United States Patent Application Publication US 2004/0034888 A1 - sequence listing, part 19

SEQ ID NO: 53722 - protein, 255 aa, Zea mays
  Clone ID: UC-ZMFLMO17248E05_FLI.pep
DIGDTSTEGTEHYGEGGVSTAVSVVTVDDVAETVSSRSPAVSVIGDDMTSVKSRPDADSSDQTTGYDALRSKEFREKECVKTEESKTVDDKVPTESTPPPRIIQVSRSPAPDGQSRVEDEAAVGTVLEGARSDTDDLATRAVVVALQSSISAGESEPPSASDRVEYTPANEGFRRDAIAEDTDNYTEEQMREQLDALRTITGYRPTPSLTLEAELVGLYVFVGVEPPVGSGSREDSDLSDLSAKLRLLKSIIGVE

SEQ ID NO: 53723 - protein, 89 aa, Glycine max
  Clone ID: LIB3242-691-F1_FLI.pep
EWVRRIEMMQLRPKILAAVESAWRRVPPWREAFYGAGMRPVQLSQFADFQAECLLAKSQIRGFHVAKRQNELVLFWHDRAIVATSAWRC

SEQ ID NO: 53724 - protein, 174 aa, Glycine max
  Clone ID: 700891309_FLI.pep
GGYMEVTGFSAEVREQIYKVASVNLCSNISGQILASLVMSPPKVGDESYDSFMAEKENILASLARRAKTLEDAFNKLEGVTCNKAEGAMYLFPQIRLSEKAIKAAEAANATPDNFYCKRLLNATGVVVVPGSGFGQVPGTWHFRCTILPPEEKIPAIVTRLTEFHEKFMDEFRD

SEQ ID NO: 53725 - protein, 155 aa, Zea mays
  Clone ID: LIB3245-069-H8_FLI.pep
LAHHHHGSSSKQPTEPQNSEASRKEKPACKKNPLVKINMDGIPIGRKVDLAAYDSYERLSLGVKELFHGFLQAQKDMSPTAGKIFSQLLDGSGEYTLVYEDNEGDRMLVGDVPWNVFVSTAKRLRVLRSSELAKGLVGTRPPQIAVAPRRGPPDC

SEQ ID NO: 53726 - protein, 72 aa, Zea mays
  Clone ID: UC-ZMFLMO17242E06_FLI.pep
FLQFFGLDRIMHQPSSPHPRTRAANVNLSAWFPCTASLLPARELESPQNFRLPVLFLPFVIVRSTKYQPKNM

SEQ ID NO: 53727 - protein, 264 aa, Zea mays
  Clone ID: LIB3245-185-F4_FLI.pep
IDTFGQRTSIYRGVTRHRWTGRYEAHLWDNSCRREGQSRKGRQVYLGGYDKEDKAARAYDLAALKYWGTTTTTNFPISNYEKELEEMKHMTRQEYIAYLRRNSSGFSRGASKYRGVTRHHQHGRWQARIGRVAGNKDLYLGTFSTEEEAAEAYDIAAIKFRGLNAVTNFDMSRYDVKSILESSTLPVGGAARRLKDAVDHVEAGATIWRADMDGAVISQLAEAGMGGYASYGHHGWPTIAFQQPSPLSVHYPYGQPSRGWCKPE

SEQ ID NO: 53728 - protein, 220 aa, Zea mays
  Clone ID: UC-ZMFLMO17044E09_FLI.pep
WCGVVFQIFTNGDKVHAVRALERLGLEDCFEGIICFETLNPPCPPQGDREAEIFDIAGHFARSGAAAELPKTPVLCKPNVDAMEEALRIANVNPHKAVSFRAPLAPSAISVPAPDVASTPDGPIYSILFFCLTTSLTKAYLYLTWLQIFFDDSVRNIQAGKQIGLHTVLVGKSQRVKGADHALESIHNVREALPGLWEEAEKAEDVLYAERVAMETSVTA

SEQ ID NO: 53729 - protein, 243 aa, Zea mays
  Clone ID: UC-ZMFLMO17051F03_FLI.pep
LRALGRVVGGPLAKAMPACGRTAVTPAGATPALLRVLSLDLSPQCGNPRLGLLGDFRWCSSDVGALKVGVAGLVGRRTTGGLRRKLCLVGTRRAATTFRLRFSFLKAQPRRPLVCVFVGVVEALCHSAWLGGVGAIVVLGVCFLPEFGVVDLCSWRRIGAASCGVCEAWQRWRAVILFLASVSGFRRRRVALAVCGSSWGVGAARPLCLSLATMTLDVFVCVRLLLSRWFVRAFTGFSTVRPV

SEQ ID NO: 53730 - protein, 332 aa, Zea mays
  Clone ID: LIB3245-460-C7_FLI.pep
STKEASGGLQRCADYVGMPTAPSESNKEPRPEECVNELGIKQPVQHVASEEQEGVQDDAKADANVMNVSFGKGKSEDSFGTINGTNSGDKIESPSGLAERTLTQPTTKGCSKQRGRSSNGRGNRTKKIEEGNASGLIAVAPESEDDDDAPFIDGNQAEGGALWDIFRREDVSKLHDYLMKHADEFRHCNFEPVKQVTHPIHDQCFYLTIEHKRKLKEEYGVEPWTFEQKLGEAVFIPAGCPHQVRNLKSCIKVALDFVSPENVRECIRLTEGFRLLPKWHKVNEDKLEVKKIALHAFNQAIKDITDESSNSNERMKPNGYTWSRAHKILMCW

SEQ ID NO: 53731 - protein, 140 aa, Glycine max
  Clone ID: 700888371_FLI.pep
QRAVFCLCPLGWAPWSPRLVEAVIFGCIPVIIADDIVLPFADAIPWEEIGVFVDEEDVPKLDTILTSIPPEVILRKQRLLANPSMKQAMLFPQPAQPGDAFHQVLNGLARKLPHDNTVFLKPGEKILNWTAGPVGDLKPW

SEQ ID NO: 53732 - protein, 179 aa, Zea mays
  Clone ID: UC-ZMFLB73186E05_FLI.pep
CSNSLPARDHAAITPVGRRSMLKLAQRMTDNFCAGVCASAAQKWRRLDEWRSGEGGDAAGNGGSAAAGEGEEKVRMMARHSVGAPGDPPGVVLSATTSVRLPATSPQRVFDYLRDEQRRGEWDILANGEAMQEMDHIAKGQHHGNAVSLLRPNVSTTTALLLTSIFTAVFTVAINESSL

SEQ ID NO: 53733 - protein, 271 aa, Zea mays
  Clone ID: LIB3245-491-F1_FLI.pep
ASTPGTCRSAPSSAAASGTSSRRGTASTPTAPAPTAPPGRATGRPRARTSPWSTGAGRRGSRRRSCSTTASRRAGSRRSGSCTSTASPATRRSPAPARSGWMTGCCAACTTRRTSGRRCSSRRRRRRRRWSRRRRSRSRTPTPTRGRRSRRSTTTRSRSWALCRRSTTWAQAQPQPLPASSCPRRRWRTSATSAATTGSRASTSTTCRCRGTPPISTAPCSSRRWPPRWSRTAASPSSEILRRLRGPDAAQRKLCIVQIFFMEPTTTKKFC

SEQ ID NO: 53734 - protein, 75 aa, Zea mays
  Clone ID: UC-ZMFLB73198C11_FLI.pep
RRAFMFSSSGETHTLLQVCRRNLQALNHGFLSCISNPFGTRARSSSCPHHFGSLASSSAPKHSKRSSANLRWQYV

SEQ ID NO: 53735 - protein, 279 aa, Zea mays
  Clone ID: UC-ZMFLB73202G12_FLI.pep
HRPVKKEDKKSLSDIPLSHSAVKEDETPVASIGPPQSAVMENIPKHTQLQDAHAGERPPKKLKLSQETTEQDIDPTNTEQRPLELQPKNIDRSKWFNIEWNDRLKMADDKGTLVYIQNLDIRFGPADIEELVRKALQLNCTAKPINHPTYDDPNNGKAYAIFRTKDAADAAISKINSGLVVGGRPLYCSKGLLEVPKPSANLVGHLSSYVKIGQKQRDEQKKAVATSHCSQPNTIEYDLALDWMLLREKQDQSFRVLHKKHREARKGFASLVGKGSKAE

SEQ ID NO: 53736 - protein, 242 aa, Zea mays
  Clone ID: LIB3245-561-H5_FLI.pep
SISLSAACDLFMRFVTRTSHLEHEKFDAAKSRLIERGEKFGEISLKARKTIAMLSQDFIYDGCTILVHGYSRVVLEVLKLAASNRKLFRVLCTEGRPDRTGLRMSNELAALGIPVKVLIDSAVAYSIDEVDMVFVGADGVVESGGIINMMGTYQIALVAHTMDKPVYVAAESYKFARLYPLDQKDMTPAHRPIDFGVPIPIGVEVETSARDYTPPQYLTLLLTDLGVLTPSVVSDELIQLYL

SEQ ID NO: 53737 - protein, 332 aa, Zea mays
  Clone ID: UC-ZMFLMO17282B08_FLI.pep
ACGGSMAAAADTSEASAAGIALAEANINWERLDKTRFHVIGAILFTAQQGALHPTAVVKTRMQVAEGGLAHMSGFAVFRRILRSDGIPGIFRGFGTAAVGALPGRVLALTSLEISKEMTFKYCEHFDLSEASQIAIANGIAGLMSSICSCSYFVPLDVICQRLMVQGLPGMATYRGPFDVINKVVRTEGIRGLYRGFGITMLTQSPASALWWSAYGGAQHAIWRSLGYGNDSQTKPSQSELVVVQATAGTIAGACSSIITTPVDTIKTRLQVMDNYGKGRPSVMKTTRLLLDEDGWRGFYRGFGPRFLNMSVWGTSMIVTYELIKRLSVKSE

SEQ ID NO: 53738 - protein, 124 aa, Zea mays
  Clone ID: LIB3245-588-A9_FLI.pep
LIHSKALTRAHRDAQSQVKVNAHDSCPRPAAAASSLFLFLADDEPAIAGVDGGDEEEEDVEDDERLYLVDGHPRLDVELRQRALPRDDLADDGEGHAQLRHPPHEQLVRLGEPEQRPSLAEAEG

SEQ ID NO: 53739 - protein, 376 aa, Zea mays
  Clone ID: UC-ZMFLMO17278A05_FLI.pep
QLPGDGLALFHPGRAGGRAGTSSDGEPAHELPLLIVFLLGGAGGRPLRVAALAAGHHGGLGVEHQVRHCAEGPGEGGGRGAVGPLLQHLVHHLGLVLHRAEHVGAGRARGGARHGEAVGPVALGHAHHAGPAEEVVQPAEGLLVGAPEEHAQVVAAGGVGGQLVQRQAVPPADELAHLAVAVAGEVREHAVDGGSLLQPLDRDDGELLPDGPHVRQGGEHGQVDVVGARRLGRAHAAGDELAEGVHRGEVLQAKDPLLEQLRGPPLQLVGVQAARVVVAAHGGGHDVAVVGAAVVRELVEEVGRGRVQASRRRSREGLEHQDRVVRHQRAPALAADDGVLHPLAVTHAAHGGHHGARVLLQAVRHRHVGLRRVGPV

SEQ ID NO: 53740 - protein, 470 aa, Arabidopsis thaliana columbia
  Clone ID: LIB3277-017-D9_FLI.pep
KLAFSKFLHVVDEEDEEDEEERESLLANMTATEAKNRKINVGDGDDVVDIEIPDTAHQISSDSWFQVAFVLTTGINSAYVLGYSGTIMVPLGWIGGVVGLLIATAISLYANTLIAKLHEFGGRRHIRYRDLAGFIYGRKAYHLTWGLQYVNLFMINCGFIILAGSALKAVYVLFKDDHTMKLPHFIAIAGLICAIFAIGIPHLSALGVWLGVSTFLSLIYIVVAIVLSVRDGVKTPSRDYEIQGSSLSKLFTITGAAANLVFAFNTGMLPEIQATVRQPVVKNMMKALYFQFTAGVLPMYAVTFIGYWAYGSSTSTYLLNSVNGPLWVKALANVSAILQSVISLHIFASPTYEYMDTKYGIKGNPFAIKNLLFRIMARGGYIAVSTLISALLPFLGDFMSLTGAVSTFPLTFILANHMYYKAKNNKLNAMQKLWHWLNVVFFSLMSVAAAIAAVRLIAVDSKNFHVFADL

SEQ ID NO: 53741 - protein, 253 aa, Zea mays
  Clone ID: UC-ZMFLMO17289H04_FLI.pep
QKSGYEVYLLEAPYKDPTGCAARNVHGFTLDEIKKMAADWEEAPPLYLQLDIHSLFHDDNLRGHSIQEVDMDTEDVDDANDATSIIAESSQKAVQDPPNEGFSKPGEEWNSEVEDGLDSLKELGQSKWSKDFEDETTKSENTEENTHALSGLARTYSTGRKNVSWGDRLEKGGFSIYATKRKLTSSLIIGPGSGYNLVSNPLAEDSSTGTKGKTNNETKKRFSEQLRDEGESFRAVFDKTKQHIGVFENGDEE

SEQ ID NO: 53742 - protein, 379 aa, Zea mays
  Clone ID: UC-ZMFLMO17300G05_FLI.pep
KSSILSALSTLNSQQTPPLPMSSGVRSGGGGDHHGVHHQHGHGHLAGADDGAEYAFYSNDMESFFFNQPASADVNNGGSRTGADELTMPPYSSVTDYLQGFMDMDPSGLARHLDAPCLLAEDAPLKHELSVDVSYDSQGTSGAPGDGAAAMHTPNSSVSLSSSDREGEGQLRRCRKGRPKAEDDAEGDEKDQEDGENSTKANRSKKKAEKRQPRVAFLTKSEVDHLEDGYRWRKYGQKAVKNSPYPRSYYRCTAPKCGVKKRVERSYQDPSTVVTTYEGQHTHHSPASFRAGGAHLFMPNAHALPPQHLMLPSSFRPADLMGMVHPVSMGANLSMFLPTMPPHMPSPASRAHPLQQQQHQFTDYALLQDLFPSTMPNNP

SEQ ID NO: 53743 - protein, 272 aa, Zea mays
  Clone ID: LIB3279-060-A7_FLI.pep
GMAQVLNTAPVAPANLPMPNPAPAISSVAPSEQSAPSKEDVELAMAINASIQSAIAEGVSVPNVQPNASTPNNNGWAAPPSNSHNGWGPPATPAPSKTSGQSQVRVDAPSSSTYNGWDVPGTSSSQSSSKPHQTQTNPPPVLIPQEALQALPTPTAPPFAEETFYNGPVHYPSIDSTPVDVTMPATTGGGSTTVIATAAPTEQLENEADASDSGKTPSGTCVICLDAPVEGACIPCGHMAGCMSCLKDIESKKWGCPICRATINQVVRLYAV

SEQ ID NO: 53744 - protein, 317 aa, Zea mays
  Clone ID: UC-ZMROB73002G05_FLI.pep
GGGPPPTATRSRARRSSAACPPTSTTCWSRTSAGCPACSPSASPGATPRSPAARSSGPPCSRPWPTPTSASPRSAPSPCSATPPCRSSASSGASRYSPAPPPPRRRSRPRFCSTWRRCACPGGVGWTCARGGTSRGSGCSTPSQPSSSAASAPPRSCSAHAPWTSTSPARPPSTGACTRTACSTSRAAPRCCSLPPRSPCSTPLRSSPAPGRCRRRRRHRAAASTSPRSCSSCATARRSATRYWRGCSSGGILRGFRHASPHSRSHWQPCCLPPCLDEHQPRDARPASTLVYCSRYTVLLITIPTVFPPLKHNNAVN

SEQ ID NO: 53745 - protein, 304 aa, Zea mays subsp. mexicana
  Clone ID: UC-ZMROTEOSINTE027F12_FLI.pep
KIAVLQLGRWHNLCRHHIEVDSTEFLEGLQSSNQLKYLCLRGISRIIELPASIGGLSNLRILDLHACHNLERLSTSITYLQMLTHLDVSECYLLEGMPRGIGLLTELQVLKGFVIGGSTGNYNCRVAELARLDKLKKLTIYIGSKVAVTENELNELENIKGLCVLKITWAVSLSKKERVHQTSDSTPLITSLSLPLNLEKLDLCCFPGEKVPDWLSPSKLLRLKRLYFTGGMLRTFGNKNMLEVWSVEVLRLKFLNDLSVQWTQVHEIFPKLTFLEVFRCRKLESFPCDKDGVWMNHDTKDSRK

SEQ ID NO: 53746 - protein, 138 aa, Zea mays
  Clone ID: LIB36-002-G8_FLI.pep
AEGQIYIDRQLHNRQIYPPINVLPSLSRLMKSAIGEGMTRRDHSDVSNQLYANYAIGKDVQAMKAVVGEEALSSEDLLYLEFLDKFERKFVTQGAYDTRNIFQSLDLAWTLLRIFPRELLHRIPAKTLDQYYSRDASH

SEQ ID NO: 53747 - protein, 236 aa, Zea mays
  Clone ID: LIB36-003-B1_FLI.pep
LYICHCHHPSLIVDEYVRTYVSSSLAGQGLIHSSSTLASCITCFLCQSDLTVSMACASSSILAPVTSFTTFPPLRILNVGTTFMPSSFASGLLSWLQSSFRNTTSRFFSDISWNFGAITLQGPHHSVYMSRTTTLSPAASTMGQKVSLLTSVTCPVTASHPRPTVLVSIPLDLTGATPLVSEAVASSRLLFWAAAVAKTAGRHVVVEIGAGVEASPWDDEIGRRRAIGLVWSGGWR

SEQ ID NO: 53748 - protein, 205 aa, Zea mays
  Clone ID: LIB36-004-B12_FLI.pep
VFVDEFSCIGCKNCANVCSKVFEIEEDFGRARVYDQSGSTELIQEAIDSCPVDCIHWTSAAQLSLLEDEMRRVERVNVGLMLAGMGGSIDVFRMASSRWEKRQAKVLEKVRRRMSQDDSRKGGSWSDIWGAPTRYEKNEEEVKERAKQPRLQQGGGGSTHGKAPTSLQHSSFRSSAQQGVRTQHSQRSYGTLQRYLAPPFTSCIA

SEQ ID NO: 53749 - protein, 238 aa, Zea mays
  Clone ID: LIB36-013-D9_FLI.pep
GKCFSVILGGDQVPNGKPSPDIFLEAAKRLGANPSSCLVIEDSVVGVKGAKASGAKAVAVPSLQNQRNHYYIADVILYSLLDFQPEMWGLPPFEDRIQGVLPIDPLLSNARIGGKILNNIHWVISDDCAYEYIPDQISGIFLGWVKSKVHGFSKVIVATGWDFSQQTVERVMHVHFLDCSGTVETEPVKLLIIGYIRKLQSADDILQALSVTDEDRRIARDALDLPTFSEYANDLHLA

SEQ ID NO: 53750 - protein, 296 aa, Zea mays
  Clone ID: LIB36-017-E11_FLI.pep
SFIYIGHQPDDACVVALLKMLIISSTPHLGVKAWKMVAWPGSARWAKRLSMGPVPVYSAWNQAPMTASMARRPFLISLVRSSLIFSGEPLPQPSGSNQRPPGYPTSVPVSLLLGKMGSVLTLPGLMMSAQRRPSAQPMRMSSMMKRVVVSVKYCCSPAVYQKGVLRTPILVRNSGMKMPAAPSIAHRQCTSSACTFHRRLSGSDPRPQGSKPKSPGRLPSSHGGGVLPGNQIGLLGSAAARTANDGRAASACLSSVLPPRKEDDARCPFLGSAVTAVVEDEEAETSAIAGASCGVA

SEQ ID NO: 53751 - protein, 239 aa, Zea mays
  Clone ID: LIB36-017-G7_FLI.pep
DMAPAARWSTSPVLFLLLLLAAATATTTTTTTTAKHEHPSPTPWPERFHAVLFTNLTNYTEASTGPPLRVTDLYYDWPRRRNLNLVRHQLSADPLYDVEWNNGTGFYFDSKACRVEQFPVGVLPPWWLSGGGAEYVGRRVAGGIDCHVWGKAGFIFYYEEARTGRPVRWDFVDVTGIQQFVMSFEPGAALEDDAQWQAPAYCFPDDDDAARSSGEEEAGDGLEAATRLLRKLAGAAATH

SEQ ID NO: 53752 - protein, 116 aa, Zea mays subsp. mexicana
  Clone ID: UC-ZMROTEOSINTE057C09_FLI.pep
DYQHQHTSVIIYTSADTEQQTRGLFNNRASHQKQPCMTELKCTTELEGLYISYEQERQHRKKISADDVSPLQKYTYLIGLASGSCFIGSPLCMIWSTLSLKNRWNWRLHRPMAHRR

SEQ ID NO: 53753 - protein, 219 aa, Gossypium hirsutum
  Clone ID: LIB3829-031-F4_FLI.pep
EFVAKLDLKPGQKVLDVGCGIGGGDFYMAKEFGVYVVGIDLSINMISFALERANGLDCSVEFEVADCTTKTYPDNSFDVIYSRDTILHIQDKPALFRYFYKWLKPGGKVLISDYCKSAGASSPEFAEYIKQRGYDLHDVKAYGQMLKDAGFDQVIAEDRTDQFIQVLQRELDKVEKDKDTFITDFSQEDYDDIVGGWKAKLIRTRFGEQRWGLFIANKN

SEQ ID NO: 53754 - protein, 179 aa, Zea mays
  Clone ID: UC-ZMFLMO17286H02_FLI.pep
YLIFQTKGSGLAAYATSQIDSSLSWKDIKWLQTITGLPILVKGVLTAEDARIAIECGVAGIIVSNHGGRQLDYLPATISCLEEVVREAKGRRVPVFLDGGIRRGTDVFKALALGASGVFIGRPVLFALAVDGRAGVRNALRMLRDELEITMALSGCASLKDITRDRVITESDMIRRSRM

SEQ ID NO: 53755 - protein, 272 aa, Zea mays
  Clone ID: UC-ZMROB73019E10_FLI.pep
RAQIPRLVSCLRSTTTNSQCGPDGHRRAIALGDSKGRPAAGPEHVRTYRSDGSAAKRAGLVCAGGASLRRLPAVAGRRGGAPLLAAQSARRHHLRQTRPSPARRRGLADGDVEPERHGAGRRRRRVQGREGEAVLRAGEPEGPRVAQVRGRHQQGQGVPVQGHRAGVRGGGARQLPVRRRPRRPLGLLLPARLRHGRVGRRGGLRPDGAHRRLRRRRHHRHPRLSQDRRRRLLGLLRRRARLLLRHRDPQEEQVERVAAARHTCIHVNRRRR

SEQ ID NO: 53756 - protein, 240 aa, Homo sapiens
  Clone ID: LIB43-147-E3_FLI.pep
TSRREVSVARQCPGILFRGQAEHPVGQWEGPTPSSRSHPPALLQDVKVFRALILGELEKGQSQFQALCFVTQLQHNEIIPSEAMAKLRQKNPRAVRQAEEVRGLEHLHMDVAVNFSQGALLSPHLHNVCAEAVDAIYTRQEDVRFWLEQGVDSSVFEALPKASEQAELPRCRQVGDRGKPCVCHYGLSLAWYPCMLKYCHSRDRPTPYKCGIRSCQKSYSFDFYVPQRQLCLWDEDPYPG

SEQ ID NO: 53757 - protein, 133 aa, Zea mays
  Clone ID: UC-ZMFLMO17155D04_FLI.pep
MCKDLLLNYFTASKTTNCEFHSEQTFQLSRADRETVQRQEYDLQVWCILINDKVQFRMQWPQYAELQVNGIPVRVMTRPGSQLLGINGRDDGPLVTTCSREGINKISLSRVDARTFCFGVRIVRRTVPQVLFI

SEQ ID NO: 53758 - protein, 700 aa, Homo sapiens
  Clone ID: LIB43-171-E12_FLI.pep
SFIHPKRLQTHEAQCRRGASTRGSTGLGAGGAGPGGPAGVDASALPPPVGFRGGPEHVVKVVGGHVLYVCAACERSYVTLSSLKRHSNVHSWRRKYPCRYCEKVFALAEYRTKHEVWHTGERRYQCIFCWETFVTYYNLKTHQRAFHGISPGLLASEKTPNGGYKPKLNTLKLYRLLPMRAAKRPYKTYSQGAPEAPLSPTLNTPAPVAMPASPPPGPPPAPEPGPPPSVITFAHPAPSVIVHGGSSSGGGGSGTASTGGSQAASVITYTAPPRPPKKREYPPPPPPLCQITVRIGEEAIVKRRISETDLRPGELSGEEMEESEEDEEEEDEEEEEEDEEESKAGGEDQLWRPYYSYKPKRKAGAAGGASVGGSGLPRGRRPPRWRQKLERRSWEETPAAESPAGRARTERRHRCGDCAQTFTTLRKLRKHQEAHGGGSHSSRAGRRPSTRFTCPHCAKVCKTAAALSRHGQRHAAERPGGTPTPVIAYSKGSAGTRPGDVKEEAPQEMQVSSSSGEAGGGSTAAEEASETASLQDPIISGGEEPPVVASGGSYVYPPVQEFPLALIGGGREPGGGRGKSGSEGPVGAGEGDRMEGIGAAKVTFYPEPYPLVYGPQLLAAYPYNFSNLAALPVALNMVLPDEKGAGALPFLPGVFGYAVNPQAAPPAPPTPPPPTLPPPIPPKGEGERAGVERTQKGDVG

SEQ ID NO: 53759 - protein, 114 aa, Zea mays
  Clone ID: UC-ZMFLMO17037E12_FLI.pep
YSHIFIKEKHIYIHSITFFLHSFIPHMHARIECKLRNTTYAVHSHIVFFLSLAHGSAAARKRGTNKSPCPSAPHMELCSCGTDHQASLLPWSLHLYRRPSPPRRDHRQFQRLPW

SEQ ID NO: 53760 - protein, 385 aa, Homo sapiens
  Clone ID: LIB43-85-D7_FLI.pep
CDIDFDDCQDNKCKNGAHCTDAVNGYTCICPEGYSGLFCEFSPPMVLPRTSPCDNFDCQNGAQCIVRINEPICQCLPGYQGEKCEKLVSVNFINKESYLQIPSAKVRPQTNITLQIATDEDSGILLYKGDKDHIAVELYRGRVRASYDTGSHPASAIYSVETINDGNFHIVELLALDQSLSLSVDGGNPKIITNLSKQSTLNFDSPLYVGGMPGKSNVASLRQAPGQNGTSFHGCIRNLYINSELQDFQKVPMQTGILPGCEPCHKKVCAHGTCQPSSQAGFTASARKDGWGPSVTNGPMTLALEINAYMAPACPSMRSPTAVSAWRAMEVSSVMKRRICLTHARRSSASMGSAGFQVWGSPTVNAAVDTRGTAVIEKSLVEGKG

SEQ ID NO: 53761 - protein, 192 aa, Zea mays
  Clone ID: 700572856_FLI.pep
IGRRPALDSLDGLLDGSDGGLGSRDRRFLLGRCDLRSGSNRRRCLPLLLVSLHSRRLLGLGGYLRLSSLDRGSSSLRLCCRRGGLGLCFLGLCLGRLSLSYGLGLDLDLLGLSLGLGRHRLLSGDDLGLRRRSSGLLVRGLDGGQLGSLHSRCSSSSSLLDGSGSRDLDLDGGHWCSAAGRVCGTVDCGANS

SEQ ID NO: 53762 - protein, 105 aa, Zea mays
  Clone ID: LIB83-002-A11_FLI.pep
WQEQRRIGRRIWPRSSAGTPRLTGRDRRCLTKPASTTEQAGDALSAGAVRKGMAAPRSSRGDFADVSAAQRAHPVYFFQPFVNTLQVELVLARKNSYLVSILIFS

SEQ ID NO: 53763 - protein, 311 aa, Zea mays
  Clone ID: UC-ZMFLB73032G06_FLI.pep
GVLQEKIMRVPYGVEKEFFRYSLFLVFCNRITTSMVSAMVLLASKKSLDPVAPLHKYGVVSISNILTTTCQYEALKYVSFPVQTLAKCAKMIPVMIWGTIIMRKKYVAKDYFFSVVVTMGCALFILYPASMDVSPFNKGRESTIWGVSLMLGYLGFDGFTSTFQDKLFKGYDMEIHNQIFYTTVCSCLLSLSGLILQNHLIPAVDFMFRHPDCFSDVVILSSVATASQFFISYTIRTFGALTFATIMTTRQLVSILLSCIWFVHPLSWMQWVGAAIVFVALYTKSFLRSKPQKLAGSSPPRGSSPNPVSNS

SEQ ID NO: 53764 - protein, 103 aa, Zea mays
  Clone ID: LIB83-005-G6_FLI.pep
THTGEHSNGLILRGTLGYREARKSLLLRPLCHLIQHIWRVVRRKDMILMTAAITPTNRLVRASDLITSQWLQITWPIFIDNESGCLPALGITRKRKFEEILVT

SEQ ID NO: 53765 - protein, 331 aa, Zea mays
  Clone ID: UC-ZMFLB73033D04_FLI.pep
ADALVNTGLAKLVYEYVNIDDCWAESDRDYQGSFVANRQTFPSGIKALADYVHAKGLKLGIYSDAGTRTCSQKMPGSLDHEEQDVKTFSSWGIDYLKYDNCNDAGRSVMERYTKMSNAMKTYGKGIFFSLCEWGRQNPATWAGGMGNSWRTTDDIADNWGSMTSRADQNDRWASYAGPGGWNDPDMLEVGNGGMSEAEYRSHFSIWALAKAPLLIGCDVRAMSQQTMGILSNSEVIAVNQDSQGAQGKKVQSSNGLEVWAGPLSNNRKAVVLWNRQGYQATITAQWSSIGLASSTAVTARDLWAHSSFSAQGQLSASVPPHDCKMYVLTPN

SEQ ID NO: 53766 - protein, 272 aa, Zea mays
  Clone ID: LIB83-006-E8_FLI.pep
ATTRNCRASELAPCAMEGDEKSAGGAPAYWGLGARPCDACGAEAARLYCRADAAFLCAGCDARAHGAGSRHARVWLCEVCEHAPAAVTCRADAAALCASCDADIHSANPLARRHERLHVAPFFGALADAPKPFASAAPPKATDDDGSNEDEAASWLLPEPDHGQKEGATTEVFFADSDPYLDLDFARSMDDIKTIGVQQSGPPELDLAGTKLFYSDHSVNHSVSSSEAAVVPDAASGMAPMVAVVSRGLEREARLMRYREKRKSRRFEKTIR

SEQ ID NO: 53767 - protein, 350 aa, Zea mays
  Clone ID: UC-ZMFLMO17305G04_FLI.pep
IAFYLFSVNSSEMRSISDRIAASPLRVPASPSRFSLSSPPSRNEPLNISLEHVVKLTHNFAPTLMIGEGYFGKVYRAALLDGRVVAIKRAKKENFLSLRAEFSNEVALLKSIEHKNLVQLLGYIDKANERILITEYISNGTLREHLDGQHGLVLGFNQRLEIAIDVAHGLTYLHLYAEKPIIHRDVKSSNILLTEAFMAKVADFGFARTGPTEPDQSQIETDVRGTAGYLDPEYMGTSHLTIKSDVFSYGILLLEILSGRRPVERTRGPAERITVRWAFNKYRRGNVRGILDPMLTEAVNEDILNKIFDVAFQCVAPTREDRPSMKEVVERLWKIRRDHTKIQRIAELTL

SEQ ID NO: 53768 - protein, 183 aa, Zea mays
  Clone ID: LIB83-012-A2_FLI.pep
CFLHRRRKFRDILLLSPALLVLDASWYMPVENRDPWKEYQVAHIPGALFFDLDGIVDRTTDLPHMLPSEEAFAAAISELDIKNQDKVIVYDGKGFFSAPRVWWMFRVFGHKKVWVLDGGLPQWQASGFNVEKASPDDDAVLKSIAANRAVKRVYNGEQTNTISFQTEFQPNLFWALEKASDFF

SEQ ID NO: 53769 - protein, 304 aa, Zea mays
  Clone ID: UC-ZMFLMO17290D03_FLI.pep
GGGFRRCFQRLAVSTMRKKLDTRFPAPRIKKIMQTDEDVGKIAQAVPVLVSKALELFLQDLCDRTYDITIRKGVKTVGSSHLKQCIQTYNVYDFLREVVSKVPDIGPSDVIADDKLGKRRKAEEDGSEEELKRTRNETESYTSNGRGRGRGRGRGRRGVRGAWREVVTSPEQFKEENQSSKVASLKVEVADEVSNVTEAKQDTTPMSNARPSLRNIDLNLDPTDEEDEVTVPPQPQLSAPATSCDAATAAPGPSVPRLREGAKLKDFFGAWELADMNKMEMDPVQFALSTNHRLEEDEDYDNED

SEQ ID NO: 53770 - protein, 284 aa, Zea mays
  Clone ID: LIB83-016-D6_FLI.pep
VVMEETIDDSEMSLSNMVLGFLEDFERDERRPENDDDNNEEEGSSGGDTAESKAFWQTQHLQLREALAKGSPAESRIRADTEEAVKSMRAAACSCSCTGRPAARDCRPCMLRHVADRLRDAGYDSALCKSKWTRSPDIPSGEHSYVEVAVQTRSGKSVRVVVELSFRAEFEVARASAGYRALVTALPEVFVGRADRLRGVVKVMCAAAKQCMKDNNMHMGPWRKHKYMQAKWLGTPERGAAAVAAAETPVVAVPSVTVGSPEKQTKFRASMLTFDFGRTALEVA

SEQ ID NO: 53771 - protein, 123 aa, Zea mays
  Clone ID: UC-ZMFLMO17287D07_FLI.pep
SAEVASAKPASFAASTHLLATSCREHVILAAPASTPNALQASCDDGRDGSEAKGARPPILAGCIRVAAAWSEAAIVVAAVMPFGFCPFPLVGAYREGRFCEGGRVRYLRAAEHRPQAEDKSSG

SEQ ID NO: 53772 - protein, 307 aa, Zea mays
  Clone ID: LIB84-004-C11_FLI.pep
VYLTAVLSKIQEGGWLPLAFSSLFLCIMYTWNYGSVLKYQSEMRGKISLDFILDLGATLGTVRVPGIGLVYNELVQGIPSIFGQLLVTLPAMHSTIVFVCIKYVPVPYVPLEERFLFRRVGQKDYHMFRSVARYGYKDVRKEDHGFFEQLLVESLEKFLRREAQEIALEASTMEAERDDISVVSEVPQTPAGDGDLQTPLLSDQRSGDNNRMAATDGSDPVLPSSSMSLEEDPGLEYELSALREAMASGFTYLLAHGDVRARKESVFTKKFVINYFYAFLRRNCRAGTATLKVPHSNIMRVGMTYMV

SEQ ID NO: 53773 - protein, 203 aa, Zea mays
  Clone ID: UC-ZMFLB73161A04_FLI.pep
IYVQPPGPWLEEITHAHPSRLPGSNVLLLFRSSRLLPHQAGHDPLDPSLCLSFFRPRYRHRTRPCACWGLRRRMFKQPWDSLCQVPELEVVEHLQVALLGHSLLLVQSLPEAIRRAHVQDFSCIDLPCVALVDALEPSSGHLVPVAWVFLALLEELGDLVACLPAIRWVYVETGDTVHDDLRWPSLVRRKGCQPAVHRLNDRQ

SEQ ID NO: 53774 - protein, 144 aa, Zea mays
  Clone ID: LIB84-004-D12_FLI.pep
IDGVVIEQHTRDDVCSYLLTRTHVYGARGRIYIEFCMHISIDGMISRFSRSSRSSRARARARAAPCAPAACSRSGPPSARGARGTRSRRRPAPPPLPRRPRSCASARSPGPSSHGAPRTEQRRRPRGRPPRRGAPCAYAPSPPS

SEQ ID NO: 53775 - protein, 147 aa, Zea mays
  Clone ID: UC-ZMFLB73161G03_FLI.pep
DTHRDLYFSFSARRLSTSISIIAASRYLRILRTTFMATYSCVSRSQHSKTRPNVPTKIQLVALFIRIITEIPSRRGDDRLQKTQTFSHFAQDFISAGQVLAKVEYEVSITVILPPWWRRATPRYHFSLWWRRGGTVMRLARPLPRPR

SEQ ID NO: 53776 - protein, 222 aa, Zea mays
  Clone ID: LIB84-006-B1_FLI.pep
RGADPVQGVQGVREAREELDQEAHRVAEEVRARQRPRARHQRHHREDQAPVRELRQVRAAVRRRRPAAPHRQRRPAALGRVRHPGPALPLHRRLDRVGRQELPHRHQRREEARHEGDHHRRRARHPPPPQGVHLARRRLPRAHQRGPRRRRQGHRLLLAALVHLLALCIYIAAAELGAWIVRGETWMAFGVGAACFARAIWSCRKWKLCCTLRNLMKPLYNS

SEQ ID NO: 53777 - protein, 558 aa, Zea mays
  Clone ID: UC-ZMFLB73165C03_FLI.pep
TREKEMAKKKEKAVNVSGKPRHSNDVNRPNDKKGAGGGAGGGSRSAATVRRLKMYKTRPKRDRAGKVLRNDFQSKELPNTRIEPDRRWFGNTRVVGQPQLEMFREELQSRLSDNFSVILKERKLPLSLLQDHQKQAKAHLLEVEPFEHAFGPKGKRKRPKLTALDYESLLKRADDSQDVFEQKYASSKLPREEEEDGLRDLVRHTMFEKGQSKRIWGELYKVIDSSDVVVQVLDARDPMGTRCYHLERHLKENCKHKHLVFLLNKCDLIPAWATKGWLRTLSKDYPTLAFHASINKSFGKGSLLSVLRQFARLKNDKQAISVGFVGYPNVGKSSVINTLRSKSVCKVAPIPGETKVWQYITLTKKIFLIDCPGVVYQNNDSETDIVLKGVVRVTNLADAAEHIGEVLRRVKKEHLQRAYKIQDWSDDNDFLVQLCRTTGKLLKGGEPDLTTAAKMILHDWQRGKIPFFVPPPQQSDGGASESAEPIGITKEDGVSSDRTAAAMKAIAGIISSQQNMNVPCHKENNADNEDTTENADNEDIESSDNEDNDDIEPAERSE

SEQ ID NO: 53778 - protein, 456 aa, Zea mays
  Clone ID: LIB84-014-E1_FLI.pep
FMMISSKDLYTIQITQVQNVRAGDVVTFTLLSRSRNSLTPSIKSSSSESSTTDEEHYNVFSKFILTSDVELSVRDAKLDLSNWLHMADLGLVDDLEKLPFVSAALEQLEEKTKYWIDYRNYGGSPPSKDSFSPGSSFKSRNSFDVNTSQQMSEHKISLSDRDMVNGISELSMSPELSKTSGKGTISKVNEKCTTTIDSNEHDPYTFYQVSDGQHLILHPLNMRCLLNHFGGSDMLPPRITAKILELETVTQSEAIRKRYRFLSHFSLTTTFQFCEIDLSDVVSPNSLAPFLDEIKKREKQRKRAAKKEESERVKAEVAAAVQASAMRFEYTNSSQSHNDVMFSLDDFEALGNNAGPSTSPPASERKLFSDVTRLGFASAQDSPPLRLGTGDANGQSETSRDQGPLATPALSFASIISSSRAVTAADNSEMQKANGAGKKGKKATRVLLSTGGGRRY

SEQ ID NO: 53779 - protein, 161 aa, Zea mays
  Clone ID: UC-ZMFLB73166G04_FLI.pep
YASELVKILEGANQSVPPQLKEMALRGGYGGRSRRWASSDDSYGSQGYGAKRSTDSFKNSSFGNQAGGGSSFHSSFHNSSSGNQFGDTTSFHASYGNSSQNNQTGDNPSFPPSSSNNQSGDGLSFHERFYGSRGRDESRSNNDGFRARSRSPGKPVEVSNW

SEQ ID NO: 53780 - protein, 82 aa, Zea mays
  Clone ID: LIB84-015-D3_FLI.pep
LPTRLLQVQHGARLPRPEACGARPRRPVDADRHLRGRAPPQPRLRPGPAAAVARAAAGAAQPLIWLPACSVLSITSSCCHKL

SEQ ID NO: 53781 - protein, 129 aa, Zea mays
  Clone ID: UC-ZMFLB73169C12_FLI.pep
SYTIFFFAISKKENSYTEDINLLHFVFRDLFICVLRCKREEAKITAWENLQKAKAEAAIRKLEMKLEKKRSSSMDKILGKLRSAQNKAQDMRSVVSSSEGQCSVRATKKTSSSVKTGRPFSCCFTYRAC

SEQ ID NO: 53782 - protein, 239 aa, Zea mays
  Clone ID: LIB84-017-A7_FLI.pep
LFEDRVFMYASTNSAKFLALLIVVPWVIDFLVHDYAMMPFLERYVQKVPLAAELLDVRRSQKLQMVKDLNIEKARYRLEVEIGKSPPLSDEEVWFELREKALELRDDWRLENRQAFANVWSDMVYGVVLFLLLCFNQSKVAMLKFTGYKLLNNISDTGKAFLIILVSDILLGYHSESGWHTMVEVILEHYGLESDEAAVTFFVCLVPVALDVYIKFWVYKYLPRLSPSVGNVLDEIKRH

SEQ ID NO: 53783 - protein, 183 aa, Zea mays
  Clone ID: UC-ZMFLB73172D03_FLI.pep
GSICALPSTDNLQQGLVANHVAVVDYFNRRGVSAIFLFRRNLLRQLVSQLANNHDRFLKQLNGTHKAHVHTEHEAHILARYKPRLNTSSLIRKLKQADEYTRDALENLNNTRHITVYYEDIVRNRTRLLDALDFLGVPRRELASRHVKIHTKPLSEQIENWDEVYSALNGTQYEGFLNAADYT

SEQ ID NO: 53784 - protein, 149 aa, Zea mays
  Clone ID: UC-ZMFLB73172G04_FLI.pep
MHATAETDRISSHLSRQRHRPAPRAFPQFLLNTIKKPDRCSSTGTAVGRRGSRRRAEQALLLPAPAGSYTRPPARPHVRRSDTPQMEEALFLHLLLVCAAGHVQSHLKPVLRRPDAQVLGRRVRHLLLRDVTECPIQCVGRHLRPVLCA

SEQ ID NO: 53785 - protein, 105 aa, Zea mays
  Clone ID: LIB84-026-B11_FLI.pep
AVYYCGLKQVNQLKDQNKQLSMALSITSQNLVAVQAQNSVLQTQKMELDSRLGALTEILWYMNSSTSTSTAPTNPAIANDFTAWSRASDILGGTSYSAIDLYQCF

SEQ ID NO: 53786 - protein, 114 aa, Zea mays
  Clone ID: LIB84-026-D11_FLI.pep
RNRSRDGSSRTPSQSQPPHATRHGQDQDARAVPVPPPLLQAAAAAAAAAGACRGRRRRQRVPGAGDGGGGDGARVPQVRRERRRADLAVGAGGAVREPGPRRVGRRGGAHDGRG

SEQ ID NO: 53787 - protein, 251 aa, Zea mays
  Clone ID: UC-ZMFLB73160G06_FLI.pep
RPAAWTSRLRTTTPRSAPSFGPGTPAQEGGTAIADVLFGKYNPGGRLPLTWFKNEYVNQIPMTSMALRPDAALGYPGRTYKFYGGPAVLYPFGHGLSYTNFSYASGTTGATVTIHIGAWEHCKMLTYKMGAPSPSPACPALNVASHMCSEVVSFSLRVANTGGVGGDHVVPVYTAPPPEVGDAPLKQLVAFRRVFVPAGAAVDVPFALNVCKTFAIVEETAYTVVPSGVSTVVVGDDALVLSFPVTINLAV

SEQ ID NO: 53788 - protein, 458 aa, Zea mays
  Clone ID: UC-ZMFLB73173F04_FLI.pep
MCHTIIWLVLSLLTTTSHGFHMTGNPGLCGYWLGSSCRSTGHRDKPPISKAAIIGVAVGGLVILLMILVAVCRPHHPPAFKDATVSKPVSNGPPKLVILHMNMALHVFDDIMRMTENLSEKYIIGYGASSTVYKCVLKNCKPVAIKKLYAHYPQSLKEFETELETVGSIKHRNLVSLQGYSLSPVGNLLFYDYMESGSLWDVLHEGSSKKNKLDWVTRLRIALGAAQGLAYLHHDCSPRIIHRDVKSKNILLDKDYEAHLTDFGIAKSLCVSKTHTSTYVMGTIGYIDPEYARTSRLNEKSDVYSYGIVLLELLTGKKPVDNECNLHHLILSKTASNEVMETVDPDVGDTCKDLGEVKKLFQLALLCTKRQPSDRPTMHEVVRVLDCLVNPEPPPQPQQQQQKAHAHHQLPPQPSPPAYVDEYVSLRGTGALSCANSSSTSDAELFLKFGEAISQNMV

SEQ ID NO: 53789 - protein, 66 aa, Zea mays
  Clone ID: LIB84-028-H8_FLI.pep
GVFGLAFGFGFCPLKAKSQPKGWIQEAAFSKSRLSRSAKLKAPLDLLLVAFGWNCENVYRRTFNDF

SEQ ID NO: 53790 - protein, 186 aa, Zea mays
  Clone ID: UC-ZMFLB73177A03_FLI.pep
LMLCGSSRIWRRTRRAKALSPWLNNKAQLPTWPSGVCPECHVPPWLTRLQACSYLLTRLHPSVPKRDVWCRYFALLFAQLSTGLRYQMFLVFFFVTRMDEARQPLSRKIPLPSSQINPRKILLPSVHPVWQEQDSQIRSTATSSAWLWLSQGRRRRHHRCCGRPCTREGPSPSPSTGRAPRAAPRR

SEQ ID NO: 53791 - protein, 75 aa, Zea mays
  Clone ID: LIB84-030-B12_FLI.pep
KGTWIFKTKSLYGLLLEKSCLHQCTHADIFFILLGGGRQMKNYETVDLFAGLKGKKEHELPSLFLLHSNSQYQDH

SEQ ID NO: 53792 - protein, 203 aa, Zea mays
  Clone ID: UC-ZMFLB73177H12_FLI.pep
DVFSHDAASRVLFLLRVCCRIGVGGGVGRHGVVLLVGGRVRDRRHRLVMAAVAPTAATALAAAALFALLALFATTVSAATVHHATGAPVAVPVALLLVVAGADAEQLRVAEAAPKDGCERDGVDSIADDGDLVALHRGGRHTVHSHSCLEGLPPLPLVIQGQLEHNLLLAHLCSTEPGRTTVLDWSVLGVNSISCDMIAEQDK

SEQ ID NO: 53793 - protein, 47 aa, Zea mays
  Clone ID: LIB84-030-C4_FLI.pep
SKTTYMCWRFSLFCLFSDGNEKIFICVNKYLTAHPFGHGSVAQRRIM

SEQ ID NO: 53794 - protein, 215 aa, Zea mays
  Clone ID: UC-ZMFLB73178A11_FLI.pep
RTPLQFLEPSLPLVIPLVTMPALAKPASRTAKPAAAPKPKPAAAKPKAATAGASHPPYFEMIKEAITALKERTGSSSQAIAKYVGDKHGASLPANFKKMLSIQLRGSAAKGKLVKVKASYKLSDAAKKASPKTKAKPAKAAAAKTTAPKPAKAAAAKSKKAAAAKPKKAAAAGTKRKVPEKKVVAKPKKSPAAKAKAKPKTVKSPASKKARKASA

SEQ ID NO: 53795 - protein, 183 aa, Zea mays
  Clone ID: UC-ZMFLB73181D03_FLI.pep
QRKKPSAGGRRADSPPSPPLHPHYANPRRTPLSDSFSPPRPDRVVQRPPGSGAPARPGSPGVGMPCCSPSLLGVGPRVRSFLRDYDALQSLALALIYLQVRIPLVCRLRRPDRPGPPAACRSPRDRPTSALVLAAALAVSACDVKPGDGIGFERPLVFPTVVGDILAASVLSVILVVERDGEL

SEQ ID NO: 53796 - protein, 208 aa, Arabidopsis thaliana; identical to SEQ ID NO: 40715
  Clone ID: LIB9-027-D10_FLI.pep

SEQ ID NO: 53797 - protein, 482 aa, Zea mays
  Clone ID: LIB3633-001-E3_FLI.pep
REKCLKVDISIWPPSPVVAMATYDKAIESYKKAVTTAASLAASAMLVRGVVNELVPYEVRDLLFSGLGYLRSRMSSRHTVVIEETEGWTSNQLYDAARTYLATRINTDMQRLRVSRVDEGKSLMFSMEEGEEMADVHAGAEFRWRLVCRDGAGNGAGNGAGNGHGHGHARGGSYRVEVRSFEMSFHRRHKEKAIASYLPHILAEAKKIKDQDRTLKIYMNEGESWFAIDLHHPSTFTTLAMDRKMKRAVMDDLERFVRRKEYYRRIGKAWKRGYLLYGPPGTGKSSLIAAMANYLKFDVYDLELTEVNWNSTLRRLLIGMTNRSILVIEDIDCSLDLQQRADEAQDAGTKSNPSEDKVTLSGLLNFVDGLWSTSGEERIIIFTTNYKERLDPALLRPGRMDMHIHMGYCCPESFRILASNYHSITDHDTYPEIEALITEVMVTPAEVAEVLMRNEDPDVALEGLIQFLNGKKDHAKDDSRQG

SEQ ID NO: 53798 - protein, 215 aa, Zea mays
  Clone ID: LIB3732-042-B10_FLI.pep
EMAQAMASMTGLSQGVLPSRRAANRARTAAVVRASAEAQAQAGRRAVLGLVGTGIVGGALSQAVHAETVKTIKIGAPPPPSGGLPGTLNSDQARDFDLPLKERFYLQPLPPAEAVARVKTSAQDIINLKPLIDKKAWPYVQNDLRLRASYLRYDLKTVIASKPKEEKQSLKELTGKLFSTIDDLDHAAKIKSTPEAEKYFAATKDALGDVLAKLA

SEQ ID NO: 53799 - protein, 537 aa, Glycine max
  Clone ID: uC-gmflminsoy056e11_FLI.pep
AFFRNGIKIAIQSFVFVMGKGENHYIAYVEDMYEDRRGQKKIKVRWFHHNQEVKGVVPVRNPHPREVFITPYSQVISSECVDGSATVLTREDFEKCMPFFSPTSRDRIHLCFRQFRSNKIKPFDLSKLRGYYAQPILSCLHLDSIQHPEFLAREDEELSAGDDVKVGVKRRRGDKGSPQSWISRQGVRKLSRNKQMMVYKTFQVANYARSERILLSRKQVGSQPWSNHKYKVDDKIELLCQDSGIRGCWFRCTVVQVARKQLKVQYDDVQDEDGSGNLEEWIPSFKLARPDKLGMRHSGRPTIRPAPTYEEQELAVEVGSAVDAWWSDGWWEGVVTRIDNCGDDSVEVHFPGECLLMNVCKKDLRISRDWLGDSWINIKAKPEITKSIFTANNSFNTKLSVSPSIAKDVDSVGFANSCHGDPVSKKSNEPVVIKEENFVSCDGSDKEENFVSCDGSAEDGDCVQDNKPSSEKSTQADNIDTHINCDNEENCGDNDNDNNSNDGGGNKNDDDNGNKDMGVFGTSGPDQETVELMEVAV

SEQ ID NO: 53800 - protein, 148 aa, Zea mays
  Clone ID: LIB3912-057-F4_FLI.pep
LAAPAKKGDAKTQALKVAKAVKSGSVKKTKKIRTSVTFHRPKTLKKARDPKYPRISTTGRNKLDQYQILKYPLTTESAMKKIEDNNTLVFIVDLKADKKKIKAAVKKMYDIQAKKVNTLIRPDGKKKAYVKLMPDYDALDVANKIGII

SEQ ID NO: 53801 - protein, 411 aa, Glycine max
  Clone ID: uC-gmrominsoy028h10_FLI.pep
ESSEVQSSASLMRKRKSEPLVGVLELIKGHEHSSLFERRLDSQDTDRYKDLVKQPMDLETIQLRLQKGHYSSCTSAFFRDLLLLFTNATVFFSHDSLESQAGRQLHRLATAEMKNHGQAQSDPIPRKNDSLPPNAPLAKPDSLLSKNKASGPILVCRKRSSMSSKPSSATFGQKGDQPVFNDKKERPSSDAKPPMKPSSSDTDEEELPKAKEKPVTGARSLRRSNKNLNSNSSNNNNKKPSSISTPKAGSSGNKPSETVKPEKSKAEGGADKKRSAAADFLKRIKRNTSAEASKGGSGGGSGGGGGGGGGSSSSSKGGGGGNGAKEQKKMVNNGKGDKGKERASRHNNVGGGSGSADKRNNKNIENSSQSKRSVGRPPKKAAETNAGSAKRGRENSASAGKDKRPKKRSKK

SEQ ID NO: 53802 - protein, 219 aa, Zea mays
  Clone ID: JC-ZMXLIB3526P093BE04_FLI.pep
SFLRVRVRLEACDLLQWLPNKASPVAAFCDHPDFGADVREHGQELQLSLGQNLGFDDPDDEAFGVRVQQAEPVVHLRREVPPRHRLPAEARRADGVDLGERGLRVAEPPRGEVEEVVALVTEAVQVAALVAALVRRVDGQRLVLLHVVQPLAQVRPHQVAAHEVPHRAAHRHRPPAAPRPAAPAAEERRRRDWGHGHRARRRRRCCRPHGAAACGRACG

SEQ ID NO: 53803 - protein, 266 aa, Glycine max
  Clone ID: uC-gmrominsoy063g09_FLI.pep
YLMVDEQGMFLPLIVPPTIYQAGLWSTWLTVLCSLKMFQALARDRLERLNASPSATPWTYLRVYSALLFVFMVDVLWIRFCLTIYQAHGSSMYLLLFFEPFSICFETLQAILVHGFQLLDIWLHHSACNSSDFRTPKLLDMLTAGSLLELKGILIRNLGFLLDMATFFMALGHYLYIWRLHGMAFHLIDALLFLNIRALLSAIINRIKGFIRLRIALGTLHAALPDATTEELRAYDDECAICREPMAKAKRLNCNHLFHLACLRSW

SEQ ID NO: 53804 - protein, 498 aa, Glycine max
  Clone ID: uC-gmrominsoy124b05_FLI.pep
FLSLFFPLVIEFSSMNNINNNRSQDQRSRPAKAATIHGCALSGDLVGLQRLLRDNPSLLNERNPVMAQTPLHVSAGHNRTEIVKFLLDWQGADKVEMEAKNMYGETPLHMAAKNGCNKAAQLLLARGAIVEARANNGMTPLHLAVWYSLRAEEFLTVKTLLEYNADCSAKDDEGMTPLNHLSQGPGTEKLRELLLWHLEEQRKQRAIEACSETKAKMDELEKQLSNIVGLNDLKVQLRKWAKGMLLDEKRRSLGLHVGRRRPPHMAFLGNPGTGKTMVARILGKLLHTVGILPTDKVTEVQRTDLVGEFVGHTGPKTRRKIKEAEGGILFVDEAYRLIPMQKSDDKDYGLEALEEIMSVMDSGKIVVIFAGYSKPMKRVITSNEGFCRRVTKFFQFNDFNSEELAQILHIKMNNLAEDSLLYGFKLHTDCSIKSLAALIERETTEKQRQETNGGLVDTMLVNARENLDLRLSFDCMDTEELLTITLVDLEAGLQLLTQ

SEQ ID NO: 53805 - protein, 511 aa, Zea mays
  Clone ID: UC-ZMFLB73144G02_FLI.pep
RHRARTTSKMVASPRFKPIEECCSEGRSEQTVAADLDGTLLISRSAFPYYLLVALEAGSVLRAALLLLSVPFVYVTYAFFSESLAISTLVYISVAGLKVRSIEMVARSVLPRFYAGDVHPESWRVFSSFGRRYVVTASPRVMVEPFARAFLGADKVVGTELEVGRDGKATGFMARPGVLVGDHKKKAVVKELGDALPDVGMGDRETDFDFMSICKEAYLVTSRKYSPVPRNQLLSPLIVHDGRLVQRPTPLVALVTFLWMPFGFALALMRVYINLPLPERIVYYTYKLMGIRLVVKGTPPPPPKKGHPGVLFVCNHRTVLDPVEVAVALRRKVSCVTYSISKFSELISPIKAVALSRERDKDAENIRRLLEEGDLVICPEGTTCREPFLLRFSALFAELTDRIVPVAINTKETMFHGSTVRGFKLMDPYFFFMNPRPTYEITFLTQLPKDLTCSGGKSPIEVANYIQKTLSGQLGFECTSITRKEKYGMLAGTDGRVPSKNKEKEKEKDKN

SEQ ID NO: 53806 - protein, 605 aa, Glycine max
  Clone ID: uC-gmrominsoy179b12_FLI.pep
SLEANAGMVSQIRVARPPAEGRGRNQLLPRYWPRITDQELQQISGDSNSTIVPLFEKMLSASDAGRIGRLVLPKACAEAYFPPISQPEGLPLRIQDVKGKEWMFQFRFWPNNNSRMYVLEGVTPCIQSMQLQAGDTVTFSRMDPEGKLIMGFRKATNSTAVQLQKGCSETHLNALSKKWNSAGGDMSWHNIDMPESRKRDELPLPPVMVPEKKRTRNIGSKSKRLLIDSQDALELKLTWEEAQDLLRPPPTVKPSIVMIEDHVFEEYEEPPVFGKRSIFVVRSTGVNEQWTQCDSCSKWRKLPVDVLTPPKWTCVENLWDQSRCSCAAPNELNPRELDNLLRLNKEFKKQRLAASQRLALEHESSGLDALANAAILGDDASDSGRTSVVSTTKHPRHRPGCSCIVCIQPPSGKGKHKPTCTCNVCMTVKRRFKTLMMRKKKRQSEREAEIAQRNQLSWRTKDESEVDSTLRHLTPVDRLENEVRVQNELDSRSQNHAVAEAAKGQLDLNCQPDREDVQAWPNNLSMTSLLEEANLPLETYLKRNGLSSLISEQQTNSASNVQAQTTNDSEGKHNEDCGTALVIHERESSPEENSGQDREQNNSLS

SEQ ID NO: 53807 - protein, 266 aa, Oryza sativa
  Clone ID: UC-OSFLCYP054A07_FLI.pep
VSPQTTDMASGRIALLCLLGLLLVAASPAAIAAKDDKIFYQITFMWPGAYCAQTKAGCCMPKTDVAPASDFYVAGFTVYNATTNSSLSSCSNTPFDMNQIGDVTRLMQYWNNIRCPSKSGQKGWKNAWETSGVCSDLTESAYFDTALALRDKINPLSRLVSNGIKPDFGLYSVKKIKEVIEEGIGAPALIQCSKGPFNKFQLYQIYVCVAEDAKTFVECPSPRKPYTCGDDILFHPFKKWMLKTNSTKSYAAADAIDQLLEAVMEI

SEQ ID NO: 53808 - protein, 235 aa, Glycine max
  Clone ID: uC-gmrominsoy185h07_FLI.pep
DMGDTPKRSNLSRRIASLVRFREKRKERCFDKKIRYSVRKEVAQRMHRKNGQFASLKESPGSSNWDSAQSSGQVGTSHSESVRRCHHCGVGENNTPAMRRGPAGPRTLCNACGLMWANKGTLRDLSKGGRNLSVEQSDLDTPIDVKPTSVLEGELPGIHDEQGSSEDPSKSNAADGSSNHAVNPSDEELPETAEHFTNVLPLGIGHSSTNDSEQEPLVELSNPSDTDIDIPGNFD

SEQ ID NO: 53809 - protein, 266 aa, Oryza sativa; identical to SEQ ID NO: 53807
  Clone ID: UC-OSFLM202106A04_FLI.pep

SEQ ID NO: 53810 - protein, 129 aa, Glycine max
  Clone ID: uC-gmrominsoy273c02_FLI.pep
PPALTLPILRHLLPPLPLQQTLRQPRLQIHQRSRPSQRHQGHHSLVPESQKPNKRTMRIFCKVIRDPSKYRRKRGFEWEPSILPRKLLEPTTPPLGLSEVPSQNKNPSLTFLLQPHHRSFLLRGFPHLP

SEQ ID NO: 53811 - protein, 605 aa, Zea mays
  Clone ID: UC-ZMROB73014A06_FLI.pep
FAAHEHPDTHARAWPASQPDTVIRSVCADTVTQAKPHNTIGASQHNSHVHLHAEVQTVSLHFGLSFIIHVLLGDLLKRHALGLRHEHRHEHAQEVGSGEHEERVADADARRVAMVGLLGVLRRVQEPERADDGAGLAGRCRYAVARGPEPRREDLGRHDEGGAVGPEVCEEEGEPVEDDEAGVVGRLGPVLVRHPEREHEHGHHEEAHDLDPEPAHDVDEADGEPVARDGAAERDQRLGARDAVHLLDGVHGPRRRYPPDLGEDVLLEEVLAVEGDVQQEPRAAGGQQVEAMAPEELRREEAPCVGADHLALHLLILFLDLLLEHLGHVGRGLLRVAGDERRVPRRLGHLHAPVVGERGRDGAEHEDDAPDIVGLRDERRLGVHEVGRGRERVPERRRDGERHDGAEEDAEPLHGEHGGDEGAAGLLVGVLGHDGGAQRVVAADAEAEPEAEEAERGDDALGRMPEREAGRDGAEHHEDEGEAVDALAAELVAEPAEEELSRQRAAEGDAGHGGRHVGREAAGVLGGGVGVVDAAEELGHERDTEQIVCVGEEPHAGDDDRHEMVPLCLGLVECGQHVELASRHCVSRALPSPMLLARRLNLPLC

SEQ ID NO: 53812 - protein, 762 aa, Glycine max
  Clone ID: uC-gmronoir015a12_FLI.pep
AVRSPPATLSGSDLHHQSQQNVPSSVPSSSFACAQCAKHFPSQSALFQHQLIAHIGGTDAPQQQQQSTASNDTQSTVNALAMLAAAGINGGSGTTQQQQQQLFGQLLGSNPFSQGTTPSLMFNNSSAFGGINPTEFDGAAMLAKLSAEFAAVAQAQHGQSGAISATTVQSTGGPSTQQNGAMGRGHTPAPSNKPPPQKRQYSSTSKNFCDLCNKEVCNKYFLRTHMLKMHNIIIDENKQLIANIDTVDKERKGEVKFRCDICHTSMNTREELKLHKRESHGMHAGGGGSQSAPLGGARGVPKATSSSASQPTAVSMDTAETNQQQQQKRVALPSFAPAASNFNAIEHQTQQQQQQSTQRRTTSEGTEANDENNQPLGVHSPQQQQTREAAGAQQPSLAGANPMKQLLSIIGGDEALPPSLVGGARLLRTTGERNDFKKDTEEEHLGHRIADANNNATNCRFCGLCLEEEGQLQLHQLMEHPNEYMAELQPTMDLPHSASTEDKLINQVALQMAEANSHNHHHHHHQHTSAPTAISATTEDFGRVLRRFVLFGRLFRRSRHGPSASATENEERHSVARRKCRRRRRKRRRRGKAPMPTVQKNLQKCAKIGGAPAHGAPQFCRQNVTGEAIDHFAEKDCQTDEFVFMSQMQATVRKSRRMRRTRPFAHPLGEIEARGSGRRTTAGRGGGRRGESTASEEAEDGGGGRRGRSGGTTPSGRRSQRSGGKDEHRRRSGGRSKTAACTETNKGRHGGRRKAQPYERFD

SEQ ID NO: 53813 - protein, 203 aa, Oryza sativa
  Clone ID: UC-OSROCYP004E11_FLI.pep
CSCNHAIDANGHGVRALHGGSELEGVGHGGGDDGLGRERRLPWAEQRVVGDLRDVDGRAGHLEDLQDAAERLEAPGELAVAGAEHRVLAVDLAQLPRVGPDLRLDARVLGLEARRLGDQLLQPLLLPRPGPPRRLPVRQHPLPLPLVGATAAAAGVALRAGAPARRRRHGHSTVLVQNLIQEPDLFKRSKKFQRNKKETSRRM

SEQ ID NO: 53814 - protein, 535 aa, Oryza sativa
  Clone ID: UC-OSFLM202118G07_FLI.pep
LKMGSCCSRATSPDSGRGGANGYGYSHQTKPAQTTPSYNHPQPPPPAEVRYTPSAMNPPVVPPVVAPPKPTPDTILGKPYDDVRSVYSLGKELGRGQFGVTYLCTEIASGKQYACKSISKRKLVSKADKEDIRREIQIMQHLSGQQNIVEFRGAYEDKSNVHVVMELCAGGELFDRIIAKGHYSERAAATICRAVVNVVNICHFMGVMHRDLKPENFLLATKEENAMLKATDFGLSVFIEEGKMYRDIVGSAYYVAPEVLRRNYGKEIDVWSAGVILYILLSGVPPFWAETEKGIFDAILQGEIDFESQPWPSISESAKDLVRKMLTQDPKKRITSAQVLQHPWLRDGEASDKPIDSAVLSRMKQFRAMNKLKKMALKVIASNLNEEEIKGLKQMFTNMDTDNSGTITYEELKAGLAKLGSKLSEAEVKQLMEAADVDGNGSIDYVEFITATMHRHKLERDEHLFKAFQYFDKDNSGFITRDELESALIEHEMGDTSTIKDIISEVDTDNDGRINYEEFCAMMRGGGMQQPMRLK

SEQ ID NO: 53815 - protein, 527 aa, Glycine max
  Clone ID: uC-gmronoir052g03_FLI.pep
EVPMTVDLDNASTASGEAASVSSSGNQTKPAAPKKKRNLPGMPDPEAEVIALSPKTLLATNRFVCEICNKGFQRDQNLQLHRRGHNLPWKLRQRSSKEVRKRVYVCPEPTCVHHDPSRALGDLTGIKKHFCRKHGEKKWKCDKCSKKYAVQSDWKAHSKVCGTREYKCDCGTVFSRRDSFITHRAFCDALAEENARSHTVVKDISENDSKVLIGDSPPPQPVAATVAATTAAATTTTTTTITSTTQANSVMSSCLQTHNLDLPENNPPQVIEEPQAATATAISGSCGSSSSCSTSNGGATCNSNSSSSVFASLFASSTASVTLQSQTPAFSDLIRAMGPPEHPADQISGPSSEAISLCLSTTSASPIFATGGRQYASSSPHPAMSATALLQKAAQMGAAATNASLLRGLGIVSSSPLDSTSSGQQNVLQWGHQQQLEPESGSVAAAGLGLGLPCEDGGSGLKELMMGTSSMFGPKHTTLDFLGLGMAAGGTAGGGLSALITSIGGGLDVTAAFGNGDFSGKDIGSSS

SEQ ID NO: 53816 - protein, 566 aa, Oryza sativa
  Clone ID: UC-OSFLCYP029G06_FLI.pep
TSLLLLHLVVVSAALSPPLYTLTHTRTRKPNPRICLTPQPKPSSSPMGACFSSHTATAAADGGSGKRQQRKGDHKGKLPDGGGGEKEKEAARVEFGYERDFEGRYQVGRLLGHGQFGYTFAATDRASGDRVAVKRIDKAKMVRPVAVEDVKREVKILKELKGHENIVHFYNAFEDDSYVYIVMELCEGGELLDRILAKKNSRYSEKDAAVVVRQMLKVAAECHLHGLVHRDMKPENFLFKSTKEDSPLKATDFGLSDFIKPGKKFHDIVGSAYYVAPEVLKRRSGPESDVWSIGVITYILLCGRRPFWNKTEDGIFREVLRNKPDFRKKPWPGISSGAKDFVKKLLVKNPRARLTAAQALSHPWVREGGEASEIPVDISVLSNMRQFVKYSRFKQFALRALASTLKEEELADLKDQFDAIDVDKSGSISIEEMRHALAKDLPWRLKGPRVLEIIQAIDSNTDGLVDFEEFVAATLHIHQMAELDSERWGLRCQAAFSKFDLDGDGYITPDELRMHTGLKGSIEPLLEEADIDKDGRISLSEFRKLLRTASMSNLPSPRGPPNPQPL

SEQ ID NO: 53817 - protein, 268 aa, Zea mays
  Clone ID: uC-zmrob73011a04_FLI.pep
PFLFSLSCACPASSLCMRMCRRRTRAGLRRTGKSCRLRWVNYLHPGLRRGRITADEERLILQLHAQWGSRWSRIARSLPGRTDNEIKNFWRTRARKQKAAAQQQQQQQDSRSSKTATASAFSGSASSVTTTTSSCSGSPSPTSRGCGTATSSSALTESALRQSGGEDEDAELDEASTTTTTTASQRQHQDDDHQQQHQECYASDHFWNDIAAAEAAIYMLIDGGWTGSGPGHPAADPPSSPAWEYCSDYSLWRIDDDEYYEKMLDSSS

SEQ ID NO: 53818 - protein, 84 aa, Oryza sativa
  Clone ID: UC-OSFLCYP099G03_FLI.pep
SFPQLHFDLRLLGTDLQLLFLFGIVLDLGLEGMAVWGSRSDLMRKFRVLGDCEMWLCLVHAEVVSLVENCNDVIESLCVYDRLM

SEQ ID NO: 53819 - protein, 644 aa, Zea mays
  Clone ID: uC-zmrob73080h10_FLI.pep
NSCKSRRTRRCWLSRSRCSRCPTRSSARSSTSSSRPRQKRTRCTPRSLLQPEPDQVDLPQLPEPPLQETSRPVVHSFCKILTPSDTSTHGGFSVLRRHANECLPALDMSMPTPTQELITKDLHGSEWRFKHIYRGQPRRHLLTTGWSTFVTSKKLIAGDAFVYLRSETGQQRVGVRRLVQKQSTMPASVISSQSMHLGVLASASHAIRTHSIFLVYYRPRLSQSQYIVRLNKYLESSKIGFDVGMRFKMSFEGDDVPIKKFSGTVVDKGDLSPQWQGSEWKTLKVKWDEATNLNGPERVSSWEIEPFDASAPAITMPVQPSMKNKRPRETAEGLDIHALEPAQEFWLSGRPEQHEKTSVSSSEPKHQVAWTSERAGYSAMSSSICQNSAVTGSWFKGFNSSGSHPSLPEISQKLFQVTSNDARVPPWPGLSAYHADEPSSKLSCNTALCSYQTEEVAPRFSNAVEEEKKEPGMFRLFGVNLINHARSSATADKTSVGAGETSARAAGSFEDSAQLSRVTKDHTHMVNGSPREIQSHQSCSGRSRIKVQMHGNDVCRAVDLGNLDGYEQLMGEVGEMFEIKDLGSKEKEEWKVTFINDENETMEVGAVPWQEFCQMVRKIVIHSIGDRGHMEACPCLGQDGKRDY

SEQ ID NO: 53820 - protein, 65 aa, Zea mays
  Clone ID: LIB3062-041-H11_FLI.pep
LLEYNSIQGSKQDLMPKFVLGNKNAIHFLLCRPRQILEMSTPRYNLKRLELDSMLQLIFSAKYWN

SEQ ID NO: 53821 - protein, 403 aa, Zea mays subsp. mexicana
  Clone ID: uC-zmroteosinte023b03_FLI.pep
ERFERFLLESYIEDNDTVKWCPSTPHCGNAIRVKGDIYCEVECTCGCQFCFNCSLRAHSPCSCMMWELWIKKCRDESETVNWITVNTKPCPKCHKPVEKNGGCNLVACICGQAFCWLCGGATGRDHTWSTISGHSCGRFTDDQTKKTEQARRDLYRYMHYHNRYKAHTDSLKQEAKLKNEIQGKISISENKESKIKDYSWVINGLNRLFRSRRVLSYSYPFAFYMFGDEIFKDEMTPEERELKQNLFEDQQQQLEFNVERLSGFLEKDFQLFTDDEVMDTMKHVINLSNVVDRLCKQMYQCIENDLLYPLRTPHNIAPYKSKGIDRASELNISWDPGEQSSQSTKHSQDEHRNKQASNILGKRTHELHGSSSSNKRERVDANGGGGGGALFDLNVPAEVVDKI

SEQ ID NO: 53822 - protein, 107 aa, Homo sapiens
  Clone ID: LIB3064-052-C6_FLI.pep
RNGDQWHEIRQGRLPRIPQVLSQEFTELLKVMIHPDPERRPSAMALVKHSVLLSASRKSAEQLRIELNAEKFKNSLLQKELKKAQMAKAAAEERALFTDRMATRSTT

SEQ ID NO: 53823 - protein, 44 aa, Zea mays
  Clone ID: 700204228_FLI.pep
SACSDPSPTSSIRARPVSSLVLVMRTYGLAPTTWRASVGHVQSR

SEQ ID NO: 53824 - protein, 250 aa, Zea mays
  Clone ID: LIB3075-033-G12_FLI.pep
IKEIKEVIELPIKHPELFESLGIAQPKGVLLYGPPGTGKTLLARAVAHHTDCTFIRVSGSELVQKYIGEGSRMVRELFVMAREHAPSIIFMDEIDSIGSARMESGTGNGDSEVQRTMLELLNQLDGFEASNKIKVLMATNRIDILDQALLRPGRIDRKIEFPNPNEDSRFDILKIHSRKMNLMRGIDLKKIAEKMNGASGAELKAVCTEAGMFALRERRVHVTQEDFEMAVAKVMKKDTEKNMSLRKLWK

SEQ ID NO: 53825 - protein, 253 aa, Zea mays
  Clone ID: 700044356_FLI.pep
LVGQKSRVCNTSSKKSSNCSVHGAANLAEAKTFISLDTKTQNRGARQPARRGPSHEQVGPGRLEGGPELPGGRPHLAVHERELDRRVVELLRVVPLAQLEVDRRSLDDLDAGGPHAVARGHLVVHLLHGAVQGRVAVLLVHVVVPRPALVPQPDAVVLDGGRVALEDLVDGEHLAIALLHLLQLSQEVPELRLGANLVSGPELHAVDLGVLIGRGRQRATHHLVLMEPVGDHFGVLAWPEERRRSPKTEQGRW

SEQ ID NO: 53826 - protein, 242 aa, Homo sapiens
  Clone ID: LIB3081-112-D4_FLI.pep
ENNFQPYPLPHVRHMAYQLCHALRFLHENQLTHTDLKPENILFVNSEFETLYNEHKSCEEKSVKNTSIRVADFGSATFDHEHHTTIVATRHYRPPEVILELGWAQPCDVWSIGCILFEYYRGFTLFQTHENREHLVMMEKILGPIPSHMIHRTRKQKYFYKGGLVWDENSSDGRYVKENCKPLKSYMLQDSLEHVQLFDLMRRMLEFDPAQRITLAEALLHPFFAGLTPEERSFHTSRNPSR

SEQ ID NO: 53827 - protein, 200 aa, Zea mays
  Clone ID: 700095567_FLI.pep
SLVAKTKEMRKRRYDNHQMTVKSLVDLLERGAGGGATSGGGSDVVGSKLALSLVGGAAPGLAVQERLAVLVELQLSDDHLGGVDAHVHGGAVHLLAGDPLDVDDPAAAVDLHHLPLAALVGAAHDLHLVVLADRDGAHVVLVAELRRQPGGHENAADGGRGRKVRLAALPAGARDAGIALHDGGGVDAPAYLGGRFGGGG

SEQ ID NO: 53828 - protein, 404 aa, Homo sapiens
  Clone ID: LIB3082-008-C10_FLI.pep
LLGPGQGWSWAGIPSSAAAQRAGPPAGALEALSPGGARAHAERRGEMRATPLAAPAGSLSRKKRLELDDNLDTERPVQKRARSGPQPRLPPCLLPLSPPTAPDRATAVATASRLGPYVLLEPEEGGRAYRALHCPTGTEYTCKVYPVQEALAVLEPYARLPPHKHVARPTEVLAGTQLLYAFFTRTHGDMHSLVRSRHRIPEPEAAVLFRQMATALAHCHQHGLVLRDLKLCRFVFADRERKKLVLENLEDSCVLTGPDDSLWDKHACPAYVGPEILSSRASYSGKAADVWSLGVALFTMLAGHYPFQDSEPVLLFGKIRRGAYALPAGLSAPARCLVRCLLRREPAERLTATGILLHPWLRQDPMPLAPTRSHLWEAAQVVPDGLGLDEAREEEGDREVVLYG

SEQ ID NO: 53829 - protein, 221 aa, Zea mays
  Clone ID: 700101412_FLI.pep
FELVNYQLKQIRTALAVASLLKRTLVMPPLWCRLDRMWFGHPGILEGTMTRQPFLCPLDHVFEVHVMLKDLPKEEFGQHIDFREYSFLENPSLPKEVKDSLLEVELCDEHSSRCSAIDEIDKHGPFLLPRNSTEEKLLDLLSSYKDVKIIQFSSMVDAFGGFADAAVEKKFRNRVNRYVGLWCCVEFREIGHIYYDMYWDEKPGWKPHPPETREQDHPPWS

SEQ ID NO: 53830 - protein, 653 aa, Homo sapiens
  Clone ID: LIB3119-029-B6_FLI.pep
TSSLLFGAMLKFQEAAKCVSGSTAISTYPKTLIARRYVLQQKLGSGSFGTVYLVSDKKAKRGEELKVLKEISVGELNPNETVQANLEAQLLSKLDHPAIVKFHASFVEQDNFCIITEYCEGRDLDDKIQEYKQAGKIFPENQIIEWFIQLLLGVDYMHERRILHRDLKSKNVFLKNNLLKIGDFGVSRLLMGSCDLATTLTGTPHYMSPEALKHQGYDTKSDIWSLACILYEMCCMNHAFAGSNFLSIVLKIVEGDTPSLPERYPKELNAIMESMLNKNPSLRPSAIEILKIPYLDEQLQNLMCRYSEMTLEDKNLDCQKEAAHIINAMQKRIHLQTLRALSEVQKMTPRERMRLRKLQAADEKARKLKKIVEEKYEENSKRMQELRSRNFQQLSVDVLHEKTHLKGMEEKEEQPEGRLSCSPQDEDEERWQGREEESDEPTLENLPESQPIPSMDLHELESIVEDATSDLGYHEIPEDPLVAEEYYADAFDSYCEESDEEEEEIALERPEKEIRNEGSQPAYRTTQQDSDIEALARCLENVLGCTSLDTKTITTMAEDMSPGPPIFNSVMARTKMKRMRESAMQKLGTEVFEEVYNYLKRARHQNASEAEIRECLEKVVPQASDCFEVDQLLYFEEQLLITMGKEPTLQNHL

SEQ ID NO: 53831 - protein, 291 aa, Zea mays
  Clone ID: LIB3136-015-A2_FLI.pep
PKREIVDWVDLHEMVTAACYTPDGKGALIGSHKGSCHLYDTSDDMLCYKTQIDLQNKRRKSSQKKITGFQFVPGDSSMVIITSADSRIRVLDGFELVHRFKGFRNTSSQISACLAGNGRYIISASEDSRVYIWRNDDGSKPSKKKGIVSVTNTHEHFHCESVTVAVTWPFTSTTMTSLMNPRKQELERGSENGYSPQDLQTKLAKAREMTDVEYRRTNITSYNSKHNSDRTSPAWPEELVTPPNQSLSATTCHANEGDQALNRSAWGLVIVTAGRGGQIRTFQNFGFPVRV

SEQ ID NO: 53832 - protein, 229 aa, Zea mays
  Clone ID: 700163363_FLI.pep
ANPKQGVDLSAAAMSKLQSESVKDAISQIVGDAKEKNRKFTETVELQIGLKNYDPQKDKRFSGSVKLPHIPRPKMKVCMLGDAQHVEEAEKMGLDYMDVEALKKMNKNKKLVKRLAKKYHAFLASEAIIKQIPRLLGPGLNKAGKFPTLVTHQESLESKVNETKATVKFQLKKVLCMGVAVGNLAMEEKQIQQNIQMSVNFLVSLLKKNWQNVRCLYVKSTMGKPYRVF

SEQ ID NO: 53833 - protein, 234 aa, Zea mays
  Clone ID: LIB3136-056-F11_FLI.pep
INIHSHDGRKQQPKQVGTPYPKINTRLVHNLIQSISHALFPLSHPKRVSPGKEKKKKEKGRRRAQRSYSWGVKLTLMSGEALYAMGCGELAGQPTMVKPVVVAFRFMALAWGWGGAAECGGGGAWNPFPGPACEIGVAAVSTGGGGATGAGNAGTGEGCCMLILLLWCCFRLLGRKLPTITCIGLAARSIPATTPPTTRPSGPARETLSPPVLLRPSSAIVKEPISCRISKRPS

SEQ ID NO: 53834 - protein, 691 aa, Zea mays
  Clone ID: LIB3137-010-A12_FLI.pep
APFSSVKRLLMGATGRHPDSSLLRDLSRLPFPAAVGGGAVVHADHIGRRIALSPTHLLSMLLAYLKQLAEADLGGAPVADCVISVPCYFTQAQRRAYLDAAAIAGLRPLRLMHDLAATALGYGLYRSDLGGSGGPTCVAFVDVGQCDTQVAVVSFDMSGMKVLSHGFDADLGGRDFDEVLFEHFAEEFKDRYMIDVTGNVKASMRLRAACEKAKKVLSANAEAVVNIECLIEEKDVRGVIRREDFEKLCARLLERVVEPCNRAVTDSRIGLERLHSVELVGSGSRVPAIAKVLKEFFRKEPSRTLNSSECVARGCALQCAMLSPTFRVREYEVHDAIPASIGFYTSDGPVSTLSSDALFRRGLPFPSVKIITLQKNDSFSFDAYYVDANELPPGTSTDIGSFQIGPFQAHMEASKVKVKIRLNLHGLVSVESAALIDDYQRNATSADHMEVDTSGDDMGHKSRSERSIQRQELPITEYICCAMSKQELLEAQEQEHQLAYQDKLMERTKDRKNALESYVYDTRNKLSERYRSFATDSEREQISFNLQQTEDWLYEEGDDETEVVYSSKLEELKKLVDPIENRCNDDEVRAEIARELLKCIVDHRMAAKSLSAPERDAVDNECNKAEQWLSEGSKLQESLPKNVDPVLWSCEIKGKEEELDMFCRNITRHKGSPARTDGSRGSDHMPTPDRD

SEQ ID NO: 53835 - protein, 514 aa, Zea mays
  Clone ID: 700209531_FLI.pep
FDVSEHYWFPMLAGLSDLTLDSRPEVRHCALEVLFDLLNERGHKFSSPFWESIFHRVLFPIFDHVRHAGRDGLSSSGDDWLRDTSIHSLQLICNLFNTFYKEVSFMLPPLLSLLLECAKKTDQTVVSIALGALVHLIEVGGHQFSDGDWDTLLKSIRDASYTTQPLELLNSLRFQKSKHQQLLSREESNAQGNSYLDSRGEPSISDSNNGEHNHPEAGLQTILENSEDLPSPSGRTQPAVFPRGQSFGQRIMGNMMDNILVRSLTSKSKGRTDDIAPPSPVKAPDDEADKAEEEESPMMETVRSKCITQLLLLGAIESIQKKYWSRLKATQQIAIMDILLSLLEFASSYNSPSNLRTRMHHIPPERPPLNLLRQELAGTTIYLDILHKSTVEQDEKDSIEETNGLNVESDDQEKIKYLAEGKLVSFCGQVLKEASDLQPSTGEAASADIHRVLDLRAPVIVKVLKGMCIMDAQIFKRHLKEFYPLITKLICCDQMDVRGALGDLFSKQLTPLMS

SEQ ID NO: 53836 - protein, 303 aa, Zea mays
  Clone ID: LIB3137-013-A5_FLI.pep
PPRALRRAHYHKHEPDECYLQPLTPIRSRALDPPCPARRVPLTPQNHRENTRNAPPGDARKRDACARHATTRRRMRLRSNSAAAAACRQSPGLLLRLPRGAGEHGEQVEVVSLRRHRRVRLRRRLLRRREPPRRRHGPRLQGGPERRRRHCHRHRRLVLLARALPEEREGDTGAGAGTGAGRGGGRCGGAGEDGGGGAGPRGRQDRGLGLPEQPLDGLPVRLEPQLAGQLEHARRAHDRHPHAPPAPVHLAVPVLSRARARLLRRRGVGGGCGWSGGRQRHRRRRGHGPVHLEGGAVARGHGH

SEQ ID NO: 53837 - protein, 223 aa, Zea mays
  Clone ID: UC-ZMFLB73214B05_FLI.pep
EISDALERIIAGPEKKNAVVSEEKKRLVAYHEAGHALVGALMPEYDPVAKISIIPRGQAGGLTFFAPSEERLESGLYSRSYLENQMAVALGGRVAEEVIFGQDNVTTGASNDFMQVSRVARQMVERFGFSKKIGQVAIGGPGGNPFLGQQMSSQKDYSMATADVVDAEVRELVEKAYSRARQIITTHIDILHKLAQLLIEKETVDGEEFMSLFIDGQAELFVA

SEQ ID NO: 53838 - protein, 573 aa, Glycine max
  Clone ID: LIB3242-396-G4_FLI.pep
CHHHSMDLNQFLNFNVISSEGFPCTSSCTPISPISNQLLGSLKLDIGNSPNSALSSHFDSDTLSSALSDSQELHTSGEIHSGVNSCKSLQESNHYLHRPVSFVDHLQDGLHLSTRSFLPQDASYDHETRHALLELETALMAPDGEDQITTSSTSLGVGSRPTTSCQRNRSWSSEGQSSDVAHVEKHHKSVEEESLQGFPSCNLKQLLIVCAKALSENNMQHFDQLIEKARSAVSITGEPIQRLGAYLVEGLVARKEASGNNIYHALRCREPEGKDLLSYMQLLYEICPYLKFGYMAANGAIAEACRNEDQIHIIDFQIGQGTQWVTLLQALAARPGGAPHVRITGIDDPLSKYVRGDGLEAVGKRLAAISQTFNIRVEFHGVPVLAPDVTKDVLDVRPGEALAVNFPLQLHHTADESVDMSNPRDGLLRLVKSLSPKVTTLVEQESNTNTTPFFNRFIETLDYYLAMFESIDVSLPRKSKVQINMEQHCLARDIVNIIACEGKERVERHELLGKWKSRLTMAGFRQYPLSSYMNSVIRSLLRCYSKHYNLVEKDGAMLLGWKDRNLISTSAWY

SEQ ID NO: 53839 - protein, 399 aa, Zea mays
  Clone ID: UC-ZMFLB73214H10_FLI.pep
DKLARAMEGFSRDLLCGIGKGDAPPPEKRPGQLREEMEEVELSLGLSLGGRFGLDRKGSKLPRSSSVAAMLTTPVEVPAPPSLSRASSLPVQAEASEVERKQGLDGWGSCREGGGLGVQHAARLPASGNPSSASSVGEGQILQGTLMRTSSLPAVIEASGNDDWKKRKEAQSLKRLEVKKKRIERRNSLACNTSKEAAGQSPKEMNANTDKLVSSDETIVSANESHSSGKHLVKGLPPKYQATITSEDSSSAMRKKPNSAFKGTAITEEQNSSSSVPSSGEAISSVTAPSLPLLSLVPITATLGSREDQSILGRAGARANGMGDVERRMMQEMPGVFTKGLSNGSRVEGFLYKYSKGEVRIVCICHGSFLTPSEFVEHAGAGKVDNPLRHIVVSATPNL

SEQ ID NO: 53840 - protein, 387 aa, Zea mays
  Clone ID: UC-ZMFLB73221F04_FLI.pep
SPLHTCLLFFISRSPRVPHARQLERPPPLYAQLPMSSSGPSPATGTHHTRSTPLQVIHVLGNFMRIWSVYSLYSYLSNSGDSIVGFIFSCLVPTSVIFLVLQKPWKGRPLPNSQVVPTVVNGGILAFYFVLWGKGLLACGPLVALLAEYAGAVLGVLSAALYGRKSNIWKKIGGLAAMLAAYYLLSNGWSTRTHSPLYSFGSEPVEKAAQTIGVKAMMVPITAGILSALRRVLARRVSLKNQLKRRLHAITIASATCFLFPFAMWDTILGSASDSIVKLQLPSWAYFSTVLFGMVLIFYVDNVAEEKLHLVFSSPRHLMVSTGCIIVLETVYQMDFSLLGFLVCSVILGFGISEATSLERSKKSPLETHELSNGVFHNQLPISELPS

SEQ ID NO: 53841 - protein, 424 aa, Glycine max
  Clone ID: LIB3242-444-G4_FLI.pep
KIPIYKSMGSSDMDKTPKEKESKTPPATSQEQSSTTAMPTTNPDWSNFQTYSPIPPHGFLASSPQAHPYMWGVQHYMPPYGTPPHPYVAMYPHGGIYAHPSIPPGSYPFSPFAMASPNGIADASGNAPGRIEVGGKPPEVKEKLPIKRSKGSASGGNLNMWITGKNNEPGKIPGESANGIHSKSGESASDGTSEGSDENSQNDSQLKSRERQDSFEDEPSQNGSSVHAPQNGVHNRPQTVVNQTMSILPISTTSAPGAVPGPTTNLNIGMDYWGTPTSSTIPALHGKVPSTAVAGGMIAAGSRDGVQSQVWLQDERELKRQRRKQSNRESARRSRLRKQAECDELAQRAEALKEENATLRSEVSQIRSEYEQLRSENAALKERLGDIPGVATPGKEDLRSGQNDQHVSNDTQQSGQTEVVQGVH

SEQ ID NO: 53842 - protein, 530 aa, Zea mays
  Clone ID: UC-ZMFLB73223E06_FLI.pep
KAQSVVFFNPLEQTRDEIVMVVVSSPDVSVINSNGSCLPSQLSPEWQFVSDEKISTGRHRLYWRASVPPLGLETYYVVTGQDCEKAIPAVVKTYTAAQEFPCPEPYECSKLEGKTVEMKNSNYTLSFDTCHGLLQTVTRHKYGEQTVVGEEIGMYRSHGSGAYLFKPLGEARSIVEEGGYFILTEGPLVQEAHSLPKTEWPKSPLSHSTRMYNCGDSIQDMLIEKEYHVDLVGHAFNDRELIVRYKTDIDNQRIFYSDLNGFQTSRRQTYDKIPLQGNYYPMPSLAFLQDSHGNRFSVHSKQSLGAASLKNGWLEIMLDRRLVQDDGRGLGQGVMDNKPMNVIFHLLMESNVSALPQTHSLLTLQPSLLSHRVGAHLNYPMHAFMSKKPHEKSFKLVQQSFAPLTASLPCDVHIVNLKVPQPLRFSHTEAAEPRFAVLLHRRGWDASYCKRGGLECTTVGEEPVNLFYMFKDLSAVNVKATSLNLLYDDPEMLGYLQQIGDVGQEGNVLISPMEIQAYKLDLQPPSSQEE

SEQ ID NO: 53843 - protein, 160 aa, Zea mays
  Clone ID: LIB3245-062-C9_FLI.pep
RTVADDSPRTRVLNTIRKLNPHLFVHGIVNGTYNAPFFVTRFKEAMFFFSSIFDMLEANALRMDEHRLLIEREFFGREAVNVIACEGTERIERPETYKQWQMRNLRAGFRQLALDREIMKRARYKVSKSYQGDFLVDEDNKWMLQGWKGRIIYALSAWTS

SEQ ID NO: 53844 - protein, 187 aa, Zea mays
  Clone ID: UC-ZMFLB73225B08_FLI.pep
YCSSFRGYSLLLPRAAVSERSPLPFLATLFSLTSDAALHCSHPLGFFARKEPPAPDTGNFSLHLAPSPPVHGRAIFGGDAAADLPSAGGVGTGPARVRRRRSRRRQHAVPFATEDEEGSHPLPPRFVASDSLASVSDHQRRHQIQTHPLRFDLVGTKSPVLKVICFTTPRQIIVYVPIELQLKSYCA

SEQ ID NO: 53845 - protein, 101 aa, Zea mays; identical to SEQ ID NO: 50624
  Clone ID: LIB3245-518-C12_FLI.pep

SEQ ID NO: 53846 - protein, 656 aa, Zea mays
  Clone ID: UC-ZMFLB73225F09_FLI.pep
AAAMTLPCAGGCEIQASGINYRIAVSTRPLKVWSRSDDDVHSQDHHSVVRQVLRDVSCRARPGELLAIVGPSGAGKSTLLEILAGRLSPSPPPHLLRIDGAAAHSADLRRVSAYVTQQDVLFPLLTVRETLLFSARLRLGARLPSKDMHARVEALLDDLTLRRVAATRIKDLSGGERRRVSIGVEAVRDPPVLILDEPTSGLDSASALHIVGALRAMAEARGRTVLLSIHQPGARIVKMFDSVLLLAAGSVLHHGTVDQLRALLGDAGLHLPPHVDDVEFAIDSVDALRRHASSSLQAPSSGDREGRCTLQRLFQLHGKQVADAPVAVTMMASRYANSRAREVAVLSQRFFKNVARTRQLFACRTVCMLVAGLALGSIFYDLGQDKVAERVGLFAFLLTFLLSSTTEALPIFLQERDILARETASGAYRVSSYAVANAVVFLPFQLALAVVFAAPVYWLAGLRRTAAAFGYFLLVIWLILYTANSVVVCFAAAAPDFVVGNAAIQGVMGSFFLFSGYFIARSAMPGCWVFMHYLSLFKWPFEALLVNEFAGGGRCVVRALGECVATGDEVLRREGLGEECRWRNVGVMVAFMAAYRVLGYAVLRVRCSLALNKKGAVAAGPPGLGLSRRLRRQLAIIGTAAWPSPSSSSTPSLPVN

SEQ ID NO: 53847 - protein, 186 aa, Zea mays
  Clone ID: LIB3279-008-A1_FLI.pep
ARRALAPRGGGEEHRGLRRRGPAGAARAPGPLGGADGGRRLRPRPAQLLRAAAGPAGGAGAGLRRVQGAGGEGRLLPLLAGARHLLRLRLARPSLRLMEERVDAFPYLCGGGDGPPVVALRVRWPSRTLGLLLVVLCVQFTPYLVRFQSGLFIVYPCRSPIWMDGISCLFGSVSPFRSVNVTTRAA

SEQ ID NO: 53848 - protein, 194 aa, Zea mays
  Clone ID: UC-ZMFLB73226C07_FLI.pep
FEDVSFGYDPAMDYDSHMQSTVKVEDAKPEDVLPVTDGVQKVEKEKLKNARDGSDKRTKDSLLRRLSAPRTPLNDAQKRAQNLRAYKADLQKLKKEQEEEQIKRLERLKLDRQKWIAARGNGKGPGNDAPRANGMNGLSKSVPTFTGMKRVENGTTESLSGRLKRLSEPKSIVGAEHSLNPKSAGAGRSRRSMA

SEQ ID NO: 53849 - protein, 150 aa, Homo sapiens
  Clone ID: LIB3547-007-A6_FLI.pep
MLRMIMSGNYQFGSPEWDDYSDTVKDLVSRFLVVQPQNRYTAEEALAHPFFQQYLVEEVRHFSPRGKFKVIALTVLASVRIYYQYRRVKPVTREIVIRDPYALRPLRRLIDAYAFRIYGHWVKKGQQQNRAALFENTPKAVLLSLAEEDY

SEQ ID NO: 53850 - protein, 212 aa, Zea mays
  Clone ID: UC-ZMFLMO17169D04_FLI.pep
SEGYVIKMRDGKNLRCVHSNFQGRNIPESAPQPAIVLRIEDGSGTLLPIIVLEMPSVLLMAAIRNVHIARPTIYQVVKEMIDKMGYEVKLVRVNKRIQEAYCAELYLTKVNDPTDNITFDLRPSDAINIAVRCKVPVQVHRSLAYSDGIRPVEPARMAVAAGLSDGLLFTELDRPDGQPCVEAQEFGLVRNMLIAAIEERYKDAGNDTSLLY

SEQ ID NO: 53851 - protein, 589 aa, Homo sapiens
  Clone ID: LIB3547-132-C8_FLI.pep
EMGGTARGPGRKDAGPPGAGLPPQQRRLGDGVYDTFMMIDETKCPPCSNVLCNPSEPPPPRRLNMTTEQFTGDHTQHFLDGGEMKVEQLFQEFGNRKSNTIQSDGISDSEKCSPTVSQGKSSDCLNTVKSNSSSKAPKVVPLTPEQALKQYKHHLTAYEKLEIINYPEIYFVGPNAKKRHGVIGGPNNGGYDDADGAYIHVPRDHLAYRYEVLKIIGKGSFGQVARVYDHKLRQYVALKMVRNEKRFHRQAAEEIRILEHLKKQDKTGSMNVIHMLESFTFRNHVCMAFELLSIDLYELIKKNKFQGFSVQLVRKFAQSILQSLDALHKNKIIHCDLKPENILLKHHGRSSTKVIDFGSSCFEYQKLYTYIQSRFYRAPEIILGSRYSTPIDIWSFGCILAELLTGQPLFPGEDEGDQLACMMELLGMPPPKLLEQSKRAKYFINSKGIPRYCSVTTQADGRVVLVGGRSRRGKKRGPPGSKDWGTALKGCDDYLFIEFLKRCLHWDPSARLTPAQALRHPWISKSVPRPLTTIDKVSGKRVVNPASAFQGLGSKLPPVVGIANKLKANLMSETNGSIPLCSVLPKLIS

SEQ ID NO: 53852 - protein, 225 aa, Zea mays
  Clone ID: UC-ZMFLMO17063B07_FLI.pep
GPYRGHPPGRRREVPLGRVDHDHVPLGLVHLGRQVVQRQRTRPVAAHARQLQGVVAAAAAGEAGRVPPVRGQEPVRLVEARAVGHQVRAQERRLRPHHAVPRRVLLQEHRGAARVQRVPQPRVVAQPEHQQPQRRAPPQHGQRQRDLVDRLLWHGLRGGVRHGRLRQRRHARRRAVPGPRRRGHRRQARQRQGQRRQQVRRQGGRRQQAGRQECRGQQQRAGAGG

SEQ ID NO: 53853 - protein, 270 aa, Homo sapiens
  Clone ID: LIB3791-002-D9_FLI.pep
VTLRKKYTRYEKIGQGASGTVFTATDVALGQEVAIKQINLQKQPKKELIINEILVMKELKNPNIVNFLDSYLVGDELFVVMEYLAGGSLTDVVTETCMDEAQIAAVCRECLQALEFLHANQVIHRDIKSDNVLLGMEGSVKLTDFGFCAQITPEQSKRSTMVGTPYWMAPEVVTRKAYGPKVDIWSLGIMAIEIVEGEPPYLNENPLRALYLIATNGTPELQNPEKLSPIFRDFLNRCLEMDVEKRGSAKPLSSLTPLIMAAKEAMKSNR

SEQ ID NO: 53854 - protein, 338 aa, Zea mays
  Clone ID: UC-ZMFLB73117B07_FLI.pep
AAQHQQLQRQLFLMQQAQSHPQQLSQQAMSRFPSNIDAHLRPLGPLRFQQPQPQPQPSHSQGPSQSPSQATQQASPQQQQQQAAAAAAAAQAQAQAQAQAARVRSPEMEMALQDAMRVCNPDVKTPFQSIEDAVNRLLPYHVVADYEAEEDDRILDSDTTGQIPSRLQQWDHNILVKIAEFTTTFDKQVLAYNIMTKKRAIGEFRSEERLMLEQALLQEEKQAMLGLRAEMESREKAGREAAEVKMRLAMEHARAEAQAHSEMMNHGPIRASAVASQGEDGPSHDMVQEHGEDGWGNSQRDDEDPSEDFLNDENEPENGNSDGQEDWRRSGEFDLNSR

SEQ ID NO: 53855 - protein, 1011 aa, Homo sapiens
  Clone ID: LIB4119-079-D3_FLI.pep
LLCLIKDFERRPSVTHLLDHPFIKGVHGKVLFLQKQLAEVLQDQKHQNPVAKTRHERMHTRRPYHVEDAEKYCLEDDLVNLEVLDEDTIIHQLQKRYADLLIYTYVGDILIALNPFQNLSIYSPQFSRLYHGVKRASNPPHIFASADAAYQCMVTLSKDQCIVISGESGSGKTESAHLIVQHLTFLGKANNQTLREKILQVNSLVEAFGNSCTAINDNSSRFGKYLEMMFTPTGVVMGARISEYLLEKSRVIKQAAREKNFHIFYYIYAGLHHQKKLSDFRLPEEKPPRYIADETGRVMHDITSKESYRRQFEAIQHCFRIIGFTDKEVHSVYRILAGILNIGNIEFAAISSQHQTDKSEVPNAEALQNAASVLCISPEELQEALTSHCVVTRGETIIRANTVDRAADVRDAMSKALYGRLFSWIVNRINTLLQPDENICSAGGGMNVGILDIFGFENFQRNSFEQLCINIANEQIQYYFNQHVFALEQMEYQNEGIDAIPVGYEDNRPLLDMFLQKPLGLLALLDEESRFPQATDQTLVDKFEDNLRCKYFWRPKGVELCFGIQHYAGKVLYDASGVLEKNRDTLPADVVVVLRTSENKLLQQLFSIPLTKTGNLAQTRARITVASSSLPPHFSAGKAKVDTLEVIRHPEETTNMKRQTVASYFRYSLMDLLSKMVVGQPHFVRCIKPNDDREALQFSRERVLAQLRSTGILETVSIRRQGYSHRILFEEFVKRYYYLAFTAHQTPLASKESCVAILEKSRLDHWVLGKTKVFLKYYHVEQLNLLLREVIGRVVVLQAYTKGWLGARRYKKVREKREKGAIAIQSAWRGYDARRKFKKISNRRNESAAHNQAGDTSNQSSGPHSPVAAGTRGSAEVQDCSEPGDHKVLRGSVHRRSHSQAESNNGRTQTSSNSPAVTEKNGSHSCDIQTRAREEHPRQEKQEWAIARGRICRAILGRHSQAQSSPKGCDIFAGHANKHSVSGTDLLSSRICHPAPDQQGLSLWGAPQKPA

SEQ ID NO: 53856 - protein, 314 aa, Zea mays
  Clone ID: UC-ZMROB73061G10_FLI.pep
MPSPVAAQDPSKLSLQYYSKTCPNVEHVVRTEMECAVRADTRNAALMLRLHFHDCFVQGCDGSVLLDDTATMIGEKQAEQNVNSLKGFDLVDKIKEKLEAECPGTVSCADLLAIAARDAVVLVGGPYWDVPVGRLDSKKASLDLANSDIPTAQQGLLTLIAKFWEKGLDATDMVALVGSHTIGFARCENFRDRIYGDFEMTSKYNPSSEAYLSKLKEVCPRDGGDDNISAMDSHTSDVFDNAYFETLIKGEGLLNSDQAMWSSIAGYSTSDTVNKYWADPEAFFKQFSDSMVKMGNITNPAGGEVRKTCRFVNT

SEQ ID NO: 53857 - protein, 373 aa, Homo sapiens; identical to SEQ ID NO: 39334
  Clone ID: LIB4119-138-H10_FLI.pep

SEQ ID NO: 53858 - protein, 159 aa, Zea mays
  Clone ID: UC-ZMFLB73154H06_FLI.pep
TVICFVVAAYMKNNQLDHALQWLLSLEKEGLQLGVKTNLMLLDWLSMLQLVPEAEQFVQKIKNLGEEPIEVHVFLADMYAKSSQEDKARRSLKILEEKKKLLKSDQFERVIRGLVDGGFSEEANKFYKMMKSCGFEPSKTIEVAVKALRIRGGSHRTGR

SEQ ID NO: 53859 - protein, 236 aa, Zea mays
  Clone ID: LIB83-005-C7_FLI.pep
RLSRPLRITLNSFSRILLLANVSGSYMLLTGLLYLITLVASEVLLLEAWQKNRIPYLACTAAMAVAPTTLGLGMLFLWPVSGSVLPIFGDPRAVVASAIVKRRGGCSAGSSSTHQYCRLRKPSLNTTRGLLTLRGPSPGAPPPPRMQVPTHLVVHCNALADLGCLIRSCFPSPPESVGGTLEKVSAWGAGVERMAARASATTACAAGADIPRPGCLRGLGSQATSRRRRRDGGTGT

SEQ ID NO: 53860 - protein, 345 aa, Zea mays
  Clone ID: LIB84-006-B11_FLI.pep
GDMIGVGALSTKETEIKCIKGTKTLWSDRVSGKVTVLAGNANFWAVGCEDGFLQVYTRCGVRAMPAMMMGSAAVFIDCDDSWKLLLVTRRGLMYIWNLYDRTCILQDSLAALVASPDESSAKDAGTVKVISATFSRCGSPLVVLASRHAFLYDMSLKCWLRIADDCFPASNFASSFSFPQGGELGKLQIDIGKFMARKPIWSRVTDDGLQTRAHLENQLASSLALKSAQEYRQCLLSYVRFLAREADESRLREVCESFLGPPMGMVGSASPTDPKNLAWDPDVLGMKKHKLLKEDILPSMASNRKVQRLLNEFMDLLLEYETDVTLIPQPGTEGNGNGNDKVMTS

SEQ ID NO: 53861 - protein, 307 aa, Zea mays
  Clone ID: UC-ZMFLB73047B08_FLI.pep
EIFRIHITQSRPDIYGPAFVEVENMFGLSNFVPILFGSKQLCSELERIHDALCGSYSENNVLGELLSASSDPHEHRKLCSSVMSGFLIDIGWLIRKPTPDEFKSVLSSTNIQRWICMLKFLIQNDFINVLEIIVKSMDSIMGSEVLSNLERGRLEDHVTAFLGYVSHARNIADRRANHDEKTQIETRGIIVTSPNQPNLGASVPFASENTDFGGDNKLNSTDEEEIMPLVTRDVSHRHCCQPDTTVRWLKPSLIVTYPGGATRMRLVTTVAVAAVLCFTACLVLFHPHGVGVLAAPVKRYLSSDSAS

SEQ ID NO: 53862 - protein, 204 aa, Zea mays
  Clone ID: LIB3061-058-F7_FLI.pep
SSSTPDWRTRHHEGADRCPCSPGARCERRLQYKRRLWLPDTTVSSTASVLYAASVLSAAAAAAAAMAIPHSTTAAKPVPAVRILRRRQRRQPVPGPVRRVPEAPVQPGGDALRLATVPGAAAAVLPPDQAGGAAAPVPGDIRCGPAVLPAAAAAGRARGADGGPGSAAADGDVRSAAAAARSLPLQRSCRRCLLLRKLCTVVIM

SEQ ID NO: 53863 - protein, 163 aa, Zea mays
  Clone ID: UC-ZMFLB73177H11_FLI.pep
FILKAGKALSSKKAEVRVQFKDVPGDIFRSKKQGRNEFVIRLQPSEAMYMKLTVKKPGLEMATEQSELDLSYGMRYQNVKIPEAYERLILDTIRGDQQHFVRRDELQAAWKIFTPLLHDIDDGKLKALPYEPGSRGPKEADELSARVGYVQTHGYIWVPPTLA

SEQ ID NO: 53864 - protein, 383 aa, Glycine max
  Clone ID: 700650775_FLI.pep
HQQPLSLPSLQQNQFSGDISGQVPAASPATRHGNSMNAESPPGLLMSVSCLSDYDLLCGEDSSGILSGESPECSFSDIDSSPPPPSPTTEDCYSIASFIEHERNFVPGFEYLSRFQSRSLDANAREESVGWILKVHAYYGFQPLTAYLAVNYMDRFLDSRRLPETNGWPLQLVSVACLSLAAKMEEPLVPSLLDLQIEGAKYIFEPRTIRRMELLVLGVLDWRLRSVTPLCFLAFFACKVDSTGTFIRFLISRATEIIVSNIQEASFLAYWPSCIAAAAILTAANEIPNWSVVKPENAESWCEGLRKEKVIGCYQLMQELVINNNQRKLPTKVLPQLRVTTRTRMRSSTVSSFSSSSSTSFSLSCKRRKLNNRLWVDDKGNSE

SEQ ID NO: 53865 - protein, 60 aa, Glycine max
  Clone ID: 700892854_FLI.pep
KASFERFRERLKKLETLIDERNGNTKLKNRNGAGIVPYELLKPFSKPGVTGMGVPCSISI

SEQ ID NO: 53866 - protein, 302 aa, Zea mays
  Clone ID: UC-ZMFLMO17174B09_FLI.pep
RSRSCPSSSTSPGCIFLMTLLHYVPPRSSAARSLAPLRRSPVPFPQARVPLLLFPYRAAPSLAEFPCALWSSPLQAPMAPSSPSSDDAQLPAFPLSSLFPGHASSEPSLLPISIAAPLKLGRELSSSLVRGSLLAPGAARAALRSALLLPARVNQLGPSALTFACRSASSPARPLPPAKVVAPISLALARIPLGALTPAPIAASSLPISLLGKLPCELQLGFFSLAARFLRLSPVRSTSGSGVELCFGVLGGWSGADGFFDGTPGGGTLLLGGSDSFGNSNIGARQVLNKTPETKVRRHRSR

SEQ ID NO: 53867 - protein, 117 aa, Zea mays
  Clone ID: UC-ZMFLMO17179B03_FLI.pep
AWGNTKEESFSCAINKQIKIIHIFRIQESHFPNHEYIILLMTGLLQMFRCERILWHGDGIAQLSYFRGGSQFSDHRRVCRTFTVEVKRLDGRSMRRPSNTNIRIDAEELLPTRDKHN

SEQ ID NO: 53868 - protein, 350 aa, Zea mays
  Clone ID: UC-ZMFLMO17180C01_FLI.pep
PKSHITLESHLPAHERDGFHHHHLPRHLAGRGSVRGAGTVLLTARHPRAAEREAGAGQPGVAVDVDAGVAQLLRVGPPPMQRRRAREQRLHRRRGRRARPDPVGGGRADGAHVADAVPAAGADGRHPGLPHGAVEPPVPHRLPHQRVRRHPGVAGAAARPRLRGPLQQPADGRHPGGVRRPAQPPVAGPPAQPADGPHPGGAGAGAVPVAGPVLQPAHGPHPARRRARRDQHRRPLPQQAHRRPLPPVRRRPAHRQGGPVVELPRLRPQQAGVPAGAHVPGPVPQPHPRHRAAVAGAPVHAAEAGPQLQPPVRPAPQGARRHQARVQAVRAQPVQQRDPARGMPGPGVSE

SEQ ID NO: 53869 - protein, 216 aa, Arabidopsis thaliana
  Clone ID: LIB22-061-G2_FLI.pep
NDQFLQNNSLFAMATEQEAEVGTETSSVSGRFLRNRDLYLFLPFLLGFSDQESSNGDDDDVASSRERIILVNPFTQGMIVLEGSSGMNPLLRSLLESREEGRPPASKASIDAMPIVEIDGCEGECVICLEEWKSEETVKEMPCKHRFHGGCIEKWLGFHGSCPVCRYEMPVDGDEIGKKRNDGNEIWVRFSFNDGRRIRDFSAQDGGNSDGVESEN

SEQ ID NO: 53870 - protein, 224 aa, Zea mays
  Clone ID: UC-ZMFLMO17180D02_FLI.pep
RRKNMASSPSLRPTDRLRRPPASPAFCSFSAVSLRGLVSLSSASRVLSVSFRQRLLTAVRSSRDPGEVIDVASGEGTELPGGSTGPRKDGKETAKSFSTKELLEKLKRYGVAGVLSYGLLNTVYYVTAFLLVWFYVAPAPGRMGYGAAVERFVKLMAMVWAGSQVTKIFRAGGALALAPFVERGLKWFTVKFNFKSEGKAFMTIVGLCFAVAALMFFGLTILWA

SEQ ID NO: 53871 - protein, 154 aa, Zea mays
  Clone ID: UC-ZMFLMO17277D05_FLI.pep
HVTVTSCGRRANSDTDHAHVLKQLSRSSWQSVISALVADGAVDEVAALGDGDGHLGLDPGLLGRLGQHDGAEALGALLPDGVHRRAAAVGRRRAGVLRRGRARRQLQRHPVRRRRPALARAADGHEACSGRDQGEDEQREALHLGSLVSYSHCH

SEQ ID NO: 53872 - protein, 829 aa, Arabidopsis thaliana
  Clone ID: LIB23-028-C3_FLI.pep
LKRRRINSVVRRIESSEVMEEPECPVCLQSYDGESTVPRVLACGHTACEECLTNLPKKFPDTIRCPACTVLVKFPPQGPSALPKNIDLLRLFPSISKLKLEPGRNFEKVVEFVTRSWSDDFYATWKDRILVHDAVSVEIRESESSDFDSSSRLCGSLRDDSKVSLLRVASFEHGDCDSVLKYSYVQRMMSCLWGMREEERDELDAIISVKQRGVSKVFGLWGDLKNGVLYLVGEKLIGFSLEEFDSLEDETLRLGIIGMQICEALLNLHKEGLITGCLSVSCVKFDEYENAYVDLIELIETGRNVYRIIAEETSSLRKPVGASEMGLIFVGLQQKGIFISSEVLFEFLKEQNMLIKNTSSKSFVSHNSDVWPVCFLLLKLRLGKRCTEEFIESVNCVDGKGCEEGIEDILVLYTGITEKLSLESELQGKFKSMVEILRQCCCLDPQARPVLTDLWKCIRELVMKPRFNSMSRLHKTIYGKRKQFCLAQSELCRLVEVESKEVDKELPGMKIGDEAEEGKVDIDFPGRVSEGKVRSKDMRGHQDSVTGLAVGGGFLFSSSYDRTILIWSLKDFSHVHTFKGHQDKVMALIHIEGTEPVCVSGDGGGGIFVWSTTFPLEEQPLRKWYEPKDWRYTGIHALAYSEYGHVYTGSGDNTIKAWSLQDGSLLCTMSGHKSVVSTLVVVNGVLYSGSWDGTVRLWSLSDNSLLTVLGEETPGIVRSILSLAADDQTLVAAYQNGDIQIWRDDTLMKSMKIQNGAILSIAVNGKWLFTGGWDKTINVQELSGDEISVNCAHVGSIPGSSVITSLLYWEGKLFAGFADKTIKVYYFGR

SEQ ID NO: 53873 - protein, 172 aa, Zea mays
  Clone ID: UC-ZMFLMO17297F11_FLI.pep
KKLCSSLLQVREKKDSKSIQIIISAQERFRSSGKYYFPSPFYLYPLASSSLFLFLLFGREDPALLSMFSLSSASASSSSSSASPSSSSASSSPSSSSSPSPSSSSSSSPSSSSPSSSPSGPSSPSSSSSSSSSSSSVSKRSLPSASAPSRYLRLGISAKTSSLYPSTCSSAP

SEQ ID NO: 53874 - protein, 98 aa, Zea mays
  Clone ID: UC-ZMROB73052E05_FLI.pep
QGWGMNDRGVSYTFGADKVSEFLQKHDLDLICRAHQVVEDGYEFFADRQLVTIFSAPNYCGEFDNAGAMMSVDETLMCSFQILKPAERKNKFMGSNKM

SEQ ID NO: 53875 - protein, 72 aa, Zea mays
  Clone ID: UC-ZMROMO17023B10_FLI.pep
LRLRMHACWISYCSCHIFAENKATPLSISSRGRGSMHASQSMFYFPFFQLLHTLSLDLPPSMPSEALECIHD

SEQ ID NO: 53876 - protein, 114 aa, Zea mays
  Clone ID: UC-ZMROMO17089D03_FLI.pep
KAVLGSSFGVVGEGENAEPSKSNVEESGAKKEGAKHETSDSSKDSDYSIVSRQRTAEEEDLEWDEIEDLGEHEEKKGGIQTSSPALKEELRKRLSIAEDDEDLSWDIEDDDDNA

SEQ ID NO: 53877 - protein, 95 aa, Zea mays
  Clone ID: UC-ZMROMO17100E05_FLI.pep
LRRATTLLNMQLACQKSMESAGTAQMSFTHPPLIATLHIERLIWSYRAACTSHQWSLPFRNSGMYLLPMELAFPHQCYALPMELAFPQQCMVVTK

SEQ ID NO: 53878 - protein, 490 aa, Arabidopsis thaliana columbia
  Clone ID: LIB3175-024-F6_FLI.pep
DSLSMDYERIGKTQVTSSGGGFSPGKLRSMLLLGVDRKKNEEEESTPTMRSGSNQIDDPRVYVASGLDDCKDVDVVSEITDCSTSGIARSISLGLQEYSDYDNVNEIKSVSASSVFEFQKTEKEKVNQRMPIRSFSKPAPSKWDDAQKWIASPTANRPKTGQVQVPGSKKGPSFGRQSSMKIVEVAEHRVVEEPDTKRIDVSQVKKDMGNKFGSWEVDSYTTVDSYVKPVLMVENSIVESATEVNLSRHDSSVATAFAQPPSTARSVSMRDMGTEMTPIASQEPSRNGTPIRATTPIRSPISSEPSSPGRQASASPMSNKELSEKELQMKTRREIMVLGTQLGKFNIAAWASKEDEDKDASTSLKTKASLQTSKSVSEARATAWEEAEKAKHMARFRREEMKIQAWENHQKAKSEAEMKKTEVKVERIKGRAQDRLMKKLATIERKAEEKRAAAEAKKDHQAAKTEKQAEQIRRTGKVPSLLFSCFSFCS

SEQ ID NO: 53879 - protein, 217 aa, Zea mays
  Clone ID: UC-ZMROMO17111C06_FLI.pep
LLAVPLAYVGVSFVLAVVRTVRRFTSPHTKKKRRVSKNIFLLKSLDDLFQKGREAINYPALQDLMQKTGFDMDDVVRKYIRYTLNEKQFSPDVVVDLIHLRKASMLEDAEVAEILNEISRRIVREKGPVVMDLSGFTEQGFKRKLAVQALFGKILYLSELPEFCSRDSSLVVKEIFGVTDEDADSLRIHTLSATGDIESIQKMVDDLDLEQGPPSSS

SEQ ID NO: 53880 - protein, 114 aa, Zea mays subsp. mexicana
  Clone ID: UC-ZMROTEOSINTE004G02_FLI.pep
MCEISKIRCAELVFLKSYHHLPHCSFQIIHYCRAIISRRMHNALRDFTPPLTMSKLLLDVKILTLQKILPGRQLHLCFPLLHQFRQKGLTVWCPKLQLVLLFILKKLGRGEKDH

SEQ ID NO: 53881 - protein, 225 aa, Arabidopsis thaliana
  Clone ID: LIB24-056-G6_FLI.pep
NYSLTQPRHFCKTCRRYWTRGGALRNVPVGGGCRRNRRTKSNSNNNNNSTATSNNTSFSSGNASTISTILSSHYGGNQESILSQILSPARLMNPTYNHLGDLTSNTKTDNNMSLLNYGGLSQDLRSIHMGASGGSLMSCVDEWRSASYHQQSSMGGGNLEDSSNPNPSANGFYSFESPRITSASISSALASQFSSVKVEDNPYKWVNVNGNCSSWNDLSAFGSSR

SEQ ID NO: 53882 - protein, 117 aa, Zea mays subsp. mexicana
  Clone ID: UC-ZMROTEOSINTE008B11_FLI.pep
IMSLSCMRGGKGRCGLSKLFLLPAILPEEGEKTDHGSASPWLEQSPRIGLDLSIHETCMRSPLPLFSLFFFFFTSTTSIYLSLFFSSLFFTFTFFGQRGGKRSNFLEGEGRYSSNYQ

SEQ ID NO: 53883 - protein, 128 aa, Zea mays
  Clone ID: LIB3060-049-H11_FLI.pep
ENKCERFDLQGFSLYQCYRRWATKRTAGSTKNGRDSNPKYLGVKKFGGEKVLPGNIIVRQRGTRFHPGNYVGMGKDHTLFCLKEGNVRFERNKLSGRKWVHVDPVAGHDLHPIYADGFATTSDTEPMQ

SEQ ID NO: 53884 - protein, 146 aa, Zea mays subsp. mexicana
  Clone ID: UC-ZMROTEOSINTE028B11_FLI.pep
PRPRAGGQCPRPAGRSRQEPAAGAAAAAAAFFVEPDGGEAPARGHRLPPGRRDAGARDRLLGHPGLRALRRPRRLASRVAFFGLPTLSQLLAHWLCFFSSPSCVSTVIKGSTVVNTFLRISIVSLFVIPVKVEGLLQACHSIFAIS

SEQ ID NO: 53885 - protein, 55 aa, Zea mays
  Clone ID: LIB3061-005-D9_FLI.pep
ITKWLQVTTFTSYNKITIYIIGVITKESDSKKLQFKMYKTFIGFQIHASLSDNPQ

SEQ ID NO: 53886 - protein, 122 aa, Zea mays subsp. mexicana
  Clone ID: UC-ZMROTEOSINTE029E09_FLI.pep
PPAAGSQAQAHEAFAFLSGGTAEGREPNEQASHQGRLLGPEWMGFMLRVRLASFFVGAAAAAAGGGYFLYKDYKLANDSMALKVKCLQDSTDTRYEALEKRLAALEGQQSTEAAPDVDTPSD

SEQ ID NO: 53887 - protein, 187 aa, Zea mays subsp. mexicana
  Clone ID: UC-ZMROTEOSINTE031C03_FLI.pep
LKVASTYLGPLAANNEALLKPLKETLVTLIQPNEDVVMNALSLPVLASSVQVAMSRRLGIEEPQLMKIVRTTIHTHTEWFKLQMCKDHFEHLLKIDSLKEVDPSLGSHRKSKVLTDECANGSSQMTTCSSGKVPDEGSSPQVSSEVACDENAILKVMEFLALPRADAIQLLMQYNGNAEAVIQQIFQ

SEQ ID NO: 53888 - protein, 88 aa, Zea mays
  Clone ID: 700472059_FLI.pep
KNHKQAMPQLTDRTKLPNIVDPVIRDTMDPKHLYQVAAVAVLCVQPEPSYRPLITDVLHSLVPLVPVELGGTLRVAEPPSPNLKHSAC

SEQ ID NO: 53889 - protein, 143 aa, Zea mays subsp. mexicana
  Clone ID: UC-ZMROTEOSINTE035G04_FLI.pep
FKESPPSKQSIAAFKEYPPPSKQSIAVFKESPPLEETSPKEAVVLSDRGLFSVQNHQLSHVTEDVQNLKSKLNNLESKLEEAGKMIIRLKEESRSTTQERDKLQQEMVFLRKKGTPRSQVGFPLLFVVYVALLGTLLGYLLRL

SEQ ID NO: 53890 - protein, 188 aa, Zea mays; identical to SEQ ID NO: 47821
  Clone ID: 700552086_FLI.pep

SEQ ID NO: 53891 - protein, 372 aa, Zea mays subsp. mexicana
  Clone ID: UC-ZMROTEOSINTE104H09_FLI.pep
QELLRGAKDVMSLAQGVVYWQPPESAMDKIEKIIREPIVSKYGSDDGLPELREALLEKLSRENKLTKSSVMVTAGANQAFVNLVLTLCDAGDSVVMFAPYYFNAYMSFQMTGVTDILVGGCDPKTLHPDVDWLEKVLKENEPIPKLVTVVNPGNPSGAFIPRPMLERISDLCKNAGAWLVVDNTYEYFMYDGMEHYCLEDAHIVNLFSFSKAYGMMGWRVGYIAFPNEADGFHDQLLKVQDNIPICASIIGQRLALYSLEAGPEWIKERVKDLVKNRALLVEALSPLGEDNVKGGEGAIYLWAKLPDSCSDDFEAVRWLANKHGVAVIPGSASGGPGYIRVSFGGLKEEDTRLAAERLRRGLQELVTDGMVQ

SEQ ID NO: 53892 - protein, 165 aa, Zea mays; identical to SEQ ID NO: 47795
  Clone ID: 700616890_FLI.pep

SEQ ID NO: 53893 - protein, 86 aa, Zea mays
  Clone ID: UC-ZMFLMO17041D11_FLI.pep
ALGCLQALVSQILSTIGSILVKVRCQCQFTHHCHCSFFLHLPTLCIKFLLIYFIVRIYDVTAMVKVTNHVGAHTPRVCTYLRRTRR

SEQ ID NO: 53894 - protein, 155 aa, Zea mays
  Clone ID: LIB189-009-H5_FLI.pep
YFLNLFGFHNLGLTMFPWNRLHNITYTLKLSTETHQCSYQICVAVASVHKDRQLVSHKYAGNPTIPAENLLVILRILTSNPVYTFQTRSQTEKGVARPAGNLTLLTIRGTVTMILSSKHPYQTRVGCYNLERDLSGHPPSKAWSSTSSMRFTSRI

SEQ ID NO: 53895 - protein, 256 aa, Zea mays
  Clone ID: UC-ZMROB73066B05_FLI.pep
GLAPHPPPHQPSAMALAARLVSRSRQLHSVQAAFANGGATQVRSFAKDAAPADRPPVSGDDLLKGIFFEVKKKFETALGVLKKEKITIDPDDPAAVSRYAQVMKTVREKADLLSDSQRIKYTIETFTKGIPDARTYLNTLQQLRIKSGLIDHIGIEPLMMEALEKIEKDIKKPLLRSDKKNMATLMAEFDKINAKLGIRKEDLPKIEKELELEIAKSELTELKKECVEAMETQLKREEFQDEEMPDVRKLDIRNFL

SEQ ID NO: 53896 - protein, 623 aa, Zea mays
  Clone ID: LIB3060-049-B7_FLI.pep
LQLHAMAMATTSPATVQPSSYKHTSRGAARCCPPPLLSWKTRSFGQQVTTRATAASSRGQPAGVALAGGEEGDSIRRLQNGSDVRGVALEGEKGRAVDLTPLAVEAIAESFGEWLREEELRLRGQEPEQLRVSVGRDPRLSGPRLSAALFAGLARAGCSVFDMGLATTPACFMSTILPRFNYDGSIMMTASHLPYTRNGLKFFTKRGGLTSGDVENICDRAAHKYVARKTGVGGGGRGTPPVVMRVDLMSAYAQHLRDIIKQRVAHPTHYDTPLRGFKVVVNAGNGCGGFFTWDVLEKLGADTTGSLHLEPDGRFPNHIPNPEDATAMSLTRGAVLAQGADLGVVFDTDVDRSGVVDAGGAAINGDRLIALMSAIVLGEHPGTMVVTDARASDGLTRFVESRGGRHCLYRVGYRNVIDKGVQLNADGVETHLMMETTGHGALKENYFLDDGAYMVVKIIIEMVRMKLAGVEGGVGSLIRDLQEPAESVLLRMDVMGEPKDAKERATHAVEAFKNYIQEDKLFGWVLDDCGDCSVAEGCLTDTNNDPINVDAHMYRAKLYDENQRAVGMVHIRQSVHNPNIALNMQSYAPGGCKSMAKDLLERFLLASGLNEFVDISQVEKFVQ

SEQ ID NO: 53897 - protein, 108 aa, Zea mays subsp. mexicana
  Clone ID: UC-ZMROTEOSINTE092F06_FLI.pep
GMYRHYTTGTSKPYVVGTLIHISYNFTHTPAELYSSVSWSWSHGLVHFASSGACAASSSALSETTAFVPLSFIPGLSIQARQNEIAKKKLATIKLKPLQSKGVSSEMK

SEQ ID NO: 53898 - protein, 122 aa, Zea mays
  Clone ID: UC-ZMFLMO17093B03_FLI.pep
CQPEQFIDDIQVQAWEICENQYSMELLHAITYHKLSSIKFRNHTPLISVLRFPIVVKQILCHKAMLGTVRACLGAETQSPRDPGLFSGQAIHVYAILISHLVLHRALFSYSHPTIGRDQEKF

SEQ ID NO: 53899 - protein, 141 aa, Zea mays
  Clone ID: 700243938_FLI.pep
WLGEGVSSVEQAEAHVVIRLLLGLFLLLLDSRGSSSRSTTSRCGSSNWSSSATRSNGEDEVLDVALLQELGEEGRPVGLDLDVGRLHDRGDLLGGDGDAIVAEDESGVGAGKLAGGHGFVRLPLTGRRICGIRLREAVRRH

SEQ ID NO: 53900 - protein, 68 aa, Zea mays
  Clone ID: UC-ZMFLMO17286F06_FLI.pep
HQNTNQSAETNAWRTMRHQLVKNTDRLLYCFPSLDRLCVEDWNFTWPLFTRTKHASYKVRVYLSCLDS

SEQ ID NO: 53901 - protein, 103 aa, Zea mays
  Clone ID: 700101417_FLI.pep
LDKIQIQEKPVPSKILKKHIVCCNSRTGSTTFSHTAQQRTCPRDRTRPPPGSRQISAHASPSLLWSSPRHLHIPKTPFQHQQLGHRWGQVVELQLSPSYLSKC

SEQ ID NO: 53902 - protein, 353 aa, Zea mays
  Clone ID: UC-ZMFLMO17292D07_FLI.pep
KSDRDKSHGSVGPIVIIQGSSTVKGLEGAELLDTLVTYLWRIHGVDYYGMSETNEPKGLRHVKADARTYNGASSNGAEWENKLDSFWQDRIQGQDPLEMLKGKEKIDGAATEVLDPYVRKIRDEKYGWKYGCGAKGCTKLFHAAEFVQKHLKLKHADLVVDLTSKVREDIYFENYMNDPKAPGGTPIMQQPAPRGKGRQRPPIESRLRDERGNHRFDRNVDSPKRDGSGENPDDPIYDSFGDPAMHGAFPPDIPAPPVLMPVPGAGPLGPFIPAPPEVAMHMLRDQGAPPPIEPTGGPHPRKAGTGGGPSMRGPSPIFGAPSPHHMHDPRRIRSYQDLDAPEDEVTVMDYRSL

SEQ ID NO: 53903 - protein, 187 aa, Zea mays
  Clone ID: UC-ZMFLMO17333B01_FLI.pep
TQLAQEVAEKHSAVEGDLVVNPSDDHFWFGRPKIVLYLIHFILFQNAFEIAFFFWILTTYGFNSCIMDHVPFIVPRLVVGAIIQLLCSYSTLPLYAIVTQMGTFFKKEIFDEHVQQSLLGWAQKAKKRKALRNNGNGSNGAAAGSSHPSATARLELMRRAVALEEGSAGGNGSEASAAELHDTGPKL

SEQ ID NO: 53904 - protein, 422 aa, Homo sapiens
  Clone ID: LIB4119-002-G2_FLI.pep
FTGVASGSTGSTGSCSVGAKASTNNESSNHSFGSLGSLSDKESETPEKKQSESSRGRKRKAENQNESSQGKSIGGRGHKISDYFEYQGGNGSSPVRGIPPAIRSPQNSHSHSTPSSSVRPNSPSPTALAFGDHPIVQPKQLSFKIIQTDLTMLKLAALESNKIQDLEKKEGRIDDLLRANCDLRRQIDEQQKLLEKYKERLNKCISMSKKLLIEKSTQEKLSSREKSMQDRLRLGHFTTVRHGASFTEQWTDGFAFQNLVKQQEWVNQQREDIERQRKLLAKRKPPTANNSQAPSTNSEPKQRKNKAVNGAENDPFVRPNLPQLLTLAEYHEQEEIFKLRLGHLKKEEAEIQAELERLERVRNLHIRELKRINNEDNSQFKDHPTLNERYLLLHLLGRGGFSEVYKVMYVLFCFFYTNVARI

SEQ ID NO: 53905 - protein, 488 aa, Homo sapiens
  Clone ID: LIB3119-049-F10_FLI.pep
PPLRPSDFLPFGALLFLMLASPATETTVLMSQTEADLALRPPPPLGTAGQPRLGPPPRRARRFSGKAEPRPRSSRLSRRSSVDLGLLSSWSLPASPAPDPPDPPDSAGPGPARSPPPSSKEPPEGTWTEGAPVKAAEDSARPELPDSAVGPGSREPLRVPEAVALERRREQEEKEDMETQAVATSPDGRYLKFDIEIGRGSFKTVYRGLDTDTTVEVAWCELQTRKLSRAERQRFSEEVEMLKGLQHPNIVRFYDSWKSVLRGQVCIVLVTELMTSGTLKTWLWAWSVKPITSQWPVQYVNGLLPSSESVRSCVKQGNWRHSHQSQDLHQQLCPWPPVPPVSSPLSLRSQRQTSTSPSFSATPATHLPLAFALSIPRSGPGSDFSPGDSYASDAASGLSDVGEGMGQMRRPPGRNLRRRPRSRLRVTSVSDQNDRVVECQLQTHNSKMVTFRFDLDGDSPEEIAAAMEEPAPLPALPVPLPDPSNGMY

SEQ ID NO: 53906 - protein, 228 aa, Zea mays
  Clone ID: 700355634_FLI.pep
VAVAAMVAVAAALPLLACGGYAECYDYCFKDCISKDKSMRDYCSYACDKTCAPDARPRLRDQCRPAEASARRRRCWRCRAARASGVTGPPIPREAGRSRTGGGVARPSIPREAEAGRSRPGGGGVAWPPVPQDARRGQAGRGAGSRIRRVSGMGPRRPLIVVRRRRRSAANDGECHMPMLSCGPRTLLSATSTRESVRVMCVTQCRLINDAHFRADPGMLSAESRALF

SEQ ID NO: 53907 - protein, 737 aa, Homo sapiens
  Clone ID: LIB3119-019-H2_FLI.pep
IKDRKKSPIINESRSRDRGKKSRSPVDLRGKSKDRRSRSKERKSKRSETDKEKKPIKSPSKDASSGKENRSPSRRPGRSPKRRSLSPKPRDKSRRSRSPLLNDRRSKQSKSPSRTLSPGRRAKSRSLERKRREPERRRLSSPRTRPRDDILSRRERSKDASPINRWSPTRRRSRSPIRRRSRSPLRRSRSPRRRSRSPRRRDRGRRSRSRLRRRSRSRGGRRRRSRSKVKEDKFKGSLSEGMKVEQESSSDDNLEDFDVEEEDEEALIEQRRIQRQAIVQKYKYLAEDSNMSVPSEPSSPQSSTRTRSPSPDDILERVAADVKEYERENVDTFEASVKAKHNLMTVEQNNGSSQKKLLAPDMFTESDDMFAAYFDSARLRAAGIGKDFKENPNLRDNWTDAEGYYRVNIGEVLDKRYNVYGYTGQGVFSNVVRARDNARANQEVAVKIIRNNELMQKTGLKELEFLKKLNDADPDDKFHCLRLFRHFYHKQHLCLVFEPLSMNLREVLKKYGKDVGLHIKAVRSYSQQLFLALKLLKRCNILHADIKPDNILVNESKTILKLCDFGSASHVADNDITPYLVSRFYRAPEIIIGKSYDYGIDMWSVGCTLYELYTGKILFPGKTNNHMLKLAMDLKGKMPNKMIRKGVFKDQHFDQNLNFMYIEVDKVTEREKVTVMSTINPTKDLLADLIGCQRLPEDQRKKVHQLKDLLDQILMLDPAKRISINQALQHAFIQEKI

SEQ ID NO: 53908 - protein, 105 aa, Homo sapiens
  Clone ID: LIB4117-012-G11_FLI.pep
KQVWNWVTGRGWNSLKGSEEDRKMWESLELPRYLLNGFAQNADSNIDNKIQAEVVSDGDEKLVGNWSKGDSCCVLAKRLAASFPCLRDLWNFELERDDCETWSQR

SEQ ID NO: 53909 - protein, 154 aa, Zea mays
  Clone ID: UC-ZMFLB73067H10_FLI.pep
GDSPPPRLVFAMHHVHERLRRSNAPTLERLQRHSNATSASAAPPNNSNATPALAAVELYCSQLRHPAPAALGTFDSGFCRTRSATSWTRTSTPTAGSPCRASTPCSSRRTTPRPRRPSTRTGSLLPSSPTRRRSSSGEFIYCSTSVLANVKTWR

SEQ ID NO: 53910 - protein, 151 aa, Homo sapiens
  Clone ID: LIB4119-048-G2_FLI.pep
YHPIAPAKSRPSDDLPTNWPPQAAVCSTEQTKNKTLKPYDQRRISANHHLPLSVPSKLHTSLPAEDDSVHTQSSAVLPHETVTFQMSLSLGLDLRPGSLRKQPQLNSSSSARVGKSLGAVRLPLGLRTLLLEYEIPGNWYRTNLEALQLAS

SEQ ID NO: 53911 - protein, 222 aa, Zea mays
  Clone ID: UC-ZMFLB73274E11_FLI.pep
SMITALRLYGADISGRGLVDALQRRPPLPVPRTGAPAAVVLPRQLIKAGVQGCLVVVVLLLGRGATRHALALPRLQQLLLRFPLLVLLPRLHRLRHLLGGDEAVHVTEEQRLLGLEQLDAREAHGAPLPARGVLPVLGDAERDERDVVARVGAHDLGGAGGPVEPLHPPARVLEQHRRHLRRLAVPHALLRRLAGVLAGWVAHASEPGRGAATTTAIPKEKE

SEQ ID NO: 53912 - protein, 566 aa, Homo sapiens
  Clone ID: LIB3063-072-D3_FLI.pep
AAGTYAWMAPEVIKASTFSKGSDVWSFGVLLWELLTGEVPYRGIDCLAVAYGVAVNKLTLPIPSTCPEPFAQLMADCWAQDPHRRPDFASILQQLEALEAQVLREMPRDSFHSMQEGWKREIQGLFDELRAKEKELLSREEELTRAAREQRSQAEQLRRREHLLAQWELEVFERELTLLLQQVDRERPHVRRRRGTFKRSKLRARDGGERISMPLDFKHRITVQASPGLDRRRNVFEVGPGDSPTFPRFRAIQLEPAEPGQAWGRQSPRRLEDSSNGERRACWAWGPSSPKPGEAQNGRRRSRMDEATWYLDSDDSSPLGSPSTPPALNGNPPRPSLEPEEPKRPVPAERGSSSGTPKLIQRALLRGTALLASLGLGRDLQPPGGPGRERGESPTTPPTPTPAPCPTEPPPSPLICFSLKTPDSPPTPAPLLLDLGIPVGQRSAKSPRREEEPRGGTVSPPPGTSRSAPGTPGTPRSPPLGLISRPRPSPLRSRIDPWSFVSAGPRPSPLPSPQPAPRRAPWTLFPDSDPFWDSPPANPFQGGPQDCRAQTKDMGAQAPWVPEAGP

SEQ ID NO: 53913 - protein, 490 aa, Zea mays
  Clone ID: UC-ZMFLB73152E05_FLI.pep
PPTPNTLNPSLAAPATASALDLQQRIGLANTLSSGSMSEPAQPSGGEGDVNTLRILVATDCHLGYMEKDEIRRFDSFQAFEEICALADKNKVDFILLGGDLFHENKPSRSTLVKTIEILRRYCLNDQPVKFQVVSDQTVNFPNRFGKVNYEDPNFNVGLPVFTIHGNHDDPAGVDNLSAIDILSACNLVNYFGKMDLGGSGVGQIAVYPVLVKKGMTSVALYGLGNIRDERLNRMFQTPHSVQWMRPGTQDGESASDWFNILVLHQNRIKTNPKSAINEHFLPRFLDFIVWGHEHECLIDPQEVPGMGFHITQPGSSVATSLIDGEAKPKHVLLLEIKGNQYRPTKIPLRSVRPFEYAEVVLKDEADVNSNDQDSVLEHLDKIVRNLIEKSSQPTASRSEPKLPLVRIKVDYSGFSTINPQRFGQKYVGKVANPQDILIFSKSAKKRQTTGDHIDDSEKLRPEELNQQTIEALVAESNLALSQHIIWICA

SEQ ID NO: 53914 - protein, 1061 aa, Homo sapiens
  Clone ID: LIB3080-053-D5_FLI.pep
NFALFKLEEREKKVYPKAVERSSTFENKASMQEAPPLGSLLKDALHKQASVRASEGAMSDGPVPAEHRQGGGDFRRAPAPGTLQDGLCHSLDRGISGKGEGTEKSSQAKELLRCEKLDSKLANIDYLRKKMSLEDKEDNLCPVLKPKMTAGSHECLPGNPVRPTGGQQEPPPASESRAFVSSTHAAQMSAVSFVPLKALTGRVDSGTEKPGLVAPESPVRKSPSEYKLEGRSVSCLKPIEGTLDIALLSGPQASKTELPSPESAQSPSPSGDVRASVPPVLPSSSGKKNDTTSARELSPSSLKMNKSYLLEPWFLPPSRGLQNSPAVSLPDPEFKRDRKGPHPTARSPGTVMESNPQQREGSSPKHQDHTTDPKLLTCLGQNLHSPDLARPRCPLPPEASPSREKPGLRESSERGPPTARSERSAARADTCREPSMELCFPETAKTSDNSKNLLSVGRTHPDFYTQTQAMEKAWAPGGKTNHKDGPGEARPPPRDNSSLHSAGIPCEKELGKVRRGVEPKPEALLARRSLQPPGIESEKSEKLSSFPSLQKDGAKEPERKEQPLQRHPSSIPPPPLTAKDLSSPAARQHCSSPSHASGREPGAKPSTAEPSSSPQDPPKPVAAHSESSSHKPRPGPDPGPPKTKHPDRSLSSQKPSVGATKGKEPATQSLGGSSREGKGHSKSGPDVFPATPGSQNKASDGIGQGEGGPSVPLHTDRAPLDAKPQPTSGGRPLEVLEKPVHLPRPGHPGPSEPADQKLSAVGEKQTLSPKHPKPSTVKDCPTLCKQTDNRQTDKSPSQPAANTDRRAEGKKCTEALYAPAEGDKLEAGLSFVHSENRLKGAERPAAGVGKGFPEARGKGPGPQKPPTEADKPNGMKRSPSATGQSSFRSTALPEKSLSCSSSFPETRAGVREASAASSDTSSAKAAGGMLELPAPSNRDHRKAQPAGEGRTHMTKSDSLPSFRVSTLPLESHHPDPNTMGGASHRDRALSVTATVGETKGKDPAPAQPPPARKQNVGRDVTKPSPAPNTDRPISLSNEKDFVVRQRRGKESLRSSPHKKAL

SEQ ID NO: 53915 - protein, 313 aa, Zea mays
  Clone ID: UC-ZMFLB73174B05_FLI.pep
AREEEMTSLSITVMTLNLHEGEQPSESPNSWEKRRDICVSVITSYSPTILCTQQGLRWQLDYLQQCLPGYEQFGISRKGSQDNTDEYCTIFYEKEKVELTEGGTFWLSESPSVPGSISWGAKAPCIATWATFQLKRLEPPGFSFQIVNTNLDEVSPRARRRSALLTWQHIASLPPNLPVIYCGGFNTQKESMTGRFLLGRSREHGVVGDMRDAWPNARVRKNVSLIHTYHGFKGEKQGALEFLKLIFRALCLCWDRQTQDLHIDWILFRGRPLVPALCEVINDNIDGVYPSSHFPIFAEFLLPRSVRLAETPS

SEQ ID NO: 53916 - protein, 105 aa, Homo sapiens
  Clone ID: LIB4119-106-E6_FLI.pep
TFKILTTFLWALKMIKSASIATFKRLLFPFYIHYANFTSILFSHTTSQPPQKRKREKSKKRMEQKKNKKAKKEQRNRIKKRDHRFEKEKQFNSANSPKQCEYILK

SEQ ID NO: 53917 - protein, 606 aa, Zea mays
  Clone ID: UC-ZMFLMO17139C05_FLI.pep
RRRRHTIYHGHRRASPHRPTVRGGLFTDLRFPSTIHRPSSSPSTATAFRLRDWDPHSPSSSSSARSPSSPSASSSSSSTSASARRLSPLARFLLDALRRHQRWGPPVVADLSKLRRVPPSLVAEVLTARPPPPPPLALPFFLWAGRQKGFRHCFPAFHALASLLSAAGLPAAADQLPDLMRAHGRPVSHPQLTLLVRLHTAARRPLRALHALRRFRHEFDVQPQVHACNRVLGALAAAGHVEDALKLFDEMSEGGVQPIPVTFAIMVRALAHAGMVDRLLEMIGRMRNEVCRPDVFVYTALVKTMVRRGYMDGCIRVWDEMEKDGVEPDTMAYATMVGGLCKAGMVEEAAELFKEMRSKGLLVDRMVYASLIDGYVAVGRVGDGCRLLNELVDAGYRADLGIYNTLIIGLCGIGREDKAHKLFQIVLQEDLMPSSDTVSPLLACYAEKGEMVMFFGLVNKLAEMGLSVVEMLVDFMKLFAGKDGRVLKAVEVFDALRQKQYCSVGIYNILIENLLKIKDRKKSLLLFEEMQSSGHVGLTVYEIDDTLDSTRGGIKWIFLGAFVASRKLYLLNIAYSDTRTVSQELFWTKHSILLIMYSLYFLWQKI

SEQ ID NO: 53918 - protein, 606 aa, Homo sapiens
  Clone ID: LIB4119-042-F3_FLI.pep
PDLNVCKREITIMKELSGHKNIVGYLDCAVNSISDNVWEVLILMEYCRAGQVVNQMNKKLQTGFTEPEVLQIFCDTCEAVARLHQCKTPIIHRDLKVENILLNDGGNYVLCDFGSATNKFLNPQKDGVNVVEEEIKKYTTLSYRAPEMINLYGGKPITTKADIWALGCLLYKLCFFTLPFGESQVAICDGNFTIPDNSRYSRNIHCLIRFMLEPDPEHRPDIFQVSYFAFKFAKKDCPVSNINNSSIPSALPEPMTASEAAARKSQIKARITDTIGPTETSIAPRQRPKANSATTATPSVLTIQSSATPVKVLAPGEFGNHRPKGALRPGNGPEILLGQGPPQQPPQQHRVLQQLQQGDWRLQQLHLQHRHPHQQQQQQQQQQQQQQQQQQQQQQQQQQQHHHHHHHHLLQDAYMQQYQHATQQQQMLQQQFLMHSVYQPQPSASQYPTMMPQYQQAFFQQQMLAQHQPSQQQASPEYLTSPQEFSPALVSYTSSLPAQVGTIMDSSYSANRSVADKEAIANFTNQKNISNPPDMSGWNPFGEDNFSKLTEEELLDREFDLLRSNRLEERASSDKNVDSLSAPHNHPPEDPFGSVPFISHSGKLHM

SEQ ID NO: 53919 - protein, 290 aa, Zea mays
  Clone ID: UC-ZMFLMO17310E08_FLI.pep
ASQRPTGSPGSGRLDGPWGRSGVEFEAMSRLASGLQRLRRSSSQWEVLWSALASCGLVLFSQLAVAMVPRLFPFLSLLAMLPIAGLVFIAAIVLGRLWRRFIGVAASAPLFVLFNILLLWGVYVFVIRRETSSLLDMLINAECALLLWGFYRILSGDPGIVACDSSYLEEAGCKDFVEAIYSSEKLPMLSRVRQCTWCKANIRGYDHHCPAFGTCIGQKNHRLFMALLTGFVVAESTYTMCSTKYITRCISSGTIRSENPVSLNIVISTTLFSILQVLWQILRAVTRLYS

SEQ ID NO: 53920 - protein, 312 aa, Homo sapiens
  Clone ID: LIB3082-005-G5_FLI.pep
GSFKFVLSWELALFGWSRALRRRMALDVKSRAKRYEKLDFLGEGQFATVYKARDKNTNQIVAIKKVIIKDNSLVLTPSHIKAYMLMTLQGLEYLHQHWILHRDLKPNNLLLDENGVLKLADFGLAKSFGSPNRAYTHQVVTRWYRAPELLFGARMYGVGVDMWAVGCILAELLLRVPFLPGDSDLDQLTRIFETLGTPTEEQWPDMCSLPDYVTFKSFPGIPLHHIFSAAGDDLLDLIQGLFLFNPCARITATQALKMKYFSNRPGPTPGCQLPRPNCPVETLKEQSNPALAIKRKRTEALEQGGLPKKLIF

SEQ ID NO: 53921 - protein, 350 aa, Zea mays
  Clone ID: UC-ZMROB73080E10_FLI.pep
RRGKTYTECSPYQTSIRYHDSEHDKDFLNQMRTWLPQGLKDFTSNNSELYLMNLKSDSTFDLVCKVFHVHVENNNSIFYVWDGTDTPAAEFPAILDAEAAKSLSLHEGPPLSREILCTMPDFGTVLRIFSDRFVNKVSYMQKNIYWARFWNITCKQNFGIWKGTFSDSGGVRLLSNKDDSVVDRLKMYDSRIANRVRRRPMASIPSSVTDVEYEDAGYASLMKSLTHHDVTHKLRTLVRVVAAHPCEASLLSTGNCHLRLTLEDPTARIHAYVHKNDLVGFFGGGFLTAEVIVKKMNMVLGIPEPQGSVEVAPSTRNPPWIWCCLMSYYMDKNDPWVSRKYRIYSTAIRD

SEQ ID NO: 53922 - protein, 341 aa, Zea mays
  Clone ID: 700549516_FLI.pep
SLQADQNDDTCASCGDGGELICCDNCPASYHQACLSCQDIPDGNWYCSSCLCDICGEVIDSKELVTSLPALDCSQCERQYHVKCVSAKVPCNEDGSGTWFCGRKCHEIYMTFRSRVGVPDHMDDDLCFTVLRNNGDKKVRTAEEIALMAECNMKLMIATSIMEECFLPILDPRTGIDIIPSILYNWRSDLHFNYKGFYTVVLESDDSMVSVASIRLHGAILAEMPLVATSKENRQQGMCRRLMDYIEEMLKSLKVEMLLLSAIPHLAETWTSTFGFREIDESDKKRLSKVRLAAVPGTVLLKKDLLCECSGADAGEPPSPKPFQVYSRVPRGRTGLDAVCQ

SEQ ID NO: 53923 - protein, 426 aa, Zea mays subsp. mexicana
  Clone ID: UC-ZMROTEOSINTE120E06_FLI.pep
VTAVPYFVFCKEGKIVDTLEGANPASLANKVAKVAGPASVAESAVPASLGVAAGPAVLENIQKMAQQNGSSAAESTNSGSTQDALNKRLEQLVNSHPVFLFMKGTPEQPRCGFSRKVVNILKQEGVKFGSFDILTDNDVREGMKKFSNWPTFPQLYCKGELLGGCDIVIAMHDSGELKDVFEEHNIPLKPQGSKNEEAGQPESATEKGAAVAEPMGLTDAQKSRLESLINSSPVMVFIKGTPEEPKCGFSGKLVHILKQENIPFSSFDILSDDEVRQGLKVLSNWPSYPQLYIKGELVGGSDIVMEMHKSGELKKVLSEKGVIPKESLEDRLKSLVSSAPVMLFMKGTPDAPRCGFSSKVVNALKKEGVSFGSFDILSDEEVRQGLKTYSNWPTFPQLYYKSELIGGCDIVLEMEKSGELKSTLSE

SEQ ID NO: 53924 - protein, 273 aa, Glycine max
  Clone ID: LIB3051-016-F9_FLI.pep
DLKDKCRIGSGPQNEWYFFSHKDKKYPTGTRTNRATTAGFWKATGRDKSIYHTNSKRIGMRKTLVFYTGRAPHGQKTDWIMHEYRLDEDDADVQEDGWVVCRVFKKKNQSRGFQQELEEEEHLTTHMRASGPCQVLEQKHLHMQGGPYDHYNFDGTMHLPQLFSPESAIAPPTNSSLALSMNAMDILECSQNLLRLTTTGCGLNLMQQQQEERFSGDWSFLDKLLASHHGMDQSKCNPPTNHHAATAVGTSAQKFPFHYLGCDTTHDIMKFSK

SEQ ID NO: 53925 - protein, 207 aa, Zea mays subsp. mexicana
  Clone ID: UC-ZMROTEOSINTE120H07_FLI.pep
IDAIVRASQFPLSIVLVGVGDGPWDMMHQFDDNIPARSFDNFQFVNFTEIMSKSIAADRKEAEFALSALMEIPTQYKATLDLQLLGRRQRITPRIALPPPTRTAYSRTTSFSQQSGVYSRSSSFDQQTSVSQQRSESLKQQQPAAPKGPDTCASESALEDRILCPICMYKSKDLAFGCGHQTCYECGRDLERCPLCQQHITTRIRLY

SEQ ID NO: 53926 - protein, 384 aa, Zea mays
  Clone ID: UC-ZMROB73077H12_FLI.pep
FVSLFIIYSVLAHVAGIFSSTGNTAYMEIVYHVLSMFALISLHVFLYGCNLSMWKGTRINHNFIFDFSSTALTHRDAFLMSASIMCTVVAALVVNLFLRNAGATYANALPGALLLLSAGVLFCPFNIFYRSTRFCFMRVMRNIVLSPFYKVLMADFFMADQLTSQIPLLRHLEFTGCYFMAETFRTHAYGSCTSSSQYKNLAYVLSFLPYYWRAMQCLRRYLEEGHDMNQLANAGKYVSAMVAAAVRFKYAATPTPFWMWMVIASSTGATIYQLYWDFVMDWGFLNPKSKNFWLRDQLILKNKSIYYASMMLNLVLRLAWAESVMKLRLGMVESRLLDFSLASLEIIRRGHWNFYRLENEHLNNAGKFRAVKTVPLPFRELETD

SEQ ID NO: 53927 - protein, 606 aa, Glycine max
  Clone ID: 701151793_FLI.pep
ARRRQKGREHKDKFDLVISDVHMPDMDGFKLLELVGLEMDLPVIMLSANGDTKMVMKGISHGACDYLLKPVRMEELKNIWQHVIRRKKFDSKEKNKTSNLDKPTSNSGNGLGSSGTGNSDQNEKLTKKRKDQDEDEDEDQENDLDNEDPSAQKKPRVVWSVDLHRKFVAAVNQLGIDKAVPKKILDLMNVEKLTRENVASHLQKYRLYLKRISCVANQQANMVAALGVADPSYLRMSSVSGVGHVQTLSGSGQLHNNNFRSFPPSGIINRLNTPAGLNVHGFPSGVLQLSQSQNLNNANDHHKFQSVIVPVNQNGVQGMTVSVGLDQLQNNKVVMSVQNLTTVFDAKTTFPIPNKLPDPRPKITNSVSHTSDVHFSNNALMLEPRPQGSQGSVRIGTLSSSVASQHSEFSLSLLDQGRYSDNWTSAVQPSVIQTNFFPPSECFRQTNIPPADNMASVPLQGGNLSGPSITSLSRQSHDSMTEMHSEGMTFTNRPGHTSSNVPFQGWDDHNQDATHHSNIMSINSLTPVNGAAVQAGHAATNSVLHRNLDFNYCDPLQMKHEGFVELTDETLLKQHQGNTMDQQKSQENHFSNNLGSLEDLVSSMMK

SEQ ID NO: 53928 - protein, 180 aa, Zea mays
  Clone ID: UC-ZMFLMO17023D09_FLI.pep
TSDGRQRHAFIGLGFRERPEAYDFQAALHDHMKYLNKKKAAEEMIQHYEKQSSVDYSLKEGETLVLQLKNKETGTKTKSTFFEQGLNKLSVNEKTSAKEAPVSLKLPPPPPSPVSPTDSGVAASPFKAEFPPQEQPPAEPVSRTSALPSKGEPAPELPAAAEKMEQETVDEDFGDFQAAG

SEQ ID NO: 53929 - protein, 215 aa, Glycine max
  Clone ID: 701121062_FLI.pep
AKQMKVDVDEYLKTRQQSSPFLSELKDKLLLSPNEAASAGTRYNVPLINSLVLYVGMQAIHQLQGRTPHTQTSANAFPLAVFSVGAALDIFQTLIVDLDTEGRYLFLNAIANQLRYPNTNTHYFSFILLYLFAESNQEVIQEQITRVLLERLIVNRPHPWGLLITFIELIKNPRYNFWNRSFIRCAPEIEKLFESVSRSCGGPKPVDDSMVSGWV

SEQ ID NO: 53930 - protein, 737 aa, Zea mays
  Clone ID: UC-ZMFLMO17169B12_FLI.pep
PSLTDAPLPDLRPDLAASPAPAREPPSTATAMGTANGQQPAEGAPSDKLRHVESMSELPSGAGKISGINAVVLGESLAAEENDLIVPSPEFSASALVSSPKQYREMYERSIKDPAGFWSEIAETFYWKEKWNPAEVCSENLDVTKGPVQINWFKGGKTNICYNAVDRNIESGNGDKVAMYWEGNEPGQDGKLTYSELLEKVCQLANYLKSLGVGKGDAVIIYLPMLLELPIAMLACARIGAVHSVVFAGFSADSLAQRIVDCKPKLVITCNAVKRGVKPIFLKDIVDAALVESEKNGVSVGLCLTYENQSAMKRENTKWQAERDVWWQDVVTKFPTKCDVEWVDAEDPLFLLYTSGSTGKPKGVLHTSGGYMVYTATTFKYAFDYKPTDIYWCTADCGWITGHSYVTYGPLLNGATVLVFEGTPNYPDSGRCWDIVDKYNVTIFYTAPTIVRSLMRDGTEYVTRYSRKSLRVLGSVGEPINPSAWRWFYNTVGDSRCPISDTWWQTETGGFMITPLPGAWPQKPGSATFPFFGVQPVIVDEKGQEIEGECSGYLCIKKSWPGAFRTLYGDHERYETTYFKPFAGYYFTGDGCSRDKDGYHWLTGRVDDVINVSGHRIGTAEVESALVSHPQCAEAAVVGVEHEVKGQGIYAFVTLVDGVPYSEELRKSLIMTVRNQIGAFAAPDKIHWAPGLPKTRSGKIMRRILRKIAARQLDELGDISTLAEPAVVDQLISLSNC

SEQ ID NO: 53931 - protein, 749 aa, Homo sapiens
  Clone ID: LIB4119-210-G8_FLI.pep
KIFPFDASFLPCLHKFNLKGKGNSKGFKMAEKFESLMNIHGFDLGSRYMDLKPLGCGGNGLVFSAVDNDCDKRVAIKKIVLTDPQSVKHALREIKIIRRLDHDNIVKVFEILGPSGSQLTDDVGSLTELNSVYIVQEYMETDLANVLEQGPLLEEHARLFMYQLLRGLKYIHSANVLHRDLKPANLFINTEDLVLKIGDFGLARIMDPHYSHKGHLSEGLVTKWYRSPRLLLSPNNYTKAIDMWAAGCIFAEMLTGKTLFAGAHELEQMQLILESIPVVHEEDRQELLSVIPVYIRNDMTEPHKPLTQLLPGISREALDFLEQILTFSPMDRLTAEEALSHPYMSIYSFPMDEPISSHPFHIEDEVDDILLMDETHSHIYNWERYHDCQFSEHDWPVHNNFDIDEVQLDPRALSDVTDEEEVQVDPRKYLDGDREKYLEDPAFDTNYSTEPCWQYSDHHENKYCDLECSHTCNYKTRSSSYLDNLVWRESEVNHYYEPKLIIDLSNWKEQSKEKSDKKGKSKCERNGLVKAQIALEEASQQLAGKEREKNQGFDFDSFIAGTIQLSSQHEPTDVVDKLNDLNSSVSQLELKSLISKSVSQEKQEKGMANLAQLEALYQSSWDSQFVSGGEDCFFINQFCEVRKDEQVEKENTYTSYLDKFFSRKEDTEMLETEPVEDGKLGERGHEEGFLNNSGEFLFNKQLESIGIPQFHSPVGSPLKSIQATLTPSAMKSSPQIPHQTYSSILKHLN

SEQ ID NO: 53932 - protein, 390 aa, Zea mays
  Clone ID: UC-ZMFLMO17185A04_FLI.pep
QQALVGEDLAETQLFSSSSSLTDDSICSDFDIYVRKLQDKYGLQCHHPRQMTSKAHRYQVLDALVDLFCRSKVSADVRLVGGWLFRQLLPHGEEEFTAFHLRRLKDSHKDCSSKLSEESGGCWCDMLLPIVKEAWRNCKKAIEASSPPKGSKSIIVPMDLCSFEGDSSVAIAEALYEMVKGFVLQHQVILFCLGETFTELPPIYPLVDLPINTRASAADFGGSVPKPGLEVNLVDAVPCRIAFERGKERHFCFLAIAHGTSGWILLLEELPLKRERGIVRVMAPLAGSDPRIDTKHGKWLHLRIRPSSVPFLDTEKHKAKTKKYLVDGRWTLAFRDEQSCKVAESMVIEEMKLQRGAVAEQLKPLVEFDMPEDGMQHPQTSHETPSDDGS

SEQ ID NO: 53933 - protein, 431 aa, Zea mays
  Clone ID: LIB3136-019-H1_FLI.pep
LHLTECFVSGISRVIFTGTVVAVPDVMALTSPGERAECRREAPQRKNGGVQEGVKGLKSLGVRDLSYRLAFVANSVQVADGRREVDIRERDTDGDDSERQKFTEEEEDEVVRMRNTPDFFNKIVDSICPTVFGHQEIKRAVLLMLLGGVHKITHEGINLRGDINVCIVGDPSCAKSQFLKYTAGIVPRSVYTSGKSSSAAGLTATVAKEPETGEFCIEAGALMLADNGVCCIDEFDKMDIKDQVAIHEAMEQQTISITKAGIQATLNARTSILAAANPTGGRYDKSKPLKYNVALPPAILSRFDLVYIMIDEPDENTDYHIAHHIVRVHQKREEALAPAFSTAQLKRYISFAKSLKPQLSSEAKKVLVESYVTLRRGDSTPGTRVAYRMTVRQLEALIRLSEAIARSHLERVVLPAHVRLAVKLLKTSIIR

SEQ ID NO: 53934 - protein, 557 aa, Zea mays
  Clone ID: UC-ZMFLB73202A11_FLI.pep
TVKLEGTTRSAPQGSPGASSGILANNICSGAKTAPQSAINESEKIWLYMDPSNKIQGPFSIIQLRKWNSNGYFPPSLKIWKASEKQDDSILLTDALAGKFEKDLPPWEPPHVSLFQINKTPLEQSTIAGEQTPKSVVAKSFSSSNQRHGYSSTNLGTTMIHSGTQGYYGMQNSHAAYTSQHSLTGSWNATSSQFGVAVNPVTPTQPAMGSFSGQNIVSAENMGHLTPGTAPAAANAEMVNSDLTSQKQISYLPQTDGILADDIESKSGEDVSHGKVSSSAKAIGPLGAQLGQGQLNTQQHEADIKNQMSSTDVSNSTMPSQMMSTPSAASVQPSLSTIAGSDNQSSGWAVPTQVVNTSGQSQITGNLTWGNTPQGDASLGWGMMGQNNMNMPWVASAQGASGYNMGAAMPTQPNAVPNMGWLPNPGNTNMNMIWAATQGQGIPNAAAMMGGQMQGVAVAPWGGVAAGNANSYPAWGNQQVGNMNQNVRWSAPVQGNPSQENNNMNWNAPNGNPNNWNNQQRENEGRHSGHRGAFSAGDSGRKSWKPRSGADGGSWGT

SEQ ID NO: 53935 - protein, 238 aa, Zea mays
  Clone ID: LIB3151-017-A12_FLI.pep
AEEPDRHHEGVARCPRSPGSRCERHLHAYKRRLRLPATAAGSSTAAGASATSGSPATSGASPTAGPPAAAGPPATAGPCAAAGSSAAATMPLPYSTAPASASSPATPMPVPTAASKPVPAAGNLRRWQHPDPGPVRRVPEASVQPDGDALLLASVPVVAAAVLPAAQAGGAAAPVPGDLRLGPPVHPAAAAAKRPGRGAVGGADSAATDGDVRPAAADSMPLRCCRRCPPLKKLCAVV

SEQ ID NO: 53936 - protein, 96 aa, Zea mays
  Clone ID: UC-ZMFLB73253E12_FLI.pep
GTYAEQISPPLPFAGSACCCSDISTAASWRAACNSLCIFDFSKVKLAPFIHGLDRFLVFSSSISLTACNILGWKVGTPTCDTAAAPKKFPSSAASV

SEQ ID NO: 53937 - protein, 370 aa, Zea mays
  Clone ID: UC-ZMFLB73257F11_FLI.pep
SQVAFPGEDELRRAEAYSREFLCRRRASGELKDKWVIPKDLPGEVAYALDVPWKASLPRIETRMYLEQYGGADDVWIGKVLYRMSLVNNELLLRTAQADFRSFQRQCKLEWHGLRKWASRRNLQAYGVTSNSTLRSYFLAAASIFEPDRATERLGWARTAVLAEAVSSCLRDGRCSRADGMLRELTSGIHLRNDDNPAASLVHALHELIGLLAFDNASYNSLLDAWKQWLAMWTAQGHEGSVALLLVRTVEICSGRRRSASATDDGQAHSLSEYSQLEQLTSSVCSKLAAAGTGDGDDLSPASVEDAADRHRVDLEMQTLARCVLRSRSSIDAVTRQTFLHVARSFYYVAHCSARTVDAHISKVLFEDVV

SEQ ID NO: 53938 - protein, 128 aa, Homo sapiens
  Clone ID: LIB4119-046-B11_FLI.pep
FCDHKLHDVLIAPGTADLTADVDFSYLRRMAQGKVASLGPIKQHTFLKNMGIDVRLKVLLDKSNEPSVRQQLLQGYDMLMNPKKMGERFNFFALLPHQRLQGGRYQRNARQSKPFASVVAGFSELAWQ

SEQ ID NO: 53939 - protein, 532 aa, Zea mays
  Clone ID: UC-ZMFLMO17015H01_FLI.pep
PLHSAARSIPIPIHRTGSAQSGSLMESLVAALPAGGAAAAAAFGGLVAAAALAGKVGLVGSKKHLNAPPAVSGLPLIGNLHQLKEKKPHQTFTKWAEIYGPIYTIRTGSSTVVVLNSAQVAKEAMIAKFSSISTRKLSKALSALTRDKTMVATSDYGDFHKMIKRYIMTFMLGTSGQKQFRDTRNMMVDNMLNTFHTLLMDDPNSPLNFREVFKNELFRLSLVQALGEDVSSIYVEEYGKVISKEEIYKATVVDMMMCAIEVDWRDFFPYLSWIPNRTFETRVLTTEARRTTVMQALIKQQKERIARGETRISYLDFLLAENTLTDEQLLMLVWEAVIEAADTTLVTTEWAMYEIAKHPEKQEYLYQEIQKVCGNKTVTEDHLPELPYLNAVFHETMRRHSPVPLVPPRLVHENTNLAGYEVPAGTEIIINLYGCNMNKNDWAEPEEWKPERFLDGRFEAVDMHKTMAFGAGRRACAGSMQAMNISCTAIGRFVQEFAWRLEEGDEDKVDTIQLTTNRLYPLHVYLAPRGRK

SEQ ID NO: 53940 - protein, 405 aa, Homo sapiens
  Clone ID: LIB4115-010-A12_FLI.pep
GSRASETTHSSVARPQRHPGQDGQERRPPFLHALSPRHGALRRGEAGGWVEAPACPQLEGRGMDRDGGQVTSGTQGARPLSHGGARGCAGLVQPQGFTQPAGKIHFFHLGPLDEGVVCEHLQVRPLRWVLDEAFIDKLLEVGGEHTVGQLRRWLVHNIVQEFKDGHGRPAIHPVTADGAPGGPRPRRDAVRLSFFPVDHGPAKDGLQLFGVGRGDGVPSDGQLHQGQAHAPDVRLHRVMCALQPLRSHVGARAHEGVGHGVYELAAHPEVTQLDLPSRVHEDVGGLHISVHDLVLLSEVRQAPENRDADFPQDLLGNPLGLFQHLVQGAAVHVFHANADLPVTVEGPVEAHDVRRVAFVQDLQLADDLVPDGRLDLKVDQLPGHDEARGSVLDFGDHPAVARAQL

SEQ ID NO: 53941 - protein, 97 aa, Zea mays
  Clone ID: UC-ZMFLMO17235G12_FLI.pep
WWTLPTTSSYRGRGNLWLTRARRRNCGGREGGGTVRAATRPHHLGEAVASYLSSSCHIALDLKHEEKHCGGEASVQHCCCIGINILKITWKTFTKNS

SEQ ID NO: 53942 - protein, 212 aa, Zea mays
  Clone ID: LIB3059-041-E6_FLI.pep
VRERERGGKMLRHAARRLVSRAVAPPTARRALATAEVPAEAVEDSTFVEAWKKVAPNIEPPATPLSLMQPRPPTPATIPTKLTVNFVLPYKSEIANKEVDMVIVPATTGQMGVLPGHVATIAELKPGVLSVHEGNDVSKYFVSSGFAFVHANSIADIVAVEAIPVDQIDPALVQKGLAEFTAKLGSASTDLEKAEAQIGVDVHSALNAALTG

SEQ ID NO: 53943 - protein, 265 aa, Zea mays
  Clone ID: UC-ZMFLMO17238A06_FLI.pep
KGQNFHICVMKQHSKIITSSLVHLNSPHFFPTPLSAGEGIKVAGPETHHGETKSRRENNMIKTLSRKRRDDSPPPQSRKPVRRRTALRTRRRSRPLSVLPAPSSTELCAAARRATISCGGTKASPASSALPPAPAPAWAHLPLRAGSDGIRTGADLAIADAATVSGTGRAADRAGAPTPTPTPAAARFFFLPSSSGSAARRPRPTADGEAGQSTSSSRKSPSAPAAAWVGAGRGGRDIMRRSIASAPAPGITSTADLRRCGGAPA

SEQ ID NO: 53944 - protein, 667 aa, Zea mays
  Clone ID: LIB3061-035-H2_FLI.pep
KRPPPPARPPACPSALFRLHRRSPLQSPTTARLPVPPATPLPCEIRGAMWRSCVSRGLSRAKASASRLLSTASSSYTVVDHTYDAVVVGAGGAGLRAAIGLSEHGFNTACITKLFPTRSHTVAAQGGINAALGNMSEDDWRWHMYDTVKGSDWLGDQDSIQYMCREAPKAVIELENYGLPFSRTEEGKIYQRAFGGQSLDFGKGGQAYRCACAADRTGHAMLHTLYGQAMKHNTQFFVEYFALDLLMDNEGKCQGIIALNMEDGTLHRFRASNTILATGGYGRAYFSATSAHTCTGDGNAMVARAGLPLQDLEFVQFHPTGIYGAGCLITEGSRGEGGILRNSEGERFMERYAPTAKDLASRDVVSRSMTMEIREGRGVGPLKDHIYLHLNHLPPEVLKERLPGISETAAIFAGVDVTKEPIPVLPTVHYNMGGIPTNYHGEVVDIKGDNPDAVVPGLMAAGEAACASVHGANRLGANSLLDIVVFGRACANRVADISKPGEKQKPLEKDAGEKTIAWLDKLRNANGSLPTSKIRLNMQRVMQNNAAVFRTQETLEEGCELISKTWESFHDVKLSDQSLIWNSDLIETLELENLLINACITMYSAEARKESRGAHAREDFTTRDDEKWMKHSLGYWENEKVRLAYRPVHMNTLDDEVESFPPKARVY

SEQ ID NO: 53945 - protein, 185 aa, Zea mays
  Clone ID: UC-ZMFLMO17242C08_FLI.pep
APQSTPMARSPSLPQACLHRVPDPLLELALARKFSCVPPWCALLSVSLLATLAQPSVAPSSVRRGACSCARRPPDHLQTPAVELSRLSPTLSRVFQLGALLFCLPFAGRAHLPLLGRPRCCSLHVRNSLRAAAFSSPVASVVVKHVSKKSQESGEDGANNMVFTKCTTGSSSQDLSVFVRVLGRV

SEQ ID NO: 53946 - protein, 640 aa, Zea mays
  Clone ID: UC-ZMFLMO17265F06_FLI.pep
GLSIYRWFEVIGRTTQAKMASVHKATTLVLMFCLLALGRAEYLKYKDPKQPVAVRIKDLLGRMTLAEKIGQMTQIERENATADALAKYFIGSVLSGGGSVPAPQASAQAWAAMVTEMQKGALSTRLGIPIIYGIDAVHGHNNVYKATIFPHNVGLGATRDPDLVKRIGEATALEVRATGIPYAFAPCIAVCRDPRWGRCYESYSEDPKVVQSLTSLISGLQGDAPADSAGRPYVGGSKKVAACAKHYVGDGGTHNGINENNTIIDTHGLLSIHMPPYYNSIIRGVSTVMVSYSSWNGVKMHANHFLVTDFLKNKLKFRGFVISDWEGIDRITTPPHANYSYSIEAGVGAGIDMIMVPFRYTEFIDDLTTQVQNKVIPMSRIDDAVYRILRVKFTMGLFENPYPDSSLAGELGKQEHRELAREAVRKSLVLLKNGKSSYAPLLPLPKKAGKILVAGSHANDLGNQCGGWTITWQGSSGNTTAGTTILSGIEATVDPSTQVVYSESPDSGVLADKYDYAIVVVGEPPYAETFGDNLNLTIPAPGPSVIQSVCGAAKCVVVLISGRPLVVEPYLGDMDALVAAWLPGSEGQGVADVLFGDYGFTGKLPRTWFKSVDQLPMNVGDAHYDPLFPFGFGLTTKGTK

SEQ ID NO: 53947 - protein, 302 aa, Arabidopsis thaliana
  Clone ID: LIB22-086-G3_FLI.pep
LSMATPNEVSALWFIEKHLLDEASPVATDPWMKHESSSATESSSDSCSIIFGSSSSSFAPIDFSESVCKPEIIDLDTPRSMEFLSIPFEFDSEVSVSDFDFKPSNQNQNQFEPELKSQIRKPPLKISLPAKTEWIQFAAENTKPEVTKPVSEEEKKHYRGVRQRPWGKFAAEIRDPNKRGSRVWLGTFDTAIEAARAYDEAAFRLRGSKAILNFPLEVGKWKPRADEGEKKRKRDDDEKVTVVEKVLKTEQSVDVNGGETFPFVTSNLTELCDWDLTGFLNFPLLSPLSPHPPFGYSQLTVV

SEQ ID NO: 53948 - protein, 503 aa, Zea mays
  Clone ID: UC-ZMFLMO17266A12_FLI.pep
CTEAWLSLGGCLLCATGSEAIFSNLCYFPVRYVQYMFVLLVLPCLVLAYLGQAAFLIANQKSSEHVFFSSIPSGVFWPVFLVANLAALIASRTMTVAIFQCLKQSIALGCFPRLKIVHTSRKFMAKIYIPVVNWFLLVSCLGFIILFRNIYDVGNAYAIAELGVMIMATVYVTIIMLLIWESNITKVLSFVITFLFLELIFFSSALSSVGDGGWALLIFASVLLMIMFIWNYGSKLKYDSEVKQKLPKDLMRKLGPNLGTIRAPGLGLVCSDIVKGVPAIFGHFLTSLPAIHSIIVFVCIRNVPVPVVPQSERFLFQRVCSRGYHLFRCIARYGYKDKKQEHHSVFERLLIEGLEKFIQREAVELSLQSEDDIDSDEEPPTPVKIITAPNGSLYSLDVPLLADYVPSTELIHEASCSTPQHDPVLDYAQNLELELAFIEQSKRSGVIYLIDNPIIKARKDSWFFKKLMINYFFAFLRNNCRRAIMLMSIPHSNMMQVRMTSYV

SEQ ID NO: 53949 - protein, 254 aa, Arabidopsis thaliana; identical to SEQ ID NO: 38866
  Clone ID: LIB24-047-A12_FLI.pep

SEQ ID NO: 53950 - protein, 313 aa, Zea mays
  Clone ID: UC-ZMFLB73136F03_FLI.pep
HFYAFLWRTVVCSSKNLCKSAPHLSISIQFKLLWFILSSVYVSVCNARTLQEGRICVKRVVVQNFLCTGEAQLRLADPNWPMAQPEIPAFEDWETTGNTPYTQKFEDVRKNKKTGIPAQTNDPRRNPEHPRKSPLHPTAYKTDPQDQGPRNPPHRPRPETDQQRHSDRPTHREPAPRRHANPHREQGSNAVAPRSPYRTAAGSASPMQSNNQSKPNHRSTATQAPERRHSSEGHSQHTPGRSRMKPGSYEPEEVAVPPFGEWDDANAASGEKYTGIFNRVRDDRLSPTSSARQPSTARREENKVQQKCSCCIL

SEQ ID NO: 53951 - protein, 149 aa, Arabidopsis thaliana; identical to SEQ ID NO: 40736
  Clone ID: LIB24-125-F5_FLI.pep

SEQ ID NO: 53952 - protein, 204 aa, Zea mays
  Clone ID: UC-ZMFLMO17202C09_FLI.pep
EGKHREFAIRMGSKAPFCLTLLLLLAAACGPAAHAHDAVELPHHGLALKEQISSTKIPARLKSGSGLCSACENFTSEAVTYLGKEQTQDRIMEFLHDACSQSFSFEQKCVELMDSYATLLFAKITEIRPEAFCKRYGLCRDTALLSGVGSDSTCVFCHHLLDEIMSKLKDPDAEFEIIQILVKECNKIEGHVQQVGFLALPLSL

SEQ ID NO: 53953 - protein, 517 aa, Arabidopsis thaliana
  Clone ID: LIB22-034-F7_FLI.pep
KERDRDIMGKQGPCYHCGVTNTPLWRNGPPEKPVLCNACGSRWRTKGTLVNYTPLHARADGDENDDHHRFQRMKSISLGNKNKEIKMLKRKAIQENIIIKRPVFEFSYGLKAAVIEEDASNRSSSGSAVSNSESCAQFSSADGSPSQSNAWDTTVPCKRRTCVGRPKSSSVEKLTKDLYNILQEQQSSCLSVSSEEDLLFENEMSMVSVEIGHGSVLMKNPHSFAREEESEASSLSSIENKSSISDAYSHSVKRVEIGAVRGSYYGGQTIKQEQFKRTKSQTERVHVLGSHGSPLCSIDLKDVFNFDEFIEQFTEEEQKKLMNLLPQIDSDDLPHSLRMMFESAQFKDNFSLFQQLIADGVFDVSSSSGAKLEEIRTFKKLALTDFNKSRLVESYNLLKEREKGTGDSVTTTSKSSIPNVPKNIVTIKRRYENQIQVKSESRGLMRSPKRVMKMKASHETENNVSCFRPRSLASVFAQEGGSAVFSYEGNCSSDQDLLLLDLPSNGSFPQAELLHQL

SEQ ID NO: 53954 - protein, 282 aa, Zea mays
  Clone ID: UC-ZMFLMO17202E05_FLI.pep
QHSRFSRHRGQSAAAAESRMMGSGMGAYGGALRPVESAAGETMLLWGLGQPESHRNNALVRQAAHAFELDACGRRLSLLQSPSSMATPGVTGAVVWDSGVVLAKFLEHSVDSQRLLLRGARAVDLGSGCGLVGCVAALLGAHVVLTDLADRLKLLRKNVALNVDDPHVPGSARVTELVWGDDPHHELLEEPLPDFVLGSDVIYNEEAVDDLLITLNQLSGKHTTILLAGELRNDAVLECFLEAAMEDFLIACIEQDQWHPEFRSNRVALFILVKKPEKPSAE

SEQ ID NO: 53955 - protein, 832 aa, Arabidopsis thaliana
  Clone ID: LIB23-056-D7_FLI.pep
CKDGKLGCLDNGKYVRYTPEQVEALERLYHDCPKPSSIRRQQLIRECPILSNIEPKQIKVWFQNRRCREKQREEASRLQAVNRKLTAMNKLLMEENDRLQKQVSQLVHENSYFRQHTPNPSLPAKDTSCESVVTSGQHQLASQNPQRDASPAGLLSIAEETLAEFLSKATGTAVEWVQMPGMKPGPDSIGIIAISHGCTGVAARACGLVGLEPTRVAEIVKDRPSWFRECRAVEVMNVLPTANGGTVELLYMQLYAPTTLAPPRDFWLLRYTSVLEDGSLVVCERSLKSTQNGPSMPLVQNFVRAEMLSSGYLIRPCDGGGSIIHIVDHMDLEACSVPEVLRPLYESPKVLAQKTTMAALRQLKQIAQEVTQTNSSVNGWGRRPAALRALSQRLSRGFNEAVNGFTDEGWSVIGDSMDDVTITVNSSPDKLMGLNLTFANGFAPVSNVVLCAKASMLLQNVPPAILLRFLREHRSEWADNNIDAYLAAAVKVGPCSARVGGFGGQVILPLAHTIEHEEFMEVIKLEGLGHSPEDAIVPRDIFLLQLCSGMDENAVGTCAELIFAPIDASFADDAPLLPSGFRIIPLDSAKEVSSPNRTLDFASALEIGSAGTKASTDQSGNSTCARSVMTIAFEFGIESHMQEHVASMARQYVRGIISSVQRVALALSPSHISSQVGLRTPLGTPEAQTLARWICQSYRGYMGVELLKSNSDGNESILKNLWHHTDAIICCSMKALPVFTFANQAGLDMLETTLVALQDISLEKIFDDNGRKTLCSEFPQIMQQGFACLQGGICLSSMGRPVSYERAVAWKVLNEEENAHCICFVFINWSFV

SEQ ID NO: 53956 - protein, 151 aa, Zea mays
  Clone ID: UC-ZMFLMO17209F05_FLI.pep
GSEQSGCPLIRDVKSALSLPQCTAPLIINVVAAVSSGNVPLNDVQLLWVNLIMDTLGALALATEPPTNHLMERTPVGRREPLIINIMWRNLIIMALFQVSVLLTLNFKGISLLQLKNDDPAHADKVKNTFIFNTFVFCQVFNNSIRVNQMS

SEQ ID NO: 53957 - protein, 245 aa, Zea mays
  Clone ID: UC-ZMFLMO17215C03_FLI.pep
PFYFSIKCGPTVHNFDSSISVFCCHLTLIGLCSTTGERDPVTSALLIILGRKVSLDIAQVVRWKTSPAAEVLPTVRYAASFAGYGFYGEVIRESEKYRWMGPARYDFSGTMVFLKHRSYGAKVAFLDTPYTHSLTASAQDDITGAQPLQSRWKKPRKIICRTNCFVCKEASTSGQNPDDVADNSRTICENQKWVWSEGHFLSVGAAVISCRNERAPDGLVADAHLSDGFLHLLLIRDCPLPLYLW

SEQ ID NO: 53958 - protein, 249 aa, Zea mays
  Clone ID: LIB3062-002-D3_FLI.pep
EVIQKKRAEKPEVRDAAREAALREIKERIKKSKDEIHLKVKSKGEASGEEDGKEEEVEVEIEAKFVEKEEVKDTGDGAAGKGTKKKDTKEKDKKKKEGGDDSGKAEEDKKGKAKDSEGKGQVKKEKKDGAGDDGGEEKGKEKKDKKDKGEKNDKEKKEKKKDKGGEKKKDKGAKEKTTDPVKLRAKLEKVDTKLQDLHAKREDILRQLKELELEEEGKGKANEEEPAHVQNLEQGGESVVKEQSHVAAA

SEQ ID NO: 53959 - protein, 241 aa, Zea mays
  Clone ID: UC-ZMFLMO17217E08_FLI.pep
QLPVKSKLASHGCAATTRTKVLNLCVTSNTGGDACHRPTTNSVGDAAVIHPGGVYVISKVYLYNIQRTLKLIRKEDYFRRSTTLSSLFDNRRTPPESEKVPFQMPKFCLQVMFQNLAQYMFFCIYDTLLTNLSEKILRTVPKSGIVHKISLDRGGPSCRESDLAASASKLYVHQSKTGKLSENSDMTDITKYFFSKIKLIMFSLPMLMFSAPSKNNQTKIKSCSSIWKTLKHHLIFHRCFS

SEQ ID NO: 53960 - protein, 425 aa, Zea mays
  Clone ID: LIB3060-034-G1_FLI.pep
FFSCCHPFLQSPPDSRGARRSRKDTPPPPMSRHRVETCDSWRPPRKNHAGAPPLLRAGPRLLAFASLSVRDGGDSAAAVAKAVEEAVVVRSDEVKEAVAGEERKKTKSAERRLPPAAQLVSHPLALLALVPNSAAIFAAGAAAGTVAKTVTAPLDRVKILMQTHSVRVAGESAKKGVGFLEAMADIGKKDGLKGYWKGNLPQVIRIIPYSAVQLFSYEVYKKIFRRKDGELSVFGRLAAGACAGMTSTLVTYPLDVLRLRLAVQSGHSTLSQVALNMLREEGLASFYGGLGPSLVAIAPYIAVNFCVFDLMKKSVPEKYKNRPETSLATALLSATFATLMCYPLDTVRRQMQMKGTPYNTVFDAIPGIVERDGLTGLYRGFVPNALKNLPNSSIKLTVFDTVKTLIATGQKEMDKLIQENEEKRS

SEQ ID NO: 53961 - protein, 478 aa, Zea mays
  Clone ID: UC-ZMFLMO17258C08_FLI.pep
LILSPLSPAPFVSGELGFAPPPCHPTVPAILGSPAMYGGDEVSAIVIDVGSYSCKAGYAGDDTPKAVFPSVVGSIEQTEDTDDPKPEKEADSASDSKNGAKPMDVDKAKTKRRLYVGQELEFRRDHMEVISSMKDGTVTDWDIVDNIWNHAFRRRLLINPEEHPMLIAEPSTNTAQQREKAAELMFENYKVPALFLAKNAVLTSFASGRATSLVVDSGGGSTVVSAVHDGFVLQKSVSTSPVGGEFLTDCMMKSLESKGIVIRPRYSFKKKEISPGEYKIVDLDLPNTTESYRLYCMRAIASDVKESVCRVPDTAFDEVAYANVPTTSYELPDGQTIEVGADRFKVPDILFNPSLSQTIPGIDGFADSIPVRGLQRMVIDSVNKCDVDIRKELFSNILLSGGSSSILQLKERLEKEVLEESPQAARVKVMASGNSVERRFSVWIGGSILASLGSFQQMWFSKAEYEEHGVSYIQRKCP

SEQ ID NO: 53962 - protein, 313 aa, Zea mays
  Clone ID: LIB3066-009-H5_FLI.pep
RGSEWQLPRTPRRFTEPAPSDPSRSFQKVTAMAAPFFSTPFQPYVYQSQQGSVTAFQISGGDVQVLQVMLKSQEKLTAKPGAMCYMSGNMQMDNNYLPENDGGVWQWIFGKRVSSTIFFNSGSDDGYVGIAAPFPGRILPVDLTNFSGELLCQADAFLCSVNDVSVSSTVEPRPRNIEIGAEMILKQKLRGQGMAFLVGGGSVMQKILAPREVITVDAACIVAMSATINFQLKSPNQLRRAVFGGDNQLTASLTGPGVVFIQSLPFHRLSQRITSRSVAGPSLRDNPKFFIQIVMFFFLAYVMIVSSIILTDV

SEQ ID NO: 53963 - protein, 486 aa, Zea mays
  Clone ID: UC-ZMFLMO17258C09_FLI.pep
LDVLSGDLPKSTKLQNKHLQALIELHNMTGTFARNIQYLFSESDLAVVLNTLKAIYSPYETFKARYGQMERAILSAEMTSIDIRGAVPRGVGAQGIELSETVRRMEESIPEMIVLLEAAVERCISLTGGSEADELVLALDDVMLQYISNLQETLKSLRIICGLDSDALKKDAGLEKKEVQRLVDVSEEEEWSIVQGALQILTVADCLTSRTSVFEASLRATLARIGTNFSVSGFGSSLDKSPAATADENADLSFAGRAALDIAAIRLSDLPDKSKKFLTVLEQSKDPRFHALPLTSQRVAAFSDTVNELVYDVLISKVRQRLSEVARLPIWSSVEEQGGLPLPSFSAYPQAYVTSVGEYLLTLPQQLEPLAEGISGNEAGNDEAQFFATEWIFKVAEGATALFMEQLRGIHYITDRGSQQLAADIEYLNNVLSALSMPIPPFLSTFHACVSTPRDQVRDLIKSDGASQLDLPTTHLVCKIRRITLD

SEQ ID NO: 53964 - protein, 226 aa, Zea mays
  Clone ID: LIB3066-027-G7_FLI.pep
LGWTGSELLLFVIIFLHLSTAGAVLLSEEEDLELVVARKHTSASNGTKNVSTSTLEQGLGAFLLKDLLECVQGALVLDSLTRSHHHPSADSINGVRCKTSTVGDQPTQSKTGKEVVLEAASEDNWLDRIVKSEIQATINNNSNTRYVKSTVKPSNTIRFECLAVDIHKTIELSIASSLGSLGIIGQPCPRIIQGVHKKQRGSTSSTTRGQVASKPLPVTIPVLLEV

SEQ ID NO: 53965 - protein, 811 aa, Zea mays
  Clone ID: UC-ZMFLMO17136B11_FLI.pep
PLGILNHRAMAAKLTRLHSLRERLGATFSSHPNELIALFSRYVHQGKGMLQRHQLLAEFDALFDSDKEKYAPFEDILRAAQEAIVLPPWVALAIRPRPGVWDYIRVNVSELAVEELSVSEYLAFKEQLVDGQSNSNFVLELDFEPFNASFPRPSMSKSIGNGVQFLNRHLSSKLFQDKESLYPLLNFLKAHNYKGTTMMLNDRIQSLRGLQSSLRKAEEYLLSVPQDTPYSEFNHRFQELGLEKGWGDTAKRVLDTLHLLLDLLEAPDPANLEKFLGTIPMMFNVVILSPHGYFAQSNVLGYPDTGGQVVYILDQVRALENEMLLRIKQQGLDITPKILIVTRLLPDAAGTTCGQRLEKVIGTEHTDIIRVPFRNENGILRKWISRFDVWPYLETYTEDVSSEIMKEMQAKPDLIIGNYSDGNLVATLLAHKLGVTQCTIAHALEKTKYPNSDIYLDKFDSQYHFSCQFTADLIAMNHTDFIITSTFQEIAGSKDTVGQYESHIAFTLPGLYRVVHGIDVFDPKFNIVSPGADMSVYYPYTETDKRLTAFHPEIEELIYSDVENSEHKFVLKDKKKPIIFSMARLDRVKNMTGLVEMYGKNARLRELANLVIVAGDHGKESKDREEQAEFKKMYSLIDEYKLKGHIRWISAQMNRVRNGELYRYICDTKGAFVQPAFYEAFGLTVIESMTCGLPTIATCHGGPAEIIVDGVSGLHIDPYHSDKAADILVNFFDKCKADPSYWDKISQGGLQRIYEKYTWKLYSERLMTLTGVYGFWKYVSNLERRETRRYIEMFYALKYRSLASQVPLSFD

SEQ ID NO: 53966 - protein, 208 aa, Zea mays
  Clone ID: LIB3066-021-B7_FLI.pep
RCASAGRKTPTSPRARLAALMGGRPGYLTLPIFSVVAAIGYVYYTTVFVAVPRWLDLSTAAGVANAAAFTALAAACLATYAVAVRRDPGRVPPGFVPDVEDAESTVHEIKRKGGDLRYCQKCCHYKPPRAHHCRVCKRCVLKMDHHCIWINNCVGHENYKIFLVFVLYAVVASFYALGAFCTVFLKMSSQAAILLEHPLLSVGSFFLH

SEQ ID NO: 53967 - protein, 472 aa, Zea mays
  Clone ID: UC-ZMFLMO17187D01_FLI.pep
LKKPSACLRLPRLSPSDLLPPLPIARCHRPGDPRASTSTMVSSSSSSSSFLLPLLLLCSHLSLASAETASAAADLLSEARAPGFAAWLRGVRRRIHQRPELAFQEFRTSELVRAELDAIGVPYRWPVAQTGVVATIAGAAAGPVVALRADMDALPVQELVDWEHKSQESGKMHACGHDVHTTMLLGAARILQDRKSDLMGTVKLVFQPAEEGQGGAYYVLQEGVLDDASAIFGLHVDPALPVGVVSSRPGPFAATSGRFLATVTGKGGHAAMPHESIDPVVAAATTVVSLQKIISREIDPLQGAVVSVTFLKGGEAYNVIPENVAFGGTMRSMTNEGLSYLKKRIKEIVEGQAAVHHCSASVDFMEDTMKPYPAVVNDEGMYAHAKEVAEGLLGEKNVRVGPQVMGAEDFGFYAQRMAGAFFTIGVGNASTMATIHSTHSPHFVVDEDVLPVGAAFHAAVAIEYVRKNRAST

SEQ ID NO: 53968 - protein, 156 aa, Zea mays
  Clone ID: UC-ZMFLMO17199A11_FLI.pep
ACCVADDRVPCLQPIQQSPAYFLRHTYTGHTHDYLKLLNTDDLHPRRHDTSRERSCRPSSRDWIGSYAYATALAGGITIGLRTTCSLDTHFRFPSAPATAGGPFHRTVTVKLCFSFALANRSTGGRTTTDTALGMSTTALYTELAFPTLVTVRRTV

SEQ ID NO: 53969 - protein, 215 aa, Zea mays
  Clone ID: 700244484_FLI.pep
QRATCSRAHTHTSTFDPSTAYASPHTGIKVLLNIRSLQTVSLCLLGGLGGLLGRLCLLAPHTGRLLRRLLGQQNRVDIGEHTAVSDSHAAQQLPKLLVVPDRQKHVARNNASLLVVPGSITGELQNLSGEVFEDSGEVDGGAGADTLRVAALLQVAPDAADGELEPGLHGPRHRLLPWPADLAPGRSLLPLTPCSGAGGVHGRISASIGLSGTRR

SEQ ID NO: 53970 - protein, 655 aa, Zea mays
  Clone ID: UC-ZMFLMO17199B04_FLI.pep
SLSRDSSSSRLPSSSPKIQGAVPGIGRVATMLEELLIFTRGGLILWSSCRALGAAALKGSPIDALIRSCLLEERSADASFSQDNYALKWTFHNDLGLVFVAVYQKILHLLYVDDLLAAVRKEFSQIYDPKRTSYDDFGDIFRQLHREAEARAEEMKKSKQALSSRPQPALTQKKPGPKGRGGDSRGGAANKGGSGAKDDSDGDSYGNQDHRTLANGAFKGQENGVRKENSSHGRTVVVKGKENGAPKDEGAFDVSKLQKLRANKKNGATDNGTKKLTKPDIKKKGKQDRVWDDKPSNKKLDFTDPADERGDEVTDNVAVIEGESMMDKDEDLSSDSEDEEVEDGPKKKGWFSSMFQSISGNNVLEKSDLQPALKALKDRLMAKNVAEEIAEKLCESVAASLEGKKLGSFTRISSTVQTAMEDALLRILTPRRSIDILRDVHAAKERGRPYVIVFVGVNGVGKSTNLAKVAYWLLQHNLSVTLAACDTFRSGAVEQLRTHARRLQIPIFEKGYEKDPAVVAREAIQEATRNKSDVVLVDTAGRMQDNEPLMRALSKLINLNSPDLVLFVGEALVGNDAVDQLTKFNQKLADLSAVPTARLIDGILLTKFDTIDDKVGAALSMVYISGAPVMFVGCGQSYTDLKKLNVKSIVKTLLK

SEQ ID NO: 53971 - protein, 709 aa, Homo sapiens
  Clone ID: LIB4119-100-C9_FLI.pep
TQQRWNPFGGAWGPSSQARRVSGEGCSPWQTDSVAWGFGGAREAGANLIGGDTSAVLFPPLGGLLCQQPGGRPGRQSQWYRGLGRAVSGSSGTMSTIQSETDCYDIIEVLGKGTFGEVAKGWRRSTGEMVAIKILKNDAYRNRIIKNELKLLHCMRGLDPEEAHVIRFLEFFHDALKFYLVFELLEQNLFEFQKENNFAPLPARHIRTVTLQVLTALARLKELAIIHADLKPENIMLVDQTRCPFRVKVIDFGSASIFSEVRYVKEPYIQSRFYRAPEILLGLPFCEKVDVWSLGCVMAELHLGWPLYPGNNEYDQVRYICETQGLPKPHLLHAACKAHHFFKRNPHPDAANPWQLKSSADYLAETKVRPLERRKYMLKSLDQIETVNGGSVASRLTFPDREALAEHADLKSMVELIKRMLTWESHERISPSAALRHPFVSMQQLRSAHETTHYYQLSLRSYRLSLQVEGKPPTPVVAAEDGTPYYCLAEEKEAAGMGSVAGSSPFFREEKAPGMQRAIDQLDDLSLQEAGHGLWGETCTNAVSDMMVPLKAAITGHHVPDSGPEPILAFYSSRLAGRHKARKPPAGSKSDSNFSNLIRLSQVSPEDDRPCRGSSWEEGEHLGASAEPLAILQRDEDGPNIDNMTMEAERPDPELFDPSSCPGEWLSEPDCTLESVRGPRAQGLPPRRSHQHGPPRGATSFLQHVTGHH

SEQ ID NO: 53972 - protein, 221 aa, Zea mays
  Clone ID: UC-ZMFLMO17202A10_FLI.pep
NVPGVCHRDVKPQNVLVDPLTHQVKLCDFGSAKVLIPGEPNISYICSRYYRAPELIFGATEYTSSIDIWSAGCVLAELLLGQPLFPGESAVDQLVEIIKVLGTPTREEIRCMNPNYTEFRFPQIKAHPWHKIFHKRMPPEAIDLASRLLQYSPSLRCSALDACAHPFFDELRTPNARLPNGRPFPPLFNFKHELANASPDLVSRLVPEHIRRQIGVNFGSS

SEQ ID NO: 53973 - protein, 466 aa, Homo sapiens
  Clone ID: LIB4119-023-F2_FLI.pep
APAARPGPARAGVASGSGRPRRPAVPSQEVAVLSAMAHSPVQSGLPGMQNLKADPEELFTKLEKIGKGSFGEVFKGIDNRTQKVVAIKIIDLEEAEDEIEDIQQEITVLSQCDSPYVTKYYGSYLKDTKLWIIMEYLGGGSALDLLEPGPLDETQIATILREILKGLDYLHSEKKIHRDIKAANVLLSEHGEVKLADFGVAGQLTDTQIKRNTFVGTPFWMAPEVIKQSAYDSKADIWSLGITAIELARGEPPHSELHPMKVLFLIPKNNPPTLEGNYSKPLKEFVEACLNKEPSFRPTAKELLKHKFILRNAKKTSYLTELIDRYKRWKAEQSHDDSSSEDSDAETDGQASGGSDSGDWIFTIREKDPKNLENGALQPSDLDRNKMKDIPKRPFSQCLSTIISPLFAELKEKSQACGGNLGSIEELRGAIYLAEEACPGISDTMVAQLVQRLQRYSLSGGGTSSH

SEQ ID NO: 53974 - protein, 117 aa, Zea mays
  Clone ID: UC-ZMFLMO17202H05_FLI.pep
LHPSTPVMIHIKKTCSQHHSHSVQCLVFGRSIMAPVSAFATRSPRPMSPSAAGEHTARSPDALPSPGRMTGPLCRSTPPPLRRKASQLYNPAPTTAARGPAAMRSCYAQICTCARPA

SEQ ID NO: 53975 - protein, 232 aa, Zea mays
  Clone ID: UC-ZMFLMO17210E12_FLI.pep
IALSKSYPNSKFFQEMNDASEVLGVIFECLHKSYTSRTVYHGVSHEKNSIGSWDCANISCITHNLFGMDVYERMNCHNCKMESRQLKYTSFFHNINASSLRTAKMMCPDSSFDELLKVVIMNDQLACDQDVGGCGTPNHIDHILSNSPHVFTVVLGWQNNKERVDDISATLAGISTEIDISIFYRGLDQGGKHTLGFVTMASITIVLPSRMDGGSCMMTRQSRLLVVGVMCS

SEQ ID NO: 53976 - protein, 225 aa, Arabidopsis thaliana
  Clone ID: LIB22-006-G11_FLI.pep
IRPVSEDDTVVEELSIVPSGSDPSASTKEYICESQTLVDRKRHCENEAVEEPEPKRRLKKDNSQSSDSVSKPGKKNKFVVHAAGDVGICGDGYRWRKYGQKMVKGNPHPRNYYRCTSAGCPVRKHIETAVENTKAVIITYKGVHNHDMPVPKKRHGPPSSMLVAAAAPTSMRTRTDDQVNIPTSSQCSVGRESEKQSKEALDVGGEKVMESARTLLSIGFEIKQC

SEQ ID NO: 53977 - protein, 225 aa, Zea mays
  Clone ID: UC-ZMFLMO17215B09_FLI.pep
RRRQVHARAAAGGRDTGAAPEPGAPFDRWRRGHVARGFPAAAEPHAAHPLRQPHRRRSRPPRRRWPVLLLLAHGSRFLYARAPCFPVQSSMVSGSLRALPSALPASCSPSSASSSYLPCRGTLLRAARRARPALGFHLPACVPVCARRAPTASYARSCVYSFLALVPARVELSCRALAPSNRLLAVRAVEVLSPCALTSAAADSAIKFASAPCSARFAVGNFSTF

SEQ ID NO: 53978 - protein, 475 aa, Homo sapiens
  Clone ID: LIB4119-040-C5_FLI.pep
SMISFCPDCGKSIQAAFKFCPYCGNSLPVEEHVGSQTFVNPHVSSFQGSKRGLNSSFETSPKKVKWSSTVTSPRLSLFSDGDSSESEDTLSSSERSKGSGSRPPTPKSSPQKTRKSPQVTRGSPQKTSCSPQKTRQSPQTLKRSRVTTSLEALPTGTVLTDKSGRQWKLKSFQTRDNQGILYEAAPTSTLTCDSGPQKQKFSLKLDAKDGRLFNEQNFFQRAAKPLQVNKWKKLYSTPLLAIPTCMGFGVHQDKYRFLVLPSLGRSLQSALDVSPKHVLSERSVLQVACRLLDALEFLHENEYVHGNVTAENIFVDPEDQSQVTLAGYGFAFRYCPSGKHVAYVEGSRSPHEGDLEFISMDLHKGCGPSRRSDLQSLGYCMLKWLYGFLPWTNCLPNTEDIMKQKQKFVDKPGPFVGPCGHWIRPSETLQKYLKVVMALTYEEKPPYAMLRNNLEALLQDLRVSPYDPIGLPMVP

SEQ ID NO: 53979 - protein, 621 aa, Zea mays
  Clone ID: UC-ZMFLMO17215H12_FLI.pep
PKLSLSSLATARLERSRPGVPVPVAKPAADEMDYLRTVVPSQLLAERGSNLVVINPGSGNVRMGFASQDVPFNIPHCIARHINPQEGEEPRFSVRDQMLNCHATSSQNAERESAYDIIAALMKIPFLDDEEMPSPNQPLPPKMGRVDGFSSQQNRDDNKFTWTDVSERIIKPSTPFDRSVYKDAEEDTLPSTSDDDNGQDFKENKYKEMIFGEDALKIPPSESYCLSRPIRRGHFNVSHNYSVHQVLEDLRTIWNWILTEKLHINPRDRGLYSAILVLGETFDNREIKEMLSIVLHDLGFSTAVVHQEALSAAFGNGLSTTCVVNIGAQVTQVVCVEDGVALPHTALALPYGGDDISRCLLWVQRRHGTWPNFQTDPMSNPIDMLMLNKIKESYSQIKTGSIDAAVLVHSYDNERSGGHQKTRLSAINVPPMGLLYPRVLVPEEYPPPPRSWFQDYDDMLEDTWQTSDGLYPSGNGGFGMWDSYPMFPTRLKKFDNIGLVEAIISSVLSTGRVDLQKKLFGSIQLVGGAASTAGLAQVLEQRVRTKISANQSIEKVEVLQSRTYPLFVPWKGGVILGVLDIGKDAWIHREDWIKNGVHIGSGRKYKDSYFLQAQVMCYYNV

SEQ ID NO: 53980 - protein, 197 aa, Gossypium hirsutum
  Clone ID: LIB3582-058-E4_FLI.pep
AEGIQEFTVFGEVVTNFDITRYDVERIMASNTLLAGEFARRNKDVGPGGNDNLLTGNTNAETNINISPKNNGGQPDWKMILYQSSEQQQPNIIENFKAQAFSLAPETMVGHREVDDSSKIGTTHFSNASSLVTSLSSSREGSPERSSLPMAFAMPPPPSSKLFTTSPNTVNSWIPSAQLRPAISMPQMPVFAAWTDS

SEQ ID NO: 53981 - protein, 297 aa, Zea mays
  Clone ID: UC-ZMFLMO17219C04_FLI.pep
KIIRAEGQGTRTPRERSRGEIMATATTLSFSGGGGGTTLLRGHVALTSGRCCTFPSSRWRPPRLSASRADDSSPAPFEMTVEDALKLLGVAEGASFDEILRAKNAVLASCKDDQDAVAQVEAAYDMLLMQSLSQRRAGKVANNRIRFADVKPVKSAGAGTVPQWMQATMKNAPITFETPSSSSLGIQSCVYGALMVFTYASGSSTSLPSAYSSPDVPGFILATGFGASLYFLAKKNMNLGKAALVTVGGLAAGATVGSALENFLQVDLVPFLGIHSPAVVVSEFILFSQLLVSLFVR

SEQ ID NO: 53982 - protein, 673 aa, Zea mays
  Clone ID: 700101868_FLI.pep
TAVKHGLDANVFVGSSLINLYVKHGCISDAKKVFDFSTEKNIVMWNAILYGFVQNELQEETIQMFQYMRRADLEADDFTFVSVLGACINLYSLDLGRQVHCITIKNGMDADLFVANAMLDMYSKLGAIDVAKALFSLIPVKDSVSWNALIVGLAHNEEEGEAINMLKRMKFYGIALDEVSFATAINACSNIWAIETGKQIHSASIKYNVCSNHAVGSSLIDLYSKFGDVESSRKVLAHVDASSIVPINALITGLVQNNREDEAIELFQQVLKDGFKPSNFTFTSILSGCTRPVSSVIGKQVHCYTLKSAILNQDTSLGISLVGIYLKCKLLEDANKLLEEVPDHKNLVEWTATISGYAQNGYSVQSLVMFWRMRSYDVRSDEATFTSVLKACSEMAALTDGKEIHGLIVKSGFVSYETATSALMDMYSKCGDVISSFEIFKELKNRQNIMPWNSMIVGFAKNGYANEALLLFQKMQESQIKPDDVTLLGVLIACSHAGLISEGLHFFDSMSQVYGIVPRVDHYACLIDLLGRGGHLQKAQEVIDQLPFRADGVIWATYLAACQMHKDEERGKVAAKKLVEMEPQSSSTYVFLSSLHAAAGNWVEAKVAREAMREKGVMKFPGCSWITVGNKQSVFVVQDTHHPDALSIYKMLDDLTGMMNKDGRIKECLLEGQ

SEQ ID NO: 53983 - protein, 483 aa, Zea mays
  Clone ID: UC-ZMFLB73265E07_FLI.pep
HRRSPRVRAPPLHLPIDLRRPRIFPYELCFSKFAAGHIDVVILDPDECVCHLHGSSTDLARMFGRGSPRMNLIQAATMKKISPRSTTNKRKKRTSPKVGRLRANWNSGLEKGLVEILQDHNNDCYKGQNGWSSEAWNRIVKLFHEKFSYVTFTKCQIQDKEKELKRDYKALKEARQQSGVSWDERLCRIEAEEPIWNNLTTSNERLKKFRTKSFPLFEALGELYDGNIAEGTMNFTSIEPSRPPVTQPCQGAATQPSQAAFTLTQPSQIAFTQPSLAAFARPSRTAFRHPSLAAFPQPSQAAFAQPSQTIFTQPSEATFTQPSEATFTQPSEATFTQPSQAAFTQPSQANISQAICDEDDELRVLDPPAPASVSKRAKNVGTGNSRTRINKRTQDGNVVEMMGRFLEMKEKQAEADERATTNANEDDFPIQTCIAIVDGMEEFSDDEKVDSYDVFKDAQNRAIFMTAKDATRIKWLRKKIART

SEQ ID NO: 53984 - protein, 411 aa, Zea mays
  Clone ID: UC-ZMFLMO17171C06_FLI.pep
YICYSRCIIYVVTLYLNSDLDETKLKEKAQLFHDTFLTKLSLLLKGMVVAPPDKFGETLVNERINGGTFTGSENFQLPNKMMPNGGMRLYGGAQYHRAMAEFRLVVGSTRCPPITRDEIVNACGVEDIHDGTNYSRTACVIAVAKARDTFEPFLDQLGFRLLYILKRLIPISVYLLEKDGEHFSSHEVLIRRVQEAFKRFVESTEQSCRQRCMEDLESTTRYVTWSLHNKNRAGLRHFLDSFVAPEQLSVNTLNERFSGLNDNKQDKAKGDSKSNHSPDTNSSTAMPETRLVDLLDSTLWNRRLVPSSERLVYALVHQIFHGIKEHFLVTTELKFNCFLLMPIVDKLPALLRQDLESAFEEELDSIFDVTQLRQSLGQKKRELEIELKRVKRLKEKFGEINKKLNSLQVRQ

SEQ ID NO: 53985 - protein, 408 aa, Arabidopsis thaliana columbia
  Clone ID: LIB3176-028-F1_FLI.pep
RYHLKHKMGTSTTESVVACEFCGERTAVLFCRADTAKLCLPCDQHVHSANLLSRKHVRSQICDNCSKEPVSVRCFTDNLVLCQECDWDVHGSCSSSATHERSAVEGFSGCPSVLELAAVWGIDLKGKKKEDDEDELTKNFGMGLDSWGSGSNIVQELIVPYDVSCKKQSFSFGRSKQVVFEQLELLKRGFVEGEGEIMVPEGINGGGSISQPSPTTSFTSLLMSQSLCGNGMQWNATNHSTGQNTQIWDFNLGQSRNPDEPSPVETKGSTFTFNNVTHLKNDTRTTNMNAFKESYQEDSVHSTSTKGQETSKSNNIPAAIHSHKSSNDSCGLHCTEHIAITSNRATRLVAVTNADLEQMAQNRDNAMQRYKEKKKTRRYDKTIRYETRKARAETRLRVKGRFVKATDP

SEQ ID NO: 53986 - protein, 266 aa, Zea mays
  Clone ID: UC-ZMFLMO17176H02_FLI.pep
QPAFLELVSPALRRRAENHADDDGGHHVGPGMLPLQNQDPQDPLLPPTTVRVRLRQGGVRQGQGAGFGDLRRHGPRLQAPLQGRTFRNQNRDCAPAPAAAATEKGSTTSTNGACSCRGEPPTARSNEQQARSATNVHKSAHPVPMPVPVSVPAPVPKSTAALLPLPLLQAAAMPDTTTTTTTALSDTTTAMSATCVRVQVPSMDAVPVPRPPVGRLLRGEPTTRRPLRCHVTANCCCRGGRAGTAAGCCNCNLSRPCHFICMCASA

SEQ ID NO: 53987 - protein, 166 aa, Glycine max
  Clone ID: LIB3028-002-B2_FLI.pep
PEDNVATKEALVLELSSQQEYLRLKARYEALQRSQRNLMGEDLGPLSSKELESLERQLDSSLKQIRSIRTQFMLDQLSDLQRKEHFLGESNRDLRQRLEEFQINPLQLNPSAEDMGYGRHPGQPQGHALFQPLECEPTLQIGYHPDPVSVVTEGPSMNNYMAGWLP

SEQ ID NO: 53988 - protein, 782 aa, Zea mays
  Clone ID: UC-ZMFLMO17175H08_FLI.pep
TLHWGGIDLNNSGSVVVREDKRLLTVLFPDGRDGRAFTLKAESSKDLFEWKTSLEEALAQAPNAALLMGHNGIFRNDTTDVYEEAIPNWREKRPTKSLVVGRPILLALEDIDGSPSFLEKALCFLEKHGIKVEGILRQAADVEEVDRRLQEYEQGRTEFAPEEDAHVVGDCVKHVLRELPSSPVPASCCTALLEAFRLDIKESRIKSMHAAISETFPEPNRRLLQRILKMMHTVASHTAENRMTPSAVAACMAPLLLRPLLAGECELEDDFDMSGDSAAQLIAAANAANSAQGIVTTLLEEYESIFNDEHFRCSLSPDSQTGDSGSEESTDDETVDIKDNGFHDAENDVDQELDDAERVLSGKLSETSACVHADLHDYKEVNGNDSDAELSVEDNTFEPNVNLNDTPLSRLIENGKKPSNLASSHETPLSVGEILLSLDAGVPLPGRAAEYSKDRHSSKPNGIQQHVKRTNLWGRSNARKGQRSELVDPSSEEELAIQRLEVMKNDLQVRIAKEARSNAILQASLERRKQALHERRVALEQNVSRLQEQLQAERDLRAALEIGLSMYSSQFSSSHSMDSKTKAELKEIALAEADVARLKQKVAELHLQLNQQRQHQYGSSVDANDCPPHIPNHLSQNTVQTGFDRTVAFCNQEKQRNEESLPCTSHWRSIKQHVLSQGSSRPFSRKHSSDTSLSDSREASTSVLAEGGPLLVNIARTTEQGVEYGRPPTVPSSTLVELTTRLDFFKERRSQLMEQLHSLDLGHGSASHGFPYKPSSPWNSPR

SEQ ID NO: 53989 - protein, 210 aa, Zea mays
  Clone ID: LIB3062-050-D11_FLI.pep
VKIRPSQWDGGTDSHLVLHPRFHHICLLNKCAWQTSIWFTSQILSLGSSGLVICAGGIWCCRWWWRRRCLRCICSATARLNLPSRISSTTNCPILASCGVRSCTAACWLRRCSIGIVGHCTLRVACNWIARVTCICISRASIISIVVCSSLSTLLICPILGSLLICPILGSLLICPSLGPLLICPRLGPLLICPSLGSLLICPSLSTLLI

SEQ ID NO: 53990 - protein, 197 aa, Zea mays
  Clone ID: UC-ZMFLMO17169E11_FLI.pep
SRLMNSGIHHTAVLQSSLHTSTNCYGSNMLGSRVVAPCFCCRSPCSMQKSGVRSGPTGAETTDTGTRNKMREETPGPKTSTPVRSPPPAHNNHLFINTWPAMRAHPSWQRPPLGCHIFFSLFCCRRTQTFTCCSLPRLFQAAYLIDLLIIIEIDPIIISAETSSIEVKQDCRPRDPAASSHRRLRSAPNRTTTTTTT

SEQ ID NO: 53991 - protein, 285 aa, Zea mays
  Clone ID: LIB3066-031-B1_FLI.pep
RRLQVLLSISSHTDTTDGDVPFATQRNARWIWDAAYGRMELASVGEGVEDGAHVESERGGDEADEARGGLGGGAVGGAAQRAEADLHDHDHGRHQEDAADDGSDGGGEHAEAEHAGVDVGARRVVRVLGVDEVERQLQALRHQAGEEEGREGHHLQHQQRPRHARAGVAPRVPCQAPQLPRCRQRQPHEHGHREQRVHVHHAVQRRHVHARRVRAQRRRELPLVPVVRVGVPAAVAVLLRFVHGGMRLDQAEARGSRTADFAGQPWGWDGGKNEMEELRIVQLTK

SEQ ID NO: 53992 - protein, 108 aa, Zea mays
  Clone ID: UC-ZMFLB73355D01_FLI.pep
YFKVLRRKCFVPVLFHLNNSLLSQLHFLTSSAQSNAKIEELLQEDHNAKRRREKYQKQSSLLSKLTRQLSIHDNRAASYGNDSSGAGKFYTSNKNIFHCSPQMCSIMS

SEQ ID NO: 53993 - protein, 728 aa, Zea mays
  Clone ID: UC-ZMFLMO17093C02_FLI.pep
RIAGSPTQSSSCGMAAAEPCCISHAFERATRQEPGRLAVIHAAASGADSEERRFTCGDLLAAVGSLSRRIAAALGSTATDTRRDREQGSGFRAAGAVVPRVVGVYASPSLEYVAAVLAVLRCGAAFLPLDPSWPEERVSWAISASNAALVVSSVGSRGATLFESSACPVLRFYGGIRRRFRDGNGGDDGEELVWPCEHEWHRKFCYVMFTSGSTGKPKGVCGTEKGLLNRFLWMQRRNPLCSDDVLLFKTSVSFVDHLQEFLSAVLTCSTLVIPPSEWRANPASLANLIKVYRISRMTLVPSLMEIILPTLAEKLSDGCNPLKILIFSGEVLSVSLWKRVYEFLPEATIINLYGTTEVSGDCAFFDCKKLPTILEQEELNSVPIGFPISNCEVSLVTNDGLSDEGEISVSGACLFTGYLADPMTSNCPEGSEVLAYYRTGDFARRLKTGELIFLGRKDRIVKIYGHRFSLEEVESTLRDHPDVSDAAVTFQSNGSLDFKAYLVLRSNNKFLKCTQGYSGLHSSRDIIAPLRNWLIMKFPLAMVPRLFIPMKSLPLTLSGKIDYVKLSSLVCAFEPCEIHPESSPADPHMQVIKKAFSDALLVHEVSEYDDFFSLGGNSITAAHVAHKLEIDMRLLYIYTTPSKLFHGLLGEHSHVIPPTPEFHNRKKLRKYASISDSFGPVSEYLDSNFHDQGQISKEGAYDHFAGNHWQTMDTKFSLTKGVVYWPLQ

SEQ ID NO: 53994 - protein, 102 aa, Zea mays
  Clone ID: LIB3059-045-F10_FLI.pep
PAAILQHIVSSVGDTAGSSVGAWSRLLQDGLEDQAEDRLVPVLRLHLPELLATLLPQRLALRRAVGRRRRAALMPQKLDALAQDRGAANAAGSLQLARAWMR

SEQ ID NO: 53995 - protein, 371 aa, Zea mays
  Clone ID: UC-ZMROB73012E11_FLI.pep
SVERNAEPGEEGGRTGDCRSRTGGGVEEGAESMRGSADAVVVARDVVASSSPSKAASALDMTRYPRLSPDGLPLPNGSGSGASKKPAAPVSPAPRSSKDDVAPAVATDSSRIAAFLASTSLEPKPRARAPQPQPTAPNSAPTAAVAANRSPARDHGHGHCSDHSDPASPSSTGARELLLRWGQNKRMRCRRDCASASPQRRQAGGKIPRRSSSPAADNLMPPPSAAPYARGSNLRYATPRPPRSGASDAHHGRGALPNPLSNRSTGASRAWRASTATPTDHRPTAAGRRACGGSNAARRRRRRRFGDSEGCVSTATRSRRLTLSRWVKGCQKEQEEGGFSRKKTILFRVNHSGAVLYSRRFVYLGSDETMS

SEQ ID NO: 53996 - protein, 81 aa, Zea mays
  Clone ID: LIB148-016-H4_FLI.pep
TSDVVHTGNTTSILIRTLFSFSAIQAHRSCAKKTYLHFLQELARISLVVVKQKGKKPPQNQGFANSTSKSGSAGSFSLGLS

SEQ ID NO: 53997 - protein, 653 aa, Zea mays
  Clone ID: UC-ZMFLB73030D09_FLI.pep
RRPTQQCRDSLSLSPATSRSRAPHLPGQGLGMGAPLASWPWASLGSYKYLLYGPLVAKVAHAWRETGSLPLGSWCLHLLLLLALRSLTFQLWFSYGNMLFFTRRRRVVKDGVDFRQIDAEWDWDNMVILQTLVAAVAMGSAAFPAVSELRAWDPRGWALALLLHVAVSEPVFYWTHRALHRGPLFSQYHARHHSSPVTQPFTAGFGTPLEALLLTLAMGAPLAGAFLAGAGSVSLVYGHVLLFDCLRCMGYSNVEVISHRAFAAFPPLRYLVYTATYLSLHHREKDCNFCLFMPLYDALGGTLSSRSWGLQREVDQGMNDRVPDFVFLAHVVDVVSSMHVPFAFRSCSSLPWAMRPVLLPLWPVAFAFMLLQWFFSKTFTVSFYFLRGRLHQTWSVPRYGFQYFIPSAKKGINRQIELAILRADKMGVKVISLAALNKNEALNGGGTLFVNKHPNLRVRVVHGNTLTAAVILNEIPSSVREVFLTGATSKLGRAIALYLCRKRIRVLMLTLSTERFLKIQREAPPEFQQYIVQVTKYQAAQGCKTWIVGKWLSPREQRWAPPGTHFHQFVVPPIIGFRRDCTYGKLAAMRLPKDVEGLGSCEYTMERGVVHACHAGGVVHCLEGWEHHEVGALEVDRIDVVWEAALKHGLTPA

SEQ ID NO: 53998 - protein, 159 aa, Zea mays
  Clone ID: UC-ZMFLMO17097C05_FLI.pep
VLECIGSRAEPAREPISSRASLSSSRSDRAKPSLAWLGSFLALAEGSCHQLIFFLRIVPENFIAHCFYQLQPFSAGFAGSFLELKPIRKSNKFILFPFFLFLLHSPPTRSWKRPICQIFLHQVLSADMLCHNSKFHLGQVVGGPQLHVAQGSSHAEAQS

SEQ ID NO: 53999 - protein, 456 aa, Zea mays
  Clone ID: UC-ZMFLMO17051F02_FLI.pep
PKLCLPPLPHTSKVSRIRTGDFFYDDRTMLEIKNPSRLAFQNLGDLENLIAKDPLLFSFMDLKKLHSLRRIWVNRCDETFLRGLDDGVAIPTVQSLELGQFTPTKNSLSNVFKCFPALSSLDVMASPSDEDPEEVVLHFPPSSSLRDVTFNGCKNLILPMEEGAGFCGLTSLESVAIKECNKLFSRWSIGGRAAQTQSIINPLPPYLRTLSLYYMETLPQEALLPNLTSLEKLTLHNCLGCEQSTEPMALPANLTSLTSLELFNCRNITMDGFDPRITFSIKSLWVENQRNHGTDPYSVAADLLVTVVRTKTMPDVSFKLVRLYVDNISGVLVAPICRLLSATLEKLSFSNDWRTENFTKEQDEALQLLTSLESLGFYDCRALQSLPQGLHRLPSLQQIIIRGPQNIISLPKEGLPDSLRLLQITNCCAEIYEACQQLKGTRPDIDVFAFKADVQN

SEQ ID NO: 54000 - protein, 233 aa, Zea mays
  Clone ID: LIB3061-006-A8_FLI.pep
LASGYTTAHSFFSGGHPAVQAYRLQQAIAASVLQQPIAQLQQQSLAHLTIQTIATQQQQQFLPALSHLAMVNPVAYLQQQLLASNPLALANVVANQQQQQLQQFLPALSQLAMVNPAAYLQQQQLLSSSPLAVANAPTYLQQELLQQIVPALTQLAVANPVAYLQQLLPFNQLTMSNSVAYLQQRQQLLNPLAVANPLVAAFLQQQQLLPYNRFSLMNPVLSRQQPIVGGAIF

SEQ ID NO: 54001 - protein, 154 aa, Zea mays subsp. mexicana
  Clone ID: UC-ZMROTEOSINTE117A09_FLI.pep
ASIYTAERMTRKMTMLPSYRKHALYFLEDVSHAAINYRGSRTRLRGCSCGRGFLGHLGRLLQRADEVAVPVDVVHTTSCWPELGAPEPCRGERSVLPGIRLAPCVTHQELRWVRSALQDIVKHICFAVFYLCNLFPDGDKSVAEPVQLGLALTF

SEQ ID NO: 54002 - protein, 182 aa, Zea mays
  Clone ID: LIB3062-034-B10_FLI.pep
VNPIGVRSCYDEGKRVAETLMFDYHRQHGIEIRIARIFNTYGPRMNIDDGRVVSNFIAQAVRGEPLTVQKPGTQTRSFCYVADMVDGLIRLMNGNNTGPINLGNPGEFTMLELAENVKELINPDITVTMTENTPDDPRQRKPDITKAKEVLGWEPKIVLKDGLVLMEDDFRERLAVPKKTKA

SEQ ID NO: 54003 - protein, 202 aa, Zea mays
  Clone ID: UC-ZMFLMO17011G05_FLI.pep
SQTFHLHLHPGSCTSEVMRVLPYLKKAYGNAMQKVLHVGPDSCTVVSNLLKEGKVEAWGVEPYDLEDTDSTCKSLVRKGFVRMSDIKFPLPYRPDSFNLVVVSDALDYLTPRYLNKTLPDLARVSTDGLVIFAGNPGQQKAKVSELPKFGRPAKLRSSSWWTRYFVQTGLTENEGPLKKFEDATSKNKYKPGCQIFHLSSPR

SEQ ID NO: 54004 - protein, 254 aa, Zea mays
  Clone ID: LIB3062-058-E3_FLI.pep
SIPSCKLLEEVCKRNFATHFDYCTTACTDFVSLDEATFKDILEHGDMTVTSEERVLDVILTWCMGACETFHWTSVDELLRTSTPEQLFGERLSAINTLLPLVRFPLMHLSILKRMERSNLANHIQAFRQLVAEAIEFSHAGQLMPTACECERFQHRRSSYKELQYISDGDSNGVIYYAGTSFGKHQWMNPVLTKNITVVASSPNSRHTDPKALVSKNYQGTCFAGPCVENGKRVSWWMVDIGQEHQVGSYIPGI

SEQ ID NO: 54005 - protein, 93 aa, Zea mays
  Clone ID: UC-ZMFLB73319H11_FLI.pep
VLKPLVGLRNTEQQQQYRKESAEVGQMEVALPLLEQLLVEWLLAQPCYLLFLLSVLPIGGTGNHKSIFSMYMASKLVFDYYLSCNIRANNVYM

SEQ ID NO: 54006 - protein, 410 aa, Zea mays
  Clone ID: LIB3062-058-F5_FLI.pep
RARSRSTPRHQSNGGSAAPRRVPCLVLWLLGRPRAEVQRHLQLRRLHVRHRQPVRERSPRRPDAHPAALRRDLLRPRHLPLLRRPPRRRLPGREVRAALAEAVEAGRRELQAGRQHGDHRRDHHGFWLLPVAGHRRQDLEQRAPQHPDPMVPAADAVHLRFKAGLQVVPVQVPVRAGRVRRQRLQRAALRRLLPGAGEQAERHHRGRHRAGRGAAHPPGRDARGGPRRAARGLLPDLPHAVPDLQRRRLRPARLPEALQRAVRAAQRAAAAQGVGPAGQVPRRADHVRRLLRPRLRHGQEARQLRVQREPQGVLRRRRRQVQLPERRALRHARRARVLQPVVVAQLGRHPPDGGGVQEDRRRLGQRGLLPPAHLGVIVCLDLIRLFVSGSERFGSKMMEAISKKNRLYTV

SEQ ID NO: 54007 - protein, 515 aa, Zea mays
  Clone ID: UC-ZMFLB73307B10_FLI.pep
LEYLEERRLKDLVKKHSEFISYPISLWTEKTTEKEISDDEDEEEKKDAEEGKVEDVDEKEEKEKKKKKIKEVSHEWSLVNKQKPIWMRKPEEITKEEYAAFYKSLTNDWEEHLAVKHFSVEGQLEFKAVLFVPKRAPFDLFDTKKKQNNIKLYVRRVFIMDNCEELIPEWLSFVKGIVDSEDLPLNISRETLQQNKILKVIRKNLVKKCVELFFEIAENKEDYNKFYEAFSKNLKLGIHEDSQNRTKIAELLRYHSTKSGDELTSLKDYVTRMKEGQNDIYYITGESKKAVENSPFLEKLKKRGYEVLYMVDAIDEYAVGQLKEFEGKKLVSATKEGLKLDETEDEKKRKEELKEKFEGLCKVIKEVLGDKVEKVVVSDRVVDSPCCLVTGEYGWTANMERIMKAQALRDSSMAGYMSSKKTMEINPENPIMDELRKRAEADKNDKSVKDLVMLPFETALLTSGFSLDDPNTFGNRIHRMLKLGLSIDEDEPVEAEAEMPQLEDDAGESKMEEVD

SEQ ID NO: 54008 - protein, 726 aa, Zea mays
  Clone ID: UC-ZMFLMO17309H11_FLI.pep
APLLVMHSSENKLGWNETSMGLVPVPKRPARPDASHQCKSDSFMKRSPRKVRNATLAKSIKSKYHYSPLKQRKGSDSVPGKIVTGLTARKKKKRKIQITDEATRLERRARYFLIKIKLEQNLLDAYSGDGWNGQSREKIKPEKELQRARKQIIKCKIAIRDIIRQLDLYTSTGSVDDPLMPTDQSTNPEHTMCSTCKSHESFPSNKIIFCKGPCKRACHEKCLEPPLNKSVLPTSSHGWLCKFCLCKVRILETINAHLGTSFTVKCHFEDIFKETTELIDSEDALDEDWLSEYSGDEDYDPDENEASGDCMDSGEKIMSDDSNGSGSPLYSPNDDIPDFISADLNVVEGFCHTNLDLGIDAVEDDFAQILTYQRPRRDVDYRRLNEEMFGKITGNEEQSEDEDWGHERRKKRTHSGVAGDNSVGFLNVISDEKSQKKGRKLFRIPPAAVEVLRRAFAENELPPRDVKENLSRELGISFEKIDKWFKNTRCAALRDRKAEGNSHNTAPSKSSKNKGKAGISGKTGRNGHVTGPCNNLRTNEEKTGISGKFDSGDNSCLVPFSEVINVPTRLPHNFEMRKMESTRSPARLHNKGGFLSATVQIKESTLLPTGKPCWQSEMSHPTTNEVSTSAQATTWIDAGACAEEQEPTPWVDIGVSDYQPFLDVIDDMCGLEWRLQRLKENMLSSSIDGQTAASESDKRNQTVVLVPTAELKEKLPHDGLFGHYCP

SEQ ID NO: 54009 - protein, 309 aa, Zea mays
  Clone ID: LIB3066-016-D7_FLI.pep
GRDATPDRPRLLARGMKGGGVIRAAGGGAGGAGLLRTRLRLPVVLLSCSLFFLAGFFGSLLFTQDPEEADMPVPRERLLEAAWPEMPYGESGEAAPSLIPYQILSWQPRALYFPQFATSEQCENIVKTAKERLKPSTLALRKGETAESTKGIRTSSGTFLSANEDPTETLAEIEKKIARATMLPRNHGEPFNVLRYNIGQRYASHYDAFDPAQYGPQKNQRVASFLLYLTDVEEGGETMFPYENSENMDIGYDYEKCIGLKVKPRKGDGLLFYSLMVNGTIDRTSLHGSCPVIKGEKWVATKWIRDNIV

SEQ ID NO: 54010 - protein, 99 aa, Zea mays
  Clone ID: LIB3067-052-G7_FLI.pep
NANCLHDHLSAKVCAQKSRIIFLLSLDGLYQTFVLRHRLLFLVAGDPPRATSVRAAARLVANKAVSVVAGQPHLPLFLRRKNPDAPHAVHEVLPWVITN

SEQ ID NO: 54011 - protein, 327 aa, Zea mays
  Clone ID: UC-ZMFLB73107F06_FLI.pep
FGRIGRLVARVALQSEDVELVAVNDPFITTDYMTYMFKYDTVHGQWKHSDIALKDSKTLLFGEKPVTVFGIRNPEEIPWGEAGAEYVVESTGVFTDKDKAAAHLKGGAKKVVISAPSKDAPMFVVGVNEDKYTSDVNIVSNASCTTNCLAPLAKVIHDNFGIIEGLMTTVHAITATQKTVDGPSAKDWRGGRAASFNIIPSSTGAAKAVGKVLPELNGKLTGMSFRVPTVDVSVVDLTVRIEKGASYEEIKKAIKAASEGPLKGIMGYVEEDLVSTDFTGDSRSSIFDAKAGIALNDHFIKLVSWYDNEWGYSNRVVDLIRHMFKTQ

SEQ ID NO: 54012 - protein, 178 aa, Zea mays
  Clone ID: LIB3150-017-E8_FLI.pep
NLETHQTFRSLPFLCGLLSSSGVQLRPESRHGQQLNAPPPPRSHARPTGTASSHPSTATAKLLLADSNMTEEEAKKVEVEVEVTKAAPAKENAAEEKAVIPATEPPAAQEKPPAPADDSKALAIVESEYNLLCLILPLCSGRLAMERWCWRTGFCSKNSEKLSSSLLYALVRRLCTSW

SEQ ID NO: 54013 - protein, 387 aa, Zea mays
  Clone ID: UC-ZMFLMO17222E07_FLI.pep
RHMDASTEVTDAIGAVGFDNGAAGKLPPSDSVEGHAEEHDVLADGAHSGESEVINPSEEVEMEATSQSQDIKPRVPEGVQGHSMKVGTKSQRQSPRGGDKSQTRKSSFNPSYPKAPIARVSDPDLVDCSLSNGDAGSSKKKAEKSSFRPVAKETPSLEDSNEKKKTQKASNQHSVKKDIEEESNESVKPQRVGSTPSYGFSFKCDERAEKRREFYSKLEEKIHAQELEKSNLQAKSKETEEAELKMLRKSLNFKATPMPSFYKEPPPPKVELKKIPTTRARSPKLGRSKNTSSGGTEGNPNPPARSARLSLDERVSQNGVKKAPVANAVKKPQRKSLPKLPSEQTTKVDIAPSVPSAEELENKSPTKGLDREPIRAQITPDEPGLTA

SEQ ID NO: 54014 - protein, 68 aa, Zea mays
  Clone ID: UC-ZMFLMO17235F02_FLI.pep
VEQYCHFTVPHSTMETWKVSAHQLKRFFCLQRCIPDCAWRTIMAEQPLILIAGHGCFIWNGNSSVCLQ

SEQ ID NO: 54015 - protein, 195 aa, Glycine max
  Clone ID: LIB3242-679-C10_FLI.pep
SLGFARFLSIFHSHPSSPFSFSNFNSMPPFLGDLEQERYFFSTKVAKYPNGNRSNRATNSGYWKATGLDKQIVTSKGNNQVVGMKKTLVFYRGKPPNGSRTDWIMHEYRLILNASQSQSHVVPMENWVLCRIFLKRRIGAKNGEESNSKVVFYDFLAQNKTDSSSSVASGITHESDEHEESSSSNTFPYTIRRKP

SEQ ID NO: 54016 - protein, 260 aa, Zea mays
  Clone ID: UC-ZMFLMO17234G07_FLI.pep
GTVITDQAYARGAARRGRPRRGARRAPPSSATTPPSASTPSRPGSSPRSRCGVNRLRGPRRSRSFRRHQCAGKAVLSAGRKRGMIDHPRQSNYLSRSIVGSHALSCAHVSYLEASSIPAHPRLRRQRLLLWTPDPAAIAATVQVLLIFVFLGRSTWSNTSRTQCLHQSVRFFYVLWHSGQSASRPRNTRLRCLIILGSGGHTVEMMNIVTMLQKDRFTPRYYVAALTDNMSLQKAEIYEQSLIQVTSSHHKIPNDNRETT

SEQ ID NO: 54017 - protein, 485 aa, Glycine max
  Clone ID: LIB3242-682-C4_FLI.pep
STMLANNLSPSSVPTSEPFPCTENGTATNKRKRRPAGTPDPDAEVVSLSPKTLLESDRYVCEICNQGFQRDQNLQMHRRRHKVPWKLLKRETPVVRKRVFVCPEPTCLHHDPCHALGDLVGIKKHFRRKHSNHKQWVCERCSKGYAVQSDYKAHLKTCGTRGHSCDCGRVFSRVESFIEHQDACNMGRLRPHESQPLQPSACLSRTASSPSPSSETNFSTAPWPTRMIIQKPSETPTIFMNNPITAITTAETSSKSNNKLLHPNLDLQLSTPTNNNNSNTSNTNTSNIANPIDNAAISAKRDHYHENHSTHLQLSIGSSDMSEKNDQSNRNSSEKSSNNSNNINDQNNKQQSNNMALLRVQEQAREHLRIAMAEKAYAEEARKQAKRQIELAEQEFTNAKRIRQQAQVELDKAYALKEHAMKQINSTMLQITCHFCKQQFQARNATTTSPDDNSLVLSYVSSAITTEGGEVENDNIAKDHAKDNN

SEQ ID NO: 54018 - protein, 381 aa, Zea mays
  Clone ID: UC-ZMFLMO17266F11_FLI.pep
PAPAPAGLRGRVPVQAHLPRGGLGLAPRRSSRALRVRASVAIEKETPESEPPPTFLREDGHGSGSVRARFEAMIRRVQGEVCAALEEADGGGARFVEDVWSRPGGGGGISRVLQDGRVFEKAGVNVSVVYGVMPPDAYRAAKAEAAKNGAAAADGHKPGPVPFFAAGISSVLHPKNPFAPTLHFNYRYFETDAPKDAPGAPRQWWFGGGTDLTPSYIIEEDVKHFHSVQKQACDKFDPSFHPRFKKWCDDYFYIKHRNERRGLGGIFFDDLNDYDQEMLLNFATECADSVLPAYIPIIERRKNTPFNEEHRAWQQLRRGRYVEFNLVYDRGTTFGLKTGGRIESILVSLPLTARWQYDHKPEEGTEEWKLLEACINPKDWI

SEQ ID NO: 54019 - protein, 59 aa, Homo sapiens
  Clone ID: LIB33-018-D2_FLI.pep
IVGFYGAFYSDGEISICMEHMDGGSLDQVLKEAKRIPEEILGKVSIAVLRGLAYLPGRP

SEQ ID NO: 54020 - protein, 731 aa, Zea mays
  Clone ID: UC-ZMROB73056B12_FLI.pep
ICHKNHDISSSTGGMPHAALSKTQLKKSVNSNLLADEKWHLIGASVWVRLISVLEHRLREFFEKEGLEHEAGVSGSEFRGLITSVAAKFVMDSIHFVSSSLVPLHASFLRKNLPMNSSSSLLFWLESKLPQQLPVSDSYDHLSRISQLSNSENMEALFNILWEISVNPVDVCNAFVSEGVNCFSLSNTNVTRSWKDIRCPVVECDKIITERSGEEHEHRLGSKRLGQGFAEKASYNGEVLYETKRRELIIQKEFQSPREILRRSGELLEAVCLNSVNEKQAAIATNRKGLVFFNWSDKQHNKSFSEYVWSGSDWPLDGWAGCQSTPTPTSISPGVDLGRKKGSQLGSVGATTGLSSLAKPGRDLTGGGAFGIPGYAGIGASGFGWGEPEEFEDFIDPPATLENIHSRALSRHPSLPLFLVGSSNTHVYLWEFGKASAMATYGVLPAANIPPPYALASISSVQFDCYGQRFATAALDGTICTWQVEVGGRSNVYPTESSICFDSHASDVAYVSASRSVIASAGYSSNGSNVVIWDTLSPPATSQTSIMCHEGGARSISVFDSDRGYGSISPLVVTGGKNGDIALHDCRFLSTGKSKHHRVTTEHGVEASSMHDIKSSTFGGTDSGMVWHIPKAHLGSVTKVTTIPNTSLFLTGSKDGDVKLWDAKNSQLVFHWTKMHERHTFFQPTSRGFGGVVRAAVTDLQVLPNGFVSCGGDGSVKLVQIKDDLAAAYQR

SEQ ID NO: 54021 - protein, 157 aa, Arabidopsis thaliana
  Clone ID: LIB9-43-G8_FLI.pep
LEIHNQSKMASYKLFRIAFLVCLSSSMMINTCSASRRLLQQQPLPQIPNLPIPTMGLPPLPSTLPQPSLPTLPTMPTAMSPFPMPSALPQPNLPTIPTAMPPMPTLPSFPTTIPSLPTNIPSIPSLPTNLPSIPSLPTSLPSIPFFSPPPSATTSSP

SEQ ID NO: 54022 - protein, 229 aa, Zea mays
  Clone ID: UC-ZMROB73078C07_FLI.pep
DVFFSYLTETLITFRYVKSRNDAQLRDKSKASDTTNCDPEAKTVDGKPIVPCGLIAWSLFNDTYTLIHNNKTLRVDKKDISWKSDRDHKFGSDVFPTNFQKGPLQGGKILNPKIPLSEQEDLIVWMRTAALPTFRKLYGRIHVDLKENDTITVQLENNYNTYSFSGKKKLVLSTATWIGGKNDFLGLAYLTVGGICFVLAFAFTLLYLIKPRKMGDNNYLSWNRPTLGR

SEQ ID NO: 54023 - protein, 225 aa, Glycine max
  Clone ID: 701068004_FLI.pep
CRGYYRCTYRNVQGCLATKQVQKSDEDPMICEITYKGRHTCTQASHLNKTVIPPSKTKVNLLGENKHQTHQIKNQPRQEKIEQQPPETFFTFGSSSGLEVKIEDIDHKEGIFPSFCFSSPSIVGSENGDDNNSSIFSYTMIENNLMESFSPAFISPTTSDIESNTFCHWGSTGLGQSVQSSGSDITDIVSAPTSVTNSPIMDLDFFFDKIDFDTDFPLSTMELCT

SEQ ID NO: 54024 - protein, 247 aa, Zea mays
  Clone ID: UC-ZMFLMO17165H04_FLI.pep
TCQTATDMIGSMKPEELQKMFEVASSLNSTSSAGPNLGPNMPEMSPDMLKMASDMIASMPPDDVQKMMSFASQMGGPGGAPRSSENINFGPSVRATTSNSARGSSSQPVLENPDELSDDQRMSQSSSSLPPSTADMQETMRNSMKDPAMRQMLTSMMKNMSPEMMANMSEQFGMKLSKEDAAKAQQAMSSLSPEDLDRMMRWMERAQKGVEVAKKTKNWLLGRQGLILAIVMLILAFILHQFGFIGR

SEQ ID NO: 54025 - protein, 132 aa, Zea mays subsp. mexicana
  Clone ID: UC-ZMROTEOSINTE115H07_FLI.pep
KQSNIYWADRNPIVPKERKLVLMQYIKHVLAERLFYSSSHFFSAFLIFSNASLQIHHGLGLPVGFNLFFRLRLIFMAIWWLTWLQVLLEGQASCLEVGIAANSLLFVVFPSKKIVLAAFHFCNLLQKIIFWA

SEQ ID NO: 54026 - protein, 132 aa, Zea mays
  Clone ID: 700101530_FLI.pep
DTHRLPPPPLPLRRSPHASGATSTMAPKKEKAPPPSSKPAKSGGGKQKKKKWSKGKQKEKVNNAVLFDQATYDKLLSEVPKYKQITPSILSERLRVNGSLARRAIKDLMAKGLIRMVSVHSSQQIYTRATNT

SEQ ID NO: 54027 - protein, 354 aa, Zea mays subsp. mexicana
  Clone ID: UC-ZMROTEOSINTE115H12_FLI.pep
MERGDGGSGRPPAERKAAWRDGAVTYFHLLFYIAISGGQIFFNKWVLSSKEINFPYPVALTLLHMVFSSVVCFAITKVFKIIKIEEGMTTDIYITSVIPIGGMFAMTLWLGNSAYLYISVAFAQMLKAIMPVAVFLLGAAFGLEEMSYKMLSIMSVISVGVIVASVGEITISWVGVVYQMGGVVAEALRLIFIEIFLKKKGVKLNLISMMYYVSPCSAVCLFIPWLFLEKPKMDDSISWNFPPFTLFLNCLCTFVLNMSVFLVISRTSALTARVTGVVRDWSVVLLSAAIFADTQLTFINIIGYAIAIAGVVAYNNYKLKVKPQANPQQGDENKVISGSTQDVVLSVSSAKETS

SEQ ID NO: 54028 - protein, 374 aa, Zea mays
  Clone ID: 700101791_FLI.pep
NPPMAHRVLLLLSLASAAAVAAAVDAEDPLIRQVVPGGDDNDLELNAESHFLSFVQRFGKSYKDADEHAYRLSVFKANLRRARRHQLLDPSAEHGVTKFSDLTPAEFRRTYLGLRKSRRALLRELGESAHEAPVLPTDGLPDDFDWRDHGAVGPVKNQGSCGSCWSFSASGALEGAHYLATGKLEVLSEQQFVDCDHECDSSEPDSCDSGCNGGLMTTAFSYLQKAGGLESEKDYPYTGSDGKCKFDKSKIVASVQNFSVVSVDEAQISANLIKHGPLAIGINAAYMQTYIGGVSCPYICGRHLDHGVLLVGYGASGFAPIRLKDKPYWIIKNSWGENWGENGYYKICRGSNVRNKCGVDSMVSTVSAVHASKE

SEQ ID NO: 54029 - protein, 433 aa, Glycine max
  Clone ID: 700892569_FLI.pep
RYVLQKPFTEEQCRQSCMEDCLCSVAIFRLGDSCWKKKLPLSNGRVDATLNGAKAFMKVRKDNSSLVVPPIIVKKNSRNTLIVLLSGSACLNLILVGAICLSSFYVFWCKKKLRRVGKSGTNVETNLRCFTYEELEEATNGFEKVLGKGAFGIVYEGVINMGSLTLVAVKRLNTFLLEEVQKEFKNELNAIGLTHHKNLVRLLGFCETQDERLLVYEYMSNGTLASLVFNVEKPSWKLRLQIATGVARGLLYLHEECSTQIIHCDIKPQNILLDDYYNARISDFGLAKILNMNQSRTNTAIRGTKGYVALEWFKNMPITAKVDVYSYGVLLLEIVSCRKSVEFEADEEKAILTEWAFDCYTEGVLHDLVENDKEALDDMKTLEKLVMIALWCVQEDPGLRPTMRNVTQMLEGVVEVQIPPCPSSQLSIQYSLD

SEQ ID NO: 54030 - protein, 377 aa, Zea mays; identical to SEQ ID NO: 46342
  Clone ID: 700242627_FLI.pep

SEQ ID NO: 54031 - protein, 279 aa, Zea mays
  Clone ID: 700243095_FLI.pep
ASSAMSSSWNSVGLAILYQVLGWVAFAAWSFSFYPQVLLNYKRKSVVGLNFDFLVLNLTKHSSYLIYNAALFFSPFIQQQYHDKYGDKEMIPVAANDVAFSLHAVALTAFTVFQVFIYERGTQKVSKVCISISAIVWIAALVCLIIAWPKSDWLWLIDVFNSIQVGMTAIKYIPQAIMNFRRKSTIGWSVGNILLDLTGGVLNFCQMGVQSIDQHTLVNFYGNIGKTLLSLETVFFDVLFIIQHYVLYPVKKDENGKAIISERVAPLIRPSDKPEEDNV

SEQ ID NO: 54032 - protein, 536 aa, Zea mays
  Clone ID: UC-ZMFLB73298G11_FLI.pep
SERKALELQLESKSVEVEELLMAVTSLEENTEQKELESQLELMSAQATELRLTVASLEERVQAERNISMQQKENAEAMLSTKEELEAQLCSATTEMGKLRDMVKALENEVKTEKALHEELTAHIQIKVEAAVDAVKEPLEAQLCSTNTEAEKLRDVVKALEDQVEKEKALCEELAAKVELKTKAARTAEAVQESLEAQLSSANAEIQKLEEITKQLQSELEKEKTLHEEFSAQLEMKIEAERARSMESAKESLEEQFQLVNSETAKLRDTVHALEHDVEKEKVFSAELQMQLEALEAVKKVLESEAESAHQDAKILSQKVESLEAKLTEHMLVTDEFTANVESLQSDRIAMEHKLKTADRELIKLTNKVSLLHREIEQERLMSEEYEQKCQKLEDQLSRDSRDAKLWRLANSNGDLKVKKEKELANAAGKLAECQKTIASLERQIKSLTDLDGVVLEPERLESSRDMPLPLDFRNSDAEFAMFTDDLYDFDLPNDSKSFFSPLPSIQTSSPPSEMSVFAGGLSTLSSYRSKRASRR

SEQ ID NO: 54033 - protein, 216 aa, Zea mays; identical to SEQ ID NO: 47321
  Clone ID: 700082619_FLI.pep

SEQ ID NO: 54034 - protein, 522 aa, Zea mays
  Clone ID: UC-ZMFLMO17180E09_FLI.pep
YSPSRPHPPPPTSALLRPPARHRSSRAGWPVLLQLPPPPEQSDAGMQQMLALQSVQPPPAAAHLRAAASAKTPPLLPRRAAGPPPASASASASAEFPGSVPDSAQMAPRRRRRRSVAGIDQDELLDPEALADPDSGFYEINGVRLHHKVCSHEDEDSSSDQSTGSTIASDSDVVLKSQIGLPILLLHGFGASVFSWSRVMRPLARIVRAKVLAFDRPAFGLTSRASRSADDAKPLNPYSMAFSVLATLAFIDYLGAEKAILVGHSAGCLVAVDAYFEAPERVAALVLVAPAIFAPRKAVKEGQSGEEEEGGQQTQSIPNDENSPPNLFARISGGFLELWKHIAGLVLKMITAIRDVVRSLCLKAVVAFLRSSLGVVLVRWVMDKFGILGVRNAWYDPSKVTDHVIQGYTKPLKSKGWETALLEHTVSMIIDSVSASRVPVSKRLSEISCPVLVVTGDTDRIVPAWNAERVARAIPGATFEAIKSCGHLPHEERPEEFLSVVEIFLRTAFANPNEQVFQAAVS

SEQ ID NO: 54035 - protein, 653 aa, Zea mays
  Clone ID: UC-ZMFLMO17038G05_FLI.pep
NCKNDQEVANILASGIKLREYTKGVENNIRQIELDSIQDYIKESENLVSLHDQICDCDNILLQMETVLTGFQTEIGSISSEIKVLQEKSMDMGLKLKNRKAAESKLSKFVEDIIVPPRMIDIIVDGEVNDEYMKTLETLSKKIKFIDADPMVKSSKALKDVQPEVERLRQKAVSKIFEFVIQKFYALRKPKTNIQILQQSVLLKYKYTINFLKEHAKEIYAEVRTAYIDTMNKVLSAHFRAYIQALEKLQMDIATSTDLLGVETRSTGFIFSIGKEPLKTRPSVFALGERINILKEIDQPALIPHIAEAKSQKYSYEVLFRSLQKLLIDTATSEYLFTDDFFGEESIFHDIFAGPIQVVDEHFNTVLLNCYDAIGIMLMIRIIHQHQLIMFKRRIPCLDSYLDKVNMSLWPRFKMVFDLHLNSLRNANIKTLWEDDVHPHYVTRRYAEFTASLVHLNVEHGDGQLDLNLERLRMAIEDLLVKLAKMFSKPKLQTVFLINNYDLTISILKEAGTEGGKAQQHFEEVLKSNIAIYVEELLLEQFSSLIRFVKSRPADETAANSEKASIAEVEPLVKDFASRYKAAIELMHYDVITSFSNFLCGMEILRATLAQLLLYYTRLSECVKRINGGSALNKDLVSISSILFEIKKYSRTF

SEQ ID NO: 54036 - protein, 475 aa, Zea mays
  Clone ID: UC-ZMFLMO17179A09_FLI.pep
MGIASLTILIGELLLPFFLVVMEFICNMSCAFVCLLFVLLFFFSIMCTMSLCHIHIQMCKLYFCRIVLGIQCLVAILSRDIALLVPSQTGARLLCHPSSLAMVICSLGLILGHRHSMVHLSNLMVATPQHLVAIRLDGISLKTSNLIQLPLVLGMIIIVSSSNLSNNLPLGQLLLLMPLATIMVSLRRMLHRDMILPTLSRVVGSKHMDMMATLVTRPKGSSRATLSRLVMISRVMAHLLMDQLQTRPRMGPTMVVLEGPVRHLQGSKHQTQLLEANLAIPANRPLVLQQLTHLKVQLHLDMALHHPSLAMAPNHHSKADMVRALMGSLLHRARNLLHCHLMDRLCLLVLLRLVTGSMVTANLLTVHHQLTLVHPLQATRAMASSSLMAMLMVVQAMGSLQPTLLKQHLLLHPRITLLPLLRPLEQQLRQLLKTVGAPKHPLKLELQQLIGNKHFPRPCRVVSSALLLNIITHLI

SEQ ID NO: 54037 - protein, 97 aa, Zea mays
  Clone ID: 700169649_FLI.pep
KFAPTSIRSPTRCHCLQVMHTALSLTINQTIATEQSSLCGKTALFYTLNLELATPLAAILSTRRRPNGKPKKDRTTPPISVLQSGHTAFILSHLSTH

SEQ ID NO: 54038 - protein, 131 aa, Zea mays
  Clone ID: 700164858_FLI.pep
GFLVGGLLMKGARKNKPGYFILNLLGTIPFVAIRQRWLGKCLKRTLQKRFGGYRQLWENNLKSPSVPNRNMKGFKMRRFFVGFVMRGRYAWCYFPAGTELYANLVLRNARSVQSAVCQLKSACLYMMFKPH

SEQ ID NO: 54039 - protein, 235 aa, Zea mays
  Clone ID: 700799143_FLI.pep
KILRNEIDGKAALLGFVGAPWTIATYIVEGGMTNTYTNIKNMCHTAPDVLRCLLSHLAEAISDYIIYQVNSGAQCIQIFDSWGGQLPPHVWEQWSKPYIKKIVNRIKKECPHVPLVLYINGNGGLLERMKDTRVDVIGLDWTVDMADGRKRLGNGISVQGNVDPAFLFSPLPVLTDEIRRVVKAAGTKGHILNLGHGVLQKTPEEAVAHFFDVTRSLRYDTHFQGSVAEGLQPVA

SEQ ID NO: 54040 - protein, 330 aa, Glycine max
  Clone ID: 700893149_FLI.pep
ALFCLQSGAMSSSSADVFPAIQEVMLEFRAGKMFLEEKRVVPDTRKGLVRIARGEEGLVHFQWLDRTQNVVEDDQIIFPNEAIFEKVNQTSGRVYILKFNSDDRKFFFWMQESNADGDSQLCSSVNDYINRPLELLGEEEPDGSLPLQISEDMTEDDISSRAANLGIPNLGVEATSDVTSSGPVKLEDLQRILSNIGPADSIVDPDGGLGLGDILKPDLIMPLMDMLPLEQRLAPYLPEGKWSPEEILELLQSPPFRQQVDSFTYVLRTGQIDLSQFGIDPSKYKFTVLSFLEALEDSVSKSVESEEARQDDQDLRSQSCNRHDPMDESQ

SEQ ID NO: 54041 - protein, 278 aa, Zea mays
  Clone ID: 700212502_FLI.pep
LQHRAARRGWCPARIESSPEVMADSATSRPTVLVTGAGGRTGQIVYNKLKERSEQFVARGLVRTEESKQKIGAAGDVYVADIRDADRLAPAVQGVDALIILTSAAPKMKPGFDPSKGGRPEFYYEDGMYPEQVDWVGQKNQIDAAKAAGVKHIVLVGSMGGTNPNHPLNSMGNGNILVWKRKAEQYLANSGIPYTIIRPGGLQDKDGGVRELLVGKDDELLQTDTKSIPRADVAEVCVQALQYEEAKFKAFDLASKPEGVGTPTKDFRALFSQITARF

SEQ ID NO: 54042 - protein, 312 aa, Zea mays
  Clone ID: UC-ZMFLB73401B09_FLI.pep
LAKQLQGETNIKPLWGTAQLFMHPRYMHGAATSPEVKVYAYAAAQVKKALEVTHYLGGENYVFWGGREGYQTLLNTDMKRELDHLANFLQAAVDYKKKIGFNGTLLIEPKPQEPTKHQYDWDVATTFAFLQKYGLTGEFKINVECNHATLSGHSCHHELETARINGLLGNIDANTGDPQVGWDTDQFMTDIAEATLVMSSVVKNGGLAPGGFNFDAKLRRESTDVEDMFLAHISGMDTLARGLRNVAKLIGDGSLDDLVRKRYQSFDSEIGALIEAGKGDFETLEKKVLEWGEPTVASGKQELAEILFQSAL

SEQ ID NO: 54043 - protein, 270 aa, Zea mays
  Clone ID: 700342511_FLI.pep
PALCSSDASPGVRVETLESLIRAEACRRSSFRTLEEEHMLGPIGVKLKPANLLMQLITCGSISVKEHRGFGFIPTYRPRFTQVEFPSSVFSTPVALRHLDKIPCNTRTIGTRAPESERFSGSLVETKMQDESRRGISSLKRSSSYDEDRVYRAAHSKSDTENSCESGSFRCLPQTIRIISCKQSRNGTILSPFSDVRNSSSQQEYSTRSSPLGSSKSASNRMTDPSLGKVDSFHKEKDMIKIEERLPSGARVIIQSAPLCEDSDGSNESL

SEQ ID NO: 54044 - protein, 448 aa, Zea mays
  Clone ID: UC-ZMFLMO17282F05_FLI.pep
SAAGKEPPAGMAPPRKSRWGPPPPGVAGDKAAPSTSARRTPTPTPTRTADSRRHPGAPHAPAPHARNPGSQAVALRPQARPQPPAVETPPPQPYGFHNLDRRVMPLADGTVRTYFALPPDYSFEPVPLPPLPHRLLPRAAPDLWPPPLHLQMPPHEARRKHPAEQDEGFARHPKQPRLDEPHQPPPHAKVDGHALRRAFLKYAKMLNESSAQRRSYLEGGRVPCLACGRSSKDFADVHGLVMHAYNPPNADSLVDHLGLHKALCVLMGWDYTKVPENFKGYQSLPSDLVQASREDLIVWPPTVIIHNTSTGRKKDGRLEGLGNKEMDKKMTELGFSGGKSKSLYGKEGHMGLTLIKFANNSSGLKEAERLAEYLERQDRGRIGWSRAHASRSVDSDQNPLLVETDTRTAEKKRILYGYLAIASDLDELDSDSRKRASLQSRREFDPNE

SEQ ID NO: 54045 - protein, 634 aa, Zea mays
  Clone ID: UC-ZMFLB73180D01_FLI.pep
GLCLQGETGRGGRGGSGAREKRTGEEGGRMLSVVRVHLPSEIPIVGCEITPYVLLRRPDGAVSTNDVPETAPADGQFMRYRWYRIQSDRKVPICSVHPMEQATIQCLGCLKSKIPVAKSYHCSAKCFSDAWQHHKVLHERASSALNENGAEEEELFGRFGSGGSGVLSTAGSGSLSNFGQSPGVNNGPVPFYPSGTDKNSGETWFEVGRSRTYTPTADDIGHALKFECVAVDSEKKSPIGPSTSIMTSRVIPAPTPTPRRLIQVNGDVLGHLDLDSQISSLGTFTVLSYNILADAYATTDAYSYCPTWALTWNYRRQNLLREIIGYHADIICLQEVQVNHFEDFFSPELDKHGYQALYKKRTTEVYSGNPMAIDGCATFFRRDKFSHVKKYEVEFNKAAQSLTDAIIPAAQKRVALSRLIKDNIALIAVLEAKFGNHGAENPGKRQLLCVANTHINVHQDLKDVKLWEVHTLLKGLEKIAVSADIPMLVCGDFNSTPGSSPHALLAMGKVDQHHPDLAIDPLGILRPPSKLNHQLPLVSAYSAFARMVGVGYDLEHQRRTDPATNEPLFTNCTRDFTGTIDYIFYTADSLTVDSLLELLDEESLRKDTALPSPEWSSDHIALLAEFRCKPRIRR

SEQ ID NO: 54046 - protein, 119 aa, Zea mays
  Clone ID: 700431187_FLI.pep
DCEHRNVLMGCGKPRLLYPCGAGYRGKRERLPGRPSAGIKHGPVHCDGATGRDHDPLAAIPRGGGSCRQEAGAEGVKQLKDGSGTNINRSATRLIFVSMAWVLRLSARRCHSVQNHGCL

SEQ ID NO: 54047 - protein, 555 aa, Zea mays
  Clone ID: UC-ZMFLB73284A01_FLI.pep
TVQPNELPHGSQLIMGLNPPFGVKASLANKFIDKALTFKPKLIVLIVPKETKRLDQRRTPYDLIWEDSECLSGKSFYLPGSVDLNDKIVEGWNASAPPLYLWSHPGWTKKHMQVAEEHGHTCMGKIACHVEESNLSDDLSVRKQSDATNKLNSRSGKETPFNDRMSNLLDDGSARKQARSEEEKRTLGKIEHHVKKANIPDNLPVKKEPEASSKVMSHSGKDRKIGRYNRRRHDNRSSKGTPDHTESLPPEKQVEVAYEETRVIPSKKIAHNEKKSAQYNYEQTAAGMPNMRSRGGDSDMSISPPVSCNARSKPMSYSLTRPIEHLDTNAHLLAEEPSDSVLNRVPNHDSYLAIKEEYCDGFKRKNDPIFSHIDDSSRMRGSSIEEVTKPYITAPNSDPWSKGDGSFYRHPSSEDLNANADVLMPGYSARYGQIGGDSNPQASMVPLATDSRLHGGTVADNYLSARYSLGSSGARVSQPAPTVPPFGLSGASSQRGSVMDRYSYGLSGPTGTQRSVIDRYAPSLDGTNTTRSRSSLPEQYPFGQPGSSGGGWPHH

SEQ ID NO: 54048 - protein, 91 aa, Zea mays
  Clone ID: 700397446_FLI.pep
FIQTQQWSPPTNLNLLDSQTWRERLLELVGLVGVVDAEGVEVPGAAHLELDGVLGPLDPHRPCVLPPRSQQEVLDLVDLLRHGGSPGGRHC

SEQ ID NO: 54049 - protein, 299 aa, Zea mays
  Clone ID: UC-ZMFLMO17181A12_FLI.pep
RLGTEEVGGGTRLCTQVGAGRSLRAGRRCRMWVRPWTIKAAMKARRDPGRGAERRGRRALMAASQRITRSGRGAEGEEGVDGGCGIGSRQRITGSGRGAEGQEGVCDSGPRRRRKRERERGGGGGPLQRTTTATKARARAGRRGRTAPRWCYSRSPPHRPSASSSSGAPTRQSGPPSPSPASASTSTSSPPRQGRGASCGVGEHRVGRVMGPRTGAGWRPLPRSVCGGRVWPRGDGSEDRGASMAPFHRRRAEGAVSGYGRKRMERSAAGGRDAWSVRGRGGGGEESGGSTTETGAAER

SEQ ID NO: 54050 - protein, 402 aa, Zea mays
  Clone ID: UC-ZMFLMO17181B05_FLI.pep
DPSHSLGLVVSLAVAVRVALLQQRPGLLVGLRRLLLRLLGLERLQLDVVVVSHPEEGDPVAEEVDGGDGVADDGPGEGDEQPVLDDAGDVHGESRRLADEQEDGEVEREGAEGVGAEDEEVRLEDADGAQPGQLDEDPGHDEEGEAAGRDVVERGDGVEGDALGGEEDLDEDEARGLEGDGGELQGDAAGVEAGLSVGGNGDAEGDGEHVEHGGGLEGLLLEEDPDGVDGDGHERLEHLDEGDGEVDVGGVGEPERERVERADGEHGGDVELRRHGGRGREVDDAEDADERHGEGGAEGHVHHGEGDGEGPVVHLGVEDVLVVDDHGEGEEDPHRHVHVRDQDLADHRLRHAAVAGPFLAHGWPLAPPLPRAAPVRGRGGGGSRLSTGREIWKERRKGGGGA

SEQ ID NO: 54051 - protein, 320 aa, Glycine max
  Clone ID: 700567611_FLI.pep
SSVLLFVLMKRLGSSDSLGALMTICPPTDEHSPRNNHAYGREFQSMLEGLDEEGCVEEPGHHSEKKRRLSVDQVKALEKNFEVENKLEPDRKLKLAQELGLQPRQVAVWFQNRRARWKTKQLERDYGVLKANYESLKLNYDTLQQDHEALLKEIKELKSRLVQEENNNNTESDVSVKEEMLTTTLCETAIPGSDTKELSYECFNKSDEVGGGSSVFHVDFKDGSSDSDSSAILNEENNNHSPNNNAAISSCGVLQSHGLLLSPSSSSMNNCFQFQKQYQTTTTQYVKMEEHNFLSADEACNFFSDEQAPTLQWYCSEEWS

SEQ ID NO: 54052 - protein, 155 aa, Zea mays
  Clone ID: UC-ZMROB73066D04_FLI.pep
SEILTDRILLMQDRPRFAEGWIRFPQQTRISASRLQNGMIQLQIHLAELQLGIIHRYIHRGLPCFQLPADALEGDQALLLSCHQLRQALLPLDIHRCKLLHLINDEQDIGIHHTRASLRTREVAVLQIENRQGTANLIPIVSVGNQRKTWEGRKN

SEQ ID NO: 54053 - protein, 558 aa, Zea mays
  Clone ID: UC-ZMROB73077A05_FLI.pep
SCRTPPQPSSPFRFPTRPRRLTAPAAPAMDFSEQDVDVFGEDYDVHDGGAEAEAEADGGGDSSGSSSPSSSSSSSAAASSSSSSGGSSLSSSGGAAGEGEDGADAGDGEEYDSSNLIATRSAGAAGYLDDERREYENQEVEEERDLFGSDNEEYVRTPARSHYLVPVLPPIRNTNNHSRGGFGGRGGRGPPLLPRPGGHPGRHNFGYGRFGNGRHVEGLVSDMKLNKSEETLSRKAVTFQEPCEIACLSRVEGGEVYFDDRSLRLFKREICEYRGADLNKGFESYIEKRDLGSEGFGDLLACIRNSNILLQNTIHFVTYRNNLNKILATAYLREPWKMGVHKRRGVVYLDVHKLPERPKSEVERKRCYWGYSFENLATENSFSDDGRGIDANVEFCSVIKTKLGAHRIVMGAEMDCCDATDDGRRFYVELKTSRELEYHTVEAYEKEKLLRFWIQSFLAGVPYVVVGFRNDAGILVRTERLRTKDITQKVKAKNYWQGGVCLAFADEVLCWLYGTVKENEDYVLQFVHPFNRLELLRAQSPCPEAITLHVQQLSGAAD

SEQ ID NO: 54054 - protein, 431 aa, Homo sapiens
  Clone ID: LIB4119-308-E10_FLI.pep
LEKMSRAVRLPVPCPVQLGTLRNDSLEAQLHEYVKQGNYVKVKKILKKGIYVDAVNSLGQTALFVAALLGLRKFVDVLVDYGSDPNHRCFDGSTPVHAAAFSGNQWILSKLLDAGGDLRLHDERGQNPKTWALTAGKERSTQIVEFMQRCASHMQAIIQGFSYDLLKKIDSPQRLVYSPSWCGGLVQGNPNGSPNRLLKAGVISAQNIYSFGFGKFYLTGATQMAYLGSLPVIGEKEVIQADDEPTFSFFSGPYMVMTNLVWNGSRVTVKELNLPTHPHCSRLRLADLLIAEQEHSSKLRHPYLLQLMAVCLSQDLEKTRLVYERITIGTLFSVLHERRSQFPVLHMEVIVHLLLQISDALRYLHFQGFIHRSLSSYAVHIISPGEARLTNLEYMLESEDRGVQRDLTRVPLPTQLYNWAAPEVILQKAAA

SEQ ID NO: 54055 - protein, 275 aa, Zea mays
  Clone ID: UC-ZMFLB73333E09_FLI.pep
SPPLGGQKNTTESRNKAPAPAASRALVSSGLVSLGEALGGARQRLEVAAHDGVDEHARLVRGVAVWHVHHVRLHHDGAGAGAGAGLVHGGDRPVVGEAVLAADDAEAEHAALVVQDLEPLAAAGGGEARDDPHLAHRPHGHVAAAHEAAAPDEVLVRLRAVEAPHHRPHRPHGRRDRLHHRRAALPRARRVLVVPRHLRRHRRARRPVRRRLRPAAAQYTAVLLRRRPRSCVRHCCCLPDCFALHCSATLCARQTHPTPPQGSQGSLVGQGCSVP

SEQ ID NO: 54056 - protein, 358 aa, Homo sapiens
  Clone ID: LIB4118-101-H1_FLI.pep
ALFGWSRALRRRMALDVKSRAKRYEKLDFLGEGQFATVYKARDKNTNQIVAIKKIKLGHRSEAKDGINRTALREIKLLQKLSHPNIIGLLDAFGHKSNISLVFDFMETDLEVIIKDNSLVLTPSHIKAYMLMTLQGLEYLHQHWILHRDLKPNNLLLDENGVLKLADFGLAKSFGSPNRAYTHQVVTRWYRAPELLFGARMYGVGVDMWAVGCILAELLLRVPFLPGDSDLDQLTRIFETLGTPTEEQWPDMCSLPDYVTFKSFPGIPLHHIFSAAGDDLLDLIQGLFLFNPCARITATQALKMKYFSNRPGPTPGCQLPRPNCPVETLKEQSNPALAIKRKRTEALEQGGLPKKLIF

SEQ ID NO: 54057 - protein, 174 aa, Zea mays subsp. mexicana
  Clone ID: UC-ZMROTEOSINTE084E04_FLI.pep
KVIHDNFGIIEGLMTTVHAITATQKTVDGPSAKDWRGGRAASFNIIPSSTGAAKAVGKVLPELNGKLTGMSFRVPTVDVSVVDLTVRIEKGASYEEIKKAIKAASEGPLKGIMGYVEEDLVSTDFTGDSRSSIFDAKAGIALNDHFIKLVSWYDNEWGYSNRVVDLIRHMFKTQ

SEQ ID NO: 54058 - protein, 250 aa, Homo sapiens
  Clone ID: LIB4118-140-F2_FLI.pep
NMNTIRTYQVCNVFESSQNNWLRTKFIRRRGAHRIHVEMKFSVRDCSSIPSVPGSCKETFNLYYYEADFDSATKTFPNWMENPWVKVDTIAADESFSQVDLGGRVMKINTEVRSFGPVSRSGFYLAFQDYGGCMSLIAVRVFYRKCPRIIQNGAIFQETLSGAESTSLVAARGSCIANAEEVDVPIKLYCNGDGEWLVPIGRCMCKAGFEAVENGTVCRERQDLTMLSRLVLNSWPQMILPPQPPKVLEL

SEQ ID NO: 54059 - protein, 167 aa, Zea mays
  Clone ID: UC-ZMFLB73237C04_FLI.pep
NTSSIILLLSASAMHAFLARDAHRTPHLINRVAVNVGADLVRQGDAALAGQRGGAADVGAAPVGAVGDVLEAAADGAAVGGVVGLLQQAADAAAARLGRHGPAHLDERQARHQRAVHGGARHRRAHRGRGSHHGRRQEHGQRQRRELRSSHASPSLSAGLTYDMILI

SEQ ID NO: 54060 - protein, 502 aa, Homo sapiens
  Clone ID: LIB3081-101-B10_FLI.pep
GLSVSARPGTGRRARGAGAAMAAVFDLDLETEEGSEGEGEPELSPADACPLAELRAAGLEPVGHYEEVELTETSVNVGPERIGPHCFELLRVLGKGGYGKVFQVRKVQGTNLGKIYAMKVLRKAKIVRNAKDTAHTRAERNILESVKHPFIVELAYAFQTGGKLYLILECLSGGELFTHLEREGIFLEDTACFYLAEITLALGHLHSQGIIYRDLKPENIMLSSQGHIKLTDFGLCKESIHEGAVTHTFCGTIEYMAPEILVRSGHNRAVDWWSLGALMYDMLTGSPPFTAENRKKTMDKIIRGKLALPPYLTPDARDLVKKFLKRNPSQRIGGGPGDAADVQRHPFFRHMNWDDLLAWRVDPPFRPCLQSEEDVSQFDTRFTRQTPVDSPDDTALSESANQAFLGFTYVAPSVLDSIKEGFSFQPKLRSPRRLNSSPRAPVSPLKFSPFEGFRPSPSLPEPTELPLPPLLPPPPPSTTAPLPIRPPSGTKKSKRGRGRPGR

SEQ ID NO: 54061 - protein, 190 aa, Homo sapiens
  Clone ID: LIB3064-079-C3_FLI.pep
VFCHSHRVIHRDLKPQNLLINELGAIKLADFGLARAFGVPLRTYTHEVVTLWYRAPEILLGSKFYTTAVDIWSIGCIFAEMVTRKALFPGDSEIDQLFRIFRMLGTPSEDTWPGVTQLPDYKGSFPKWTRKGLEEIVPNLEPEGRDLLMQLLQYDPSQRITAKTALAHPYFSSPEPSPAARQYVLQRFRH

SEQ ID NO: 54062 - protein, 128 aa, Glycine max
  Clone ID: 700905166_FLI.pep
PKPFKFPLTSVTGNLRLKFLLFFFFLMLLLLFLLTTIRRGCTPKQQRLQPLLPHTPHCRGHGVAAPLPYLHHRELRREPVNLHPNPKPPIHPFQLHPTLLLPPHRHRPRSAPFARCARSGLWRRHRSR

SEQ ID NO: 54063 - protein, 381 aa, Homo sapiens
  Clone ID: LIB4119-088-H2_FLI.pep
ETLSCRIMDHPSREKDERQRTTKPMAQRSAHCSRPSGSSSSSGVLMVGPNFRVGKKIGCGNFGELRLGKNLYTNEYVAIKLEPIKSRAPQLHLEYRFYKQLGSAGEGLPQVYYFGPCGKYNAMVLELLGPSLEDLFDLCDRTFTLKTVLMIAIQLLSRMEYVHSKNLIYRDVKPENFLIGRQGNKKEHVIHIIDFGLAKEYIDPETKKHIPYREHKSLTGTARYMSINTHLGKEQSRRDDLEALGHMFMYFLRGSLPWQGLKADTLKERYQKIGDTKRNTPIEALCENFPEEMATYLRYVRRLDFFEKPDYEYLRTLFTDLFEKKGYTFDYAYDWVGRPIPTPVGSVHVDSGASAITRESHTHRDRPSQQQPLRNQEIFVD

SEQ ID NO: 54064 - protein, 344 aa, Zea mays
  Clone ID: UC-ZMFLMO17322F09_FLI.pep
SSPKTPLAMSSLAYPLLRLPCRCSIAPAPAPASQLPAPVCLSASASANAGGDLTAREKRAQRRERRELRATDWKEEVQDRLIHEPARRRKKPPKRSWREELNLDLLAELGPQWWLVRVSMAPGTDYVDLLTKAISRRYSEVPFKIYNPSIQVKRRLKSGAISVKSKPLHAGLVFLHCTLNKELHDFIRDTEGCYGFIGATVGSIKRQIKKPKPIPVDEVESIIREEKEEQERVDREFEEMENMGNIEPFSKPVEESELMLMNKIKKQFKKSSSQGGTRHSAFSPGATVHVLSGPFADFTGSILEVNRKNKKATVQLSLFGKESFVDLDFDQIEVVEVDDDDSKL

SEQ ID NO: 54065 - protein, 639 aa, Zea mays
  Clone ID: 700151120_FLI.pep
AAAVSVAVAAAAAAMITGRDIYDVLAAIVPLYVAMFLAYGSVRWWAIFTPDQCSGINRFVAVFAVPLLSFHFISSCDPYAMQYRFLAADSLQKLVILAALAVWHNVLSRYRRGAAASSLDWTITLFSLSTLPNTLVMGIPLLRAMYGDFSGNLMVQIVVLQSVIWYTLMLFLFEYRGAKALISEQFPPDVGASIASFRVDSDVVSLNGREALQADAEVGSDGRVHVVIRRSASASTTGGGHGAARSGAGYRPYGPSSAMTPRASNLTGVEIYSLQTSREPTPRGSSFNQSDFYAMFNGSKMASPLAQPGAARAPGLDEQVANKFASGKGGDAAAYPAPNPGMMPPPRKKELGGSNSNSNKELHMFVWSSSASPVSEANLRNAVNHAASTDFAAAPPPSMPVDGATPKGVSGTVTPAKKPDPAANGGDLEIEDGLKSPATGLAAKFPVSGSPYVAPRKKGADAPGLEEAAHPMPPASVMTRLILIMVWRKLIRNPNTYSSLIGLVWSLVSFRFNIQMPSIIKGSISILSDAGLGMAMFSLGLFMALQPKLISCGKRVATFAMAVRFLTGPAVIAATSIAIGLRGVLLHVAIVQAALPQGIVPFVFAKEYNCHPQILSTAVIFGMLIALPITILYYILLGI

SEQ ID NO: 54066 - protein, 371 aa, Zea mays
  Clone ID: UC-ZMFLMO17330A08_FLI.pep
AQTDSRMEEKAADATATATVAAAAAADQDGAVYCSEHPYPPGAAAAAGAGAGGICAFCLQEKLGMLVSSSKSSPFHPPPQQPVSAASPSSTTPPPSNRASSEAPPPPLYPPAASRKVMPAQSAGGGGGGLKRSKSVAPRPEEPLPPPAVTADSPRKKSFWSFLHLSSSSGSHKGGASSASAGSGGAARRNSVSVASASSASLGGRLEAIVEPESPGRRSEGSSSSSFGRKVARSRSVGCGSRSFSGDFLERLSTGFGDCALRRVESHREPKPKAALGHLGGGEEHEQDQDQHHRIKCAGFFGGGLGAAAPPSSSYWLSAPDGASASASGSARGSGSRSHRSWAWALASPMRALRPTSSSSSKSIMAAPTAA

SEQ ID NO: 54067 - protein, 651 aa, Zea mays
  Clone ID: UC-ZMFLMO17339D09_FLI.pep
VRPWWWWTELVDTVDFVVGMERSEPSLKPEWLLRPTVPATTHKPVTSPRADDHGRGASSRNRSSGRDRDRSSQLSSSRRGSSSSGSRRNDRDGTGKSRGYGNFGKHSKDRIQEKDLDFRERESRLVQPDDPLRDGFESFSSCRSEKDRLNRTRSKVAIPNRAGVSLDNGNVSKKDNGVISFEREFPHLGSEDKNGKQDIGRVPSPGISTPIQNIPLVVSDGWNSVLAEVPALVDPNINSVSSSSSPAGSSKPIEVSNSGSALSMAETVMQSPLNICTTPQLSIDAQKIEERTMRQCILRPLTPSSNKISASISLDKLLKSKGARAGESNGPIKVAPQLSIQPSSNSVRTPVKTELVKQSQSGSLQVLSREQNGTVNTAAKDITSNNPVSPVLGRSSSMEPMRKSIVNPKLKVGTNGRSLHPLQGSFADRKASAKDKYKFFELLRSKSVNGSSAAIESPSSLTDDQQNSNLDLPFKFIENGNSSCEEANSCEGSQRHLSDNEEIIPPSESHDVLDEGSLGIQVDDKGSSSSPVLGTQDISSKKPQEDNVDIVVSVYVNDGSVMPNSVDNEARLLLEEANPAQVLQHIDAREENPCPAQEFESIGAGGEEELNLLRSMGWDENEEVQPLQQEEIADCVRQNVRLQQKLQECRG

SEQ ID NO: 54068 - protein, 204 aa, Zea mays
  Clone ID: LIB3150-110-H2_FLI.pep
TDGGTAVIRNQNRSTTAAIAALPKYLHRHAATEANNAGDISSVQELDGEGVKASTDVDTTGTDVQHGSIEATKANAAGDTPGAFFQKQCAKAADVITIDDDDEDNSHRCYKEEQTAVVDLEADYAGDNHPVQLEANSRGHKHVKVKERIWYYIDPQGDEQGPFTMQHLSIWWSNGFFPGDFRVWRTGQTSNDAILLVDALQMTR

SEQ ID NO: 54069 - protein, 121 aa, Zea mays
  Clone ID: UC-ZMFLMO17340G08_FLI.pep
TFFCDQGTLLVMDQIGYNAGRTPFTDISNTIITGNQNESNSLGPIVDAKERKRQRDRERYAAMTVEEKNEKNRKRREARQRNKGLSIEPLSSREGVNTDQTCEVVSFPDDCSTIDFTNLST

SEQ ID NO: 54070 - protein, 151 aa, Glycine max
  Clone ID: 700796339_FLI.pep
RLNSNGCQLIQSSQNKIKLSNFSNVSHHRMIIWVQRSLEDPTILVTTYEGEHNHGHQRAEISLVSNQSEALPPLKGSSPVSSPNTATIRSAVCPTVTLDLVKSGLVEFESAQKSSIQQFLVQQMATSLTRDPNFTTELATAISGKILEAQW

SEQ ID NO: 54071 - protein, 230 aa, Zea mays
  Clone ID: UC-ZMFLMO17426F09_FLI.pep
SSRVQFRNMASRARWVEEAGAAEVVENRGKLWLTTGVTRGGKLYYNVEETGFLAEMGALILLNDKDETIGIEDIYGKLAGGNYGCSWDTFQAYKHLKSLGYIVGRFGVPWTMKHGGTHHTIAPQMNILETDQSLNRVDGASNDITKLLKEIQIDGICPSFEVYLPNSKFKKSSPGCPSFLLCLLRGKPPSRVELEAVENNFRGIPLKYAHVDNGRVSFLSFDEVTLPSLP

SEQ ID NO: 54072 - protein, 594 aa, Zea mays
  Clone ID: UC-ZMROB73014C12_FLI.pep
PAEGIQPLSKIAVHRATVEMQPSAYVRATPSLLGEQGEDTEWVTVKFGWKEPSEDDWIGVFSPSEFNSSATCPNPWPAEEPYLCTAPIKYQFANYSANYIYWGKGSIRLQLINQRSDFSFALFTGGLSNPRLIAVSEPISFKNPKAPVFPRLAQGTSHDEMTVTWTSGYAIDEAYPFVEWGALVAGGVRHTARAPAGTLTFNRGSMCGEPARTVGWRDPGFIHTAFLRDLWPNKEYHYRIGHELPDGSVVWGKPYSFRAPPSPGQPSLQRVIVFGDMGKAERDGSNEYAAYQPGSLNTTDALIADLDNYDIVFHIGDMPYANGYISQWDQFTAQVAPITARKPYMVGSGNHERDWPDTAAFWDVMDSGGECGVPAETYYYYPAENRANFWYKVDYGMFRFCVGDSEHDWRVGTPQYDFIEHCLSTVDRKHQPWLIFATHRVLGYSSNAWYAGEGSFEEPEGRENLQRLWQKYRVDIAFFGHVHNYERTCPMYQSQCMTSEKTHYSGTMNGTIFVVAGGGGCHLSSYTTAIPKWSIYRDYDFGFVKLTAFNHSSLLFEYKKSSDSKVYDSFTIDRDYRDVLRCVHDSCFPTTLAT

SEQ ID NO: 54073 - protein, 76 aa, Glycine max
  Clone ID: 701102752_FLI.pep
ITTSNFSSPKIDSFSVQSDFRCRYCCKNCLTIYHNNLDLSVTVVVTDIFAVLVEPSLHGGALRFVPELPIKRLARA

SEQ ID NO: 54074 - protein, 181 aa, Zea mays
  Clone ID: LIB3069-004-C11_FLI.pep
HDITGSPGRPPPSSRADARAQLGAVQEAGDDAPRATLRLDARRARGGRRLRLRLRVQVQPGTRRRGGSADDGYRLVGPRLRRLLRGAGRRGLRRRRARGRGREVLPGEAGPPRRRPRGGPGAGAAQPAGGVADAPQDGVELLDLGVGGLVDGGRGGGGGGGGVAGVVGVGALALAPGGGRA

SEQ ID NO: 54075 - protein, 175 aa, Glycine max
  Clone ID: 701044506_FLI.pep
HKSTWQIFDSDFLRLTKSFKCPLVFPTNFLFLLRGEVILNVKGLANFLWSLPLDHVGYSLTCKVQQALDVQVVSSQDEIEERGLVDLDEFSVPGLEIVLGGFVFGIRGLDVLLAVLDNLRQDLARHVRQRDAAVGAVVLDHVLYRLRLQRHRLLHLESLAVRTLQRDFLRRRHDE

SEQ ID NO: 54076 - protein, 580 aa, Zea mays
  Clone ID: UC-ZMFLMO17132C12_FLI.pep
SLVSPSPSSTPPARVTATAFHASPTSRRRRLVGVHATAAAEMDPDFSPGGGGPSFEFAFNEVNFSDRELRIEVVAGDDYAPGSSGAGAGGGGLADWARHRKRRREELLKEKESTTHMSDQTNCNEVEAEECDAYEENQEEPVAMVEESPPDVGQDGDDGQGIDSSWTVVGTPVLRVKTIYISSAILAAKSPFFFKLFSNGMKESDQRHATLRITDSEETALMELLSFMYSGKLATTEPTLLLDILMAADKFEVVSCMRYCSQLLTSLPMTTESALLYLDLPCSISMAAAVQPLTDAAKDFLAVKYKDLTKFQDEVMNIPLAGIEAILSSNDLQVASEDTIYDFLLRWARAQYPKSEERREILSSRLLPLVRFSHMTCRKLRKVLTCTDIDHEQATKCVTEALLYKADAPHRQRALAADTTTCRKFAERAYKYRPLKVVEFDRPYPQCIAYLDLKREECSRLFPAGRIYSQAFHLAGQGFFLSAHCNMEQQSTFYCFGLFLGMQEKGSTSVTVDYEFAARTRPSGEFVSKYKGNYTFTGGKAVGYRNLFGIPWQAFMADDSLFFIDGMLHLRAELTIKQPT

SEQ ID NO: 54077 - protein, 397 aa, Zea mays
  Clone ID: UC-ZMFLMO17122A05_FLI.pep
AQAAEASPFRSVAAAGPWTQLAHQPMAGTDVAGSARGSDAALGKTGEPPAAARSGAAKKVALALLASFSALLYSQIQPPPSKIPGMPGGPPVTAPRTRLKDGRHLAYLESGVPKEKAKYKIIFVHGFDCCRYDVLNVSQGLLEELGIYLLSFDRPGYAESDAHPARTEKSIALDIAELADNLQLGPKFHLIGFSMGGEIMWSCLKYIPHRLAGVAILAPVGNYWWSGFPPDVFKEAWRVQFPQDQRAVWVAHHLPWLTHWWNTQKLFRGSSVKDGDPAMLSKEDRLVADKFEKRTYEKQVRQQGEHDSLHRDMMVGFGKWDWSPLEMENPFAGAQDEVKVHLWHGVEDLYVPVQLSRYISERLPWVIYHELPTAGHLFPVADGMPDAIVRSLLLGDE

SEQ ID NO: 54078 - protein, 153 aa, Zea mays subsp. mexicana
  Clone ID: UC-ZMFLTEOSINTE44C09_FLI.pep
GDLYVLLKFLTRYMFHCFAVPTNSMCWLIFFFFLQGSSLHLEFLVNYICELSLLEYSLLCYLPSMVAASSVFLAKFILMPIKNPWNSSLSYYTRYTPSELRGCVRVLHRLFRLGPGSNLPAIREKYSQHKYKFVAKKYCPQSIPTKFFQDLTS

SEQ ID NO: 54079 - protein, 540 aa, Zea mays
  Clone ID: UC-ZMFLMO17316D09_FLI.pep
APLLLAIVEGERERERPRSVGFGFGRQLQLSATATMGLRVAATAPAPAGVRVLGRGAARVTPRPWAAVGGRRRFSVRMSVATTEATTTIAVGASEDQALEARNSKTVVAVILGGGAGTRLFPLTRRRAKPAVPIGGAYRLIDVPMSNCINSGINKVYILTQFNSQSLNRHLSRAYDFSNGVAIGDGFVEVLAATQRPGTEGKRWFQGTADAVRQFDWLFDDAKSKDIEDVLILSGDHLYRMDYMDFVQSHRQRGAGISICCLPIDGSRASDFGLMKIDDTGRVISFSEKPKGDELKAMQVDTTVLGLSKEEAENKPYIASMGIYIFKKDILLNLLRWRFPTANDFGSEIIPASAKEIDVKAYLFNDYWEDIGTIKSFFEANLALAEQPPRFSFYDADKPMYTSRRNLPPSMVNNSKITDSIISHGCFLDNCRIEHSVVGVRSRIGSNVHLKDTVMLGADYYETAVERGELLAEGKVPIGIGENTTIQKCIIDKNARIGKKVVISNSEGVDEADRTSEGFYIRSGITVVLKNAIIADGLVI

SEQ ID NO: 54080 - protein, 304 aa, Zea mays
  Clone ID: UC-ZMFLB73128F06_FLI.pep
TPSQNRGPRLPHHPARRRRRRRRGQCRRLQASGSQRDALLRPRFRGAGDGVPPPADEAERHDRADVLVFLCFLPMFHIFGLSVITFAQMQRGNSVVVMSRFDMDSVMAAVQRHRVTHLFCVPPVMIALAKLGSVGKYDLSSLRFIGSGAAPLGKDVMEGVAKNFPEAVIAQGYGMTETCGIISLEYPEKGQIRQFGSTGALVSGVEAKIVDVETLICLPPNQLGEICVRGPNIMQGYFNNVQATEFTIKQGWLHTGDIGYFDEGGQLFVVDRLKELIKYKGFQVRFSFFCKQMFSFCKLLFIIM

SEQ ID NO: 54081 - protein, 399 aa, Glycine max
  Clone ID: 700890247_FLI.pep
MVIITRSSAGRKPSEIMKFFLTTFIGIVFGFFIGVSIPTLSITKLNLPSGLLPSIDLSYIEDRYAGRQAWSFMNNGNKRSSSQVQLSSDTSKIWVPSNPRGAERLPPGIVEAESDFYLRRLWGKPSEDLTSRPNYLVTFTVGYDQKNNIDAAVKKFSGNFTILLFHYDGRTTEWDEFEWSKKAIHVSVHKQTKWWYAKRFLHPDIVAPYDYIFIWDEDLGVEHFNAEEYIKLVRKHGLEISQPGLEPNKGLTWQMTKRRGDQEVHKVTEEKPGWCSDPHLPPCAAFVEIMAPVFSRDAWRCVWHMIQNDLVHGWGLDFALRRCVEPAHEKIGVVDSQWIVHQGLPSLGNQGESQTGKSRWQGVRERCRKEWTMFQSRLANAENAYYKSMGTDTSNSTAH

SEQ ID NO: 54082 - protein, 420 aa, Arabidopsis thaliana
  Clone ID: LIB24-131-G1_FLI.pep
VKLKGSDSFVFSLKNLEGSDSVVKQKRSMGTHIDINNLGGDTSRGNESKPLARQSSLYSLTFDELQSTLGEPGKDFGSMNMDELLKNIWTAEDTQAFMTTTSSVAAPGPSGFVPGGNGLQRQGSLTLPRTLSQKTVDEVWKYLNSKEGSNGNTGTDALERQQTLGEMTLEDFLLRAGVVKEDNTQQNENSSSGFYANNGAAGLEFGFGQPNQNSISFNGNNSSMIMNQAPGLGLKVGGTMQQQQQPHQQQLQQPHQRLPPTIFPKQANVTFAAPVNMVNRGLFETSADGPANSNMGGAGGTVTATSPGTSSAENNTWSSPVPYVFGRGRRSNTGLEKVVERRQKRMIKNRESAARSRARKQAYTLELEAEIESLKLVNQDLQKKQAEIMKTHNSELKEFSKQPPLLAKRQCLRRTLTGPW

SEQ ID NO: 54083 - protein, 223 aa, Zea mays
  Clone ID: UC-ZMFLB73187A07_FLI.pep
LEKPSFSLLGIMLVVSFGVLLTVAKETEFNLWGFIFIMLAAVMSGFRWSMTQILLQKEEYGLKNPFTLMSHVTPVMAIVTAIISIVMDPWHDFRASHFFDSSAHIIRSSLLLLLGGALAFFMVLTEYVLVSVTSAVTVTVAGIVKEAVTILVAVLFFNDPFTWLKALGLAIIIFGVSLFNIYKYKRFKKGHYNENAGTNTQSSNWTSKYVILDEDTEAQDDTG

SEQ ID NO: 54084 - protein, 440 aa, Arabidopsis thaliana
  Clone ID: LIB24-008-H8_FLI.pep
AKMGQQQSKGELLYQQVSYGNSEGIRALHRDGGDLEWMDREGKTPLILACMNSELFDVAKTLIELGSNVNAYRPGRHAGTPLHHAAKRGLENTVKLLLSHGANPLVLNDDCQTPLEVARVKGFSNVVRAIEKHICLFSGWMREFYGPTFLDLFAPQLLSRRVWVVIVPTGSRNPTKPFKLELVVYASLQDAQPRTVMPLWKANLEEPKAKQSDTSVMIVDNSTKTRLKFAPSTEGDSQQLKWFCDACKGIPQPMHPPVFLQAPPSAPPPPSEDGLAMGMNASLHTTMSDPSNLNHHSIGQASSSSGPSSSTAPPSGKASAFGFNSHGIGIVLESSPSAPPLTDDDIATVDDGPIHYPSIDSTPVDLPSAASLPASTEGERKEDGNTGTCAICLDAPSEAVCVPCGHVAGCMSCLKEIKSKNWGCPVCRAKIDQVIKLYRV

SEQ ID NO: 54085 - protein, 399 aa, Zea mays
  Clone ID: UC-ZMFLB73190A05_FLI.pep
TLQVLRRYNGELERFLRSVPRERLHSLVVGMFCTDAVDVGAKLGVPVYTFFASAAATLAVVAQLPALLSGRRAGLKELGDTPLQFLGVPPFPASHLVRELLEHPDDDELCKTMVDVWKRCTDGSGVLVNTFESLESPAVQALRDPRCVPGRVLPPVYCVGPLIGGDGGTRAAAEQERAAETRHECLAWLDEQPENSVVFLCFGSRCAHSAEQLRGIAVGLERSGQRFLWSVRTPAGTDGGSENLGALFPEGFLQRTKDRGLVVRSWAPQVEVLRHPSTGAFMTHCGWNSTLEAITAGVPMLCWPFYAEQLMNKVFVTEGMGVGVEMEGYTTGFIKSEEVEAKVRLVMESEEGRHLRGRAVALKNEAQAALRDDGPSETSFARFLFDAKNLQGHLGHGSE

SEQ ID NO: 54086 - protein, 233 aa, Arabidopsis thaliana columbia
  Clone ID: JC-ATXLIB327426P1F09_FLI.pep
TAARRRQKGTAARRRQREETAKSREGNCRLFGIPLTNNMNGTDSTMSQRNNLNDAAGLTQITSPKVQDLSDQSKGSKSTNDHREQGRPFQTNNPHPKDAQTKTNSSRSCTKVHKQGIALGRSVDLSKFQNYEELVAELDRLFEFNGELMAPKKDWLIVYTDEENDMMLVGDDPWQEFCCMVRKIFIYTKEEVRKMNPGTLSCRSEEEAVVGEGSDAKDAKSASNPSLSSAGNS

SEQ ID NO: 54087 - protein, 143 aa, Zea mays
  Clone ID: UC-ZMFLB73196G11_FLI.pep
MRGFSMENKRRRGAMASCCRKENRHPWKRRSAAMADEGSARLAALGTCEQPLGSGSTSRRGQHRHGEKDEGRRRAHQQEGKEQGSRRWGCASIPWAAGRALDRGQGRAPGRSVKLQQGGATMAGRGGRHGRDVERAGMTSEAL

SEQ ID NO: 54088 - protein, 310 aa, Zea mays
  Clone ID: UC-ZMFLMO17013C10_FLI.pep
LHTQLKRKEPSIDRQGGMGLREIESTLPPGFRFYPSDEELVCHYLYKKVANERAAQGTLVEVDLHAREPWELPDAAKLTASEWYFFSFRDRKYATGSRTNRATKTGYWKATGKDREVRSPATRAVVGMRKTLVFYQGRAPNGVKSCWVMHEFRLDSPHTPPKEDWVLCRVFQKRKDSEQDNGGGSSSPTTFAGASSQGVVLDLPDDQPSMTMAGAYVAVDHHQPGSSAVGFALPPHAQDNGLGDGGLDALLMNGATMWQYSSSALADHFPPEEVTAAPMMGLGSRGGGDGCSFFYDSGFDGMGFPQGWMG

SEQ ID NO: 54089 - protein, 596 aa, Zea mays
  Clone ID: UC-ZMFLB73099E10_FLI.pep
LSMGSFLWKQPSYLFILIILHLVAHEARTLSSDGEALLAFKKAVTNSDGVFLNWREQDADPCNWKGVRCDSHSKRVIDLILAYHRLVGPIPPEIGKLNQLQTLSLQGNSLYGSLPPELGNCTKLQQLYLQGNYLSGYIPSEFGDLVELEALDLSSNTLSGSVPHSLDKLSKLTLFNVSMNFLTGAIPSSGSLVNFNETSFVGNLGLCGKQINLVCKDALQSSSNGLQSPSPDDMINKRNGKNSTRLVISAVATVGALLLVALMCFWGCFLYKNFGKKDMRGFRVELCGGSSVVMFHGDLPYSSKDILKKLETIDEENIIGAGGFGTVYKLAMDDGNVFALKRIVKTNEGLDRFFDRELEILGSVKHRYLVNLRGYCNSPSSKLLIYDYLQGGSLDEVLHEKSEQLDWDARINIILGAAKGLSYLHHDCSPRIIHRDIKSSNILLDGSFEARVSDFGLAKLLEDEESHITTIVAGTFGYLAPEYMQFGRATEKTDVYSFGVLVLEILSGKRPTDASFIEKGLNIVGWLNFLASENREREIVDLNCEGVQTETLDALLSLAKQCVSSSPEERPTMHRVVHMLESDVITPCPSDFYDSE

SEQ ID NO: 54090 - protein, 665 aa, Zea mays
  Clone ID: UC-ZMFLB73117D06_FLI.pep
KHKNESDGLDDYWKDFALAVESTKLDEVDEAAIEKEDNGKMEDIDCNHDIRIHEDLGHVCRVCGMIVRRADSIIDYQWKKASRRRTNGYGGHSKDADEIDCGTVKLSEDFIVADIAIHPRHARIMKPHQLEGFNFLVKNLIGDKPGGCILAHAPGTGKTFMLISFIQSFMARYPSARPLVVLPKGILGIWKTEIKRWQVQDIPVYDFYSVKAEKRVEQLQILKSWEDKMSILFLGYKQFSTIVTDDGGSNVTAACRDRLLKVPNLLILDEGHTPRNRETNVLESLNRVETPRKVVLSGTLFQNHVEEVFNILNLVRPKFLRMESSRPTARRIMSQVEIVGRSSKGLADGAFTKAVEETLLNDENFKRKAHVIRGLRELTKDVLHYYKGDILDELPGLVDFSVFLKLTPKQKDIIYKLEAHDRFKRNAVGSALYIHPCLSELSEVNAEHRANTFRDDLVDSLVDSITVRDGVKANFFMNILSLANSAGEKVLAFSQYISPMIFFERLLVKKKGWHVGKEIFMISGDTSQEDRELATDHFNNSADAKIMFGSIKACGEGISLVGASRVVILDVHLNPSVTRQAIGRAFRPGQQKKVFVYRLVAADSDEVKVHETAFKKEVIPKLWFEWSEHCTTEDFKLGQIDIDDSGDELLDTKAIRKDIKALYRR

SEQ ID NO: 54091 - protein, 622 aa, Glycine max
  Clone ID: uC-gmronoir050e02_FLI.pep
QLGVTGSHPQQTPPPPGKQFNGTMHLAPDSSGEAQIRNGRPRADSRGRNQLLPRYWPRCTDLELQQISIDSNSVITPLFQKTLSASDAGRIGRLVLPKKCAETYFPPISQPEGLPLKILDAKGKEWIFQFRFWPNNNSRMYVLEGVTPCIQSMQLQAGDTVTFSRLEPEGRLVMGFRKASSVMPSDQDNETKTGNGFSAHGEVELADPNSWSKVDKSGYIAKEALGSKSLISRKRKSNILSSKSKRLRIENEDLIELKITWQEAQGLLRPPPSHIPSIVVIEGFEFEEYEEAPVLGKPTIFTSDSVGEKIQWAQCEDCFKWRKLPASALLPSKWTCSDNSWDPERFSCSAAQELTAEQLENLLPPCNSAVPKKMKATKQDPDNAEALEGLDTLANLAILGEGEALPASAQATTKHPRHRPGCSCIVCIQPPSGKGPKHKQTCTCNVCLTVKRRFRTLMLRREKKQSEKEAETTRKKQQQQHPLPLPSSEILLDEDSLPCSNTGDSSPNQNKEGNDGSDDDPSRIKSSASPFKGKIDLNIQPEREEELSPGSDSGGMMKLLHDATERYLKQQTVNSGTGDSSGSQSQLVGDAMREDKLSNGVAHGSSSHNTDKEHAQSLPMNV

SEQ ID NO: 54092 - protein, 202 aa, Zea mays
  Clone ID: UC-ZMFLMO17221E01_FLI.pep
EDSKSPKGRQKLFSNEEKILLNKRVPDLETATSSKWLPLHTLAASGDFYLLNSLLKHNVDINALDKDGLPAIHKAILSKKAAIINYLLRNSANPFIQDKDGATLMHYAVQTACSQTIKTLLLYNVDINRPDDYGWTPLHLAVQTQRTDIVKLLLIKGADRTIRTQDGLTPLELCLRLGHDVRTYELIKLLKSFRGQKQHDLV

SEQ ID NO: 54093 - protein, 133 aa, Glycine max
  Clone ID: UC-GMFLMINSOY069C08_FLI.pep
MLLSSVHSLIVILLLATAFLVIILIIHLRYRLLRFFFIPTSRTFRLFLVISSHVLLVLHFPFLRLCHIRCFFSIRHRLPFCSSSFAHSRHCFVVGMFLVEHLPEFLQLDKDKSFDDKIIRRKDKRAHRKSNES

SEQ ID NO: 54094 - protein, 113 aa, Zea mays
  Clone ID: 700378587_FLI.pep
LSHPAAAAQVALAPATSRICPVALAVVPPTVTMQNEEGKTVDLYVPRKCSATNRIITAKDHASVQINIGHLDANGLYDGHFTTFALSGFVRAQGDADSSLDRLWQKKKVDIKQ

SEQ ID NO: 54095 - protein, 272 aa, Zea mays
  Clone ID: LIB3279-055-D2_FLI.pep
TTTITLGGLVSLGGCGSSLTPEPSSPPSGNETNLLARGSVSADSRGVTDVLVVTSSVGMLHRVHGHTTHLGPAVPLHTVLVVRVTSLEHRLLSPASTSNLPNHSTAAAGDNLLGARGQLNPRCAVVRVVADHNGVVPRGPGEDTAVTDVVLDVADDGTLRDPAEGQHVADGEGGAATAVDELARVHALGCDKELLLVLVPEWVAESDLGERRATAGVVDDVGDDALEVPVALAEVEGAEAGGALAVVGVGLEHGPRTLTLRADHATHLLRRR

SEQ ID NO: 54096 - protein, 221 aa, Zea mays
  Clone ID: 700348478_FLI.pep
STPTPHRSGGGGANAGEGEGVREGAPAMVHVNFYRNYGKTFKKPRRPYEKERLDAELKLVGEYGLRCKRELWRVQYALSRIRNAARHLLTLDEKNPRRIFEGEALLRRMNRYGLLAEGQNKLDYVLALTAENFLARRLQTLVFKAGMAKSIHHARVLIKQRHIRVGRQIVNVPSFMVRVESEKHIDFSLSSPFGGGPAGRVKRKNQKKASGGGDAGDEDEE

SEQ ID NO: 54097 - protein, 180 aa, Zea mays
  Clone ID: 700476350_FLI.pep
FLSDVDVLYSCIFGFNNMPLVCCQASYLQEINGLRPRGLFFLIMCIGATTLDEYRKHIEKDPALERRFQPVKVPEPTMDETIQILRGLRERYELHHKLRYTDDALIAAAQLSYQYISDRFLPDKAIDLIDEAGSRVRLRHAQLPDEAKELDKELRQISKQKNEAVRGQDFEKVYCCLAQR

SEQ ID NO: 54098 - protein, 246 aa, Zea mays
  Clone ID: 700580674_FLI.pep
LHHPVLSPLAIRSLDPSFPSKKRSAHGHGHASLRRHAPPAGRRLGAGGEAAAAELAARAAVVVLPRAGPAPRVHRGGGGGAQGVRGPAAGPQHAVPDLRRQHGRAAPQGAGGGVLRHHVDVPQGAGVRDAHRRRRHHAGGPQPLEAGAQGAVPGARHQVALQVQDHLPVLPRLPQRRGAVPPPQGRRLPGEGQPRQGGRRPELPQHRQERQPHRRQVHRQGHLRLITLHVRRTPQPGSKLKNFFFY

SEQ ID NO: 54099 - protein, 152 aa, Zea mays
  Clone ID: 700614602_FLI.pep
PIVLALSNPTSQSECTAEQAYTWSQGRAIFGSGSPFDPVKYNDKLFVPAQANNAYIFPGFGLGVVISGAVRVSDDMVLAAAEALAEQVTPEHIEKGLIYPPFSIIRKISANIAAHVAAKAYDLGMATQLPRPKDLVKYAESCMYSPVYRSYR

SEQ ID NO: 54100 - protein, 188 aa, Zea mays
  Clone ID: 700620408_FLI.pep
HSPGHQSFLSGRDLHLAVVNLLLQVLGVLAVDGAPDADAGTEDLLDGAGQFLGHGPVPHGPGDLDDVVEADVAAVLDVLDLLAVPLWLLERLDDERRGGGDDGDLGLPVLDGELDGDAEALPVLGRLLGDVLSDLLGGKTERADLGGQRRRCADLAAGHTDEHLHHLRRVELGRHGCGRGSGGGSCGS

SEQ ID NO: 54101 - protein, 152 aa, Zea mays
  Clone ID: LIB143-002-G4_FLI.pep
LKQKKAHLMEIQVNGGTIADKVDYGYKFFEKEVPVDAVFQKDEMIDIIGVTKGKGYEGVVTRWGVTRLPRKTHRGLRKVACIGAWHPARVSYTVARAGQNGYHHRTEMNKKVYKIGKAGQESHDASTEFDRLRRTSLPWVASPTTVSSRVTT

SEQ ID NO: 54102 - protein, 153 aa, Zea mays; identical to SEQ ID NO: 53282
  Clone ID: 700425581_FLI.pep

SEQ ID NO: 54103 - protein, 111 aa, Zea mays
  Clone ID: 700577676_FLI.pep
VLGFKILFRICMDAKITSVLTYLLRFFTRWSIVYLPIAIQYSVADDGMVTGVSIHAAWRTCSCCSPCCFPLLADSYGSVFSTFTRNIAFLSEPNSMTSEGWKRTGKFGGTR

SEQ ID NO: 54104 - protein, 325 aa, Zea mays
  Clone ID: 700430988_FLI.pep
TSAAEDRSQSGQRLLPALGSRWRGCLVPTSRSNQRRYSAVHHRCRGPSLIPAITGRNRSWSSTPISTSRSNRRRSHIRGPLVTTPLISSLVISDCGKLRGNSSFLLLLLCFLWVPVEEQIHHDLPLVPREDSAPHLQNHPGQKPEQASNAVPPLVVRWDADIDIPHGRVSITEGNGGDVPQSRLLNWLMVSPWVGKDEQPRLAEGGLELVSEGTRGVPPSDGMSASVLSELEDSTLAIGAGGLDDDVLRVLDGNDNPRCKLQFLPCLAKVDDVDAVGAALKGIALHLEIAVLGAKVDVGGEHHLYVLLLLGQRTHRASACCRCHD

SEQ ID NO: 54105 - protein, 304 aa, Arabidopsis thaliana
  Clone ID: LIB23-069-F11_FLI.pep
SSPQEKHFNFFYQQSQIKEMGRAPCCEKMGLKRGPWTPEEDQILVSFILNHGHSNWRALPKQAGLLRCGKSCRLRWMNYLKPDIKRGNFTKEEEDAIISLHQILGNRWSAIAAKLPGRTDNEIKNVWHTHLKKRLEDYQPAKPKTSNKKKGTKPKSESVITSSNSTRSESELADSSNPSGESLFSTSPSTSEVSSMTLISHDGYSNEINMDNKPGDISTIDQECVSFETFGADIDESFWKETLYSQDEHNYVSNDLEVAGLVEIQQEFQNLGSANNEMIFDSEMDFWFDVLARTGGEQDLLAGL

SEQ ID NO: 54106 - protein, 180 aa, Zea mays
  Clone ID: 701160310_FLI.pep
EPQFASTRAAAASPVDAHRAAMAEQTEKAFLKQPKVFLSSKKSGKGKKPGKGGNRFWKSIGLGFKTPREAIEGTYIDKKCPFTGTVSIRGRIIAGTCHSAKMNRTIIVRRNYLHFVKKYQRYEKRHSNIPAHISPCFRVKEGDHVIIGQCRPLSKTVRFNVVKVIPAGSAAAGKKAFTAA

SEQ ID NO: 54107 - protein, 313 aa, Zea mays
  Clone ID: LIB3245-206-F3_FLI.pep
RTEHMFFASDERIKAVRQMIMAPTLELRQQALDRLLPYQRSDFEGIFRAMDGLPVTIRLLDPPLHEFLPEGNIEDIVSELCAETGANQEDALARIEKLSEVNPMLGFRGCRLGISYPELTEMQARAIFEAAIAMTNQGVQVFPEIMVPLVGTPQELGHQVTLIRQVAEKVFANVGKTIGYKVGTMIEIPRAALVADEIAEQAEFFSFGTNDLTQMTFGYSRDDVGKFIPVYLAQGILQHDPFEVLDQRGVGELVKFATERGRKARPNLKVGICGEHGGEPSSVAFFAKAGLDYVSCSPFRVPIARLAAAQVLV

SEQ ID NO: 54108 - protein, 53 aa, Zea mays
  Clone ID: LIB3245-501-F4_FLI.pep
IGTLHKHADNLLFPSKYMNRENIGNRYSQPAMTLRSNTATTTNYLKKMPFLFP

SEQ ID NO: 54109 - protein, 559 aa, Zea mays subsp. mexicana
  Clone ID: UC-ZMFLTEOSINTE057G08_FLI.pep
LYEPWEVVDDEGQPFTMFDPFWNRCLSMPYDPPAPLLPPKRINSGDLSMCPSEDLIFEDESERGSNALLARAWTPGWQNADKALTAFLNGPLADYSVNRKKADSASTSLLSPHLHFGELSVRKVFHLVRMKQLVWSNEGNHAAEESCTLFLRSIGLREYSRYLSFNHPSSHERPLLAHLRFFPWVVDESYFKIWRQGRTGYPLVDAGMRELWATGWLHDRIRVVVASFFVKVLQLPWRWGMKYFWDTLLDADLESDALGWQYITGSLPDGRELDRIDNPQFEGYKFDPHGEYVRRWIPELARLPTEWIHHPWDAPVSVLQAAGIELGSNYPLPIVELDAAKGRLQAALSEMWQLEAASRATMNNGTEEGLGDSSEVLFPQELQMEVDRQPAPAEAAANVHVHVHVPMPARRRGDQMVPTMTTSSLNRAGTEVSADLVVANSEEEDTRAQVPFHAHLHLHPRAEAPPAARRTNNGARQHDAFQQPRNHRRDALLAPSASEASSSWTGREGAVVPVWSPPAASGHSDAFAADEADVSSRSYLGRHPQSHRLMNWSQLSQSS

SEQ ID NO: 54110 - protein, 334 aa, Zea mays
  Clone ID: LIB3245-456-G10_FLI.pep
CLDRIRKLADNCTGLQGFLVFNAVGGGTGSGLGSLLLERLSVDYGKKSKLGFTVYPSPQVSTSVVEPYNSVLSTHSLLEHTDVAILLDNEAIYDICRRSLDIERPTYTNLNRLVSQVISSLTASLRFDGALNVDVNEFQTNLVPYPRIHFMLSSYAPVISAEKAYHEQLSVAEITNSAFEPSSMMAKCDPRHGKYMACCLMYRGDVVPKDVNAAVATIKTKRTIQFVDWCPTGFKCGINYQPPSVVPGGDLAKVQRAVCMISNSTSVVEVFSRIDHKFDLMYAKRAFVHWYVGEGMEEGEFSEAREDLAALEKDYEEVGAEFDEGEDGDEGDEY

SEQ ID NO: 54111 - protein, 523 aa, Homo sapiens
  Clone ID: LIB4119-147-C9_FLI.pep
SCFCCRVKQMADSGLDKKSTKCPDCSSASQKDVLCVCSSKTRVPPVLVVEMSQTSSIGSAESLISLERKKEKNINRDITSRKDLPSRTSNVERKASQQQWGRGNFTEGKVPHIRIENGAAIEEIYTFGRILGKGSFGIVIEATDKETETKWAIKKVNKEKAGSSAVKLLEREVNILKSVKHEHIIHLEQVFETPKKMYLVMELCEDGELKEILDRKGHFSENETRWIIQSLASAIAYLHNNDIVHRDLKLENIMVKSSLIDDNNEINLNIKVTDFGLAVKKQSRSEAMLQATCGTPIYMAPEVISAHDYSQQCDIWSIGVVMYMLLRGEPPFLASSEEKLFELIRKGELHFENAVWNSISDCAKSVLKQLMKVDPAHRITAKELLDNQWLTGNKLSSVRPTNVLEMMKEWKNNPESVEENTTEEKNKPSTEEKLKSYQPWGNVPDANYTSDEEEEKQSTAYEKQFPATSKDNFDMCSSSFTSSKLLPAEIKGEMEKTPVTPSQGTATKYPAKSGALSRTKKKL

SEQ ID NO: 54112 - protein, 502 aa, Homo sapiens
  Clone ID: LIB3063-070-A3_FLI.pep
TSSLLFGAMLKFQEAAKCVSGSTAISTYPKTLIARRYVLQQKLGSGSFGTVYLVSDKKAKRGEELKVLKEISVGELNPNETVQANLEAQLLSKLDHPAIVKFHASFVEQDNFCIITEYCEGRDLDDKIQEYKQAGKIFPENQIIEWFIQLLLGVDYMHERRILHRDLKSKNVFLKNNLLKIGDFGVSRLLMGSCDLATTLTGTPHYMSPEALKHQGYDTKSDIWQKRIHLQTLRALSEVQKMTPRERMRLRKLQAADEKARKLKKIVEEKYEENSKRMQELRSRNFQQLSVDVLHEKTHLKGMEEKEEQPEGRLSCSPQDEDEERWQGREEESDEPTLENLPESQPIPSMDLHELESIVEDATSDLGYHEIPEDPLVAEEYYADAFDSYCVESDEEEEEIALERPEKEIRNEGSQPAYRTNQQDSDIEALARCLENVLGCTSLDQPCRSWGQKYLKRSIITSREQGIRMLAKQRSASVWKKWCLKPATVLKWTSSCTLKSSC

SEQ ID NO: 54113 - protein, 503 aa, Homo sapiens
  Clone ID: LIB4119-294-E10_FLI.pep
GHARDAFSFGTLVESLLTILNEQVSADVLSSFQQTLHSTLLNPIPKCRPALCTLLSHDFFRNDFLEVVNFLKSLTLKSEEEKTEFFKFLLDRVSCLSEELIASRLVPLLLNQLVFAEPVAVKSFLPYLLGPKKDHAQGETPCLLSPALFQSRVIPVLLQLFEVHEEHVRMVLLSHIEAYVEHFTQEQLKKVILPQVLLGLRDTSDSIVAITLHSLAVLVSLLGPEVVVGGERTKIFKRTAPSFTKNTDLSLEGDPFSQPIKFPINGLSDVKNTSEDSENFPSSSKKSEEWPDWSEPEEPENQTVNIQIWPREPCDDVKSQCTTLDVEESSWDDCEPSSLDTKVNPGGGITATKPVTSGEQKPIPALLSLTEESMPWKSSLPQKISLVQRGDDADQIEPPKVSSQERPLKVPSELGLGEEFTIQVKKKPVKDPEMDWFADMIPEIKPSAAFLILPELRTEMVPKKDDVSPVMQFSSKFAAAEITEGEAEGWEEEGELNWEDNNW

SEQ ID NO: 54114 - protein, 542 aa, Homo sapiens
  Clone ID: LIB4119-111-F11_FLI.pep
LKVGGLLRGTGGQLGQTVGWPCGALGPGPHRWGPCGGSWAQKFYQDGPGRGLGEEDIRRAREARPRKTPRPQLSDRSRERKVPASRISRLANFGGLAVGLGLGVLAEMAKKSMPGGRLQSEGGSGLDSSPFLSEANAERIVQTLCTVRGAALKVGQMLSIQDNSFISPQLQRIFERVRQSADFMPRWQMLRVLEEELGRDWQAKVASLEEVPFAAASIGQVHQGLLRDGTEVAVKIQYPGIAQSIQSDVQNLLAVLKMSAALPAGLFAEQSLQALQQELAWECDYRREAACAQNFRQLLANDPFFRVPAVVKELCTTRVLGMELAGGVPLDQCQGLSQDLRNQICFQLLTLCLRELFEFRFMQTDPNWANFLYDASSHQVTLLDFGASREFGTEFTDHYIEVVKAAADGDRDCVLQKSRDLKFLTGFETKAFSDAHVEAVMILGEPFATQGPYDFGSGETARRIQDLIPVLLRHRLCPPPEETYALHRKLAGAFLACAHLRAHIACRDLFQDTYHRYWASRQPDAATAGSLPTKGDSWVDPS

SEQ ID NO: 54115 - protein, 76 aa, Zea mays
  Clone ID: LIB143-067-F7_FLI.pep
AKKCVVFYNNLNFHPPTHLQNSSRLHAMPNSCIKLGLQMMLNGLSMLSCNIVISPSLTSMSLSKASIFFFSDTTSF

SEQ ID NO: 54116 - protein, 558 aa, Homo sapiens
  Clone ID: LIB4115-003-B2_FLI.pep
TSAKNEHEQLTYSSTRSKAPSVIITGLKPATKYVFHIRVRTATGYSGYSQKFEFETGDETSDMAAEQGQILVIATAAVGGFTLLVILTLFFLITGRCQWYIKAKMKSEEKRRNHLQNGHLRFPGIKTYIDPDTYEDPSLAVHEFAKEIDPSRIRIERVIGAGEFGEVCSGRLKTPGKREIPVAIKTLKGGHMDRQRRDFLREASIMGQFDHPNIIRLEGVVTKRSFPAIGVEAFCPSFLRAGFLNSIQAPHPVPGGGSLPPRIPAGRPVMIVVEYMENGSLDSFLRKHDGHFTVIQLVGMLRGIASGMKYLSDMGYVHRDLAARNILVNSNLVCKVSDFGLSRVLEDDPEAAYTTTGGKIPIRWTAPEAIAYRKFSSASDAWSYGIVMWEVMSYGERPYWEMSNQDVILSIEEGYRLPAPMGCPASLHQLMLHCWQKERNHRPKFTDIVSFLDKLIRNPSALHTLVEDILVMPESPGEVPEYPLFVTVGDWLDSIKMGQYKNNFVAAGFTTFDLISRMSIDDIRRIGVILIGHQRRIVSSIQTLRLHMMHIQEKGFHV

SEQ ID NO: 54117 - protein, 116 aa, Zea mays
  Clone ID: 700624118_FLI.pep
HLPVGSQSPPQEEELGDFQVSREDGPSVADIADGPRQCYCALVLYNLCPKQIHEIKDFLLTARRKDARSVKIKRSKDVVKFKVRCSKYLYTLCVFDAEKANKLKQSLPPGLSVQEV

SEQ ID NO: 54118 - protein, 534 aa, Homo sapiens
  Clone ID: LIB4119-045-G4_FLI.pep
TGLKPATKYVFHIRVRTATGYSGYSQKFEFETGDETSDMAAEQGQILVIATAAVGGFTLLVILTLFFLITGRCQWYIKAKMKSEEKRRNHLQNGHLRFPGIKTYIDPDTYEDPSLAVHEFAKEIDPSRIRIERVIGAGEFGEVCSGRLKTPGKREIPVAIKTLKGGHMDRQRRDFLREASIMGQFDHPNIIRLEGVVTKRSFPAIGVEAFCPSFLRAGFLNSIQAPHPVPGGGSLPPRIPAGRPVMIVVEYMENGSLDSFLRKHDGHFTVIQLVGMLRGIASGMKYLSDMGYVHRDLAARNILVNSNLVCKVSDFGLSRVLEDDPEAAYTTTGGKIPIRWTAPEAIAYRKFSSASDAWSYGIVMWEVMSYGERPYWEMSNQDVILSIEEGYRLPAPMGCPASLHQLMLHCWQKERNHRPKFTDIVSFLDKLIRNPSALHTLVEDILVMPESPGEVPEYPLFVTVGDWLDSIKMGQYKNNFVAAGFTTFDLISRMSIDDIRRIGVILIGHQRRIVSSIQTLRLHMMHIQEKGFHV

SEQ ID NO: 54119 - protein, 145 aa, Zea mays
  Clone ID: UC-ZMFLMO17342B12_FLI.pep
LSVDMLATSSGVWPRAMAVELVRCGGEGPFSLDGKLLDVKLPPSSWREDQDLANQLDSFPKSLVPPLEGRRGSLNGTQYENGLFSSSLPDFFDKKSELLVSYILFEWVYFVVLNNELLVSPARCMNIKRKKASRSIWEKNLASLF

SEQ ID NO: 54120 - protein, 468 aa, Homo sapiens
  Clone ID: LIB3064-097-F3_FLI.pep
VDYRTVTINTEQKVSDFYDIEERLGSGKFGQVFRLVEKKTRKVWAGKFFKAYSAKEKENIRQEISIMNCLHHPKLVQCVDAFEEKANIVMVLEIVSGGELFERIIDEDFELTERECIKYMRQISEGVEYIHKQGIVHLDLKPENIMCVNKTGTRIKLIDFGLARRLENAGSLKVLFGTPEFVAPEVINYEPIGYATDMWSIGVICYILVSGLSPFMGDNDNETLANVTSATWDFDDEAFDEISDDAKDFISNLLKKDMKNRLDCTQCLQHPWLMKDTKNMEAKKLSKDRMKKYMARRKWQKTGNAVRAIGILSSMAMISGLSGRKSSTGSPTSPLNAEKLESEEDVSQAFLEAVAEEKPHVKPYFSKTIRDLEVVEGSAARFDCKIEGYPDPEVVWFKDDQSIRESRHFQIDYDEDGNCSLIISDVCGDDDAKYTCKAVNSLGEATCTAELIVETMEEGEGEGEEEEE

SEQ ID NO: 54121 - protein, 503 aa, Zea mays
  Clone ID: UC-ZMFLMO17307H04_FLI.pep
TLASEWMMGRTGDGRRRDVDGRLEALLSGAGGEEPWLRRVALATALELRLLAPLAAPAVVVYMLIIVMSSTTQIVCGQLGNVQLAAASLGNNGIQVFAYGIMLGMGSAVETLCGQAYGAEKYEMLGVYLQRSTVLLTATGVPLAAVYALSEPLLLLLGQSPEIAGAAAEFAYGLVPQIFAYAANFPIQKFLQAQSIVAPSAYILAASFALHVPLSWLAVYGLGLGLLGASLTLSLTWWVLVLGQFAYIVWSPRCRATWTGFTWAAFADLPGFAGLSAASAVMLALEVWYFQVLILLAGMLPDPQIALDSLTVCTSIQSWVFMISVGFNAAASVRVGNELGAGNPRSAAFSAWVVTALSAFVSGIAGLVTFLLRDKLSYIFTGGEAVSRAVADLCPLLVGTIVLCGIQPVLSGVAVGCGWQAMVAYINVGCYYFIGVPLGVLLGFKFGFGIKGLWGGMIGGTLIQTLALIWITLRTDWNKEVEEARKRLDKWDDKRQPLLASKE

SEQ ID NO: 54122 - protein, 235 aa, Bos taurus
  Clone ID: LIB188-028-E1_FLI.pep
PPFTGENRKKTIDKILKCKLNLPPYLTQEARDLLKKLLKRNAASRLGAGPGDAGEVQAHPFFRHINWEELLARKVEPPFKPLLQSEEDVSQFDSKFTRQTPVDSPDDSTLSESANQVFLGFTYVAPSVLESVKEKFSFEPKIRSPRRFIGSPRTPVSPVKFSPGDFWGRGASASTANPQTPVEYPMETSGIEQMDVTMSGEASAPLPIRQPNSGPYKKQAFPMISKRPEHLRMNL

SEQ ID NO: 54123 - protein, 436 aa, Zea mays
  Clone ID: UC-ZMFLB73299G10_FLI.pep
LQHIFASSSHTYGGLTLDLHCNRLGPTALFQICECAVLTDRLEVLNLSGNRLTDACSSYLFTILKKCKALYSLNVEQCSITSRTVQKMTDALHEESVLSHLSLGKNNPISSNTMLNLLSKLASLTRFSELSLTGIKLNKLMVDKLCLLAQSSCLSGLLLGGTSIGPVETTRLTEALSCTSQDFLRLELSNCGLTTPDFTQICTNLSRINILELNLGGNPINLEGCDAVQRMLVNPQCSIRSLSLDKCNLGLAGIVRVIQSLPENSQLEELRVSKNTNLALETTTKYDEDMQEVSTASEQKQCNDPETTNDIAPGNIDFANMQVPDSEDEADNDAHRARSGSRRSCASSSQKNSYSSCQMIEELAKALISAKQLMVLDLSCNGLSEEAVQSLYSAWASVPRGDGMARKHVNKEVVHFSVDGMRCCGLKPCCRRDLQM

SEQ ID NO: 54124 - protein, 268 aa, Homo sapiens
  Clone ID: LIB4119-079-C1_FLI.pep
LASLLKGLKHANIVLLHDIIHTKETLTFVFEYMHTDLAQYMSQHPGGLHPHNVRLFMFQLLRGLAYIHHQHVLHRDLKPQNLLISHLGELKLADFGLARAKSIPSQTYSSEVVTLWYRPPDALLGATEYSSELDIWGAGCIFIEMFQGQPLFPGVSNILEQLEKIWEVLGVPTEDTWPGVSKLPNYNPEWFPLPTPRSLHVVWNRLGRVPEAEDLASQMLKGFPRDRVSAQEALVHDYFSALPSQLYQLPDEESLFTVSGVRLKPENV

SEQ ID NO: 54125 - protein, 520 aa, Zea mays
  Clone ID: LIB143-020-A10_FLI.pep
MDLANAAAVSAPKYDDLTNAGQAKRIVHSQATAKRKHAGLHQDQPCGIPRKKDRSRPLSELCNGDMWGGSRPNGQKADEHLLGVATCSSSSSGTSTLDTPLDMNNCHRSMAFKTDQAKGTEISCMTRLLSDDSRHGNDFVGTPAAQNIVEPDHLHRYQPCGLAKNPTWKPNKQTNDARKAEKHARKNMKMRTISSVDQENKNRTRDSNDHDHHKPKTGKHKSPRDGVVLLEKRQEKRSLDKNKPAEHDIKMHIAVVPSGMDCVGAFQQQRFKSRCDPEESLESLSNHSNCESGSVSSLVFEKPLQALPPGKNLLGYEICHAAKPIKTLHLNPALYDVELSVLGSSNTGRRVPLVSLMSRWNCKAVVGYPVSVEVSDDVFGCPSPSSEKDIQQAATNSVNGIVLKKDETEGLERVVVPPSAQTSRPRCKSRSRRASEKAVDKLWQPHTKWPASSSRKMRRLSSFGPGQRDGKSAVRKVSGATVACIPLRVVFSRINEALSFSVNENALAGCGTASRLRNTW

SEQ ID NO: 54126 - protein, 594 aa, Homo sapiens
  Clone ID: LIB4119-131-G1_FLI.pep
DSWSQWKPINRRCGLSYGTEQCYIVQEYMETDLANVLEQGPLLEEHARLFMYQLLRGLKYIHSANVLHRDLKPANLFINTEDLVLKIGDFGLARIMDPHYSHKGHLSEGLVTKWYRSPRLLLSPNNYTKAIDMWAAGCIFAEMLTGKTLFAGAHELEQMQLILESIPVVHEEDRQELLSVIPVYIRNDMTEPHKPLTQLLPGISREALDFLEQILTFSPMDRLTAEEALSHPYMSIYSFPMDEPISSHPFHIEDEVDDILLMDETHSHIYNWERYHDCQFSEHDWPVHNNFDIDEVQLDPRALSDVTDEEEVQVDPRKYLDGDREKYLEDPAFDTNYSTEPCWQYSDHHENKYCDLECSHTCNYKTRSSSYLDNLVWRESEVNHYYEPKLIIDLSNWKEQSKEKSDKKGKSKCERNGLVKAQIALEEASQQLAGKEREKNQGFDFDSFIAGTIQLSSQHEPTDVVDKLNDLNSSVSQLELKSLISKSVSQEKQEKGMANLAQLEALYQSSWDSQFVSGGEDCFFINQFCEVRKDEQVEKENTYTSYLDKFFSRKEDTEMLETEPVEDGKLGERGHEEGFLNTVGSSSLTSSSSP

SEQ ID NO: 54127 - protein, 582 aa, Zea mays
  Clone ID: LIB3060-011-C1_FLI.pep
PQLSTLSSGGNGVSERPPLRRQRRGRAMAAPALAFPMLLAASLLSVAAPALARSPSCPDGWQGGPVQNRCFMYISASLSWDRSEAVCHNYSGHLAAVSSVQELNFVKSLCGSSSTGCWVGGHHYSTSTGNGWKWSDDSSVWNETVFLGEPLPANCSDPACKVATSNDFCTLVTNGQPSTITEKRCSESHGLICRMNHVDRCYHDHCHKEYFISIIAVSGFILATTLAVVVWLLVYRRSKKRRRSREVLSASAAALVAPQWKVFTSEELRSITKNFSEGNRLPGNAKTGGTYSGILPDGSKVAIKRLKRSSLQRKKDFYSEIRRVAKLYHPNLVAVKGCCYDHGDRFIVYEFVANGPLDVWLHHIPRGGRSLDWAMRMRAATTLAQGIAFLHDKVKPQVVHRDIRASNVLLDEDFGSHLMGVGLSKFVPWEVMHERTVKAASYGYLAPEFIYRNELTTKSDVYSFGVLLLEIISGRRPAQSVESVGWQTIFEWATPLVQSHRYLDLLDPLIQESPDAGVVQKVVDLVYSCTQHVPSVRPRMSHVVHQLQQLELKSAASEQQLRSGTSTSATSPMLPLEVRTPR

SEQ ID NO: 54128 - protein, 365 aa, Homo sapiens
  Clone ID: LIB4219-043-E7_FLI.pep
RSGVWKFRGTGAQAHDCSGMDQYCILGRIGEGAHGIVFKAKHVETGEIVALKKVALRRLEDGFPNQALREIKALQEMEDNQYVVQLKAVFPHGGGFVLAFEFMLSDLAEVVRHAQRPLAQAQVKSYLQMLLKGVAFCHANNIVHRDLKPANLLISASGQLKIADFGLARVFSPDGSRLYTHQVATRWYRAPELLYGARQYDQGVDLWSVGCIMGELLNGSPLFPGKNDIEQLCYVLRILGTPNPQVWPELTELPDYNKISFKEQVPMPLEEVLPDVSPQALDLLGQFLLYPPHQRIAASKALLHQYFFTAPLPAHPSELPIPQRLGGPAPKAHPGPPHIHDFHVDRPLEESLLNPELIRPFILEG

SEQ ID NO: 54129 - protein, 131 aa, Zea mays
  Clone ID: LIB3062-026-C3_FLI.pep
LLAMLDEYVMLRQEREEEKKRMREQKRYIEQQLNTDHEGPFGSRVSPNRPASSKKAVGVKVNGSVSNGTPPNRRLSISGQQNGGGHGVRSGGKDSKKDTAKTASPGNNAVAAAPVDAVSQISVTDPVPSTP

SEQ ID NO: 54130 - protein, 484 aa, Homo sapiens
  Clone ID: LIB4653-002-F12_FLI.pep
AWAADMLLLKKHTEDISSVYEIRERLGSGAFSEVVLAQERGSAHLVALKCIPKKALRGKEALVENEIAVLRRISHPNIVALEDVHESPSHLYLAMELVTGGELFDRIMERGSYTEKDASHLVGQVLGAVSYLHSLGIVHRDLKPENLLYATPFEDSKIMVSDFGLSKIQAGNMLGTACGTPGYVAPELLEQKPYGKAVDVWALGVISYILLCGYPPFYDESDPELFSQILRASYEFDSPFWDDISESAKDFIRHLLERDPQKRFTCQQALRHLWISGDTAFDRDILGSVSEQIRKNFARTHWKRAFNATSFLRHIRKLGQIPEGEGASEQGMARHSHSGPPCWPAPQVVMPRQMPRPSGLTPRFPSLGCFRSPPPTPPPGAGLCWILRFEGVAHGAGVGMGHPQVCPQALPCLGAVAPLPCCLSRPCPPRPAKSRGGAGRRASGAVFPARLLCASLSVGGPACVMVMAFQPPPVFPKPIKKDTA

SEQ ID NO: 54131 - protein, 117 aa, Zea mays
  Clone ID: LIB3066-055-E1_FLI.pep
DPVVKVMSKGTPRRKAELEHLVLMLSTINAMQIETRSLDVMTSRVCMADQVMHLNEKKMFPTDHDKGNNVWVLDTGASNHMKGCLEALAPLNISVRDTMRFGDGSLVEIEGIGFMML

SEQ ID NO: 54132 - protein, 379 aa, Homo sapiens; identical to SEQ ID NO: 37526
  Clone ID: LIB4119-031-C2_FLI.pep

SEQ ID NO: 54133 - protein, 250 aa, Zea mays
  Clone ID: LIB3066-031-H2_FLI.pep
LIDSCGGGGDGGVVCESEGDVRHPTVLPVVRGDGDILLLALPRVLAALGGAHCGGQLLHGLAVDLRLEVVQRVAEEVGGAAVLLQAVVEAGARLRIRRRRRLQLREVVDLGLGAGGVVDGHPGGQHRQPVHVLVAGLLAARVGAQRRHAVVVGHAGVRLGRAAARLLHAHRGRALLRRLAIVHRRASSGGGDIIISRHQLHYRLRNTNQKQQAETEQYQRHTPAAATAAGTGHFRPNYLARMDDVPCCWS

SEQ ID NO: 54134 - protein, 520 aa, Homo sapiens
  Clone ID: LIB4119-200-E7_FLI.pep
VTVSPSSPPTPPSQALSSLKAVGPPPQTPPRRHRGLQAARPAEPTLPSTHVTPSEPKPFVLDTGTPIPASTPQGVKPVSSSTPVYVVTSFVSAPPAPEPPAPEPPPEPTKVTVQSLSPAKEVVSSPGSSPRSSPRPEGTTLRQGPPQKPYTFLEEKARGRFGVVRACRENATGRTFVAKIVPYAAEGKRRVLQEYEVLRTLHHERIMSLHEAYITPRYLVLIAESCGNRELLCGLSDRFRYSEDDVATYMVQLLQGLDYLHGHHVLHLDIKPDNLLLAPDNALKIVDFGSAQPYNPQALRPLGHRTGTLEFMAPEMVKGEPIGSATDIWGAGVLTYIMLSGRSPFYEPDPQETEARIVGGRFDAFQLYPNTSQSATLFLRKVLSVHPWSRPSLQDCLAHPWLQDAYLMKLRRQTLTFGYHQQQHLAGLLPHRPSRTETPGPGPDATPGQSQSGRPIGQAQQGGNRQRDKRGMEKWRGKGIEGQEGGGSRKVLGWGSVHLRENQGRWAWLERRKRKEPMLS

SEQ ID NO: 54135 - protein, 405 aa, Homo sapiens; identical to SEQ ID NO: 53940
  Clone ID: LIB3063-117-E9_FLI.pep

SEQ ID NO: 54136 - protein, 336 aa, Zea mays
  Clone ID: LIB3066-049-B3_FLI.pep
QPTTTVSMATTQSRGGGGVVPVEVDEEHGRRRQGGAAPQEEEEEEAAEKPELRRGPWTVDEDHTLVNYIADNGEGRWNSLARAAGLKRTGKSCRLRWLNYLRPDVKRGNFTADEQLLILDLHTRWGNRWSKIAQHLPGRTDNEIKNYWRTRVQKHAKQLNCDASSKRFKDAMRYLWMPHLVDATATTADDEYHHHQHQHQAAAAGNIDGLLAGGDVDDVQNALAAGVAAAMASSSSDSLASEPYSYEDGGLLASVRAGEDMQLVMSGGGWAMAQEANDQGLWPSSSAGHGLSSSVQAAAGGAGQFEDPELSGWVQGFSDSIITGNLWALEEIWKMQ

SEQ ID NO: 54137 - protein, 81 aa, Zea mays
  Clone ID: LIB3158-008-H11_FLI.pep
LFKIFRILGTPTKETWPGVASLPDYKSTFPKWPPVDLATVVPTLEPAGIDLLSKMLRLDPSKRITARAALEHDYFRDLEHA

SEQ ID NO: 54138 - protein, 50 aa, Zea mays
  Clone ID: LIB3182-015-H5_FLI.pep
LASGYTTAHSFFSGGHRRQQRRGMESAAAGRTSPSVAALSAPPTAPRPGR

SEQ ID NO: 54139 - protein, 481 aa, Zea mays
  Clone ID: LIB3059-053-F1_FLI.pep
AEKELGANGHSLDRCDSVQEDEDGLSCKEKDLYNCGTKASDEEFSDRLQENHENTQPSNNHNDSVDQSQLPPSSSPTESTDEISSEDEENNDKENMDPSAQNNDVHTLEHLQQAIGGNSRPDDAILKDFLDDEAEEEDDSDNDMTRFKDNEEDDGSDENEVFNDLIAAGYEEKEVDHEKRNELHQKWLQQQDAAETNNVIQRLKFGHREQKESAYEDEDEDEDEDEDEYVADCEEGSQNEDLTPANIVRQNSEKAKQMIAKMFEDDNDTYEHSDDEEIEEHLARQRISKREVDNNTLISPLEDDNSREVFSLIKKLNIAPKPKMRGKQSTSNHEMLMAGRNTIASKSSFLGRTASGSLASSHRSVYRSYVFGRDDSNSSSRSCISTSESNLDLDQTNSSQPKKAKFSSQPKPEGTRATPECNTTSSGVSLFDVLRRTSEQSSQESCSTITESQAVHQFSAFKLSRRFSKVGSKNRQSLDGC

SEQ ID NO: 54140 - protein, 442 aa, Homo sapiens; identical to SEQ ID NO: 39111
  Clone ID: LIB4219-051-H12_FLI.pep

SEQ ID NO: 54141 - protein, 287 aa, Zea mays
  Clone ID: LIB3137-005-F5_FLI.pep
LTSKHLFGIITSALGPPGEHERLEHELPRHGGRAAPLLLHTLQRGPRDRLQVHALGPRRGHDRAGVQEPDQVLQRHLHLDVHVGGRALGAHPDGLERERQGPVPLHGQSRPRVQVRPQGRVELAVQRVLERVDLVVVAPHGEHAAGLPQGAAHDGVEERDVEPVDGGGHHDQVQGALAADQRHQLVLREVLRGVEVPHLRVRGGVPELPLAHVRRHHALVVLRHADGGLAGATPGVPGALVPRGEAGQHGEPLLGVLRTLLGVRLRLLLVEPRHSFSASTLSVRYRL

SEQ ID NO: 54142 - protein, 190 aa, Homo sapiens
  Clone ID: LIB4651-002-H7_FLI.pep
NNWNPASPPTPAYPSGPKSCTHTPTTKDKLSRSEGSRDTEPGGVCTLAGGLCGNCLTLRTSAVSLLRAGVLERVQTQLFRSSLHLLSGISVRLADVAFADRMLIEVDPHRVTQDSDTALETWMDKGFWPQVWVSCWRRACLEKGGWLGEKPGSRCISAPVGACRVLICCTQLTRMSCTGTCICNTVSTSI

SEQ ID NO: 54143 - protein, 411 aa, Zea mays
  Clone ID: LIB3137-018-E6_FLI.pep
NTPPSGPANRTALEAAAEADKAAAASGNPQSHVVVGRHGIRIRPWPHPDPVEVMRAHRIMERVQEEQRRWYGVKEPRQVLAVTPTYSRAFQALHLTGLLHSLRNVPYPLTWIVVEAGGTTNATASMLARSGLTVVHIPFPDRMPTEWADRHATENRMRLHALRVIRERKMDGVVVFADDSNVHTMELFDEVQKVQWMGAVSIGILAHTGTADQLRLSEEDKQNMPLPVQGPACNSSGHLAGWHTFNALPFSGKTATVVGEAAPVLPKGLEWAAFVLNSRMLWKEAEGKPDWVKDLDAVGENGEEIENPLTLLNDPSSVEPLGNCGKKVLLWWLRVEARADSKFPQGWVIEPPLEVVVPAKRTPWPETTTELPSELLDDKQKPEDRHLSRGNKSSQPRGTTKRKGDPQGQDN

SEQ ID NO: 54144 - protein, 245 aa, Homo sapiens
  Clone ID: LIB4118-027-G4_FLI.pep
EEHARFYSAEISLALNYLHERGIIYRDLKLDNVLLDSEGHIKLTDYGMCKEGLRPGDTTSTFCGTPNYIAPEILRGEDYGFSVDWWALGVLMFEMMAGRSPFDIVGSSDNPDQNTEDYLFQVILEKQIRIPRSLSVKAASVLKSFLNKDPKERLGCHPQTGFADIQGHPFFRNVDWDMMEQKQVVPPFKPNISGEFGLDNFDSQFTNEPVQLTPDDDDIVRKIDQSEFEGFEYINPLLMSAEECV

SEQ ID NO: 54145 - protein, 195 aa, Zea mays
  Clone ID: LIB3136-022-E7_FLI.pep
STDGPSTGPLFGLKADGSSFPSFSLGAASNGSSATVLATSAEAPKKFAMAEGPVETGEENEKAVFTADSALYEYLDGGWKERGKGELKLNVPVSSSGGERARLVMRAKGNYRLVLNASLYNDMSLKDMDKKGVTFACMNSIGESPSSLATFALKFKDTATREEFKDAVEFHRASKAPDEPLKAPENSSKAAEAEA

SEQ ID NO: 54146 - protein, 416 aa, Zea mays
  Clone ID: LIB3332-028-C5_FLI.pep
PGHLYSSKTGGLRRWYNPPWFSETVPSTPYNALFLREMFEKAVIKRLMTDVPFGVLLSGGLDSSLVASVASRHLNETKVDRQWGNKLHTFCIGLKGSPDLKAAREVADYLSTVHHEFHFTVQEGIDALEEVIYHIETYDVTTIRASTPMFLMSRKIKSLGVKMVISGEGSDEIFGGYLYFHKAPNKKEFHEETCRKIKALHLYDCLRANKATSAWGVEARVPFLDKSFISVAMDIDPEWKMIKRDLGRIEKWVIRNAFDDDERPYLPKHILYRQKEQFSDGVGYSWIDGLKDHASQHVSDSMMMNAGFVYPENTPTTKEGYYYRMIFEKFFPKPAARSTVPGGPSVACSTAKAVEWDASWSKNLDPSGRAALGVHDAAYEDTAGKTPASADPVSDKGLRPAIGESLGTPVASATAV

SEQ ID NO: 54147 - protein, 279 aa, Zea mays
  Clone ID: LIB3136-040-A3_FLI.pep
REKKMVAAAAEVSTAATASSSPPAEEGERRDESESDGEMAGLAAVLDFDMLCASVALSAERRKAGAALAGAAGDCGGGGGGVQRMWEGDVVLDCLDDRRIALETSCCPCYRFGKNMRRANLGSCFLQGMVYCILLAAVLISLIAFSVTRHHIYLYMGIGSVLLIAVYTGYFRRRIRKQFNIRGTESSLDDCVLHLICPCCTLCQEARTLEMNNVQCGVWHGRGDTICLGSNGAGNKAFAALNKASLVPIKSPGMCGMDRSSSAADEQQPLVPPDQLEQV

SEQ ID NO: 54148 - protein, 212 aa, Homo sapiens
  Clone ID: LIB3063-051-F6_FLI.pep
PDNKNLCVQMFDWFDYHGHMCISFELLGLSTFDFLKDNNYLPYPIHQVRHMAFQLCQAVKFLHDNKLTHTDLKPENILFVNSDYELTYNLEKKRDERSVKSTAVRVVDFGSATFDHEHHSTIVSTRHYRAPEVILELGWSQPCDVWSIGCIIFEYYVGFTLFQTHDNREHLAMMERILGPIPSRMIRKTRKQKYFYRGRLDWDENISWALCS

SEQ ID NO: 54149 - protein, 443 aa, Zea mays
  Clone ID: LIB3150-041-D8_FLI.pep
GPRPPTPPSQPFQIALSTQLYSPSSIHHPSPSPHRLPDLYPPLPVLTLSSALWRMSSSARFDLRASSQQLQPPPSHASMSSDGGAFANAENLEHCARYLNQTLVTFGFPASLDLFATDPVSIARTCNCIYALLQQRQRDIEFRESTNDQRQRMQSDISRLEAKIERMDAQLAAKDRELATLTRTEAKNTAALKSQIDKLQQERDEFQKMVIGNQQVRTQQIHEMKKKEKEYIKLQEKLNQVLMEKKKESSRSGMEIMNLLQKEGRQRGTWNGKKNDNDYYKMIVDAYEVKKQELMQENADLRALLRSMQMDMRDFLNAPNGSSQSTVTDNGRQESGSPQSPLGGKTDVFDLPFHMARDQIEESLRTKMTSIKARMTQLQDAQKGAEVTSEATDRELELEAQLVEARSIIQEQACIMSKHFKSDKPSGRRHSGLDGEREASAEV

SEQ ID NO: 54150 - protein, 202 aa, Zea mays
  Clone ID: LIB3136-032-A4_FLI.pep
AMAAQFAAATGVFLSCLLALAALASCNTEGDILYKQRATWKDPNDVLVSWDPTLANPCTWLHITCNNDNSVIRVDLGNAGLSGTLIPDLGGLQNLQYLMLYGNNLTGPIPESLGNLTSLERLELQRNALSGAIPSSLGNIKTLQFLKLNANMLTGTVPLEVLSLVIAGNLTELNIANNDLAGTVRSSGLRVTAIIQDKLKTT

SEQ ID NO: 54151 - protein, 402 aa, Zea mays
  Clone ID: LIB3136-040-G2_FLI.pep
ENIVVFMYDDIAHSPENPRPGVIINHPQGGDVYAGVPKDYTGREVNVDNFFAVLLGNKTALRGGSGKVVDSGPNDHIFVFYSDHGGPGVLGMPTYPYLYGDDLVDVLKKKHAAGTYKSLVFYLEACESGSIFEGLLPNDINVYATTASNAEESSWGTYCPGEFPSPPPEYDTCLGDLYSVAWMEDSDFHNLRTESLKQQYNLVKDRTAVQDTFSYGSHVMQYGSLELNVKHLFSYIGTNPANDDNTFIEDNSLPSFSKAVNQRDADLVYFWQKYRKLADSSPEKNEARRELLEVMAHRSHVDSSVELIGSLLFGSEDGPRVLKAVRAAGEPLVDDWSCLKSTVRTFEAQCGSLAQYGMKHMRSFANICNAGILPEAVSKVAAQACTSIPSNPWSSIHKGFSA

SEQ ID NO: 54152 - protein, 217 aa, Zea mays
  Clone ID: LIB3151-012-F11_FLI.pep
LYLLQSAEEPDRHHEGVARCPRSPGSRCERHLHAYKRRLRLPATAAGSSTAAGASATSGSPATSGASPTAGPPAAAGPPATAGPCAAAGSSAAATMPLPYSTAPASASSPATPMPVPTAASKPVPAAGNLRRWQHPDPGPVRRVSEASVQPDGDALLLASVPVVAAAVLPAAQAGGAAAPVPGDLRLGPPVHPAAADSMPLRCCRRCPPLKKLCAVV

SEQ ID NO: 54153 - protein, 269 aa, Zea mays
  Clone ID: LIB3150-109-C10_FLI.pep
VRSDPELCRPAMATRVWLTTLLLAFLLVATPFTARVARADSEEDAAAAEVVEGADLGIVGDDTQVSSDGPLSPAPGVETVVVFPKNAGKIVLAGEETELLVGLQNEGESTLNVVAVHSTLHLPFDHNMYGQNLTVQNFFNASVPVSVQATFPYKFVVSKFLQPGAYDLVGYIVYEIDQHPYQNVFYNGTIEVVEAGGLLSVESVFLITLGIALLGLFGLWAYGQVQQLSKKTKKAPKVELGTGTTDANIDEWLEGTSFVQRSKSKKKQT

SEQ ID NO: 54154 - protein, 148 aa, Zea mays
  Clone ID: LIB3079-001-D10_FLI.pep
LYMKSSLHTFVATKFEFHSMFSCTTNRRKLDIAKSSKQHVDGLEVALMLLPYLDHSYTPGIPPADHHDHVADVKHDEVHDLVGLQIDLDGVVGLDERVGVADGAVVVGVQIGDVFLAKLNRPHLVELELGILIPDWVKTKAACSSRLS

SEQ ID NO: 54155 - protein, 93 aa, Zea mays
  Clone ID: LIB3150-112-D11_FLI.pep
FIRLYVNRFVLIMRAASYNNAIILLGFLLNLHTRVNASVSSPDAQNPAVLDENERRTPNSLYQYSRQPATYSTTMNGYGLRLKYLSVYLPIYT

SEQ ID NO: 54156 - protein, 185 aa, Zea mays
  Clone ID: LIB3067-045-E5_FLI.pep
SLAYPAPEPGVCPTNRSSDTRMAAAPSSLASSHLSPIAAVSTPAVPHQLRIGCSRRRAGRIVAMAGSGKFFVGGNWKCNGTKDSISKLVSELNAATLETDVDVVVAPPFIYIDQVKNSLTGRIEVSAQNVWIGKGGAYTGEISAEQLVDIGCQWVILGHSERRHIIGENDEFIGKKAAYALSQKC

SEQ ID NO: 54157 - protein, 189 aa, Zea mays
  Clone ID: LIB3150-107-E5_FLI.pep
RPMPAPCRAVAVAVAPERRTPGDRLTQRARSAAVRRWTHSTDFSTAATAASGAGTAASSSVAATSGVAATAGDASPSSSLASTAAASLVSAAISGSAASTGAAAASVSAAGAAASGSASLGSASVGSASATASASTSTSLDSVSASADTGSLAATTSVSAAGAAVSSFGVSTAASWAASTPAAAAAAAS

SEQ ID NO: 54158 - protein, 108 aa, Zea mays
  Clone ID: LIB3069-025-F9_FLI.pep
RSDGFFFQDHELVEMFWEVLKSLSSDNQKKFLKFVTGCSRGPLLGFQYLEPKFCIQRAGVPGLEEHADRLPTSATCMNLLKLPPYKSKEQMQTKLLYAINSEAGFDLS

SEQ ID NO: 54159 - protein, 280 aa, Zea mays
  Clone ID: LIB3150-118-C1_FLI.pep
EFTNQTPLSPTLHRVCYASPAGRPMASRKFFVGGNWKCNGTGEDVKKIVTVLNQAEVPSEDVVEVVVSPPFVFLQQVKGLLRLDFAVAAQNCWVRKGGAFTGEISAEMLVNLQVPWVILGHSERRALLGESSDFVADKVAYALTQGLKVIACIGETLEQREAGTTMDVVAAQTKAIAEKISDWTNIVLAYEPVWAIGTGKVATPAQAQEVHDGLRKWLHSNVSPAVAELTRIIYGGSVNGANCKELAAQPDVDGFLVGGASLKPEFVDIIKSATVKSSSA

SEQ ID NO: 54160 - protein, 188 aa, Zea mays; identical to SEQ ID NO: 47821
  Clone ID: LIB3075-054-G6_FLI.pep

SEQ ID NO: 54161 - protein, 197 aa, Zea mays
  Clone ID: LIB143-060-F8_FLI.pep
LAVTRETNTHNVQKHSYCFLPFALPHQSPAGCHPAHWHCSDNGLHSGDLNLDGLGLLGLRRGQLLDGHREHAVPAHGGDLVHVGVVRQHELAHELAHPPLHAQVLGVLALLPAPLAADHQHPLVLHLHPDVARAQPRHVHHERVRSRELLDVGRGGRHGARVADVGARGAAARLVAVGHVQQVMQRRHPGGLQPEHP

SEQ ID NO: 54162 - protein, 272 aa, Arabidopsis thaliana columbia
  Clone ID: LIB3175-059-E4_FLI.pep
LNIFQSLKAPLFSPFRASSYSSSLRVLPLMEGNFFIRSDAQRAHDNGFIAKQKPNLTTAPTAGQANESGCFDCNICLDTAHDPVVTLCGHLFCWPCIYKWLHVQLSSVSVDQHQNNCPVCKSNITITSLVPLYGRGMSSPSSTFGSKKQDALSTDIPRRPAPSALRNPITSASSLNPSLQHQTLSPSFHNHQYSPRGFTTTESTDLANAVMMSFLYPVIGMFGDLVYTRIFGTFTNTIAQPYQSQRMMQREKSLNRVSIFFLCCIILCLLLF

SEQ ID NO: 54163 - protein, 405 aa, Glycine max
  Clone ID: 700845275_FLI.pep
DNPPLKIRFVDNTDPAGIDHQIAQLGPELASTLVIVISKSGGTPETRNGLLEVQKAFREAGLDFPKQGVAITQENSLLDNTARIEGWLARFPMFDWVGGRTSEMSAVGLLPAALQGIDIREMLAGASLMDEANRSTVLRNNPAALLALCWYWATDGVGSKDMVILPYKDSLLLFSRYLQQLVMESLGKEFDLDGNRVNQGISVYGNKGSTDQHAYIQQLREGVHNFFVTFIEVLRDRPPGHDWELEPGVTCGDYLFGMLQGTRSALYANNRESITVTVQEVTPRTVGALIALYERAVGIYASLVNINAYHQPGVEAGKKAAGEVLALQKRVLAVLNEASCKEPVEPLTLEEVADRCHAPEDIEMIYKIIAHMAANDRALIVEGSCGSPRSIKVFLGECNIDGLYA

SEQ ID NO: 54164 - protein, 251 aa, Zea mays
  Clone ID: LIB3151-043-B4_FLI.pep
KVESSSNNRATMETKIFSLLMLLALSTCVANATIFPQCSQAPIASLFPPYLPSIIASVCENPALQPYRLQQAIAASNIPLSPLLCQQSPALSLVQSLVQTIRAQQLQQLVLPVINQVALANLSPYSPQQQFLPFNQLSTLNPAAYLQQQLLPFSQLATAYSQQQQLLPFNQLAALNPAAYLQQQILLPFSQLATASRASFLTQQQLLPFYQQFAANPATLLQLQQLLPFVQLALTNPAASYQQHIIGGALF

SEQ ID NO: 54165 - protein, 231 aa, Zea mays
  Clone ID: LIB3180-030-H3_FLI.pep
QAKFDEIKKKAAAGGDADDASDDVEEDEDSDSSDSDIDPELEKIIAQRERARNGARWPRKEKKSSSHHHRNSSSKRKSKHTRSRSDDSEEDEGRRGRDRKKMSGRSKKHERSDEASSDDTDSDRQRHRKSRKDRKSRKDRKRRSHRRSDDTLDEKDVSGGEERRHQRHQRSHHWRDASDCDNGDSDSAHDKKQSSRRRRHCQSENSGLDEDERHDHRGAKRSRKNRDHKRS

SEQ ID NO: 54166 - protein, 306 aa, Zea mays
  Clone ID: LIB3180-011-F4_FLI.pep
ARAEKDKNHGVVLIPEGLVESIPELYALLQEIHGLHGKGVSVENISSQLSPWASALFEFLPPFIRKQLLLHPESDDSAQLSQIETEKLLAQLVETEMNRRLKEGTYKGKKFNAICHFFGYQARGALPSKFDCDYAYVLGHVCYHIIAAGLNGYMATVTNVKSPVNKWRCGAAPISSMMTVQRWSRGPSATQIGKPAVHMASVDLKGKAYDVLRQNSSRFLLEDVYRNPGPLQFEGPGADSKPISLCVEDQDYMGRIKKLQEYLEKVKSIVKPGCSQDVLKAALSAMSSVTETLNIMTSSSTGQTAL

SEQ ID NO: 54167 - protein, 247 aa, Zea mays
  Clone ID: LIB3150-112-G4_FLI.pep
SGRRRREDGSEVRSKNRSGLGKRGRRRPVGMIQLLFLVLFAEGAVALLLMVKVGPLRELAMRGVDQVKTGKGPATVKTLACTLSVILMSSVASILKIQNRGLKLGTVSPMDQVLWRTHLLEASLIGYTLFLAFVIDRLHHYLRKLMTLRKTSSTSREEVEKLQMENRSLREKEEKSSSETNRLQREIARLNEGMKKLKSETEEHERKASVAEAHVDALQKQSEELLLEYDRLLEDNQILQTQLLSRG

SEQ ID NO: 54168 - protein, 230 aa, Zea mays
  Clone ID: 700451947_FLI.pep
GSNPKQGVDLSAAAMSKLQSESVKDAISQIVGDAKEKNRKFTETVELQIGLKNYDPQKDKRFSGSVKLPHIPRPKMKVCMLGDAQHVEEAEKMGLDYMDVEALKKMNKNKKLVKRLAKKYHAFLASEAIIKQIPRLLGPGLNKAGKFPTLVTHQESLESKVNETKATVKFQLKKVLCMGVAVGNLAMEEKQIQQNIQMSVNFLVSLLKKNWQNVRCLYVKSTMGKPYRVF

SEQ ID NO: 54169 - protein, 394 aa, Zea mays
  Clone ID: UC-ZMFLMO17326H05_FLI.pep
ADYNVISDLALKRVKQDLTMHGGQVCSSIAPATHLVVVSVLQVYNFDNLYKSFPPAERRYLHDKRLHVVSNKWLEDSVEKQMKLSETAYSLKPDTLEELEIERSEENVQPPEHKFEEHKEFERSHAENMPRKRSRPTSSRTARAAPRAVRRIRPRRGNQKAKIGDVESEESGPSECQDDENLDTDDTSKIEEGITNKNKGLPAPASKPAWRTRATKGNQHTKMGDGGSGPCETGKDDQKLDTDYISKMEVDNIDNDCGPPPGAQLFTLGEQEVKGVKLNTVEEKQDIPFQRTTAAEAMSSTPGEKIEQMADPLHAMLLDMLPLLGQKRTEDTSKAPLAKAETDPPAIGSSTSNSEILLPDAGTSGVPAPEPSAAPPKKKKVSYRDVVSELLKDW

SEQ ID NO: 54170 - protein, 155 aa, Zea mays
  Clone ID: LIB3150-063-H6_FLI.pep
HLKYVASTENSFRDTWNSKLRRSSFHCLGGSLDQKTLCRLSQEVGELLERGLGILGLGPELRSEEAVGLHQTIKGCLDEVTECLGGATGRGKDIFNAGELEDLLGHAGSDNPGPPGRRHHAHGDGPALAGDLAGHSVRLADLVSPVAPPDGHDRE

SEQ ID NO: 54171 - protein, 179 aa, Zea mays
  Clone ID: UC-ZMFLB73095E05_FLI.pep
CFMLSILTFKSTNFADVLWQEAEIEKLKYEHLKISEEHCDLINQNHKLSEEAAYAKELASSAAVELKNLAEEVTKLSVLNAKQAKELLVAQEMAHSRVHGRKGRTASRGRDEVGTWSLDLEDMKMELQARRQREAALEAALAEKELLEEEYKKKFDEACHPFLVVCCSSLRCCCKENRP

SEQ ID NO: 54172 - protein, 301 aa, Zea mays
  Clone ID: LIB3180-045-H2_FLI.pep
TPPASRRREESSPSRSLSISPLRRRRFLAGTRESGAMQLYHHPYSLDSQKVRMALEEKGIDYTSYHVNPLTGKNMNVDFFRMNPSAKLPVFQNGAHVIYRAIDIIQYIDRLAVHLSGEIPPVNTEVHQWMQKVDAWNPEMFTLTHTPAKYRAFVSKFIRRVLIARMAQAPDLASMYHVKLREAYETDDKVKDPDIMKQSEEELSKLLDDVEAQLGKTKYLAGDEFSPADSMFVPVLARITILDLDDEYINCRPKILEYYNLVKLRPSYKITIGRYFSGWKKYRTLFKTSFFLCVRTLFRKY

SEQ ID NO: 54173 - protein, 480 aa, Zea mays
  Clone ID: UC-ZMROB73013G08_FLI.pep
EGAWAEDGKKPSIWDTYTHSGYSIDRDTGDVAADQYHHYKEDVKLMHDMGLDAYRFSIAWSRLIPDGRGAVNPKGLEYYNSLIDELLRYGIQPHVTIYHFDLPQALQDEYNGLLSPRIIDDFTAYADVCFRSFGDRVKHWITVNEPNIEPIGGYDQGYLPPRRCSYPFGLGVTCTHGNSTTEPYAVAHHLLLAHASAVSLYRRKYQGEQGGRIGLTLLAWWYEPATQKPEDVEAAARANDFSLGWFMHPLVYGDYPPVMKRNVGARLPSLTARDSAMVRGSLDFVGINQYGAILVEADLGQLDRDLRDYYGDMATNFVTVPFESTVTRNQQVPRLGLRNHEAPWALSKLLEHLQTHYGNPPVMIHENGAGHEPDPSGGFLYDDEFRAHFLRVYVEAALASVRNGSDLRGYFVWSFMDVFEFLFSYRFRFGLYGVDFAADNRTRYARRSARWYAGFLRGGEKKQKLKNKFFLFINIIFFFF

SEQ ID NO: 54174 - protein, 392 aa, Zea mays
  Clone ID: UC-ZMFLMO17320D12_FLI.pep
IYQKFRIYLSAPGSPLRKLEQDGKASPGCAGDASAACTTCRLTLGITDGLLPNGNFERSPLPSQLRGTRVVGASAIPSWQTSGFVEYISSGQKQGDMVLVVPEGAYAVRLGNEASIRQRLRGAARGARYSLTFSAARTCAQAEQLNVSASGQSGLLAMQTMYSSNGWDSYAWAWVANADEVDIVIHNPGVTEDPACGPLIDSVAIKTLNPPRRTNKNLVKNGDFEEGPYIIPGTKWGVLIPSRVVEDHSPLPGWMVESLKAIKYIDGESFAVPRGRRAVELLAGRESAIAQVIRTVPGRQYVLSFTIGDASNACRGSLMVEAYAGRESTKVAYESAGKGGVKRAVLPFRAASARTRLVFFSSFYSTRSDDLSSLCGPVLDDVVVVSVRTKRG

SEQ ID NO: 54175 - protein, 293 aa, Zea mays
  Clone ID: UC-ZMFLMO17330B09_FLI.pep
AKRGSESRPADRPGHERQAATVLVDGGGLLRDAGARTRRPGPGAGGVLSSLVVVPVAAHAPGRAGAAPRRARGPGPPRRVAPPPGWRGLAGRVHGRGVQAVRRVPRAAARRRCRRGVRRKRRPARLAPHAGGLVEPPPLETGGACDQRVQARGHGGEGGEPRAGGDARGCASAAPERGRPRRRQAGRLQRLPRRALRHPDADLVPADAALVGRAPLLARPQRGRRGLRRLLRRRVRDGAVPGAAARGGGGRQVRGGGRRRRRRRRRGDDARVPARAGGGGGGQGGRGARRRRG

SEQ ID NO: 54176 - protein, 159 aa, Arabidopsis thaliana columbia
  Clone ID: LIB3177-019-B4_FLI.pep
PIKGSPYPRGYYRCSTSKGCLARKQVERNRSDPKMFIVTYTAEHNHPAPTHRNSLAGSTRQKPSDQQTSKSPTTTIATYSSSPVTSADEFVLPVEDHLAVGDLDGEEDLLSLSDTVVSDDFFDGLEEFAAGDSFSGNSAPASFDLSWVVNSAATTTGGI

SEQ ID NO: 54177 - protein, 156 aa, Zea mays
  Clone ID: UC-ZMFLMO17320F03_FLI.pep
LALAGNGVPPGAINLIPLNEIVVDINGTFVPSLSAPAPTNTGFSLTIDEVDNTWLEAPPAAEAPPSLVTPQEHGHLVTKHSLDCLSHLTKNDFEGISPDLRWEEEGPQHVPSEKVMYLKLGLAAKDERENKVERMLAIIQVMQIFEMSWKMMVQPP

SEQ ID NO: 54178 - protein, 203 aa, Zea mays
  Clone ID: LIB83-016-H9_FLI.pep
FSLGCLIFYCITKGKHPFGEYYERDVNIANNRFDLFMVDYIPEAVHLISHLLQPNPEARPTAVYVMHHPLFWSPELRLSFLRDTSDRIEKTSETDLINTLESIGSLAFGGKWGEKLDAALVTDMGRYRKYNFESIRDLLRYIRNKSGHYRELSDDLKGILGSLPEGFDRYFASRFPKLLIEVYKVLWVHCKDEEAFSKYFKGS

SEQ ID NO: 54179 - protein, 287 aa, Zea mays
  Clone ID: UC-ZMFLMO17327F04_FLI.pep
AELRGDLASDKAGSLLLGLPGHALPGRSGSSSLLRGCHLLRSRRCLPLLGRSSRLLGCLGGGGLGGGLGDLGRAPAGLGRRGGRSDRLGLGLGLGLGLGLGRRRLGLRSGLGLRLRRGLGLGRGLGCLGLGGLGLGVGGRQLEGVLHPRQLAGGSELLQLHGELLAEVGGELAAVLPLDVLADGHRARPLPLLEGSDRLYNHLSVGRVRRRLLRRGRLLLLRRLLLLGRLLRLGRLGHLGRRDLRWHLGHRDLSHNSLLRRHCGSLLLSPTLSGTTLHYAVVGGGGG

SEQ ID NO: 54180 - protein, 81 aa, Zea mays
  Clone ID: LIB3245-487-G1_FLI.pep
PLHLLAAVRPLPMADEEVTDPKAFLEERSKAKCVSQWYEYQKCVKRIENDETGHKHCTGQYFDYWKCVDKNVAEKLFEMLK

SEQ ID NO: 54181 - protein, 350 aa, Zea mays
  Clone ID: UC-ZMFLMO17320F11_FLI.pep
PLSPGTSVGVGNYVTQLGLGTPSTSYAMVVDTGSSLTWLQCSPCVVSCHRQVGPLFDPRASSTYASVRCSASQCDELQAATLNPSACSASNVCIYQASYGDSSFSVGYLSTDTVSFGSTSYPSFYYGCGQDNEGLFGRSAGLIGLARNKLSLLYQLAPSLGYSFSYCLPTAASTGYLSIGPYNTGHYYSYTPMASSSLDASLYFITLSGMSVGGSPLAVSPSEYSSLPTIIDSGTVITRLPTAVHTALSKAVAQAMAGAQRAPAFSILDTCFEGQASQLRVPTVAMAFADGASMKLTTRNVLIDVDDSTTCLAFAPTDSTAIIGNTQQQTFSVFYDVAQSRIGFSAGGCS

SEQ ID NO: 54182 - protein, 826 aa, Homo sapiens
  Clone ID: LIB4119-026-D11_FLI.pep
GAAPEAAAAAAAAGAVGTRAAPAAERAASWPGRSGGGGGARGAMVIMSEFSADPAGQGQGQQKPLRVGFYDIERTLGKGNFAVVKLARHRVTKTQVAIKIIDKTRLDSSNLEKIYREVQLMKLLNHPHIIKLYQVMETKDMLYIVTEFAKNGEMFDYLTSNGHLSENEARKKFWQILSAVEYCHDHHIVHRDLKTENLLLDGNMDIKLADFGFGNFYKSGEPLSTWCGSPPYAAPEVFEGKEYEGPQLDIWSLGVVLYVLVCGSLPFDGPNLPTLRQRVLEGRFRIPFFMSQDCESLIRRMLVVDPARRITIAQIRQHRWMRAEPCLPGPACPAFSAHSYTSNLGDYDEQALGIMQTLGVDRQRTVESLQNSSYNHFAAIYYLLLERLKEYRNAQCARPGPARQPRPRSSDLSGLEVPQEGLSTDPFRPALLCPQPQTLVQSVLQAEMDCELQSSLQWPLFFPVDASCSGVFRPRPVSPSSLLDTAISEEARQGPGLEEEQDTQESLPSSTGRRHTLAEVSTRLSPLTAPCIVVSPSTTASPAEGTSSDSCLTFSASKSPAGLSGTPATQGLLGACSPVRLASPFLGSQSATPVLQAQGGLGGAVLLPVSFQEGRRASDTSLTQGLKAFRQQLRKTTRTKGFLGLNKIKGLARQVCQVPASRASRGGLSPFHAPAQSPGLHGGAAGSREGWSLLEEVLEQQRLLQLQHHPAAAPGCSQAPQPAPAPFVIAPCDGPGAAPLPSTLLTSGLPLLPPPLLQTGASPVASAAQLLDTHLHIGTGPTALPAVPPPRLARLAPGCEPLGLLQGDCEMEDLMPCSLGTFVLVQ

SEQ ID NO: 54183 - protein, 434 aa, Zea mays
  Clone ID: UC-ZMFLMO17327H09_FLI.pep
VPIDAGKEQSSTTDCEAPTKLQNLVCSKSTQNHSQSHVKLGLSKEPGDICANITQYSHRKKHFAEHSAVNCNADQHCLAVIDDCIKRSGLNSAAPDFVPLAVRKSNTSDGSCSSSGTNVSGILKEINSLSEVLCNNYSDEIKLEEHDHSLLQSVIGNLQSYLHKASKVPAMVDSDKSGGLKACYAQNAVSKPVAGDYNGSFTADNGKGISISNLGDSSPLVGDLRKKSVTGYQQPALSNFPKELSWEERSQALIYKKLWFDAERTNCALKYQLKQTRVEIDLESSTAHIGGGPRNSSFHLCDVGVDPSSSYGSAITCPPMMLKGHPGERKSHNLLSAADHIQSGDSSALSRPKGYIAVPENIEDGYFLSGPEETGVRRHARPGLQSRPLGRLNTSTSDGMSSSYVTGRDDILRGSCEFGSSDWEHVLKEEIGST

SEQ ID NO: 54184 - protein, 81 aa, Zea mays
  Clone ID: 700045827_FLI.pep
PHQASALLQPAMMIACCLQHICARLSNSTCILGLLPEAILSPLGIGGHPINNNLLIYVHPISVKSERDSNSSIPGRRPESP

SEQ ID NO: 54185 - protein, 449 aa, Zea mays
  Clone ID: LIB3137-061-A1_FLI.pep
RLSTQTVAKQVDRQLTTHRNHSISAISRPSVLCTVLPFGARVIIGRLLVLVPAGDDEVGKEVEEAEHGEQPEEVVEVAAVEVLRDPPDAAVPGGDVGDDGHQDRAEVVAERDGGERQRGAHAPHGVGRLVVEELQLPHEGEHLRASDDEVLRYLPEDGDGHDVVLAVQAVPRDGAQPHDVQHARRHHGEDGDDEADAHALQLREPARPPGVGAHQGHDGAVVHGDPDDDADGVHHGQRRRGDLEPGPHALVQRVALQHEHGAHLRVHRREHDPAGPDGQQPDHALELLHLRHRAQAPRARLRAVLGRHHGRPVEARQLLRVLQLAAPLDAGLPVHRLVQPRLVGGHGHVPLARARDEHLRDARQRAAPGLLVPVQRRAHEEAADGDGHDHGGDAEAPAPAHVRLHVHQHRGRHQRADVDGEVEPVEEGALALLLPLVVLVELVGAEGGH

SEQ ID NO: 54186 - protein, 239 aa, Zea mays
  Clone ID: 700083816_FLI.pep
QWGAATRFFLTRCLLPLPLLSPRWRQRRRGSICATRAFAMAASGFGGGEAFRLSAAPGAGLLKLHKGDITLWSVDCATDAIVNAANERMLGGGGVDGAIHQAAGPELVQACRKVPEVKPGVRCPTGEARITPAFELPASRVIHTVGPIYDLDKHPEVSLKKAYENSLKLAKDNGIQYIAFPAISCGVYRYPPKEASKIAVSTAQKFSEDIKEVHFVLFSDDLYNIWRETAQQLLSQFEK

SEQ ID NO: 54187 - protein, 152 aa, Zea mays
  Clone ID: LIB3069-050-B2_FLI.pep
FRHYRNRKTEQQSGPLAPDAARELDVLRHDGDPLGMDGAEVGVLEETHQVRLTQLSPMARTKQTARKSTGGKAPRKQLATKAARKSAPATGGVKKPHRFRPGTVALREIRKYQKSTELLIRKLPFQRLVREIAQDFKTDLRFQSSCSAATAE

SEQ ID NO: 54188 - protein, 230 aa, Zea mays
  Clone ID: LIB3136-022-G5_FLI.pep
AALRTAGSGRRRGAGSQQTGLNGGRFLMMQRRELVTKAGIPLAVSCSMATSPASANGAAQGIVSDSVSPVVRAGLEILPFKADGYNFWTWRGRRIHYVEQGAGRPVVLIHGFGASAFHWRYNIPELAKKYKVYAIDLLGFGWSEKALVDYEATIWMEQVSDFLREIVKEPAVLVGNSLGGFTTLFTATEVPELVRGVVLLNSAGQFADPNKPAAAPAEEEEGGSALSRCT

SEQ ID NO: 54189 - protein, 506 aa, Homo sapiens
  Clone ID: LIB4653-002-E1_FLI.pep
RLSLEQIQKHPWYLGGKHEPDPCLEPAPGRRVAMRSLPSNGELDPDVLESMASLGCFRDRERLHRELRSEEENQEKMIYYLLLDRKERYPSCEDQDLPPRNDVDPPRKRVDSPMLSRHGKRRPERKSMEVLSITDAGGGGSPVPTRRALEMAQHSQRSRSVSGASTGLSSSPLSSPRSPVFSFSPEPGAGDEARGGGSPTSKTQTLPSRGPRGGGAGEQPPPPSARSTPLPGPPGSPRSSGGTPLHSPLHTPRASPTGTPGTTPPPSPGGGVGGAAWRSRLNSIRNSFLGSPRFHRRKMQVPTAEEMSSLTPESSPELAKRSWFGNFISLDKEEQIFLVLKDKPLSSIKADIVHAFLSIPSLSHSVLSQTSFRAEYKASGGPSVFQKPVRFQVDISSSEGPEPSPRRDGSGGGGIYSVTFTLISGPSRRFKRVVETIQAQLLSTHDQPSVQALADEKNGAQTRPAGAPPRSLQPPPSRPDPELSSSPRRGPPKDKKLLATNGTPLP

SEQ ID NO: 54190 - protein, 377 aa, Zea mays
  Clone ID: 700098979_FLI.pep
QLKAAREDIKELLKSTYCHPIMVRLGWHDSGTYDKDIKDWPQRGGANGSLRFDAELSHGANAGLINALKLIQPIKDKYPGITYADLFQLASATAIEEAGGPKLPMKYGRVDVTAAEQCPPEGRLPDAGPRDPAEHLREVFYRMGLDDKEIVALSGAHTLGRARPDRSGWGKLETKYTKDGPGEPGGQSWTVEWLKFDNSYFKDMKFLSQLPWKEQKEQDLLVLPTDAALFEDPSFKVYAEKYADDQEAFFKDYGEAHAKLSDLGAKFDPPEGFSLDDDTSSSPSDEKTEEPTLVAVGAAVATATADDNNGAAPQPEPFVAAKYSYGKRELSDAMKQKIRAEYEGFGGSPDKPMQSNYFLNIMILIAGLAFLTSLLGN

SEQ ID NO: 54191 - protein, 153 aa, Zea mays
  Clone ID: 700103356_FLI.pep
IRSAHARTQQGKNTNERERETGRGHPSIRPSPMDNLKEQRGHDAAGANSGVWMTVPAFGDWDTKNGALPDYSMDFSKIREMRKQNKKELSRASLGGDDDLLAHAHAQKPQANSAQPKLGRPCPAADRRPLHARDHSPTGGKKFLSYFQCCIKA

SEQ ID NO: 54192 - protein, 256 aa, Homo sapiens
  Clone ID: LIB4218-046-D1_FLI.pep
TTSEPLSIPTNRLTQRIIPRRFALSTKIPDTKGCLQCRVVRNPYTGATFLLAALPTSLLLLQWYEPLQKFLLLKNFSSPLPSPAGMLEPLVLDGKELPQVCVGAEGPEGPGCRVLFHVLPLEAGLTPDILIPPEGIPGSAQQVIQVDRDTILVSFERCVRIVNMQGEPTATLAPELTFDFPIETVVCLQDSVLAFWSHGMQGRSLDTNEVTQEITDETRIFRVLGAHRDIILESIPTDNPEAHSNLYILTGHQSTY

SEQ ID NO: 54193 - protein, 465 aa, Homo sapiens
  Clone ID: LIB4119-186-B6_FLI.pep
RSPSRDHHGDPSAGPRLREVESRGTTFLLLSFPSSVGKGLSPASASKMKNYKAIGKIGEGTFSEVMKMQSLRDGNYYACKQMKQRFESIEQVNNLREIQALRRLNPHPNILMLHEVVFDRKSGSLALICELMDMNIYELIRGRRYPLSEKKIMHYMYQLCKSLDHIHRNGIFHRDVKPENILIKDVLKLGDFGSCRSVYSKQPYTEYISTRWYRAPECLLTDGFYTYKMDLWSAGCVFYEIASLQPLFPGVNELDQISKIHDVIGTPAQKILTKFKQSRAMNFDFPFKKGSGIPLLTTNLSPQCLSLLHAMVAYDPDERIAAHQALQHPYFQEQRKTEKRALGSHRKAGFPEHPVAPEPLSNSCQISKEGRKQKQSLKQEEDRPKRRGPAYVMELPKLKLSGVVRLSSYSSPTLQSVLGSGTNGRVPVLRPLKCIPASKKTDPRKDLKPAPQQCRLPTIVRKGGR

SEQ ID NO: 54194 - protein, 236 aa, Zea mays
  Clone ID: 700152533_FLI.pep
LVRRLKLHRPSPSPYDPDPAAAPVPATAGDGELFRPRRAAVLVCLFRGDGGELRVILTKRSSSLSTHSGEVSLPGGKVEEGDADDVATALRESKEEIGLDPALVTVVASLEHFLSKHLLVVVPVVGILLDRQAFKPALNIAEVDEIFDVPLEMFLKDENRTSEEREKMGQTFTVHYFTYENGIQKYLIWGLTARILIHAASVVYERPPDFTERRAHFKLPMFTKDCSSMLAGPAKH

SEQ ID NO: 54195 - protein, 421 aa, Zea mays
  Clone ID: 700150510_FLI.pep
ASNRRMEAAVAAALKSPTAARPSWRPAAPGATSLPFDRRRSFAFGSIKGLGRQQLTSRTRRRSSVVRASWSPSESLPPSSSMAPLRMESPAGQLLSQILHTHPHLLPAAAEQQLELLQTDREAEKDKDKESDAGDKLAPTGVDLMLYRRIAQVKEKERRRTLEEILYALVVEKFVEAGVSLVPALSRSIDSSGRVDQWAETVEGRLQRLHSPEAYEMIENHLALILGQRQSDATIAAISKLRVGQVYAASVMYGYFLKRVDQRFQLEKTMKSLPWGSEEEDGALNQLMTTDSMPSAQASSSHPEMGSWTTAPDFNAGGPSESIKPCRLRSYVMSFDPDTLQRYATVRSKEAFGIIEKHTEALFGKAEIVVTPGGTVGSSKDEHIRISFAGLRRLVLEAVTFGSFLWDVESFVDSSYHFVTS

SEQ ID NO: 54196 - protein, 58 aa, Zea mays
  Clone ID: LIB83-002-F4_FLI.pep
NKHWYPRLFAFTTLQHIYHICMDRYNASPAAPATRVVSSRDYKQQSTIRVDRFLLLQN

SEQ ID NO: 54197 - protein, 523 aa, Zea mays
  Clone ID: LIB3151-012-C9_FLI.pep
SPACALVQCTHDAGSMAGRARARRFVLAGALMIAWLLCLLPRATAAAVRRSDFPPSFLFGTATSSYQIEGAYLEGNKSLSNWDVFSHVPGRIEDGSTGDIADDHYHRYEDDIELMHSLGTNAYRFSISWARILPRGRFGEVNPAGIAFYNRLIDSLLLKGIEPFVTLSHYDIPQELEDRYGAWLGGAEARRDFGHLADVCFAAFGDRVRHWATFNEPNVAVTRGYMLGTYPPGRCSRSCARGNSDAEPYVAAHNVVLAHAAAVQIYKTKYQKGLIGIVMSTVWFVPLTDAPADRLATERALAFDVPWFLDPIIYGDYPPEMRRLLGSRLPTFSPEDRRTLGYGLDFIGINHYTTLYARDCMFSPGYCPSGQEFHQSLAAYTGERDGIPIGPPTAMPTFYVVPDGIEKMVTYIMNRYSNLPMFITENGYAQGGDGYTTRAEDWLDDQGRIQYLEGYLAKLAKVISDGADVRGYFIWSLIDNFEWLYGYTLRFGLHYVDYQTQERKPKSSALWYKRFLQSSLQAQ

SEQ ID NO: 54198 - protein, 522 aa, Zea mays
  Clone ID: LIB143-063-B6_FLI.pep
APPPSNMETAYVVVLSFFFIVAIHRLLNRGESKNMSKQPLPPGPRAIPVLGHLHLLEKPYHLAFMRLAARYGPVFSLQLGSRAAVVVSTADCARECLAEHDATFANRPTYPTLHLMTYGGATIGHSAYGAHWRHVRRVVSLHLLSPQRVLSSMVPTITAEVRAMARRMYRAAAGGAARIELKGRLLELSLSTLMETIAQTKTYRPADDADTDMSPETQEFKQLLDAIISLLGLTNVLEFLPVLQTFDVLGLKKKIAAAAGRRDAFFQRLIDAERRRLDDGVEGQKKSMLAVLLALQKSEPENYTDEKIMALCFSMFIAGTDSTATAMEWAMSLLLNHPEVLKKAREEIDAHVGSSRLLGADDVPSLGYLHCVLNETLRLYPVGPTLIPHESTADCTVGGYRVPSGTMLLVNVYAIHRDPATWPDPDVFRPERFEDGGGSAEGRLLIPFGMGRRKCPGETMALQIMGLALGTMIQCFDWGAVGGGGAPKVDMTQGGGLTLPRAVPLEAMCKPRQVMLDVLQKL

SEQ ID NO: 54199 - protein, 434 aa, Zea mays
  Clone ID: LIB3150-020-B1_FLI.pep
KNNGLDELELEGEDWDDDDEEMVDAEVDMEDIAGKAPARRKNGNLEGVLANGVHNGVKDMVTPIIRTSLEKQGYKIIGSHSGVKICRWTKSQLRGRGGCYKHSFYGIESHRCMEATPSLACANKCVFCWRHHTNPVGKSWKWKMDDPLDIVNAAIDQHTKMVKQMKGVPGVKPEKLDEGLSPRHCALSLVGEPIMYPEINALVDELHRRHISTFLVTNAQFPEKIKALKPITQLYVSVDAATKESLKAVDRPLFSDFWERFLDSLKSLHEKDQRTVYRLTLVKGWNAEEIDAYAKLLDLGQPDFIEIKGVTYCGSSATSKLTMENVPWHSDVKEFSEVLASKSGGVYEVACEHAHSCCVLLAKVDKFKINGKWHTWIDYDRFHELVTSGKPFNSRDYMAMTPSWAVYGAEEGGFDPDQSRFKKERRHGTAALRS

SEQ ID NO: 54200 - protein, 243 aa, Zea mays
  Clone ID: LIB3150-105-E5_FLI.pep
WKCNGTTDQVEKIVKTLNEGQVPPSDVVEVVVSPPYVFLPVVKSQLRQEFHVAAQNCWVKKGGAFTGEVSAEMLVNLGVPWVILGHSERRALLGESNEFVGDKVAYALSQGLKVIACVGETLEQREAGSTMEVVAAQTKAIAEKIKDWSNVVVAYEPVWAIGTGKVATPAQAQEVHASLRDWLKTNVSPEVAESTRIIYGGSVTAANCKELAAQPDVDGFLVGGASLKPEFIDIINAATVKSA

SEQ ID NO: 54201 - protein, 66 aa, Zea mays
  Clone ID: UC-ZMFLB73210E04_FLI.pep
KFSFPRRYRLYILGIGCLCRHLLAFCCASSSVCIVWVEAVKCKWRFQRWKFFLMTTDVFVKQNFHL

SEQ ID NO: 54202 - protein, 239 aa, Zea mays; identical to SEQ ID NO: 47056
  Clone ID: UC-ZMFLMO17245A05_FLI.pep

SEQ ID NO: 54203 - protein, 53 aa, Zea mays
  Clone ID: LIB3059-049-F8_FLI.pep
LYKPIKRLKRLIWNNTFFFSFQLFIQVIAHTDTATIRHPCPCAHDLPRHPPIV

SEQ ID NO: 54204 - protein, 690 aa, Homo sapiens
  Clone ID: LIB4119-028-H6_FLI.pep
AFEHTTITSSWQIKEGGGKRGLIVVMAHEMIGTQIVTERLVALLESGTEKVLLIDSRPFVEYNTSHILEAININCSKLMKRRLQQDKVLITELIQHSAKHKVDIDCSQKVVVYDQSSQDVASLSSDCFLTVLLGKLEKSFNSVHLLAGGFAEFSRCFPGLCEGKSTLVPTCISQPCLPVANIGPTRILPNLYLGCQRDVLNKELMQQNGIGYVLNASNTCPKPDFIPESHFLRVPVNDSFCEKILPWLDKSVDFIEKAKASNGCVLVHCLAGISRSATIAIAYIMKRMDMSLDEAYRFVKEKRPTISPNFNFLGQLLDYEKKIKNQTGASGPKSKLKLLHLEKPNEPVPAVSEGGQKSETPLSPPCADSATSEAAGQRPVHPASVPSVPSVQPSLLEDSPLVQALSGLHLSADRLEDSNKLKRSFSLDIKSVSYSASMAASLHGFSSSEDALEYYKPSTTLDGTNKLCQFSPVQELSEQTPETSPDKEEASIPKKLQTARPSDSQSKRLHSVRTSSSGTAQRSLLSPLHRSGSVEDNYHTSFLFGLSTSQQHLTKSAGLGLKGWHSDILAPQTSTPSLTSSWYFATESSHFYSASAIYGGSASYSAYSCSQLPTCGDQVYSVRRRQKPSDRADSRRSWHEESPFEKQFKRRSCQMEFGESIMSENRSREELGKVGSQSSFSGSMEIIEVS

SEQ ID NO: 54205 - protein, 376 aa, Zea mays subsp. mexicana
  Clone ID: UC-ZMROTEOSINTE023G11_FLI.pep
SRNSAGMGLMKKHPSIIPFMVYITNEDKHMERFAVRAKYMTLDPAKNRYIKYIRNIRAIQEYLCNRADKHLVPKINNTNVDQSVAAIHATVFSCLRRRAAGEQLYDLNTNTVAVVDEEYRNQRAANTLGSKGMFQLIQRKGSSRNLMALLNTDGSVTKAWHVSASDGNGNLNGITNNKKSPENPMLDPSQIGKAEAVNLQFGPFGISAWMSDTGGTSHTGSVEDLRPDSVETGGRNYSSCCSSPKMSDSTSKELMEDYSVYGSDEEADDPRDAETDDDLTDEERDMHEIDAGSVDEHSTKSDEEYEDLAMRDVMENGDWSDDDQAVGKTKNSPAQESIHGSGAAEDDGIKGRYHHNLDLFLKMSKEVAGTRMPCAS

SEQ ID NO: 54206 - protein, 471 aa, Glycine max
  Clone ID: 701206489_FLI.pep
KECTQLLKSCLHSVILPIGSLPIGLCVHRALLFKVLADLINLPCRIAKGCKYCRKDVGASCIVQFGSDREYMIDLVGRPGATCQPDSSLNSASSMLVPSPLCHPKFKPVETAEYTKTLAQLYFLDSEALHLVFDTTSGPAVNHSGRMDLQKTEALGANYAGGNSHLIALIPGAEEYESFNEANQSIMDYPSHEVDLDKEDLDIPWSELILKENIGTGSFGTVLRADWRGSDVAVKILKVQGFDPGRFEEFLKEVSLMKRLRHPNIVLLMGAVIQPPKLSIVTEYLSRGSLYELLHMPNVGSSLSEKRRLSMAYDVASGMNYLHQMRPPIVHRDLKSPNLLVDDSYTVKVCDFGLSRTKANTFLSSKTAAGTPEWMAPEVIRGELSSEKCDVFSFGVILWELVTLQQPWRQLNPSQVVAAVGFMGKRLEIPGHVNPQVAALIELCWATEHWRRPSFSYVMKCLQQIIADAKG

SEQ ID NO: 54207 - protein, 96 aa, Zea mays
  Clone ID: 700241877_FLI.pep
GWIPRWFRLTQSRRRPSTTSTTRTCWRTRSCSSPTTHCSTTHGRPEWSTSTPQSRRHGRSSSPRPWLRWARSRCSPARRERSGRSASPSTHTTSQV

SEQ ID NO: 54208 - protein, 368 aa, Glycine max
  Clone ID: LIB3107-030-B2_FLI.pep
ANTDSFFSLCVKILRLWRLRNHLGRVMEEEVICQWSVFRSLLAILQWWAFNVTVIIINKWIFQKLDFKFPLSVSCIHFICSAIGGYVVIKVLKLKPLITVDPEDRWRRIFPMSFVFCINIVLGNVSLRYIPVSFMQTIKSFTPATTVVLQWLVWRKYFDWRIWASLIPIVGGILLTSVTELSFNAFGFCAALLGCLATSTKTILAESLLHGYKFDSINTVYYMAPFATMILAIPALLLEGNGVLEWLSTHPYPWSALIIIFSSGVLAFCLNFSIFYVIHSTTAVTFNVAGNLKVAVAVLVSWLIFRNPISYLNSVGCAVTLVGCTFYGYVRHMLSQQPPVPGTPRTPRTPRSKMELLPLVNDKLDDKV

SEQ ID NO: 54209 - protein, 611 aa, Zea mays
  Clone ID: LIB3357-011-H9_FLI.pep
LVSRPSHKKKTARLLLLLRRAGIMCGILAVLGCSDWSQAKRARILACSRRLKHRGPDWSGLYQHEGNFLAQQRLAVVSPLSGDQPLFNEDRTVVVVANGEIYNHKNVRKQFTGTHNFSTGSDCEVIMPLYEKYGENFVDMLDGVFAFVLYDTRDRTYVAARDAIGVNPLYIGWGSDGSVWIASEMKALNEDCVRFEIFPPGHLYSSAGGGFRRWYTPHWFQEQVPRTPYQPLVLREAFEKAVIKRLMTDVPFGVLLSGGLDSSLVASVTKRHLVETEAAEKFGTELHSFVVGLEGSPDLKAAREVADYLGTIHHEFHFTVQDGIDAIEEVIYHDETYDVTTIRASTPMFLMARKIKSLGVKMVLSGEGSDELLGGYLYFHFAPNKEEFHRETCRKVKALHQYDCLRANKATSAWGLEVRVPFLDKEFINVAMGMDPEWKMYDKNLGRIEKWVMRKAFDDDEHPYLPKHILYRQKEQFSDGVGYNWIDGLKSFTEQQVTDEMMNNAAQMFPYNTPVNKEAYYYRMIFERLFPQDSARETVPWGPSIACSTPAAIEWVEQWKASNDPSGRFISSHDSAATDHTGGKPAVANGGGHGAANGTVNGKDVAVAIAV

SEQ ID NO: 54210 - protein, 355 aa, Zea mays
  Clone ID: 700243035_FLI.pep
CPTPPSLSMAVPRGCLGLPLVAVLLASLCRGQAAVRELKVGYYAETCPEAEDIVRETMARARAREARSVASVMRLQFHDCFVNGCDGSVLMDATPTMPGEKDALSNINSLRSFEVVDEIKDALEERCPGVVSCADIVIMAARDAVVLTGGPNWEVRLGREDSMTASQEDADNIMPSPRANASALIRLFAGLNLSVTDLVALSGSHSIGEARCFSIVFRLYNQSGSGRPDPHMDTAYRRSLDALCPKGGDEEVTGGLDATPRVFDNQYFEDLVALRGFLNSDQTLFSDNTRTRRVVERLSKDQDAFFRAFIEGMIKMGELQNPRKGEIRRNCRVANNSPWQPRTGMASGQSTSELR

SEQ ID NO: 54211 - protein, 259 aa, Homo sapiens
  Clone ID: LIB4655-049-H9_FLI.pep
HGRGAVCAGDPPFGLRPSAALAKSSYLATEPIITTATPAAATVSATSKMCPGNWLWASMTFMARFSRSSSRSPVRTRGTLEEMPTVQHPFLNVFELERLLYTGKTACNHADEVWPGLYLGDQDMANNRRELRRLGITHVLNASHSRWRGTPEAYEGLGIRYLGVEAHDSPAFDMSIHFQTAADFIHRALSQPGGKILVHCAVGVSRSATLVLAYLMLYHHLTLVEAIKKVKDHRGIIPNRGFLRQLLALDRRLRQGLEA

SEQ ID NO: 54212 - protein, 355 aa, Zea mays
  Clone ID: 700237335_FLI.pep
DKSAKMSGDVPRAAIANIFFTEIFTPLLLAVVTVIPYLFINAQTGVLADKQTVAKGANPPKIQPTASLVRILIVAFGPVAINAGVLLVMFAMACFMGPLLSMCCKKFGSVLAAIAHALAVIFMLVFFEVLFLLEGFNFARTMAGMIAVVSLQRFLFKLIVSLTLTREFKTDQSNIAFWTGKWYSMGWHSVSQPAREFLCKITELSMFAADFILGHWLLMFMLPVILIPRVDTLHSMMLFWLLPSQQIRPPIYSLKQSKLRRRRVIRFAILYFVLAVVMIALIVGPVYGGKAVSASLNNQLSDIAGFRLLQPNHQNHDNTNGTQQTGTGAPNYTGAGRKTTSTGAGAGVTGKIRLF

SEQ ID NO: 54213 - protein, 199 aa, Zea mays
  Clone ID: 700241208_FLI.pep
RLHIYTRRQLMICSCVCVLNCTEARTYGRSGGGDERFVHFEVRDDPGNGACGGGDGDDEAGDAEQLQAHPPRAPPGHLLLHDVHLHGEVDGERPEPQRAQEPDHVVEEGQQHGHHRRGHHERRPPRQPEQAELVAPAAGGPERERDVDLARDVAGLGPPLARPLLDEGEQGLAVDLVGADEVHGDGGVGDVEEPEGLVE

SEQ ID NO: 54214 - protein, 71 aa, Zea mays
  Clone ID: 700242227_FLI.pep
ARFFSIDGRYTRLSMVRNQPKKKTVACMKHRLIRHAWLTQRVCCQTPSETVDHHASNQPKLGFLGKRSLLF

SEQ ID NO: 54215 - protein, 334 aa, Zea mays
  Clone ID: 700444672_FLI.pep
NGAGGETLDDDGKKKRTGTVWTASAHIITAVIGSGVLSLAWSTAQLGWVVGPLTLMIFALITYYTSSLLADCYRSGDQLTGKRNYTYMDAVAAYLGRWQVLSCGVFQYVNLVGTAVGYTITASISAAAVHKANCFHNKGHAADCSTYDTMYMVVFGIVQIFFSQLPNFSDLSWLSIVAAIMSFSYSSIAVGLSLARTISGRSGTTTLTGTEIGVDVDSAQKVWLALQALGNIAFAYSYSMILIEIQDTVKSPPAENKTMKKATLMGVTTTTAFYMLAGCLGYSAFGNAAPGNILTGFGFYEPYWLIDFANVCIVVHLVGAYQVFSQPIFAALET

SEQ ID NO: 54216 - protein, 488 aa, Zea mays
  Clone ID: 700266206_FLI.pep
SAAMEKIRAAGLLKTQGLIAGQWVDAYDGKTIEVQNPATGEVLANVSFMGSRETSDAIASAHSTFYSWSKLTASERGKALRKWYDLIISHKEELALLMTLEQGKPMKEALGEVNYGASFIEYFAEEAKRIYGDIIPPTLSDRRLLVLKQPVGVVGAITPWNFPLAMITRKVGPALACGCTVVVKPSELTPLTSLAAADLALQAGIPAGALNVVMGNAPEIGDALLQSTQVRKITFTGSTAVGKKLMAESANTVKKVSLELGGNAPCIVFDDADIDVAVKGSLAAKFRNSGQTCVCANRILVQEGIYEKFASAFIKAVQSLKVGNGLEESTSQGPLINEAAVQKVEKFINDATSKGANVMLGGRRHSLGMSFYEPTVVGNVSNDMLLFREEVFGPVAPLIPFKTEEEAVHMANDTNAGLAAYIFTKSIPRSWRVSESLEYGLVGVNEGIISTEVAPFGGVKQSGLGREGSKYGVDEYLELKYICMGNLG

SEQ ID NO: 54217 - protein, 198 aa, Zea mays
  Clone ID: LIB3137-061-C6_FLI.pep
EQIILNNVHDRWKYIWGSDKFSSQKAYRSLMGQMQTHPIYKLVWKSKCQPKHRVFYWLWLKNRLNTRNMLRRRNMEIDSYSCENCLWQREETLYHLFLRCNFAKACWNSIGITPPRISNPEEASVNLKHQLNVPFSMEITILMTWSIWKSRNEWLFSNRDPSVLRCTQEFSRELRLIIHRAQGEFDTSIPNWLNLWQI

SEQ ID NO: 54218 - protein, 112 aa, Glycine max
  Clone ID: JC-GMFL02220136B03_FLI.pep
IETCMVTKLNFPPSTALRVTTRTIYVAVTMLIGICVPFFGSLLGFLGGFAFAPTSYFLPCIIWLKLKKPKKFGLSWTINWICIILGVVLMILSPIGALRNIILSAKNYKFFS

SEQ ID NO: 54219 - protein, 158 aa, Zea mays
  Clone ID: UC-ZMFLMO17322E01_FLI.pep
KVKTICRDFTRGKCSRSANECRFLHHSSVEDAAIVCQDFLRGQCNRIACRYSHVVAHPVPPMSHVPMPYPEMLYMPPPPPPPLGVPMMGPPPSPFTDNKNRVEVCRDFLKNMCNRESCRFLHPGTHTAAASANVEVCRDFKRGECNRPACRFLHPYTS

SEQ ID NO: 54220 - protein, 62 aa, Glycine max
  Clone ID: 700660053_FLI.pep
HGILIYYPPLIFYTQVDFFFQFFYLQITTCVHIPYPVFRPCVRVHRKRKLITDYHMMEQALG

SEQ ID NO: 54221 - protein, 377 aa, Glycine max
  Clone ID: 700726746_FLI.pep
PNMKNKPIILALLISFSLTNVVVSARLFPNVSSWLDAHAPLPRGAWGAFLNFTGCHRGDKYDGLANLKSYFERFGYIPHAPPPSNFSDEFDDALESAIKTYQKNFNLNVTGVLDDATLQKIVLPRCGVADIINGTTTMNAGKENETASFSKPKFHTVAHFSLFPGMPRWPEGTQELTYAFFPGNELSDTVKGVFATAFARWAEVTSLKFRESASYFGANIRIGFFSGDHGDGEPFDGSLGTLAHAFSPTNGRFHLDAAEDWVVSGDVTLSALPTAVDLESVAVHEIGHLLGLGHSSVEEAVMFPTISSRKKKVVLARDDIEGIQFLYGSNPNFNGSTATSAPERDASDGGRCLTCVGPSSGVFTLLTFAFAHFVLLI

SEQ ID NO: 54222 - protein, 79 aa, Zea mays
  Clone ID: 700343036_FLI.pep
QLGSFVAYGDLHGSQMLTLNFIIHNSPRYCCCVILAPASTANKSNLHEQTDHRHEMMNFPSSGISLGPVKKKLGPKGTK

SEQ ID NO: 54223 - protein, 47 aa, Glycine max
  Clone ID: 700730152_FLI.pep
SRNIKVLSLTSTKHNHSIQVYGKEWDHLGQFPNHRLDYVTLVHYLVK

SEQ ID NO: 54224 - protein, 87 aa, Zea mays
  Clone ID: 700380274_FLI.pep
NKFTSVKSLDEIDGDKINSREPYEISYETDVLAIRCSFHNVLKIWNLNEHSSVVGAFNCQGAGWCRVAKKNLIHDHQPRTVSGVIRA

SEQ ID NO: 54225 - protein, 105 aa, Glycine max
  Clone ID: 700733935_FLI.pep
EKQNQVSPCCLPVVDIIDDEKQNRVSEKEENWKLTPHGAKRDATLDLLQLDNSTVKKMRETKEFGELNNELPLQGEKGCLVVGGVWKKLTEEELLVIESSVRILV

SEQ ID NO: 54226 - protein, 81 aa, Glycine max
  Clone ID: 700734368_FLI.pep
REEGVCNNRGYDIEPALSSSKASSHQSMDKHAILRRIRQRRFNNRAKTALEALIGTSEANNNTTTGQEHLWLQLGDSFSSP

SEQ ID NO: 54227 - protein, 309 aa, Glycine max
  Clone ID: 700734812_FLI.pep
RKIAREVEFNSKVEKKRRGLIPLRDMNLDDYKAYKEAKLAQMKLLDYSSSFPVDENVPEPQLNRGEKFEAEAELDGGERVAPKNPRWAVYGRGLEDVTEFFNSDNYDPTAKTPGGRRKLFNKEEKVLLNKRIPDLAAATSDKWLPLHTLAACGEFHLLDSLLKHNVDINAVDKDGLTALHRATIGKKQAIINYLLRNSANPFVQDNEGATLMHYAVLTASTQTIKILLLYNVDINLQDNYGWTPLHLAVQAQRTDLVRLLLIKGADKTLKNEDGLTPLDLCLYNGQSARTYELIKLFKQPQRRLSHVSV

SEQ ID NO: 54228 - protein, 66 aa, Zea mays
  Clone ID: 700337730_FLI.pep
RQNYYISSYRLKPNKPTNVTKLCIKTALTTLPPFFRKGRIVDILIIIKLVLVHGPHHTGQLVDKEQ

SEQ ID NO: 54229 - protein, 74 aa, Glycine max
  Clone ID: 700735007_FLI.pep
LLQFRTIPYIVVSFPLQLIKDPFGCCMRLGASLKQTKKYSYNQKEKTLYKETYWLKHYHFVLTLFFPFIGIAGL

SEQ ID NO: 54230 - protein, 262 aa, Zea mays
  Clone ID: 700348529_FLI.pep
PAGWSGRVWARTLCAADAATGRFSCATGDCGSGAVQCNGGGAAPPATLAEFTLGGSGGLDFFDVSLVDGYNVPMLIVPAQGAGGGGSSSSSNGSAGGSSKCMATGCLVDLNGACPADLRVMAASASASASGAGGAVACRSACEAFGSPQYCCSGAYGNPNTCRPSTYSQFFKNACPRAYSYAYDDSTSTFTCATGISYAITFCPSTTSGKYSGENPQAAGVQPTNGSMVYLGGEQLATSVAAAARASQLLLAAAALAAVALL

SEQ ID NO: 54231 - protein, 155 aa, Glycine max
  Clone ID: 700837882_FLI.pep
SLKMQGGKKAGESIKETAANIGASAKAGMEKTKATVQEKAERMTARDPMQKELATQKKEAKMSQAELDKQAARQHNTAAKQAATAGHMGQPMGTHQTSAMPGHGTGQPTGHVTEGVVGSHPIGTNRGPGGTATAHNTRAGGNPNDYGYGTGGTYN

SEQ ID NO: 54232 - protein, 199 aa, Glycine max
  Clone ID: 700840103_FLI.pep
PASLSIFDTLSVIFWVPVYDRIIVPIATKFTGNKNGLTQLQRMGIGLFISIFSMVAAAILELIRLRMVRRHNYYQLEEIPMTIFWQVPQYFIIGCAEVFYFIGQLEFFYEQAPDAMRSFCSALSLTTVAFGQYLSSLLVTIVTKISTRNGSPGWIPDNLNFGHIDYFFWLLALLSVVNLIAFLVVSMLYTYKRPVGTLR

SEQ ID NO: 54233 - protein, 76 aa, Zea mays
  Clone ID: 700343072_FLI.pep
VFIHSTGDGLTHRSLPGDNDPSSGSLSRQIDVVVVVALKQLARCGYSILSLYIAATTAVSRTSLSHVNILCQHWQT

SEQ ID NO: 54234 - protein, 35 aa, Glycine max
  Clone ID: 700842101_FLI.pep
TPDTDLYISWLSSFYTKNYTVMLKIATCIILAWLV

SEQ ID NO: 54235 - protein, 470 aa, Zea mays
  Clone ID: 700350060_FLI.pep
KPPLAADCKPSFFSLLRCAVLHLRRRIRDSDLGFTAAHRAPPTPVPIRALLYDASVMAGMAPEGSQFDAKHYDSKMQELLSTGETEEFFTSYDEVFESFDDMGLQENLLRGIYAYGFEKPSAIQQRGIVPFCKGLDVIQQAQSGTGKTATFCSGILQQLDYGLVECQALVLAPTRELAQQIEKVMRALGDYLGVKVHACVGGTSVREDQRILASGVHVVVGTPGRVFDMLRRQSLRPDNIKMFVLDEADEMLSRGFKDQIYDIFQLLPSKIQVGVFSATMPPEALEITRKFMNKPVRILVKRDELTLEGIKQFYVNVDKEDWKLDTLCDLYETLAITQSVIFVNTRRKVDWLTDKMRSRDHTVSATHGDMDQNTRDIIMREFRSGSSRVLITTDLLARGIDVQQVSLVINYDLPTQPENYLHRIGRSGRFGRKGVAINFVTRDDERMLFDIQKFYNVLIEELPANVADLL

SEQ ID NO: 54236 - protein, 81 aa, Glycine max
  Clone ID: 700850269_FLI.pep
RWHQLKNCDTCEEVLMCVYLHIPISHGFGHLVECILVKNDAKIHLTGIYKVVKVNSCYLIYNFTGFRAMVSIHNPIYSPQS

SEQ ID NO: 54237 - protein, 197 aa, Glycine max
  Clone ID: 700850765_FLI.pep
STFTTTTTPACASPRNHNTHPTTPWRGRWQRHSEPHPGDVPHGFPTPSSPRRRSPWCNAAPPLRHLAHRQPLGAGGGDAALHLLQPAAGPRRLRHRNGGDRGAGGGGVRAGGARVVLVGGELSPADATGDDDDDGAAGASEAARGGHGGVRGAEDEGGWARHSDKGTSCPGNNKDDSALSYHETRKWFQFISLMYDL

SEQ ID NO: 54238 - protein, 154 aa, Glycine max
  Clone ID: 700852639_FLI.pep
AEAAARAYDEAALRFRGNKAKLNFPENVTLRQPQFTVSNSPSSLVSITTSTDPVVHSTRPLLLPSQASTATNVYEYFQLSGFPTNTNLYDGNRMFVTSNAMASHHLQSSSSLLSSSSSAFVSSVTSQDTSLSSLYSGQLPPWSKVSGHSSSSSG

SEQ ID NO: 54239 - protein, 145 aa, Zea mays
  Clone ID: 700440344_FLI.pep
SFTSYDDTYCLITHGRKGAILSLAHPLFLQLQMLRVQLPALSFSSTSCTASTTTYQPIPSIKQGLPPELLPRAAPRLGLRLRLRLAVRIPCNQVSEARSREPRKAKDRYSGSLYRRGPRRADPVPAPPASSPSPVSWRSSSPPQT

SEQ ID NO: 54240 - protein, 128 aa, Glycine max
  Clone ID: 700853112_FLI.pep
TSIIKYPLLKIQILNREKEREMAFTISRSQSALTDREKENLDNLVDKECATTEGMISSQLKLKSSLSSKASSHQSMDKHAILRRIRQRRFNNKAKTALEALIGTSEANNTGTAQEQKWLQLGDSFSSP

SEQ ID NO: 54241 - protein, 232 aa, Zea mays
  Clone ID: 700440372_FLI.pep
VKPADESSAKRTEDCSSGENSPVFYTARAGNEHDNCHDNDSEKSSITSNSCAGDDYRDEVLPDESSSCNCEDKTVSEAIESGANVGQARPLEKTMVPNERKPFINKLQWLLRFGRPSAEGNVVEKGSAQASSDDKHDVVPPCPSPADASSDNSCSGINLAYGDNKKVMGTLKNIGQNMLENIQVIETAFQQDRAQPSAMENLSNNILGGKGQVTAMAALTELRKISNLLREM

SEQ ID NO: 54242 - protein, 245 aa, Glycine max
  Clone ID: 700853241_FLI.pep
EEPGQLVRISLNIHGTRVVQKLIETLKTRQQISLVVAALEPGFLALIKDLNGNHVVQHCLQCLSNEDNKFIFVAAAKYCVDIATHQHGCCVLQRCIGHSRGEHREKLVEEISANALLLAQDQFGNYVVQFILDLRIPSATATLSLQFERKYVHLSMQKFGSHVVEKCLAVFNDENQSRVIHELLSAPHFEQLLQDPHANYVIQSALRHSEGHVHNLLVEAIESHKAISRNSPYSKKIFSQKLLKK

SEQ ID NO: 54243 - protein, 41 aa, Glycine max
  Clone ID: 700854057_FLI.pep
GGLAVIKDISRLLDNHILQHTILYLHTTYSTYDCMLQNMIV

SEQ ID NO: 54244 - protein, 186 aa, Zea mays
  Clone ID: 700452437_FLI.pep
PHQTLTRAPSPSSRLLAPAFGALTLSGRDPQGSGCVQETSQLLARDQEMAEKEGAKVGAEEMEEREQEGEAEEVEVKFRLFDGSDIGPVRCNAAATTVAALKDRVVADWPKDKSIIPKTASDVKLISGGKILENDKNVAQCRAPFGDLPSSAITMHVVVQPSSAKSKPDKKANKLPKTTRCSCTIL

SEQ ID NO: 54245 - protein, 166 aa, Glycine max
  Clone ID: 700953279_FLI.pep
KKEAYGLKNPLVLMSYVSPVMAAATALLSLALDPWDEFRENKYFDNSLHITRSCLLMLLGGTLAFFMVLTEYVLVSVTSAVTVTIAGVVKEAVTILVAVLYFHDQFTWLKGFGLLTIMVGVSLFNWYKYLKLQKGHADGSDVAEHSRDSAAKYVILEEMEEQEDGI

SEQ ID NO: 54246 - protein, 444 aa, Zea mays
  Clone ID: 700468850_FLI.pep
ASAAVPSPARAPARGAVRSRGHIPGRQGGARGAEVRRGRVLGPAPLLPLVVGLLPRPLRGVPVRRQLLRSSRRQLLLPPRHRRRARPRGLLRRAPSGASVLAPLPRVLVPRRQPVPRRAPGGGPAAADPPHPRPLRQRLLRRHTGVSVHRLLRAAGALPLPQRPLRRDTAAAGAPGRPDAARLAAQRAHGDPAEPGRDALAGPPRRERQRAVGVAAPRARDAAAVALVRRGPEQLLLRAAQRRGAGCAPRTAGAGPHWQRGVRRGPGRRVRAPGAAAAAPGFQPARRGPGGSRRWILEPARGAGSERQQARWAAASLPWRNAAARGGRARQEPVHRRHSRTVRRPCRGRGIHGTVGAVRQADAARQLSVRSPAEAVEADPGGQRSGELGGQLPAEVSTQVLLLPRGPAEGPRHVSQVRYFDPSSGHSAADALIVHSELVLKSLT

SEQ ID NO: 54247 - protein, 211 aa, Glycine max
  Clone ID: 700961695_FLI.pep
TIKAMEPFFTVVLSALLLGEMPTFWVVSSLVPVVGGVALASMTEVSFNWIGFTTAMASNVTNQSRNVLSKKLMTNEEETLDNINLYSVITIISFLLLVPCAILVEGVKFSPSYLQSAASQGLNVRELCVRSVLAAFCFHAYQQVSYMILQMVSPVTHSVGNCVKRVVVIVSSVIFFQIPVSPVNTLGTGLALVGVFLYSRAKRIKSVQKTN

SEQ ID NO: 54248 - protein, 222 aa, Glycine max
  Clone ID: 700984669_FLI.pep
RKEKTKKREMGTPETSREPCPDRILDDIGGAFGMGAVGGSAFHFLKGLYNAPRGARVVAASQAVRLNAPRVGGSFAVWGGLFSSFDCTMVYLRQKEDPWNSIFAGAATGGFLSMRQGLPAAARSAAFGGVLLALIEGAGIMLNKFLSAQQPMPMIVDEPLPPNGLPGQPVASAPDAASQSSWLGGWFGDGKKDEAAAEATGGSETKVLESFDAPPVPNFEYK

SEQ ID NO: 54249 - protein, 513 aa, Homo sapiens
  Clone ID: LIB4119-019-H6_FLI.pep
AARGRGRGAARGRPAGGRGAMRRRRAAVAAGFCASFLLGSVLNVLFAPGSEPPRPGQSPEPSPAPGPGRRGGRGELARQIRARYEEVQRYSRGGPGPGAGRPERRRLMDLAPGGPGLPRPRPPWARPLSDGAPGWPPAPGPGSPGPGPRLGCAALRNVSGAQYMGSGYTKAVYRVRLPGGAAVALKAVDFSGHDLGSCVREFGVRRGCYRLAAHKLLKEMVLLERLRHPNVLQLYGYCYQDSEDIPDTLTTITELGAPVEMIQLLQTSWEDRFRICLSLGRLLHHLAHSPLGSVTLLDFRPRQFVLVDGELKVTDLDDARVEETPCAGSTDCILEFPARNFTLPCSAQGWCEGMNEKRNLYNAYRFFFTYLLPHSAPPSLRPLLDSIVNATGELAWGVDETLAQLEKVLHLYRSGQYLQNSTASSSTEYQCIPDSTIPQEDYRCWPSYHHGSCLLSVFNLAEAVDVCESHAQCRAFVVTNQTTWTGRQLVFFKTGWSQVVPDPNKTTYVKASG

SEQ ID NO: 54250 - protein, 513 aa, Homo sapiens; identical to SEQ ID NO: 54249
  Clone ID: LIB4118-190-H1_FLI.pep

SEQ ID NO: 54251 - protein, 257 aa, Homo sapiens
  Clone ID: LIB4119-283-F3_FLI.pep
RTGTKTQMDAKKPRKCDLTPFLVLKARKKQKFTSAKVGSKLSVQIQKPPSNIKNSRMTQVFHKNTSVTSLPFVDTKGKKNTVSFPHISKKVLLKSSLLYQENQAHNQMPASELKASEIPFHPSIKTQDPKAEEKSPKKQKVTLTAAEALKLFKNQLSPYEQSEILGYAELWFLGLEAKKLDTAPEKFSKTSFDDEHGFYLKVLHDHIAYRYEVLETIGKGSFGQVAKCLDHKNNELVALKIIRNKKRGQRGGFTSRP

SEQ ID NO: 54252 - protein, 76 aa, Zea mays
  Clone ID: 700476240_FLI.pep
LAQKNPILRDNFIRKMPLCVYRATVGYTNASRILDPRCNFPKPLSVGVLLLRTFCRDTIAVRRLYLFILLQNTVCR

SEQ ID NO: 54253 - protein, 748 aa, Homo sapiens
  Clone ID: LIB4119-180-G1_FLI.pep
AAFEQVSEPPSETPALGTGGRRASGPLKALRRRGDTMAEPLKEEDGEDGSAEPPGPVKAEPAHTAASVAAKNLALLKARSFDVTFDVGDEYEIIETIGNGAYGVVSSARRRLTGQQVAIKKIPNAFDVVTNAKRTLRELKILKHFKHDNIIAIKDILRPTVPYGEFKSVYVVLDLMESDLHQIIHSSQPLTLEHVRYFLYQLLRGLKYMHSAQVIHRDLKPSNLLVNENCELKIGDFGMARGLCTSPAEHQYFMTEYVATRWYRAPELMLSLHEYTQAIDLWSVGCIFGEMLARRQLFPGKNYVHQLQLIMMVLGTPSPAVIQAVGAERVRAYIQSLPPRQPVPWETVYPGADRQALSLLGRMLRFEPSARISAAAALRHPFLAKYHDPDDEPDCAPPFDFAFDREALTRERIKEAIVAEIEDFHARREGIRQQIRFQPSLQPVASEPGCPDVEMPSPWAPSGDCAMESPPPAPPPCPGPAPDTIDLTLQPPPPVSEPAPPKKDGAISDNTKAALKAALLKSLRSRLRDGPSAPLEAPEPRKPVTAQERQREREEKRRRRQERAKEREKRRQERERKERGAGASGGPSTDPLAGLVLSDNDRSLLERWTRMARPAAPALTSVPAPAPAPTPTPTPVQPTSPPPGPVAQPTGPQPQSAGSTSGPVPQPACPPPGPAPHPTGPPGPIPVPAPPQIATSTSLLAAQSLVPPPGLPGSSTPGVLPYFHLACRPQTPGEPLSLPCQSHLMSTL

SEQ ID NO: 54254 - protein, 633 aa, Homo sapiens
  Clone ID: LIB4118-163-G11_FLI.pep
SPPTLLVNENCELKIGDFGMARGLCTSPAEHQYFMTEYVATRWYRAPELMLSLHEYTQAIDLWSVGCIFGEMLARRQLFPGKNYVHQLQLIMMVLGTPSPAVIQAVGAERVRAYIQSLPPRQPVPWETVYPGADRQALSLLGRMLRFEPSARISAAAALRHPFLAKYHDPDDEPDCAPPFDFAFDREALTRERIKEAIVAEIEDFHARREGIRQQIRFQPSLQPVASEPGCPDVEMPSPWAPSGDCAMESPPPAPPPCPGPAPDTIDLTLQPPPPVSEPAPPKKDGAISDNTKAALKAALLKSLRSRLRDGPSAPLEAPEPRKPVTAQERQREREEKRRRRQERAKEREKRRQERERKERGAGASGGPSTDPLAGLVLSDNDRSLLERWTRMARPAAPALTSVPAPAPAPTPTPTPVQPTSPPPGPVAQPTGPQPQSAGSTSGPVPQPACPPPGPAPHPTGPPGPIPVPAPPQIATSTSLLAAQSLVPPPGLPGSSTPGVLPYFPPGLPPPDAGGAPQSSMSESPDVNLVTQQLSKSQVEDPLPPVFSGTPKGSGAGYGVGFDLEEFLNQSFDMGVADGPQDGQADSASLSASLLADWLEGHGMNPADIESLQREIQMDSPMLLADLPDLQDP

SEQ ID NO: 54255 - protein, 230 aa, Zea mays
  Clone ID: 700573985_FLI.pep
LLPPHKRRLGVSKREERRLTRSTLELLAEEDELGLVVDGQDTGTGNTTENVGTSTLEERLDTLSGDDLAGGIHGTLVLDGLTGGHHHAATDGVKGVRGDTGTGGDGPTKSERGQEVTLEGTGEEDRLDRVVHTEVQTTVDNDTSNGGHETTVETTDTVGSEGLLVDVYETVELALTTLLGGLGVVGKTGTGVVEGVDEEEGSGTGSTTGGQVTGHPLGVTVTLLLVGEHG

SEQ ID NO: 54256 - protein, 861 aa, Homo sapiens
  Clone ID: LIB4118-152-A2_FLI.pep
RCRAGSTPLRSAGHPLGGSRRRAGQRRAPGVAFSAGGLGLDAVDTMAEPLKEEDGEDGSAEPPGPVKAEPAHTAASVAAKNLALLKARSFDVTFDVGDEYEIIETIGNGAYGVVSSARRRLTGQQVAIKKIPNAFDVVTNAKRTLRELKILKHFKHDNIIAIKDILRPTVPYGEFKSVYVVLDLMESDLHQIIHSSQPLTLEHVRYFLYQLLRGLKYMHSAQVIHRDLKPSNLLVNENCELKIGDFGMARGLCTSPAEHQYFMTEYVATRWYRAPELMLSLHEYTQAIDLWSVGCIFGEMLARRQLFPGKNYVHQLQLIMMVLGTPSPAVIQAVGAERVRAYIQSLPPRQPVPWETVYPGADRQALSLLGRMLRFEPSARISAAAALRHPFLAKYHDPDDEPDCAPPFDFAFDREALTRERIKEAIVAEIEDFHARREGIRQQIRFQPSLQPVASEPGCPDVEMPSPWAPSGDCAMESPPPAPPPCPGPAPDTIDLTLQPPPPVSEPAPPKKDGAISDNTKAALKAALLKSLRSRLRDGPSAPLEAPEPRKPVTAQERQREREEKRRRRQERAKEREKRRQERERKERGAGASGGPSTDPLAGLVLSDNDRSLLERWTRMARPAAPALTSVPAPAPAPTPTPTPVQPTSPPPGPVAQPTGPQPQSAGSTSGPVPQPACPPPGPAPHPTGPPGPIPVPAPPQIATSTSLLAAQSLVPPPGLPGSSTPGVLPYFPPGLPPPDAGGAPQSSMSESPDVNLVTQQLSKSQVEDPLPPVFSGTPKGSGAGYGVGFDLEEFLNQSFDMGVADGPQDGQADSASLSASLLADWLEGHGMNPADIESLQREIQMDSPMLLADLPDLQDP

SEQ ID NO: 54257 - protein, 639 aa, Homo sapiens
  Clone ID: LIB3113-018-A8_FLI.pep
TNTMAEPLKEEDGEDGSAEPPGPVKAEPAHTAASVAAKNLALLKARSFDVTFDVGDEYEIIETIGNGAYGVVSSARRRLTGQQVAIKKIPNAFDVVTNAKRTLRELKILKHFKHDNIIAIKDILRPTVPYGEFKSVYVVLDLMESDLHQIIHSSQPLTLEHVRYFLYQLLRGLKYMHSAQVIHRDLKPSNLLVNENCELKIGDFGMARGLCTSPAEHQYFMTEYVATRWYRAPELMLSLHEYTQAIDLWSVGCIFGEMLARRQLFPGKNYVHQLQLIMMVLGTPSPAVIQAVGAERVRAYIQSLPPRQPVPWETVYPGADRQALSLLGRMLRFEPSARISAAAALRHPFLAKYHDPDDEPDCAPPFDFAFDREALTRERIKEAIVAEIEDFHARREGIRQQIRFQPSLQPVASEPGCPDVEMPSPWAPSGDCAMESPPPAPPPCPGPAPDTIDLTLQPPPPVSEPAPPKKDGAISDNTKAALKAALLKSLRSRLRDGPSAPLEAPEPRKPVTAQERQREREEKRRRRQERAKEREKRRQERERKERGAGASGGPSTDPLAGLVLSDNDRSLLERWTRMARPAAPALTSVPAPAPAPTPTPTPPEQSFSVLYFYYYYVIITLSFCHQNEACEIQGSLLHL

SEQ ID NO: 54258 - protein, 644 aa, Homo sapiens
  Clone ID: LIB4119-128-C12_FLI.pep
APAVTGERRVPRALLPSWKQDFRGCVTACRRRAGTWTPPRPRGSGSRAMAGNCGARGALSAHTLLFDLPPALLGELCAVLDSCDGALGWRGLAERLSSSWLDVRHIEKYVDQGKSGTRELLWSWAQKNKTIGDLLQVLQEMGHRRAIHLITNYGAVLSPSEKSYQEGGFPNILFKETANVTVDNVLIPEHNEKGVLLKSSISFQNIIEGTRNFHKDFLIGEGEIFEVYRVEIQNLTYAVKLFKQEKKMQCKKHWKRFLSELEVLLLFHHPNILELAAYFTETEKFCLIYPYMRNGTLFDRLQCVGDTAPLPWHIRIGILIGISKAIHYLHNVQPCSVICGSISSANILLDDQFQPKLTDFAMAHFRSHLEHQSCTINMTSSSSKHLWYMPEEYIRQGKLSIKTDVYSFGIVIMEVLTGCRVVLDDPKHIQLRDLLRELMEKRGLDSCLSFLDKKVPPCPRNFSAKLFCLAGRCAATRAKLRPSMDEVLNTLESTQASLYFAEDPPTSLKSFRCPSPLFLENVPSIPVEDDESQNNNLLPSDEGLRIDRMTQKTPFECSQSEVMFLSLDKKPESKRNEEACNMPSSSCEESWFPKYIVPSQDLRPYKVNIDPSSEAPGHSCRSRPVESSCSSKFSWDEYEQYKKE

SEQ ID NO: 54259 - protein, 131 aa, Zea mays
  Clone ID: 700613614_FLI.pep
RIRYRTAADKLNTKRQPCPKPAWIQRPGAPFTFILSIDKQQRWSATKGHRGRPSIGRQKYLSLLGLEHVADQVDDAVAVAPLVVVPRDELDEVVVQGNPGLGVEDARPAVTGEVGGNQILLHVAHNTLEWA

SEQ ID NO: 54260 - protein, 656 aa, Homo sapiens
  Clone ID: LIB4649-035-D9_FLI.pep
TCKRTMKDYDELLKYYELHETIGTGGFAKVKLACHILTGEMVAIKIMDKNTLGSDLPRIKTEIEALKNLRHQHICQLYHVLETANKIFMVLEYCPGGELFDYIISQDRLSEEETRVVFRQIVSAVAYVHSQGYAHRDLKPENLLFDEYHKLKLIDFGLCAKPKGNKDYHLQTCCGSLAYAAPELIQGKSYLGSEADVWSMGILLYVLMCGFLPFDDDNVMALYKKIMRGKYDVPKWLSPSSILLLQQMLQVDPKKRISMKNLLNHPWIMQDYNYPVEWQSKNPFIHLDDDCVTELSVHHRNNRQTMEDLISLWQYDHLTATYLLLLAKKARGKPVRLRLSSFSCGQASATPFTDIKSNNWSLEDVTASDKNYVAGLIDYDWCEDDLSTGAATPRTSQFTKYWTESNGVESKSLTPALCRTPANKLKNKENVYTPKSAVKNEEYFMFPEPKTPVNKNQHKREILTTPNRYTTPSKARNQCLKETPIKIPVNSTGTDKLMTGVISPERRCRSVELDLNQAHMEETPKRKGAKVFGSLERGLDKVITVLTRSKRKGSARDGPRRLKLHYNVTTTRLVNPDQLLNEIMSILPKKHVDFVQKGYTLKCQTQSDFGKVTMQFELEVCQLQKPDVVGIRRQRLKGDAWVYKRLVEDILSSCKV

SEQ ID NO: 54261 - protein, 656 aa, Homo sapiens; identical to SEQ ID NO: 54260
  Clone ID: LIB4676-059-G1_FLI.pep

SEQ ID NO: 54262 - protein, 656 aa, Homo sapiens; identical to SEQ ID NO: 54260
  Clone ID: LIB4119-174-G9_FLI.pep

SEQ ID NO: 54263 - protein, 193 aa, Zea mays
  Clone ID: UC-ZMFLMO17009C07_FLI.pep
YNGHQGQHRLRSALRRAGAARRGDGGGGQGRAYAGRLLDVHRQHRVAPGRGRHQERRLWLGRRRRGGQEEPLRGRGRHGRPPGLPGRGRRVRRRLRQQRRGRLQRRHGPAGRRRGRRRRRRPAGRRRRVRAPRRRWRRYPVWRLRWRRHPLRRLRRRGRWRWRRHALSWPWAAGGAWSSRCMRVLRVVRGYGT

SEQ ID NO: 54264 - protein, 374 aa, Homo sapiens
  Clone ID: LIB4118-182-A12_FLI.pep
RSPRAFRAHCAARTASGSDGRCPRRAARPDRPRLRRLGLGAPGRPSPAMLLSKFGSLAHLCGPGGVDHLPVKILQPAKADKESFEKAYQVGAVLGSGGFGTVYAGSRIADGLPVAVKHVVKERVTEWGSLGGATVPLEVVLLRKVGAAGGARGVIRLLDWFERPDGFLLVLERPEPAQDLFDFITERGALDEPLARRFFAQVLAAVRHCHSCGVVHRDIKDENLLVDLRSGELKLIDFGSGALLKDTVYTDFDGTRVYSPPEWIRYHRYHGRSATVWSLGVLLYDMVCGDIPFEQDEEILRGRLLFRRRVSPECQQLIRWCLSLRPSERPSLDQIAAHPWMLGADGGAPESCDLRLCTLDPDDVASTTSSSESL

SEQ ID NO: 54265 - protein, 195 aa, Zea mays
  Clone ID: UC-ZMFLMO17012E02_FLI.pep
TLTIVIIPYSYGVNDMAGSAKKIYDAAAGAPEGHSVVLLAHNGPTGLGSRMDDICGRDWVPGGGDHGDPDLERAISDLQREARVSIPLVVFGHMHKSLAYGRGLRKMIAFGANHIIYLNGAVVPRVKFAQTTPGHEQNQPEGSGSIAPTLRAFTIADLYEGRVEKISEVWVLVSGARTEVEEEIVLYKHPREQHM

SEQ ID NO: 54266 - protein, 263 aa, Homo sapiens
  Clone ID: LIB4119-144-G7_FLI.pep
NGQILKIFVDNLFAIVLLKQATAVRCLDMSASRKKLAVVDENDTCLVYDIDTKELLFQEPNANSVAWNTQCEDMLCFSGGGYLNIKASTFPVHRQKLQGFVVGYNGSKIFCLHVFSISAVEVPQSAPMYQYLDRKLFKEAYQIACLGVTDTDWRELAMEALEGLDFETAKKAFIRVQDLRYLELISSIEERKKRGETNNDLFLADVFSYQGKFHEAAKLYKRSGHENLALEMYTDLCMFEYAKMAVLFHHLFDPGAEGVFGGL

SEQ ID NO: 54267 - protein, 663 aa, Zea mays subsp. mexicana
  Clone ID: UC-ZMROTEOSINTE039B09_FLI.pep
FESAITAGGLHVTEGSKLWAAYREYEMAILITIADANDEEREKQVQRIRMLFHRQLSVPLADMESTLAEYKSWEAEQGNANDPGADFDGVPSNVVSAYKKANDMYNERKQYEDQLSNAGTFEGDKLQQFMKYIKFEEASGDPARVQVLYERAVSELPVSSDIWMGYTSYLDRTLKVPSVVRSVYYRATRNCTWVGELWVHYLLSLERIRASEEELQHVFERAIQCTFSTIQEYFNIYLTRVHGLRRRISDGLDFQLIRQTLTDAAEFLSSQLSTKELLRLYAYWAKLELSLGKDLSAARGVWENAIKKSGSVFEVWEQYILMEIKMDHVHEARSLYKRCYSKRFAGSGSEEICYSWIRFEEENGTLDDYDLAVKKVTPRLKELMTFKSQEEAKVEAYPNLNDNSNANDSSQKRKPSNNKQQPPAKKRKENPPKSTMPSDDQGSNVQSGHSGAVTDVEVGGASREKVMASIEMKVDSDSRTGKSSSNEPKPSFYNDNCTVFVSNIDLKANEDDLRRFFSDIGGATAIRLLRDRFTKKSRGLAYVDFLDNKHLEAAIKKNKQKLLGKKVSIARSDPSKGKKSREAGQTSQDNLPPSGGDDAKATGSSGPDNEVPKGDAKTIGKNTLFAPRALVKPLGWTNKDEKKPDVAGELKSNEEFRNLLLKK

SEQ ID NO: 54268 - protein, 695 aa, Homo sapiens
  Clone ID: LIB4119-266-G8_FLI.pep
SSQARRVSGEGCSPWQTDSVAWGFGGAREAGANLIGGDTSAVLFPPLGGLLCQQPGGRPGRQSQWYRGLGRAVSGSSGTMSTIQSETDCYDIIEVLGKGTFGEVAKGWRRSTGEMVAIKILKNDAYRNRIIKNELKLLHCMRGLDPEEAHVIRFLEFFHDALKFYLVFELLEQNLFEFQKENNFAPLPARHIRTVTLQVLTALARLKELAIIHADLKPENIMLVDQTRCPFRVKVIDFGSASIFSEVRYVKEPYIQSRFYRAPEILLGLPFCEKVDVWSLGCVMAELHLGWPLYPGNNEYDQVRYICETQGLPKPHLLHAACKAHHFFKRNPHPDAANPWQLKSSADYLAETKVRPLERRKYMLKSLDQIETVNGGSVASRLTFPDREALAEHADLKSMVELIKRMLTWESHERISPSAALRHPFVSMQQLRSAHETTHYYQLSLRSYRLSLQVEGKPPTPVVAAEDGTPYYCLAEEKEAAGMGSVAGSSPFFREEKAPGMQRAIDQLDDLSLQEAGHGLWGETCTNAVSDMMVPLKAAITGHHVPDSGPEPILAFYSSRLAGRHKARKPPAGSKSDSNFSNLIRLSQVSPEDDRPCRGSSWEEGEHLGASAEPLAILQRDEDGPNIDNMTMEAERPDPELFDPSSCPGEWLSEPDCTLESVRGPRAQGLPPRRSHQHGPPRGATSFLQHVTGHH

SEQ ID NO: 54269 - protein, 136 aa, Zea mays
  Clone ID: UC-ZMFLMO17321E09_FLI.pep
FLLLLFPPKAPTIPLSLYNSHPRALPPLSSPNPGYRSSRAAARSRSPPGTSPPRLSLLLDFTDLACFTVPSYGGSGSRPLPASTAHAMHGRSIPSDRDCRRHAVASPLASPLSHPLASFCVVSGFDTACLSRSYSF

SEQ ID NO: 54270 - protein, 812 aa, Homo sapiens
  Clone ID: LIB4119-056-H10_FLI.pep
RPAGSEKKEKMEEEGGSSGGAAGTSADGGDGGEQLLTVKHELRTANLTGHAEKVGIENFELLKVLGTGAYGKVFLVRKISGHDTGKLYAMKVLKKATIVQKAKTTEHTRTERQVLEHIRQSPFLVTLHYAFQTETKLHLILDYINGGELFTHLSQRERFTEHEVQIYVGEIVLALEHLHKLGIIYRDIKLENILLDSNGHVVLTDFGLSKEFVADETERAYSFCGTIEYMAPDIVRGGDSGHDKAVDWWSLGVLMYELLTGASPFTVDGEKNSQAEISRRILKSEPPYPQEMSALAKDLIQRLLMKDPKKRLGCGPRDADEIKEHLFFQKINWDDLAAKKVPAPFKPVIRDELDVSNFAEEFTEMDPTYSPAALPQSSEKLFQGYSFVAPSILFKRNAAVIDPLQFHMGVERPGVTNVARSAMMKDSPFYQHYDLDLKDKPLGEGSFSICRKCVHKKSNQAFAVKIISKRMEANTQKEITALKLCEGHPNIVKLHEVFHDQLHTFLVMELLNGGELFERIKKKKHFSETEASYIMRKLVSAVSHMHDVGVVHRDLKPENLLFTDENDNLEIKIIDFGFARLKPPDNQPLKTPCFTLHYAAPELLNQNGYDESCDLWSLGVILYTMLSGQVPFQSHDRSLTCTSAVEIMKKIKKGDFSFEGEAWKNVSQEAKDLIQGLLTVDPNKRLKMSGLRYNEWLQDGSQLSSNPLMTPDILGSSGAAVHTCVKATFHAFNKYKREGFCLQNVDKAPLAKRRKMKKTSTSTETRSSSSESSHSSSSHSHGKTTPTKTLQPSNPADSNNPETLFQFSDSVA

SEQ ID NO: 54271 - protein, 373 aa, Homo sapiens
  Clone ID: LIB4119-276-B1_FLI.pep
RPTAPCPPTPTPTTHNGAIVMLGACFPHLSSGDVMVFGPGGLGQPVLHPVLVLGHHQQPVLGFGSKLVVGPVVGPQACLGVQFALSAVLALPLPLEGGRRRGFGLGGLQPRVAEDLIDVEPLADVGLQHAVDEVLALAGQVLGAREVHTVLLLDTQHLPDVGVVIGHGAADHDVQDHAQAPDVIHLGLVGDALQHLGGCISCRPAEGLAEDDAPIAVPQAALGEAKVRQLDVEVLVEEKVLALEVPVDDVQVVAVLDGGGELSEHLACHVLMQGSLALDELEEVALDAKLHDDVDPSVRGLKDLVSLDDGAVVDSCQDVHLPRKESLHKVSRCFLAVDDLDSHIELEALRVGRFDFCVGTLAKIDAYDVTLLP

SEQ ID NO: 54272 - protein, 311 aa, Glycine max
  Clone ID: 700654670_FLI.pep
SERVRMSSGTTYWCYTCRQPIWLEGREAICPYCDGGFVQELNELRGVARQHGFSSRMEDAHQMPDIMDAVRAVMEQRGSEPRIRVRDAVDNFMRQRMAGRYTNFDVRRRSGSGSGSGSILIPDETWGVFSSGPYLIFHGQAPGFTNSNGSSRGGPRRVDFGDYFLGPRLEGLIEQHISNDRLGPPPASHSSIDAMPTIKITHEHLQSDSHCPVCKERFELGSEARKMPCNHVYHSDCIVPWLVLHNSCPVCRVELPPKEHTSSRGRRIWGNGSGSGSSNDISRGRENRQMNNGRRNLLSYLWPFRTSSSST

SEQ ID NO: 54273 - protein, 358 aa, Homo sapiens
  Clone ID: LIB4119-121-F1_FLI.pep
LGCSDDRCCAATPGLSGRFLWFGHQEPGSPMLPPGHYLLGPALHPVAGLTVITPTVQGGLRDLLSSLPRTGSRMFPCGRLVWPKWTLACCPLGRLQALPSTWGSSILCLTMLCHAGPSPAPQPCCFSPPHPRHLHQATSILPGPTDSRVVLCPKASSPSAPSLGSHGAPLWPPAHKAHTHYGAFAQLCPPQAPALTSPRLFLRCPFRTRALGPPAPLTRNGPPVVSQVTAVVAATGATPVTATASDLGPACIQTHCSERPGRPWVGRRGRRWEKVSGTMGPDLEPTCQLQRWALKAFEQEEEVTLAPGDAVRETEAILSPRSRERAGPGAGGPWASSSWVLLCSHPCCLLNPCKAAQD

SEQ ID NO: 54274 - protein, 151 aa, Zea mays
  Clone ID: UC-ZMFLMO17013D11_FLI.pep
AKLPNKIKIFLWFLLKNKILTKRNLKKEDGLGLRIAAFPGSRAPRRARCGRPPARTRSVASVGTDARTGGRLNGRSAPLRKRARPCHADRQCGSGLSLGPSRGGQAPPRERGRHLGALLGGASLVAAGATALVGVGGGCRWWGRGKLDGGV

SEQ ID NO: 54275 - protein, 374 aa, Homo sapiens
  Clone ID: LIB3119-052-C10_FLI.pep
RSPRAFRAHCAARTASGSDGRCPRRAARPDRPRLRRLGLGAPGRPSPAMLLSKFGSLAHLCGPGGVDHLPVKILQPAKADKESFEKAYQVGAVLGSGGFGTVYAGSRIADGLPVAVKHVVKERVTEWGSLGGATVPLEVVLLRKVGAAGGARGVIRLLDWFERPDGFLLVLERPEPAQDLFDFITERGALDEPLARRFFAQVLAAVRHCHSCGVVHRDIKDENLLVDLRSGELKLIDFGSGALLKDTVYTDFDGTRVYSPPEWIRYHRYHGRSATVWSLGVLLYDMVCGDIPFEQDEEILRGRLLFRRRVSPECQQLIRWCLSLRPSERPSLDQIAAHPWMLGADGGVPESCDLRLCTLDPDDVASTTSSSESL

SEQ ID NO: 54276 - protein, 230 aa, Zea mays
  Clone ID: UC-ZMFLMO17269B04_FLI.pep
RAGEMHKQFSELTKHHLSYFKEVLSPSIERIRTYVDNLAVLNSREESIEHGGDDEISEQTSPQKSLEEEYLETEKKIVTAFSIVDRMKKMFYSEQAANSRQDDAEVRTLFSEIEKLREVFESVERPTLDIEVRKAKDPMKDKSGSNRSAKDKSESSHSPVQVPSSPKDVPVESPKSPVKPEQTLDPDSEFAKLELEFGKVNRDHEEIGGWDFDELEEELRADISNSTNPK

SEQ ID NO: 54277 - protein, 443 aa, Glycine max
  Clone ID: 701202869_FLI.pep
PSLSFSSHSLVPLMRTLHNYTPTLTRPQCTTLVQSTKPLQKMEKMMNMPQLRSSSLPPLSKKVGKRWKEYQGMNNWDGLLDPLDENLRAEILRYGHFVEAAYKSFEFDPSSPNYATCKFPKNTLFEKSGLHNTGYKVTKHLRATSGIKLPSWVDKAPSWVAAQSSYVGYVAVCNDKEEIKRLGRRDIVVAYRGTTTCLEWLENLRATLTHVSVPSITTETTTEPCSMEENGAMVESGFLSLYTSTVSNNKSFMSLQDMVRKEIGRIRKTYQGENLSLTITGHSLGAALATLTAYDIKNSFLQPPPLVTVISFGGPRVGNRSFRRRLEEQGTKVLRIVNSDDVITKVPGFVFDDVDKTEDVAACNGGVQVAKFQRWIRKRAEEVQWLLYSEVGKELRLCSRDSPYLRGVNIATSHDLNTYLHLVDGFVSSTCPFRATAKRFLQH

SEQ ID NO: 54278 - protein, 215 aa, Zea mays
  Clone ID: UC-ZMFLMO17168B06_FLI.pep
ILLDADYNAKLSDFGLAKDGPEGDKTHVSTRVMGTYGYAAPEYVMTGHLTSKSDVYSFGVVLLEMMTGRRSMDKNRPNGEHNLVEWARPYLGERRRFYKLVDPRLDGNFSIKGAQKTAQLAHACLSRDPKARPLMSQVVEVLKPLQNLKDMASSSYYFQSMQHERRTALANPYGSQSMKAQSTFARNGQQPMRSLSYGPHASPYRQSPRLDSKRQ

SEQ ID NO: 54279 - protein, 275 aa, Glycine max; identical to SEQ ID NO: 44015
  Clone ID: 701203534_FLI.pep

SEQ ID NO: 54280 - protein, 184 aa, Zea mays
  Clone ID: UC-ZMFLMO17052G10_FLI.pep
NMCTLFLHRLQTEHSIHIGGLVRLDVEELTVGSIYVTVWASPLVPLHMGKTENTTTLIKEHFGLQLQPPIGQERVKELGKWVRKQFKVSGNSWDTNSKDIAIAGLGWFGIGLKGEAVLGLWTYDGVDVISRSSLVHERASVFEEAGFTVSQIVSKADSMTNKLKSTKKPKKERMKRTSPTEPEA

SEQ ID NO: 54281 - protein, 567 aa, Glycine max
  Clone ID: 701204111_FLI.pep
VATIHPFTQFLPMQSPDDVRNLPIDITFSRLGEWLVDRKRVPADWRKRVAAIRARISKEFPSLPKDSDPFFQTLDPEGINYLEAKQIYGNLLKSTSESRNIFGRLSGAAGVWEAIARSFEKDHVFLGEAAQILIQNVSYEIPYQRKQVQKIQQQLSELDRKEADIKRSAALSATKYAEACQELGLQQGKNVRVELLETAQLLPSTFSKILDVVNSGNMSRAIEYYSNFVRDAHTEKDRSLGDVLQNLKSMCENPPSLNVAVDSEIINDVNVHSSKNEFDPAINNAEIAVPDIDWDISVESSQIDWDIGTVEETEDNGNGLGPYEIINASDIGSDPTISNQEIGSHADISWDISVDTPQVDVIDDDNAPTVVLENQTSLPDSLSQLTGNKEERSQLLDTEYRNKILDDLYEMKSFLNQRLAELRNEETLSLQHQVQAVAPFVLQQYAADAIETMQNDISLAISLLTNRKTRDLIMILNSKRFLDRLVNSLEEKKQHEVKLKEGLKDLAAKRMELQNSLSSSWSKQDVAVAKTKELKKLCESTLSSMFDGRPVNIIGEINAILTSGIGA

SEQ ID NO: 54282 - protein, 472 aa, Zea mays
  Clone ID: UC-ZMFLB73347G09_FLI.pep
DNFLAVLAMVSVVAVLFAAWPISIEDLACRLHAVRPLHVLTAAILTAALAKLRRMSRPSDVYLVEYGCFWPKPCFRAPFATCLEHVRLLPYLVNEDDISWGWRLLQRSGIGEETCVPYAYHYLPPDRSFRASLDETELVIFSAVDDVFARTTAVTPADIGVVIVNCSIFTPTPVFTDMIVNRYKLRADVRSVNLSGMGCSAALISIGLARNMLQVAPPGTHALIVSTEILSSQYYVGMDRSMLLPNCLFRMGAAAMIMSNTAARGARFRLARVVRTVASARDAAYRCVFQVEDEESNTGIRLSKDLVPTAAQTLKSNIVAFGPLVLPASEKLLVALSILRRRLVQSSRGRVYRPDFRTAFEHFCIHAGGRGVIDEVQRGLGLSDEDVEASRMTLHRFGNTSSSSVVYELAYIEAKGSMRKGDRVWMISFGAGFDCSSVAWECIEPAADAAGPWADCIHRYPVQLPKLMEALD

SEQ ID NO: 54283 - protein, 70 aa, Glycine max
  Clone ID: 701204214_FLI.pep
PGKDIYMYKGDRAFCSVDCRCKQIFTDEEEAIQKEKCSLAAMRPTSSSASTSTASHHHRKGTRNRGGACF

SEQ ID NO: 54284 - protein, 606 aa, Zea mays
  Clone ID: UC-ZMFLB73349D12_FLI.pep
QTKSLQSTLEEKQKQIDSLSTSNTELQNSIKDLDERLGASKQSRADADEIISSQKAIIRELEEQLSEERNLRREERDKAAHDLKFAVHKVQAEAQEEIKKQAESYLRQQREQKEVINKLQESEKETRLFVETLRSKLEDARDNLVTSEKKVRELEAQFQDEQLVSANNRKKSENLETELRKLKKELENEKAAREEAWAKVSALELEIAATIRDLSIEKQRYQGARERIILRETQLRAFYSTTEEISSLFAKQQEQLKAMQRTLEDEENYESTLMSVDLNKEHLAIDNAGMKPVNCSKNTLGASIASPENTQVSEHSSSDEDANMTEQQDDDVTANGGNTQDLECTSPERSVERRPGFHGNPVPTAPEREVTDTEQVPETESEAGNVGCDDQRCDNIGGETMPLEDEVLLPENEEPTALLKDAGQPQSNMVPIPILDDGGGHCSEEKHEGACSESKRDDTHVGAIRTGDLLASEVAGSWAVETAPSVNGENESPRSLGDATERDEDGGSVAADALLTLVNSEGQAAGSQNNVEQASSKITDDRRVLSAMIGIVDPEFRKQMSRSGAGNEEPMSDAETDEGVEEGDSDSGSDGSDSDSEEAMVEDSVG

SEQ ID NO: 54285 - protein, 335 aa, Glycine max
  Clone ID: 701204508_FLI.pep
RAKRMAPKGLIFLAVLCFSALSLSRCLAEDNGLVMNFYKESCPQAEDIIKEQVKLLYKRHKNTAFSWLRNIFHDCAVQSCDASLLLDSTRRSLSEKETDRSFGLRNFRYIETIKEALERECPGVVSCADILVLSARDGIVSLGGPHIPLKTGRRDGRRSRADVVEQFLPDHNESISAVLDKFGAMGIDTPGVVALLGAHSVGRTHCVKLVHRLYPEIDPALNPDHVPHILKKCPDAIPDPKAVQYVRNDRGTPMILDNNYYRNILDNKGLLIVDHQLANDKRTKPYVKKMAKSQDYFFKEFSRAITLLSENNPLTGTKGEIRKQCNAANKHHEEP

SEQ ID NO: 54286 - protein, 127 aa, Zea mays
  Clone ID: UC-ZMFLMO17074C02_FLI.pep
MLQITHPDTSHGSIQGGKKRDNPRKIDAYHGNKTISFRSQIPSAKVQGRTPARHVKMLLESSSTKAKNQALVSCYRGVANPSESQPQESGLSPSMEVSSADAVALCIGISEPCTPPSATTGTLHHRI

SEQ ID NO: 54287 - protein, 111 aa, Glycine max
  Clone ID: 701206644_FLI.pep
FFIFQVYVWSKQNPFIHMSFLGLFTFTAAYLPWVLLGFSVLVGASAWVDLLGMIAGHAYYFLEDVYPRMTGRRPLKTPSFIKALFADDPVVVARPANVRFAPPPAEELHQD

SEQ ID NO: 54288 - protein, 389 aa, Zea mays
  Clone ID: UC-ZMFLMO17151G07_FLI.pep
SCCIFIFFLYLSHMILILQWQVIVRDIVSKLLIVQFRAHTSPISALCFDPSGTLLVTASVHGQNMNVFRIIPPHGTSEAGQIGTYVHLYKLQRGITNAIIKDISFSDDSDWIMISSSRGTSHLFSISPYSGSTRFRYSDNNPVENDYTVDSSVNHTAHWSQNSATSLSLSQKTLFVSGPPVTLSVVSRIRNGSNVFKGAVHGAAAFATGASTPISGAIASTFHNRMAGDIDSDGSLRMKYYLLVFSPSGSIIQYALHLSAEQDSGLDFRTSPISYGPERETDTKFVIEALQKWDVCYKRNRRDSAESFAYSDFENGENNKLLLKAMWKGTSIYPFDCSVERQKLSADENRNLYSQSELQTHVVQTPLWSKSRVFSCTIFCFNAAFIFYV

SEQ ID NO: 54289 - protein, 537 aa, Glycine max
  Clone ID: 701207337_FLI.pep
KAQPLDMWLYLSEHEKFNDFGSESSLVWHETNVPYAVWGPESTRTHTLKYHPSESLKHNGSLYAHVFFAHSGFSPDPSDPEYQPQAAFGRTHPVVTYLPKSKADKKKSLLGSSPDSSEAQVASKVVDESEDDDDSSDDGDSNDDGPVEWASYWKPNITINLVADFTQYPKTGVAPNIAPYLNVDPLTGNYYPIVYFNEFWLLRDKLIPLNETVTELSLNLEVGPISMTKWQLFLQIDQSFQIHRSYGSMLEGEADELKRVFLEGNPYLLAITMVVSLLHSVFDFLAFKNDIQFWNKNKSMEGLSAKTVVVSFACQLIIFLYLLDNDTSWMILASSGIGCVIEFWKIGKAMRIEIDRTGRIPMLKLRDRESYVRNKTKEYDDIAMKYLFYVLFLLVAGFSVYSLMYERHKSWYSWILSSLTSCVYMFGFIMMCPQLFINYKLKSVAHLPWRQMTYKFLNTIIDDLFAFVIKMPTLHRLSVFRDDLIFVIYLYQRWIYKVDKKRVNEFGFGGEDDQVVAETDATKEEENTTTEEEKKTN

SEQ ID NO: 54290 - protein, 414 aa, Zea mays
  Clone ID: UC-ZMFLB73253F11_FLI.pep
LCRSMASVGVARSSLGFQNGTSSSSDPDRLPNELGSMSIRDDKDVEDIVVNGNGAEPGHIIVTSIDGRNGQAKQTISYMAERVVGHGSFGTVFQAKCLETGETVAIKKVLQDKRYKNRELQTMRVLDHPNVVALKHCFFSKTEKEELYLNLVLEYVPETAHRVIKHYNKMNQRMPLIYAKLYMYQICRALAYIHNSIGVCHRDIKPQNLLVNPHTHQLKLCDFGSAKVLVKGEPNISYICSRYYRAPELIFGATEYTTAIDVWSAGCVLAELLLGQPLFPGESGVDQLVEIIKVLGTPTREEIKCMNPNYTEFKFPQIKAHPWHKIFHKRMPAEAVDLVSRLLQYSPKLRSTALEALVHPFFDELRDPNTRLPNGRFLPPLFNFKPHELKNVPADFMVKLVPEHARKQCAFVGW

SEQ ID NO: 54291 - protein, 570 aa, Zea mays
  Clone ID: UC-ZMROB73066C10_FLI.pep
VEELRVPEYLQFKEQLVEEGPNNNFVLELDFEPFNASFPRPSLSKSIGNGVQFLNRHLSSKLFHDKESMYPLLNFLRAHNYKGMTMMLNDRIRSLSALQGALRKAEEHLSTLQADTPYSEFHHRFQELGLEKGWGDCAKRAQETIHLLLDLLEAPDPSTLEKFLGTIPMVFNVVILSPHGYFAQANVLGYPDTGGQVVYILDQVRAMENEMLLRIKQCGLDITPKILIVTRLLPDATGTTCGQRLEKVLGTEHCHILRVPFRTENGIVRKWISRFEVWPYLETYTDDVAHEIAGELQANPDLIIGNYSDGNLVACLLAHKMGVTHCTIAHALEKTKYPNSDLYWKKFEDHYHFSCQFTTDLIAMNHADFIITSTFQEIAGNKDTVGQYESHMAFTMPGLYRVVHGIDVFDPKFNIVSPGADLSIYFPYTESHKRLTSLHPEIEELLYSQTENTEHKFVLNDRNKPIIFSMARLDRVKNLTGLVELYGRNKRLQELVNLVVVCGDHGNPSKDKEEQAEFKKMFDLIEQYNLNGHIRWISAQMNRVRNGELYRYICDTKAPSCSLLSTRLSG

SEQ ID NO: 54292 - protein, 587 aa, Glycine max
  Clone ID: 701208171_FLI.pep
ANEKKRPFVLTRAGFSGSQRYAATWTGDNLSTWEHLHMSISMVLQLGLSGQPLSGPDIGGFAGNATPRLFGRWMGVGSLFPFCRGHSEAGTTDHEPWSFGEECEEVCRLALKRRYRLIPLIYTLFYFAHTRGTPVSTPTFFADPKDPSLRKLENSFLLGPVLVYASTLRRQGLDKLEITLPKGIWLNFDFNDAHPDLPALYLKGGSIIPVGLPHQHVGEANPSDDLTLFVALDEHGKAEGVLFEDDGDGYEFTKGSYLLTHYVAELKSSVVTVSVHKTDGSWERPKRRLHIQLLLGGGAMLDTWGTDGEVLQLILPSEDEVLKLVSTSEKNYKDRLENATPIPDVEEVSGPKGTELSRTPIELKNGEWNLKVVPWIGGRIMSMTHIPSGTQWLHSRIEINGYEEYSGMEYRSAGCSEEYSVIDREPGLVVLEGDIGGGLVLKRHIYVPKNVPNAIQIDSSIIARSVGAGSGGFSRLVCLRVHPTFSVLHPSESFVSFTSMDGSKHEVFPDGMEQFFEGDLIPNGEWRLVDKCLGLALVNRFSVSEVFKCLVHWDCGTVNLELWSQSRPVSEQSPLRISHQYEVIGIS

SEQ ID NO: 54293 - protein, 810 aa, Zea mays
  Clone ID: UC-ZMFLMO17085D05_FLI.pep
SPRRRGPPTRRRSRAHLSWSPSSFRSSAPTPSSRSGTQLLQVEMNGPSNFMPTPEQDVLDVKPLRTLAPMFPASLGVNTFNHSTTPPLIFVTPSGQFQGGFGDWNNSAAKSFFAFSSKDARGGKADTFSDQNTGTGKAATFGDQDAFGSQNVFASDHSTGTGKAATFGDQDAFGSQNVATGVQDAAKGQTATDWTDVSANANPNGPIDAIAISAYRSTQPNVISLDDDDDDDDEPYAANKTSASGRKIKRPSHLSGYNVSDALVSDSSNSMKVKRPKSSHGKAAADNEHALLPPSEDPREIVEAVLMTFEALRRRHLQLDEAQETNKRADLKASAILMSSNIRANPGKRIGVVPGVEIGDIFYFRMELCIIGLHAPSMAGIDYMTAKFGDEDDSVAICIVAAGGYDNNDDDTDVLVYSGSGGNSKNSEEKHDQKLERGNLALERSLSRKNVIRVVRGYKDPGCLTGKVYIYDGLYRIHESWKEKTKSGIFCFKYKLLREPGQPDGVAIWKMSQKWVQNPLTRGSVLNPDLSSGAENLPVCLVNDIDSDEVPHHFTYTTQVEHLKPLSSVKPLQGCRCLSVCLPGDANCCCAQRNGGSLPYSSSGLLVCRKTMVYECGESCRCSFNCRNRVTQKGVRIHFEVFKTGNRGWGLRSWDAIRAGSFICEYVGEVIDDANINLNDIEDDYIFQMSCPGERTLKWNFGPELIGEQSTNVSADSFETLPIKISAKRIGNISRFMNHSCAPNVFWQPVQFDHEDDHRPHIMFFALKHIPPMTELTYDYGDVGADPSGVRSPRAKNCLCESSNCRGFFI

SEQ ID NO: 54294 - protein, 343 aa, Glycine max
  Clone ID: 701208795_FLI.pep
EMAPTHLRGGLNMMFQVATTFGIFTANMINFGTQKIKPWGWRLSLGLAAVPALLMTVGGIFLPDTPNSLIERGLAEKGRKLLEKIRGTKEVDAEFQDMVDASELAKSIKHPFRNILERRYRPELVMAIFMPTFQILTGINSILFYAPVLFQSMGFGGDASLISSALTGGVLASSTFISIATVDRLGRRVLLVSGGLQMITCQIIVAIILGVKFGADQELSKGFSILVVVVICLFVVAFGWSWGPLGWTVPSEIFPLEIRSAGQGITVAVNLLFTFIIAQAFLALLCSFKFGIFLFFAGWITIMTIFVYLFLPETKGIPIEEMSFMWRRHWFWKRICLPTDGSI

SEQ ID NO: 54295 - protein, 282 aa, Zea mays
  Clone ID: UC-ZMFLB73004C06_FLI.pep
NGVLSDKPGKGVKLCSSRSIEIQVPDTDDKNPEQRRVPVSIDVPDPDFHDFDKDRTEKAFDSDQVWATYDSEDGMPRLYVMVQKVLSMRPFRIRMSFLNSKSNIELAPISWVASGFQKTCGDFRVGRYQVSETVNIFSHRVSWTKGPRGVIRIVPQKGDTWALYRNWSPDWNELTPDDVIYKYEIVEVVDDFTEEQGLTVIPLLKVAGFKAVFHRHMDPKEVRRIPKEGLFQFSHRVPSRLLTGEEGNNAPKGCHELDPAATPVDLLKVITELKEDAVGADC

SEQ ID NO: 54296 - protein, 386 aa, Glycine max
  Clone ID: 701209411_FLI.pep
CELVYIQDSVSWRIGFGIPTVCMLCSIIMFFVGTRVYVHVKPEGSIFSGIAQVLVTAYKKRKLNLPMSEEKPDGVFYDPPLIGITVVSKLPLTKEFRALNKAALIMEGELNPDGTRVNQWRLVSIQQVEEVKCLARIIPIWAAGILSLISMTQQGTFTVSQAMKMNRHLGAKFQIPAGSVSVISLITIALWLPFYDRILVPKLRKMTKHEGGITLLLRIGIGMVFSILSMVVAGYVEKVRRDSANSNPTPLGIAPMSVLWLAPHLILMGLCEAFNIIGQIEFFNRQFPEHMRSIGNSFFSCSFGVSSYVSSIIVNIVHHSTRTHSHPDWLTDDINAGRLDYFYYLIAGLTSLNLVFFIYVARRYQYKGNVDLLDETHQVELGSHKA

SEQ ID NO: 54297 - protein, 806 aa, Glycine max
  Clone ID: 700852943_FLI.pep
PMATDRLTRVHSLRERLDETLTANRNEILALLSRIEAKGKGILQHHQVIAEFEEIPEENRQKLTDGAFGEVLRSTQEAIVLPPWVALAVRPRPGVWEYLKVNVHALVVEELQPAEYLHFKEELVDGSSNGNFVLELDFEPFNAAFPRPTLNKSIGNGVQFLNRHLSAKLFHDKESLHPLLEFLRLHSVKGKTLMLNDRIQNSDALQHVLRKAEEYLGTVPPETPYSEFEHKFQEIGLERGWGDNAERVLESIQLLLDLLEAPDPCTLETFLGRIPMVFNVVILSPHGYFAQDNVLGYPDTGGQVVYILDQVRALENEMLHRIKQQGLDIVPRILIITRLLPDAIGTTCGQRLEKVFGTEHSHILRVPFRTEKGIVRQWISRFEVWPYLETYTEDVAHELAKELQGKPDLIVGNYSDGNIVASLLAHKLGVTQCTIAHALEKTKYPESDIYWKKLEERYHFSCQFTADLFAMNHTDFIITSTFQEIAGSKDTVGQYESHTAFTLPGLYRVVHGIDVFDPKFNIVSPGADQTIYFPPTETSRRLTSFHPEIEELLYSSVENEEHICVLKDRSKPIIFTMARLDRVKNITGLVEWYGKNAKLRELVNLVVVAGDRRKESKDLEEKAEMKKMYGLIETYKLNGQFRWISSQMNRVRNGELYRVICDTKGAFVQPAIYEAFGLTVVEAMTCGLPTFATCNGGPAEIIVHGKSGFHIDPYHGDRAADLLVDFFEKCKLDPTHWETISKAGLQRIEEKYTWQIYSQRLLTLTGVYGFWKHVSNLDRRESRRYLEMFYALKYRKLAESVPLAVE

SEQ ID NO: 54298 - protein, 242 aa, Glycine max
  Clone ID: LIB3051-048-D3_FLI.pep
PYRIKKLDWKTNSTWAKSIGTLVSIAGALIITLYKGQAVIKNHPSNKLFPKKHVSSEQFDWVLGAVLLAGHSFVLSLLFIVQTWIIRNYPTELVIVLTRSTLVAMLSIPPSLISVTDPKALRLGFDVNLIAIAFQAIFGVSLRSIVHIWVMSKKGPLYVAMVKSIGIIFAVIMGIAFLGDSIYLGRHTFLSCLNHMKNWSVLGAAIIWGKSQEQAKEECEVYDDSESYSPVVPLLKNKRMEE

SEQ ID NO: 54299 - protein, 470 aa, Zea mays
  Clone ID: UC-ZMFLMO17197A02_FLI.pep
YYDVVMYSIFSTVGVHSKDHRLEILRHKIAAKENELKGQKRPLFAVATKNADFSSNQPRLPSEKIRLEASSSGEYSRFNSLSEHSGGPNKWLKLNQQYNQFCSDLTPLAPIGSISEKINVQSSEVTNRSENGITMNLNVNETDIIDTTELADQIQQSGATKSLRHHKDSGGAENHVMLESHDGLAAQPPFIFTDTQTIPEDTSALAPITSAQARQQVLSIGTSPVLDGTPQLQPGKENDECLNNSGQIGVETQNTILFSLLEMEELQDKELEDAQEHRQKCESEAYRKAQRALLEANGRCAILRRKREICSSQDHGLIAENSSLVQSLSIRNPEDGLAMPSLLNSQIHVVSQIPENQGGRHRLCPEEPSQQQIDKHEDEARPHYCDKLAASTTDPSSVSVVNADSILSDYMEDDLLFPTRQARSECALDVENQMEETIHVYAEENRQVSGDGGQDYELLEASLRSRCRRL

SEQ ID NO: 54300 - protein, 371 aa, Glycine max
  Clone ID: LIB3107-052-A6_FLI.pep
EETQTTTSVLPLYTNSIPSSEYRPFTLRTHQRRKKMEGVGYCGSFFQRCKPYIAMVSLQFGFAGMNIITKVSLNRGMSHYVLVVYRHAFATAAIAPFAIVLERKVRPKMTFLMFMQIFVLGLLGPVIDQNLYYAGLKFTSPTYSCAISNILPAMTFVMAAIFRMEKLDMRKVRCQAKVIGTIVTVAGAMLMTLYKGQVISFLGSKYMHHPRNYVPENTTDSGEKDWFKGSILLILATLSWASFFILQAGTLRKYPAQLSLTALVCALGTLQSIAVTFVMEHKPSVWTIGWDMNLLAAAYAGIISSGITYYVQGIVMQKKGPVFVTAFSPLMMIIVAIMGAFILAEKIYLGGVVGAILIVMGLYSVLWGKHK

SEQ ID NO: 54301 - protein, 113 aa, Zea mays
  Clone ID: UC-ZMFLMO17201C02_FLI.pep
LKEYSVCLNEEMPSVSSRVYLHREGDHIYKHNLKKQLRIERIVTNFSVYIYIVDSFLPSFQQTIVIRIMKVFVSTGSIRQHGNSHPKYSQPPDRVLPVVLGEHGDGFLRQVVV

SEQ ID NO: 54302 - protein, 102 aa, Glycine max
  Clone ID: LIB3170-048-H6_FLI.pep
PLCMIITAALGSLVLAEQVHLGSIFGAILIVCGLYTVVWGKSKDRKSTTEIEKGESQELPIKNGTKSASDIFDGIEINVPSEVLKKGGGKNVPPATTTTTTS

SEQ ID NO: 54303 - protein, 275 aa, Zea mays
  Clone ID: UC-ZMFLMO17201E07_FLI.pep
GTWIKQKQRVLLHLQQLRIWVMFLSGLKQEDISGRKHILQPLHHICLTAYMTLASAYRFRALSLEEAVRSDGENTDDFFRMAKAAAAYSLVLAGSAHHLFLSECSLMIPLSHFLLNTGQSLLYLAESIKGKTRQNISEARLSFSSCPASSTDNDSPPYHVFRSTCEAFGKQTLSLSLRCWSFLVRGLPCLEKIKSPMEFSMPGTTIFQSVLSEEDHANLSAHEPVSFTERQAGCILSLALCCITYCKYLATICYGPHHYLADHAKYLLEGIDPAQ

SEQ ID NO: 54304 - protein, 457 aa, Zea mays
  Clone ID: UC-ZMFLMO17211G05_FLI.pep
PNRGEMSRPHDGHRSFFPMGNPFRMILPRGARLPPKLTELLTSYEDGLASSLRKVKPEATSEVFTLSWMKLAVECLSELHTNIATLITELELPLSDWDEKWVDIYLNSSVKLLDICIALSSELSRLDQGQLLVRYLLNVLNSGSDMPSQEQLRRAEVSLKEWIERASERSPRLDSCLAALQELSGNLSLMKVRHSAKGKVLMRALYGIEAVTVLICSVLVAVLSGTFKPLVDFDVPEKFGWSTAFIDLQKAISGELSRQLSRGSVAAVKELEDVDVCAKQLHTLTCTVQLEEENASLAHSFSRSKEVVLADTTAQGRGHADNLKLADDSSCQHEVIMLQSITTEGGMDTADIKEDTETIGHTKEVMAPEKIIDRGHQDDNTKQDTGVVTDISCLERREELLNCISRMSKSAERLQLGLDSLSKRVDDFFHIVLTGRDALLCNLRFSNGGKVAAEVRS

SEQ ID NO: 54305 - protein, 216 aa, Glycine max
  Clone ID: LIB3242-043-E8_FLI.pep
PVIEVYYSHRTIIVSLGDSQSGLATVASNPLLGDIFALASAGLYAVYITLIRKKLPDDDGKSGEASTAQFLGFLGLFNVLIFLPVALILHFTKKESFSTLTWKQLGLIIGKGLLDNVLSDYLWAKAVLLTSTTVATAGLTIQVPLAAIVDTLTGNAPRFMDYLGAIAVMIGFTGINIPSDTFSKSTETTVALENENLNTRTEELTLSISQDSVAIS

SEQ ID NO: 54306 - protein, 529 aa, Zea mays
  Clone ID: UC-ZMFLMO17258B03_FLI.pep
LPSTHHAPPDLPSLIGSSSFPLGRNAARRAELAAGMPAQKRPLPSSASPGSDADVEEAPGADADGCGGADQRSPKVTLNGVEERDGGPLQAKDQRHDSDADDEEEGDREGGGGGDGSGSGGDDDCDSQSSQSDGVMDEFTLVKLVDVRKEVQCPICLGIIRKTRTVMECLHRFCRDCIDKSMRLGNNECPACRTHCASRRSLRDDPNYDALILALYPDIDKYEEEELAFSEEERTRNKRIQESIAETFRRQTEALVKKRSTVKATDAASTRKTRRNMRPRRRGRISSPDIAPTDFDDDDREENGDDGSKESSSVDDHSPDVRPKRSRRWPMPRRSPAKAIGNTDNSIEDNDDSGGARDFMTASPLRGEMLAWGKNGTRSQTRHGNSSGSSGRMGRSGRVAKLVDQFRNADDFDNELNLYLVLLPLDGQSVPKLEKPYLSCLPTLSVRHLCQFVALQLSRQPKEVEIYIRKSKDACLSANYTCKYETKPEQPNGLERLWEEKSLSDLYPSLATRQGDLELLYSLKAQGQG

SEQ ID NO: 54307 - protein, 526 aa, Zea mays
  Clone ID: UC-ZMFLMO17267B02_FLI.pep
TTAQECTDMVYSEHILYKNRIEKQMNSHAKEDINQDLILHEQNDEKTNSHEAETPVAESGDCDSPSKAIASSENINFQGKVIEVSASSHLETVCSKYDSPSGPNMHKEGSSSGPARISPELEERHHVEVQVKVDTEHHFSVSNANLEISFDGPNPTECDKEISAIGHGSQDYIQSSQSHQLSACAKPWSLDSAKTKSDTVSIQAQLRNQLENAQTYQSNNLSQNMQQQELTMPHNVQTSAQIQDQLLAQPNHRNQQYLQMMQGYATQMGEYYQQQLYYLQAQHNQQMQSLQQQQLPTEHLQQTFMQQVQQLNQQLVLWQQQVQQQPQVVLQQALPVQQLPDEKQGQCPSGDSKHGQNKQQQQAPQMDQQSQQLQQQQLLYLQQQQQMYLIQQQQMYQQQQAQQQQLLQQQLMQQQQYVLQMPQHQQDSVRQQQQQLFEQQQQQMMLLQRQQQHIMQQQIQPYVQQQQNQQGPKDQTYKSNHQDGRNRQMEHGQLSEASQSDGSKLRSGEQSELSYPSTPQSERSNH

SEQ ID NO: 54308 - protein, 136 aa, Zea mays
  Clone ID: UC-ZMFLMO17267G12_FLI.pep
SPAVWHRSSTATAGTSPSCPRWSNEPHRAQHSRQERDSPRRAALSRGPRLALPLAPRRRGGVLPHPHLPDDPGATRGCMHCGNKGYVAAYILKRFDYTLSTIATETLAVGDGFCYFGMLLFISMIEQIQNGEFGRG

SEQ ID NO: 54309 - protein, 87 aa, Glycine max
  Clone ID: LIB3242-168-B1_FLI.pep
RSGYLLCYWRCMVSLGDNKTMLFFAISCNFNNVKIYEQFCLSFIHFHAFSSQLYQFYSFAREERFLWLVIAGQGHLPPHSLRLLFPT

SEQ ID NO: 54310 - protein, 592 aa, Zea mays
  Clone ID: UC-ZMFLMO17134F06_FLI.pep
IADRCDKKGVSVDERLIRVAEMLEKMVESYSPKDLPNAAVSPDVAKVSSSSINEESDGPSPKLSDWSRRGSADMLDYLQETDNTISLDDIKNLPSMTCKTRFGPKSDHGMATSSAGSMTPRSPLTPRSNHIDMLLAGKNAINESGDLPQIVELADIARCIANTPLDEESALSQMVTCIEDLQEIVNRRKHEALTVQTFGTRIEKLHREKYLQLCDSVDMDKVDSASTIMDEEDDVVRSLRASPVHPVKDRTSIDDFEIMKPISRGAFGRVFLAKKRTTGDLFAIKVLRKADMIRKNAVESILAERDILITVRNPFVVRFFYSFTSRENLYLVMEYLNGGDLYSLLRNLGCLDEDVARVYLAEVVLALEYLHSMHIVHRDLKPDNLLIAHDGHIKLTDFGLSKVGLINSTDLSGPAVSGASLYGDDEPQMNELEQMDHRARRQNRSAVGTPDYLAPEILLGTGHGCSADWWSVGVILFELIVGIPPFNAEHPEAIFENIMNRKIPWPHVPEEMSFDAQDLIDRLLTEDPHQRLGANGASEGEDSTGLNEFESSANVNYSFSNFSFKNLSQLASINYDLLTKGLKDDPPPRTEM

SEQ ID NO: 54311 - protein, 480 aa, Zea mays
  Clone ID: UC-ZMFLMO17186G04_FLI.pep
FSPALPSAASLQPQQHVHFTCPFLPPFPLPPRHLRSPPPAAPAMAMTEGLVPITRTYLARYYDKYPLPPLPDATTDLAARLRALSADLAAVAPIAPDEELLEQEAAGIPAHKIDENLWKNREQMEEILFLINTSHRPVALQQKSTPEDAEIVCTLDDIEAKLKDMLKNLEQFQLKNADNVFNTVMTYMPQDFRGTLIRQQRERSERNKQAEVDALVSAGGSIHDRYALLWKQQMERRVQLAQLGSATGVYKTLVRYLVGVPQVLLDFIRQINDDNGPMEEQRERYGPALYTLTKLVLAIRLYLHVSLARYGQRKIEKDDAAVLQQAVVIYTKEFLKFTEFIGEVFVNAPFFISAEDAGAVDARKSDEYKETIIPAGKTHEVILSVEAVNSYIAWDFSLQQGALNMDIGFHVEYISPSGEKTLILPYRRYEADQGNFCTVSSGSYKLVWDNSYSSFFKKVLRYKVDAVPPVVEPALSATEL

SEQ ID NO: 54312 - protein, 352 aa, Glycine max
  Clone ID: LIB3242-404-A4_FLI.pep
WGHRNHLGRVMEEGVICQWSVFRSLLAILQWWAFNVTVIIINKWIFQKLDFKFPLSVSCIHFICSAIGGYVVIKVLKLKPLITVDPEDRWRRIFPMSFVFCINIVLGNVSLRYIPVSFMQTIKSFTPATTVVLQWLVWRKYFDWRIWASLIPIVGGILLTSVTELSFNAFGFCAALLGCLATSTKTILAESLLHGYKFDSINTVYYMAPFATMILAIPALLLEGNGVLEWLSTHPYPWSALIIIFSSGVLAFCLNFSIFYVIHSTTAVTFNVAGNLKVAVAVLVSWLIFRNPISYLNSVGCAVILVGCTFYGYVRHLLSQQPPVPGTPRTPRTPRNKMELLPLVNDKLDDKV

SEQ ID NO: 54313 - protein, 391 aa, Zea mays
  Clone ID: UC-ZMFLMO17190H01_FLI.pep
RIQPSIGSTQGPTHKRGMAATSSLKSSLLLPSTIFDFSGAAAAVSISTQKRRSRGARVQVSAAADSKNILVMGGTRFIGVFLSRLLVKEGHQVTLFTRGKAPITQQLPGESDAEYADFSSKVLHLKGDRQDFEFVKTSLAANGYDVVYDINGREAVQVEPIIEALPNLQQYIYCSSAGVYLKSDILPHCEVDAVDPKSRHKGKLETESLLTSRGVNWTSIRPVYIYGPLNYNPVEEWFFHRLKAGRPIPIPGAGNQITQLGHVKDLARAFNLVLGNPKASKQIFNISGAKYVTFDGLARACAKAGGFPEPELVHYNPKEFDFGKKKAFPFRDQHFFASVEKATSELGWTPEFDLVEGLTNSYNLDFGRGTFRKEADFTTDDMILDKKLATV

SEQ ID NO: 54314 - protein, 205 aa, Glycine max
  Clone ID: LIB3242-516-D7_FLI.pep
AIGATTPFFTAIFAFLITCKKETGEVYLALLPVVFGIVVASNSEPLFHLFGFLVCVGSTAGRALKSVVQGILLTSEAEKLHSMNLLLYMAPLAALILLPFTLYIEGNVLALTVEKAKGDPFIVFLLLGNATVAYLVNLTNFLVTKHTSALTLQVLGNAKAAVAAVVSVLIFRNPVTVMGMAGFGITIMGVVLYSEAKKRSKVTTH

SEQ ID NO: 54315 - protein, 759 aa, Zea mays
  Clone ID: UC-ZMFLMO17192A07_FLI.pep
PIEKHIDKLMEEPADQIIEKSIELPTQKITETPTDEPAEKINETPTGEPAEKIIEAASENTEGTIKNATEETHEMAVEELIEEPEETISVSSTGLKQGENTSLVEGSSADDEEDHLECAATNLQPGNDTCLEREEVLNQKDLVKLQAVIRGHLVRKQALESLQCLLAIIKIQGLIRAHQAQHSPGMIQETIVHSSGEKLLRNGFALKLMDNMSTSKSICIKCDPSESDVTWEWMERWTTLIPPITVVHVPEHKENSELMGETVTEQVTEHAQCDEDIVALDSDICFPKLVADDVKETVETSESSTLEAPVSVPDETPKMEMKHDTESELIETTNVDAEQVTDQKAENDVDKAFMSLNQQYTQADASRDPCPLSEKFESSKEDSGDAYNSEQTLEMEGKRFVVRKSCNPAFAAAQLKFEELSTNSTVSRSSSLSHLDGASKSRVHAPSSQEDCSSKQDGTGMPDRSVGHDTKMIIAASECGTEISISSTLDSPDRSEGDGGEIVLEIGALENRNYVTSKADNDFNTVHPEVKNAPEVEAQPQKQIEQNGHVPALEIEAQPQDELVQEPHAEPEMPGLHERLEKPVASYATPEGTPMSRTTITESQETPSSEVSVNTKKSRSKKPKPHASKRSLASPGSDSVGRSSTDNFSKESRHPKRESSSKAAKSDHVEQEPRTSNSNSNLLPSYMQFTESARAKASSSPKMSPDVQDSNPRKRHSLPMTDGKHDSSPRMQRSSSHAQQNVKSNGPAPHSASDRKWHI

SEQ ID NO: 54316 - protein, 701 aa, Zea mays
  Clone ID: UC-ZMFLMO17194E12_FLI.pep
GACLPGPELLPVLEAMKLVTGVDLETEVELSPIAKAEEAAVFSPYSSPSTALLLQRRVVSWSTETGSPATVRVRLGDRSFDLHKDPLVSKCKYFSEASLQSGGDVVELPASSPGVREAFESVALFCYGDAVALDPFNVAAVRCAAELLGVGGLGARCDLYISQVVLQSWDDALIVLQRCLPLLPAAEELLVVSRCVEALAFMACMEILDPEQRRDQLPGAGGAASRALVGRRWDAELVKELAARDLWVKDLLALPFQFFERIVRALRRQGMKEKYVGPVVLFYANKWVLSKKTHRFWATTDDDAVDGETDANRRAAAILEGVVGLLPAESPAVAANGAIPVAFYFALLSRSLTLELSDESRTKLRGHVASNLRFARVDDLPLPEEEADGRSIADSREVRAMESIVSNHASVQRKGVEAVSELWDRYLLQFAGDPKLRPERLAELIGAIPASDRKTHDHLYEAINTYLVEHRGLSGEEKATLCGHLDCRKLSHEACVQAVQNERMPLRLIVQALFVQQMHTHRAFTECSDSFRCTRSGELVPGAGGYTPSPGCPAIPTSQPLSGSSPYDSHHHAPRDAKLRARDDASSDYETASFRIQALEQEIISLKRTLQRHNTLRGSASARGEGKEPSFRVAADAGAPATIKRRATVSGSCIGSMRWGSQRRCASRILRVFARLAVFGRGRSRGKQSKCSASTERQNCM

SEQ ID NO: 54317 - protein, 540 aa, Zea mays
  Clone ID: UC-ZMFLMO17197F11_FLI.pep
NTVDTAASGKNNFGGELCCSSSDPIHVPSPGSKSAGTFGAIKREVGVVGARQRPADSAAIYTSTSNGLVKVVSAPKVSPHLEWKPKSVSPSTAAPPGAPSPVDDGSKTEVSALSKKLSHANVSHEHVIIPEHIRIPDSERTHFIFGSFESEIYPKASLAAYYDAVAKEDLNDHSPSRMDNVGSCSPLPQSEPAVSVSEHEQSLTECVDVRSPGVVGGTNETISSKVTHSQPRLQHQEAAQNFKAYEPDSGYGMSFITKVDGEAAQGIAYSSEAMVLHSVNGYQLPASTATQQPVPQMFSQQFQAPQYPNFLPYRHVFSPQFGSLMVVPNYSSNHAFPQLPHASSYLVMPNGASQLAANGMKYGSNHQYKQVFQGAPAGYGYGNHNGYPNGVIGGTGAIEDMNMSKYKDNCLYAPNPQVETADVWIQSQKESPNMPSAPFYNMVGQPVSPHAAYLPPQSGHTAFSPAPSHPGHLQYPGFVHALQPTSMTMVQNPQTMIHQPAAPPLAGNLGLDMSAMVPGNQVGAFQHNQLAHLGWTTQSF

SEQ ID NO: 54318 - protein, 658 aa, Zea mays
  Clone ID: UC-ZMFLMO17201A06_FLI.pep
DLNLLGRHLFSLAHAASGYHKVLEENRKLYNQVQDLKGSIRVYCRVRPFLPGQASPSTVASIDEGNITLVIPSKSGKEVRKTFSFNKVFGSSATQDEVFLDTQPLIRSVLDGYNVCIFAYGQTGSGKTYTMSGPKNMTEQTQGVNYRALGDLFKLAEQRKRTFIYDIAVQMIEIYNEQVRDLLVTDGLNKKLEIRNNSQNGLNVPDASLVRVASTMDVMELMNVGHKNRAVGATALNDRSSRSHSCLTVHVKGRDLTSGTILRGCMHLVDLAGSERVDKSEVTGERLKEAQHINKSLSALGDVIASLAQKNSHVPYRNSKLTQLLQDSLGGQAKTLMFVHISPESDAVGETISTLKFAERVSTVELGAAQLNKESGEVRELKAQIAQLKSALAAKDLGSEQIISHDTEAFNIKMPSPGFSIKRQGSCDLLSTQTNFRQPLDAVGNIEARANPTLRQKKPSFDLQDLLTANDSPSWPDSNLRVNFQTGDEREVIGGDWIDKVVVNNNNSVGDWEGDNAALPDFFYQRYHSGMREKQYQRNNTRQKDDHEYEEQRSRFYSTNTDDSDDIDMATSDSSESDALWQQLNVQSMDNSISLSGSKVKKPQIKLRDGSDARTPIHSQIPSASRKVANGSNRSVRQPLSRSDSRRLSSNGRQSGAK

SEQ ID NO: 54319 - protein, 353 aa, Glycine max
  Clone ID: LIB3242-726-G11_FLI.pep
ETMTMTWARFDSWKQQYYTTSGVVVGYAVCSSLLAIINKYAITKFNYPGLLTALQYLTSALGVYVFGKLGFLHHDPFTLPTAKKFFPAALVFYLAIFTNTNLLRHANVDTFIVFRSLTPLLVALADTVFRSQPCPSNLTFLSLLVILAGAFGYVATDSAFTLTAYSWAFAYLITITTEMVYIKHMVMSLGLNTWGFVFYNNLLSLMMAPFFSFVTGENVEIIAAVRSGGLFDPAAFYAVSLSCLFGLLISFFGFAARRAVSATAFTVTGVVNKFLTVAINVLIWDKHASPIGLVCLFFTIVGGILYQQSVTGLGSAPAQPKQLDTESNKGGGEDDDDGDLAGESDGLIKATSI

SEQ ID NO: 54320 - protein, 430 aa, Zea mays
  Clone ID: UC-ZMFLMO17201G03_FLI.pep
DGISPALLLSPSPGLRSRCPEPSAFPARHAMPAWAEAALVLASPSPATASSTTSSCGARPRAAVGSVRLFCKGFPCSIRSKAGFQIHNYRTRMFKIKAKAESGDGYTRLAPLRFESPSGQLLIQILQSHPHLIPATVDQQLENLQSEKSAQSEEASKVPQDLLYKRIAEVKEKERQNALEEIIYCWVTYRFMENDIYMTPALSPGGGPVRDISALPNQEDKLRNIHSADAFEMIQNHLNLIMGEKIASPPDTVVEISNLNLGKLYAASIMYGYFLKRVDERFQLEKTMKTLPPKPNQQIVFENLQPNPFWDMESLVQITPDGEEISLDDEKSNPNKLRSYVSQLDADTLQRYATIRSKEAVSLIEKQTQALFGRPDIKVLDDGSVNAKDGRMITITFTELNHLVLEAVAFGSFLWEAESYVESKYHFVNS

SEQ ID NO: 54321 - protein, 671 aa, Zea mays
  Clone ID: UC-ZMFLB73064F11_FLI.pep
HTHCISAYAYRKWKPMDLKQAFSGTIFCLLLLFCVGCRCRTLEIEATQTAALKVDASPQLARKIPETLFGIFFEEINHAGAGGIWAELVSNRGFEAGGSHTPSNIDPWSIIGDDSSVFVATDRTSCFSRNIVALRMEVLCDDCPAGGVGVYNPGFWGMNIEDGKAYNLVMYVQSPETKDLTVSLTSSDGLQNLASATITVSGTSNWTKVEQKLVAKGTNRTSRLQITTNKKGVVWLDQVSLMPEDTYKGHGFRTELISMLLDLKPRFLRFPGGCFVEGDWLRNAFRWRESIGPWEERPGHFGDVWHYWTDDGLGYYEFLQLAEDLGAAPIWVFNNGISHNDEVDTVAIAPFVKDVLDSLEFARGSADSTWGSVRAAMGHPEPFLVKHVAIGNEDCGKKFYRGNYLKFYNAIREAYPDIQMISNCDGSSRPLDHPADLYDFHVYTDSKTLFNMRSTFDRTSRSGPKAFVSEYAVWRSDAGRGSLLASLAEAAFLTGLEKNSDIVQMASYAPLFVNDNDQTWNPDAIVFNSWQHYGTPSYWMQTIFRESSGAMIHPVNISSRYSSSLAASAITWQDAENSFLRVKVVNFGSDTVNLTVSTSGLGASVNALGSTATVLTSGNVMDENSFSNPNKVAPVKSQLSNAAEQMQVTLAPHSFTAFDLALAEPKLVAEI

SEQ ID NO: 54322 - protein, 323 aa, Zea mays
  Clone ID: LIB3607-060-F2_FLI.pep
VVIGGLAIMSGKLTAEQLTKFTLYAEWLILSTWWIGDNWSSLMQSVGASEKVFRLMDLLPSKQLSSEGLKLEKLKGQIQYADVSFSYPSRPTVPILGGLNLTLNPNEVVAIVGLSGSGKSTIINLLLRLYEPTNGQILIDGVPLTELDIRWFRERIGFVGQEPRLFRMDISSNIKYGCPRDVSHEEVIWAAKQAYAHDFIMALPDGYNTIVDDALLSGGQKQRVAIARALLRDPSILLLDEATSALDAESEHYVKSVITKVSRDSKAKRTVVIIAHRLSTIQTADRIIVMENGNIVEDGKHIDLIEKGGLYSRLARRQNDDLK

SEQ ID NO: 54323 - protein, 430 aa, Zea mays
  Clone ID: UC-ZMFLB73272C11_FLI.pep
MDDSGGGGRSGGDGDAVEHDGLDGEARAEAEEDAPVEPLAGGGLAVLGGALAHLVEDEEHAGAGHVAVLGEDVAGGAHPGLVQPDPGLHLVQDGGPAGVRHPEDGVPVGDAERLERVLQRALDVLGDEPGHVLEQVERQPHLAEVAVDGALRVGQDGLRRRHELEQRALDPPVRVGAHHDGRRAVAEQRLPHERVQVRLGGAPERHGRDLRAHHQDPRPAVVLRQVLGHAQHRAAREAPLLVHHQAVHGRAQPQRLGQLVVGARHVHPRRGAEHQVRDPRLGLPPLLDRLLRRRLPQLRHLRHHHVLPRVQRRRHVRAHARVLRQELLRQVHVPLPDHRLVAHPLELLLEVGEVVALGDPEVVVRVVGLVHAVGGRGRPDGQHGGGAAGALALPHLVHGHGGAGHRRSSLFLSLSTYVVPEAAGRGRRWL

SEQ ID NO: 54324 - protein, 699 aa, Zea mays
  Clone ID: UC-ZMFLB73272A05_FLI.pep
QVAAHPGGPPYRGMAPPGPAVPFINGHVYSSPMLHPSQQQGAQPQSHQKTQLPNLPSSSQKHQPQHSQGLLGYAPNANAAAAASNSHNYSSGNQRPVLAHRQESDKTGEDGLSSDDKPSHSQKSGYEHNFAVPVHLPNFAMMPAAQPAGSQSEKKLSDHHHQQQQPQVSRGQGVRIDLASSQPFVMPFGSIGPPGSAPSGLDFSALAQSHAFLQSHQEAARHGYPQLNFAAAQSTQHKPQHGETKSVAGDSSLTHIAGDSQRKKSTSTKYSGDSQQHSLSFTRTESKNHVPPFLSGSTNESSSRTLSLIGTESSNTFMGSKSTNSTTPASTPPAASSSISQQHQHFLQMQVQHKHQHQQMIQHHHLNRPRSAAPSTQNSAGGYPDRLNMASFQNMMYPPNAAQGQGRVQSPQLKASSGRGTPSSTATTPPAAAPPNLIVMKTSSLHPQQAKIPMQALSTPGHQSQSSLSMSSSKMAPVTNLSTGGGDLSRSSNAPVASGSPSNSVSKSTGGSPPATGNAKGVQQPVQLPSPQQQLAKNSVSTCGSKSTPANHFSMAMPSILGQQPNSSPGSNTGSKQQSHMSSSMKQQPFPQGHFFISSTYAPQAPGAGGAAALGLYQKRPGDKTQPQAPHQQNALSAAAGSNMKSLHPSSGGFMHLAAATQSAGGGMPHTHMPAAQLSFGTMPVPLKPSSDQKPAAGK

SEQ ID NO: 54325 - protein, 211 aa, Zea mays
  Clone ID: LIB3608-017-H5_FLI.pep
PFEVQIRTREMHLQAEYGFAAHWRYKEGTCRHSFVLRMVEWARWVLTWQCEAMDRERTASLGSDDGTVSVRPPPACPFPQHAEDCPYSYTRQCNHDGPLFVILLEHGKMSVQEFPANLTVMDLMDRVGANSSRWSPYSIPMKEDLRPRVNGEPICDPDRRLNMGDVVELTPALPRKSLSGYREEIQRMYDRGGFALSARGGGGGGGGARRC

SEQ ID NO: 54326 - protein, 1239 aa, Zea mays
  Clone ID: UC-ZMFLMO17151D04_FLI.pep
HDISHPSEFHCCCNRAYLPDYYSFRPPFPQELPPPHLYYHVPSPHHPNACPSYFVPSHPYPFDQTPYGYEKFKSHCCGCPTHVCPGAEKNNVKIEEQRPDVKLESGEHKNADSDSIIQHPNKKYPFIWLPSGNMKGKENGEHYELSPQVLNEWAPVSGKWLGDVKQQGQDNEKGKQFQWPIVWMPAGYDAPNQKAKDMNDTEETPKSPKISEVSPQSPKIIPLSWFGNGHHHDQKSAARNGSGDHNNGSAVKNQPVVTDHQDSMILEGNPKITPAVPKSIHVGKKPPRENCKTIPVVPEKEINEKKASTYRTIPVIKESDEKKIGMREKRESKEANSAEMVEENRKTKHNDSSVVKHSKLPPVCLRVDPLPRKKPGNGSSRSPSPPRKDTDNTKKDVDEAQSQILEPKQSSTSKDITVSEVKEKSPYEMKKEVGFRNETVEAASVEHLQEEEAPTSKDGQKVQAASTTVGDQENAALNSIEEDHVQENAGAGSLNGCDKRKNEDGTVIESETAKDDARTYGVNLSESDAAVRIQSAYRGYDVRKWQPLDKLWKIKHVHEQMQVVRKQIQCLLDSCSKPTQKEQVAIGETIMNLLLKLDAIQGLHPSVREARKSVARELICLQEKLDTLCKAASGDLNHTDSNDDESEGTKNIIQTEAPTVITEASDRQKRTIELGKVQEPCSVDSMEPCNTVPSGVSWEVRPDVDASEEKNEKQESCSTTVDEAHEQVASSMDMISDEAFTADNQEHGIGESNVTSVEQVTEEEKPASEDEVKEPPLVNSTALLYDTTSSGDSSGLKQYTASTDQNLYAESNTGSSPASTEDIDISTLAVESEVAAENDGPINSQVHETVALENVEMKDDVSSAENEHNRSSSPVIHLEDPLVSLKDVEQHGPTPTKDFVVPNTEDQQEARDISLQVQAVDSMKDCGEVPDGTIEASTNDDELELGTSADVEKNDQPTLLEPRSESVSVPELSVLDESDDKMQCGVSGKDEEAHVEEKTVTIAVDKVTGGSANFEDPLCEASRKEPDIEKSHPSLGEEEDDTIGGTVFPGSGSCELSCPQDGGIAVYEGPEMVSPESQTDARKENIHSDVAETDECTKTQKAALAGTEGENSAEDSGVPVSEMDKCNEMPKDAPTLTAAGANPAEDEASLKDLSVQTENKASSASPAPDDPKASDEKTLAEENQKLKELLQKLLASGNDQMGVITDLSEKVKVLERRLARKKRPKVRVHKPSRHASCVH

SEQ ID NO: 54327 - protein, 707 aa, Zea mays
  Clone ID: UC-ZMFLMO17180D07_FLI.pep
LAVSLQSSSGFQHGGWSGTPGQLSMVDIVKMGRPQGKASSKPVVTADRGYAGQYPSLPSTNQNLKQSGSMVSPAELDKGLQPAHNLVQVKNHGHFTADSKLPYGTDWSPQDDPTSENQSSQPETSGDPSLYESSFQSSTLVTDVVNSHENSHLELDENSTFAMRSTLASERHLEPSDSIPEYNDGILNNSSSYQPHNYSYTEQDVEDSSADVSAAAENFQSLSLHNDELAAKKTAEDNPAVIIPDHLQVTNTECVSLSFGSFGSGAFSGLLPQKTTDSNVEFLVREDSATVDPIDARNQDYYESGAVTSPAEENLEAMLGTNMENVDAPSVSQANELSQDVLDPSILKYDVPSVSSHAYSNMNTPQPSKIEDPQGNNQAHTLSHLSNMMQANPLSTSSLLASNQNHPSLHGIEFDLLYLEAKYNTGSTTNPRPAISMQEALKAGVFSNARSTQSLPSTSIPTGHPLPQQLAHHPYSQPTLAPITHFPNIVGYPPYLPQNYAAYLSSGTFQQAYPSNGAFHQSAATLLGSGMKYSAPEYKNNLSATGLQQQHQPQPQPPSSVISGYGGFGSSSNIQGNFTLNQSTGTGSTLVFDDALGRQYKDTSQHIALQQPDNSGMWLHGSGSRAATLPPNHFYGYQGQSQLGGFGQAQQQQPSQFGGHGYPTFYQSQGGLTQEHHPQNLAEGSLNGFQVAPSQPSHPSWQHQHTY

SEQ ID NO: 54328 - protein, 406 aa, Zea mays
  Clone ID: UC-ZMFLB73220F05_FLI.pep
PADRVRAVRRRPREPEAEDGVPGEPVGRRRVRRARREAGPAVRPQGRLSSPRRDGGDGEVGAFGRGGAQVHEAAHRAGGGVLRGRVHGQLLPRHSGRADPAVPDDGAPGRRRAAAGDQLQAVVGAEVHAGAAEAVPARRDELRRRGRGRRRALLPRGRVPGAVPRPGPDPVAAPDPEPAQPDDGGLRAVPARRAGAAARPARGPRGAARGAAPDADRLARRHPAAAEPGRGGGGGGRAGVQRDVGGGRRGRAGVRGAGERGRRAGGRARRRADEPGVPADGGRGGADRAVGQDGLDGHQLLRAAGGGAGAPLPGVLRRGGGDEPQGQVPAGARGVQRPHGAPQAGVAGARPDRHEAGRHRQPHYVPARAAAGARQAAAVRDRDSCYCSSSSNSPLPTGHPETVEAS

SEQ ID NO: 54329 - protein, 663 aa, Glycine max
  Clone ID: 700845556_FLI.pep
DGVSLARNTSNNARRGLPMIQTNMKPTDSEFQVCHDDSTPPVRAQTIHELHSLQKKKSTPSTPLSATQGPFATVSDEERQKQQLQSISASLASLTRESGPKVVKGDPATKAEKGTHVHHHPQPHYFASTAFDVSDSALKFTHVLYNLSPAELYEQAIKHEKGSFITATGALATLSGAKTGRSPRDKRVVRDDTTEHDLWWGKGSPNIEMDEHTFLINRERAVDYLNSLEKVYVNDQFLNWDPEHRIKVRIVSARAYHSLFMHNMCIRPTPEELEEFGTPDFTIYNAGQFPCNRYTHYMTSSTSIDINIARKEMVILGTQYAGEMKKGLFGLMHYLMPKRNILSLHSGCNMGKDGDVALFFGLSGTGKTTLSTDHNRYLIGDDEHCWSENGVANIEGGCYAKCVDLSKDKEPDIWNAIKFGTVLENVVFDEHTREVDFSDKSVTENTRAAYPIEYIPNAKIPCVAPHAKNVILLACDAFGVLPPVSKLSLAQTMYHFISGYTALVAGTEDGIKEPQATFSACFGAAFIMMHPTKYAAMLAEKMQKHGATGWLVNTGWSGGSYGLGNRIKLAYTRKIIDAIHSGSLLNAQYTKTEVFGLEIPTALEGVPSEILDPVNTWSDKKAYQDTRLKLASLFKKNFDGFTTYKIGGDQKLTEEIVSAGPIF

SEQ ID NO: 54330 - protein, 869 aa, Glycine max
  Clone ID: LIB4127-086-F3_FLI.pep
GVFVITKNMDQNRDESWRKLVKKMLPPGASIPADASNLDYSIAMEYVGPPVSYEVPRVEPFDTNSRAIPTAQPLSGSQRSNTHGGHMVIEPIPLPVSRIAVGVTSSPNQSPRVSGSSDSVVSVLQNPDLSSASPSASPASVHNLPSNPPKPANEAKRAPVVTFNTVDRPQRKEVEVVKPVYAEYVGVLNERKKKKIRVCYRCGKGKWETKESCIVCNAKYCSNCVLRAMGSMPEGRKCVTCICQPIDESRRLKLGKYSRVLSRLLSPLEVKQIMKAEKECSANQLRPEQLIVNGLPLKPDEMAELLGCPLPPRKLKPGRYWYDKESGLWGKEGEQPDRIISSNLNFTGKLSLDASNGNTEVYMNGREITKLELRVLKLANVQCPRDTHFWVYDDGRYEEEGQNNIRGNIWEKASTRFVCALFSLPFPHGQPHGQKDETSHYTTVPKYLEQKKTQKLLLLGIQGSGTSTIFKQAKFLYGNKFSAEELQDVKLMIQSSMYKYLSILLDGRERFEEEAVSRMNGQGSPGQTMETGSNGEASNTSECIYSLNPRLKHFSDWLLDIIATGDLDAFFPAATREYAPLVEEVWRDPAIQETFKRKDELHFLPDVAEYFLSRAVEISSNEYEPSERDIVYAEGVTQGNGLAFMEFSLDDRIPKSDTYSENLDAQLPPLAKYQLIRVNAKGLNEGCKWVEMFEDVRAVVFCVSLSDYDQLLLSPDSSGSGTLVQNKMVQSKELFETMVRHPCFKDTPLVLVLNKYDIFEEKISRVSLNTCEWFSDFCPVHAHHNNQSLAHQAYFYVAMKFKDLYASLTGKKLFVAQARARDRVTVDEAFKYIREVLKWDEEKEENFYGPPEDSFYSTDISSSPFVRQE

SEQ ID NO: 54331 - protein, 764 aa, Glycine max
  Clone ID: 700852993_FLI.pep
ENALLQLKDGLGDDDIEVIYVGCLKEEVHPSEQDEVSQTLLETFKCIPTFLPADQFTKYYHGFCKQQLWPLFHYMLPLSPELGGRFNRSLWQAYVSVNKIFADRIMEVINPEDDYVWIHDYHLMVLPTFLRKRFNRVKLGFFLHSPFPSSEIYKTLPVREEILRALLNSDLIGFHTFDYARHFLSCCSRMLGLTYESKRGYIGIEYYGRTVSIKILPVGIHLGQLQSVLRMPQTEEKVCELIRQFSDKGRTLLLGVDDMDIFKGISLKLLAMEQLLIQHPEYREKVVLVQIANPARGRGKDVKEVQAETKATVKRINETFGKPGYDPVILIEEPLKFYERVAYYVVAECCLVTAVRDGMNLIPYEYIISRQGNETLDKVLGLASSPKKKSMLVVSEFIGCSPSLSGAIRVNPWNIDAVADAMDSALEMADLEKELRHEKHYRYVSTHDVGYWARSFLQDLERTCSDHVRRRWWGIGFGLSFRVVALDPNFKKLSMEHIISAYKRTATRAILLDYDGTLMPQSSTIDKSPSSKSIEILSSLCRDKNNMVFLVSARSRKMLSEWFCPCENLGVAAEHGYFLRMKRDEEWETHVAATDTSWKQIAEPVMKLYTETTDGSTIEDKETALVWCYEDADPDFGSCQAKELLDHLESVLANEPVTVKSGQSNVEVKPQGVSKGLVATRLLSAMEEKGMCPDFVLCIGDDRSDEDMFEVITSSMGSPIAAKAEVFACTVCRKPSKAKYYLDDTTEIVRLLQGLACVSEQIDK

SEQ ID NO: 54332 - protein, 141 aa, Glycine max
  Clone ID: LIB4127-341-D4_FLI.pep
AVLVSIAGVVMTTLGKTWAADDAISSASNGQRSLVGDLFGLLSAMSYGLFTVLLKKISGEEGERVDVQKLFGYVGLFTLVALWWLIWPLSALGIEPKFTIPHSARVDEVVLANGFGTLCCMDNSPCGHFGHVTYHSSCYDG

SEQ ID NO: 54333 - protein, 451 aa, Zea mays
  Clone ID: UC-ZMFLMO17008D09_FLI.pep
PGGPYRPVGPPGSFPVEPFGYYGQFPPNSEVAARQGPGHGGYQAKNGDVYHPTPPNSYIMNQPVIPVRPVYQGPVPYDGYYGPRAHFNNANVRDPHFVGGPGILNQFPNQNDRFHPGHPQNRPGRHETVPREQLESDKIHVFHRGNPGSLHDNSDRLGGSREFERNAQPASPLLPHPDGNRTDVNMRTDTRDTFSESERTRVLTKSVPNQRGSVGTEHLSVYDNAHSHHRETGDGTLRKKFKEDGSAALHPVIKKNAALIEKIESLNNKARNVDARNLPESASSKEFKKHQKSTDVPSNDVMGMACKSDPAVSVSCVSPAVQRLPNVPIKGTILGLAHPQLTEFSKAEKLGDSISDHVHRKSDSSRNSYHGPSKDRPANKFGSHGRGESSTTSSLPVADLRNNIDHGQQPEIASQLQPAIVPDDMPASLDYESQRAKMKELAAERAKKVES

SEQ ID NO: 54334 - protein, 489 aa, Glycine max
  Clone ID: 700746253_FLI.pep
LIKTTLIPLERRMLLAMLLNLVLASFVFLSFIRDGSAGITSSFIRSEWPAVDIPLDHEAFAVPKGYNAPQQVHITQGDYDGKAVIISWVTTEEPGHSHIQYGTSENKFQTSEEGTVTNYTFHKYKSGYIHHCLIEGLEYETKYYYRIGSGDSSREFWFKTPPKVDPDSPYKFGIIGDLGQTFNSLSTLEHYIQSGAQTVLFVGDLSYAHRYQYNDVGLRWDTWGRFVERSTAYHPWLWSAGNHEIDYMPYMGEVVPFKNYLYRYTTPYLASNSSSPLWYAVRRASAHIIVLSSYSPFVKYTPQYMWLKEELKRVEREKTPWLIVLMHVPLYNSNGAHYMEGESMRSVFESWFIEYKVDVIFAGHVHAYERSYRYSNVDYNITGGNRYPLPNKSAPVYITVGDGGNQEGLASRFLDPQPEYSAFREASYGHSTLEIKNRTHAIYHWNRNDDGKKVPTDSFVLHNQYWGHNRRRRKLKHFLLKVIDEVASM

SEQ ID NO: 54335 - protein, 756 aa, Zea mays
  Clone ID: UC-ZMFLMO17101G06_FLI.pep
QFHLTPSALVGGFKDRCDGLLQFTSLPAIALSAIESMKLTRSVQIDRVFSQSVTVLSGELGYRTDSTTGIDIAQQDETCCYSQAQKLISVCGWEPRWLPNVQDWEENSTRSARNAGSAEPDGQFHSQFPERHQNSNSVSIKKDKGKGKMHVKDSGCSMRSPLLDCNLCGATVRIWDFRSVPRPSHFSLNNIDMPDTGRKPVLVRGISATSGINGLVTEGAERENVEGRDEAGIVEGKSLSNAQVDLNLTMAGGLPSNNSALPPMPGHLNYGGMGRDLVIGQPTGSGLGGRAASIESRGPSSRKRNLEEGGSTADKPISRLQPADSIEGTVIDRDCDEVDDAAQDSGARSKRPRCFNLFDINRPSSSGAGPSRNLSFDLDIDVNRLDTSNAEVPSALRNPFPRDSMRASSVIAMDTVHGMEENSMESVEYHPCDVDDVNKPSSALRSGVMSDMLDPNYSNQAQQSSFVQPAAETESNAREIGGSSMNGGEEVLNAETTPAFARDQLSLGVSGGSVGMGASHEAEIHGTDVSEHKTGSVVGDADPIPELIETMGHTGESAPGPALMDEFVPEEVGREGPNGDSQDMASRLAVRADSGSKICGSTKADSVESGEKTSRENSAHPSLSCNARVFSGIDASKDEVTGIMLTNDDYDPGSGLGATNGGNDYETGLPDFDPIRHHNDYCPWVNGNVAAACCISTGSSTALSGWQLTVDAIETLQSLGQAQNQTMQSDSAASLYKDDHVRPSRKLLKSANHSKS

SEQ ID NO: 54336 - protein, 172 aa, Zea mays
  Clone ID: UC-ZMFLMO17136D06_FLI.pep
PQTQNSLRLQASSDPQQYKDQSQKSVQGTQAVLDPYSLLGLLSLIGMKEPGPTTLALGIDLTSLGLNLNSQDNLYKTFGSPWSSEPAVGEPDYQIPACFSTKPPPALQKFHPLTLFYIFYSMPKDATQLYAANELYNKGWFYHKDYRVWLTRAPNSAPLVKTPLHSKHLALM

SEQ ID NO: 54337 - protein, 426 aa, Glycine max
  Clone ID: LIB4164-026-D11_FLI.pep
VDNTNTPQFIAPIFLFSHKFSSILLHVQIISQEATMISSMKCTASSLTCSAFSNRKIPIARPQLVTLPTINNVEQNTGLSQLCSQKPLYLSSTENLALVKRRRETECQAYEADRSRPLEINIELPGEEAAQRFKIGLYFATWWALNVVFNIYNKKVLNAFPYPWLTSTLSLAAGSLMMLVSWATRVAEVPKVNLDFWKALFPVAVAHTIGHVAATVSMSKVAVSFTHIIKSGEPAFSVLVSRFLLGEAFPMPVYLSLLPIIGGCALAAVTELNFNMIGFMGAMISNLAFVFRNIFSKKGMKGMSVSGMNYYACLSIMSLLILTPFAIAVEGPKVWIAGWQTAVSQIGPNFVWWVAAQSVFYHLYNQVSYMSLDQISPLTFSIGNTMKRISVIVSSILIFHTPVQPINALGAAIAILGTFLYSQAKQ

SEQ ID NO: 54338 - protein, 162 aa, Zea mays subsp. mexicana
  Clone ID: UC-ZMROTEOSINTE001G04_FLI.pep
QDASGSGALGSRNAYLRGLASLPQRPILRDSRPLIRPDGERSWKVAENAGGHGRNPNGILGLLCREHFPRLVKYGGVTDPAYTFNHYVVAPDAVDQDSREFNNKAERVKQKLWDFFRYEVVYEARADVLATTSYKKLVVDMHYEVRIQAIISYHGAPSLVRR

SEQ ID NO: 54339 - protein, 521 aa, Zea mays subsp. mexicana
  Clone ID: UC-ZMROTEOSINTE004A11_FLI.pep
NSAFQSGGTTLKRSSLRNNSASNVHNFSKADVVPVIVPRTSSGGELATDSRSDAADVAPVFPKVTRRVEPATDSRKESNDVELVVPRASSRMEIADLAPISSSKSGRRLESAPDSKEESADTAPVVVSNPRANVRMEIVSDSAPALSKSNRKLDSGTNSKKESADAVIVPRTNSRMEMISDSRREPSAGRISPFRIQSRYAEPRKLAHAKADSNKVDSRNKITETEDFNCQIFLPRRNGVFQTISSEEPREDVKCGPVDRVGFSNSSEPNASVRNENYVPRMRKPGDNCYIEVSRAGRARSSVSNWEGRDQPPSHEEPTTSSSTLAPTGHPYSSRGSNQASEAPTIASDEDVLSLIMERHDLFLSSTKSRLMKLQIIHQMWERNDIRGVLSAMDRMGDHAVCADMASVLMEKSETITLDLCTSILPVVTDLLESKIDRHLVVALELLVKLVRTFGPMIHSTVSSGPCVGVDIEAEQRRERCNLCFIELEKAKNKLPSLTRRKGAVANAAQELALVFQEIMS

SEQ ID NO: 54340 - protein, 96 aa, Glycine max
  Clone ID: LIB4167-067-E7_FLI.pep
MDTADQRKGKYAPTRDTENPLLGKFDKPLPCFGCGIGWFSLLLGFVCPPMWYYATILYFGNYYHKDPRERAGLAASAIAALVFTIAAVVTVAVIFL

SEQ ID NO: 54341 - protein, 100 aa, Glycine max
  Clone ID: 700875469_FLI.pep
WKVLPLFRNIHHSPDNFKEPEKFDPSRFEAAPKPNTFMPFGSGIHMCPGNELAKLEILVLLHHLTTKYRWSVVGAKNGIQYGPFALPQNGLPITLFPKNK

SEQ ID NO: 54342 - protein, 411 aa, Glycine max
  Clone ID: 700888550_FLI.pep
FFFPFISNLIFVSIQKMALSRVAQSSPSQSNLLKPLSSYLSLRRRSVSTSSEPLTVETSVPFTSHNCDAPPRAVETSSAELFSFFRDMALMRRMEIAADSLYKAKLIRGFCHLYDGQEAVAVGMEAAITRKDCIITAYRDHCTFLARGGTLIEVFAELMGRRDGCSKGKGGSMHFYRKEGGFYGGHGIVGAQVPLGCGLAFAQKYCKDENVTFSMYGDGAANQGQLFEALNISALWDLPSILVCENNHYGMGTAEWRAAKSPSYYKRGDYVPGLKVDGMDALAVKQACKFAKEFALKNGPIILEMDTYRYHGHSMSDPGSTYRTRDEISGVRQERDPIERVRKLLLTHEIATEKELKDIEKEIRKEVDEAIAKAKESQMPEPSDLFTNVYVKGFGVEACGADRKELRATLP

SEQ ID NO: 54343 - protein, 682 aa, Zea mays
  Clone ID: UC-ZMFLMO17011F01_FLI.pep
NWVDQDVFENEEFQESKRWWSSNSSVQQGDSNSRPLSRTSSYPQQPLQHRSSEPIVLPKTSSFTSFPPPVAGGGRAPYPAQGLTRHGSIPSIGAGLQMGSPSMSLSASPYHMVGPSHGLPYTGGMPYGALNLPVNNSVQNDWSNHVNPFTGEHLNLLPNLLHKQLSLPNSPMSSLLFSQHQQRLAQVQSSHQNYLNIMPHVLYPHHSAEITSRFGSVGSSHSSRDKRSRSGKGKHNIRFSQLPSDTGSQNGDSGGIKFRSKYMSSEEIESILRMQHSASHSSDPYIVDYYHQACMAKRGATSKQKTNFSPTSMKDVPSKSRSSSDQHTYLQVDALGRVSFSSIRRPRSLLEVDHPSSADGSHDQKSTVRPLEKEPMLAARVTVEDALCLVLEVDDTDRLLQSSQSQDNIFELKRRRQVLLEGLAASLQFVDPLGPSKSGHSSGSALKDDVIFLRIVSLPKGRKFLARYLRLLVPGSELTRIVCMAIFRHLRFLFGGLPSDSSAAETTVALAKTVSSCVHHMELGALSACLAAVVCSSEQPPLRPLGSSAGDGASLVIKSVLDRATELLTDRHAAASYTVPNRALWQASFDAFFGLLTKYCVSKFESIQQMFVTQTPSSGIGPEASKATSKEMPVELLRASLPHTNEQQRQRLLDFAQRSMPVTGFNPSGARGGHITSESVPG

SEQ ID NO: 54344 - protein, 152 aa, Zea mays
  Clone ID: UC-ZMFLMO17016E02_FLI.pep
VAVVINRLLLQVIPVDKTHNFDVMYDFLKENWEIARWVALGVVVFEAVLLLLALAVRAMNKPAEYDSDDEIIAIGRSPTIRQPLIHTQNVPATGVPVPTLDQRASRNDAWSQRMREKYGLDTSQFTYNPSDPSRYQQNGTPRAEERSRCTIM

SEQ ID NO: 54345 - protein, 327 aa, Glycine max
  Clone ID: LIB4280-029-F1_FLI.pep
PNWGECSALAKVAVNLSEWTDLGAGLDCGAQPCALGDNLPHPYGHFYVISGFYVVYRFFNLTSEATLDDVLAKGKGFCEKRWDVAKRSVAPQPFIEQYCFRAPYIASLLREGLHINDNQITVGSGNITWTLGVALLEAGKAFSTRFGLRDLEFFQMKINPLVLVPILLLSFILLLCALSCVGNWMPRFFRRQYLPISRHNSVTGASVLNIPSPFRFQRWSPMYSGDGRLKMPLSPKIASSQQSQFGLGHSLDDNSGGIELMESSLYPSANNVSHSYSSNNLGQMQFDSGNMGAFWSPHRSQMRLQSRRSQSREDLNSSLAEVHLMKP

SEQ ID NO: 54346 - protein, 880 aa, Zea mays
  Clone ID: UC-ZMFLMO17025E05_FLI.pep
FSDSLTLALWTKCDLQELKVAAIDFQMSPFVLAVVSVAFLNLLFLQAHGSGLLLSCGSNSTVDADGRRWTGDITPEGNFTLSSPGLAASLVGKSSSDEIFGPLYSSARFFNAATWYTISVLPGSYCVRLHFFPSTFGNLSANNSVFDVTANDFKLVSKFNASEEIAWRASVSNSVTSAVVKEYFLVVGARGLSIEFDPRPGSFAFVNAIEVMLTPDNLFNDTVSKVGSAGTQLPLGLSGRGVETMYRLNIGGPALKSPSDQYLHRPWYTDEAFMFSTNAAQTVSNASSIVYVSSNDSSIAPIDVYETARIMGNNMVVDKRFNVSWRFYVHPNFDYLVRLHFCELVYDKPSQRIFKIYINNKTAAESYDVYARAGGINKAYHEDFFDNSTQQADTLWLQLGPDSMASASGADALLNGVEIFKLSKDSDLSYVLGHIDTGNQMDSSKGGKIKGLWEELGIGSASFVAVTSVVLFSWCYIRKKRKAVNKEAPPGWHPLVLHEAMKSTTDARAASKSSSARNASPIGHRMGRRFGIAEIRAATKNFDESLVIGTGGFGKVYKGEIDEGATVAIKRANTLCGQGLKEFETEIEMLSKLRHRHLVAMIGYCEEQKEMILVYEYMAKGTLRSHLYGSSLPPLTWKQRIDACIGAARGLHYLHTGADRGIIHRDVKTTNILLDDSFVAKIADFGLSRTGPTLDQTHVSTAVRGSFGYLDPEYFRRQQLTQKSDVYSFGVVLFEVACARPVIDPTLPKDQINLAEWAMRWQRQRSLEAILDPRLDGDFSPESLKKFGEIAEKCLADDGRSRPSMGEVLWHLEYVLQLHEAYRRNVVESESFGSGELGFADISSSFFSLPHVIREGEEEHHHRSKKPSSIREELDTRENF

SEQ ID NO: 54347 - protein, 578 aa, Zea mays subsp. mexicana
  Clone ID: UC-ZMROTEOSINTE039A10_FLI.pep
HGATMSRGSAASVYLGVDVGTGSARAGLFDEKGKLLGSASSPIQIWKEKDCIEQSSTDIWHAVCAAVKSACSLANVAPEDVAGLGFAATCSLVAVDADGSPVSVSLSGDTRRNIIVWMDHRAVNQAERINATNSPVLQYCGGGVSPEMQAPKLLWMKENLLDSWSMVCRWMDLSDWLAYRATGDDTRSLCTTVCKWTYLGHAHMKQWKESDSRDMEACGWDNVFWEEIGLADLLEGNCAKIGRSVAFPGHALGSGLTPTAAKELGLLPGTPVGTSLIDAHAGGVGVMESIPDAGSKAGLSDEHAICHRMVLVCGTSTCHMAVSKDRLFIPGVWGPFWSAMIPEFWLTEGGQSATGALLDYIIENHVASPLLSNHAASQSISIFELLNKMLLSMSQEQNSPFLSALTQDTHVLPDFHGNRSPVPDPKSKGVIYGLTLDTSEKHLALLYLATIQGIAYGTRHIVEHCNAHGHKIDTLLACGGLAKNSVYIQEHADITGCPIILPRESESVLLGAAVLGAVAGKKFPGVRDAMKALNAAGKVVNPSSDPKVKKYHDAKYQIFRSLYEQQLSHRATMAQALQ

SEQ ID NO: 54348 - protein, 303 aa, Zea mays
  Clone ID: UC-ZMFLMO17002D03_FLI.pep
DTPRRASAARPHSLTATAEMAACSHLAAAGGSSPAAAAVVRSPAHSSAAAAFARLRSTLRFSSAGLSVKGSRATFPWVAAAGPAAAAPVADLDGRPATEKQPIIVIDNYDSFTYNLCQYMGELGLNFEVYRNDELTIEDVKRKNPRGILISPGPGEPQDSGISLQTVLELGPTIPIFGVCMGLQCIGEAFGGKIIRAPSGVMHGKSSPVYYDEELGKALFNGLPNPFTAARYHSLVIEKETFPHDALEATAWTEDGLIMAARHKKYKHIQGVQFHPESIITPEGKKIILNFIRFIEELEKQRS

SEQ ID NO: 54349 - protein, 799 aa, Zea mays
  Clone ID: UC-ZMFLB73030G01_FLI.pep
FALWRKMSGAPKRLLEEGSHSTPTKRPLDDSSLYSSPGKFIQSGGSDFHGSSEHDGRFAKFQRVESRDDKRPSVHRMPVGSTNFAVHPISSDSRLESKQNKDARDSKADDRETKVDARDVHSDSRIEFQANKIESDVKVDNRADESEIRADRRGHPDYRTDIKFGKDSHSTVPANINWKDNKEHRGKRHFEPPADTVDWRLPRPSLQSIDEAPKGPISVEGRNSKDTNESAGDYKAEPKNEDRFRDKDRKKKDEKHRDFGAREGDRNDRRTGVPLGSSGVERREMQREDRDAEKWDRERKDSLRDKEGNDREKDSARKDSSVVIAKDNPILEKASSDGAVKSAEHENTTTESKAPKDDVWKAHDRDPKDKKREKDVDAGDWLEQRNKYNDKELDDNAIEGDMEKDKDVFGSVQRRRMVRPRGGSQVSQREPRFRSRMRDGEGSQGKSEVSAIVYKAGECMQELLKSWKEFDVTQDATIAESLQHGPTLEIRIPAEFVTSTNRQVKGAQLWGTDIYTNDSDLVAVLMHTGYCSPTSSPPPSAIQELRATVRVLPPQESYTSTLRNNVRSRAWGAGIGCSFRIERCCIFKKGGGTIGLEPRLSHVSAVEPTLAPVAVERTMTTRAAASNALRQQRFVREVTIQYNLCNEPWLKYSINIVADKGLKKSLYTSARLKKGEVIYLETHINRYELCFSGDKPCIIGSSSNASESETEKHQSGSHHSQNGDRGCVEHELRDVFRWSRCKKAMPESAMRSIGIPLPADQLEVLQDNLEWEDVQWSQTGVWVSGKEYPLARVHFLSAN

SEQ ID NO: 54350 - protein, 378 aa, Zea mays
  Clone ID: UC-ZMFLMO17155A05_FLI.pep
PLLTHTHTHTHTLHASETTRRTAASRSPPPRPGACELALASLPAPTEMDPRFPLPAAAAPSTGGGGGARGHHRRAHSETFLSFHDADLLLDPDGDFFSDLDFPSLSDDSPAASDPTPPPHPQQQPPQASPAPRPPGGTHTRSLSLDAAFFEGLAFQGPSGSAGGGGGPGHKRSGSMDGDTSPFEGESALSSGLPDYAKKAMPAERIAELALIDPKRAKRILANRQSAARSKERKIMYTSELEKKVQTLQTEATTLSAQLTLLQRDTTGLTAENRELKLRLQSMEEQAKLRDALNEALREEVQRLKIAAGQVGNMNGNPFNGGLQQQIPSYFVQQQQMPYFGGHQAQHHSQNQNHRHQISSNVGQTLSGQSLNDSMDFM

SEQ ID NO: 54351 - protein, 501 aa, Zea mays
  Clone ID: LIB4571-004-E5_FLI.pep
WAPPPSIVATMEVVSCSHSCPALHQTPASTWRLRGSALGLGLGHARPSRTRRYTVACVGTTSGASNPGGSGKVHAAQGFHVSDVDAALQGIPSMKAGEAERVMIQGLPEGPDSSPISTGFWEWKPKLTVYYERPGMKNSKAPAVLFLPGFGVGTFHFEKQLRDLGRDHRVWTMDFLGQGMSLPGEDPAPSSIASEEAFWGFGQDSQPWAEELVYSVDLWQNQVQHFIEEVIREPVYIVGNSLGGFVALYFAASSPHLVKGVTLLNATPFWGFFPNPATSPRLSKIFPWAGTFPLPSFVRKITEAVWQKISDPKSIQDILKQVYADHSTNVDKVFSRIVEITQHPAAAASFASIMFAPRGQISFQEAISRCQDQGIPISLMYGREDPWIRPIWGLKVKQQVPEAPYYEISPAGHCPHDEVPEVINYLLRGWLKNLESEGSIDLPFLEEPSYAERGVSRELEFVREGSRKSVSVRLYGTKISLWSQLSSFLNTRVPKSRIVLR

SEQ ID NO: 54352 - protein, 149 aa, Zea mays
  Clone ID: UC-ZMFLB73010B08_FLI.pep
RCSARMLQHSNSANELLLRRKLEEQQQAAELQHAIELQSRRLMDLQLLGLKARAAATAAAASALPTPVANAFASNHPLSTMAVESPLESGEQLKLSSGFALEGKLNGGDKEESACEASPDAADSDQRWIKQPISSFFFLVSYDSHACLS

SEQ ID NO: 54353 - protein, 406 aa, Glycine max
  Clone ID: 700793752_FLI.pep
YDPMAATLFQGLGVVTPSFSSSHSNKFMLSSLSERKDGIFVVRSDADARILKTGARKHELLVTNAVATKGASSAASTSKSGSGHELLLFEALREGLEEEMERDPCVCVMGEDVGHYGGSYKVTKGLAPKFGDLRVLDTPIAENAFMGMGIGAAMTGLRPVVEGMNMGFLLLAFNQISNNCGMLHYTSGGQFKIPIVIRGPGGVGRQLGAEHSQRLESYFQSIPGIQMVACSTPYNAKGLMKAAIRSENPVILFEHVLLYNLKERIPDEEYVLSLEEAEMVRPGEHVTILTYSRMRYHVMQAAKTLVNKGYDPEVIDIRSLKPFDLHTIGNSVKKTHRVLIVEECMRTGGIGASLTAAITENFHDHLDAPIVCLSSQDVPTPYAGTLEEWTVVQPAQIVTAVEQLCQ

SEQ ID NO: 54354 - protein, 372 aa, Glycine max
  Clone ID: 701138480_FLI.pep
VEQLHKIFKLCGSPSEEYWKKSKPPHATVFKPQQPYKCVISQTFKDIPSSALSLLEVLLSVEPKDRGTASLALQHEFFTAMPLPCDPSTLPKYPPSKEFDAKLREEETRRQRAVNKGYEHESVGRNFRESKAVPIPDANAEFQATVGRQGQCNSKCITKKYNPEEDGDYGFHREPAKSRALDVLSHSGQSVHPSVYGSSRNMNLKEEDLTSPDHGFRSRKSELRKQKSYWQGSTAKLSRFSNSVAVQGDPLLDMSGDSSANSQWPEDQFGMRCSHQADGDSKQLLDGLKSSQKNDFHPIGKDRAKGYANKNARMHHSGPLLAPEDNLEEMLKEHERQIQQAVRKARLGKDKTKKADSESGLTESLFHHVRNQ

SEQ ID NO: 54355 - protein, 365 aa, Zea mays
  Clone ID: UC-ZMFLB73004G08_FLI.pep
EVTKTISYNCSALSNSLEGMLLGRFLVGTGMGLGPPVASLYITEVSPSTVRGTYGSFVQIATCLGIIVSLLIGTPVKDIDRWWRVCFWVAVIPATLQALGMEFCAESPQWLYKCGKISEAEMQFEKLLGPLHVKSAMAELSRYERVDDGESVKYSELFYGRHFNVVFIGTTLFALQQLSGINSVFYFSSTVFRSVGVPSNLANICMGISNLSGSIVAMLLMDKLGRKVLLSGSFLGMAFAMGLQAVGANRQYLGSACVYLSVGGILLFVLSFSLGAGPVPGLLLPEIFPNKIRAKAMALCMSVHWIVNFFVSLMFLRLLEQLGPQLLYTIFSSVCVVASIFVRRHVLETKGKTLQEIEVSLLQPQ

SEQ ID NO: 54356 - protein, 714 aa, Zea mays
  Clone ID: UC-ZMFLMO17038H08_FLI.pep
AAMGLPQPSTVEDDAPTALRTSISCPPHSGGVSACDLDGLPAGSSSRRVLSYPLIRDFDRKATLDAPNESNGYSKDGCEFDEPADLHGLNIDSRNTNSWSSPKLVPSVHMPARRVVGFDSGCIGGSDGAETDMVDSSLVDRNSHLPFDQHGLQAKKRLFSPLKNVLVKQFNGDMLNLPSGDSRFRHSDSADKLYSTGFQDNKKANTGCINLFETRDTPASRCSSRSPEWDVTRSNSNSFTDGPLLGSKDYISYYDHLAASAKLAHSPLSLSPLSPKYMNKIKVTGSQRYIMKDLEDDFLDLKESGGSGGARMPEVSKGSNLLHDELDVMTPKWGSLRRYRNWGPESSPTSPRIVYGRSLSLHVRRSLVGSFEESLLSGRYSYGKDSQTIDGFLAVLNVTGGSFFPTTQKLPFSVTSIDEDSSLLYYSSIDLAGRLPSNNTKSPKLQRSYSNNDSRSAKSRLRIPVKGRIQLVVSNPEKTPLHTFFCNYDLSDMPSGTKTFVRQKVTLSPSALPSNPVEEGSKTCDVNAGHKSSQSVSSGNEPSEQGARSECCNGGQNCNSNDESEKGDLKTRCRSLDSDSNVSNKSSSPGNKKDQSDSDGCCCQMDKFGMGEKKSCCSPSKINDSSGGAVLRYALHLRFLCPSKKKSLKSMLRCKSDPSTAPYSSNTLPEEERRFYLYNDLRVVFPQRHSDADEGKLRVEHDFPADPKYFDISN

SEQ ID NO: 54357 - protein, 262 aa, Glycine max
  Clone ID: 701202968_FLI.pep
RKKMKGQTQATKLVNLYRFCVSSSSSSISRFNHFTLTTTDYNKFKFACAKAKNLQLSLSQRAFVFLSPLNVAANYLRSYRVSGSYICSGSILGVSIASAPIIAHAMDAGDALVDDHESQDLSEEEIDVHHLLRLARKLWLPAFFFLTVLSNLGDSITILFIKLTLFLLSTKPSPFSVYVFVDKLCQQHMRQETRFFKAKSLYASKVEVQDYKLLCLADVEVRDQKFTLVGVLGSWWPIPHLPFWEAFSFVRNRIGSILVKTT

SEQ ID NO: 54358 - protein, 753 aa, Zea mays
  Clone ID: UC-ZMFLMO17185G05_FLI.pep
SDDADNGNVKYLEVLECIPQASARKHGASTTDKSETSKIADVHSKPVYGNHDRIQTGPSPSNLNTSIRDDGKEAKYRHIRYCENGEMGQSLRVRDMSPKSPINHISDNNRSEYHLKQRYSYSTKECPGERNLDGPSKVRGLEKDRAEILRMLDELRDQVQQSCNATNGASGIAPSTAAADSNSSHGTSDRLSQLRQVAPQLHQNGSHHSPSLNVGSPSVSRVYAPLPAQQDCVRYAEPISHARASSYPASLYPWRNFDNYFFGQHDPDPLLSCRHDGFYHQAACSCLHCCHQEFLPIQGNHIGFHDQRAPYLLNNYGAYPVDSPLLGQQRYSARVTNTTLQQNHMRVNVSKKAAQTCEPVAGGAPFTICCNCYEVLQIPRKQSLSGNEYKLRCGSCSHAIIVKLDGNRLNVSEFALCTRLSDGQENDMGTDGQTQDNRSIPAYHLSVGSPASQERDLHSNLSESENNHTPLGTDSEGTSLSRDLPAEDSAVSHVPNLPHHSHSGSSPTEHFGVGSRSTHSEPEKVILLTESSKQTSVRGICVTNKMQSPNNEFDVPEYTDDTLNDQQDTDHPRTTKASDSFLTNLIKRSFKINNGLRNRRARVYVNGFPISDHVVRKAEKLAGSICPGNYWYDYHAGFWGVMGHPCLGMIPPYIPEFNFPMPKNCAGGNTSIFVNGRELHQKDLDLLVTRGLSDSPGRSYVVENSGKVSDEVSGEELYGLGKLAPTVEKMGRGFGMRIPRFIKRQANLVQLDF

SEQ ID NO: 54359 - protein, 72 aa, Glycine max
  Clone ID: 701204602_FLI.pep
FQSKSILTLHRALYMIKAKAKLVFNYSFSQQVRFNLLGSLVSQSVIGLLSSVVRYLCLYKWKFVYCNYILHE

SEQ ID NO: 54360 - protein, 712 aa, Zea mays
  Clone ID: UC-ZMFLMO17037D08_FLI.pep
VARFDHVLLVAASRDCTVAKLQREVVSVLGLRDAPTEQAQAAGILSFLRDKSFLLLLDSVWERLDLERVGIPQPLGMANGKVRKIIVASRSEALCADMGCRNKIKMECLNEEDAWSLFQANVGGDIIHGHAQIPALAKQVAAECKCLPLALVTVGRAMSNKRTPEEWSNALDTLKASLRSGTPGLDKSTHALVKFCYDNLESDMVRECLLTCALWPEDHNISKEELVQSWIGLGLLPDLGDIEEAHRFGLSVIAIMMAACLLEPGDNHRYNMFPSDTHVRMHDVVRDAALRLAPAKWLVRAGAGLREPPREEALWRGAQRVSLMHNTIEDVPAKVGGALADAQPASLMLQCNKALPKRMLQAIQHFTKLTYLDLEDTGIQDAFPMEICCLVSLKHLNLSKNKILSLPMELGNLSQLEYFYLRDNYYIQITIPPGLISRLGKLQVLEVFTASIVSVADNYVAPVIDDLESSGARMASLGIWLDTTRDLERLARLAPGVRARSLHLRKLEGTRALPLLSAEHAPELAGVQESLRELVVYSSDVEEVTADAHVPMLEVIKFGFLTKLRVMAWSHAAGSNLREVAMGACHSLTHLTWVQNLPCLESLNLSGCNGLTRLLGGAEDSGSATEEVIVFPRLKLLALLGLPKLEAVRVEGECAFPELRRLQTRGCPRLKRIPMRPARGQQGTVRIECDKHWWNALQWAGEDVKACFVPVL

SEQ ID NO: 54361 - protein, 437 aa, Glycine max
  Clone ID: 700875422_FLI.pep
MKVAKGRILVGKYELGKTIGEGSFAKVKFARNVQNGNYVAIKILDRKHVLRLNMMEQLMKEISTMKLINHPNVVRILEVLASKTKIYIVLEFVDGGELFDKIAANGRLKEDEARNYFQQLINAVDYCHSRGVYHRDLKPENLLDSNGVLKVSDFGLSTYSQKEDELLHTACGTPNYVAPEVLNDRGYVGSTSDIWSCGVILFVLMAGYLPFDEPTHMALYKKIGRAEFSCPSWFSPQAKKLLKHILDPNPLTRIKIPELLEDEWFKKGYKPTSFTEEEDLNVDDVVVAFNESNENLVTERKEKPVSMNAFELICRSQSFNLDSLFEKQTGQVKQETSFTSQCPANEIMFKIEEAAKPLGFNVYKRNYKMKLQGDKSGRKGHLSVATEVFEVAPSVHMVELRKTGGDTLEFHKFYKIFSSGLQDIVWHDTEGKKNMKN

SEQ ID NO: 54362 - protein, 40 aa, Zea mays
  Clone ID: LIB3992-013-E4_FLI.pep
VASQRLHYIITVPIVSSVIDTAGSCAARAGTWLLLQTAHR

SEQ ID NO: 54363 - protein, 396 aa, Glycine max
  Clone ID: 700891365_FLI.pep
ISNLQGFRKVDPDRWEFANEGFLRGEKQLLKSISRRKSAHVNGSQQASQVHKSAAGACVEVGKFGLEEEVERLKRDKNVLMQELVRLRQKQQGTDNQLQNVGQRVQSMEQRQQQMMSFLAKAMQSPGFLAQFVQQQNESSKHIPGSNKKRRLQRQEEDSLATKDLHSSLDGHIVKYQSSINEAAKALFRQILQINNSTTQSSIKNPDVFLIDDIPSAIASDSSSSSTQVSNVMVPPISELTSMEVGSQFPLSCMPSNISEVQSSPAVLGFCRSQGLETESSLLNHELNVMGADTRNMGEIDMMSTVLDEADEADHFSPDTDGISKLPEISDEFWELFLRPSPLTEDTEETKCSSLGCGLTEDQGLPSEMGNKQENFDTIQHVDCLTQQMGLHALEY

SEQ ID NO: 54364 - protein, 457 aa, Zea mays
  Clone ID: UC-ZMFLB73030H10_FLI.pep
ISRSGDRARRAEGREVPCPPPMLFPKRINYVAPMLASAAILLLLLSGYFELPSISTPAPLLAGAARFPTALDSVGSRDRDPFTSLLEAFASWDAAVGCPRVRAKLAAAGLGLGPGLPLPSASASASANGTAEDPAAASVSGGAAWRGAARCEDLAARHVGVLVKGWTWIPDALDGVYTCRCGVSCVWSKSAAAVDRPDALLFEGATPPPQRMKGLPLRVYLDLEASRKPTGFEDIFVGYHASDDVQVTYAGKSFHTSRSYHISTEKRNDALIYWSSSRCLPHRDKLAKDFLSLVPHHSFGRCLNNVGGPDMALSMYPVCSTNDNGTPHWWDHLHCAMSHYKFVLAIENTKTESYVTEKLFYALEAGSVPIYFGAPNVWDFVPPNSIIDASKFSSLRKLASYVKTLANDPVAYAEYHAWRRCGALGNFGRAREMSLDTLPCRLCEVVSKRGGKGADAL

SEQ ID NO: 54365 - protein, 606 aa, Zea mays
  Clone ID: UC-ZMFLB73296G05_FLI.pep
EEMAERLTRIAIVSEDKCKPKKCRQECKKSCPVVKTGKLCIEVTSASKLAFISEELCIGCGICVKKCPFDAIEIINLPKDLEKDTTHRYGPNTFKLHRLPVPRPGQVLGLVGTNGIGKSTALKVLAGKLKPNLGRFKNPPDWQEILTYFRGSELQNYFTRILEDNLKAIIKPQYVDHIPKAVQGNVGQVLEQKDERDMKSELCVDLELNQVIDRNVGDLSGGELQRFAIAVVAVQNAEIYMFDEPSSYLDVKQRLKAAQVVRSLLRPNSYVIVVEHDLSVLDYLSDFICCLYGKPGAYGVVTLPFSVREGINIFLAGFVPTENLRFRDESLTFKIAETQENAEEIETYQRYKYPTMSKTQGNFKLTVVEGEFTDSQIVVMLGENGTGKTTFIRMLAGLLKPDTVEGTDIEIPEFNVSYKPQKISPKFQNTVRHLLHQKIRDSYMHPQFVSDVMKPLQIEQLMDQEVVNLSGGELQRVAICLCLGKPADIYLIDEPSAYLDSEQRIVASKVIKRFILHAKKTAFIVEHDFIMATYLADKVIVYEGRPSIDCTANAPQSLVSGMNKFLSHLDITFRRDPTNYRPRINKLESTKDREQKSAGSYYYLDD

SEQ ID NO: 54366 - protein, 352 aa, Homo sapiens
  Clone ID: LIB4654-056-G4_FLI.pep
KYSTLKHSLFEELDSLYSGTYTSFSLLTLDEIVDTLGEGAFGKVVECIDHGMDGMHVAVKIVKNVGRYREAARSEIQVLEHLNSTDPNSVFRCVQMLEWFDHHGHVCIVFELLGLSTYDFIKENSFLPFQIDHIRQMAYQICQSINFLHHNKLTHTDLKPENILFVKSDYVVKYNSKMKRDERTLKNTDIKVVDFGSATYDDEHHSTLVSTRHYRAPEVILALGWSQPCDVWSIGCILIEYYLGFTVFQTHDSKEHLAMMERILGPIPQHMIQKTRKRKYFHHNQLDWDEHSSAGRYVRRRCKPLKEFMLCHDEEHEKLFDLVRRMLEYDPTQRITLDEALQHPFFDLLKKK

SEQ ID NO: 54367 - protein, 308 aa, Zea mays
  Clone ID: UC-ZMFLB73301F03_FLI.pep
VPGGVRAHQACHGVGRAPRQLRQAVREGARGQGAARLRLRRPRARGGVRGRRRVLRREGEHQRVGAAGEHGVGVQPVADLGHRRLLRQRPQHHRGRLAGQPGAVRGQRAEVLHLLDDGRLPDHRMLQPPLLRLHPDQQPHRHGRRHLAHLRLQRRPVRHQPARLEGPEPRQLVAGVRLRRAGGVLAVAAVQPPGVAREHGAVRRRGGEHARVGVAHGHADGQRTLRRGRLRPGLLLPEPGGGGLGQQPGAARRRLPRHRRPPQLLRHPGRRQRRLGELLLLRRAGQERQVHLASSSYSSSSSRLGPLT

SEQ ID NO: 54368 - protein, 509 aa, Zea mays; identical to SEQ ID NO: 37741
  Clone ID: UC-ZMFLMO17292A10_FLI.pep

SEQ ID NO: 54369 - protein, 1805 aa, Homo sapiens
  Clone ID: LIB4219-109-D6_FLI.pep
RPRAPAADMKRSRCRDRPQPPPPDRREDGVQRAAELSQSLPPRRRAPPGRQRLEERTGPAGPEGKEQDVVTGVSPLLFRKLSNPDIFSSTGKVKLQRQLSQDDCKLWRGNLASSLSGKQLLPLSSSVHSSVGQVTWQSSGEASNLVRMRNQSLGQSAPSLTAGLKELSLPRRGSFCRTSNRKSLIVTSSTSPTLPRPHSPLHGHTGNSPLDSPRNFSPNAPAHFSFVPARRTDGRRWSLASLPSSGYGTNTPSSTVSSSCSSQEKLHQLPFQPTADELHFLTKHFSTESVPDEEGRQSPAMRPRSRSLSPGRSPVSFDSEIIMMNHVYKERFPKATAQMEERLAEFISSNTPDSVLPLADGALSFIHHQVIEMARDCLDKSRSGLITSQYFYELQENLEKLLQDAHERSESSEVAFVMQLVKKLMIIIARPARLLECLEFDPEEFYHLLEAAEGHAKEGQGIKCDIPRYIVSQLGLTRDPLEEMAQLSSCDSPDTPETDDSIEGHGASLPSKKTPSEEDFETIKLISNGAYGAVFLVRHKSTRQRFAMKKINKQNLILRNQIQQAFVERDILTFAENPFVVSMFCSFDTKRHLCMVMEYVEGGDCATLLKNIGALPVDMVRLYFAETVLALEYLHNYGIVHRDLKPDNLLITSMGHIKLTDFGLSKMGLMSLTTNLYEGHIEKDAREFLDKQVCGTPEYIAPEVILRQGYGKPVDWWAMGIILYEFLVGCVPFFGDTPEELFGQVISDEIVWPEGDEALPPDAQDLTSKLLHQNPLERLGTGSAYEVKQHPFFTGLDWTGLLRQKAEFIPQLESEDDTSYFDTRSERYHHMDSEDEEEVSEDGCLEIRQFSSCSPRFNKVYSSMERLSLLEERRTPPPTKRSLSEEKEDHSDGLAGLKGRDRSWVIGSPEILRKRLSVSESSHTESDSSPPMTVRRRCSGLLDAPRFPEGPEEASSTLRRQPQEGIWVLTPPSGEGVSGPVTEHSGEQRPKLDEEAVGRSSGSSPAMETRGRGTSQLAEGATAKAISDLAVRRARHRLLSGDSTEKRTARPVNKVIKSASATALSLLIPSEHHTCSPLASPMSPHSQSSNPSSRDSSPSRDFLPALGSMRPPIIIHRAGKKYGFTLRAIRVYMGDSDVYTVHHMVWHVEDGGPASEAGLRQGDLITHVNGEPVHGLVHTEVVELILKSGNKVAISTTPLENTSIKVGPARKGSYKAKMARRSKRSRGKDGQERKRSSLFRKITKQASLLHTSRSLSSLNRSLSSGESGPGSPTHSHSLSPRSPTQGYRVTPDAVHSVGGNSSQSSSPSSSVPSSPAGSGHTRPSSLHGLAPKLQRQYRSPRRKSAGSIPLSPLAHTPSPPPPTASPQRSPSPLSGHVAQAFPTKLHLSPPLGRQLSRPKSAEPPRSPLLKRVQSAEKLAAALAASEKKLATSRKHSLDLPHSELKKELPPREVSPLEVVGARSVLSGKGALPGKGVLQPAPSRALGTLRQDRAERRESLQKQEAIREVDSSEDDTEEGPENSQGAQELSLAPHPEVSQSVAPKGAGESGEEDPFPSRDPRSLGPMVPSLLTGITLGPPRMESPSGPHRRLGSPQAIEEAASSSSAGPNLGQSGATDPIPPEGCWKAQHLHTQALTALSPSTSGLTPTSSCSPPSSTSGKLSMWSWKSLIEGPDRASPSRKATMAGGLANLQDLENTTPAQPKNLSPREQGKTQPPSAPRLAHPSYEDPSQGWLWESECAQAVKEDPALSITQVPDASGDRRQDVPCRGCPLTQKSEPSLRRGQEPGGHQKHRDLALVPDELLKQT

SEQ ID NO: 54370 - protein, 73 aa, Zea mays
  Clone ID: UC-ZMFLB73272C06_FLI.pep
ICPNSSDYHFHPYLYLPLAYGHNHWCFHFPISVITVLILYPSQWIPLIGTPSELLVNVCWKIRICHSAYVPSS

SEQ ID NO: 54371 - protein, 474 aa, Zea mays
  Clone ID: UC-ZMROB73061B04_FLI.pep
HLPEAAATDRAKRRSPRRRQNPSFSYSMATVSLTPQAVFSTESGGALASATILRFPPNFVRQLSTKARRNCSNIGVAQIVAAAWSDCPAARPHLGGGGRRARGVASSHAAAASAAAAASAAAEVSAIPNAKVAQPSAVVLAERNLLGSDASLAVHAGERLGRRIATDAITTPVVNTSAYWFNNSQELIDFKEGRHASFEYGRYGNPTTEALEKKMSALEKAESTVFVASGMYAAVAMLSALVPAGGHIVTTTDCYRKTRIYMETELPKRGISMTVIRPADMDALQNALDNNNVSLFFTETPTNPFLRCIDIEHVSNMCHSKGALLCIDSTFASPINQKALTLGADLVIHSATKYIAGHNDVIGGCVSGRDELVSKVRIYHHVVGGVLNPNAAYLILRGMKTLHLRVQCQNNTALRMAQFLEEHLKIARVYYPGLPSHPEHHIAKSQMTGFGGVVSFEVNLILELIVLCTKLLRT

SEQ ID NO: 54372 - protein, 1611 aa, Homo sapiens
  Clone ID: LIB4219-057-F7_FLI.pep
CSWLHYYTMLVTECCRTSNRKSLIVTSSTSPTLPRPHSPLHGHTGNSPLDSPRNFSPNAPAHFSFVPARRTDGRRWSLASLPSSGYGTNTPSSTVSSSCSSQEKLHQLPFQPTADELHFLTKHFSTESVPDEEGRQSPAMRPRSRSLSPGRSPVSFDSEIIMMNHVYKERFPKATAQMEERLAEFISSNTPDSVLPLADGALSFIHHQVIEMARDCLDKSRSGLITSQYFYELQENLEKLLQDEFDPEEFYHLLEAAEGHAKEGQGIKCDIPRYIVSQLGLTRDPLEEMAQLSSCDSPDTPETDDSIEGHGASLPSKKTPSEEDFETIKLISNGAYGAVFLVRHKSTRQRFAMKKINKQNLILRNQIQQAFVERDILTFAENPFVVSMFCSFDTKRHLCMVMEYVEGGDCATLLKNIGALPVDMVRLYFAETVLALEYLHNYGIVHRDLKPDNLLITSMGHIKLTDFGLSKMGLMSLTTNLYEGHIEKDAREFLDKQVCGTPEYIAPEVILRQGYGKPVDWWAMGIILYEFLVGCVPFFGDTPEELFGQVISDEIVWPEGDEALPPDAQDLTSKLLHQNPLERLGTGSAYEVKQHPFFTGLDWTGLLRQKAEFIPQLESEDDTSYFDTRSERYHHMDSEDEEEVSEDGCLEIRQFSSCSPRFNKVYSSMERLSLLEERRTPPPTKRSLSEEKEDHSDGLAGLKGRDRSWVIGSPEILRKRLSVSESSHTESDSSPPMTVRRRCSGLLDAPRFPEGPEEASSTLRRQPQEGIWVLTPPSGEGVSGPVTEHSGEQRPKLDEEAVGRSSGSSPAMETRGRGTSQLAEGATAKAISDLAVRRARHRLLSGDSTEKRTARPVNKVIKSASATALSLLIPSEHHTCSPLASPMSPHSQSSNPSSRDSSPSRDFLPALGSMRPPIIIHRAGKKYGFTLRAIRVYMGDSDVYTVHHMVWHVEDGGPASEAGLRQGDLITHVNGEPVHGLVHTEVVELILKSGNKVAISTTPLENTSIKVGPARKGSYKAKMARRSKRSRGKDGQESRKRSSLFRKITKQASLLHTSRSLSSLNRSLSSGESGPGSPTHSHSLSPRSPTQGYRVTPDAVHSVGGNSSQSSSPSSSMPSSPAGSGHTRPSSLHGLAPKLQRQYRSPRRKSAGSIPLSPLAHTPSPPPPTASPQRSPSPLSGHVAQAFPTKLHLSPPLGRQLSRPKSAEPPRSPLLKRVQSAEKLAAALAASEKKLATSRKHSLDLPHSELKKELPPREVSPLEVVGARSVLSGKGALPGKGVLQPAPSRALGTLRQDRAERRESLQKQEAIREVDSSEDDTEEGPENSQGAQELSLAPHPEVSQSVAPKGAGESGEEDPFPSRDPRSLGPMVPSLLTGITLGPPRMESPSGPHRRLGSPQAIEEAASSSSAGPNLGQSGATDPIPPEGCWKAQHLHTQALTALSPSTSGLTPTSSCSPPSSTSGKLSMWSWKSLIEGPDRASPSRKATMAGGLANLQDLENTTPAQPKNLSPREQGKTQPPSAPRLAHPSYEDPSQGWLWESECAQAVKEDPALSITQVPDASGDRRQDVPCRGCPLTQKSEPSLRRGQEPGGHQKHRDLALVPDELLKQT

SEQ ID NO: 54373 - protein, 268 aa, Zea mays
  Clone ID: UC-ZMROB73066G09_FLI.pep
GKKEEHVLSTDTKNDEASSPSDEEPEQSESSEQTVYERWMIPKDHYHLRKSKLEKNILKRKKRLGKDNMSSQDMISPVFGKRLVPANTHFTSLRKLRKHKFTSDKINDEICKHILNYNERELLSVGQTTMTGGQLEKYVNEGDNGDKILRAFITCFTCDEKFNQGNITTVIPPHEVSEEGELSKVDAAQLVEEIKAVLKGTNVARVRKDTESTKDPKVKVFRNMRRTFIFFPFYKNEELFVFHVDTKRLPIIDALFCKMSSLSFEDRS

SEQ ID NO: 54374 - protein, 644 aa, Zea mays
  Clone ID: UC-ZMROB73075B04_FLI.pep
SKDIDMEKISSQISSVTLGGNDKIQSMAGNQQPDVMPCTSIDVPMDQNFGRDRSHLNLNELLLPSENKDSSLSCQYSSDKRLAWSLKMQNCSVTPLNDTIDSAMLTDKPYSILLEGSEKPSYPPFVEFPSTWDTSLWNDTKNNAASTIDTITSSQMQTGFSSIDNTYALLNGGQDGLGTVYTHDNVSVYTRGRGNVSGHPGMGSHQHRAMGSVRTDSIGSFDKTISVNKDESRIISDTLSEFNPWDDSYSTANNFVRMLRESENNDVQCTAPSWKSGTGSKQSRFSFARQDNQGNLLDSSLRNCGIGTEQNFSLLPQNSRRNIYQNGLAFQSLENEFSNSNFPGLLDMATTGTSMSKISAPPGFSAPTRVPPPGFSTAFPSQDSLNPTPGFPSGILSHDGSIPLSRFPSFSSGVSAQEVSKLPTRLPSPFSSRFSSQDGPDPPSRFPFSSGFTSQDGSNQLYGSTNPENLLGGTVLGVDGNHYQSQFGRHSSDMEFDDPAILAVGKGLMPGIGDSGLEMKNTRASQLQPASSDPRFQLHVQPNVQSHQNMRFTDPVQDGLNHMNDNYLASRFLAQNHGPLSPYVQIPQQPRNSQVTNGHWDGWSESRQGNNIPMSDMSRILYPSEVNKLHMLGSNDIHNRAFGM

SEQ ID NO: 54375 - protein, 560 aa, Homo sapiens
  Clone ID: LIB4656-027-G7_FLI.pep
PSPPSPRAGVPYRAASCMLRRQWPRPGSLGRNSGRRMEDMGRGSGGNPDPKDLGGLTAPPHPPPNPSAPKAGSAPLSGDGGFLHYRGLCAPRRMEEGSPTVLESPQHGLPRQHPGMVPWGWGSGSGLGPTVLEEGALQEGGQLHPVVLVEEAIVHELRGEVLGAVRWEQVVGQLPVQPVFQHQKQSEMPARLVLASLQVALHLDDLSGLRVKGLWRRGLGLLDLLRGWGQHTGQPQGSSGCKVHQWVDSIPDILQEFVQLHEGDFRVPPLQRGPAGPGKLRQDRVQVHGLGLLLHHILRHEVLVLDEAVGCQELQRVHLEEHAVEEEAVGRGPAGRVPGQAAKDELPHVGVTQRVPGASNGLLCDPGVPIGLDFQYSHLQRTHPKGEDVHSGPIGHLSILWGEEVQVPKFLSLSADGASEIIWKCIGEDSVPHGADLDEAVVLNEDGVAGQVPVDDWGAAGVQEAERRQDLRAPALPGLAADARLRRSGGRRRGGWACGARPASSPSPCPRPPGTPSPSQSPRLPQPRPVPVAAPARSPYPGVHGLVVLLGLFEELLEAA

SEQ ID NO: 54376 - protein, 570 aa, Zea mays
  Clone ID: UC-ZMROB73078A02_FLI.pep
NAAFLAFFLFAYVALLLHPKYSGLLDRGATSLVRCTFRDSCPPPSPSNQQLSRKLGGVAANKVAEEERIVNAGRAAAMFDELRGRLRMGLVNIGRDELLALGVEGDAVRVDFERVSDAFRWSDLFPEWIDEEEDDEGPSCPELPMPDWARYGGDVDVVVASLPCNRSAPGWNRDVFRLQVHLVAAQVAARKGRRDGAGAVRVVLRSQCEPMMDLFRCDEEVGREGDWYMYKVDVPRLEEKLRLPVGSCNLAMPLWGSGGRGIHEVLNATSWSGGRRPRREAYATVLHSSDTYLCGAIVLAQSIRRAGSTRDLVLLHDHTVSRPALRALSAAGWTPRRIKRIRNPRAARGTYNEYNYSKFRLWQLADYDRVVFVDADILVLRDLDALFAFPQLAAVGNDGSLFNSGVMVIEPSACTFDALMRGRRTVRSYNGGDQGFLNEVFVWWHRLPRRVNYLKNFWANTTGERALKERLFRADPPEVWSVHYLGMKPWTCYRDYDCNWNVADQRVYASDEAHARWWQVYDQMGDHMRGPCRLSERRKVEIAWDRHVAEELGYTDQHWKINITDPRKWD

SEQ ID NO: 54377 - protein, 210 aa, Zea mays
  Clone ID: UC-ZMROB73079G05_FLI.pep
PHYEMFKVVQNDIPPESMDAMRPVQQHLPTRTSTPPSKMNNLPKDAQNMEVSTPVPPINPEGNDEDETPKNTVSRNGGFLQNAVGQDLVHLGVARTASGCPSAVASGVSTRHQHNRMDLDPASSSVDNFKTPELTKENGLEEDGKGESSMYDERQPKRRKRTLMNNEQIDELEKALVDEPEMHKNPVLLQSWSEKLSLQVIFFHFGAFNS

SEQ ID NO: 54378 - protein, 611 aa, Zea mays
  Clone ID: UC-ZMFLMO17039G03_FLI.pep
PLNTAPARRAPPSAVRPPSATPARRAAGCCFCAAASSASSPSTWDWTRWSRHFDEVDQAESYASLLQFQLEEAVENEDFAEAAKLKRDIIEATGNDAVAHVMAELKNAIEEQRYQDASRLTRLAGTSLVGWWVGYAKDTDDSIGRIVRISPGVGRYVAKSYNPRQLVTASSGTPLFEIFLVKEDDETYTMKVVHMRPTKGTSGAPSISSTITESPAKVENENSSESSAISDSVTEEANTDTTVRGNEDAEEKAQDVGSSKDSSVEGLKSVLNFFKSRIPEFKVQVINVDVAEETELAANSSEELVQDDVKSTPESSLEEPATEELEQEEDVPEENTDEESKSTEVKLFISGVVHNKEDAGAKSYVRVPAEINNMEKDSFELYIPGEGSDRDLAETKAAKQKVADMAAKLASELMPSDVAKALWGTAKSSSKINKEVQELLRLTLSKARVKLTENTIFKRIIMDTNSTDPFNGLYVGAFSPYGPEIVQLRRKFGHWNSTDDVEFFEYVEAVKLTGDLSVPAGQITFRAKIGKGKRLENRGAYPEEFGVIASYKGQGRIAQPGFKNPRWVDGELLVLNGKSTIPHLGGAELGFLYSVPEQSFLVLFDRLNLPE

SEQ ID NO: 54379 - protein, 560 aa, Homo sapiens; identical to SEQ ID NO: 54375
  Clone ID: LIB4656-003-G12_FLI.pep

SEQ ID NO: 54380 - protein, 476 aa, Zea mays
  Clone ID: UC-ZMFLB73298E04_FLI.pep
NRRGALSLMITAEEKSPEREEEEEEANPRAEAFLEIICRVPAGEVEAALSACGIGPTAEVEELVLKSRECYKRPKSAVRFFRWAGQSVSHTAYAWNLLVDILGKAAMFEPMWDAIRSMKQEGGGGLVSVATFASVFASYCAAGNIKDAIAALDVMDRYGLKHDAVALNSLLSAICRVEGRAQDAQDVFERTKATIPPDGDTFAILLEAWEKEGNAVRAKSVFGEMVVRIGWDAANVSAYDSFLSTLVRGGLLDEAFKFLQVMRSKGCLPGINFFSTAVDLVVRKGDYLNAVAIWHMMVSEAGLVPNFSMYSAMIGLHCNAGSIDDALGLLDEMPLNGVFANSVTYNTILEGFIKHRKAREAESFLTEMSKNEQLPTASNCAAAISLFFKEFNPSAAIDVWRCIVEHNITPAEDSAKELIAGLLEFGRFTEVTKRADEMIDMRVELSRSTMENMKRGFAKAGRHQSYDNIARRLKRY

SEQ ID NO: 54381 - protein, 613 aa, Zea mays
  Clone ID: UC-ZMFLB73303A03_FLI.pep
CSGMALKATAQGAAEAAVAAIGRGYDVVSDVRLKYCKGKLADPDARLIDVSRDGVQDVLLPGGIKVAAVPKSVTCDKGERTRFRSDVLSFQQMSELFNRELSLTGKIPSGMFNSMFDFSGCWQKDAANTKSLAFDGWYISLYTLALSKSRILLRDHVTQAVPSTWDPAALARFIDKFGTHIVVGVKMGGKDVIYLKQQHSSSLQPAAVQKRLKDMSDMRFLDGNGQYDMNNKHVHGKDKHDARDQRLRFVESSPSSSYCSKEDLVMVVKRRGGKEWDKDMPHSEWINTVQSEPDVISMSFLPITSLLSGVPGCGFLNHAINLYLRYKPPIEELHQFLEFQLPRQWAPVYSDHPLGPQRRKQSSASLPLSFMGPRLYVCTNMVDVGERPVTGIRLYLEGKKSNMLAIHLQHLCSLPQILQLQDDPYNHRYPEPEPEPYDRKYVEPFGSWKRFSHVYTAPVESDDDDSIVTGAQLHVSSHGLTKVLFLRLQFARVSNAALVKNPEWEGSPNLGQKSGLISTLISTHFSMAAQKPAPRPADVNINSAVYPGGPPTPVQAPKLLKYVDTAEMVRGPQDTPGYWVVSGAKLQLERGKISLRVKYSLLTAMVPDEEYEE

SEQ ID NO: 54382 - protein, 715 aa, Homo sapiens
  Clone ID: LIB3063-134-E5_FLI.pep
GLKARAGNLGCEYFLIFPEIKQKIELLMSVNSEKSSSSERPEPQQKAPLVPPPSPPPPPPPPPLPDPTPPEPEEEILGSDDEEQEDPADYCKGGYHPVKIGDLFNGRYHVIRKLGWGHFSTVWLCWDMQGKRFVAMKVVKSAQHYTETALDEIKLLKCVRESDPSDPNKDMVVQLIDDFKISGMNGIHVCMVFEVLGHHLLKWIIKSNYQGLPVRCVKSIIRQVLQGLDYLHSKCKIIHTDIKPENIFMCVDDAYVRRMAAEATEWQKAGAPPPSGSAVSTAPQQKPIGKISKNKKKKLKKKQKRQAELLEKRLQEIEELEREAERKIIEENITSAAPSNDQDGEYCPEVKLKTTGLEEAAEAETAKDNGEAEDQEEKEDAEKENIEKDEDDVDQELANIDPTWIESPKTNGHIENGPFSLEQQLDDEDDDEEDCPNPEEYNLDEPNAESDYTYSSSYEQFNGELPNGRHKIPESQFPEFSTSLFSGSLEPVACGSVLSEGSPLTEQEESSPSHDRSRTVSASSTGDLPKAKTRAADLLVNPLDPRNADKIRVKIADLGNACWVHKHFTEDIQTRQYRSIEVLIGAGYSTPADIWSTACMAFELATGDYLFEPHSGEDYSRDEDHIAHIIELLGSIPRHFALSGKYSREFFNRRGELRHITKLKPWSLFDVLVEKYGWPHEDAAQFTDFLIPMLEMVPEKRASAGECLRHPWLNS

SEQ ID NO: 54383 - protein, 309 aa, Zea mays
  Clone ID: 700426833_FLI.pep
TRRSSSPRIVCSLHTRNLGHSALVFNLGTACMKMGVTQVTRPPTLLATKQADSTATGAPSSLLCSALLCSRDGVSPPPRLPRRVSGRSRHVPVVPRRVAAGHLGQPAQLLPPAAPRRGPLAVILATNASAAGGLEPRRQGRRRATLHQLLERVHLVLQLQVLGLHALQLQLQRVDVLLRRRPPFLERLRRAVQQLPSRRRRHAVRRLVGQQRGGGGVGGRAAGQRVADLHLLREEHLDHHPQRQPLVLRRVHARVQRQLLAVHHPAQTLPLVLRQRRVRLNQPEHEQTTIIGSSPRTKEDRGIKSTAVT

SEQ ID NO: 54384 - protein, 913 aa, Zea mays
  Clone ID: UC-ZMFLMO17323B11_FLI.pep
NFYRPGMNRCEISEEETTNALNALYVPAPANGIPAVGHPHVASTGLVTSSTPNMNGHIEQNRKRKNIPSDGNFVAEGSHLTQVSGHPMSNQHAPSKTKTYTDGIQYSAERHSVSKSVDPIIEKKRSKSKHHSSYSDGGDLVERPKKHSKVKNKRDLDHDEYKASKKIRKEERHHFDVDRILGSDLASGDVPDEAKALPAKSATSKGSGERTDLSSSKQKSASRHNRLETSKKARQDDLVGPEDESKGYFHQSDVQRSDLSSKKRIVKEWEESQHNSVAHVSKGAVKETYRDQNLKEAKLKSLNSEELFSMTSTKPPKVQHADQVLSYDGGRMNSELVEDNTLFSGKRGLPEQEKSLSDQALDLGEPASDVAYIQTSAVTSSSSKASVSQKKKQTTQAMKTSPIEPLSSSPRRNSNIDKVSVPHSRISGKDGSLNANSATVPIMAKQLNTEVRVASNDQRSSEPVSVGSPRRKSDRDNGLVQLTQGHASDGFHLERGFNEDLQPESGRKDSNVKSSHIPKASHHLHSGEKNNYNTDGSPMQPGKHPVDPKTSVLDKCDSSMHESNKSTNSLQDRNGSTHCPPDGNPLLGLPSGKEKSYINSNKQDSQKPKPQMVCSPLKENKLDSHSTPLKPNGSKLTPQSRQYNAQNGGRHGTAKHAIPSPADTSSPARKDNTSTAYALKEARDLKHKANRLKGEGKELESTRLYFESALKFLHVASLLEPPSFDGLKQGDAAQSMYSDTAKLCNFVGHAYEKCKKMAAAALAYKCVEVAYLKAAYYKHPTASKDRQVLQAVVQTAPGESPSSSASDIDNLNNNGLSKASSSKDANSPQVAGNHLLLAARNQPHLMRLLAYTNDVNSAFEATRKSHMAIASAAGNHENGVDGLPSVKTVLDFNFRSVNDLLRLVRISMESISC

SEQ ID NO: 54385 - protein, 735 aa, Glycine max
  Clone ID: LIB3242-694-G9_FLI.pep
MLVAVGASWDLNWFLQLLLSVIVVAVGVHYFVKATASKYFLVDANFEGDHHALAAADPMPGALAAAVDPLCAVCATPAPKKCSRCKAVRYCSQACQQSHWMSGHKTVCKNFHGTNARSSAQNGVINRGFKTSAAGGKGSSSIALIPDCGDGAISRPIKQAKDVLFPYDEFVKFFNWDKPGFPPCGLLNCGNSCFANVVLQCLSFTKPLVAYLLEKGHRRECSCNDWCFLCEFENHVERTRLSSQAFSPMNILSRLPNIGGTLGYGKQEDAHEFMRFSIDTMQSVCLDEFGGEKAVPPNLQETTLIQHIFGGRLQSEVICTKCDKISNQYENMMDLTVEIHGDAASLEECLDQFTAKERLDGENMYKCEGCKDYVKAWKRLTVKCAPNILTIALKRFQSGRFGKLNKRIAFPETLNLSPYMSEAGDGSDIYKLYGVVVHIDMLNASFFGHYICYIKDFQGNWYRIDDWKVMTVEVEEVLSQGAYMLLYSRCSARTSSFQIQTSESSGIAEVQTEVEVEMEVEPGQTEQDECLSNMKALTCSRGSEVLPSDASPELKVSSSYDCESSAGLNSQAKREQFEDVNMMDVDSTGIANELSCGAVESSYVPISQTDSDLGDVDMGRSLEETSGCKQEQDDTDMVRSGSCSGLPNGSSFFDKHPSVSRDHQNMEEHSEHIDVVNCKLITAKDNAYYGNGYVSANDSSMPVEDAGTQFSGISSFPTENDKGNGIKKVEISADI

SEQ ID NO: 54386 - protein, 418 aa, Zea mays
  Clone ID: UC-ZMFLMO17368D07_FLI.pep
FCRMAQFHLLDPFYDESHRGRLLSEGQDLATLRSRTHNGFQDMVFDDRYTNYLRRAGLDVISYQLRRGLPTIDSAAITALVDRWRPETHSFHLPFGEMTVTLEDTQKILGLDVGGRAVTGQCDPDGWRARVEAFLGRELPAEGVERTAGVGITWLRQSFGVCPADADEATVQFYCRAWILHMFGCVLFPDATGDCASWMYIPCLTDWDTAGHYSWGSAVLSFLYRQLCEACRRTSSSSSIGGCVYLLQIWMWFRIPVGRPRVFQPRPWPWMIYGNARLRPTYAYIWDQVAAPFARAKRAYMEYVNEFDTLSASSVTWQPYNAPEYAGMIFSVVCSSEDEIYMMQCPLVCFWCVEWHLPHRVQRQFGRNQLWPVEDVPTSKELHKFDRRKQKKITDFRQHHMSMTCPLDWEPKWRRHPY

SEQ ID NO: 54387 - protein, 127 aa, Zea mays
  Clone ID: UC-ZMFLMO17127A11_FLI.pep
ENPLLQMTSMSSDFLSREIATQSLHTSSLHVSCHCLSGKDISRHCLSVWASFLKGATFLRRFRIFHSSSSLLRRDPSCVSRALRTVLEHDLAMAAARWSRRVAWCRRAVIERCRASWAGGGMSWRRR

SEQ ID NO: 54388 - protein, 328 aa, Zea mays
  Clone ID: UC-ZMFLMO17150H04_FLI.pep
KKMATSPEMLCCFCPAPFKQFLEIVTNMKFDEEPNYAKLISIFDGLIEAPASRPVRIDGALKVGQKRGRLHANLEDEQPKKKVRLGSPAAQWISVYNARRPMKQRYHYNVADSRLSQHIEKGNDDGLYVSCVASSANLWALIMDAGTGFCSQVYELSPVFLHKDWIMEQWEKSYYITAIAGSTNGSSLVVMSKGTPYTQQSYKVSESFPYKWINKKWKEGFHVTSMATAGNRWGVVMSRNSGFSTQVVELDFLYPSEGIHRRWESGYRITSTAATNDQAAFILSMPKRKPMDETQETLRTSAFPSSHVKEKWAKNLYIASICYGRTVC

SEQ ID NO: 54389 - protein, 329 aa, Zea mays
  Clone ID: UC-ZMFLMO17175C10_FLI.pep
SSLSPRSAASLPRLPVGWRMKVTVVSRSGREVVKGGIDLKDSAKVADLQEAIHARTKKYYPSRQRLTLPLQPGKGGKPVVLSPKASLLEYCEKGSGSLTVVFKDLGPQVYYSTLFFFEYLGPLIIYPMFYYLPVYKYFGYEGERAMHPVQTYAMYYWCFHYFKRIMETFFVHRFSHATSPLSNVFRNCAYYWTFGAYIAYYCNHPLYTPVSDLQMKIGFGFGVVCQVANFYCHILLRNLRSPSGSGGYQIPRGFLFNIVTCANYTTEIYQWVGFNIATQTVAGYVFLVVAAGIMTNWALGKHSRLKKASGFLPCVLFFDTRISPFLLHA

SEQ ID NO: 54390 - protein, 507 aa, Zea mays
  Clone ID: UC-ZMFLMO17070F09_FLI.pep
VPRLMGLAPPELGQFDGWESSGEEERERERWGWCRRSRRGSSRRRAAPKGTDDDTAVDTGCCIRLWPVGTCPPPPQRSKVDTSTSSASTHGEKSTENGSRNQPVALVVSGSTTTSNAESSSSASKVGEEIKVASQLRKFAFNDLKCATRNFRPESLLGEGGFGCVFKGWIEENGTAPVKPGTGLTVAVKTLNHDGLQGHKEWVAEVDFLGNLHHPNLVRLIGYCVEDDQRLLVYEFMPRGSLDNHLFRRSLPLPWAIRMKVALGAAKGLAFLHEEAERPVIYRDFKTSNILLDAEYNAKLSDFGLAKDGPVGDKTHVSTRVMGTYGYAAPEYVMTGHLTSKSDVYSFGVVLLEMMSGRRSMDKNRPNGEHNLVEWARPLLGERQRFYKLIDPRLEGNFSVKGAQKAAQLARVCLSRDPKARPLMSQVVEVLKPLQNLKDMASASYFFQTMQAERMAHSSSMNGRSSMNGGFKTQSPFGRHGQPPPVRSLSDGPRASPFRYSPKPNVK

SEQ ID NO: 54391 - protein, 224 aa, Zea mays
  Clone ID: UC-ZMFLMO17289F04_FLI.pep
PHLLEGDADDVDTSTIGANHDQPGENSEKSISNLVVSTEQKQDGSHSNAAKDTELDEASNETQPETGSPLRKSITSTYADADQHGLEPRFCSVQGTNEEPSGGVTLTEMHANNSRSTEVSTITESLVNREKEKQGLYDRMNEFDPIKQHRTFCPWTSPDYGEPLPGWRLTLSALLAGDKRSDGDLQVDVQTSLLDEDDDPLTSVRKLFMTPPPKRRRIQQSEKS

SEQ ID NO: 54392 - protein, 282 aa, Oryza sativa nipponbare
  Clone ID: LIB3431-014-G12_FLI.pep
HRVRLLLLHDPYRNSGHGEVSTGGEQDDEEGNAAGGVDHDGVLHAVRVPGVRGVRERGAGEHAHRVRLLRALLADRLRQRLHRGPPGRRLPGVLPAHLRRRRDVRRQAVAGLGVHHPGAPRRGRQVVQRQHVQADVADGVRGRQHGARHRDALLQRHPGLPRRRRVLAADGVLPGGDVHPAAADTAVHVQVGGAADAQPPLLPRLARLRRRLHRGRQRVAQALRPLQDQVVIPITTAFFFLLLHPDEKRFQKHMHNKCRKLAKSLVTSSVRWSVRRRRVQLV

SEQ ID NO: 54393 - protein, 341 aa, Zea mays
  Clone ID: UC-ZMFLB73276B12_FLI.pep
HGRRQQAATRRSSRLSPRSAASLPRLPVGGRMKVTVVSRSGREVVKGGIDLKDSAKVADLQEAIHARTKKYYPSRQRLTLPLQPGKGGKPVVLSPKASLLEYCEKGSGSLTVVFKDLGPQVYYSTLFFFEYLGPLIIYPMFYYLPVYKYFGHEGERAMHPVQTYAMYYWCFHYFKRIMETFFVHRFSHATSPLSNVFRNCAYYWTFGAYIAYYCNHPLYTPVSDLQMKIGFGFGVVCQVANFYCHILLRNLRSPSGSGGYQIPRGFLFNIVTCANYTTEIYQWVGFNIATQTVAGYVFLVVAAGIMTNWALGKHSRLKKLFDGKDGRPKYPRRWVILPPFL

SEQ ID NO: 54394 - protein, 595 aa, Zea mays
  Clone ID: UC-ZMFLB73280F08_FLI.pep
EEEEAVVSAPEKPMRRGRRRWGAEVDDGYSPSSTGGGGSSCCDSFGCDSPLAGFVRPDGDPDTDLETDGLATSTSSAFTERQDDEAEEALYGVKEEEWAQIQEPAKNPAFRATPECHKQRYRTDAAVLLHGRKGSKQRPASLDLGSPGFHGATFSPSFVIGGVGLMNKGLGASVIRSDVFHSPGTPNYPRHRASVLGCHKGWSSERVPHPSKGNRRYPGSSMAFPYSNGRTLPSKWEDAERWIFSPNSSDALGRTTVAHARRPKSKSGPLGPPGRLGGQYSSVSSVSLLDNGRAGPITANSPFAAGVLMPEHVCEGKSTNGTYSSRPIGNEINIGRGVKICPLNGGSHPVRTSRVRQRLDYAVESSVSLPSTQESVQDEQVEITEDSASTIASIISRKDAATQTSPELSRSSSPNTRPTFNGSLSTEQVKEKGSCLSDLDIRDVQMDDRVTLTRWSKKNVTRSSNKNSTNIIEWSEKTVESKSSSWGFAKAKCISKIDREDTEITAWENIEKAKADAAIQKLVIKLEKKRSSSLDKILNTLKSAQRKSQVMHEHERDAVTANQDGKGSRKAKKRAQLSKNGQISSLSGCFTCHAF

SEQ ID NO: 54395 - protein, 155 aa, Oryza sativa nipponbare
  Clone ID: LIB3433-058-H12_FLI.pep
RQAVAGLGVHHPGAPRRGRQVVQRQHVQADVADGVRGRQHGARHRDALLQRHPGLPRRRRVLAADGVLPGGDVHPAAADTAVHVQVGGAADAQPPLLPRLARLRRRLHRGRQRVAQALRPLQDQVVIPITTAFFFCFCILMKKDFRNICTTNAGS

SEQ ID NO: 54396 - protein, 425 aa, Zea mays
  Clone ID: UC-ZMFLMO17160E05_FLI.pep
PSESLRGKGMGVSARAHHPKHRCHQETCVPDGASLAAMYLYGDVLESVVERVPVADLAAAARVSREWLRAVRAALRRRPLRLPWLVVHLQGRGGLRCAAAYDPCSGAWLAVPAPRHATPSHVRLLRGARGDRVCALSLSGLAVAADPLGTAGCVALDAPGVWRIDPVLAAVGDRVVALGGACRLALAEGGNAAAVEVHEDGGWTACDPMPDALRDSAAATWLSTAATDQRVYLVERTTGWASWFDPANRRWGPTRRLGPDAAVTTWGVAPGRAGAEDRLLLFGAKRADKEAECTVVVQAWEVDGDTLEQSPSASSDAMPPELSERLFRRDDTDDDDDEEELDDMTLSIGVCGNAAGGYVYNAAEPANGAVLYELWEEGNAIAVARWDWVPCAPAVQAQPLGRAILGCSPVGLDELALAVAARGPR

SEQ ID NO: 54397 - protein, 186 aa, Glycine max
  Clone ID: 700889879_FLI.pep
TDSLQIWTPLLFYYQPHAEKNFNAKISDFGLAKLGPSGGQSHVTTRVMGTYGYAAPEYIATGHLYVKSDVYGFGVVLLEILTGMRALDTKRPTGQQNLVEWTKPLLSSKKKLKTIMDAKIVGQYSPKAAFQAAQLTVKCLEHDPKQRPSMKEVLEGLEAIEAIHEKSKESKTRNSYQSPRQRVVRV

SEQ ID NO: 54398 - protein, 207 aa, Oryza sativa nipponbare
  Clone ID: LIB3477-009-E8_FLI.pep
RAHVPLTFQSSAERSVHLESVDDVSNGARSGGDGDDEAARAERLERDPPRAATWHAALRDVHLDGEVDGERPEGDGAEETHHVAEEGEEHGDDCGEADERRAPRQAEEAEREGPHAELLGDERAVRPPAGGPALDEGEDWLDEHLVGADEVHDDGDVGDVEQPEGLVEAEAREEVVGRRVAERRVAHAPAQHVEHRGRRHAQPRRRD

SEQ ID NO: 54399 - protein, 510 aa, Zea mays
  Clone ID: UC-ZMFLB73096A07_FLI.pep
AERGFMEMEGRGLSDLFRNTSEEIFLKAVMENSMGVAAAPSMEMLGFKNTSRSLREDSEELFNNWLMNGEIPGFGSVNNHPRQPSRLSSEAAGLPNQQHDIAQQSFLTDNLVPQNLTIPSVEYPNNHNQQSLKNAAEKGMQASDLLLAKAWFHSTQPMTRSRSSELRRRYAAMQTNMAPITIGSIETPNQLKQDFTNTTNITPMSNTLVHTPKFVSPSSSSTSPLDNPHVAAQDTVTSVVSMLKDTLERKKLGSHANKDTSAGNSFGFYDTQQFQQNILGGTDFFPIVTTAQVQDSLMLPKVDRPMEPNNGNFVAPANQVWFSAASREPSHSGSSTAMTTHSAGFEMCDELPPAAQAMSVCESTRKNAANGTTDCKSKGKEYRERVQKDNLKDGRKKAALTRIGSISSEQAADNGDPTKKRRVERSRKMAEAKERSSTPVIPSDMQAVLKRCETLEKEVRSLKLNLSFMNRKDSEQTKQIEELQKQNEDLAEEKERLVEEIERIVSDPNT

SEQ ID NO: 54400 - protein, 709 aa, Zea mays
  Clone ID: UC-ZMFLB73119B03_FLI.pep
CSLPSTHVYSGRLTDKIPLGKIERSVQAVEAALKKLENGGSVNDAKAVCEPEVLRQLARWHSKLRVYISPFIHGTRYSSFGRHFTKVEKLVEIVDRLHWYVETGDMIVDFCCGANDFSRLMKEKLDKVQKKCHFKNYDLIQPQNRFCFEKRDWMTVQPNELPHGSQLIMGLNPPFGVKASLANKFIDKALTFKPKLIVLIVPKETKRLDQRRTPYDLIWEDSECLSGKSFYLPGSVDLNDKIVEGWNASAPPLYLWSHPGWTKKHMQVAEEHGHTCMGKIACHVEESNLSDDLSVRKQSDATNKLNSRSGKETPFNDRMSNLLDDGSARKQARSEEEKRTLGKIEHHVKKANIPDNLPVKKEPEASSKVMSHSGKDRKIGRYNRRRHDNRSSKGTPDHTESLPPEKQVEVAYEETRVIPSKKIAHNEKKSAQYNYEQTAAGMPNMRSRGGDSDMSISPPVSCNARSKPMSYSLTRPIEHLDTNAHLLAEEPSDSVLNRVPNHDSYLAIKEEYCDGFKRKNDPIFSHIDDSSRMRGSSIEEVTKPYITAPNSDPWSKGDGSFYRHPSSEDLNANADVLMPGYSARYGQIGGDSNPQASMVPLATDSRLHGGTVADNYLSARYSLGSSGARVSQPAPTVPPFGLSGASSQRGSVMDRYSYGLSGPTGTQRSVIDRYAPSLDGTNTTRSRSSLPEQYPFGQPGSSGGGWPHH

SEQ ID NO: 54401 - protein, 504 aa, Zea mays
  Clone ID: UC-ZMFLMO17026E12_FLI.pep
GKEDHVLSDEEGSSLAAHTKSNATAKLDFDLNEGIPGDDGHQSETTASPVVCSSAIHLTGLLPFTSPTTSGLPPAPITVAAPAKGPFVPPENLLRAKPEIGWKGSAATSAFRPAEPRKILEMPAATRDIPVSHAAGKQSRPTLGFDLNVADDQALEEDFPQSSAQTTCSESGNTRSRDGSSRSAGIELDLNRADEVADNGQFVPNASHRVEVPLFSTRSLPRVLSNAGANSSRDFDLNSGPDLYDVGTEPAPRSLPSKNTSSIQFLPQVPVRMNSDAMSNNISPWLVSTSPCGPVAIQSFLPSREQPYPLEAAPGAQRIIAPTADGGQFGGDPCRPPVISTSPAMVFHPPAYQYAGFSFPPSVHLQTPAFSIGSATFNNSASAGVPYFPTLSSSLVGPAGALPSQHSRQYAINLAEGSSSSVRDGNRKWESQGLDLNSGPGSIDLEGKDERMPLPVRQNLIPPLHGFVEDQGRIYQMPVVGTKRKEPDGSWDSERSTYKQLPWQ

SEQ ID NO: 54402 - protein, 363 aa, Homo sapiens
  Clone ID: LIB3082-005-D10_FLI.pep
RNRADGRAAAAPQTRVGRTAPAARGPAHRSPSGSRARPRAVRALVRLACRMAGQPGHMPHGGSSNNLCHTLGPVHPPDPQRHPNTLSFRCSLADFQIEKKIGRGQFSEVYKATCLLDRKTVALKKVQIFEMMDAKARQDCVKEIGLLKQLNHPNIIKYLDSFIEDNELNIVLELADAGDLSQMIKYFKKQKRLIPERTVWKYFVQLCSAVEHMHSRRVMHRDIKPANVFITATGVVKLGDLGLGRFFSSETTAAHSLVGTPYYMSPERIHENGYNFKSDIWSLGCLLYEMAALQSPFYGDKMNLFSLCQKIEQCDYPPLPGEHYSEKLRELVSMCICPDPHQRPDIGYVHQVAKQMHIWMSST

SEQ ID NO: 54403 - protein, 321 aa, Zea mays
  Clone ID: UC-ZMFLB73006G01_FLI.pep
PEEGRQRLPWHRRGHVLPQQVQHGDVLQGVQSLELHGPCSSQRSHQEVIPVLDTKRNDMYSFTYHSNSMLYMTNRGLAKGDPKKPETVELAIKDYPYAVDGLDMWAAIKKWVADYCAIYYADDGAVARDSELQGWWSEVRNVGHGDLADAPWWPAMDCVADLVETCATVVWLSSAYHASISFGQYDYLGFVPNGPSITTRPVPGPDAGAEVTESDFLASVTPVTEALGFMSIASGPMGLKGTEVYLGQRPDTEQWTRERRAAEALAEFRARLEEVAGNIDRRNADPALKNRTGQVEVPYTLLKPTAQPGLVLRGIPNSITV

SEQ ID NO: 54404 - protein, 733 aa, Zea mays
  Clone ID: UC-ZMFLB73265G01_FLI.pep
PKMEGVTNSVFIDPTGLHQHVYVQQQQQQQQMPPQQLPSTYGFSHIPVISSEKDRVVSPSSAHNDVANSHHQFMQQSQQQLPSGHGMPQYPVKPTSPSNPLAGEGSVSGNSRHNEDGQVYRDNMPPVAPVAVPTYMANVDRMMDSLRMSPSEVSGSTEQRKHAMSPDSGLPQNAVPDYSQGHPENSISTWPDTRANDVHPSNTNTFFDVSEPKVLLQTESAPPPSVASSYLHNVQHVNMSHMPHMVSIGGPYSSYVVATVGPGGLPQSTYGIDMIYPNATVNPVTERRDVPPEVYHKEAPHEVVAPPNTVQLPTAALANHATNVDQAAAHALPPRPKRVASRENISPKDPHPHNSLLNCKGPDLNIPAEDVSLQKQSDHKGDDISNPDLLSMDDGLATSKAQSSEPQPPLVNEGVGAITNKVEGEVHPNEVSKSRPADWISGFPASDGRLQIIKNNDLEELQELGSGTFGTVYHGKWRGTDVAIKRINDRCFAGKPSEQEKMRYDFWNEASKLADLHHPNVVAFYGVVLDGPGGSIATVTEYMVNGSLRTALLKNAKTLDRRKRLIIAMDTAFGMEYLHSKNIVHFDLKSDNLLVNLRDPQRPICKVGDLGLSKVKCQTLISGGVRGTLPWMAPELLNGSSSLVSEKVDVFSFGIVLWELLTGEEPYADLHYGVIIGGIVSNTLRPPVPDSCDPEWRSLMEQCWSTEPSERPNFTEVVNRLRSMAASQKVQQH

SEQ ID NO: 54405 - protein, 117 aa, Zea mays
  Clone ID: UC-ZMFLB73262D11_FLI.pep
INGSLFSKPFTYFVCRNPSRLIGSTTEKELDQKWWICTKRLLKASRSRSTSTQLLPSTSQSLMLWSAAVALTLLYFKVYCLKIYSVFCVFYLELLYQHFLDECIQFFSSRINSLPYC

SEQ ID NO: 54406 - protein, 151 aa, Glycine max
  Clone ID: LIB3106-067-B9_FLI.pep
SECPICLEEFYVGNEVRGLPCAHNFHVECIDEWLRLNVKCPRCRCSVFPNLDLSALSSLRAEPEQFSASVVTTARYVRGQPSSLSYRLRLQGLLCPVRAEIAGPVGDIDNALKNAQNGVVSIVTQNASSSGDQASSVECMPVTVCHSSAQS

SEQ ID NO: 54407 - protein, 209 aa, Zea mays
  Clone ID: UC-ZMFLB73261H04_FLI.pep
TYYSLATVLINYTHMDSSQQQQKQDDVDVDVMEVPEVHGDLLMELLDASLAAENAAHHHHHHHHHQQLGLAPDGDGDGDCWIDDNQENYDNMHAHQGCEDCRGLLDGILSDFDDYDGGPSRPRSPPAPYRVVFGHDDDTLLELEWAEEAAMDPFATSESAGGWYMDGLVMAMAWDEQQDGGGFPFEPCYGYEGEAGAAGQLYDASPLWE

SEQ ID NO: 54408 - protein, 666 aa, Zea mays
  Clone ID: UC-ZMFLB73305E06_FLI.pep
RRLYNELIELRGNIRVFCRCRPLSSNELARGCSSVVEIDSSQETELQFVPNEKERKPFKFDHVFGPEDDQEAVFSETVPVVGSVMDGFNVCIFAYGQTGTGKTFTMEGVPENRGVNYRALEELFRISEKRSASVAYTFSVSILEVYNEKIRDLLDESNDQSKRLDIKQNADGTQEVHGLVEAPIYNIDGVWEKLKFGAQNRSVGSTNANELSSRSHSLVRVTVRSEHLVTYQRSRSHMWLVDLAGSERIAKTGVEGDRLKESQFINKSLSALGDVISALASKNSHIPYRNSKLTHLLQSSLGGDCKTLMFVQISPSSMDSGETLSSLNFASRVRAVEHGPAARKQADPAGSLKLKQMTEKLQHEEKENAQLNQSLQLMQLKYASRENVFRTLNEKVKDAEQACRNYQQRIRELENELGNEKRASRDSARSSRPPLVPTRQRQPQGRTNSFAPPSGPSRWRLKAPAKHNKENIPVAMNKPNAGDDPNKPVGRARRVSLAPVIRQIPIQPKRRSSMAVLPSVREHLSVLNDKKAGSRLSQANMARGSLGAFGLNLVPGTPLAGHGGPVDATPDGAKFRRFDFGSSSKFTSPAPNVGMWNKMVTPQQKLGMAPAGAKLCFSIQKRVTPPHVRAKPGLGIFDPALRENMVVGRAGNALRVLNPKRRQSVI

SEQ ID NO: 54409 - protein, 334 aa, Glycine max
  Clone ID: LIB3106-076-F4_FLI.pep
TTANTNTDPSLPSSLPHSLLQFHQHNHQFHQPSHNNSIIMIAVARKDMDRIKGPWSPEEDEALQKLVERHGPRNWSLISRSIPGRSGKSCRLRWCNQLSPQVEHRAFTPEEDETIIRAHARFGNKWATIARLLSGRTDNAIKNHWNSTLKRKCASFMMAGDEAVAVSPRPLKRSFSAGAAVPPPGSPSGSDFSESSAPGVVSVSPSHVFRPVPVRPIVETASSQDDADDAGPATSLSLSLPGVESAEISNRATTVPVMPVNTVAAPAPVPAEVGLGALNLSGEFMAVMHEMIRKEVRSYMEQQKNGMMCFQGMEMMEGFRNVSVKRIGISRVDS

SEQ ID NO: 54410 - protein, 158 aa, Glycine max
  Clone ID: LIB3106-079-D1_FLI.pep
LRTLEDLPKGAFVCEFVGEILSMKELHERNLKCTENGKYTCPVLLDANWDSGYVKDEEALCLDAASFGNTARFINHRCSDANLIEIPVEVEDPGHYYYHFAFFTSRKISAQEELTWDYGIDFDDHDHPVKLFQCRCGSKFCRNMKRYSRSLRYASIAG

SEQ ID NO: 54411 - protein, 676 aa, Zea mays
  Clone ID: UC-ZMFLMO17016D10_FLI.pep
LVPCTRPVPLPPLDPPAKTSHCRRRASQGGEERPAASRRAEEEEERESGASRPGRMFGRDPWGGPLEISNADSATDDDRSRDLDRAALMRQLDETQQSWLLAGPGDQAGKKKKRYVDLGCLVVDRKVFMWTVGTVLGLGVFIAFVIMIVKLVPHKRPPPPPPDQYTQALHKALMFFNAQRSGPLPKHNGVSWRGNSCMKDGLSDSTVRRSLVGGFYDAGDAIKFNYPMAWSMTMLSWSVIEYRAKYEAIGELDHIRELIKWGTDYILKTFNSSADTIDRIVAQVGVGDTSKGSSQPNDHYCWMRPEDIDYKRPVTECHSCSDLASEMAAALAAASIVFKDSKTYSDKLVKGAKALYKFGRLQRGRYSPNGSDQAIFYNSTSYWDEFVWGGAWMYFATGNNSYLTVATAPGMAKHAGAYWFGSPNYGVFTWDDKLPGAQVLLSRLRLFLSPGYPYEEILRTFHNQTDNVMCSYLPVFNSFNFTKGGLIQLNHGRPQPLQYAVNAAFLASLYSDYLEAADTPGWYCGPNFYTIEVLRKFARSQLDYILGKNPLKMSYVVGFGNKYPKRPHHRGASIPHNGVKYGCKGGYKWRDTKKANPNILVGAMVAGPDRRDGYKDVRTNYNYTEPTLAANAGLVAALISISDIKTGRFGIDKNTIFSAIPPMFPTPPPPPSAWKP

SEQ ID NO: 54412 - protein, 122 aa, Glycine max
  Clone ID: LIB3106-090-F5_FLI.pep
FTFLFYFSFVVELLWQVGSNKAGSNSFSAHQKDESKCEVKNNDAATLSLLGRITYFQQENKSSEYKQETFDNCSYQSQPGEEHQVAVLNLDLTLAAPKAKTLQEQNKSSPSAPFLLGPISVT

SEQ ID NO: 54413 - protein, 461 aa, Zea mays
  Clone ID: UC-ZMFLB73199A09_FLI.pep
DKKATSSGEKNVLIFDLGGGTFDVSLLTIEEGIFEVKATAGDTHLGGEDFDNRMVNHFVQEFKRKHKKDISGNPRALRRLRTACERAKRTLSSTAQTTIEIDSLYEGIDFYTTITRARFEELNMDLFRKCMEPVEKCLRDAKMDKSTVHDVVLVGGSTRIPKVQQLLQDFFNGKELCKSINPDEAVAYGAAVQAAILSGEGNEKVQDLLLLDVTPLSLGLETAGGVMTVLIPRNTTIPTKKEQVFSTYSDNQPGVLIQVYEGERARTKDNNLLGKFELSGIPPAPRGVPQITVCFDIDANGILNVSAEDKTTGQKNKITITNDKGRLSKEEIEKMVKEAEKYKAEDEEHKKKVDAKNSLENYAYNMRNTIKDDKIASKLGADDKKRIENAVDGAISWLDSNQLAEVDEFEDKMKELEGICNPIIAKMYQGAGADMGAAAGMDEDAPAAGGSAAGPKIEEVD

SEQ ID NO: 54414 - protein, 250 aa, Glycine max
  Clone ID: LIB3106-098-A2_FLI.pep
PLVLSNSDNMEIQKMNNGHSVVTATVTATATPTPTTTFVAAATAITTTPSSLSSLSSSRWPKTEVHALIRLRTSLETKYQENGPKAPLWEDISAGMLRLGYNRSAKRCKEKWENINKYFKKVKESNKQRREDSKTCPYFNELEALYKEKSKTQNPFGASFHNMKPHEMMEPLMVQPEQQWRPPSQYEQGAAKENNNNERKEREEEEEDEEEEEEEEEDENEEGDLESVEDEGGNRYEIATNKLSSVDTVE

SEQ ID NO: 54415 - protein, 249 aa, Zea mays
  Clone ID: UC-ZMFLMO17089F04_FLI.pep
SHPKLSHECLTFISVKGIYYQAEVQGQKITWLTPHALQQVLTDDVDFNVMLSFLEFYETLLGFVNFKIYHSINVNYPPILDPRLEALAVELYALCRYMSAGSRRMIGNSQTDEVMEDKDEKSKAEEVIEEEKVVKNKASSKADESEFRLAQLQHQLPTNEPGALMNLVEESTADDADDDDTKDCKGLFKNLKFYLSREVPRESLLFIIPAFGGTVSWEGEGAPFKEIDEDITHQVDSICNNLLHQSLTI

SEQ ID NO: 54416 - protein, 194 aa, Glycine max
  Clone ID: LIB3106-100-H11_FLI.pep
LEMMASFAGTTQKCKACEKTVYLVDQLTADNKIYHKSCFRCYHCKGTLKLSNYCSFEGVLYCKPHFDQLFKKTGSLDKSFEGIPRTARLERSTDQVQTNSKVSNLFAGTQEKCVACKKTVYPIEKVAVDGTSYHKACFRCTHGGCVISPSNYVAHEHRLYCRHHHTQLFKQKGNFSQLDKQENDEGVTENTITE

SEQ ID NO: 54417 - protein, 550 aa, Zea mays
  Clone ID: UC-ZMFLMO17015C03_FLI.pep
TSMTQAKPAPSGKRNWSSGGTAAGRKNKERGDDKAKGIRVAGWNKGDKKKEDKGRQVSAGSKRRWSEGVPRVGVKRAVSGFDRRKRKIDDDSWDDDGGKDVSSSKSKFTRKCSSTISRRKVSPGKGDRLKSQTLYEDDYRAGKRSISKVSDVSRGVKNRLVNSVASKGKKLGASEGVIRTKKGGAKEVDLDEEAVNSKKSDDLDLIIEEEKPRPRLTRVLDQTGKKIKPAKKVVVPDNEERAPPKKRKRMKLDPYDTSNKRIEDSSIQDVSSAEKVLVNCTPEEETEMSINAKFRAIQPSSSILSYVEDNLLGRRRLIEIKNAGYNVKISAPLDNVPFSTSTERERIEDIAFRNKLEFFAAAKISSSFPTPTLPEIAFAGVSNVGKSSLLNSLTRQWGVVRTSDKPGLTQTINFFQLASKLCLVDLPGYGFAYAKDEVKESWEELVKEYVSTRVGLERVCLLVHTKRGMKPLDYELVDLMERHKTPYQIVLTKTDLVFPIDVARRAMEIQESLKRNKSVVNPVMMVSSKTGAGIRNLRGVLGKLARFIKP

SEQ ID NO: 54418 - protein, 360 aa, Zea mays
  Clone ID: UC-ZMFLB73283G04_FLI.pep
SSCLLLSVLLALAAAAARQAQSHGKASAVFIDASSHRYLRDQQADHQDASMSLNEVSAVVSVLLGFAPSTSLPAISSSKLNKVLLPNPFDRPRAVFLVQIDGFNVPSFVSEGSNIFKTRIEGANIADTGLTDKDDLIVIHSDESLDLSRSDYLDNELSSLANWLEGSYQKSTGKLVIPLENGNSLTLQLDKEADKEFMSSLASLLKTIERAIQVHEDFSGVVNPAELLECHFTGLKALENEYGSGEIVKQGTEIVQRAVTKSFQSLHEAYKGKIVGLVISTNEAPSSLGSIIDAPSSLHISRRLEEASKTTDIASVVLVRKSLAWITGIILLVSTLIGVCLLMNMPLTRDTLLYSNVKID

SEQ ID NO: 54419 - protein, 364 aa, Glycine max
  Clone ID: LIB3107-079-C9_FLI.pep
SSLHWVQEACDDACSICLEDFCKSDPATVTNCKHEFHLQCILEWCQRSSQCPMCWQPISLRDTTSQELLEAVELERSLRDTPSRNAAIFHHPALGDFELQHLPMAMNEADIEERIIQHLTAAAAMRRSHHLGQREGHRTRSSAHGRPHFLVYSTQPSAPPFAAGGESEPAAIPVGIPSTPLTFDGNEQSSPQQIPYFQTRGSSLTSGSTVATTNLQGVHSNDRRFASHSFPASQDRAQPSEQSFSDSLRSRFNAVSTRYKESISKGTRGWKERLFSPNSSMSELGSEVKRELNAKIASVSRLMERLETTRENNRAAGTSLSNPNHLVNCSIAETSNQNNVEARGENSLRDNSTPTTFSASSDSK

SEQ ID NO: 54420 - protein, 283 aa, Glycine max
  Clone ID: LIB3109-009-G5_FLI.pep
ISRSEVEPMDCTAARKTQKADREKLRRDRFNVQFVELGNILDPDRPKNDKATILGDTIQLLKDLTSEVSKLKDEYATLNEESCELAQEKNELREEKASLKSDILKLNNQYQQQLRTVSPWTATDRSIMLAPPSYPYPVPMPIPPAPIAMQPYPFYANQHSAIIPNPCSTFVPYLVPNTLTEQRSTQYMSPPVHPGFRSHVSGKQESRNKSSKESKAEKHEDSNDVTLTPGSSADQDLSSGQRKSSKLSRKESSCTEVSSLDRCSLSCSVQDSSSSSVVHKHKG

SEQ ID NO: 54421 - protein, 819 aa, Zea mays
  Clone ID: UC-ZMFLB73274A02_FLI.pep
NLLSGGLRLSPPSMFHGSLLSDCFIHPLTPPLLYCACMLSSFITPAALAVSPPHRPDGLSLVSPDAPPRPAPPRLASLLPLPVPAPAPPAPPAARLRTMRRVGGDLQGDGTTPRSAAAGQAMMELQANGSAAVGGAMVVGLSPLSEALWRDSKALPPGAGPAALIGDVSARLTWKDLCVTVALGPGKTQTVLDELTGYAEPGSLTALMGPSGSGKSTLLDALAGRLAANAFLSGNVLLNGRKAKLSFGAAAYVTQDDNLIGTLTVRETIGYSALLRLPDKMPREDKRALVEGTIVEMGLQDCADTVIGNWHLRGVSGGEKRRVSIALELLMRPRLLFLDEPTSGLDSSSAFFVTQTLRGLARDGRTVIASIHQPSSEVFELFDMLFLLSGGKTVYFGQASQACEFFAQAGFPCPALRNPSDHFLRCVNSDFDKVKATLKGSMKARVERSDDPLDRMTTSEAIRKLVASYSRSQYYYAAREKVNDISRMKGTVLDSGGSQASFLMQACTLTKRSFINMSRDFGYYWLRLLIYLLVTVCIGTIYLDVGTKYTSILARAACSAFVFGFVTFMSIGGFPSFVEEMKVFQRERLNGHYGVAAFVISNTISATPFLILICFLSGTICYFMVRLHPGFEHYIFFVLNLYASVTVVESLMMAIASVIPNFLMGIIIGAGIQGIFMLVSGYFRLPYDIPKPFWRYPMQYISFHYWALQGQCQNDMKGLVFDNQYPDQPKIPGDFILKYIFQINVDRSKWIDLSVIFSMIFIYRILFFLMIKINEDALPWIRGHIARKRMQKKGPTPTMGKTPSLRGYVVDPELGSNEG

SEQ ID NO: 54422 - protein, 345 aa, Glycine max
  Clone ID: LIB3109-015-F4_FLI.pep
GDSCKFDHPVWVPEGGIPDWKEAPNVVTSETPPERPGEPDCPYFLKTQRCKFGSKCKFNHPKVSSENADVSSGLPERPSEPPCAFYMKTGKCRYGTACKFHHPKDIQIQLSDDLSQNVAQTQTNSMMGGATGDTQPIKSLISPSLQNSKGLPVRLGEVDCPFYMKTGSCKYGVSCRYNHPDRNAINPPIAGLGASILPSSAANLNIGLLNPAVSAYQAFEPRLSNPMVGIAETIYPQRPGQIECDFYMKTGECKFGERCKYHHPIDRSALSLSKQATVKLTPAGLPRREGDVICPYYLKTGTCKFGATCKFDHPPPGEVMEMAKSQGTSANGEEAEGDTSALEQL

SEQ ID NO: 54423 - protein, 369 aa, Zea mays
  Clone ID: UC-ZMFLMO17181F07_FLI.pep
NKKRCLCSGPPTPPNKNVPPRPTRRSLADGMPRDSRPAGMRLFGVTIAPAPEADPPVRDPSPNPPVAAREDVMRKCKSMGNLAALGAVADGGGGGADGGGAGDGYLSDGGLMQSSGKRRRAQERKKAVPWTEEEHRTFLAGLEKLGKGDWRGIAKNFVTTRTPTQVASHAQKYFLRQTNPNKKKRRSSLFDMMPRELSPAPNCPILPPSMAKVHDVVAMTKQLQNSNLEGTSSSNAASQVGRDLPPVPSFKATNMDPSFSKFSHMERVWRTPYPFGPVPRAPEGTPSPTPAAAAAAANAAVPVSQANLTTACTSNTFLSQPKPSDTPSLPPKGGPPSEEDGLELTVAPPSQQNMTNMSSQNAVGVIQVI

SEQ ID NO: 54424 - protein, 344 aa, Glycine max
  Clone ID: LIB3109-015-G9_FLI.pep
ICSHCKGNFVAMGLIDLNTTEDDEAAPLSASSSHSGISTSASTLVVSPPPSVCLELWHACAGPLISLPKRGSVVVYLPQGHFEHVQDFPVNAFDIPPHVFCRVLDVKLHAEEGSDEVYCQVLLVPESEQVEHSLREGEIVADGEEEDTGATVKSTTPHMFCKTLTASDTSTHGGFSVPRRAAEDCFPPLDYSQQRPSQELVAKDLHGLEWRFRHIYRGQPRRHLLTTGWSAFVNKKKLVSGDAVLFLRGNDGELRLGIRRAAQLKWAGSFAVPSGQQLNPATLMDVVNALSTRCAFSVCYNPRYFSLYSLVPSPGVIEGNLLMSVPVHSYYGVFSVCIRWGWGF

SEQ ID NO: 54425 - protein, 474 aa, Zea mays
  Clone ID: UC-ZMFLMO17065D07_FLI.pep
EAHERRRRHDRGAGARGEASVHPGLPRRVPALRAQGARAAGHDALRLPHRLLPHGPGHADAAGHRAGAAQIADAAAVEAGVHARARRHRRLAVEACQGARGDPRHGVPPAGEPLAAHALLRGALHHCREPAAQPAAPGVPPPAPALPLHHGDQRAGQGGAHQRRRHHRGVLLAGQVRRRAQLSGVRRHVAVRHGGAAQRPRQAWARRAPGRRRAGAHHQGLPLRARRAHGLEHHKAVGGRLRQRLLQVRRGRRRRPRAEGVLGRGAQRGPRRQEGRAVVARARHPRQPRGDAHHHHVGHLRPPLGGQLRAVPLRRILPEPPDHHPEEHARGGGGGPGRRDEEVPEAAGDDPAGHAADADAGHQGDDDAGHPLVALARRGVHGRVGGAVVAGGAHGEGGVREVRRQDEGDRGIHRRVQQQPGAQEPVRSRDRAVRTAQALLQAGSHREGHPQQHLHLTRPSSPSNGGLPYCVHAS

SEQ ID NO: 54426 - protein, 295 aa, Glycine max
  Clone ID: LIB3109-031-F7_FLI.pep
GEMEQKYNMVEHDLKDEEDVEDGENLAPGSYEILQLEKEEILAPHTHFCTICGKGFKRDANLRMHMRGHGDEYKTPAALAKPHKESASPKPIKRYSCPYPGCKRNKDHKKFQPLKTILCVKNHYKRTHCDKSYTCSRCNTKKFSVMADLKTHEKHCGKDKWLCSCGTTFSRKDKLFGHIALFQGHAPAIPLDDTKGAGVAEAPIHDSKENNSKVQSMNFTFGSNPSNANEVPNAMDAKGDSDDPINYFSSLNFEANFGEFNEFTRPLFDDPEGSFSFVMPGSFKSGGESSSDNLL

SEQ ID NO: 54427 - protein, 324 aa, Zea mays
  Clone ID: UC-ZMFLB73307D05_FLI.pep
KFLGKYAISAEEFSEEMVGAKSRNIAYLKGKVPSWVGVPTSVAIPFGTFEKVLSDGLNKEVAQSIEKLKIRLAQEDFSALGEIRKVVLNLTAPMQLVNELKERMLGSGMPWPGDEGDKRWEQAWMAIKKVWASKWNERAYFSTRKVKLDHEYLSMAVLVQEVVNADYAFVIHTTNPSSGDSSEIYAEVVKGLGETLVGAYPGRAMSFVCKKDDLDSPKLLGYPSKPIGLFIRQSIIFRSDSNGEDLEGYAGAGLYDSVPMDEEDEVVLDYTTDPLIVDRGFRSSILSSIARAGHAIEELYGSPQDVEGVVKDGKIYVVQTRPQM

SEQ ID NO: 54428 - protein, 233 aa, Glycine max
  Clone ID: LIB3109-044-D5_FLI.pep
SMGRGKVVLERIQNKINRQVTFSKRRNGLLKKAFELSVLCDAEIALVIFSSRGKLFQYSSTDINRIIEKYRQCCFNMSQTGDVAEHQSEQCLYQELLVLRVKHESLQRTQRNLLGEELEPLSMKELHSLEKQLDRTLAQARKHLTQKLVSRIDELHGKVHSLEQANKHLESQERGKCTQICEGSPNGHILQDKQVNQFEYGTAGSFRLQQEQTTASKGKEIETIEDWLRPKQS

SEQ ID NO: 54429 - protein, 863 aa, Glycine max
  Clone ID: 700842448_FLI.pep
CWWVAKMLGGLLHRGHKIKGTVVLMRKNVLDVNSVTSVGGIIGQGLDLVGSTLDTLTAFLGRSVSLQLISATKADANGKGKLGKATFLEGIITSLPTLGAGQSAFKINFEWDDGSGIPGAFYIKNFMQTEFFLVSLTLEDIPNHGSIHFVCNSWIYNAKLFKSDRIFFANQTYLPSETPAPLVKYREEELHNLRGDGTGERKEWERIYDYDVYNDLGDPDKGENHARPVLGGNDTFPYPRRGRTGRKPTRKDPNSESRSNDVYLPRDEAFGHLKSSDFLTYGLKSVSQNVLPLLQSAFDLNFTPREFDSFDEVHGLYSGGIKLPTDIISKISPLPVLKEIFRTDGEQALKFPPPKVIQVSKSAWMTDEEFAREMLAGVNPNLIRCLKDFPPRSKLDSQVYGDHTSQITKEHLEPNLEGLTVDEAIQNKRLFLLDHHDPIMPYLRRINATSTKAYATRTILFLKNDGTLRPLAIELSLPHPQGDQSGAFSQVFLPADEGVESSIWLLAKAYVVVNDSCYHQLVSHWLNTHAVVEPFIIATNRHLSVVHPIYKLLHPHYRDTMNINGLARLSLVNDGGVIEQTFLWGRYSVEMSAVVYKDWVFTDQALPADLIKRGMAIEDPSCPHGIRLVIEDYPYAVDGLEIWDAIKTWVHEYVFLYYKSDDTLREDPELQACWKELVEVGHGDKKNEPWWPKMQTREELVEACAIIIWTASALHAAVNFGQYPYGGLILNRPTLSRRFMPEKGSAEYEELRKNPQKAYLKTITPKFQTLIDLSVIEILSRHASDEVYLGERDNPNWTSDTRALEAFKRFGNKLAQIENKLSERNNDEKLRNRCGPVQMPYTLLLPSSKEGLTFRGIPNSISI

SEQ ID NO: 54430 - protein, 192 aa, Glycine max
  Clone ID: LIB3138-082-G11_FLI.pep
TTATTTTIATTMYNNNQVSSSSFSSDETNNTKDDKHYRGVRRRPWGKYAAEIRDPNRKGSRVWLGTFDTAIEAAKAYDKAAFKMRGSKAILNFPLEIGSDQSKEESSSSSSSVSSSSIVIKVGVKREREEESERKNNYEKSEFNNNSNSNKHVKKEECPLTPSCWKGFWDTDVMGTIFSVPPLSPLSPLMVV

SEQ ID NO: 54431 - protein, 289 aa, Zea mays
  Clone ID: UC-ZMFLMO17330G05_FLI.pep
LYRVGCEMDQAADSSELLRRIEELQREKDEKQNSLELLLRRIEGLQYEMDEKVDLVEVLTRQVENLQRERDELRKDIEQLCMQQAGPGYVSVATRMLTQRTAALEQDIENLQKKLGGCLRENQNLQEELAEAYRIKSQLAELHGAALSKNKDLEKQVRFFQSSVAQAFAERDSSLMECEKAKEREEAVSRKFADFEERMREYQSEIDEQKHLNDDLQRELTELKAHTELSLKVILKFYDLRCRDSGCSSSLTIEEKCSILLGDSADNWSFSSDGGTSTLKYIVNHPYPL

SEQ ID NO: 54432 - protein, 133 aa, Glycine max
  Clone ID: LIB3138-126-A1_FLI.pep
VSWSRGNNSFVVWDPQAFSITLLPRYFKHNNFSSFVRQLNTYGFRKVDPDKWEFANEGFLRGQKHLLKNIRRKKTLTNQQQALPIDHCVEVGRFGSLDGEVDALRRDKQVLMVELVKLRQQQQNTRSFLHSLC

SEQ ID NO: 54433 - protein, 339 aa, Zea mays
  Clone ID: UC-ZMFLMO17324F12_FLI.pep
SSCSSCPLPLGFLCSHWVLEERSRLRLGDEMGHRMFSPLGFFLLAIVVLYGGTEQRRAEAAEGASPHRMLATISVSKPSYPMVTTPMSAYGDPVSTPGTPYSTFPSLATGNGGAGAGAGAGGGAGVGGGGGGGAGVGGGGGGGGTWCVASQSASPTALQVALDYACGYGADCSPIQQGGSCFNPDTVHDHASYAFNSYYQKNPAPTSCDFGGTATITNTDPSSGSCQYPSSSGGAQSTMPPPSPTSMPPTVPTAPMTPTPMTPDTTPTTGTPVYGLSPPDYGSLSPPDSGSMSPPGYGSTSPPDYNDVGAAATTGQGGAALALALLCVLVATVSLHVSK

SEQ ID NO: 54434 - protein, 186 aa, Glycine max
  Clone ID: LIB3106-032-B6_FLI.pep
SKSHSEAERRRRERINNHLAKLRSLLPSTTKTDKASLLAEVIQHVKELKRQTSLIAETSPVPTEADELTVVDEADEDGNSVIKASLCCEDRSDLFPELIKTLKALRLRTLKAEITTLGGRVKNVLFITGEETDSSSSEDHSQQQQQCCISSIQEALKAVMEKSVGDHHESASANIKRQRTNIISMS

SEQ ID NO: 54435 - protein, 601 aa, Zea mays
  Clone ID: UC-ZMFLMO17321H07_FLI.pep
LNSIPAPANATPSALIRSRRRRHSRARPMDSARSWLQKLQPRDKDRERGAKTPAPASPNGGAGNSARMAAAAGEEALSSATKQKVAAAKQYIENHYKSQMKSLQERKERRWMLERKLADADVSEEEQNNILKDLEKKETEYMRLRRHKMGVDDFELLTIIGRGAFGEVRLCREKATSNVYAMKKLKKSEMLRRGQVEHVRAERDLLAEVDSPYIVKLYCSFQDDEFLYLIMEYLPGGDMMTLLMRKDTLTEDESKFYVAETILAIESIHKRIYIHRDIKPDNLLLDRSGHLKLSDFGLCKPLDSSCFPNLSDLDYAAGKSTNPSSDGDKQSSNSTAPRRTQQEQLLHWQKNRRMLAYSTVGTPDYIAPEVLLKKGYGMECDWWSLGAIMFEMLVGYPPFYSEDPMSTCRKIVNWRSHLKFPEEASLSLEAKDLISKLLCNVDQRIGTKGAHEIKAHPWFAGVEWEKLYQMEAAFIPEVNDELDTQNFEKFEETAPPMQTSSKAGPWRKMLSSKDVNFVGYTYKNFEIVNDPELPGIAELKKTNNKPKRPTIKSLFETADSEDQPSDGSFLNLLPTQLELPESLEPSPHSSISSEDSQARNR

SEQ ID NO: 54436 - protein, 201 aa, Glycine max
  Clone ID: LIB3138-074-E12_FLI.pep
TNHTKKRAADEAVSHRVRGPYHHPLDAIESLNTHRVVHEPQAFSSFRERLYHLQRTENDRVCFGRSGIHGWGLFARRNIQEGDMVLEYRGEQVRRSIADLREARYRLEGKDCYLFKISEEVVVDATDKGNIARLINHSCMPNCYARIMSVGDDESRIVLIAKTNVVAGDELTYDYLFDPDEPEENKVPCLCKAPNCRKYMN

SEQ ID NO: 54437 - protein, 649 aa, Zea mays
  Clone ID: UC-ZMFLMO17341H06_FLI.pep
CFIIGMDKTTQGLEFGGGINSPKPYCYWSTTQDTTVHKDSTPEAYSTFSISNSKASKRKQGAMSGAKGGNPLLTLGLGCSPSSSYNSKLSSGTACITSSSLLKEIDEESSIDLGLNLGLYIGNDIGHCQQKSHAGFENVLSTNSPKLDLQLSLSTSSPESVVIDTNRSPDGLAMPMANSPLAIVEEGSVPHSWVFEHSIVSSSHASKATHGFPLSKKTNGGNASVPSHVMSSTMFTSVKGPVASASETTNSQQRNSNAKSCQFPGCVKGARGASGRCIAHGGGRRCQKPGCEKGAEGRTIYCKAHGGGRRCQFLGCTKSAEGRTDHCIAHGGGRRCSHEGCSRAARGKSGLCIKHGGGKRCQKENCTKSAEGHSGFCIAHGGGRRCQFPDCTKGAQGSTKFCKAHGGGKRCTFVGCTRGAEGSTSFCKGHGGGKRCAFQGGGVCPKSVHGGTQYCVAHGGGKRCASFGCTKSARGRTEYCVRHGGGKRCKFESCTKSAQGSTDFCKAHGGGTRCLWGQADTSFGAGAQQCDKFVRSKTGLCSAHSALIQDHCVHGGGTLGSAIYQSVHVKPTEMINGDKTLLDPGVPVPNSGVHPPVLAQSMIDPLPEGRVHGGGLLALLSRGGSRTSAGGSELCFGQDRVDLRLSGSP

SEQ ID NO: 54438 - protein, 89 aa, Glycine max
  Clone ID: LIB3106-115-D4_FLI.pep
PFCLLWSRVCGGFCFPFFCLCSLAQMRGILFACMLCLFTMPTLFGPQSLNSIFGHFDPNLEAWIAESICFAFQTLLTMYILCVNSFGCH

SEQ ID NO: 54439 - protein, 548 aa, Zea mays
  Clone ID: UC-ZMROB73078H10_FLI.pep
KHAITVLKIAPWQLLGMEFDVLEPLKKSYDNLPSDKLRLCLLYCSLFPEEFSISKDWIIGYCIGEGFIDDLYTEMDEIYNKGHDLLGDLKIASLLEKGEDEDHIKMHPMVRAMALWIASDFGTKETKWLVRAGVGLKEAPGAEKWNDAERISFMRNNILELYERPNCPLLKTLMLQGNPGLDKICDGFFQYMPSLRVLDLSHTSISELPSGISSLVELQYLDLYNTNIRSLPRELGSLSTLRFLLLSHMPLETIPGGVICSLTMLQVLYMDLSYGDWKVGASGNGVDFQELESLRRLKALDITIQSVEALERLSRSYRLAGSTRNLLIKTCSSLTKIELPSSNLWKNMTNLKRVWIVSCGNLAEVIIDSSKEAVNSNALPRSILQARAELVDEEQPILPTLHDIILQGLYKVKIVYKGGCVQNLASLFIWYCHGLEELITVSEEQDMAASGGGGQGSAAFRVITPFPNLKELYLHGLAKFRRLSSSTCTLHFPALESLKVIECPNLKKLKLSAGGLNVIQCNREWWDGLEWDDEEVKASYEPLFRPLH

SEQ ID NO: 54440 - protein, 226 aa, Glycine max; identical to SEQ ID NO: 45573
  Clone ID: LIB3106-046-E9_FLI.pep

SEQ ID NO: 54441 - protein, 484 aa, Zea mays
  Clone ID: LIB3137-023-B11_FLI.pep
PQRRARACGMDEPLLGNGLKTSGKRESLVVAEVRKQMYLAGPLIAAWILQNIVQMISIMFVGHLGELALSSASIATSFAGVTGFSLLSGMASSLDTLCGQSFGAKQYYLLGIYKQRAILVLTLVSLVVAIIWSYTGQILLLFGQDPEIAAGAGSYIRWMIPALFVYGPLQCHVRFLQTQNIVLPVMLSSGATALNHLLVCWLLVYKIGMGNKGAALANAISYFTNVSILAIYVRLAPACRNTWRGFSKEAFHDITSFLRLGIPSALMVCLEWWSFELLVLLSGLLPNPKLETSVLSISLNTGSLAFMIPFGLSAAISTRVSNELGAGRPHAAHLATRVVMVLAIVVGVLIGLAMILVRNIWGYAYSNEKEVVKYISKMMPILAVSFLFDCVQCVLSGVARGCGWQKIGACVNLGAYYLIGIPAAFCFAFMYHLGGMGLWLGIICALVIQMLLLLTITLCSNWEKEALKAKDRVFSTSVPADMMT

SEQ ID NO: 54442 - protein, 209 aa, Zea mays
  Clone ID: LIB3182-016-B6_FLI.pep
VSLAISSSTPDWRTRHHEGADRCPCSPGARCERRLQYKRRLWLPDTTVSSTASVLYAASVLSAAAAAAAAMAIPHSTTAAKPVPAVRILRRRQRRQPVPGPVRRVPEAPVQPGGDALRLATVPGAAAAVLPPDQAGGAAAPVPGDIRCGPAVLPAAAAAGRARGADGGPGSAAADGDVRPAAAAARSLPLQRSCRRCLLLRKLCTVVIM

SEQ ID NO: 54443 - protein, 281 aa, Zea mays
  Clone ID: LIB3150-100-D1_FLI.pep
HEFTNQTPLSPTLHRVCYASPAGRPMASRKFFVGGNWKCNGTGEDVKKIVTVLNQAEVPSEDVVEVVVSPPFVFLQQVKGLLRLDFAVAAQNCWVRKGGAFTGEISAEMLVNLQVPWVILGHSERRALLGESSDFVADKVAYALTQGLKVIACIGETLEQREAGTTMDVVAAQTKAIAEKISDWTNIVLAYEPVWAIGTGKVATPAQAQEVHDGLRKWLHSNVSPAVAELTRIIYGGSVNGANCKELAAQPDVDGFLVGGASLKPEFVDIIKSATVKSSSA

SEQ ID NO: 54444 - protein, 168 aa, Zea mays
  Clone ID: LIB3137-024-G9_FLI.pep
QRYHQLYTLFNRQHLNNMYITASIPLPLHTSLLPSIHKQHKWITSRDYSSTPLRLRSRRRRRRRYAPHLASFRVAKMTKRTKKAGIVGKYGTRYGASLRKQIKKMEVSQHSKYFCEFCGKFAVKRKAVGIWGCKDCGKVKAGGAYTMNTASAVTVRSTIRRLREQTEA

SEQ ID NO: 54445 - protein, 107 aa, Glycine max
  Clone ID: 700902403_FLI.pep
QTTNLTHNKVAIRQKYMVSLTCSKSLAIHKSLPVQSNLFLSLYCTLNLLTSLTSLTSDGCDMSNFGSEGARKCVQELHNLLYVSSKSLGQATAEILPDHHPEDRYVL

SEQ ID NO: 54446 - protein, 767 aa, Glycine max
  Clone ID: 701202428_FLI.pep
SCCLRTRFMEWTTLQHLDLRHVGRGVRPLQPHAASFHPHQALVAVAIGTYIVEFDALTGSKISALDIGAPAVRMSYSPTSGHTVIAILQDCTIRSCDFDLEQTCVLHSPEKKTEQIFSDTEVHMALTPLQPVVFFGFHKRMSVTVVGTVEGGRTPTKIKTDLKKPIVNLACHPRLPVLYVAYAEGLIRAYNIHTYAVHYTLQLDNTIKLLGAGAFAFHPTLEWIFVGDRRGTLLVWDVSTERPSMIGIKQVGSQPITSVAWLPMLRLLITLSKDGNLHVWETRVTVNPNGPPTQANFFEPAAIESIDIPRILSQQGGEAVYPLPRIKALEFHPKSNLAALVFANATIADNSKNKARYSTDGRKQLFAVLQSARGSSASVLKEKLSALGSSGVLADHQLQAQLQEHHLKGHGHLTISDIARKAFLYSHFMEGHAKISPISRLPLITVLDNKHHLKDFPVCQPFHLELNFFNKANRVLHYPVRAYYMDGLNLMAHNLSSGSDSIYRKLYNSIPGNVEYRAKYLIHSKKQRLFLVVYEFSGATNEVVLYWENSDAQVANSKSSTVKGRDAAFIGPNENQFAILDDDKTGLGVYTLPGGASQEAKDNDKVFEENPTATAETSAGSIRGPTPFMFETEVDRIFSTPLDSSLMFASHGNQIGIAKLIQGYRLSTSTANGHYISTNSEGKKSIKLKRNEIVLQVHWQETLRGHVAGILTTQRVLIVSAALDILAGTYANFDKGLPSFRSLLWVGPALLFFYCCCNQYTWLGWKS

SEQ ID NO: 54447 - protein, 108 aa, Glycine max
  Clone ID: 700902443_FLI.pep
ETAFRVSVFGGVVVMADADVDLSELFSGNADEDDDMFYIDIQTVQKVLDEDDDCYFQEVGFLLCQKQRLKFRMLSLCKVSLKTESVIEHMPNEVSCDRRIEASVQWQR

SEQ ID NO: 54448 - protein, 464 aa, Glycine max
  Clone ID: 701203283_FLI.pep
AWLLMGSRSRTVNVNTKDTDKVLNGMPSYAPPLPSSSNSMAMEATNAHPSRISEFGTLEQSLGFRVEDTINLSRNPMFNQMKSNSQALGADIQFGALNKSIATSDINLSAAIAASQALVFQKDSQPTLASTSAGRENWGETNMADASPRTDTSTDDTEDKNQRPERDESSGSKDKSDQKTLRRLAQNREAARKSRLRKKAYVQQLESSRLKLTQLEQELQRSRQQGIFISSTGDQAQSMSGNGAMAFDVEYARWLEEHNRQTNELRAAINSHAGDIELRTIVDNFMTQFDDIFRLKGIAAKADVFHILSGMWKTPAERCFMWIGGFRSSELLKLLLSQLEPLAEQQLMGIYNLQQSSQQTEDALSQGMDALQQSLSETLANGSPSSSGSSGNVANYMGQMAMAMGKLGTLEGFLHQADNLRQQILQQMLRILTTRQSARALLAISDYFSRLRALSSLWLARPRE

SEQ ID NO: 54449 - protein, 887 aa, Glycine max
  Clone ID: 701209742_FLI.pep
HNYNSHNETKLVTVSAAFRFLRMFQNIMNAFTTTGDDDNGPGHRVKGTVVLMKKNVLDFNDFSASFLDRLHEFVGKRVSLQLVSSVNVDPGNGNGLKGKLGKPAYLEDWITTIAPLTAGEAAFKVTFEWDEEIGTPGAFIIRNNHHSEFYLKSLTLEDVPGQGVIRFICNSWVYPADKYEKDRIFFSNKTYLPSETPMPLLKYREEELENLRGNGKGQLQEWDRVYDYALYNDLGNPDKGPQHARPTLGGSKDYPYPRRGRTSRPPAKSDPKCESRLNIASSLDIYVPRDERFGHLKMADFLAYALKSIVQVLKPEFESLFDSTPNEFDKFEDVLKLYEGGIEVPEGILTEVRDNIPAEMLKEIFRSDGQRLLKFPVPQVIAVDKSAWQTDEEFGRELLAGINPVVIRGLQEFPPASKLDPKIYGNQTSTITKEHIESNLEGFTVDEAIKERRLFILDLHDALIPYVKRINSTSTKMYASRTILFLQDSGTLKPLAIELSLPHPEGDQYGAISKVYTPVEQGIENSFWQLAKAYVVVADSGYHQLISHWLHTHAVIEPIILATNRHLSVLHPIHKLLHPHFRDTMNINALGRQILINAGGALELTVCPSKYSMEFSSVLYKDWVFPEQALPEDLVKRGVAVKDSTSPYGLRLLIEDYPFAVDGLEIWFAIKTWVKDYCSFYYKEDDTIKKDTELQSWWKEIREVGHGDKKDEPWWPKMQTCEELIQTCTIIIWIASALHAAINFGQYPYGGFPPSRPAISRRFMPEKGTPEYDELVANPDKAYLKTVTSQFLAVLGISLVEILSKHSSDEVYLGQRDTPDWTSDAEPLQAFEKFGKKLADIEERILRMNSDEKFRNRYGPVKMPYTLLYPSSKGGLTGMGVPNSISI

SEQ ID NO: 54450 - protein, 150 aa, Zea mays
  Clone ID: UC-ZMFLMO17344C11_FLI.pep
IMANRIEANSTVTTLRTGKNNYHDHSWAEKLVLRSRHRNVEPLRPNSSTPPCGLCIGRYKPCASHLHQIVSKCLPPCGCLDCHHQTRSIFRHLALPSQHSGQSLHFFPCVSRQQPNHRRQLIVSLVEKTQLCQCPYWMIPQRYWMIPHFL

SEQ ID NO: 54451 - protein, 273 aa, Glycine max
  Clone ID: LIB3242-662-B11_FLI.pep
AIQNSVPAITFLMAAILRIEQVRLNRKDGLGKVAGTVLCVVGATVITLYKGPTIYSPTTGVNINNTRVTQVFELGSVSLGDAKGKNWTLGCLYLIGHCLSWSGWLVLQAPVLKKYPARLSVTSYTCFFGLLQFLVIALLLERDAQAWLFHSGGEAFTILYAGVVASGIAFAVQIWCIDRGGPVFVAVYQPVQTFVVAIMASIALGEEFYLGGIIGAVLIVAGLYLVLWGKSEERKFAREQLAIASTEHSIIRPASHAKASLAQPLLSSSTENV

SEQ ID NO: 54452 - protein, 163 aa, Zea mays
  Clone ID: 700468004_FLI.pep
SDHPPVVIKLCFLRRLVAHATAASDVGGFAASSASGPRQRRRRPRAPSGPRGTCAAARRGGPPPRATIAHRDSNSCSSPPSPAACAGGGGSGRRRRRRRAAGGRAAAAAARRAAGTALGTTTARPAPAPRGGRRPPCIYQETSATTTAGGQPAGLLPWTGSDS

SEQ ID NO: 54453 - protein, 221 aa, Zea mays
  Clone ID: UC-ZMFLMO17134C03_FLI.pep
DRYCGLFTPMQVLHPQSMRPAREGDIPVRVKNSYNPKAPGTLITRQRDMDKVVLTSIVLKSNVTMLDIVSTRMLGQYGFLARVFAIFEDLCISVDCVATSEVSVSVSLDPSKIWSRELIQQELDHVVEELEKIAIVRLLQQRAIISLIGNVEQSSLILEKTGRVLRKSGVNVQMISQGASKVNMSLIVHDSDAKALVEALHQAFFEDDVLSQVEAENLLVG

SEQ ID NO: 54454 - protein, 388 aa, Glycine max
  Clone ID: LIB4127-121-G6_FLI.pep
IGQIVMGWLDSVWGRGRKFIKRKDSDAGDAGKALEELRASLYNEIRTSEGAKRQQQRYCGPVVALSFNFMVSVGIIMANKLVMGKVGFNFPIFLTFVHYITAWLLLAIFKTLSVLPVSPPSKTTPFSSLFALGVVMAFASGLANTSLKYNSVGFYQMAKIAVTPTIVLAEFILFGNTIDFKKVLALAVVSAGVAVATVTDLEFNLFGALIAIAWIIPSAINKILWSTLQQQGNWTALALMWKTTPITVFFLGALMPWIDPPGVLSFKWDVNNSTAVFVSALLGFLLQWSGALALGATSATTHVVLGQFKTCVILLGGYLLFESDPGVVSIGGAVVALSGMSVYTSLNLQEPQEPSSKPKSTSEDTKSTDSNVNTTTTTTTSTTIVCVI

SEQ ID NO: 54455 - protein, 111 aa, Zea mays
  Clone ID: UC-ZMFLMO17114F11_FLI.pep
LVAFSENGLMIRWWSLGSAWWERLSRSLTPIQCTKLIYVPPWEGFSPNSARLSIISSILDDKPGRSEKELGEADNLKLLLHNLDLSYRLHWIGGKTIKLTRHGQDLGTFQL

SEQ ID NO: 54456 - protein, 230 aa, Glycine max
  Clone ID: LIB4127-341-A7_FLI.pep
RLFGGKVIVKGKPPLPPSGENSGVLFVCTHRTLMDPVVLSSVLRRKIPAVTYSVSRLSEILSPIPTVRLTRTRDIDAEKIKRELSKGDLVVCPEGTTCREPFLLRFSGLFAELTDRIVPVAMNYRVGFFHATTARGWKGLDPIFFFMNPRPVYEVTFLNQLPVEATCSSGKSPHDVANYVQRILAATLGFECTNFTRKDKYRVLAGNDGTVSPTYSFVDQMVKVVRTFIQ

SEQ ID NO: 54457 - protein, 326 aa, Glycine max
  Clone ID: 701205845_FLI.pep
MDAGQMPFGSGIDLRDNPVGDFLSSRDEPQMISGSSLFGNGHKRDNLGLDNHHSLNGSNKRLRGDSPWNSKPMDFEACIEQMEHWMGKARMMYATKDQACEESTMNQQLLINELQKRDNMIEHLHKAKLEETQKRQIEVYRFEKELYMMQSLVDGYRKALKETRKAFADYRASCPQGDDEPLYKDLPGSGGLVLTAVEVEREQLKKEAEERAKMRDFMIDFEKKTTDFESTWFGKFEAHMSTVESLSQRLLVLEDQVKHLNEVSATRKVSDPIESDPVEFKVSDPIESDPIESKVSDPIECNVSDPIECKVSDPIECAPTPEGETA

SEQ ID NO: 54458 - protein, 355 aa, Zea mays
  Clone ID: UC-ZMFLMO17220H08_FLI.pep
AENPSASADVEMVRGRDGVWTARSPTVVVLWDLDNKPPRGPPFPAATALIGAASLLGRVVSISAFANRHAFSHLPGWVTAERRARRALDRSERAGVVVPSVPYSCSVCGRRFPTRPDLTRHFRQLHERERNKKLSRLRSLKGKKRQKFRERFITGNTKYEDAARELLTPKVGYGLASELRRAGVHVRTVPDKPQAADHALKRQVKHSVACGVDWLVLVSDDSDFTDTVRNARAADLRTVVVGDGCRALGKVADIWLPWDRVENGEVDEEMLRSCTFSEYREDQGTERDGQFIGDWDAGDFDDVVDDIVGTRTSLLGATTMSAFADEDIADGIFGVELTGDNMFWSSDDEEEDDYL

SEQ ID NO: 54459 - protein, 77 aa, Zea mays
  Clone ID: UC-ZMFLB73245F07_FLI.pep
LEIREVGEVKLSSDPHYSAPELHTTSTSFLNRLWMGGESSYSFPTRFNATAQLLKYLENPPGKSLLLSPLKKRVHDA

SEQ ID NO: 54460 - protein, 220 aa, Glycine max
  Clone ID: 700740186_FLI.pep
GYCAPDYAMTGQLTFKSDIYSFGVVLLEIITGRKAIDNTKPAKEQNLVSWAKSLFKNRKRFCEMVDPLLEGQYPMRGLYQALAIAAMCVQEQPSMRPETTDVVTALDYLASQKYDPQIHPVQNCRKGLSFPRERSSGHRRTVSNDSDPRARSDGHRRTVCNGSETRARSNCHKRTVSISNGHSSSSETESSRKGLSSPRVRSDGHRHFVSNGSETDSSGD

SEQ ID NO: 54461 - protein, 190 aa, Glycine max
  Clone ID: LIB3028-035-A7_FLI.pep
DTPSKKPMWRGVILAYIGVAFCYLPVAFIGYYMFGNSVDDNILITLERPAWLIAAANLFVFVHVVGGYQVFAMPVFDMIETYMVTKLNFPPSTALRVTTRTIYVALTMLIGICIPFFGSLLGFLGGFAFAPTSYFLPCIIWLKLKKPKKFGLSWTINWICIILGVMLMIVSPIGALRNIILSAKNYEFFS

SEQ ID NO: 54462 - protein, 272 aa, Glycine max
  Clone ID: LIB3109-015-C12_FLI.pep
GLGIGKVIENGGVGGSLTGITIGTVTQTDKVWRTMQALGDIAFAYSYSLILIEIQDTVKSPPSESKTMKKASFISVAVTSIFYMLCGCFGYAAFGDASPGNLLTGFGFYNPYWLLDIANAAIVIHLVGSYQVYCQPLFAFVEKHAAQMFPDSDFLNKEIEIPIPGFHPYRLNLFRLVWRTIYVMLSTVISMLLPFFNDIGGLLGAFGFWPLTVYFPVEMYIIQKRIPKWSTKWICLQILSMTCLLMTIGAAAGSIAGIAIDLRTYKPFKTNY

SEQ ID NO: 54463 - protein, 438 aa, Glycine max
  Clone ID: 700751091_FLI.pep
FADEHSAPIASVTMEARHATLGRRTLEEIRQKRAAERLSKTSSGPDLTQVPSTSEIAGMSKSESANKLSETDLSALLSQLKGLQKKNTELEEENTKISLKLQTMEIDNETMHKQLNDVEQNTVPSLRKALRDVAMEKDAAVVAREDLSAQLRTLKKRLKEAEDEQYRAEEDAAALRAELNSIQQQAMTNTVSTISSFGNPPDHFQIQRLQKELDDLKLELQEQEQLAKEQACIASLISEKQELEEKLMSISREPAEASDKAAHKAFSLEDKQKLDRQLYDMALAIERLESSRQKLLMEIDSQSTEIERLFEENSSLSNSYQEAIGAAARWENQVMDCLKQNEELRGILDNLRMELARGLPDSSKNGAHEIASLASMKGQLVTEQSRAEALSAEVMQLSAQLEQVKQAYDGLARFYRPVLRNIESNLIKMKQDNSLAVR

SEQ ID NO: 54464 - protein, 247 aa, Glycine max
  Clone ID: LIB3139-061-A8_FLI.pep
QNPKKIWRTFQALGNIAFAYSYSMILIEIQDTIKSPPAESETMSKATLISVLVTTVFYMLCGCFGYASFGDASPGNLLTGFGFYNPFWLIDIANAGIVIHLVGAYQVYCQPLFSFVESNAAERFPNSDFMSREFEVPIPGCKPYKLNLFRLVWRTLFVILSTVIAMLLPFFNDIVGLIGAIGFWPLTVYLPVEMYITQTKIPKWGIKWIGLQMLSVACFVITILAAAGSIAGVIDDLKVYKPFVTSY

SEQ ID NO: 54465 - protein, 467 aa, Glycine max
  Clone ID: 700750041_FLI.pep
LTKDQDIRLGDFGLAKMLSSDDLASSVVGTPSYMCPELLADIPYGSKSDIWSLGCCIYEMAAYKPAFKAFDIQSLLIKINKCIVSPMPTMYSAAFRGLVKSMLRKNPELRPTAAELLNHPHLQPYIHKIQLKLNSPRRSTFPFQWPESNYVRRTRFVDPESVYTLSDLDKCLSFSNDMALNPSVSGTEQVSQCSTQRAHGLSTCSKEKIYELSVGCVREKYKTDKSKASKFSTVERTPRSRAVTVSATTKRHTIATSKTTHSGPKRDSLPASHAPSRKFSTPPRTRARATPNLYTNVLGSLDSLDVSINAPRIDKIVEFPMAFCEDPFSPIRGPSSTSARCSSSSAGSTADCSITKDKCTIQEDKVTLPTSITDACPAPKETKCSYEHVKDCVSSHSSTDLDQRRFDTSSYQQRAEALEGLLEFSARLLQQQRFDELGVLLKPFGLEKVSPRETAIWLTKSFKQTAV

SEQ ID NO: 54466 - protein, 450 aa, Glycine max
  Clone ID: 700756337_FLI.pep
PQSTPNPPTSNKVTKTHFFLFFASSFSFLLSKLTNFFSNKFDSFFIFNLIFFSIQKMALSRVVAQSSQSNLLKPLASYLSLRRRSVSTSSDPLTIETSVPFTSHNCDAPSRAVETSSAELFAFFHDMALMRRMEIAADSLYKAKLIRGFCHLYDGQEAVAVGMEAAITRKDCVITAYRDHCTFLARGGTLIEIFSELMGRRDGCSKGKGGSMHFYRKEGGFYGGHGIVGAQVPLGCGLAFAQKYCKDENVTFSMYGDGAANQGQLFEALNISALWDLPSILVCENNHYGMGTAEWRAAKSPAYYKRGDYVPGLKVDGMDALAVKQACKFAKEFALKNGPIILEMDTYRYHGHSMSDPGSTYRTRDEISGVRQERDPIERVRKLLLTHEIATEKELKDIEKEIRKEVDEAIAKAKESQMPEPSDLFTNVYVKGFGVEACGADRKEVRAILP

SEQ ID NO: 54467 - protein, 688 aa, Homo sapiens
  Clone ID: LIB4651-024-E4_FLI.pep
AGDTGFLSAPAAPKAEGRALRAGLVKLGVHCVTCQKVAIKIVNREKLSESVLMKVEREIAILKLIEHPHVLKLHDVYENKKYLYLVLEHVSGGELFDYLVKKGRLTPKEARKFFRQIISALDFCHSHSICHRDLKPENLLLDEKNNIRIADFGMASLQVGDSLLETSCGSPHYACPEVIRGEKYDGRKADVWSCGVILFALLVGALPFDDDNLRQLLEKVKRGVFHMPHFIPPDCQSLLRGMIEVDAARRLTLEHIQKHIWYIGGKNEPEPEQPIPRKVQIRSLPSLEDIDPDVLDSMHSLGCFRDRNKLLQDLLSEEENQEKMIYFLLLDRKERYPSQEDEDLPPRNEIDPPRKRVDSPMLNRHGKRRPERKSMEVLSVTDGGSPVPARRAIEMAQHGQSKAMFSKSLDIAEAHPQFSKEDRSRSISGASSGLSTSPLSSPRVTPHPSPRGSPLPTPKGTPVHTPKESPAGTPNPTPPSSPSVGGVPWRARLNSIKNSFLGSPRFHRRKLQVPTPEEMSNLTPESSPELAKKSWFGNFISLEKEEQIFVVIKDKPLSSIKADIVHAFLSIPSLSHSVISQTSFRAEYKATGGPAVFQKPVKFQVDITYTEGGEAQKENGIYSVTFTLLSGPSRRFKRVVETIQAQLLSTHDPPAAQHLSEPPPPAPGLSWGAGLKGQKVATSYESSL

SEQ ID NO: 54468 - protein, 475 aa, Glycine max
  Clone ID: 700741010_FLI.pep
VESATMNMMRRLKSIASGRTSISSDPGGDSNSKRAKFEPETEGKADEKTNTIETICTDQEQPIDTSKETSNVGTSDVSTVARTEKSGFDELPKELNEMKIRDEKSKNNNEKDIEATVVSGNGTETGQIITTAIGGRDGQPKQTISYMAERVVGTGSFGVVFQAKCLETGESVAIKKVLQDRRYKNRELQVMRTVDHPNVVKLKHYFFSTTDKDELYLNLVLEYVPETVYKVSKHYVRMHQHMPIIYVQLYTYQICRALNYLHQVIGVCHRDIKPQNLLVNPQTHQLKICDFGSAKVLVPGEPNISYICSRYYRAPELIFGATEYTIAIDMWSVGCVLAELLLGQPLFPGESGVDQLVEIIKVLGTPTREEIRCMNPNYNEFKFPQIKAHPWHKVFHKRMPPEAVDLVSRLLQYSPNLRCTALAACAHPFFNDLRDPNACLPNGRPLPPLFNFTSQELANAPEELRQRLIPEHARS

SEQ ID NO: 54469 - protein, 420 aa, Homo sapiens
  Clone ID: LIB4651-038-H5_FLI.pep
PLTSLLPQPYPPTGPNFRYSHGVPPHLFAYFPPGSTVSQDNSFISPQLQHIFERVRQSADFMPRWQMLRVLEEELGRDWQAKVASLEEVPFAAASIGQVHQGLLRDGTEVAVKIQYPGIAQSIQSDVQNLLAVLKMSAALPAGLFAEQSLQALQQELAWECDYRREAACAQNFRQLLANDPFFRVPAVVKELCTTRVLGMELAGGVPLDQCQGLSQDLRNQICFQLLTLCLRELFEFRFMQTDPNWANFLYDASSHQVTLLDFGASREFGTEFTDHYIEVVKAAADGDRDCVLQKSRDLKFLTGFETKAFSDAHVEAVMILGEPFATQGPYDFGSGETARRIQDLIPVLLRHRLCPPPEETYALHRKLAGAFLACAHLRAHIACRDLFQDTYHRYWASRQPDAATAGSLPTKGDSWVDPS

SEQ ID NO: 54470 - protein, 186 aa, Glycine max
  Clone ID: 700760643_FLI.pep
EQIFEKIISGMYLGEIVRRVLLKLAEEVDFFGDTVPPKLRIPFVLRTPDMSAIHQDTSSDLKVVGNKLKDILEINNTSLKMRKIVVELCDIVANRGARLSAAGIFGILKKIGRDTVKDGKKSVVALDGGLFEHYTKFRSSLESTLKELLGDEAAETIGIEQSNDGSGIGAALLAASHSQYLEVQES

SEQ ID NO: 54471 - protein, 317 aa, Homo sapiens
  Clone ID: LIB4676-058-A2_FLI.pep
VDRWTSRLAVRWGGGMCLWPFCVTLPPCRLSGNPPFYEEVEEDDYENHDKNLFRKILAGDYEFDSPYWDDISQAAKDLVTRLMEVEQDQRITAEEAISHEWISGNAASDKNIKDGVCAQIEKNFARAKWKKAVRVTTLMKRLRAPEQSSTAAAQSASATDTATPGAAGGATAAAASGATSAPEGDAARAAKSDNVAPADRSATPATDGSATPATDGSVTPATDGSITPATDGSVTPATDRSATPATDGRATPATEESTVPTTQSSAMLATKAAATPEPAMAQPDSTAPEGATGQAPPSSKGEEAAGYAQESQREEAS

SEQ ID NO: 54472 - protein, 381 aa, Glycine max
  Clone ID: 700755553_FLI.pep
EIPSATNALRYYAGAADKIHGDVLKMNGDFHAYTLLEPIGVVGHIIPWNAPSLSFFIKVSPSLAAGCTMVLKPAEQTPLSALFYAHLAKLAGIPDGVLNIVPVFGPTAGAAISSHMDIDAVSFTGSIEVGREVLQAAAWSNLKPVSLELGGKSPLIIFNDADIDKASELALFGIMSNKGEICVAGSRVFVQEEIYDEFEKKLVEKAKSWVVGDPFDPKSLQGPQADRNQLEKILSYIEHGKREGATLLTGGNTVGNKGYYIEPTIFSNVKEDMLIARDEIFGPVLALMKFKTMEEAIKSANNTKYGLAAGIVTKNLDTANTMSRSIRAGIVWINCYFTVGSDVPFGGYKMSGFGRDLGLQALHKYLQVKSVVTPIHNSPWL

SEQ ID NO: 54473 - protein, 473 aa, Homo sapiens
  Clone ID: LIB4654-060-E3_FLI.pep
SLAMPFGCVTLGDKKNYNQPSEVTDRYDLGQVIKTEEFCEIFRAKDKTTGKLHTCKKFQKRDGRKVRKAAKNEIGILKMVKHPNILQLVDVFVTRKEYFIFLELATGREVFDWILDQGYYSERDTSNVVRQVLEAVAYLHSLKIVHRNLKLENLVYYNRLKNSKIVISDFHLAKLENGLIKEPCGTPEYLAPEVVGRQRYGRPVDCWAIGVIMYILLSGNPPFYEEVEEDDYENHDKNLFRKILAGDYEFDSPYWDDISQAAKDLVTRLMEVEQDQRITAEEAISHEWISGNAASDKNIKDGVCAQIEKNFARAKWKKAVRVTTLMKRLRAPEQSSTAAAQSASATDTATPGAADRSATPATDGSATPATDGSVTPATDGSITPATDGSVTPATDRSATPATDGRATPATEESTVPTTQSSAMLATKAAATPEPAMAQPDSTAPEGATGQAPPSSKGEEAAGYAQESQREEAS

SEQ ID NO: 54474 - protein, 367 aa, Zea mays
  Clone ID: LIB3060-026-B8_FLI.pep
QSWQLFLCVAVGLWAGLVIGFVTEYYTSNAYSPVQDVADSCRTGAATNVIFGLALGYKSVIIPIFAIAFSIFLSFSLAAMYGVAVAALGMLSTIATGLAIDAYGPISDNAGGIAEMAGMSHRIRERTDALDAAGNTTAAIGKGFAIGSAALVSLALFGAFVSRAAISTVDVLTPKVFIGLIVGAMLPYWFSAMTMKSVGSAALKMVEEVRRQFNNIPGLMEGTTKPDYATCVKISTDASIKEMIPPGALVMLTPLIVGILFGVETLSGVLAGALVSGVQIAISASNTGGAWDNAKKYIEAGVSEHARTLGPKGSDPHKAAVIGDTIGDPLKDTSGPSLNILIKLMAVESLVFAPFFAAHGGILFKWL

SEQ ID NO: 54475 - protein, 453 aa, Homo sapiens
  Clone ID: LIB4119-027-D2_FLI.pep
NVMLFFHTMPSAPMGSQGKAVTCLESEGCGEDGACPWSVIRPTHASLLPSPSSYVVLDLMESDLHQIIHSSQPLTLEHVRYFLYQLLRGLKYMHSAQVIHRDLKPSNLLVNENCELKIGDFGMARGLCTSPAEHQYFMTEYVATRWYRAPELMLSLHEYTQAIDLWSVGCIFGEMLARRQLFPGKNYVHQLQLIMMVLGTPSPAVIQAVGAERVRAYIQSLPPRQPVPWETVYPGADRQALSLLGRMLRFEPSARISAAAALRHPFLAKYHDPDDEPDCAPPFDFAFDREALTRERIKEAIVAEIEDFHARREGIRQQIRFQPSLQPVASEPGCPDVEMPSPWAPSGDCAMESPPPAPPPCPGPAPDTIDLTLQPPPPVSEPAPPKKDGAISDNTKAALKAALLKSLRSRLRGALWAGRVGRGETWTWTRLQAFTFSPAQLPRRWPQRTPGGS

SEQ ID NO: 54476 - protein, 739 aa, Homo sapiens
  Clone ID: LIB4119-033-B7_FLI.pep
VMERKPGQLSIGTDGRRWSLASLPSSGYGTNTPSSTVSSSCSSQEKLHQLPFQPTADELHFLTKHFSTESVPDEEGRQSPAMRPRSRSLSPGRSPVSFDSEIIMMNHVYKERFPKATAQMEERLAEFISSNTPDSVLPLADGALSFIHHQVIEMARDCLDKSRSGLITSQYFYELQDNLEKLLQDAHERSESSEVAFVMQLVKKLMIIIARPARLLECLEFDPEEFYHLLEAAEGHAKEGQGIKCDIPRYIVSQLGLTRDPLEEMAQLSSCDSPDTPETDDSIEGHGASLPSKKTPSEEDFETIKLISNGAYGAVFLVRHKSTRQRFAMKKINKQNLILRNQIQQAFVERDILTFAENPFVVSMFCSFDTKRHLCMVMEYVEGGDCATLLKNIGALPVDMVRLYFAETVLALEYLHNYGIVHRDLKPDNLLITSMGHIKLTDFGLSKIGLMSLTTNLYEGHIEKDAREFLDKQVCGTPEYIAPEVILRQGYGKPVDWWAMGIILYEFLVGCVPFFGDTPEELFGQVISDEIVWPEGDEALPPDAQDLTSKLLHQNPLERLGTGSAYEVKQHPFFTGLDWTGLLRQKAEFIPQLESEDDTSYFDTRSERYHHMDSEDEEEVSEDGCLEIRQFSSCSPRFNKVYSSMERLSLLEERRTPPPTKRSLSEEKEDHSDGLAGLKGRDRSWVIGSPEILRKRLSVSESSHTESDSSPPMTVRRRCSGLLDAPRFPEGPEEASSTS

SEQ ID NO: 54477 - protein, 897 aa, Homo sapiens
  Clone ID: LIB4119-095-G10_FLI.pep
SFYQLIFSTVHGLYKDRYAYRDSMTDVIVQHLITEQKVRIKCKELVKKIAIYRNRLAIQLPEKILIYELYSEDLSDMHYRVKEKIIKKFECNLLVVCANHIILCQEKRLQCLSFSGVKEREWQMESLIRYIKVIGGPPGREGLLVGLKNGQILKIFVDNLFAIVLLKQATAVRCLDMSASRKKLAVVDENDTCLVYDIDTKELLFQEPNANSVAWNTQCEDMLCFSGGGYLNIKASTFPVHRQKLQGFVVGYNGSKIFCLHVFSISAVEVPQSAPMYQYLDRKLFKEAYQIACLGVTDTDWRELAMEALEGLDFETAKKAFIRVQDLRYLELISSIEERKKRGETNNDLFLADVFSYQGKFHEAAKLYKRSGHENLALEMYTDLCMFEYAKDFLGSGDPKETKMLITKQADWARNIKEPKAAVEMYISAGEHVKAIEICGDHGWVDMLIDIARKLDKAEREPLLLCATYLKKLDSPGYAAETYLKMGDLKSLVQLHVETQRWDEAFALGEKHPEFKDDIYMPYAQWLAENDRFEEAQKAFHKAGRQREAVQVLEQLTNNAVAESRFNDAAYYYWMLSMQCLDIAQADPAQKDTMLGKFYHFQRLAELYHGYHAIHRHTEDPFSVHRPETLFNISRFLLHSLPKDTPSGISKVKILFTLAKQSKALGAYRLARHAYDKLRGLYIPARFQKSIELGTLTIRAKPFHDSEELVPLCYRCSTNNPLLNNLGNVCINCRQPFIFSASSYDVLHLVEFYLEEGITDEEAISLIDLEVLRPKRDDRQLEIANNSSQILRLVETKDSIGDEDPFTAKLSFEQGGSEFVPVVVSRLVLRSMSRRDVLIKRWPPPLRWQYFRSLLPDASITMCPSCFQMFHSEDYELLVLQHGCCPYCRRCKDDPGP

SEQ ID NO: 54478 - protein, 420 aa, Zea mays
  Clone ID: LIB3150-067-D9_FLI.pep
GSGVSQWRLALLMPSRIAACFRCAAAPSSGAGAGAAGPSLATSIYETHLGLVALSWSRTSLGLSLRAVLRLSATPPPGSSSSASGAGYLDDDADEEILAFRVSPWLFWRRRGSRRFRAGDRLVDLAWDLSRARFPVSGSPEPSSGFFVAVVVCGEMVLAAGDLTDLAYRRTRARRPSGPRPVLLSRREHVSLRDAGAGRGRSHTTWVNVQGKEREISVDLVARGRGRDKATAGKGKEKDRADVGMSVSVDGERVLHVRRLRWKFRGSERVDLGGGDGVQVSWDLHNWLFPPREPPPTEASTHAHAVFVFRFELASGGEESEADLGKNPSPSKAARRNTGVWGGYLARWGQRDWSETGSNGERRKGRGRRLAKESSSSSASVASSTASWASGSTVMDWASPEEVEMQRGDGFSLLIYAWKS

SEQ ID NO: 54479 - protein, 968 aa, Homo sapiens
  Clone ID: LIB4119-256-F5_FLI.pep
GKDRALNFDPCCISYFTKGEYILLGGSDKQVSLFTKDGVRLGTVGEQNSWVWTCQAKPDSNYVVVGCQDGTISFYQLIFSTVHGLYKDRYAYRDSMTDVIVQHLITEQKVRIKCKELVKKIAIYRNRLAIQLPEKILIYELYSEDLSDMHYRVKEKIIKKFECNLLVVCANHIILCQEKRLQCLSFSGVKEREWQMESLIRYIKVIGGPPGREGLLVGLKNGQILKIFVDNLFAIVLLKQATAVRCLDMSASRKKLAVVDENDTCLVYDIDTKELLFQEPNANSVAWNTQCEDMLCFSGGGYLNIKASTFPVHRQKLQGFVVGYNGSKIFCLHVFSISAVEVPQSAPMYQYLDRKLFKEAYQIACLGVTDTDWRELAMEALEGLDFETAKKAFIRVQDLRYLELISSIEERKKRGETNNDLFLADVFSYQGKFHEAAKLYKRSGHENLALEMYTDLCMFEYAKDFLGSGDPKETKMLITKQADWARNIKEPKAAVEMYISAGEHVKAIEICGDHGWVDMLIDIARKLDKAEREPLLLCATYLKKLDSPGYAAETYLKMGDLKSLVQLHVETQRWDEAFALGEKHPEFKDDIYMPYAQWLAENDRFEEAQKAFHKAGRQREAVQVLEQLTNNAVAESRFNDAAYYYWMLSMQCLDIAQDPAQKDTMLGKFYHFQRLAELYHGYHAIHRHTEDPFSVHRPETLFNISRFLLHSLPKDTPSGISKVKILFTLAKQSKALGAYRLARHAYDKLRGLYIPARFQKSIELGTLTIRAKPFHDSEELVPLCYRCSTNNPLLNNLGNVCINCRQPFIFSASSYDVLHLVEFYLEEGITDEEAISLIDLEVLRPKRDDRQLEIANNSSQILRLVETKDSIGDEDPFTAKLSFEQGGSEFVPVVVSRLVLRSMSRRDVLIKRWPPPLRWQYFRSLLPDASITMCPSCFQMFHSEDYELLVLQHGCCPYCRRCKDDPGP

SEQ ID NO: 54480 - protein, 109 aa, Zea mays
  Clone ID: LIB3156-001-A6_FLI.pep
RIKGAVERMDDELVRSAIDYYEMAETNKRRTGTGILPRTDLNITSWLGRPQHDADFGWGKPQSMSRAESVRGGSMHLMNDDGGTGNVRVLVCLEAENIKELGRLLYAKL

SEQ ID NO: 54481 - protein, 492 aa, Zea mays
  Clone ID: LIB3150-082-C2_FLI.pep
SRLRRQVAGLRLRLRPFPCAPTESLLQPPTSPAASSPQPSGSLFQGLSTWKMADEEQTPSSRKRVAGTQINKDNPEPDDDEPEQEMGTFKKSTEEVMATRRIVKVQPSDVKGDEGCNGTGKNTLSVPDKNAGSGVNTDSGAITEAPPQPVETSEKAEGTEAESGGDKVVAGEPNEGSCMPSEVQGKTKEGDAEEKEGADGAGNNGTVSKDDTEKKGGGESETKDCLSDEQRDAGKISKDKSEQKDGGESHQKDADNKGQTSSATSLFSFTNLSSGQNAFTGLTGTGFSSTSFSFGSASTDGPSTGPLFGLKADGSSFPSFSLGAASNGSSATVLATSAEAPKKFAMAEGPVETGEENEKAVFTADSALYEYLDGGWKERGKGELKLNVPVSSSGGERARLVMRAKGNYRLVLNASLYNDMSLKDMDKKGVTFACMNSIGESPSSLATFALKFKDTATREEFKDAVEFHRASKAPDEPLKAPENSSKAAEAEA

SEQ ID NO: 54482 - protein, 161 aa, Zea mays; identical to SEQ ID NO: 46039
  Clone ID: LIB3150-082-D11_FLI.pep

SEQ ID NO: 54483 - protein, 213 aa, Zea mays
  Clone ID: LIB3150-085-A3_FLI.pep
AARRIAGPSLQRCAVTSVSMKRRPSNRGANRSPRRPPLWLLSLDADEDPCGEKQARTVPISQPCFYFPPIFTWNVNRGGIVIPPILYIAPYKTGEAGGGPRNPRSVGDAPQGPRRRGAAGRAPARRTCRRSRQGPATEQRRRSRRRGARRPTPPPRSPRKPRRLPAPTSSLLPLAAVGGGWQTPRRVVGGWSTPASRRRSRCEHAGSACLLAT

SEQ ID NO: 54484 - protein, 188 aa, Zea mays
  Clone ID: LIB3355-020-C6_FLI.pep
HLKKKLAKTGARESGASAKTTKKSDRAAAPKGQWERRLQTNIHTARQALREALSMDDTAPPAIKPEPLPLPLPLGQLPAPASQAMYASSIDNIARLLEGWMRPSVSGNASAESMSSFSAFSGGGDGASASHIGTAHTPEGFTGTRKEEGAGPGPSSLPMFENWLLDDGMGSGDASLICVPLADPCEFF

SEQ ID NO: 54485 - protein, 190 aa, Zea mays
  Clone ID: LIB3150-095-A1_FLI.pep
GLRMTLRSFSAFATAAAQLGALGTLLDSALRLRLLGLGHLSLLRLLLILGLLNALLDLTKSSFSSSITDFRLLSSLLLDHFQGSTHNGPRVWLLGGAAPLLDSFSMDVLLVLLPVHCCPGKLCRLQAVVEVALAFRVGKKENLRISTNKPDAFPRIDLLATEAAEFRLQHHLLGFKKSSLKTFERSGRRP

SEQ ID NO: 54486 - protein, 115 aa, Chlorella sorokiniana
  Clone ID: LIB3602-017-G8_FLI.pep
GVFCVQGHVFSSSMGGGRGRAVRNGPAARPAWRTKLLRVDGAISSPATIYMVRPAGMPPGDMPGSASFFRFCSVITAWVVSMMPAMEQALVRPLRVTLAGSSTPASIRFSMRSYI

SEQ ID NO: 54487 - protein, 580 aa, Zea mays
  Clone ID: LIB3152-045-B7_FLI.pep
VPATPVAPPPRRTYSANTGRTRSINSDDMSYSYSVFSHNPSCSLTHNSTDIYAAGEGTNGSVHSRFNFRPMGDGSVAFAPAQLKEGTSSFFPTELPARMAAALSAGASFDASHGGMHSSRPHRILREIVSDPVPAMAQALQDFPSETLEVLRETVRGMVDAPEKRDELSSLQRKLERRSDLTAEVLGRANKTQLEILVAIKTGMATFVTGKGRVSSSELVEMFLMTRCRNLNCKSAVPVDDCECKICSTKKGFCSACMCPVCQKFDCAANTCSWVGCDVCSHWCHAACALEKNLIRPGPTLKGAMGTTEMQFQCLGCNHASEMFGFVKEVFNCCAQNWSAETQIKELDFVRKIFAASEDFEGKGLHAKAEEVLSMLVKKLISPSDATNTMLQFFKYGVTDCSVTGSKSKGILAAQTSKSTDMLHLQAPTITPPKSPFNFKPSTSILDSQIDVLKASPKPLPIEPHFNSSSKDDDSSSLETIVKCKEAEAKLFQKLADDARKEVDSYRQIVRTKTQKLEEEYATKVAKLCFQETEEKRRKKVEELKTLENSHYDYHKMKLRMQTEIQGLLERMEATKKMWV

SEQ ID NO: 54488 - protein, 478 aa, Chlorella sorokiniana
  Clone ID: LIB3602-055-H10_FLI.pep
VGRDPRLSSPLMAASLAAGLAAAGAGVARFGPCTTPAMFMSCILPGHEYDGAVMITASHLPVNRNGAKFCTGEGGLEKKDITQLLTRAAELAEEAGQRPSDRHTDAAFVITAALQASRSLVSYVDFLPEYAAYLRELMKRSIAHPTNPDAPLTGFKIVVDPGNGGGAFIADQVLGPLGADVSGSINLEPDGSFPNHMPNPEDKQAVAATRAAVLDSNADLGIMLDTDVDRSGVVDRNGNGINRNRYIALMSAITLRENPGETIVTDSCTSNGLAAFIRGLGGKHFRYKKGYKNITNKGQELNAAGVPCPLMMETSGHGAMRENYFLDDGAYGALKIVIEMVRRRLEGQGDIADLLQELREPAEAMEIRVAIQASDVRAEGERVTAAFKQWVDAGCGGASHWKLEDENYEGWRVKVLEGDGKEGWLLLRPSLHDPDIVLNVESEQAGGMKAILQHLLEFFKEHPEFQVCTAKVEDYVYT

SEQ ID NO: 54489 - protein, 275 aa, Zea mays
  Clone ID: LIB3150-117-B2_FLI.pep
PPGAHRRRLPPPRAARRQIPPSGAAQRRIPLHRAPGRRIPSSRVGAAGSCRPRAGAAGSVFPDQPAAGSLLCRPGPRQCASGTGLRLREHRRGGGSPDLLRPAAVAGDPAEEARDGRRRSVARSRRRRRGAAAPAESARGSRRRRQGACCFRGVRQWIPPPPPPGSLLSSGARSGIPSLPPGIGISPLPPPLGACCCCRPGRLRRKGWLDHIAAATAGGPSWPQAHLSSSSAARSRVLVLALLHVGPLSSLDWLLPSMAAAGLSASRGPVSNSRP

SEQ ID NO: 54490 - protein, 169 aa, Zea mays
  Clone ID: 700259589_FLI.pep
GTHGVCVLSANGSISNVTLRQTATSGRTVTYEGQFEILSLSGSFFLAEDGVQRSRNGSLSVSLAGPDGRLLGGGVAGLLVAASPVQIVLGSFNSGGGKEPQKQAPSEPTSAPPRVAPTAGMGGPSSPSSRGTLSESSGGAGSPPPLHRAMAASASNSNQPPFLSSMPWR

SEQ ID NO: 54491 - protein, 258 aa, Zea mays
  Clone ID: LIB3116-016-G4_FLI.pep
DKSFGFDTAVEEAQRAINAAHVEAESAENGIGVVKLMGRNSGFIAMYATLASRDVDCCLIPESPFYLEGKGGLLEFVERRLKDNGHMVIVVAEGAGQDLIAKSMNSVDTQDASGNKLLLDVGLWLSQKIKDHFKKKPRFPITLKYIDPTYMIRAVSSNASDNVYCTLLAHSALHGAMAGYTGFIVAPVNGRHAYIPFYRITEKQNKVVITDRMWARVLCSTNQPCFLSHEDVENMKHDDDEHHLHNTLLLDSPENSSK

SEQ ID NO: 54492 - protein, 672 aa, Zea mays
  Clone ID: 700466646_FLI.pep
PLSISLSATISMVEMSVVELRTLPLGFRFHPTDEELVTHYLKGKITGRINSESEVIPEIDVCKCEPWDLPDKSLIRSDDPEWFFFAPKDRKYPNGSRSNRATEAGYWKATGKDRIIKSKGDKRKQHTIGMKKTLVFHRGRAPKGERTGWIMHEYRTTEPEFESGEQGGYVLYRLFRKQEEKTERSSPEEVDRSGYSPTPSRSSPDNLEANEEANTPLNKESPESALHESPIELPKSVETNGGSMTRWLADRNDNLMVTAPDVSHIPFHGHAAGVAKQVDPSVGASGHLVNPHNGNDDYNKFVSDFTPILPLENAFFTDIQQGAFGFDGIMNPLDPLDAFLNQTLVDPDEHSSTTSKVQYDSDIPTEFENHWNMKVEPQDDQCWWANIGFEPDEPNPLLPCDTTDQDILSVDSGADSFNELFNSMEETGIIVRPQQLDSTVQPNHVFASQGNAARRLRLQVESREIITKDESEDEVSCVLTPDCLNDSVEESTAEKDVASDGDEAESTGIVIRSHHPAPRSSSESSFTQQGTAMQRLRLQSGLNKGQRPSTDDSSSCIIDEPGSQHKAEKAEIEEDASTNLAGSADDLPGNIHDDEQKNIPEHGAEMTSPEAKSVLRLRKTSEEGNKDVKQESCLEPHVRAPMQKGGFQSYIIWLVLPVALLLLLCVGTYGWV

SEQ ID NO: 54493 - protein, 329 aa, Zea mays
  Clone ID: LIB3136-003-E11_FLI.pep
TASRAAPSLYVPPFPVLAAMARHFVLNTGAKIPSVGLGTWQSDPGVVGNAVYAAVKAGYRHIDCARVYGNEKEIGLALKKLFEEGVVKREDLFITSKLWNDHHAPEDVPEALNDSLNDLQLEYLDLYLIHWPFRVKKGTNTSPENFVTPDFPATWGAMEKLYDAGKARAIGVSNFSSKKLGDLLAVARVPPAVDQVECHPGWQQTKLHSFCQSTGVHLTAYSPLGSPGTTWMNGNVLKEPIIISIAEKLGKTSAQVALRWNIQMGHSVLPKSTNEERIKQNLDVYDWSIPDDLLAKFSEIKQARLLRGNFIVNPESVYKTHEELWDGEL

SEQ ID NO: 54494 - protein, 789 aa, Zea mays
  Clone ID: 700474077_FLI.pep
RCILPSCATTAIGAKYDPEVTQKLKVHFEKDPYPSRETKENLSEELGLTFNQVSKWFSSTRHYSRVASAKKEMHPDSHTCENNDETTVDSMQAKQPNAGVMEKLTGDRNGIVPEKPMVQDNLNQGAMEKLTRDKNDIVPEKPVMQSSLNQCNNEDIPLSGTEIEMESYEQESSDSSDEEWSILSTPRKTRLQDHGKSSVTESLRSAKRCSRRAPAREQNNERIQSEQLHGSASEQQTEFLRSNVSSGKVSKYHFGPIVSQKLKEHFEKDPYPCRATKESLAQELGLTFNQISKWFSGTRHYSRDAVAKNQKRPGENTTVNNNSTTFDDIQVIEPNVGLIDKPAADVNDMISEKLMVQINLNEGIEEDIPPSQYARCEEKITMTPAAISREAGLPGYGPGPGENFLQVSSRNTSCEQSVILAPTAIAREVGPPGYATGENQGNGAPWNTSYERRLFMNPVTSSRAVSPPGYGPEESRGSGISWNTSSEQILFMSPTTISRELGPPGYGPREDQCSGTSWNASCELGVFMSPVTTSREDSPPGYGPRENQENDNMRCELRMFTSPTTISREVGPPGYELTGKNKGNGASCTTNYQQGAFTSPEAFPREACPPGFVSGENQGNDTPWYMSSKQMAFTSPTTNPRVGPPGYGQENQGSRVSWNTSYEQGVFMSSTNISREAGPPGYGPGESQGNITSWISTGGQRMFTGPSTIPNEVGQQGYGPSGIPGTDGSRSMDLKAFPPGYGPAGENQGGGASGSVISPQARSAENVEFSDDARKKAIQRELRRRQKFR

SEQ ID NO: 54495 - protein, 1016 aa, Zea mays
  Clone ID: UC-ZMFLB73276F12_FLI.pep
LGIRHHFFALRSSRWQQSPIWMPSQVMDPRRHLSQFSNPTVAASSFSEEQFRLPTERQVGFWKQESLHHIGSKSVASSPIEKPQPIGTKTVGRVEPQPYKLRDQKTAFSLEHKTFGQERHVNLPPSLWRADQDPNLQSDPSLFPDGRRTSPNEAYNENGLFSSSLSEIFDRKLGLRSMDVRLRQPVQKVDLTHVDDEPFELTEEIEAQIIGNILPDDDDLLSDVLDVGYTAHANMDDDVDDDIFYTGGGMELETDENKKNTELNGANDGLGLLNGTMNGEHPYGEHPSRTLFVRNINSSVEDSELKLLFENYGEISNLYTACKHRGFVMISYYDIRSAWNAMRALQNKPLRRRKLDIHYSIPKDNPSEKDINQGMLVVFNVDPSITNNDIHQIFSEYGDIKEIRDAPQKGHHKIIEFYDVRAAEGAARALNRSDLAGKKIKLETGRLSGARRSTQHMSKELGQEEFGVCKLGSPSTNSPSLPSLGSSNIAAMTSCGRENGSMHGLHSGLLTSMSPFREASFLGLSSTLPQSLSSPIGIASAATHSNQAPLGELSHSLSRMNGHVNYGFQGLGAIHPHSLPDVHNGANNGTPYNLNTITPVGVNKNSRTAVAVDSRHLHKVGSGNLNGHSFDRAGEGAMGFSRSGSGHNCGHQLMWNNSNNFHGHPNSPVLWQNPGSFVNNVPSRPPAQMHGVPRAPSHMIENVLPMHHHHVGSAPAINPSLWDRRHGYAGDLTEASSFHPGSVGSMGFPGSPQLHGLELNSIFSHTGGSRMDPTVSSAQISAPSQQRGPMFHGRNPMVPLPSFDSPGERMRSRRNDSGVNQSDNKRQYELDVDRIMRGEDSRTTLMIKNIPNKYTSKMLLAAIDESHKGTYDFIYLPIDFKNKCNVGYAFINMTNPQHIIPFYQSFNGKKWEKFNSEKVASLAYARIQGKTALIAHFQNSSLMNEDKRCRPILFHSDGPNAGDQEPFPMGSNIRARSGRSRTSSGEENHHDIQTVLTNGDTSSNGADNSGPTKDTE

SEQ ID NO: 54496 - protein, 431 aa, Zea mays
  Clone ID: 700476093_FLI.pep
YIHYVACLTFSVGFVGFLSDYAKTLVPNLLNGEDLVLLSDFADKLQSWCKSQVAVKVVQNDIPPESMDAMCPVQQLLPTRTSTPASKMNNLPKDAQNMEVSTPVPPINPEGNDEDETPKNTVSRNGGFLQNAVGQDLVHLGVARTTSGGPSAVASGVSTGHQHNRMDLDPASSSVDNFKTPELTKENGLEEDGKGESSMYDERQPKRRKRTLMNNEQIDELEKALVDEPEMHKNPVLLQSWSEKLSLQGPEITASQLKNWLNNRKAKLARIAKERAENADKPSTSHPGESSESAGEDNYLPPAGVMTVLSKGGSLLSPDCTEQTSQAELSPNTTMMVRPFTRSFSLEPGRLVSLVDSDGKEVGRGKIFQAPGKSTTESRVCVVDVTELRTEKWRELPHPSEAFGWTFQEAEARNGGIIRVSWDAVRLFPVA

SEQ ID NO: 54497 - protein, 326 aa, Zea mays
  Clone ID: LIB3066-046-B2_FLI.pep
PVPEVGARRGDQPLPPRGRLRRRGARQAGPGAGVPRGGVLRRHPRTGVGRADYHDRRAPVPGSAGAQGLAVVVAHGARRGAAARQLHRGPPHPDVRRQGVHGAGAGGAVRRPHAGLLPLQGVRRPPLQLPQPGREAGAVRPQHEPVLRQGAAGRVQGLPQGPHHRRVQRHHDARQVRQHVLRQPRARPRPAQHRRGAVDGPTHQAPGAALCIQRHSLLRRLRPRHGEAQLVRRQDRRRRRGQAALRRLQQRPRRRRHHTQDVTTLRVVRRRARTCLSACGSIDGRAVWHDDGVLIEGLGSSCDGHDGVKISCRNVICFMLDQVIYS

SEQ ID NO: 54498 - protein, 63 aa, Zea mays
  Clone ID: 700578987_FLI.pep
LAACSLRLAAAAIRLRLRLLQYFSLYGLQLQQSKQLQQCRLVASRTRPSLLSLAGRSARGRPP

SEQ ID NO: 54499 - protein, 910 aa, Zea mays
  Clone ID: UC-ZMFLB73110G04_FLI.pep
GKTTKGSCAPLNGGDRHEEIKHLNEGCHNAGVPETSNMEKDGKSTDVSDKRQTSQNTSQVKKRKKSKVGSVDMPSVDASGEKDHRYSENATKQDTASTKREIVHEPSMQQMSNIVHQGDSNVIENPSGDGKKKKKRRHHSESLKGMNPSQDLTKSSGFVTNESSIQCTGAAPINAKQTNLVIIEGETVTGHRKLSENLDVAATHVVDEVLADLRSKDGLSKDLDENLLPGQTHLGSNQNGIEVPESIAVKVGSTTAALPPKYPATVHSASPVNSPRQRKSKGKKLKVLSTMADSSHQSSGVPEEDANRKLKESDSLRFADKTSDHEDIVTANVVAQADEKRKATKRQRKKGSVKQVLDTLDLKEVNDTEENLVQGGSVVDTPLSTAGNVEQKDWSSETLSPKEQETNCSTHGLDSHTAKDSQDEYVTDTIGTHDNENAAGTPALHVVQKDAMALKSASPNSQKEQETSLNSELQSQDCPLEHGFSADLVNSRTEKGVRTTSSASAVKSDYNTMFHPANGRINVLDHFSRSNLNDGSSIVAESKQNNEDGSLREVKNKKKKRKQGTGSVEPNDVIESLPSEIASLTGHFGTSKAVVSSVATENMNGGNENVNKGKEKKRKGKSNMEVPTAGKDHPNCDTQFIDIGTQESLISIVQKERTGQDNGKESNSKATQNASIMQHEPEDATWNRSPEKNHHQSVDDDQNKLLTEKDHAHINKEVRKFTPQTKAHAKIRKPDGSTIKEKVAPNPKPVTNLVKDFSMSPRASSDSTEGMPQSANRYRVAVRKVPSKRYEETSGNSNKASRKVGSGAIFNDSISEGSGDELDTKTVMERSPNKSSTSADSGISSAASGESEVPDDDGTVSLSQKSFKGLHISSILRGSRSYKKALKRQMELLDDDTIVPDSQPADGLWG

SEQ ID NO: 54500 - protein, 263 aa, Zea mays
  Clone ID: 700613365_FLI.pep
SLCPKGFLLPIANAVLHNCVARKMESAGIDAALMGKPNREPRVVVQTVSEVDILDDGYRWRKYGQKVVKGNPNPRSYYKCTNTGCPVRKHVERASHDPKSVITTYEGKHNHEVPVSRNASHEMSTAPMKPAVHPINSNMPGLGGMMRACDARAFTNQYSQAAESDTISLDLGVGISPTHSDATNQMQPSVPESMQYQMQHMAPVYGSMGLPGMPVTAVPGNSASSIYGSREENGNEGFTFKAAPLDRSTNLCYSSAGNLVMGP

SEQ ID NO: 54501 - protein, 486 aa, Zea mays
  Clone ID: UC-ZMFLMO17330D06_FLI.pep
TNSSHRVPQLSRRAQPIPLPPAYTAQNSLLHLSLSRPCRPLFAYNPMATHAGENGSGHENGGGHAEWRFARAAKEGALAVAGDKMSIRAVRFKISASLDARDPRPVLPLAHGDPSAFPAFRTAAEAEDAVAAALRTGKFNCYPAGVGLPEARRALAEHLSSDLPYKLSSDDIFVTAGGTQAIEVVVSVLAQPGTNILLPRPGYPNYEARAGLHNLEVRRFNLIPERGWEIDIDGLESIADKNTTAMVIINPNNPCGSVYTREHLAKVAEVARKLGILVIADEVYGNLVFGDTPFVPMGVYGHIAPVLTIGSLSKRWIVPGWRLGWVAVCDPNKVLQETKIIASITNFLNVSTDPATFVQGALPHILKNTKEDFFKRIIGLLAETSEICFSGIKDIKCITCPHKPEGSMFVMVKLNLYLLESIHDDIDFCCKLAKEESVILCPGSVLGMENWIRITFAIDSSSLLDGLERLKSFCQRHKKKNLLNGH

SEQ ID NO: 54502 - protein, 341 aa, Zea mays
  Clone ID: 700799054_FLI.pep
AEPPSTSHSTSPGDLLLADLLGPLAIEGPPAVEQNPAQGLNANQSPAGDLALATLDDQSNSVQPIVNVEEKFHILCTKDSGVLYEDPYIQIGLKAEWRAHHGRLVLFLGNKNTSALTSVRALILPPSHLKMELSSVPDTIPPRAQVQVPLEVANLLASRDVAVLDFSYAFGTSLVDAKLRLPVVLNKFLQTITLTPEEFFSQWKALTVHSLKVQEVVKGVKPMPLSEMANLFMSLHLAVAPGLDNNPNNLVACTTFFSEATRAMLCLIRVETDPQDRTQLRLTVASGDQYLTFELKEFIKEHLVDIPRTQVAPPRAAVQPQLPTTAPATYNDPGTMLAGLL

SEQ ID NO: 54503 - protein, 293 aa, Zea mays
  Clone ID: 700072777_FLI.pep
PKRNFWIQFLAIQTQTQPGIKQHDSSGPMQGDPGYGYGGYGAGAGGYGYDYDYDVAANCVGGGYYSAPNDRYPAAPPPAAAYEDPLGGRRQHDFPAPLTGLEFQPSDTCPKNYVIFDQTYDRSRVMFHPSLANNFGSSAGGYDYGNHCYGYDQTYPGESAYHGCGDDAGGAGGVSVRQKEDTDEIDALMSTEEGDEEDDVLSTGRTPGCRAGGSPDSTCSSGGYAGNSSGGRKHETGGGEKKKERMKKMVRTLKGIIPGGDRMDTPAVLDEAVRYLKSLKVEVKKAGARGSSS

SEQ ID NO: 54504 - protein, 305 aa, Glycine max
  Clone ID: 700890845_FLI.pep
LKKFMEIACTNCTQIKQSYWILIFGGIHFFLSQLPNFNSVAGVSLAAAVMSLSYSTISWVACLARGRVENVSYAYKKTTSTDLMFRIFNALGQISFAFAGHAVALEIQATIPSTPEKPSKIPMWKGAIGAYVINAICYFPVALVGYWAFGRDVEDNVLMEFERPAWLIASANLMVFIHVVGSYQVYAMPVFDLIESMMVKRFKFPPGVALRLVARSAYVAFTLFVGVTFPFFGDLLGFFGGFGFAPTSYFLPSIMWLIIKKPKRFSTNWFINWISIYIGVCIMLASTIGGLRNIATDASTYKFYT

SEQ ID NO: 54505 - protein, 276 aa, Zea mays
  Clone ID: 700083446_FLI.pep
IFAYPFRCPIPAALLALCWYWASEGIGKKDMVVLPYKDSLLLLSRYLQQLVMESLGKEFDLDGNRVNQGLTVYGNKGSTDQHAYIQQLREGVHNFFVTFIEVLRDRPAGHDWELEPGVTCGDYLFGMLQGTRSALYANDRESISVTVQEVTPRAVGALIALYERAVGIYASLVNINAYHQPGVEAGKKAAGEVLALQKRVLTVLKEAICENPTEPLTLDEIADRCHCPEDIEMIYKIIQHMAANDRALIAEGSCGSPRSVKVYLGECSVDEDMQAA

SEQ ID NO: 54506 - protein, 339 aa, Glycine max
  Clone ID: 701038834_FLI.pep
FPILYLSAGTCTTLIIIGGSTARTFYQVVCGETCTAKPMTTVEWYLVFTCVAVVLSQLPNLNSIAGVSLIGAVTAVGYCTAIWVTSVARGALPDVSYNPVRTGNSVEDAFSVLNALGIIAFAFRGHNLILEIQSTMPSSEKHPSHVPMWKGVKVSYTIIAACLFPMAIGGYWAYGQLIPANGGMLTALYQFHSRDVSRFVLGLTSFFVVVNGLCSFQIYGMPAFDDMESGYTTRMKKPCPWWLRAFIRVFFGFLCFFIGVAVPFLSQMAGLIGGVALPVTFAYPCFMWLKTKKPKKYSAMWWLNWFLGTLGVALSAILVAASLYVIIDTGVNVSFFNPQ

SEQ ID NO: 54507 - protein, 594 aa, Zea mays
  Clone ID: 700094352_FLI.pep
FYIERRGCIYSTTTIIILMKLIAVYFIQLLHAMIHMHGNEHAIQKLRRGDAAEADGVDVVPGAVRRDAGHEQAGGAVEQRDGALAVVLALLGPQEGALEEVPPRVAVHGQQVPGVEVVLVGRVAALGDLAALVPAVEVDAGAAVREVGDGRRVEGHARDHVVAVHHPERLHGHVGAHVAREHLVAHARLPVGDHGEQAVQDAPLPVERQQRREDGRQRGAEAVAGDHDVGVRVLLQLLLDLLAQRVVGQRLARDGVGGGLGERPRGVLAVLLLQAQRLEEADVDVAQLAHAQPRQVYVRGPVPHVEGLRAPERHHHHARVLCLVGEHERLRRVVAHELVPAVVEPHEVELPDVVDDVLDVGGVLVGDLGGHHAHLEHGEGAEADEPPVHVLLLHQRHRRAAALHVQVVVIAAGSGGGGDAHHLQPPVLWAAAGWQRLQLRPPVDHPDHGPEVGRLPVQWDHQLTSEEVEKDAEYAIVERDEVEEELDDGADHESRVVGAGERLLDDLRERDEPVAGRAAQVGGGPVAGLHECVAGDGAPQEQHRQHVYEPHLLRPDDQLLLPHLGVAGGSSSDDWLLRRHMVVVASCYSCCTSC

SEQ ID NO: 54508 - protein, 524 aa, Zea mays
  Clone ID: UC-ZMFLB73208H03_FLI.pep
FQNITPSRTPRTAATAMAMAAEGAASEPELVSIPATPHGLSTPEGAATPTGAGGGGGGRSKGSGTPGRRVVEGLRGYLEDVGHLTRLDPRDAWLPVTESRGGNARYAAFHSLNAGLGFQALLLPLAFPDLGWSWGIISLTIAYFWQLYTLWILVKLHEAVPGRRYNRYVELAQAAFGEKMGMWLALFPTIYLSAGTATALILVGGETMKLFFQIVCGPLCSPNPITTVEWYLVFTSLAVILSQLPNLNSIAGLSLIGGATAIMYCTMSWVLSVSQPRPPTVSYDPVTSNSFGLSLFSILNALGIIAFAFRGHNLALEIQATMPSTFKHPAHVPMWRGAKVAYLLIAMCLFPVAVGGYWAYGNMVPPGGMLAALYAFHSHDISQGVLATTCLLVVLNCLSSFQIYSMPVFDSFEAYYTGRTNRPCSAWVRSGFRVFYGFLSLFISVALPFLSSLAGLLGGLTLPVTFAYPCFMWICVKKPERFSFSWYLNWGLGLLGTAFSLAFSLGGVWSIVNNGMKLKFFKPN

SEQ ID NO: 54509 - protein, 170 aa, Zea mays
  Clone ID: 700089621_FLI.pep
KNAKKSLLHHIRSRAISNPRKFPTMQPYVSLTRSGVPYHDDGDDSHAEHDGEPPTDRRVDGDGPLGPVPFGEEVVDGDVDEDARGEAHGDGEDPVGHPALRGGVDNDADADADGAGDGEREGVGEAGEEGPVGQHPEQRDAHGDGREDLVQAYGPQRLPCVGLGLCRFDN

SEQ ID NO: 54510 - protein, 352 aa, Homo sapiens; identical to SEQ ID NO: 54366
  Clone ID: LIB4115-001-H8_FLI.pep

SEQ ID NO: 54511 - protein, 379 aa, Zea mays
  Clone ID: 700090275_FLI.pep
LCVSSRSIIAASVGTDPWQCRLASQSQPARDGWIEVEARHAQGLVPVVHGEDGADVHGADVVGGSVHELADDDPVGALRGVERVPVRVHVPVGAHVGRRRAQPDPVVGALPAACHLGRHEPVVLRVEHEVEADPVGVGGDEDVGADVGVELGEHLHQLRVEEVGRLREVARALAVDAVHGELRRHAPDHPGARHHHAPGPELVQPREDLPVLGDEVGDVVLDGKLARADGEGHQVVVVDEVVAAERDEHERVVDGLPRRVLADERRQPLLVLLEVAQLLSDPDDVHELYAGVVEDADAGGREVGADQELGAAEVGAQVRQRGLGAEVLADDVRDVQPVGEPPRGHVRGEVDPVGRRVGARRRHQVVVVAVVHEGVTEHE

SEQ ID NO: 54512 - protein, 591 aa, Homo sapiens
  Clone ID: LIB4119-123-G6_FLI.pep
PYTNKVITLWYRPPELLLGEERYTPAIDVWSCGCILGELFTKKPIFQANLELAQLELISRLCGSPCPAVWPDVIKLPYFNTMKPKKQYRRRLREEFSFIPSAALDLLDHMLTLDPSKRCTAEQTLQSDFLKDVELSKMAPPDLPHWQDCHELWSKKRRRQRQSGVVVEEPPPSKTSRKETTSGTSTEPVKNSSPAPPQPAPGKVESGAGDAIGLADITQQLNQSELAVLLNLLQSQTDLSIPQMAQLLNIHSNPEMQQQLEALNQSISALTEATSQQQDSETMAPEESLKEAPSAPVILPSAEQTTLEASSTPADMQNILAVLLSQLMKTQEPAGSLEENNSDKNSGPQGPRRTPTMPQEEAAEKRPPEPPGPPPPPPPPPLVEGDLSSAPQELNPAVTAALLQLLSQPEAEPPGHLPHEHQALRPMEYSTRPRPNRTYGNTDGPETGFSAIDTDERNSGPALTESLVQTLVKNRTFSGSLSHLGESSSYQGTGSVQFPGDQDLRFARVPLALHPVVGQPFLKAEGSSNSVVHAETKLQNYGELGPGTTGASSSGAGLHWGGPTQSSAYGKLYRGPTRVPPRGGRGRGVPY

SEQ ID NO: 54513 - protein, 473 aa, Homo sapiens; identical to SEQ ID NO: 54473
  Clone ID: LIB4654-022-E3_FLI.pep

SEQ ID NO: 54514 - protein, 147 aa, Zea mays
  Clone ID: 700571850_FLI.pep
SSFCSLFPCSQCHCLMVVVFLFKFQMSKINMLRSCKGSVYWMAPEVINPKKMYGPSADIWSLGCTVLEMLTRQIPFPNVEWTNAFFMIGRGEQPTIPNYLSKEAQDFIGQCVRVDPESRPSASQLLEHPFVNRPLRASFESSSPPAI

SEQ ID NO: 54515 - protein, 315 aa, Zea mays
  Clone ID: UC-ZMFLMO17184G05_FLI.pep
KLKPLHALPLRAEPAKPTSQSEEEPGSGSCSGRGRSTRGMDRYQRVEKPRNDTPISQNEIRITTQGRMRNYISYGMSLLEENGHDEISIKAMGRAINKTVMVVELIKRRVGGLHQNTATESVDITDTWEPLEEGLLPLETTRHVSMITVTLSKNPLDTSSPGYQPPIPAEEVKPAFDYDHEESYPTGRGRGRGGGRRGRGRGMSNGPPPPAYGYNEEWEEEGDYYNRGRGRGRLRGRGGRGRGGYYGGGRRGGYGYDYGYAPRGGYYEEQDEYYDEPEEYAPPPGRGRGRGRRGGMPWRGRGGRGPPRGGRGSYY

SEQ ID NO: 54516 - protein, 825 aa, Homo sapiens
  Clone ID: LIB4218-102-H9_FLI.pep
WRPGSPLHGATRTLGVPSPPPPCPLSRRADPGVLGAQLLSSRPQAGGGGGEERGPWDPRPPHPAAPAPRDPEKMSSRTVLAPGNDRNSDTHGTLGSGRSSDKGPSWSSRSLGARCRNSIASCPEEQPHVGNYRLLRTIGKGNFAKVKLARHILTGREVAIKIIDKTQLNPSSLQKLFREVRIMKGLNHPNIVKLFEVIETEKTLYLVMEYASAGEVFDYLVSHGRMKEKEARAKFRQIVSAVHYCHQKNIVHRDLKAENLLLDAEANIKIADFGFSNEFTLGSKLDTFCGSPPYAAPELFQGKKYDGPEVDIWSLGVILYTLVSGSLPFDGHNLKELRERVLRGKYRVPFYMSTDCESILRRFLVLNPAKRCTLEQIMKDKWINIGYEGEELKPYTEPEEDFGDTKRIEVMVGMGYTREEIKESLTSQKYNEVTATYLLLGRKTEEGGDRGAPGLALARVRAPSDTTNGTSSSKGTSHSKGQRSSSSTYHRQRRHSDFCGPSPAPLHPKRSPTSTGEAELKEERLPGRKASCSTAGSGSRGLPPSSPMVSSAHNPNKAEIPERRKDSTSTPNNLPPSMMTRRNTYVCTERPGAERPSLLPNGKENSSGTPRVPPASPSSHSLAPPSGERSRLARGSTIRSTFHGGQVRDRRAGGGGGGGVQNGPPASPTLAHEAAPLPAGRPRPTTNLFTKLTSKLTRRVADEPERIGGPEVTSCHLPWDQTETAPRLLRFPWSVKLTSSRPPEALMAALRQATAAARCRCRQPQPFLLACLHGGAGGPEPLSHFEVEVCQLPRPGLRGVLFRRVAGTALAFRTLVTRISNDLEL

SEQ ID NO: 54517 - protein, 342 aa, Homo sapiens
  Clone ID: LIB4656-028-E10_FLI.pep
QNHSHCGFLSLNCFYLAEISMALGHLHQKGIIYRDLKPENIMLNHQGHVKLTDFGLCKESIHDGTVTHTFCGTIEYMAPEILMRSGHNRAVDWWSLGALMYDMLTGAPPFTGENRKKTIDKILKCKLNLPPYLTQEARDLLKKLLKRNAASRLGAGPGDAGEVQAHPFFRHINWEELLARKVEPPFKPLLQSEEDVSQFDSKFTRQTPVDSPDDSTLSESANQVFLGFTYVAPSVLESVKEKFSFEPKIRSPRRFIGSPRTPVSPVKFSPGDFWGRGASASTANPQTPVEYPMETSGIEQMDVTMSGEASAPLPIRQPNSGPYKKQAFPMISKRPEHLRMNL

SEQ ID NO: 54518 - protein, 1403 aa, Homo sapiens
  Clone ID: LIB4651-030-F8_FLI.pep
GSWLSQQLQQLREWPGGRRVPAAMEAVPRMPMIWLDLKEAGDFHFQPAVKKFVLKNYGENPEAYNEELKKLELLRQNAVRVPRDFEGCSVLRKYLGQLHYLQSRVPMGSGQEAAVPVTWTEIFSGKSVAHEDIKYEQACILYNLGALHSMLGAMDKRVSEEGMKVSCTHFQCAAGAFAYLREHFPQAYSVDMSRQILTLNVNLMLGQAQECLLEKSMLDNRKSFLVARISAQVVDYYKEACRALENPDTASLLGRIQKDWKKLVQMKIYYFAAVAHLHMGKQAEEQQKFGERVAYFQSALDKLNEAIKLAKGQPDTVQDALRFTMDVIGGKYNSAKKDNDFIYHEAVPALDTLQPVKGAPLVKPLPVNPTDPAVTGPDIFAKLVPMAAHEASSLYSEEKAKLLREMMAKIEDKNEVLDQFMDSMQLDPETVDNLDAYSHIPPQLMEKCAALSVRPDTVRNLVQSMQVLSGVFTDVEASLKDIRDLLEEDELLEQKFQEAVGQAGAISITSKAELAEVRREWAKYMEVHEKASFTNSELHRAMNLHVGNLRLLSGPLDQVRAALPTPALSPEDKAVLQNLKRILAKVQEMRDQRVSLEQQLRELIQKDDITASLVTTDHSEMKKLFEEQLKKYDQLKVYLEQNLAAQDRVLCALTEANVQYAAVRRVLSDLDQKWNSTLQTLVASYEAYEDLMKKSQEGRDFYADLESKVAALLERTQSTCQAREAARQQLLDRELKKKPPPRPTAPKPLLPRREESEAVEAGDPPEELRSLPPDMVAGPRLPDTFLGSATPLHFPPSPFPSSTGPGPHYLSGPLPPGTYSGPTQLIQPRAPGPHAMPVAPGPALYPAPAYTPELGLVPRSSPQHGVVSSPYVGVGPAPPVAGLPSAPPPQFSGPELAMAVRPATTTVDSIQAPIPSHTAPRPNPTPAPPPPCFPVPPPQPLPTPYTYPAGAKQPIPAQHHFSSGIPAGFPAPRIGPQPQPHPQPHPSQAFGPQPPQQPLPLQHPHLFPPQAPGLLPPQSPYPYAPQPGVLGQPPPPLHTQLYPGPAQDPLPAHSGALPFPSPGPPQPPHPPLAYGPAPSTRPMGPQAAPLTIRGPSSAGQSTPSPHLVPSPAPSPGPGPVPPRPPAAEPPPCLRRGAAAADLLSSSPESQHGGTQSPGGGQPLLQPTKVDAAEGRRPQALRLIERDPYEHPERLRQLQQELEAFRGQLGDVGALDTVWRELQDAQEHDARGRSIAIARCYSLKNRHQDVMPYDSNRVVLRSGKDDYINASCVEGLSPYCPPLVATQAPLPGTAADFWLMVHEQKVSVIVMLVSEAEMEKQKVARYFPTERGQPMVHGALSLALSSVRSTETHVERVLSLQFRDQSLKRSLVHLHFPTWPELGLPDSPSNLLRFIQEVHAHYLH

SEQ ID NO: 54519 - protein, 82 aa, Zea mays
  Clone ID: 700201525_FLI.pep
VQAMGSLQPTLLKQHLLLHPRITLLPLLRPLEQQLRQLLKTVGAPKHPLKLELQQLIGNKHFPRPCRVVSSALLLNIITHLI

SEQ ID NO: 54520 - protein, 712 aa, Zea mays
  Clone ID: 700102931_FLI.pep
RGYTATTTINRAATGPASHCSRHTRPDTNRLVHLLDLGARATASSRSVLVHAAGASHVGTRALVHLGDDGVAKALQLLHLVIELVRLGELVGVQPADGRVDGVLDLLLVVGSQLGRDLLVLDRVAHVVGVVLQRVLGLHLLLVLLVLRLVLLRVLHHLLDLLLGQTALVVGDCDLVLLPRRLVLGRHVQDAVGVDVEADRDLGDTTRSRWDAGELELPKQVVVAGPGPLTLVHLDQHTRLVVRVGGEHLLLLGGDGGVPRDKDGHHSSGSLQTQRERSDVKQKQVLHLLVALTTEDSGLDGSTIGNGLIRIDVLAQLLAVEEVLEQLLHPGDPSGATNKDNIMDAALVHLGIPQALLNRLHALPEQVHVELLKPGTGDGGVEVNALVQRVNLNGGLGSGRQSSLGPLTRGPQPPESPRVASDILLVLSLELLDKVVNHPVVKVLTTKMGVASCGLDFKDTFLNCKEGDIEGTTSKVKDEDILLTDTGCLLVKTIGNSSSGWLIDDTQHIEASNHPSILCGLPLRVVEIGRDRDNSILDRAAKVSFSDLTHLDENHRGDLFGCKLFLLPLVLNNYHWLLTGPWNDLEGPQLNITLDRGITKPPANETLGIKDGVDGVHGDLVLGRISDEALGVGEGDVRGCGAVTLVVGDDLDTVVLPDADARVRRAEIDADCRPITLACHLFSLSAEVAEDGMELAVAVNGRGVAAEGEVTE

SEQ ID NO: 54521 - protein, 275 aa, Glycine max
  Clone ID: 700952447_FLI.pep
SSSSSIPTPRKLSHLSNPTKKNHYFTSLYMSNSDATTNGVSNGAIIDAQRQQALAVKKPPSKDRHSKVDGRGRRIRMPIICAARVFQLTRELGHKSDGQTIEWLLRQAEPSIIAATGSGTTPASFSSVSLSVRAAANSLSSPSSTSDHKPQLLSPTPFILGKRIRTDEDSSKDEAVSVGPSLVGPSTPPGLWALPARPDFGQIWSFAAAAAPEMVSVSQQQQASLFAHHHRQQQQQAIGEASAARVGNYLPGHLNLLASLSGGPGNSGRRDDEPR

SEQ ID NO: 54522 - protein, 278 aa, Zea mays
  Clone ID: LIB148-012-H2_FLI.pep
VGGNVGGSGKAYTGADAGTSVSSGGSAGADAGTGATVGAGVSKDAKVGGGVGGSVGGSGNAYTGTGAGVSSGGSSGGADAGAGATVGAGVSGGAKVGGGVGGNAGGSGKAYTGTGADAGVSGGGSGGVDAGVSGGAKVDGNIGGKAGGSGNAYTGADAGTSVSGGGSGGASAGTSATVGAGVSGGAKVGGGVGGNAGGSGNVYTGTGADAGVSGGGSGGADGGIGANIGAGVFGGVKFGGGAGGSVGGSGSAAAGASGGSKSSGGGSDFGYGSASKEL

SEQ ID NO: 54523 - protein, 197 aa, Glycine max
  Clone ID: 700795232_FLI.pep
EFRAVASGTSNVTQSMLDCRPGEALVVNFAFQLHHMRDETVSTVNERDQLLRMVKSLNPKLVTVVEQDMNTNTSPFLPRFVEAYNYYSAVFNTLDATLPRESQDRMNVERQCLAKDIVNIVACEGEERIERYEVAGKWRARLSMAGFTPSPMSTNVREAIRKLIIKQYCDKFKIKEEMGGLHFGWEDKNLIVASAWK

SEQ ID NO: 54524 - protein, 275 aa, Zea mays
  Clone ID: UC-ZMFLB73017G03_FLI.pep
QTSSHSATPSSCHPPEAVQAYGAPCQPAPRRGAARRRRCRGGAADVRAHRVPGVRGGGQRQRVRDPAVHGRHVDHHGAHRGHLLRRRHAHRLPTAVRLHPGQERVQPDDRDDGAGADAGVAQRRALLRLRLRRELLRAGQEPGGPAAGRGPARGPLGRGQVRGRAPLRGLRGGRRRRGAGGAARGQPPGHPVGRRRQRRAQGRPGLALHRRAVQLALRVHRQGQRDLDALRRGRRRQYVMRFQACSRGTEAFREGRACTCAVQLCYHEVFRALVR

SEQ ID NO: 54525 - protein, 442 aa, Zea mays
  Clone ID: LIB3137-019-G9_FLI.pep
PTSWQHDSRSSSSPQPLPLPPGSPCLPSSSLQWKKGKLLGSGTFGQVYMGFNSEGGQMCAIKEVKVISDDSNSKESLRQLNQEIVLLSQLSHPNIVQYYGSDLCNETLSVYLEYVSGGSIHKLLQEYGPFGEAVLRNYTAQILSGLAYLHGRNTVHRDIKGANILVDPNGDIKLADFGMAKHISAYTSIKSFKGSPYWMAPEVIMNSNGYSLSVDIWSLGCTILEMATAKPPWSQYEGVAAIFKIGNSKDIPDIPNNLSSEAKGFLKLCLQRDPAARPTAAQLMDHPFVKDQATVRSSRSSITRDMFPNSTDGKNSRVKIETSSYRSLSPLRDPDILGRNLPGPTSPIPSTSSRRIAALNTSNVRMNMSLPVSPCSSPLRQYRQSNRSCLRSPPHPAYSAGAANYNPINNALYPTRPSSGLTDPWLEISQVKTQTFDSPRRL

SEQ ID NO: 54526 - protein, 249 aa, Zea mays
  Clone ID: LIB3151-005-A4_FLI.pep
LQTISFIYSRAQKNPIDTMRVLLVALALLALAASATSTHTSGGCGCQPPPPVHLPPPVHLPPPVHLPPPVHLPPPVHLPPPVHLPPPVHVPPPVHLPPPPCHYPTQPPRPQPHPQPHPCPCQQPHPSPCQLQGTCGVGSTPILGQCVEFLRHQCSPTATPYCSPQCQSLRQQCCQQLRQVEPQHRYQAIFGLVLQSILQQQPQSGQVAGLFGGADSAATDGDVRPAAADSMPLRCCRRCPPLKKLCAVV

SEQ ID NO: 54527 - protein, 306 aa, Zea mays
  Clone ID: UC-ZMFLB73020H08_FLI.pep
PHSTLSLHVHTTPPPMAAVAEEEVIVVGAGQSGLAVAACLSLRGVRALVLERDDCVGSLWRKRAYDRLHLHLTKKYCALPHAPHPAEAPAYLHRDDFARYLDGYAARFAVRPRLRREVRSARYDPASARWEVEAVDLGTGQAERYAARFLVVASGENAEKFLPEVPGLEAFPGQVMHAVEYRSAVVDVGTYAKIRSGEIRVLPAAVKSVRGNVVEFGDGSRHPFDAIVFATGYRSTVRRWLKSEDGLVGDDGMAARSYPEHWKGDHGLYCAGMVRRGIYGSCEDAELIAADISKLLHPKQEQGNGV

SEQ ID NO: 54528 - protein, 442 aa, Zea mays
  Clone ID: LIB3150-017-A7_FLI.pep
GANILVDNKGCIKLADFGASKQVEKLATATAAKTMKGTPYWMAPEVIVGSGHNCSADIWSVGCTVIEMAIGKPPWSHEYQEVSLLYYVGTTKSHPPIPEHLSTEAKDFLLKCLQKEPEMRSVASDLLQHPFVTRVLEDFCQLNHAGPKETSKNELPSYVVPTVDSDLSRPGKLRNLNSNKLSDTRPLWDQRCNDDDICEFADEDNVPMVGSSFNPMSEPSDEWENKLDISPEQQFSQSREFGGLAKLAESQMSENDFTFPCEGSCEEDDEFTESKIKEFLDEKATDLKKLQTPLYEFYNTVNAGVSQGVSDVCRANNVTNPQLPPRATKMVGGAALEPICVNLKNVNPKSCTRRFSRGSVESNHVLREIASPELNILEDKVHDDTEDSPSLSFSEIQRKWKEELDQELKREREMRSGGYGKAPSPSSTSRRLTGKRDRSPVY

SEQ ID NO: 54529 - protein, 497 aa, Zea mays
  Clone ID: LIB3180-011-H6_FLI.pep
HCQESERASRGSAAMAAAIVLSGQVRPLPSSLPLSLLLLLLLCCSGTSWGWSTSRGGAARECGFDGKLEALEPRHKVQSEAGSVQYFSRFNEADRELTCAGIFAVRVVVDAMGLLLPRYSNVHSLVYIVQGRGIIGFSFPGCQEETQQQQYGYGYGYGHHHHQHDHHKIHRFEQGDVVAMPAGAQHWLYNDGDAPLVAVYVFDENNNINQLEPSMRKFLLAGGFSKGQPHFAENIFKGIDARFLSEALGVSMHVAEKLQSRRDQRGEIVRVEPEHGFHQLNPSPSSSSFSFPSSQVQYQTCQRDVDRHNVCAMEVRHSVERLDQADVYSPGAGRITRLTSHKFPVLNLVQMSAVRVDLYQDAIMSPFWNFNAHSAMYGIRGSARVQVASDNGTTVFDDVLRAGQLLIVPQGYLVATKAQGEGFQYIAFETNPDTMVSHVAGKNSVLSDLPAAVIASSYAISMEEAAELKNGRKHELAVLTPAGSGSYQQGQAGSAQQ

SEQ ID NO: 54530 - protein, 250 aa, Zea mays
  Clone ID: 700210459_FLI.pep
VPGHSRWRRARRLGEHEPAQVVPHQRGLLLSVGGKPRCPDLRAVHRPGVPQERRHGRHGEAGRHRLQGLADLPVTPVPRHQALGGAAALRCRRPARAHPPTRHHSKVVRADSGGGRTLRGCGAEEVLACMFPPPGEVRRGRRGGRVEPGAPHGGERERAGVRDALRGGRQVRDPPRGRRCYDGDAACHGRVGTAAGQRRPRFTPLLLLVYSAARIRTLLRAHVPKKIKYTPTLLVLGLASPLCTPCTFAR

SEQ ID NO: 54531 - protein, 388 aa, Zea mays
  Clone ID: LIB3179-020-C2_FLI.pep
PPQVVLRGLPAPFGHAHHHPVVRGRGHPARRRRPHPRVHLLLPHPALRPDVLPVQPHQGVHRVPRDDPALHDGHDHPRRHRRGDRGRRVRGPVLRVRAVQGPHRERRHRGAVRVPGRRRVAGRAAVLGHGGAQAGAPVPGRAGRGLRRGRGLRGGQARGAVHVHRDEPAPGAAQREAVQRRGGGGPDRAAGARRRRGHQLGARVHEPRHAVVHGPQRHGGQGGGQLLRPRRALRRHRRQEAPGHRHDQRRARDEGARHERRRGRDRAPHARGRARHDRHRDGGRRDRRRPEDGPDVRRHDDLRPEGGAPGAEGTGQAQRRGRDHPRGVAGAARGVRDCVQGRRGRGRLSEHPRASMQAASYLGRRHHGVSSFNLGLCCCWTNEFPSIG

SEQ ID NO: 54532 - protein, 450 aa, Zea mays
  Clone ID: 700210566_FLI.pep
DLGCVQRGCILVYRFSFYRSTVADSDGMLEDQSCLISRSLPGSCEQESRLAYMTYHLLEITRSKRPPGTLSIEHDVVAALTKRTKSSEHQNSEALDCQGSNGQGDSDSSTLISSIGRDNSINCLARCSRSDYGSIASLNRSFRSLVRSGELYKERRQQGISEHWVYFSCNVQEWEAYDPYRSRWMTLPRMPRNECFMHSDKESLAVGTELLVFGKEILSHIILSYSILTHSWSRGVEMNAPRCLFGSASFGEKAIIAGGMDADGRVLRSVELYNSETKRWTTLPSMNKARRKCSGVFMDGKFYVIGGMASNTEVLTCGEEYDLDRGTWRVIENMSEGLNGASGAPPLVAVVENELYAAQYAGKLVRKYNKRDNSWTTLGELPERPEAVDGWGIAFRGCGERLLVIGGPRVLGGGMIELHSWIPSEGPLQWNMIGSKPSGNFVYNCAVMGC

SEQ ID NO: 54533 - protein, 558 aa, Zea mays
  Clone ID: LIB3180-043-C8_FLI.pep
QPRVSLWEIEPLTTFPMYPSPFALGLKRPWPAGLPSLYGGRGDGLTSSLMWLRDRANPGFQSLNFSGLGMSPWMQPRLDNSLLGLQSDMYQTIAAAAALQSTTKQVPPSAMQFQQPQNIADRSALLSSQILQQVQPRFQQIYPQNLNENKIQGHTQPEYLQQQLQRCQSFNEQKPPMHPQQQQQEPQQQQCVQTPQDQQMQEQKHLHNFHSLPDALSAFSQLSPATHSPPSALQTVPAFSHQQNFPDTNISSLSPSTGPSMHGMLGRLPSEAASSLPCVAINAHVSVSDPWSSKRVAVESVNPCRPHVSPQIEHLDMATCNMPQSSALAPLPGRECLVDEDGCSDPQNHLLFGVHIDSHSLLMQGGIPALQNDNSSGTIPYSTSNFLSPSENDFPLNQPLRSAGCLDESDYLPCAENAEQANQQFATFVKVYKSGTVGRLLDITRFSSYDELRSEVGRLFGLEGQLEDPLRSGWQLVFVDREDDVLLVGDDPWQEFVNSVSCIKILSPEEVQRMGKPGIQLLSSAPSRRLGNGCDSYASMQELRGLDAGMAPVGSVEF

SEQ ID NO: 54534 - protein, 400 aa, Zea mays
  Clone ID: 700209962_FLI.pep
FSPEVAASPGLVGSGQLGLGLSAAFETLPPILVEVNGFTRTLILNRPKQLNALSSTMIMGLLRCFTAYEKDDGVKLLIMKGKGRAFCAGGDVAAVVRSIHKDSWKYGADFFRNEFLLNYIIATYTKPQVSLLSGIVMGGGAGVSLHGRFRVATDNTVFAMPETALGLFPDIGASYFLSRLPGFYGEYVGLAGARLDGGEMLACGLATHFVQSNSLLSLEESLKKVDTSNAFAVCGIIDQFAQQPSLKESSSLNRLEIINKCFSKRTVEEIISALEVEASNSADEWVATTIQSLKKASPTSLKISLRSIREGRTQTVGECLQREYRMVCHVMRGDFSRDFFEGCRAILLDKDRNPKWMPPRLEQVHDEAVEQYFSRIDDPQWEDLNLPARRSHGRNIESKL

SEQ ID NO: 54535 - protein, 564 aa, Homo sapiens
  Clone ID: LIB4117-004-F7_FLI.pep
NTSVTSLPFVDTKGKKNTVSFPHISKKVLLKSSLLYQENQAHNQMPASELKASEIPFHPSIKTQDPKAEEKSPKKQKVTLTAAEALKLFKNQLSPYEQSEILGYAELWFLGLEAKKLDTAPEKFSKTSFDDEHGFYLKVLHDHIAYRYEVLETIGKGSFGQVAKCLDHKNNELVALKIIRNKKRFHQQALMELKILEALRKKDKDNTYNVVHMKDFFYFRNHFCITFELLGINLYELMKNNNFQGFSLSIVRRFTLSVLKCLQMLSVEKIIHCDLKPENIVLYQKGQASVKVIDFGSSCYEHQKVYTYIQSRFYRSPEVILGHPYDVAIDMWSLGCITAELYTGYPLFPGENEVEQLACIMEVLGLPPAGFIQTASRRQTFFDSKGFPKNITNNRGKKRYPDSKDLTMVLKTYDTSFLDFLRRCLVWEPSLRMTPDQALKHAWIHQSRNLKPQPRPQTLRKSNSFFPSETRKDKVQGCHHSSRKADEITKETTEKTKDSPTKHVQHSGDQQDCLQHGADTVQLPQLVDAPKKSEAAVGAEVSMTSPGQSKNFSLKNTNVLPPIV

SEQ ID NO: 54536 - protein, 367 aa, Zea mays
  Clone ID: 700213777_FLI.pep
IHRSGTLNLWMIKHLSWLAAEARSSKPRLRRRATGGSHLLPPVDEHGDGDVVRDGADEHEHVEDLVAVAHDVEHPGPPLLRHAADVEPCARGVGETHGDLEAERQVAGGVAPVEPQRVQRRDDARQAHGQEQRRAEAAVARGRAGRGEQRGHHERAQRRDGGQVCRPRRRVAEEGVVHRRHEGGDDHHGDARVVELPEHHAGAPRVARQQVGRRADGQARHGAHQEHRPRPPRHAGLRRPAVVAWQTRMLGASPRSVSWWCHHESHDPRSGFVGGLRPPSGDRERQEKQEPSEMRPHVESLVVPGEGAEERVADGPLGAVVPADVLVVLEVLRQLLVPHQPWPPPRLRLHARSARHGLLLLLLPLAG

SEQ ID NO: 54537 - protein, 298 aa, Zea mays
  Clone ID: LIB3150-033-F7_FLI.pep
AATHQQLFNDTLLKINKDLAYLQFELRACMNQYDGMVYYGVVNNIADEESKLGTKYSVPQIAFYKGLLEAIVQEAGNDGSITSIDALNVRLDNQVAVLDGSQDSQSRLPSSIKNFSMSQKEKTLDELIRDRWLLYTATGKIGLGTRSFLDLRSWFRGNDIPSCVVCNEACIKASSCPNEGCDVRIHEYCLKKKFSQRKASRACPSCGTGWPCQDGEADDVNEPGEEELASPANHPSGKKRRRVKAELVEENDIAGPSTEVPRTRRTLRSAKAEAVEADQEASSTAASQPGRGSKTRKK

SEQ ID NO: 54538 - protein, 99 aa, Glycine max
  Clone ID: 700657392_FLI.pep
NTEKLIFKTNSNQDEFLLVLVTVEPEGFPAKLHVAERQFIIFNIVCDELLLGIPHKAWWVVALALLCLGIAFIVPSFLPLHLLPKNQVLRTDDYVSKIS

SEQ ID NO: 54539 - protein, 452 aa, Zea mays subsp. mexicana
  Clone ID: UC-ZMROTEOSINTE036G06_FLI.pep
HFPSAMGKEKTHINIVVIGHVDSGKSTTTGHLIYKLGGIDKRVIERFEKEAAEMNKRSFKYAWVLDKLKAERERGITIDIALWKFETTKYYCTVIDAPGHRDFIKNMITGTSQADCAVLIIDSTTGGFEAGISKDGQTREHALLAFTLGVKQMICCCNKMDATTPKYSKARYDEIVKEVSSYLKKVGYNPDKIHFVPISGFEGDNMIERSTNLDWYKGPTLLEALDLINEPKRPSDKPLRLPLQDVYKIGGIGTVPVGRVETGVIKPGMVVTFGPTGLTTEVKSVEMHHEALQEALPGDNVGFNVKNVAVKDLKRGYVASNSKDDPAKEAASFTSQVIIMNHPGQIGNGYAPVLDCHTSHIAVKFAELVTKIDRRSGKELEKEPKFLKNGDAGMVKMVPTKPMVVETFSQYPPLGRFAVRDMRQTVAVGVIKSVEKKDPTGAKVTKAAAKKK

SEQ ID NO: 54540 - protein, 443 aa, Zea mays
  Clone ID: 700475858_FLI.pep
WGLDGSVWFSSEMKALSDDCERFITFPPGHLYSSKTGGLRRWYNPPWFSETVPSTPYNALFLREMFEKAVIKRLMTDVPFGVLLSGGLDSSLVASVASRHLNETKVDRQWGNKLHTFCIGLKGSPDLKAAREVADYLSTVHHEFHFTVQEGIDALEEVIYHIETYDVTTIRASTPMFLMSRKIKSLGVKMVISGEGSDEIFGGYLYFHKAPNKKEFHEETCRKIKALHLYDCLRANKATSAWGVEARVPFLDKSFISVAMDIDPEWKMIKRDLGRIEKWVIRNAFDDDERPYLPKHILYRQKEQFSDGVGYSWIDGLKDHASQHVSDSMMMNAGFVYPENTPTTKEGYYYRMIFEKFFPKPAARSTVPGGPSVACSTAKAVEWDASWSKNLDPSGRAALGVHDAAYEDTAGKTPASADPVSDKGLRPAIGESLGTPVASATAV

SEQ ID NO: 54541 - protein, 957 aa, Glycine max
  Clone ID: LIB3242-331-A5_FLI.pep
NSREESNLPQLLQEIQDKLVKGAVECMICYDMVRRSAPIWSCSGCFSIFHLTCIKKWARAPISVDLSVEKNQGGFNWRCPGCQSVQLTSSKDIRYLCFCGKRPDPPSDLYLMPHSCGEPCGKPLERDLQGDKELLCPHLCVLQCHPGPCPPCKAFAPPRLCPCGKKNITTRCSDRQSVLTCGQRCQKLLQCGRHRCQQICHLGPCHPCQVPINASCFCAQKMEVILCGEMAVKGEIRADGGVFSCGSTCQKKLNCGNHICIETCHPGSCGDCELLPSRIKTCCCGKTRLEEKRHSCLDPIPTCSQVCGKYLPCGIHHCEEPCHAGDCSPCLVLVSQKCRCGSTSRTVECCKTKMENEKFTCERPCGQKKNCGRHRCSERCCPLSNPNNILNADWDPHFCQLPCGKKLRCGQHACESLCHSGHCPPCLETIFTDLTCACGKTSIPPPLPCGTPPPSCQLPCSVPQPCSHPASHSCHFGDCPPCSMPIAKECIGGHVVLRNIPCGSKDIKCNKLCGKTRQCGLHACGRTCHLPPCDNLSAVPGIRASCGQTCGAPRRDCRHTCTAPCHPSTPCPDTRCKFPVTITCSCGRITENVPCDAGGSCANYDADTVHEASIIQKLPVLLQPVAANGKKVPLGQRKLMCNDDCAKLERKRVLADAFEITAPNLDSLHFGENSVASELLADMLRRDSKWVLSVEERCKFLVLGKSRGNAHGPKVHVFCPMLKDKRDAVRVIAERWKLAVNAAGREPKHFVVVHVTPKSRAPARVLGFKGTTTVNVPLPPAFDPLVDMDPRLVVSFIDLPMDADISALVLRFGGECELVWLNDKNALAVFNDPARAATAMRRLDHGTVYQGAVVVVVPNVGASVASSATNAWGGSGTMKGGALAALKSNPWKKDVIQEPGWREDAWGDEEWATGSANVKLPIQKKEARISASVNPWSVLNQESSSSSSVAAIKIDGF

SEQ ID NO: 54542 - protein, 246 aa, Zea mays
  Clone ID: LIB3900-007-F2_FLI.pep
TDTDMPFFFLLNLKTYRYDRDTQTRTLAAVQHVTIARAAAPGYGRWARTTHTHTYQSFLSSSLLALIGCARTVHAAGCSPVEASREVREHVLSSDRDRDCDVLAVDRAVRGAVAAAVGHRRLTAGVVGGGGVVGGDEAAGGVVGGLPLLHPLDGRGRAAGDARAPRHRLPRRVLREEPLEYHPVVVGLLVDGRVVGEHLGGVVHHLIRHLLFSEGFETIDPVVANAVTELFFLPVENMLGQVRVLV

SEQ ID NO: 54543 - protein, 268 aa, Oryza sativa nipponbare
  Clone ID: LIB3479-003-F5_FLI.pep
VPFKGNAALPTKSNEPAEPEGTGPLAVLKGFRNLPTGMPSVLIVTGLTWLSWFPFILYDTDWMGREIYHGDPKGTDPQIEAFNQGVRAGAFGLLLNSIVLGFSSFLIEPMCRKVGPRVVWVTSNFLVCIAMAATALISFWSLKDFHGTVQKAITADKSIKAVCLVLFAFLGVPLAVLYSVPFAVTAQLAATRGGGQGLCTGVLNISIVIPQVVIALGAGPWDELFGKGNIPAFGLASGFALIGGVAGIFLLPKISKRQFRSVSMGGGH

SEQ ID NO: 54544 - protein, 134 aa, Zea mays
  Clone ID: 700239348_FLI.pep
RLLALECLEAWEALQLGQLHRPWRRPFLGASALMVAMQAAGQRHLPLQLAEALAALDHATALPADLITGQAVGEVHDLRLAAFWGGRAAGVFRGSRCDGNSVGDGSDGKESCELRWLHGKIRLATRRDSLGRLS

SEQ ID NO: 54545 - protein, 315 aa, Arabidopsis thaliana columbia
  Clone ID: LIB3278-077-D5_FLI.pep
FLLLQTQFPPSMAATLPLSPINHQLCRFGNNSLTTHRFCSPGFLISSPCFIGLTGMGSATQLRARRSLISSAVATNSLLHDVGATVAVLGGAYALVLSFESLTKRNVIQQSLSRKLVHILSGLLFVLAWPIFSGSTEARYFAAFVPLVNGLRLVINGLSISPNSMLIKSVTREGRAEELLKGPLFYVLALLFSAVFFWRESPIGMISLAMMCGGDGIADIMGRKFGSTKIPYNPRKSWAGSISMFIFGFFISIALLYYYSSLGYLHMNWETTLQRVAMVSMVATVVESLPITDQLDDNISVPLATILAAYLSFGY

SEQ ID NO: 54546 - protein, 301 aa, Arabidopsis thaliana
  Clone ID: LIB23-048-A2_FLI.pep
TLPLSPINHQLCRFGNNSLTTHRFCSPGFLISSPCFIGLTGMGSATQLRARRSLISSAVATNSLLHDVGATVAVLGGAYALVLSFESLTKRNVIQQSLSRKLVHILSGLLFVLAWPIFSGSTEARYFAAFVPLVNGLRLVINGLSISPNSMLIKSVTREGRAEELLKGPLFYVLALLFSAVFFWRESPIGMISLAMMCGGDGIADIMGRKFGSTKIPYNPRKSWAGSISMFIFGFFISIALLYYYSSLGYLHMNWETTLQRVAMVSMVATVVESLPITDQLDDNISVPLATILAAYLSFGY

SEQ ID NO: 54547 - protein, 75 aa, Zea mays
  Clone ID: 700243762_FLI.pep
YTIIVHRTRRALPVSADQTNDKPVQQQRLSSIHSSYETSPGLLGLTHPNLLLSGRPWYIHLWGGEAMHPPRQMRC

SEQ ID NO: 54548 - protein, 344 aa, Glycine max
  Clone ID: LIB3242-468-F1_FLI.pep
HAMAAESGGTPTNFDLPEEVVQVLPSDPFQQLDVARKITSIALSTRVNTLESELSSLRAQIADKDNLIADLQSQLDSLDASLSQIADKLLQTEQDKESLLQENASLSNTVKKLNRDVSKLEVFRKTLMQSLQEEDDNSGAAPDIVAKIQSQASLTSTSQIGDNDVSLPPSVSSSTGNSFAKDHESDAIRPRVSQNLLLASQGSTPRITPPGSPPSLSASVSPTRTSKPVSPQRHSISFATTRGMYDDRSSMFSSMSLTHGSISSSDAGTGSQTGRTRVDGKEFFRQVRNRLSYEQFGAFLANVKELNSHKQTKEETLRKADEIFGPENKDLYTIFEGLINRNLH

SEQ ID NO: 54549 - protein, 185 aa, Glycine max
  Clone ID: 701098608_FLI.pep
YKRKHELNMLTSTLMFTLSYSYSTIAWAASAHKGVQENVEYGYKAKSTSGTVFNFFSALGDVAFAYAGHNVVLEIQATIPSTPEKPSKGPMWRGVVVAYIVVALCYFPVALIGYWMFGNTVEDNILISLEKPKWLIAMANMFVVIHVIGSYQVKFSFSYSCPLSKTLLILASPFLFGSKNRSHQE

SEQ ID NO: 54550 - protein, 540 aa, Glycine max
  Clone ID: 700605413_FLI.pep
ATQLLCMCCGAQPQPQPQAAPFMRFPFWNSVHPKNPTSVVRVQAEAADMNMNSIPHVLSVAGSDSGGGAGIQADLKTCAARRVYCSTVITAVTAQNTAGVQGLNILPEDFVADQLHSVLSDMHVHVVKTGMLPSLNIVKVLCQTLRKFPIKALVVDPVMISTSGDVLVGPSVLAGFLEELLPMTDIVTPNIKEASVLLGGVPLKSVSDMRTAAKLIHDLGPRNVLVKGGDLPNSLDAIDVFFDGEEFYELCSPRVNTRNSHGTGCTLASCIAAELAKGSSMLSAVKTAKHFIEAALDYSRDMTIGNGAQGPFDHFLALNINQSSCRLNRFNPNDLLLYAVTDSAMNRKWGRSIAEAVKAAVEGGATIVQLREKDAETRDFLEAAKVCLEICHSYGVPLLINDRIDVALACDADGVHVGQSDMPARLARTLLGPEKIIGVSCKTPEQAHQAWIDGADYIGCGGVYPTNTKANNRTIGLEGLKEVCLASTLPVVAIGGIGLSNAREVMKLGAPNLNGVAVVSALFDRECILTETRNLHALVS

SEQ ID NO: 54551 - protein, 256 aa, Zea mays
  Clone ID: 700355402_FLI.pep
LKAAMAINADVIAEMEIPEEYIESLPKNGRSILGDSMYKIITDDVFDPNELLQSVDLSTEHKIVDLKDRIEASVVIWHRKISNKLSWGPAGVSLEKREEFEERAQTALLILKHRFPGIPQSALDISKIQYNTDVGYAILESYSRTLESLAFAVLSRIEDVLHADAVACDPKRTKSRRRPSLECDAAAEAEAEAETAHHSGSVHWQDHQDAEDDGGEKHPDGNGRKLKKLHRVATKKFLHTQKIDGVAGGLKSFAHR

SEQ ID NO: 54552 - protein, 420 aa, Zea mays
  Clone ID: UC-ZMFLB73145G01_FLI.pep
RAAAMAGAGAPAVPQAGRPAPNFDVIVVGAGIMGSCTAHAAASRGARVLLLERFDLLHPLGSSHGDSRIIRDAYAQPRYLRMVRLARCLWAAAEAEAGYRVLTPTPHLSMGPRSSASLAAAIANIGAEEVDVDDLHRRWGGAFALTVPGPVDAWVTALSDHGGVLSATKAVAMFQSLAVAKGAVVRDNTEVVGIDRAPEPDGGGVVVRAAGGEAFRGARCVVTVGAWAAKLLGSWGVDLPIRPLHTLHLYWRVKPGQEQTVSASAGFPTFSSYGDPPVYGAPSLELPGLIKISCDGGPPCDPDARDWLAGDAEVTHRVARWIQEAMPDHVDAAGGPVVRQSCICSMTPDADFVMDFLGGGRDVVVGAGFSGHGFKMGPAVGKILAEMAIDGGSETAAEAGLDLGFFRIGRFDGNPMGNAK

SEQ ID NO: 54553 - protein, 124 aa, Zea mays
  Clone ID: 700572340_FLI.pep
VVCMYVLYWHSINAYNTMQLRIYKADRVLVDLDKAKLEYLQASLVVTSTRRLMIPSLLHSNMHDFAKDTESLLRWICEQLPTSWSIRKSMVDCLAAITNNNNKLEEVVVDVIPLDYDFQYLLPM

SEQ ID NO: 54554 - protein, 161 aa, Zea mays
  Clone ID: UC-ZMFLB73151D09_FLI.pep
PPKAKDPLTIFRSEVLGNLLATQKLDDHDIEGVIHLYYNIISQPCLVCKNLTDVELLRKYTFLHSLPLDKSLKIVRDFLISATAKDCSLMISFRPRENGSTDSEYDSVFLESVKRTYEYKAYFLDLDVKPLDKMEHYFKLDQRIVNFYTRNGGGLAISKGQ

SEQ ID NO: 54555 - protein, 882 aa, Glycine max
  Clone ID: 700728028_FLI.pep
IFEVRRVCCVEVSKMLIGSLLNRRPKIKGTVVLMTKNVFDVNDFMATTRGGPAAVAGGIFGAAQDIVGGIVDGATAIFSRNIAIQLISATKSENALGHGKVGKLTYLEKHLPSLPNLGDRQDAFDVYFEWDESFGIPGAFYIKNYMQSEFFLVSFKLEDVPNHGTILFACNSWVYNAKLYKKDRIFFANKAYLPNDTPTPLVKYRKEELENLRGDGRGERKELDRIYDYDVYNDLGNPDENDDLARPILGGSSKHPYPRRGRTGRKPTKKDPRCERPTSDTYIPRDENFGHLKSSDFLTYAIKSLTQNVLPQFNTAFGFNNEFDSFEDVRCLFDGGVYLPTDVLSKISPIPVLKEIFRTDGEQALKFPPPHVIKVRESEWMTDEEFGREMLAGVNPGMIQRLQEFPPKSKLDPTEFGDQTSTITKEHLEINLGGLTVEQALKGNKLFILDHHDAFIPFMNLINGLPTAKSYATRTILFLQDDGTLKPLAIELSLPHPRGHEFGADSRVVLPPAAVNSAEGTIWLIAKAYVAVNDTGYHQLISHWLNTHATIEPFVIATNRHLSVLHPIHKLLLPHYRDTMNINALARQSLINADGVIERSFLPGKYSLEMSSAVYKSWVFTDQALPADLIKRGMAIEDPCAPHGLRLVIEDYPYAVDGLEIWDAIQTWVKNYVSLYYPTDDAIKKDSELQAWWKEAVETGHGDLKDKPWWPKLNTPQDLVHICSIIIWIASALHAAVNFGQYPYGGLILNRPTLTRRFLPEPGSKEYEELSTNYQKAYLRTITRKIEALVDLSVIEILSRHASDEIYLGKRDSDDWTDDQKAIQAFEKFGTKLKEIEAKINSRNKDSSLRNRNGPVQMPYTVLLPTSEEGLTFRGIPNSISI

SEQ ID NO: 54556 - protein, 119 aa, Zea mays
  Clone ID: UC-ZMFLB73190D02_FLI.pep
RNKDYKQRMLSVFSSPLMASGYIASSSQESGEFFTLCPDENIQILVLLPFMHICSLLCISVDSIYVAVSKTVPPVTLILFSMILEMSLALTMMGLDNSIPFPSTLKQPNYVTCTSRRDL

SEQ ID NO: 54557 - protein, 184 aa, Glycine max
  Clone ID: 700728859_FLI.pep
KSIWSPVTDPRSGFNRESRTFHSLKPPLRLPPPNAAVSAAAFALFLRRNSQFPDSSTAFIDSATGHRLSYGELLHRAKTLASNLATILKLTKGDTALVLSPNILQETDEAFKAKFPNVLVMQGYGLTESAVTRTTPEEANQVGATGKLIPNIEAKIVNPETGEAMFPGEQGELWIRGPYVMKGN

SEQ ID NO: 54558 - protein, 363 aa, Zea mays; identical to SEQ ID NO: 38676
  Clone ID: UC-ZMFLB73196F04_FLI.pep

SEQ ID NO: 54559 - protein, 377 aa, Glycine max
  Clone ID: 700730047_FLI.pep
TKKIVLMSGPRLRSMNVGDSEAARPVFGPAGNKTGPLSSRKPASKPLRKAEKLYNEAKEKKSYEVSTVVASPQSYSASVLRRHEQLLHCNLSLNASCSSDASTDSFHSRASTGRLTRSNSLGCTRKRSVSKPRSVASDGVLESPPHGSQSKKRCAWITPNTEPCYATFHDKEWGVPVHDDKKLFELLVLSSALSELTWPAILSKRHILGEVFADFDPVAISKFNEKKIMAPGSTASSLLSDLKLRAIIENARQISKVIEEFGSFDKYIWSFVNHKPIISRFRYPRQVPVKTPKADVISKDLVRRGFRGVGPTVIYSFMQVVGLTNDHLISCFRFQDCMAVAEGKEENAVKDDAQQKEGDHVESDLSIAIDNLSLSSE

SEQ ID NO: 54560 - protein, 101 aa, Zea mays
  Clone ID: UC-ZMFLMO17262B03_FLI.pep
HHLDSNAPIVKLHLAALPASCLWLHALCLAFDLLDASMPSTTSTLLCLSFVCYSTQGSGSALFWLLVMFMGKVVKKRDMCPSLARCSRKGLNRRSSSSLIC

SEQ ID NO: 54561 - protein, 43 aa, Glycine max
  Clone ID: 700733738_FLI.pep
LSNVLVGTTELDKIPFHHQIRKESISIENKTKRILLTSVLKSG

SEQ ID NO: 54562 - protein, 52 aa, Glycine max
  Clone ID: 700733778_FLI.pep
ILMSTMLWNKCFQDIMFHIKCFMITFLHEDQSSVQLLTTLGKSFWYNHNFMA

SEQ ID NO: 54563 - protein, 133 aa, Zea mays
  Clone ID: 700579561_FLI.pep
NRIISLYCIKIIKYVWNTSGHRSYTVATVLAVKSNSSSSEVLLGVAVEVVAVADAEHVAVALVVADAVDVGGVLPHAAVFGAVDDVGDGAVAGNPPRRRVGARRRPVAEDHVVARRLGRLRRHPEPDGRLEGD

SEQ ID NO: 54564 - protein, 111 aa, Glycine max
  Clone ID: 700837682_FLI.pep
HTIVSSCSVFKEGINFLLIYNNTFCHSCIKYKVFIDFFYELFSPLFPFLYILADWLLCREIFCIGFHLCRGQLLKRVREKNMLEGDGQIGLELRSFSRRKNGNSGSLLYFS

SEQ ID NO: 54565 - protein, 534 aa, Zea mays subsp. mexicana
  Clone ID: UC-ZMROTEOSINTE004B05_FLI.pep
KRLKGSEALRISNSINHCSAFEFSGVQESLENQDFSYDIDFLSQFIEKERDHYSSLWSPTNSIGQREAREWLRRLWVLKPDLRELIWKGACLAINVDKWYSCLEEICACHSLPPPTEDEKLPVGTGSNPVFIVSGNVIKIYAEGGLVYSVHGLGTELEFYDLLQKSGSPLINHIPEIIASGFLEYKDDIYSTVPWNGKGIPEILVKYYSLEVSCANSCFPLGLWSKQRFGMCSSADVSDRPIWPYMVTRKCKGDIFARIRDMLSKTDILHLASSLGVQMRNIHLLPLPPVEHVPESGNNDVKEVVGTCDDTTVLPEWQQLVSTLNRRKQNVKKHLANWGDSVPQVLVEKAEEYLPPNMGFLIKFVKDDGELLCPCPSWIHSDIMDDNILIEGITKLSSSGERERVYDSDRDKINAIHIIDFSDLSIGDPICDIIPLHLDIFRGDSDLLKEFLRSYQLPLLRGESTTDVYRSVRNSKFSRASYRAMCYCILHEDNVLGAIFSLWKELRVATSWEDVENLVWGELNRYQDSAVRSA

SEQ ID NO: 54566 - protein, 62 aa, Glycine max
  Clone ID: 700837950_FLI.pep
SDGVKIDVTVKRAEAKDCLTRRHGFQGRCLFDRQCAHVCRSDGFIGGQCRGPLRKCFCSRPC

SEQ ID NO: 54567 - protein, 256 aa, Glycine max
  Clone ID: 700838356_FLI.pep
RTRDSLHPSSLVGHIVMATVEASHEAMATVANKAPITAERKVPEDLDSKLPKPYLPRALSAPDTENVNGTWGHKHNDMSVLQQHVSFFDLNNDGVVYPLDTYMGFRALGFNVILSFIFSIGIHVTLSYPTLPTWLPSPFFPIYIKNIHRAKHGSDTGTYDTEGRFMPANLEFMFSKYAREVPDKLTLKELWHMTEGNRVAYDFFGWAASKFEWGVLYVLARDEQGYLSKEAVRRCFDGSLFDYCAKNSKGAAGKMA

SEQ ID NO: 54568 - protein, 85 aa, Zea mays
  Clone ID: UC-ZMFLMO17327A03_FLI.pep
FRLQRTPSCRISLGWRAPWSCCARCHCLQQKPPSRPRPLHGPEPWPVGQVKKNLQSLALALDSCYFLIACTTCIKNTYTSMPSSS

SEQ ID NO: 54569 - protein, 478 aa, Glycine max
  Clone ID: 700839184_FLI.pep
RRRMEMMGLANTVLMMKIPQIVSGSWSWLGLQRHLNQLCNFVGNEIGNKPPPSIRSLTEIIACIQRSKIGIQDWSLSDLTIGLYLIYLRQASTHPFEDIKGIPILSESIVQDLIYHIELAKGAYRDNPCSISRNSMLRESNVKKFVKNSSVMRPAYYIGVDTRKKLVILGIRGTHTFYDLITDILSSSDGEVTYEGYSTHFGTAESARWFLRHEIEIIRKCLEKHEGFKLRLVGHSLGGAIASLLAIMIHRKSSKELGFSPDIVSAVGYGTPPCVSRELAESCSGYVSTVVMQDDIIPRLSVASLARLRNEIVQTDWMSVIEKEDWKSITDLVTNAKEVVSSVQDVARKLADYTNFRGNKSLAVGTTDKELPVVTEAPLPSEAAKETSGVTKVAGTKTAVIEELFIPGTVYYLKRNLGSQIDAGKDFFTLYKREPGEHFQKVIFSGNFITDHRCDSHYYALRDVLKGVPWCGKEGIFK

SEQ ID NO: 54570 - protein, 301 aa, Zea mays
  Clone ID: UC-ZMFLB73250F12_FLI.pep
KTSYSTEKTLKEDAYTVDEGVAYRSRRKRKKTATDSIEKALDEDAPGLLKILLDRGIGVEEIKLYGAEEDNEMIADSTESNFEDLENVIANIFPKRGKCHLLSAARYERGEKSIYCLSCLISLIEQSRYLRFRDCPVEWGWCRDLQSFIFIFRSHNRIVLERPEYGYATYFFEVVQSRPIEWQIRRLVVAMKLSGCGRTALIENRPLLVGTDLTEGEAHVLEGYGWLRNTGLGTMVNYRDRVVHDRWTEKSVSDWRSKIGKLLMVGYAEGQSITTLGPKKILDMLEATGDAEFEVKLEDPY

SEQ ID NO: 54571 - protein, 239 aa, Glycine max
  Clone ID: 700842694_FLI.pep
DDSPSLEAAIKQSREEEKEILIAKATTDELKEEGVTDSVLVITELLKPLKNAVPWFQEIFTWERPIITLAVLAASLMITYMEWVGKTFAVFLIWAIIKMLDARQKKIHDKSNEIVISRSSMASDQSTMESIVSAQHGLYTVHDMMQIANIAMLKIWSILISKADKHANLVMVAMSGLAILLAVIPFKFFLMALILQSFTMTLGKSSGSGTGNRRLREWWDSIPIVPIRVVDDPNTVDAK

SEQ ID NO: 54572 - protein, 139 aa, Zea mays
  Clone ID: UC-ZMFLMO17151G08_FLI.pep
TSKRKSPHLEERVGTPRHKPKSRGGWTGGDDLPLKKYKSNGWGSPSTPKKSYANHQFLSGCDYLTPQPSRRHNYHGTMSSPNHQFLSGCDYFTPESSRGHSHGTMSPNWNYSPSARKHGFSSSRFAAAASNTHVRFGRN

SEQ ID NO: 54573 - protein, 114 aa, Glycine max
  Clone ID: 700849946_FLI.pep
NREKEREMAFTISRSQSALTDREKENLDNLVDKECATTEGMISSQLKLKSSLSSKASSHQSMDKHAILRRIRQRRFNNKAKTALEALIGTSEANNTGTAQEQKWLQLGDSFSSP

SEQ ID NO: 54574 - protein, 224 aa, Zea mays subsp. mexicana
  Clone ID: UC-ZMROTEOSINTE032C06_FLI.pep
ELLEAEGGSFSVEEMVDFCLSLLVAGYETTSVLMTLAVKFLTETPTALAQLKEEHDSIRGVKGKGQALEWSDYKSMPFTQCVISETLRVANLISGVFRRANTDIHFKGYVIPKGCKIFASFRAVHLSLDHYENARTFDPWRWQQGKSKLQSAEGASLFTPFGGGPRLCPGYELARVVVSVFLHHLVTRFSWEEAEEDRIVFFPTTRTLKGYPIILRRRPDCDDL

SEQ ID NO: 54575 - protein, 514 aa, Glycine max
  Clone ID: 700850156_FLI.pep
ANISNQANFMRLMFDTMNETADEAAIGAKKYATKQANISGFQTLYCLVQCTPDLSTQGCRSCLSDAIGLLPWCCEGKQGGRILNPSCNVRYDLYPFYRTNVSAPPASVPPTDSSNSGGGGSEISPGTIVAIVVPITVAVLLFIVGIWLLSKRAAKKRNSAQDPKTETEISAVESLRFDFSTIEAATDKFSDANKLGEGGFGEVYKGLLPSGQEVAVKRLSKNSGQGGTEFKNEVEVVAKLQHKNLVRLLGFCLEGEEKILVYEFVANKSLDYILFDPEKQKSLDWTRRYKIVEGIARGIQYLHEDSRLKIIHRDLKASNVLLDGDMNPKISDFGMARIFGVDQTQANTNRIVGTYGYMSPEYAMHGEYSAKSDVYSFGVLILEIISGKRNSSFYETDVAEDLLSYAWKLWKDEAPLELMDQSLRESYTRNEVIRCIHIGLLCVQEDPIDRPTMASVVLMLDSYSVTLQVPNQPAFYINSRTEPNMPKGLKIDQSTTNSTSKSVNDMSVSEVDPR

SEQ ID NO: 54576 - protein, 211 aa, Glycine max
  Clone ID: 700850275_FLI.pep
KMKGAGNVSSKDMIFRADKIDLKSLDAQLEKHLSRVWSRSIETKRPREEWEIDLAKLDLRYVVAHGAYGTVYRGTYDTQDVAVKVLDWGEDGVATAAETAALRASFRQEVAVWQKLDHPNVTKFVGASMGTSNLKIPPKNPMNADEESLPSRACCVIVEFVSGGTLKQYLFKSRRRKLAYKIVIQLALDLARGYVPFLTSLQLPTAYLLLI

SEQ ID NO: 54577 - protein, 301 aa, Glycine max
  Clone ID: 700739861_FLI.pep
FLLSYVNSSLSMMALDMIDVVPRTRMEEENIAIQEAASAGLKSMEHLIRLLSPSSSLHNNLNNLNLNHLDCSEITGFTVSKFKQVINLLNRTGHARFRRSPPQAQAQAQTNPQPQPQIQQQGFSLDFVKPTILNSKPINKDETLTLSTTSSSFMSSVTNDASVSDGKIGPFLPPSAAKPPLSSAHRKKCRDAAAALSAKPSCHCSKKRKSRVKRTIRVPAISSKIADIPPDEYSWRKYGQKPIKGSPYPRGYYKCSTVRGCPARKHVERAQDDPKMLIVTYEGEHRHVLPLTSAAGVSFGH

SEQ ID NO: 54578 - protein, 620 aa, Glycine max
  Clone ID: 700854111_FLI.pep
TGRGPTVTDPNTEKQGEVFYVPRDENLGHLKSKDALEIGTKSLSQIVQPAFESAFDLKSTPIEFHSFQDVHDLYEGGIKLPRDVISTIIPLPVIKELYRTDGQHILKFPQPHVVQVSQSAWMTDEEFAREMIAGVNPCVIRGLEEFPPKSNLDPAIYGDQSSKITADSLDLDGYTMDEALGSRRLFMLDYHDIFMPYVRQINQLNSAKTYATRTILFLREDGTLKPVAIELSLPHSAGDLSAAVSQVVLPAKEGVESTIWLLAKAYVIVNDSCYHQLMSHWLNTHAAMEPFVIATHRHLSVLHPIYKLLTPHYRNNMNINALARQSLINANGIIETTFLPSKYSVEMSSAVYKNWVFTDQALPADLIKRGVAIKDPSTPHGVRLLIEDYPYAADGLEIWAAIKTWVQEYVPLYYARDDDVKNDSELQHWWKEAVEKGHGDLKDKPWWPKLQTLEDLVEVCLIIIWIASALHAAVNFGQYPYGGLIMNRPTASRRLLPEKGTPEYEEMINNHEKAYLRTITSKLPTLISLSVIEILSTHASDEVYLGQRDNPHWTSDSKALQAFQKFGNKLKEIEEKLVRRNNDPSLQGNRLGPVQLPYTLLYPSSEEGLTFRGIPNSISI

SEQ ID NO: 54579 - protein, 264 aa, Glycine max
  Clone ID: 700672484_FLI.pep
GEAEEAIMAIRGIGMSFSAPSTTRPILSLNPRFLSASSTIPLFLVPSRSSYLLLSFSFSRPETECPVPHEQQPINEYQSLSTSFPFSWAAGDVVEYASRLFVTGASFALLLGLPVAWFGSAGAQAEPAKRLLCAASSGLFAVTLAVVRMYLGWAYVGNRLLSATVEYEETGWYDGQIWVKTAEVLARDRLLGSFFVKPVLGRLKITLVSLATSLLVCALILINIDGDQNLTSKEPRVRVVPGVYNDDSARLFEPDAFRDELDLQ

SEQ ID NO: 54580 - protein, 153 aa, Glycine max
  Clone ID: 700976261_FLI.pep
SIPQFFALTKKDTFSLTMARTKQTARKSTGGKAPRKQLATKAARKSAPATGGVKKPHRFRPGTVALREIRKYQKSTELLIRKLPFQRLVREIAQDFKTDLRFQSSAVSALQEAAEAYLVGLFEDTNLCAIHAKRVTIMPKDIQLARRIRGERA

SEQ ID NO: 54581 - protein, 287 aa, Zea mays; identical to SEQ ID NO: 38989
  Clone ID: UC-ZMFLMO17264F07_FLI.pep

SEQ ID NO: 54582 - protein, 603 aa, Glycine max
  Clone ID: 700979801_FLI.pep
WNICWTMKHKDGKPINQPNKNRAVTLAVTLIALCGFSFYLGGIFCSGKDGVVVNTIQKTLDSPKQSSGSLQIKPISFPECSIDYQDYTPCTDPKRWRKYGVYRLTLLERHCPPVFDRKECLVPPPEGYKPPIRWPKSRDECWYRNVPYDWINKQKSNQHWLRKEGEKFLFPGGGTMFPNGVGEYVDLMQDLIPGMKDGTVRTAIDTGCGVASWGGDLLDRGILTVSLAPRDNHEAQVQFALERGIPAVLGVISTQRLPFPSNSFDMAHCSRCLIPWTEFGGIYLMEIHRILRPGGFWVLSGPPVNYEHRWRGWNTTIEDQRSDYEKLQELLTSMCFKLYNKKDDIAVWQKAKDNSCYEKLARESYPPQCDDSIEPDSGWYTPLRACFVVPDPKYKKSGLTYMPKWPERLHATPERVTTVHGSSTSTFSHDNGKWKKRIQHYKKLLPELGTDKVRNVMDMTTVYGAFAAALINDPLWVMNVVSSYGPNTLPVVYDRGLIGTFHDWCEAFSTYPRTYDLLHLDGLFTAESHRCEMKYVLLEMDRILRPGGHAIIRESTYFVDAIATIAKGMRWVCRKENTEYGVDKEKILICQKKLWHSSNNGSR

SEQ ID NO: 54583 - protein, 127 aa, Zea mays
  Clone ID: UC-ZMFLMO17136A09_FLI.pep
KQSFCVKACFRATDDGAYDDTTFVMKSLLSYSTVTVFVCLTSSLMQEELDGMAKNYPDRFKIYYVLNQPPEVWDGGVGFVSKEMIQTHCPAPAADIQVLRCGPPPMNKAMAAHLDGLGYTKEMQFQF

SEQ ID NO: 54584 - protein, 215 aa, Glycine max
  Clone ID: 700982626_FLI.pep
TMFLKCFGHSSSSQRQYPTIIEELCHQFSLADLGKSTNNFDQNRVIGRGAFSTVYKGCLQHKDGSDYTVALKRFHEGYSAVFKKEIELLCQLRHPNCVSLIGFCNHEKEKIIVYEYMSNGSLDRHLLRGKLSWKKRVEICIGVACGLHYLHAGAKRSIFHCILRASTILLDEDKEPKLAGFGLSIQGRNLIRRSRNKLMQIILWVLLVTCLWSMS

SEQ ID NO: 54585 - protein, 414 aa, Zea mays
  Clone ID: UC-ZMFLMO17127A12_FLI.pep
CTWKHRLQELHEAARGLLLAQADERGVVDERAAERAVGLHVVEGALEDDAGAVGDGREVQHGALVASGAPGLVGHLDRGARRVGLGGHGARAAVARVPHGEGEAVGPPRHGAHLLHERALPAAHQLDGARALGHGEVRGVHVLDGLGRDDHPGGERRVVVLDVGRDEHAPGRAGQEVGALLEPAVLEQVSPRPPGERGRVQRTDGDAVDERAAGGVLLHARVVDDQRHRVHLRLECPGVRVPAVAAVDGLHREHAPLGAHRHVQPLRLRARPRRAERDGVVGAARHGQALPDGRLVAQTHRVRALRHHQQHVPLLVPRLDVLHEARRLPTRDGVRARHHRAVHQRRLGRAILEVAVREKTVSDDRGSRRRQRAHGGDEQQRDAAHLRSPSSGCAAASPPPPPPLQLRLTRRTAL

SEQ ID NO: 54586 - protein, 220 aa, Glycine max
  Clone ID: 700983857_FLI.pep
EGLHGRGFDCLLERTPGQYYPIFPHTSSAAGATTSLLLYHLDYARTRLGTDAIECRVTSQRQFKGLIDVYRKTLSSDGIAGLYRGFGISIWGITLYRGMYFGIYDTMKPIVLVGPFEGKFLASFLLGWSITTFSGVCAYPFDTLRRRMMLTSGHPNKYCTAIHAFQEIVRQEGFRALFRGVTANMLLGMAGAGVLAGYDQLNRISSRHSHYNETNQRVLK

SEQ ID NO: 54587 - protein, 782 aa, Zea mays
  Clone ID: UC-ZMFLMO17006F05_FLI.pep
LPLPFPSFPPIHTATTAYLHHQSISSAASKALSGYPHSPKPGHMASFGVDTRPAAAASGGGVGVAGTREGALSFLSRGLREDLRLIRARAGELETFLSAPVPEPELFARLRRAYSSSASSSRTRLDLSAIGKAFEADAWRGARTARWRWEAETEAEEWEPVRMVKAHLSELERRRLAQSPSDMLHKLKLSLKSLTFAPEASEDVLPLDLGELLAYFVKQSVPLFDQLGIKRDVCDKLVESLCSKRKDHPAYSFLSATESSSSKNDNVGNELDLRIASALQSTGHHYEGGFWSDGHKSDISGKRHVAIVTTASLPWMTGTAVNPLFRAAYLAKSCKQDVTLVVPWLCKSDQELVYPNSMTFSSPEEQETYMRNWLEERVGFKTDFKISFYPGKFQKERRSIIPAGDTSQFIPSKEADIAILEEPEHLNWYHHGKRWTDKFNHVIGVVHTNYLEYIKREKNGAIQAFFVKHINNLVARAYCHKILRLSGATQDLPKSTICNVHGVNPKFLEVGERIAAERESGQQSFSKGAYFLGKMVWAKGYRELIDLFAKHNSDLEGFKLDIYGNGEDSHEVQSAARKLNLNLNFHKGRDHADDSLHGYKVFINPSISDVLCTATAEALAMGKFVVCADHPSNDFFRSFPNCLTYKTSEDFVARVKEAMARDPQPLTPEQRYNLSWDAATQRFMEHSELDKVLNGDSNSECGGSVGTETGKSVGTMMRRSASAPNMSDVVDGSLAFVHYCFTGSELLRLSTGAVPGTRDYNKQHSLDLHLPPPQVQNPVYGW

SEQ ID NO: 54588 - protein, 395 aa, Glycine max
  Clone ID: 700986090_FLI.pep
DTRTHEKDAEGKISHKFHILRNPSFFCGSGRYICGKHVDQKQTDGESSNHTIMVPKASTLWPDVFDMDKPVVFTYEEIFSTTDGFSDSSLLGHGTYGSVYYSLLRDQEVAIKRMTATKTKEFMLEMKVFCKVHHANLVELIGYAASHEELFLVYEYAQKGSLKSHLHDPQNKGHSPLSWIMRVQIAIDAARGLEYIHEHTKTHYVHRDIKTSNILLDASFRAKISDFGLAKLVGKANEGEISTTRVVGTYGYLAPEYLSDGLATTKNDVYAFGVVLFEIISGKEAIIRSEGTMSKNADRRSLASIMLGALRNSPDSMSMSSLREYIDPNMMDLYPHDCVFKLAMLAKQCVDEDPILRPDMRQVVISLSQILLSSVEWEATLAGNSQVFSGLVQGR

SEQ ID NO: 54589 - protein, 317 aa, Zea mays
  Clone ID: UC-ZMFLMO17092G04_FLI.pep
RDHLYFAVVLLLMELNFCASASTYQAGRLLSGGSVSASAPPFIPSFSSSSQKSSVSSAVSNPPCCWLRARPPCFSLPSCLRLPSPWMLSARFSSSDVVPRSSSSANSARVAVGSSSSPCCCSSSCCCKPPLAGAAPMGRLRFREAAESSAAPSSSLRLPCCWASSWNKSGLCTARARNPIICTCLCSACRSRSSMARMSARVLCCSCRSFTTSASRMLLSRLSRSISPSSPPNRPTSRHDPCDCDAWRYGGGGAGLRRLISRRRCLWPLRNPSFANSQLSGSIFLKPCTSQSDEHAQRSVSCISRSHHTLRIDKCRR

SEQ ID NO: 54590 - protein, 255 aa, Glycine max
  Clone ID: 701141767_FLI.pep
DAVTNFKPLAGADDAEAEFLSTHSKSEIVDMLRKHTYDNELQQSTRGGRRRRDAETASSGAFDAKAREQLFEKTVTPSDVGKLNRLVIPKQHAEKHFPLSGSGGGALPCMAAAAGAKGMLLNFEDVGGKVWRFRYSYWNSSQSYVLTKGWSRFVKEKNLRAGDAVQFFKSTGLDRQLYIDCKARSGKVNNNAAGLFIPVGPVVEPVQMVRLFGVDLLKLPVPGSDGIGVGCDGKRKEMELFAFECSKKLKVIGAL

SEQ ID NO: 54591 - protein, 71 aa, Glycine max
  Clone ID: 701142214_FLI.pep
LLVCMCSGPFKHWFFYLKFTITKSNMIMSDYTNCADSVLKFINYCLQKIFVNNYNLVGNQMTHVWQHSHKT

SEQ ID NO: 54592 - protein, 725 aa, Zea mays
  Clone ID: UC-ZMFLB73011F10_FLI.pep
RRMAGKEDENEKPSLVAAGGKQDRTAATTESLPQRTNLEWGKAACSEDDIQKCVAAGAFHPGELVEWRAPVKDETPTLSTMEDQFVILSLTHIICGLRVDASDFLVSVLEYYRLEWSHLTPNSITALSIFAHLCEAYVEAPPTVEVFTHFYSLYHNRKGETTTLGAVYFRLRDRMKKNYPLYYLRSSQFMWVSLWFYAKVPKSCRLTFRGDILKEENNWNWKDLLPLSCEQMKQVGQIMKLSNQGLTGADIIHDYLKRRISPLRRRMHLTCNYSGLSDPTRDSDKDLSVEDIESKLSYLLDLKRMGVKQPTGRLVRASTNDQANQPLDLLNVCSTHEAKKEAQPQVCASLRRYTRQSAGPRKVAVPPPLKIDPPPTQGPAPEEILDATTNIATAVSPNLGVEQKSIEHPTVAEERKIAELVKPTFSVIGAKRKASAPRSRSKRRAKYSLLSVVTKTRMSSLDTGSIKGTSRTKEAVLALNSRSIGLARCPPASLAEGTGNGGLFMLAKVVDHTKVVEDSMSNILLNQQVGDSSRKEVDPAQSITEIVQDQEAIEVSAAIPVPNKEEINSGVIWERMQKVQSEYVSLSMTASSELLEQAKKLVMENKRLKDVQIMLSQQVKDLEDGRRLLTERMKKAEQETFKIIEENMKLKDENKGQKQMIEELSKQNESTLGALVHKCTLLDRYKEESAQLIREKEELQSRVSRVNDLVKLVSSTLCQEKDSAS

SEQ ID NO: 54593 - protein, 430 aa, Zea mays subsp. mexicana
  Clone ID: UC-ZMROTEOSINTE023F01_FLI.pep
DLKFDPDLVIRGLVIDKEKGNLVKADRFGYIKRAMHGTQMLSTRAVSEIYGRELVDLRKEIRWEFLNTLFSVSEAVMFMQMVDKLDQGLVPAELGPLDYKGLYNAVSKALFRAHVEGQLKREIMAEPDRFVEPDPELPLALLDQKEAGKKLLLITNSDFHYTNKMMNHAFNRFLPNDVGWRDLFEMVIVSARKPEFFQLSHPLYEVVTDDGLMRPCFKVNSGGLYSGGSAQMVEKSLDIHGDEILYVGDHIYTDVSQSKVHLRWRTALICRELEDEFDALVKSHDQKEKLVTLIQQKEIVGDLFNQLRLALQRRSNSRPAQTLAATCMDDQELTESMQKLLIVMQRLDEKIGPMLEADGELFNKRWGWLSRAGLWDKSHLTRQIEKYADIYTSRVSNFLHYTPFMYFQSQEQTLAHDAHSYSGGKDIKVH

SEQ ID NO: 54594 - protein, 466 aa, Glycine max
  Clone ID: JC-GMLE01810054F11_FLI.pep
QESTCPPGTVDLTKDDDGLDTVGSCDIVERKPTPASIHSQFVTPNSTSLGMNSTGVNQNVATQIDDFWPGVCFVRSRSDTPTVGNSELPVLPDTVSPTFSQESAGHDNNPVVNSAMHNQFLGPNNLQMQMNHMNSVNEYGRSSSAPRHIHRTPVAVQALPVQSQALGPQQNSITNLNSSLLPSNSSATPHISLSNPTSVDTLNAILSDTERQQHFSRTPMNLPQVSGVNSPAFQHHTATQNRGPLINTSAPTQPQNQYRANAFSEFRNLHLQQALNLRPPPPRSSNAQWPHIQQGVPQSGNFQAAARGASVAAGQGSSHARNVPTSGATTHSHQARGMVANQPARPSVLVQNQSTVAGTPFHGLTTEQRGNTAQSVSRPEELFSSQSEQNWAPTGRMRGSLDLSQLNDESIAQRIITPTQGQNSRPPGPQPIRRTGISSLQPATTQQDVLIANNRNANAHNRSSSR

SEQ ID NO: 54595 - protein, 79 aa, Zea mays subsp. mexicana
  Clone ID: UC-ZMROTEOSINTE026F09_FLI.pep
EVYTPQTKEHNSSFFPTKTCIYGSQTTRYKARYLLDTVKQLSTADKQNHRASANYNPNLIPHATRTSHHEKISTNYTYY

SEQ ID NO: 54596 - protein, 157 aa, Glycine max
  Clone ID: UC-GMROMINSOY314F04_FLI.pep
LLCLLEWQLDDWVLCRIYNKKGKIEKYNGVAVVDQKVAKLSEEEVQFQHETKPQIKMYGHDDFRNDQLYMDTSDSGPRLHTDSSCSEHVVSPDGTCEKEVQSEPKWNDLELGPDPALGFDFNFMDLTSDDAFAPQVQYQINHLSPWQEMFTYLPKTF

SEQ ID NO: 54597 - protein, 59 aa, Glycine max
  Clone ID: UC-GMROPIC088B08_FLI.pep
GLGGRLLAAATRDPHSSNSLLVSSLCTKTSIKHSESFCGPVAFAIASVRSSSVRTYTQQ

SEQ ID NO: 54598 - protein, 231 aa, Zea mays
  Clone ID: UC-ZMFLB73376C06_FLI.pep
VVSCADIVALAARESVALGGGPAYKLPLGRRDGLAPASNAAVLAALPPPTSKVPTLLSFLAKINLDVTDLVALSGGHTVGIAHCGSFDNRLFPTQDPTLNKFFAGQLYRTCPTNATVNTTANDVRTPNAFDNKYYVDLLNREGLFTSDQDLLTNATTRPIVTRFAVDQDAFFHQFVYSYVKMGQVNVLTGSQGQVRANCSARNGAAAGDSDLPWSSVVIETVADAAGSLVL

SEQ ID NO: 54599 - protein, 64 aa, Zea mays subsp. mexicana
  Clone ID: UC-ZMROTEOSINTE105D05_FLI.pep
ITLGQGPEKSEDEGARVGGGRRRAAVRRAIESTAAVLADGSGCGACVVVDAVVGGDDVAGVVAV

SEQ ID NO: 54600 - protein, 123 aa, Zea mays
  Clone ID: UC-ZMFLB73241G05_FLI.pep
KHLSKCLKLSADDAPRGGGWRRRPVLARSSYRCPLSFSLPSAVAAGEVGSGGLAGRRGSARQLKTAGKGRSATRAALAHGSHRGSGGRAGWQSGTRWLGGAADSGGRVVHGDDDERWGRWRLW

SEQ ID NO: 54601 - protein, 248 aa, Zea mays
  Clone ID: UC-ZMFLB73195H02_FLI.pep
PLSLLVFLPRSLLGQDQLLAAVVSSAATPASHAGHATDAAIRSAAVGTSEMASSLGVGGQQQGHGHGHGEARARLRWTRQLHDRFVLAVAQLGGADSESSLLSTPPFTVTASQAVLCLMLPYRRRRLSRSLPLAAEATPKSVLRAMAVPGLTLYHLKRHLQKYRLVAVSRGVASPLGDSGDGTDERSSSSSENQPADECDDGTVAEPHGDSSRSVARMQRKLQEQIEVNETIESGRSITIVPTLWLWQ

SEQ ID NO: 54602 - protein, 189 aa, Zea mays
  Clone ID: UC-ZMFLMO17070A07_FLI.pep
ESGRNPTLVRAQQPVGVKCSVLAGACNLCNGGIRFVREQHPNRYCIAALLNFQSNHMPLQIESRRELLLPTDEDSIHAGGLRQPPQRLDGGVPLRELLVPLRLPHELHPLELHHGPELVRLEVLRLVPGRGVAGPHQQRLQQALGVHPVLYEVALVIVLGAPEPGPARLAAEHEPPFAQVAGGELLYGE

SEQ ID NO: 54603 - protein, 141 aa, Zea mays
  Clone ID: UC-ZMFLB73283C02_FLI.pep
DGSWTHSFCGFSSTQCIRRICKGVAIGISSVHKLVCCRFLCQRAGVRFTSCGDEGAEHLLECSGEVLVAAVRLQVHLAQVGRAVHADLHEGVGGSGLLLLLRFLFLLAPHGLDDGHGVPAVRPDWWPAHGLCPDMHATRSF

SEQ ID NO: 54604 - protein, 515 aa, Zea mays
  Clone ID: UC-ZMFLMO17287A11_FLI.pep
KGVPGFKRTTHASMSDQQRHYGSYELLPAHPDLRCLVCTRPFTLDAEVTDSLEALAICRECKTTVLSDSNRDDTPRANRQRRWRRRQSSIRGVSVFSQLINLARQQGHEADTDSPTVPRRHTSYSSTPSRSQRGHTSDDESDGLSYADSVFGEIESNISFGDEGGESDTSLDRHTMVGREIGIQLDNESYMNTDTDIDPMNAGVYQWDSDDPEDDEDEESEESGLDEGDDTMQERRQQWHDIAPSGLNEQESEGAAWTWRTVGSQGINRTDLRVDMEGREIRRLFIGNPGDYVDARQFEMLLEQFADEDNSSRRGAPPAAASSIENLSSVVISKGYEINGGVTCPVCKDDMPITTVAKQLPCMHLYHSSCILPWLNSRNTCPVCRYELPTDDSEYERSKHAAVNEGGIHRVERTHPQEVVEETYEPEVDGGSNTGGDTMNETNTHEQHTAQQSNGAHGRHRWLFIAAAPVVSLVSLALVLCFTNPAGNVRRQLCRRSQTTTTARVDTRRSWWSMF

SEQ ID NO: 54605 - protein, 267 aa, Zea mays
  Clone ID: UC-ZMROB73053G10_FLI.pep
RSSAGGAAGADGAMSDGGGAGPRAPASSTFWFLLHALCCLISLFLGFRFSRLLFFLLFSTTALYRSSTSSSSAAVLRATTTTTTTTTTTTTTTNTFTLSFAAANTPPSTPANRTALDVADKGAASGNPQSHVVVGRHGIRIRPWPHPDPVEVMRAHRIMERVQEEQRRWYGVKEPRQVLAVTPTYSRAFQALHLTGLLHSLRNVPYPLTWIVVEAGGTTNATASMLARSGLTFVHIPFPDRMPHDWADRHATENRMRLHALRFPCAA

SEQ ID NO: 54606 - protein, 250 aa, Zea mays
  Clone ID: UC-ZMFLMO17160C10_FLI.pep
CSHVLQGYGLTETCAGSFVSLPNNMSMLGTVGPPVPYVEVRLESVPEMGYDALSSETPRGEICIRGDTLFSGYYKREDLTKEVLVDGWFHTGDIGEWQSDGSMKIIDRKKNIFKLSQGEYVAVENLENIFGQTPAVDSIWVYGNSFESSLVAVVNPNTQALERWAESNGVTGEFATICEDPRAREFILGELTKMGKEKKLKGFELIRAVHLDPAPFDMERDLITPTYKKKRPQLLKHYQTIIDGMYNSMK

SEQ ID NO: 54607 - protein, 415 aa, Zea mays
  Clone ID: UC-ZMROB73055E05_FLI.pep
EIFFASVELSIRYCFKVAIYAEFRRDWPEALKFYEEGVRVLREMIGTSTRLPPTQRLVEIKAVAEQFHFKISTLLLHAGKAVEAITWFRKHIRSYARVLGTPEVAFLHWEWFSRQFLVFGELIETTSTTIPDTLSPRFGTADYGLTEWEFQPAYYYQLAATYLREKRYAIECSSSMANLTTEVNGVPESVMPSVYVGQYVRLFEQGDTVSILPLSDTEYTSYALSEAERFQDSYEIIALFRKAYESFQSLGATRIASVCSGGMAMEYYAAGDFSNAKQLFDNVAGLYRKEGWTTLLWENLGYLRECSMKLNSPKDFISYSLEMAALPLFSRSEEENRENKIKSGPAGSPTISRRENIQQEVINVLERNQSSEGTDDGFNNAMEEVTHLDIDQISSLRMLWLISWRFNSINLTVTL

SEQ ID NO: 54608 - protein, 226 aa, Zea mays
  Clone ID: LIB3069-041-A7_FLI.pep
DEVGAEHGPFMDLKARFMDFKQRNYVENFSNYQNLAEQQTPKFMVIACADSRVCPTAVLGFQPGEAFTVRNVANLVPPYEHEGSETSAALEFAINTLEVENVLVVGHSRCGGIQALMSMKDDSTSGSFIKNWVSIGKSARLSTRAAAGNLSFDMQCKHCEKESINSSLLNLLTYPWIEKRVNEGTLNLHGGYYNFVDCTFEKWTLLYREGLEGGSKYAIKNRSTWS

SEQ ID NO: 54609 - protein, 138 aa, Zea mays
  Clone ID: LIB3078-048-E3_FLI.pep
YSNASLNSLFTSYNPSMLLSTAYYRMDLYERPLNEVPVTNFFGSVMKTLHTDSAYTGFLAAHDNETPMSTGDNLDDHFMLKGRAIARRSTIEKEAQLTPHGWTEVLAEQLEGKNTDTVVMYGLGAMGILLALSTWLSM

SEQ ID NO: 54610 - protein, 229 aa, Zea mays
  Clone ID: UC-ZMROB73061E03_FLI.pep
CSFVMYALSMEYSPFFFFPINWVFVSSSGIRFSNLYCDPQIIPGGHKITARQRWQPTPMQLQILENIFDQGNGTPSKQRIKEITAELSHHGQISETNVYNWFQNRRARSKRKQAASLPNNAESEAEVDEESLTDKKPKSDRSLQDNKAMGAHNADRISGMHHLDTDHDQIGGMMYGCNDNGLRSSGSSGQMSFYGNIMPNPRIDHFPGKVESSRSFSHLQHGEGFDMFG

SEQ ID NO: 54611 - protein, 263 aa, Zea mays
  Clone ID: LIB3075-041-B12_FLI.pep
GRLGSDHPRHRWAAAANDVRARAPPPPPSHRHRGILTSDKELGVEEVHVWMVRNSRTYEYCVILLPIAITFYTTWWFIRFVDGFFSPIYVHLGIHLFGLGFVTSITFIFLVGVFMSSWLGASLLGLGEFFIKRMPLVRHIYSASKQISAAISPDQSSRAFKEVVIIRHPRIGEYALGFITSTVALRGAGVRGDQDLACVYVPTNNLYLGDIFLMSRADVIVPDLSVREAIEIILSGGMSVPKIISAVEGAVGLGDHGRAVKDS

SEQ ID NO: 54612 - protein, 162 aa, Zea mays
  Clone ID: UC-ZMFLMO17158G05_FLI.pep
VLEMKMSLLFCSSLDRKIFCLCFFQNSYVPPDWLILLQVVLKRISTGDENESALLFKLLGTIVEGGQEKVLSHIPKIVSNIASTVMELLSPVPDPWPQVVVHLSSVWSIFWYFIMMTGGRNTGRVGVIKNREKYKRRVIKNREKHKGSFETIHVLLRAFCYV

SEQ ID NO: 54613 - protein, 300 aa, Zea mays
  Clone ID: UC-ZMFLMO17159B03_FLI.pep
EKHAKGKSRSPSPSTRRSKSRSRSPIKYRRSRRSRSYSPPVRRSREQRSRSPSKSRHSKYGSDRSHRDDKDRYSRSGRRESERSRDHHSSSSRRNRSKSRSPRHKKPSRVDSRSPKKQREESLSPSKSRSARAGSRSPRHHKGSKSSPTRDRHSRHSRHSRSRSPGRKHRHSDKRDSRKSEIQDDKRRSHRGSRHDKDESSVKDEGERSHRSNRGDKDERSVKDPVEDKGMDTKVVAHKRSSTVSEDEILNNNSSNHKKYRHEVGLEVDGNDVCSAAADIDRKHETGVDGSLGGAAESAM

SEQ ID NO: 54614 - protein, 419 aa, Zea mays
  Clone ID: LIB3245-505-A9_FLI.pep
YGLVLCSSDEHRPRCRPPAVRRRVAAAGGGGAPPPHGRRQQHRHGPRQRRLLLHRGVLAGGPDAARPARQAVRGVGGQVPQGVRQLRGEAAPVRGVQGQPAPHRRGQQEGGHQLLAGPQRLRRPHARRVQGHLPGPPAEEDQRWPVQVRRRGRRRRRGARVRGLAEEGRRDGGQEPGAVRQLLGLLHGGGRGRDQPDRDGQPHVAVGAAAGRLQHRREQRVQRRRHGQRLLVHRHRRRAPLRGGVPVPHGGRGLRRQGPRRRGARHYIRVRGRAGQRRAGARQGPRPPARQRRHRGVREALPVLQRGRVRWTVRVGAGPRRGGGGLRQQQGAGLHHRQELVGHPLGREGLHPHEEGHRQAGGPLRHQQDGILPDQGPLMDHGRRRSYLSSLPFHPTLSISIVCPLFLNVCVFFIYYCVK

SEQ ID NO: 54615 - protein, 287 aa, Zea mays
  Clone ID: UC-ZMFLB73306E04_FLI.pep
HLCFRTLQRFTAATLEHGMHPPNAPKPEWRALLDEMAVVATEEYRSIVFKEPRFVEYFRLATPETEYGRMNIGSRPSKRKPSGGIDSLRAIPWIFAWTQTRFHLPVWLGFGAAFKNVLQKDIRNLHMLQEMYNEWPFFRVTIDLVEMVFAKGNPGIAALYDKLLVSEELHPLGEKLRANYEETQKLLLQVAGHRDLLEGDLYLKQRLRLRDAYITTLNVCQAYTLKRIRDPDYHVALRPHLSKEIMDSTKAAAELVKLNPGSEYAPGLEDTLILTMKGIAAGLQNTG

SEQ ID NO: 54616 - protein, 769 aa, Zea mays
  Clone ID: UC-ZMFLMO17163G09_FLI.pep
RIRHHSLVVNCQLSKSTSFNNSKVPKVKQLLNEVPQKPKFLKESWSSIINKKEGPISMTTKSATFKKPKPCEPTNKAKSSVLSPAEEPRVPNQLASHNVTNGQCSILGPPSATSSMVAPVLRTDSTTQLLSTRNNTVDSNNLGSVHLQGNSELKKPRLAKVPGSMMLSNAERSAGGILGSGAHREVIQNSDPSHRDAKIKDQTGFRQGASSSNRTIRCQRCNEYGHSTHFCEVEKLRLSSGKPLSERNLKDASAKRNKTSEVSTLASSEKTPSREPEHVVKCAINQNLINGPNDGIPAPSSHVKKHSLSPRANVSIPGSGVDCSKPKFKNNDPSLSGTAGIFVHNGRIMPNDHRDEPAQGFSAGDEPTSSTVPELGWIWQGGFELQRTGSSPELCDGFQAHLSCSASQLVLDAVKKFPSKVQLEEVPRKNSWPTQFQKNGPTYDNIGLFFFARDVQSYENHYSKLVENMLKNDLVLRGSVGTVELLIFPSNILSKNFQRWNMLYFLWGLFRVSKKDSSNLPSYLSTSRVEQNFNDDLQAMDWMPSTHSFSQNRSDLAELDPGLLKSTNFEPSLEASREVCLDGENSLNQLVRRRALDNHLDSDAKACSTISNGAMGSSAMSMQRKHQKPDYPEHQDKTRDTFGGNVSERDFDVNTVPVTCSVSLTHLQEEPGKLSTAIDLMDIDHGVSAGALDRSHASGGAGKRSFETAEVADEVPEHKKTKLDNNACTNDGNSDKLMPGSSSSDGKRVFPLDLNAVGDEDIVNIPAFR

SEQ ID NO: 54617 - protein, 272 aa, Zea mays
  Clone ID: 700209152_FLI.pep
MSAEAIRSAFGAAEEEFHRQVRQEWRSRPRLAAVGSCCLLGAISGDTLYVANAGDSRAVLGRRVPGGGAAVAERLSAEHNAACEEVRRELAALNPDDAQIVVHARGAWRVKGIIQVSRSIGDFYLKKPEYSLDPLFRQVGAPIALKRPALSAEPSVQVRKLKPNDLFLIFASDGLWEHLSDDAAVQIVFKNPRTGIASRLVKAALKEATRKREVRYRDLRTIERGVRRHFHDDISVVVVYLDGHRERRHTRVVDSSSNCTSAPVDIHSSNSR

SEQ ID NO: 54618 - protein, 124 aa, Glycine max
  Clone ID: LIB3093-019-A6_FLI.pep
HSFILFFPFFCCACLQMDNSELKSENNEYKLRIQALEQQSQLKDALNETLDAEVRRLRRTVAELGGESLLSSRMAQQLAISQQVFQLQHQQHPNQLRHVQLDNSHSQEQTQTQSQCHNGKATAY

SEQ ID NO: 54619 - protein, 491 aa, Zea mays
  Clone ID: 700455859_FLI.pep
SSLLPTASRCHPGSLHSLRFCSAVPEFVDVAADPAEAAVSSGHPWPEWGNFLDKLRAKGYFEQGLPSSVSSGEVAAGDGDPAAASENAATAASGNTVVDAEDSAVTSEDIYHFLKDENRVKNACLKFGRDRFDLLSLLPKQDIQAIVMSGCPNNNRKPVYSAKRLREYVQVKEEDACSICKFKASCDRAYVTPKGEVEVRTVDVVRILLSYAMDKNHSGDNSVIEESVQESAKKLLSKLTEFSDTTIDPSLPKPAFQVARKAQGSVGKGRETTAVEMKKGDWLCTNCNFLNFARNRHCLECKADGPKKIEAAVDAMKMGDWICTQCQFMNFSRNKICFKCEEPHPKRQLNPGEWECPSCDFVNFRRNAICKKCNQDRPEDDTRDSQRGLRKTRGAGKFRRFDYIDQKSDDDDDNAWFQKRGASMRSKPDQRTTTAKSRGSDGLDDILVTTKRRSTKQDEDDEVLPYEGARKHVVSRRATPSQRRFTAARNQ

SEQ ID NO: 54620 - protein, 180 aa, Glycine max
  Clone ID: LIB3093-031-D8_FLI.pep
NKTYEEEESTVLFSHSQTQTELLPFNENDPQDMVIYQVLNEANALTNTFLPQRLHQPQLCLEPTRNITKKHYRGVRRRPWGKYAAEIRDSARHGARIWLGTFQTAEEAAMAYDRAAFKMRGSKALLNFPAEIVAATELSFNNTNSNNHDAVSDSSAGSSCTNNSVQLNRNQSESCTSSTG

SEQ ID NO: 54621 - protein, 427 aa, Glycine max
  Clone ID: LIB3106-009-C11_FLI.pep
HCRSMDPLCEFCRVVRAVVYCKSDSARLCLHCDGCVHSANSLSRRHSRSLLCDKCNSQPAMIRCMNHKLSLCQGCDWNPNDCSALGHRRLALNCYTGCPSLAEFSRLWSFVFDANSSLGGWESVGTLPKSESCTSQCLEQTDHNGGYFGLVSDKLDEIESCVRYQPRMDQSQIIPSNPNYTPYCKDEAFFFPQDSNQPKLQECPNLGIHDGNELCEGFNVDNVQLNFEIADEIFYCSQVATRYHLEDGGMDCLLMDKNIAVTESSSLIESAMEASSSIQQDCVAFQSSRAGGSASVMQVINSNTNCALMNPSCTKNISLGFPQGLVHSNMPLQFPNIVGENNSTEYQDCGLSRVGESPWESNLEGTCPQARDKAKMRYNEKKKTRTFGKQIRYASRKARADTRKRVKGRFVKAGEAYDYDPLGTRDI

SEQ ID NO: 54622 - protein, 111 aa, Glycine max
  Clone ID: LIB3106-049-H1_FLI.pep
YKRKKILIYLLNGFTYRQTNKRIAPVTAWSILIQWDRALCYVKAKILSVIFVRHIGHSEQASEQDLHKQKCRHGSRIAAVGDSKHTLQTWEFASPFPRYLSSFSFISCMRA

SEQ ID NO: 54623 - protein, 304 aa, Zea mays
  Clone ID: 700550830_FLI.pep
QIFVKTLTGKTITLEVESSDTIDNVKAKIQDKEGIPPDQQRLIFAGKQLEDGRTLADYNIQKESTLHLVLRLRGGMQIFVKTLTGKTITLEVESSDTIDNVKAKIQDKEGIPPDQQRLIFAGKQLEDGRTLADYNIQKESTLHLVLRLRGGMQIFVKTLTGKTITLEVESSDTIDNVKAKIQDKEGIPPDQQRLIFAGKQLEDGRTLADYNIQKESTLHLVLRLRGGMQIFVKTLTGKTITLEVESSDTIDNVKAKIQDKEGIPPDQQRLIFAGKQLEDGRTLADYNIQKESTLHLVLRLRGGY

SEQ ID NO: 54624 - protein, 227 aa, Glycine max
  Clone ID: LIB3107-055-B3_FLI.pep
VIETFPTFVYSTVKSLKLGRATLECAVCLNEFEEVETLRFIPNCSHVFHSECIDAWLANHSTCPVCRANLFPKPDDPSFDPIQIPDPEQPVISSPTRAETGGSNPRSPNLIDQNPTSRSRSTGFRIAGWFPRSHSTGHSLVQPGENCERFTLHLPEEVRNQLMLSRTKSCGVGVTFTRENSERRGYRARSVGSSLSPHVRGWFSVKDDVGERSSDRLFSTSTRDSEV

SEQ ID NO: 54625 - protein, 112 aa, Zea mays
  Clone ID: 700574426_FLI.pep
IYTDNRMVILHSISFIINSTTSSPSISRTCNLNLLLPAPLIALHLWIWRRPAADGTGNRETLPSAPWRGRCGGSSAAARRRTTPPACTGRCAPPRPTTTAGTAACAWWGASA

SEQ ID NO: 54626 - protein, 100 aa, Glycine max
  Clone ID: LIB3107-067-B12_FLI.pep
NVSKEISFGDSELDEGSNGQQQPMPRRCTHCLAQRTPQWRAGPLGPKTLCNACGVRYKSGRLLPEYRPAKSPTFVSYLHSNSHKKVMEMRMSVYSISSEQ

SEQ ID NO: 54627 - protein, 133 aa, Zea mays
  Clone ID: 700479660_FLI.pep
QRSARFRQCRGAARAARVWARAAPSATARSCATTSRASPSRRSGGWLGGAASSASPGSSTRRPAVCSRSFWRTSFVTPSPTLSTPAARPSPPWMSSTRSSDRAAPSTASAARSLPHLVANCMCVGGGRVVCLI

SEQ ID NO: 54628 - protein, 276 aa, Glycine max
  Clone ID: LIB3109-035-C2_FLI.pep
SGCCIVVVCKVLVMDRHKCKLCSRSFSNGRALGGHMKAHLASLPLPLPPKLHSCFSSSDSEQEQSLRENPKKTLRILDPEDRESETESNKNPTRQRSKRNWKSTMPKLSLGHPEAEPLSSVSDTSPEEDLAMCLMMLSRDTWQEHKLANAGPPKTRCSSGSEIKLKSKVRSKHLCHACHKSFRSSRALGSHRTLCSPRQEAQNNSIISNNNIKVFECPFCYKLFGSGQALGGHKRSHLIPSSSSTVNHSVKLKQSFIDLNLPAPAEDDDLSVVSDA

SEQ ID NO: 54629 - protein, 79 aa, Glycine max
  Clone ID: LIB3107-002-C9_FLI.pep
SCSLSSSAEPYPFPCYFFFFCFNYIIIPNYLFFPKKTLNKEKGTNPGNMLEKLAIITKGGRENVDLRIFLLLEEKKTAV

SEQ ID NO: 54630 - protein, 319 aa, Brassica napus
  Clone ID: LIB82-020-E9_FLI.pep
LRAHLSFASSGEAFKMAAALPLSPVSHQLCRISNRFWYNAMTPRFCSPVSSPCYIGVKGIGSSSQLRARHPLISSAASTDYLLHDVGATVAVLSGAYALVLLFESLTKRDVIPQRLSRKLVHILSGLLFALSWPIFSASTEARYFAAFVPLVNGLRLVVNGLSVSPNSTLIQSVTREGRPEELLKGPLFYVLALLVAAVFFWRDSPTGMISLAMMCGGDGIADIMGRKYGSYKIPYNPRKSLAGSISMFIFGFFISIGLLYYYSSLGYLHMNWETTFTRVAIVSLVATLVESLPITDQIDDNVSVPLATILAAYLSFGY

SEQ ID NO: 54631 - protein, 233 aa, Zea mays
  Clone ID: LIB3957-022-E3_FLI.pep
AAGAYSLVRVFDELTERRLIEKSLSRKVVHVLSGVLFMSSWPLFSNSTEARYFAAVVPFLNSMRLLIYGLRLYTDEALVKSVTREGKPEELLRGPLYYVLVLLFSVLVFWRESPIGIVSLSMMSGGDGFADIVGRRYGSAKLPFNRKKSWAGSISMFISGFLLSAMMMLYFSSLGYIDVIWEEALGKLALVALAATVVECVPVTEVVDDNISVPLATMLVAFLLFSSNRTIVN

SEQ ID NO: 54632 - protein, 619 aa, Zea mays
  Clone ID: UC-ZMFLMO17154B11_FLI.pep
FYSIPLFAPPPVRPAPPRPADSAAMPLHLHLLSSPATAAKLAAGLRAAPLRRCHSLAPAPRHTDRVALASSLSAVARSAGPAVAAAQTKPSVSGKKQVLISLSDKTDLAYLGNGLQGLGYSIVSTGGTASSLEAAGVSVTKVEEITHFPEMLDGRVKTLHPSIHGGILARRDQEHHLKALKDHGIGTFDVVVVNLYPFYDKVTSGNISFEDGIENIDIGGPTMIRAAAKNHKDVLIVVDHNDYPALLEYLKGKRDDQQFPRMLAWKAMQHVASYDSAVSEWLWKQSNKGEMFPPSFTVPLELKSTLRYGENPHQSAAFYADKSLSLVGAGGIATAIQHHGKEMSYNNYLDADAAWNCVSEFDSPTCVVVKHTNPCGVASRKDILEAYRLAVRGDAVSAFGGIVAFNTTIDEDLAKEIREFRSPTDGETRMFYEIVVAPGYTEKGLEVLRGKSKALRILEAKRSGKGMLSLRQVSGGWLAQESDDLTPEEITFTTKSERSPQENELADAKFAWLCAKHVKSNAIVIAKNNCMLGMGSGQPNRRESVRIAFRKAGEEAKGAALASDAFFPFAWNDAVEEACQNGIGIIAQPGGSKKDEDAVACCNKYGVSLVLTGVRHFKH

SEQ ID NO: 54633 - protein, 249 aa, Gossypium hirsutum
  Clone ID: LIB3165-026-A4_FLI.pep
TILFVAVGKMLYENSLVSDLFAAVVCCGVIFAFLLLWQVTAKCGVDQKLNRKLVHISIGLVFMLCWPLFSAGYRGAILAAITPGVNIIRMLLIGSGIWKDEATVKSMSRYGNYRELLKGPLYYAITVTLACVVYWRTSPIGIAALCNLCAGDGLADVVGRRLGRKKLPYNRNKSIAGSVAMATAGFLSSVGYMYYFSYFGYIQDGWGMILRFLVVSLASALVESLPISTELDDNLTVSLTSIFIGSLIF

SEQ ID NO: 54634 - protein, 422 aa, Glycine max
  Clone ID: 700565535_FLI.pep
KDILGLPKNSFPTLEKKSRPPKESQRKPDGISREVYALTGGLAPLMPATEASQLKKKPPPLEKITWQWLPFTSSARKDNLHLYHWVRVVNGVPPTGDYSFAKYNKSVDVIKYTDEEYDKYLTDPMWTKEETDQLFDLCERFDLRFIVIADRFPSSRTVEELKDRYYSVSRAILIARAPSSGDVAAHPIVKETYNFAQEMERKRALSMVLSQTRQQERRDEEVLVEAKKIAEKRLPPKVAEQSQLVASNAGAEATERAVPGETISPSNVQIPMAVPDNASTLASLRMLRVYLRTYALEQMVQAANASAGLRTIKRVEQTLQDLGVNLKPRVPTKAVCAEHLELRKEILTWLNLQKQVQYKEAEGSSFRDGSYGETPGTPKDRTFVPDSTNFGVERVGKKDQKRKAPGAPSAHKRPRKLKASDL

SEQ ID NO: 54635 - protein, 306 aa, Gossypium hirsutum
  Clone ID: LIB3196-048-A11_FLI.pep
FISFSAATMSLSLSFTHPILSRHVYSAVFPPPRFLFLSPLIPTTSRFPILYRAPQRATALSATAVTASIFRDTAASASVFAGAYALVFTFDILTQKELIQQNLSRKLVHILSGLLFAISWPIFSNADEARYFASLVPLFNCLRLVIHGLSLTDDQSLIKSVTREGNPKELLRGPLYYVAMLMLCALVFWRESPVGVICLAMMCGGDGVADIIGRKYGSSKIPYNQSKSWVGSISMFVSGFIISIGMLYYYSALGYLQLDWGYTLHRVAFISLVATVVESLPISMLIDDNISVPLASMLAAYLTFGH

SEQ ID NO: 54636 - protein, 154 aa, Sorghum bicolor
  Clone ID: LIB3480-019-F3_FLI.pep
LAALTMMTLLLYRELLRGPLYYVLVLLFSVLVFWRESPVGIVSLSMMSGGDGFADIVGRRYGSVKLPFNKKKSWAGSISMFISGFLLSAMMMFYFSSLGYIDVIWQEALGKLALVALAATVVECIPVTEVVDDNISVPLATMLVAFLLFSSNAQ

SEQ ID NO: 54637 - protein, 256 aa, Glycine max
  Clone ID: 700672177_FLI.pep
FGGRGRGGDRGRGRRRGPRREEEEKWVPVTKLGRLVKEGRIRSLEQIYLHSLPIKEHQIIDTLVGPTLKDEVMKITPVQKQTRAGQRTRFKAFVVVGDNNGHVGLGVKCSKEVATAIRGAIILAKLSVIPVRRGYWGNKIGKPHTVPCKVTGKCGSVTVRMVPAPRGSGIVAARVPKKVLQFAGIDDVFTSSRGSTKTLGNFVKATFDCLMKTYGFLTPEFWKETRFSKSPFQEYTDLLAKPTGKTLILEEERVDA

SEQ ID NO: 54638 - protein, 198 aa, Triticum aestivum
  Clone ID: LIB3908-021-G6_FLI.pep
KLVHITIGMVFLLFWPLFSAGRYAPFFAALAPGINIIRMLLLGLGIMKNEAMVKSMSRSGDHRELLKGPLYYATTITLATSVLWRTSPIAIALVCNLCAGDGIADVVGRRFGKEKLPYNPNKSYAGSIAMAVAGFLASIGYMHYFHSFGLMEKSWYMTLGFLVVSVAAALVESHPISTELDDNLTVPLTSFLVGSLIL

SEQ ID NO: 54639 - protein, 185 aa, Glycine max
  Clone ID: 700560513_FLI.pep
LRTKKKEMASSMISSPAVTTVNRAGAGMVAPFTGLKSMAGFPTRKTNNDITSIASNGGRVQCMQVWPPIGKKKFETLSYLPDLDDAQLAKEVEYLLRKGWIPCLEFELEHGFVYREHNRSPGYYDGRYWTMWKLPMFGCTDASQVLKELQEAKTAYPNGFIRIIGFDNVRQVQCISFIAYKPPGF

SEQ ID NO: 54640 - protein, 296 aa, Triticum aestivum
  Clone ID: LIB4126-002-G4_FLI.pep
LHTRLRSRPLCSPTSSAPTVSSSSAPPSLRFRFGFPRRGCAADRSRRATTMAAVVSPGDGGLVHDLVSSGVTAAIALGLLRFFEELAKRGVCDQKLNRKLVHITIGMVFLLFWPLFSSGRYAPFFAALAPGINIIRMLLLGLGIMKNEAMVKSMSRSGDHRELLKGPLYYATTITLATSVLWRTSPIAIALVCNLCAGDGIADVVGRRLGKEKLPYNPNKSYAGSIAMAVAGFLASIGYMHYFHSFGLMEKSWYMTLGFLVVSVAAALVESHPISTELDDNLTVPLTSFLVGSLIL

SEQ ID NO: 54641 - protein, 312 aa, Triticum aestivum
  Clone ID: LIB4312-010-C11_FLI.pep
VSTLQRPFPSLLMAAARPALPSSPTSLLLARSTSAPDLAARRPRRWLVAAAGVPAVAGALAASASTPAASMLLRDGGATLLVTAGAYSLVRAFDALTERRLVQQSLSRKVVHVLSGVFFMASWPLFSNSTSARFFAAVVPFLNCVRLLTYGLGFYSDEALVKSVTREGKREELLRGPLYYVIVLLIIVLVFWRDSPIGIVSLSMMSGGDGFADIVGRRFGSLKLPFNKKKSWVGSAAMFISGFLLSALMLSYFSWLGYIHVSWDQALGKLVLVALAATVVECIPVTDVVDDNISVPLATMLVAFLLFGNTAN

SEQ ID NO: 54642 - protein, 132 aa, Zea mays
  Clone ID: 700106551_FLI.pep
STEQEYSHTGPKQPQVTFLMKAKGKRKLLSRQPKTPACLVLCRRGPVQIQFEAHLVCRHRGRRRGVINHRRRVGVALRNRGHSHGRWSDLEHPVSGCRGSRLLVEKVLLWRRAGDRIALERKPHAGGDCVHG

SEQ ID NO: 54643 - protein, 185 aa, Glycine max; identical to SEQ ID NO: 54639
  Clone ID: 700646115_FLI.pep

SEQ ID NO: 54644 - protein, 87 aa, Zea mays
  Clone ID: 700204510_FLI.pep
LASMESASKKVAACALALLLLQLMVAPTTATARLLQADTSPVFGLDIIAREFGHPDGAIYCGESCVLIPCISSVIGCRCENKVCVHD

SEQ ID NO: 54645 - protein, 318 aa, Glycine max
  Clone ID: 700669174_FLI.pep
FILFAQFPTSPFKMQIFVKTLTGKTITLEVESSDTIDNVKAKIQDKEGIPPDQQRLIFAGKQLEDGRTLADYNIQKESTLHLVLRLRGGMQIFVKTLTGKTITLEVESSDTIDNVKAKIQDKEGIPPDQQRLIFAGKQLEDGRTLADYNIQKESTLHLVLRLRGGMQIFVKTLTGKTITLEVESSDTIDNVKAKIQDKEGIPPDQQRLIFAGKQLEDGRTLADYNIQKESTLHLVLRLRGGMQIFVKTLTGKTITLEVESSDTIDNVKAKIQDKEGIPPDQQRLIFAGKQLEDGRTLADYNIQKESTLHLVLRLRGGF

SEQ ID NO: 54646 - protein, 343 aa, Zea mays; identical to SEQ ID NO: 37513
  Clone ID: 700264242_FLI.pep

SEQ ID NO: 54647 - protein, 115 aa, Zea mays
  Clone ID: LIB84-029-E9_FLI.pep
RRPCQRSRRRRSCSDHGVGVGDSSSSTRTTTAVKTIRTNQNHYAKHIYRLLSTYCRTKDLCIYICVRPYHHRTGIKLAISLLHDREIARVRVIKYYRCMHDACVCVSIYHVMVCI

SEQ ID NO: 54648 - protein, 105 aa, Glycine max
  Clone ID: 700656559_FLI.pep
DCCDSFFFVVIFFFCCLCVCFFSHLKMSCCGGNCGCGSACKCGNGCGGCKMYPDLSYTESTTTETLVMGVAPVKAQFESAEMGVPAENDGCKCGANCTCNPCTCK

SEQ ID NO: 54649 - protein, 164 aa, Zea mays
  Clone ID: LIB189-034-F8_FLI.pep
CTNVLVELEAGEHVVVDGVGEVVEQVLERANAGDEPLDEVTEDGEHGEPAVLDLLELELIHLLLGLAEAERVEEGPAGVGRVAGAGEELLEAEEVLLAHGARVVPVLEAAVLGEAHERHVEDEERVGVGPVVVGARGRDDARLEPRQRGLRGDDAHLAEDLRGD

SEQ ID NO: 54650 - protein, 253 aa, Glycine max
  Clone ID: 700659335_FLI.pep
LKKMPIRNIAIGRPEEATHPDTLKAGLAEFISTLIFVFAGSGSGIAYNKLTDNGAATPAGLISASIAHAFALFVAVSVGANISGGHVNPAVTFGAFVGGNITLLRGIVYVIAQLLGSIVASLLLAFVTASPVPAFGLSAGVGVGNALVLEIVMTFGLVYTVYATAVDPKKGNLGIIAPIAIGFIVGANILLGGAFSGAAMNPAVTFGPAVVSWTWTNHWIYWAGPLIGGGIAGLIYEVVFISHTHEQLPSTDY

SEQ ID NO: 54651 - protein, 58 aa, Zea mays
  Clone ID: LIB3279-035-C8_FLI.pep
CGDLLLLVWLHVLHATEDHPTEAYIGNLTLVFSARTYLVHIVFLSNTNRWFVLISSSS

SEQ ID NO: 54652 - protein, 202 aa, Glycine max; identical to SEQ ID NO: 42491
  Clone ID: 700672217_FLI.pep

SEQ ID NO: 54653 - protein, 187 aa, Zea mays
  Clone ID: LIB3279-180-D12_FLI.pep
AGRGGVEDTTKNPCKKGRPNKSVDAGGCSIAGELGDGLGSLGDGVFGELSWEDEAHGGLDLAGGDGGLLVVPGELSGLAGELLEDVVDEGVHDGHGLGGDADVGVHLLQDLEDVDFVGLHALLGLLLPLLLAALLAGGLRGGQALLGLGLLTCGRLLRLLLGRRLLLRWLLLGLGRHRVGTRGCRGR

SEQ ID NO: 54654 - protein, 185 aa, Glycine max; identical to SEQ ID NO: 54639
  Clone ID: 700684992_FLI.pep

SEQ ID NO: 54655 - protein, 227 aa, Zea mays
  Clone ID: LIB3279-192-F7_FLI.pep
IKHQGTSSYQFVKCCACSRFFHAHATVKHGRNTIALLSDDSGSIFSEHDLKANLLWNVFKCRLGSSDFVENVFDLPSLLLFHSDLHWLDEPFSKQEMYSIVAALPSDKSPGPDGFNTNFIKKCWPIISQDFYDLCDQFYHGDVCLRSINGSYIVLIPKKDNASLVGDFRPISLLNNSMKIITKLLANRLQTVMTSLVHKNQYGFIKGRTIQDCLAWAFEYIHLCHIS

SEQ ID NO: 54656 - protein, 73 aa, Glycine max
  Clone ID: 700729854_FLI.pep
FGVIIWELCTLNRPWEGVPPERVVYTVANEGARLDIPDGPLGRLISECWAEPHERPSCEEILSRLVDIEYSMC

SEQ ID NO: 54657 - protein, 168 aa, Zea mays
  Clone ID: LIB3591-092-E2_FLI.pep
EPLRADHRIAVAHKPDDAAPVERLVLVTLVAVLTLVKLSTDLLVVLLKRRQILTSLGELALLHTLTDVPVHEGALGVHEVELVVNAGEDLHNTGGVGDHTHGTLHLGQITAWDDAGRLVVDSALEASRAPVHELDGALGLDCGHSSVHVLGNHITTVHEAACHVLAMA

SEQ ID NO: 54658 - protein, 182 aa, Zea mays
  Clone ID: LIB3600-026-A11_FLI.pep
AALVRLRLGGLLLAALPLRDGVLHAQKEEQSSDQRQILGELRKEACKFCLLHIVVVEVMDDRSDQSKVQQQEISTERAAQNKKEASKTLKTNCSSNHMLQLNVWHSYSQMSRYIFDKHVEFGPKGLSCWSTISTEFIKLLVGGEEESGDEEHPPDEGHEPHLGNGGEATTGRGRGGASAAAM

SEQ ID NO: 54659 - protein, 185 aa, Glycine max; identical to SEQ ID NO: 54639
  Clone ID: 700741020_FLI.pep

SEQ ID NO: 54660 - protein, 113 aa, Zea mays
  Clone ID: LIB3607-003-G4_FLI.pep
VVAQTVETGAQTAATLTQQTEQMKRIGNELDTVHFSLKKASQLVKEIGRQVATDKCIMAFLFLIVLGVIAIIVVKIVHPNNKNIRDIPGLAPPAQNYQIHNRRLLWAEASIGM

SEQ ID NO: 54661 - protein, 448 aa, Zea mays
  Clone ID: LIB3689-240-D10_FLI.pep
ERGSPRIGNSLLLNLSLLVATRSSASLLPRGSSCWRVYLTLLIPSSSLSGMVAVKQLTGPARPAHTCAAHAHQLLSARYDHRGASQAELPDRISPSNASTFCTSMYSSSAADSSKSCRQAGALPFLPHPPKREQQQQQSSSSPSLLVCTDLGNGGQDEAEAEHPAELKDFLNLSGEASWRGGFHGESSGVAFRFREKVEFQFLSEQLGIAITDHDESPRLDDQEDIYDRPPQTSSCPVLSCSNQEEGLQRAGSPVKAQLSSYRAACNNKPRLRWNLELHELFVKAVNKLGGPEKATPKGVLKLMKVEGLTIYHVKSHLQKYRFAKYLPETKEDMKSSSEDKMPGSNPGRKKILKSLQVAEALRMQMEVQKQLHEQLEVQRQLQVRIEEHAKYLQKILEQQKARNSLSATTSSIQTELSESTKEEKPETQADTSSAQLPNKKNSDTDME

SEQ ID NO: 54662 - protein, 337 aa, Zea mays
  Clone ID: LIB4569-006-G6_FLI.pep
TLEAGREGRAVMAKNRQRRLYTNILREGFDDGFYRDVWTHVPFEHPKTFDKLAMDPAKKKDIIDDLNMFKQSKDYYDRVGKPWKRGYLLYGPPGTGKSTMVAAMANHLGYDVYDFELTSVKTNTDLRKLLIETKSKSIMVFEDIDCSLQVTGKRKSKEEEEGSKDGNGDNPSAAKQKEEEEDAKSSSKVTLSGLLNFIDGIWSACGEERLVVFTTNHVDKLDPALIRTGRMDKKIEMSYCDFESFKFLARMHLRDDVVEAHGEQCDRVRALLQEVNMVPVDVGEHLTPRSPDEFEDAGPCLARLVTALEKAKKEADILPRPQAQPDVSGIVVDAGSK

SEQ ID NO: 54663 - protein, 614 aa, Zea mays
  Clone ID: LIB3591-073-A8_FLI.pep
KLYSERVSMCGILAVLGCADEAKGSSKRSRVLELSRRLKHRGPDWSGLRQVGDCYLSHQRLAIIDPASGDQPLYNEDQSVVVAVNGEIYNHLDLRSRLAGAGHSFRTGSDCEVIAHLYEEHGEEFVDMLDGVFSFVLLDTRHGDRAGSSFFMAARDAIGVTPLYIGWGVDGSVWISSEMKALHDECEHFEIFPPGHLYSSNTGGFSRWYNPPWYDDDDDEEAVVTPSVPYDPLALRKAFEKAVVKRLMTDVPFGVLLSGGLDSSLVATVAVRHLARTEAARRWGTKLHSFCVGLEGSPDLKAAREVAEYLGTLHHEFHFTVQDGIDAIEDVIYHTETYDVTTIRASTPMFLMSRKIKSLGVKMVISGEGSDELFGGYLYFHKAPNKEELHRETCRKVKALHQYDCLRANKATSAWGLEARVPFLDKEFINAAMSIDPEWKMVQPDLGRIEKWVLRKAFDDEEQPFLPKHILYRQKEQFSDGVGYSWIDGLKAHATSNVTDKMLSNAKFIFPHNTPTTKEAYYYRMVFERFFPQKSAILTVPGGPSVACSTAKAIEWDAQWSGNLDPSGRAALGVHLAAYEHQHDPEHVPAAIAAGSGKKPRTIRVAPPGVAIEG

SEQ ID NO: 54664 - protein, 554 aa, Zea mays
  Clone ID: UC-ZMFLMO17179D12_FLI.pep
PQRSRWSASLPSAPLPTAVSSSPLLHHLAVATHRLQRQPSSVTAERPSDPRDAARAQEQVVEKGNIIMDIMQTSDSSHHGIVENSPYRIPYDRHAEGGQLGASWYFSRKEIEENSLSRRDGIDLKKESYLRKSYCTFLQDLGMRLKVPQVTIATAIVFCHRFFLRQSHAKNDRRTIATVCMFLAGKVEETPRPLKDVILLSYEIIHKKDPAAVQRIKQKEVYEQQKELILLGERVVLVTLGFDLNVNHPYKPLVEAIKIFKVAQNALAQVAWNFVNDGLRTSLCLQFKPHHIAAGAIFLAAKFLKVKLPSDGEKVWWQEFDVTPWQLEEVSNQMLELYEQNRVQPPPSQGNDTEGSSASVANQRVPGKVLGVADEPPAHDHNQAPRPSSQQNMLDHRGYDHPHPDKQNYRIPPNDARDGTANSNEGPNVSSSMMDAMKKVNKDKVKAALEKRRKSKGDFSRKVDVMDDDDLIERELEHGVELAAEDEKVKQERKQSWPHLAHHQSTNRENTEEGELSMDSQEYRSPEHDNRKRKDVREYRNYDRDERDLKRLRS

SEQ ID NO: 54665 - protein, 1196 aa, Homo sapiens
  Clone ID: LIB4115-013-G12_FLI.pep
CNPNKAIFTVDAKTTEILVANDKACGLLGYSSQDLIGQKLTQFFLRSDSDVVEALSEEHMEADGHAAVVFGTVVDIISRSGEKIPVSVWMKRMRQERRLCCVVVLEPVERVSTWVAFQSDGTVTSCDSLFAHLHGYVSGEDVAGQHITDLIPSVQLPPSGQHIPKNLKIQRSVGRARDGTTFPLSLKLKSQPSSEEATTGEAAPVSGYRASVWVFCTISGLITLLPDGTIHGINHSFALTLFGYGKTELLGKNITFLIPGFYSYMDLAYNSSLQLPDLASCLDVGNESGCGERTLDPWQGQDPAEGGQDPRINVVLAGGHVVPRDEIRKLMESQDIFTGTQTELIAGGQLLSCLSPQPAPGVDNVPEGSLPVHGEQALPKDQQITALGREEPVAIESPGQDLLGESRSEPVDVKPFASCEDSEAPVPAEDGGSDAGMCGLCQKAQLERMGVSGPSGSDLWAGAAVAKPQAKGQLAGGSLLMHCPCYGSEWGLWWRSQDLAPSPSGMAGLSFGTPTLDEPWLGVENDREELQTCLIKEQLSQLSLAGALDVPHAELVPTECQAVTAPVSSCDLGGRDLCGGCTGSSSACYALATDLPGGLEAVEAQEVDVNSFSWNLKELFFSDQTDQTSSNCSCATSELRETPSSLAVGSDPDVGSLQEQGSCVLDDRELLLLTGTCVDLGQGRRFRESCVGHDPTEPLEVCLVSSEHYAASDRESPGHVPSTLDAGPEDTCPSAEEPRLNVQVTSTPVIVMRGAAGLQREIQEGAYSGSCYHRDGLRLSIQFEVRRVELQGPTPLFCCWLVKDLLHSQRDSAARTRLFLASLPGSTHSTAAELTGPSLVEVLRARPWFEEPPKAVELEGLAACEGEYSQKYSTMSPLGSGAFGFVWTAVDKEKNKEVVVKFIKKEKVLEDCWIEDPKLGKVTLEIAILSRVEHANIIKVLDIFENQGFFQLVMEKHGSGLDLFAFIDRHPRLDEPLASYIFRQLVSAVGYLRLKDIIHRDIKDENIVIAEDFTIKLIDFGSAAYLERGKLFYTFCGTIEYCAPEVLMGNPYRGPELEMWSLGVTLYTLVFEENPFCELEETVEAAIHPPYLVSKELMSLVSGLLQPVPERRTTLEKLVTDPWVTQPVNLADYTWEEVFRVNKPESGVLSAASLEMGNRSLSDVAQAQELCGGPVPGEAPNGQGCLHPGDPRLLTS

SEQ ID NO: 54666 - protein, 140 aa, Zea mays
  Clone ID: UC-ZMFLMO17169G05_FLI.pep
NSMQATLVASRKSLHKRKGVLEVTHELLERLEAHLRATAELMVTANMRGNSAEEVAERVLSQTSIWGLQGPTVSPVYRRRDGKVDVEYYAINVVVPQKLLYKSIQQLRSIGGSGVLVTKLTYIFDEETPRWRNLLSELGL

SEQ ID NO: 54667 - protein, 152 aa, Zea mays
  Clone ID: LIB3067-033-H5_FLI.pep
WWWWKRWGWEWRGWIGWWEWRRRIWWRRQQRWRRRIWWWWKRWRRRIWRRADERSLPRGRAEAGRVRQLAERADQRDPGDAAQDAVLHADPGAGGPGGGGVPLHRPQGQRPGHQPQPAHQPQPPRQLLRQARPLGLPVLLTITRPSIDRSGG

SEQ ID NO: 54668 - protein, 311 aa, Glycine max
  Clone ID: 700756148_FLI.pep
PTSPFKMQIFVKTLTGKTITLEVESSDTIDNVKAKIQDKEGIPPDQQRLIFAGKQLEDGRTLADYNIQKESTLHLVLRLRGGMQIFVKTLTGKTITLEVESSDTIDNVKAKIQDKEGIPPDQQRLIFAGKQLEDGRTLADYNIQKESTLHLVLRLRGGMQIFVKTLTGKTITLEVESSDTIDNVKAKIQDKEGIPPDQQRLIFAGKQLEDGRTLADYNIQKESTLHLVLRLRGGMQIFVKTLTGKTITLEVESSDTIDNVKAKIQDKEGIPPDQQRLIFAGKQLEDGRTLADYNIQKESTLHLVLRLRGGF

SEQ ID NO: 54669 - protein, 412 aa, Zea mays
  Clone ID: LIB3069-003-D7_FLI.pep
LVPSFPSSRAVLRSNCRTRAEESRALPRALPRGDPVAFLRGCCSFGSAGRKRPKASPLPSPPRLSAAAAAADDGAKMKGLFKTKPRTPVDIVRQTRECLVHLDLHSGSRSGDAKRDEKMTELSKNIRDMKSILYGNGESEPVTEACVQLTQEFFRENTLRLLIIHLPKLNLETRKDATQVVANLQRQQVSSKIVASEYLESNKDLLDILILGYENMDIALHYGAMLRECIRHQSIARYVLESEHMKKFFDYIQLPNFDIASDASATFKELLTRHKATVAEFLSNNYDWFFEEFNSRLLSSTNYITKRQAIKLLGDMLLDRSNVAVMMRYVSSKDNLMILMNLLRDSSKNIQIEAFHVFKLFAANKNKPPEVVNILVTNRNKLLRFFAGFKIDKEDEQFEADKEHVIKEISAL

SEQ ID NO: 54670 - protein, 261 aa, Glycine max
  Clone ID: 700756577_FLI.pep
SHHNRQRQLKKMPIRNIAVGRPEEATHPDTLKAALAEFISTFIFVFAGSGSGIAYNKLTDNGAATPAGLISASIAHAFALFVAVSVGANISGGHVNPAVTFGAFVGGNITFLRGIVYVIAQLLGSIVASLLLAFVTASTVPAFGLSAGVGVGNALVLEIVMTFGLVYTVYATAIDPKKGNLGIIAPIAIGFIVGANILLGGAFSGAAMNPAVTFGPAVVSWTWTNHWIYWAGPLIGGGIAGLVYEVVFISHTHEQLPTTDY

SEQ ID NO: 54671 - protein, 148 aa, Zea mays
  Clone ID: LIB3078-054-F9_FLI.pep
SYLHVSVHDELELLDAVLHGRAAGAVKADAARGERGEHGHRLQRVGAPGHVPVHHLAQLLAVAHRLVDADDEVLLLRPLAQVDGPPPRQQLQQHHAERVHVALQRQLPCQRVFGVEVAERAQHPGGGVQVLVLLQQLGEPEVRDLCLV

SEQ ID NO: 54672 - protein, 459 aa, Glycine max
  Clone ID: 700796979_FLI.pep
FNSQAVYLRRRGAFHGPPTNSSKTLDGAGRLSSVESTEDKSELYVVSTEDPENDDDRNDGSDPAEGMPGFQNVLKDMIPGVKVKVFKVITPDKVDKDISNVIEQIIEDEDEDEDGNEDEDEDEDEDEDEDEEEDEDEDEDEDEGKENDTESLELEDIKSETDQEGDDEIEVNAGLGTFESEDQNEFAVKIAIGGLVQKLSGNLSSRDLLRVPAKLEMKGRGSFSFTVEKEVNQQVGLDKGNSSSDKSTKFQGRRRVDHVIFDLAKFIGRGKIPSKVLKEVGELINLTLSQAQSHHQLSGSTIFNRIEIPTSFDPLNGLYIGAHGLYSSEVIHLRRRFGQWQEDNGAKEPSNLEFYEYVEALKLTGDPYVPAGQVAFRAKIGKRYQLPHKGIIPEEFGVIARYKGEGRLAEPGFQNPRWVDGELVILDGKHLKAGPVVGFVYWAPEYHFLVFFNRLRLQQ

SEQ ID NO: 54673 - protein, 415 aa, Zea mays; identical to SEQ ID NO: 46800
  Clone ID: LIB3075-052-F11_FLI.pep

SEQ ID NO: 54674 - protein, 303 aa, Zea mays
  Clone ID: 700073332_FLI.pep
SDDGIAPADEREDGWLCFYEILANHFVRVPESGRRILELIVQLWSQSFAANIFALLFQKWLFEAPLDEKEISLRYSSALVQGATNVFWIDIQTNTRHFLSLYHYLLEDVALVPERLSKISLQAGRDLFLLLSRFMFFYDQDHMLSSFLEHFPNFPNSFLVGGPADYFVIELADQLQKLKIEPVLLHYLSRMSILQGLELRLSTSTRLKACLYSFTSPGGPTYPTRAVRHAAWNTLDLLFPIGRYPRHVISLFFRLLYPWYWPSSCWNFVMTCAMTVYYYILNLLVSCWENMRRRPSHRRTHGE

SEQ ID NO: 54675 - protein, 262 aa, Glycine max
  Clone ID: LIB3093-025-E10_FLI.pep
YNMETMNVQVMRSLSDMVIKKGPWTEEEDSVLINYVNVHGEGHWNSLARSSGLKRTGKSCRLRWFNYLRPNVRRGNITLQEQLLILELHSHWGNRWAKIAEQLPGRTDNEIKNYWRTRVVKQAKQLKCHVNSKQFRDALRFVWMPRLMEQIQASSSSYGLDQTTLCNTQTHRDNSMVSSYSSEVDLQPPSLSDTSITSSSYNLIGDGGLSTESAEKGSIYSLWQHWDYSDIQAFEPCNGFGDADLWTDENMWFLQQHLADEL

SEQ ID NO: 54676 - protein, 675 aa, Glycine max
  Clone ID: LIB3093-032-C6_FLI.pep
DECLPPLDMSKQPPTQELVAKDLHANEWRFRHIFRGQPRRHLLQSGWSVFVSSKRLVAGDAFIFLRGENGELRVGVRRAMRQQGNVPSSVISSHSMHLGVLATAWHAILTGTMFTVYYKPRTSPAEFIVPYDQYMESLKNNYTIGMRFKMRFEGEEAPEQRFTGTIVGIEDADTKRWPKSKWRSLKVRWDETSNIPRPERVSQWKIEPALAPLALNPLPMPRPKRPRSNVVPSSPDSSVLTREASKVSVDPLPTSGFQRVLQGQELSTLRGNFAESNESDTAEKSGVWPPATDDEKIDVSTSRRYGSDSWMSMGRHEPTYPDLLSGFGAHGDHSSHPSFVDQNGPVANLSRKHLLDREGKHNVLSPWPGVPSSLSLNLLDSNLKGSAQGGDTAYQVRGNLRYSSAFGEYPVLHGHKVEHSHRSFLMPPPPSTQYESPRSRELLSKPISGKPCEVSKLKDSDCKLFGISLLSSRPIASEPSLSQRNVTSESVGHMHTASHHQRAIENDQKSEHSRGSKPADGLLIDDHEKVLQTSQPHLKDVQAKSHSGSARSCTKVHKKGIALGRSVDLTKFSDYGELITELDQLFEFGGELTSPQKDWLIVYTDNEGDMMLVGDDPWQEFVAMVRKIYIYPKEEIQKMSPGTLSSKNEENQSASEGAADAQEIECQLNHSSSDT

SEQ ID NO: 54677 - protein, 301 aa, Glycine max
  Clone ID: 700901166_FLI.pep
FTLPFFFFKQQQPHSSDPKKMGTRVWCCFMMFFLSLNALAIALEDHNLKTTSRDDIKCTPCGIILFVLVAGYLPFNDPNLMVMYKKIYKGEFRCPRWFSMELRRILTRLLDTNPDTRITVDEIMKDTWFKKGYKEVKFGDLGLEWKSEGEGVKDLNAFDIISFSTGLNLSGLFDSSCGVEEGERFLLRESPAAPTTTYCPPPPSPPSSGGGGAYYYSPPPPSQYIYSSPPPPASTGGGGGGVYYYPPPRGYYPTPPPPNPIVPYFPFYYHTPPPPSTAAPPPVKGSLVCAISFLTLFIAFL

SEQ ID NO: 54678 - protein, 120 aa, Glycine max
  Clone ID: LIB3106-005-H8_FLI.pep
VFRFKIGYLFPGFFWFSNFWCPFEAFVKTTSSFEQLVEVWPAVKNPLKRVIVAKLECSFAVVASEASLMVHSVICCQLINQINCFVTSHALLSCSCKCHISLFPILSPYQSATKVYDPFV

SEQ ID NO: 54679 - protein, 202 aa, Glycine max
  Clone ID: LIB3106-015-B6_FLI.pep
QVEDDDDSWEVRAFAEDTRNIMGTTWPPRSYTCTFCRREFRSAQALGGHMNVHRRDRARLHQAPVPSSSSNPMTSSLPTSPFINIPPQDLVANAGLCLLYHLPKSPSSTAPPFPPSPTTPSPSTLLSISSYPTTNFLMQTSFNFPGAPATGINTTTTTTVSSLCYNSSKVEQSATSSSIDHNGHLEELDLELRLGHKPTPTS

SEQ ID NO: 54680 - protein, 449 aa, Glycine max
  Clone ID: LIB3109-053-D12_FLI.pep
LLLIGLQEDDKIVELVSKYGPTKWSLIAKSLPGRIGKQCRERWHNHLNPDIKKDAWTLEEELALMNAHRIHGNKWAEIAKVLHGRTDNAIKNHWNSSLKKKLDFYLATGRLPPIPKNSPQVPVKDTIRRSASKSMLGCSNKELNAAVETSSETTAISKLDDSGRNQFESSGTVREVGDSSSVPANDSADSDCVECKPGSSNINPSCSNSEHVSRANFGTTFGPISENSGLNGNSTFEHCTNNGDRSSTRLIGTSSQENPTCGSLCYEPPQLDGSVPIDSLYLNYTCQQNEYCPSPTMSPTGFFTPPRAKGSELCTETPESILRKAANTFPNTPSILRRRRTGAQTLTSPTKVLKVDNNPHTSNKTERTNDDSGSGHFSGSPASHGYGIGIPNNKAFNASPPYRLRSKRTAIVKSVEKQLEFAFDKEKNDDKRSNVMTEDRLHEKKLVVT

SEQ ID NO: 54681 - protein, 97 aa, Zea mays
  Clone ID: 701163075_FLI.pep
QQPASGKRAHTPNATATATARARHSRNQQFHTKQKKGTLPLCRFPSAAVVCDRPDHGQDPGLLHPELVAGGHLRGRPLLLLLRRPALVAGSAPGGGG

SEQ ID NO: 54682 - protein, 99 aa, Glycine max
  Clone ID: LIB3138-001-D6_FLI.pep
GYAVLRNWIKWKRWKVQRQLQQQRQAVSDAEPQVDDEIEDVPDGQLCVICLMRRRRSVFIPCGHLVCCQGCAISVEREVAPKCPVCRQEIRDSVRTYES

SEQ ID NO: 54683 - protein, 139 aa, Zea mays
  Clone ID: 701166808_FLI.pep
AFYTEKHIRIPCFGGEHEVTFFHEYRDSVDWVFVDHPSYHRPGNLYGDKFGAFGDNQFRYTLLCYAACEAPLVLELGGYIYGQNCMFVVNDWHASLVPVLLAAKYRPYGVYKDCLTLVKGMPPRPFREYPLQSSIPFRW

SEQ ID NO: 54684 - protein, 125 aa, Glycine max
  Clone ID: LIB3107-008-D2_FLI.pep
FSNFWCPFEAFVKTTSSFEQLVEVWPAVKNPLKRVIVAKLECSFAVVASEASLMVHSVICCQLINQINCFVTSHALLSCSCKCHISLFPILSPYQSATPFCRLLAGVPFCRLLAAVPFCRLLAAV

SEQ ID NO: 54685 - protein, 571 aa, Zea mays
  Clone ID: LIB3151-045-C7_FLI.pep
GDLPLGYHQKDLVIYEMHLRGFTKHNSSKTKHPGTYIGAVSKLDHLKELGVNCIELMPCHEFNELEYFSSSSKMNFWGYSTINFFSPMARYSSSGIRDSGCGAINEFKAFVREAHKRGIEVIMDVVFNHTAEGNEKGPILSFRGIDNSTYYMLAPKGEFYNYSGCGNTFNCNHPVVREFIVDCLRYWVTEMHVDGFRFDLASILTRGCSLWDPVNVYGSPMEGDMITTGTPLVAPPLIDMISNDPILGNVKLIAEAWDAGGLYQVGQFPHWNVWSEWNGKYRDTVRQFIKGTDGFAGAFAECLCGSPQLYQAGGRKPWHSINFVCAHDGFTLADLVTYNSKYNLSNGEDNRDGENHNLSWNCGEEGEFASLSVRRLRKRQMRNFFVCLMVSQGVPMFYMGDEYGHTKGGNNNTYCHDHYVNYFRWDKKEEQSSDLYRFCRLMTEFRKECESLGLEDFPTSERLKWHGHQPGKPDWSEASRFVAFTMKDETKGEIYVAFNTSHLPVVVGLPERSGFRWEPVVDTGKEAPYDFLTDGLPDRAVTVYQFSHFLNSNLYPMLSYSSIILVLRPDV

SEQ ID NO: 54686 - protein, 80 aa, Zea mays
  Clone ID: 701179787_FLI.pep
IGLFHNNIWSSTRSIDTQRELYSILMRRNSHRFINSCTHEFPTSQRSLYLFYLMYKISADTVRFDSCAFRMATIETNSKI

SEQ ID NO: 54687 - protein, 1103 aa, Zea mays
  Clone ID: LIB143-019-H8_FLI.pep
LFRLSDWWSPAAGTRSMAAAPGTSSGGAGGEVAGGTKVNEELWYACAGPLVALPPAGSLVVYFPQGHSEQVAASMRKDADAKIPSYPNLSSKLICILRSVTMLADPDTDEVYARMTLQPVSNVTHCDKETLLATELALKQTRPQTEFFCKTLTASDTSTHGGFSVPRRAAERIFPHLDFSVQPPAQELQARDLHDAIWTFRHIYRGQPKRHLLTTGWSLFVSGKRLLAGDSVLFIRDGRQQLLLGIRRANRQPVNLSSSVLSSDSMHIGILAAAAHAAANNSQFTVFYNPRASPSEFVIPFAKYQKAVYSNQLSLGMRFRMMFETEESATRRYMGTITGISDMDPLRWKNSQWRNIQVAWDEAAPSERRTRVSLWEVEPVIAPFFIYPSPLFTAKRPRQPGVTDDDSSEMDNLFKRTMPWFGEEVGKRDLSTQNGLVPGLSLVQWMNMQHNPSLANTVMQPELLNSLAGKPVQTLAAADLSRQISFQPQFLQQNNIQFNTSLLPPQNQQTEQLANVIATPNQLGSVIVPQKAVQNSSSEQKQNLVTQPLQVSQPMVSVAQPQLVHTQLQQPQVVLQAQPQQPQVIVQAQLQQQQPLVQNHTTIQSGLQQIQLLQQQQVQQSVQEQQQIKIQPFQVPNDANMVTQLSDQMKIQLLKALQPQQPLVMEQQKMIFDLQQQAVNSQSTAQQCSQVATQVVGLHSSSTNQYPTQQKTQPLKTFQDFPGNAVSIVKPEIVTSVGARSLHVPGGVQSMKMDEVPSSSTSPSTNNNPVILRSTPSSSKNQCLPTAAKAPQSSVVLGSTLEQGMKPCDSTQHPMVIPKLAEERPATGQDYMNSTQLDYLDTSSSATSVCLSQADGSLQQSFPPSSFNQHQPLREAVPDSEFEVTDAGNNFLFGANIDGHMEPLNEDDLLGTAFEADKYMEQMPGNGISNYISSKDSQQELSSSMISHPFGVADIAFNSIDSSINDIQFLNRNSRAPGPVQQRMRTYTKVHKRGAVGRSIDINRYSGYDELKHDVARMFGIEGQLSDQNRVGWKLVYEDHEKDVLLVGDDPWEDFVNCVRCIRILSPQEERQMRLASDYGDSFLGNQACSSSDGGRPWRVTGD

SEQ ID NO: 54688 - protein, 97 aa, Glycine max
  Clone ID: 700832792_FLI.pep
VFGTEHSHILRVPFRTEKGIVRKWISRFEVWPYLETYTEDVAHELAKELQGKPDLIVGNYSDGNIVASLLAHKLGVTQCTIAHALEKTKYPESDIYW

SEQ ID NO: 54689 - protein, 252 aa, Glycine max
  Clone ID: 700678516_FLI.pep
NKVLFSREEGQQQGEQRLQESVIVEISKEQIRALSKRAKSSSRKTISSEDKPFNLRSRDPIYSNKLGKFFEITPEKNPQLRDLDIFLSIVDMNEGALLLPHFNSKAIVILVINEGDANIELVGLKEQQQEQQQEEQPLEVRKYRAELSEQDIFVIPAGYPVVVNATSNLNFFAIGINAENNQRNFLAGSQDNVISQIPSQVQELAFPGSAQAVEKLLKNQRESYFVDAQPKKKEEGNKGRKGPLSSILRAFY

SEQ ID NO: 54690 - protein, 261 aa, Glycine max; identical to SEQ ID NO: 54670
  Clone ID: 700983879_FLI.pep

SEQ ID NO: 54691 - protein, 107 aa, Glycine max
  Clone ID: 700990264_FLI.pep
VCDCCDSFFFVVIFFFCCLCVCFFSHLKMSCCGGNCGCGSACKCGNGCGGCKMYPDLSYTESTTTETLVMGVAPVKAQFESAEMGVPAENDGCKCGANCTCNPCTCK

SEQ ID NO: 54692 - protein, 261 aa, Glycine max; identical to SEQ ID NO: 54670
  Clone ID: 700942642_FLI.pep

SEQ ID NO: 54693 - protein, 395 aa, Glycine max; identical to SEQ ID NO: 38715
  Clone ID: 700984979_FLI.pep

SEQ ID NO: 54694 - protein, 261 aa, Glycine max; identical to SEQ ID NO: 54670
  Clone ID: 700953423_FLI.pep

SEQ ID NO: 54695 - protein, 283 aa, Glycine max
  Clone ID: 701013650_FLI.pep
LVFHEQLATTLFVKMAMSNNVIGCINFVAVILSIPIIGAGIWLTNGDADSCVQFLQWPVIILGVLILVVALAGFIGAFFRVSWLLIVYLVAMLVLVILLVSLVAFVYMVTLRGHGNIEPNRAYLEYRMDDFSGYLRRRVRSSFKWDRIRSCLSQTNMCAELNQSYRMAQDFFNARLTPMQSGCCKPPTQCAYTFVNPTYWISPINTAADMDCLQWSNDQTQLCYNCDSCKAGLLANLRKEWRRANVILIITVIVLIIVYLVGCCAFRNVKTEDLFRKYKQGYT

SEQ ID NO: 54696 - protein, 343 aa, Glycine max
  Clone ID: 701041458_FLI.pep
ADDILIRQVVPDVGEAEEEDNLLNAEHHFASFKAKFAKTYATKEEHDHRFGVFKSNLRRARLHAKLDPSAVHGVTKFSDLTPAEFRRQFLGLKPLRFPAHAQKAPILPTKDLPKDFDWRDKGAVTNVKDQGACGSCWSFSTTGALEGAHYLATGELVSLSEQQLVDCDHVCDPEEYGACDSGCNGGLMNNAFEYILQSGGVQKEKDYPYTGRDGTCKFDKTKVAATVSNYSVVSLDEEQIAANLVKNGPLAVAINAVFMQTYVGGVSCPYICGKHLDHGVLLVGYGEGAYAPIRFKNKPYWIIKNSWGESWGENGYYKICRGRNVCGVDSMVSTVAAIYPSSH

SEQ ID NO: 54697 - protein, 441 aa, Glycine max
  Clone ID: JC-GMFL02220054C02_FLI.pep
VVKLPGQPKVGFKQFAGYVDVDAKHGRSLFYYFVEAEQDPHKKPLTLWLNGGPGCSSIGGGAFTELGPFYPKGDGRGLRRNSMSWNKASNLLFVESPAGVGWSYSNTTSDYNSGDASTANDMYLFMLKWYEKFPSYITRELFLTGESYAGHYIPQLTNVLLDHNARSTGSKFNIKGVAIGNPLLRLDRDAPAIYEYFWSHGMISDEIGLAIMNDCDFDDYVYASPHNVSQLCNNAIYEANLIVGDYINNYDVILDVCYTSIMEQELRLKRMATKISVSVDVCMTLERRFYFNLPEVQKALHANRTNLPYSWSMCSHVLNYRDTDGNINILPILKRIVQNHIPVWVFSGDQDSVVPLLGSRTLIRELAHELQFKITVPYGAWFHKGQVGGWVTEYGNLLTFATVRGAAHMVPYAQPSRALHLFSSFVRGRRLPNTTRPSIDE

SEQ ID NO: 54698 - protein, 205 aa, Glycine max
  Clone ID: JC-GMFL02220054F11_FLI.pep
QHKKTNLIPRRRKTFIVSIKKKMERSTKLFSAALVLCVVVMAHQTAAQELKGKNLINKVCTITPSRDLCVGILSSDPIRSPDADLKDLAVISLRVAARNASGILSEAKMLIDDDNLDPDVQQGLSDCKETILDAESQLEDTIASLLVDSDTDTQIWLKAALAAIDTCDASIPGDDDVLSVKSAMFRRLCNIAIAITKRLNKPLKF

SEQ ID NO: 54699 - protein, 83 aa, Glycine max
  Clone ID: JC-GMFL02220057B12_FLI.pep
GRRDAGRYKDTNIFFYFIRYLYDLLTKGSVVRKKIPMLILCNKTDKVTAHTKEFIRKQMEKEMYVFKSQIFYLYSLYQSATVL

SEQ ID NO: 54700 - protein, 282 aa, Glycine max
  Clone ID: JC-GMFL02220057H01_FLI.pep
KQKKSQSVASLSLGAPSPAVHPSMQPSSSALKHGPPSGTKTKKQKSFPSTGLTSQSQVTNQGGSSGAFATKGPAEAASYDPWIGRKVWTRWPEDNHFYEAVITDYNAAEGLHALVYDMNSANETWEWVNLKEISPEDILWEGEDPGISHKGCQPGPGRGLKKSMPHGGAVTGAGRGRGMMKVQPKKDFTLSQKGGRKKATNDIEILHTDTLIKEVEKVFTASHPDPMEIEKAKKMLKEHEQALVNAIARLGDVSEGESARWKTSVFARAVNGSGKTLEETTV

SEQ ID NO: 54701 - protein, 312 aa, Glycine max
  Clone ID: JC-GMFL02220061C08_FLI.pep
PHSFSSFSSSSLLDCSFFLTFPLPSPPHKTSLLPLPSRHRWPSPSLPTPATFLPPSSTRNPSPPPPSPPSVTFHLPLPPHVTFFFIRHHQSTTFPLPLAQPSSDKATSKTNHGSPVSRASLVDVGDAGVVLDLSGNFVEDVLDIGVGMVGPTGHEGGVVACAVFTTRGANAEVEEAFVGDEVHAALGVLVPLIVAVDDAVAGVEVVGEGRDGVVNWGAGLDEMMTDLGRWRERTKSRGVYWLVRGREPSLVHAALDVLVPLVVVVDDVVVGVEVVEEGDDGMVDWGVDLDEDDDGSGVLEGKNKEGESRRNG

SEQ ID NO: 54702 - protein, 271 aa, Glycine max
  Clone ID: JC-GMFL02220063A07_FLI.pep
AITKISGRGGLKWIITGLSITTLPNTLILGIPLVKAMYKSEAVVLLAQIIFLQSMIWYNLLLFLYELDAVKTRPTAAASSSQGSGETDTGREVQSKGEEDAEPRIKRKRKVLLILVTVGKKLIKNPNTYATLLGFIWSSIKFRWGLHMPEVVSQSIEILSNGGLGMAMFSLGLFMASQSSIIACGPRMAMVAIGLKVVLGPTLMAVASFVIGLRDTLFKVAIVQAALPQGIVPFVFAKEYNVHPAVLSTAILLGMLIALPVELAFYFLLAI

SEQ ID NO: 54703 - protein, 177 aa, Glycine max
  Clone ID: JC-GMFL02220063B08_FLI.pep
RKVMLMRCRVFISITTKNISKLYKMLLIKLIVRSLPRHIKLPMFFLRFLKAVNMTQSMEVDREILETQDKVAEKTEILVPYNILPLYPDSANQAIMRFPEIQAAVYALHNTRGLAWPKDYKKKKDEDILDWLGVLFGFQKHNVSNQREHLILLLANVHIRQFPKPDQQPKGRGEEGI

SEQ ID NO: 54704 - protein, 549 aa, Glycine max
  Clone ID: JC-GMFL02220063C09_FLI.pep
PSSMGNCCSQGNVADGPADDSAAANDKGEANQQGSNNHANDNNDNSTNPTTAPTTTSKPPPTVTPPTSKPSKPAAMGPVLGRPMEDVRATYTIGKELGRGQFGVTHLCTNKATGQQFACKTIAKRKLVNKEDIEDVRREVQIMHHLSGQPNIVELKGAYEDKQSVHLVMELCAGGELFDRIIAKGHYTERAAASLLRTIMQIIHTFHSMGVIHRDLKPENFLMLNKDENSPVKATDFGLSVFFKEGETFKDIVGSAYYIAPEVLKRKYGPEVDIWSVGVMLYILLSGVPPFWAESEHGIFNAILRGHVDFTSDPWPSLSSAAKDLVRKMLTTDPKQRLTAQEVLNHPWIKEDGEAPDKPLDNAVLNRLKQFRAMNQFKKVALRVIAGCLSEEEIMGLKEMFRGMDTDNSGTITIEELKQGLAKQGTKLTEQEVKQLMEAADADGNGTIDYDEFITATMHMNRMNREEHLYTAFQYFDKDNSGFITTEELEQALREYNMHDGRDIKEILQEVDGDNDGRINYDEFAAMMRKGNPEVMTKKRRDSLPLPLP

SEQ ID NO: 54705 - protein, 131 aa, Glycine max
  Clone ID: JC-GMFL02220063E03_FLI.pep
PSTQELLYCLTDLKFSTCMNLFDPLVILVFFILLFLHVFFPFIFFALPAKTFDKPRYWRRVPCLSHNFHDLLHTLNRKGAMENQNLVASPSDARLKNWYGGPYLLDAIDSLQPPTREFSKPLLMPVCDVIK

SEQ ID NO: 54706 - protein, 195 aa, Glycine max
  Clone ID: JC-GMFL02220065D07_FLI.pep
RPDFFWRCFPDGKDVYDKWGDVICHGDQKVIKEGYKSFPSGHTSGSFSGLGFLSLYLSGKIKAFDRKGHVAKLCIVFLPLLVASLVGISRVDDYWHHWQDVFAGGLLGLTVATFCYLQFFPPPYHSEGWGPYAYFRMLEESRGMTQVPSVQNSGQAQLAEAQAESQEEQGLHGCMGLTLSRDHHAALNDCESGRG

SEQ ID NO: 54707 - protein, 250 aa, Glycine max
  Clone ID: JC-GMFL02220068B03_FLI.pep
GDRGRGRRRAGGRRDEEEKWVPVTKLGRLVKEGKIRSLEQIYLHSLPIKEHQIIDTLVGPTLKDEVMKIMPVQKQTRAGQRTRFKAFVVVGDNNGHVGLGVKCSKEVATAIRGAIILAKLSVIPVRRGYWGNKIGKPHTVPCKVTGKCGSVTVRMVPAPRGSGIVAARVPKKVLQFAGIDDVFTSSRGSTKTLGNFVKATFDCLLKTYGFLTPEFWKETRFSKSPFQEYTDLLAKPTGKALILEEERVEA

SEQ ID NO: 54708 - protein, 239 aa, Glycine max
  Clone ID: JC-GMFL02220068B11_FLI.pep
KGAFSYLGAPLARPFLGPFAAFSDGLANGAKKEPLVTWVHKNFQGILTNETRCLRCETVTARDETFFDLSLDIEQNSSITSCLKNFSSTETLNAEDKFFCDKCCSLQEAQKRMKIKKPPHILVIHLKRFKYIEQLGRYKKLSYRVVFPLELKLSDTAENSDIEYSLFAVVVHVGSGPNHGHYVSLVKSHNHWLFFDDENVEMIDESAVQTFFGSSQEYSSNTDHGYILFYESIGSGNRN

SEQ ID NO: 54709 - protein, 365 aa, Glycine max
  Clone ID: JC-GMFL02220073B02_FLI.pep
EKKEEEEEEMANELPVKAFGWAALDTSGTLAPFHFSRRENGVDDVTLKILFCGVCHSDLHTLKNDWGFTTYPVVPGHEIVGVVTEVGNNVKNFKVGDKVGVGVIVESCKECENCQQDLENYCPRPVFTYNSPYYDGTRTQGGYSNIVVVHQRYVLRFPENLPLDAGAPLLCAGITVYSPMKYYGMTEPGKHLGVAGLGGLGHVAIKLAKAFGLKVTVISSSPNKQAEAIDRLGADFFLVSSDPAKMKAALGTMDYIIDTISAVHSLIPLLGLLKLNGKLVTVGLPNKPLELPIFPLVAGRKLIGGSNFGGLKETQEMLDFCGKHNITADIELIKMDQINTAMERLSRADVKYRFVIDVASSFSSF

SEQ ID NO: 54710 - protein, 258 aa, Glycine max
  Clone ID: JC-GMFL02220080G04_FLI.pep
KSLIPCASVGERNLLADVARIVEKNGKSFKRKDDLRKVVAEALSSLGYDSSICKSKWEKTSSCPAGEYEFIDAIVEGERLIVDVDFRSEFEVARSTGTYKAMLQSLPFTYVGKSERLTEIVAIVSEAAKQSLKKKGMHVPPWRKRDYMLAKWLSPSSIREKEKENKQPPSSSVQVAAAAAAPETVSDGDAASTTESDCGELELIFGGEMSPETEYGEAKAESAVATKPAWQPPAVKPKSVERGTKVVTGLASLLKDKP

SEQ ID NO: 54711 - protein, 156 aa, Glycine max
  Clone ID: JC-GMFL02220080H10_FLI.pep
WIASALHAAVNFGQYPYGGLILNRPTISRRFMPEKGSPEYDALAKNPEKEFLKTITGKKETLIDLTIIEILSRHASDEFYLGQRDGGDYWTSDAGPLEAFKRFGKNLEEIEKKLIEKNNNETLRNRYGPAKMPYTLLYPSSEEGLTFRGIPNSISI

SEQ ID NO: 54712 - protein, 261 aa, Glycine max
  Clone ID: JC-GMFL02220081D04_FLI.pep
PDRLLPDRVQVGMTQHFMKSYSDLLIRTCHRRGVHAMGGMAAQIPIKDDPVANEAALELVRKDKLREVKAGHDGTWAAHPGLIPSCMEVFNNNMGNAPNQIDTVKRDDAANLTEQDLLQIPTGTRTMEGLRLNTRVGIQYLAAWLSGSGCVPLYNLMEDAATAEISRVQNWQWLKYGVELDGDGLGEKVNKDLFHRVVEEEMARIEKEVGTEKFEKGMYKEACKIFTRQCTSLTLDDFLTLDAYNYIVVHHPKEGTVKASN

SEQ ID NO: 54713 - protein, 421 aa, Glycine max
  Clone ID: JC-GMFL02220086A06_FLI.pep
QHKAGYCLFKLPSLSLFLSASLPEVKMAQETFLFTSESVNEGHPDKLCDQISDAVLDACLEQDPDSKVACETCTKTNMVMVFGEITTKANVDYEKIVRDTCRNIGFVSDDVGLDADNCKVLVNIEQQSPDIAQGVHGHLTKRPEEIGAGDQGHMFGYATDETPELMPLSHVLATKLGAKLTEVRKNGTCPWLRPDGKTQVTVEYYNDKGAMVPIRVHTVLISTQHDETVTNDEIAADLKEHVIKPVIPEKYLDEKTIFHLNPSGRFVIGGPHGDAGLTGRKIIIDTYGGWGAHGGGAFSGKDPTKVDRSGAYIVRQAAKSIVANGLARRAIVQVSYAIGVPEPLSVFVDTYGTGKIPDKEILSIVKESFDFRPGMISINLDLKRGGNGRFLKTAAYGHFGRDDPDFTWEVVKPLKGEKVPA

SEQ ID NO: 54714 - protein, 426 aa, Glycine max
  Clone ID: JC-GMFL02220086B04_FLI.pep
RIYKGIIPSTGQLVAVKQLDRNGIQSSKEFLAEVAELSLLHHENLVNLIGYCADGDQRLLVYELFASRTLENRLFEKKADESPLNWFERMKIVAAASKGLEYLHETSKPPVIYRDLKASSILVDSDLLAKLCDVGMAKLSGGDKMNNGPPRLMGTYGHCAPEYVKAGQLTLKSDVYSFGVVLLELITGRRAIDTSKPNEEQNLVSWATPLFRDPKRYPEMADPLLNKNFPEKDLNQVVAIASMCLQEEAEARPLISDVVTALGFLSAPPPPPAHAPVPKKSDVAESERESDSEGESESGSDAISRKGSRRSSLDKSQHDYCDSSHLPPVVSSKASRKSSTRSSKGKHSSESGDGVSVSSISSKSSRKSRGDLSQKSSRKSSVEDLSQQKSSKKSSVEDLSQHKSSRKSSSTKDLSQKSAENLPWKT

SEQ ID NO: 54715 - protein, 97 aa, Glycine max
  Clone ID: JC-GMFL02220090F05_FLI.pep
FETLIDISVIEILSRHASDEVYLGQRDNPNWTTDSKALEAFKKFGNKLAEIEGKITQRNNDPSLKSRHGPVQLPYTLLHRSSEEGMSFKGIPNSISI

SEQ ID NO: 54716 - protein, 425 aa, Glycine max
  Clone ID: JC-GMFL02220093E06_FLI.pep
GTKPLFGSVEQGLAGEIPEAVQSAIEHRRKAAKMKVFVKTLKGTHFEIEVNPSDTLSEVKKNIETVQGADVYPAAQQMLIHQGKVLKDGTTLEENKVAENSFIVIMLSKTKSSSGEGSTTSTAPSVKASATPTSTSVSAAPQAPASTGATPTPVTAPAAPASAAAPAPISSGSAVPESDIYGQAASNLVAGSNLEGTIQQILDMGGGSWDRDTVVRALRAAYNNPERAVEYLYSGIPEQAEAPPVTREPASAQPANPPAAAPQAAQPASVPSSGPNANPLDLFPQGLPNVGSGAAGAGSLDFLRNSQQFQALRAMVQANPQILQPMLQELGKQNPHLMRLIQEHQVDFLRLINEPVEGGEGNILGQLASAMPQAVTVTPEERQAIERLEAMGFDRATVLEVYFACNKNEELAANYLLDHMHEFDE

SEQ ID NO: 54717 - protein, 478 aa, Glycine max
  Clone ID: JC-GMFL02220097G03_FLI.pep
GAYKSDGKGLSNWDNYTHGPGRSVIMDGSNGDIAIDHYHRYLEDIDLMETLGVNSYRLSLSWARILPKGRFGEPNHAGIEFYNRLIDVLLLKGIQPFVTLSHYDIPQELEDRYGSWLSPQLQEDFAFYADLCFKTFGDRVKYWVTFNEPNFLVSLGYRSGLYPPCRCSGQLAMAKCSEGDSEKEPFVAAHNVILSHAAAVDIYRTKYQTEQKGSIGIVLQHEWFEPMSNSTADKLASERARAFNFNWFLDPIIFGKYPTEMENVLGSLLPKFSSYEKEKLKRGLDFIGVNYYTAFYVQDCMYSACKPGPGISRTEGSYKKSGEKNGVPIGEPTPFSWFNIYPDGMEKTVTYVRDRYNNTPIFLTENGYAEEVDPNFTSEEHLNDFKRIKYMVDHIEALLAAIRKGADVRGYFAWTLIDSFEWIYGYTVRYGFHHVDYATLKRTPRLSASWYKQLLVQYKKTFLLGTSMTGHEKLVQHT

SEQ ID NO: 54718 - protein, 264 aa, Glycine max
  Clone ID: JC-GMFL02220104D07_FLI.pep
ESETRRRRRRRRRRRIEKMVFEETELRLGLGLCLPGNGTTATTEAAAAELGVRKRGFSETETDETATVDLMLNLSPKEAAAADGADPREKPKTSPKEKTLLLPDPAKPPAKAQVVGWPPVRSFRKNMFAAQKSSGGEESEKSSPNASFVKVSMDGAPYLRKVDLKMYKSYPELSDALGKMFSSLTIGNCESQGFKDFMNESKLMDLLNSSDYVPTYEDRDGDWMLVGDVPWEMFVESCKRLRIMKGKEAIGLAPRAVEKCKNRS

SEQ ID NO: 54719 - protein, 79 aa, Glycine max
  Clone ID: JC-GMFL02220112E12_FLI.pep
PFVCKLLLYAVTVDVSLRREEFHCLSGTVIINIILSFGVCLLLLLLPSYLDKKQIEIDTIGVCIFLIGGSGNNMIYHVL

SEQ ID NO: 54720 - protein, 214 aa, Glycine max
  Clone ID: JC-GMFL02220112F12_FLI.pep
VRHLSSSGVDVYTAIAGAVGALYGPLHGGANEAVLKMLSEIGTVENIPAFIEGVKARKRKLSGFGHRVYKNYDPRAKVLRKLTEEVFSIVGRDPLIEIAVALEKIALSDEYFIKRKLYPNVDFYSGLIYRAMGFQPEFFTVLFAIPRMAGYLAHWRESLDDPDTKIMRPQQVYVGEWLRHYAPINQRTASSNTDKLGQLAVSNASKRRLAGSGA

SEQ ID NO: 54721 - protein, 450 aa, Glycine max
  Clone ID: JC-GMFL02220138D06_FLI.pep
IIFKMREILHVQAGQCGNQIGGKFWEVMCDEHGIDATGNYVGNSHLQLERVNVYYNEASGGRYVPRAVLMDLEPGTMDSLRSGPFGKIFRPDNFVFGQNGAGNNWAKGHYTEGAELIDSVLDVVRKEAENCDCLQGFQICHSLGGGTGSGMGTLLISKIREEYPDRMMLTFSVFPSPKVSDTVVEPYNATLSVHQLVENADECMVLDNEALYDICFRTLKLTNPSFGDLNHLISTTMSGVTCCLRFPGQLNSDLRKLAVNLIPFPRLHFFMVGFAPLTSRGSQQYRSLTIPELTQQMWDARNMMCAADPRHGRYLTASAMFRGKMSTKEVDQQMINVQNKNSSYFVEWIPNNVKSSVCDIPPTGLSMSSTFMGNSTSIQEMFRRVSEQFTVMFKRKAFLHWYTAEGMDEMEFTEAESNMNDLVAEYQQYQDAAASEEGENEIDDEEAMAA

SEQ ID NO: 54722 - protein, 152 aa, Glycine max
  Clone ID: JC-GMFL02220139B11_FLI.pep
TDEQNEKARRKLASWTIALLCIGILIVTSAASADWCPRILRLTLCGMGGILLLCSTIVLACVKQDDTRHSFGHSGGFACPFVPFLPAACILINTYLLIDLGVATWLRVSVWMLIGVLVYLFYGRTHSSLLHAIYVPSAYADEIHRSQASHLA

SEQ ID NO: 54723 - protein, 181 aa, Glycine max
  Clone ID: JC-GMFL02220144F01_FLI.pep
KLEAKPKESGLNKVSMKVTKGVSETDKNSCVIDINRGSCDGFSENLEGEMICRICHLASGQRLEAADVGTASSATTNTDLIQLGCACKDELGIVHSHCAEAWFKLKGNRLCEICGETAKNVSDVTDNGFIEEWNDTRFMDSDNTSSRRFGGCLCGQPFCNFLMACLVIAFVLPWFFRVNMF

SEQ ID NO: 54724 - protein, 183 aa, Glycine max
  Clone ID: JC-GMLE01810005G10_FLI.pep
FNFIFLHPKMEKERPASWRPDPFHARPPPRDPMEFLSRSWSASALEVSKALSSQQLPPSSNNNVVCYVNNSNASIILEDIAGEVEESAATVSGNPFSFASSETSQMIMDRIMSHFFGQQEVSPRTSGRLSHSSGPLNGSLTDSPPVSPSEIDDFKYNRSNNNHNTVNMITGLNGQYWGAGGAA

SEQ ID NO: 54725 - protein, 394 aa, Glycine max
  Clone ID: JC-GMLE01810008B06_FLI.pep
ENVRGRKVVLSGIGVAICDLSDNLIFEVSKSLIGNGTSKVAAEIKALIEAFNAAIALDLKRVVYCCDYYPLFQFVSGKWPAKQRKIAILVDQVNLLQRKFSYCNPRFVARHDVKFAFKLARDAIESQSTRLAESGSRSLNETCVICLEETDVGQIFSVDGCQHRYCFSCMKQHVEVKLLHGMVPKCPHQGCKYELLVDSCQKFLTQKLTETMQQRKLEASIPVAEKIYCPYPTCSALMSKTEVLEYSKDITGQSEQSEPKICLKCRGLFCFNCKVPWHSGMTCNTYKRMNPIPPAEDLKLKFLASRSLWQQCLKCNHMIELAEGCYHMTCRCGYEFCYNCGAEWKDKKATCACPLWAEENIWLDDHEEELEEEEEDDDDDYDDYRSDYPDDYYY

SEQ ID NO: 54726 - protein, 251 aa, Glycine max
  Clone ID: JC-GMLE01810009A04_FLI.pep
PVTKKGYWQIEMGDFFIGGLSTGVCEGGCAAIVDSGTSLLAGPTTVVTEINHAIGAEGVLSVECKEVVSEYGELLWDLLVSGVRPDDVCSQVGLCFKRAKSESNGIEMVTEKGQRELSAKDTALCTSCQMLVVWIQNQLKQKKTKEIVFNYVNQLCESLPSPNGESVVDCNSIYGLPNITFTVGDKPFTLTPEQYILKTGEGIAEVCLSGFIAFDIPPPRGPLWILGDVFMRVYHTVFDYGNLRVGFAKAA

SEQ ID NO: 54727 - protein, 423 aa, Glycine max
  Clone ID: JC-GMLE01810010B12_FLI.pep
AIRKMLPRVLVLLLLNVLATNVLADYGPGDAVVILTEKSFAKEVLQSPDYWLVEFYAPWCKHCKNFEPEYKAAAKKLKKHARLGVVDATVHQELARKYFVQDFPTIKEFGAEKKRPQDYRGGRTTREIVKYVKNSPDAKKLGVSGANVVTLTYDKVYTFLNKDLPFAIFFGSPTKGKKSPKMPTWLDDVAESFMEGKKKKKSPTVQLAFVPGSDNKIANHFRLAKDQLPTVVYIYSASRKYTVLDVNNVNEATARKFISDALAKTEAAEKDESLPSVPLFPSPEVAKKKPVVGLKELDVDTVRDCVAKRDKMCVVVVKTDTELVRSLAKKYRRDPFTFLFSKPDAQVLQALTTYVGEKNAEVVVLRAGRNMKYSALSGTNDESAISEFLDKLIDGSIPFSVPSGDMKTFVATVAGMSARHEEL

SEQ ID NO: 54728 - protein, 293 aa, Glycine max; identical to SEQ ID NO: 43808
  Clone ID: JC-GMLE01810017D03_FLI.pep

SEQ ID NO: 54729 - protein, 210 aa, Glycine max
  Clone ID: JC-GMLE01810020G07_FLI.pep
HHLHCSLPGDYGFDPLGLSDPEGTGGFIEPKWLAYGEIINGRYAMLGAVGAIAPEILGKAGLIPQETALPWFRTGVFPPAGTYNYWADSYTLFVFEMALMGFAEHRRFQDWAKPGSMGKQYFLGLEKGLGGSGEPAYPGGPFFNPLGFGKDEKSLKDLKLKEVKNGRLAMLAILGYFVQALVTGVGPYQNLLDHLADPVHNNILTSLKFH

SEQ ID NO: 54730 - protein, 223 aa, Glycine max
  Clone ID: JC-GMLE01810021A09_FLI.pep
SKLKRLLLSANNFTGTIPETYSKLKNLTEFRIDGSSLSGPIPSFIGNWTNLIRLDLQGTNMEGPIPPTISQLKLLTELRITDLNGGPSMTFPDLKNLTKLKRLELRNCLITGSIPGYIGEMANLATLDLSFNMLTGSVPDSIQKLDNLDYLFLTNNSLSGPIQDWILSFKNNIDLSYNNFTNSSATSCQLLDVNLASSHFSSAVTSASTFCLKRDLPCAEKPQ

SEQ ID NO: 54731 - protein, 226 aa, Glycine max
  Clone ID: JC-GMLE01810028A02_FLI.pep
RSGTIQLWDRMSGLCERRFQHPEGVVTKMQWLPCGNQFVSGSADKSLVLWNASEGSTAYQWSGRRVLDIAVHPHDSKVFVLTSGYEIRVYDITLKSDQLFLQAEHLVSCLSISPSGKFLLVNFVKQEQIACVEIVTGFVIAKYRGFREQRYILRPCFGGDHSELVLSGSEDGAVYLWQRDSGKQVGKLDGHSSVVNVVVRHPIHSNVIASASDDKTVRLWSLKSLE

SEQ ID NO: 54732 - protein, 129 aa, Glycine max
  Clone ID: JC-GMLE01810029H10_FLI.pep
IFFDLRNYSNLNVYCLLIRLKNLREITIASIQRGELGLDIMMIQNQKNLILLGLRKKKNNKFMKKEIFVIEPVRLSRKNNKQFFMYQTIGLSLIQKNKRKIYHKYPEKIHVNKKNFYKYITRTRDQKIT

SEQ ID NO: 54733 - protein, 154 aa, Glycine max
  Clone ID: JC-GMLE01810030A04_FLI.pep
APVPQGQPFRAQRGYVEPTLCRCPRLDLLDEFVVDRLHVLVGGDPVPSLHVLSLHGQSEILRHHAVLVNDLDTSGLQILGEFGQSGRVVKFGSEGKTSCPSKDGGDGVGGRLLAFLVLPVVSSDSAVCGLRLHSQTIGGHKLGCHHSQGSIALG

SEQ ID NO: 54734 - protein, 222 aa, Glycine max
  Clone ID: JC-GMLE01810030A10_FLI.pep
IEQALGIKGKMIAKKNYAEKAQMKKTLAMHEESTSRRKTDDNVQDGAVPAYLLDRDNTTRAKVLSNTIKQKRKEKAGKWDVPLPKVRPVAEDEMFKVVRTGKRKTKQWKRMVTKATFVGPGFTRKPPKYERFIRPTGLRFTKAHVTHPELKCTFNLELIGVKKNPNGPMYTSLGVITRGTIIEVNVSELGLVTPAGKVVWGKYAQVTNNPENDGCINAVLLV

SEQ ID NO: 54735 - protein, 350 aa, Glycine max
  Clone ID: JC-GMLE01810042D06_FLI.pep
DILVKDSNGNPYMVPNTAFDVGMLDLTHPKTATWFKQILREMVDDGVRGWMADFGEGLPVDAVLYSGEDPISAHNRYPELWAKINRELVEEWKSSSLDKVKEDEDEGLVFFMRAGFRDSPKWGMLFWEGDQMVSWQTNDGIKSSVVGLLSSGISGYAFNHSDIGGYCTVNLPIVKYRRSEELLLRWMELNSFTTVFRTHEGNKPSCNSQFYSNHQTMSHFARSAKVYKAWKFYRIQLVKEAAQKGLPICRHLFLHYPDDECVHRLSYQQFLVGSEFLVVPVLDKGKKKVKAYFPLGESSSWIHIWTGKVFSKQGREEWVEAPIGYPAVFVKVGSQVGETFLNNLRSLGIL

SEQ ID NO: 54736 - protein, 237 aa, Glycine max
  Clone ID: JC-GMLE01810044G05_FLI.pep
TLRIQRLRKKFYFHFQDYVDLIIWKVQFLDRHHLLIKFGSVDGGVSRNADHHPAFVAVYNMDTTEIVSFYQNSPDELYLLFEQFCDHFHATSRNSMYMNFISSHSNNIHALEQLRSIKDKASSSAQFVKKMLASLPFSCQSQSPSPYFDQSLFRFDDKLISATDRHRQSTDHPIKFILRRHPYSLKFKIKPGPEAGSMDGRAKKISSFLFHPILPLALSVQQTLFLQPSVVNIHFRR

SEQ ID NO: 54737 - protein, 229 aa, Glycine max
  Clone ID: JC-GMLE01810044H09_FLI.pep
LELCEILSRRFEKMSKLQSDALREAISGIMADSKEKNRKFVETIELQIGLKNYDPQKDKRFSGSVKLPHIPRPKMKICMLGDAQHVEEAEKIGLDWMDVEALKKLNKNKKLVKKLAKKYHAFLASEAVIKQIPRLLGPGLNKAGKFPTLVTHQETLESKVNESKAMVKFQLKKVLCMGVAVGNVSMEEKQIFQNVQLSVNFLVSLLKKNWQNVRCLYLKSTMGKCYRVF

SEQ ID NO: 54738 - protein, 349 aa, Glycine max
  Clone ID: JC-GMLE01810045A11_FLI.pep
ATDYRMLRSARSSSIRSVLAAQAQRGYATEAGAIKTLLFLEHRDGKINPGSLNALSAATALGGDVVGLVTGEGDAAQKVADAAKSLPLKSVILQKSEKLAHGLPEPLAPLLVDLIKSGNFTHLVGAHTALGKNAFPRAAALLDVAPISDVQKVISGDTFERPIYAGNAVATVRSKDAIKIFTVRTAAFDAAAESGSGASVEDGSGKEGELQSEWISEELTVSSRPDLGSASRVVSGGRGLKNKENFDKIMEPLADALGAAIGASRAAVDSGYADNSLQVGQTGKIVSPDLYLAVGVSGAIQHLAGMKDSKTIAAINKDPDAPIFQVADVGLVGDLFELTPELTQKVSQK

SEQ ID NO: 54739 - protein, 106 aa, Glycine max
  Clone ID: JC-GMLE01810052E06_FLI.pep
LGKLRYFLGIKVAQSKDGVVISQRKYALDILEETGLLNSKPVGTPMDPSVKLSPDQVEPFSDPGRYRRLVGKLNYLAVTLPDIAFAVSVVSQFLNSPCQDRWNAVS

SEQ ID NO: 54740 - protein, 309 aa, Glycine max
  Clone ID: JC-GMLE01810053F05_FLI.pep
TEFNYQQIYHFVHTHGVSIPIQVEMMRSMAKDHPIYALLDYHFFGNFDFEFLSGIVLFAANTPYDESMAFGASGSIRCLYDEYSKTSLAEDFPAEIANNGLQYLPNHRYVKYGAMYYSIIKTFVTAYVKAYYVSEDTIKNDSELQTWAARATIVWGVNDFPSSFKGYDDLIKLVTNLVFQNAVKHHFMNGRVSWHSQAAPFRTGALYNAPLPTKKGVNVNPFDYVIPSDLFPLLSSTVVQFYRPIPLSQSLLNGYTTAPFSNEAILTDAITQFHQAMLAMETSMSASDTKKHYLDTFVKPSVMPWFSYV

SEQ ID NO: 54741 - protein, 145 aa, Glycine max
  Clone ID: JC-GMLE01810055H08_FLI.pep
FISEGGLRAIDSLWREYSGGKFGYSVQKKLLEKANGDFTKFFIKVGWMKKLDTEMEQYNYRSFPTEFIWELNDDTPEGHLPLTNALRGTQLLNNVLKHPAFDVVDDKEEKEKDGENKENGGAISATGLKDNGSSSKRIFKTDYSF

SEQ ID NO: 54742 - protein, 360 aa, Glycine max
  Clone ID: JC-GMLE01810059F10_FLI.pep
EIDYINEGKNADRFRRDFRNIKWVRIPLVYWDYTALKVLTMEYVPGIKIDQVDTLTSRGYDRLRISSRATEAYLIQILKTGFFHADPHPGNLAIDVDEAIIYYDFGMMGQIKSFTRERLLELFYAIYEKDSKKVMQRLIDLGALQPTGDLSSVRRSVQFFLDHLLSQAPDQEQTLSAIGEDLFAIAQDQPFRFPSTFAFVLRAFSTLEGIGYTLNPNFSFSKIAAPYAQELLEIRQKQRTAPQLVEEIRKQADDATTYTMSMPYRVQRIEEFTKQLEAGDLKLRVRVLESERAARKATGLQMATMYTVLGGTLLNLGITMSSQGNITIANGSFIGAGIFMTLFVRSMQRVKMLDKFEKMI

SEQ ID NO: 54743 - protein, 435 aa, Glycine max
  Clone ID: JC-GMLE01810063D09_FLI.pep
KCLNNCSCMAYTNSNISGTGSGCVMWFGDLLDIKLYPAPESGQRLYIRLPPSELDSIRHKVSKIMYATSVAAAIGVILAIYFLYRRKIYEKSMAEYNNESYVNDLDLPLLDLSIIIVATNKFSEGNKIGEGGFGSVYWGKLASGLEIAVKRLSKNSDQGMSEFVNEVKLIARVQHRNLVKLLGCCIQKKEKMLVYEYMVNGSLDYFIFDSTKGKLLDWPKRFHIICGIARGLMYLHQDSRLRIVHRDLKASNVLLDDTLNPKISDFGVAKTFGEENIEGNTNRIVGTYGYMAPEYAIDGQFSIKSDVFSFGVLLLEIICGKKSRCSSGKQIVHLVDHVWTLWKKDMALQIVDPNMEDSCIASEVLRCIHIGLLCVQQYPEDRPTMTSVVLLLGSDEVQLDEPKEPGHFVKKESIEANSSSCSSTNAMSITLLTAR

SEQ ID NO: 54744 - protein, 118 aa, Glycine max
  Clone ID: JC-GMLE01810075B06_FLI.pep
FGQIYKLLQVWRHWKDETPLNTLDPKLRDNYSNIEVIKCIRIGLLCVQENPDARPTMLTIVSYLSSHSIELPSPQEPTFFLYHRMDPTVAHESSSRQSTNNSIPSSINEMSISKFYPR

SEQ ID NO: 54745 - protein, 473 aa, Glycine max
  Clone ID: JC-GMLE01810075C05_FLI.pep
RKTHREDWTGEKSVKARFPIKEELVNDYLSGKITMDATFNELRKKGKKSDKEIDSMIRLAKEVQASILNQKLEPVVRTFYNRTAFQLPGDARVRISFDTNLTLVREDNWDNGKRSGSNWRRMDIGIDWPFEQLPKEDLELFPYGVLEVKLQTQMGQEPPEWVRELVSSHLVEAVPKFSKFIHGCATLLPNRVDLVPFWLPQMETDIRKPVSTKKAALIERPTASNSHTPTTTSDTDPHAAGYTEPLSEDEDEGAEAADDDDSDDDRRGKGDPFSKVTNDEAGVAGLPAEVQAQVEDARAFREKNRLSQQHLSPNSSTARNGKAAILPLNEDSAASNNASTSEARTSGARATADLAKLTPRNLKKMLAAKYEAEGQPNGESASTTDGAVSAGANGQTGPGQSGISSSGEPNSTEYVNSFTYNGKRIAVPIRVEPKVNFALERTLLAWVEFSVLISAIGVGLLNFTSKHDHVGFA

SEQ ID NO: 54746 - protein, 168 aa, Glycine max
  Clone ID: JC-GMLE01810082H09_FLI.pep
THSGCNMRCLSVSGTGPLGGTDQVVERLLGLGPTSGLETTVGVDEEVVGVEDLQHGLDLLLHLLLGGNSGRVNVVKTGSDTRVVSLVLEGLDQLHVGLGGLDRDDVGVEGLDVGEDVVEVRVAEVGVDLGLGLGDGGRKPERGNGPLEVVVPVGLSEGKSLSDSGLVN

SEQ ID NO: 54747 - protein, 185 aa, Glycine max
  Clone ID: JC-GMLE01810085A10_FLI.pep
VGRILREYGEESNWRTLQKKIVNARLHGGLHSTSDLLDLIRRVAPPMRGGRQGWIKTATRVFQALRIAVNDELKTLEDSLYYCFDCLAPGGRLAVISFHSLEDRIVKQTFLNIIKGSKDVEERESLNSDLRKTSDEIKEKEAWIKQVIYGSNGTILTKRPITPSGEEEKLNRRSRSAKLRVIQKH

SEQ ID NO: 54748 - protein, 265 aa, Glycine max
  Clone ID: JC-GMLE01810086D01_FLI.pep
RNQQSKSAVYGLDQFSDLSDEEFRTTILMKNTLPIDNSAPVPFVGSPSAPATFDWRSSGAVTAVKDQEQCGSCWAFSATEAIESAWILAKKATNNSVDLAPQQIVDCDRQDGGCNGGWPSSAMEYVHSAGGQEDESHYPYTAKNGNCAFNSAYVKAKINAYKVAATPKDENSLQAGLLALGPLSICVDASSWNGYQGGVLTSRECCTSCQLDHCVQLVGYNSAASTPYWIVRNSWGNGWGYGGYIYLAMGGDTCALTAKATWPTL

SEQ ID NO: 54749 - protein, 109 aa, Glycine max
  Clone ID: JC-GMST02400003E07_FLI.pep
FNVEKFYLSIIYAWTVCLDPVTACFGMISGKCGSHGILGREMLNETKLKDLLHGSEYVLTYEDKDGDWMLVGDVPWEMFIETCKRLRIMKSSDAIGLAPRAVEKSKSRT

SEQ ID NO: 54750 - protein, 114 aa, Glycine max
  Clone ID: JC-GMST02400006B11_FLI.pep
SVLTFNTNLFYTDYWSEKNTKNTYGSFSQYIIIFRRERKNIVPVGATVGSVVLHVAGCLYEDEDEFKDSEADIVSSGVLVSARRMFASSLLDVLICSSKIYIMYDNLKKKRRYK

SEQ ID NO: 54751 - protein, 173 aa, Glycine max
  Clone ID: JC-GMST02400009G07_FLI.pep
NNRDAQQELSSSMVSQTFGVPDMAFNSIDSTIDDSNFLNSGPWAPPPAPPPLPPAQFQRMRTYTKVYKRGAVGRSIDITRYSGYEELKKDLARRFGIEGQLEDRQRIGWKLVYVDHESDVLLVGDDPWEEFVNCVRCIKILSPQEVQQMSLDGDFGNGGLQNQACSSSDGGNT

SEQ ID NO: 54752 - protein, 209 aa, Glycine max; identical to SEQ ID NO: 47420
  Clone ID: JC-GMST02400015B12_FLI.pep

SEQ ID NO: 54753 - protein, 114 aa, Glycine max
  Clone ID: JC-GMST02400016H10_FLI.pep
SSQILESTYDFSVTDSNSLLFLFKHSPEVAKELNITSEFSFESASLSKHNDWMAIFPLSFLFSNSLKFPAKKDDILKQYEFFPKLSVQNPSLNSKKGPRRVHLELYLGSLIKDQ

SEQ ID NO: 54754 - protein, 117 aa, Glycine max
  Clone ID: JC-GMST02400018H09_FLI.pep
SITLLSSLQIIKDLNRQQCRAKRGCQQSNLMFLHFPSLNPLTLNFFILESRINDCNHVPDLKMMIFWLHLCLICCISCGCSLAALLQWQTSETALLLKQIQQQWWPRVLSLILVTPC

SEQ ID NO: 54755 - protein, 167 aa, Glycine max
  Clone ID: JC-GMST02400029B12_FLI.pep
GFVVLVFVIAVYCLMPMELRVSLTFIVPLVYHLQSYQMANRVQIPTNNSALIAMIADEDTVVGFLLAGVGNVDIRRKTNYLIVDSKTTVKQIEDAFKEFTTREDVAIVLISQYVANMIRFLVDSYNKPVPAILEIPSKDHPYDPAHDSVLSRVKYLFNTESVASGRR

SEQ ID NO: 54756 - protein, 195 aa, Glycine max
  Clone ID: JC-GMST02400029H09_FLI.pep
LFHSVITWKNLLCGSLQIRTKLVAPGGEALGGVIGAFRYMIRTEGFFSLYKGLVPSIISMAPSGAVFYGVYDILKSAYLHSPEGMKRIQNMHKQGQELSAFDQLELGPVRTLLNGAIAGACAEAATYPFEVVRRQLQLQVQATKLSSFATFAKIVEQGGIPALYAGLIPSLLQVLPSASISFFVYEFMKIVLKVE

SEQ ID NO: 54757 - protein, 330 aa, Glycine max
  Clone ID: JC-GMST02400050C01_FLI.pep
ELVRNGSVESHLHGDDKIKGMLDWEARMKIALGAARGLAYLHEDSNPRVIHRDFKASNVLLEDDFTPKVSDFGLAREATEGSNHISTRVMGTFGYVAPEYAMTGHLLVKSDVYSYGVVLLELLTGRKPVDMSQPQGQENLVTWARPMLTSREGVEQLVDPSLAGSYNFDDMAKVAAIASMCVHSEVTQRPFMGEVVQALKLIYNDTDETCGDYCSQKDSSAQESDFRGDLAPSDSSWWNAGGLTPRITYGQASSFITMEYSSGPLEEMENRPFSTSSLIGDEISLPIRHGNRSGPLRTVRNKLSLYRFTGSRSEHGGPSSKPNWNDGYWV

SEQ ID NO: 54758 - protein, 370 aa, Glycine max
  Clone ID: JC-GMST02400057A09_FLI.pep
IIVGIVVIGGLLVLLVVCIIRKSKAERSPHKMDKSVANKYSTSVSPRPIGTRHIPQAMKQAAVGLPPYRIFTSEEIEDATNNFDPSNLIEEGSQGQLYKGWLRDGSVVLVNCVKIKQKGLPHSIMQQVEVLHNLRHRHMVSVLGHCVITEQEHPQTTSTVFIVFEYISNVSLRDQLSDGRKREMLKWPQRMAMSIGIARGVQFLHTGVAPGIYGNNLKIENILLDDSLNAKVSRYNIPLPSKSAHNEQNATNHISSTNNTEKEDIYQLGVILLEVITGKQITSSSEIEELKEELENGSPEATSVIRSAIDPTLRGTYAYESMKTAVQITINCLSKVSSQRPSIEDVLWNLQYAMQVQESWTSSGNLSTKL

SEQ ID NO: 54759 - protein, 211 aa, Glycine max
  Clone ID: JC-GMST02400057E02_FLI.pep
DAVYGLFQCRGDLTNDQCSRCVSRAVTQLGTLCFASCGGALQVDGCFVKYDNATFIGVEDKTLVTKKCGPSVGLTSDALTRRDAVLAYLQTSDGVYKTFRTSGYGDFQGVAQCTGDLSPSECQDCLSDAIQRLKTECGPTNWADIYLAKCYARYSEGGTRSRGNNNDDSNHNDDEIEKTLAILIGLIAGVALIIVFLSFLSKVCEKHKGGK

SEQ ID NO: 54760 - protein, 125 aa, Glycine max
  Clone ID: JC-GMST02400057G10_FLI.pep
QRISVITLRRFYDVHQYGAANLILPSWISPFTFVLELEQFLESCNYHGLTYIPFSFYYFLLHIRKLLDILFFCSDLFSSKMLLQYHNALHYHLSFQINSGWCCACAIGTCSRLGFGKGIIWVGIC

SEQ ID NO: 54761 - protein, 242 aa, Glycine max
  Clone ID: JC-GMST02400061E01_FLI.pep
FVAAASIFEPEKSRVRLAWAQTSILLETITSYVSDAEMRKAFMKKFSDCLNRRDYSIGWRLNRNRTGHGLAETLVATIDQISWDILVSHGHEIGYDMHRNWEKWLSSWHREGDKCKGQAELLAQTINLCGGHWISEDQVSDPLYQSLLQLTNNLCNKLRCHQKDKELESSNSGTNVNSMITQEEESKMQELVQLVHQKSPTGIDFNIKNTFLTVAKSFYYTAFCDSRTVNFHIAKVLFDEVV

SEQ ID NO: 54762 - protein, 224 aa, Glycine max
  Clone ID: JC-GMST02400062F04_FLI.pep
KIWLVDSKGLIVSSRKNSLQHFKKPWAHEHEPVNSLLEAVKVIKPTVLIGSSGVGRTFTKEVVEAMTSNNDKPLILALSNPTSQSECTAEEAYQWSEGRAIFASGSPFDPVEYKGKVYASGQANNAYIFPGFGLGLVISGAIRVHDDMLLAASESLAKQVSEENYKNGLIYPPFSNIRRISANIAANVAAKAYELGLATRLPRPQNLVKCAESCMYTPVYRNYR

SEQ ID NO: 54763 - protein, 401 aa, Glycine max
  Clone ID: UC-GMFLMINSOY002A03_FLI.pep
QKQCNKKKKKKNMKFAIITILFSLFLLDFGFAQQGDLDISRFGGKPNTNIGQAFLSAWTQACASPTAVKIVIPAGTYQMGAVDVKGPCKAPIEVQVDGTIQAPANPTDLKAAHQWFVVQYVNSFTLSGKGVFDGQGATAWKQNDCTTNKDCKMLCMNFGFNFLNNSIVRDITSKDSKNFHVNVLGCNNFTFDGFKVSAPKDSPNTDGIHIGRSTDVKILNTNIATGDDCVSLGDGCKNITVQNVNCGPGHGISVGSLGKYDAEEPVAGLLVKNCTLNGTDNGVRIKTWPNTPGAITITDMHFEDLTMNNVMNPIIIDQEYCPWNQCSKQNPSKIKISKVSFKNIKGTSGTKEGVVLVCSSGVPCEAVEMADIDLTFNGSAATAKCANVKPTITGKAPTCAA

SEQ ID NO: 54764 - protein, 178 aa, Glycine max
  Clone ID: UC-GMFLMINSOY005B06_FLI.pep
LGILCCVPLLSYFLLLTQLVVPIAIVTNQLTKVYISSYHHQMKNIGLFFLVVVATFVVAATAGSFYQDFEITWGGERAKIYENGNLLTLSLDRASGSGFRSKKEYLFGKIDMQLKLVPGNSAGTVTAYYLSSLGPTHDEIDFEFLGNLSGDPYTLHTNVFSQGKGNREQQFHSQRANP

SEQ ID NO: 54765 - protein, 134 aa, Glycine max
  Clone ID: UC-GMFLMINSOY011G02_FLI.pep
FFCLLFFSVYICLRNFSQRLRNFSLTLFAWLGKITLETYISQFHIWLRSNMPNGQPKWLLSLIPEYPMLNFMLTTAIYVFVSHRLFELTNTLKTVFIPTKDNRRLLHNFITGVTLCISLYCIALILLLIPHSTV

SEQ ID NO: 54766 - protein, 265 aa, Glycine max
  Clone ID: UC-GMFLMINSOY021B05_FLI.pep
DGAMPPLVELLKMQNSGIRELATAAILTLSAATSNKPIIAASGAGPLLVQILKSGSVQGKVDAVTALHNLSTGIENSIELLDASAVFPLLNLLKECKKYSKFAEKATALLEILSNSEEGRTAISIADGGILTLVETVEDGSLVSTEHAVGTLLSLCRSCRDKYRELILKEGAIPGLLRLTVEGTAEAQDRARVLLDLLRDSPPEKRLTSSVLEKIVYDIAERVDGADKAAETAKRLLQDMVQRSMEHSMKCIQHRAASCTPIPST

SEQ ID NO: 54767 - protein, 220 aa, Glycine max
  Clone ID: UC-GMFLMINSOY022E04_FLI.pep
TGLGLQISAQLTRQDGQIFYSLLFENNSQVPLDGFMIQFNKNTFGLAAAGPLQVSQLQPRMSARTLLPMVMFQNMSQGPPSSALQVAVKNNQQPVWYFSDKISLLVFFTEDGRMERSSFLETWRSLPDSNEVSKDFPAIVIGNADATLERLAASNMFFIAKRKNANQDVFYFSAKLPRGIPFLIELTTLIGNPGVKCAIKTPSPEMSALFFEAIETLLMG

SEQ ID NO: 54768 - protein, 250 aa, Glycine max
  Clone ID: UC-GMFLMINSOY022H04_FLI.pep
EVNFLGRLSHPNLVNLLGYCWDEDKLLLVYEFMPKGSLDYHLFRGNITPLSWNTRLKIAIGAAWGLAFLHASENNVIFSDFKASNILLDGNYNAKISDFGFARWGPFEGESHVSTRVIGTYDYAPPEYIATGHLYVKSDIYGFGVVLLEILTGMRALDTNRPQTMQNLVEWTKPCLSSKKKLKAIMDAKIEGQYSLEAAWQAAKLTLKCLKSVPEERPSMKDVVEALEAIEAIQNPQFAAYISSTPSAGS

SEQ ID NO: 54769 - protein, 330 aa, Zea mays
  Clone ID: UC-ZMFLB73344G07_FLI.pep
RLNALRVFRFCVSVRLAGMERPWRDKDKGAAAPAAGRARRYGDQPSFSSTLLDAIYRSMDEPDDGVTSSSSTAAKKQNQDLRHSCYYYKASLAAGSYRGSSRAAAPRGPQAATTSSSSDQCSSYGGFSSSEAESSQHRRLRPIRTSLATTAVAVAAPALAPEKKKAGVSIRARLRDLRRKPASPGPGARLAGFLNAIFSGRRAPPSASSCSRSCLSETPSTRGQPKRTVRFLDSDGGGERRRTVPVGVAPELEQMLLHRMEVDSGDDDDDESSDASSDLFDLENFAAVDPDGGAAYSDELPVYETTRLVLGHRAIGHGYARTGGVPTRVV

SEQ ID NO: 54770 - protein, 728 aa, Zea mays
  Clone ID: UC-ZMFLB73291G02_FLI.pep
AFPSQPPALNVPTSCHRLLPVMSPALAAGVEPMAVDDSASKKAKRKQLKAAAAAAEAEAEAASVKKKEKKEKKRKVKEPSPPLPSAASSDEEEKSSTSSEETAPAAKKAKEKTKKNVDVSSSASDDDGEITASSDEDPADPNALTNFRISESLRQSLRSKGIKSLFPIQATTFDLVLDGSDLVGRARTGQGKTLAFVLPILESLVNGANKASRRTEHGRTPSVLVLLPTRELANQVHADFEFYGATFGLSACCVYGGSPYRPQEMALRRGVDIVVGTPGRVKDFIVKGTLNLKCLKFRVLDEADEMLNMGFVDDVELILGKVEDATKVQTLLFSATLPEWVNKLSMRFLKVDRKTVDLVGNEKLKASASVKHLALPCNKAARAQVIPDIIRCYSHGGRTIIFTETKDSASELSGLIHGSRALHGDVAQAQREVILAGFRSGKFQVLVATNVAARGLDINDVQLIIQCEPPRDVEAYIHRSGRTGRAGNTGVAVMLYEPRYKHSVSRLERESGVKFEHISAPQPTDVAQSAGSEAADAIASVSDSVIPIFRQQAEQLLSSSSLSAADLLAKALAKAVGYTDIKKRSLLSSLEDYSTLHLQTGRPMWSPGFAFTILKRFMPEDKLADVKGATLTADGTGVVFDVPAADVEDYIQASESAAQVTIDEVKQLPPLQEKDQSRGNSGGGRFGHGGGRRFSGGGGGGRGFSGRGGGGRGFSGRGGGGSRFNRRN

SEQ ID NO: 54771 - protein, 119 aa, Glycine max
  Clone ID: UC-GMFLMINSOY025E05_FLI.pep
KSCLRLLNTGWSAGSYGNGSRIKLQYTRKIIDAIHSGSLLNAEYKKTEIFGLEIPTEVEGVPSEILDPMNTWSNKKAYKETLLKLAGLFKNNFETFTNYKIGKGNNNLTEEILAAGPIF

SEQ ID NO: 54772 - protein, 279 aa, Glycine max
  Clone ID: UC-GMFLMINSOY028B10_FLI.pep
ELDGTSRCCSCERMEPRDTKYLLLDDGRKLCLECLDSSIMDTHECQPLYLEIQEFYEGLNMKLEQQIPMLLVERQALNEAMEGEKNGHHHLPETRGLCLSEEQTVTTISRRPRIAAGYRAIDMITEPYRLIRCCEVTAILVLYGLPRLLTGSILAHEMMHAWLRLKGYPNLSPEVEEGICQVLAHMWLESELYSGFGNDGASSSTSSLSSSSPSSSSVSTKKGKRSDFEKKLGDFFKHQIESDTSSAYGDGFRLGNQAMVKYGLKRTLDHIHMTGSFPY

SEQ ID NO: 54773 - protein, 190 aa, Glycine max
  Clone ID: UC-GMFLMINSOY029E06_FLI.pep
PSGRVFFWSYVFYLSRFLHMLRTVLVVLRRRKLVFFQLFYHAISTFMSFLWLEFSQSFQVLAILFTTLAFSVMYGYRFWTSVAARGACLPLVLNCQIALLGCNLVCHVAVLLLHFLTGGCNGIGAWVFNSVLNGAILLLFLNFYVRMYLARRRKRKGVVIDHRCENDNNIARSSVLGAGKEPHSNKVKSN

SEQ ID NO: 54774 - protein, 368 aa, Glycine max
  Clone ID: UC-GMFLMINSOY031A12_FLI.pep
PLQNLSALISASGNATTATARPPRGRPWAVHAASSDTTTAAQAQLGRYEEGKLERPKWVGETPLSRLVQALISFKPLFSVLKLGARRALISTAEKNNIPWRKMAQEILESEVYRELESIQNQSLVYPDYYLNPFHAYEEGNLTWLAAAEAEAATMSMARRALPDASSIQEANQILRGNWLHAIEQHHMQYSESCVIDDILDIGCSVGISTRYLADKFPTAKVTGLDLSPYFLAVAQHKEKRAMPRKFPIKWIHANGEDTGLPSKSFDLVSIAFVLHECPTRVIVNLVREAFRLLRPGGTLALTDFSLKSKVLQELSPVLFTLVKSTEPFLDEYYLTDMDETLREAGFVNITSILTDPRHVTITATVPQ

SEQ ID NO: 54775 - protein, 488 aa, Glycine max
  Clone ID: UC-GMFLMINSOY034F04_FLI.pep
VPIHHLDRSLDFHALCALYAVTDVALVTSLRDGMNLVSYEFVACQDKKKGVLILSEFAGAAQSLGAGAILVNPWNITEVATAIAKALNMPSAEREKRHKHNYEHVKTHTAQEWAETFVSELNDTVVEAQIRTKQVPPRLPTETAVERYLQSNNRLLILGFNGTLTEPVEREGDRFKERELTVHPELKLPLAELCSDPKTTVVVLSGSGRAVLDENFKEYDIWLAAENGMFLNPSKGEWMTTMPEQLNMEWVDSVKHVFDYFTDRTPRSYFEEREASLVWSYRHADAEFGRLQARDMLQHLWTGPISNASVDVVQGSRSVEVRAANVTKGAAIDRILGEIVHSKFMTTPIDYVLCIGHFLTKDEDIYAFFEPELPSIGVGLQRSKGTEGVKFPVERVSSLKNPASRNGAAKSSSQKKGQRPVSNNEKKRNNHVCRGPRRLAPEKISWNVLDLKKENYFSCAVGRTQTNARYTLGSPDEVVAFLKELANV

SEQ ID NO: 54776 - protein, 185 aa, Glycine max
  Clone ID: UC-GMFLMINSOY035C02_FLI.pep
ANCFLLLSLLPNPSLSHSSAPFNLFPLLAISITTESYYPYTAQDGTCDASKANDLAVSIDGHENVPGNDENALLKAVANQPVSVAIDAGGSDFQFYSEGVFTGDCSTELNHGVAIVGYGATVDGTSYWIVRNSWGPEWGELGYIRMQRNISKKEGLCGIAMLASYPIKNSSNNPTGPSSSPKDEL

SEQ ID NO: 54777 - protein, 320 aa, Glycine max; identical to SEQ ID NO: 36857
  Clone ID: UC-GMFLMINSOY036A11_FLI.pep

SEQ ID NO: 54778 - protein, 110 aa, Glycine max
  Clone ID: UC-GMFLMINSOY037B10_FLI.pep
EGPWFIPDILVNVHRAGEESIGVIREALPDGSYRVGLGSSGNGETITALPNEMEAVVPRKSDKIKIMGGALRGATGKLIGVDGTDGIVKVDDTLDVKILDLVILAKLAQP

SEQ ID NO: 54779 - protein, 248 aa, Glycine max
  Clone ID: UC-GMFLMINSOY040G10_FLI.pep
LDYIGINYYGQEVVSGAGLKLVENDEYSESGRGVYPDGLYRMLLQYHERYKHLNIPFIITENGVSDETDLIRRPYLLEHLLAIYAAMIMGVRVLGYLFWTISDNWEWADGYGPKFGLVAVDRANNLARTPRPSYHLFSKIVNTGKVTHEDRERAWDELQRVAKEKKTRPFYRAVDKHRLMYAGGLDKPEQRPYIERDWRFGHYQMDGLQDPLSRFSRSIFRPFSLFSLKRKPKSQKKNAKLILQPLET

SEQ ID NO: 54780 - protein, 552 aa, Glycine max
  Clone ID: UC-GMFLMINSOY041A09_FLI.pep
RCCLLAGDRSGRNSNATDMGKKGSWFSAIKRVFTHHSKGKDSDNNKGTKEKKKSLGKLKHGETNSFIPLFREPSSIEKIFGDFEREQQLLGLRPATPPERPKTPPYVPPRAPSPRPPSPRAPSPRPPSPRAASPRVASPRVTSPKAASSRIAHHHKEVGYRPEPTLRQQHATATKIQSVYRGYMARRSFRALKGLVRLQGVVRGQNVKRQTVNAMKHMQLLVRVQSQIQSRRIQMLENQARYQADFKNDKDAASILGKLTSEAGNEEWDDSLLTKEEVEARLQRKVEAIIKRERAMAFAYSHQLWKATPKSTHTPMTDTRSSGFPWWWNWLERQTPAATPQERQSLKNFQITPPRPYSEQKTSPRPGSSTQRQPQSQQQQPHVSFDNMDTPTPKSTKSTIVASSKPVRMPPFRTPQANSSGSGSKYPRPRDVGSNSPFDLPLKDDDSLTSCPPFSVPNYMAPTLSARAKARASSNPRERLGGTPTSTDSKRRLSFPLSQGIGSFKWSKGFSSKDQRVPDKFQSLESIGNVSVDSTVSLPARVVGRKPFTRFV

SEQ ID NO: 54781 - protein, 123 aa, Glycine max
  Clone ID: UC-GMFLMINSOY041C10_FLI.pep
LMFLQTWDLYERKELVGLVDMSLNGEFDAEQACKFLKIGLLCTQESPKHRPSMSSVVKMLTGKMDVDDSKITKPALISDLLDLKVRGNEESSIDMKNSSMYTTFSSDNHDTTSSFATTTTFTA

SEQ ID NO: 54782 - protein, 176 aa, Glycine max
  Clone ID: UC-GMFLMINSOY042C11_FLI.pep
VTDMSLADYIGVSPSKHATYVPHTAGRYSVKRFRKAQCPIVERLTNSLMMHGRNNGKKLMAVRIIKHAMEIIHLLTDLNPIQVIVDAVINSGPREDATRIGSAGVVRRQAVDISPLRRVNQAIYLLTTGAREAAFRNIKTIAECLADELINAAKGSSNSYAIKKKDEIERVAKANR

SEQ ID NO: 54783 - protein, 173 aa, Glycine max
  Clone ID: UC-GMFLMINSOY042H09_FLI.pep
ALPMADDSAKGIENASLNSTQLENPQIEPIRLPSVEEIRGQDIWNNCAVRSVVSGVMGGGLGIFMGLFLGALDNPLMQEEMTGRQQFIYQAKQMGRRSWSSAKAFAVMGFIFSAAECVVEKARAKHDITNTVVAGCATGGAISAKGGPKAACAGCAGFAAFSVVIEKFLERHQ

SEQ ID NO: 54784 - protein, 286 aa, Glycine max
  Clone ID: UC-GMFLMINSOY044B02_FLI.pep
RNKISIVEAGALEPIISFLKSQNPNMQEYATASLLTLSASPTNKPIISACGTIPLLVNILRDGSPQAKVDAVTALSNLSTTQPENLSIILQTNAMPLIVSLLKTCRKSSKIAEKCSALIESLVGYEEGRTSLTSEEGGVLAVVEVLENGTPQSREHAVGALLTMCQSDRCKYREPILREGVIPGLLELTVQGTPKSQPKARTLLQLLRESPYSRPEAEPDTLENIVCDIISQIDGDDQSGKAKKMLAEMVQVSMEQSLRHLQQRALVCTPSEMPIASCASEVSSKY

SEQ ID NO: 54785 - protein, 64 aa, Glycine max
  Clone ID: UC-GMFLMINSOY044D08_FLI.pep
FPFRINPYNTIHQKQMPQHPITAQLYTKLPDCLLASRFHSGTPSPGTQALISITLPSKALGPPI

SEQ ID NO: 54786 - protein, 357 aa, Glycine max
  Clone ID: UC-GMFLMINSOY044H10_FLI.pep
FAHCSLKNLHKLRVGQRERERERERERERERMGGWAIAVHGGAGVDPNLPLERQEEAKQLLTRCLNLGISALNSNLPAIDVVELVVRELETDPLFNSGRGSALTEKGTVEMEASIMDGPKRRCGAVSGLTTVKNPISLARLVMDKSPHSYLAFSGAEEFARQQGVEVVDNEYFITPDNVGMLKLAKEANTILFDYRIPTSGYETCGSGVESPLQMNGLPISVYAPETVGCVVVDREGRCAAATSTGGLMNKMTGRIGDSPLIGAGTYACDVCGVSCTGEGEAIIRGTLAREVAAVMEYKGLKLQEAVDFVIKHRLDEGMAGLIAVSNAGEVAYGFNCNGMFRGCATENGFMEVGIWE

SEQ ID NO: 54787 - protein, 60 aa, Glycine max
  Clone ID: UC-GMFLMINSOY046A02_FLI.pep
FGPVSPKTRTVFQFKSVYRSLSFGFSAYPWVWGKSQIPWALEFVDKNAFMSRVYLYPFCF

SEQ ID NO: 54788 - protein, 502 aa, Glycine max
  Clone ID: UC-GMFLMINSOY046C08_FLI.pep
LSLSHLGSAFSFFCGMLEPRFSGGVLLLWLLCGTLVPTMVESAIGVNWGTISSHRLKPTTVVDLLRQNKISKVKLFEADSDVLRALMGSGIQVMVGIPNEMLPFLSSSPAASDLWVRQNVSAYVGRGGADIRYVAVGNEPFLSSYNGQYQNLIMPAILNMQQSLVKANLAGYIKLVVPCNADAYQSSALPSQGAFRPELTQIMNQLVQFLNSNGSPFVVNIYPFLSLYNNGDFPQEYAFFEGTTHAVQDGSNVYTNAFDGNYDTLVAALTKLGYGQMPIVIGEIGWPSDGAIDANITAAKVFNQGLINHIASNKGTPLRPNAPPMDVYLFSLLDEGAKSTLPGNFERHWGIFSFDGQAKYPLNLLLGNKELKNARNVEYLPSRWCVANPSGDLNNVVNHMRLACSVADCTTLNYGGSCNEIGEKGNISYAFNSYYQLQMQDSRSCNFDGLGMVTFLDPSVGDCRFLVGVTDKGSDSSTSQTTYQWWTLVLLLILHGAFLLSM

SEQ ID NO: 54789 - protein, 131 aa, Glycine max
  Clone ID: UC-GMFLMINSOY049D04_FLI.pep
TEVPESGLLCDLLWSDPSKDIEGWGENDRGVSYTFGASRVTEFLGKHDLDLICRAHQVVEDGYEFFANRQLVTIFSAPNYCGEFDNAGAMMSVDETLMCSFQILRPAEHRKPKFAFGSKTTFKAILDAARV

SEQ ID NO: 54790 - protein, 152 aa, Glycine max
  Clone ID: UC-GMFLMINSOY049F02_FLI.pep
EMVVKEGLRLHPVAPLLLPHHSREDCMVGEYFIPKNSRVIVNAWTIMRDPSAWDEAEKFWPERFEGSNIDVRGKDFRFLPFGSGRRVCPGLQLGLNTVLLTVAQLVHCFDWKLPNNMLPCELDMTEEFGLSMPRANHLLVIPTYYRLHDQSC

SEQ ID NO: 54791 - protein, 178 aa, Glycine max
  Clone ID: UC-GMFLMINSOY049G11_FLI.pep
ECILCEGKFNATKPLNITRSHRDTLSMSQLFLKNFTFGCAHTALAEPTGVAGFGRGLLSLPAQLATLSPNLGNRFSYCLVSHSFDKERVRKPSPLILGHYDDYSSERVEFVYTSMLRNPKHSYFYCVGLTGISVGKRTILAPEMLRRVDRRGDGAASAARDTLRGQCQASLLGFCCKW

SEQ ID NO: 54792 - protein, 300 aa, Glycine max
  Clone ID: UC-GMFLMINSOY055C12_FLI.pep
FAPRPVLARTPEEVLAAKGVKPTLSPNLNTLALVEAAGVKRLLFCGVGCQVQALRSVEHHLNLDKLYVLGTNCVDNGTRQGLDKFLKAASQSPETVLHYEFMQDYKVHLKHLDGHIEEVPYFCLPANDLVDVIAPSCYSCFDYTNALADLVVGYMGVPKYSGIGMTQHPQYVTVRNERGREMLSLIENLLEITPTISTGDRRPFVMETVKADDEAKLGRGPSQPAPKFIGNLLAFILNLIGPKGLEFARYSLDYHTIRNYLHVNRMWGKERADRHMPTYAKKIVDLYNQNGQIEKMLSNK

SEQ ID NO: 54793 - protein, 120 aa, Glycine max
  Clone ID: UC-GMFLMINSOY055G07_FLI.pep
KREEKSKTMSGIIHKIEETLHVGGHKKEEEHKGEQHHGGEYKGEHHGEHSTEYKGEHHVGEHKPEHHGGEEHKEGFLDKIKDKIHGEEGGATAEGEKKKKKKEKKKHEHGHDSSSSSDSD

SEQ ID NO: 54794 - protein, 158 aa, Glycine max
  Clone ID: UC-GMFLMINSOY056G03_FLI.pep
CWSALNMVMQPTSKRILKELKDLQKDPPTSCSAGPVAEDMFHWQATIMGPADSPYAGGVFLVSIHFPPDYPFKPPKVAFRTKVFHPNINSNGSICLDILKEQWSPALTISKVLLSICSLLTDPNPDDPLVPEIAHMYKTDRAKYEATARSWTQKYAMG

SEQ ID NO: 54795 - protein, 414 aa, Glycine max
  Clone ID: UC-GMFLMINSOY057B04_FLI.pep
SALAQKLWLAGFSKGIQEMHRKASLVLEDAVRNIYTVVAFCAGNKVMELYQLQLNKIFKQSFFHGVAIGFAFGFSQFLLFACNALLLWYTAICVNKSYVDLPTALKEYIVFSFATFALVEPFGLAPYILKRRKSLMSVFEIIDRVPKIDPDDSSALKPPNVYGSIELKNIDFCYPSRPEVLVLSNFSLKVNGGQTIAVVGVSGSGKSTIISLIERFYDPVAGQVLLDGRDLKQYNLRWLRSHLGLVQQEPIIFSTTIRENIIYARHNASEAEMKEAARIANAHHFISSLPHGYDTHVGMRGVDLTPGQKQRIAIARVVLKNAPILLLDEASSSIESESSRVVQEALDTLIMGNKTTILIAHRAAMMRHVDNIVVLNGGRIVEEGTQDSLVAKNGLYVRLMQPHFGKALRQHRLV

SEQ ID NO: 54796 - protein, 368 aa, Glycine max
  Clone ID: UC-GMFLMINSOY057G02_FLI.pep
DNDAFRRMARLTDGTLSEVLPRISDTDVQISRQRISAFLSSHTAYELLPESGKVVALDVDLPVKQAFHILHEQGVFMAPLWDFCKGQFVGVLSASDFILILRELGNHGSNLTEEELETHTISAWKEGKSYLNRQNNGHGTAFSRCFIHAGPYDNLKDIAMKILQKEVSTVPIIHSSSEDASFPQLLHLASLSGILKCICRYFRHCSSSLPVLQLPICAIPVGTWVPKIGESNRRPLAMLRPTASLASALNLLVQAQVSSIPIVDDNDSLLDIYCRSDITALAKNRAYTHINLDEMTVHQALQLGQDAYSPYELRSQRCQMCLRSDPLHKVMERLANPGVRRLVIVEAGSKRVEGIVSLSDIFKFFIGG

SEQ ID NO: 54797 - protein, 355 aa, Glycine max
  Clone ID: UC-GMFLMINSOY058A08_FLI.pep
GDDHEREEKEEEEEEEEEEGEVGGVRVESVEEENAAAIAEIVGDFSGFSTSNEDDSSSTSTGPRSNNISPNGRIKRVITAGNWQKGELLGRGSFGSVYEGISEDGFFFAVKEVSLLDQGNQGRQSVYQLEQEIALLSQFEHENIVQYIGTEMDASNLYIFIELVTKGSLRNLYQRYNLRDSQVSAYTRQILHGLKYLHDRNIVHRDIKCANILVDANGSVKLADFGLAKATKFNDVKSCKGTAFWMAPEVVKGKNTGYGLPADIWSLGCTVLEMLTGQIPYSHLECMQALFRIGRGEPPHVPDSLSRDARDFILQCLKVDPDERPSAAQLLNHTFVQRPLHSQSSGSASPYIRRG

SEQ ID NO: 54798 - protein, 348 aa, Glycine max
  Clone ID: UC-GMFLMINSOY058B11_FLI.pep
HWFEKFNWFISSENYLVISGRDAQQNEMIVKRYMSKGDLYIHADLHGASSTVIKNHKPAQPVPPLTLNQAGCFTVCHSQAWDSKIVTSAWWVYPHQVSKTAPTGEYLTVGSFMIRGKKNFLPPHPLIMGFGLLFRLDESSLGSHLNERRVRGEEEAADDYEETGPLEDKSDSESEKDVTDIEPATDLERNGNLSADSHKPLPEDFPADPSQTSLATTDAETAISQDFPAKETSTLNMVDREILSDVGGNGLASVTPQLEELLDQALELGPVAKSSKKYGIEKSQIDLDTEQHFEQTKTAVREKPYISKAERRKLKKEQKPGEEDSNVEHGKDESKLKDISANLPVKED

SEQ ID NO: 54799 - protein, 402 aa, Glycine max
  Clone ID: UC-GMFLMINSOY061H05_FLI.pep
DSRRCVLPGIGLHLNALASLKDCKNIKIDTLSSGRQPNLLSSPSSVQLSPSQEHQLSLVPASVERDLEPLENEVQPGEDCTQSLVLVQMAGEDFQQNSPKKKRRKLEPAGEGESCKRCNCKKSKCLKLYCECFAAGVYCIEPCACRDCFNKPIHVETVLQTRQQIESRNPLAFAPKVIRSSDSVSEIGDDLNKTPASARHKRGCNCKKSSCLKKYCECYQGGVGCSVSCRCEGCKNTYGRKDGSVPSGLEAEPEEETEACEKGVVENASWKTETQNTEDHPDQSLATTPLPLSRSLLPLSFSSKGKPPRSFVTTISSSGLFVSQKLGKSNAPRSQHQPKCVKPLQTVPDDDSPVTCIKTSSPNGKRISSPNCDVGSSPTTRRGGRKLILQSISSFPSLTPHH

SEQ ID NO: 54800 - protein, 234 aa, Glycine max
  Clone ID: UC-GMFLMINSOY062B01_FLI.pep
ILHIFSFLPRDLNFIEHTSNIGWKEHQRARPIIIDPGLYHSKKSGVYWAKEKRSVPSSFKLFTGSAWVVLTKSFLEFCVWGWDNLPRTLLMYYTNFLSSPEGYFHTVICNHKDYQNTTINHDLRYIRWDNPPKQHPVFLKLEHFDDMVHSGAPFARKFTKDDPVLNKIDKELLRRSDGHFTPGGWCIGNPLLGKDPCAVYGNPIVVKPTLQSKKLEKLIVKLLDSENFRPKQCK

SEQ ID NO: 54801 - protein, 142 aa, Glycine max
  Clone ID: UC-GMFLMINSOY062D11_FLI.pep
KLDPFRDAEILRTNLPSLRESSIRVLIACTIFLKQAAAAGLCLAQIGQMMTREFCDGEESPSELENICLKVKTTSVPRGSDDNVNNRKDETEECDEVGGIISLADLNQGEWEAFLEGFSELLHGFFEGKRCKSKSWNLNGSY

SEQ ID NO: 54802 - protein, 377 aa, Glycine max
  Clone ID: UC-GMFLMINSOY063C05_FLI.pep
LLSKSSSSARHDPEIDEGIHNVKLYSYKQLRNATEKFSPANKIGEGGFGSVYKGRLKDGKVAAIKVLSAESRQGVKEFLTEINVISEIEHENLVKLYGCCVEKNNRILVYNYLENNSLSQTLLGGGHNSLYFDWGTRCKICIGVARGLAYLHEEVRPHIVHRDIKASNILLDKDLTPKISDFGLAKLIPANMTHVSTRVAGTLGYLAPEYAIGGKLTRKADIYSFGVLLAEIISGRCNINSRLPIEEQFLLERTWDLYERKELVELVDISLNGEFDAEQACKFLKISLLCTQESPKLRPSMSSVVKMLTGKMDVNDSKITKPALISDFMDLKVRRNEESSIDMKNSSMYTTSSSDNHDSTMSFATTTTFAAIYDESM

SEQ ID NO: 54803 - protein, 357 aa, Glycine max
  Clone ID: UC-GMFLMINSOY063H10_FLI.pep
CFEVVEKTGNDLHCKCIDAGLFLPGAKLSFWRDGKLVRGNNKLPTLSTKDWADIDFGIAEGVDFFALSFVNHADSVKDLKNYLSSKSTKSIKVLAKIESSESLHKLEEIVRASDGIMVARGDLGVEIPLEQIPTVQEDIIYVCRQLNKPVIVASQLLESMVEYPTPTRAEVADVSEAVRQYADALMLSGESAIGSYAQKALAVLDMASSRMESWSREENRQNLVNYHQLGASLPECITEQICNCAVEMANNLGVDAIFVYTKYGHMASLLSRNRPNPPIFAFTNDDSTRMALTLQWGVVPLLVDLSDDAESNISKSVQLMKSRGLISQGDVVLVVSDVAPTRATPMAFQSIQVKTII

SEQ ID NO: 54804 - protein, 205 aa, Glycine max
  Clone ID: UC-GMFLMINSOY065G06_FLI.pep
VVSKRPMKGHGREMIQLGVPIADAPPDVDNVTGISKDKKVESIPSLFQDIIERLAASQVMTVKPDACIVDFFNEGEHSHPNNWPPWFGRPVYTLFLTECDMTFGRIIVSDHPGEFRGAVRLSLVPGSLLVMQGKSTDFAKHALPSIHKQRIIITFTKSQPKCSLPNDSQRLAPPAASHWAPPQSRSPNHVRHQLGPSIIPRFQQL

SEQ ID NO: 54805 - protein, 298 aa, Glycine max
  Clone ID: UC-GMFLMINSOY067G12_FLI.pep
VFTEHLHSALNMAEATQSNAELLEWPKKDKRRFLHVVYRVGDLDRTIKFYTECFGMKLLRKRDIPEEKYANAFLGFGPEQSHFVVELTYNYGVTSYDIGTGFGHFAIATPDVYKLVEDIRAKGGNITREPGPVKGGKSVIAFVKDPDGYAFELIQRSSTPEPLCQVMLRVGDLERSIKFYEKTLGLRVVKKTDRPEYKYTVAMLGYAEEHETTVLELTYNYGVTEYTKGNAYAQVAIGTDDVYKSAEVVNIVTQELGGKITRQPGPVPGLNTKITSFLDPDGWKTVLVDNQDFLKELE

SEQ ID NO: 54806 - protein, 141 aa, Glycine max
  Clone ID: UC-GMFLMINSOY069B03_FLI.pep
KTLKRGEKKKKRMVTIAGGVSLSSPSRVFANAKGIDSAQKAQAVRFPALSRPIQKWPGLVKTRPVRATPEKISEKVEESIKSAEEACSGGGGDAECAAAWDEVEELSAAASHAREKQKQSDPLENYCKDNPETDECRTYDN

SEQ ID NO: 54807 - protein, 325 aa, Glycine max
  Clone ID: UC-GMFLMINSOY069B05_FLI.pep
PHNTLCSDQFLLSTFSIEEMSSSVTNGDDSLTGHIISTTIGGKNGEPKQTISYMAERVVGTGSFGIVFQAKCLETGEAVAIKKVLQDRRYKNRELQLMRVLDHPNVISLKHCFFSTTSTDELFLNLVMEYVPESMYRVIKHYTNANQRMPIIYVKLYMYQIFRGLAYIHTVPKVCHRDLKPQNILVDPLTHQVKLCDFGSAKVLVKGEANISYICSRFYRAPELIFGATEYTSSIDIWSAGCVLAELLLGQPLFPGENAVDQLVHIIKVLGTPTREEVRCMNPNYNDFRFPQIKAHPWHKIFHKKMPPEAICSSGRIMMISLEGA

SEQ ID NO: 54808 - protein, 328 aa, Glycine max
  Clone ID: UC-GMFLMINSOY070A12_FLI.pep
SSELEPATTPEEEEIMTKLKNPQHSVIEEALISLRKLTRIREETRLQLCTPRLLSALRSLVLSKHVNVQVNALASVVNLSLEKSNKVRIVRSGMVPPLIEVLKFGSSEAQEHGAGALFSLAMDDDNKTAIGVLGGLAPLLHMLRSESERTRHDSALALYHLSLVQSNRSKMVKLGSVPVLLSMVKSGHMMGRVMLILGNLGSGSDGRAAMLDAGVVECLVGLLSGPEPGTGSTRESCVAVMYALSHGGLRFKAVAKAAGVVEVLQKVEKMGSERARRKVRKILEIMRTKEVEEEDVDWEELLDSGLGCRTRSRLGGGLDESSANSAEF

SEQ ID NO: 54809 - protein, 154 aa, Glycine max
  Clone ID: UC-GMFLMINSOY070D09_FLI.pep
EFIGPIFKIFIILCRYAFPIKCTEVILADDNETILEIRAEYDPSKKTKPKGVLHWVAQPSPGVDPLKVEVRLFERLFLSENPAELDNWLGDLNPNSKVIIPNAYGVSSIQNAKVGDNFQFERLGYFVVDQDSTSEKLVFNRTVTLKDSYSKGGK

SEQ ID NO: 54810 - protein, 315 aa, Glycine max
  Clone ID: UC-GMFLMINSOY074G03_FLI.pep
PLLSIQVTELLDGVFIGCSMNHTIGDGTSYWNFFNTWSEIFFQTQAQGLEYDATVPISRHPIHNRWFPDGCGPLINLPFKHEDEFIDRFESPKLRVRIFHFSAESIAKLKARANSESKSKTSEISSFQSLSAHVWRSVTRARKLPNDEITSCKLAISNRSRLEPPLPHEYFGNAVDVVSTAGFTAGELLEKDLGWAAWKVHVAVANQNDKAVRQKLKEWLKLPVVYQLGVHFDPCTVTMSSSPRFNMYGNEFGMGKAIAVLSGYANKNDGNVTAYQGYEGEGSIDLEICLSPDAVSALESDEEFMEAASVANFLH

SEQ ID NO: 54811 - protein, 343 aa, Glycine max
  Clone ID: UC-GMFLMINSOY074H02_FLI.pep
DAIRIGNYKDGLYPTDSREFAKRIFYTVFMGSENSSEMTRSRAKVLADEIGSWHLDVSIDVVVSAFLSLFQTLTGKRPRYKVDGGSNVENLSLQNIQARIRMVLAFMLASLLPWVHSKPGFYLVLGSSNVDEGLRGYLTKYDCSSADINPIGSISKQDLRAFLQWAAIHLGYSSLADIEAAPPTAELEPIRSNYSQLDEVDMGMTYEELSVYGRLRKIFRCGPVSMFQNLCYRWGARLTPSQVAEKVKHFFKYYSINRHKMTVLTPSYHAESYSPEDNRFDLRQFLYNARWPYQFRKIDELVSELDVKDVKDSGDHEAMAATSDGVGGMGVAAAGSGNPNVGL

SEQ ID NO: 54812 - protein, 329 aa, Glycine max
  Clone ID: UC-GMFLMINSOY077C06_FLI.pep
SCPKNHVTIKILYCGICHTDLHYAKNEWGITMYPVVPGHEIIGVVTKVGRDVKGFKEGDRVGVGCLAASCLECEHCKTDQENYCEKLQFVYNGVFWDGSITYGGYSQIFVADYRYVVHIPENLAMDAAAPLLCAGITVFNPLKDHDLVASPGKKIGVVGLGGLGHIAVKFGKAFGHHVTVISTSPSKEAEAKQRLGADDFIVSSNPKQLQAARRSIDFILDTVSAEHSLLPILELLKVNGTLFLVGAPDKPLQLPAFPLIFGKRSVKGGIIGGIKETQEMLEVCAKYNITSDIELITPDRINEAMERLAKNDVRYRFVIDIANAAASNN

SEQ ID NO: 54813 - protein, 526 aa, Glycine max
  Clone ID: UC-GMFLMINSOY078A09_FLI.pep
AGLGMAVGRDLKGDKNNVVAVIGDGAMTAGQAYEAMNNAGYLDSDMIVILNDNKQVSLPTANLDGPIPPVGALSSALSKLQSNRPLRELREVAKGVTKQIGGPMHELAAKVDEYARGMISGSGSTLFEELGLYYIGPVDGHNIDDLVSILNEVKSTKTTGPVLLHVVTEKGHGYPYAERAADKYHGVTKFDPATGKQFKSNAATQSYTTYFAEALIAEAEADKDIVGIHAAMGGGTGMNLFLRRFPTRCFDVGIAEQHAVTFAAGLACEGLKPFCAIYSSFMQRAYDQVVHDVDLQKLPVRFAMDRAGLVGADGPTHCGAFDVTFMACLPNMVVMAPSDEAELFHMVATAAAIDDRPSCFRYPRGNGIGVELPLGNKGIPLEIGKGRILIEGERVALLGYGSAVQSCLAAASLLEHHGLRATVADARFCKPLDRSLIRSLAQSHEVLITVEEGSIGGFGSHVVQFMALDGLLDGKLKWRPIVLPDCYIDHGSPVDQLSAAGLTPSHIAATVFNLLGQTREALEVMT

SEQ ID NO: 54814 - protein, 120 aa, Glycine max
  Clone ID: UC-GMFLMINSOY080H12_FLI.pep
EMLSIFRKGEEFNHGVEFVLLISFNEDALGNQAEHALASLASMMLESPSLIVQFTHGLNFSPSSKEYTHGVVIRFRSVEAFEIFINSKEYKNAWHYKFQPIVHKSFSLHFSVDPVGTEIM

SEQ ID NO: 54815 - protein, 174 aa, Glycine max
  Clone ID: UC-GMFLMINSOY081B08_FLI.pep
GKYMIIHSDVKTTNILLDDDWVAKVSDFGLSRFGPMDSSQAYGSTTAVRGSFGYIDPVYYKRHHLTDKSDVYAFGVVLFEVLCARPPLIRNEDPKQESLAKWVRYCYQSGTMDQIVDPTLKGRIAPECFQRFCHIGVSCLSEVGMQRPSMKDVVFMLESTLQVQESAENVKRGN

SEQ ID NO: 54816 - protein, 256 aa, Glycine max
  Clone ID: UC-GMFLMINSOY083G02_FLI.pep
GYWAKLPMIRRLMLSHPEVEWIWWMDSDAFFTDMVFELPMSKYDEYNLVLHGYPDLLFEQKSWIAVNTGSFLFRNCQWSLDLLDAWAPMGPKGPVREEAGKILTANLKGRPAFEADDQSALIYLLLSKKEKWMDRTFLENSFYLHGYWAGLVDRYEEMIEKYHPGLGDERWPFVTHFVGCKPCGSYGDYPVERCLSSMERAFNFADNQVLKLYGFRHRGLLSPKIKRIRNETVSPLEFVDQFDIRRHSTENTESKS

SEQ ID NO: 54817 - protein, 326 aa, Glycine max
  Clone ID: UC-GMFLMINSOY084G04_FLI.pep
EVRRWNKQDNWGRKTLKEASESTVPKIVGEGIYGVGPVLAALSADRREFYALYVQEGLDLSGNNRKKKDKKGFERVLKIAEKLGLSVKEASKHDLNMVADNRPHQGLVLDASQLEMVKVNELDPVSIDEGKGSLWVALDEVTDPQNLGAIIRSAYFFGASGVVLCAKNSAPLSGVVSKASAGSLELMELRYCKNMMQFLVSSAENGWRVLGGSVSSKAIALDEVVPGPPTILVLGSEGTGLRPLVERSCTQLVRIPGNIHFDSSTSELDGESSGLNSQSSGKEFLSFLAVESLNVSVAAGVLIHHLIGKKLVDSFPEEHKQIDMSE

SEQ ID NO: 54818 - protein, 514 aa, Glycine max
  Clone ID: UC-GMFLMINSOY089C05_FLI.pep
KETWLKLPPETVHMISFAGLIGDGAPLISLSSGKSTNVSAVHSIKSVNMVHTGARKNGFSHWIKSGNPFQQKLPTSNEGRGYSQPNGSVCGEFDGSSTNNFHDDKTPRKNDINQMNGANSVSEDENEDLLADFIDEDSQLPSRSSKPHHSRALSSHVNDEENTTQTGSSLCLLKSMDKYARLMQKLEVVNVEFFKGVCQLFGFFFYFIYETFGQQNASSTGKGTSSSLNYRLRTALSRVNQDCEEWIKSQSSSPTSLSSPFVHAELTPTHPPNTNYGHSSGTSLGLKERCVAVDTISLVARILNRSKAHLQSMLLQSNSTILEDFYVHLVDAVPDLTEHVHRTTVRLLLHINGYVERVANCKWEVKELGMEHNGYVDLMLGEFKHYKTRLAHGGIRKEVQDLLLDYGLEIVAETLVEGLSRVKRCSDEGRALMSLDLQVLINGLHHFVSLNVKPKLQMVETFIKAYYLPETEYVHWARAHPEYSKSQVVGLVNLVATMKGWKRKTRLDILEKIE

SEQ ID NO: 54819 - protein, 327 aa, Glycine max
  Clone ID: UC-GMFLMINSOY089F09_FLI.pep
LPVPRWASGLVGGYYAPSLFIGGATGMAYGKLISLAVAESNPTINLSVLEVASPQAYGLFLLQVGMAATLAGVCQVPLTAVLLLFELTQDYRIVLPLLGAVGLSSWISSVQTKRGDDGGAKKIELENSNSPLLPETSSRSSIESSAGNTFAEDVSYLSDLCQVESSLCVEDDNVETTYFVRRTFVSEAMKTRYVAVSMCTPLIEVIDLMLAEKQSCAVIVDTDDTLIGFLTLRDIQEYGKFAKARSTKHKELLVSEFCLLNGEICSVPWTATPDMELHYAQMIMKERRFNHVPVVRNIYERTYPVGIIDPESISLTCSALATRQSLS

SEQ ID NO: 54820 - protein, 295 aa, Glycine max
  Clone ID: UC-GMFLMINSOY099E02_FLI.pep
SVFWQEGGMAKDVEVAERGSFSGKDYQDPPPAPLIDAEELTKWSFYRALIAEFIATLLFLYITVLTVIGYNHQTDLKENGEICGGVGILGIAWAFGGMIFILVYCTAGISGGHINPAVTFGLFLARKVSLIRAIMYMVAQCLGAICGVGLVKAFQKSYFNKYGGGANSLAAGYSTGTGLGAEIIGTFVLVYTVFSATDPKRNARDSHVPVLAPLPIGFAVFMVHLATIPVTGTGINPARSLGAAVIYNQDKPWDDHWIFWVGPFIGAAIAAFYHQFILRAGAAKALGSFRSNPHN

SEQ ID NO: 54821 - protein, 270 aa, Glycine max
  Clone ID: UC-GMFLMINSOY108E06_FLI.pep
EGNEKGLQPRINLQGYLLGNPITTRNEGNDQIPFAHGMGLISDELYASLQRNCKGEYENRDSRNVLCLRDLKHYDECLSGINTFYILDRYCKSDSPKKHEAQWRRSLTQKFEASLNSHLRVPDIRCQIFGFFLATQWANDESVRKSLHIREGTIGKWERCYTTDFEEQIFSSFEFHVNLSAKGYRSLIYSGDHDAVVPFMSTQAWIRALNYSIVEDWRPWLLEDQVAGYTRIYSNQMTFATVKGSGHTAPEYKPEEGFAMFSRWIANMPL

SEQ ID NO: 54822 - protein, 318 aa, Glycine max
  Clone ID: UC-GMFLMINSOY109A01_FLI.pep
RVMGYFSSPLFSPSSDKRFWSTLRSRIDALLDARQSETSTHSPTNEQGNNRLKEDSMLLMRGFDSVAHTLSLLSNNLDNALHGARELANPPTLTDIFHSKYDKVENKEDSGEKQKEEEESKQGMKRKFDPNDVSEENAVDSQKEENGKKMMDTNIKKAKNLAVSMATKAASLARELKSIKSDLCFMQERCGLLEEENRRLRDGFAKGVRPEEDDLVRLQLEALLAEKSRLANENANLVRENQCLHQLVEYHQLASQDLSDESYEHALQGMYLDFSSPPPTIPEETRDGDGDEDENGEPTHTRRNHICKFSASIDDGEE

SEQ ID NO: 54823 - protein, 417 aa, Glycine max
  Clone ID: UC-GMFLMINSOY109G05_FLI.pep
AQSKDNVIAIMLDTKGPEVRSGDLPQPINLTTGQEFTFTIRRGVGTADCVSVNYDDFVNDVDVGDMLLVDGGMMSLVVKSKTEDSVKCEVVDGGELKSRRHLNVRGKSATLPSITEKDWDDIKFGVDNKVDFYAVSFVKDAQVVHELKNYLKSCDADIHVIVKIESADSIPNLHSIITASDGAMVARGDLGAELPIEEVPLLQEEIITICRSMGKAVIVATNMLESMIVHPTPTRAEVSDIAIAVREGSDAIMLSGETAHGKFPLKAVKVMHTVALRTEATIPGGQMPPNIGQVFKNHMSEMFAYHATMMSNTLGTSTVVFTRSGFMAILLSHYRPSGTIFAFTDQKRIQQRLALYQGVCPIYMEFSEDAEETFTRALDLLQKQGMVKSGEEVALVQSGTQPIWRFQSTHNIQVRTV

SEQ ID NO: 54824 - protein, 583 aa, Glycine max
  Clone ID: UC-GMFLMINSOY109H04_FLI.pep
VDLETGQVVSQEAITWSVSGYPTMTLEDMVGVLEVPLKSTEFNRSITKRGVNLADLACLPISSGWYGTQVEENTRLIKVQCYSKEGTVNFYMKPIEGVTALVDMNKKEVLSISDNGQNIPVANGINTDYRYSIQKLNGGELRMLNPISLEQPKGPSFTINGHLVKWANWEFHLRPDPRAGIIISQAKVRDPDTSKLRSVMYKGFTSELFVPYMDPTQDWYFKTYMDAGEYGFGLQAMPLDPLNDCPKNAYYMDGVFASSDGTPYLQPNMICIFESYAGDIAWRHAECPITDLKVTEVRPKVTLVVRMAAAVANYDYIVDWEFQTDGLIRAKVGLSGILMVKGTTYENMDQVPNQEYLYGTLLSENIIGVIHDHFITYYLDMDVDGSDNSFVEVNIKKQETSPGESPRKSYLKAVKKVAKTEKDAQIRLQLYDPSEFHVVNPLKKTRIGNPVGYKLVPGATAASLLDPEDPPQKRAAFTNNQIWVTPYNKSEQWAGGLFAYQSKGDDTLQVWSNRDRPIENKDIVLWYTIGFHHIPCQEDYPVMPTVSSSFDLKPANFFERNPILGVPPNFEDDLPVCKARDSA

SEQ ID NO: 54825 - protein, 238 aa, Glycine max
  Clone ID: UC-GMFLMINSOY117H03_FLI.pep
ELKRIENKINRQVTFAKRRNGLLKKAYELSVLCDAEVALIIFSNRGKLYEFCSGHSMAKTLERYHRCSYGALEVQHQPEIETQRRYQEYLKLKSRVEALQQTQRNLLGEELEHLDVKDLEQLERQLDSSLKQIRSNKTQQMLDQLADLHRKEEMLLETNNILRNKLEEINVALQPTWETREQNAPYNYHPSQSEGYYETAHCNSTLRIGYDSSGLNEAGGAAGTSAQNASEFMNGWMN

SEQ ID NO: 54826 - protein, 224 aa, Glycine max
  Clone ID: UC-GMFLMINSOY026G11_FLI.pep
PAPLPMASNHEEVILLGKWASPFSNRVDLALKLKGVPYKYSEEDLANKSADLLRYNPVHKKVPVLVHNGNPLPESLIIVEYIDETWKNNPLLPRDPYERALARFWSKTLDDKILPAIWNACWSDENGREKAVEEALEALKILQEALKDKKFFGGESIGLVDIAANFIGYWVAILQEIAGLELLTIEKFPKLYKWSQEFINHPVIKEGLPPRDELFAFFQASAKK

SEQ ID NO: 54827 - protein, 211 aa, Glycine max
  Clone ID: UC-GMFLMINSOY030H10_FLI.pep
LITNAGAVKSLIYVLKTGTETSKQNAACALLSLALVEENKGSIGASGAIPPLVSLLLNGSSRGKKDALTTLYKLCSVRQNKERAVSAGAVKPLVELVAEQGNGMAEKAMVVLNSLAGIQEGKDAIVEEGGIAALVEAIEDGSVKGKEFAVLTLLQLCVDSVINRGFLVREGGIPPLVALSQTGSARAKHKAETLLRYLREPRQEAASTSSS

SEQ ID NO: 54828 - protein, 118 aa, Glycine max
  Clone ID: UC-GMFLMINSOY032C09_FLI.pep
VFGAAWKSVFTADEKEREKNVEEAIEALQFLENEIKDKKFFGGEEIGLVDIAAVYIAFWVPMVQEIAGLELFTSEKFPKLHNWSQEFLNHPIVKESLPPRDPVFSFFKGLYESLFGSK

SEQ ID NO: 54829 - protein, 368 aa, Glycine max
  Clone ID: UC-GMFLMINSOY032D03_FLI.pep
DLNFSIFTSSFYCLHCVYFFFSMFNCEQSKIQSLAGQHSDILESLSPNVRKRVEVLREIQGQHDELEAKFFEERAALEAKYQKLYQPLYTKRYEIVNGTTEVEEGAVKETAPDNEEDQEKGVPAFWLTAMKNNEVLAEEISERDEGALKYLKDIKWSRIENPKGFKLDFFFDTNPYFTNSVLTKTYHMIDEDEPILEKAIGTEIQWHPGKCLTQKILKKKPKKGSKNAKPITKTENCESFFNFFNPPQVPEDDEDIDEDVAEELQNQMEQDYDIGSTIRDKIIPHAVSWFTGEAIQGDEFGDLEDDEDDEDIEEDDDEDEEDDDDDDDDDDDEEESKTKKKSSAPKKSGRAQLGDGQQGERPPECKQQ

SEQ ID NO: 54830 - protein, 189 aa, Glycine max
  Clone ID: UC-GMFLMINSOY034E05_FLI.pep
AISMLSEQGKVQEAFFIIQSLGSKQNFPMHDFYKNLIASLCRKGNTYPAFQMLYEMTKYGFTPDSYTYSSLIRGMCREGMLDEALKIFRILEENDHRPDIDNYNALILGFCKAQRTDLSIEIFLMMVNKGCVPNENTYTILVEGLAFEEETDIAADLMKELYLKKVLSQSTVERLCMQYDIKELIATGQ

SEQ ID NO: 54831 - protein, 266 aa, Glycine max
  Clone ID: UC-GMFLMINSOY034F03_FLI.pep
AMGLNSCIAIAPMPNSKASHSTMNGFEKLVPITYQIHRLRDGKSFASRKVDGIQKGNVIFTLMASFQKEESGMVHQEVAIPSVPAPDKLLPMEELRERRLTDPRLPITYRNKVATSQFIPWPIEIRLCEYETATNMTKSPPSLRYWFRAKGKLSDDQALHRCVVAYASDLIFLQVSLNPPREKGFRTRSVSLDHSYVPESYSMWFHRSVKADDWVLFAIFTPSAHSARVFVTGQMFNQKGELLVSLVQEGLARKINPGNSAIKSML

SEQ ID NO: 54832 - protein, 228 aa, Glycine max
  Clone ID: UC-GMFLMINSOY035B11_FLI.pep
LTAIDNLGQIGTSLRYPKKTRSTFVSLVSIWNYLGRVFSGFVSEHFLQKYKFPRPLMLTLTLLLSCVGHLLIAFDVPNGLYVASVIIGFCFGAQWPLLFAIISELFGLKYYATLYNFGSVASPLGLYVLNVKMTGYLYDKEAKKQLAASGLTREEGHELNCVGVNCFKLSFIIITAATFFGAIVSLILVARTRTFYRSDIYKRYRDAATEAETEMAEKDSKHVVPAQT

SEQ ID NO: 54833 - protein, 127 aa, Glycine max
  Clone ID: UC-GMFLMINSOY040G02_FLI.pep
HVHQMRLLTELLGTPTEADLGLVKNEDARRYIRQLPQYPRQPLAQVFPHVHPAAIDLVDKMLTVDPTKRITVEEALAHPYLEKLHDVADEPICMEPFSFDFEQQQLDEEQIKEMIYREALALNPEYA

SEQ ID NO: 54834 - protein, 289 aa, Glycine max
  Clone ID: UC-GMFLMINSOY045H05_FLI.pep
LQIAMAKHDVEGGSFSAKDYHDPPPAPLIDAEELTQWSFYRALIAEFIATMLFLYITVLTVIGYKSQSDVKAGGDVCGGVGILGIAWAFGGMIFILVYCTAGISGGHINPAVTFGLFLARKVSLIRAIMYMVAQCLGAICGVGLVKAFQKAYYNRYGGGANELSEGYSTGVGLGAEIIGTFVLVYTVFSATDPKRNARDSHVPVLAPLPIGFAVFMVHLATIPVTGTGINPARSLGAAVMYNQQKAWDDHWIFWVGPFIGAAIAAFYHQFILRAGAAKALGSFRSNPAI

SEQ ID NO: 54835 - protein, 389 aa, Glycine max
  Clone ID: UC-GMFLMINSOY049A01_FLI.pep
SENRKVAPLASLLNMKLLIALLLVLCAPFSSSSKPKDPFLGISPEDDKYYKASDVIRCKDGSGKFTKAQLNDDFCDCADGTDEPGTSACPGGKFYCRNAGHSPVYLFSSRVNDGICDCCDGTDEYDGQVKCPNTCWEAGKVARDRLEKKIATYQEGVKLRKLEMEQAKVAMEKDEAELSKLKKEESILKGIVKQLKDHKEQIEKAEEKERLQKEKEEKQKKESEEKANEAKDKADEDTGHRNEAEKHSDVEDNSVENNHDKIENLEGSPADQDEAGDKLEDVLDNDDEASDSPGSEGSLHNKVEENAKEAEEEPIVKSETDIKVGNKESSAEIINKVQQRSFIHSMIIALRARRTSTLTKSAPINRLLRRRAIPTPVWGAGTNLRIHTE

SEQ ID NO: 54836 - protein, 364 aa, Glycine max
  Clone ID: UC-GMFLMINSOY049F06_FLI.pep
VKMTQNAIVSKTKSGINRDITVPQKPLAAAAAAGGYIPIPRRRVLKNLEINAWVDSMRSSSPTNSKSTSSLAEEHSTWILRHPSALDMFEQIMDASRGKQIVMFLDYDGTLSPIVDDPDRAFMSDSMRRTVRKLARCFPTAIVTGRCKDKVYNFVRLAELYYAGSHGMDIQGPTRTSKYSNKDKGEPVLFQPASEFLPMIDEVYHQLVEKMKSIPGAMVENNKFCCSVHFRCVDEKKWSELAQEVRSVLKEYPKLRLNQGRKVLEIRPSIKWDKGKALEFLLESLGFANCNDVFPVYIGDDKTDEDAFKKLRDRGQGFGILVSKFPKDTTASYSLQEPNEVMDFLQRLVEWKQVSLRLRTRSRV

SEQ ID NO: 54837 - protein, 141 aa, Glycine max
  Clone ID: UC-GMFLMINSOY053F02_FLI.pep
CANSIRRVKGRLLCGTAPARNVRVKLYDEDAGVDPDDQLDAGYSDPNGNFQLSGHTSELTNIDVVFKVYHDCDDGIKPGSRKLKFKIPNSYVTDSATPKKTFDIGVLNLETVFKDEERELIVTMKKKRRSHRYQDFLDILP

SEQ ID NO: 54838 - protein, 277 aa, Glycine max
  Clone ID: UC-GMFLMINSOY055F01_FLI.pep
LRQPLFRRRRYLGRAPDLQFDYLGQRFLSFSIMATRLQFENNCEVGVFSKLTNAYCLVAIGGSESFYSVFEAELAGVIPVVKTSIGGTRIIGRLCAGNKNGLLLPHTTTDQELQHLRNSLPDQVVVQRIDERLSALGNCIACNDHVALTHTDLDRETEEMIADVLGVEVFRQTIAGNILVGSYCAFSNRGGLVHPHTSIEDLDELSTLLQVPLVAGTVNRGSEVIAAGMTVNDWTAFCGSDTTATELSVIESVFKLREAQPSAIVDEMRKSLIDTYV

SEQ ID NO: 54839 - protein, 221 aa, Glycine max
  Clone ID: UC-GMFLMINSOY060B09_FLI.pep
TLLRVLAKPFSPFSNSVNAAKCCSICSQSVSHSHSVSVNETKMLLKLCDFGSACHVGDAEPAPYLVSRFYRAPEIMLGLPYDFGIDLWSVAVTLYEVYTGKIMFPGKSNNQMLKFMMDLRGKFPNKVIRKAVFKDQHFDYNCNFLYHETDKVTGKDKVTVLTNIKLLRNLPAELSGDQELDRDGFAKVDHFRSLLEQMTALDPSKRISCSDALKHPFIVEK

SEQ ID NO: 54840 - protein, 154 aa, Glycine max
  Clone ID: UC-GMFLMINSOY073C12_FLI.pep
KIVNDKKSGFSDVIFFHGYQVKIGDLGLAAIVGKNHCAHTILGTPEFMAPELYDEDYTELVDIYSFGMCVLEMVTVEIPYSECDNVAKIYKKVSSGVRPAALNKVKDPEVKAFIEKCLAQPRARPSAAELLRDPFFDEIVDDDDENDDCSCSYQ

SEQ ID NO: 54841 - protein, 254 aa, Glycine max
  Clone ID: UC-GMFLMINSOY081A01_FLI.pep
RKIMKLFPDSDLHEAIFSGTAPKHAIAIETISHFPSVGHSNETSHPFIETVLDHKIHGFLKLQPFVFHHRCHLTRQRATYDGLAFTRARYAAHVARVGPGAYQRRVTDAPGHFVHQPSRGCCCRAPALPVNHHAPNGFGRVHAYWESIHLQWTLHTGSARLVPRCWDSVIKQDCVCFLCQLEHANVVRCDKVLVVHNLHTLLPSKFFSAGEGEVGMRGFVHNQTSKRDRVLNGGKTRNGAASSFWTIHDASLHL

SEQ ID NO: 54842 - protein, 219 aa, Glycine max; identical to SEQ ID NO: 44745
  Clone ID: UC-GMFLMINSOY081C12_FLI.pep

SEQ ID NO: 54843 - protein, 491 aa, Glycine max
  Clone ID: UC-GMFLMINSOY081G11_FLI.pep
PLSLREAIVHYYLFEYFQDDLIVVLTNSVPDSKNATGTLCGFNNEAIPEAREVVRVDLVGGFALQKVTSERCYFRTIANMDIKLDFVPPSLINFISRQLIGNGFRLYQKTVSSMTSHDKGEFNKALGDPLYVRIREALYNTSGSKAMNGKELQQVASVLPAEDLVESKQGGEKDASKEDMSNQYANNVMPMAVNNKVLDSSKTFNEIVEVDCEEIVQGKEKNASKEDISNQYANNVMPMAMNTKELGGRKKFAEIVEIDIEEIVLIEEDTEEVKDIQNKEVEMSVLRGKRSIYIRSEVEHALETLEKAISMVREQRLHSRVVSSSVADEESPFMKNDDKVDTYSSKLTQPSSKNEVSVEVPNGDISEGASQEALGNNPGIQNSRCTGTDPNSKDVNSNKVVPTSSEQNVSTSILLSQAVSHPLGNGAILDQTTISNKQLNTDSVQDTSLDHADKSSRQKKLNTIVTQSMNSDVPKKLSRQKKFLLFCCFLH

SEQ ID NO: 54844 - protein, 170 aa, Glycine max
  Clone ID: UC-GMFLMINSOY085H05_FLI.pep
EIEPYLNGRCIYLVDQSLGMMGSGKTTVGKILSQVLSYLFFDSDALVEEEVDGTAVADIFKHNGEPFFRNKETEVLRKLSMMHRYVISTGGGAVVRPINWKYMQQGISVWLDVPVEALAQRITAVGTDSRPLLHYEEGDAYTKTFMRLSALFKERSEAYANANVKVSLET

SEQ ID NO: 54845 - protein, 93 aa, Glycine max
  Clone ID: UC-GMFLMINSOY087A10_FLI.pep
LFRQYLTLIFFKNLGLNSSENQFLVFISETIKVYFLFNSQLTDVSLASMSEYCEKYAKPEDIGEATEEKSSDEEMSEDEYDSSDEQVVGKADP

SEQ ID NO: 54846 - protein, 155 aa, Glycine max
  Clone ID: UC-GMFLMINSOY092G02_FLI.pep
APEGRHILHIFTTSSMEDWEGLSRVEYEAKKQLVADEITSRLENKLFPGLRSSIDFMEVGTPKTHRRYLARDEGTYGPMPRRIPKGLLGMPFNTTGIDGLYCVGDSCFPGQGVIAVAFSGVMCAHRVAADIGLEKKSPVLDSMLLRLLGWLRTMA

SEQ ID NO: 54847 - protein, 53 aa, Glycine max
  Clone ID: UC-GMFLMINSOY092H04_FLI.pep
AKSNISILFKSKRKNSCFYLHKILNPRTYPDDINKQINEIILQNGLLEVLYTP

SEQ ID NO: 54848 - protein, 332 aa, Glycine max
  Clone ID: UC-GMFLMINSOY099C05_FLI.pep
KRFTYSEIKAATKDFSNLIGKGGFGDVYKGELPDHRVVAVKCLKNVTGGDAEFWAEVTIIARMHHLNLVRLWGFCAEKGQRILVYEHIPGGSLDKYLFRVNKSHNNNHLKEQSSSLNPNTPQQERHVLDWSMRYRIALGMARAIAYLHEECLEWVLHCDIKPENILLGDDFCPKISDFGLAKLRKKEDMVTMSRRRGTPGYMAPEWITADPITSKADVYSFGMVLLELVSGIRNFEIQGSVVRSEEWYFPGWAFDKMFKEMRVEEILDGQIRDAYDSRAHFEMVNRMVKTAMWCLQDRPELRPTMGKVAKMLEGTVEITEPKKPTVFFLGEE

SEQ ID NO: 54849 - protein, 301 aa, Glycine max
  Clone ID: UC-GMFLMINSOY107A12_FLI.pep
NSTTSLSLSLSLTGIATSGATVTDRRETSTSEPAAATSTTTAHFNSLSAKKIVTQMDLETENRLAAMLMREAAELRRQSEREGVLAYLRKPNIRTRPNSRFLTATVRGVQQANRAVEVNEMWRLRQKELELDKRVKEKSLGKSSRDRSHGDDNSSRGTGRHASIDNSTSTSSSSRSGKREYELDKWVKDTSKDKSSGDRSYRAGNSSRSAGRHAAVDKSTSAHASCSSEREYEHGLEGLKDEELEEFLHSRTKRGRGAVGPRMDETGPYLPHLEGEPSTSPDVREHRVYLWSREASVIEAI

SEQ ID NO: 54850 - protein, 158 aa, Glycine max
  Clone ID: UC-GMFLMINSOY108C12_FLI.pep
GYLMLKIDFEKTYDKVDWEFLRVTLCEFGFPYTIIALVLNCITSTLLALRWNNEIIEGFNLSSGLCHRDPLSPYLFVLCMEKLALLIQQEVENNSWSPVRMTLLTKNGPSILHLFLSMTRRFICGISWSSTTIVIGAHMLIYLSFILTYMMLNFFIFV

SEQ ID NO: 54851 - protein, 223 aa, Glycine max
  Clone ID: UC-GMFLMINSOY108F10_FLI.pep
SKNDVKLLSFLLSPVGHRVEWALKLKGVEFEYVEEDIFNKSNLLLELNPVHKKVPVLVHHQKPIAESLIIVEYIDQTWKQHPLLPQHPYQRALARFWGTVADKLVKTSYVAMCSSGDEQEKSVKEAKEVMDKIEEEIIKGKKFFGGDNIGYLDLAFGWIPYWLPIWEEVGSMQIVDPLKHCAISAWNTNFLSHPIIKDCLPPRDKMLVYSHRRKNEFSSTLRR

SEQ ID NO: 54852 - protein, 301 aa, Glycine max
  Clone ID: UC-GMFLMINSOY109C12_FLI.pep
AMPSSPKSYAISYARQPTRRSTLYLFLSALLLLFLFGIVAFLAQIRGSRCVNAHPRSVRVVWEHSAGAGTVAGDGGRHKVMGFVGIQTGFGSAGRRVSLRKTWFPSDRQGLQRLEEATGLAFRFIIGRTSDRAKMSALQKEVAEYDDFILLDIQEEYSKLPYKTLAFFKAAYALFDAEFYVKADDDIYLRPDRLSLLLAKERSHPQTYIGCMKKGPVFTDPKLKCFRMFSNEDVTIGAWMLAMNVNHENNHELCATDCTATSIAVWDIPKCSGLCNPEKKMLELHQKEACSKSPTLESDDE

SEQ ID NO: 54853 - protein, 239 aa, Glycine max
  Clone ID: UC-GMFLMINSOY112G04_FLI.pep
WELGYGEEGSFSFPNVPPKADLVYEVELIGFDETKEGKARSDMTVEERIGAADRRKMDGNALYQEEKLEEAMQQYEMAIAYMGDDFMFQLFGKYRDMALAVKNPCHLNMAACLIKLNRYEEAIGQCNTVLGEDENNVKALFRRGKARATLGQTDAAREDFLKATKYAPQDKAIAKELRLLAEHDKAVYQKQKEIYKGIFGPRPQPVPKPRNWLILIWQWLLSVFYGLVTLFKRERHKSD

SEQ ID NO: 54854 - protein, 403 aa, Glycine max
  Clone ID: UC-GMFLMINSOY114B03_FLI.pep
NRTSTTEGKLSRGINQEGIDYYNNLINELVANGIQPLVTLFHWDLPQSLEDEYGGFLSPRIVKDFRDYAELCFKEFGDRVKYWVTLNEPWSYSQHGYANGGMAPGRCSAWVNPNCTGGDSGTEPYLVTHYQLLAHAAAVRVYKTKYQVSQKGLIGITLVANWYLPFSNTKADQKATERAIDFMFGWFMDPLTSGDYPKIMRSLVRTRLPKFTTEQSKLLIGSFDFIGLNYYSSTYASDAPHLSNARPNYVTDSLVTPEFERDGKPIGIKIASDWLYVCPRGILDLLLYTKEKYNNPLIYITENGINEFRDETLSLEESLLDTFRIDYHYRHLFYLRSAIRHGVNVKGYYIWSLFDNFEWSSGYTVRFGMILVDYKNNLKRYHKLSAIWIKNFLKKTSLYDSSI

SEQ ID NO: 54855 - protein, 308 aa, Glycine max
  Clone ID: UC-GMFLMINSOY115H05_FLI.pep
AEVLKSEIKRIELMLAVVTEERNKLRNVANLKNDEALDASKNANPVQEPESSLMKKDDCIKDLESTLHEQRMVNNRQLDEMKLLNEKLHGEARRVKSLERESDRLRSEISLLEAKLGHGDFSAANTKVLRMVNTLTVDNEAKQTIEALQTELQKTKEKLKAVEELKSQSGEAGKLVDSYISDKMLQLKEQIATLEKREERYKTVFADRISVFRRACCELFGYKIVMDEHQRSNGIPVTRFTLQSIYAQSDDEKLEFEYESGNTNILANHYTSQPEVSRQVEIFIRKMNSIPAFTANMTVESFNRRTLS

SEQ ID NO: 54856 - protein, 58 aa, Glycine max
  Clone ID: UC-GMFLMINSOY116D10_FLI.pep
MEQPVYNSTLDCWRKIYRTEGLASFYRGAVSNVFRSTGAAAILVLYDEVKKFMNWGRI

SEQ ID NO: 54857 - protein, 334 aa, Zea mays
  Clone ID: LIB3607-029-G8_FLI.pep
QRLVAMMAGALSSRIRRPPASHQHLAGLCGAEQRAEWQLLQHVSPCFGLALHGANLAILDAVADQRAIHLIDFDVSVAQHTALIDSLASRRVAGTCLKVTAVTDPTSPFTPALAQALAATGQRLKEHARQAGVEFRFRAVSCVAGEVEASRSRLGCDETGEALVVNLAFALSRVPDESVSPANPRDALLRGVRGLRPRVVTLVEQELGANTAPLAARFADACAHYGAVLESLDATLGRDSAQRARAEAALASKAANAVAREGPDRVERCEVFGKWRARFGMAGLRPVAIGQGVADRVKGRLGPAARPGFDVKLDSGRLAIGWMGRVVTVASAWR

SEQ ID NO: 54858 - protein, 320 aa, Zea mays
  Clone ID: 700261908_FLI.pep
AAHQLRFLPTASFQVATARVREEGEKRLSESTPARGAEVGMGGGLDEAVKVVDLEDGEGEEEAEAAAAEGSSMEMGMLPRMPVRVLLAEGDDSTRHVISALLRKCGYRVAAASDGVKAWDLLKEKSFKVDLVLTEVELPLMSGFLLLSTIMEHDASKNIPVIMMSSHDSVSMVFKCMLKGAADFLVKPIRKNELRNLWQHVWRKQLANGGPNVQHIQREENLAERIQQKTGVTKADNLDRDVPCKNRECSEQESDAQSSCTRSELEAESKQTDNILEYKQSTQRHLSIPSHKNVELNGQTKIQRAKGNNLIPASEDDLSP

SEQ ID NO: 54859 - protein, 128 aa, Zea mays
  Clone ID: 700613283_FLI.pep
ALKKYGANVSCVESGKDAISLLQPPHCFDACFMDVQMPEMDGFEATRQIRQTEMRVNEERKNKLVLIEGSTFVEYHLPVLAMTADVIQATYEKCIKSGMDGYVSKPFDEEQLYQAVSRLIVGTTDSTV

SEQ ID NO: 54860 - protein, 175 aa, Zea mays
  Clone ID: LIB3595-026-A9_FLI.pep
PTSLADRTGQVHATVTASYVPGYVRHTHTERDASNRSVLNSKIPCHTAMYARERLPRHARTPIPWALAAAAACARPHSLAFSGSSGAAASASAAGSWGPAGAGASGSSAASSSRAAASASATGSAAAGSSAPAGGAASSSAAASCSAAGVSSGPAGAAASASAAGSAAAGSSSLA

SEQ ID NO: 54861 - protein, 199 aa, Glycine max
  Clone ID: 700743711_FLI.pep
PKCRGSLYRLLHRSGAKEVLDERRRLGMAYDVAKGMNYLHKRNPPIVHRDLKSPNLLVDKKYTVKVCDFGLSRLKANTFLSSKSAAGTPEWMAPEVLRDEPSNEKSDVYSFGVILWELATLQQPWINLNPAQVVAAVGFKGKRLEIPHDVNPQVAALIDACWANEPWKRPSFASIMDSLRPLLKPPTPQPGCPSMPLLT

SEQ ID NO: 54862 - protein, 392 aa, Glycine max
  Clone ID: UC-GMRONOIR009D06_FLI.pep
QRLEFLGDAVLDYLITSYVFSAYPKLKPGQLTDLRSLSVNNKAFACLAVDRSFDKFLLCDSSGLSEAIKKYVDYIRRPVSDNSIKEGPKCPKALGDLVESCVGAILLDSGFNLNKVWKIMTSFLDSIMKFSSSLQLSPVRDLRELCQSHNMELEFLPVPSKLTKRFSVEAKVSGNGVCETASATGQNKKEACRIASLLLFSKFKAQGWKAKSKTLEEVLESTSKMEPKLIGYDETPIDVTDTNKHIVVNADPYNKSNPEIRPMQETDEICSPCVKPFGQRLQSSAKGKLSQIFENRDCSSDLSGTGTARSRLYELCASYCWKPPSFECCKAEGPDHLKQFTCKVTLEIEEAQNLILEFVGEPLSKKKDAAESAAEGAFWYLQHEGYLPSSGN

SEQ ID NO: 54863 - protein, 57 aa, Glycine max
  Clone ID: UC-GMRONOIR010B08_FLI.pep
NSDHSLNTSCLFIIEIRSLINKILNIASRSNFYCYYKVDDQIVFFIYKKKYIMTLAS

SEQ ID NO: 54864 - protein, 278 aa, Glycine max; identical to SEQ ID NO: 45966
  Clone ID: UC-GMRONOIR023F07_FLI.pep

SEQ ID NO: 54865 - protein, 336 aa, Glycine max
  Clone ID: UC-GMRONOIR024E05_FLI.pep
IMGNALRFLYSHCCKPTAAGDSESLGPHGVSSATVGVSTLAHDLFHFDITSQVPEGLSKHVVSSKKAQANWYRKLVDAWKEAKPPPKTPEEAARLVIQTLRRHQKADVEGLLAFYGLPLPHTLVQGTTQPLSSLPDGVQFEMHTLPVDAKAVADGDTITVYVSTTDPRESAFVPGNVHAAAVRRSEARARRNFTEADALHKQIIDSGYRVIPVQNEEILAKKYRIRLRGIDAPESAMPYGKEAKTELTKIVQGKPLRILVYEEDRYGRSVGDIYCNGIFVQEMMLKKGLAWHYVAYDKRPELETWEKQARAKRVGLWASKNPEKPWEWRKDRREAA

SEQ ID NO: 54866 - protein, 258 aa, Glycine max
  Clone ID: UC-GMRONOIR025A11_FLI.pep
ENWLLWLVEFPFEIRALEVLFEAICSFLDARTRELETSAYPALDELTSKISSRNLDRVRKLKCAMTRLTIRVQKIRDELENLLDDDDDMADLYLSRKLAASSSPTSSSDAPYWLYGSPNTGSKRHKSSRASGTTVQRENDVEELEMLLEAYFMQIDGTLNKLATLREYIDDTEDYINIQLDNHRNQLIQLELFISAGTVCMSLYSLVAAIFGMNIPYTWKAPGHEHVFKWVVIFGGMVCASLFLSIVSYARRKGLVGS

SEQ ID NO: 54867 - protein, 245 aa, Glycine max
  Clone ID: UC-GMRONOIR028A09_FLI.pep
QCDCCIFCAKRAPMPDLFVFYRICDSLFFVAHWWNHGTCFSPKISPNTSALEDEHIVEGVVRLVRHDRNYIGLGQLQREFRCCGVNGTEDFTIWRTSKWHMHHREPKPAFPQSCCVPERLAECVERSITMDKEMSNGIRPSMEQLAAEAAPTSAEAEASVVGGGEHVAQNQQQLPADSSSSSSTIFMTNFTGSEAAAFYTNTCYMPFRTDLLSVVHVAAWLSISCSFYLLVPAFFATFFAKLVKK

SEQ ID NO: 54868 - protein, 62 aa, Glycine max
  Clone ID: UC-GMRONOIR049D11_FLI.pep
ILRFTEFVEGFFRFSLISDTWIIILLRCTEERKDQNMFQQNILKLQLLVVLLSFFLDSRSIV

SEQ ID NO: 54869 - protein, 215 aa, Glycine max
  Clone ID: UC-GMRONOIR060A10_FLI.pep
TVECDFGESKCHSPSSIMQMFQSSLFCLQPQGDSYTRRSAFDSMLAGCIPVFFHPGSAYTQYTWHLPKNFTKYSVFIPEDDIRKRNISIEERLSQIPPEQVKIMREEVISLIPRLVYADPRSKLETLKDAFDVAVQAVIDKVTNLRKDIIEGRTDDNFIEENSWKYALLPEGEHEVGPHEWDPFFSKPKDGNGDSNDSSAEVAKNSWKNERRNQS

SEQ ID NO: 54870 - protein, 311 aa, Glycine max
  Clone ID: UC-GMRONOIR060E06_FLI.pep
LGALKSIVNVIGMTKMTPPIKDLLPRLTPILKNRHEKVQENCIDLVGRIADRGAEFVPAREWMRICFELLEMLKAHKKGIRRATVNTFGYIAKAIGPQDVLATLLNNLKVQERQNRVCTTVAIAIVAETCSPFTVLPALMNEYRVPELNVQNGVLKSLSFLFEYIGEMGKDYIYAVTPLLEDALMDRDLVHRQTAASAVKHMALGVAGLGCEDALVHLLNYVWPNIFETSPHVINAVMEAIEGMRVALGAAVVLNYCLQGLFHPARKVREVYWKIYNSLYIGAQDALVAAYPALEDEHSNVYSRPELMMFI

SEQ ID NO: 54871 - protein, 328 aa, Glycine max
  Clone ID: UC-GMRONOIR063G08_FLI.pep
FSRHLHARCISDLQRLVESRTLLQLQRDAIGGQHFIAIGGQHFIAIRGSTFIRCSRLALAEGLVERDRGLDRADGSLELATSVETTQLFQGTRELHSGDFGASDPSVLEKLSNGSSFRWVHDKHLGDQVLRFVRYVVPVWRVELEFTLLDLLEKSVVVVIMERRVPTKQDVRNDANTPNIDAFTVRLSFQDFRSDITWGAARGHETIAVELDLLCKPKVRQLDRRIVVLARQQQVFWLQVTVNNIGIVAVLDSLKKQLDQISCFSLAVVRLFNDAVEKFPTSHEFSDEVIVLLFREEVMQDHDIRVIHLLQNGHFRRQCFNVFRSQAF

SEQ ID NO: 54872 - protein, 233 aa, Glycine max
  Clone ID: UC-GMRONOIR065H09_FLI.pep
GKSGIRLDWIRRLKIALGAARGLDYLHELANPPIIHRDIKSTNILLDERLIAKVSDFGLSKPLGEGAKGYITTQVKGTMGYLDPEYYMTQQLTEKSDVYSFGVLLLELITARRPIERGKYIVKVVKGAIDKTKGFYGLEEILDPTIDLGTALSGFEKFVDIAMQCVEESSFDRPTMNYVVKEIENMLQLAGSSPIFSASASVSTSSSYNNATKISLHPYNNEYFDSSVVLPRA

SEQ ID NO: 54873 - protein, 71 aa, Glycine max
  Clone ID: UC-GMRONOIR070C07_FLI.pep
NLTHDRVEIAGCMFHSEHGLMNFEHPTQKMKAMPRIDSEGVMCGANFNVDSQSKIQVMPRVGSEANWATWG

SEQ ID NO: 54874 - protein, 158 aa, Glycine max
  Clone ID: UC-GMRONOIR074F07_FLI.pep
DIYMCPKIIFTTNRNQYFRFILQDGNDELRRSPGTPVFTAPECCLGLTYHGKASDTWAVGVTLYCMILGEYPFLGDTLQDTYDKIVNDPLVLPEDINPQLKNLIEGLLCKDPELRMTLGDVAEHIWVIGDDGPIPGYLCWCKRKSMVTEDSDGSDILD

SEQ ID NO: 54875 - protein, 122 aa, Zea mays
  Clone ID: UC-ZMFLB73132E03_FLI.pep
LAFSSFLQCSLPLWPGQPSLQGLQLLIQRGRVPCPHQIANAGSFNCTFDAYHVQARLQKQYTSLAFHIVDIRNIWGSAEKILYMTRPWAARVCSIVIWLIHLDQSIAIQHSCVPWSLFFASI

SEQ ID NO: 54876 - protein, 223 aa, Zea mays
  Clone ID: UC-ZMFLMO17268A06_FLI.pep
GFDSFTVPPLPSLSCSIHRRCLIPMASANNDNREAAGILRLLMGMAAAAPASALPRGGGGGGGGGLMVVQHVILDVDGELFSGGVGGGGVPPASKAAIAALKEVKAGEGEGEGEDALGECAICLDAVEGTGKEMPCGHRFHGRCLERWLGVHGNCPVCRRELPAPAKEEEEDSAASAEGGEEERRRPRAAVVVSYLVFGGGRAEAQQEPEREEPWNIRIEDVD

SEQ ID NO: 54877 - protein, 225 aa, Zea mays
  Clone ID: UC-ZMFLB73149H09_FLI.pep
QQHPWSGVDCQFDSTKGNWIIDGLGLDNQGLKGVIPSDISKLQHLQNINLSGNSIKGNIPISLGTISVVQVLDLSYNELNGSIPESLGELTSLQILNLNGNRLSGRVPASLGGRPLHRARFNFTDNAGLCGIPGLRECGPHLSVAAKIGMAFGVLLAILFLVVFAACWWKRRQNILRAKRLAAAREAPYAKSRTQFTRDVQMAKHQRTHENARSSNSEGSPHLLS

SEQ ID NO: 54878 - protein, 491 aa, Zea mays subsp. mexicana
  Clone ID: UC-ZMROTEOSINTE016A10_FLI.pep
FIPEEPRSLKGIVWKCRSCGDTLLRFTNQGPPSDACCIENDDINASCGNMLCYWHNHKNDCSGTYEKTMKLEAPSQKKVAGGAQLLLTLPSEMSNIQESSSSILQLEWSTKSTEPNAEDKHLCLGSGSNGKPQGSSSSKKAGKRNSPEMVGETSVLPAAAQGKPNQNHGLVAMAKQAPASVEGYSDAESPGRHTSKKAGKRHKPDDLQKSSVLPSVPQGTTKPKHALVATENNPLPSAERRNDAKSPKTNTSKKPGDWHELQIAQKACSQPADPHKKLKQDLGAPEKKELFSLMGPSNEKLLGRRSSKKASRQHDREDIQEKNTILPTAPGIRPKASAFAASEKRRKGKCKRKPVEEKEYAVMSAWLNYYESDRSSGSPEPLVNKRTERRRRERARILTYSRSKKNKTEPLASSGTHASVSSHKIEMAPQDHAVVTTGNQVAVAPATEDQAQPSADSAPCLDLVPFLQPADPLTSPDQSTARDMIVISDDD

SEQ ID NO: 54879 - protein, 116 aa, Zea mays subsp. mexicana
  Clone ID: UC-ZMROTEOSINTE028A03_FLI.pep
RHASAACGVSSACTTLAHNNCGCSEPRSMHRSCVHHGHGPLAGCHLRTAMAGAPLTEPACLPADRYHCCCCAVLQHAMPPSESSAHRWLKLSSTVSRSCMPKNRPDMGEKKRMHYK

SEQ ID NO: 54880 - protein, 851 aa, Zea mays
  Clone ID: UC-ZMFLB73121B01_FLI.pep
HSARTRIRAAPAPAPAPAPDAKLAPQKRSQRGGGGGGASAAAAASSAAAGDSGDAVMARWLQSAGLQHLAASSAAGGAGAGDLRVGGLSGGGGGGLLPSLLMQGYGPQTIEEKQKLYTLLRSLNVNGGLASASISEPYTSTGQSFAGGAPVDGFYSPELRGEFGAGLLDLHAMDDSELLSENAASEPFEPSPFMPKEMDDDDYDVIAENQQGLVDNQSAFTNEKENTVVSARESNVAKIKVVVRKRPLNKKEVSRKEEDIIDVHNSQFLTVHEPKLKVDLTAYVEKHDFCFDTVLGENVTNDEVYRETVEPIIPLIFQRTKATCFAYGQTGSGKTYTMQPLPLRAAHDMVCLLHQPMYRNQHFKLWLSYFEIYGGKLFDLLSERRQLLMREDGKKQVCIVGLQEFEVSDVQIVKEYIEKGNAARSTGTTGANEESSRSHAILQLSVKKHIPVTETRRQRDRDAIEAKNTKHVGKMSFIDLAGSERGADTTDNDKQTRIEGAEINKSLLALKECIRALDNDQIHIPFRGSKLTEVLRDSFVGNSRTVMISCVSPSSGSCEHTLNTLRYADRVKSLSKGGNTKKEQFAVQSVSSGKESTYTSYPLSCEAEETMEQTQEIRPVDSSRKGVDSFTSNSSIEPEKNSYCMIPSYPHKGKEETSTRSGLNDRERGDLKYNQAGFNSKTHSLQESINSQEEVKVTKVSPPRRKANRDEKSERQVNYMKKESGPEISRTGVKQQQQLKQLQRPSSTSSSQVLSKQSEKEDMEINTILEEEALIAAHRKEIESTMEIVREEMNLLAEVDQPGSLIDNYVAQLSFLLSRKASGLVSLQARLARFQQRLKEQEILSRQKPLR

SEQ ID NO: 54881 - protein, 314 aa, Zea mays
  Clone ID: UC-ZMFLMO17082D09_FLI.pep
KRQIKSLLHLQTNPCTIPYLHKDPIEHVPTWLRASSRAGSYEAKAGQVLLDKASEREDPRTAAARVTLCQAQARPPFLVHPEALRADPLDHLVDGLGIRWPAGHVGDVEHVHGHVAPGGDLGVRHREAVLSEHARDVGEQPAAVGDAQLQPHALGCAPLDGRLQALDHAPPLGRRANWPPVQPPDVELLLGVIAVRIERAVVHDVIQVRQGADDVEEQLGAVTAAHGEHRVPPLPPILHGDRRGLVGAALGLPVLVEELVEPPVHVDGRGVRPDHPGAERAAAEDVPEPGLDAPDPRRVVDGRARVLVRTNTSR

SEQ ID NO: 54882 - protein, 172 aa, Zea mays
  Clone ID: UC-ZMFLMO17266A07_FLI.pep
IAAISEQSSESSSASGADSSENANGSPEWRSFDMHSVIAATEDLFDFILSRKGWRVRVFLVQDIVNASDVFLQEATFPYVYAKVGKIGDLNPERSKMIRRLVNTVQSFRQAINLAPDAWSAMLIRTLLKPESQKFVLDVFLALANHSSYKIPETFWLFMSRFLNYLDKQDIL

SEQ ID NO: 54883 - protein, 138 aa, Zea mays
  Clone ID: UC-ZMFLMO17093D04_FLI.pep
LINVSQSSRRFNAKLDTLCFHSPWNYLHCSSMSYNIVLSILAANKVSSVWKSRCLLLGEHASSIFVWLYQDVNLLMHCLLIFFHLHMQNNEMSGLNFYTKYWFAISCGHRKRTILLQVLVYQIMSLIHVSIIRILILG

SEQ ID NO: 54884 - protein, 285 aa, Zea mays subsp. mexicana
  Clone ID: UC-ZMROTEOSINTE024F04_FLI.pep
RLILNFQQDQKQDLLFDTFWLMTFFESVSLVGSQEIINVLVSDDDSRFLLPYAFAATLSVVGILYIRNASSTCQHASAIGSYQKSFLAHVLRDKRVLILVLAQASIHFAVSAFWFLWAPTIVADGRYAQLSVIYPCFLASRMLGSAGFPWFYGAIAPFRNEDSLTIAYVGAGLALSIAAYDYQEIAPLVIVFCIFHACVGFILPSLARLRTMYLPNELRGGMMSFSMSLANAATFVFLIQGSAHHRRVANSTILSLASYGLLGAGGCVHMLRRWRKHTRLNARSL

SEQ ID NO: 54885 - protein, 425 aa, Zea mays subsp. mexicana
  Clone ID: UC-ZMROTEOSINTE034B02_FLI.pep
LVLSFNGLTGTIPAEIGYLTALQDLDLNNNRLEGELPETLSLLKDLYDLSLNSNNFTGGVPNFRSSKLTTVQLDGNNFSGGFPLSFCLLTSLEVLDLSSNQLSGQLPTCIWDLQDLVFMDLSSNTLSGDVLASSTNSSLSLESLHLSNNRFSGEFPPVIKNMKMLVVLDLGDNYFSGEIPSWVGSGSPLLRILRLRSNMFSGSSIPLELLQLSHLRFLDLASNNLQGPIPHGLASLTSMGVQPQTEFDIRSGVHHQILNLEADFSYADRVDVSWKTHTYEFQGAIALMTGIDLSGNSIGGEIPTEITNLQGLRFLNLSRNNLSGTIPANVGDLKLLESLDLSWNELSGLIPSGISELTSLSSLNLSNNMLSGEIPTGNQLQTLADPSIYSNNYGLCGFPLSISCPNSSGVQVLDRSNKEIEGVYV

SEQ ID NO: 54886 - protein, 307 aa, Glycine max
  Clone ID: 700748208_FLI.pep
LKISDFGLSALPEQLRYDGLLHTQCGTPAYVAPEVLRKKGYDGSKADIWSCGVVLYVLLAGFLPFQHENLMTMYNKVLRAEFEFPPWFSPDSKRLISKILVADPSKRTAISAIARVSWFRKGFSSLSAPDLCQLEKQEDAVTVTVTEEENNSKVPKFFNAFEFISSMSSGFDLSGLFESKRKTATVFTSKCSAAAIVAKIAAAARGLSFRVAEVKDFKIRLQGAAEGRKGRLAVTAEVFEVAPEVAVVEFSKSAGDTLEYAKFCEEDVRPALKDIVWTWQGDATCAANVPACHGEECHKQVVVVSTI

SEQ ID NO: 54887 - protein, 328 aa, Glycine max
  Clone ID: 700758634_FLI.pep
SVSEPRNAQLEAPELSQADKKYQPSSQAIDKPADDGYNWRKYGQKQVKGSEYPRSYYKCTHLNCVVKKKVERAPDGHITEIIYKGQHNHEKPQANRRAKDNSDSNGNVTVQPKSESNSQGWVGQLNKFSEKIPDSSVAKSDQTSNQGAPPRQLLPGSSESEEVGDVDNREEADDGEPNPKRRNTDVGVSEVPLSQKTVTEPKIIVQTRSEVDLLDDGYRWRKYGQKVVKGNPHPRSYYKCTSAGCNVRKHVERASMDPKAVITTYEGKHNHDVPAARNSSHNTASSNSMPLKPHNVVPEKHPLLKDMDFGSTDQRPVHLRLKEEQIIV

SEQ ID NO: 54888 - protein, 372 aa, Zea mays; identical to SEQ ID NO: 39427
  Clone ID: UC-ZMFLB73092G10_FLI.pep

SEQ ID NO: 54889 - protein, 143 aa, Zea mays
  Clone ID: UC-ZMFLB73238A03_FLI.pep
LNMHKAARQHLIFYSHCFYFVNSLTHVSVLVYSGDKSPRPELQEDQAWLWLQLCCLLLLDRREGGEKQLACRLLLRWSFILYGASRIHLLQKHHKSCLGHYTRASHSATWHSQSEVLEERQIQLPAYLGSGRDLFGFQMVCWS

SEQ ID NO: 54890 - protein, 179 aa, Zea mays
  Clone ID: UC-ZMFLB73098E07_FLI.pep
VSLLPSSSAAAAVVFVRSRSESGEEEKAIDGVQLRGHDGRGGTVPRPSQPQHQHDPDGRRGGGGGIAAQLPAQLLLRVLRGPQPRRRRRRGQVRVRARDPRRVVQVPAPPHQLPGPRPRPPAPVPAGLPRRAGAGRLVFRFLPHRRGPVSVRGQRRARRGESEKMMGYTCRVSLSEGKE

SEQ ID NO: 54891 - protein, 170 aa, Zea mays
  Clone ID: UC-ZMFLMO17065F02_FLI.pep
KFSMCFLVLYADRLSQHGEDSRRIRPKLDMSRNQLIGEIPAELGAMPVLSVLDLSSNELSGAIPPALANLRLTSLNLSSNQLSGQVPAGLATGAYDKSFLDNPGVCTAAAGAGYLAGVRSCAAGSQDGGYSGGVFHALRTGLLVAGEGEATETRRVRQTASAHGYLYLFT

SEQ ID NO: 54892 - protein, 463 aa, Zea mays
  Clone ID: UC-ZMFLMO17161G09_FLI.pep
CHEVRPSSSSKRAKSTPRGGGGRGGGGMMGCLFACFRASGGDGEVKGTGGQLAHPSQPPATTTTTSRQVQDGAGRRARPPSRNALSAVFQREDEGSRTAQVASSWADESGERKEMDQELVHQAIIQRSCGALLQTTNNIQGALIKYADSVHQKETHSGCLPVVSDDLHFMEAPKVEKCETPSRSHQSFTVPDATSSSKTNDELQTSATSLANNVKDSMNENNMEALVQDEEQHQALDLEECGVSKEESFHPEKTEEPKCAKNHHVVSMEISISDECSLFQSSEGSVPSSYKIRESMNTTSVEKSPKTEATIHATRKKLPKSDNSELELPSLAQWLKPPNPKKTFRDEAMAGDRSHSGKSSDEDRPIIGMVAAHWKDKVPLPANFTSKLRDGNGIPNSTNKYKEDQKVSWHATPFEERLEKALSEEKLLSERSCSSGKTSQFLGVEGEESDMAESNRLYATAYA

SEQ ID NO: 54893 - protein, 452 aa, Zea mays
  Clone ID: UC-ZMFLB73151H07_FLI.pep
CSMVAMVTTHIILLLQHLYQMLLVEGDTIMPIDPTQGAFIADTLSPNSFLFGPRPEWFRSSEGTGSFPSPAASPQPSRGVPGSYDQNNFPMASRMSSPHQKPFYGLRSTTDSYGRGFSHGGMFPQASNYGGSVTSFGLNGRSLISTEKGRRRGRGNALICSCNGPLDFLNEQSRGPRATKPKKQPEVDSKDEVPTTGVGRELYNKPDFVMEYTNARFFIIKSYSEDNVHKSVKYGVWASTTNGNKKLDSAYREAKEKGEHCPIFLLFSVNASAQFCGVAEMIGPVDFEKSVDYWQQDKWTGQFPVKWHIVKDVPNNLFRHIILENNDNKPVTNSRDTQEVKLEQGMEMLKIFKNHDDDASILDDFEFYEEREKALQENKARLHQQHLPSSIVIEPKKPLTAPSDLVGHITKSFAEAVRLGEAKTVSHLTEKVSGGDPSIPVKHVEVKQSGLS

SEQ ID NO: 54894 - protein, 91 aa, Zea mays
  Clone ID: UC-ZMFLMO17179H04_FLI.pep
QICGLSSSVSEDSTKGVELPRGFVPSASAQRCAPCPKTPVSPLLKFLVSSRQYSTLPSDWKWLAWTGSCGLKDALQLLRMPVLFMMTKPSM

SEQ ID NO: 54895 - protein, 181 aa, Zea mays
  Clone ID: UC-ZMFLMO17285B09_FLI.pep
HPHASSSSTHTAQKIPIPVRGTHKQGEQSTYGVGLSFQPADQVRSVTFFGLQIHPPPLASVSRTKLVVRRSAPRGQPGELRSGAERRPPTGSLAAVALLEPARPSSSPPPLFSASLCLLLLLLTSWPRTRPPWRPRTRPLCSAATAAASAGCWPPALRTPRRGASAHSGSPRCRTGCRPCT

SEQ ID NO: 54896 - protein, 341 aa, Zea mays
  Clone ID: UC-ZMROB73057G08_FLI.pep
LAEFDRYPGTNNPPTPLMAASSRMGLSVYLAIMAAVLASALGAELTADYYSETCPQALTTIKLLVGAAILREPRMGASLVRLHFHDCFVNGCDGSILLDDTDDMVGEKTAKPNNNSVRGYDVIDTIKSAVNTICLGNVVSCADILAVAARDSIVALGGTSYDVLLGRRDATTASMDDANNDIPTPFMDLPALQDSFESHGLSLHDLVVLSGGHTLGYSRCLFFRGRLYNETGTLDPAYAGSLDERCPLTGDDDALSALDDTPTTVDADYYQGLMQGRALLHSDQQLYQAGGAAGDLVEYYAENPTKFWEDFGAAMLKLGSLSPLTADEGEVRENCRVVNQV

SEQ ID NO: 54897 - protein, 281 aa, Zea mays
  Clone ID: UC-ZMROB73057H03_FLI.pep
CPTTLKRICRQHGINRWPSRKIKKVGHSLKKLQMVIDSVHGSEGTVQLSSLYENFTKTTWSERELQGDATYPLSEEKGPLEPSVPDRYCEGRFTSHTSGSNSLSPSCSQSSNSSHGCSSGSKSQQHVSAPQLAVKKEVFMEENQSSTLLKAASHAELQMLPEERLVTLPRSHSQVLLSEQKPVENITGMQMSKPDSLKIKAMYGEERCIFRLQPSWGFEKLKEEILKRFGIAREVYVDLKYLDDESEWVLLTCNADLLECIDVYKSSSTQTVRILVHSSDQ

SEQ ID NO: 54898 - protein, 188 aa, Glycine max
  Clone ID: 700743681_FLI.pep
GISHDLRFLLSRLLDTNPKTRITVDEIYKDTWFNADGEYRFNRVLVKESECEKQLGRTGFKSLNAFDLISFSTGLDMSGLFEDPTGSNSVERVVSTVVPEKIMERVEAMTEEGRVVVRREKNGGGAKLEGQDGNLIGIVVVYQLTDELVVVEMKRSEKGGGFGGQFWKDKLRPLLLELASELEEPVSR

SEQ ID NO: 54899 - protein, 206 aa, Glycine max
  Clone ID: 700764345_FLI.pep
IILFICLSFSFSLPPSGSFNLPQNKQFSLVMALLVYLVLFLAFTYHSSALYCICKDGVSDQTLQKAIDYACGTGADCTPILQNGACYQPNTVKDHCNYAVNSYYQRKGNAPGTCDFAGAATTNANPPTTSSGCVYPSSPSNAGTTPSTGSPPGTTPSTGGTTPTFAISPTSTTGINNANGASFKPTNNTKLLLLFFVLTLWLAMRV

SEQ ID NO: 54900 - protein, 449 aa, Zea mays
  Clone ID: UC-ZMFLMO17086C12_FLI.pep
ADKKTPPSKKSAGPALERPSRERKTVERYSELAPRATPAKKSPAILQGSGTKLKDIPNVSFKLSKRKADESLQSLHTVLYGRKSNNHFLKRNISQFSGFVWTDNQEKHRTKIKEKLEKFNKEKLLDFCEILDVIVKVTTKKEEVSAKLLEFLESPCVTRDVILTDKKKGKKRGRKSKVSREVTSEGASAEKKRKRVQKQAAEDGKENDDGDDADLAGSEDASTGDEADVGSDSEANDHAVSDAEPDEPPAKKKSTDVKQVKETGTDAKEKDAPGKKGSMKPAKRASKPSQNSKNEPEVEIKKVGKRAKSSKETDAPPDSNKPNKKVSKSKKDNGKEAQNNKAARNKNKGKGKGGPGAGTAPTNEQLHAVVSSILKEVDFNTATLADILRQLGTHFEMDLMDRKAEVKRIIEDVINSMSDDEGEEGSEDEAEDNGKVEKSKSDPDGGEEK

SEQ ID NO: 54901 - protein, 711 aa, Zea mays
  Clone ID: UC-ZMFLMO17156D10_FLI.pep
RGPGQRKIKPARVGGFIYDGNEVDLDASKDADFSMEPCSKSKKKSLKKTVKPRDEVVAVNGRNSTGNVKASLSSNEQNKSLPLITAKQYACRAAHLSSLVVSWSPVVSLSDRTSCLLRHWCILAVGSKSGNISFWKLYKPEYYTIDAGVVTSDPMLIGVLHAHESWVNAITWQVLSAGSSKSSLLLATGCSDGSVKIWLGNIEGLNQCAIGEEVPFVLVAEVAANLSAPVSSISLGIPARSQHEVSLAIGRVSGLLEIWIWNASTNKIESSSAWHAHDQVVTGLRWAIDGNCLFSCSQDNSTRCWISHENHLEEFFLHSEFSELRESEDLSKVSDRCYGLTLSPGEEIIAVVRSLDLNLLNQMYQVRTQKAVVEFIWIGGQFVGIPLDGSIDICSPQSADLSSSNLMWWGSNILWSLKKYENVEKRLVLWDVVAALQELKKTAPAFLETLVHSWASALFAGDSQCVSITAQSSRSMHDMMPHVSSRKLHLLNIICRKVMLGNHARHGPGAGNNSNDGTTDFWSTLLVASETELRERLVGFTFAAVVKRTACLFNGTSTANCWFPVGVAQMDSWVSMNYEKVHGQLQSIRSKIKELGSRIDGYSDVESCPYCSSPVRFESPDVAICGERHTLSRCRTSMTLCSVAQPVWHCSCCGGTVDKLLPESFFTMPLDAVRDDKGSLDLSAASAPLCPFCGVLLQRSMPAFLLSTSPV

SEQ ID NO: 54902 - protein, 251 aa, Zea mays
  Clone ID: UC-ZMFLMO17161E04_FLI.pep
KTLVEHEDKLLQPVVGWLVSSPVPCAAEADGMRLAAAKPAAITVAQRQPIPIPTCSSSRNQAKKSRRSAWRVAVASRDAADGDAEAGAGQGQGQAPTGRRARLSARRRQRVPLPDGVSGAGVGEFLRHPDAVESILNTGALESFAPAGPGTFTCALRRVGLLGFEVAPVLDLRVAPTSTDCTIEMLSCRFEGSEVLEQQNELFSAFMSNHITWSDDAEEPCLDIHVKLEVTLEVYTKPFSMLPLSAVEKPG

SEQ ID NO: 54903 - protein, 602 aa, Zea mays
  Clone ID: UC-ZMFLMO17161F09_FLI.pep
RRPCLYYTAALNLSFRGPSRLFAPATTRTASRARALHALRCACLVAATSTYLYLSVRRPHPLSQDPSRGVSKYLARRSRLQGASHSCEFLAMVAVAAGRRAGGVGGRRRSGCGAGQAQQKLLAIAVAARFAEAVAPPSAEASRAGSGGCCVELLECLLGALSVNAAPPPAQHRRAVHSIRRRRPRGGGSADDRHADAPSGRIAGNGASASAAASLYTMQGRKGVNQDAMVVWENFGSKDDTIFCGVFDGHGPNGHLVAKRVRDLLPVKLSANLGKGECKEISTSDVKSGTTKGVATEHRVEDTDASPGNEENGEYPEFFTALRASFLQAFYVMDRDLKAHRNIDCEFSGTTAVTVIKQGQNLIIGNLGDSRAVLGTRGEHNQLVALQLTVDLKPSIPSEAERIRQQSGRVFSLPDEPDVVRVWLPTFNSPGLAMARSFGDFCLKKYGIISMPDVFYHRITDKDEFVVLATDGVWDVLSNAEAVSIISNAPSQASAARFLVEKAHRAWRTRYPTSKTDDCAVVCLFLKTVAASTSSSAVTKDSVKNREMSNGKHSLAVKTSTKVPANLVTAKDEWSFVDGSSGCVALPTLPEPTSVVKDSSKD

SEQ ID NO: 54904 - protein, 220 aa, Zea mays
  Clone ID: UC-ZMFLMO17163A08_FLI.pep
FRTSSRQIQGNAEFCLISSRFLVRSKRFLAFFFLARSKGSPFSSFAMSMALSRFTQWLWPGGAAARVDTHEHPSGGLTSSSFPDFPSGFREPDTVTFYTGRQRARPRRVRNRRRSRGEARVDREYDMVIVPSDGGGCLSGSDSDDSDWSIGWLEPQAPELQTDGDPENCFAVLVPCYRHGRQEQQPRRQEGRFLGAGALTDGGPSDGKNFVELWLSSFQN

SEQ ID NO: 54905 - protein, 145 aa, Zea mays
  Clone ID: UC-ZMFLMO17163D07_FLI.pep
RGFTNPPSDWRGDPCLPQGNSWTGVTCNQDPLARVTGLNLTNFRVGGSISNNIANLTAISSIWLVGNNLTGPIPDLNHLLHVVSLHLEDNGLTGPLPESLGNLTRLEELSVQNNSLQGTIPSSIRNRAAVDPRFRFQYTPGNNLS

SEQ ID NO: 54906 - protein, 482 aa, Glycine max
  Clone ID: 700756373_FLI.pep
DRFPILFLLATLITLASGARHDILRLPSEASTFFKAPGGDQNDEGTRWAVLIAGSNGYWNYRHQSDVCHAYQLLRKGGLKEENIVVFMYDDIAFNEENPRPGVIINSPHGNDVYKGVPKDYIGEDVTVGNFFAAILGNKSALTGGSGKVVDSGPNDHIFIYYSDHGGPGVLGMPTNPYMYASDLIEVLKKKHASGSYKSLVFYLEACESGSIFEGLLPEGLNIYATTASNAEESSWGTYCPGEYPSPPSEYETCLGDLYSVAWMEDSDIHNLQTETLHQQYELVKQRTMNGNSIYGSHVMQYGDIGLSENNLVLYLGTNPANDNFTFVLKNSLVPPSKAVNQRDADLIHFWDKFRKAPVGSSRKAAAEKQILEAMSHRMHIDDSMKRIGKLFFGIEKGPELLSSVRPAGQPLVDDWDCLKTLVRTFETHCGSLSQYGMKHMRSFANFCNAGIRKEQMAEASAQACVNIPASSWSSMHRGFSA

SEQ ID NO: 54907 - protein, 475 aa, Zea mays
  Clone ID: UC-ZMFLB73016G07_FLI.pep
FPFPRRSSEATTVPRPARARKRRNAATAGEGSGSAPDGLQPGREPTVRAHWARAGEAAGACRFYLARSAPRPAAAGCGAPADFLLGAMEAGYCNRKKTDGICDGVCDSELGSKSVLSMSRLKCALRTFDLRVLLILLIGVPILLFAIYVHGQKVTYFLRPIWEKPPKPFKVLPHYYHENVSMANLCKLHGWRVRETPRRVFDAVLFSNELDILDIRWHELSPYVSEFVLLESNSTFTGIRKDLHFRENRQRFGFAESRLTYGTIGGRFVKGENPFVEESYQRVALDQLIKIAGIADDDLLIMSDVDEIPSGHTVNLLRWCDDVPEVLHLQLRNYLYSFEFLLDDRSWRASVHRYRAGRTRYAHFRQTDDLLADSGWHCSFCFRRIDDFVFKMKAYSHVDRIRFGYFLNPRRIQHVICEGADLFDMLPEEYTFQEIIAKLGPIPSTFSAVHLPAYLLEHNERYRYLLPGNCVRESG

SEQ ID NO: 54908 - protein, 113 aa, Glycine max
  Clone ID: 700852775_FLI.pep
FYFQPEWMAPEFLRGEPSNEKSDVYSFGVILWELVTLQQPWNGLSHAQVVGAVAFQNRRLAIPPNISPALASLMESCWADNPADRPSFGSIVESLKKLLKSPADAIKMGGAIT

SEQ ID NO: 54909 - protein, 72 aa, Glycine max
  Clone ID: 700849826_FLI.pep
MKEHCLFLTYIDMACHIDGFITAVAHTHVLQEGPVAATNTAAEVALRLVRPGKKVINCNNFFLLDLHLYNTS

SEQ ID NO: 54910 - protein, 142 aa, Zea mays
  Clone ID: UC-ZMFLB73135D04_FLI.pep
CCFSISYDYIFSVLCPLQFHVFCGSLQFKIDPQDFQDSEPDILANSASSIIERIKENSDQCAAALRSLCRRKKGLTVEEASLIGVDSLGIDVRAFSGLEVKTVRFSFNAQALSERSAEKKIRRMLFPRYQRKNVKASTEDES

SEQ ID NO: 54911 - protein, 179 aa, Zea mays
  Clone ID: UC-ZMFLB73141E02_FLI.pep
LPRTYLHLCFLWFTGTGAKVSQNCVLLHTPLESHDIQACLSKNGFNGNRISLWVLQGLPLSTTTSLEHLLLLISNLAMKGSIVIGELPHFTDCTAPMDMGLEQDKLEKLFFTHGFRVSFVQYDTVAEDIGLDLAITLEQCGTMLFVAEQLRFSDAQMESFRIHFGRIEEGADEEGFEEL

SEQ ID NO: 54912 - protein, 385 aa, Zea mays
  Clone ID: UC-ZMFLMO17223E02_FLI.pep
ASPEACDVSSGKVEDAKTRNEGIKKVRRGEDACNTLKSFKDGEKPHESIFKSLTPVCTPRHANKVQPLAVASPRGQKKKSAVVRLSFKRQSFDGEQTTEICSSRRYLIRPRAGLLVPQAGEKISEGCWSVLEPSAFKLRGESFFKDKKKSPAPACSPYTSFGVDIFMSPRKIHHIAQHIELPSVKPNDKIPSLLIVNIQMPTYPAAMFLGDSDGEGINLVLYFKLNDNFEKEISPQFHDSIKRLVSDETEKVKGFPLDSTVPFRERLKILAGLVNPDDMNLSSAERKLVQAYNEKPVLSRPQHNFYVGSNYLEIDLDVHRFSFISRKGLEAFRERLKHGMIDLGLTIQAQKQEELPEHVLCCVRLNKIDFVDNGQIPTLLPCDDD

SEQ ID NO: 54913 - protein, 249 aa, Zea mays
  Clone ID: UC-ZMFLMO17264E03_FLI.pep
LQGLGAMGRGRVELKRIENKINRQVTFAKRRNGLLKKAYELSVLCDAEVALIIFSNRGKLYEFCSGQSITKTLERYEKNSYGGPDTAVQNKENELVQSSRNEYLKLKARVDNLQRTQRNLLGEDLGSLGVKELEQLEKQLDSSLRHIRSTRTQHMLDQLTDLQRREQMLCEANKCLRRKLEETSNQVHGQVWEHGANLLGYERHSPQQQAPSHVGNGLFFHPLEAAAEPTLQIGFAPEHMNNFMPTWLP

SEQ ID NO: 54914 - protein, 471 aa, Zea mays
  Clone ID: UC-ZMFLMO17122G11_FLI.pep
RLADAVKLKDEMLTSGFVGPDPKVYSLLMAGFVGAGDGAKAVELYQELKDKVGGEPILDGIVYGTLMKAYFLMGTGEKVMECYKEVLCVESAVRFGAESYNEVVDALGQNGRLEDALKLFDRMLEEHDPPLRIAVDLRSFRVMVDAYCAAGRFEDAVAMFRRMGEWKLVPDVASYNNLIRHLQINQLIDKAEVLYNEMCESGVGADKETYLLLMEACFSVDRIDDGISYFDKMDELELKPDATAYHKLIDGLVGFSMVDKAQEYFNQMKEKGVNPSISSYETLLKAYIAADRLDDAVNVAKGILLNEKVLFSYGMRELLEGALRGDGRENDIAKLYEDVEREKAEAEARAAEEKARAEALAREERERRRAEIAAKDEAAAKASAAAIEAILAHKRKTENEGGAPAPDANTLDGGFLSKLGFKTAGEGALQGNPTESGDDGEGALHGNPTESGDDGEGALQGNPTERNGGNV

SEQ ID NO: 54915 - protein, 144 aa, Zea mays
  Clone ID: UC-ZMFLMO17150C09_FLI.pep
PKIRPQTRHLITHRDSFFHLRQLHGEQQRHHELYRIFAFHPVELSRKCSARPCPVPPPLSPAHPSLHAWLDDELLHARSHRRLLDRRGREPRLGRPVKLGGRGHQRHGHVGSRGLASLPPLVRAAGPRRGGVRGGGGLGRRRRR

SEQ ID NO: 54916 - protein, 202 aa, Zea mays
  Clone ID: UC-ZMFLMO17176A05_FLI.pep
DRLILLIPGKKTRGRSGSNDYRRASFGSESDDEINSYPDEDIDKGPRNNGSRSQGSTNRASVRHNALAYSDDEPFSDDVDSGMADRFGPRQTKSSTNIKDNFRDTRRNLNGRRSSGDRYGRTERNERDRYGRTEQRNERDRYGRTERNERFNNFDMHRGGSVLDKGRGARGNQLDSGSRGLQRNARRNWDRSGGFDGRHKGV

SEQ ID NO: 54917 - protein, 264 aa, Zea mays
  Clone ID: UC-ZMFLMO17179F03_FLI.pep
DRLRIKQRESTAKYNKLRQDRVRIKQHSTSPRRSVRAAKQPAGDLERDEGVDAGVLDLLVAEAGRVPAAHGDPLRLHEVDAHDDLHERTQPRLAEVRAVHPLRGAAPQVLRVGHHQTVVVAEPLRVRLHADADEADPAVAEELRQRAGDVVGVEELEDEAAVSDAELQCGHRVLVRAEAWAPLNVKPDDDAVAVAAGAVQREDLRDPALHSLAGGCDGGVNHVVAEGHFDHVRVGHWIPRRRPSVCGAPFPLRKGQGELGKRGV

SEQ ID NO: 54918 - protein, 444 aa, Zea mays
  Clone ID: UC-ZMFLMO17180H08_FLI.pep
ALHTNSSELWWWEPVEGFYSPELRGDLGAGLLDLHAMDDTGLLSEDVASEPFEPSPFMPKDIDDDDEDVIAGSQQASVDNYGVVTSEKETTARENNVAKIKVVVRKRPLNRKELSRKEEDIITVEDSSFLTVYEPKLKVDLTAYVEKHEFCFDAVLDEHVSNDEVYRETVEPIIPIIFQRTKATCFAYGQTGSGKTYTMQPLPLRAAQDMVRLLHQPVYRNQNFKLWLSYFEIYGGKLFDLLSDRRQLLMREDGKKQVCIVGLQEFEVSDVQIVKEYIERGNAARSTGSTGANEESSRSHAILQLAVKKHIIVKDTRRQRDRDANEAKNTKAVGKISFIDLAGSERGADTTDNDRQTRIEGAEINKSLLALKECIRALDNDQIHIPFRGSKLTEVLRDSFVGNSRTVMISCISPNAGSCEHTLNTLRYADRVKSLSKGGNTRKE

SEQ ID NO: 54919 - protein, 81 aa, Zea mays
  Clone ID: UC-ZMFLMO17126E10_FLI.pep
ELVKQQRGDGESPLQPKTIRARLSDETGAHRKRSNVLVIRALLQGSMGGGEGAAGCHLWRDGDVLCSSEQEGTSTMLPARG

SEQ ID NO: 54920 - protein, 455 aa, Zea mays
  Clone ID: UC-ZMFLMO17129G04_FLI.pep
DDKNDSTVQLNVSTESRVLKNKRKYKVDILRCESLASLAPATLERLFLRDYDIIVSMVPLPSSSVLPGPSGPIHFGPPSYSSMTPWMKLVLYTAGHCGPVSAVFMKGLRFRLLPEPLAGCEKALLWSWDGSVVGGLGGKFEGNLLKGNLLLHCLNSMLKQSAVLVQPLSIHDLDTSGNLVTVDIPLPLKNDDQSIESVVAQTNLPKEQILDLTSVLKDLSSKFELSTLGYLRLLRLHRIDEPDKFDPENVSYKWVPLSLEFGVPLFSPKLCEKICERVVASHMLQKDDLIEHSDVMQNVRRQLRELCSEYQATGPVAKLFNKRGSSRDSPRALINSISGRWNLSNDPSTPSGGAPSEHERLKFVGRQRPRTEVVSFDGSTVRSYALDPEHNEEQSSIQDVKPDPEETDSKDVVLPGVNLIFDGAELHPFDIAACLQARQPLWLISEASTASSTLL

SEQ ID NO: 54921 - protein, 481 aa, Zea mays
  Clone ID: UC-ZMFLB73226G12_FLI.pep
KTEATFIIPDVKNLSTSRACNLNIIFISRGQVGQIIGEDSCSGNDVEGSSLQKLEGKCSWGKMPTNLLAPSLEKCVTLSTGNAVDLTSTVTMNPSFLEPKFLEQDSCLTFCSHKVDATGSYQLQVCISAEEAGARELLLSPYYCNYSYNNVPPSLLPEIIRLRAGNVLFNYKYYNNTMQKTEVTEDFSCPFCLVPCGSFKGLGCHLNSSHDLFHYELWISEECQAVNVSLKADAWKTEFVAEGVDPRHQTFSYCSRFKKRRRLETTAEKFRHVHPHIMESGSHEDAQAGSEDDYVQRENGLSVANTSVDPSQPVHGSNLSPPTVLQFGKSRKLSAERSDPRNRQLLQKRQFFHSHRAQPMPLEQVLSDHDSEDEVDDDIADFEDRRMLDDFVDVTKDEKLIMHMWNSFVRKQRVLADGHIPWACEAFSRCHGQQLVQNPALLWGWRFFMIKLWNHSLLDARAMNACNTILQGYQDGSADPK

SEQ ID NO: 54922 - protein, 179 aa, Zea mays
  Clone ID: UC-ZMFLMO17056A10_FLI.pep
KMLDRLQELSKKSDGKVLAIDLRTDLLEQKSCKTTRGARRKGCYSPDEVLAFLRSVGFSANTTIYLTETSWHKGLDVLKEEFPNTWYKGDIMPAENKAEFLKSSNADLARALDLEICSQSDVFVPAVAGLFYGHVTGKRIASGRTQILVPSQSSTSTHASDFISTYISNKNHLAYACYC

SEQ ID NO: 54923 - protein, 450 aa, Zea mays
  Clone ID: UC-ZMFLMO17250C02_FLI.pep
RICSACQAGKQVGAHHPHKNVMTTDRPLELLHMDLFGPIAYISIGGSKYCLVIVDDYSRFTWVFFLQEKSQTQETLKGFLRRAQNEFGLRIKKIRSDNGTEFKNSQIEGFLEEEGIKHEFSSPYTPQQNGVVERKNRTLLDMARTMLDEYKTSDRFWAEAVNTACYAINRLYLHRILKKTSYELLTGKKPNISYFRVFGSKCFILVKRGRKSKFAPKTVEGFLLGYDSNTRAYRVFNKSTGLVEVSCDVVFDETNGSQVEQVDLDEIGDEEAPCIALRNMSIGDVCPKESEEPPRTQDQPSSSTQASPPTQNEDEAQVDEVEDQANEPPQDDGNDQGGDAIEEDKEDEEQRPPHPRVHQAIQRDHPIDTILGDIHKGFRPIHPPSRRLSVAPVEEDFEDDQQVGEGDQEVGDDEDKFGRFHCGGKMKFMGMDKLRKKFKKKSPRQATCVS

SEQ ID NO: 54924 - protein, 370 aa, Zea mays
  Clone ID: UC-ZMFLB73020E07_FLI.pep
EAKKPAPGEAEAGNGAGAEAATCDYCGTAAAAVYCRADSARLCLPCDRLVHGANGVCSRHARAPLCAGCCAAGAVFRRASTSAFLCSNCDFGRHRDGGDPPLHDRCAVQPYSGCPPASDLAALLAVPLFDKPAAEDGAWWNIWEEPQVLSLEDLIVPTTPCHGFEPLLTPPSPKNRSISPDRKVNEEILRQLGELAESDGGMQASAGREEAEQAGGDQFPSWASPQYATGHGNFGTEDNHENGRWNNSEYHDLNDACKLEVTYDQAPVNSAEPCLSSFAPLSEICPSMSNGSSKEDNHQANPGIGMPMQGLPKRSGFDVVPCPDRDSVISRYKAKRKTRRFDRQVRYESRKVRADGRLRIKGRFAKANQT

SEQ ID NO: 54925 - protein, 510 aa, Zea mays
  Clone ID: UC-ZMFLMO17312F10_FLI.pep
VGGAASTQPEGRGAMAAVAGPLCTWLVAACLSAACDAEEHKQKHFCPGGSRAGGGVMVGQRRRLGARRRGLARSGMTMAVALQAERSVIEKKKPDIKQRRVVVTGMGVVTPLGHDPDVFYNNLLDGVSGISEIERFDCSNFPTRIAGEIKSFSTDGWVAPKLAKRMDKFMLYLITAGKKALENGGLTEELRNELDKTRCGVLIGSAMGGMKVFNDAIEALRVSYKKMNPFCVPFATTNMGSAILAMDLGWMGPNYSISTACATSNFCILNAANHIRRGEADVMLCGGSDAPLIPIGLGGFVACRALSQRNSDPTKASRPWDMGRDGFVMGEGAGVLVLEELEHAKERGATIYAEFLGGSFTCDAYHMTEPHPEGRGITLCIEKALADAGVAREEINYVNAHATSTQAGDLKEYEAIVRCFRQNPQLRVNSTKSMTGHLIGAAGGIEAVASIQAIRTGWVHPNLNLENPEDTVDVGVLVGSQKERCEVKVALSNSFGFGGHNSSILFAPFK

SEQ ID NO: 54926 - protein, 131 aa, Zea mays
  Clone ID: UC-ZMFLMO17150B09_FLI.pep
TGLSKTPLDIPFDNQLPYTQFSIPVPKRSILASSALRSNLIRILAKTIFHGTGVYGVEQYLQGRRSPKGCGQHRAVTSSRNQTHQNPSWQRCQDQRPQVHVGLPVLFSSLSSFLCADASVPPPLAVVSLFS

SEQ ID NO: 54927 - protein, 349 aa, Zea mays
  Clone ID: UC-ZMFLMO17300D10_FLI.pep
FFATGTASIIMVFSSLPIFLDPPNWGQMQMQMQPPLQCLLGSGGGSDHHHLMPPPSGLAPLPGGPADTAASAPAGGVSSTSVSVQAAAGAGAGAQPRPVVSMAERARLARVPLPEPGTLRCPRCDSTNTKFCYFNNYSLSQPRHFCKACRRYWTRGGALRNVPVGGGCRRNTKRSSKKSSRGGGAGATAATSSSSTTSTSTTATTTTTTSAAMAAAEAIAGMQAQLPHLGLPPAAAAAALEASLEGYHHYLPLQMQPQFLQQAGLHGYHFADDGTGVLAADGFPRGVVASGLLAQLAAVKMEEHGSNGGGAIAAHHEQQSYWPGSTGGGGGWPVEFLSGFSSSSSGNVL

SEQ ID NO: 54928 - protein, 331 aa, Zea mays
  Clone ID: UC-ZMFLMO17169G08_FLI.pep
GSGKMGERKVLNKYYPPDFDPSKIPRRRQPKNQQIKVRMMLPMSIQCGTCGTYIYKGTKFNSRKEDVVGETYLGIQIFRFYFKCTKCSAEITFKTDPQNSDYTVESGASRNFEPWRAQDEAADKEKIKRDAEEMGDAMKALENRAMDSKQDMDILAALEEMRSMKSRHAGVSVDQMLEILKRSAHEKEEKAIAELDEEDEELIKSITFRNSGFYVKRIEDDDDDDEDLAPGQSSRTIKINESSESVTKPTDVLSKTNGSEVANKEGSKSWMPKFIVKPKSASADPHKRQKIESTAVQDTGKGQDDEQKSEPAKQTNVLQSLCQNYDSDDSE

SEQ ID NO: 54929 - protein, 126 aa, Zea mays
  Clone ID: UC-ZMFLMO17165F02_FLI.pep
EQLLQKNVEINDLQEKVFRVEQQLSAKVDISCEKEADCTQHETIDLKSKLQSKEAKIEKMKYEHLTREAALAEKELLEEEYKKKFDEAKKELSLENDIACMWVLITKLKRGALDISDLNVDDRTKV

SEQ ID NO: 54930 - protein, 450 aa, Zea mays
  Clone ID: UC-ZMROB73080D02_FLI.pep
RHAAELRASHLTRPVFGHAADRAMDASSSLSLLALVTMLSLLHSATTDAAAGLPAARTSHRRLLLLHQQDTNLAALPPPARVHVVPVDVHVPSHGTGSFPAASPGPHGGKNGPSEAAPATPATAAAYLSRSMRWLYMVAVPAVALLALAGLACWLLCRKSAVATIGPWKTGLSGQLQKAFVTGVPKLQRSELERACEDFSNIVVSYPHYTVYKGTLSTGVEIAVVSTMITSSKEWTEHSESCFRRKVDALSRINHKNFVNLLGFCEEEEPFTRMMVLEYAPNGTLHESLHAEDFERIAWRGRMRIVMGLAYCVQHMHELSPPVAHPDMQSSSVLLSEDGAAKIADMSVWHEVISQGKTTTNGDEQASSAGLLAGNVYSFGALLLEIISGKLPTPYPAHERSLQMTSVTSYRRNTVMFLTTRRRTPNGDVMFLLLLLLLLLLLLPRLWWSA

SEQ ID NO: 54931 - protein, 231 aa, Zea mays; identical to SEQ ID NO: 53109
  Clone ID: UC-ZMROB73033G02_FLI.pep

SEQ ID NO: 54932 - protein, 640 aa, Zea mays
  Clone ID: UC-ZMROB73045D03_FLI.pep
ARLARTGGNSSPPSVDGSNSGRHLLSSPFVASSPQSMSDGSVQLQQARVAEGAAVAEEVMAALERNGVSFVGGGLGKAKKDGSGKQLMGRAALLQLPATVRIDIPPTSPGRAALKVWEELVNVLRKDGADPAAAFVHRKKVQHAEKSIRDAFLALYRGLDLLKKFSSLNVKAFTKILKKFVKVSEQHRKGDLFSEKVKRSPFSSSDKVLQLADEVECIFLRHFAGNDRKVAMKYLKPQQPRNTHMVTFLVGLFTGTFVSLFIIYSVLAHVAGIFSSTGNTAYMEIVYHVLSMFALISLHVFLYGCNLSMWKGTRINHNFIFDFSSTALTHRDAFLMSASIMCTVVAALVVNLFLRNAGATYANALPGALLLLSAGVLFCPFNIFYRSTRFCFMRVMRNIVLSPFYKVLMADFFMADQLTSQIPLLRHLEFTGCYFMAETFRTHAYGSCTSSSQYKNLAYVLSFLPYYWRAMQCLRRYLEEGHDMNQLANAGKYVSAMVAAAVRFKYAATPTPFWMWMVIASSTGATIYQLYWDFVMDWGFLNPKSKNFWLRDQLILKNKSIYYASMMLNLVLRLAWAESVMKLRLGMVESRLLDFSLASLEIIRRGHWNFYRLENEHLNNAGKFRAVKTVPLPFRELETD

SEQ ID NO: 54933 - protein, 336 aa, Zea mays subsp. mexicana
  Clone ID: UC-ZMROTEOSINTE016D02_FLI.pep
SDFTSQKQVIKPKLVRPMRIPVTSCAWDHEGKRIVGGIGDGSIQVWTIKAGWGSRPDIHVEKTHTEDITGVKFSTDGQSLLSRSMDSTLKIWDLRRMKTPLKVFEDLPNHYAETNAAFSSDEQLIFTGTSIEKDGDNGGLLCFFDRKKLELVSRVGISAHYSVIRCLWHPRINQVFATVGDKKEGGTHILYDPSISQRGALVCVGRAPRKKSVDDFEVQPVIHNPHALPLFRDQPSRKRQREKILKDPLKSHKPEAPVNGPGFGGRVGTTKGSLLTQYLLKEGGLIKETWMDEDPREAILKYADAAEKDPKFIAPAYSQTQPKPVFAESDSDNEEK

SEQ ID NO: 54934 - protein, 272 aa, Zea mays subsp. mexicana
  Clone ID: UC-ZMROTEOSINTE016D09_FLI.pep
RPRARGLQAERKLGAMSLSPADGAAYWLRWQVLVCGALIALPTVAAAALLPRLRRAAPPLRAADLWVPCWARLHPGWLLAYRAVALAAAVALLARLVVARGITVFYFYTQWTFLLVTIYFAFATAISAHGCLVYSRKSLRKADESRGLLNADVENRDVSISGERKTDETNMMVSYYEQTVNERRAGFWGRCMEIIYQDNARDTDLESSHRHLDVEARYSQRRRIGGPRLREPVVEVYDIEEFLGRRPMLMASAKLKRWSAAPLPSITILVEL

SEQ ID NO: 54935 - protein, 100 aa, Zea mays subsp. mexicana
  Clone ID: UC-ZMROTEOSINTE006E07_FLI.pep
VNEDIQTRAYLSNVCVAKELQKKGLGYTLVDKSKKLALEWGITDLYVHVAINNVAGQKLYKKCGFVYEGEEPAWKGRFLGRPRRLLLWLDMSKVLVRSCM

SEQ ID NO: 54936 - protein, 202 aa, Zea mays subsp. mexicana
  Clone ID: UC-ZMROTEOSINTE008G02_FLI.pep
APGTATMARPSAAAAGGFLLACAALLLFAGQSNAQTTFIFPFASLFPVGYVPPIVRIYSKQNTGLNMAVRYGKVVLVTANSWDQTQLWWKIPPLTSLFDGEGAKYWLVNVATKQAMTCPNGPMQVQLAEFNPYNGAQMWVPSTPRLQDGVFYQIKPYTQNSKALNGLGGNVHDGTEIGIYSDTPVSSNTLWFTSNVFPFPFY

SEQ ID NO: 54937 - protein, 85 aa, Zea mays subsp. mexicana
  Clone ID: UC-ZMROTEOSINTE019A10_FLI.pep
NLRGGDGGHDHVGEGEADLHQPRQPHRRGGRGPQRWQLHEGAYPSAHPLYDCQRQNLIYLLALESDIPIRTHFLGCLGVLFFIGY

SEQ ID NO: 54938 - protein, 800 aa, Zea mays
  Clone ID: UC-ZMFLMO17043E05_FLI.pep
LFPPRFVCLFLYKKENPLALLGQYSDDEVEDEEAADQPTGEAKGSPGDASAQLTSQRADIAGDNSVAKIEPSASVGDQQEAAPQAGDVKNYTQSVTEENTIAPEPTVQEESVKATESLPDSSGMQIVGDVGGNWKAVMHEQSNQCYYWNTVTGETSWDIPNGLASGVATAFVPSDVDYSNEAQTHVLPHSTLEAYPSDMSVGNGTTYPNLGMACGSAHVTQDAYAYAAPIASHEPMDIDPLYLAKYGDGLLQRLDLLERLCGSNKGLELIRREIEIRMSDLNALSSYGSSLLPLWLHAEVHLKQLDSSISKLEMNYHADSEPRNSKTEVAEHRAPDDADLITPSNGEALKYEVCAGITIDANMKIGKPASTSQNSQDRDNAAVPPKIESDNDEDMDVEMEVDEDNVEEQAQCSSVPEKEHPPSEQLSSSNLPSFEVPTPPEDNSVPPPPPEEEWIPPPPPEHEHEPAPPASPEEPAASYVQVDTIPQPYIAQENVGYTISGMEYYSTEGTNANYYMQVSEPHVLQAQHSYYAPVSGSGISVSVDGTSIAPESYYTYPSVTVAASAVAAEHSGYYASSVSAISSSAADIKTSSASLVSANSNSDLKNPDNVISNDASIVPFTQAVVATSAAGTTSVLESSTQPSSSTTNQTKVIRNKKRVVGITSSLRSNKKVSSLVDKWKAAKEELRDEEEDEPETALEALERKRQKEIEEWRKQQIAFGHAQENANFVPVRGDWRDRVKRRRAEAKKESKDDIVVASLSSSKQHKGSPDLAELSKGLPTGWQVSILDCIISDANIVCCV

SEQ ID NO: 54939 - protein, 207 aa, Glycine max
  Clone ID: UC-GMROPIC006D11_FLI.pep
RYCTQCFNASTRSSLCWTQTRFHLPVWLGFGAAFKKVIEENVKNLNMLQEMYNQWPFFRVTLDLVEMVFAKGDPKIAALNDRLLVSKDLWPFGDQLRNKYEETRKLLLQVAGHKEILEGDPYLKQRLRLRHAPITTLNIVQAYTLKRIRDPNYNVKVRPRISKESAEASKSADELVKLNPTSEYAPGLEDTLILTMKGIAAGMQNTG

SEQ ID NO: 54940 - protein, 406 aa, Glycine max
  Clone ID: UC-GMROPIC006E08_FLI.pep
QNPNLCESDPCIQQTNNKQPDGDQQKNKNNIVIPVVASVAGVLVLLIIVAAAIICGLKRKKPQASDVNIYVETNTPNGSQFASKQRQYTFNELVKITNDFTRILGRGGFGKVYHGFIDDTQVAVKMLSPSAVRGYEQFLAEVKLLMRVHHRNLTSLVGYCNEENNIGLIYEYMANGNLDEIVSGKSSRAKFLTWEDRLQIALDAAQGLEYLHNGCKPPIIHRDVKCANILLNENFQAKLADFGLSKSFPTDGGSYMSTVVAGTPGYLDPEYSISSRLTEKSDVYSFGVVLLEMVTGQPAIAKTPDKTHISQWVKSMLSNGDIKNIADSRFKEDFDTSSVWRIVEIGMASVSISSFKRPSMSYIVNELKECLTTELARKYSGRDTENSDSIELVTLNFTTELGPPAR

SEQ ID NO: 54941 - protein, 288 aa, Glycine max
  Clone ID: UC-GMROPIC007C01_FLI.pep
QFISTSLLLHQSTNTSLHLKVSDFGLTAFSDHLKEDGLLHTTCGTPAYVSPEVIAKKGYDGAKADIWSCGVILYVLLAGFLPFQDDNLVAMYKKIHRGDFKCPPWFSLDARKLVTKLLDPNPNTRICISKVMESSWFKKQVPRKVEEVVEKVDLEEKIENQETMNAFHIISLSEGFNLSPLFEEKRKEEMRFATAGTPSSVISRLEEVAKAGKFDVKSSETKVRLQGQERGRKGKLAIAADIYAVTPSFMVVEVKKDNGDTLEYNQFCSKQLRPALKDIFWNSAPASA

SEQ ID NO: 54942 - protein, 183 aa, Glycine max
  Clone ID: UC-GMROPIC010G10_FLI.pep
YNNICVCVYIYIYIYIYALWQVEGRTVKAQIWDTAGQERYRAITSAYYRGALGALLVYDVTKPTTFENVSRWLKELRDHADANIVIMLIGNKTDLKHLRAVATEDAQGYAEKEGLSFIETSALEATNVENAFQTILAEIYRIISKKSLSSNDPAANIIKEGKTITVGGAPEPNTNKPSCCTSS

SEQ ID NO: 54943 - protein, 165 aa, Glycine max
  Clone ID: UC-GMROPIC012D02_FLI.pep
MSSDAFQLLGMAERGMLPEFFSKRSRYGTPLIGILFSASGVILLSWLSFQEIVAAENFLYCFGMILEFIAFILLRIKHPNASRPYKIPGGTAGAIIMCIPPTILIGVVLFFSTLKVMVVSLIAMAIGLLMQPCLKFVEKKRWMKFSHSSELPDFGNQEDTRTLVH

SEQ ID NO: 54944 - protein, 205 aa, Glycine max
  Clone ID: UC-GMROPIC012H01_FLI.pep
QEISLFTLELYFAFLVPNNMAKSTFFVCLNLSLLFSLVTATYYSSLTPTLLGFREEQFTHLHFFFHDVVTGPKPSMVFIAEPNGKAKDALPFGTVVAMDDPLTVGPEQDSKLVGKAQGIYTSISQEEMGLMMVMTMAFTDGDFNGSTISVLGRNMIMSEPVREMAIVGGTGAFRFARGYAQARFYSVDFTKGDAIVEYDVFVNHY

SEQ ID NO: 54945 - protein, 322 aa, Glycine max
  Clone ID: UC-GMROPIC014A06_FLI.pep
PNEAILCSDSFQSMYTQMLCGLIERHHVLRLGAVFASGLLRAIRFLQLNWPELAHDIQTGTLNSRITDPAIRSYMDKVLKSDPELAQFVTQQCSKDNWEGIITRIWPNTKYLDVIVTGAMAQYIPTLNYYSGGGLPLACTMYASSECYFGLNLNPMCKPSEVSYTIMPNMAYFEFLPHDPKPGSTSSKLVELADVEVGKEYELVITTYAGLYRYRVGDILRVTGFHNSAPQFHFVRRKNVLLSIDSDKTDESELQKGIENASKLLSEFNTSVVEYTSSRHNNDSGSLRDLLGIVDQGLDELTQSRGVESVLFGDGGVLELGV

SEQ ID NO: 54946 - protein, 301 aa, Glycine max
  Clone ID: UC-GMROPIC018F12_FLI.pep
SAMEAQAVQVLRYSATLHSNNPKLEKTGTNGSLRMFGGFKKQLFVSSKLQSAKPSANIRRRTASLVVACSHNNIPASALEYGSFHSSVEEKLILKIKSQEIEPYLSGRCIYLVGMMASGKTTVGRILSEALSYSFYDSDALVVKEVGGISVTDIFKHYGEPFFRNKETEVLQKVSIMHRHLISTGGGAVVRPINWKYMQQGISVWLDVPVEVLTQRITAEGTDSRPLLHYEGGDAYTKTITHLSSLFEERSEAYANANVKVSLENMAAKLGRRDVLDLSPTAIAMEALEQIKGFLIGEDGF

SEQ ID NO: 54947 - protein, 100 aa, Glycine max
  Clone ID: UC-GMROPIC019H03_FLI.pep
MIPLLLCGGLKTYSAILLCPIFFSLAHLNHFLEIYAKQNYRIVKAAMVIGLQLGYTVVFGSYASFLFIRTGHLIAPLVAHIYCNFMGLPVLYSQRSDLEA

SEQ ID NO: 54948 - protein, 74 aa, Glycine max
  Clone ID: UC-GMROPIC020E03_FLI.pep
PNNEQLPLITSIFFKRLKEGFALNFGCNMKETFATDKDAFKQELNRKNRMPFNFQGKIKIRSYVLLWSREKMKE

SEQ ID NO: 54949 - protein, 143 aa, Glycine max
  Clone ID: UC-GMROPIC021E04_FLI.pep
SQYANMASFPGSGNGLRSLPSSDDATLYFSSDQGSNSFDYAPEISSMLSAPLDCESHFVQNANQQQPNSQNVVSIEDDSAKTLSEELVDIESELKFFQMPYLEGSWGDTSLESLLSGDTTQDGGNLMNLWCFDDIPSMAGGVF

SEQ ID NO: 54950 - protein, 127 aa, Glycine max
  Clone ID: UC-GMROPIC022C10_FLI.pep
HYSALTSSKLGFHDIMAEVYKNGPVEVAFTVYEDFAYYKSGVYKHITGYELGGHAVKLIGWGTTDDGEDYWLLANQWNREWGDDGYFKIRRGTNECGIEEDVTAGLPSTKNLVREVTDMDADAAVSF

SEQ ID NO: 54951 - protein, 423 aa, Glycine max
  Clone ID: UC-GMROPIC022E12_FLI.pep
IIPNDIQGNIARWLKKEGDKISPGEVLCEVETDKATVEMECMEEGYLAKIIRGDGAKEIKVGEVIAVTVEDEGDIAKFKDYQPSASEPSAVPAKEISAPPTPKKEEEVEEPGREPEPKVSKPSAPPSSGDRTFASPLARKLGEEKNVPLSSIKGTGPEGLIVKADIDDYLASGAKEVSASSKAKVATDAALDYTDIPVSQIRKVTASRLLLSKQTIPHYYLTVDTCVDKLTSLRTQLNSLQEASGGSRISVNDLVIKAAALALRKVPQCNSSWANDYIRQYNNVNINVAVQTDNGLFVPVIRDADKKGLSTIGEEVKQLAKKAKENSLKPQDYEGGTFTVSNLGGPFGVRQFCAIINPPQAGILAVGSSERRVVPGSGAEEFKFASFMSVTLSCDHRVIDGAIGAEWLKAFKGYIENPETMLL

SEQ ID NO: 54952 - protein, 90 aa, Glycine max
  Clone ID: UC-GMROPIC023G11_FLI.pep
MDPTNCQLRAHASPLASFVGTVTIAHFNGSKTCGFEILIRAGRTPILFLHPSLLFPSRHAKPDPNNNNPNPNQNRNHNPNPYPNPFRSSF

SEQ ID NO: 54953 - protein, 150 aa, Glycine max
  Clone ID: UC-GMROPIC024H11_FLI.pep
YNAKLSDFGLAKDGPVGDKSHVSTRVMGTYGYAAPEYLATGHLYIKSDVYSFGVVLLELLTGRRSLDTTFDGEQKLAEWAHSLLKEKKKLLKIIDPRLDGDYPIKAVHKAAMLAYHCLNRDPKARPLMREIVHSLEPLQAHTEAPIGKKR

SEQ ID NO: 54954 - protein, 70 aa, Glycine max
  Clone ID: UC-GMROPIC027E02_FLI.pep
VVIFIAWLVARILLFVYMFYHVYLHFDQIEQMHAFGQVLVIVVPLALSVMNLIWFSKIIKGLRKTLAKRQ

SEQ ID NO: 54955 - protein, 88 aa, Glycine max
  Clone ID: UC-GMROPIC028E07_FLI.pep
DTLSTHSPDEEYLGERQQPSIWSGDAEIVEAFYDFSAKVQQIEKVIDGRNLDRTLRNRCGAGVLPYELLAPSSEPGVTCRGVPNSVST

SEQ ID NO: 54956 - protein, 123 aa, Glycine max
  Clone ID: UC-GMROPIC028G01_FLI.pep
SSWHPDGVTFATGNQDKTCQIWDLRNLSKSVAVLQSNLGAIRSIKYTSDGRYMAVAEPADFVHVYDVKSGYENEQEIDFFGEISGISFSPDTESLFIGVWDRTYGSLLEYGRRRYYAYLDSLT

SEQ ID NO: 54957 - protein, 287 aa, Glycine max; identical to SEQ ID NO: 44177
  Clone ID: UC-GMROPIC028G12_FLI.pep

SEQ ID NO: 54958 - protein, 211 aa, Glycine max
  Clone ID: UC-GMROPIC033E09_FLI.pep
RGVLYLHRDSRLRIIHRDLKASNILLDDEMNPKISDFGLARIVRGGDDDEANTKRVVGTYGYMPPEYAMEGIFSEKSDVYSFGVLLLEIVSGRRNTSFYNNEQSLSLVGYAWKLWNEDNIMSIIDPEIHDPMFEKSILRCIHIGLLCVQELTKERPTISTVVLMLISEITHLPPPRQVAFVQKQNCQSSESSQKSQFNSNNDVTISEIQGR

SEQ ID NO: 54959 - protein, 117 aa, Glycine max
  Clone ID: UC-GMROPIC034F08_FLI.pep
KQLIIFLSHSHYKHKTLPILIKVKMKASPIAWFTLVVVLLVAEVQVSMAVTCSPVQLSACVSAITSSTPPSNLCCSKIKEQKPCLCQYLKNPNLKKFVDSPNARRVASTCGTPFPRC

SEQ ID NO: 54960 - protein, 135 aa, Glycine max
  Clone ID: UC-GMROPIC035H03_FLI.pep
WSVVQTFICDGPVHEDMFHWQATIMGPPDSPYAGGVFLVTIHFPPDYPFKPPKVAFRTKVFHPNINSNGSICLDILKEQWSPALTISKVLLSICSLLTDPNPDDPLVPEIAHMYKTDRNKYESTARSWTQKYAMG

SEQ ID NO: 54961 - protein, 284 aa, Glycine max
  Clone ID: UC-GMROPIC036C10_FLI.pep
ISLLATFHHTTMPNPPIRLIDHALPSVATAGTATAEYDLTKATTSALLFRFSSFFVLSDILAVSSSVRFTFSSKVVFLSSIIKVNSALAFLLSSESVAVFVFTSLSNSASFFAFASKILLTAVFSCSFPPFSATSFNAFSCSSGVFSAVASAAFFNAFACLTLKSSTALFTLSAASVKTAGALGFASSFLASSVFGSSFLASSFLASSVLPSPFFVSSFFGSSFVASSFFASASSFFGSSFLPSSALVSVAAASSGIGFACVSVPMETVQMTSRKMQSNWEFIF

SEQ ID NO: 54962 - protein, 105 aa, Glycine max
  Clone ID: UC-GMROPIC040B05_FLI.pep
ERARERERMAALGGNRDVAGSQNSLEIDGLARFAVEEHNKKQNALLEFEKVVSAKQQVVSGTLYTITLEAKDGGQKKVYEAKVWEKAWLNFKEVQEFKLVGDAPA

SEQ ID NO: 54963 - protein, 131 aa, Glycine max
  Clone ID: UC-GMROPIC041C12_FLI.pep
GSPSSSGSSSPRLSSPLPETLPLTPPAKMATTITSSKKRKPSTISTLLKTAKVQVDTYWPTLFAKLAEKKNLGDLIANAAGGGAPVAVAAAAPVAASGGGGGAAAAPAAEEKKKEEPEEESDDDMGFGLFD

SEQ ID NO: 54964 - protein, 261 aa, Glycine max
  Clone ID: UC-GMROPIC041D02_FLI.pep
SHHNRQRQLKKMPIRNIAVGRPEEATHPDTLKAALAEFISTFIFVFAGSGSGIAYNKLTDNGAATPAGLISASIAHAFALFVAVSVGANISGGHVNPAVTFGAFVGGNITFLRGIVYVIAQLLGSIVASLLLAFVTASTVPAFGLSAGVGVGNALVLEIVMTFGLVYTVYATAIDPKKGNLGIIAPIAIGFIVGANILLGGAFSGAAMNPAVTFGPAVVSWTWTNHWIYWAGPLIGGGIAGLVYEVVFISHTHEQLPTADY

SEQ ID NO: 54965 - protein, 186 aa, Glycine max
  Clone ID: UC-GMROPIC041D06_FLI.pep
LAGFGNLPGDMVFWDYIDKKQLGATKAEWSVTSEWSPDGCYFMTATTAPRLQVDNGIKIFHYNGSLYFKKMFDKLYQVDWKPESPGKFGDIAELIKSLNLVQLEDKKPSGQGPPKSTQTSTKASSANPTTQKPAAYRPPHAKNASAIQAELFGETTAETLSKNALRNKKKREKQKEKKAASDASSS

SEQ ID NO: 54966 - protein, 100 aa, Glycine max
  Clone ID: UC-GMROPIC041H03_FLI.pep
FHKYILEIYNVNLCHSSYRKLIYNTLTSLLKHALYNLLDVLLGSFGETNSEVPIVKDGVIYPHENIAKNPERTSRRRNVKSNKPTKANFCNAFSSFHPHP

SEQ ID NO: 54967 - protein, 191 aa, Glycine max
  Clone ID: UC-GMROPIC042D11_FLI.pep
RVDLSRGVIIVHLCCSCFNLLSSLSCGKNYVNISSEQILEYHPQMLQEYLRGGDQTSFMYPSGVDRFKRQFAHLEEHYGKGERSTPPLQRQHASLPRERVCAPKDESKQNNDSEKPSGSNLQQSPPGSDETGAQNGTSKPNYSARSLLKSASISASKCVVLKQNKDPEVANSIFSSAWLFAERSYYMVKVM

SEQ ID NO: 54968 - protein, 97 aa, Glycine max
  Clone ID: UC-GMROPIC043E02_FLI.pep
KYLFNLFSGSSFYRGIKASSIWSQVKHLSSCPSSLNKSLNVSSLHYNICDSDQVGSICLMAILHVLILLCSSDRQIRTGKRDLKCKCQVKVKSTVQF

SEQ ID NO: 54969 - protein, 190 aa, Glycine max
  Clone ID: UC-GMROPIC043E05_FLI.pep
LLIHFSTNSLGFTPEFLGRVKLVTSIASLLGVGLYNGFLKNVPLRKIFFATTLLGSTLGMTQVFLVTGLNRKFGISDEWFAIGDSLILTVLSQASFMPVLVLAARLCPEGMEATLFATLMSVSNGGSVVGGLLGAGLTQLFGITKDRFDNLAALIILCNLSSLLPLPLLGLLPGGNPDVNEEDNSDIEMK

SEQ ID NO: 54970 - protein, 316 aa, Glycine max
  Clone ID: UC-GMROPIC043H07_FLI.pep
SQIADAVLVARSLGATLVIPDIRGSQPGDKRNFEDIYDVDVFMKSMEGVVRVLKDLPSHVSTHKIAAVKVPNRVTEDYIAQHVEPIYRSKGSVRLATYFPSINMRKAGEKSDAESVACLAMYGSLELQQETHDLVDSMVERLRTLSRKSDGQFIAVDLRVEMLDKKGCQGRDSEKEKSCFNAQEVAVFLRKIGFEKDTTIYVTQSRWDESLDSLKDLFPKTYTKESIIPADKKKRYLDSEDSELEKVIDFYISSESDVFVPAISGLFYANVAGKRIGSGKSQILVPANIPDSSASASSFLSHYVSKKNHFAYSCYC

SEQ ID NO: 54971 - protein, 66 aa, Glycine max
  Clone ID: UC-GMROPIC044E08_FLI.pep
KACQVQPGKNRQSLSLFFLHELYTRIPLKTGFFKGFDLEPMFLFVLIFVLSHTILHAAAGPIKKLV

SEQ ID NO: 54972 - protein, 136 aa, Glycine max
  Clone ID: UC-GMROPIC045D10_FLI.pep
GLFEVVGFRDAWHGLVLLAPKGHGTRLAQTSRIRFEFHKGAADCTFMRIDGEPWKQPLPKDDDAVVVEISHHDQVSMLATPLCRSKSIYDPSSPSDDREEDDSSEEEPSEDWEERRKFGAAETFKYPDGIDIAQVS

SEQ ID NO: 54973 - protein, 291 aa, Glycine max
  Clone ID: UC-GMROPIC046A05_FLI.pep
IDFPKQKIVVAGAGSAGIGVLNAARKTMARMLGNNEVAFESAKSQFWVVDAQGLITEGRENIDPDALPFARNLKEMDRQGLREGASLVEVVKQVKPDVLLGLSAVGGLFSKEVLEALKGSTSTRPAIFAMSNPTKNAECTAEEAFSILGDNIIFASGSPFSNVDLGNGHIGHCNQGNNMYLFPGIGLGTLLSGARIVSDGMLQAAAERLATYMSEEEVLKGIIFPSTSRIRDITKQVATAVIKEAVEEDLAEGYHGMDARELQKLSEDEIAEYVQNNMWSPEYPTLVYKKE

SEQ ID NO: 54974 - protein, 261 aa, Glycine max; identical to SEQ ID NO: 54964
  Clone ID: UC-GMROPIC047B06_FLI.pep

SEQ ID NO: 54975 - protein, 433 aa, Glycine max
  Clone ID: UC-GMROPIC049A03_FLI.pep
EVRVLMGGQNSKEESWRQSSSVRSSSSSWSAYLDPLSSYGFNEPQPSYSSYGYEAYGGDGMVRYDSTKLERRYSRISDHYSSIDQVSEALALAGLESSNLIVGVDFTKSNEWTGKNSFNRRSLHHIGRGLNPYEQAISIIGKSLAAFDEDNLIPCFGFGDASTHDQDVFSFYPSERFCDGFEDVLSRYREIVPHLRLAGPTSFAPIIEMAMSIVEQSGGQYHVLVIIADGQVTKNVDTKHGRPSPQEQKTVDAIVAASKFPLSIILVGVGDVPWDMMKEFDDNIPARAFDNFQFVNFTEIMSKSIPPSRKEAAFALAALMEIPSQYKAAIELKLLGSRQANAPQRHALPPPRYSSHAARFEPSIPPQHGNSHPFATAPSAPSSTSDNQLCPICLSNAKDMAFGCGHQTCCECGQDLQSCPMCRSPINTRIKLY

SEQ ID NO: 54976 - protein, 137 aa, Glycine max
  Clone ID: UC-GMROPIC049C12_FLI.pep
PELATVAAPTSATDVYSFGVVLLEVACGRRPIETSVAEEEVVLIDWVRELYAKGCAREAADLRIRGEYDEGDVEMVLKLGLACCHPDPQRRPTMKEVVAFLLGEDPPEAPGKVLSDLVRGGEDSDEAAPLQPSPPPV

SEQ ID NO: 54977 - protein, 128 aa, Glycine max
  Clone ID: UC-GMROPIC050C07_FLI.pep
LWLSELEEREEEMPLLAWVIFKIDEKKKEVVVEKTGGPAESYDDFTASLPENDCRYAIFDFDFVTSENCQKSKIFFIAWSPSVARIRPKMLYATSKDRFRRELQGIHYEIQATDPTEMDLEVLRERAN

SEQ ID NO: 54978 - protein, 128 aa, Glycine max
  Clone ID: UC-GMROPIC054C08_FLI.pep
ERWELCPFVSQNNQCICYWSTKASKDSSSTGFDCKLPVLMYNFHLWHAEKIKNVSNGDVADDSYHRYKEDIGIMKYMNLDAYRFSISWSRVLPKGKLSAGVNHEGVNYYNNLINELMANGHNLLTQIS

SEQ ID NO: 54979 - protein, 41 aa, Glycine max
  Clone ID: UC-GMROPIC055C04_FLI.pep
GSLLPNGWITWTLSCVLKVTVVRKSQVHGGYRIHMIMCMTL

SEQ ID NO: 54980 - protein, 193 aa, Glycine max
  Clone ID: UC-GMROPIC055G12_FLI.pep
IHRDLKASNVLLDEKFNPKISDFGTAKAFGGDQIEGNTKRVVGTYGYMAPEYAVAGLFSIKSDVFSFGILLLEIVCGIKNKALCDGNQIHSLAWTLWKEKNALQLIDSSIKDSCVISEVLRCIHVSLLCLQQYPGDRPTMTSVIQMLGSEMELVEPKELSFFQSRILDEGKLSFNLNLMTSNDELTITSLNGR

SEQ ID NO: 54981 - protein, 77 aa, Glycine max
  Clone ID: UC-GMROPIC059B01_FLI.pep
TSSDTTKQVHYIIKVPSRYLFAHRLALKMEDSKATLTHTTSPVLACKLTLLDNVVLFWKVFTLEVPIKHVFDPSSIT

SEQ ID NO: 54982 - protein, 358 aa, Glycine max
  Clone ID: UC-GMROPIC059D01_FLI.pep
RDGNTLLSALTEQSFVLALDFALKYSQSQQTPSSSSSSSMAPKQTKAEKKIAYDAKLCDLTEEYGQILVVNSDNVGSNQLQNIRKGLRGDSVVLMGKNTMMKRSVRMHAEKTGNNAYLNLIPLLVGNVGLIFTKGDLKEVSEEVAKYKVGAPARVGLVAPIDVVVPLGNTGLDPSQTSFFQVLNIPTKINKGTVEIITPVELIKKGDKVGSSEAALLAKLGIRPFSYGLVVLSVYDNGSVFSPEVLDLTEDDLIEKFAAGVSMVTSLSLAISYPTLAAAPHMFVNAYKNVLAVAVETDYSFPEADKVKEYLKDPSKFAVAAVAAPAAESGAPAAAKEEEKKEEPAEESDDDMGFSLFD

SEQ ID NO: 54983 - protein, 276 aa, Glycine max
  Clone ID: UC-GMROPIC063E09_FLI.pep
GFLVSDFLTDELLLKYQEVAVKKFLDQDFSGAALSEFKREVRIMRRLRHPNIVLFMGAVTRPPNLSIISEYLPRGSLYRILHRPNCQIDEKRRIKMALDVARGMNCLHTSTPTIVHRDLKSPNLLVDKNWNVKVCDFGLSRLKHNTFLSSKSTAGTPEWMAPEVLRNEPSNEKCDVYSFGVILWELATLRLPWSGMNPMQVVGAVGFQNRRLDIPKEVDPIVARIIWECWQQDPNLRPSFAQLTVALKPLQRLVIPSYQDQLAPPMPQEISVNSTP

SEQ ID NO: 54984 - protein, 231 aa, Glycine max
  Clone ID: UC-GMROPIC063F07_FLI.pep
NMASLSSLVLLLAALILSPQVLANYENPPVYKPPTEKPPVYKPPVEKPPVYKPPVENPPIYKPPVEKPPVYKPPVEKPPVYKPPVEKPPVYKPPVEKPPVYKPPVEKPPVYKPPVEKPPVYKPPVEKPPVYKPPVEKPPVYKPPVEKPPVYKPPVEKPPVYKPPVEKPPVYKPPVEKPPVYKPPVEKPPVYKPPVEKPPIYKPPVEKPPVYKPPYGKPPYPKYPPTDDTHF

SEQ ID NO: 54985 - protein, 524 aa, Glycine max
  Clone ID: UC-GMROPIC064G01_FLI.pep
RNGGNVVDCNVVRWGNRIGMDRGREGLILDVVGTGGGCATMTGPVGVEVLSTGLVDSLVGVGTEVITLGLNEVGWQALGSETVEVGQSAGKSGNGNAIQEGGGNHCAPRALDRLDLSLEVRVEQQVWQARVVVVGLLNLAQESGANDATSSPHESDATVVKIPFELLGGRAHQKKALSIGNHLRGEESISDLSNEDFPISGEVGFGSRDHFAGLHSLILQRAQAASEDGLSNEGHRNAEVKSGGSSPLASSLLSSCIENEIHDVLASLFVLLAEDMRGDLNEVAVKVSLVPFGEDLSELVVRESKDAGKEVVGLSNQLHVSVLNSIVHHLDEMASTILSDPVAAGSAVFDLRGNGLEDGFDVLPSSGVSSGHDGRTGQSSLLSTADTSSDERDALLLQELGSAVGVGIVGVASIDDDVSSFKEGKQRVDLLVDRGASSDHQHDLARSLELAHQLLEGMSANDLLALGSCFQELVHHRGRAVEDRHSEPSALDVENKVLTHHRQSNQPNIRRHLCSFRNRSGSPD

SEQ ID NO: 54986 - protein, 466 aa, Glycine max
  Clone ID: UC-GMROPIC065C08_FLI.pep
ISKEEKYMLRRIGLMMKPFLLLGRRGVFDGTVENMHLHWKYRELVKIICNGSLEEVHQIALTLEAESGGILVAVERVRKGFAIIVYRGKNYSVPVCLRPQTLLNKRQALKRSIEAQRRESLKLRILTLDKEINELKLQIVEDEEANSKQMAEASRLDMATDEHEACSNFINWHSPKEASGDNQQAIQEEPVELIDSGGAHQGEPENSISWNSSIEASIDNQQAIQEHPVELIDGGATHQDEPESWPSLIHKETQSDEVSDSVTDTELHISNRKGMESSNSLSKNDREPLAPVIYMSLPSRSVHLSTKERLLLRKQALKIKQPVLAIGKSNIVSGVVQTIKAHFEKHPLAVVNVKGRAKGTSVQELVFKLEQETGALLVSREPSNIILYRGWPSERRSRPAMHVNKVRNEEGTEPSVSPAYAHRIRIRNRNRKIRISMIGKRRIDRTGSRPNFNFRRDSTPIFSTSS

SEQ ID NO: 54987 - protein, 257 aa, Glycine max
  Clone ID: UC-GMROPIC065C11_FLI.pep
LYLVLDFVNGGHLFFQLYHQGLFREDLARIYTAEIVCAVSHLHSNGIMHRDLKPENILLDADGHVMLTDFGLAKQFEESTRSNSMCGTLEYMAPEIILGKGHDKAADWWSVGILLFEMLTGKPPFCGGNRDKIQQKIVKDKIKLPAFLSSEAHSLLKGLLQKEPGRRLGCGPRGVEEIKSHKWFKPINWRKLEAREIQPSFRPEVAGVQCVANFEKRWTDMPVVDSPAASPNGGNPFKDFSYVRPAASFLQRNSPAY

SEQ ID NO: 54988 - protein, 195 aa, Glycine max
  Clone ID: UC-GMROPIC066B05_FLI.pep
FMSNGSLFDVLHGSMENSLDWASRYSIAVGVAQGLSFLHGFTSSPILLLDLSSKSIMLKSLKEPLVGDIEHYKVIDPSKSTGNFSAVAGSVGYIPPEYAYTMTVTMAGNVYSFGVILLELLTGKPAVTEGTELVKWVVRNSTNQDYILDFNVSRTSQAVRNQMLAILEIARVCVSTSPESRPKMKSVLRMLLNAR

SEQ ID NO: 54989 - protein, 146 aa, Glycine max
  Clone ID: UC-GMROPIC067C06_FLI.pep
LSQTSYSDNMKKVVLKVEIHDDKIKKKAMKAVSGILGVELVSADTKDKKLTIIGDIDPVKVVAKLRKQLCHADIVFVGPTKEEKKEEPKKDSAKEIVVTITYGKPRKLLAESRTMFFLRRFVALPKIVQVDYLPRSPQDKTAQITV

SEQ ID NO: 54990 - protein, 218 aa, Glycine max
  Clone ID: UC-GMROPIC068G01_FLI.pep
SEVEIRRKNSNCNSTSNGNSLPRPASLNAFDIISFSQGFDLSGLFEEKGDEARFVSSAPVSKIISKLEEVAQLVSFTVRKKDCRVSLEGCREGVKGPLTIAAEIFELTPSLVVVEVKKKGGDKAEYEKFCNSELKPALENLGMEDSASSSSSCHQSTHTQSEFQQQHRTFSDSALNRHSDNNECLYEQELGLAEETSIPQLGEPKFEFQQENVPMFTI

SEQ ID NO: 54991 - protein, 290 aa, Glycine max
  Clone ID: UC-GMROPIC070G01_FLI.pep
HVNLHNRSSFHLLLKPWKKNGSKKLSHNTVFLWNLSNARFESGLEPRSRFYLAIEVEHGLSLLIGDLSPRSSKAKKPSKTNQLLVLKRDNVHVAPHRSRVYQTKAKLGGKVREIEIDCDVYNCCGYGYENENSSRLLFSVDGEKVLEVARLKWKFRGSERVEIDGVHVQISWDVHDWLFEKDKDIVNHRSSNNNNSNNNGIEGHAVFMFKFEEDEVRGSGGGKEEEQQWSMGSGGEWRNGKSWSSSSLSVSSTSGGSFGGSSSVMEWSSVEENELVVPLGFSLVVYAWRR

SEQ ID NO: 54992 - protein, 245 aa, Glycine max
  Clone ID: UC-GMROPIC074B03_FLI.pep
RISSTVHTAMEEALVRILTPRRSIDILRDVHAAKEQRKPYVVVFVGVNGVGKSTNLAKVAYWLLQHNVSVMMAACDTFRSGAVEQLRTHARRLQIPIFEKGYEKDPAIVAKEAIQEAARNGSDVVLVDTAGRMQDNEPLMRALSKLVYLNNPDLILFVGEALVGNDAVDQLSKFNQKLADLSTSPTPRLIDGILLTKFDTIDDKVGAALSMVYVSGAPVMFVGCGQSYTDLKKLNVKSIAKTLLK

SEQ ID NO: 54993 - protein, 232 aa, Glycine max
  Clone ID: UC-GMROPIC074E10_FLI.pep
RNMASLSSLVLLLAALILSPQVLANYENPPVYKPPTEKPPVYKPPVEKPPVYKPPVENPPIYKPPVEKPPVYKPPVEKPPVYKPPVEKPPVYKPPVEKPPVYKPPVEKPPVYKPPVEKPPVYKPPVEKPPVYKPPVEKPPVYKPPVEKPPVYKPPVEKPPVYKPPVEKPPVYKPPVEKPPVYKPPVEKPPVYKPPVEKPPIYKPPVEKPPVYKPPYGKPPYPKYPPTDDTHF

SEQ ID NO: 54994 - protein, 383 aa, Glycine max
  Clone ID: UC-GMROPIC074H10_FLI.pep
STPKFSEELKFASCMRKFTFNGLKVATRNFRPESLLGEGGFGCVFKGWIEENGTAPVKPGTGLTVAVKTLNHNGHQGHKEWLAELNYLGDLVHPNLVKLIGFCIEDDQRLLVYEFMPRGSLENHLFRRPLPLPWSIRMKIALGAAKGLAFLHEEAQRPIIYRDFKTSNILLDAEYNAKLSDFGLAKDGPEGEKTHVSTRVMGTYGYAAPEYVMTGHLTSKSDVYSFGVVLLEMLTGRRSIDKKRPNGEHNLVEWARPVLGDRRMFYRIIDPRLEGHFSVKGAQKAALLAAQCLSRDPKSRPLMSEVVRALKPLPSLKDMAISSYHFQIARVDRTMSMPNHKNGIRTQLVSVPRKGQPVRTLSSPNVPHGSPYLHHTKSPKPIG

SEQ ID NO: 54995 - protein, 254 aa, Glycine max
  Clone ID: UC-GMROPIC080D11_FLI.pep
LTLGYMIPLVLNFEALIAQNPNNKNFVFGNVVWLEVNEIAVRLITMVAFLLQFRLLQLTWSSRKSDESNKGLWIAERKATCVTLALYAAGLLIALLLKLKKDGDAVPVITPLNQHHSSWENIKSYGGLVLDGFLLPQIILNLFSNMRGNVLSCSFYFGTTFVRLLPHAYDLYRTHNYARVDSGSYFYADPSADFYSTAWDIVIPLGGVLLAIIIYLQQRFGAHCILPQRFKGSKVYEKVPVVAESEAEVETANL

SEQ ID NO: 54996 - protein, 539 aa, Glycine max
  Clone ID: UC-GMROPIC089B11_FLI.pep
KEKEKRVIMAGGGAPAKADEPQPHPPKDQLPNISYCITSPPPWPEAILLGFQHFLVMLGTTVLIPTALVPQMGGGNNEKARVIETLLFVAGINTLLQTMFGTRLPAVIGGSYTFVPTTISIILAGRFSDEPDPIEKFKRIMRSIQGALIVASTLQIVLGFSGLWRNVARFLSPLSSVPLVSLVGFGLYELGFPGVAKCVEIGLPQLILLVFVSQYVPHVLHSGKHIFDRFAVLFTIVIVWIYAHLLTVGGAYNDAPHKTQISCRTDRAGLIDAAPWIRIPYPFQWGAPSFDAGEAFAMMMASFVSLVESSGAFIAVYRYASATPLPPSILSRGISWQGVGILLSGLFGTVNGSSVSVENAGLLALTRVGSRRVVQISAGFMIFFSILGKFGAVFASIPPPIIAALYCLFFAYVGAGGLSFLQFCNLNSFRTKFILGFSIFIGLSVPQYFNEYTAINGYGPVHTGARWFNDIINVPFQSKPFVAGVVAYFLDNTLFKRAADIRKDRGKHWWDKYKSFKGDTRSEEFYSLPFNLNKYFPSV

SEQ ID NO: 54997 - protein, 372 aa, Glycine max; identical to SEQ ID NO: 44621
  Clone ID: UC-GMROPIC089F01_FLI.pep

SEQ ID NO: 54998 - protein, 409 aa, Glycine max
  Clone ID: UC-GMROPIC089G06_FLI.pep
LSRYLLPLEWLHHFPCEVRVISAKVSICSSLQEPAISTPLEIKVDGDHARPEVKTLLHNAEDFLVRDLPSAISVNKHRQGLRHTNGIGNLHNCPPSKSICNNALCSLPHNVGTTPINLGRILPREGTTTMCTPSSIGVDDDLAAGETSIAMRPSNDKPARRVQMENGLLIKVLLRNHRLNHVFFKISCNLIICDSLIMLCGDEHSVDADWNHGTLVIVVLNSDLGLAIRSQPRACPVLPNLGELGTELRGKDMAQGHELGSLVSGIAEHMTLVTSTNLLRPLCEVAVHTLSNIRTLLLNVDEDLAVVSIKTNIIRDKTNVPACVTHNLLIVHVGLGCDLSENHHHVGLGAGFTGNLAVRVLLQACIEHSIGDLAQETFLFTSESVNEGHPDKLCDQISDAVLDAVLQAC

SEQ ID NO: 54999 - protein, 606 aa, Glycine max
  Clone ID: UC-GMROPIC090B01_FLI.pep
KTHYFPLFSFFFFFFLISINAKLDLYPSETEGVLCERRRLSGKETYALRITRLVFKSNNLNGVLSPSIGRLTELKELSLSDNQLVDRVPPQIVDCRKLEILDLANNIFSGEVPSELSSLTRLRVLDLSTNRLSGNLNFLKYFPNLETLSVADNLFTGRVPPSVRSFRNLRHFNFSGNRFLDPSLQSSSPDTILSRRFLSEDGDGDVPAPAPAPNNSQKKKSNASTHAAAAASGPAPNHTNKHKHSKRKLLGWILGFVAGALGGTLSGFVFSLMFKLALALIKGRGRKAGPDIYSPLIKKAEDLAFLEKEEGIASLEIIGRGGCGEVYKAELPGSNGKMIAIKKIVQPPKDGAELAEEDSKVLNKKMRQIRSEINTVGQIRHRNLLPLLAHVSRPECHYLVYEFMKNGSLQDTLSKVERGESELDWLSRHKISLGVAAGLEYLHMNHNPRIIHRDLKPANILLDDDMEARIADFGLAKAMPDYKTHITTSNVAGTVGYIAPEYHQILKFTDKCDIYSYGVILGVLVIGKLPSDDFFQHTEEMSLVKWMRKTLSSENPKEAINSKLLGNGYEEQMLLVLKIACFCTMDDPKERPNSKDVRCMLSQIKH

SEQ ID NO: 55000 - protein, 275 aa, Glycine max
  Clone ID: UC-GMROPIC094G01_FLI.pep
LHLGHGMHPPISPKPEWRALMDEMAVIATEEYRSIVFKEPRFVEYFRLATPELEYGRMNIGSRPAKRRPSGGIETLRAIPWIFAWTQTRFHLPVWLGFGAAFKHVIEKDVRNIHVLQEMYNQWPFFRVTIDLVEMVFAKGDPGIAALYDRLLVSEDLWSFGEQLRTMYEETKELLLQVAGHRDLLEGDPYLKQRLRLRDSYITTLNVCQAYTLKRIRDPNYNVKLRPHISKESIEISKPADELITLNPTSEYAPGLEDTLILTMKGIAAGLQNTG

SEQ ID NO: 55001 - protein, 137 aa, Glycine max
  Clone ID: UC-GMROPIC097D08_FLI.pep
VYISIIFFIHMKTTSKILLLKPYIPYTDDMSRLLHLHYLHFLFFLHAISGNYTLKRAIYSQTLLMMNLSMLSLTSSICIDCSVKQMDITPIFLSTWKIFRMCVANSLVSFQCWDELIDKHVAEDRVVLFTFFANPPM

SEQ ID NO: 55002 - protein, 166 aa, Glycine max
  Clone ID: UC-GMROPIC097E06_FLI.pep
TADFHTYSILWNPQRIILSYINQSMVVHMYVCFSFSVDGTPIREFKNMESKGVAFPKEQPMRIYSSLWNADDWATRGGLVKTDWTQAPFTASYRNFNANACVHSGSSSSSSSCTANSSSSNAWFSQQLDSTSQDRLSWVQKNYMIYNYCTDTKRFPQGLPPECQTS

SEQ ID NO: 55003 - protein, 195 aa, Glycine max
  Clone ID: UC-GMROPIC098B02_FLI.pep
IVFLPSLAPLPLLSSSLFLPLTMARMPLEPLIVGRVIGEVLDSFTTSTKMIVSYNKNQVYNGHELFPSTVNTKPKVEIEGGDMRSFFTLIMTDPDVPGPSDPYLREHLHWIVTDIPGTTDATFGKELVSYEIPKPNIGIHRFVFVLFKQKRRQCVTPPTSRDHFNTRKFAAENDLALPVAAVYFNAQRETAARRR

SEQ ID NO: 55004 - protein, 376 aa, Glycine max
  Clone ID: UC-GMROPIC099C04_FLI.pep
FGDGGGGKVMAFCPIFCCGNSSDRKGRGKKQPPWRVFSLKELHSATNNFNYDNKLGEGGFGSVYWGQLWDGSQIAVKRLKVWSNKADMEFAVEVEILARVRHKNLLSLRGYCAEGQERLIVYDYMPNLSLLSHLHGQHSAESLLDWNRRMNIAIGSAEGIGYLHNQSMPHIIHRDIKASNVLLDSDFQAQVADFGFAKLIPDGATHVTTRVKGTLGYLAPEYAMLGKANESCDVYSFGILLLELASGKKPLEKLSSAVKRSINDWALPLACEKKFSELADPKLEGNYAEEELKRVVLTALLCVQSQPEKRPTILEVVELLKGESKDKLAQLENNELFKNPPAVGHTDDGTVAAEGSSDFISEDKESKPELEENTEP

SEQ ID NO: 55005 - protein, 306 aa, Glycine max
  Clone ID: UC-GMROPIC100A06_FLI.pep
NLFFLLSYVNSSLSMMALDMIDVVPRTRMEEENIAIQEAASAGLKSMEHLIRLLSPSSSLHNNVNNLNLNHLDCSEITGFTVSKFKQVINLLNRTGHARFRRSPPQAQAQAQAQTNPQPQPQIQQQGFSLDFVKPTILNSKPINKDETLTLSTTSSSFMSSVTNDASVSDGKIGPFLPPSAAKPPLSSAHRKKCRDAAAALSAKPSCHCSKKRKSRVKRTIRVPAISSKIADIPPDEYSWRKYGQKPIKGSPYPRGYYKCSTVRGCPARKHVERAQDDPKMLIVTYEGEHRHVLPLTSAAGVSFGH

SEQ ID NO: 55006 - protein, 137 aa, Glycine max
  Clone ID: UC-GMROPIC100C10_FLI.pep
LLVTERVASAINYGDHGSTFAGSPLVCSAALAVLDKISKPDFLSSVSKKGLYFKELLREKLGENRHVKEIRGVGLIIGIDLDVPASPLVDACRSSGLLVLTAGKGNVVRLVPPLIITEKELEQAAGILCQTLPVLDN

SEQ ID NO: 55007 - protein, 96 aa, Glycine max
  Clone ID: UC-GMROPIC100E08_FLI.pep
KEAGYVPETKFVLHDIDQEGKEEALLAHSERLAIAYGLLNSPARAPMRVIKNLRVCGDCHTALKIISKLVGRELIIRDAKRFHHFNDGLCSCRDYW

SEQ ID NO: 55008 - protein, 231 aa, Glycine max
  Clone ID: UC-GMROPIC100F11_FLI.pep
EITKAKLAFEGMTERETASWNALINGFAVNGCAKEALEVFARMIEEGFGPNEVTMIGVLSACNHCGLVEEGRRWFNAMERFGIAPQVEHYGCMVDLLGRAGCLDEAENLIQTMPYDANGIILSSFLFACGYFNDVLRAERVLKEVVKMDEDVAGNYVMLRNLYATRQRWTDVEDVKQMMKKRGTSKEVACSVIEIGGSFIEFAAGDYLHSHLEVIQLTLGQLSKHMKVEII

SEQ ID NO: 55009 - protein, 231 aa, Glycine max
  Clone ID: UC-GMROPIC101F01_FLI.pep
KRYEIIIGTAEGLVYLHENSKTRIIHRDIKASNILLDAKLRAKIADFGLARSFQEDKSHISTAIAGTLGYMAPEYLAHGQLTEKADVYSFGVLLLEIVTARQNNRSKASEYSDSLVTVAWKHFQAGTAEQLFDPNLDLQEDHNSNVNVKDEILRVVHIGLLCTQEVSSLRPSMSKALQMLTKKEEDLVAPSNPPFLDESTMELHDTSGDPFYPLTAPDSIATMSHSSFYPR

SEQ ID NO: 55010 - protein, 564 aa, Glycine max
  Clone ID: UC-GMROPIC102G11_FLI.pep
RRNKMDSWVRMLFLIACIVPALVECKVRHYKFNVVLKNTTRLCSSKPIVTVNGKFPGPTLYAREDDTVLVKVNNLVNHNVTIHWHGVRQLRTGWADGPAYITQCPILSGQSYLYNFTLTGQRGTLLWHAHVNWLRSTLHGAIVILPKRGVPYPFPKPDKELVVILGEWWKSDTEDVINEALKSGLAPNVSDAHTINGLPGIVSVANCSTQDVYKLPVESGKTYLLRIINAALNEELFFKIAGHPFTVVEVDASYVKPFKTDTLSIAPGQTTNALLTADQNSGKYTIVASTFMDSPVVAVDNLTATATLHYTGTLATTPTLLTTPPPRNATQVANNFTNSLKSLNSKKYPAKVPQKVDHSLLLTVGLGINPCPSCTAGNGSRVVAAVNNVTFVMPTTALLQAHYFNIKGVFTTDFPGNPSHVYNYTATPPAAAWQTTNGTKAYRLAFNSTVQVVLQDTGVIAPESHPVHLHGFNFFVVGSGVGNYDPKTDQNNFNLADPVERNTIGVPTGGWVAFRFRADNPGVWFLHCHFEVHTTWGLKMAFLVDNGKGPNESLLPPPKDLPKC

SEQ ID NO: 55011 - protein, 306 aa, Glycine max
  Clone ID: UC-GMROPIC103A03_FLI.pep
ENIGYVIPTPVILHFIRDYEKNGAYTGFPILGVEWQKMENPDLRMSMGMGPDQKGVRIRRIEPTAPESHVLKPSDVILSFDGVNISNDGTVIIHYIAATFDLVRENIQGGGPIRHGERIGFSYLVSQKYTGDRALVKVFRNLQILEFNVKLATHKRLVPAHIKGRPPSYYIIAGFVFTAVSVPYLRSEYGKDYEFDAPVKLLEKHLHSMAQSVDEQLVVVSQVLVSDINIGYEEIVNTQVLAFNDKPVKNLKSLANMVESCDDDYLKFDLEYQQKVVLKTSTAKAATLDILTTHCIPSAMSDDLKT

SEQ ID NO: 55012 - protein, 256 aa, Glycine max
  Clone ID: UC-GMROPIC103B01_FLI.pep
FCDSADAIPQLLKPICGSDSFGSVHPDLQEDVITTLLNISIHDNNKKLVAETPMVIPLLMRALRSGTIETRSNAAAALFTLSALDSNKELIGKSGVLKPLIDLLEEGHPLAMKDVASAIFNICVMHENKARAEKDGAVRVILAKINKQIHVAELLAILALLSSHQRAVHDMGDLGAVPSLLRIIRESSCERNKENCVAILQTICLYDRSKLKEIREEENSHKTISELAKHGTSRAKRKASGILERLNRAVNITHTA

SEQ ID NO: 55013 - protein, 374 aa, Glycine max
  Clone ID: UC-GMROPIC103C05_FLI.pep
SLIILVSNIKGDYTGDNVTTENLFAVILGDKSKLKGGSGKVINSKPEDRIFIYYSDHGGPGILGMPNMPYLYAMDFIDVLKKKHASGSYKEMVIYVEACESGSVFEGIMPKDLNIYVTTASNAQENSWGTYCPGMDPSPPPEYITCLGDLYSVAWMEDSEAHNLKRESVKQQYKSVKQRTSNFNNYAMGSHVMQYGDTNITAEKLYLYQGFDPATVNFPPQNGRLETKMEVVNQRDAELLFMWQMYQRSNHQSENKTDILKQIAETVKHRKHIDGSVELIGVLLYGPGKGSSVLQSVRAPGSSLVDDWTCLKSMVRVFETHCGTLTQYGMKHMRAFANICNSGVSEASMEEACLAACEGYNAGLFHPSNRGYSA

SEQ ID NO: 55014 - protein, 320 aa, Glycine max
  Clone ID: UC-GMROPIC103D01_FLI.pep
EIAVATPGRFIDHLQQGNTSLSRISFVVLDEADRMLDMGFEPQIREVMRNLPEKHQTLLFSATMPVEIEELSKEYLANPVQVKVGKVSSPTTNVSQTLVKISENEKIDRLLDLLVEEASQAEKCGHPCPLTIVFVERKTRCDEVAEALVAQGLSAVSLHGGRSQSEREAALHDFRSGSTNILVATDVASRGLDVTGVSHVINLDLPKTMEDYVHRIGRTGRAGSTGLATSFYTDRDMFLVANIRKAIADAESGNTLTFATGKVARRKEKEAAAAQKEANIALSKQLGLGAASMNIEDKYKFMITATNTKKEGAADSAWDD

SEQ ID NO: 55015 - protein, 231 aa, Glycine max; identical to SEQ ID NO: 54984
  Clone ID: UC-GMROPIC103E01_FLI.pep

SEQ ID NO: 55016 - protein, 270 aa, Glycine max
  Clone ID: UC-GMROPIC105D04_FLI.pep
YMTNFRVAWGQVEQLHKIFKLCGSPSEEYWRKYRLPNATIFKPQQPYKRCILETYKDFPPSSLPLIETLLAIDPEDRGTASATLNSEFFTTEPYACEPSSLPKYPPSKELDVKLRDEEARRQKALNGKASAVDGAKKVRVRERERGRAVPAPEANAEIQTNLDRWRVVTHANAKSKSEKFPPPHQDGAVGYPQDASNKGPVSFGAPDTSFSSGIFNSKPSGHVRNHAAAGLHRGRKTKKDESQMASSWKFMRPFKPSTAGLSMDLLFRSK

SEQ ID NO: 55017 - protein, 320 aa, Glycine max
  Clone ID: UC-GMROPIC105H11_FLI.pep
LTTCSSSFRKTQVELISIMAALMDFYSSSPEFQLHSDPFRGELMEVLEPFMKSPSPNYFPSSPSLPNLYSNGLSSNTQSLIGFGQAQPTSLVGLNHLTPSQISQIQAQIQIQAQQHQNHSNTLSFLGPKPIPMKHAGMPPKPTKLYRGVRQRHWGKWVAEIRLPKNRTRLWLGTFDTAEEAALAYDKAAYKLRGDFARLNFPNLRHQGSSVGGDFGEYKPLHSAVDAKLQAICEGLAELQKQGKTEKPPRKSRSKLAEKVVSDKENNNSCKVEAASWSSEGSSPLSDLTFADVSEAQWEGDSDNYNLQKYPSYEIDWDSL

SEQ ID NO: 55018 - protein, 188 aa, Glycine max
  Clone ID: UC-GMROPIC106A04_FLI.pep
YYDCYNMKLNFVIILPLCLTILLLMFFSALLIYNKIYNSVLCQSIKQVAALKSQLQLMSHAMYSSIPFQGISLVTMILSEPDTEALWRKEIKVMAKRIQTMRTTLRHCLENLHSSFNWEHITDQVGMFCFSGLTPDQVQQMEKLFHIYMTPDGRMSMSGVTSSNVDYLANAIHQVTRIDEEALRSCYV

SEQ ID NO: 55019 - protein, 251 aa, Glycine max
  Clone ID: UC-GMROPIC106C06_FLI.pep
TIGNGPSLGWVFMADFLTALAKKVKTNTAAVENYRRIYVPPGIPLRREKDEPLRVNVLFKHIQELLSGDTAVIAETGDSWFNCQKLHLPENCGYEFQMQYGSIGWSVGATLGYAQAATDKRVIACIGDGSFQVTAQDISTMIRCGQKTIIFLINNGGYTIEVEIHDGPYNVIKNWDYTRFVDAIHNGQGKCWTAKVRTEDDLTEAIAKATGPQKDSLCFIEVFVHKDDTSKELLEWGSRVAAANSRPPNPQ

SEQ ID NO: 55020 - protein, 282 aa, Glycine max
  Clone ID: UC-GMROPIC107F03_FLI.pep
LTSQSRRLLLLVLEARKTMARMLGNNEVAFESAKSQFWVVDAQGLITEGRENIDPDALPFARNLKEMDRQGLREGASLVEVVKQVKPDVLLGLSAVGGLFSKEVLEALKGSTSTRPAIFAMSNPTKNAECTAEEAFSILGDNIIFASGSPFSNVDLGNGHIGHCNQGNNMYLFPGIGLGTLLSGARIVSDGMLQAAAERLATYMSEEEVLKGIIFPSTSRIRDITKQVATAVIKEAVEEDLAEGYHGMDARELQKLSEDEIAEYVQNNMWSPEYPTLVYKKE

SEQ ID NO: 55021 - protein, 306 aa, Glycine max
  Clone ID: UC-GMROPIC108B04_FLI.pep
SRKDVEGSLFVVKRNSQPRFQFIVMNRRNTDNLVENLLDFEYELKKPYLLYRNAAQEVNGIWFYNPDECEEVANLFNRILNAYPKTAPTTVLPVNISESEELQPVSIMPESPLESSSATASAIDAVEDPANTNFLSTLKVTGNYASNMENFRQHSATVTSAPSGLFSTAPAVQIPSASHSTSSISGFPLDSLETAKSGNQIINLVKPSTFFASTSSSSLLVPPISSSVQPSAAVQHSLNLPRQYGTPVLQPFPPPNPPLSLTPISSSTPNRPVFSRDNVRDALLSLVQEDQFIDMMFQALLKVSHS

SEQ ID NO: 55022 - protein, 171 aa, Glycine max
  Clone ID: UC-GMROPIC108E09_FLI.pep
NYALFEPTKGIYDPMYHLHYDNMLDAQIDAAYAALEDAGFDKMEVIVTETGWASNGDQSEAGANATNARTYNYNLRKRLAKRKGTPHRPKNVVKAYIFALFNENEKPGHSSEKNYGLFKADGSISYDIGFHGLNAGHSSLLSLKNINTQGLSQSYMMVFFLSSLIPLIFWS

SEQ ID NO: 55023 - protein, 203 aa, Glycine max
  Clone ID: UC-GMROPIC110B02_FLI.pep
KKKKKQTNKQKGVQTMGDAIDLSGDGGVIKTIVRKSKADAVGPTENFPLVDVHYEGTLADTGEVFDTTHEDNTIFSFEIGKGSVIKAWEIAVKTMKVGEVAKITCKPEYAYGSAGSPPDIPPDAQLVFEVELVACRPRKGSSLGSVSEERARLDELKKQRELAAAAKEEEKKKREEAKAVAAARVQAKLEAKKGQGKGKGKAK

SEQ ID NO: 55024 - protein, 299 aa, Glycine max
  Clone ID: UC-GMROPIC110D12_FLI.pep
RRMGIHGHPLEIQALFYSALLCAREMLTPEDGSADLIRALNNRLVALSFHIREYYWIDMKKLNEIYRYKTEEYSYDAVNKFNIYPDQISPWLVEWMPNKGGYLIGNLQPAHMDFRFFSLGNLWSVVNSLATEEQSHAILDLIEAKWSDLVAEMPFKICYPALDGQEWQIITGSDPKNTPWSYHNAGSWPTLLWQLTVACIKMKRTHIAAKAVEIAERRILRDRWPEYYDTKRSRFVGKQSRLYQTWSIAGYLVAKLLLADPSKANTLITEEDSELVNALISANPRGKRGRKNLRQTYIV

SEQ ID NO: 55025 - protein, 273 aa, Glycine max
  Clone ID: UC-GMROPIC111D08_FLI.pep
EWLSMNTHLLHYPKPASFSRNECVHNPVLFFAILSNQRSGSGWFETLLNSHINVSSNGEIFSVRERRQNVSSILHTLDKVYNLDWFNSASKNECSAATGLKWMLNQGLMEHHKEIAEYFNRRRVSIIFLFRRNLLRRMVSMLANSYDRYAKLLNGTHKAHVHSAEEAEILSKYKPIINSTSLLDDLQDMEMRSAKALEYFYSTRHMIVYYGDLMRNHTKLKDVQDFLGLPQMELTSRHVKIHRGPLSDHIQNWDDVNKTLKGTIYESFLEADY

SEQ ID NO: 55026 - protein, 495 aa, Glycine max
  Clone ID: UC-GMROPIC111G03_FLI.pep
SPIFNMTKISPEVEIRMPMEAFPPVSADVSFISNSFPKYKLDADNQVLEEPVEDNQGPSLKDVIEQEASNLSDQHKRISVRDLASKFDKNLAAAAKLSNEAKLRDVASLEGHVLLKKLRDALESLRGRFAGRNKEDVEKAISMVEALAVKLTQNEGELIQEKFEVKKLVNFLKQASEDAKNLVNQEKSFACAEIESARAVVLRIGEALEEQEKASQASKPQDVDGLVEEVQESRRIKLLHHPSKVMAMEYELRALRDQIREKSIFSIKLQKELIMSKRNEENKSCLYMLDGSEALGSYLRVQPCSDEVPQVSKCSFQWYRLSSEGSWREVISGANKSIYAPDPSDVGRILQVDIVSNGKKLTLTTNPIQTVSGLGSHVETLLRKSNTDFNVVISQMNGKDHSSHSTHSFNVGRMRIKLCRGWITKAREIYSPSMQLCGVRSDVVNAAKVLFWQARKGLSFVLTFESERDRNSAIMVARKYALDCNVVLAGPDDLV

SEQ ID NO: 55027 - protein, 154 aa, Glycine max
  Clone ID: UC-GMROPIC112G08_FLI.pep
VELIFPHFVKFNSKGFHFPFQCLPIRTKAPPSTAMPPLIDPERGLALDPLHPPMKSNCTSIPASTSTTKSPVFVAKLKKLKNVAEEIGSEVKFQRDFLEQVQMVMIQAQAGVKNNLRRLNKSIVKNGSNNIVHVIAFALVCFFIVYFWSKMSRK

SEQ ID NO: 55028 - protein, 400 aa, Glycine max
  Clone ID: UC-GMROPIC114E02_FLI.pep
SYASNEIKLHLEVEINGVDQSRLSECSGESNALVKGIQIDTKQNCCQYDVEVEDSINKKDCGNVGEDIQQHQDIGLDAYTESVYGILDLNSVQKMFLKGMSSFGSTDSDIAEIYQCSGASMQARWELFQKQAELTKKNHGEANIRYAWLASSKGELSTMMNYGLSHYGLSGSKCTYGIGVHLAAVTCPDASVRYCDVDENGVRHLALCRVIMGNMEILQPGTGQFHPSSCEYDNGVDSIECPRYYVVWNMNMNTHIYPEFVVSFKVSSDAEGHFCGSEGKNVSGVNSACQGPHGLLHSESSTVDNGKAPSMVASTPKVPKSPWMPFPLLLDAIRNQVPPKGMDVIKIYYEQFRSKHISRDDFVKMLRLIVGDGLLRTTITNLQFKIPSGGELKGSIKKEV

SEQ ID NO: 55029 - protein, 270 aa, Glycine max
  Clone ID: UC-GMROPIC115B02_FLI.pep
ITVGKDHFVALGRTAWDFMRTEGGSDFGANIFLNLPPVLNMSVLTVERQPWRGHNQFAIPYPSYFHPKTLAQTLTWQSHLRRRARPHLFSFVGGTRPGLQKAKVRDHIVSQCQASKRCVLVRCASGDSKCHNPMSVLEVMEKSTFCLQAPGDSFTRRSTFDSVLAGCIPVFFSEHTAYTQYKWYFPRERDTYSVFIDEREVIEGKEKMMIEEVLLGFGEKEVERMREVLIGLIPTLTYAHPNATAAFQDVVDVMLRRLSRRVTHHFNPII

SEQ ID NO: 55030 - protein, 94 aa, Glycine max
  Clone ID: UC-GMROPIC116A03_FLI.pep
PYCVILVHNTRPQGLEVYVCTLCASHIHQKSCTATTNTPKSSTGGTNAHKIRTNPKFNMRPMGSNILLLKGLDVEIQVIPMKNRLFSSDSSFVS

SEQ ID NO: 55031 - protein, 103 aa, Glycine max
  Clone ID: UC-GMROPIC120H12_FLI.pep
CDSFFFVVIFFFCCLCVCFFSHLKMSCCGGNCGCGSACKCGNGCGGCKMYPDLSYTESTTTETLVMGVAPVKAQFESAEMGVPAENDGCKCGANCTCNPCTCK

SEQ ID NO: 55032 - protein, 186 aa, Glycine max
  Clone ID: 701039520_FLI.pep
LRTYDLQFYKYKYPSPSLKTQTSSLLPSLINNMQIFVKTLTGKTITLEVESSDTIDNVKAKIQDKEGIPPDQQRLIFAGKQLEDGRTLADYNIQKESTLHLVLRLRGGTMIKVKTLTGKEIEIDIEPTDTIDRIKERVEEKEGIPPVQQRLIYAGKQLADDKTAKEYNIEGGSVLHLVLALRGGTY

SEQ ID NO: 55033 - protein, 94 aa, Zea mays
  Clone ID: 700579256_FLI.pep
RNTLSSSGCDSTSNRITASTEPSSNVYRGVPETARAEGLRHLSQREAALNKFRLKRKDRCFEKKVRYQSRKLLAEQRPRVKGQFVRQDHSIQGS

SEQ ID NO: 55034 - protein, 176 aa, Glycine max
  Clone ID: UC-GMFLMINSOY024E07_FLI.pep
VGLLGMGRTLQRDLNRIAAVADTSPSEGLHYVLTETTLALLRHPDYCISAYSSVDIKQGIEDGEKRFNQLSIEERGKFDEETLVNANNIKRQSTRSQRANGFSNEYIVITILAAAEGDHKLPSINGSGDLKQALQKLGSIPSSRLLAVEVLWTPQNENDTLSERELLEDYPLLRPL

SEQ ID NO: 55035 - protein, 479 aa, Glycine max
  Clone ID: 701101394_FLI.pep
VVLVQIANPARGRGKDVKEVQAETKATVKRINETFGKPGYDPVILIEEPLKFYERVAYYVVAECCLVTAVRDGMNLIPYEYIISRQGNETLDKVLGLASSPKKKSMLVVSEFIGCSPSLSGAIRVNPWNIDAVADAMDSALEMADLEKELRHEKHYRYVSTHDVGYWARSFLQDLERTCSDHVRRRWWGIGFGLSFRVVALDPNFKKLSMEHIISAYKRTATRAILLDYDGTLMPQSSTIDKSPSSKSIEILSSLCRDKNNMVFLVSARSRKMLSEWFCPCENLGVAAEHGYFLRMKRDEEWETHVAATDTSWKQIAEPVMKLYTETTDGSTIEDKETALVWCYEDADPDFGSCQAKELLDHLESVLANEPVTVKSGQSNVEVKPQGVSKGLVATRLLSAMEEKGMCPDFVLCIGDDRSDEDMFEVITSSMGSPIAAKAEVFACTVCRKPSKAKYYLDDTTEIVRLLQGLACVSEQIDK

SEQ ID NO: 55036 - protein, 83 aa, Glycine max
  Clone ID: 701108407_FLI.pep
IMKYQRKGQVFFLRGFFFGFGGLNATFIAASKTVFTFCKQNKERILTISSMYFTSQFGFRDHRFLTCMIKWNTEKQKCNLYAP

SEQ ID NO: 55037 - protein, 109 aa, Glycine max
  Clone ID: 701099788_FLI.pep
VENMAETSKNGASTGCAQELLGGEEEEERSVASVENQLRKEMTVYEKFILGMLTNFGSMALDRIHNTLKMFCIADPPYDKSLQQLQSFLSGLVSEEKLELRDGMYFLKK

SEQ ID NO: 55038 - protein, 200 aa, Glycine max
  Clone ID: 701100375_FLI.pep
IMVGIERKLNLASYNCRLFCGIDDIYCLFLGSLNNLSLLNKQYGLSKSTDEAMFVIEAYKTLRDRGPYPADQVVKELDGSFAFVVYDSKVGSVFAALGSDGGVKLYWGIAADGSVVISDDLEVIKEGCAKSFAPFPTGCMFHSEGGLMSFEHPMNKLKAMPRVDSEGAMCGANFKVDKFARVNSIPRVGSQSNWMEWDQH

SEQ ID NO: 55039 - protein, 90 aa, Glycine max
  Clone ID: 701064260_FLI.pep
PDARIQTGWGRWKTNLSPILDEANFLGIASEALPATHKPIFPDQSMRIPTHTASARTRSVVLRVRIPHIGVPHASELQILKRKNPVTLAS

SEQ ID NO: 55040 - protein, 260 aa, Glycine max; identical to SEQ ID NO: 51494
  Clone ID: 701064353_FLI.pep

SEQ ID NO: 55041 - protein, 59 aa, Glycine max; identical to SEQ ID NO: 44171
  Clone ID: 701067910_FLI.pep

SEQ ID NO: 55042 - protein, 129 aa, Glycine max
  Clone ID: 701068116_FLI.pep
IPSKQKATMPTLTNFYSIKDLSQHTTKDDCWILVDGKVYDVTQYLDDHPGGDDVILAATGKDATEEFEDAGHSKSAREHMEQYCIGELDTSSPISTKEKFIQLTKQYWVVPATVVGISVVVAFLYLRKK

SEQ ID NO: 55043 - protein, 98 aa, Glycine max
  Clone ID: 701117612_FLI.pep
FVVIFFFCCLCVCFFSHLKMSCCGGNCGCGSACKCGNGCGGCKMYPDLSYTESTTTETLVMGVAPVKAQFESAEMGVPAENDGCKCGANCTCNPCTCK

SEQ ID NO: 55044 - protein, 226 aa, Glycine max
  Clone ID: 701117952_FLI.pep
GTTATFVLVDGWTVTVASVGDSRCISDTQGGVVSLLTVDHRLEENAEERERVTASGGEVGRLNVFGGNEVGPLRCWPGGLCLSRSIGDTDVGEFIVPIPHVKQVKLSNVGGRLIIASDGIWDALSSDMAAKSCRGLPAELAAKLVVKEALRSRGLKDDTTCLVVDIIPSDLPVLPPIPRKKHNMLTSLLFFGKKSENSVNKATNKLSAVGVVEELFEEGSAMLTER

SEQ ID NO: 55045 - protein, 221 aa, Glycine max
  Clone ID: JC-GMFL02220062A10_FLI.pep
RGGSGVYQGNSSWVRASSSTWNCALRPQVQNVLLGSSGNIKLADFGCAKRVKEDSANCGGTPLWMAPEVLRNESVDFAADIWSLGCTVIEMATGTPPWAHQLSNPITAVLMIAHGDGIPHFPPHFSKEGFDFLSRCFQRQPNKRSTVQDLLTHPFVSTPSSQQQYAPSSSPSTVKETSKENRSSITNTFASHHDDPKGIPVCKPQDIALGSSGNWITVRSG

SEQ ID NO: 55046 - protein, 212 aa, Glycine max
  Clone ID: JC-GMFL02220073F02_FLI.pep
GPDGHQAVAARVQADRAVFANCRFEGYQDTLYTQAHRQFYRSCIVTGTIDFIFGDAAVVFQNCIMVVRKPLENQQNMVTAQGRVDKQQVTGIVLQKCTIKADDSLVPEKDKIRSYLGRPWKEFSRTIVMESEIGDFIHPDGWTAWEGDFALKTLYYAEYGNTGPGASTNARIKWPGYQVINKDEASQFTVGSFLRGTWLQNTGVPATQGLYN

SEQ ID NO: 55047 - protein, 361 aa, Glycine max
  Clone ID: JC-GMFL02220076G04_FLI.pep
LLLILLTSGLGTLSVNGLNLVPKPLVDFANKPMILHQIEALKAIGVNEVVLAINYQPEVMLNFLKEFETKLGIKITCSQETEPLGTAGPLALARDKLISDSGEPFFVLNSDVISEYPLKEMIQFHKTHGGEATIMVTKVDEPSKYGVVVMEETTGQVERFVEKPKLFVGNKINAGIYLLNPSVLDRIELRPTSIEKEVFPKIAADKKLYAMVLPGFWMDIGQPKDYISGLTLYLDSLRKKSPSKLASGPHFVGNVIVHETATIGEGCLIGPDVAIGPGCVVDSGVRLSRCTVMRGVRIKKHTCISNSIIGWHSTVGQWARVENMTILGEDVHVCDEVYSNGGVVLPHKEIKSNILKPEIVM

SEQ ID NO: 55048 - protein, 256 aa, Glycine max
  Clone ID: JC-GMLE01810067G10_FLI.pep
VSSLHNVCSNIQIQKITVQAPTKFPYTSGIVPDSSEHVCIDNCNISTGHDAIVLKSGWDEYGVAYGKPTSNVHIRGVYLQSSSGAGLAFGSEMSGGISDIIAEQLHITNSTFGIELKTTRGRGGYMKNIFISDAKLENIYLGISMTGSSGSHPDDKYDPNAVPDVGNVTFENVIGANIAIAGNFSGIVDSPFTPICLSNVTFSTSSESSPSWFCSNVMGISKEVFPEPCPDLQNTYSNFSSCFSSLHPSSSFVSSA

SEQ ID NO: 55049 - protein, 233 aa, Glycine max
  Clone ID: JC-GMLE01810071H07_FLI.pep
AATIITTCKLSLLLSLLSVSLLLGVRSDTLQNVGAIPPTCKRIECPSYDVIHVGNGYEIRRYNSPVWISNSPIQDISLVEATRTGFRRLFDYIQGKNNYKQKIEMTAPVISEVLPSDGPFCESSFVVSFYVPKENQANPPPAKGLQVQRWKTVFVAVRQFGGFVKDSSVGEEAAALKASIAGTKWADAVEKSQKRAGHASVYTVAQYNAPFEYDNRVNEIWFLFDIENELQTV

SEQ ID NO: 55050 - protein, 307 aa, Glycine max
  Clone ID: JC-GMST02400015D11_FLI.pep
DKSTRLTKCYSLFLITLITHYQYNNSLTKLNNFIKPAMASSCASSAIAAVAISTPSSQKNGSLLGSTKASFLSGRKLKVNSFTAPVGARSSTTVCAVAEPDRPLWFPGSTPPPWLDGSLPGDFGFDPLGLGSDPESLRWNVQAELVHCRWAMLGAAGIFIPEFLTKIGILNTPSWYTAGELEYFTDTTTLFVVELFFIGWAEGRRWADIIKPGCVNTDPIFPNNKLTGTDVGYPGGLWFDPLGWGSGSPEKIKELRTKEIKNGRLAMLAVMGAWFQHIYTGTGPIDNLFAHLADPGHATIFAAFTPK

SEQ ID NO: 55051 - protein, 110 aa, Glycine max
  Clone ID: JC-GMST02400018B07_FLI.pep
KQPVTCKTTDPTVAPTENDDTRNKKVVTRVVYPFAMVKPGGREGDVTLNDINERILMPPTRPVRHPVGDFACRPCVSAEGPGLSGKAVVALTRIHTQGGRGTITIIRTKG

SEQ ID NO: 55052 - protein, 395 aa, Glycine max; identical to SEQ ID NO: 38715
  Clone ID: 701206618_FLI.pep

SEQ ID NO: 55053 - protein, 67 aa, Glycine max
  Clone ID: 701206630_FLI.pep
YDIVLIPNVYFIPTMILFSPVPNISLKLMFASVLSTYRQPEAGHHALEWSQTLLNRDQIQGICMHYW

SEQ ID NO: 55054 - protein, 132 aa, Glycine max
  Clone ID: 701147070_FLI.pep
HHLAFYNFQAMAKSTGSLVFLSIFTLLLSCNLGGHLKFANGMLDQESWCVAKPSTSDVALNDNIQYGCIALGDCKMIQPGGSCFYPNTLLNHASVVMNQYYAANGRNTWNCFFSGSGLFVVSDPSYANCTYA

SEQ ID NO: 55055 - protein, 522 aa, Glycine max
  Clone ID: 701203991_FLI.pep
QQTLPAEDDPEPPPILLFITYSMASSLLSPSFTSFLRTKDLSLSAFTSQRCFKAVPRKIIRCAIAAPQRQPSTTGSVRTAMTMTEKILARASEKAQLTPGDNVWVNVDILMTHDVCGPGSIGIFKREFGEDAKVWDREKLVIIPDHYIFTSDERANRNVDILRDFCHEQNIKYFYDIKDLSNFKVNPDYKGVCHVALAQEGHCRPGEVLLGTDSHTCTAGAFGQFATGIGNTDAGFVLGTGKLLLKVPPTLRFVMDGEMPDYLLSKDLILQIIGEITVAGATYKSMEFVGTTVESLTMEERMTLCNMVVEAGGKNGVVPADSTTFKYLEGKTSLPYEPVYSDDQARFLAEYRFDVSKLEPVVAKPHSPDNRALARECKDVKIDRVYIGSCTGGKTEDFMAAAKVFLASGKQVKVPTFLVPATQKVWMDLYSLPVPGSGGKTCSQIFEEVGCDTPASPSCGACLGGPKDTYARMNEPKVCVSTTNRNFPGRMGHKEGQIYLASPYTAAASALTGYVTDPREFL

SEQ ID NO: 55056 - protein, 319 aa, Glycine max
  Clone ID: 701211635_FLI.pep
NTKMALPYPFSYLLFLLLILLSSLPNISQATSRAPNRMLALVQNQPLVLKYHKGPLLKGNITLHLLWYGTFTPTQRSIVIDFLESLTSTSAPGAPSVSTWWQTTESYRGGPCTLVVGNQILDETYSLGKSLKNDHLVALASNPKLNSAPGDRVIHVILTAADVAVEDFCMNQCGTHGRGKNGNSEKIAYAWVGNSVTQCPGQCAWPFHQPLYGPQTAPLVAPNGDVGVDGMVINLATVLAGAVTNPFEDGYYQGPASAPLEAVSACTGIFGKGAYPGYAGNVLAENATGASYNAVGVRGRKFLLPAMWDPLTSTCKTLV

SEQ ID NO: 55057 - protein, 413 aa, Glycine max
  Clone ID: 701211701_FLI.pep
SPRSRYPFLLFFYLSSFKSIKMAETFLFTSESVNEGHPDKLCDQISDAVLDACLEQDPDSKVACETCTKTNLVMVFGEITTKANVDYEKIVRDTCRNIGFVSNDVGLDADNCKVLVNIEQQSPDIAQGVHGHLTKKPEEIGAGDQGHMFGYATDETPELMPLSHVLATKLGARLTEVRKNGTCPWLRPDGKTQVTVEYYNDNGARVPIRVHTVLISTQHDETVTNDEIAADLKEHVIKPVIPEKYLDEKTIFHLNPSGRFVIGGPHGDAGLTGRKIIIDTYGGWGAHGGGAFSGKDPTKVDRSGAYIVRQAAKSIVASGLARRCIVQVSYAIGVPEPLSVFVDTYGTGKIHDKEILNIVKENFDFRPGMISINLDLKRGGNNRFLKTAAYGHFGREDPDFTWEVVKPLKWEKA

SEQ ID NO: 55058 - protein, 327 aa, Glycine max
  Clone ID: 701144440_FLI.pep
IPCDAAQATTSPSPDKMVDDGATSAATSRRKPSWRERENNRRRERRRRAIAAKIYSGLRAQGNFNLPKHCDNNEVLKALCAEAGWCVEEDGTTYRKGCKPPLANGAGSSMRNITFSSSQNPSPLSSSFPSPIPSYQVSPSSSSFPSPFRLDVDKDNVSHLIPYIRNASLSLPPLRISNSAPVTPPLSSPTSRNPKPIPTWESIAKESMASFSYPFFAASAPASPTHRHLYTPPTIPECDESDTSTGESGQWVKFQAFAPSSSVLPISPTFNLVKPVVPPGMPDNSIQEMRTSSDEFGVQVKPWVGEKIHEVALDDLELTLGSGKVRS

SEQ ID NO: 55059 - protein, 112 aa, Glycine max
  Clone ID: 701144981_FLI.pep
TAAEDDRGDRTERERMAALGGNRDVTGSQNSVEIDALARFAVEEHNKKQNALLEFEKVVTAEQQVVSGTLYTITLEAKDGGQKKVYEAKVWEKSWLNFKEVQEFKLVGDAPA

SEQ ID NO: 55060 - protein, 124 aa, Zea mays; identical to SEQ ID NO: 47585
  Clone ID: 700614675_FLI.pep

SEQ ID NO: 55061 - protein, 37 aa, Zea mays
  Clone ID: 700615708_FLI.pep
AHVHVHFYCRRNVSMTTNRRLQFLHIKDNCAQCGTRA

SEQ ID NO: 55062 - protein, 99 aa, Zea mays
  Clone ID: 700575401_FLI.pep
YFPLGCYRKDLKKPLMIYRCGCTRGCFHSLKQPPLAVDVAIAIAGSYCTLALGSVGKTLPSLQCVMNEIHIVGFAWNNVSLLCVCFKCRRSLIIEFVGT

SEQ ID NO: 55063 - protein, 71 aa, Zea mays
  Clone ID: 700576162_FLI.pep
LVSIVLACLVYTTQSERETMDHFVLFGIFFKCYLRNIVRLYCKIRRRKKKENSYEVYIVWLLVLFPVSNSV

SEQ ID NO: 55064 - protein, 137 aa, Zea mays; identical to SEQ ID NO: 47793
  Clone ID: 700453892_FLI.pep

SEQ ID NO: 55065 - protein, 300 aa, Zea mays
  Clone ID: 700454464_FLI.pep
HLNPTPVQPAAMEALTATDKCFSPARAMFPMPIVRPPASPDHASQYLEDLLQEQQKLGPFVQVLPICGRLLNQEIMRTSNLLSNFGVRGNERLPPIASPNHMHPLPRGPDFCGNGFGPWNEMHPERSGFPRGAMGWQGAVQNHSSYIVKKIVRLEVPTDAYPNFNFIGRLLGPRGHSLKRIEATTGCRVFIRGKGSIKDPVKEEQLKGRPGYEHLDDPTHILIEAELPADVIDARLAQAQEILEESLKPVDESQDNIKRQQLRELAMLNSVYREGSLHQNGSASPFSNGAQNSDREEIQL

SEQ ID NO: 55066 - protein, 110 aa, Zea mays
  Clone ID: 700454793_FLI.pep
PLSHPAAALAPATSRICPVALAVVPPTVTMQNEEGKTVDLYVPRKCSATNRIITAKDHASVQINIGHLDANGLYDGHFTTFALSGFVRAQGDADSSLDRLWQKKKADIKQ

SEQ ID NO: 55067 - protein, 130 aa, Zea mays
  Clone ID: 700452922_FLI.pep
RQFMTLVSGIEQNLKTTSALVSLPAERAALSEPCLSSCGLAEDSLAARAHNNSLGVAENSGYAEAPLALNIHEEGVGRLDESLFLVLELLEFCRRVEQINVVLENHLASGCGGGNCVRCGGGGGGAAAEV

SEQ ID NO: 55068 - protein, 246 aa, Zea mays
  Clone ID: 700441468_FLI.pep
AKAKRLDSHSNCRLDLSNGLEESLPRSTLLKSSMVTEQLCVDTIRNNSTLTLVLQVVGTAELGEAPLSALNNLLAARELELGASQSFTGMCSIVVLASNRKEYLTNVHPSTGALRLAKGTPHSSLEPISPSTRKHLVDTKDMEGVNPDPKVEGILSCRLGHVLVAGNTGSLKSLTGDILLLPRDKVHTVGELINTLSLHANIVDPNLGVRDTTAVPGLGVWLVLDLAIASRRPSPHGDGSREEAAA

SEQ ID NO: 55069 - protein, 77 aa, Zea mays
  Clone ID: 700214115_FLI.pep
VFAPPPPPPPQPQQCRRTRPSGSRRSWRRRCARTAPSPTGSACALTIPSGTTPSAGTGAAPSSASERRDWPAAASEG

SEQ ID NO: 55070 - protein, 172 aa, Zea mays
  Clone ID: 700214966_FLI.pep
NAYISGRGSAEILLSATNLCQRKPETWRRARNESSQPAAACFLVRRGHTLVKLGEPHADPHGVLQELLRAPADARLLLLVQVLAPERVHAVREAPLHQRIVHSQAVADLELVDHGGHPHLVLLGEAVQVAEHALVHGRRRRYGSSTWLATTIRTRQGRGTGLGRRRLARTEG

SEQ ID NO: 55071 - protein, 163 aa, Zea mays; identical to SEQ ID NO: 50472
  Clone ID: 700197637_FLI.pep

SEQ ID NO: 55072 - protein, 311 aa, Glycine max
  Clone ID: 701138680_FLI.pep
GPLHFDLNTGAKIPSVGLGTWKAPPGVVGDAVIAAVKAGYRHIDCARIYDNEKEVGEALKTLFSTGVVQRSEMFITSKLWISDCAPEDVSKALTRTLEDLKLDYIDLYLMHWPFRTKPGSRGWDPEIMAPLCLPETWNAMEGLFASGQARAIGVSNFSTKKLQDLLGYAKIPPAVNQVECHPVWQQPALHNLCKSTGVHLTAYCPLGSPGSWVKGEILKEPLLIEIAEKLHKSPAQVALRWGLQSGHSVLPKSVNESRIKENLSLFDWCLPPELFSKLSQIHQQRLLRNESAVHETCSPYKSLEELWDGEI

SEQ ID NO: 55073 - protein, 463 aa, Glycine max
  Clone ID: JC-GMLE01810037H09_FLI.pep
VCSLILYITINCLITCIISTYLSMKRHAEKIKDHSNADVTVDEYHRYKEDIGIMKYMNLDAYRFSIAWSRVLPKGKLSAGVNKEGINYYNNLINELLANGLQPYVTLFHWDVPQALEDEYGGLLSPHIVDDFRDYAELCFKEFGDRVKHWITLNEPSTVSMNGYAVGSHAPGRCSDWLKMNCTGGDSGTEPYLSSHYQLLSHAAAANLYKTKYQTSQKGIIGITLNTDWFLPASEKITDRDAARRALDFRFGWYMDPITFGDYPKSMRSLVGNRLPKFSKEETRQLKGSFDFLGLNHYATVYAGHAPHLRGPRPTLLTDPLIYVTNQRDGRVLCPYAASNWLCVYPRGLRQLLLYIKKQYNSPVIYITESGYDELNDPTLSLEESMIDTYRVDYFYRYLYYLQMAIRDGVNVKGYFVWSLLDNMEWSAGYTVRFGLVFVDYKDGLKRYLKLSAQWFKNFLNKS

SEQ ID NO: 55074 - protein, 359 aa, Glycine max
  Clone ID: JC-GMLE01810060B11_FLI.pep
LISLSLTNVVVSARLFPNVSSWLNAHAPTGGAWDAFLNFTGCHRGDKYDGLANLKSYFERFGYFPHAPPSSNFSDEFDDALESAIKTYQKNFNLNVTGVLDDATVQQIVLPRCGVADIINGTTTMNAAKENETASFSKPKFHTVAHFTLFPGMPRWPEGTQELTYAFFPGNGLSDAVKGVFAAAFARWAEVTSLKFRETASYFGADIRIGFFSGDHGDGEPFDGSLGTLAHAFSPTNGRFHLDAAEDWVVSGDVTRSALPTAVDLESVAVHEIGHLLGLGHSSVEEAVMFPTISSRKKKVVLARDDIEGIQFLYGSNPNFNGSTATSAPERDASDGGRCLTCVGPSSGVFALLTFAFLF

SEQ ID NO: 55075 - protein, 67 aa, Glycine max
  Clone ID: UC-GMFLMINSOY059F11_FLI.pep
VQRQAYASEYKYYRGNQTIQSKSSSNNLSKELISDLWKLFTEHYIKSCIKSIFTHNLSITRSQHHPT

SEQ ID NO: 55076 - protein, 286 aa, Glycine max
  Clone ID: UC-GMFLMINSOY081H05_FLI.pep
VVTNIVTFNHTCGQMTSSTLLLCSIALLYSASFGAEAWTSPYIPVSSLISKSLYDKFFLHKDDTACPAKDFYPYDAFIRASKSFPAFGTTGCLATRKREIAAFLAQISHETTGGWATAPDGPFAWGLCFKEEISPQSNYCDSTNTQWPCFPGKSYKGRGPIQLSWNYNYGPAGKALGFDGLRNPEIVANNSVIAFKTAMWFWMTEQKPKPSCHNVMVGIYVPTEDDIAANRTAGYGLVTNIINGGLECGIPGDARVNDRIGFFERYTKLFNVDTGPNLDCAYQKPF

SEQ ID NO: 55077 - protein, 112 aa, Glycine max
  Clone ID: UC-GMFLMINSOY105A03_FLI.pep
FDSCIMGRVRYIVPRLIIGVFIQLLCSYSTLPLYAIVTQMGTHFKKAIFDEQVQARLVGWAQKAKKKGQRGDNSLSGQESSRAGAGIQLGSVFRRESASEDNVIVPRNDGSE

SEQ ID NO: 55078 - protein, 529 aa, Zea mays
  Clone ID: LIB3150-088-E1_FLI.pep
RKDMRDPFDAPVDLINPDHNGGNKLSRTGAVSAGDYGLQNGPKSFAPNSDTLVRHQVQVASLHKDLVLEDPNTRIMDPETKELYFRSQSQGDEILLLRKKIAEASLKELRLLGEKHILERRFTDLRMAVDEKQEEAISGALQQLNQKKTHLEDNMRLANELKVEEEELYFFTSSLLSMLAEYNIRPPQINASIITTVTKRLYQQMHLKLRSLNDNLGDMTQPGNIYNPNLQQVTLSRNEPSPSYNLDSNRNTLQQYAQGPSDRHMDQMYHGSNFQQDTGGTTPSNYFGGDRRVDGDSQLYQPDGDTLPGIEGFQIAGEPRPGFQLTACGFPTNGTTLCNFQWVRHLENGTRQSIEGATMYDYVVTADDVGTFLAVDCTPMDDNGRQGDLVTEFANNGNKITCDPEMQSHIDAYISNGRAEFEVFVLAYSPEEWELATLVLTRPNYQIKFKKTGEAIIDEKYSQSLQMKIPNGRTTQFVLVTAGATLPFNTQGISEPNNEDYDVRLRDLIVLVMRTFQKKALDAKRKVNT

SEQ ID NO: 55079 - protein, 79 aa, Zea mays
  Clone ID: LIB3150-015-D9_FLI.pep
CNSITWRQHERGHQNSSGSLEPPGFTFNCLPHMPSAGSSSSSYSASSSSSAVASWYCWYSDTRSFILLSASVNSISSMP

SEQ ID NO: 55080 - protein, 536 aa, Zea mays
  Clone ID: LIB3060-001-C2_FLI.pep
GHKTEVPKRSICASPHRPSRNHLIQKQTSMASNGCNGNGNGKAAPAGVVVPEIKFTKLFINGEFVDAASGKTFDTRDPRTGDVLAHVAEADKADVDLAVKSARDAFEHGKWPRMSGYERGRIMSKLADLVEQHTEELAALDGADAGKLLLLGKIIDIPAATQMLRYYAGAADKIHGDVLRVSGRYQGYTLKEPIGVVGVIIPWNFPTMMFFLKVSPALAAGCTVVVKPAEQTPLSALYYAHLAKMAGVPDGVINVVPGFGPTAGAALASHMDVDSVAFTGSTEVGRLIMESAARSNLKTVSLELGGKSPLIIFDDADVDMAVNLSRLAVFFNKGEVCVAGSRVYVQEGIYDEFVKKAVQAARSWKVGDPFDVTSNMGPQVDKDQFERVLKYIEHGKSEGATLLTGGKPAADKGYYIEPTIFVDVTEDMKIAQEEIFGPVMSLMKFKTVDEVIEKANCTRYGLAAGIVTKSLDVANRVSRSVRAGTVWVNCYFAFDPDAPFGGYKMSGFGRDQGLAAMDKYLQVKSVITALPDSPWY

SEQ ID NO: 55081 - protein, 273 aa, Zea mays
  Clone ID: LIB3151-008-H4_FLI.pep
QLHDGAGVGVLVAEDLRRHGLLLVQVVVRRRVERRRVGRLVGVRVPRRRRVGRRLVVPSSEREPRVVHVQAGGRVLVLVAGLVLLVAVSVAAVLLLLILLAAVLLLFLLLAVLLLLASGSACILLLLLLGRLVAAAALRRRGRLGLDDGRVLARALVHVLRQLGLLEHALHRHLRRLEVRFYGLHAFHLEDPLLDPLGARLAVHVHLQHHSDHRRLLLLLRLRRLGLCLLLIVLLLLRLIFLLLLHLRRGRHRRQQLDLAASLLLHALHHLHG

SEQ ID NO: 55082 - protein, 323 aa, Zea mays; identical to SEQ ID NO: 47067
  Clone ID: UC-ZMFLB73033C03_FLI.pep

SEQ ID NO: 55083 - protein, 70 aa, Glycine max
  Clone ID: UC-GMROPIC049H05_FLI.pep
QLISFYEAGSIKNHKVESNCTAALGNHSGPWIKDCTVNFPASPSVRVGLYPAHLTLCDTSAPGPVFWYSA

SEQ ID NO: 55084 - protein, 285 aa, Glycine max
  Clone ID: UC-GMROPIC064A01_FLI.pep
YVGHPNPLKEGQDLFRKGLLSEAVLALEAEVLKNPENAEGWRLLGIAHAENDDDQQAIAAMMRAQEADPTNLEVLLALGVSHTNELEQTAALKYLYGWLRHHPKYGTLAPPEMADSLYYADVARLFNDAAELSPDDADVHIVLGVMYNLSREYDKAIASFERALKLKPQDYSLWNKLGATQANSVQSADAIMAYQQALDLKPNYVRAWANMGISYANQGMYDESVRYYVRALAMNPKAENAWQYLRISLSCASRNDMLEACDSRNLDLLQKEFHYSKACSRCLLL

SEQ ID NO: 55085 - protein, 247 aa, Glycine max
  Clone ID: UC-GMROPIC101B09_FLI.pep
TDLHQIIRSNQALSEEHCQYFLYQILRGLKYIHSANVLHRDLKPSNLLLNANCDLKICDFGLARVTSETDFMTEYVVTRWYRAPELLLNSSDYTAAIDVWSVGCIFMELMDRKPLFPGRDHVHQLRLLMELIGTPSEADLGFLNENAKRYIRQLPLYRRQSFQEKFPHVHPEAIDLVEKMLTFDPRKRITVEDALAHPYLTSLHDISDEPVCLTPFSFDFEQHALTEEQMKELIYREALAFNLEYQQ

SEQ ID NO: 55086 - protein, 56 aa, Glycine max
  Clone ID: UC-GMROPIC062G04_FLI.pep
LPKFSLFKILSSSNNYLRYNNLIGPMVYNSKSISEIERAPHGSPANSSIAMMRKGN

SEQ ID NO: 55087 - protein, 71 aa, Glycine max
  Clone ID: 701121276_FLI.pep
RKKKHFFIQVLLTGCIINHHLFFIWLCSLFLTYIASKQKNIIYIYIKKKEYWNSLFSLLLQRQNSNISSSM

SEQ ID NO: 55088 - protein, 182 aa, Glycine max
  Clone ID: 701138456_FLI.pep
DRAGDPLLAQQTSESEAMRLVKATPFDYGSGHVDPTAALDPGLIFDAGYEDYIGFLCTTPSIDVHEIRNYTHTPCNTSMGKPSNLNTPSITISHLVRTQVVTRTVTNVAEEETYVITARMEPAVAIEVNPPAMTIKAGASRQFLVSLTVRSVTGRYSFGEVLMKGSRGHKVRIPVLANGYRR

SEQ ID NO: 55089 - protein, 207 aa, Glycine max
  Clone ID: 701143172_FLI.pep
GTAAVEGKPTMVHVSFYRNYGKTFKKPRRPYEKERLDAELKLVGEYGLRCKRELWRVQYALSRIRNNARNLLTLDEKNPRRIFEGEALLRRMFRYGLLDETQNKLDYVLALTVENFLERRLQTLVFKSGMAKSIHHARVLIKQRHIRVGRQVVNIPSFLVRVDSQKHIDFSLTSPLGGGRPGRVKRRNQRAAAKKAAGGDGDEEDED

SEQ ID NO: 55090 - protein, 143 aa, Glycine max
  Clone ID: 701153117_FLI.pep
ARRRQKGGSLIILVIGSLVNFGNVAHAAISTVCVVVYFCCFAMGYEPIPNILCSEIFPTRVRGLCIAICALVFWIGDIIITYSLPVMLGSLGLGGVFAIYAVVCFISWIFVFLKVPETKGMPLEVISEFFSVGAKQAASAKNE

SEQ ID NO: 55091 - protein, 148 aa, Glycine max
  Clone ID: UC-GMFLMINSOY036F09_FLI.pep
EETEACEKGVVENASWKTETQNTEDHPDQSLATTPLPLSRSLLPLSFSSKGKPPRSFVTTISSSGLFVSQKLGKSNAPRSQHQPKCVKPLQTVPDDDSPVTCIKTSSPNGKRISSPNCDVGSSPTTRRGGRKLILQSISSFPSLTPHH

SEQ ID NO: 55092 - protein, 98 aa, Zea mays
  Clone ID: 700161773_FLI.pep
PAPIRLCQAANSTSATYLLHRQRASLLLQLHLHRTACFGTRTDLASSTVEPFCIFVSFFLFPSLLFIMPAVVYHLPRLKRLVFSAPFPRGTVTSCFVC

SEQ ID NO: 55093 - protein, 531 aa, Zea mays
  Clone ID: UC-ZMFLMO17321E08_FLI.pep
LSRGGQEGKVAAASGMGSPKAAKSMVKQRIWRHRLVAPFAAVLITAVVVFSGLFAQDPSATSEFTAVNVGNTLPVRDKSESTEPNQAFQGTVPAAGERGTATAVPAQRERSSGGSEPEEKQSPPQDQEGEETSAKSGLVQYTTCTPRTGATVCDLSNQRYDICELCGDARTIGRSSTVMYVPQPLTSNGEEWNIPAQSRKSLPWIKKVTVKTLKASQQAPICTSRHAMPAIVFALGGFTGNVWHDVSDVLVPLFLTARQFDQDVQLLVTDSRPWFIKKYSAILRRLTRHSVIDFDADDEVRCYPHVIVGLRSHRDLGIDPDSTPQKNYTMVDFRLFVREAYGLPAPGVDIPYRADKDEPEKKKPRMMLIERGKTRRLVNTPDVLLGLGWFGFEVVRADPRTHSDLEEFARLVDSCDAMMGVHGAGLTNMVFLRSGAALVHVVPYGVEFMADGFYGAPARDMGLRHVRYSVGPDESTLLEKYGRNHAVVRDPEAVRSGGWEKVGEVYMTEQDVVLNVTRFGPSLLKAIEFIV

SEQ ID NO: 55094 - protein, 166 aa, Zea mays
  Clone ID: 700205025_FLI.pep
PKSIYTQCIQSSRGPSWNCWSSRAGSRRRLHLGAPARREAQAVVVQVVGDVEVLLLEVTDDGHAGARGAQDRQAHDAVRVQPDEVVLRGEVPDGTVGEQQRQLRHLGSLHAGHVVARAEHREVRDRRVRAAHPVDERAADHLVRRLHEVAQRGAGVDDCAAGAALA

SEQ ID NO: 55095 - protein, 140 aa, Zea mays
  Clone ID: 700243794_FLI.pep
SLFLLKKELYLWGLGRTQSYFLFHSSAEVMAHLLGLAICGGRGRRVQLIPGLDPGDHGVTELDKVGVNRAQLLLHLSREVDVALLDGVAVLGDGHVLEEGDDVLLPEDALVFLLQVNEGHLRPPEPGSQDWPAIHLAQQG

SEQ ID NO: 55096 - protein, 186 aa, Zea mays
  Clone ID: UC-ZMFLB73305G12_FLI.pep
GCEDSCSSNQLIIWLQNFGHIDILVSNAAANPTVNVILEMKEVVLDKLWDINVKASILLIQDAAPHLRAGSSVILISSIAGYNPEQGLTMYGVTKTALFGLTKALAGEMGPDIRVNCIAPGFVPTRFASFFIDNETIRKKLNERTMLKRLGSVEDMAAAAAFLASDDASFITAETIVVAGGVPSRL

SEQ ID NO: 55097 - protein, 283 aa, Glycine max
  Clone ID: UC-GMRONOIR058A10_FLI.pep
LNVPSSFIKSYMVLLGCNQMTRGKTCEEFMKIKLLRIMNMCSSQSTVLFHQKDILLFCVRFLGLRMKGQQRLPLFSRLLLLLLLLLLLLLLPELFPLSLLILDSPLSLSLHAKGLFFHHSLSTTPPFADPSEGLGVTLELQLFPKGSFFFYLLLLVLRSKRKRKPHFEVEPSTINVPVPLHLCHIFVIIIIINLSTTTIFFSLVVHDAQVSLFHRVFFMSSSINNHVVLNEVLQGELVVGLGHVLHHFHELPLPSHYGLRPRRWREASVVVFSAWGARGPHGR

SEQ ID NO: 55098 - protein, 206 aa, Glycine max
  Clone ID: UC-GMFLMINSOY084E05_FLI.pep
YNYAFVFKQSHTTTCSVEYWVLNLLQVPVALGATSYQAVLLYTGKRVIASKGDQRTQWRAHQLIMYCSCGICAGIVGGLLGLGGGFILGPLFLELGIPPQVSSATATFAMTFSASMSVVEYYLLKRFPIPYTLYFVAVSTFAAFVGQVLVRKLVAILGRASLIIFILSSTIFVSAISLGGVGISNMIQRIANKEYMGFENLCTYSA

SEQ ID NO: 55099 - protein, 75 aa, Glycine max
  Clone ID: UC-GMRONOIR065H07_FLI.pep
LILDTIRGDQQHFVRRDELKASWQIFTPLLHRIDEGEFKPLPYKPGSRGPAEADQLLEKAGYVQTHGYIWIPPTL

SEQ ID NO: 55100 - protein, 250 aa, Glycine max
  Clone ID: UC-GMROPIC021G08_FLI.pep
QWNDFLSPLTRRFNVYVPDLLFFGDSHTTRPDRSEAFQAQCVAALLQAHGLQRTSVVGISYGGFVAYSLAAQFPERVEKVVLCCAGVCLEDKDLDEGMFQVKTVDEAADILLPQTPEKLRQLVQLAFAKPVKTMPTCFLNDYINVMCTDNRQERKELIETLHKDRKLSNLPKITQPTLIIWGEKDLVFPMELAHRLQRHLGENAQLVVIKNAGHALNVEKPKEMYKNLKSFLLDPATPTPTAQKNHSNGS

SEQ ID NO: 55101 - protein, 204 aa, Glycine max
  Clone ID: UC-GMROPIC022F04_FLI.pep
ASSISGIVIRVVGSGSKIRITIPEILDDEWFKKDYKPPVFEENGETNLDDVEAVFKDSEEHHVTEKKEEQPTAMNAFELISMSKGLNLENLFDTEQGFKRETRFTSKSPADEIINKIEEAAKPLGFDVQKKNYKMRLANVKAGRKGNLNVATEIFQVAPSLHMVEVRKAKGDTLEFHKFYKKLSTSLDDVVWKTEDDMQMRETK

SEQ ID NO: 55102 - protein, 330 aa, Glycine max
  Clone ID: UC-GMROPIC027G09_FLI.pep
SVGLKRYSFSDIKKITNSFKIKLGEGGYGSVYKGKLLNGCSVAVKILNESKENGEEFINEVASISKTSHVNIVSLLGFCLDGSRKALIYEFMSNGSLEKYIHEKTAETKTTTPSLSWERLHQIAIGIARGLEYLHKGCNTRILHFDIKPHNILLDEAYRPKISDFGLAKLSTRDESIISMSNARGTVGYVAPEVFSKSFGGVSHKSDVYSYGMMLLEMVGGQKNMDVEASRSSEIYFPQLVIYKKLEQGNDLGLDGILSGEENEIAKRMTMVGLWCIQTIPSHRPTISRVIDMLEGSVDSLEMPPKPFLSSPPRSSTDFSTAISKSLASV

SEQ ID NO: 55103 - protein, 111 aa, Glycine max
  Clone ID: UC-GMROPIC036D11_FLI.pep
LTSRLRFFAPLVLLADLALFLGCEVVHNVESLADLLRGLALDHARDLRARQIEQALDVHVVGRQDQLEEDVLLNVHKVGVPVRDHVVHVRALQWLFDLTHWVVVVVAAELD

SEQ ID NO: 55104 - protein, 414 aa, Glycine max
  Clone ID: UC-GMFLMINSOY014D11_FLI.pep
VDANEEKNKDLASQYDVKGFPTINILRNGGKNVQEYKGPREADGIVDYLKKQSGPASTEIKSADEATAFIGENKVAIVGVFPKFSGEEFDNFSALAEKLRSDYDFGHTLNAKLLPRGESSVSGPVVRLFKPFDELFVDFQDFNVEALEKFVEESSTPVVTVFNNEPSNHPFVVKFFNSPNAKAMLFINFTAEGAEAIKSKYREAAEQYKQQGVSFLVGDVESSQGAFQYFGLKEEQVPLIIIQHNDGKKFFKPNLEADHIPTWLKAYKDGHVAPFVKSEPIPETNDEPVKVVVGASLEDIVFKSGKNVLLEFYAPWCGHCKQLAPILDEVAISYQNEADVVIAKLDATANDIPSETFDVQGYPTVYFRSASGKLSQYDGGRTKEDIIEFIEKNRDKPAQQEQGKDEQEQGKDEL

SEQ ID NO: 55105 - protein, 264 aa, Glycine max
  Clone ID: UC-GMFLMINSOY030D03_FLI.pep
WPLMFIGSENKQLKLDWPTRFRICIGIAKGLAFLHDESRFKIVHRDIKASNVLLDDKLNPKISDFGLAKLDEAEKTHISTRVAGTIGYMAPEYALWGYLTDKADVYSFGVVALEIVSGKSNNNYLPDDGSVCLLDRACQLNQTRNLMELIDERLGPDLNKMEVEKVVKIGLLCSNASPTLRPTMSEVVNMLEGHADIPDVIPEPSTYNDDLRFKALRNLHQYQSKQSLSGNQSQSSMTHTFTSASGGNTHTTSYIEDHSSVDSS

SEQ ID NO: 55106 - protein, 104 aa, Zea mays
  Clone ID: 700551138_FLI.pep
STRVGSTLSRVTSVKLSIRDHESNHNLKNIELEGNFDQIKQASDLLRDLIATISASMPAKNPSSAVAPAGGGRGSGPGGTSSNYKTKLCENFLKLCENFQHDYV

SEQ ID NO: 55107 - protein, 114 aa, Zea mays
  Clone ID: 700576742_FLI.pep
REWIQSINKEAERVRDSVKGEDGNQDMYLPALLPKVPGRFYYLFGQPIEMKGMGNLVRDRKSANEVYLRIKSQVEEIMSYLKRKREEDPYRSLPQRALYQATWGASAQVPTFEP

SEQ ID NO: 55108 - protein, 115 aa, Glycine max
  Clone ID: UC-GMRONOIR036C09_FLI.pep
CDAFLHHKVNLSHIKDLAEHQRGDAVSSMVYEANARVRDPVYGCVGAISSLQQQIDVLQTQLAVAQAEAVHLRVRQTASLYSPTSPTNSGSPSQAKPIFDMDMVVDQNSYGDSMW

SEQ ID NO: 55109 - protein, 168 aa, Glycine max
  Clone ID: 701100519_FLI.pep
FKVLHKSPDLPESLSSEGQDFLQQCFRRNPAERPSAAVLLTHAFVQNLHDQDVQVHSQGQNCPRGDPGPGDDSRRHSPGNSSRNSRGVGSASIRAWFFNKTHNLIGVTSKKYVSEDSNHVTSSRDSPCSMTEMNNPQSPMKSSALNYMTVTNPSNIPLSAVMKIIRNI

SEQ ID NO: 55110 - protein, 262 aa, Glycine max
  Clone ID: 701103464_FLI.pep
YTPAGEPLPTNKRYDAAKIFSHPDVAAEEPWYGIEQEYTLLQKDVNWPLGWPLGGFPGPQGPYYCGTGADKAYGRDIVDAHYKACIYAGINISGINGEVMPGQWEFQVGPSVGISAGDEVWAARYILERITEMAGVIVSFDPKPIPGDWNGAGAHSNYSTKSMRDEGGYEVIKKAIEKLGLRHKEHIAAYGEGNERRLTGRHETADINTFSWGVANRGSSIRVGRDTEKNGKGYFEDRRPASNMDPYVVTSMIAETTILWKP

SEQ ID NO: 55111 - protein, 418 aa, Glycine max
  Clone ID: 700746951_FLI.pep
IPTMKALRTLRRTLYSPTPATVFRAFFSAQPQPHHDDPTDSSVFDSSHYALEAEPTLKPEPKPTWDEKYRARADRVVFGEEGPKGKLRVKEEEDERRRRALAKALLEAAMDEGEDEEEEGKGAGLVKEDDQKSLSVGIIGAPNAGKSALTNYMVGTKVAAVSRKTNTTTHEVVGVLTKGDTQICFFDTPGLMLNCGGFPYRDVKVRVESAWSSVNLYEVLIVIFDVHRHITRPDSRVIQLIKRMGARSIPNQRRILCMNKIDLVEKKKDLLKVAEEFKDLPGYERYFMISGLKGSGVKDLTQYLMEQAVQRPWEEDPFTMSEEVMKMIALEVVRERLLDHVHQEIPYDVEHRLIDWKELRDGSLRIEQHFITNKLSQCKILVGKNGSKIGRIGIEANEELRSIFKKQVHLILRVRHKK

SEQ ID NO: 55112 - protein, 698 aa, Glycine max
  Clone ID: 700754281_FLI.pep
SSPPPLEMPALACCVDAAAPPGYAFAGDISFPAPVALTGVPPATTDDSNNNRWSPSLSAALYNVDGWGGPYFAVNTAGNISVRPHGSDTLSHQEIDLLKIVKKASDPKSLGGLSLQLPLIARFPDVLKNRLESLQSAFDYAIQSGGYESHYQGVYPVKCNQDRFVVEDIVKFGSPFRFGLEAGSKPELLLAMSCLCKGNPDALLICNGFKDAEYISLALVANKLALNTVIVVEQEEEVDLIVELSKKLCIKPVIGLRAKLRTKHSGHFGGTSGEKGKFGLTTAQILRVVKNLDLAGMLDCLQLLHFHIGSQIPSTALLADGVGEAAQIYCELVRLGANMRVIDIGGGLGIDYDGSKSCDSDISVEYSLEDYAVAVVHAVQCVCDRRSVKHPVICSESGRAIVSHHSVLIFEAVGTSSTTGGGASPALSAQYLAEELSEDYRNLSELAFRGEYETCLVYTEEMKERCVEQFKQGTVCMEQLAAVEGLCELARKAVGAGESVRRYHVNLSVFTSVPDAWGIEQVFPIIPIHRLDEKPSVRGILSDLTCDSDGKIDKFINGESSLPLHEMEGGRTYYLGMFLGGAYEEALGGVHNLFGGPSVVRVSQSDGPHSFAVTRAVPGPSCGDVLRVMQHQPELMFETLKHRAQEYVSHDNAAALLAAGLARTFDRMPYLLSLSSFVADDVAAAVPAAQDLGEQWSY

SEQ ID NO: 55113 - protein, 578 aa, Zea mays
  Clone ID: UC-ZMFLB73023G02_FLI.pep
TLAFGHPKTLAAAGAKPLPAATSTSVSFPATHQPACLLSSPAPGSLRRRDVAAMVSAPPAVGTAMPSLDFDTSVFNKEKVSLAGHDEYIVRGGRNLFPLLPEAFKGVKQIGVIGWGSQGPAQAQNLRDSLAEAKSDIVVKIGLRKGSKSFEEARAAGFTEESGTLGDIWETVSGSDLVLLLISDAAQADNYEKIFSHMKPNSILGLSHGFLLGHLQSLGLDFPKNISVIAVCPKGMGPSVRRLYVQGKEVNGAGINSSFAVHQDVDGRATDVALAWSVALGSPFTFATTLEQEYKSDIFGERGILLGAVHGIVEALFRRYTEQGMDEESAYKNTVEGITGIISKTISKKGMLEVYNSLSEEGKKEFNKAYSASFYPCMDILYECYEDVASGSEIRSVVLAGRRFYEKEGLPAFPMGNIDQTRMWKVGEKVRSTRPEGDLGPLHAFTAGVYIALMMAQIEILRKKGHSYSEIINESVIESVDSLNPFMHARGVAFMVDNCSTTARLGSRKWAPRFDYILTQQAFVAVDKDAPINQDLISNFLSDPVHGAIEVCAELRPTVDISVPANADFVRPELRQSS

SEQ ID NO: 55114 - protein, 603 aa, Zea mays
  Clone ID: UC-ZMFLB73283F12_FLI.pep
DSSFFPNPTLRLLPRRTAAPSLHAPPYLRSASPTAAPPPDPSPNLGGGGGGEGHFQDSDEALPPSAASHATTTDHHQQQQQQQQEEEGRMFKLHRHRSSDRVGERFDFRFSNFRAVQVPAVSDRLFLSIVSVDSGRTIAKSSKVASRSGICQWPDTILEPIWFSKDEVSKEFEDCQYKIIVSLGSTKSGILGEIFLNLSNFLNIVDPTAISLPLKRCNAGTVLQLKVQCLGTKSKLSGVRSLRDMAPRLDDRSPTPTNDEMDNKSDCSDGMFNRSVRSSSENHLVGTYQDESGNRETSFSAPGSHRSSNSGDSTADRTNFSPRDNSSGGLYVGRQDSASSYASYVSAGRGDDGLRSNNSSFSSRASGPNLLQGNTPKIFSNGLSQLSMGASDSSKDLLEAAEETIEELRDEAKMWERHSRKLKADLEMLKKECSEKSKQHAELAGELSAAQAERDSYRHEIEELKSSLQDVNTRQTITGTPKRSDWIDLQKELEGEVKFLRESNADLTIQLNRTQESNIELLSILQELEETIEEQRVEISKISKVKQTADPENGLLVKEDKEWAKKLSMKDDEITVLREKLDRALNIGNAGGAGSNAIYLELE

SEQ ID NO: 55115 - protein, 72 aa, Zea mays
  Clone ID: UC-ZMFLMO17264G05_FLI.pep
MGRTSIIQTRDTTNTNSARRQTTYTVHVPTGWARTRRLQEHRQQKNFLPPHHARTSYCVTNRQVLYLSTMFR

SEQ ID NO: 55116 - protein, 123 aa, Zea mays
  Clone ID: UC-ZMFLMO17214E04_FLI.pep
ATPASFGAYATAKISVDASLAGGIIGKGGANIKQISSVTGAKVVIQEDRHESDTSLKNIEFEGTFDQIRNASAMVIELIVSISGIGSNFKTKMCENFAKGSCSYGGKCHFAHGESELRKPAAA

SEQ ID NO: 55117 - protein, 460 aa, Zea mays
  Clone ID: UC-ZMFLB73166E01_FLI.pep
MVNGERRADAECTRASLLGRYEIGRTLGEGNFGKVKYARHIASGGHFAIKILDRSKILSLRIDDQIRREIGTLKLLKHPNVVRLHEVAASKTKIYMVLEFVNGGELFDKIAIKGKLSEHEGRRLFQQLIDGVSYCHDRGVYHRDLKPENVLVDRKGTIKISDFGLSALPQHLGSDGLLHTTCGSPNYIAPEVLQNRGYDGSLSDLWSCGVILYVMLVGCLPFDDRNLVVLYQKIFKGDCQIPKWLSPAAQDLLKRILQPNPMKRINVAGIREHEWFKKDYVPAVPHDDDEDVLPSPAPSIKPIDEPAQEKCSPINAFQLIGMASSLDLSGFFEEEDAAQRKIRFTSTHPPKDLFDKIESVVMEMGFKVHRGAGKLKVLRNSKCSRNPSSLLVCTEVFELGPSLYVVELRKSHGDSTLYRQLCERLSDELGACKTDQIARTESSSDDLSSVDGEAFPLSGF

SEQ ID NO: 55118 - protein, 647 aa, Zea mays
  Clone ID: UC-ZMFLMO17262D04_FLI.pep
RFLPPLLPNPIDTCNASAHGGRRRRYRQEALDLEAMTRARARGLWALLLVALVAAAVAPGALVLAQGGTLTSRSDLVGLYALRGSLGLRARDWPRRADPCAAWAGVGCRAGRVVSLSVAGLRRTRLARLSPRFDVDGLRNLTRLEAFSAAGFGLPGSIPAWLGAGLAPTLQSLDISACAVSGEIPASALLGLGNLTTLNLAGNQLSGQLPATALPRLTRLRTLNLSRNAFSGALPHAVWSLPGLSVLDVSRNNLTGALPTPGLALPANAQVVDLSGNFFYGGVPETFRRLFAQVLLANISGNYFDGELGVSDGGGGNVSFQLNCFLDVLGQRTQVDCQQFYASRGLPYDGPVIPPAPQPAPSPVRKKHKNLKYILIGAIGGGLLLIAVVAAIVFCFVCSGSTGRRNHQRESGASPSAPSGVSATGTAAATGGTQPSALSANTVKVGDSFAYDQLVNATSGFGENRLIKHGHSGDLYHGVLQDGTAVVVKRITSRVPRKDAYLAELDLFAKGVHETLVPLLGHCLDKEEEKVLVYRFVRNGDLSNALHRKSREENEGLQSLDWIKRLKIATGVAEALCYLHHECSPPMVHRDVQASSILLDDKFDVRLGSLSKVCPQEGEGHQNVITKLLRFSSRSRFFWFPICNLPI

SEQ ID NO: 55119 - protein, 97 aa, Zea mays
  Clone ID: UC-ZMFLMO17084C04_FLI.pep
QNLLRKYEFEPMLFICKTKKKLYECAKCNACLQKYSLYTWVSNITVNTQTFGGGTSVKYESRSFLVPNRNFSLTEAHYITNLHTLHSLFLFCEHAMN

SEQ ID NO: 55120 - protein, 213 aa, Zea mays
  Clone ID: UC-ZMFLMO17045A12_FLI.pep
SSAQRRAPPSLCSSLSLRPVEALLWRAWISPPPSPASQRAPPSSLHPWSSAPISMARPASSRRARFRGFFSARFISSSATTTSPAPSPTILVDPALVQEVFLDNILNVNLGQAPAGQAALGAGLPNSVPCTTVNKVFSSGMKAVMLRLKVFSWESMMSWSLVAWKACRIPQNMGAELCSDQHSISREVQNSYAILSNERGIAAQDSGAFSWRD

SEQ ID NO: 55121 - protein, 383 aa, Zea mays
  Clone ID: UC-ZMFLB73319A11_FLI.pep
PRPACRGLSAQAAALALSGRRRCRTTHSTRSRTLSGRRRCLTTHSTRSRTLAGLRRNCRTTHSTRSRTLSGRRRCPTIHSTRSRTLSGRRRCLTTHSTRSRTLAGLRRHCRTTHSTRSRALSGRRRCPTIHSTRSRTLSGLRRCLTIHSTRSRTLAGLWRHCRTTHSTRRSRALSGRRRCPTIHSTRSRTLSGRRRYRITRSTRSRTLSGRRRCLTIHSTRSRTLAGLRRHCRTTHSTRRSRALSGRRRCLTIHSTRSRTLVGLRRHCQTTHSTRRSRALSGRRRCPTTHSTRSTTLSGQQRCPTTRSTRRRMLSGRRRCRWTTRCTTRSSGQGSRIPDTSCIRHGAPSAPNRRFVVGERRRSAGNGECHMHTCSWLPCDIKH

SEQ ID NO: 55122 - protein, 263 aa, Glycine max
  Clone ID: 700753894_FLI.pep
YKLVYREENMKLFVFFVAAVVLVAWPCHGAGYQRFPLRMKTGYGERSSEVKCASFRLAVEAHNIRAFKTIPEECVEPTKDYINGEQFRSDSKTVNQQAFFYASEREVHHNDIFIFGIDNTVLSNIPYYEKHGYGVEEFNETLYDEWVNKGDAPALPETLKNYNKLLSLGFKIVFLSGRYLDKMAVTEANLKKAGFHTWEQLILKDPHLITPNALSYKSAMRENLLRQGYRIVGIIGDQWSDLLGDHRGESSTFKLPNPMYYIE

SEQ ID NO: 55123 - protein, 139 aa, Zea mays
  Clone ID: UC-ZMFLMO17204G05_FLI.pep
SKTLPLSWTGLLWRLGICRERGGKSRLEVGAAPCLSSTMMTCCDLSLWAACLFSFGSSKVSHGKSESLATLQSCLAMITHGSFRCSSALRCGFALRGVVSFGCSCRSWFVVWCMKSELLSLGAKLDNDDLSQALGLLTR

SEQ ID NO: 55124 - protein, 248 aa, Zea mays
  Clone ID: UC-ZMFLMO17209G12_FLI.pep
RLASGRADLRPSGGPVAVANVSAPFRHHRDGLRPRPGHRKGKSGLRDGPHQTRTRVRRLASRPSPSSPARPRGLGRRSERHSGHVVRPRSIQRSMQARWKACAQLPSRRTSSAASSVSRQTMQAAWVAGDGCCSARSWAYSTAGSRVFTSSGWWASAEPRAASCGKPTAASVSRTASLMAPSRLQKATTGLGMGAQQHTGGNPMVSGLDWIGRWSWTGRMKQRALLRPPRRRQRGGLLFVVGIDRTVK

SEQ ID NO: 55125 - protein, 682 aa, Zea mays
  Clone ID: UC-ZMFLB73117B08_FLI.pep
RRRLFSFDSLVFLEGDEGRFRRARTDAAMAGVDAARYAHSPAHHAVAARDHAALRRVLDALPRARRPEEIRTEADSVAEEARAEAVSAVIDRRDVPGRETPLHLAVRLCDPTAAEMLMAAGADWSLQNEQGWSALQEAICTREEALARVIVRHYQPLAWAKWCRRLPRVVAAMRRMRDFYMEITFHFESSVIPFISRIAPSDTYRVWKRGSNLRADMTLAGFDGFKIQRSDQTILFLGEGSEDGKVPPGSLCMINHKDKEIMNALEGAGTPASDAEVQQEVAAMSQTNIFRPGIDVTQALLLPQLTWRRQERTEAVGPWKAKVYEMNHVVVSVKSRRVPGAMTDEEFFSSCNDNDIESEGFDDVLTEEEKKQLEAALKMDSPDAGGEDQSDSFAGPRHSCFEPREREVPIEDMSVSGNGEGKHDKKGWFSNWGKRSQVSKSEGVKKMASPRNSLCVDDKVSDLVIESPSNVQTRPGRHSVDVVRPDDNRRIRERDSRRHVASAENGHRRKEGSKESEYKKGLRPVLWLSPNFPLRTEELLPLLDILANKVKAIRRLRDLLTTKLPPGTFPVKVAIPVVPTIRVLVTFTKFEELQPLDEFTTPPSSPDNSKSPAVQPSSSSWIQWIKAPYLQNLSTAPGPSSRVEDIQDPFAIPSNYVWTTPEEKKKKTQENKNKSKKGRSGA

SEQ ID NO: 55126 - protein, 592 aa, Zea mays
  Clone ID: UC-ZMFLMO17077F06_FLI.pep
ENGVRSSSREGDMVAGTGISSPIKKRKFSPIIWDRDSPKPPHSGAARDKKSVESVPSELPPPPPLPQDHIPLSLSVEKSPMDVETTVGTESAEQLPEHEVNKVIEQEEDYPSPTMRNISTSRWAGANDDEEGGAAPMKKRSVSPADSSVPGQWKRASPEPGEVSGGRAMSRSSDSGKIGNDEKEDSEVDKDDYMDVDREHASDSGTENCMSDTDSDNEMCRPETPEPERPPHRCINMLQGCRSVDEFERLNKINEGTYGVVYRARDKKTSEIVALKKVKMEREREGFPLTSLREINILLSFHHPSIVDVKEVVVGSSLDSIFMVMEYMEHDLKGVMETMKQPYTQSEVKCLMLQLLEGVKYLHDNWVLHRDLKTSNLLLNNRGELKICDFGLSRQYGSPLKPYTQLVVTLWYRAPELLLGTKEYSTAIDMWSVGCIMAELLAKEPLFNGKTEFEQLDKIFRTLGTPSEKIWPGYAKLPGVKVNFVKQPYNRLRDKFPAASFSGRPILSEAGFDLLNRLLTYDPDKRISADDALKHKWFSEVPLPKSKDFMPTFPALNELDRRTKRYLKSPDPLEEQRLKELQGNIGNRGLFG

SEQ ID NO: 55127 - protein, 431 aa, Zea mays
  Clone ID: UC-ZMFLMO17166D08_FLI.pep
AEISGDTRAWNSFYMRQDTVVENIARKNGISKSELLDREADDLAVRIALGETHVIAETKKFLSRSGVNVAALEEHASKRNEKFKRSNYVILVKNLPFNSTEEELATLFQKHGSLDKIILPPTRVFALVVFVEATEAQYAFKKLLYTRYKDTPLYLEWAPENILSPTSAPVDEEVKNEVGERILTKANIDQTVEGVSAEEIDPDRVESRSVFVKNLNFKTTDESLKQHFSTKLKSGSLKSATVKKHVKKGKNVSMGFGFVEFDSVETATGVCKDLQGTVLDGHALILQLCHVKKDGQAAKKNGKDKSSTKLLVRNVAFEATEKDLRQLFSPFGQIKSLRLPMKFGSHRGFAFVEYVTKQEAQNALQALASTHLYGRHLVIERAKEGETLEELRERTAAQFVDESSGFQSLSSKRKRSSLVDEGSVKVSRIAE

SEQ ID NO: 55128 - protein, 146 aa, Zea mays
  Clone ID: UC-ZMFLB73259F08_FLI.pep
FKETPTVQYHSSHHPSTKTWLEPKCKDVQYSKQQAVSVCNAMQVSQYTDWAPPGLCSSGQEARTTAATFSPSPPAPDTNSTCHSKQADTKLQCPSPSLPSRKLITRNGSTRCTWTGRSVAASWTERCRWCCRTNRSASAWTPRPPS

SEQ ID NO: 55129 - protein, 395 aa, Zea mays
  Clone ID: UC-ZMFLB73003G09_FLI.pep
QSDESQFLPWRATLQGASACRPAWRPTRGPREAHRASPTRPSFLPRDAAAARPALALHQAGRQKQAPPTNLLVSHSATHIPRSSTKISPPRLPPARRGLHRSSRAAPLPCPHPNASLWPAPAARPAPHKATHPKNLHSSTAPSRGSHGIRRFASPLAPAPALPRRHIPPPQHPAPAGPPRRPQQRDPSSAPRPRAARLQQQRQQRGRGGARPPRGRGRLPIPVPRRRAPRALPSHAVPLLRRAAPPAGPRGSALPLIAAHTLSPLPHALLRRCAEPAGVLPLRPLQRDAGRRARRAAHLSRPARAVVRALRWGWVRDLPEHGEHGLPLPVRLLGVRRGRLPAREDTTSAHCRRCSGAPGDVTTIRFLRTMLMERESDDMQKTSQWFVGACSKSQA

SEQ ID NO: 55130 - protein, 107 aa, Zea mays
  Clone ID: UC-ZMFLB73122F08_FLI.pep
LFLLSAFSLFLLSAFLCYRRRQASGTPLPHEYFVYCQLAQWLRLFGEMCFPLYPSSCVSIRWISFSIFLCGLDPGFSSRDPLAFYRDENWDRKGKYFSLIALACADI

SEQ ID NO: 55131 - protein, 146 aa, Zea mays
  Clone ID: UC-ZMFLMO17201F07_FLI.pep
GSFEKLLPRSAGIGRRLVVRADIKVISTGEACRRGLAAGIDLFGRRLRGVSAHLRAQFPRGNPPDLQTSGGYPDLSSPTRVVGDASVPIIAIPPFVILSSGNSGGSRDGGRGGFGRAQPDRRRRHGGSLSYRPPSILPQPRVCLLE

SEQ ID NO: 55132 - protein, 513 aa, Zea mays
  Clone ID: UC-ZMFLB73018G04_FLI.pep
VSHSPCSSPTTLQSTRATPSTRLPPHPIPNLPPPPPTSLPNRIYDAVIKTGTESNAGKAALDALGAELTTPLVADVLHRLRYEEKLAFRFFAWASQQDGYNHEPTTYNDIIDILSGTRYKSRQFGVLCNVLDHMKRHGSRSVPVEDLLEILRAYTEKHLTHMRKLAKKRRVRMRTPPETDALNVLLDAFCKCGMVKEAEAVFGRVKRKLLGNAETYSTLFFGWCRARDPKKAMKVLEEMIQMKHTPESFTYVAAIISFCSAGLVSEARELFEFMRTEGLTISSPTAKTYSIMIVALAKADRMEECFELLSDMRSCGCMPDVTTYKDLIEGMCLVGKLDAAYRVLDEMGRAGFPPDIVTYNCFLNVFCSHRKADDALELCERMIEAHCEPSVHTYNMMMMMFFEMGEAHRALDICLEMDKRRCQRAIDTYEIMIYGLFDCGETEYATALLDEVINRDMKLSYKKFDAIMLRLSDVVNLGAIHRLSEHMRKFYNVAMARRFAITQKKKSIGLRRK

SEQ ID NO: 55133 - protein, 436 aa, Zea mays
  Clone ID: UC-ZMFLMO17185D11_FLI.pep
VGVIVSSRLVLFSSPPSFRGAERAAGTGPPRSAPRRPAKMPGLTAPSDYAEEPPRHPALKINSKEPFNAEPHRSELVASYITPVDFFYKRNHGPIPKVEDLSRYAVSISGLVNKSIQLSMADIWSLPKYNVTATLQCAGNRRTAMSNVRKVRGVGWDISALGTATWGGAKLSDVLELVGIPKLSSVTSLGGKHVEFVSVDKCKEEKGGPYTASIPLNQATNPDADVLLAYEMNGEVLNRDHGYPLRVVVPGVIGARSVKWLDSINVKEEECQGFFMQKDYKMFPPTVDWDNINWSTRRPQMDFPVQSAICTLEDVDVIKEGQARIAGYALSGGGRGIERVDVSADGGKTWVEARRYQKDNVAYVSDGPQSDKWAWVLFEATLDVPANPEIVVKAVDSAANVQPEKVEDIWNLRGILNTSWHRIKIQRSLCVERSKL

SEQ ID NO: 55134 - protein, 328 aa, Zea mays
  Clone ID: UC-ZMFLMO17187F03_FLI.pep
SRPARRRARKPHLALPAEERASTTVPAARRSVHSIHAASGERGVRTLRPMDLKDSLSKFKQQQERCQSSLASIAASTSKPKHRAQPAHAPNVPARPSQPIKFSNDTERLQHINSIRKSPVGAQIKLVIELLYKTRQAFTAEQINEATYVDIHGNKAVFDSLRNNPKVSYDGRRFSYKSKHDLKGKDQLLVLIRKFPEGLAVVEVKDAYSNVLEDLQALKAAGEVWLLSNMDSQEDIVYPNDPKAKIKVDDDLKQLFREIELPRDMVDIEKELQKNGFKPMTNTAKRRAAAQINGVKPKAKPKKKQREITKRTKLTNAHLPELFQNLNT

SEQ ID NO: 55135 - protein, 847 aa, Zea mays
  Clone ID: UC-ZMFLMO17192B10_FLI.pep
ASASAPPTPVAVIADNWGGCFDDGEQYRTRPSVVVDNWGGFFYGEDVAPSDNPTRFVLPVASTDEPSIDTAPARANSGAADDSVFVTAESSGYEEPSGYDEMDARLDLRFARLQQLQAEEVDEPYRDAVSPLPPLPVVYEPYREASHPPPVHDDVAGVVSTGSDDDLDLQQIAKEPSVSSPPRHSSRDAVRGPCPRPLHHQLTIPIAANLDQICRLSRPCDVADRGLLCDLLWSDPSSMEDREWADNKDRYVSCTFGADVATDCRRAQDLDIVYRAHQVVEDEYEFSVDRQLVTFFSAPNYRKLGCSFTIIKLKADRNSSSPLGCSTKCPSQALHPIVKPNLVVVLNIAGAGGKLCGGFDIKVFTRVHQTGDVSLMPNVSIELVSNMMEQGKQPSVAAIPGLALGGGLELTMSCQAQIPTHVAHTICSLVNNVMASQAHVVGQGIVDRAAFGGDHQWIVQGTANGHGLSSKVAAEVNNQFRVGIQTTAIIHVLPRGVLQFGSTGLALGNKKIVMFAKTLCSQLNNRSSLAASASAKNTSRQHGQSLIDNAIVSTSTPPNVLLIASLLWAAQQNGHPELIGKTPIVRPSLDVERHILLKGAFDKAEEIVLRMKQWDGTAGLVWQKDSLMVPKWLTDRLMAFLIFYSEAITALLCCALIPGLLLLELVKFTETWQGTVCWEPTILLLTRRHLYKQNELYATLFEGAMIGYTPGGMQFAQETIETMISSNLFLTAEMANTLSPWPWFNCVQECVLWQFDLLDISALHASRIGFSFVIILTESIKVLKMLLVDQGAAGHFFVMIWDPGGIDAMYRLEGKPNFKKGRMSAARHLNHEPLSLSQQGSWTKTSK

SEQ ID NO: 55136 - protein, 662 aa, Zea mays
  Clone ID: UC-ZMFLMO17201C11_FLI.pep
SPYYTTHKIMQGLLDQYTLASNEKGLDVVLRMADYFSNRVKNLVQIHTIQRHWEAMNEETGGFNDVMYQLYTITRDQKHLTMAHLFDKPCFLGPLGLHKDDISGLHVNTHLPVLVGAQKRYEVVGDRLYKDISTYLFDVVNSSHTFATGGTSTMEHWHDPKRLVDEIKISSNEETCATYNFLKVSRNLFRWTKEAKYADHYERLLINGIMGNQRGTQPGVMLYFLPMGPGRSKSVSGQSPSGLPPKNPGGWGGPNDTFWCCYGTGIESFSKLGDSIYFLEEGESETTGLYIIQYIPSTFDWKATGLTVNQRAKPLLSTDPFFKVSLTISAKRGARQAKVSVRIPSWTTTVGATAILNGQKLNLTPTGNSTNGGFLTITKLWANDTLTLHFPITLRTEAIKDDRPEYASIQAVLFGPHLLAGLTHGKLPVTDSSHSNDGLTAGIWEVDATGAASVAGWVTPLHSETLNSQLVTLKQSIGGRTLVLSVSIADAKLEMQQQPAPGTDACVHATFRAYGQAGGSSQLLRGPNVTIEPFDRPGMAVTNGLAVGCRGGRDTLFNAVPGLDGAPGSVSLELATRPGWFVATAPTAMHANATTQVVCRANKGGAAFRRAASFARAPPLRRYHPLSFAARGTARNFLLEPLRSLQDEFYTVYFSLVSDGES

SEQ ID NO: 55137 - protein, 582 aa, Zea mays
  Clone ID: UC-ZMFLMO17201F12_FLI.pep
CTRTIEPQEKHRIHRLLHQSIPIPEYHSILYSAIVDRLARLPWFITSNGRKGAEPFQSKIDSVLAMEKETPPPLHTDQETSVSSEQQRPRPHLSIDIPAASSLPADHLLPMATATQAGTSITPPSTRRGQQTSSNILSTPAPSSSSSKPSSRPPLRSPSFMLRQTVKSLLPLGSFKSSAVKSYEASISKLFGASATKVMARTPSLPLDHALSSSPHPPPVQQKSAALHHMCRSQSLPTTTNMKKAKLLNAANAKSFKRMDSLGGTFRVVPSTPRTPATAVPDDIAPAPPGGPGVDGGEDIPEEEAVCRICMAELSEGSDTLIKLECACKGELALAHTDCAVKWFSIKGTRTCEVCKQDVQNLPVTLLRVQSVQRRDLLNRGGASNTPRYDRYRMWHGTPILVIISILAYFCFLEELLVAHDGIVALAISLPFSCILGLFSSLTTTSMVARRYVWIYAAAQFLLVVFFTHLFYRYLHLQAVISIILATFAGFGVGMTGNSIAIEILRWRARRVAPPTQQARRRRHRRPRAPQHQAPDLPASGSADQTSSQPSAADMGMGIGAGQHHVMATAAGDVENPPVPQA

SEQ ID NO: 55138 - protein, 1100 aa, Zea mays
  Clone ID: UC-ZMFLMO17257C05_FLI.pep
KSQHGKRESPSPPPHPGLGFAPSRTIRSPPAAAAAMGSGDDERSTSKHHHRDKDKDRDRSSSRHHRDKDRDRERSSRHHRDDGDRDRDRHHRDKDRDREERKEREREERKAREREERKAREREEREERDREKEKEKEKERARRREERDREERESSRRRGDADGEEDDDRDRKRRRRSSHHHHRDPEPEPEPASREEEEVDAEEAERRRQRKKEEDMEAEQQRLDDEMERRRRRVKEWQEKRREQQQQDGSVASGASAAVAAEADGAKAGKKWTLDGEESDEEEDKEDGKKAEGNGGAGDMDVGLPSGNGDANGGAEMEEDEIDPLDAFMNSMVLPEVAKLESAAVAMDTAPAAGADGKNGKSSKDVISNGDKKGSRKATGRIMQGDDSDSDYDDADDDGAGEDDEDDEEFIKRVKKTKAEKLAIVDHSKIDYQPFRKNFYIEVKDITKMTSEEVVDYRKHLELKVHGKDVPKPIKTWVQSGLTSKLLDTIKKLGFEKPMPIQTQALPIIMSGRDCIGIAKTGSGKTLAFVLPMLRHVKDQPPVVPGDGPIGLIMAPTRELVVQIHSDIKKFSKVLGINCVAIYGGSGVAQQISELKRGAEIVVCTPGRMIDILCTSSGKITNLRRVTFLVMDEADRMFDMGFEPQITRIVQNTRPDRQTVLFSATFPRQVEILARKVLTKPVEIQVGGRSVVNKDITQLVEVRPDTERFFRLLELLGEWYVKGKILVFVHSQDKCDSLLKDLFQHGYPCLSLHGGKDQTDRESTIADFKSNVCSLLIATSVAARGLDVKELELVVNYDVPNHYEDYVHRVGRTGRAGRKGFAVTFISDEDERYATDLVKALELSEQAVPQDLKALADRFMAKVKQGTEQAHGTGYGGSGFKFNEEEDEARKTAKKAQAREYGYEEDKSDSDSDDEGGVRKAGGDLAAQAIANAHAAAALVANKAANNANQQIPGSATAPLIPLLTASNQQNDEATARALQAAMNLQQNLARIQAHAVPEHYEAELEINDFPQNARWRITHKETLAPIQDWTGAAITTRGTYIPQGKIVGANERKLYLFIEGPTESSVKKAKAELKRVLEDCANQALNLPGSAQTGKYSVI

SEQ ID NO: 55139 - protein, 398 aa, Zea mays
  Clone ID: UC-ZMFLMO17047B05_FLI.pep
RFVPHAIGDHVKNSVPWLPHSGRWRALRKIMATELFAPHRLEALQHLRRQKVEELVGHVRLLALQGRAVDVGSVAFTTSLNLLSRTIFSCDLTNLDDHTGSAKEFQEVVTEIMEVAASPNLSDLFPALACADLQGLRRRLAKLFARLHQVFDVEVDRRLCERDAGDRRKNDFLDLLLDTDGGTAALDRDSLLSLFTDLFAAGSDTSSSTVEWALTELLRNPVPMAKTCDELLAATGAARNIEESEIEQLPYLQAVVKETFRLHPPVPLLLPRRAGAATRAMGHTIPKGARVLVNVWAMGRDGDVWPDPEKFMPERFLGRPTDFRGGDLELIPFGAGRRICPGMPLASRMVHLVLASLLNQFRWRLPAEVERDGTDEMAESFGVTLKKASPLCAIATPV

SEQ ID NO: 55140 - protein, 1019 aa, Zea mays
  Clone ID: UC-ZMFLB73063H08_FLI.pep
KSQNLIPAPPPSKTLGASYNAAAAMDDSLYDEFGNYIGPELADSDADDDSDAAGASPSSTASRSPSPAARSPSGSPSRPAALMDVDEDEGDPSQQAVVLAEDKKYYPTAEEVYGPGVEALVMDEDEQPLEMPIIAPPRVVKFEVGTRAAATSTYASTDFLLGLAGNPALVRNVTLVGHLQHGKTVFMDMLVEQTHEVDTFDSEGERHVRFTDTRVDEQERQVSIKAVPMSLVLEGGNGKSYLCNIMDTPGHVNFSDEMTAALRLADGAVLIVDAAEGVMVNTERAIRHAIQERLPIVVVINKVDRLITELKLPPNDAYFKLRHTLEAINDLISSCSTTVGGTQLVDPIAGNVCFASGAAGWSFTLQSFAHLYLKIHGVQFDHEKFASRLWGDLYFHPDSRTFKKKPPKEGANRSFVEFILEPLYKIYSLVVGEQKGNVESKLAELGVTLSNAAYKLNVRPLLRLACRSIFGTGTGFTDMLVKHIPSVKDAAARKIDHIYTGPQDSSIVDAMKKCDPNGPLMVNVTKLYPKSDCSVFDVFGRVYSGTIQTGQTVRVLGEGYSPDDEEDMTVKEVTKLWVYQARYRVAISKAPAGSWVLIEGVDASIMKTATICPMNIDEDVYIFRPLRFNTLSVVKIAAEPLNPSELPKMVEGLRKISKSYPLAITKVEESGEHTILGTGELYLDSIMKDLRELYSEVEVKVADPVVTFCETVVDTSSMKCFAETPNKRNKITMLAEPLEKGLAEDIENGLVSLDSRQKEITDFFRQRYQWDVLAARSIWAFGPDKQGPNILLDDTLSIEVDKNLLNAVKDSIVQGFQWGAREGPLCDEPIRNVKFKILNANIAPEPLHRGGGQIIPTARRVVYSAFLMATPRLMEPVYYVEIQTPIDCVSAIYTVLSRRRGHVTADVPKPGTPIYIVKAFLPVIESFGFETDLRYHTQGQAFCLSVFDHWAIVPGDPLDKSIVLRPLEPAPMQHLAREFMVKTRRRKGMSEDVSINKFFDEAMMNELAQQAADIHLQMM

SEQ ID NO: 55141 - protein, 908 aa, Zea mays
  Clone ID: UC-ZMFLMO17318E08_FLI.pep
SRSRIIANSLLNFTQVIKTLQMRLLPDSPLLLCVVLVFTAIPSEQDSSGVLGTSQSQAGGSNALPAAGCPRSCGNLTFDYPFGIGSNCSRSPAFSLTCDSTTQTPRLYFEDDSITEVVAYGSTWLQISLSQAIPIMHGGVVSTYNMSWKSSGSGFTLFYANLNITGCDFDIYQLQDRHASSVKLCTVTCPDAGITDKVARQNCNGTGCCSVNLDVLEAFQLQFVLRSHGRARLGTHTSRSSLWDSINVTSTDAEILWSIVDQPTCASAMDDSANYACVSNHSNCYDGLGGRLDLGYICRCDGGYRGNPYVPNGCSRDKGYNPKEQKENCQRSCGNISVPFPFGLEEGCFARRLFQLNCTNTASSSLQFDDEHQVTRIHINEGLVDIKYTPLYEQEMFRVYVSNEPGLYIGSGESSSVQWAVANLTCHEAMQNKSGYACVSISSTCLGVNSTDDYIGYRCKCLHGFQGNPYIHNGCQALPINGESTKKQNLLLGIVIGLSSGIGILLLGLCATVLLRKWKRDIKKQQRKKYFQKNKGLLLEQLISSDENASEKTKIFTLEDLEKATNNFDPTRIIGHGGHGMVYKGILSDQRVVAIKRSKNIEEGEISQFINEVAILSQINHRNIVKLFGCCLETEVPLLVYDFISNGSLFEILHSSSSSGFSLSWDDCLRIAAEAAGALYYLHSAASVSIFHRDVKSSNILLDSNYTAKVSDFGASRLVPIDQTHVVTNIQGTFGYLDPEYYHTGQLNDKSDVYSFGVVLVELLLRREPIITSETGSKQNLSNYFLWEMKTRPTKEIVATQVCEEATEEEINSIASLAEMCLRLNSGERPTMKQVEMNLQLLRTKRSNSCHVVQDNAEEIQPLLCTGAESRYETFSITLGGSSNAESQYSQRFNSLEHDFKSSLGTPH

SEQ ID NO: 55142 - protein, 153 aa, Zea mays
  Clone ID: UC-ZMFLB73278B09_FLI.pep
RSNLWMIGSLLRRWLVKLPRSPTVDDILKKYLEHRAKKDGKINDSYAEILKGLRCYFDKALPAMLLYKKERDQYAEEVKGDVSPSTVYGAEHLLRLFVKLPELLASVNMEEDALNKLQLKLLDVLKFLQKNQITFFTSAYDGSCKGADEDKTK

SEQ ID NO: 55143 - protein, 190 aa, Zea mays
  Clone ID: UC-ZMFLB73077C05_FLI.pep
TNIVLNRFCANLTRRSSSHISTIVAPFLLSDPANVTIVLARLPTHQRKRASCPGEGARRKCPQLRPPGRPLRGTAVTRTAGGSPAAVAAAGARPPRRGSTTREAPRTAGRPRAPPWPGTRPGGEAPPRGTTRRSAASSASPSPPAGGSELPRTTPTNSESGRRLLGRGTFAGSLLSAAKANRQIDDGWMV

SEQ ID NO: 55144 - protein, 305 aa, Zea mays
  Clone ID: UC-ZMFLB73413H12_FLI.pep
RMEDREWMYTGRVRRNDVTPEWIRKTDAFVERAYGEAAKGASLVPCPCSKCDNRKRKPKKVMVEHIWKNGFTPDYTRWIFHGEAHRTREEVVRQRVEDYDADAGVGDMLNDYHEAQFAEGRTEDEPEATAKTFYDMFDAAQKPLHGKTKVSQLDAIGRIMAFKSQYSMSRDAFDGLLTVIGSLLPEDHVLPKSMYEAQKLHYTRARSTSASPAIRPRQDTSQHRIQQLQTQLDDERRQREELEKRMAEMFAYMQSLGAAQGHAPPPPLFPAADPTEFTTPGQSAASNNPHASSSPSPNQSRCPPR

SEQ ID NO: 55145 - protein, 306 aa, Zea mays
  Clone ID: UC-ZMROB73037D08_FLI.pep
FLRLFPRVFDLRAPLPLSLSLTPAAAGLLAVASSPADAARTLHRLLAMSVTRSLPLRAVFRVWRELALPDDFEDSVVEGHPHLFRLVSNPAEPNTHILHLVADQATEDFTPAVEKARPDRYAFKLQFPPGFRLAKEYRKKVKEWQLLPYTGPYQVVSPSAGGSKRVSKLARRKMEKRAVGIAHEFLSLTVEKMVEVEKFSQFRKWFGIEVNVRDVFLDHPGIFYLSAKGKRHTVFLREMYDRGKLLESNDVSEARAKLVELMLLRRRGLGNANSSANMASGATADARESGDDFVDHEDCLLDVSEK

SEQ ID NO: 55146 - protein, 76 aa, Zea mays subsp. mexicana
  Clone ID: UC-ZMROTEOSINTE075G07_FLI.pep
SKTTNCLDRLQLTRRPRDPVVKFNFSSSRLCVFPPCFSYIIDACNQIGSFVVFIPLYPPCLPPLNCILNNNVRHLV

SEQ ID NO: 55147 - protein, 443 aa, Zea mays
  Clone ID: UC-ZMFLMO17209F12_FLI.pep
APCALLGSPAAAPEKMPEEDEEIVAAVVAGKIPSYVLETRLGDCRRAAGIRREALRRITGREMDGLPLDGFDYASILGQCCELPVGFVQLPVGVAGPLLLDGRRLYVPMATTEGCLVASTNRGCKAIAESGGASSVVLKDGMTRAPAVRFPSARRAAELKAFLEDPANFDTLAMVFNRSSRFGRLQGVKCAIAGRNLYMRFSCSTGDAMGMNMVSKGVQNVLDYLQADFPDMDVISISGNFCSDKKSAAVNWIDGRGKSVVCEAVIKEEVVKKVLKTNVQALVELNVIKNLAGSAVAGALGGFNAHASNIVAAIFIATGQDPAQNVESSQCITMLEAINDGKDLHISVTMPSIEVGTVGGGTQLASQSACLDLLGVKGANRESPGSNARLLATVVAGAVLAGELSLISAQAAGHLVKSHMKYNRSSKDMSKTLAEETDKAKKC

SEQ ID NO: 55148 - protein, 190 aa, Zea mays
  Clone ID: LIB3078-017-G3_FLI.pep
AAEREREANPSTHKHSNVYASPRRFIHPSQRAPGGRAGTTTAKLAHRNSIASISAAVPTTTTTMIFPPAFLQDSSSWNDNQQQQHHQQQQGHGHLLVAVSGSGDANHELLQQPIMGGALPDGGGGGGGGGQVGGPAKPMSMAERARLARIPLPEPGLKCPRCDSTNTKFCYFNNYSLTQPRHFCRACRRY

SEQ ID NO: 55149 - protein, 115 aa, Zea mays
  Clone ID: UC-ZMFLB73417F02_FLI.pep
GQQRYPRHPPSTSVNNLFVTVFDGEDLVLFLGVDVSSFVIAGVAPGTTVLLPTQKVLSCTLVAELCGVSGVEGMTKLEALLGVSSTPLGASCNNTGCDCFGLDEDAWMKSFAVPT

SEQ ID NO: 55150 - protein, 124 aa, Zea mays
  Clone ID: UC-ZMFLMO17117F04_FLI.pep
EGEGSSSAAVWSVENDDSEDMAPREEIVLDQLTFVKFVNFSGTWCQLQLLSFFLDKSPVLQQLVLVTPEGEEALGDDRLKVIYERVAALEKASSEASITMCRPKEDDTPNHPHTRYFHEEYETM

SEQ ID NO: 55151 - protein, 75 aa, Zea mays
  Clone ID: UC-ZMFLMO17118C01_FLI.pep
HVLNFLCSLLQLTHAKWQFLYNDPIEFVIAHVFAKFHQVLLQQNKQSWNIELRHWSLKKRSRNPKNGWITMLKYG

SEQ ID NO: 55152 - protein, 370 aa, Zea mays
  Clone ID: UC-ZMFLMO17015H03_FLI.pep
KTGLQRPIAWIDENGNRYFPESFVQDQKIFMKKDFGNGYHDYISVESNGTREMNDQLGTSESSAESSNFGSSTEDVSSPKRARAENNSIIKKYCDMGEAIGENEPCTLLPTACNLLPRQANLGEVSRAQRTIEAVEKLLLQGMGSVIESKDIIGIYRTPLLDDHGQVRYHNHEKHVQVTRCHRGNANVRYAWLPCSKSTVHEMMLNSSLQVHKPPIKCAAYGEGTFLTPANRSDACVKFSAVDENGIVHMMLCRVIMGNVEIVHPGSKQHQPSSDYFDSGVDDLKNPQHYIVWDMNLNRHIYPEFVVTVKLPSKTKDYFVSQEDCQNSSDLSLVLNSSSPDCISERSQPKCLLKLWTWLLVAMKSLRVRK

SEQ ID NO: 55153 - protein, 446 aa, Zea mays
  Clone ID: UC-ZMFLB73246C04_FLI.pep
SWRRPTPAVLGPGTIPERYFLGPGTPIFFAMSMGLMERIRKRRQEDDDDMMMFFLPALHLLRSSSLKGRRVKKRRHTSKLSGEEHVLELLEGHVKNCRVAFRMEPEIFRALASYLRKERLVRDTRIKVEEKLGFFLYMISHNASFEDLQEEFGHSSDTFHHHIKHFFDIVVPSLAKRFLKPPSPMQVHSKIERNPRFYPYFKNCIGAIDGTHVPITISPDKAAPFRNRKGTLSQNVMVACDFDLNITFMSTGWEGSATDARVLRSAMNNGFHVPPGKFYLVDGGYANTTSFLAPYRGVRYHLKEYGQGHRRPQNYKELFNHRHAILRNHVERTLGVVKKRFPILKAATFHKIRNQVKIPVAAVVLHNIIRSLKGDEEWLDNQPDNISPQNFVDLPDGDQGNDQVNVQGNRPYVALFYILFTVTLLPLLIFGLIHFSLFSILKHNII

SEQ ID NO: 55154 - protein, 481 aa, Zea mays
  Clone ID: UC-ZMROB73044D09_FLI.pep
MPEPGGRCLGDLGGQRQVLKGWPDLWLVGDKPGLRALSTAAMAAAPQPPPLEADQTLALPDVLLLRVLACLPEPQLTGAASLVCRRWTRLAGRLRRRLAVRDWAFVAHRLPYRFPDLADLDLFPASIAAPTTAVPHGAAASPLLTCGVVSLTLDTSADPPLGACRFIDDDALDRGLAAVAASFPNLSRLSATAASESGGLMAIAVGCPTLQELELHRCTDLALRPVSAFAHLQILRIVAASPALYGTAEGGGVTDIGLTILAHGCKRLVKLELQGCEGSYDGIAAVGRCCAMLEELTIADHRMDGGWLAALAFCGNLKTLRLQSCSRIDDDPGPAEHLGACLTLESLQLHRCQLRDRSALHALFLVCEGAREIQFQNCWGLEDDMFALAGLCRRVKILLLEGCSLLTTRGLESVITSWGDLQSLEVVTCNKIKDEEITPTLAELFSNLKELKWRPDNKSLLAASLVGTGMGKKGRVFFKRV

SEQ ID NO: 55155 - protein, 87 aa, Zea mays
  Clone ID: UC-ZMFLB73258H06_FLI.pep
ERAKRAAEESQGILGSFLVDSAGLTESHFQENIVQLQIAPLRVSKVETQVRIDCLLKSMESANFSAFSPSSDICTAIHKIVVNHYSL

SEQ ID NO: 55156 - protein, 51 aa, Zea mays
  Clone ID: UC-ZMFLMO17103E10_FLI.pep
TALLVVVASMHYCTGKIANACFNNLARQIYTQNTPASCCSAVLPCPHSHDS

SEQ ID NO: 55157 - protein, 200 aa, Zea mays
  Clone ID: UC-ZMFLB73043H11_FLI.pep
PICTYKRSLVTSDAIYPIYYFVSWFIYNLLHPALSSSNLDKFLISIGKQPAYVDLEAAPAVGKDNPPDLAHLVPTGVPNSSEQPVENTAPTNVLKETEVKAKPKVQSKGAETSSKVDKPTTDTSVDKFVNDVFEIISPLFLSEALKKLDIKKEDLSLILEGLRGRADPDLKSIAMTLKNASYTSGFHAGYKTMQNRGLNG

SEQ ID NO: 55158 - protein, 186 aa, Zea mays
  Clone ID: UC-ZMFLB73032B04_FLI.pep
LEGEFPHVSLPLFCATGHVLKLFLTPPLHLIHVIYFPRIQLLETSFTRCVEHPGNHPRHPSHHCTTARFVLLAGLLQHQERSLLLVDVRFSQTRELPSNSNTLLASLSLQAIVSLVLAKVGRVLSFARQRLQSSFLFHGCTLTDSSAWPWSSVSCVPVLGRRVTCSSVLMPCTLRLVELAGVVIYY

SEQ ID NO: 55159 - protein, 221 aa, Zea mays
  Clone ID: UC-ZMFLMO17082C11_FLI.pep
FLKNGFLLLARVIATTCCVTLSASMVARLGSTPMAAFQICLQTWLACSLLADGLAFAGQAILASAFARKDHPKATATASRILQLALVLGLLLSILLGVGLHIGSRLFTSDQGVLHHIYIGILFVCLTQPINALAFVFDGINYGASDFGYAAYSMFYWNLDSSGDLHEPPDVCWILEDRDDTRALGLSSRLNIAADAKLSHGWLLCIAGLQYMFPSGSLSEV

SEQ ID NO: 55160 - protein, 441 aa, Zea mays
  Clone ID: UC-ZMFLB73200D03_FLI.pep
VLLLHPARRFRNPESSRRACVGVGACGGEAPAPPSRVARARASRWPTASLPSRAGPSRISWSTTRRASASGEADGDDAPPPRGSDHGASRPATARANGGADLAVFEQFERMERKVEISNGAIEDGPLQKSLLPSFESAEMRNLAETLLRDIIRGSPDVKWESIKGLENAKRLLKEAVVMPIKYPKYFTGLLSPWKGILLFGPPGTGKTMLAKAVATECKTTFFNISASSIVSKWRGDSEKLVKVLFELARHHAPSTIFLDEIDAIISQRGEARSEHEASRRLKTELLIQMDGLTKTDELVFVLAATNLPWELDAAMLRRLEKRILVPLPEPDARHAMFEELLPYTPGTMEIPYDVLVEKTEGYSGSDIRLVCKEAAMQPLRRVMAVLEGRKEEVPEGELPEVGPVTTEDIELALRNTRPSAHLHAHRYEKFNQDYGSHVHG

SEQ ID NO: 55161 - protein, 879 aa, Zea mays
  Clone ID: UC-ZMFLB73204C06_FLI.pep
HDESLPLKRTGYLAVALFLDERHDLVILVVNTIQKDLRSDNYLVVCAALTAACRLIGEEAIPAVLPQVVDLLVHPKEAVRKKAVMALHRFYQRSSSSVSHLVSNFRKRLCDNDPGVMGATLCPLYDLISEEPNSYKDLVVSFVNILKQVAERRLPTSYDYHQMPAPFIQIKLLKILAVLGSGDKQASGHMYTVLGDIFKKGDTASNIGNAILYECICCISSIFPNPKMLVAAAETTSKFLKSDSHNLKYMGIDALGRLIKINPDIAEEHQLAVIDCLEDPDDTLKRKTFELLYKMTKSTNVEVIVDRMIEYMINITDHHYKTEIASRCVELAEQFAPSNQWFIQTMNRVFEHAGDLVNIRVAHNLMRLIAEGFGDEDEGADSQLRSSAVDSYVRIVGEPKLPSSFLQIICWVLGEYGTADGKHSASYIIGKLCDVAEAHLTDDTVKAYAISAILKIFAFEIALGRRIDLLPECQTLVDELLASHSTDLQQRAYELHALLGLGKNDVESVMPADASCEDIEVDRNLSFLDSYVQQALENGASPYIPESERSGLTSVGSYRSQEQQETSAHTLRFEAYEMPKPSLPLATSQTSMSTPNTDLVPVSEPGYYKEDHQTSRPQPPSDAVSGEFGVKLRLDGVQKKWGRSTYSSSTPSSSMSSQQTTNGASHSDGGGPSSQPRESSYGSKRQQGTEVSAEKQRLAASLFGSAAARADRKAQASRKTGKDSPSTEKVATTNVAAQSVKEQVIPAAAPPPDLLDLGDETVPSSRPSADPFSQLVGLLGPASAAPALSGTPATTTSTSKAPDLMSIFSDDVPTGVTSSGSTDPTPGDAISVSSHKGATAVAPKKGSSLQDALQKDSTARQVGVTPTGNNPNLFKDLLG

SEQ ID NO: 55162 - protein, 257 aa, Zea mays
  Clone ID: UC-ZMFLMO17018A07_FLI.pep
KKSSIVFWWIANKRTVAEALEGMAWISDIRGTISWAVIFDLLILCEAVTEVHLQAGTTDKHFWRFSTSGQYSAKAAYELFFLGSTAFGPLKGFGKLGLLPNASSFCGWSCITDAGQQIVWQKGISLTLRSVLSVISKRKQSNTFSFLVFLQDNSGSRCCKRWGLPNLSPDLDATNLDSWWNSAAEKLPGDLQAGFNSIVILGAWSIWRPRNDCVFNGMSPSVTTAITLASDELRMWSLAGAKGLNLLSALVFVFDPG

SEQ ID NO: 55163 - protein, 1404 aa, Zea mays
  Clone ID: UC-ZMFLMO17018C05_FLI.pep
PFFFLLVRFIVSSGFSSSGERERERCPAACCRVIWSSINITMILLHTRDDDAKQDEVRMMATAESDDDAIWVPPDEAAAAAYSMMQDDDDDDYHAGAGEEDDEYEDDDDATSSICRWRHDSDHQSAAHREERQKAMLRAMNGQLRMLAARFLESAGIDTSSWLDIVISLSWEAALAIKPDVGTAVGNQMDPSSYIKVKCLASGTPRQCEVVKGLVFRKNVAHKHMPTKCHNPRLLLLSGLLGHSYVGFSSFSSIEQEKDHLDKSVCEMMEICRPDVVLVERTVSRDIQELLLKEGVTLVLDMKLNRLQRVARCSGAPIVSFSEVLSKPKLKQCDYFHIEKVTEEHNLITCSAGVGSRPSKTLMFLEGFHKPLGCTILLRGANTQELKKIKQVMNYTVFAAYRLVLETSFFEDQRLILNNKDSSKEEVSVARKAGPSSLGSVQETTDSNALNPLDKGFPNQALLPSEGLVVSAVPESPRRFIDILRYHNIYLPVTSSQEATDHQIQDSIHISPNVGVPIGSVESVDHLSDPQEQASSETNQQMALDGPSVSEKHEQSLENIKTSDTDEVDDVLESQSILILLSSQCITKQVICEQSRLSRIRYYGNFDVSLGRYLQDILQKQNLSCSSCGEPPEAHMYSYTHRNGNLTVLVRHLLPKYRLPGESEGKIWMWTRCLRCERESGISRSSRRVIMSAEAHYLSFGKFLELSFSSHSTARRLSICGHSLNTDCLRFFGLGSKVAMFQYSSVEIYNACKPQPTLEFHNSDMHEWYGQEVLATGVTLFSEVTSALQKLKDQFPVKYLSQLEEMLIKEKAEFMDSLAKTVDRNRESSSVDDILNVNWLYQDLLLELYVWDRRLHQLVGCTPAEKAIAANGQTAAAAEAGRIGERMSSIASFENRCIKEPEKFSEAGTASALLDDAWNDKHYNDQHSTNCECDGGEEKWVWNPVNESRLAFRQEVEVGCLKRFEVVNHYCPSHLSPLHKHRESGEEMGGSPQFTVGPGGSILCVSEDEVSSIISRALAVSEERRHLLMDAIAETEPADSTRGKTMDKSYSSLSESSSASLWSSDSEASISSDDLSSYDTSLLLSSSLHPEIAVNGTTALKGRYSVICVHSNQFYNLRRKCCPSELAYVASLSRCKRWDAQGGKSKAFFARTMDGRLIIKQIKKTEFESFIKFAPDYFKHVNHSLDTGSQTCLAKILGIYQVKQTRHGKEIKMDLMVMENILFGHNVSRTYDLKGAVFSRYVSDPNDHAGTVYLDQNFVDDMRVSPIYIGGRAKHLLERAIWNDTSFLTSINVMDYSLLVGVDRQKRELVFGIIDYLRQYTWDKQLETMVKASLVVPKNESPTVISPRDYKKRFRKFMSKHFLTVPDEWSTESRPPVAWESCAHAGELPGVKPQHPNPILLACA

SEQ ID NO: 55164 - protein, 166 aa, Zea mays
  Clone ID: UC-ZMFLMO17092E07_FLI.pep
VLAEVKPHEKKKFISELQKEHKLVAMVGDGINDAAALASADVGIAMGGCVGAASDVSSVVLMGNRLSQLIDALELSKETMKTVKQNLWWAFLYNIVGLPIAAGALLPATGTILTPSIAGALMGFSSVGVMANSLLLRVRLSSRRKREPLKAISDEVEKNYSSKWST

SEQ ID NO: 55165 - protein, 174 aa, Zea mays
  Clone ID: UC-ZMFLMO17222E02_FLI.pep
RLSIVISRICQHVSRLSSPHTHLSLTVPSLHFLLAAAAALLSMAATSLSAARKFFLPWCSWLLFLWPCRVPLLPNAHPSSGPCSSSSRPLPARSPPPFPLPVRPSTPRRRFPSLDRALLGFLQHMSSPCAQGHGAATTMKPPSCRALDVLDEIPQQAPPRSMPTRSPLRRTSVR

SEQ ID NO: 55166 - protein, 398 aa, Zea mays
  Clone ID: UC-ZMFLB73015D07_FLI.pep
EEDSYFSYLPLAHIFDQVIENYCISKGASIGFWQGDIRYLMEDVQVMKPTIFCGVPRVYDRIYTGINMKIQSGGMIARHLFQYAYNYKLANMRKGLKQHEASPFFDKIVFSKIKEGLGGRIRLMIAGAAPLPGQIEEFMRVTTCSVVVQGYGLTESCAGCFTSIANIFSMIGTVGPPVTTIEARLESVPEMGYDALSDTPRGEICLRGHTMFSGYYKRPSLTEEVFSDGWFHTGDIGEWQSNGTMKIIDRKKNIFKLSQGEYVAVEVLERAYLQSPLVASVWVYGNSFESFLVAVAVPERQALEEWAAANSKAGDFAELCADPKARTYVRDQLNQTGKKLGLRGFEMLKAVYLEPVPFSIEKDLVTPTFKLKRPQLLKYYKDRVDQMYKDAKEGRAAP

SEQ ID NO: 55167 - protein, 182 aa, Zea mays
  Clone ID: UC-ZMFLMO17242A03_FLI.pep
TGRTKSGSNKLPSQNKIRSSHFSSQASSQFSSQVPQFSSQASSQAHISMEQYTGSSLTSYYTSSHFWEQYTGSSFTSYHTSSHFWEQKTGGVVAVVCSSSFAATTSSRLGASSSFPATTTTSHLLWRGLGLWSQRRRHLLWRGAASSKGEDAEFGEKEVQRRRHLLWRGTTGSRSPGSRGGD

SEQ ID NO: 55168 - protein, 114 aa, Glycine max
  Clone ID: 700874667_FLI.pep
VLFINNNILTQGLPDNLASTHILLLTLANNKFMGPIPRSLPKALSTLSEVLLLNNQLTGCLPYEIGFLEEATVFDAGNNQLTGPLPLSLSCLEKVEVLNLVVIYCTAWCLKWCV

SEQ ID NO: 55169 - protein, 126 aa, Zea mays
  Clone ID: UC-ZMFLMO17031A12_FLI.pep
RVEEAKDLFASISRSGLVPCAVTYSIMITNLLKEGLVEEAEDMFSSMQNAGCEPDSRLLNHVVRELLKKNEIVRAGAYLSKIDERNFSLEHLTAMLLVDLFSSKGTCREQIRFLPAKYHFLAEASP

SEQ ID NO: 55170 - protein, 476 aa, Glycine max
  Clone ID: 700833639_FLI.pep
LPTWKTFMRIPKAIRWLWCAGFTKLMSPGHYEKFQNEARCTHLEPFICNHQFDNDDVKPFDITQIKGYWKQEILRYMYTQLDSKSSGSSRQSDDDLELDENHMTTVFIRPKKRLRLTKADDAKEAVDLVGLKTENVNNSKNNTKINTGNNSGKLIGHTNMTATIKGTNEHASHHLVVGSLVEVLSQDGGMRGCWFRASVIKKNKDKVKVQYQDIQDAVDETKKLEEWVLASRIAVPDNLGLRMRGRTMVRPAPPSNKRELSWVGDVGFVVDAWWHDGWWEGIVVQKDSESNCHVYFPGEKVVSVFGPGNLRESQDWVGNEWVFVRERPDLVASVLSSLKTKQNSCKSNSNNIQSTGAITRDGIQFGQSDTCLDSDKDRPRKAEVVPDLLKNVLSSQLRWKTTRKRKRGRSSASYQKPRCTDTHQKRSPNVMKSNAPDSFLIPASLKVDHDDCKYVGDPSIFSSSVVPSLTNMVMCR

SEQ ID NO: 55171 - protein, 382 aa, Zea mays
  Clone ID: UC-ZMFLB73020G07_FLI.pep
GDRPPGRAGARGSAPRSRRAGKLRGVTMQEPTETRPAGAEDLANGARDGEGPPPQVEEEEVEEEPPRSATAKQEEATAALGSEGSRPFTMRELLGELKEDGETAAGGSSARSAFGDGNRVGSDDAEGSFYSQDSTQQFSSHHDVAMDLINSVTGVDEEGHSRQRILSFAAKRYVNAIERNPNDPDAYYNWALVLQESADNVDPNSSSSKDALLEEACKKYAEATRLCPTLYDAYYNWAIAIADRAKMRGRTKEAEELWKQAILNYEKAVQLNWNSPQALNNWGLGLQELSAIVPARDKQTIIKTAISKFRAAIQLQFDFHRAIYNLGTVLYGLAEDTVRSGKPDVSPNELYSQSAIYVAAAHALKPNYSVYRSALRLVRSMV

SEQ ID NO: 55172 - protein, 538 aa, Zea mays
  Clone ID: UC-ZMFLB73155D04_FLI.pep
LEYGAKAKCIIRAAHAATPRDKMSSEESSAMLNSRIVAMNQFIHKLQKENKLREKERNEARNVLKLREEELAQLRAKLNLIERQGKATENEINSKVMEKTQTLRGELMKMEEAMYKQQQELCVLRQRLQEVEREKADSCQPGQQDVIGGRLLARLSEMPAGLDQSMAIDMSMDLDMGDQTSMQDVKVIKEDTCQQGQIWNHTTTAASACTGSLVQEDDVRLSGYPEKTVLSTVFEEGDEDYAEKKCGLQEEVRKEVVDENFKVDIAQHTLSEPDHPATRKHHIENMFRLCGNHREIAKKPKVQSPAKEMFWNENQSPAKQVFGNQNKSPANKIFGDENKEPLAWGAIETPMCDVRVTDSPVSSQLSPIVCQVVDAPLSAQPDTCSAVEESDPNKENSLAGQKDGGLLEVYIKWESGNLIKGLKLLHNSCLSDLRKFIEAHFEEAGSKQKHQFTFLLLGDPSGAPVSRDTEASVQISRLPHWNNQPDSYLACLRAAKKPSADHVPFSPLDSNLNTVHLAGAVSPKVNQMSPSYIRELRA

SEQ ID NO: 55173 - protein, 426 aa, Zea mays
  Clone ID: UC-ZMFLB73143D12_FLI.pep
IAEKRRTFGCCMMVEGPNFAGLIGGHDNGGNFCDMAYYRKLGEGSNMSIDSLNSMQTSTHGGSIAMSVDNSSVGSCSSHTRMLNHPGLKGPVVGNYSVGGHSIFRHGRVSHALSDDALAQALMDPRYPTETLKDYEEWTIDLAKLHMGMPFAQGAFGKLYRGTYNGEDVAIKLLERPEADPERAGLMEQQFVQEVMMLATLRHQNIVKFIGACRKPVVWCIVTEYAKGGSVRQFLAKRQNRSVPLKLAVKQALDVARGMAYVHGLGFIHRDLKSDNLLISGDKSIKIADFGVARIEVKTEGMTPETGTYRWMAPEMIQHRPYDQKVDVYSFGIVLWELITGMLPFANMTAVQAAFAVVNKGVRPAIPQDCLPTLGEIMTRCWDPNPDVRPPFTEVVRMLEHAEVEILSTVRKARFRCCISQPMTTD

SEQ ID NO: 55174 - protein, 718 aa, Zea mays
  Clone ID: UC-ZMFLB73127H11_FLI.pep
AIQVQQNCFQSVSFIRKVGVWREEEKMAALERRGGHHTAAFIRAAKASSPPPPARQRQSQRCSKSGSGLDDDDDDRDARAAPRSPQKASSQTKLQEQKREAETEVQRRRRRSEAHNSLRKEIQQLETRLRDQQVVRGALEKALGPEPEPEPDDDGAGPRPLTLQNESPALKLIREVATLELEIKHLEHYLLALYRKAFEQQQAPTTALPPSDDRRDAARKLSVSSRPDDETPRARAPVIRGGGGNGRRNGGTADDCSPSTTCPRRTAVDSDPAGLRSQSALSFRGAWSSSSSTSSRISPTEDSLARALRSCHSQPFSFLEQGETTAPSGGVVSLADYLGTSVADHIPETPSNLSEEMVRCMAGVYCRLADPPLLARHRPSASSASASLSSAASAVSPTQCLGGGDNNTWSPTSSSSYHCGRRDAARLVNPFRVEGVKEFSGPYSAMVEVPAISRDRPRLREAEDLLQTYKLILYRLETVDLRRMTGEEKLAFWINVHNALVMHAYLKYGVPHNQLKTTTSLLVKAECKIAGRAINAAAIQGLVLGCTAHCSSGHWLRALLRYPRTTTKASRRASRAGGEEWRAFAVRQPEPLLRFALCSGSHSDPAVRVYFPKRLAQQLEAAREEYVRATAGVRKDDRRVLLPRLLDAYARDAGLTADRLLDAVQRCLPETLRTAVQRCRRRGDGPGAGKAVIEWVPHRRSFRYLLARDLAFPHLSLS

SEQ ID NO: 55175 - protein, 411 aa, Zea mays
  Clone ID: UC-ZMFLB73177E06_FLI.pep
HKPAISIGKSVNHFPLWVIEISDKPRQRESEPAFKFIGNVHGDEPVGREVLMHLANWLCDNYLKDSLATLIVENMHLHILPTMNPDGFALRWRGNANNIDLNRDFPDQFFPVNNDIDYRQPETRAIMNWVKQEHFTASASLHGGALVANYPWDGTRDTSKHYYGCPDDKTFQHMASVYSRSHYNMSLSKEFEGGITNGAFWYPIYGGMQDWNYIHGGCFELTLEISDTKWPKADELPIIWEHNRMSMLNLLASLIKSGVHGRIFAADTGRPVPGSVMIKGIDSKVSASSTFGDYHRIVAPGETYEVVASMRGFRQKSTRIRLEQEAVSLDFILDPDGADGQTKLLPRSNDRGCRCDNDNAAKPFHVHEAHLWLYLLIVSVLLALYVVFKRKTVPRLLAYRHSSSLRRPVAV

SEQ ID NO: 55176 - protein, 771 aa, Zea mays
  Clone ID: UC-ZMFLB73240F09_FLI.pep
PHRPPSPPPRLFRAAMDEAFARAVEDGLKLTKRLVLPSGGGMPPPPRPHLAMDRDDPAAALQQLMPAAPMAYAVVVDPAAVDSPDVPSYQPHVYGRLDPPALIPLQMREVELRVDCAAGCATAEVALRARWWLHCITRSRACHCRIVVPMAHQGSILGAEVTVGKRSYNTHVIDTEDNCSVKIAMPESGGLLKQEFFSLTIPQVGGGEDIFATIRWSQKLLYDNGQFSVEVPFRFPQFVNPLPKVFMKKEKIQLIVNSGVTKEILLQGTSHPLKEKSRQGEKLSFLHEAVVENWSTKDFTFAYTVYSGDLSGGVLVQPSTLRDYDDRDMFCLFLLPGNNENRKVFRKAVVYIIDTSGSMQGKPLESVKNALSTTLSDLIPGDYFNIITFNDELHSFSSHLEQVNEKTIGNAIEWMNLNFVAQGGTNIMHPLSEAMTLLSTSHDALPQIYFVTDGSVDDERNICHTLKTQLIKSGSKSPRISTFGLGSYCNHYFLRMLASIGKGHYAAAFDTGSIEGRMLQWFQKASSTIVSNVSIDAIKHIQDFEVDSVYIPDISAKYPLCVSGRYNGKLPETLIAKGHLADMSEISIELKVQHIKDIPLDKVLAKQQMDLLTAKAWLMENKELERKVVKLSIQNSLPSEYTRMVLLQTSLDKIDPAQQAKNKPTKQSSSPDELPAMPLGGLAVGFGDVAATTENLTTGFGDMKAAEKFVMLEKAAGCCSRMADCCCCMCFIKACSKMNDQCAIVMAQACAAIACLGCFECCSELCCGGSN

SEQ ID NO: 55177 - protein, 560 aa, Zea mays
  Clone ID: UC-ZMFLB73264A02_FLI.pep
EAFPAARFPPIDLYALPTGGSRTSTNLPSRPARRRRRLAVRFRPPKPYYLLPSSPASSMATNGSSPRVRDTESSLEKVKRQLSSGSGRYLLQGPLLKRSETLRKWNERWVILDPTSGKMEYKLRRNETAIKGTILFDASSTITLSPVNFQGMPKYNGCCFYIGTPQKKDYFLCAETPGAAKAWVSTLHATQLVLRAHKEAVNSLAGNGSPATLGTVATAVANANATAMEATKEIEAALKVSMRAALGLDTNNSNEGQLDDLTIMKETLRVKDEELQHLAKDIRSRDATIKEIADKLTETAEAAEAAASAAHTMDEQRQLLCSEIERLKQALERQIEQSVVKLRQSEEKVISLSKEKEQLMKERDAAFQEAHMWRIELVKAREQAVIQEATIARAEEKARVSEADAAARIKEAAEKLHTVEKEKEELLALVGVLQSQVLREQSSTKQVCEERSESCSGADNSPLLTKHVDASDDDVDKACVSDSRSVPVSSDSTEVQLAVDGVDIRPVGDAEWSSFQQPEALIADVREVSPEADGGSLDIPVVNPPPVSDHIQGGGGATHP

SEQ ID NO: 55178 - protein, 799 aa, Zea mays
  Clone ID: UC-ZMFLB73274D03_FLI.pep
AMEPNECYITMAISRHPFLRRWILSRYKKLCDSCKPAVVSEVSSCLKVLGSLSEPSDDKSHTGNESSVLEKLDNNVRENMRPDELISSSEQGALAKTESVDNYGNKFSQNKNVDMVRSDNQKSDELTDAKLDDFKGGTVVSDAQHQGSRSDLLMPKSVYDSAGGSTSLTSPGQHFGRAKHLFSEPFDIYGTYVARDVISVSKELWVGSLGNRATEALVRSKFEEFGPLVNFLFYPSRKFSLVEYRNILHAVHACGYMQGSSIWGGFLQVKYLDRLIGSKGVIRGIAIGESRHVYVAKVKNKKDKDEVFDDLKMAGLKWPSGITDIPGENALLLEFETAVDAATAKFYIRHQARPNVCSRDMNLPGHQLLVQNIDHSVPDIDLINAFSQFGEVIRWQINRADSNCFIVYRSQDAAARAKSHLHGARFGLKSISIESRTYSAGSVHDKTVSPVAPLLGQSVPDNSVRHEIRNPIVPGYHAGYAAPGDRPIYGPPPPNTSRAPQGNFPCPPVSTHHGSVMPPPPIQTSFVRPMYPGPGSPWENTTPNPPPFSHVSPRMMPGSNFRVNPASLPFVPSCVTPVSQLPGGSAQHSEKMPPSLPLPTVAPPPFTPLDMPPTHPPPLPISQPPSVPPPPNSPPPQPFADSSDSQKPSSHPQWQGPLLKSGLHYCRIYASRIELDACRYENTVSEPAEWPSALDVTKRTAFQHVKTTFNNTPPNKREVCRLVPCSNGDQRGFRDFISYLVQKECAGVIRIPAVKAMWTRILFILPPTSDACGMVGIPPLPADTMIVVTLPKETTVEAS

SEQ ID NO: 55179 - protein, 638 aa, Zea mays
  Clone ID: UC-ZMROB73075G09_FLI.pep
VTSAPHFAVELEDTRSNAGFFCGDLWCGLMEPKGESGQKPIEEAIDSLKTDASMKANNVNLPAKKDASSSDAVSCISSGDAASTVKDREMNQETSFGDQGMHYYGYYYPGAYGGWDENGYFVGYNGLEVHPAVVQADNGSYLCYPLGYENGYASYIPVVPGGIASVDGQYVSKEPYYSSALPIQDPSTPGIFAQPIAYGTELVPAYSWDPFVLLDGVQGHPVGVHHTNYAPRPKYSSNKHVVPSLKASHSAKSTADTVKGSSSALETVPNAANSSTSSKGANKAPGASITKGYLPSSKFVMHSNNQAKSSVYQSKGINLKESGRSWHSSEKLKARSKLNGHGDSESNENNHTDNSKYSLSSQSDVVGLSSVGDANASIPSPVVIRKTAYNLSDFVTKYEQALFFVIKSYSEDDIHKSIKYNVWASTPNGNKRLDNAYRLAQERMAEKGTKCPVFLFFSVNASGQFCGVAEMVGPVDFNRNMNFWQQDKWNGFFSVKWHIIKDVPNPQFRHIILENNENKPVTNSRDTQEVKFSQGTEMLNIFKNFTCKASILDDFDFYENRQKVMQDRRGKPLTSFGHPLPKAEKTAEVKRQTQLISATEVGRADTTKENEEKSSSVPEILNAACSNKEKPNKIATDG

SEQ ID NO: 55180 - protein, 443 aa, Zea mays
  Clone ID: UC-ZMROB73076H11_FLI.pep
QTVSRATSARCLRGCDLLPSLPSPTEQTAIGSRAPSPEGQMAAAEGQVRRDMWGQEYRTSSADCAAALDAYYAAFMSFGRGRVAAVLRAAAADPTCALAAAHAAQSVAPRDPAGAAAFLNAAADNLGKATEYERAVFGTLSVLVGEKRDEEVAIERHFELLEQFPRDLLSLKRAQLICFYMGKPDLSLKFVQQVLPKNQDQNFIYGMLAFPLLELGRMDEAERAARRGLAINKNDFWSQHNLCHVFQQECRFREATEFMESCSPSWEACTSFLLTHNWWHVAVCYLEAESPLCKVLEIYDHNIMKELEKSDCETAEVYLNGLGLLLRLFIRGHIDSAKERLTTLLDALKNESIWHVEWLLDLLILWALSSMGELKSAHNMLESLKSRVRLMDRNRQQAMQKAIKLAEAAYEYGKGDHMKVYDTLGPDFDALGYKVGSGTFLLL

SEQ ID NO: 55181 - protein, 272 aa, Zea mays
  Clone ID: UC-ZMFLMO17202H10_FLI.pep
HPLPLAIDPVIDLDSSCSSSDNAFASHSALVEGMEQDTGDSRASKNNKAWRRSMDFYSHHDTNQSTNYEPRESALVPHNPDNTQEASVDPYDSDMTPSLQEALHRSTMDISGAEYRGKEVPLLVVPTRYLLKLDTTMTSYCDMQRVLFEEEKSAYNQAMQQNICDGKIHPLTSIHHTSTYNSSICKLMEYCLSPAVTTLQDRLKENELRLSMLQEEAKQLEADTQNMRNGSPRRLMNHGAGGKSSPTAQSRHPFSNQGSPRSPSGGSRRRAC

SEQ ID NO: 55182 - protein, 72 aa, Zea mays
  Clone ID: UC-ZMFLMO17288A09_FLI.pep
MEEISGILGALFSLQKLAGSPLWPTWEELHYPAKHPFNNLVSFIRIHCCLVDGACVNWFRQGILVSHPLRSQ

SEQ ID NO: 55183 - protein, 195 aa, Zea mays; identical to SEQ ID NO: 51348
  Clone ID: 700348188_FLI.pep

SEQ ID NO: 55184 - protein, 811 aa, Glycine max
  Clone ID: 700565776_FLI.pep
RTSEEMANHPLTHSHSFRERFDETLTGHRNEILALLSRLEAKGKGILQHHQVVAEFEEIPEESRKKLQDGVFGEVLRSTQEAIVLPPFVALAVRPRPGVWEYLRVNVHMLVVDELRPAEYLRFKEELVEGSSNGNFVLELDFEPFNASFPRPTLNKSIGNGVEFLNRHLSAKLFHDKESMQPLLEFLRLHSYKGKTMMLNDKVQSLDSLQHVLRKAEEYLISVAPETPYSEFENRFREIGLERGWGDTAERVLEMIQLLLDLLEAPDPCTLETFLGRVPMVFNVVILSPHGYFAQDNVLGYPDTGGQVVYILDQVRALENEMLNRIKKQGLDITPRILIITRLLPDAVGTTCGQRLERVYDTEYCDILRVPFRTEKGIVRKWISRFEVWPYLETYTEDVALELAKELQAKPDLIVGNYSDGNIVASLLAHKLGVTQCTIAHALEKTKYPESDIYWKKFEEKYHFSCQFTADLFAMNHTDFIITSTFQEIAGSKDTVGQYESHTAFTLPGLYRVVHGIDPFDPKFNIVSPGADMGIYFPYTETERRLTEFHSDIEELLYSSVENEEHICVLKDRNKPIIFTMARLDRVKNITGLVEWYGKNARLRELVNLVVVAGDRRKESKDLEEKAEMKKMYGLIETYKLNGQFRWISSQMNRVRNGELYRVICDTRGAFVQPAVYEAFGLTVVEAMTCGLPTFATCNGGPAEIIVHGKSGYHIDPYHGDHAAEILVEFFEKSKADPSHWDKISQGGLKRIHEKYTWQIYSDRLLTLTGVYGFWKHVTNLERRESKRYLEMFYALKYRKLAESVPLAIEE

SEQ ID NO: 55185 - protein, 159 aa, Zea mays
  Clone ID: UC-ZMFLB73276E10_FLI.pep
LLPIHIMASKQQQKQFLDEAMIKQPTPEEDREGAWPSVLTIIGFGFLTFNSFMAVYRSNGDVGSISFVVFSYLVLVLLFYCLRRFETTPPESPSREHIKMAVWVLTTMLTAAFSYKVAAIMPLPVQVLVWAMAGATVFGGFYAFFIHQEKTAQLEPPKP

SEQ ID NO: 55186 - protein, 253 aa, Zea mays
  Clone ID: UC-ZMFLMO17154G04_FLI.pep
PLPSANRSIYTLQATARNGKRKENGRGNTRSERGKQATATLHYYYCSYTFFFFFFGLLRVHGRPHGTCSTQPRRARRGVTAHRSPGGGWGGGPGWWFLPTGSLELRVAEQRRLVGGEGHVGAAERARGALVPEPGLEAGAVEEVAAGEAVHHGPRPEPGQAHAAVVAAAVRLARRRRRRQHLVQRRPEGPEEPLCQSRARRRQLVPAVVPGRQRGLQVQEHQRRPHQPRQRRDRDHRVVHQVPQQAVPRLRHA

SEQ ID NO: 55187 - protein, 333 aa, Zea mays
  Clone ID: UC-ZMFLB73245H04_FLI.pep
KRNRISAGAARSHRPPSSLAEPTPSPFGPQLATTTMASSKRRFGAAGGADKKDLFHVVHKVPAGDSPYVVAKHLQLVEKQPDVAIVWFWKAINSGDRVDSALKDMAMVMKQQDRSEEAIEAIRSFRHLCSKQAQESLDNLLIDLYKKCGKVEEQIELLKQKLKSIYLGEAFNGKATKKARSHGKKFQVSIQQETSRILGNLGWAYMQQNNFEAAELVYRKAQAIEPDANRACNLGLCLIKQGRHDEARQALEDVRLRRIYGSEDGKVVARAEQLLRELNPLQCVSSPFQVGLSVHEGIMGKPDLVVMNEWTPFRSRRLPVFEEIATFRDQMAC

SEQ ID NO: 55188 - protein, 437 aa, Zea mays
  Clone ID: UC-ZMFLB73326B04_FLI.pep
KIERRASQCTRAMEGSPVARLPEANSLPDGFVPDSESSDTDAAPPSSAPIVDDAIDSDSPDATNPGGEETLSDPSLPASTAEDASSAAAAEALDTLCLDVVADPERALGEHGPTTAARGEGSLKENRASEQVGAPSDQKVVKGSGEPKRKVIKHSKLEKDKELFQLAQQYHKVVAERDQAIAVKDRLESLCREFQRQNKMLKEECQRVSTEGQNMRTELSEKFDHAIKGVSAKLEEQRVERISQLEENNTLRSKLKDLADQYNITQQKYAHQLKEKMLELELADLRLQQHQEKAAQEHTQMQLYAEQVSQLMTTEKNLRLQLASDGERFQHFQDALSKSNEVFETYKQEMEKMISVIKNLKKENEFLKGKCENSDIAIVKLIEERELTKKQIEKLKNQREKLESLCRTLQAERKQGPSASIPDAPSSQEVSATSQES

SEQ ID NO: 55189 - protein, 210 aa, Zea mays
  Clone ID: UC-ZMFLB73298H04_FLI.pep
WQVPPARAHSHRRDPASVAIPRFVVCFIKGSDSTTSMSRSHILVPPKNHDMSPLGQGTTITDADPSRPWRTQGSTRLGFPNPRSPSMANGSSPDMMSARLPSPRFTVSVHLLLSLNAAFHSSIQSTSSWNRAAVVTPAMVVRTMPTSGSGARGRRGRPWRGGGGCRGGSRISSRRVRRAWQRPGRCHAWQVDGRGSRGQRPRRRHAWQAR

SEQ ID NO: 55190 - protein, 963 aa, Glycine max
  Clone ID: 700685384_FLI.pep
KAEEESLQQVQSGSGSGSEMEEGELEPEPQAETVPPVSEDLPSVAMETDEKQAQKNECHPNDDSTDAAVDERRELSSKEEVKPNEEVGCCEVKDGEEIEADEMADVRDDLSEKMLVTETEVESVGNGDDDKKEEALDAGAECEEETKKGADVDKQDKDKNKVVDLGTGADVVKPELNDGVSTGNEVPKEVDREMMMESAVNIAKDKGKGVSVALVPPTNVVHALDDSLWLDRGSRDLPTCSVDVIEGPSTRGFELFSRSPVRKVEKVDHSVLNKHKDDMEQLDLTLSLPNVLLPIGAHETTSQAPGSPSQARSVQSLSNTFCTNSDGFTASMSFSGSQSFYHNPSCSLTKTSVDYEQSVGSRPLFGGIDQVSQGCWQGQSQSDPKQKEVPFGQRTSANGNGSLFQPQASWGVLDSQAVKGQHSRVLEGSSKMGSGLDRQLSFHKQFSGQSRRHDDVRSPSQSVGSHDIGSNYSFEKKREVRERGSGSLYRTTSQKEQEQLLVGGVDFVETIIARIVSEPVHAMSRKFHEMTGQSIVCLKEGIREIMLNADKHGQILAFQKVLLNRSDIILDVLLKCHRVQLEILVALKTGLTHFLHLESSISSSELAQIFLNLRCKNLSCRSQLPVDECDCKVCAQKNGFCRECMCLVCSKFDNASNTCSWVGCDVCLHWCHTDCGLRESYIRNGPGTKGMTEMQFHCIACDHPSEMFGFVKEVFQNFAKEWSVETLCKELEYVKRIFSASKDMRGRQLHEIAEQVLPRLANKSNLPEVLRHIMSFLSDGDSSKLPMTTNFSGKEQIKENNGVAGPSQEATWMKSIYSEKPPLLERPANILPTFDQNDKRTLVQELQMSSIQKDFCFDELESIVKIKQAEAKMFQSRADDARREAEGLKRIALAKNEKIEEEYTNRIAKLRLTETDEIRKQKFEEAQALERAHLEYLNMKMRMETDIKDLLSKMEATKMSLAM

SEQ ID NO: 55191 - protein, 398 aa, Zea mays
  Clone ID: UC-ZMFLMO17009E05_FLI.pep
VHLQNKIMCMGQQQGALYILEKNLIYTVVNGIHVRVVLGSTLESSVDVLACSSKSVTDMVRIFHKLIIPTILYLSSSLMFEESIIRPDCVKYLIPHRFLQTQQLPLKRMKQILLSLPAESMYGYEHTWSAIESNKRIILQSGSDHARELLSDDDFHEVLHRRYYDLQHLATELAVNPDNQQQHEIIPETDVVDPSILGIAKGVEMVLQRLKRVEQGIRDLKEEIASLRYYEYHLLTELHRKMDYMMNYNTQLEERKVPQMFYLVSLDNRSKQLVTRILPGMRSLRVHMLCEFRREMHVVEDQLGCDLIQVDNQTVKSLLPYMSKFMKLLTFALKIGAHFIVGMGEMIPDLSREVCACWTPRPCTTQLHLPCPWGLWYSQYIPNSMHTSRKNVEQQLRR

SEQ ID NO: 55192 - protein, 407 aa, Zea mays
  Clone ID: UC-ZMFLB73144C05_FLI.pep
MCELMEELLEHSLEASANPMKVVEYVQKESPLIAVVLKAHMHCEACAEGIRKRILNMKGVQSVEPDLKASEVAVMSKKVRRVEAVVAELECRNSELFGEKGELEEKLVAAKEVLARLTAMTREQEARVFARRRESDLVKEKEAVAKALDAEKAEVARLRLKIEELEKCSGEKDGDIRKMKPAYFANYAHMGEGTQEQALTYSCRHQKEWVIDSGASKHVMGISSSFKAYIPHTHYEFVQIADGSSQRIHGVGSIECTPSLSSSSVLHVPSFPVNLISVSSIIDQFKCTVTFDENTCVFQEKGTGRRIGTGVRRDGLWFIGHEESALRAVAERDVKEILLLHCRLGHISFETLRRLHPAMFKGVDKSRLVCDACELGKHTRSIYPSIGLRSCEPFTMIHSDVWGPCSV

SEQ ID NO: 55193 - protein, 48 aa, Zea mays
  Clone ID: UC-ZMFLB73206E07_FLI.pep
IKMFSEKITKCFHLGIISSCSLYSCRDLGVASDVSSNSFCTGSSKMLN

SEQ ID NO: 55194 - protein, 230 aa, Zea mays
  Clone ID: UC-ZMFLB73294E03_FLI.pep
FRLWPSLPAMVECTGTYTYEGSGFKATAAQQYDSSPFLSGLKSISSKPFHQVCSHFIRTVAGFQLCYAAKTWFGGFVGMMIFGASEVSRNVDLGDETTTMICKFVMRASDESITREIKSDLQGWLDDITDGAVEYMPEDEVKSVAAEQLKISMERIALLKAARPKVPPAKTDQEEEEERKQSEELDGFGNPKGPSTLSKLTAEEAEHRALQAAVLQEWHQLCKERAMKAQ

SEQ ID NO: 55195 - protein, 270 aa, Zea mays
  Clone ID: UC-ZMFLB73021C10_FLI.pep
TLLFGDKPVTVFGIRNPEEIPWGEAGAEYVVESTGVFTDKDKAAAHLKGGAKKVVISAPSKDAPMFVVGVNEDKYTSDVNIVSNASCTTNCLAPLAKVIHDNFGIVEGLMTTVHAITATQKTVDGPSAKDWRGGRAASFNIIPSSTGAAKAVGKVLPDLNGKLTGMSFRVPTVDVSVVDLTVRIEKGASYEDIKKAIKAASEGPLKGIMGYAEEDLVSTDFLGDSRSSIFDAKAGIALNDHFVKLVSWYDNEWGYSNRVVDLIRHMFKTQ

SEQ ID NO: 55196 - protein, 649 aa, Zea mays
  Clone ID: UC-ZMFLMO17016B09_FLI.pep
LRRLVVALSAGVLAGRRRGSSTFSAPIHTYMLVLRRLRLRLPLPRPLLVSSFSSTSPSSSPSTSSSSSCWSSTGESRRAMASSPSPDSAAVVAEGSAARRFWIAASTREAAFAAYTPFLLSLAAGNLRLNVFRHYIAQDAHFLHAFARAYEMAEDCADDDDDMATIAALRKAILQELNLHSSVLKEWGVDPTKEIPPSAATTKYTDFLLATAAGKVDGTKGSDKMVTPFEKTKIAAYTVGAMTPCMRLYAYLGKELMVFLKQDENHPYKKWINTYASSDFEDTTLQIEELLDKLSVSLTGEELEIIGKLYQQAMKLEVEFFSSQLIDQPVVAPLSRYCDPKYKLLIFSDFDLTCTIVDSSAILAEIAILSFQKANQSGIDNNLDRAKSGDLRSSWNMLSKQYMEEYEKCMERLLPPEESKSLDYDKLYKGLEVLAEFEKLANSRVVDSGVLRGMNLEDIRKAGERLILQGGCKNFFQKIVKTRENLNLDVHILSYCWCAELIRSAFSSAGCLDGLNIHSNEFAFEDSVSTGEIDRKMQSPLDKVEKFKSIRSDVDSTVPFLSVYIGDSVGDLLCLLEADIGIVIGSTTSLRRVGKQFGVSFVPLFPGLVEKQRQLAEEDASVFKARSGVLYTVSSWSEIHAFVLGSDFS

SEQ ID NO: 55197 - protein, 201 aa, Zea mays
  Clone ID: UC-ZMFLMO17177B06_FLI.pep
DLVGFRRRRRRFARFAGSVASRKVMEHRAFDCSGSDDDLPPTYQIRVPRMHFSGNRRPLAGAFSQPRPHNKLDSDIHQIEQQAYTGVLRAFKMQSDALTWEKESLITELRRELKVSDVEHRMLLNMVNEEEAIHRIRQSRQGCGMQSSLPYNSVVDHNLGPIKRQKKSHPIYSLPVDPHSPSMPLKALVGNKAYTVGLEYS

SEQ ID NO: 55198 - protein, 825 aa, Zea mays
  Clone ID: LIB3060-006-H7_FLI.pep
AERVSPKPSPTKSQPPARIGAAMSQILRHRLSAHYHGVCGHCCRRLSSSVYGGGGSRRAVAAPPQDGEGSRAVRVSVWWDFENCHIPNGVNVHRVAPRVSAALRAAGIRGPLSITAFGDVLQLARSSQEALAATGVSISHVPSSGKNSSDRSFMADLVYWIAQNPPPVHFFLISGDRDFANILHRLRMSNYNVLLACPSSATSVLCSAATIMWPWEGLVRGEDLSPKRFNNPPDGLHGSWYGHYRGALDDPPLEKESEEPIKVASVPKQFSVPSNTKHCPVPKHVKNAILEVLRSYPEGVNISLLRNQLVKNKIDLGTNFFGHKKFSSFLESMPHVVKLLGSRLGENELYAIAANKKFMQPGDGALDDPFLEKGAEEPIKVSSDSQHCSVPSDTKSSSIPKYVTDAILEALCSYPEGINLSLLQEELAKKKICLGPDFFGHKDFSCLIQSIPDIVELVCPQTGGQLYAIAVNRRSLQPGDGSTKTLSSAQGNARENNPTGTAHSNKKNTLSSLRSIYKSRSFTETLSEHPPTFSVLPSPSNGLSEDQIECPVVDVNGSTESPAKHREVGEMTTPGTPSSSGVENAANEYGFFKRIWTMWNGPKNVKSEVSQNCESTSAEVIDDLQVSQNCESTFAKVIDDLRTPLEEYNGDHRIKLLRRIHETSSKNDRSDGTEGMLAVSDNLSISLGDDHSEKIKRDPSIPENPEPCRKPAAVSMIKSGKKDDISEMNRGMFNWASRWWPFGKSDADSSTTNINATDEPRTDSIEEFESSNAPTNGSAQQVVHEIFTKPDLWSVLEQQLSEPLGSEVVLKAKTRKRRIQMRSIY

SEQ ID NO: 55199 - protein, 194 aa, Zea mays
  Clone ID: LIB3059-003-A7_FLI.pep
LPSQLFEYIKRTFRYCLTLTRIEPPQIFNKSHQQGPCITYLFDQVIIVIGEGLRSGSCKLSFMLLLQGHINLHFWWLQSNSFNKVKVLIPCQLPSEVKEGLLKVVIALGRNLIVLQVLLPVECNLLGLDLPVLDINLVTTKNNGDVLTDPAQVPVPCRNILVCQPRSDIKHNDGTLTMNVVAIPKATELFLPST

SEQ ID NO: 55200 - protein, 228 aa, Zea mays
  Clone ID: LIB3066-054-B10_FLI.pep
VLASAYSHELPRYGLEVGLTNYAAAYCTGLLLARRVLKTRGLDKEYEGNVEATGEDFSVEPADERRPFRALLDVGLIRTTTGNRVFGALKGALDGGLDIPHSEKRFAGFKKDDKQLDADIHRKYIYGGHVADYMRNLAEEEPEKYQSHFSEYIKKGIEADDMEALYKKVHAAIRADPSVVKSTKQPPKEHKRYNPKKLTYEQRKASLIERLNQLNSSGGADDDDEDDE

SEQ ID NO: 55201 - protein, 243 aa, Zea mays
  Clone ID: LIB3079-025-B12_FLI.pep
SRARNVRRRLLGDADGLRRRGRRRHALRRRRRDRSGRSRHHAALLLLLDGIDRRRSPPASGRRALLVAGERDDGEVVAVADLDHEAVGVVEEDLVHVDAALLHAALHVRDADLLQPPLHRHHALALEGDMVVLGVDLSLLRREAAGVLRLQQVDADPVVEQPGAAEVERAGAADRDEAEHVRVEAQRRLHRPAHDADVVQRRQRQHAAAAARRPHRRRALHHPPAALLIPIRAIYLVDPADNL

SEQ ID NO: 55202 - protein, 92 aa, Zea mays
  Clone ID: LIB3079-047-G7_FLI.pep
KKTANLHQTKRQWLPAKYMLIPILNSRGLFVSTDHRLATTLWTRHAGRPADLASGAKTLHVDQVSEQIVRHVIWSGCCHWSFFWPLISVHPS

SEQ ID NO: 55203 - protein, 237 aa, Zea mays
  Clone ID: LIB3115-012-C6_FLI.pep
PQTEYNRTAGTALFIGNKLASTTPSSETKKAKKRCSLGAGELGADELSGGDHVGQGGLDLRVLAGLEAAVGVHPEDVGVQHRQHLVDAVGDLLSRRDPGGVDVVDTGADARAVLDALAEHGEQLLVGPRVLNGDHVRVHVDDRVDDVVEVGVAHVGVDLGGVLDLAVGNSEGVDSPVQVECMLSLAERQPFSQCSLVDLDNLNTTSLKILDFLLDRKSDLVASLKPRLVIPDEGPVE

SEQ ID NO: 55204 - protein, 97 aa, Zea mays
  Clone ID: LIB3088-049-C8_FLI.pep
KLMNVRRWTACFAKQTFSACLMVEKSHRPEGIKSSFVVNNLFPCFVFGILAGSCVNPLLFSLSIVPLFYFGFDGQYLSQVMCTKLRLMLPVIELYGM

SEQ ID NO: 55205 - protein, 182 aa, Zea mays
  Clone ID: LIB3079-034-E6_FLI.pep
VSPCFSLMERRYRSQIIFIKVPCQTDKKPSMVYHQAQLSSCRTGRLWEYMVYWRPCRSQQQPYRGQRRTLALRTATPTPRTCRCAGQGGRCRVPGRACRYPIPTRRSRGGACRGRCGGRRGGPCRRGVGGRKPRRVRRRRPGCGTLPRLASQPSLACSLTDLCESSCSEFGCAARRQPWRQK

SEQ ID NO: 55206 - protein, 262 aa, Zea mays
  Clone ID: LIB3079-054-H8_FLI.pep
LVTTHDHDLVKKAGGSRRCRRPMAPQTRRERLAGEARPSSSGLTPAKPGAVEVQRRRVGSGWTSRRISIYASRVYFLLIMLQIPLFRVPCRAGTCTTPIQVTSSQLVSNDIFPAAVVKAMLYPGATVSSLTKSKTFPSWNDLFDMYNLTEAKNASAVVDLQRLEILAGSYFCVAGALIGIINPGRMTLFGTLLIIWGMVKEALFGKPVNSDLTQSTHVYPTILIALICAFMSITYNVKKTARSSTPVSIAKPLISSAKSKLK

SEQ ID NO: 55207 - protein, 82 aa, Zea mays
  Clone ID: LIB3079-055-A11_FLI.pep
NSTIKQLLRTRKLSCWIHTRLCSQEILVGTLLKKRPIGLKTKLSIFNCTKRKDLHCTGGWCMFEAWMMAEVSCFFMLNLVSK

SEQ ID NO: 55208 - protein, 198 aa, Zea mays
  Clone ID: LIB3079-015-F8_FLI.pep
KGQSGTGATEIASKKPQMAAIAAATQAAATVLLLAALVLAAGPGGARAQSASPSSQCTSALVSLSPCLSYISGNVSAAPPSCCAQLGKVVQSDPQCLCVALSADPASLGLTVNRTRALGLPDACKVTTPDVSSCKGGAAAAGGAPVATPAGQTAPATGSKTTPATSSVPGAAASPPGSAARLVAGFFVAAAVVAGFAA

SEQ ID NO: 55209 - protein, 317 aa, Zea mays
  Clone ID: LIB3079-025-C8_FLI.pep
QPSPTADPCPSGVFLSRIPSLRSTATAMAAASSAAPARHSCAKLSVPVEDPKAVTAGGGTVFVKATWLPSRFSLAVTDGAGAWVADASDHEVRLRAEQWDQPVADYIALAERYLAFQQPGSTYSFHDAGKGQRRLAWTFERQGTKLEWRWKLQPSPNTQQTISEILDFLMDANIRLSEEVVRKTQSFDKLKQEAEKCLQQSERFNNEKAEFEQAAFSKFVAVLNSKKAKLRQLRDKVVELEPAVKPPKEEAGQEQEEEEENSTDRTELFEGENDKEASAKDEHSGETGSGNVPSSPGESAATSRGRGRGRGRKKARR

SEQ ID NO: 55210 - protein, 376 aa, Zea mays
  Clone ID: LIB3079-026-A2_FLI.pep
RGDTVDEEDSDDEFKGFDENGDLCLPFVVSWDPPPVLVCTAGASFTMEEAEEIVDSVNERNDDLLSAWCEMVNNKVTPLPATPLHILPAITTFCVSGYECYHLRYWTEITSETDPDHPYFKPCEMMQVFSLGLSSPLTHPVNIYGYFSVRDNWEPLRNYLFKRSRADPAMISQGCSFLPLCSPCRGIYVLQFFLVDIELWIKEEGEASADKLLFSGYVEIDTSWAGFERMLRGRFQGDYLGLNMEFAFLGHSIETLIEVEAEAKQPTDVRISALTSGFDEEISLYDGKFCGSGSMFKHFVAVKKQEELHVVLKMDGSPYKWTFKAGAGVAAAPEHPVPGFTQYFVMNVSFRTRGKTASTWQWSCISNNVCISEIDP

SEQ ID NO: 55211 - protein, 174 aa, Zea mays
  Clone ID: LIB3088-033-A1_FLI.pep
LLQVEGMQVHANEGGVTQTRGGIYWIILPAGYLGSSFWGMVFILASTNLLTTRIAAGCFILALFIVLFVADNWFLRWLCLGFIVFIAVVWVIQEFTSFHILKYVILFIGVMNSLFSVYDIYDDLISRRVNTSDAEKFAEICPCPCNGFAWGVIWGFISFIFLCASIYLGLVILS

SEQ ID NO: 55212 - protein, 264 aa, Zea mays
  Clone ID: LIB3116-013-F6_FLI.pep
GEPMGAAPSSDDSSRAGDGRAVASSAASGTGTGSNSNQAQSKRAPPPHKFHEIVALAQEATTAGGGGGGGTAAAADLEDQACSTGVYLAGKTKKYWVDEKTRCNCFVLFARALSITWGDDPRYWIWHPVRETSDAEIVEAASLQNVCWLEVHGRLELSHLTPGCSYDVAFQVMLTEPAYGWSVPVNLRLRFPDGTVQARKEKLQGMPTEQWLELRAGEVKAPAQPGGAGRSGELEISLFEYDGGLWKKGLLIKGIKIVPKESDY

SEQ ID NO: 55213 - protein, 222 aa, Zea mays
  Clone ID: UC-ZMFLB73389D11_FLI.pep
SLNWLHDRMPVILGSKDYVDAWLNDVSVKLEEITAPYEGADLVWYPVTSALGKASFDGPECIKEVHIGATDKPISKFFTKKSTAYDLSGKYENMSRELAHAYKAAKVECDGSVENQGGDGNQHQSREKQTTNCTIKDEPVTLEPQVFETPWSIEHEDTMTLAGATLETQRDLGFKRKIEDTQVEASMKPSQLTRKEKAVKAASDGQASLLSYFARKQGRSMK

SEQ ID NO: 55214 - protein, 280 aa, Zea mays
  Clone ID: LIB3136-014-B9_FLI.pep
VVFVTVITDLNTCHPTWFHADVNRCYCPSEEVAKRAALDDLQPSQIRVFGLPIRPSFCRAVLVKDDLRRELELDPELPAVLLMGGGEGMGPVKKTARALGESLFDKELGKPIGQLIVICGRNKTLSSSLQAVEWKIPVKVRGFETQMEKWMGACDCIITKAGPGTIAEALIRGLPIILNDFIPGQEVGNVPYVVDNGAGVFSKSPKETASLVARWFGPDSEELKKMSEKALKLAQPEAVFDIVKDMHELSQEQGVISQISSSLTSSFFLPSPESTPLQLI

SEQ ID NO: 55215 - protein, 104 aa, Zea mays
  Clone ID: LIB3153-006-C12_FLI.pep
HSSRINREEFIKLSCEMEYRKRVDALVFFSLLLLGYFAAHAHGKGHVTDDVGVSTPAKEGIMQGNGARCIVGFPPCKDNKCYCCIGGRTHARYSTMAECRHACF

SEQ ID NO: 55216 - protein, 296 aa, Zea mays
  Clone ID: LIB3150-109-E11_FLI.pep
AALSSLFSLPLALLSFPSSREREARPHPVVGLGMGGSECALGDAAIGEETLNYDGDDVEMADADSDTEEARAAEVSAATGGSAGGVRQAEKDGPDGKKKRKKRRNKGKKNKGRQDGAPTNIADINRFVLNTCKRLKEKKSYLVWNAVGCLGVTAVNDLVREVEAIQKCGGQTIADGSRFRTGGGILWNILKSREPKAYKEIMAKGKELEKQFRCTKRPQISRNEDASSQGSALIDDEIEARDQKETLDDPEQLDDVEVHVSDNKAQRKPLADRIRAPVAYDDLFEEGEIHDGEPRS

SEQ ID NO: 55217 - protein, 555 aa, Zea mays
  Clone ID: LIB143-044-F10_FLI.pep
LSFCSERTHSPVPDLRSPRRSKMQIFVKTLTGKTITLEVESSDTIDNVKAKIQDKEGIPPDQQRLIFAGKQLEDGRTLADYNIQKESTLHLVLRLRGGMQIFVKTLTGKTITLEVESSDTIDNVKAKIQDKEGIPPDQQRLIFAGKQLEDGRTLADYNIQKESTLHLVLRLRGGMQIFVKTLTGKTITLEVESSDTIDNVKAKIQDKEGIPPDQQRLIFAGKQLEDGRTLADYNIQKESTLHLVLRLRGGMQIFVKTLTGKTITLEVESSDTIDNVKAKIQDKEGIPPDQQRLIFAGKQLEDGRTLADYNIQKESTLHLVLRLRGGMQIFVKTLTGKTITLEVESSDTIDNVKAKIQDKEGIPPDQQRLIFAGKQLEDGRTLADYNIQKESTLHLVLRLRGGMQIFVKTLTGKTITLEVESSDTIDNVKAKIQDKEGIPPDQQRLIFAGKQLEDGRTLADYNIQKESTLHLVLRLRGGMQIFVKTLTGKTITLEVESSDTIDNVKAKIQDKEGIPPDQQRLIFAGKQLEDGRTLADYNIQKESTLHLVLRLRGGQ

SEQ ID NO: 55218 - protein, 415 aa, Zea mays
  Clone ID: LIB3079-016-D4_FLI.pep
KIMDPETKTTTPPATITSFGVATPVSITTSTTPSGAARSTPLRPVRMSPGSHQKYSTPPKKGEGELPTPMSLEQAVEAFENLGVYPEIEQWRDSLRQWFSSVVMNPLVQKIKTSHTQVKQTTATVGASVTVSQVGSDLPSTTPPVALSPLGGTKDWQPTVTVDEDGILNQLHSALLHSRDAPVAQTFGSLQQPQRNPHLPAIQACIDAITEHQRLNTLMKGELIKGLLPQSSVRADYTVQRVQELAEGTCLKNYDYMGHGNDYGKSEKKWTTELPTDSHLLLYLFAAFLEHPKWMLHVDPTSYSGSQSSKNPLFLGVLPPKERFPEKYVALISGVPAIIHPGALILAVSKQNPPIFALYWDKKQQFSLQGRTALWDAILLLCHQINVGYGGVVRGIHIGSSALNLLSVIDSDSES

SEQ ID NO: 55219 - protein, 99 aa, Zea mays
  Clone ID: LIB3088-047-D6_FLI.pep
SKIISSYLLRERTASRGPTRSDEWGNSMGGLSGLSSHRLQLEEEEEQSSMHLRVMLFDPKVLILQIPLSPSRPQAVFSIAQSCWNLDLPLKHAVWPCGV

SEQ ID NO: 55220 - protein, 358 aa, Zea mays
  Clone ID: LIB3079-036-A2_FLI.pep
ASSLTATHTGRRRSAGERCGRLNPLQLRHRIRTPAKPRIGEDRGVMDAAAAAAAAASPTSKRIALVTGGNKGIGLETCRQLASRGVRVVLTARNEARGLEAVERVRCARGDAEVYFHQLDVTDPCSAARLADFVRDQFGRLDILINNAGISGVHRDPVLSAAVKDKVDGMDVNQRVEWMKENSKETYEEAVQCMKTNYYGAKLVTEALLPLLQLSSSGRIVNVSSGFGLLRNFNSEDLRKEFEDIDNLTESRLEELMDKFLEDFKANLVEAHGWPTGGSSAYKVVKAALNAYTRILAKKYPTLRINCLTPGYVKTDMSMHMGVLTLEEGARNPVKVALLPDDGPTGAYFDLNGEASFV

SEQ ID NO: 55221 - protein, 160 aa, Zea mays
  Clone ID: LIB3088-024-H4_FLI.pep
PIGSIIVGNLLGMVAIFLIQRNRHALIGRAIDDHDMQRVLEFLKSDPVVDALYDCKSEVIGPGFFRFKAEIDFNGVVLVQNYLERTGRGSWAKQFREAAMSKDDTELLRVMANYGEDVVEALGYEVDRLESEIQKLVPGIKHVDIEAHNPEGLALRAEVL

SEQ ID NO: 55222 - protein, 100 aa, Zea mays
  Clone ID: LIB3088-013-E1_FLI.pep
EAAASNSEANKYIISQIKEAQEVKRAAINDMATMEKQGGFWTKPLMVEKGAAYWKLDGYCDNSAILLQEYGGDELMANKDKWFMFTEDEEKIIEKHLATR

SEQ ID NO: 55223 - protein, 645 aa, Zea mays
  Clone ID: UC-ZMFLB73295D02_FLI.pep
LTDHTSAARTGAKGGILYRARAMATRPGPLTEWPWQRLGNFKYLVMAPVAVHGARRVVARGWGDIDLAFALILPSLLLRMVHNQIWISAARYQTARSKHRIVDRGIEFDQVDRERGWDDQIILNGLLFYVGYLAIPSARRMPAWRSDGAVAMALLHAGPVEFLYYWFHRALHHHFLYSRYHSHHHSSIVTEPITSVIHPFAEHMVYYVLFAIPMLSTLYMGNASVLGIVLYIAYIDFMNNMGHCNFELVPRWMFQLFPPLKYLMYTPSFHSLHHTQFRTNYSLFMPLYDYVYSTMDKSSDQLYETSLRGAEETPGLVHLTHMTDLQSVYHLRIGFASVASRPSATGAMWWYMWVLWPVAWLSMALAWAYGSSAFVVERIKLGKLRMQTWAVPRYNFQYGLSWERESINGLIERAILDADARGVKVLSLGLLNQAKQLNGGGELFRHRYPKLRVRLVDGSGLATAVVLRSIPRDAKQVLLHAGPSKVACATAAALCERGVQVVMNPNKEYDMLKSQIADSKASYLERRSDNHHTPQVWLVDSIDDEEQKMAPKGAVFVPISQFPIKKIRKDCTYLSTPAMKIPETMQNIHACENWLPRRVMSAWRIGGILHALEGWTVHECGDAMVHADKAWSAAIRHGFVPLTKA

SEQ ID NO: 55224 - protein, 282 aa, Zea mays
  Clone ID: LIB3088-021-C10_FLI.pep
VFVCSCSWMKMAAENGSQSNLKRIKPPDFAVLLHYQSMRVAATRAAAAAHPPSAFLLLLVLLCCASLAIGGAAMAGHVLGGVKENPAAANSAESDGLGRFAVDEHNRRENALLEFVRVVEAKEQVVAGTMHHLTLEAVEAGRKKLYEAKVWVKPWLDFKELQEFSHKGDATAFTNADLGAKEGGHEPGWREVPVEDPVVKDAAHHAVKSIQERSNSLFPYELLEILRAHAQVVEDFAKFDILMKLKRGSKEEKIKAEVHKSLEGAFVLNQHQPAEHAESSSQ

SEQ ID NO: 55225 - protein, 652 aa, Zea mays; identical to SEQ ID NO: 38995
  Clone ID: UC-ZMFLMO17391H02_FLI.pep

SEQ ID NO: 55226 - protein, 104 aa, Zea mays
  Clone ID: LIB3117-010-E9_FLI.pep
GTPNPVLNAITTGVAFAVFQGGFFMIGQKFSKPSSEDTYYSLTRSMLHKLGLEKYEKNFRKGLLNDQTLPLLTDSALRDVKIPPGPRLLILDQIKRDPGLVRAK

SEQ ID NO: 55227 - protein, 460 aa, Zea mays
  Clone ID: 700076578_FLI.pep
SPAGSWPLRFLDRPDVAMGKSKRNKGGRGGGGADDKLDGGGDADSVTSLSSGLSDLQLAQATEHVSSQEFVLDKYVDALYEKRGSTREEALGALTDAFESFVLLGLVENKYVTLLSQFINSIKRGSVKEVCLACRSIGLLAITLGAGSSSHEIMDESHPHLLRVLQTWPDAQKMISALDCLAVVTFVGATDLAETQLSLKAIWDVIHPKSGSNVGVVRKPKPPLLAAAVSAWAFLLTTIGSSRRNTDSWKEPITFLCSLLEAEDRAVRIAAGEALALCFELRLFDVSSSDEADVDSYTREAGGSKHQLFLNMQALKAKLSGLVYSLSMEAGGRGADKKNLNDQRDLFQRISDFIKSGECPEESLRISGKNGILRVTSWRESIQLNYMRRFLGRGFLKHSQDNDLLHEVFDIKIDRTENMSATEKKMFRSGEEKGRALKLNKERRLAQERKQLNILNEQYG

SEQ ID NO: 55228 - protein, 732 aa, Zea mays
  Clone ID: 700087883_FLI.pep
MDHEREQLETYKLELEKIKSALEAEKEKISEEQNNLKLTAQERQEHSLLIAKLKKEIEEYRMRSNSLSEEMEDLRKQRQKFEEEWEQLDEKRALLVEEDKRLNIERMNLERWRDNEEKRLNDMKLKMDEEYKQQLESLERKEKALSDDMKHKQMENDEFLKGERADVQRKLQLKRHELEMEMEQKQATKEKELEEKENELNKKIDFVENKLRHAIELNESKIEKLLLEKREVQMERELLLEERKKTETDKADIRRDIESLHSLSKSLKERREAYNRDRSRLIELFEKYKACKNCGISIFEGLDSLLLKDSAEIEHPSLAVEGDDHALTTDTSGPDTGTLVNSGGRFSLLQKCSRLFKFSPRKKGEQSSEQPSERNISFGARLEEATQSDGDYVPTPVYEIAHDSFNAEDELPSDGETRENEESERHDIADNAQMESSVGVADNSIDILGTKSFDGANDMAVEATIVSVDQNGEDSVVPAEAGVEPETSEQGRRQQNQRGRRKGGMKRTRSVNAVVEDAKMILGEVFEEKTDDQGDTVKVGATRKRRFAGATISEQDEEGSEAHSESVSLGGQRRKRRQTAGAVTDAPGERRYNLRHSRAANAGAATAQADKKKSSKARNKHTVEASADDTEGTSKVVEEPAPESKRVSESADYDASQLHEFSQVEVGDAHAVDGEGAGEEDGDILDGQDALPDVPMTPSGSEFGAEQEDEDDDDSERRNQSISKKLWSFFTT

SEQ ID NO: 55229 - protein, 578 aa, Zea mays
  Clone ID: 700075375_FLI.pep
EKLALLEAENEKLTGVNETLKDEVDAKLAMFDELQERFSSTHAEKEEVAEKVAVHERTISHLTEEHTRTLELHSVAESKNGEIEAQLREALETIAQKEGEAKELCKKLDALEIELGYYEEQATEAAAAEENHKVKFDEASQKIKILEEQLAETQSKLEHFLIEKESLTQTNSTLNEELEVHQNKLNDLQLALAAAVAEKEEASEEIHSLHKTLDGMIEHKAELEIQVSSTIQEHEELKSKYQNTMEEKHALSDKYETAKKELEDAIAKLEEEMNVDKSEKESHISKLERQITLSEIKYMEEIKTMQVETTEKNEALTAKMQEHTDLQHEKDELEQQLLEVRKELDGAYHTIANQEEQASVREIKWDAFRKYTEDRLEAEQQRAEELELQVAALKQQLQEAEIHYKQKEEQVSLREVQWEADQNHSLDELNAQRQYATDLEKQIEDLTQKLTSADAHYKQKVTEERDKLVEVTKELSELTQKVSESVELERKVQDLEQKLQLAYSKCDEQAVDTVESRSREFSLDSSTTSGKQQDKTQAVSPNPTLQGVQEPSGIMAFKFILGVALLSVLIGVFLGKRY

SEQ ID NO: 55230 - protein, 49 aa, Zea mays
  Clone ID: 700075757_FLI.pep
LKTYEYWSTKIVRCAFSQITVICKMKLLQINYQANNRFLYSKNQAIIGL

SEQ ID NO: 55231 - protein, 246 aa, Zea mays
  Clone ID: 700086591_FLI.pep
LGILSPLHNPNTRPKMLLSPHMRFSTRVLDVFIFVSFFLHVRVTVTPEQEHPSLPPCSYGGRLIATSLMARSTCFLFVQVNREEGGDTDGGGEARVEEREAGGAGRHGGRAAGVPARRRHPHGVREEAPGVQAGGRRPGAQGGGAAGGRAHRLVLLVPPPRRQEGELLVPGRGRPPRLREGDRRRGHAGPRAEGRARRPEGQVGRRLPQGAHPRAARRPRRDPQRVLLIHRPQFQAYQVFLAVSVC

SEQ ID NO: 55232 - protein, 259 aa, Zea mays
  Clone ID: 700072490_FLI.pep
VLGFDVFSLIVWIRYKLHTYDRNCMLKLISSHPKITVRMQYTPHTTQLALHTPGTRKCKGGSTWTAGQMANEMVVRTSDVRLEGVELPEVHGGDVLGVAVDDVLGEQHVGGLAWVVRVPEHVLVPGVAQARRRPARHQPVVRPAVAAARHAGRLEPVVGVVGDELHDEVVDVGEAEPGAGEAGVEVDDELPEPGVVLPNQLAAQYNSRLRELFFALNAVLPGARFCLAYVYDLVLELITNYLNYGFLLSCISFLFIHGY

SEQ ID NO: 55233 - protein, 266 aa, Zea mays
  Clone ID: UC-ZMFLB73199A11_FLI.pep
AAMAVEKTLPGASAGRTVLVTGGAGYIGSHAVLQLLLAGFRAVVIDNLNNSSELAVRRVAALAGDHSRNLSFHKIDLRDKGALEMVFASTRFEAVIHFAGLKAVGESVQKPLLYYDNNVIGTINLLEVMSVHGCKKLVFSSSAAVYGSPKNSPCTENFPLTPNNPYGKTKLVVEDICRDIYRSDPEWKIILLRYFNPVGAHPSGYLGEDPRGIPNNLMPYVQQVAVGRRPALTVLGNDYATRDGTGVILLHMMCLIVFFWYTIQID

SEQ ID NO: 55234 - protein, 856 aa, Zea mays
  Clone ID: 700098936_FLI.pep
TLAQPSTPAVVARALSCSGCPRGAASQTLAASSRSRFRREAGEVRAAPPQMEPAGARKEWRAVPDSSLRSNGAEDAAEHGKLGQSEERAIYEEGAGGLGDFCTITIDGSGGLSEDILQQRLQSVARQREELQQVEIELRAQAIAHPQIIEAQQSFQAAAKEHAAAVAKIKEQLHEREQYILELEMKLNDKDRELNALKIDHQTVWANQDLLREQTKELASVRRERDNSEAERAQHLKQIHDLQELLREKESQFIAIEEQHRAAQENILYKDEQLREAHAWVSQVREMDALQSQSLQVELRERMEQFNQYWISSQQQYAEMQRSLLHTIQQLQQELAEARERSGAQKDGPHVSREGSAESSLVQSIANSVTSNGSATADGSQQLLKNNGSVDVSLKGNNASAVPVPSLLGIGGPAAHIAAMHSFMIHPQGIPQPLASPNSGIPQFGSFQTQPMIQPNSHWPNQQEVQIVSQPQDETNYQTSQSGQTALQQDTINTDELSPKASEGGHPDHLNAQGKQQQSPASAPTESTHELTVVETNIAEHVPYDEQQKTLKEQDSLSNIKSHVGRVEPQEQNAESKVERAASDKQPEPQSRQHKPSNFPPTTQLNLKNSATENPNVVNQVDTMKSVTGGFGSQLPRVPKEPALLDERSLLACIVRAVPAGPEGGIRISSTLPNRLGKMLAPLHWHDYKKQYGKLDDFVASRPELFVIEGDFIHLREGAQQIISATTAAAKIAAATASSAPYSSLLPSVAVTPVAQSTRQKRGPAVDSRSSNAILSGNGFTDQFNIIQGVSDVPVSGKVRNTLDNGFLGEVRTGQPSVLTAAANGARHDKGTNNVIQGYGGKQQGRSTGMAYLSRR

SEQ ID NO: 55235 - protein, 226 aa, Zea mays; identical to SEQ ID NO: 41882
  Clone ID: 700099042_FLI.pep

SEQ ID NO: 55236 - protein, 292 aa, Zea mays
  Clone ID: 700152168_FLI.pep
IKRQPVRVSPNSVDCNKLPPVRIIFYKVLMSSSAGSLLGFGSAAADGVGSSPSLSRALKEATGVIPFFLPVKTSLMGSPFFMRHISGADAAGPAATTWADVSHARQASSSGSSFISASPPADIVPDPVHKVVGDGVLDLIALGDCNPNHVDPLDGARSTHRRNRGFSGLVPDLSSVRAAGRVVGDSIRDRSGGAGNVAPLLLLLLAPKEGPRSTQGVRAVAALLLLPRGVASVDAALGGEGGRRLTWNSVRRTRASDSRRSRRTGVGGRRWREGRGVWCGRGLRFRIRPQEG

SEQ ID NO: 55237 - protein, 512 aa, Glycine max
  Clone ID: 700755389_FLI.pep
LSLSTMEPSSISPPPAPPATAVPFPAEPNDHLPPPIPEPPSNHPPYAEMIYTAIEALKEKDGSSKRAIAKYIEQVYTQLPPNHSDLLTQHLNHLKSRGLLQMVKKSYALPRSVPVSVPGPAPTQGTSAVPAAVVAITTTPRPRGRPRKAQNPVQNSPLPQDTVNVQVQQNAEPVWAALGLADEPVQAEGSGKKRGRPKKSGILGAGLTKRGRPPGSGKKPGRPPKATTTDVSASAGPKRRPGRPPKNQSQPTLIPFAPAVSAASVDTEHVAASAETAPVDADAALGPRARGRPKKYADEMIAAGRGRGRGRGRGGGGRGRGRGRGELPAQPRKPGARPVGRPKKGSTSASTSQNAANEDLRRKLEHFQSKVKESLAVLKPHFNHESPVTAIAAIQELEVLGTMDLNVPLRDETLPHQVELPPPQPPVQQQQQPPQQQLQQPPQQPPQQHLAPQQLPPQPPIFQQTYPPFHLPQFHHHQPSLQFQQQQQQPPQPPPQLFQHQAQPPSHQQFHP

SEQ ID NO: 55238 - protein, 535 aa, Zea mays
  Clone ID: UC-ZMFLB73019H10_FLI.pep
SKPIVQVRRDVVQKYVEGLCWVMRYYYQGVCSWQWFYPYHYAPFASDLKGLAELEITFFLGQPFKPFDQLMGTLPAASSNALPKYYGDLMSDPDSPLKSFYPKDFEIDMNGKRFAWQGVAKLPFIDERRLLAETRKLEDTLTEEEKFRNRTMLDIIYVRDTHPLITQIIFLYQNYYHLSRTDPYVIPIEPAASGGMNGFLCLSERNWYSVTVTSPVKGFNGIAQNRVLNAAYLNPQYHKHIPEPPAGVIIPAKILKPSDFKPFPVLWHQDNSRRQVRERPQVSGALSGSLLGEAAHRLVKNSLQIRSGNAAGLLYMPYRGAPYGPGNRPRPAGPLGYERGFVDNPYHAHMSRSVPNPHAQFFGDSQANRQPMRILERPDSRSHDAGIRASMSKLTIQEGPRPHQNNRMQNSGYWPNQPHPTHFTGPPAQRPMQNISFIPQRPFQTGGFPQQRPVNGAPPPLPPSNWIGKQPSGCHMSVSPAKLDPRTAPDRQPKQDNPRSQQDKRQQATKVYRVKTQATNVNGLSEPGKQEEPEG

SEQ ID NO: 55239 - protein, 240 aa, Zea mays
  Clone ID: 700201559_FLI.pep
YIYDTSHICLFLLIFGTKHAHKSSYVGTTYTRVHTNACTCNARLYIIVQIQIRIIPAKSKSLAHACRAYSGRSRAEGDLVVAVAATGMGLHVGGVVVRVGASRVRAHQPHAGAAGEGHGEVVAVDDRDVVEVLAAADGELGQRQRRLPRQRAGQRAAAVARLAAPAVAVEGAAGAAPHAAGAGAGRHVDGPRPARVQLRAPAHRGGRGPHGEPAVVGDGEGGGVGAHASQGGGQEQQEDR

SEQ ID NO: 55240 - protein, 218 aa, Zea mays
  Clone ID: 700220496_FLI.pep
PYSALHPLLLPSPNPHLFLKPKTLTLSLSSSSLTSMSSSSLPAPVTDVWEVVTPTAPPVDHVDGGLDDCVIFPPRLHEGLGLDGEPEEVPPMPAVAKEENEEDGEYEGEDDEWLWGWERCSLAARRAWAAGVGIVQERVLVHGACGCPAVRPAVWSVAAAAAVVGTLLYARRRDRRERDLLVLLSKEKDKRIAQLLHQIALMSDIRSGNEAVKVIRKS

SEQ ID NO: 55241 - protein, 357 aa, Zea mays
  Clone ID: 700213924_FLI.pep
FGNCLASISDELPPHIFELLQQCIDSNADLSGDGEIEIDIHAVSDDLLFELKKHVDKYLQEKEQSQQVKSEPSENEAVNVSGLSHSSTNPCKGGEPIEEDVDICGNASPIMLDKDAQIRNSKCGSPSSSSSDSESSSSDSDSGSDSESESEKVGSPGKLAKGTKKPDQLVEQEKSDVISPADANRPAAIVGLHGEDSESKPAPGGENSEPDTQVSPDRLLRAALLRSRYADVIVKARGILSQGGDKQEELEKLQKEEKERLLAEGTAAMEACRAEAEAEKKRKRNFEREKARQALQEMERTVEINDNLHLKDLELLGTATTEHIVSSVDETSPERSHDGMAGYHPGAVNPWSNLDCS

SEQ ID NO: 55242 - protein, 416 aa, Glycine max
  Clone ID: 700867375_FLI.pep
APSSQSYLLIPNVLSAAISRRCTMLHPGYGFLAENAVFVEMCREHGINFIGPNPDSIRVMGDKATARETMKKAGVPTVPGSDGLLQSTEEAIRLANEIGFPVMIKATAGGGGRGMRLAKEPDEFVKLLQQAKSEAAAAFGNDGVYLEKYIQNPRHIEFQVLADKYGNVVHFGERDCSIQRRNQKLLEEAPSPALTPELRKAMGDAAVAAAASIGYIGVGTIEFLLDERGSFYFMEMNTRIQVEHPVTEMISSTDLIEEQIRVAMGEKLLYKQEDIVLRGHSIECRINAEDAFKGFRPGPGRITAYLPSGGPFVRMDSHVYPDYVVPPSYDSLLGKLIVWAPTREKAIERMKRALDDTIITGVPTTIDYHKLILDIEDFRNGKVDTAFIPKHEEELAMPPQKMVLANRVNELAGSTA

SEQ ID NO: 55243 - protein, 385 aa, Zea mays
  Clone ID: 700240985_FLI.pep
GDSDIGKRKLESPASGMATGQEHVAAPAPAVEETPEKKQASTTELPAPSGWTKKLAPTRGGRGGRFEVIFVSPTGEEIKSKRQLTQYLKAHPGGPASSEFDWGTSDTPRRSARLSEKVKATESPEGEKTPKRARSSSKRGKKEEKVDAEDANEAGEDGAAAEGKGTDVEMKDAENAEDEKKDVPSAEKTEEVDDKKDAENVEMKDAAEKTEEVDDKKEEAPAVDAAEKNEEGDDKKEEEPPAEKTVEKEVVPAVDAAENTEQSTGGQAQPNDVGAPESENKGDGKPAESELAPTAFVDEAVPLVIVGEEKTEDSQAAEPTVTSLASSEGEKKENGGATEPAAPPPADADKGAENSGQVNTAPQEPTAANCDKGQIQPGASAVRCT

SEQ ID NO: 55244 - protein, 712 aa, Zea mays
  Clone ID: 700241038_FLI.pep
LPPPSPPLAPPLPSPLLSSLPEPNQTPPTPTPRFSECCTSVSPYRGRQKSDLSAVSGGHTAARLTNPPRIEPQTPAVPARGPQAGPGRSMGSRSAAAALRLWLLALLLGCCQGRFVVEKNSLKVTAPDGLKGTYECAIGNFGVPQYGGTMVGFVAYPKANRKACKSFDDFDISYKAKPGAFPTFLLVDRGDCYFAKKAWNAQKAGAAAILVADDKDEPLITMDNPEEGGNTDYLENITIPSALITKSFGDRLKKAIDSGDMVNVNLDWREALPHPDERVEYEFWTNSNDECGPKCDSQIDFVKSFKGAAQVLEKKGYTEFTPHYITWYCPEAFILSKQCKSQCINHGRYCAPDPEQDFSKGYDGKDVVVQNLRQVCVFKVAKEHKKPWLWWDYVTDFAIRCPMKEKKYTKECADGVIKSLGLDHKAIDKCIGDPDADEENHVLKAEQDAQIGKGSRGDVTILPTLVINNRQYRGKLDKGAVLKALCAGFRETTEPAVCLSDDIQTNECLENNGGCWQDKAANIIACKDTFRGRVCECPVVKGVKFVGDGYTHCEASGSGRCEINNGGCWKDTKNGRTYSACTDDGCRCPDGFKGDGKHKCEDVDECKERTVCQCEECRCKNTWGSYECGCSGGLLYMKEHDTCISKNGASEAGWGFLWAVVFGLVAAGIAGYAVYKYRIRRYMDSEIRAIMAQYMPLDSQGDVQSHAHHIEM

SEQ ID NO: 55245 - protein, 60 aa, Zea mays
  Clone ID: LIB3079-052-D2_FLI.pep
WTPPEGAGQFHGVPLDVKVVHFKGSRKRLMLEAWNFYSSTSKLSDMLCLILRSGRTKYDF

SEQ ID NO: 55246 - protein, 260 aa, Zea mays
  Clone ID: 700422955_FLI.pep
LSSFLSSSSSSPSASFFLPSSSLSPFGSDPSFSLAFLSFLSLSLFPIFLRFSSSPTSLPSPVSFLSLIFSCFSPLEPFNSDPSFSLAFLPFLSFSAFPESPSSSFFFLSFSFLSFFLIAFSSPSPYSCSTDFSSFPSLSFFPSLLFPPTDPAPPPESLASSFSTNLALISVSSSFRLAASLSFPILNMIKLPLLGGGGGALRGGQDPGPGGKQDACCRGFEKWKRPSAFLYTVERTDRWRRGERKGEEGPRRKVCENVRR

SEQ ID NO: 55247 - protein, 284 aa, Zea mays
  Clone ID: 700348104_FLI.pep
SAEELDRSRGFRSYGGGGGFGAGAGGERRGGFDDEGRRGPGRSSDLDMTSRADEADDWGATKKFTPAPADSGRRDRFGGPSPLGRADDIDDWSRDKKPLPSRYPSLGSAGGFRDSPGFRDSSASSDADRWVRGATPMPHNGQGAGERPRIVLNPPKRDPSAASTPSAEVARNRPSPFGAARPREDVLAEKGVDWKKFENEIEQKTSRPTSSHSSRPNSAHSSRPGSPGSQVSAVGSEGAPRARPKVNPFGDAKPREVVLQEKGKDWRKIDVELEHRAINRPESD

SEQ ID NO: 55248 - protein, 138 aa, Zea mays
  Clone ID: 700347701_FLI.pep
RHVVLVRQRPGQAPNSQKNKPALRCAYRGGPGSQAQRRSHGCVRNVPAAVRVGEAAQRGGVQGRDEGRVRNGTHQGRRGRRAAGGGGSFRLDIRGGGAHGVESHVQAHRRRLRGDRQIKAGRVQAHGGAQPRDHPWRQ

SEQ ID NO: 55249 - protein, 451 aa, Zea mays
  Clone ID: 700449511_FLI.pep
VLHLRRRIRDSDLGFTAAHRAPPTPVPIRALLYDASVMAGMAPEGSQFDAKHYDSKMQELLSTGETEEFFTSYDEVFESFDDMGLQENLLRGIYAYGFEKPSAIQQRGIVPFCKGLDVIQQAQSGTGKTATFCSGILQQLDYGLVECQALVLAPTRELAQQIEKVMRALGDYLGVKVHACVGGTSVREDQRILASGVHVVVGTPGRVFDMLRRQSLRPDNIKMFVLDEADEMLSRGFKDQIYDIFQLLPSKIQVGVFSATMPPEALEITRKFMNKPVRILVKRDELTLEGIKQFYVNVDKEDWKLDTLCDLYETLAITQSVIFVNTRRKVDWLTDKMRSRDHTVSATHGDMDQNTRDIIMREFRSGSSRVLITTDLLARGIDVQQVSLVINYDLPTQPENYLHRIGRSGRFGRKGVAINFVTRDDERMLFDIQKFYNVLIEELPANVADLL

SEQ ID NO: 55250 - protein, 317 aa, Zea mays
  Clone ID: UC-ZMFLB73279A06_FLI.pep
LALLLLLPAARAATFTMTNNCGYTVWPGLLSGAGTAPLPTTGFALAHGASAAVDAPAGWSGRVWARTLCAADAATGRFSCATGDCGSGAVQCNGGGAAPPATLAEFTLGGSGGLDFFDVSLVDGYNVPMLIVPAQGAGGGGSSSSSNGSAGGSSKCMATGCLVDLNGACPADLRVMAASASASASGAGGAVACRSACEAFGSPQYCCSGAYGNPNTCRPSTYSQFFKNACPRAYSYAYDDSTSTFTCATGISYAITFCPSTTSGKYSGENPQAAGVQPTNGSMVYLGGEQLATSVAAAARASQLLLAAAALAAVALL

SEQ ID NO: 55251 - protein, 573 aa, Zea mays
  Clone ID: LIB3066-031-H6_FLI.pep
MMALNLSHQTGAAVAAAPAAPRAAVVAAAATAPRSAVVAAAATVAPPPASAPAPAPALQLQTMTVDPAPAQAPDAVKPDLAMACQALVEAAPEAEHADVAAELRSRAGVPVFVMMPLDTVRKDGNSLNRRKAVEASLAALKSAGVEGIMVDVWWGIAEADGPGQYNFNGYMELMEMAKKTGLKVQAVMSFHQCGGNVGDSVTIPLPGWVLEEMDKDQDLAYTDRSGRRNYEYVSLGCDAMPVLKGRTPIQCYADFMRAFRDHFATFMGNTIVEIQVGMGPAGELRYPSYPESDGTWSFPGIGEFQCYDRFMLSSLKAAAEAVGKPEWGNAGPGDSGSYKDWPEDTGFFRREGGWSTEYGEFFMSWYSQMLLEHGERILSAATGVFTGSPGVKISVKVAGIHWHYGTRSHAAELTAGYYNTRSHDGYAPIARMLARHGAVLNFTCVEMRDHEQPQDAQCRPEALVQQVAAAAREAGVGLAGENALPRYDDTAHDQVVATAADRAAEDRMVAFTYLRMGPDLFQPDNWRRFAAFVKRMTEPGAREACREQVEREAEGVAHATQPLVHEAAVALTN

SEQ ID NO: 55252 - protein, 226 aa, Zea mays
  Clone ID: 700552370_FLI.pep
LFSLTPTTNMGASADGAMFVVGVNENSYDPKMNVVSNASCTTNCLAPLAKVVHEEFGIVEGLMTTVHATTATQKTVDGPSMKDWRGGRGAAQNIIPSSTGAAKAVGKVLPELNGKLTGMAFRVPTPNVSVVDLTCRIEKSASYDDVKAAIKTASEGALKGILGYTDEDVVSNDFVGDSRSSIFDAKAGIGLSSSFMKLVSWYDNEWGYSNRVLDLIAHMALVSAKH

SEQ ID NO: 55253 - protein, 863 aa, Glycine max; identical to SEQ ID NO: 54429
  Clone ID: 700605994_FLI.pep

SEQ ID NO: 55254 - protein, 348 aa, Glycine max
  Clone ID: 700667138_FLI.pep
LMLPSDSARQWHVHELELVEVVADQVAVALSHAAILEESMRARDQLIEQNVALDLARREAETAIRARNDFLAVMNHEMRTPMHAVIALSSLLQETDLTAEQRLMVETILKSSNLLATLINDVLDLSRLEDGSLQLEAATFNLHSLFREVLNLIKPVASVKKLSLTSHVASDLPMYAIGDEKRLMQTILNVVGNAVKFSKEGCISITAFVAKPESFRDARIPDFLPVPSDNHFYLRVQVKDSGSGINPQDIPKLFTKFAQNQSLTRNPAGSGLGLAICRRFVNLMEGHIWVESEGIGKGCTVTFIVKLGIPDRSNEFKLPFVPKVPGNHGSTNFAGLKVLVMDDNGSVA

SEQ ID NO: 55255 - protein, 698 aa, Glycine max
  Clone ID: 700670519_FLI.pep
SQLVSCGIDPFHRASSPSPRHRRHSNLLLLRRRSSRVFAVSAEPKPAVNGANSRPPPTRAVNGGVSTRIGDVSKEIKRVRAQMEEDEQLATLMRGLRGQNLRDSLFAEDDVELRLVEVDESSEFLPLVYDPASISAYWGKRPRAVATRIVQLLSVAGGFLSRIAGDVINKKVKENEVARAIELREIVTSLGPAYIKLGQALSIRPDILSPVAMTELQKLCDKVPSFADDVAMALIEEELGQPWQNIYSELSSSPIAAASLGQVYKGRLMENGDLVAVKVQRPFVLETVTIDLFIIRNLGLALRKFPQVSIDVVGLVDEWAARFFEELDYVNEGENGNRFAEMMRKDLPQVVIPRTYHKYTSRRVLTTEWIDGEKLSQSTESDVGELVNVGVICYLKQLLDTGFFHADPHPGNLIRTPDGKLAILDFGLVTKLTDDQKYGMIEAIAHLIHRDYPAIVKDFVKLGFIPDGVNLEPILPVLAKVFDQALEGGGAKNINFQELASDLAQITFDYPFRIPPYFALIIRAIGVLEGIALVGNSEFAIVDEAYPYIAQRLLTDESPRLRDALRYTIYGKSGVFDAERFIDVMQAFENFITAAKSGGGENMNGNMAELGILSTSQSEYLLPGFQSVIPLSQQPVQTRAALAFLLSDRGNFFPRISFGRDRQGHRCSNKGTTGESNVLARSSECNPCFQHGTYSGTL

SEQ ID NO: 55256 - protein, 536 aa, Zea mays
  Clone ID: UC-ZMFLMO17181C07_FLI.pep
GSAGPASAPLTQPPPPQQRQPQGRPVPNVPPQGKNQGWVHQIPVNICEALKTFGSCGGRSLCSSSRPGEAGEWGALSTDAHRGKKRGQRAPAGGSWLCGAAVARCLLAIQEEDDDDEVGKGAAVVPAEEMRASDGWDVEEEKTVMVGEVEVEKKDEILVVGKEEEGRVSVCIPPRNALLLMRCRSDPVRMAALATRFCGSPAAATVEQVDNEVSGCLNDNEEEGKEEAGAEAEPVECKEEAHGSVVSVTDLKCEECGCDENGGAETEEIDQAKTEAEESSKCGDLMEEKEDASCRDLVGVEEAQIVWKNAGLEVPLGEDTETENQGPDMVVSEEEVPAQEEVEDKMKGRRSISSYSPSAALKEDRTKLRRWSSRRRGNTSSRASSSSDRVGRRHSFSAETEARRSSFSSLKDSRRASFTIDRDGRRWSFSIEQEHLVAEPKVLMASRKGKKTKSSEPESEKDCDVVAPNSVEEGQESCDDGKEEETTENAEEEGKTHYAEINQEVEKVECTPPTCVSLSLSLFCLCLSKVCTSIFI

SEQ ID NO: 55257 - protein, 521 aa, Glycine max
  Clone ID: 700831873_FLI.pep
GEVLRNRNTEMEPETSLNFTLMLTFLLYLNLVMGVLSVDHYRRVDFPDEFVFGSGTSAYQVEGASNEDGRTPSIWDTFAHAVYEHGENGDLACDGYHKYKEDVQLMVETGLEAYRFSISWSRLIPNGRGPVNPKGLQYYNNLINELISKGIQPHVTLHNCDLPQALEDEYGGWVSRDIIRDFTNYADVCFREFGDRVQYWTTVNEPNAFALGGYDQGTSPPQRCSPPFCTTNSTRGNSTYEPYLAVHHILLSHSSAVRLYRRKYRDQQHGYVGISVYTFGFIPLTDSEKDKAASQRARDFLVGWIIEPLVHGDYPISMKKNAGARIPTFTTRESEQLKGSSDFIGVIYYNNVNVTDNPDALKTPLRDILADMAASLIYLQDLFSEEEYPVTPWSLREELNNFQLHYGNPPIFIHENGQRTMSNSSLQDVSRVKYLQGNIGGVLDALRDGSNIKGYFAWSFLDLFELLAGYKSSFGLYYVDRDDPELKRYPKLSAKWYKWFLRGTIELKKDASFDSVGHLFQ

SEQ ID NO: 55258 - protein, 359 aa, Glycine max
  Clone ID: 700868174_FLI.pep
DSGRLDDDPQAQDGSRVLQKRLSHAISMGNGSPLEEFSLETLLQVTNNFCEDKRIGLGSFGAVYHSTLEDGKEVAIKRAEASSSTYTVLGGQGQVDKDNAFVNELESLSRLHHKNLVRLLGFYEDSKERILVYDYMDNGSLSDHLHKLQSSALMSWAVRIKVALDAARGIEYLHQYATPPIIHRDIKSANILLDAKWTAKVSDFGLSLMGPDPEDEDAHLSLLAAGTVGYMDPEYYRLQHLTPKSDVYSFGVVLLELLSGYKAIHKNENGVPRNVVDFVVPFIFQDEIHRVLDRRVAPPTPFEIEAVAYVGYLAADCVRLEGRDRPTMSQVVNNLERALAACLAKPILSRSTTDSISSQ

SEQ ID NO: 55259 - protein, 387 aa, Zea mays
  Clone ID: UC-ZMFLB73063F07_FLI.pep
AEAIGGGGDPEAAARRRWDLPGKVAGNIAMGKIDMSTDEESDCVAICPPNRNAGHEEVVSGSHDEDSSGKQENPYAVNSHMDSNGQEDVSVNLDLLKLIHQQESSVSNSPTKPAVARQQGSGHTVLEPCAVAPERRSSGAGNIARIPHPTSSGEKLSDKSSSSPRSMAKKSPSFTPRKPLQSDNTSHSQDDDSYSVTSSTVTSARAGKTKKTTVAVAPTFVCANRAEKRGEFYTKLEEKRKALEEEKLQAEARKREEEEEALRQLRKNLVVRAKPMPSFYQEGPPPKVELKKVPPTRAKSPKLTRRKSCSETPHTPEGGNGSAVCCRLHRHSIGNARDVSSKAQCSPKSASKAGSATRSRVTKSREDLKASVKKVGLPSAANFAVQT

SEQ ID NO: 55260 - protein, 286 aa, Zea mays
  Clone ID: 701169290_FLI.pep
RRRSTSSCGRRWTRTTATPWGRVNAPRCWRSASTRRRRPSGPSSAASTARRCTSTSSGAARSAQTPKPATPSAPAASARSASSRACPLAPAPSASTYSTTPLGSSASPSPEASTAFGTTAPSPPSPSSQTPRSAPSCSSPTSLTSPTATPRTTPASSPTPSSGSTSRSSSPSPRPTPPRPPQPPIPSFCRGRRSSGGCHRQGKKATASFVRFCYFNSLGKGFSELNLIMDGFGLDKEGPGQPKLGVIARARPVIISLSSPRFLLFIFTSSRIWLIPALCDWNHSLG

SEQ ID NO: 55261 - protein, 513 aa, Glycine max
  Clone ID: 700941739_FLI.pep
FIALMAFSLAWLVIEAGVGVAVFVRFFVNKRGMESEIIDRLGNGFSRPPFAAVVVVCTVVSILACVPLGELFFFHMILIRKGITTYEYVVAMRAMSEAPAGASVDEDLPNILYSPTGSATTGLSGGSSLGLQYKGAWCTPPRVFVDYQDEVVPHLEPGMLPSTVDPDAAGIAERGQKMPKRPVRISAWKLAKLDSQEAVRAAAKARASSSVLRPVDNHRLPDGELSSSGNMSIRSSLSTETGTNKEIKHELRLSPVRNSIAPSQGSRDEYETGTQSMSSFSSPSHVQEAVTLSPLPQDHSLGGFRAGTSIPSLVPERPLTSKATLSNFRNPISSPSLGFDGRTAMPKGIGNDPLLLSTSNTSILRDVKRASVVWDQEAGRYVSVPLLPSEARNRSSMRIEFPNVNAETSSIGRKSVIPQQELSSSAPKSPGQHIQNLMYTGDSIFYGGPFLSAPVKDGLRNERHLASTDAQEGSISVNLPQEPRYKRNLLSNQLPVFVPGGFENILQPRSGMN

SEQ ID NO: 55262 - protein, 417 aa, Glycine max
  Clone ID: 700986509_FLI.pep
RTLGDASKDSDLPRNANERMKAMEQTLMKGRQIQNDCAAAVKKLRAMLHSTEEQLHVHKKQTLFLTQLTAKTLPKGLHCLPLRLTTEYYSLNTSQQQLPNQQKLENPRLYHYAIFSDNILATAVVVNSTVAHAKDTSNHVFHIVTDRLNYAAMRMWFLVNPPKKATIQVQNIEDFTWLNSSYSPVLKQLGSPSMVDFYFKTHRASSDSNLKFRNPKYLSILNHLRFYLPEIFPKLNKVLFLDDDIVVQKDLTGLWSIDLKGNVNGAVETCGERFHRFDRYLNFSNPHIAKNFDPRACGWAYGMNVFDLVQWKRQNITEVYHNWQKLNHDRQLWKLGTLPPGLITFWKRTFQLNRSWHVLGLGYNPNINQKEIERAAVIHYNGNMKPWLEISFPKFRGYWTKYVDYDLVYLRECNINP

SEQ ID NO: 55263 - protein, 92 aa, Glycine max
  Clone ID: 701051841_FLI.pep
LEKHKEMSSSQRAWIVAASVGVVEALKDQGVCRWNHTLKSAQHVIKSHVGSFSQAKNLSFSSSMVSTSSRLKGKQSEESLRTVMYLSCWGPN

SEQ ID NO: 55264 - protein, 395 aa, Glycine max; identical to SEQ ID NO: 38715
  Clone ID: 701009148_FLI.pep

SEQ ID NO: 55265 - protein, 294 aa, Glycine max
  Clone ID: 701064191_FLI.pep
LAARMASRPEVVAPPEIFYDDAEARKYTSSSRIVQIQATLSERALELLALPDDSVPKLLLDIGCGSGLSGETLSENGHHWIGLDISASMLNVAVEREVEGDLLLGDMGQGLGIRPGVIDGAISISAVQWLCNADKSSHNPRLRLKAFFTSLYKCLSNGARAVFQVYPENIDQRELILNAAMHAGFAGGIVVDFPHSSKKRKEFLVLTCGQRSVNVSISKGKNEDRESCSDEDSEDEEKQTVCISDRHRPRKKQKNNKSGKGKEWLLRKKEQMRRRGNVVPPNTKYTGRKRKDRF

SEQ ID NO: 55266 - protein, 395 aa, Glycine max; identical to SEQ ID NO: 38715
  Clone ID: 701050489_FLI.pep

SEQ ID NO: 55267 - protein, 565 aa, Glycine max
  Clone ID: JC-GMFL02220051A09_FLI.pep
EALQVHGQVVKLGMGHKDASRKLSKVFTFAALSPFGDLNYARLLLSTNPTLNSYYYNTLLRAFSQTPLPTPPFHALSLFLSMPSPPDNFTFPFLLKCCSRSKLPPLGKQLHALLTKLGFAPDLYIQNVLLHMYSEFGDLLLARSLFDRMPHRDVVSWTSMIGGLVNHDLPVEAINLFERMLQCGVEVNEATVISVLRACADSGALSMGRKVHANLEEWGIEIHSKSNVSTALVDMYAKGGCIASARKVFDDVVHRDVFVWTAMISGLASHGLCKDAIDMFVDMESSGVKPDERTVTAVLTACRNAGLIREGFMLFSDVQRRYGMKPSIQHFGCLVDLLARAGRLKEAEDFVNAMPIEPDTVLWRTLIWACKVHGDADRAERLMKHLEIQDMRADDSGSYILASNVYASTGKWCNKAEVRELMNKKGLVKPPGTSRIEVDGGVHEFVMGDYNHPEAEEIFVELAEVVDKIRKEGYDPRVSEVLLEMDDEEKAVQLLHHSEKLALAYGLIRIGHGSTIRIVKNLRSCEDCHEFMKLISKIYKRDIIVRDRIRFHHFKNGECSCKDYW

SEQ ID NO: 55268 - protein, 441 aa, Glycine max
  Clone ID: JC-GMFL02220051B10_FLI.pep
AFRSTVREKFHYSCVPCPDFRKGACRRGDMCEYAHGVFECWLHPAQYRTRLCKDGTSCNRRVCFFAHTAEELRPLYVSTGSAVPSPRSSASAPNVMDMAAAMSLLPGSPSSVSSMSPSHFGQPMSPSANGMSLSSAWAQPNVSALHLPGSNLQSSRLRSSLSARDMPPDDLNMMSDLDGQQQHPLNDLSCYLQPRPGAGSVSRSGRSKILTPSNLEDLFSAEISSSPRYSDPAAGSVFSPTHKSAVLNQFQQLQSMLSPINTNLLSPKNVEHPLLQASFGVSPSGRMSPRSVEPISPMSSRISAFAQREKQQQQQQQLRSLSSRDLGANSPASLVGSPANPWSKWGSPNGKADWSVNGDTLGRQMRRSSSFELKNNGEEPDLSWVQSLVKESPPEMIKEKFASPMPTASADGPNSNSQIESIDHSVLGAWLEQMQLDQLVV

SEQ ID NO: 55269 - protein, 170 aa, Glycine max
  Clone ID: JC-GMFL02220052E03_FLI.pep
LNLEEISSKLPPKCSGSETVRMARSLVAARHAGERLLRCWGGGTGWAVEDAKDKIMKLLEEYESGGVVSEACQCIRDLGMPFFNHEVVKKALVMAMEKKNDRMLDLLQECFSEGLITINQMTKGFTRIKDGLDDLALDIPNANEKFSFYLEHALKKGWLLPSFDSTATDV

SEQ ID NO: 55270 - protein, 320 aa, Glycine max
  Clone ID: JC-GMFL02220055C12_FLI.pep
KKDIHSSMATLIAPSNHSPQEDAEALRKAFEGWGTDENTVIVILGHRTVYQRQQIRRVYEEIYQEDLVKRLESEIKGDFEKAVYRWILEPADRDAVLANVAIKSGKNYNVIVEIATILSPEELLAVRRAYLNRYKHSLEEDVAAHTSGHLRQLLVGLVTAFRHVGDEINPKLAQSEAEILHDAVKEKKGSYEETIRVLTTRSRTQLVATFNRYREIHGTSISKKLVDEGSDEFQRALYTAIRAINDPIKYYEKVVRNAIKKVGTDEDALTRVVVSRAEKDLKIISEVYYKRNSVLLEHAIAKEISGDYKKFLLTLLGKED

SEQ ID NO: 55271 - protein, 759 aa, Glycine max
  Clone ID: JC-GMFL02220055D12_FLI.pep
FQRASLFLSLSLSSSFASLPEMEQSLLRGESSDQSNRSRGIFRRSDAITYGSNYEKAAAFIDLAEDGVGLPEEILDSPNFQNYIRFYFIFNKCNLIWSLSYFALIVLNFLEKPLWCKKLTTNSCNDREYFYLGQLPYLTDAECLIYEGITLVLLIIHTFFPLSYEGSHIYWKNTINQLKVFSLLVLVADVLLYALFLSPLAFDFLPFRIAPYIRVVLFVLNIRELRETITILVGMLDTYLNVLALWLLFLLFASWVAYVFFEDTIQGKTVFTSYGTTLYQLFLLFTTSNNPDVWVPAYKSSRWYCLFFVLFVLVGVYFVTNLILAVVYDSFKSELVKQVFEKDRLRRTMLDKAFDLLDTHKVSSLNKNQCIRLFEELNKYRTLPKISREDFELIFDELDDSHDIKINKDEFADICNAIALKFQKEDVMSYFEYLAFYHSPSSKRLKEFVRSPMFGYLVSFVLVINLVAVIIETTLDIENNSAQKAWQVVEFVFGWIYVIEMVLKIYAFGFENYWRDGQNRFDFIVTVIIAIGETVTFAVPDDDLPFISNGEWIRYLLLARMLRLIRILMYVKRYRAFVATFLTLIPSLMPYLGIIFCTLCIYCSIGVQIFGGIVNAGNPELELTALAENDYLVFNFNDYPNGIVTLFNFLVTATWDEVMTSYKELTGTSWTYLYFISFYLITVLLLLNLIIAFVLEAFFAEMELESSETCEGNGKEVEGDKYRKRSIGTKTRSQRVDALLHHMLSAELCQNEPSSTQTS

SEQ ID NO: 55272 - protein, 159 aa, Glycine max
  Clone ID: JC-GMFL02220057E01_FLI.pep
QLDQSVPLGLILLEKKFGWDARVALNIYGAFSGKEYIKAQKLRNRQLQFHMKIFAEADVIVSPTTGVTAYSIQDDALKTGELDYVNGAALVRYSISGNFLGLPAVTVPVGYDKLGLPIGLQFIGRPWAEATLIHLAFATQAICLEYRKPKIFYDLLRKN

SEQ ID NO: 55273 - protein, 289 aa, Glycine max
  Clone ID: JC-GMFL02220060G12_FLI.pep
IDSLSDTQLVFRYTTDHVVADIALQAYVQQLESSRLKLMQLEQELERARQQGMYIGGGLDSNHLGFAGSVNSGITTFEMEYGHWVNEQNRQITELRNALNAHIGDVELRILVDGMMSHYAEMFRMKSAAAKADVFYVMSGMWKTTAERFFLWIGGFHPSELLKVLGPLIEPLTEQQRLNIYNLGQSCQQAEDALSQGMDKLRQTLADSVAAGQFMEGTYIPQMTSAMEKLEDLVSFVKQADHLRQETLEQMSRILTIRQAARCLLALGEYFQRLRALSSLWSNRPREPA

SEQ ID NO: 55274 - protein, 464 aa, Glycine max
  Clone ID: JC-GMFL02220061F04_FLI.pep
DCYLRLPRILASWLVLLSFQRETERAIARENTMDKLYGLSHLFMTVFLHNFSMFMVVPAITDVTMAALCPGQDECSLAIYITGFQQAMIGLGTLVMMPLLGNLSDKYGRKAILTLPMILTIIPVGILAYSRTKKFFYVYYVFKILISMVCEGSVPCLALAYVADNVPESGRSTVFGILSGIGSAAFVCATLSARFLSSALTFQVSTLIAVIGALYMQFFLRDSVIDDKHLYTPIISQGNPIISKVNGNLESKKHLLKALRSIKDLTSFLNSSLTINQAAIVAFFNSLADVGLHGSLLYFLKAQFHFDKNQFADLMVISGIAGTVSQLLLMPILAPILGETRLLSVGLFFHCVHMFLYSMAWSSLVPYASAMFSILYVFSHPCIRSIVSKEAGPHEQGKAQGCISGICSIAHIVSPLVFSPLTALFLSEKAPFDFPGFSIMCIGFASMISFVQSLMLRVAPPILN

SEQ ID NO: 55275 - protein, 509 aa, Glycine max
  Clone ID: JC-GMFL02220061F11_FLI.pep
INKTVSLFETTIRVLGGLLSAHLIATDYATGMRVPLYDNQLLNLAEDLARRLLPAFDTPTGIPFGSVNLLHGVDKHESKITSTAGGGTLTLEFGVLSRLTNDPIFEQVTKNAVRGLWARRSKLNLVGAHINVFTGEWTQKDAGIGTSIDSFYEYLLKAYLLFGDEEYLYIFQEAYAAAMHYLYHDPWYVEVNMDSAAIVWPLFNSLQAFWPGLQVLAGDINPAIRTHAAFLSVWRRYGFTPEGFNLASLSVQHGQKSYPLRPELIESTYWLYKATRDPRYLDAGRDMVASLQYGTRCPCGYCHISDVENHQQEDHMESFFLAETVKYLWLLFDLAVGPDNLVENGPYKYIFSTEGHLLPATPQISLVREHCLYYGAYCRSGDLRQTYFVPESDKDKKESNDTGFYESWTKPTYSSDYTTVEPSAVSGLIKGFCPGLNHGQKFGILYAYPTDERHDYETNQVQQKESTTAVQLQSHSVLVLRDQSSDNLLPEDNSSNHNDSQTNESSDTP

SEQ ID NO: 55276 - protein, 239 aa, Glycine max
  Clone ID: JC-GMFL02220070E01_FLI.pep
YLSIILVFNMQIFVKTLTGKTITLEVESSDTIDNVKAKIQDKEGIPPDQQRLIFAGKQLEDGRTLADYNIQKESTLHLVLRLRGGMQIFVKTLTGKTITLEVESSDTIDNVKAKIQDKEGIPPDQQRLIFAGKQLEDGRTLADYNIQKESTLHLVLRLRGGMQIFVKTLTGKTITLEVESSDTIDNVKAKIQDKEGIPPDQQRLIFAGKQLEDGRTLADYNIQKESTLHLVLRLRGGDF

SEQ ID NO: 55277 - protein, 173 aa, Glycine max
  Clone ID: JC-GMFL02220070G05_FLI.pep
LSLQFLLSIILLCFSQSNMAAYREPMNMNMSDRAPVSPQQPHSPWHSPVPYLFGGLAAMLGLIAFALLILACSYWKLSGYLEGNGETERDLEAGETEQDQKPAKPYEEKILVIMAGQEKPTFLATPSVSSCSTSRSSSFGDNTSTCTCEENRKSLEMAQAGTGTTETAHSSSD

SEQ ID NO: 55278 - protein, 428 aa, Glycine max
  Clone ID: JC-GMFL02220071C03_FLI.pep
DAYGSWSKTTAAERSKLLRKWYDLLMVHKEELAQLITLEQGKPLKESVGEIVYGAGFIEFAAEEAKRIYGDIVPAPFSDRRLFVLKQPVGVVGAITPWNFPLAMITRKVGPALACGCTVVIKPSELTPLTALAAVELSIQAGIPPGVVNVVMGNAPDIGDALLASPQVRKITFTGSTAVGKKLMAGSAETVKKVSLELGGNAPCIVFDDADLDVAVKGTLAAKFRNSGQTCVCANRIIVQEGIYEKFANALRDAVQNMKVGDGFSEGVSQGPLINEAAVKKVESLIHDATSKGAKVILGGKRHSLGLTFYEPTVISDVNSDMHISREEAFGPVAPLLRFKTEEEAIRIANDTNAGLGSYVFTNSIQRSWRVAEALEYGLVGVNEGVISTEVAPFGGFKQSGLGREGSKYGMDEYLEIKYVCFGNMNKE

SEQ ID NO: 55279 - protein, 445 aa, Glycine max
  Clone ID: JC-GMFL02220076H02_FLI.pep
TTTSSSLFLQISNKKVCSTVPLLALAMLPTGAKETQLRENNSQKVHPQPMEEAMNQNPEAMETLISKVFTNISSLKSAYIQLQAAHTPYDPDKIHTADKLVISELKNLSELKHFYRENNPKPVCVSPQDSRLAAEIQEQQSLLKTYEVMVKKFQSEIQNKDSEIHQLQQQIEEARQKRAKLEKNLKLRGLSTKESEDEIGFFPVDLTPDLFTSAVEAAAKAIHDFSKPLINMMKAAGWDLDAAANSIEPDVVYAKRAHKKYAFESYICQRMFSGFEQENFSVKSDNITVTKESFFHQFLALREMDPLDMLGQNPDSIFGKFCRSKYLVVVHPKMEASFFGNLDQRNYVMGGGHPRTPFYQAFLKLTKSIWLLHRLAYSFEPNVKVFQVKGGSEFSDVYMESVVKNLIMDDNDEKPKVGLMVMPGFWIGGSVIQSKVYLSGMKVAE

SEQ ID NO: 55280 - protein, 493 aa, Glycine max
  Clone ID: JC-GMFL02220080B02_FLI.pep
VIESRFPLAHRRKKGLGSRNRDSGKEFSIGVVPRISSICYPQCGYFPSSGGFTAKRRKCNSLLRLKDCSENIRQHASILFVRLVTGVMLVMAVSLASSEPSWALSEENLLFLEAWRTIDRAYIDKSFNGQSWFRYREDALRNEPMNNRDETYTAIRKMLATLDDPFTRFLEPEKFRSLRSGTKGALTGVGLSIGYPTKADMQPGGLVVISASPGGPAYRAGVSSGDVILAIDDTNTENMGLYDAAERLQGPEGSSIALTIRSGSDIKHLDLTREKVSLNPVKSRLCKLPASGNDSPTIGYIKLTSFNQKASSAIKEAINTLRSDNVNAFVLDLRDNSGGLFPEGIEIAKIWLDKGVIVYICDSRGVRDILDTDGSSALATSEPLVVLVNKGTASASEILAGALKDNKRAVLFGEPTFGKGKIQSVFELSDGSGLVVTVARYETPAHTDIDKVGVIPDHPLPISFPKDEDAFCNCLQDPASSCYVNRIQLFSKS

SEQ ID NO: 55281 - protein, 318 aa, Glycine max
  Clone ID: JC-GMFL02220083C11_FLI.pep
KIVIMANLLTMFFVMEMIIVSGLSFGASGLNMNYYLLSCPFVEPVVKNTVNRALQDDPTLAAGLVRMHFHDCFIEGCDGSVLIDSTKDNTAEKDSPANLSLRGYEVIDDIKEELENQCPGVVSCADIVAMAARDAVFFAGGPVYDIPKGRKDGTRSKIEDTINLPAPFFNASELIKMFGQRGFSARDMVALSGAHTLGVARCSSFKHRLTQVDPTLDSEFAKTLSKTCSAGDTAEQPFDSTRNDFDNEYFNDLVSNNGVLTSDQTLYNSPQTRNIVNAYAMNQALFFLDFQQAMVKMSMLDVKEGFKGEVRKNCHKIN

SEQ ID NO: 55282 - protein, 487 aa, Glycine max
  Clone ID: JC-GMFL02220084A11_FLI.pep
IFQLGTSKTAQEEEASTPGISTVSKMFCNFHIILLIALALLVQISSQLGSKVEVLPGFEGPLPFELETGYVGLGEKDDDMQVFYYFVKSENDPQKDPLMLWLTGGPGCSSFSGLAFQIGPLRFKIEEYDGSVPNLILRPQSWTKVCNIIFVDLPFGTGFSYAKNLTAQRSDWKLVHHTHQFLRKWLIDHPEFLSNEFYMGADSYSGIPAPAIVQEISNGNEKGLQPRINLQGYLLGNPITTRNEGNDQIPFAHGMGLISDELYASLQRNCKGEYENRDSRNVLCLRDLKHYDECLSGINTFYILDRYCKSDSPKKHEAQWRRSLTQKFEASLNSHLRVPDIRCQIFGFFLATQWANDESVRKSLHIREGTIGKWERCYTTDFEEQIFSSFEFHVNLSAKGYRSLIYSGDHDAVVPFMSTQAWIRALNYSIVEDWRPWLLEDQVAGYTRIYSNQMTFATVKGSGHTAPEYKPEEGFAMFSRWIANMPL

SEQ ID NO: 55283 - protein, 366 aa, Glycine max
  Clone ID: JC-GMFL02220084B02_FLI.pep
LKLPDSLSSMRVSRLIYTNQGVAILALAANAVHKLWKWQRNERNTTGKATASIQPQLWQPSSGILMTNDISDTNPEDAVSCFALSKNDSYVMSASGGKISLFNMMTFKTMTTFMPPPPAATFLAFHPQDNNIIAIGMEDSSIQIYNVRVDEVKTKLKGHQKRITGLAFSHVLNVLVSSGADSQLCVWSTDGWEKQASKFLQMPSGRPPAPLADTRVQFHLDQTHLLAVHETQIALYEAPKLECIKQFSPREANPITHATYSCDSQSIYVSFEDGSIGILTVPALRLRCRINQSAYLHPNPSLRVHPLVIAAHPSEPNQFALGLTDGGVHVLEPLEAEGKWGTPPPNENGAGPSTASGAAVSEQPQR

SEQ ID NO: 55284 - protein, 362 aa, Glycine max
  Clone ID: JC-GMFL02220084C11_FLI.pep
KMDQQAGSLCCMCFYYSFVFDTSCNSTRSYPSGSIGNVVPVFERHTKTVNCEPSYNRIPSQFDSSVVSVICSTYYDYAFILARIHFMESNTKSACTKVLWFTIWNIFFANVLSGSALYRVNVFLEPKEIPRILAEAVPSQASFFIAYVVTSGWTAIASELFRLTTLLSNFISRTFCRNNDDDFEPPLIPYHSEIPRIRLFGVLGVTYFILAPLILPFLLIYFCLGYIIFRNQLLKVYVPKYETGGEFWPTVHSSTIFSLILMHIIAIGLFGLKKLPLASILILPLPILTLLFNEYCQKRFFPIFKNYSAECLIKKDRADQNEHNMSEFYDKLANAYNDPALMRVKYSERSDSHRSPLLHSSE

SEQ ID NO: 55285 - protein, 518 aa, Glycine max
  Clone ID: JC-GMFL02220085G10_FLI.pep
YKMEERPETELISIPATPRVSTPEILTPGQRSPRAASKEGKSWTPTSFISPRFLSPIGTPMKRVLVNMKGYLEEVGHLTKLNPQDAWLPITESRNGNAHYAAFHNLNAGVGFQALVLPVAFAYLGWSWGILSLTIAYCWQLYTLWILVQLHEAVPGKRYNRYVELAQAAFGERLGVWLALFPTVYLSAGTATALILIGGETMKLFFQIVCGPTCTSNPLTTVEWYLVFTSLSIVLSQLPNLNSIAGLSLIGAVTAITYSTMVWVLSVSQQRPPSISYEPLSLAQPSASVFLAMNALGIIAFSFRGHNLALEIQSTMPSTFKHPARVPMWKGAKVAYFFIAMCLFPIAIGGFWAYGNQMPPGGILTALYAFHSHDISRGILALAFLLVVFNCLSSFQIYSMPAFDSFEAGYTSRTNRPCSIWVRSGFRVFYGFVSFFIGVALPFLSSLAGLLGGLTLPVTFAYPCFMWVLIKQPPKYSFNWYFNWILGWLGVAFSLAFSIGGIWSIVNDGLKLNFFKPN

SEQ ID NO: 55286 - protein, 353 aa, Glycine max
  Clone ID: JC-GMFL02220092F11_FLI.pep
SRSRWQWPSYFNWAVLYQNWAWPNDYYVQVDTGSDTLWVNCVGCTTCPKKSGLGMELTLYDPNSSKTSKVVPCDDEFCTSTYDGPISGCKKDMSCPYSITYGDGSTTSGSYIKDDLTFDRVVGDLRTVPDNTSVIFGCGSKQSGTLSSTTDTSLDGIIGFGQANSSVLSQLAAAGKVKRVFSHCLDTVNGGGIFAIGEVVQPKVKTTPLVPRMAHYNVVLKDIEVAGDPIQLPTDIFDSTSGRGTIIDSGTTLAYLPVSIYDQLLEKTLAQRSGMELYLVEDQFTCFHYSDEKSLDDAFPTVKFTFEEGLTLTAYPHDYLFPFKVKKADSSQITGTKKEDMWCIGWQKKYGTN

SEQ ID NO: 55287 - protein, 263 aa, Glycine max
  Clone ID: JC-GMFL02220094D02_FLI.pep
LIEITRNSVMKMKVLVFFVATILVAWQCHAYDMFPLRMNTGYGARTPEVKCASWRLAVEAHNIFGFETIPEECVEATKEYIHGEQYRSDSKTVNQQAYFYARDLEVHPKDTFVFSIDGTVLSNIPYYKKHGYGVEKFNSTLYDEWVNKGNAPALPETLKNYNKLVSLGFKIIFLSGRTLDKQAVTEANLKKAGYHTWEKLILKDPQDPSTPNAVSYKTAAREKLIRQGYNIVGIIGDQWSDLLGGHRGESRTFKLPNPLYYIQ

SEQ ID NO: 55288 - protein, 246 aa, Glycine max
  Clone ID: JC-GMFL02220096D10_FLI.pep
RMRIAIGSAKGLAYLHEDCHPRIIHRDIKAANVLIDDSFEAKVADFGLAKLTTDNNTHVSTRVMGTFGYLAPEYASSGKLTEKSDVFSFGVMLLELITGKRPVDHTNAMDDSLVDWARPLLTRGLEEDGNFGELVDAFLEGNYDAQELSRMAACAAGSIRHSAKKRPKMSQIVRILEGDVSLDDLRDGIKPGQNVVYNSSPSSNQYDTMQYNADMQKFRKAVFSNSDEFGTSSGSSGEVSQKQQRL

SEQ ID NO: 55289 - protein, 456 aa, Glycine max
  Clone ID: JC-GMFL02220097F06_FLI.pep
LHHLLLLPFPHSSTPHKPPSFQRSKTLLRASTVESPTPKRRGRKKKPETQTPSNNTPPPQNADNKTEEDELHDYDDGVDFPYSDPPLICCFGLARKEFVPAVRVQDYPMHPDIYSEWKMLQWKPPEFARAPGGPPSNVAVAHARLGGRAAFLGKVGDDEFGEEMVLMMNEERVQTRGVKIDSKCRTGCSYMKVKFEEEGRMKMETVREAAEDSLLANELNLAVLKEARIFHFNSEVLTCPSMESTLFRAIKWTKKFDGLVFFDLNLPLPLWRSHDETREIIKKAWNEADIIEVSRSELEFLLDEEYYERKRNYRPQYFAENYEQTKNRQEYYHYTAEEVSPLWHDRLKFLFVTDGTLGIHYYTPSFDGSVMGTEDVLITPYTCDRTGSGDAVVAAILRKLTTCPEMFENQDVLERQLRFAVAAGIISQWTIGAVRGFPTESATQNLKEQVYVPSLW

SEQ ID NO: 55290 - protein, 530 aa, Glycine max
  Clone ID: JC-GMFL02220101A08_FLI.pep
WPDSCGQSLQIAGSGGFGQTLVACFFVFRDLKELIITAFNATAEEIANQIKNSTLYHELATDHMTKQATDICKEVLGYAVDDIRRSVHTLEKFDLNKLNDYAYDLKVWIAGTLAHQQTCLDGFENTSSEAGKTMAKVLNASLELSNNALDIVNGVSSLFKGLNLSSFSVNSNRKLLSEETALVDGFPTWVSEGQRRLLQAVDPKPDVVVAQDGSGQVKTIHEALKLVPKKNKKPFVIYIKAGIYNEYIIMNKHLTYVTMIGDGPTKTRITGSKNYVDGVQTYNTATFGVNAANFMAKNIGFENTAGAEKHQAVALRVTADKAVFYNCNMDGFQDTLYTQSQRQFYRDCTVTGTIDFVFGDAVAVFQNCKFIVRMPLENQQCLVTAGGRSKIDSPSALVFQSCVFTGEPNVLALTPKIAYLGRPWRLYAKVVIMDSQIDDIFVPEGYMAWMGSAFKDTSTYYEFNNRGPGANTIGRITWPGFKVLNPIEAVEYYPGKFFQIANSTERDSWILGSGVPYSLGPLIALPFPTA

SEQ ID NO: 55291 - protein, 435 aa, Glycine max
  Clone ID: JC-GMFL02220101C10_FLI.pep
SEVCALIVGGEFTSHDFTNFCCDNGIRRQLTAAYTPQQNGIAERKNRTIMNMVRSMLSEKKMPKTFWAEAATWSVHILNRSPTLAVINKTPEEAWSGVKPSVKYFRVFGCISHVHVPDAKRTKLDDKSLCCVLLGVSEVSKAYKLYDPISQKIIISRDVVFDEDKSWDWDKQYEETILCDLDWGDKDVEAVVEEEHEVRHNTDTPKEDIIISSDSMAEVNTSSPVQRRCRRPPLWMEDYETGEGLSEGSTEANLAMSATGESDPTHFDAAVQIAKWRKAMDEEMEAINKNGTWELMELPDGAKKVGVKWIYKTKFKENGEVDKYKARLVVKGYAQEYGVGYTEVFALVARMETIRLVVALAAQKGWPIYQLDVKSAFLHGELDETVYVDQPCGYEQKGEEHKVYKLKKALYGLKQAPRAWYSHIEAYFLKEGFEK

SEQ ID NO: 55292 - protein, 450 aa, Glycine max
  Clone ID: JC-GMFL02220102A01_FLI.pep
GSGKTYTMQPLPLRAAEDLVRQLHRPVYRNQRFKLWLSYFEIYGGKLFDLLSDRKKLCMREDGRQQVCIVGLQEFEVSDVQIVKEFIEKGNAARSTGSTGANEESSRSHAILQLVVKRHNEVKESRRKNNDVNEAKSGKVVGKISFIDLAGSERGADTTDNDRQTRIEGAEINKSLLALKECIRALDNDQIHIPFRGSKLTEVLRDSFVGNSKTVMISCISPNAGSCEHTLNTLRYADRVKSLSKSGNPRKDQATNPVPPAIKEVSSTSSLPASVGADDFNGQCQEVKTMDMGRKVVEKESSLYSSAADVDKQSSFSSSYPFNGREEKSSTSAPIDRERFEVKNSYGGDSTSQKMNSYSIDVTNEKVQRVSPPRRKGTKEEKSERSVNWVKRDANGSDHSTASSKQQSTGNYSITTGSGQSETESSSDVNISAILEVCQIFGFPLSQFKS

SEQ ID NO: 55293 - protein, 450 aa, Glycine max
  Clone ID: JC-GMFL02220106A02_FLI.pep
KRRRPTVMMKMGSSPSRCSFFLFLLLLVALFPSSLSEIRFSEIRNDDRSIVPFDQFGFTHKGRLELSVSKISLSNSNLDLSKVGFFLCTLDSWLHVFQQLEDGEIRCALQSDLVKSVYTFNSLNGKDSFSTLYKEETDADQYNLVFANCHSPQLKVTMDVKSAMYNLDGKSDVRDYLSAGRTILPRVYFLFSLVYFTLAALWISVLYKKRLTAFRIHYFMLAVVILKALNLLCEAEDKSYIKRTGSAHGWDIIFYIFSFLKGISLFTLIVLIGTGWSFLKPFLQDKEKKVLIVVIPLQVIANIAQVVIDENGPYGHDWATWKQVFLLVDVVCCCAVLFPIVWSIKNLREAARTDGKAAVNLMKLTLFRHYYVVVICYIYFTRVVVYALETITSYRYSWTSVVAAELATLAFYFFTGYKFKPEAHNPYFVIDDEEEEAAAEALKLEDEFEL

SEQ ID NO: 55294 - protein, 340 aa, Glycine max
  Clone ID: JC-GMFL02220106G02_FLI.pep
FKSQYDKDVLKNRYKHFRKQFNDVDHLLQQGGFSWDDTIEMIDAEDHVWDAYTKAHPEAPPLRVKTLPDYWKWSVIFAAESSDTRYVHLAHNEDHSSELPMYITGEQKNGICSNVYDAGSTIEWTESMECYFVDIMIEQVNRGNRIENLYNEEAWMHMVQAFNARWGLQSDKQVLMDQYFCLMKKHDDISNILSHSEFAWNETLQTINAEDDVWDAYIKDHPDAISYKNNCLYRFCDLCKIFGNKLMEVPDVRVSDLEQLHLMEANDFTIEMDMDEANENLLNISSVDISDQNPGRTREMDTDGSFANLGVTSSSATSGNLDVTSSNATSNQNTERPREN

SEQ ID NO: 55295 - protein, 191 aa, Glycine max
  Clone ID: JC-GMFL02220114C02_FLI.pep
PGALLMGDAFNMRHPLTGGGMTVALSDIVVLRNLLKPICDLNDATSLCRHLESFYILRKPMASTINTLAGALYKVFSTSPNEARKELRQACFDYLSLGHFFSSGPIALLSGLNPSPLNLILHFFAVALYGVGRLLLPFPSFERTWIGAKIVLCAFGIIFPIIKGEGVRQMFFPTSIPAFYRAPPDRWCIEE

SEQ ID NO: 55296 - protein, 120 aa, Glycine max
  Clone ID: JC-GMFL02220114H09_FLI.pep
STLFRRYFEMTGYKLTSFNQIDDYGQEKLWKTQKQLAPRKRKNQIAALVEDALSKSSFEKYSSKARESLASWAPDCIGFNLIEAVLCHICRKERPGAVLVFMTGWENISSLRDQLKAILF

SEQ ID NO: 55297 - protein, 367 aa, Glycine max
  Clone ID: JC-GMFL02220125E04_FLI.pep
AVNSYYSFNVHMIIWVFLDYGVYYLLSIMGTNLSTPKTEKSSDDGENEHLRYGLSSMQGWRATMEDAYAAHLDLDASTSFFGVYDGHGGKVVAKFCAKYLHQQVLKNEAYIAGDIGTSLKESFFRMDDMMRGQRGWRELAVLGDKIDKFNGKIEGLIWSPRSRHSKEQDDTWAFEEGPHSNFAGPTSGSTACVAIIRNNKLFVANAGDSRCVVCRKGQAYDLSIDHKPDLEIEKERIVKAGGFIHAGRVNGSLSLARAIGDMEFKQNRFLSAEKQMVTANPDINTVELCDEDEFIVLACDGIWDCLSSQQLVDFVRQQLLLETKLSAVCERVLDQCLAPTITVGDGCDNMTMILVQFKKLAQSSAPA

SEQ ID NO: 55298 - protein, 553 aa, Glycine max
  Clone ID: JC-GMFL02220127B04_FLI.pep
SFIFRSRAESPISVCERGVGLLIHGNAEMKFYISTKGIKRVTISNGEGKGSAKTTAVAAGAGRRISARTVFPVMVVLGIVLPFLFVRIAILMLESAAACSSLECAGWRFFSGVDTSLELRDELTRALIEANDGNVNEGAGSFNELVKEMTSKQDLKAFAFKTKAMLSQLERKVQLARQQESVYWHLASHGIPKSLHCLCLKLAEEYSVNAMARSRLPPPEFVSRLVDPTFHHLVLLTDNVLAASVVVTSTIESSINPEKLVFHIVTDKKTYAPMHAWFATNSIKSVVEVRGLHQYDWSEEVNAGVKEMLATNHLIWKQYYNKEKDLDYTQENSRYLEALRPSSLSLMNQLRIYLPELFPDLKKIVFLDDDVVVQHDISFLWELDLNGKVIGSVFKSWCGDGCCPGSKYINYLNFSHPLVASNFDGDQCAWLYGMNIIDLETWRRTNITETYHQWLKLNLKSGMTMWNPGVLPPALMTFEGQVHPISSSMLVTDLGYRHQSAEISKEKLEAAAVIHFSGPAKPWLEIGFPEVRSLWSRYVNISNKFIGRCRITG

SEQ ID NO: 55299 - protein, 212 aa, Glycine max
  Clone ID: JC-GMFL02220127H05_FLI.pep
VTVKELEYAEQAVGEFGKDNRAGIEGTLHRISAIRSRNGHIVGLTCRVGRAVTGQIDMVYDLLQYGKSILFVGRPGVGKTTVMREIARVLSDELHKRVVIVDTSNEIGGDGNIPHAAIGGARRMQVPEPSMQHRVMIEAVENHMPEVIVVDEIGTEAEAHACRSIAERGIMLIGTAHGQQLENIIKNPTLSDLVCFYFYMVVPITSGYANNI

SEQ ID NO: 55300 - protein, 515 aa, Glycine max
  Clone ID: JC-GMFL02220131H02_FLI.pep
ASLACNTFIVSSTLRSVVTRAEPPKPGPLFDLSSFNRHSFPAGFTFGASSSAYQFEGAAKEYGRGPSIWDTFINQHPGKIADGTNGDRALDQYHRYKEDVQIMKGMNLDAYRFSISWSRILPNGKLSGGINREGINYYNNLIHELQTKGLKPFVTLFHWDLPQALENEYKGFLSESIIDDFGDYAKFCFEEFGDRVKHWITFNEPHIFSSHGYAYGTKAPGRKSQGLRPDSGGTEPYRVSHNILLAHAKAVQLYRNSYKESQNGEIGITLDSRWFVPYSDASSDIEATERALDFEIGWFMEPLTSGKYPESMQLYVGRRLPEFSKEEAELVRGSFDFIGLNYYTTNTARVATGYTDSVHHHPDLSTDPNVELGLTRLNGSSPIGPVPGLGWLCVYPKGIRELLLRIKNLYNNPLIYITENGINELDDPTLSPEESLMDFYRIDYHYRHLLNVDYAIRDGVRVKGYFVWSLLDCFEWSNGYIPRFGLIFVDHKNNLNRSPKLSAKWFRKFLQNRLL

SEQ ID NO: 55301 - protein, 255 aa, Glycine max
  Clone ID: JC-GMFL02220132AH12_FLI.pep
AEKGEHIAAFILEPVQGEAGVIFPPDGYLKAVRDLCSKYNVLMIADEIQTGLARTGKMLACEWEEVRPDVLILGKALGGGVIPVSAVLADKDVMLCIQPGQHGSTFGGNPMASAVAIASLEVIKNERLVERSAQMGEELTGQLLKIQQQYPDYVKEVRGRGLFIGVEFNSKKLFPVSGYELCKKLKYRGVLAKPTHDAIIRFTPPLCISVDEIQQGSKALADVLEIDLPKLQKTKPIDAAPVATSACDRCGRVLY

SEQ ID NO: 55302 - protein, 245 aa, Glycine max; identical to SEQ ID NO: 39837
  Clone ID: JC-GMFL02220138E11_FLI.pep

SEQ ID NO: 55303 - protein, 337 aa, Glycine max
  Clone ID: JC-GMFL02220139G11_FLI.pep
VGRTQKKKQKINKTMWWPFSRIGSSGFSSYSTAEEVTHGIDGSGLTAIVTGASSGLGAETARVLALRGVHVIMGVIDMIGAKTIKEAILKEIPIAKVDVMELDLSSMTSIRNFASNFNSSGLSLNILINNAGICAAPFALSKDNIELQFAINYLGHFLLTNMLLDTMKKATSESKKQGRIINVSSIGYRFTYREGIIFDKINDQSSYNNWCAYGQSKLANILHANELARRLKEDGIDITANSVHPGATVSTNIHIHSGLLNGLHKIAWLFGLEKILGYMAKNVQQGASTTCYVALHPQVSGISGKYFEDNNLAEVYSHGRDMNLAKKLWDFSINLTK

SEQ ID NO: 55304 - protein, 470 aa, Glycine max
  Clone ID: JC-GMFL02220144A02_FLI.pep
QVAKMFGIIGGNKGHKIKGNLVIMRKNVLDINSITSVKGVIGTGINIIGGVVDTVTALASHISIQLIPYLRKINATTTKTYATRTIFFLKSDGTLTPLAIELSKPHPQGEGYGPVSEVYVPSSEGVEAYIWLLAKAYVVVNDSCYHQLVSHWLNTHAVVEPFVIATNRHLSVVHPIYKLLFPHYRDTMNINSLARKSLVNADGIIEKTFLWGRYSLEMSAVIYKDPSAPHGVRLLIEDYPYASDGLEIWDAIKSWVHEYVSFYYKSDAAIQQDPELQAWWKELVQVGHGDLKDKPWWQKMQTREELIEASATLVWIASALHAAVNFGQYPYGGLILNRPTISRRFMPEKGSAEYAALAKNPEKEFLKTITGKKETLIDLTIIEILSRHTSDEFYLGERDGGDYWTSDAGPLEAFKRFGKKLQEIEQKFIQKNKDETLRNRSGPAKMPYTLLYPSSEEGLTFRGIPNSISI

SEQ ID NO: 55305 - protein, 357 aa, Glycine max
  Clone ID: JC-GMFL02220144A07_FLI.pep
NSSHEALTQSFQLAFSLRNISLNENVKLQPSRRRSLFTLATSMIIFASKAYNILSLISIAKTTLTDRTVDPFLQLVNDSKLQAVTDTDKQPSKVYGSKEDDEDALKSLSAIKLTESQSKESFATMIVQSLGKSSNESSILRERLLNDFSPDDACPLGAQLSAETTGNMYQSGLKEDKLPDMVDISLFTIDDDIPPCGLESQANSDSMQQPSQNLSLLSVDDILGSVSETTHQVGRISISTPFDMPYKEMALHCEALLVGKQQKMSTFMGTLPMQGYSFRIPAPEYYQQKDESSNSSVQQTLSSSGNPFLDSNFDSNSHNTLPDTAPRLCATAYQHQAAFFQLPASRPYDNFLKAAGC

SEQ ID NO: 55306 - protein, 548 aa, Glycine max
  Clone ID: JC-GMFL02220148F08_FLI.pep
QSHHLVPEASLFGLASGTARGMATQARVAVYKVCWLGGCFTSDIAAGIDKAIEDGVNVLSMSIGGSLMEYYRDIIAIGSFTAMSHGILVSTSAGNGGPSQGSLSNVAPWITTVGAGTIDRDFPAYITLGTGKTYTGASLYSGKPLSDSPLPLVYAGNASNSSVGYLCLQDSLIPEKVSGKIVICERGGNPRVEKGLVVKLAGGAGMILANSEAYGEELVADSHLLPAASLGQKSSEILKNYVSSSPNPTAKIAFLGTHLQVQPSPVVAAFSSRGPNALTPKILKPDLIAPGVNILAGWTGAVGPTGLTVDTRHVSFNIISGTSMSCPHVSGLAAILKGAHPQWSPAAIRSALMTTAYTSYKNGETIQDISTGQPGTPFDYGAGHVDPVAALDPGLVYDANVDDYLGFFCALNYSSFQIKLAARRDYTCDPKKDYRVEDFNYPSFAVPMDTASGIGGGSDTLKTVKYSRVLTNVGAPGTYKASVMSLGDSNVKTVVEPNTLSFTELYEKKDYTVSFTYTSMPSGTTSFARLEWTDGKHKVGSPIAFSWT

SEQ ID NO: 55307 - protein, 301 aa, Glycine max
  Clone ID: JC-GMLE01810006B02_FLI.pep
SLVQDLWGKRRALTPYPLSMDLAAKLHHLDLTGVVILDARKPSALRHLPPRVLSRTNTNTNLIYTNRFSGPPRPNSASSTGLSMITVEDDIESLFSETNSEEERRVRKQPSIGASGISSGVKLENVGKAYKGVTVLKDVSWEVKKGEKVGLVGVNGAGKTTQMRIIAGLEEPDFGNVVKAKANMKIAFLNQEFEVAPSRTVREEFMNAFKEEMEVAGKLEKVQKALEGAVNDLELMGRLLDEFDLLQRRAQNVNLDEVDAKISKLMPELGFAPEDSDRLVASFSGGWQMRMCLGKILLQVC

SEQ ID NO: 55308 - protein, 321 aa, Glycine max
  Clone ID: JC-GMLE01810006F06_FLI.pep
PGQKKNPNDASRPQPTPSLQASALGLGRALQVETVEVHDLVPHSDKVLDELVLGVRAAVHLSGGAELGVRAEDEVGAAGGPLLASLAVLALKGLLVAVGRAPRDGGVEEGHEELVGQLAGVLGEDTLVAAVPVGVESAQTAEQDDSLGDVQSKQLRPVDEHVLGADAVSTVAVVAEAVGERLEVLERLGVSLFLGSVGATRCEWHGCAGRLLQSSDTSKDDQVGHRDLLVRAVEVLLDLLQSGEHLAELTWVVDLPVLLRLETNTSAVGTTTLVATTECGSAGESGPDKLAVVDTQVEDGLLELRDVAVVDSAFGLGDRVF

SEQ ID NO: 55309 - protein, 429 aa, Glycine max
  Clone ID: JC-GMLE01810011A02_FLI.pep
FCKIMEMERIVEFPHTYMDRPPRKRARLGWDIAEVPKAQVGLFCGQEVENISSFAPSEHPPSSLFKGVARNGSPPWRDDDKDGHYMFELGDNLTSRYKIHGKMGEGTFGQVLECWDRERKEMVAIKIVRGIKKYREAAMVEIEVLQQLGKHDKGSNRCVQIRNWFDYRNHICIVFEKLGPSLYDFLRKNSYRSFPIDLVREIGWQLLECVAFMHDLHMIHTDLKPENILLVSPEYLKIPDYKSTTRSPSSFFKRVPKSSAIKVIDFGSTTYEREDQTYIVSTRHYRAPEVILGLGWSYPCDIWSVGCILVELCTGEALFQTHENLEHLAMMERVLGPIPQQMLKRVDRHAEKYVRRGRLDWPEGAASRESIKAVMKLPRLQNIIMQHVDHSAGDLIHLLQGLLRYDPFERLTARDALRHSFFTRDQLRR

SEQ ID NO: 55310 - protein, 413 aa, Glycine max
  Clone ID: JC-GMLE01810011H06_FLI.pep
NASIYNHLKTLTRRPHVAGSKANAEAASYVVSVFTSSYIPSHIVSYEVSLTYPLSRSLVLITNPSTTFTLHQETYEGDPYADVADEVVPTFHAYAKSGTVAAPVCYVNYGRVEDYLTLKDKNGVNVSGTVVLARHGKIYRGDIVKNAYEEGAVGVVIYSDRKDYGGEEKWFPDEKWLPPSGVQVGTVYGGLGDPTTPGWASSSSGDGECERLNKDEVEKGGDVPLIPSLPVSAADGEKIMRSIGGPVAEDDWQGSKDAPIYRLGPGPGILNLSYKGQDVIATIQNVIGVIEGAEEPDRFVILGNHRDAWTFGAVDPNSGTAALLEVAQRLGKLQKKGWRPRRTILLCNWDAEEYGLIGSTEWVEENREILASKAVAYLNADCVVGGPGFNVRATPQLDELIKRATQEVSPKLN

SEQ ID NO: 55311 - protein, 705 aa, Glycine max
  Clone ID: JC-GMLE01810015E02_FLI.pep
LISRVAIYYSITFLIITNALFIFESRANMAATGARLFSAALFRRYPPSPDGKTNSRRTPIATPRLAVSVDQVPPATVEKEKRREEKKKRRMNGWNEYLERSKELIKPDGGPPRWFSPLECASRLDNSPLLLFLPGIDGVGLGLILHHQKLGRIFDIWCLHIPVADRTPFTDLVKIVERTVRSEYQRSPNRPIYLVGESLGACLALAVAALSSDIDLVLILANPATSIRRSHLQLLTPLLEALPDPFSPALPNILRSTTGESLRMVLDNVVQGLPLQNTAGELVKDFTTFSLSLHVLADILPKETLVWKLKMLKSASAYALSRLYAIKAQTLILCSGNDQLLPSQQEGERLLELLPRSKSQLRKFNDSGHFLFLEDSIDLVTIVKGTSYYRRGKSHDYISDYIPPTPEEARKVTESYSLYNLVSTVMLSTLEDGTIVKGLAGIPSEGPVLFVGDHMLLGLDKVPLWCRIFSERNIVVRGIAHPLFFMRTKKGKLPDVSYFDGLRIMGAVPVAPTNLYKLFSSKSHVLLYPGGIREAFHRKGEEYKLFWPEQSEFVRMAARFGAKIVPFGVVGEDDIGQVVFDYDDLVKIPYFRSEIESLTKETAHLRNDAGGEVANQQVHLPLILPKVPGRFYFYFGKPLETKGREQELRDKQKSQELYLQVKSEVEKCIAYLKEKRESDPYRGLGPRLLYQASHGFESDVPTFEI

SEQ ID NO: 55312 - protein, 101 aa, Glycine max
  Clone ID: JC-GMLE01810015E07_FLI.pep
AALYVHSSTICLLQLFSLRFKNGCSNHRSNTHSSQTKIKHRSKWKTWSSSFVSTTPQHQNTHSSQATPYRTNPCPSPNPSPQRKEAIFHKLPSLASDPYLG

SEQ ID NO: 55313 - protein, 482 aa, Glycine max
  Clone ID: JC-GMLE01810015G12_FLI.pep
VTGLSKEARNQVMEATDRLGGQYSPNLHPRCTHLVVQSFGGRKFEHALKHGAKNGLFVVTLGWFVDSVRKSVRLSESHYRVKSYGDNNTHLEDFRLLPEYTNAENSCLPARILQTKQAISVEELQRFTGRESIRNLDSTLSGCSIYVDPGISSELRNKVIETASREGASLVEQWFVGCNVSHVVTEGTSIQRYLGYSSYLITPLWVLKTAKEKYVRRLVRMSVDLAKQVGLMLEDIHNGISGKEVIKQKVLNNLLDTESEVGYEERQQIVNSAKNGVRSRRGRRMQTCQTPIRPITPNNLLDSICWSISESTSAASIYTDSFSVEDPSENHTSIFFYAKGDGKDSEASFSNSTRPLTESEKSELIFKNPFLTILFPIDRFAEMGPSSRTFFSHNGFRCLQVLDHIHAFYQENMSREEIEAAIHSDSRHADRLRSVYSSKETAEHGYVLFKRVEFLGSRTSFEMLKRVTGDNSSNVYELLLRA

SEQ ID NO: 55314 - protein, 501 aa, Glycine max
  Clone ID: JC-GMLE01810020E03_FLI.pep
LCLSLSTIAMDPYKLRPSSAFNSPFWTTNSGAPVWNNNSSLTVGARGPILLEDYHLVEKLANFDRERIPERVVHARGASAKGFFEVTHDISHLTCADFLRAPGVQTPVIVRFSTVIHERGSPETLRDPRGFAVKFYTREGNFDLVGNNLPVFFVRDGMKFPDMVHALKPNPKNHIQENWRILDFFSHFPESLHMFTFLFDDLGVPQDYRHMDGFGVNTYTLINKAGKAVYVKFHWKTTSGIKCLLEEEAIKVGGANHSHATQDLHDSIAAGNYPEWKLFVQTIDPEHEDKFDFDPLDVTKTWPEDIIPLQPVGRLVLNKNIDNFFAENEQLAFCPAIVVPGVYYSDDKMLQTRIFSYADSQRHRLGPNYLQLPANAPKCAHHNNHHEGFMNFIHRDEEVNYFPSRYDPVRHAETFPIPPAICSGRREKCGIEKENNFKQPGERYRSWAPDRQDRFNRRWVDALSDPRVTHEIRSVWISYWSQADRSLGQKIASRLSMRPNI

SEQ ID NO: 55315 - protein, 352 aa, Glycine max
  Clone ID: JC-GMLE01810021E07_FLI.pep
IHLRLFLQVLVVTVRNWMVKVPLDSDELYEIQSHESSLKKKLIPHTNQFRVLDKAAVLPEGNEARRWKVCTVTQVEEVKILTRMMPILLSTIIMNTSLAQLQTFSIQQGTLMNTYIGKLNIPAASIPIIPLVFMTLLIPVYEFAFIPLVRRITGHPNGITELQRVGVGLVLSAISMVIAGVIEVKRKHEFNDHNQHRISLFWLSFHYAIFGIADMFTLVGLLEFFYKEAPQGMRSLSTSFSFLSLSIGYYLSTAFVELINLVTSKIGKSKKGWLEGRDLNRNHVQLFYWFLAILSLINFLIYLMCAKWYKYQSVVPFDKGMLLKDPPPRNDENVYSTSFVSTVQNIPQNEDK

SEQ ID NO: 55316 - protein, 607 aa, Glycine max
  Clone ID: JC-GMLE01810022B03_FLI.pep
TGESGRRTQKGTLVFIVSIVFLLSFIIINLQSHEPSFENNITTVPLLPIARGVAEGVSAKSNPYLSQKASYNWTNAMLSWQRTAFHFQPQRNWMNGPLFYMGWYHIFYQYNPDSAVWGNITWGHAVSRDLIHWLYLPIALVPDKWFDISGVWSGSATLLPDGKILMLYTGNTDRNVQVQNLAYPANLSDPLLLDWVKYANNPVLVPPPGIGPKDFRDPTTAWIGPDEKWRITIGSKLNKTGLSLLYKTQDFIHYEQSDRYLHQVPGTGMWECVDFYPVSVNGPNGLDTSENGPDVKHVLKASLDDTKVDHYAIGTYFIENDTWVPDNPNEDVGIGLKLDYGRYYASKTFYDQQKQRRILWGWINESDSETADLKKGWASLQTIPRTVVFDKKTRTNLLHWPVEEVESLRLSNSEFEGVVVKPGSVVPLDIGPATQLDIFAEFEIEDLASKGIGKDNVDCGNGAVDRSAFGPFGILAIADDQLSELTPIYFHLSSTTKDGSLTTSFCVDETRSSKAPDVSKLIFGSKAPVLSDEKLSMRVLVDHSIIESFAQGGRTVITSRVYPTEAIYGAARLFLFNNATDINIKASLKIWQLNSAFIRPFPFDQKL

SEQ ID NO: 55317 - protein, 649 aa, Glycine max
  Clone ID: JC-GMLE01810022G05_FLI.pep
ADTFGVDDDRKRRDATRRLAAGKEHAVYPLPPRSQSSLGLVLPHLLDGEPRLSAGVQVDFGRLSGQSSLPGVTDNPECEQDREGQVREEEALSTGVAALDASEGEETDVELSDEDDHDEDGTEPRAPHAGDGGKRQLLDRVALDLPRLPESDVRDADGKPGEKGGQTGKGQEPVEDVGSDVGEVDVRDGAKGEDGEDRVQGSSGLVDVGEHLGSVTSLGEGSEGSRTGVDTRETDGQDRDTDGGVDEVVQAADVGSVENDDEGRDVGAGAAEQIGVIVRDEQADDGERGDVDDGDSPEGVLDGGGERLARVGRLGRGETDELGTGEREGGSDEHGTDTLEAVGERTRVLPVSATDVRAVVTAGGSTTADTDDTDEDEHDDDGELETRRPELFLGVSECAERGEEDDEQEEDGDPHAERHLVRPVLNGRTGNSDLERKDNGPLENVVPAHSKGKRGVEHTGSQGVETSRDGVDDSHFTESLGDHDQHDTHDNPGHEHRSGTSVSKGSSGTDEKTSTDRSTDSNHLQMPRLHLLLQQRVVVLQVLGWDVTVGDETARGTGCPLETLDVETQSREQRLLGRVVRVVEVVPVNRTRIVVDSSVGRVDADVVAAAGDFLLLIARRARRHRRWVLVVRHGDGGRALHKELRSRNV

SEQ ID NO: 55318 - protein, 291 aa, Glycine max
  Clone ID: JC-GMLE01810025B06_FLI.pep
QTFKQRDQSFEKKETMAIHCGFYSVNGGFKISDEDKSYMQGCKVVVSTCAFGGGDDLYQPIGVSEASLKKVCYVAFWDEITLKAQELVERRIGENGFIGKWRVVVVRDLPFADQRLNGKIPKMLSHRLFPQAKYSIWVDSKSQFRRDPLGVLEALLWRSNSLLAISEHGARSSVYDEAKAVVKKNKAKPEEVEVQLNQYRKDGLPEDKRFNGKKALCEASVIVRKHTPVTNLLMCVWFNEVARFTSRDQLSFPYVLWRLKAFKNINMFPVCTRKDLVNSMGHVRKAKPLQS

SEQ ID NO: 55319 - protein, 289 aa, Glycine max
  Clone ID: JC-GMLE01810028G11_FLI.pep
ETPLNLELSFWTHIYSGPIDVTSDFGFRFTLHPSIVKVPGPSKLVSWVAKSVTSGLDALYLTRFESQAAEHWQALYSSVNFGAPFLILCSENDDLVRYQSIYEFAQQLRNLSGDVNLVNFSSSSHLGHYKHHPIEYRAAVSHLLEKASSIYSQKMLLERERTGMDGTQDEISELICDLQKVAINSNKSLRRVAVGPTDHFFLPSSAGHYSDRESGAPQDEQKEKPVFVPSFPSISAHSVLGQFLFDVCVPKNVEGWDVKSSGNLNGRSCASAPRHSLFRGTKRIGRSKL

SEQ ID NO: 55320 - protein, 396 aa, Glycine max
  Clone ID: JC-GMLE01810030C07_FLI.pep
VKGLCMHGNLNQSLQLLDRLTKKGLVPNAFTYSFLLEAAYKERGVDEAMELLDDIIAKGGEPNLVSYNVLLTGLCKEGRTEEAIKLFRELPAKGFSPSVVSFNILLRSLCYEGRWEEANELLAEMDKEDQPPSVVTYNILITSLSLHGRTEQAFKVLDEMTRSGFKASATSYNPIIARLCNEGKVDLVLQCLDQMIHRRCHPNEGTYSAIAMLCEQGKVQEAFFIIQSLGSKQNFPMHDFYKNLIASLCRKGNTYPAFQMLYEMIKYGFTPDSYTYSSLIRGMCREGMLDEALNIFRILEENDHRPDIDNYNALILGFCKAQRTDLSIEIFLMMVNKGCVPNENTYTILVEGLAFEEETDIAADLMKELYLKKVLSQSTVERLCMQYDIKELVATG

SEQ ID NO: 55321 - protein, 592 aa, Glycine max
  Clone ID: JC-GMLE01810033E06_FLI.pep
RSRHYAGTRYLRRGVNDKGRVANDVETEQIVFEDVPEGLPVQICSVVQNRGSIPLFWSQETSRLNLKPDIILSKKDQNYEATRLHFENLVKRYGHPVIILNLIKSHERKPRESILRSEFGKAIDFINKDLSQENRLRFLHWDLKHFQSKATNVLLLLGKVAAYALTVTGFLYCQVPPTPRPEDCIKCPSISFQSTRQADVDNKDGNTLERKPSGESNLANGNHFVKPPMFQRGVLRTNCIDCLDRTNVAQYAYGLAALGHQLHALGIIDHPKIDLDDPLSDDLMGFYERMGDTLAHQYGGSAAHKKIFSERRGQWKAATQSQEFFRTLQRYYSNAYMDAEKQNAINIFLGHFQPQLGKPALWDLGSDQHYDIGRYGDDDASLCGNSELWLFRSFVKRCFSDGSIIDGNSTPMSTPNPKLEKFSKLGLQDQSEEGSKAFCESSPEISTSSETESDMSFSRYTPLMPHRHLFGDIQRERFFHSDHISYSGHGDSFSSSNFVDLDWLSSGNSCEEEPFERLSITNSSIARLSSENVINGVIMGGDTPSTSDLDSNNKGRERTGSELSNRDGRSKVLEEFPDTFVNWVTNGQTLCN

SEQ ID NO: 55322 - protein, 600 aa, Glycine max
  Clone ID: JC-GMLE01810034B10_FLI.pep
NYIYNFSFVTNENESYFTYSMYNSSIISRFVMDVSGQVKQFTWLENAQQWNLFWSQPRQQCEVYAFCGAFGSCTENSMPYCNCLPGFEPKSPSDWNLVDYSGGCERKTMLQCENLNPSNGDKDGFVAIPNIALPKHEQSVGSGNAGECESICLNNCSCKAYAFDSNGCSIWFDNLLNLQQLSQDDSSGQTLYVKLAASEFHDDKSKIGMIIGVVVGVVVGIGILLAILLFFVIRRRKRMVGARKPVEGSLVAFGYRDLQNATKNFSEKLGGGGFGSVFKGTLGDSSGVAVKKLESISQGEKQFRTEVSTIGTVQHVNLVRLRGFCSEGAKRLLVYDYMPNGSLDFHLFHNKNSKVLDWKMRYQIALGTARGLTYLHEKCRDCIIHCDVKPENILLDAEFCPKVADFGLAKLVGRDFSRVLTTMRGTRGYLAPEWISGVAITAKADVYSYGMMLFEFVSGRRNSEPSEDGKVTFFPSFAANVVVQGDSVAGLLDPSLEGNAEIEEVTRIIKVASWCIQDNEAQRPSMGQVVQILEGILEVNLPPIPRSLQVFVDNQESLVFYTESDSTQSSQVKSNVSKTSSSHAISNISSASSKSLGGEN

SEQ ID NO: 55323 - protein, 377 aa, Glycine max
  Clone ID: JC-GMLE01810044A12_FLI.pep
FAKPRFANSTQIHQFTVRYKHQTAKMHRTYSMRSSRAPTASQIQSPPPPSSSTKSGRFFGKANIGHTFRHKSAGAFGPDLAKKLSQLVKMEKNVMRSMELVSRERMEVAQQLSIWGEACDDDVSDVTDKLGVLIYEIGELEDQYVDRYDQYRVTIKSIRNIEASVQPSRDRKQKITDQIAQLKYKEPNSPKIVVLEQELVRAEAESLVAEAQLSNITREKLKAAFTYQFDAMREHCEKLAIIAGYGKHLLELIDDNPVTPGETRQAYDGYEASKAIIQDCEDALTNWVSQNASVSSKLSQRSRTLSQRRRNATRRGEGHDLSGQDQPLDSRESGLWIPATEHQGNDYEDRDDLDDDVNSTIASEHQRGREEERVIAA

SEQ ID NO: 55324 - protein, 148 aa, Glycine max
  Clone ID: JC-GMLE01810045C09_FLI.pep
ACITPLPNNGYGGNVTEWPLRLHQPPDRLHSIQLDAIISRDELLRADTKYWFEIIESYVRAFRWQDYNLRNVMDMRAGFGGVAAALHDLQIDCWVMNVVPVSGFNTLPVIYDRGLIGVMHDWCEPFDTYPRTYDLLHAAGLFSVEKKR

SEQ ID NO: 55325 - protein, 109 aa, Glycine max
  Clone ID: JC-GMLE01810045C11_FLI.pep
SLISVISASNAFLTFYFLFYNTCLCRAVATAFLPRYKSFLGQKPYDMLHQPNINIYSKASTAAALTDASALGGGSMKKRKELKTMMNIVNINSDLQESPYFLTSLSPSS

SEQ ID NO: 55326 - protein, 279 aa, Glycine max
  Clone ID: JC-GMLE01810045G07_FLI.pep
SRNAIMCGALTRVPLAPSSTLPRSNRFPGSQGFLTDLECDHLISLAKSELKRSAVADNLSGESQLSDVRTSSGMFISKNKDPIVAGIEDKISSWTFLPKENGEDIQVLRYEHGQKYDPHYDYFTDKVNIARGGHRIATVLMYLTDVAKGGETVFPSAEEPPRRRGAETSSDLSECAKKGIAVKPRRGDALLFFSLHTNATPDTSSLHAGCPVIEGEKWSATKWIHVDSFDKTVGAGGDCSDNHVSCERWASLGECTKNPEYMIGSSDIPGYCRKSCKAC

SEQ ID NO: 55327 - protein, 151 aa, Glycine max
  Clone ID: JC-GMLE01810046C01_FLI.pep
YTEGGQLTEAVRRRPYTVVLFDEIEKAHPDVFNMMLQILEDGRLTDSKGRTVDFKNTLLIMTSNVGSSVIEKGGRKIGFDLDYDEKDSSYNRIKSLVTEELKQYFRPEFLNRLDEMIVFRQLTKLEVKEIADIMLKEVFERLKVKIAPYLV

SEQ ID NO: 55328 - protein, 757 aa, Glycine max
  Clone ID: JC-GMLE01810046F12_FLI.pep
GPETDKNEVAKIRDATRNGRSYCGRLLNYKKDGTPFWNLLTVTPIKDDHGNTIKFIGMQVEVSKYTEGMNEKALRPNGLPKSLIRYDARQKEKALGSITEVVQTVKDPKSIINDRNGDTATMPEEQEKFNFDFVLPKSADIGNTSTPGRQASPLNIQRMSSSHDKSKTSSRSGRISFKGLKGRSPSSAEEKPIFEPEVLMTKEIEWSNNLEHSLRERDIRQGIDLATTLERIEKNFVISDPRLPDNPIIFASDSFLELTEYTREEILGRNCRFLQGPETDQATVSRIRDAIREQREITVQLINYTKSGKKFWNLFHLQPMRDQKGELQYFIGVQLDGSDHVEPLKNRLSETTEQQSAKLVKATAENVDEAVRELPDANLRPEDLWAIHSQPVFPRPHKKDNPSWIAIQKVAARDEKIGLQHFVPIRPLGCGDTGSVHLVELKGTGELYAMKAMEKSVMLNRNKVHRSCIEREIISLLDHPFLPTLYTSFQTPTHVCLITDFFPGGELFALLDKQPMKIFKEELARFYAAEVVIGLEYLHCLGIIYRDLKPENILLQKDGHVVLADFDLSFMTSCKPQVVKQAVPGKRRSRSEPPPTFVAEPVTQSNSFVGTEEYIAPEIITGAGHTSGIDWWTLGILLYEMLYGRTPFRGKNRQKTFSNILHKDLTFPSSIPASLAARQLINALLQRDPTSRIGSTTGANEIKQHPFFRGINWPLIRNMTPPPLDVPLKLIGNDPVAKDIKWEDDGVLVSSIDMDIF

SEQ ID NO: 55329 - protein, 346 aa, Glycine max
  Clone ID: JC-GMLE01810049A12_FLI.pep
ATSAANVWRTMALRQILLPILPRSCTKEMSLLLEMSPPGKALAILHLSLELFWQMLIGDDTGQLPFSPPFISLCLDRAAVASAAESKSGDYSNKWRLCTVTQVEELKILIRMFPVWATVIVFAAVYAQMSTLFVEQGTMMNTNVGSFKIPPASLSSFDVISVIVWVPVYDRIIVPIARKFTGNERGFSELQRMGIGLFISVLCMSAAAIVEIVRLQLAKEHGLVDEPVPVPLNIFWQIPQYFLLGAAEVFTFIGQLEFFYDQSPDAMRSLCSALALLTTSLGNYLSSFILTVMTYFTTQGGNPGWIPDNLNKGHLDYFLWLLAGLSFLNMFVYIVAAKRYKEKKSA

SEQ ID NO: 55330 - protein, 330 aa, Glycine max
  Clone ID: JC-GMLE01810054B11_FLI.pep
FSLQTTQIMASTPSIPSHIKAWAYSEYGNTEEILKFESNIPIPDIKEDQVLIKVVAAALNPIDYKRAHGFLKNTDSPFPTVPGYDVAGVVVKVGSQVSKFKVGDGVYGDINEDPVNNPKAIGSLAEYTAVEEKVLAHKPSNLSFVEAASLPLAIITAYQGFEKVEFSAGKSILVLGGAGGVGSLVIQLAKHVFGASKVAATASTAKLDLLRNLGADLAIDYTKENFEELEEKFDVVYDTVGESETEKALKAVKESGKVVTIVRFGHPEAIFFIRISDGTVLEKLKPYLESGKVKPILDPKSPYPFSQTVEAFAHLKTNRAIGKVVIHPIP

SEQ ID NO: 55331 - protein, 316 aa, Glycine max
  Clone ID: JC-GMLE01810055H11_FLI.pep
VATNRETGALCAMKEVELFPDDPKSAECIKQLEQEIKVLSNLKHSNIVQYYGSEIVEDRFYIYLEYVHPGSINKYVREHCGAITESVIRNFTRHIPSGLAYLHSKKTIHRDIKGANLLVDSAGVVKLADFGMAKHLTGFEANLSLRGSPYWMAPELLQAVIQKDNSPDLAFAIDIWSLGCTIIEMFTGKPPWSEYEGAAALFKVMKETPPIPETLSSEGKDFLRCCFKRNPAERPTAAVLLEHRFLKNSQLLDVLSSTQLYNETSFMDKPHTPSRQSENSYDQLSTPCAKIAKGKAAERRGFLISSFDILPAYLDQ

SEQ ID NO: 55332 - protein, 837 aa, Glycine max
  Clone ID: JC-GMLE01810062A10_FLI.pep
QQRARHRSSHNTAIMSAEPDHSASKGKVKLDNDPSGAEKRDENEVATAILKKKKKPNSLIVTDATTDDNSILALSNNTMETLQLFRGDTVLVKGKKRKDTVLIVLADDDLDDGSVRMNRVVRHNLRVKLGDVVTVNPCPDIKYAKRIAVLPMADTIEGLTGSLFDVFLAPYFREAYRPLRQGDLFTARAAMRTVEFKVVEIDPPEYGIVAQDTVIHCEGEPIQREDEEGNLNEVGYDDIGGCRKQMAQVRELVELPLRHPQLFKSIGIKPPRGILMYGPPGTGKTLMARAVANETGAFFFLINGPEIMSKMAGESESNLRKAFEEAEKNSPAIIFIDEIDSIAPKREKTNGEVERRVVSQLLTLMDGMKARSNVVVMAATNRPNSIDPALRRFGRFDREVDIGIPDPTGRLEILQIHTKNMKLADEVDLETIAAETHGYVGSDIASLCSEAAMQQIREKMDLIDLDEDTIDAEVLDSLGVTQENFRFALGVSNPSALREVAVVEVPNVRWEDIGGLEDVKRELVESVQYPVDHPEKFLKFGLSPSRGVLFYGPPGTGKTLLAKAVANECAANFISVKGPELLSMWFGESESNIRDIFDKARAAAPCVVFLDELDSIAKSRGGSQGDAGGASDRVVNQLLTEMDGMTSKKNVFVIGATNRPEQLDNALCRPGRLDTLVYVPLPDQPGRESILKAQLRKTPVAKDVDLSYIASKTHGFSGADLGFITQRAVKLAIKESISLAIEKQKEREAAEGDDTKMDEDVDEEDPVPELTKRHFEEAMSMARRSVTDTEIRRYEAFAQSMKNSAGGSAFFRFPEGGAEGAAAEAQQNGAGEEDLYD

SEQ ID NO: 55333 - protein, 413 aa, Glycine max
  Clone ID: JC-GMLE01810062G08_FLI.pep
YAKDLLNACDANKDGRVDFQEFRKYMDDKELELYRIFQAIDVAHNGCILPEELWEALVRAGIKIDDEELARFVERVDKDNNGVITFEEWRDFLLLYPHEATIENIYHYLERICVVDIGEQTVIPAGIGKHIHASRYLIAGGVAGAASRTATAPLDRLKVVLQIQTTQSHIMPAIKDIWKKGGLLGFFRGNGLNVLKVAPESAIRFYSYEMLKSFITRAKGDEAKAANIGAMGRLLAGGIAGAVAQTAIYPMDLVKTRLQTHACKSGRIPSLGTLSKDIWVQEGPRAFYRGLIPSLLGIIPYAGIDLAAYETLKDMSKQYILHDGEPGPLVQLGCGTVSGTLGATCVYPLQVVRTRMQAQRSYKGMADVFRKTLEHEGLRGFYKGIFPNLLKVVPSASITYMVYESMKKSLDLE

SEQ ID NO: 55334 - protein, 303 aa, Glycine max
  Clone ID: JC-GMLE01810062H09_FLI.pep
SSSVNHIAVQIMPYNEFGPPLSNVTKLTFEGRTDVSDLGLQYISKLCVSLRHLNIKGCISVTDIGISDLISTCKKLNSIVVCDTLFGIYSVQALCSAISGSGNFPSLHSRDKRLKSVVSNFEMLHMGGCRGISESSLLELMSQAQVLKSLCLRWTDLVDQALYNFVGSSLEMLDVSDTKISGAALAHIIHGNPSLKCLRARGCQNLFPGNNCIEKRKSSFPSLHEKLHAELGKMCRLEEIEFGWGFSSFSLSALEPLLMSLKTINIGLGGTLGEDALKQLPAICPLLETIILHFQVIIIFPVI

SEQ ID NO: 55335 - protein, 138 aa, Glycine max
  Clone ID: JC-GMLE01810063H10_FLI.pep
TNIDPQLPFQGLVVPVIRNADTMNFADIEKQINTFAKKANDGSLSIDEMAGGTLTISNGGVYGSLLSTPIINPPQSAILGMHSIVSRPTVVGGNIVPRPMMYVALTYDHRIIDGREAVFFLRRIKDIVEDPRRLLLDI

SEQ ID NO: 55336 - protein, 489 aa, Glycine max
  Clone ID: JC-GMLE01810064D05_FLI.pep
ITSRGSHSNLQAERSDTMGSAAKYELPFKLNNPDLLHNESFVHGKWVKSKSGKTFEVADPGTGKTWIDCPTNDASDVDEAVKSSHECFLEYKKISPRQRAQMLYKWDALIKENREDIATILVYETGKPRAEAYGEIDYSTGFTWWFAGEAERIQGSVFTPALPNRRIFTIKQPLGVAAALVPWNFPIAMILRKAGAALAAGCTMIVKPSPETPITVLALAYLADKAGFPKGALNVLTTDLDKTPELSEALCRHPLVNKVTFTGSTRVGKLVAKICSDNLKKVTLELGGNCPVLIFDDANIEQAMSQVFALKFRHAGQACITANRIYVQSGIFDKFLERWNAEAQKIVVGHGSDEKTTMGPVTTPRAVDKALSLVEDARKKGAKIHTGGNKVEKNGGYFFEPTVITGVTPDMDIAKEEVFSPISTFIKFETEDEVVKAANDTSMGLASYLFTKNVDRMWRLFENLEAGMIGLNTGKSVPKARYSLVVTNG

SEQ ID NO: 55337 - protein, 394 aa, Glycine max
  Clone ID: JC-GMLE01810067C04_FLI.pep
ANTMSAPPHHDDDDDNEEVFLDESDIIHEVAMDNEDLPDADDDSELLEEDEDGDFVHKFTAHTGELYSVACSPTDADLVATAGGDDRGFLWKIGQGDWAFELQGHEESVSSLAFSYDGQCLASGSLDGIIKVWDVSGNLEGKKFEGPGGGIEWLRWHPRGHILLAGSEDFSIWMWNTDNAALLNTFIGHGDSVTCGDFTPDGKIICTGSDDATLRIWNPKTGESTHVVRGHPYHTEGLTCLTINSTSTLALSGSKDGSVHIVNITTGRVVDNNALASHSDSIECVGFAPSGSWAAVGGMDKKLIIWDIEHLLPRGTCEHEDGVTCLAWLGASYVASGCVDGKVRLWDSRSGECVKTLKGHSDAIQSLSVSSNRNYLVSASVDGTACAFEVENFR

SEQ ID NO: 55338 - protein, 129 aa, Glycine max
  Clone ID: JC-GMLE01810067C07_FLI.pep
DTGNPSVRSRHHSIKNDLQLQHGMSKSIISITSSCKSFLNCQEEVVSRSQHLKHFKDKLSFFVLLILLMNNLISPSKNGPTCNAEYVNDSFQSGEHHPFFFLAKSDIYNFIKKMSHPMPANERLREKQG

SEQ ID NO: 55339 - protein, 263 aa, Glycine max; identical to SEQ ID NO: 44650
  Clone ID: JC-GMLE01810067F10_FLI.pep

SEQ ID NO: 55340 - protein, 190 aa, Glycine max
  Clone ID: JC-GMLE01810068D05_FLI.pep
YPLEYNFQARRLLLDPAVHEEFTRLKNLVEEKDKKVKELQDNIAAVSFTPQSKMGKMLMAKCRTLQEENEEIGNQASEGKMHELGMKLALQKSQNSQLRNQFEGLQKHMEGLTNDVERSNEMVLMLQEKLEEKDRQIQRLKHEIKQKNLEDQRLKHELQQKNLEDQRLKHELQQKNLEDGNDNNAGEAAN

SEQ ID NO: 55341 - protein, 376 aa, Glycine max
  Clone ID: JC-GMLE01810070B07_FLI.pep
LLGRGRFSSADRCHLLSRYLPVNGPWLIDQMSSRAYVSQFSADGSLFIAGFQGSHIRIYNVDRGWKVQKNILAKNLRWTITDTSLSPDQRYLVYASMSPIVHIVNAGSAETESLANVTEIHDGLDFSSNDDGGYSFGIFCVKFSKDGKELVAGSSGDSIYVYDLEANKLSLRILAHTVWDRRCLIAKGKPAGVLMGHLEGITFIDTRGDGRYFISNGKDQTIKLWDIRKMSSNVTSNPGYRSYEWDYRWMDYPPQAKDLTHPCDQSVATYRGHSVLRTLIRCYFSPAFSTGQKYIYTGSHNACVYIYDLVSGAQVATLKHHKSPVRDCSWHPFHTTLVSSSWDGDVVKWEFAGSGDTPGSSTKKRVWTRHFYEHYL

SEQ ID NO: 55342 - protein, 340 aa, Glycine max
  Clone ID: JC-GMLE01810071E08_FLI.pep
DHIFRQDLGAKGSCQIGGNVSTNAGGLRLVRYGSLHGSVLGVEAVLANGTVLDMLKTLRKDNTGYDLKHLFIGSEGSLGIVTKVSILTPPKLSSVNVAFLACKDYSSCQKLLQEAKGKLGEILSAFEFLDVQSMNLVLNHMEGARNPLPSLHNFYVLIETTGSDESSDKQKLEAFLLGSMENELISDGVLAQDINQASSFWLLREGIPEALMRAGAVYKYDLSIPLEHMYNLVEEMRSRLGNTANVIGYGHLGDGNLHLNISTSHYDDKILSHIEPYVYEWTSKHRGSISAEHGLGLMKANEIFYSKSHETVQVMASIKNLLDPNHILNPYKVLPQSLIS

SEQ ID NO: 55343 - protein, 273 aa, Glycine max
  Clone ID: JC-GMLE01810075H04_FLI.pep
GVSEQDWHSVKQLAETYPSVIPCFGLHPWFVKERSPNWFQTLKEYFDSTPSAAVGEIGVDKGSHGKKIDFSEQIEVLRQQLELAKELNKPASVHCVRAFGDLLELMKFLGPFPAGVILHSYLGSAEMVHEFSKLGAYFSFSGFLMSLKASKAKKMLKMVPPDRILLETDAPDALPMSNIDSLYFVEGDTSLTEELLAQTTTSSTSGSSLGNSSHVLADASMLPKETLNHPANIHNVLDYVASMLEITKEELAELSYQNAVRLLSYEGSKVLQK

SEQ ID NO: 55344 - protein, 398 aa, Glycine max
  Clone ID: JC-GMLE01810078H04_FLI.pep
KNASEDEIKKAYRKAAMKNHPDKGGDPEKFKELGQAYEVLSDPEKKDLYDQYGEDALKEGMGGGGSFHNPFDIFESFFGGASFGGGGSSRGRRQKHGEDVVHSLKVSLEDVYNGTTKKLSLSRNVFCSKCKGKGSKSGTAGRCFGCQGTGMKITRRQIGLGMIQQMQHVCPDCRGSGEVINERDKCPQCKGNKISQEKKVLEVHVEKGMQQGQKIVFEGQADEAPDTITGDIVFVLQVKDHPRFRREQDDLFIDQNLSLTEALCGFQFAVKHLDGRQLLIKSNPGEVIKPGQYKALNDEGMPQHNRPFMKGRLYIQFNVDFPDSGFLSPDQCQLLEKVLPQKSSKHVSDMELDDCEETTLHDVNFKEEMRRKQQQQHREAYDEDDDEPSGHRVQCAQQ

SEQ ID NO: 55345 - protein, 478 aa, Glycine max
  Clone ID: JC-GMLE01810080F07_FLI.pep
DSIAVGAFGAANHNVLVSCSAGNSGPGPSTAVNIAPWILTVGASTVDREFPADVILGDGRVFGGVSLYYGESLPDFKLPLVYAKDCGSRYCYIGSLESSKVQGKIVVCDRGGNARVEKGSAVKLAGGLGMIMANTEANGEELLADAHLLAATMVGQTAGDKIKEYIKLSQYPTATIEFRGTVIGGSPSAPQIASFSSRGPNHLTSQILKPDVIAPGVNILAGWTGRVGPTDLDIDPRRVEFNIISGTSMSCPHASGIAALLRKAYPEWSPAAIKSALMTTAYNVDNSGGNIKDLGSGKESNPFIHGAGHVDPNRALNPGLVYDLDSNDYLAFLCSVGYDANQIAVFTREPAVESVCEGKVGRTGKLASPGDLNYPSFAVKLGGEGDLVKYRRVVTNVGSEVDVVYTVKVNAPPGVGVGVSPSTLVFSGENKTQAFEVTFSRAKLDGSESFGSIEWTDGSHVVRSPIAVTLSGAYSSSI

SEQ ID NO: 55346 - protein, 201 aa, Glycine max
  Clone ID: JC-GMLE01810083A07_FLI.pep
KKKMTTYGTISEEASSNSNSVFVSQAKERIEDGLGTTRPWSEMLQTCHLKLPSSFFGAIQRINTNAKHFRANYVIIILLVLFLSLLGHPISLIILVVMMIAWLYLYFLRDTPLVILRFEMDERLVVISLLLITIGLLVLTNVTYNVIVGMCVALVVVLVHAIMRETEDLFTMDEDVGVVKGFRDVVKVPLRQPGSSSFTLP

SEQ ID NO: 55347 - protein, 424 aa, Glycine max
  Clone ID: JC-GMLE01810083D09_FLI.pep
GSGPGVSAPSSSFFGSSLKKVIGSRVPNTKISSGSFKIVAVEEKKEIEETQQTDKDRWKGLAYDISDDQQDITRGKGLVDSLFQAPQDAGTHYAVMSSYEYLSTGLRQYLDNNMDGFYIAPAFMDKLVVHITKNFMTLPNIKVPLILGIWGGKGQGKSFQCELVFAKMGINPIMMSAGELESGNAGEPAKLIRQRYREAADLIKKGKMCALFINDLDAGAGRLGGTTQYTVNNQMVNATLMNIADNPTNVQLPGMYNKEENPRVPIIVTGNDFSTLYAPLIRDGRMEKFYWAPTRDDRIGVCTGIFRTDSIPEQDVVKIVDTFPGQSIDFFGALRARVYDDEVRKWISGVGVDGIGKKLVNSKDGPPTFEQPKMTLEKLLTYGNMLVQEQENVKRVQLADKYLNEAALGNANEDAINRGTFFQS

SEQ ID NO: 55348 - protein, 242 aa, Glycine max
  Clone ID: JC-GMLE01810086D06_FLI.pep
YVRYIDWVITTPALLLELCLASGLPLSDIVTLIFFDLVMIITGLVGGLVKSSYKWGYYTFGCVALFYIWWVLAGPARVSAGALGKDFQKSFTMSALILSFLWLLYPIAWGLADDGSVIYPDSEMIFYGVLDILAKPVFLIIHLISLRNCDLTRLQLQSGKYTTSAAAITTHDMEKNPRTTQNTGMIANDPVAPAGHDNMAAHGKKGFFQRKGKYDAQPVNADHPADANTTMPRTSEATMASR

SEQ ID NO: 55349 - protein, 408 aa, Glycine max
  Clone ID: JC-GMLE01810087B05_FLI.pep
TASMFFNFKESAVKTIKLSFKYHFLHIQRYSYVNVYMKWKKDSYYDSIEHIHYSVQLKPIIALKNCIVRDPNGCIPISAVSKRGLELDVPMKVARFMRQYPSIFEEFTGPEYNLPWFRLTPEVAEIDRDEKRVYEECREDLRSRLRKMILMTREHVLPLKIIQGMQWYLGLPSDLLQHPEQILDESFRFVEMEDGLKGLALESGEKIYSVMERNAMKSGFYSGGPMEAIEFPFFPSKGLRLRRKIENWLNEFQKLPYISPYDDFSNLDPNSDIADKRLVGVLHELLSLFVEHSAERKKLFCLKKYFGLPQKVHRAFERHPHMFYLSFRNKTCTVILKEAYSNKSAIEKHPLLRVRKKYIKLMKKSEVILRNRRVNNRFSNSNAKLDIDSNDIDEKGHEMASCSLEQVA

SEQ ID NO: 55350 - protein, 180 aa, Glycine max
  Clone ID: JC-GMLE01810091H04_FLI.pep
EYLAAIPIIMSMKESWHLNQEKGMFMGYGDGVKGYRIWSPSERKVLLSRDVIFDESHLLHPKIEVPIVGTQSCHSPLEKDVESTTKDSEKGVHIDTSPVPQEGEQSEDSNANEAHQNAEPEPAQLNPGISQRPKRVSKPLERYGFEDMAAYALHAAEEIDSNEPATYKKAINHPEAENWF

SEQ ID NO: 55351 - protein, 468 aa, Glycine max
  Clone ID: JC-GMST02400009C05_FLI.pep
LSTTASSSKKKQLESSRVFFFLFFVCFTFKMGEKSNVGGDAINTTLLHGKYELGRLLGHGTFAKVYHARHLKTGKSVAMKVVGKEKVVKVGMMEQIKREISAMNMVKHPNIVQLHEVMASKSKIYIAMELVRGGELFNKIARGRLREEMARLYFQQLISAVDFCHSRGVYHRDLKPENLLLDDDGNLKVTDFGLSTFSEHLRHDGLLHTTCGTPAYVAPEVIGKRGYDGAKADIWSCGVILYVLLAGFLPFQDDNLVALYKKIYRGDFKCPPWFSSEARRLITKLLDPNPNTRITISKIMDSSWFKKPVPKNLMGKKREELDLEEKIKQHEQEVSTTMNAFHIISLSEGFDLSPLFEEKKREEKELRFATTRPASSVISRLEDLAKAVKFDVKKSETKVRLQGQEKGRKGKLAIAADLYAVTPSFLVVEVKKDNGDTLEYNQFCSKELRPALKDIVWRTSPAENPTLA

SEQ ID NO: 55352 - protein, 459 aa, Glycine max
  Clone ID: JC-GMST02400016D01_FLI.pep
RRPRGMYFSAKDKGEMMSMIYNWPAHEVDMIVLTDGSRILGLGDLGVQGIGIPIGKLDVYVAAAGINPQRILPVMLDVGTNNQKLLEDRLYLGLRQPRLEGEEYLSIIDEFMEAVHARWPKAIVQFEDFQMKWAFETLKRYQKKFCMFNDDIQGTAGVALAGLLGTVRAQGRPLTDFVNQKIVVVGAGSAGLGVLKMAIQAVAKISGCSELAAKSQFYLIDKDGLVTTERNNLDPAAAPFAKNPRDIEGLTEGASIIEVVKKIRPHVLLGLSGVGGIFNEEVLKAMRESVSTKPAIFAMSNPTMNAECTAIDAFKHAGENMVFASGSPFENVDLGNGIVGHVNQANNMYLFPGIGLGTLLSGAHLITDGMLQAAAECLASYMAEEDILKGILYPSVDSIRDVTAEVGAAVLRAAVEEELAEGNGDVGPKELSHMSKDETVEYVRSNMWYPVYSPLVHEK

SEQ ID NO: 55353 - protein, 402 aa, Glycine max
  Clone ID: JC-GMST02400026E08_FLI.pep
SGIVMGAEQQHMDSHKKMVIAVAVASTSLGAVILCVLCIWIYYTKYPSKSKGKNVQRSDAEKGLASSPFLSKFSSIKLVGKKGCVPIIDYKQIEKATGNFKEINILGKGGFGCVYKAHLDDNLDVAVKKLHCENQYAEQEFENEVDLLSKIQHPNVISLLGCSSNEDTRIIVYELMHNGSLETQLHGPSHGSALTWHLRIKIALDTARGLKYLHEHCYPPVIHRDLKSSNILLDTKFNAKLSDFGLAITNGSQNKNNLKLSGTLGYVAPEYLLDGKLTDKSDVYAFGVVLLELLLGKKPVEKLAQAQCQSIVTLAMPQLTDRSKLPNIVDPVIKNTMDPKHLYQVAAVAVLCVQPEPSYRPLIADVLHSLIPLVPVELGGTLKVSQLPKQVLPADPPEDSSQ

SEQ ID NO: 55354 - protein, 385 aa, Glycine max
  Clone ID: JC-GMST02400049G04_FLI.pep
VEPDKDLSRGDRFDALMGAAGSKLEKALGDQFPEGERYFGLENFGNTCYCNSVLQALYFCVPFREQLLEYYANNKSITDAEENLLTCLADLFSQISSQKKKTGVIAPKRFVQRLKKQNELFRSYMHQDAHEFLNFLLNELVDILEKEAQAAKNDQETSPPSEKAANGPKNSLANGAKKEPLVTWVHKNFQGILTNETRCLRCETVTARDETFFDLSLDIEQNSSITSCLKNFSSTETLNAEDKFFCDKCCSLQEAQKRMKIKKPPHVLVIHLKRFKYIEQLGRYKKLSYRVVFPLELKLSDTAEDADIEYSLFAVVVHVGSGPNHGHYVSLVKSHNHWLFFDDENVEMIDESAVQTFFGSSQEYSSNTDHGYILFYESIGSGNRN

SEQ ID NO: 55355 - protein, 492 aa, Glycine max; identical to SEQ ID NO: 43037
  Clone ID: JC-GMST02400049H07_FLI.pep

SEQ ID NO: 55356 - protein, 215 aa, Glycine max
  Clone ID: JC-GMST02400057H07_FLI.pep
VECVSVGEDGKVNLVGIGDSNLNYRRLFDSAGLVSYTAVRWASPMEFATGGFGFGLQWWDQRKPGGPVSQFKGNWDKKLTSGIVHSIDIHPSRKHTCLAGGSLGTVFAWDLRWQQQPIILSGAGAANTAVQSISESEVWEVQYDRCIKSNTSSTRILPSMICSEDGILGVIEQGEEPIELLAEPCAINSFDIDRHNPSDVICSLKWEAVAILTRQ

SEQ ID NO: 55357 - protein, 284 aa, Glycine max
  Clone ID: UC-GMFLMINSOY001G03_FLI.pep
SGGYGWGVAALVHMYDQLKEALQTPTRHMGGYLTLLQCWIYEYFPSVHQGVIDDGYAKMTPRASRWLTMKAHMKGIKGTPYRARLDALTITNFSWLPYNEHRAVRGFELISCYQGRLRWGHVVVYVIPERVVQQFGYIQTIPPPPVTGSLLYEDIDDRWMHFGNHLAPAGEICVVPGQVSADYMERFFQISHPFITPTQEGDEPRHPLAPDVDAYVEPHIPEVPVAVDLPRHSVVACEGCEEITERLERVFNLRMVTAGTELHEIIEDCLRIARGDASDGSLRA

SEQ ID NO: 55358 - protein, 283 aa, Glycine max
  Clone ID: UC-GMFLMINSOY001G09_FLI.pep
VQVEVLNLIAKEKMGDNDSLSEFLASAVDAACKAGEIIRKGFYQTKNVQHKGLVDLVTETDQACEDLIFTHLKQLYSTHKFIGEETTAAGGNAELTDEPTWIVDPLDGTTNFVHGFPFVCVSIGLTIGKVPTVGVVYNPIINELFTGIRGKGAFLNGNPIKVSSQTELMSALLVTEVGTKRDKLTIDACTNRINSLLFKVRSLRMTGSCALNLCGIACGRLDVCFELGFGGPWDVAGGAVIVREAGGVIFDPSGADFDITSQRVAASNPFLKDALVDVLHQIV

SEQ ID NO: 55359 - protein, 304 aa, Glycine max
  Clone ID: UC-GMFLMINSOY002C05_FLI.pep
CELLLRSESKSETIMATPDHLFNLRNNFYLGAYQAAINSSDVANLSQEDTLERDTLVHRCYIALGQLQFVISEIHDDAPTPLQAVKLLALYFSSPDTKDSAIASLKEWLADPAIGNNATLRLVAGLVFLHENDFNEALKHTNAGGTMELHALNIQIFIKMHRSDYAERQLRIMQQIDEDHTLTQLANAWLNLAVGGSKIQEAYLIFQDLSERYQSTSLLLNGKAVCCMHMGNFDEAETLLVEALNKDARDPETLANLVVCCLHLGKPSNKSFSQLKLSHPEHVLVKRVSSAEESFDRALQSFSS

SEQ ID NO: 55360 - protein, 355 aa, Glycine max
  Clone ID: UC-GMFLMINSOY003C12_FLI.pep
VLPNGKIVAVKQLKSESRQGEREFHAEVDVISRVHHRHLVSLVGYCVSDSQKMLVYEYVENDTLEFHLHGKDRLPMDWSTRMKIAIGSAKGLAYLHEDCNPKIIHRDIKASNILLDESFEAKVADFGLAKFSSDTDTHVSTRVMGTFGYMAPEYAASGKLTEKSDVFSFGVVLLELITGRKPVDKTQTFIDDSMVEWARPLLSQALENGNLNGLVDPRLQTNYNLDEMIRMTTCAATCVRYSARLRPRMSQVVRALEGNISLEDLNDGIAPGHSRVFGSFESSSYDSVQYREDLKNFKKLALESQEQGISEYSGPSSEYGRHPSVSTSSDQQNTQEMEMGNKKGSNHDSGIQVLD

SEQ ID NO: 55361 - protein, 270 aa, Glycine max
  Clone ID: UC-GMFLMINSOY003D02_FLI.pep
VLHILPAVHFQSHLSYQNKTTTWCCRSKKHSGWRMMLPRTFFAFLLFALSCFRWLEYAESKLPKLPQEEVDALKEITSTMGATYWEFDSDSCHSKMLRLTPEPPKGSQSSIDCDCTSENNTCHVVGITFKRLNLPGMLPPYLAKLPNLTQVDFALNYLSGTIPKEWGSTKLTNISLFVNRIFGEIPKELGSITTLTYLNLEANQFSGVVPHELGSLSNLKTLILSSNKLSGKLPVTFAKLQNLTDFRISDNSFNGEIPSFIQNWKSLERL

SEQ ID NO: 55362 - protein, 361 aa, Glycine max
  Clone ID: UC-GMFLMINSOY003F11_FLI.pep
AGLVEKTNQLLNEKVVLSLKAESLERKINLLENELSSFSEKEVGLETRIAQLQSENNSLLQKEATLVERTNQLLNEKAVLSLKGESLEQKIYLLESDLNSLVKKENSTKETISNLNGNIAVLQAQVEELEESRNNLFLENQQLREKVSSLQSTVQNHENSNTSSCSWDASVKDLASENEDLKSEIEAAFTLVEKLMAENAELVEKVTELCVELDHRSAEVGHSGVTESNGMTEFVKPTGVAIPLPESAEYASVSSPKLNSLEETSVKDNGNSNDAKHVVGVTSNSSLVSADDAGEIVQIPLDDNEIQDIELQDAKNVENDADAVPITDAPLIGAPFRLISFVANFVSGADLVNQSSSNTAR

SEQ ID NO: 55363 - protein, 109 aa, Glycine max
  Clone ID: UC-GMFLMINSOY012F10_FLI.pep
KFSTIQTQFYKMKRTRLIFLTSQIKILHSNTTTKVARPTKNHRVSNCPKISEFIPMNPMTVQPIIVIVVTEKQYHLQLLMEEKTKKDFKADKKTSCKHVIGLQTFQPLF

SEQ ID NO: 55364 - protein, 389 aa, Glycine max
  Clone ID: UC-GMFLMINSOY014G08_FLI.pep
INKQSISLNITPFSCFYGLASPRAFVIVKLRSALRICNRKYWIVPMAGSNELNPNDSKMVVPLNMWVLISNFKLAYNLLRRPDGTFNRDLAEFLDRKVPANANPVDRVFSFDVVVDRETNLLTRIYRPTEGEERSVNILDLEKPVSSEVVPVIIFFHGGSFAHSSANSAIYDTLCRRLVGICKAVVVSVNYRRAPENRYPCAYDDGWTALKWVSSRSWLQSKKDKKVHIYLAGDSSGGNIVHHVALKAVESGIEVFGNILLNPLFGGQERTESEKRLDGRYFVRVKDRDWYWRAFLPEGEDRDHHACNPFGPKGKSLEGITFPKSLVVVAGLDLVQDWQLGYAKGLEKAGQEVKLIFLEQATIGFYLLPNNEHFSPVMDEIKYFVSSDC

SEQ ID NO: 55365 - protein, 175 aa, Glycine max
  Clone ID: UC-GMFLMINSOY018G10_FLI.pep
EQALKAGFRHLVFEDNYDTGTGDHYSLRQICDQSYIRGGGHNCFKDSDEARIRSRRKKFWEKAVDIEELCGPDEAWWGVRGFMRDNFNHSNKPISYAQHFQNSRYIESILDVYWELPPVAGPSLTHQTRYDPARAPSPIVEDGRYGLFRRLGLANLDNSVFNGYTQMVYLQISEQ

SEQ ID NO: 55366 - protein, 640 aa, Glycine max
  Clone ID: UC-GMFLMINSOY019A12_FLI.pep
NIMTDYGEAGKTYIKWCAQMALAQNIGVPWIMCQQHDAPQPMINTCNGHYCDSFQPNNPKSPKMFTENWIGWFQKWGERVPHRSAEDSAFSVARFFQNGGILNNYYMYHGGTNFGRTAGGPYMTTSYEYDAPLDEYGNLNQPKWGHLKQLHAAIKLGEKIITNGTRTDKDFGNEVTLTTYTHTNGERFCFLSNTNDSKDANVDLQQDGNYFLPAWSVTILDGCNKEVFNTAKVNSQTSIMVKKSDDASNKLTWAWIPEKKKDTMHGKGNFKVNQLLEQKELTFDVSDYLWYMTSVDINDTSIWSNATLRVNTRGHTLRAYVNGRHVGYKFSQWGGNFTYEKYVSLKKGLNVITLLSATVGLPNYGAKFDKIKTGIAGGPVQLIGNNNETIDLSTNLWSYKIGLNGEKKRLYDPQPRIGVSWRTNSPYPIGRSLTWYKADFVAPSGNDPVVVDLLGLGKGEAWVNGQSIGRYWTSWITATNGCSDTCDYRGKYVPAQKCNTNCGNPSQRWYHVPRSFLKNDKNTLVLFEEIGGNPQNVSFQTVITGTICAQVQEGALLELSCQGGKTISQIQFSSFGNPTGNCGSFKKGTWEATDGQSVGEAACVGRNSCGFMVTKEAFGVAIGPMNVDERVARLAVQATC

SEQ ID NO: 55367 - protein, 465 aa, Glycine max
  Clone ID: UC-GMFLMINSOY019F04_FLI.pep
LKMSSSVNSLDGEFGVDGRSVNGSNRGTVAAVGFAMMFGAFVGLGAMVIKWHKRPQDWQKRNSFSSWLLPLHAGDTSFMSKNSMGKSNFFSSSMGLGRYFSFAELQEATKNFDSKNIIGVGGFGNVYLGVIDEGTQVAVKRGNPQSEQGITEFQTEIQMLSKLRHRHLVSLIGYCDENDEMILVYEYMPNGHFRDHLYGKNLPALSWKQRLDICIGSARGLHYLHTGTAQGIIHRDVKTTNILLDENFTAKVSDFGLSKDAPMGQGHVSTAVKGSFGYLDPEYFRRQQLTEKSDVYSFGVVLLEALCARPAINPQLPREQVNLADWAMQWKRKGLLDKIIDPLLVGCINPESMKKFAEAAEKCLADHGVDRPSMGDVLWNLEYALQLQEAFTQGKAEDETKSSSAVPTAAVPTSPAPPTPPISSDDRPAAPARPEVNNNTSSDVHSIDDHSGTAMFAQFSNLNGR

SEQ ID NO: 55368 - protein, 227 aa, Zea mays
  Clone ID: UC-ZMFLB73303D12_FLI.pep
KGAVKETGATPDNAQTYNTNLIRHVVNDSGTPAKPGEEIDVYIFSLFNENRKPGIESERNWGLFFPDKSSIYSLDWTGRGNVDVMTGANITSANGTWCIASTNASETDLQNALNWACGPGNVDCSAIQPSQPCYQPDTLASHASYAFNSYYQQNGANVVACDFGGAGIRTTKDPSYDTCVYLAAGNKMSTTNSTSLPARSDSGPVPCAKCFATLLPMLAIVMAAVMV

SEQ ID NO: 55369 - protein, 622 aa, Glycine max
  Clone ID: UC-GMFLMINSOY024A11_FLI.pep
AEEKNVELEVGNSSKDTLVNEERKEVKGSSSGSVSNRKDGPRFKDLGGMKEVLEELKMEVIVPLFHPQLPRQLGVRPMAGILLHGPPGCGKTKLAHAIAHETGLPFYQISATEVVSGVSGASEENIRELFAKAYRSAPAIVFIDEIDAIASKRENLQREMEKRIVTQLMTCMDQSNRLLQPADDVESSGDDHHPGYVLVIGATNRPDAVDPALRRPGRFDREIIIGNPDESAREEILSVLTCDLRLEGLFDLRKIARATSGFVGADLAALVDKAGNLAMKRIIDERKRELSQDLTSEHAEDWWREPWSVEEINKLAIKMSDFEEAANKVQPSLRREGFSSIPNVKWDDVGGLDLLRKEFERYIVRRIKYPEDYEELGVDLETGFLLYGPPGCGKTLIAKAVANEAGATFIHIKGPELLNKYVGESELAVRTMFSRARTCAPCILFFDEIDALTTKRGKEGGWVVERLLNQLLVELDGAEQRKGVFVIGATNRPEVMDRAVLRPGRFGKLLYVPLPSPDERVLILKALARKKAVDASVDLSAIAKMEACENLSGADLAALMNEAAMAALEERLTSIETTCDTLTIKRTIKRHHFEVALSKVSPSVSDRQKQYYQHLSEGFKAA

SEQ ID NO: 55370 - protein, 534 aa, Glycine max
  Clone ID: UC-GMFLMINSOY024B06_FLI.pep
FKRVSSPFFHRATAKMKIAWLLLLLLVSVSVQVWALKSPFHPRDVLPLLPKQLSWPILNRLHSAVDLLPVFVGAASSPDDNLKWKGACFYENKAWMVFHNKSGTQFGGGTLHLKVSNAHSWTCMDLYIFATPYRVTWDYYFLAREHTLEIKEWEGKAEYEYVKNHGLSIFLLQAGMLGTLQALWEVFPLFTNTGWGENSNIKFLEKHMGASFEVRPQPWVTNVSADDIHSGDFLAVSKIRGRWGAFETLEKWVSGAYAGHTAVCLRDSSGKLWVGESGHENEKGEDIIAVIPWEEWWDFELNNDDSNPHIALLPLHPALRARFNETAAWEYALSMAGKPYGYHNMIFSWIDTLNENYPPPLDANVVACVMTIWSQLQPEYAANMWNEALNKRLGTKGLDLSEVLVEVEKRGSSFDELLTIPEQDDWIYSDGKSTSCIAFILEMYKEAGLFDPVASSVQVTEFTIKDAYILNFFENNSTRLPKWCNDGDTVKLPYCQIKGKYRMDLPGYNTMQPYPHMNERCPSLPPKYSRPQNC

SEQ ID NO: 55371 - protein, 312 aa, Glycine max
  Clone ID: UC-GMFLMINSOY024E10_FLI.pep
ENITHSLCTLEFETRRASYYWLLHALSIYQPYVWEYSRLNVSNTVMSKRKLNRLVTEKWVDGWDDPRLMTLAGLRRRGMTPTAINAFVRGIGITRSDGTLISVERLEYHVREELNKTASRAMVVLHPLKVVITNLEANSVIEVDAKKWPDAQADDASAFYKISFSNVVYIEHSDFRMQDSKDYYGLAPGKSVILRYAFPIKCTEVILADDNETILEIRAEYDPSKKTKPKGVLHWVAQPSPGVDPLKVEVRLFERLFLSENPAELDNWLGDLNPNSKVIIPNAYGVSSIQNAKVGDNFQFERLGLDIRKTCF

SEQ ID NO: 55372 - protein, 464 aa, Glycine max
  Clone ID: UC-GMFLMINSOY025C08_FLI.pep
DDTGFVQVSVGPSELSSSIRMNAILNGAEIMKMVNDVGTNVVHRRKNLWVLVGSIAGGIVVLFLVVTAFLLGTKCRNKKPKQRTVESVGWTPLSMFGGSSLSRSSEPGSHGLLGMKIPFAEIQSATNNFDRNLIIGSGGFGMVYKGELRDNVKVAVKRGMPGSRQGLPEFQTEITVLSKIRHRHLVSLVGFCEENSEMILVYEYVEKGPLKKHLYGSSLQTPLSWKQRLEICIGAARGLHYLHTGFAQGIIHRDIKSTNILLDENYVAKVADFGLSRSGPCINETHVSTNVKGSFGYLDPEYYRRQQLTDKSDVYSFGVVLFEVLCGRPAVDPQLAREQVNLAEWALEWLQKGMLEQIVDPHLVGQIQQSSLKKFCETAEKCLAEYGVDRPAMGDVLWNLEYALQLQESEPHANSSARESVSVTNAVIPGNPSTNRRTERDYYNCSSDVSTSQVFSQLMNNEGR

SEQ ID NO: 55373 - protein, 594 aa, Glycine max
  Clone ID: UC-GMFLMINSOY027B07_FLI.pep
SLIIIIIMGVLQEKLSSFYKSRWLVFVAAMWLQSWAGIGYLFGSISPVIKSSLGYNQKQLAMLGVAKDLGDAVGFMTGLLCEILPIWGALLVGAALNLVGYGWVWLVVTSQVPVLPLWAMCALIFVGTNGETYFNTVSLVSCVQNFPKSRGPVVGILKGFAGLSGAILTQIYALFHAPNQASLIFMVAVGPSLVGIGLMFIVRPVGGHKQVRPSDGKCFTLIYGVCLLLAAYLLGVMVVQDLVEVSETVISIFTGVLLLILLVPIVIPITLSFGPEQRHPEVEALLPPPQNKEAGKSQLDSDEVILSELEDEKPKEVDMLPASERQKRIAHLQQRLLQAAAEGAVRVKRRRGPHRGEDFTLTQALIKADFWLLFISMIMGSGSGLTVIDNLGQMSQSLGYDNAHIFVSMISIWNFLGRVGGGYISELVVRDHAYPRPVALAVFQLIMTLGHVFLGMGWPGSMYVGTLLVGLGYGAHWAIVPATASELFGLRNFGALYNFITIANPAGTLVFSSLIASTIYDAEAEKQHRQNMMLRVLNASEPLKCEGSVCFFLTSMIMAGLCVVGAGLCMVLVLRTRIVYANLYGKASSSRLRL

SEQ ID NO: 55374 - protein, 466 aa, Glycine max
  Clone ID: UC-GMFLMINSOY027C10_FLI.pep
DRTFTSGSVDLPASKTDSGRVNRRRGGGSSSVYSRPSLSEMKKEKAAIREKVYEFLRAIGIVPDELDGLELPVTVDVMRERVDFLHSLGLTIEDINNYPLVLGCSVKKNMIPVLDYLGKLGVRKSSITQFLQRYPQVLHASVVVDLMPVVNYLKGMDIKFDDVPRVLERYPEVLGFKLEGTMSTSVAYLIGIGVGRREIGGVLTRYPEILGMRVGRVIKPFVEYLESLGIPRLAIARLIEQRPYILGFGLGEKVKPNVKYLEEYNVRRTSLPSIIAQYPDIIGTDLNQKLEKQRSLLNSVLDLDPEDFGRVVEKMPQVVNLSSGPMLKHVDFLKNCGFSLPQMRQMVVGCPQLLALNIDIMKLSFDYFQMVMKRPLEDLVTFPAFFTYGLESTIKPRHKMVVKKGLKCSLSWMLNCSNEKFEQRMDYDTIDMEEMEMEPSFDMNSLTQPRSDESDFDYEDSDEDDE

SEQ ID NO: 55375 - protein, 364 aa, Glycine max
  Clone ID: UC-GMFLMINSOY028E06_FLI.pep
ASLVCLIILPVIFVQGKPSKAVVDSLALFGAGAMLGDAFLHQLPHAFGGEHSHSHGDHGDHDHHDSSGHDHAHSLADLSIGISILAGIVLFLLVEKLVRYVEENSGRANSWTHGHHHHHHNSKEKLKDDNSSTANFQSESNNAKEERLIDERKEDDQVSLDSLKGDNPSQSESSLRKRIGSNVTKGDNLDDNTVDSATYNVKSSNVKEPVRSPTSLVFGYLNLFSDGVHNFTDGMALGSAFLLYGSVGGWSRTMFLLAHELPQEIGDFGILIRSGFSIPKALFFNFLSALVALAGTALALLWGKDPGQSSLIEGFTAGGFIYIAIAGVLAEMNNGGNTTLRSTVVQIISLTIGMAVALGISLVE

SEQ ID NO: 55376 - protein, 312 aa, Glycine max
  Clone ID: UC-GMFLMINSOY029E07_FLI.pep
GNPNNNNLFDGCQGESDHWSELDTDLYHWTKALRPVQWFPGHIAKAEKELKEQLKLMDVVIEVRDGRIPMSTSHPQMDLWLGNRKRILVLNREDMISTADRNAWADYFTRNGTKVVFSNGQLGMGTMKLGRLAKELAADVNVKRRSKGLLPRAVRAGIVGYPNVGKSSLINRLLKRRMCPAAPRPGVTRELRWVRFGKDLELLDSPGILPMRISDQSAAIKLAICDDIGERSYDVADVAAILVQMLSKLPTVGRDALCKRYKIDVDCRDGRIFIEKLAVRVFNGDVHQAAFRVLADFRKGKFGWTALERPPK

SEQ ID NO: 55377 - protein, 435 aa, Glycine max
  Clone ID: UC-GMFLMINSOY030F10_FLI.pep
VRVFCVFANPIWPQFRHSFLDSSFFFFFFFFMDRRVYHHRPAPPAHASPPEYFVLQGNTTYKDDLYLRKRTGMRRWLCCTCQVEESYPSNENEHLKSPRNYGDGNQKGSKVSAPVKPETQKAPPPIEAPALSLDELKEKTDNFGSKALIGEGSYGRVYYATLNNGKAVAVKKLDVSSEPESNNEFLTQVSMVSRLKNGNFVELHGYCVEGNLRVLAYEFATMGSLHDILHGRKGVQGAQPGPTLDWIQRVRIAVDAARGLEYLHEKVQPPIIHRDIRSSNVLIFEDYKAKIADFNLSNQAPDMAARLHSTRVLGTFGYHAPEYAMTGQLTQKSDVYSFGVVLLELLTGRKPVDHTMPRGQQSLVTWATPRLSEDKVKQCVDPKLKGEYPPKGVAKLAAVAALCVQYEAEFRPNMSIVVKALQPLLKSPAPAAPES

SEQ ID NO: 55378 - protein, 690 aa, Glycine max
  Clone ID: UC-GMFLMINSOY030G11_FLI.pep
AAYNGFAATLDPQQAHALRASHSVLAVYEDTRYTLHTTRTPEFLGLQAHSAFWQDLHQASHDVVIGVLDTGVWPESQSFDDSQMPQIPTRWRGNCESAPDFDPSLCNNKLIGARSFSKGYRMASSNARKTRDPATPRDLDGHGTHTASTAAGSAVANATLLGYATGTARGMAPQARVAAYKVCWTGGCFASDILAGMDQAIQDGVDVLSLSLGGSSSVPYYFDTIAIGAFAALERGIFVACSAGNTGPRGGSVANVAPWIMTVGAGTLDRDFPAYATLGNGKRFAGVSLYSGEGMGDEQVGLVYFSDRSNSSGSICMPGSLDAESVRGKVVICDRGLNSRVEKGAVVRDAGGVGMILANTAASGEGLVADSHLVAAVAVGESAGDEIREYASLDPNPTAVLSFGGTVLNVRPSPVVAAFSSRGPNGVTAQILKPDVIGPGVNILAGWSGAVGPSGTEDSRKTNFNIMSGTSMSCPHISGLAALLKAAHPDWSPSAIKSALMTTAYTNDNTESPIRDAKGEETISTPWAYGAGHVNPQKALSPGLVYEASTQDYIAFLCSLNYTLDHLILVVKHPDANCSKKFADPAELNYPSFSLVFGSNKLLRYTRTLTNVGEPGSVYDLVLSVPSTVHVTVNPRRLQFRQLGESQTYTVTFLSNRTLNDSVTSDFGTIMWTNQLHQVRTPLAFTWTYF

SEQ ID NO: 55379 - protein, 525 aa, Glycine max
  Clone ID: UC-GMFLMINSOY031C06_FLI.pep
PFSIPMAPPSSPPLVDNSDAERRLREAEERLRDAIEELQRRQRRAAAHAQQHRHVDSLPCDHGPDESCVAHAIGNLCQTFLLSYGVRVGIGILLRAFKLVRGQSYSSLLDLKQLVSEKDLIVREEACRIGLLFGGFTGSYHALRCLLRKLRKKETPANAVLAGSIAGFSIMALNDSNRRRTLALYLLARLAQCAYNSAKSKNKFHLWGSHWRHGDSLLFALACAQVMYAFVMRPESLPKSYQDFIQKTGPVAEPVYKAVRDSCRGHPVDVASLHAYLSRVGRSDYVKLEEFPSIIPCSIIHPATNSCLAHQGNATSLTFKKTFPLYFSLTFVPFVVLHLQKFTDAPFRTFWLAIKGAVRSTTFLSAFVGIFQGVICSHRKVFSRDHKLVYWIAGGIAALSVLLEKKARRGELALYVLPRAVDSLWYILVNRHLLPNIRNAEVFLFSLCMGGIMYYLEHEPETMAPFLRGLIRRFLASRISNPSPPNRTASYTYLQALDGITKPTLQEKRDTESSEKYNLESIPGL

SEQ ID NO: 55380 - protein, 458 aa, Glycine max
  Clone ID: UC-GMFLMINSOY031D08_FLI.pep
VSLVSCVQNFPKSRGPVVGILKGFAGLSGAILTQIYALFHSPNQASLIFMVAVGPSLVGIGLMFIVRPVGGHKQVRPSDGKCFTLIYGVCLLLAAYLLGVMVVQDLVEVSETVISIFTGVLLLILLVPIVIPITLTFGPEQRHPEEEALLPPPQNKEAGKSQLDSDEVILSELEDEKPKEVDMLPASERQKRIAHLQQRLLQAAAEGAVRVKRRRGPHRGEDFTLTQALIKADFWLLFISMIMGSGSGLTVIDNLGQMSQSLGFDNAHIFVSMISIWNFLGRVGGGYISELVVRDHAYPRPVALAVFQLIMTLGHVFLGMGWPGSMYVGTLLVGLGYGAHWAIVPATASELFGLRNFGALYNFITIANPAGTLVFSSLIASTIYDAEAEKQHRQNMILQVLNASEPLKCEGSVCFFLTSMIMAGLCVVGAGLCMVLVLRTRIVYANLYGKASSSRLRL

SEQ ID NO: 55381 - protein, 982 aa, Glycine max
  Clone ID: UC-GMFLMINSOY032F12_FLI.pep
GKVKAVPSGDCVVIMAMPTGKPGPLPEKSITLSSLMAPRLARRGGVDEPFAWESREFLRKLCIGKEVAFRVDYTVPSINRDFGTVFIGDKNVAMLVVSAGWAKIREQGQQKGEASPYLAELLRLEEQAKQEGLGRWSKIPGAAEASIRNLPPSAIGDSSNFNARALLDANKGSPMEGIVEQARDGSTLRVYLLPEFQFVQVFVAGIQAPQMGRRAVPESATESEVTADATNGDVPGEPRAPLTSAQRLAASTSALASASAETTADPFAHEAKFFTEIRVLNRDVRIVLEGVDKYNNLIGSVYYPDGDSAKDLALELMENGFAKYVEWSANMMEEEAKRKLKTSELQAKKNRLKIWTNYVPPATNSKAIHDQNFTGKVVEVVSGDCIIVADDSIPYGSPLAERRVNLSSIRCPKVGNPRRDEKPAPYAREAKEFLRTRLIGRQVNVQMEYSRKVGPADGSAVPSGAPEARAMDFGSVFLPSTVKADGVDAPSSVPPAGSQQNGVNVGELIVSRGFGTVIRHRDFEERSNYYDALLTAESRAISGKKGIHSAKDSPAMHITDLTTASAKKAKDFLPFLHRSRKIPAVVEYVLGGHRFKLLIPKETCSIAFSFSGVRCPGRDEPYSDEAIALMRRKIMQRDVEIEVETVDRTGTFLGSLWESRTNMAITLLEAGLAKLQTSFGSDRIPDFHLLEQAEQSAKKQKLKIWENYVEGEEVSNGAPVENKQQEVLKVSVTEVLGGGKFYVQPVGDQRIASVQQQLSFLNLQEAPLLGAFNPKKGDMVLCLFGADKSWYRAMVVNGPRGPVESSNDMFEVFYIDYGNQEVVPYSQLRPIDPSVSAAPGIAQLCSLAYVKVPNLEEDFGEEAAEYLSELTLNSGKEFRAKVEERDTSGGKAKGQGTGPVLAVTLVAVDSDISVNAAMLQEGLARLEKRNRWDRKERQQALDNLDPFQGEARTNRCGMWQYGDIQSDDEDTAPPARKAGGRK

SEQ ID NO: 55382 - protein, 130 aa, Glycine max
  Clone ID: UC-GMFLMINSOY035C08_FLI.pep
EPPYFKSMTMDPPGPHGVKDAYCLLNFGDSITTDHISPAGSIHKDSPAAKYLVEHGVERKDFNSYGSRRGNDEVMARGTFANIRLVNKLLNGEVGPKTIHIPTGEKLYVFDAATVSYVLLKYGNFLFTAL

SEQ ID NO: 55383 - protein, 422 aa, Glycine max; identical to SEQ ID NO: 43848
  Clone ID: UC-GMFLMINSOY036H07_FLI.pep

SEQ ID NO: 55384 - protein, 752 aa, Glycine max
  Clone ID: UC-GMFLMINSOY040C12_FLI.pep
LQMEIELKAQMIARTEIMEMRNTFDAQLKDHVSNANKFQEQLCEREQTIHELERKIEEKDRELHSIKLDNEAAWAKQDLLREQNKELATFRMERDHSEAERAQHIKQIHDQQEHIQEKDRQLNELQEQHRVAQETIMFKDEQFREAQAWIARVREMDVFQSTTNQTLQAELRERTEQYNQLWMGFQRQFAEMERVHLHAIQQLQLELADARERSGTFNDDSRMSQINSKNNVTQFGQENGSQFDLNGSNASGGNNGLLPSESTANDGPFVSTGNASIQTEHVAGVPIAPSSLIVPPSYLPHSQVTALHPFVMHQQGVPNSVASHVPQSHVGHFHPVPSMSPVQQWQNHQSVSEGSQVPVQEHSSPSQTDQHLMRSDAKFSYEMSVNGKTLHRDYLDAHIQQGEEAQTMIFSATSETQSVDKGQLVASHQDQSMQQISSQFSDALQLNSFEPNGEIKEQNSVTLSNNGPDDQVLLAEQASSAAIASSVTSHSVNHNEMIQNNSTDSVLSEVFTSSALTASTIAKTSETTLLDGKSLLACIVRTIPAGGRIRISSTLPNRLGKMLAPLHWHDYKRKYGKLDDFVASHPELFLIEGDYIQLREGAQKMVAATAAVAKVAAAAAAASTPYSSYMSTVAVTPMAQSHRMKKAPSNLGDDPLKMSVMQRQQTNGAFSVAGGLSNVKILSKSKVSREMDGPESRVVQSSVQLPVGNGGSIDKSSMSSAQISGSANGRLVSSFASKQQTRATGAVYPSQR

SEQ ID NO: 55385 - protein, 510 aa, Glycine max
  Clone ID: UC-GMFLMINSOY040H04_FLI.pep
IVEWITVCDVVILIASMMNNSNGMISKTSSSSNTAQSQQSQSTGLKMHFKTPEGRYKLHCDKTYPSTLLHYAHGKTVSQVTLAHLKDKPVPLTPTGQSSTFSATSGVRSAAARLWGGSNGGRSLSFVGGNGTSKNLGGNSRIGSIGASSSSNSTTNSNFDGNGTYLIFNVGDAIFISDLNSQDKDPVKSIHFSNSNPTCHAFDQDSKDGHDLIIGLNTGDVYSVSLRQQLQDVGKKLVGAQHYNKDGSVNNSRCTCIAWVPGGDAAFVVAHADGNLYVYEKNKDSAGDSSFAVVKDQTQFSVSHARNSKSNPIARWHICQGSINSISFSTDGTYIATVGRDGYLRVFDYLKEQLICGGKSYYGALLCCAWSMDGKYILTGGEDDLVQVWSMEDRKVVAWGEGHNSWVSGVAFDSYWSSPNSNDDEETIRYRFGSVGQDTQLLLWDLEMDEIVVPLRRPSGGSPTYSAEASHPNGTVLSRWVPCNLLLACWMFRKSLHSLPTVFIPNHSQA

SEQ ID NO: 55386 - protein, 636 aa, Glycine max
  Clone ID: UC-GMFLMINSOY041C09_FLI.pep
LGDAGYPGAASLGDAVCGMAVAYITEKDFLFWFRSHTAKEIKWGGAKHHPEDKDDGQRMHPRSSFKAFLEVVKSRSLPWENAEMDAIHSLQLILRDSFKDAEHRNSKAVVDPHVSEQELQGVDELSSVAREMVRLIETATAPIFAVDVDGHVNGWNAKVSELTGLPVEEAMGKSLVHDLVFKESEETMNKLLSRALKGEEDKNVEIKMRTFGPEHQNKAVFLVVNACSSKDFTNNVVGVCFVGQDVTGQKIVMDKFINIQGDYKAIVHSPNPLIPPIFASDDNTCCLEWNTAMEKLTGWGRVDVIGKMLVGEVFGSCCQLKGSDSITKFMIVLHNALGGQDTDKFPFSFLDRHGKYVQTFLTANKRVNMEGQIIGAFCFLQIMSPELQQALKAQRQQEKNSFGRMKELAYICQGVKNPLSGIRFTNSLLEATSLTNEQKQFLETSVACEKQMLKIIRDVDLESIEDGSLELEKGEFLLGNVINAVVSQVMLLLRERNLQLIRDIPEEIKTLAVYGDQLRIQQVLSDFLLNIVRYAPSPDGWVEIHVRPRIKQISDGLTLLHAEFRMVCPGEGLPPELIQDMFNNSRWGTQEGLGLSMSRKILKLMNGEVQYIREAERCYFYVLLELPVTRRSSKKC

SEQ ID NO: 55387 - protein, 760 aa, Glycine max
  Clone ID: UC-GMFLMINSOY043G02_FLI.pep
LVCGASETADLPSNFVKLAKDAYTPDIIAASDCMLGKIGYGTVSEALAYKCPFVFVRRDYFNEEPFLRNMLEFYQGGVEMIRRDLLTGHWRPYLERAISLKPCYEAGINGGEVAAHILQETAFGKSYASDKLSGARRLRDAIVLGYQLQRAPGRDITIPEWYATAENQLGRSTPGSPMDDGRSAFSLDIENFDILHGDIQGLPDTVAFLQNLSELQDKHTRRERKAAANLFNWEEEIFVTRAPGRLDVMGGIADYSGSLVLQMPIKEACHVALQRNHPSKHRLWKHAEARQNDKGGNPTAVLQIVSYGSELSNRGPTFDMDLSDFMDEEDKPISYEKAKKYFAQDPSQKWAAYVAGAVLVLMTEMGVQFEDSISMLVSSAVPEGKGVSSSASVEVASMYAIAAAHGLNISPRDLAILCQKVENHIVGAPCGVMDQMASSCGEANKLLAMICQPAEIVGLVDIPSHIRFWGIDSGIRHSVGGADYGSVRIGAFMGMKMIKAKASEELSESWAANGLNYDEVEQDDIELLKQETSLDYLCNLPPHRFVTLYAKTIPESIVGETFLEQYQNHNDPVTTIDPKRTYGVRAPTMHPIFENFRVVTLKALLTSAASTYQLTALGELLYQCHHSYGTCGLGSDGTDRLVNLVQELQHSAASKAEGGTLYGAKITGGGSGGTVCVVGRNCLKSSEHIFEVQHRYKKATGYLPFIFEGSSPGAGKFGYLKIRRRATPKKANAIKDDGALTSEKANASKDDGAVTMKNNS

SEQ ID NO: 55388 - protein, 204 aa, Glycine max
  Clone ID: UC-GMFLMINSOY045C05_FLI.pep
EKHELPQPIDAERVNFSLVADVKDPLITKAAERLISSEGELKTQLENFRRDPDISSWLEDAAYFAAIDDSLNTISWYNWPEPLRNRHLVALEDIYQQKRDFINVFIAQQFLFQRQWQKVHSYAQSKGISIMGDMPIYVGYHSADVWANKKQFLLNRKGFPLLVSGVPPDAFSETGQLWGRLEVNPMINLNFSCSLFNSCPDSNI

SEQ ID NO: 55389 - protein, 462 aa, Glycine max
  Clone ID: UC-GMFLMINSOY045D06_FLI.pep
EMASYEAIKNFDDDDDDDDDVEMALPHSQISESRSATVSSPIGQTTPLHIHNIIEEQRIISRHQPQPKSPRLVSLDVFRGLTVALMILVDDAGGLIPALNHSPWNGLTLADYVMPFFLFIVGVSLALSYKKLSCGVDASRKASLRALKLLALGLFLQGGYFHRVNDLTFGVDIKQIRWMGILQRIAVAYLVVALCEIWLKSDDTVNSGPSLLRKYRYQWAVALILSFLYLCLLYGLYVPDWVYQIQTEPSAEPKTFSVKCGVRGNTGPACNVVGMIDRMILGIQHLYKRPIYARMPECSINSPNYGPLPPDAPAWCQAPFDPEGLLSSVMAIVTCLIGLHYGHIIVHFKDHRVRIIYWMIPTSCLLVFGLALDLFGMHINKVLYSLSYTCVTAGAAGVLFVGIYLMVDVCGCRRMTLVMEWMGMHALMIYILAACNVFPIFLQGFYWGSPHNNILKLIGVGT

SEQ ID NO: 55390 - protein, 226 aa, Glycine max
  Clone ID: UC-GMFLMINSOY045G07_FLI.pep
VDLRTSSILNCVFLFLSADFGGEMSSYLGVGVSPGNVPVYHSTNVNVLDRRIKITELVLRCVILGLGVLAAVLVGTDSQVKEFFSFQKEAKFTDMKSLVFLVVANGLASGYSLIQGLRCIISMIRGRVLFSKPLAWAIFSGDQVMAYVTVAAVVAAGQSGVIARVGQPELQWMKICNMYGKFCNQVGEGIASAFVASLSMVVLSCISAFSLFRLYGGNKTKNVLVG

SEQ ID NO: 55391 - protein, 246 aa, Oryza sativa nipponbare
  Clone ID: LIB3433-034-E10_FLI.pep
GGELRVQGRDGGGLGVPGVQRAGAGGIRVRRARGGAGDPGDDPVHADEAVEGGHVEGRRGGVPGHRALLLPRRDRGLLGVRPRRLRQRARRAAPAAVARRRRQHDGRRPRPRQLPGVRHAHLRDPRDDSDHQDQAPSRGAPPPRRPISLRRVHAVRRGDVPVLRRPARLLRRLRVHADVLLPPLYSVAEDQEASEVQRVVVCQLGLHRRWSAVDDRFHHRRATKHHPGCLDVPVLLVMGDDAYVLT

SEQ ID NO: 55392 - protein, 493 aa, Glycine max
  Clone ID: UC-GMFLMINSOY047B06_FLI.pep
ASPSSEMAAEIPCCGTKFSLYVLVIIGLVCFAGLMAGLTLGLMSLGIVDLEVLIKSGRPQDRIHAAKIYPVVKNQHLLLCTLLIGNSLAMEALPIFLDSLVHPAAAILISVTLILMFGEILPQAICTRYGLTVGATLAPLVRVLLIVFFPFSYPISKVLDWTLGKGHAALLKRAELKTFVNFHGNEAGKGGDLTHDETTIITGALELTEKTAKDAMTPISKAFSLDLDATLNLETLNSIMTIGHSRVPVYAGEKTNIIGLVLVKNLFMVDSKAAVPLRKMLIRKIPRVSENMPLYDILNEFQKGHSHIAVVYRDLNDKNEAPKKVNDGEQLDLKDKHKNNGENASLAKGVKLESHDSLITDGAQQAKKSPPATPAFKKRHRGCSYCILDLDNAPLPVFPPNEVVVGVITMEDVIEELLQEEILDETDEYVNIHNKIKVNMNASKEKAPDTNLLQPSQAVQGHTPTNSISTATSATGSPTTIDLISESESLRNQ

SEQ ID NO: 55393 - protein, 426 aa, Glycine max
  Clone ID: UC-GMFLMINSOY047C11_FLI.pep
HYLDISVSFSFSDNKTFLLCIFNESGSFQVSYGSELSNRGPTFDMDLSDFMDEEDKPISYEKAKKYFAQDPSQKWAAYVAGAVLVLMTEMGVQFEDSISMLVSSAVPEGKGVSSSASVEVASMYAIAAAHGLNISPRDLAILCQKVENHIVGAPCGVMDQMASSCGEANKLLAMICQPAEIVGLVDIPSHIRFWGIDSGIRHSVGGADYGSVRIGAFMGMKMIKAKASEELSESWAANGLNYDEVEQDDIELLKQETSLDYLCNLPPHRFVTLYAKTIPESIVGETFLEQYQNHNDPVTTIDPKRTYGVRAPTMHPIFENFRVVTLKALLTSAASTYQLTALGELLYQCHHSYGTCGLGSDGTDRLVNLVQELQHSAASKAEGGTLYGAKITGGGSGGTVCVVGRNCLKSSEHIFEVFFIIINLTH

SEQ ID NO: 55394 - protein, 153 aa, Arabidopsis thaliana
  Clone ID: LIB25-090-E11_FLI.pep
ECELIHGRWAMLATLGALSVEWLTGVTWQDAGKVELVDGSSYLGQPLPFSISTLIWIEVLVIGYIEFQRNAELDSEKRLYPGGKFFDPLGLAADPEKTAQLQLAEIKHARLAMVAFLGFAVQAAATGKGPLNNWATHLSDPLHTTIIDTFSSS

SEQ ID NO: 55395 - protein, 234 aa, Glycine max
  Clone ID: UC-GMFLMINSOY053B12_FLI.pep
GKDEKARREMKGLVSKMLRENASQNDLRKESLYLACDDCLQLLRHHFLQAAALDMQDVSQIARQADNLHWILDILVDRQIAEDFLKTWASQSDLAEVHSKVPAVHRFEVSRVTARLFVGIGKGQLLASKDVRCLLLKTWLVPFYDDFGWMRRASKGLDRHLIEDGLSNTILTLPLSWQQDILLAWFNRFLNSGEDCPNIQRGFEVWWRRAFWKRNGEQERTRQLRITTTSVENP

SEQ ID NO: 55396 - protein, 464 aa, Arabidopsis thaliana
  Clone ID: LIB25-066-B4_FLI.pep
EEAMEEKKKELEELKYQSGFGNHFSSEAIAGALPLDQNSPLLCPYGLYAEQISGTSFTSPRKLNQRSWLYRVKPSVTHEPFKPRVPAHKKLVSEFDASNSRTNPTQLRWRPEDIPDSEIDFVDGLFTICGAGSSFLRHGFAIHMYVANTGMKDSAFCNADGDFLLVPQTGRLWIETECGRLLVTPGEIAVIPQGFRFSIDLPDGKSRGYVAEIYGAHFQLPDLGPIGANGLAASRDFLAPTAWFEDGLRPEYTIVQKFGGELFTAKQDFSPFNVVAWHGNYVPYKYDLKKFCPYNTVLLDHGDPSINTVLTAPTDKPGVALLDFVIFPPRWLVAEHTFRPPYYHRNCMSEFMGLIYGAYEAKADGFLPGGASLHSCMTPHGPDTTTYEATIARVNAMAPSKLTGTMAFMFESALIPRVCHWALESPFLDHDYYQCWIGLKSHFSRISLDKTNVESTEKEPGASE

SEQ ID NO: 55397 - protein, 121 aa, Glycine max
  Clone ID: UC-GMFLMINSOY053F06_FLI.pep
RHAKCSCSSSLGFNCGKCIATHAPMVLVLKCNFQLDERTVVVKMKNPIPLYHKDCNTSSKTNFFKNLSCYTSKQFLIQILNEKYKKICKNHIQSLPKQPRIAQTNFSPNKCKHKENKSRRE

SEQ ID NO: 55398 - protein, 596 aa, Glycine max
  Clone ID: UC-GMFLMINSOY053G01_FLI.pep
NSINQVEMVWVNEKLKGFVGHRWVVFVCAMWDMSFAGTSYMFGSISPVIKSSMGFNQKQVAFLSVAKDLGDNVGLLAGKISQSSPIWALILVGVVQNVVGYGLVWLIVTHQFPALPLWLLCILIFVGQNGSTYYNTAALVSCVQSFPESRGPVVGILKGFVGLSGAIWTQLIAMAQLPDQASLIFIIAVGPAMVSLAFMFIIRPVESYRQSRASDGTGFTFIYSICLLLAAYLMGVLLLENMFDLDQSTITLFAVILIILILLPIIVPILLVFFSGPQKSADQESLLEPPMLEATKPNKHFVGESSSSTTKVIKHVENEKSPSKLEVLPLSSEGPRDVFQCQARLWQAVTKAVKKIKRRNGPHRGEDFTLSQAMAKADFWVMFFSLVMGCGSGLTIINNMGQICQSLGDNNVNVYVSVISISNFLGRVGGGYFSEVIVRSFGYPRLAALAVIQAGMSLGLCYYVFGLAGQVYAVAISNGFGYGAHWSIALAAASELFGLKNFGTLYNFLTMASPAGSLFLSGFVASTIYDYYAEQQVKHRMLTGNNNDLLLCEGNICFSITFGILAVVCLCAASLSLIVAHRTRKFYAQLYEESQT

SEQ ID NO: 55399 - protein, 677 aa, Glycine max
  Clone ID: UC-GMFLMINSOY054B03_FLI.pep
VSNNGFTGQVPSSIGNLQLLKMLNFSGNGLTGSLPESIVNCTKLSVLDVSRNSMSGWLPLWVFKSDLDKGLMSENVQSGSKKSPLFALAEVAFQSLQVLDLSHNAFSGEITSAVGGLSSLQVLNLANNSLGGPIPAAIGELKTCSSLDLSYNKLNGSIPWEIGRAVSLKELVLEKNFLNGKIPSSIENCSLLTTLILSQNKLSGPIPAAVAKLTNLRTVDVSFNSLTGNLPKQLANLANLLTFNLSHNNLQGELPAGGFFNTISPSSVSGNPSLCGAAVNKSCPAVLPKPIVLNPNTSTDTGPGSLPPNLGHKRIILSISALIAIGAAAVIVIGVISITVLNLRVRSSTPRDAAALTFSAGDEFSRSPTTDANSGKLVMFSGEPDFSSGAHALLNKDCELGRGGFGAVYQTVLRDGHSVAIKKLTVSSLVKSQEDFEREVKKLGKIRHQNLVELEGYYWTTSLQLLIYEYVSGGSLYKHLHEGSGGNFLSWNERFNVILGTAKALAHLHHSNIIHYNIKSTNVLLDSYGEPKVGDFGLARLLPMLDRYVLSSKIQSALGYMAPEFACKTVKITEKCDVYGFGVLVLEIVTGKRPVEYMEDDVVVLCDMVRGALEEGRVEECIDERLQGKFPAEEAIPVMKLGLICTSQVPSNRPDMGEVVNILELIRCPSEGQEELA

SEQ ID NO: 55400 - protein, 307 aa, Glycine max
  Clone ID: LIB3242-570-B7_FLI.pep
HFVRSDFLKPIVDAFVANGNRYNLLNSAVLELFEYISKENLKLLLKYLVDSFWDQLVKFEYLVSIHSLKVKYEQCLDNDGTKGTAIMIDLRRRLDERALDKEEEDYFNDSDEEDTTSASISHNQKVQQQQPVLSNGVAASYSKLSPRPGGLVDYDDDEDEDYRPPPKRPEASEEDEGIMESLRQKRKLPSENPELAKKLSKNSKSKDSVFASLCSTLSQTVLPGKKPSVNVHTGPCREDNKEESNVSRNFCENSNATAEVNHVEKETAAYRNFSDGLYGTSDNGQLGGEEHTLVSPKSSPEMAVNGS

SEQ ID NO: 55401 - protein, 430 aa, Glycine max
  Clone ID: UC-GMFLMINSOY055C06_FLI.pep
LLSSLTRILSSLLASVVQQLHHATSLGASARTDKKHAHRHNLSECASDLSESCSTPRGNNSSNTLLYTHVIAFTLYELETITKSFRADYILGEGGFGTVYKGYIDENVRVGLKSLPVAVKVLNKEGLQGHREWLTEVNFLGQLRHPNLVKLIGYCCEDDHRLLVYEFMFRGSLENHLFRKATVPLSWATRMMIALGAAKGLAFLHNAERPVIYRDFKTSNILLDSDYTAKLSDFGLAKAGPQGDETHVSTRVMGTYGYAAPEYVMTGHLTARSDVYSFGVVLLELLTGRKSVDKTRPGKEQSLVDWARPKLNDKRKLLQIIDPRLENQYSVRAAQKACSLAYYCLSQNPKARPLMSDVVETLEPLQSSSVGPGEVSLSGSNSGSAGPFAMNKISDCRMRHKFSNNVGPGATCRSPNPNCSPGGPATLRVR

SEQ ID NO: 55402 - protein, 469 aa, Arabidopsis thaliana
  Clone ID: LIB23-041-H7_FLI.pep
SFTSLIQFWVSLKKSWEFDSSNCRRNRVNRRKLKKLRFFSHALKNLSMSSSVAVLWVATSSLNPDPMNNCGLVRVLESSRLFSPCQNQRLNKGKKKQIPTWSSSFVRNRSRRIGVVSSSLVASPSGEIALSSEEKVYNVVLKQAALVNKQLRSSSYDLDVKKPQDVVLPGSLSLLGEAYDRCGEVCAEYAKTFYLGTLLMTPERRKAIWAIYVWCRRTDELVDGPNASHITPMALDRWEARLEDLFRGRPFDMLDAALADTVARYPVDIQPFRDMIEGMRMDLKKSRYQNFDDLYLYCYYVAGTVGLMSVPVMGIDPKSKATTESVYNAALALGIANQLTNILRDVGEDARRGRVYLPQDELAQAGLSDEDIFAGKVTDKWRNFMKMQLKRARMFFDEAEKGVTELSAASRWPVWASLLLYRRILDEIEANDYNNFTKRAYVGKVKKIAALPLAYAKSVLKTSSSRLSI

SEQ ID NO: 55403 - protein, 395 aa, Glycine max
  Clone ID: UC-GMFLMINSOY055H07_FLI.pep
VREKASCTEHTNLIPLILSLLRIPQNMETVLFNHSPPLEFKGLSKEEEDSLLGQVEIWRYMTCFTDSVALKAVIELRIADILDRYGKPLSLSQIVENIEDAPSPDASLLQRVLRVMVRRKIFSAQESETGETLFGLTRASKWILRDTKMTLAPMLLLENHPIHLNPAHYISEIIREGTKNGTAFFKCHGHEQFEMTGLDPEYNRLFNEGMVCTARVVSKAVITGYKDGFNQIKSLVDVGGGIGGSLSEIVRAYPHINAINFDLPHVVATAPKFDGITHVGGDMFVSIPSADAIYMKWILHDWSDEHCIKILKNCRKAIPEKTGKVIIVDHVLRPEGNELFTDVGIAFDMMLLAHNAGGKERTEENWKWLFKETGFARYNIIKINALPSIIEAFPI

SEQ ID NO: 55404 - protein, 770 aa, Glycine max
  Clone ID: UC-GMFLMINSOY056H06_FLI.pep
HFFNRVLPVVSFKRRVEEDKEMTIKPVVRVSEGKLVVKERTILTGMPENVVETSTVEGMFIGVDLEKEDSRHVVSLGKLKDVRFMACFRFKLWWMAQKMGDRGRDIPLETQFLLMETKDGSHLESDNDKNKNQIVYTVFLPLLEGSFRACLQGDSDDQLQLCLESGDAETKTSSFTHALFVSAGIDPFATIHHAFRAVRNHLNTFRLRHEKKLPGIVDCFGWCTWDAFYQEVTQEGVEAGIKSLAGGGTPPKFVIIDDGWQSVGGDDDKQNSNSLQRLTGIKENGKFQKKEEPELGIKNMVEVAKKKHSVEQVYVWHAITGYWGGVRPGVKEMEEYGSVMKYPKVSSGVTENEPTWKVDPLAVQGLGLVNPKKVFTFYDHLHSYLASAGVDGVKVDVQCILETLGAGLGGRVELTRNYHQALDASISRNFPDNGCIACMSHNTDALYCSKQTAVVRASDDFYPRDPVSHTIHIASVAYNSVFLGEIMLPDWDMFHSLHPVAEYHASARAISGGPLYVSDAPGEHDFDLLRKLVLPDGSVLRARLPGRPTKDCLFTDPARDGVSLLKIWNMNKLGGVLGVYNCQGAAWSATERKNAFHHSTDSGAAVITGYVRGCDVHLIADAAADDDWNGDCALYSHYSGQLIVLPHNVALPVSLKVLEHEVYAVAPVKKVLGGGAGCSFAALGLVNMFNAGGAVEGLVYEQGLVRVEVKGCGKFGAYSSAKPTRCMLGNNEVVDFDYDADSGLLIFNIDHLPQEGHRVHLVELVYSLSS

SEQ ID NO: 55405 - protein, 446 aa, Oryza sativa
  Clone ID: UC-OSROCYP012F07_FLI.pep
LSMVTSSVLPKVVDDAGEGEANPRRAKWWYATFHSVTAMVGAGVLSLPYAMAHLGWGPGTAALVVSWGMTLYTLRLLIELHECVPGVRFDRYRDLGAHALGPRLGPWLVVPQQLIVQLGCDVVYMVIGGKCLMKFAESVSSWSRAPQLHHQSYWICIFGASQFLLSQLPSLDSITAVSLAAAAMSVGYSTISWAACLARGTPAAAEGGGGGVSYAYKDGTAADSVFRVCSALGQVAFAYAGHGVVLEIQATIPSTPTKPSRGAMWKGAVAAYLVTALCYFPVAIAGYWAFGRDVSDNVLVALRRPPWLVAAANMMVVVHVLGSYQVYAMPIFETLETILITRIRLPPGALLRLVARSAYVAFTLFVAVTFPFFGDLLGFFGGFGFTPTSYFLPCILWLKIKKPPRFSASWFANWGCIVVGVLLMIASTIGGLRSIIQDASTFQFYS

SEQ ID NO: 55406 - protein, 411 aa, Glycine max
  Clone ID: UC-GMFLMINSOY057C09_FLI.pep
SAKNHAAAGAGDPPNDQAADGSENSAKNISARSAGDPPHDQTADGIENSLSNQSEATEKLVNDEQGPAESFVEDEVHVIETPEKCQKYGVETPISSKAERLPEEAKEILKSLASKWEDVFDANALQVIPLKGAMTNEVFQIKWPTTTGELSRKVLVRMYGEGVDVFFNRDNEIQTFEFMSKNGQGPRLLGRFMNGRVEEFIHARTLSASDLRDPSISALIATKMKEFHDLDMPGEKKVHLWDRLRNWFSEAKRLSSPKEFEAFYLDTIDKEISILEKELSGPHQRIGFCHNDLQYGNIMLDEETNSVTIIDYEYASYNPVAFDIANHFCEMAANYHTEEPHILDYNKYPDFEERQRFVQAYLSTSGEQLSNSEVEQLLQEIEKYTLANHLFWGVWGIISVSSLSHSVLFVL

SEQ ID NO: 55407 - protein, 604 aa, Glycine max
  Clone ID: LIB3051-106-A7_FLI.pep
SFLNYQPPALALGFPMDSEDDMHDANDVESLDDDFYSGETEDPPMDYYSDYDDNADDYFDDADDSDRIESRRPEQNFTILRELDIRQRQEDDIARVAAVLSIPRVSASILLRHYNWSVSKVHDAWFADEDQVRKTVGLLEKPVFQNSNTRELTCGICFEMYPRARVESTACGHPYCYSCWAGYFSTSINDGPGCLVLRCPDPSCGAAVGQDMINLLASDEDKQKYDRYLLRSYIEDNKKTKWCPAPGCEYAVTFDAGSGNYDVSCLCSYSFCWNCTEEAHRPVDCGTVSKWILKNSAESENMNWILANSKPCPKCKRPIEKNQGCMHMTCTPPCKFEFCWLCLGAWSDHGERTGGFYACNRYEAAKQEGVYDETERRREMAKNSLERYTHYYERWASNQSSRQKALADLHQMQTVHIEKLSDTQCQPESQLKFITEAWLQIVECRRVLKWTYSYGYYLPEHEHAKKQFFEYLQGEAESGLERLHQCAEKELQLFLNADGPSKDFNDFRTKLAGLTSVTRNYFENLVRALENGLVDVDSNGAASSKATSSKNAAGSSKGRGGRGKATIRTISSRMTDDNHWSCEHCTYANVKSATTCQMCNQQRR

SEQ ID NO: 55408 - protein, 727 aa, Glycine max; identical to SEQ ID NO: 52764
  Clone ID: UC-GMFLMINSOY058C04_FLI.pep

SEQ ID NO: 55409 - protein, 588 aa, Glycine max
  Clone ID: LIB3139-031-H3_FLI.pep
PRFFHNSNPSSPKSPSSFSLLKSTLRLSKSRCGICMQSARSGQGTAIFTAECSHTFHFPCIVKKHPIVTCPVCNTSWKELPVLSINNNNNDKSDKRGFKVYNDDEPLMSPTSLSRFNPIPESENEDEEQEQDNINTEFKGFHVNPLPNLHSTTVIRRNLQLSLLPEAAIVAANRNYESYVVVLKLKPPHVTKTSRRAPIDLIAVLDVGGAMSGSKLRLMKSSMRQVISSLRPTDRLSIVAFSAGSKRLLPLRRMTGGGQRSARRIVDALAAIDQTREGTPVKNDAVKKAAKVLEDRREKNAVASIVVLSDLNDSRAGNNMHKPSLVSTTRLAHLEVPVHAVRLGECSHALSDDALANFVGGLLNVVAQDVRIQLEVVSRSRAVEIAGVYSLSGRPVSLGSSDWIRLGDLYAEEEREFLVELKVPAASAGSHHVLTVRSSYRNPLTREPLIPVEQAMLVPRPHAVRSSCAKIERLRNLHVTARAVAESSRLAEHNDLSGAHHLLSSARALLLQSSKPEEEFLRWLEAEQAELQRRRQRQTQRNSRVEEKVEPLTPTSAWRAAERLAKVAIMRKSMNRVSDLHGFENARF

SEQ ID NO: 55410 - protein, 641 aa, Glycine max
  Clone ID: UC-GMFLMINSOY058G01_FLI.pep
LLPPCSIHSCDVVWVEQGTEIASGMEWDSNSDLSGDEEEEGFVFNDGDDAGPLPFPFPVVENLLQTAPCGFVVTDAHEPDNPIIYVNTVFEIVTGYRAEDVLGRNCRFLQCRGPFAKRRHPLVDSTVVSEIRRCLEEGIEFQGELLNFRKDGSPLMNRLRLTPIYGDDETITHVIGIQFFTEANIDLGPVPGSTIKESAKSSDRFRSVLSSLQTLPVGGRNVSRGVCGIFQLSDEVLSLKILAQLTPRDIASVSSVCRRLYELTKNEDLWRMVCQNAWGSETTHVLETVPGARRLGWGRLARELTTLEAAAWRKLTVGGAVEPSRCNFSACAVGNRVVLFGGEGVNMQPMNDTFVLDLNSSNPEWQHVQVSSPPPGRWGHTLSCVNGSHLVVFGGCGRQGLLNDVFVLDLDAKPPTWREISGLAPPLPRSWHSSCTLDGTKLIVSGGCADSGVLLSDTFLLDLSMEKPVWREIPVAWTPPSRLGHTLSVYGGRKILMFGGLAKSGPLRFRSSDVFTMDLSEEEPCWRCVTGSGMPGAGNPGGIAPPPRLDHVAVSLPGGRILIFGGSVAGLHSASQLYILDPTDEKPTWRILNVPGCPPRFAWGHSTCVVGGTRAIVLGGQTGEEWMLSELHELSLASSAI

SEQ ID NO: 55411 - protein, 446 aa, Glycine max
  Clone ID: LIB3028-051-A12_FLI.pep
VVIKEMGQTLSCVQQHEDHGVLFPALASGELEVVEAMVEEDPTVLEHTIGCDRLSPLHVAAANGRIEVLSMLLDRSFNVDVLNRHKQTPLMLAVMHGKTGCVEKLIHAGANILMFDSIRRRTCLHYAAYYGHIDCLKAILSAAHSTPVADSWGFARFVNIRDGNGATPLHLAARHRRSECLHALLDNGALVCASTGGYGYPGSTPLHMAARGGSLDCVRMLLAWGADRLQLDSSGKIPFSVALKHKHKACAALLDPSSAAPLVWPSPLKFISELNQEAKALLEKALLEANREREKTILKETDMPPSPLHSESEDDNIASEASDMELCCICFDQACTIEVRPCGHQMCAHCTLALCCHKKPDPATAGLSGPVCPFCRGTILQLLVAKINKISDTEVESGPMKPRRSRKSNFSEGSSSFKSLSAMGSFGRIAGRNSGKITDEKQWEVS

SEQ ID NO: 55412 - protein, 371 aa, Glycine max
  Clone ID: UC-GMFLMINSOY059B07_FLI.pep
TLSYGTPLVPTPLVLDLGGPFLWLHCASRNTPSSSSLTTPHRSLQCFTAKTHKSTNSFLSSPVDEVDQYQPCQVFPENSITGTIAAEGELVEDLMALQSAKEKGQLVEHQSRFTCSPTTLLHGLAKGARGMVGLGRSRSSLPSQVFDNFSTHRKLTLCLSSSKGVVLLGNVATYESEVLKSLTFTPLVTSFPTQEYFINVNSVKINGKRLSNEHEGGGGVLTLLSTIVPYTTMQSSIYNSFKTSFEDAAVAMNITRVASVAPFELCFSSRGSQVGPSMPVIELVLQSEMVKWTIHGRNSMVRVSDEVLCLGFLDGGVNPRNSIAIGGYQLEDVIVQFDLATSMVGFSSSLVAKNTKCSDFKYASSITADSI

SEQ ID NO: 55413 - protein, 157 aa, Zea mays
  Clone ID: 700344948_FLI.pep
SRLRDREGSSRVNHGGICSQTLRDGTPQRPQAWPFRHGSLVMRLPDSEIGKIPTVIFGTINGVIGIIASLPHDHYTFLEKFQSTLVKYIKGVGNMSHEQWRSFHNDKKTAEARNFLDGDLIESFLDLSRSKMEVVSKAMGVSVEDLSKIVEELTRLH

SEQ ID NO: 55414 - protein, 494 aa, Glycine max
  Clone ID: UC-GMFLMINSOY059F08_FLI.pep
GRRGAMDLGTYDVPEGVDILGRYDAEFAKILAKDALKFVAELQREFRNDIKHALERRREAKKKYNEGSLPGFDPATSDIREQEWVCAPVPPAAADRKVEITGPVDRKMVINALNSAAKVFMADLEDALSPTWENLISGQVNLKDAVDGTISFHDKVRNRIYKLNDQTAKLFVRPRGWHLPEAHILIDGEPATGCLVDFGLYFYHNHSAFRRTQGAGFGPFFYLPKMEHSREAKIWNSVFEKAEDVVGIKRGSIRATVLIETLPAVFQMNEILYELKEHSVGLNCGRWDYIFSYVKTFQAHPDRLLPDRVQVGMTQHFMKSYSDLLIRTCHRRGVHAMGGMAAQIPIKDDPVANEAALELVRKDKLREVKAGHDGTWAAHPGLIPACMEIFNNNMGNASNQIDTVKREDAANLTEQDLLQIPIGTRTMEGLRLNTRVGIQYLAAWLSGSGCVPLYNLMEDAATAEISRVQNWQWLKYGVELDEDGLGEKVNKDLF

SEQ ID NO: 55415 - protein, 327 aa, Glycine max
  Clone ID: UC-GMROPIC018A05_FLI.pep
FISSITPNFCIPKMNSDTTSYWCYSCTRFVHIHDQNDVVCPRCHGGFVEKVTAGQSARQGFRRRRRNAGSHSPFNPVIVLRGPGEDEESSFELYYDGFDGEGLRPLPSTMSEFLLGSGFDRLLEQVSQIEINGLGRPENPPASKAAIESMPTLEITESHVASETTCAVCKEAFELGELAREMPCKHLYHSDCILPWLSMRNSCPVCRHELPSEQAAPETRVAGQIEEEAVGLTIWRLPGGGFAVGRFAGESPLPVVYTEMESGGNSNEGSRRISLAVGGGRVRESRGGFGRIFRNLFGRIGALTRSRSLSTSLFNRRRSTRTWVLGN

SEQ ID NO: 55416 - protein, 470 aa, Glycine max
  Clone ID: UC-GMFLMINSOY059G08_FLI.pep
KREKQKVVSVIDSLQPNHHQPLLPVSSLPFLLFFRSGSVRRRGLTLFIMVATAATASFLPVPLPDAGKGKPKKLGGGGGGGGGSVNLGGLKQKQGLCGGLQVKANAQAPPKTVEKVENDLSSSSSSISHAPRTFINQLPDWSMLLAAITTVFLAAEKQWMMLDWKPRRPDMLIDPFGIGKIVQDGLVFRQNFPIRSYEIGADKTASIETLMNHLQETALNHVKTAGLLGDGFGSTPEMCKKNLIWVVTKMQVVVDKYPTWGDVVQVDTWVSASGKNGMCRDWLVRDAKSGEILTRASSVWVMMNKVTRRLSKIPEEVRAEISSYFVDSAPVVPEDNRKLTKLDESANFIRTGLSPRWNDLDVNQHVNNVKYVGWILESAPQPLLESHELCAMTLEYRRECGRNSVLDSLSDLSGADVGNLADGGFFECKHLLRLDDGAEIVRGRTQWRPKPLSSNFGHVLSQVPVPAEST

SEQ ID NO: 55417 - protein, 458 aa, Glycine max
  Clone ID: UC-GMROPIC113D03_FLI.pep
FRINMNPNDANSPKPLEILQMNPVPPFLSKTFDLVDDPTLDPIISWGSTGFSFVVWDPLEFARIVLPRHFKHNNFSSFVRQLNTYGFRKIDTDKWEFFNEAFQRGKKHLLKNIQRRRSSQSQQVGSYIGIECSTEAGRSDVEIEIERLRKERTMLMEEVVDLKQEQRRMAHRAGEVNQRLQSTEQRQKQMVSFLVKLIQNPAFLARLRHEEQKEIDSPRVVRKFVKQHQHETGTAETLQEGQIVRYQHDWRNIGMSSETPKLSPVSIEQSPHYLSQGLAGEVSVGAEDLTAQIENIVSNDLAAVHGITVSQEIMIGEGLSSFGAEDPLFKGKSVMSPILEVPPEYFASFPEGLTKGKDFQDFSALGTEGMIKLEDIWDSGLNVSGAASGSGNELWSNHVNYEEFPEFGVTSGMSDSDIWDIGLGSLGIDKWPTDEPSLGETNGQAGQPKEDRPKNFGP

SEQ ID NO: 55418 - protein, 479 aa, Glycine max
  Clone ID: UC-GMFLMINSOY061A11_FLI.pep
NISMGSSSITTSPATMTMAAIVLLFTVFAVSSALDMSIISYDNAHADKAATLRTEEELMSMYEQWLVKHGKVYNALGEKEKRFQIFKDNLRFIDDHNSAEDRTYKLGLNRFADLTNEEYRAKYLGTKIDPNRRLGKTPSNRYAPRVGDKLPDSVDWRKEGAVPPVKDQGGCGSCWAFSAIGAVEGINKIVTGELISLSEQELVDCDTGYNQGCNGGLMDYAFEFIINNGGIDSDEDYPYRGVDGRCDTYRKNAKVVSIDDYEDVPAYDELALKKAVANQPVSVAIEGGGREFQLYVSGVFTGRCGTALDHGVVAVGYGTAKGHDYWIVRNSWGSSWGEDGYIRLERNLANSRSGKCGIAIEPSYPLKNGPNPPNPGPSPPSPVKPPNVCDNYYSCADSATCCCIFEFGNACFEWGCCPLEGASCCDDHYSCCPADYPICNTYAGTCLRSKNNPFGVKALRRTPAKPHWTFGRKNKVSSA

SEQ ID NO: 55419 - protein, 745 aa, Glycine max
  Clone ID: UC-GMROPIC022D12_FLI.pep
RTTTSPLLQISSFLTRYFTFFFASLSSSLSFLILLLMAGLIDLNNATEDDEMPSSGSSSTVCLELWHACAGPLISLPKKGSVVVYFPQGHLEQHLHDFPLPASANIPSHVFCRVLDVKLHAEEGSDEVHCQVVLVPETEQVHQKLREGEFDADGEEEDAEAVMKSTTPHMFCKTLTASDTSTHGGFSVPRRAAEDCFPPLDYSQQRPSQELVAKDLHGQEWRFRHIYRGQPRRHLLTTGWSAFVNKKKLVSGDAVLFLRGEDGELRLGIRRAAQLKSGSTFSALSGQQLSPTSLMDVVNALSARCAFSIHYNPRISTSEFIIPIHRFLKSLDYSYSAGMRFRMRFETEDAAERRFTGLIVGIADVDPVRWPGSKWRCLMVRWDDLEVTRHNRVSPWEIEPSGSASTANNLMSAGLKRTKIGLPSAKLEFPVSNVIGTSDFGESLRFQKVLQGQEMLGVNPTYDSINAQSHQVSDLRRCYPVSNYPRIAATGNNIGIPQVSSNVSSNGIGFSESFRFQKVLQGQEIFPSQPYGRALSVDEACGNSRCGLFDGYQVMRSRNGWCSDMSNNSSNLHPPVPSGQVSSPSSVLMFQQAVNLVSNSDYNNKISQVMGGKFHQRVSYASDVKGGKFVSTPYEPLLCGLAKEGTNSFGLSNFHNQLDSSRSHDSISVLRANQELVPSCKSSCRVFGFSLTEVAPIANKEAADSSSVACSGPSFTRHVDDDFHPGHSLRSKAVASYCTKGVLQY

SEQ ID NO: 55420 - protein, 298 aa, Glycine max
  Clone ID: UC-GMFLMINSOY061B12_FLI.pep
TEHAESTQLLFEYSLFFKVARMVANIAILESALTESGKLCVVDFDICDENQYVSLLHELSARRKGAPAAVKIVVVTENCADDERLNIVGVLLGRHAEKLGIGFEFKVLTRRIAELTRESLGCDADEPLAVNFAYKLYRMPDESVSTENPRDKLLRRVKTLAPRVVTLVEQDANANTAPFVARVTELCAYYGALFDSLESTMARENLKRVRIEEGLSRKVVNSVACEGRDRVERCEVFGKWRARMSMAGFRLKPLSQRVADSIKARLGGAGNRVAVKVENGGICFGWMGRTLTVASAWC

SEQ ID NO: 55421 - protein, 187 aa, Glycine max
  Clone ID: UC-GMROPIC047F08_FLI.pep
LNERFLTLRSMVPSISKDDKVSILDDAIDYLKKLERRVKELEAHRVVTDIETGTRRSPQDTVERTSDHYFRKNNNGKKPGMKKRKACGVDEAEKEINSDALKGSYANDVTVSTSDNEIVIELKCPSKAGRLLEIMEAINSFNIDFSSVQSTEADGNLYLTIKSVLTGPSVATTKRIKQALQKLASKC

SEQ ID NO: 55422 - protein, 561 aa, Glycine max
  Clone ID: UC-GMFLMINSOY061D12_FLI.pep
HHGPSLTCVRGFSFSQSPTLVLPLHSHRPAKTLLQIATTPSFRSCGCAPMSTFQVRDKIDLSDVERRIFDRLLATLRHFDLQTQLRVAGGWVRDKLLGKECYDIDIALDNMMGTEFVDKVREYLLSIGEDAQGVCVIESNPDQSKHLETARMRLFDIWIDFVNLRSEEYAENSRIPSKQRFGTAEEDAYRRDLTINSLFYHINTDSVEDFTKRGISDLKSGKIVTPLPPKATFLDDPLRVLRAIRFGARFEFTLDEDLKVAAACDDVKDALAAKISRERIGTEIDLMISGNQPVKAMTYICDLTLFWIVFSLPPEFEPYISDGCERLCISYLDTAWNLIHLLGESTFTAEQKRLTLCAALFLPLRNTTYREKKAKKIPVVNHIIRESLKRKAKDAEMVLNLHQASHKFLSLIPCLASSEDVQVVDHDWLGDLVDVPVSSRVRVLTGFLLRELKDYWHVALLISTILHPIDIKDEPSQLGKRRDLFNTVENSIIKLGLEKVWDIKQLINGKDVMNALQLKGGPLVKESLDKAMAWQLAYPSGTAEECIEWLREANSKRIKLQ

SEQ ID NO: 55423 - protein, 163 aa, Zea mays
  Clone ID: LIB3066-048-B3_FLI.pep
GLGCGDGPAAQEELMAEAPASPGGGGGSHESGSPRGGGGGGSVREQDRFLPIANISRIMKKAIPANGKIAKDAKETVQECVSEFISFITSEASDKCQREKRKTINGDDLLWAMATLGFEDYIEPLKVYLQKYREVRTVFGNLGVRSCNRQSVTLSIVPLIELK

SEQ ID NO: 55424 - protein, 421 aa, Glycine max
  Clone ID: UC-GMFLMINSOY064D01_FLI.pep
QAPLNHHTSPRSRYPFLLFFYLSSFKSIKMAETFLFTSESVNEGHPDKLCDQISDAVLDACLEQDPDSKVACETCTKTNLVMVFGEITTKANVDYEKIVRDTCRNIGFVSNDVGLDADNCKVLVNIEQQSPDIAQGVHGHLTKKPEEIGAGDQGHMFGYATDETPELMPLSHVLATKLGARLTEVRKNGTCPWLRPDGKTQVTVEYYNDNGARVPVRVHTVLISTQHDETVTNDEIAADLKEHVIKPVIPEKYLDEKTIFHLNPSGRFVIGGPHGDAGLTGRKIIIDTYGGWGAHGGGAFSGKDPTKVDRSGAYIVRQAAKSIVASGLARRCIVQVSYAIGVPEPLSVFVDTYGTGKIHDKEILNIVKENFDFRPGMISINLDLKRGGNNRFLKTAAYGHFGREDPDFTWEVVKPLKWEKA

SEQ ID NO: 55425 - protein, 143 aa, Zea mays; identical to SEQ ID NO: 39567
  Clone ID: LIB3153-005-B5_FLI.pep

SEQ ID NO: 55426 - protein, 170 aa, Glycine max
  Clone ID: UC-GMFLMINSOY064D10_FLI.pep
TGSAWVVLTRSFVEYCIWGWDNFPRTMLMYYTNFISSPEGYFHTVVCNTEEFRHTAVNHDLHYIAWDTPPKQHPISLTMKDFDKMVKSKALFARKFAKEDPVLDKIDKELLGRTHRFSPGAWCDGNTDGGADPCSVRGNDTMFRSGPGAERLRELLQVLLSKESLSKQCL

SEQ ID NO: 55427 - protein, 197 aa, Zea mays
  Clone ID: LIB3279-011-H6_FLI.pep
RSTISPVHRHGRSEPDLRLGGLLGGLGGLLGRLGGGLLGLLSLLGGLLGEQHRVDVGDDAAVGDGDAGQQPPELLVVADGQQQVPGHDAALLVVLGGVPGQLQHLCCEVLEDGGEVDGGAGADALGVAALLEVAPDAADGELEPGLDGLGHRLLPRPAELLRRHLLRLAAVHLACWRVAGAPARGFGSGWELSCGAA

SEQ ID NO: 55428 - protein, 312 aa, Glycine max
  Clone ID: UC-GMFLMINSOY065B03_FLI.pep
LWKRQWFAVGWIDHNSKYCTKVVDSGRANPVWRTKFVIPVDDSASNIQDLALNVEVYSIDPVFFTEKLHGSATVFLREFLVMKVKNSEGSKPRQEEIGSYQLRKKKSSKPRGCIDILIRISDKKKEPNSQSGNKEGILLLDDGDGTRLTIEEGIRQAYPQKPQVSIHQPEKDHVQTNVPDYHSLPSTTTNYYDPYEGETSYHEVDEPSYREVAGPSYLLPRTITPPPPPPPSNVGYIPTFLPRNDGLSPSYREMSTSRAALGQRVPAGVAMGLGAGALAAGAVIFGDDFMSGFDVPPDLGDSGFNLEMDPPF

SEQ ID NO: 55429 - protein, 184 aa, Zea mays
  Clone ID: 700074133_FLI.pep
KRTNSIRLQIALLHPSAATGAGREIRLRALAADAAGELDVFGHDGDALGVDGAEVGVLEQADEVGLGGFLEGQDGVALEPQIRLEVLSDLTDQALEGQLPDQQLRALLVLADLAQSHRPGPVPVGLLHAAGRRRRLPRRLGGELLARGLASGGLAGGLLRTSHLLLSLAARFLPCLDGTNLRAT

SEQ ID NO: 55430 - protein, 464 aa, Glycine max
  Clone ID: UC-GMFLMINSOY065C06_FLI.pep
PLLGASLFRLDMEVSVSSPPRKSIAEKVFGGYYNGNNSHKKRGSEAHDDDSDGGMELMEIGAQRTKNVLILMSDTGGGHRASAEAIRDAFQIQFGDEYRIFVKDVWKEYTGWPLNDMEGQYKFMVKHVQLWNVAFHSTSPRWIHSVYLAAIAAYYAREVEAGLMEYKPDIIISVHPLMQHIPLWVLKWQGLQKKVIFVTVITDLSTCHPTWFHPWVNRCYCPSQEVATKASQDGLEESQIRVFGLPIRPSFARAVLVKDQLREELGLDHNLQAVLLMGGGEGMGPVKKTAKALGEALFDKEAEKPIGQLVIICGRNKSLVSTLESLEWKIPVKVRGFETQMAKWMGACDCIITKAGPGTIAEALIRGLPIILNDYIPGQEKGNVPYVVNNGAGVFTRSPKETARIVAEWFTTKSDERKTMSENALKLAQPEAVFDIVRDIHELAEQREPANFPYLLTSSFTSLI

SEQ ID NO: 55431 - protein, 176 aa, Zea mays; identical to SEQ ID NO: 37650
  Clone ID: 700205503_FLI.pep

SEQ ID NO: 55432 - protein, 863 aa, Glycine max
  Clone ID: UC-GMFLMINSOY066F03_FLI.pep
GPLPLAVASMPLLRHLHLGGNFFSGQIPPEYGTWQHLRYLALSGNELAGYIAPELGNLSALRELYIGYYNTYSGGIPPEIGNLSNLVRLDAAYCGLSGEIPAELGKLQNLDTLFLQVNSLSGSLTSELGNLKSLKSMDLSNNMLSGEVPASFAELKNLTLLNLFRNKLHGAIPEFVGELPALEVLQLWENNFTGSIPQSLGKNGRLTLVDLSSNKITGTLPPYMCYGNRLQTLITLGNYLFGPIPDSLGKCESLNRIRMGENFLNGSIPKGLFGLPKLTQVELQDNLLTGQFPEYGSIATDLGQISLSNNKLSGPLPSTIGNFTSMQKLLLDGNEFSGRIPPQIGRLQQLSKIDFSHNKFSGPIAPEISRCKLLTFIDLSGNELSGEIPNQITSMRILNYLNLSRNHLDGSIPGSIASMQSLTSVDFSYNNFSGLVPGTGQFGYFNYTSFLGNPELCGPYLGPCKDGVANGPRQPHVKGPLSSSLKLLLVIGLLVCSILFAVAAIIKARALKKASEARAWKLTAFQRLDFTVDDVLDCLKEDNIIGKGGAGIVYKGAMPNGDNVAVKRLPAMSRGSSHDHGFNAEIQTLGRIRHRHIVRLLGFCSNHETNLLVYEYMPNGSLGEVLHGKKGGHLHWYTRYKIAVEASKGLCYLHHDCSPLIVHRDVKSNNILLDSNFEAHVADFGLAKFLQDSGASECMSAIAGSYGYIAPEYAYTLKVDEKSDVYSFGVVLLELVTGRKPVGEFGDGVDIVQWVRKMTDSNKEGVLKVLDPRLPSVPLHEVMHVFYVAMLCVEEQAVERPTMREVVQILTELPKPPSSKQGDLTITESSLSSSNSLESPTTASKEPKDQHPPQSPPTDLLSI

SEQ ID NO: 55433 - protein, 168 aa, Zea mays
  Clone ID: 700158183_FLI.pep
LPRNHFNSRTIRLDYIRNTTSRILLTIVQHVTDKELNEVTLTTNRHPRQQGEEASSLASEAVEGSALALERVDDVHGGNSLAACVLGVGDGVADDVLEEDLEDAAGLLVDKPRNALHAAPPSQPTDRGLGDALDVVTEHLTVALCSALAQTFAALAAPRHRRCRCPVF

SEQ ID NO: 55434 - protein, 335 aa, Glycine max
  Clone ID: UC-GMFLMINSOY068H03_FLI.pep
KLHLPSLFSPPPPPSSLSLKNMIFNKGSTHSNLDCFVRCTTPVVQSQFLPKSEITSLNRLWHPWERESVEYFTLGDLWNCYDEWSAYGAGVPITLTSGETLVQYYVPYLSAIQIFTSNSFREETESGDCETRDSYSDSFSDESEYDKVWRWDGTSSEDGGSEQDCLWHFSDRLGHLYCQYFERATPYGRVPLMDKITGLAQRYPGLMSLRSVDLSPASWMAVAWYPIYHIPMGRTIKDLSTCFLTYHTLSSSFQGMDLDDDIEGGHEKKKEGEGIALPAFGLATYKMQGGNVWVAGNRGRDQERLLSLLSVADSWLKQLRVQHHDFNHFMGIRHG

SEQ ID NO: 55435 - protein, 708 aa, Glycine max
  Clone ID: UC-GMFLMINSOY069D07_FLI.pep
KSKADSVEEMGCANSELNLQIFILSMLIFTASLCVGDTDPLDVAAINSLYVALGSPPLEGWKAIGGDPCLEQWEGVSCVFSNITALRLGGMNLSGQLGSNLDFPSIIDMDLSNNQIGGTIPSTLSPTLRNLSLSANHLNGSIPDALSSLTQLSDLSLKDNHLNGQIPNVFLQLTGLMNMDLSGNNLSGQLPPSMGNLSSLIILHLQNNQLSGILFVLQDLPLQDLNIENNIFSGPIPPELLSIPNFRKDGNPFNTTIIPSPPAASPEPAAMAPSPEKSPWKVTHNPSDTIKAPIPAIAGRSFKTTKLVWIVGAGFLIFIALGVCLLMLWCFKRRQENKKYKKHNTNVYTRSLHKRTSSDSPFEATTDKEKGWSSKLPPLQPAPPHHIPIIPGENLIINQAISTTATKRQIVTNSIKVYTVASLQQYTNSFSQENYIGEGMLGPVYRAELPDGKLLAVRKLNATASMGQNHEQFLQLAFSISKIQHANIVKLMGYCAEYSQRLLVHEYCSNGTLHDALHTDDKLQIKLSWDNRIWVSLGAARALEYLHEHCQPPIVHQNFRSANVLLNDNLEVRVSDCGLGSLLSSGSASQLVGCHLTANGYSAPEFEYGSYTLQSDVFSFGVVMLELLTGRKSYDSSLPRGEQFLVRWAVPQLHDIDALSKMVDPSLNGEYPKKSLSRFADIISSCIQHEPEFRPVMSEIVQDLLRMM

SEQ ID NO: 55436 - protein, 309 aa, Oryza sativa
  Clone ID: LIB4371-003-F9_FLI.pep
RPVDVVRHFPCSSSVAASSSLLLSRSKSRLASPAAAAASSMRRRLVLGVGAAAAPAVAALAASATPAALRDCAATLLITAGAYSLVRAFDGLTARRLIEQNLSRKIVHVLSGVLFMSSWPLFSNSTEARFFAAIVPLLNCIRLLTYGLRLSTDEALVKSVTREGKPEELLRGPLYYVIVLLVSVLVFWRQSPIGIVSLSMMSGGDGFADIVGRRYGSAKLPFNENKSWIGSISMFISGFLLSALMLFYFSCLGYFTVCWDLALGKLALVALAATVVECIPVNDVVDDNISVPLATMLAAYLLFGYSSCC

SEQ ID NO: 55437 - protein, 319 aa, Glycine max
  Clone ID: UC-GMFLMINSOY069G07_FLI.pep
VKRRLRLCGLAMENSYKANGNGPTENGYSVARHSYQPSLKGSLPWLDIKVFYVRVCKCELDDSTPGSLTLNHVPLNPDTLLEINGVRTSIYSDGMSTLLKRDRVDRKSEEVTFVSTDSIRMSGSVKFEVFDKDVLLLSGALELCNTNGVVGESSYNGQRWNMNCESYIIPGTSFFKGKQLLLPDSSLPTIEVYIAGSFSSTPIILTKTLQLSQKKHTKKGVLDAIPEHEASENGKDISSAHALQAPDYLYDKHEDEDYNSLYPGTAYADGEDGELSWFNAGVRVGVGIGLSVCLGIGIGVGLLVKTYQGTTSHFRRRLF

SEQ ID NO: 55438 - protein, 289 aa, Zea mays
  Clone ID: LIB3079-031-G10_FLI.pep
PRPMDMDPRFNVDWSANEIEMVRSLIACHGASNSTNDDIVDELQAMFPGKDKRQVTDLYVELVVEMINSGAELSSNQLLLNSGGVHSRTMDGYLADEMKAKRMLLEEQRRRKLVAVPRQDNQQRARRFWTLEEHRNFLRGLRVYGRGNWKNISKDFVTTKTPVQVSSHAQKYFRRQESTTRKQRYSINDVGLYDAEPWEEQQQQQQNSSLPAFTSTNNNAYYNPYCYAFGGGQQQLASSPFQCHASQASSSSQTAVTWAAGGQQPPICSSAAPPMMEGGGAEMSWTTYY

SEQ ID NO: 55439 - protein, 397 aa, Zea mays
  Clone ID: LIB4705-006-A8_FLI.pep
HPHPVLLTQLVSLYAAAGRLADALRAFRAHLPSANLHTYAGLVSALARPYPDLAFSLFSGSRRQLRPSPHVISAVLAACAGLQPLCGRQVHTCAAKVVPPGDVFVYTGMVDVYAKGGDMESSRKVFDEMLNRGAASWNALLVGYARYKMCLEALSVFRELAAQGREVSLDQVSVSSVLSACAVAGALNYGRQVHACATKVGLELSAVCVSNALLDMYTRCGCSRESSALLNAVGCKDVVTWNIIIRSCIHDNRFKEACVLFRSMVRNGTLPDDVAFATVLQASACMSAWAIGASMHASVVKTGFLYSDGVASSLITMYSKCGCLDDAHRAFVGAKDHLHIMSWTAMITALQQHGHGMQAIDVFENMLENGIPPDHITFVSVLSSCSHSGLLSKDAGT

SEQ ID NO: 55440 - protein, 148 aa, Glycine max
  Clone ID: UC-GMFLMINSOY069H02_FLI.pep
LKILFLNDLCLLTIFLLAASGISKTSPSSVPSNLSILSYSEASDFSNLPTPRSEGEILSSPNLKAFTFNELKNATRNFRPDSLLGEGGFGYVYKGWIDEHTFTASKPGSGMVVAVKKLKPEGLQGHKEWLVGVLFPFPSLRWLKHTLH

SEQ ID NO: 55441 - protein, 533 aa, Zea mays
  Clone ID: UC-ZMFLB73379D12_FLI.pep
GIDRTVLLELALAAMEELMKVAQMDEPLWLRSPDGSGLEALNLDEYHRAFARVFGPSPAGYVTEATREAGVAITSSVDLVDSLMDAARWSEMFPCIVARASTTDIISSGMGGTRSGSIQLMHAELQVLSPLVPIREVVFLRFCKQHAEGLWAVVDVSVDAILRPDGGHHHAQNGGGAGYMGCRLLPTGCIVQDMNNGYSKVTWVVHAEYDEAVVHQLYRPLLQSGQALGARRWLASLQRQCQYLAILCSNSLPARDHAAITPVGRRSMLKLAQRMTDNFCAGVCASAAQKWRRLDEWRSGEGGDAAGNGGSAAAGEGEEKVRMMARHSVGAPGDPPGVVLSATTSVRLPATSPQRVFDYLRDEQRRGEWDILANGEAMQEMDHIAKGQHHGNAVSLLRPNATSGNQNNMLILQETCTDPSGSLVVYAPVDVQSMHVVMNGGDSAYVSLLPSGFAILPDGHCQSPNTAHQGSPSCGGSSSSSSTGSLVTVAFQILVNNLPTAKLTVESVETVSNLLSCTIQKIKSALQASIVTP

SEQ ID NO: 55442 - protein, 102 aa, Glycine max
  Clone ID: UC-GMFLMINSOY069H09_FLI.pep
PAEDDIMHITLQKRDKGQTWASPILGQGQLDPYATDLEQKRLMLQRFQEEVGFSFIRILFRVLGFGFHLQPHDMCIMCFSASLFVMFYYYCLHMFHLLGLAI

SEQ ID NO: 55443 - protein, 184 aa, Zea mays
  Clone ID: LIB3245-486-A8_FLI.pep
TGSPSPHVYSISFFLSVPRYLHAQVVQNASHRDVRLANLHSDCGDLRELEQCGLCDRVSYRLQEVAWRALDNILCNAVDIGVADSVSDAVGLAGSGEVHPDVDVNHEHLSQRLLLLKDTVEAMELKAAQNELVAAAPHSRRLLLRHGSVIERAEQQRFRTVADLETDQRGLPSYYDKANFFRQN

SEQ ID NO: 55444 - protein, 519 aa, Glycine max; identical to SEQ ID NO: 48403
  Clone ID: UC-GMFLMINSOY075C01_FLI.pep

SEQ ID NO: 55445 - protein, 225 aa, Zea mays
  Clone ID: 701160336_FLI.pep
VTRAYIAGSAARPPPPLLPSSHSAHQCSLTFPLPFLSFAFLSLCPRIGNPASHVVLRRPARGVVDRGGVHAVAAAVPGDPGAADGDAAAGRLVVLHVRRLHRGGVAAAELGAAGRAHRARPPHPLDLLRRLLRGLPGLLPEGEPLEGPLRAGPRRGQLALGRRLARPPTPRARQLPLHHPRHVGAVNGRMWVLLLFGSTDVRLCYWLLLDRSMIPCTYLLGGCCC

SEQ ID NO: 55446 - protein, 462 aa, Glycine max
  Clone ID: UC-GMFLMINSOY075C04_FLI.pep
YCYVCDSVAPCPKWVTGLLGMDHCHATDESETWRTRRKIFKLGKTAPLPSSTNYSTLSDVTNAQQNNILPFRVMSPYSMLPNQTSMSTATHTCSPVNSIPQNQSSSPITMRTCSSIHSSFQNQVSWPNNVPSIATNFTIPSGTNRGRYPESGSTLARNRYQSQSIPQHSLGNRAIQRVRQHGVSTLVPQFHSHTLFNGLGSVGVGSTMPMNHSTHDASGGFSNHVNLAQQFAGYHAATGFSNDNRTSYGQNAYVPQNLWYPNPCSQPNNLSSVSNYATAHETQVSYQSNGSQNFYAVQGNNAPSSNNVAGLSRNENVCGNVTQSGTTRQYSCQQKPHDVSLIESALKADRIEHSKQSIPYQQSSGSTNTCLGSVDDIKRWLFGDENSFLVGADDALASSSAPSGLGSVDDIKRWLFSDENTVPVGADDALASELNTPSPDLSTFDGGSFFDFESSWECRARV

SEQ ID NO: 55447 - protein, 179 aa, Zea mays
  Clone ID: 700106320_FLI.pep
YVRTPCMLWTLNDTILTELNKGKYSKEMWDIVGRSSWKLIACFLPQVALQCAYAWGRGLLVALALTFILPQTILSHQAAQGANPLVAQSVLHSVIHPVKTVGWHSSCTSGGQMAGSALPVQNPSAKVSQRVTQLPEQSPITSLGAMGSRTASRMQAVTAVDILTGAAAPEAIDVEVASS

SEQ ID NO: 55448 - protein, 459 aa, Glycine max
  Clone ID: UC-GMFLMINSOY075G05_FLI.pep
SSSAPTQGKMREILHVQGGQCGNQIGSKFWEVVCDEHGIDPTGKYVGNSDLQLERVNVYYNEASCGRFVPRAVLMDLEPGTMDSVRTGPYGQIFRPDNFVFGQSGAGNNWAKGHYTEGAELIDSVLDVVRKEAENCDCLQGFQVCHSLGGGTGSGMGTLLISKIREEYPDRMMLTFSVFPSPKVSDTVVEPYNATLSVHQLVENADECMVLDNEALYDICFRTLKLTTPSFGDLNHLISATMSGVTCCLRFPGQLNSDLRKLAVNLIPFPRLHFFMVGFAPLTSRGSQQYRALTVPELTQQMWDAKNMMCAADPRHGRYLTASAMFRGKMSTKEVDEQMINVQNKNSSYFVEWIPNNVKSSVCDIAPRGLSMASTFIGNSTSIQEMFRRVSEQFTAMFRRKAFLHWYTGEGMDEMEFTEAESNMNDLVSEYQQYQDATAEDEGEYEDEEEEDGEADDHM

SEQ ID NO: 55449 - protein, 707 aa, Glycine max
  Clone ID: UC-GMFLMINSOY076C12_FLI.pep
AIDLSQNGLMGPIPKGIFQLKNLNKLLLLSNNLSGKIPSEIGNCSSLIRFRANDNNITGSIPSQIGNLNNLNFLDLGNNRISGVIPVEISGCRNLAFLDVHSNFLAGNLPESLSRLNSLQFLDASDNMIEGTLNPTLGELAALSKLVLAKNRISGSIPSQLGSCSKLQLLDLSSNNISGEIPSSIGNIPALEIALNLSLNQLSGEIPLEFSSLTKLGILDISHNVLSGNLQYLAGLQNLVVLNISYNKFTGRIPDTPFFAKLPLSVLAGNPELCFSGNECGGRGKSGRRARMAHVAMVVLLCTAFVLLMAALYVVVAAKRRGDRESDVEVDGKDSNADMAPPWEVTLYQKLDLSISDVAKCLSAGNVIGHGRSGVVYRVDLPATGLAIAVKKFRLSEKFSAAAFSSEIATLARIRHRNIVRLLGWGANRRTKLLFYDYLPNGNLDTLLHEGCTGLIDWETRLRIALGVAEGVAYLHHDCVPAILHRDVKAQNILLGDRYEPCLADFGFARFVEEDHASFSVNPQFAGSYGYIAPEYACMLKITEKSDVYSFGVVLLEIITGKRPVDPSFPDGQQHVIQWVREHLKSKKDPVEVLDSKLQGHPDTQIQEMLQALGIALLCTSNRAEDRPTMKDVAALLREIRHDPPTSAEPHKPKPKPKPYSTEASSYSSSSVTPAQLLLLQSSSHSSSSLAYSSSSAAGYHPPRNQS

SEQ ID NO: 55450 - protein, 55 aa, Zea mays
  Clone ID: LIB3689-223-H8_FLI.pep
YTNPPSAYILLSCIINETTQHHIHRPDAYSLPLLQQQLAFISPIALSHRLRFHRF

SEQ ID NO: 55451 - protein, 508 aa, Glycine max
  Clone ID: UC-GMFLMINSOY077B08_FLI.pep
SVKMASSSSNGSSSGSKSWDIDGDLAGFGYKVRSSELQHVAENMERLENVMDIVNSSTNNNISQLASDTVFYNPSDIGSWVDTLLSEFDQTASLPYDFSDFLDLDTDQNQNHKPTLVTMEEDSGIRLVHTLMTCADSVQRGDLAFAGSLIENMQGLLAHVNTNIGIGKVAGYFIDALRRRILGQGVFQTLSSSSYPYEDNVLYHHYYEACPYLKFAHFTANQAILEAFNGHDCVHVIDFNLMQGLQWPALIQALALRPGGPPLLRLTGIGPPSSDNRDTLREIGLRLAELARSVNVRFAFRGVAAWRLEDVKPWMLQVNPNEAVAVNSIMQLHRLLASDSDPIGSGIETVLGWIRSLNPKIISVVEQEANHNQDRFLERFTEALHYYSTVFDSLEACPVEPDKALAEMYLQREICNVVSSEGPARVERHEPLAKWRERLEKAGFKPLHLGSNAYKQASMLLTLFSAEGYSVEENQGCLTLGWHSRPLIAASAWQAAPMQDRETLRFEQ

SEQ ID NO: 55452 - protein, 72 aa, Zea mays
  Clone ID: 701165939_FLI.pep
SSTRPLGAVSSRVTGRCGGRSTYATSAGGGMLRSNPTPTAGEASTTDDDDPVSLCSSSRQDAAACLLAPAAT

SEQ ID NO: 55453 - protein, 776 aa, Glycine max
  Clone ID: UC-GMFLMINSOY077C10_FLI.pep
KKAAILKSLQTIMVVFLLIVLFSSNTKAEKETIHDHANKKTYIIHMDETTMPLTFTDHLSWFDASLKSASPSAEILYTYKHVAHGFSARLTPKDVDTLAKQPGILSVIPELKYKLHTTRTPNFLGLDKATTLLPASEQQSQVVIGLLDTGVWPELKSLDDTGLGPVPSTWKGQCEIGNNMNSSNCNRKLVGARFFSKGYEAALGPIDTTTESKSARDDDGHGSHTLTTAAGSVVPEASLFGLASGTARGMATQARVAVYKVCWLGGCFTSDIAAGIDKAIEDGVNVLSMSIGGSLMEYYRDIIAIGSFTAMSHGILVSTSAGNGGPSQGSLSNVAPWITTVGAGTIDRDFPAYITLGTGKTYTGASLYSGKPLSDSPLPLVYAGNASNSSVGYLCLQDSLIPEKVSGKIVICERGGNPRVEKGLVVKLAGGAGMILANSEAYGEELVADSHLLPAASLGQKSSEILKNYVSSSPNPTAKIAFLGTHLQVQPSPVVAAFSSRGPNALTPKILKPDLIAPGVNILAGWTGAVGPTGLTVDTRHVSFNIISGTSMSCPHVSGLAAILKGAHPQWSPAAIRSALMTTAYTSYKNGETIQDISTGQPGTPFDYGAGHVDPVAALDPGLVYDANVDDYLGFFCALNYSSFQIKLAARRDYTCDPKKDYRVEDFNYPSFAVPMDTASGIGGGSDTLKTVKYSRVLTNVGAPGTYKASVMSLGDSNVKIVVEPNTLSFTELYEKKDYTVSFTYTSMPSGTTSFARLEWTDGKHKVGSPIAFSWT

SEQ ID NO: 55454 - protein, 94 aa, Zea mays
  Clone ID: LIB3245-456-E3_FLI.pep
LVMAAKRRTGNVIVKVCACSPAALDKRLSCPLLHALSYGQHVSVRQDRKSPASSFSKRNFTPAGKAGVAEMYACIWMIRRLEITWFSCPPYSSR

SEQ ID NO: 55455 - protein, 449 aa, Glycine max; identical to SEQ ID NO: 49620
  Clone ID: UC-GMFLMINSOY079F11_FLI.pep

SEQ ID NO: 55456 - protein, 152 aa, Zea mays
  Clone ID: LIB3066-017-F10_FLI.pep
GVPVHRLVKAADSVSVCLSKGLGAPIGSVVVGSEAFIDKARILRKTLGGGMRQVGVLCAAAYVAVRDTVGKLADDHRKAKALAEGLTKIKQFTVDSSSVETNMVFFDIVDPHISPSKLCQVLEQRNVLAMPASSKSRYFARSSWPYWERRCS

SEQ ID NO: 55457 - protein, 506 aa, Glycine max
  Clone ID: UC-GMFLMINSOY080H10_FLI.pep
ATATASSSITSAIIDAATDRHLSYSLLLRQVKSLTSSLQSLTPLSKGHVALILTPSSLHVPVLYFSLLSLGVTIAPANPLSSQSELTHLVKLAKPVIAFSTSNAAKNIPSSLKFGTILLDSPLFLSMLNNNEYVNADSRTRRVEVSQSDSAAILFSSGTTGRVKGVLLTHRNFIALIGGFYHLRMVVDDDPHPVSLFTLPLFHVFGFFMLVRAIAVGETLVFMHRFDFEGMLKAVERYRITYMPVSPPLVVALAKSELVKKYDMSSLRYLGSGGAPLGKEVAEDFRAQFPNVEIGQGYGLTESGGGAARVLGPDESKRHGSVGRLSENMEAKIVDPVTGEALSPGQKGELWLRGPTIMKGYVGDEKATAETLDSEGWLKTGDLCYFDSDGFLYIVDRLKELIKYKAYQVPPAELEHILHTNPEIADAAVVPYPDEEAGQIPIAFVVRKSGSNITADQVMEFVAKQVSPYKKIRRVSFIKSIPKSPAGKILRRELVDYALSCGSSKL

SEQ ID NO: 55458 - protein, 245 aa, Zea mays
  Clone ID: LIB143-001-D11_FLI.pep
TTTITLGGLVSLGGCGSSLTPEPSSPPSGNETNLLARGSVSADSRGVTDVLVVTSSVGMLHRVHGHTTHLGPAVPLHTVLVVRVTSLEHRLLSPASTSNLPNHSTAAAGDNLLGARGQLNPRCAVVRVVADHNGVVPRGPGEDTAVTDVVLDVADDGTLRDPAEGQHVADGEGGAATAVDELARVHALGCDKELLLVLVPEWVAESDLGERRATAGVVDDVGDDALEVPVIRSSSPSSSSSPPSS

SEQ ID NO: 55459 - protein, 228 aa, Glycine max
  Clone ID: UC-GMFLMINSOY084D03_FLI.pep
FIMSGVFLGGCNPGYHTLYQWYRSVESEHFPDPTGLRARIEQWTFGLYPACIKYLMSAFDVPEVMAVSRNNICQNGLESISRGGAVIYYASVFLYFWVFSTPVVSLVFGSYLYICINWLHLHFDEAFSSLRIANYKSFTRFHINSDGDLEVYTLAVDKVPKEWKLDPDWDGETKHPHELSHLRRFPSKWRAAIAHLDPVHTVKIVDHFVIGRTDKNDCATTAPNGPVQ

SEQ ID NO: 55460 - protein, 52 aa, Zea mays
  Clone ID: LIB3245-012-A4_FLI.pep
VAGITFCYTTVLCFQITLVHSVHALGLCCLVEHALLQLSSVSLLYSSLGFCP

SEQ ID NO: 55461 - protein, 105 aa, Glycine max
  Clone ID: UC-GMFLMINSOY084G12_FLI.pep
LCLQPVASTINTLAGALYKVFCASPDPASKEMRQACFDYLSLGGVFSDGPIALLSGLNPRPLSLVLHFFAVAIYGVGRLLIPFPSPKRMWIGARLISVSVSCISL

SEQ ID NO: 55462 - protein, 80 aa, Zea mays
  Clone ID: LIB3354-126-G1_FLI.pep
LFNLVIDIFSLILRQGIRALSIDKDNAPKWNPTTLEEVKYEDIDRLFQPFSPELELQVPSDDSNRWSGKYENTVYGRASQ

SEQ ID NO: 55463 - protein, 190 aa, Glycine max
  Clone ID: UC-GMFLMINSOY091F08_FLI.pep
LSLLSKGVEDNANQLGISDKSINYTNDLKQNRVRLLEMEEEARKEIPLDMYLILGVEPSVSISEIKKAYRKAALRHHPDKAGQSLTKNDNGDDQIWKVIAEEVHGDVDQLFKIIGEAYAVLSDPAKRARYDAEEEMRNSQKRRHGPIGKNSVDAQYYPFEQSNRRQWREVNRSYGNSSFRGYEPGRSSRK

SEQ ID NO: 55464 - protein, 235 aa, Zea mays
  Clone ID: LIB148-018-H1_FLI.pep
AYEYATRGSLHDILHGKKGVKGAQPGPVLSWMQRARIAVCAARGLEFLHEKADPRVVHRDIKSSNILLFDHDVAKIGDFDISNQAPDMAARLHSTRVLGTFGYHAPEYAMTGQLSTKSDVYSFGVVLLELLTGRKPVDHTLPRGQQSLVTWATPRLSEDKVRQCVDPRLGDEYPPKAVAKMAAVAALCVQYEGEFRPNMSIVVKALNPLLHSRSGNRPTASSASHAAAAAERSGL

SEQ ID NO: 55465 - protein, 192 aa, Zea mays
  Clone ID: LIB3957-025-E3_FLI.pep
GAFESMGAGLAMAPGDIAFKSNFATLDENTGVIISRRADRHFEEEGPILCAALDGMKLRSFPEYEVRVRYATEHRCGVVVKGPKLSGNISGTDPLKDNRLHLKAEPLDGSEEAKNTAAVVNELSMEITRILVSHPINAKRAAEGKNIANVVLLRGCGIRIEVPAFETKHGLAPCMVAPTKIIAGLGLSLGID

SEQ ID NO: 55466 - protein, 723 aa, Glycine max
  Clone ID: UC-GMFLMINSOY100H07_FLI.pep
INTMIEDNDARALMAATALNSCKETLAKLQETQAQSSEEAKESYQRVKEARDMFETIRGQFISKLNSQEDQGTEPKSIEEEDMSSLEEERHEPDVELLRDTIKEKLEKDSGSSLSMTEMTEKIDELVNKVITLEIAVSSQTGLVKRLRSEADKLQKNILSLEEDKEVLTEDSEGTKKKLEEVEEELRRVKILYQSANRQDNSLQTHFAEASCDLEHLSGKLNDVKLDEEGENLQLHKNKSAHDGEIKVEFEKSGDNTEHMKDVETAKEDCSVNFGDVENEDNKSNSKENIDFRTEEIPEQMLQNKDDLSEARSNLDTESLDQGTGEEENQSNRSQMMASGLDDGEKILTEFTSVLKNYEDVKDELNDVVKKNQDSIFQLALQVRELRDTVETKDQEINILQQMLTCSKTNPDESPSTPLTDYKHTPQEALLGTAAQGTDPQDPENPSSNTNASAVTTSYAGQHQKYVENKARIGILMKVRSNQLDRTHSLSTLEKKFRSNMDDLLEENLEFWLRFSTSVHQVQKFQSSIQDLKFELKTIRDNMSQENSSSIQSEIKPIFRHLREIRTELSLWLEHSEELHEELQCRHPSLCTLQDEIARAANPNSASSNNMAKLSGYQAAKFQGEILNMKQESIKVSSELQACVSFVKELKGEVEKMVEELSQEVGVNNHDHMKHSTSRPRIPLKSFLFGIKLRKQKQTVLSCVTPTKKQHRDLALAEEDAPI

SEQ ID NO: 55467 - protein, 170 aa, Zea mays
  Clone ID: LIB3637-233-D2_FLI.pep
LDSWNDTSRQHIVPKLTFLDQLCELSPYVPRSTLEAHIPYTILRSIYHQLYGGSLLASEPAEQSPRQSPLISLAHASPSSARQNRPETTPRSHTFDPGYYSSSGSQHDDGYDADRRAGRLLRSLRRSGPLDFGASRKAKKFVEGSSSGSSHGAGSLQRFAVSRSGPLSYR

SEQ ID NO: 55468 - protein, 520 aa, Glycine max
  Clone ID: UC-GMFLMINSOY109F01_FLI.pep
ECGSFMCRYRNKHKNVDMKAIKNWARQILRGLCFLHCHSPPIVHRDLKCDNIFVNGNSGLVKIGDLGLAIVMQQPTARSVIGTPEFMAPELYEEEYNELVDIYSFGMCILEMVTCEYPYSECNNPAQIYKKVTSGIKPAALAKVNDPEVKQFIEKCLVPASMRLSASELLKDPFLATENTKEINHDILELPNPHTKLVNPPTCEPHPMEIDSKSRRTSPGSSMGRIEETSQVSFFDLVRMTENNKFMLRGEKNAESTISLTLRIANACGGARNIHFPFYINSDTAISIAEEMVEHLELTNEDVSVIAELINDMIAKLVPNLKPLSEKLSSGTDQLYRPSSEVQNGEQFNCHWPLQSSDYDMKPVFKDLVHSWPVDGDDLEKQESVMSDISVECGITVASDSKVVEPDIFIFDEFWEGFDAFNSTSDVRFCGQEDGHKNQSENSSGSLINSCCCPFKNFDISSICSLTLADKDPSEGLRLEIEAIDTYFEQRFRELEMMRVAAIESLKRRHGEKHTCDVMH

SEQ ID NO: 55469 - protein, 192 aa, Zea mays
  Clone ID: LIB3607-052-B12_FLI.pep
LVTELADVGRKREAVLATFLPEQQGSFKKFTELVGRMNITEFKYRYNSNAKDALVLYSVGIYTDNELGAMMDRMESAKLRTVNLTDNDLAKDHLRYFIGGRSEIKDELVYRFIFPERPGALMKFLDTFSPRWNISLFHYRAQGEAGANVLVGIQVPPAEFDEFKSHANNLGYEYMSEHNNEIYRLLLRDPKV

SEQ ID NO: 55470 - protein, 165 aa, Glycine max
  Clone ID: UC-GMFLMINSOY117C04_FLI.pep
NLQVRSLKKQSKKKDFLSCFNLLINSNLFKMNYSCRWNLTANAARPNPQGSFHYGKITPTKVIKLANSAPLINGKLRYAVNSVSYVNPDTPLKLADYFNIPGIFSVNLLQNSPSNGPGYIGTSVLQTSLHDFIEVIFQNNENTMQSWHLDGYDFWVIGYVSFLEL

SEQ ID NO: 55471 - protein, 152 aa, Zea mays
  Clone ID: LIB3279-199-C7_FLI.pep
GCNKVVGKALMLDEIINYVQSLQQQVEFLSMKLATVNPELDFSNLSTLLHKDMYQQPCGGPSASSVFPLESAGAAFPFCEQADLFHSFGSGGSGMEDLSLLDTALPHAASPQFAFQKQQREFWEDGLQHALPTPTTGSEQRQEEDGLLVPDL

SEQ ID NO: 55472 - protein, 270 aa, Glycine max
  Clone ID: UC-GMFLMINSOY117G04_FLI.pep
HTLAGKVVMVTGASSGLGRDFCLDLGRAGCRVVVAARRVDRLESLCDEINSMAAGDGGRSRRAVAVELDVAADDPAVDKYVQKAWEAFGHIDALINNAGVRGNVKSPLELSEEEWNHAFRTNLTGTWLVSKYVCKRMRDAQRKGSIINIASIAGLNRGQLPGGAAYSSSKAGVNMLTRVMALELGAHKIRVNSISPGLFKSEITEKLMEKNWLNNVAMKTVPLRKFGTSDPALTSLARYLIHDSSEYVSGNNFVVDAGATLPGVPIYSSL

SEQ ID NO: 55473 - protein, 255 aa, Zea mays
  Clone ID: LIB3060-102-H8_FLI.pep
APMAGPRRLLLLLLPLLVLLGAHPPQRGSAEEGTKVSLELYYESLCPYCSRFIVNHLAGIFEDGLIDAVHLRLVPYGNARVASNSEISCQHGPYECLLNTVEACAIDAWPDLDVHFSFIYCVEDLVVKRQYKDWESCFEKLGLDAKPVTECYKSEHGHKLELKYANQTDALEPPHRYVPWVVVDGQPLLEDYENFEAYICKAYKGTPPKACEGLERLQMALETAAEARNGVSYNSGVSKLATAEDEGGEHKVGEY

SEQ ID NO: 55474 - protein, 344 aa, Glycine max
  Clone ID: UC-GMFLMINSOY117H06_FLI.pep
SSSSSAAANAMGDVQIHKTKLCIIGSGPSAHTAAVYAARAELKPILFEGWMANDIAPGGQLTTTTDVENFPGFPDGILGGELMERCRSQSLRFGTEIHTETVSKVDFSNRPFRVFTDSRTVEAESVIVATGAVAKRLPFPGSGDGPEGYWNRGISACAVCDGAAPIFRNKPLAVIGGGDSAMEEATFLTKYGSEVYIIHRRDTFRASKIMQSKVMNNSKIKVIWNSVVVEAFGGGDNKRVLGGLKVKNVVTQEVSELKVSGLFFAIGHEPATKFLDGQLELDSDGYIVTKPGTTKTSVEGVFAAGDVQDKKYRQAITAAGTGCMAALDAEHYLQNVGLQQDKSD

SEQ ID NO: 55475 - protein, 181 aa, Zea mays
  Clone ID: LIB3279-180-E4_FLI.pep
REVIDEDGWLHTGDIGLWLPGGRLKIIDRKKNIFKLAQGEYIAPEKIENVYAKCKFIAQCFIYGDSFNSSLVAIVAVEPDVLKAWAASEGIQYEDLRQLCADPRATAAVLADMDSIAKEAQLRGFEFAKAVTLVAEPFTLDNGLLTPTFKVKRPQAKAYFAKEISDMYSRLLETELARSKL

SEQ ID NO: 55476 - protein, 336 aa, Glycine max
  Clone ID: UC-GMFLMINSOY118D08_FLI.pep
KLQQITSLTLINSEKAGLELFTRLSNGQVIAVKRLSSDSGQGGVEFKNEVLLLAKLQHRNLVRLLGFSLEGKEKLLVYEYVPNKSLDYFIFDPTKKERLDWDRRYKIIQGIARGLLYLHEDSRLRIIHRDLKASNVLLDEEMIPKISDFGMARLIVAGQTQENTSRVVGTYGYMAPEYIMHGQFSIKSDVFSFGVLVLEIVSGQKNHGIRHGKNVEDLLNFAWRSWQEGTVTNIIDPILNNSSQNEMIRCTHIGLLCVQENLANRPTMANVALMLNSCSITLPVPTKPAFFMDSATTSLPNMSWEVNSGTTRSNQSTTKSAHDSVSETSISELYPR

SEQ ID NO: 55477 - protein, 321 aa, Zea mays
  Clone ID: LIB3591-112-G6_FLI.pep
RISGMELRRGSSCAGALPPPSTSPPPTPTTRSRAPLPRTRSLRPRPRSSLRGRPDHRSSTWSCFSRQKSTSTTLTYRLLPPQGTSSPRSPATTRCPWWRTNSGGARIVNASSLASELKRMPNEKLRNDLSNIDIWDEDRIQAVLNTFLEDLRSGRLEEAGWPVMLPAYSLSKMVINLYTRIIARRYPEMRINCVRPGFVTTDISWNLGVLTPKQGARGPVMLALLPDDGPTGWYRDEMGDKMGSLLFFKMVKYSSLVEGFCGVQFSFPNIQLCKSWSQELATNTESHLLPEMLEAANGYICHELHLMLTSIGVTHMIDCVK

SEQ ID NO: 55478 - protein, 477 aa, Glycine max
  Clone ID: UC-GMFLMINSOY120E03_FLI.pep
FVNYSSIIQYLTRSNKIDSPILQKLYAEIETDKIEIDGHLMNDIIVGFSKAGDPTRAMRFLAMAQSNGLNPKPSTLVAVILALGNSGRTHEAEALFEEIRENGLEPRTRAYNALLKGYVRTGSLKDAEFVVSEMEKAGVKPDEQTYSLLIDVYAHAGRWESARIVLKEMEASNVQPNSYVFSRILANYRDKGEWQKSFQVLKDMKSSGVQPDRHFYNVMIDTFGKYNCLDHAMATFERMLSEGIPPDIVTWNTLIDCHCKSGRHDMAEELFSEMQQRGYSPCITTYNIMINSMGEQQRWEQVTAFLSKMQSQGLQPNSITYTTLVDVYGKSGRFSDAIECLEVLKSTGFKPTSTMYNALINAYAQRGLSELAVNAFRLMTTEGLTPSLLALNSLINAFGEDRRDAEAFAVLQYMKENNIEPDVVTYTTLMKALIRVEKFQKVPAVYEEMVASGCTPDRKARAMLRSALRYMKQTLKS

SEQ ID NO: 55479 - protein, 180 aa, Zea mays
  Clone ID: LIB3354-070-G9_FLI.pep
IAFKMQFLFQVVQQFGIPHLFDLPIRPTLSASGDTGIPEVVADPQGDVANTFQNLGACVVQQCAKIRQQVSTAVSYDRSIKAIRVKVPDSDEEFLLHPATVRRNDRSAQSVDEWTGEQKVQYSDIPDDIEPEEIRPMGNYAVSITWPDGFSQIAPYDQLEMLERLVEAPSPAAASAVASS

SEQ ID NO: 55480 - protein, 187 aa, Zea mays
  Clone ID: LIB4720-008-D5_FLI.pep
YDRETIHMHASHDGAGVDVLVAEHGHVLDLRSAGVCHGLRRAADEARGSLLVVGAADVGVGGERVGHVGPHLGVLAGGLDALQHLGGLHVPGHRALALLRVHRHARHAAHRLHRALHATLATFAVHLHLDVHRLQRSLLPELERLLRLRDAAHMRHVVQDAHGATASGVCCCCRRRRRLASSRPLLL

SEQ ID NO: 55481 - protein, 347 aa, Zea mays
  Clone ID: LIB4570-007-D5_FLI.pep
PSRPAGSGTNSSLVWAVAVRRRVKRDETTMRKWALSSAPLLLFLLTTLPDPAKKLQVNAEESSDDLANPPKVEEKLGAVPHGLSTDSEVAQREAESISRKTLRSSAEKFEFQAEVSRLMDIIINSLYSNKDIFLRELISNASDALDKIRFLSLTDKEVLGEGDTAKLEIQIKLDKEKKILSIRDRGIGMTKEDLINNLGTIAKSGTSAFVEKMQSGGDLNLIGQFGVGFYSVYLVADYVEVVSKHNDDKQYVWESKADGSFAISEDTWNEPLGRGTEIRLHLRDEAKEYLEEDKLKDLVKKYSEFINFPIYLWSTKEVDVEVPADEDETSEEEDSSPETTEEETEED

SEQ ID NO: 55482 - protein, 466 aa, Zea mays
  Clone ID: LIB4702-002-F4_FLI.pep
TLEAGRTFHPEPPDLSAPYTNRVMLSFQHNRDWHRHYWCMEELHKSLSIVLFITCIAGAVAYSDRSELLSHKTCPQPQDFPSEQLYRSYVVIQRFKSTITSDPKNVTATWIGNDICGETTYVGFYCGVLPGRGNNLTVTAVLLNGYRLHAPKLQGFVDEIPDLALFHAASNNFGGDIPRVVGLGYLYNLNVGVDLPLHTTRYGNSMTVGSNLVVTLPPMCVTTTLNFTFSIGIDGGKGRKFPGVTDAKALLLNHNSLSGALPADLGYSKVSYLALANNRLTGPIPQSIGHLQDSLFEMLLLNNQLSGCLPHELGMLTKAAVIDAGMNQLTGPIPSSFSCLTSVEQLNLAGNRLYGQVPEALCKLAGPAGRLTNLTLSSNYFTSVAPACAALIKNGVLDVKNNCIPGLASQRRPAECAAFQSQPKTTCPAESTLVACPAAAAMDAAALGERKVRDYSSYVTYATLHD

SEQ ID NO: 55483 - protein, 552 aa, Glycine max
  Clone ID: UC-GMFLMINSOY028C03_FLI.pep
LTAKPTNQPTKKEGLSIYSSERLSIIIRKMACNGFCLRLIALVLVISISSVNCIETDAVEPIIDIASLNRDSFPPDFIFGAGSSSYQFEGAANEGGRGLSIWDTFTHKYPEKIQDKSNGDVAIDAYHRYKEDVKIVKDMNLDSYRFSISWSRILPKGKLSRGINQEGIDYYNNLINELVANGIQPLVTLFHWDLPQSLEDEYGGFLSPRIVKDFRDYAELCFKEFGDRVKYWVTLNEPWSYSQHGYANGGMAPGRCSAWVNPNCTGGDSGTEPYLVTHYQLLAHAAAVRVYKTKYQVSQKGLIGITLVANWYLPFSNTKADQKATERAIDFMFGWFMDPLTSGDYPKIMRSLVRTRLPKFTTEQSKLLIGSFDFIGLNYYSSTYASDAPHLSNARPNYVTDSLVTPEFERDGKPIGIKIASDWLYVCPRGILDLLLYTKEKYNNPLIYITENGINEFRDETLSLEESLLDTFRIDYHYRHLFYLRSAIRHGVNVKGYYIWSLFDNFEWSSGYTVRFGMILVDYKNNLKRYHKLSAIWIKNFLKKTSLYDSSI

SEQ ID NO: 55484 - protein, 285 aa, Zea mays
  Clone ID: LIB4721-022-A12_FLI.pep
DEHERFLVPRHGATFVTHKGDSGIAEQTIAGIDWQFNAWGGIYDDWSLDSDVAKKIVEIERIPRFPQKIILEGGSIHVDGEGTCITTEECLLNPNRNPNMTKLEIENELKDFLGVSKVIWIPRGLYGDEDTNGHIDNMCCFIKPGVILLSWTDDEKDHQYERSVEALSVLSQSVDAKGRQLQVVKIHVPGPLYMTEEEAQGVVSSGHSVPRPAGTRLAASYVNFYIANGGIIAPSFGDRWDEEAYAVLQKAFPDHEVVMVEGGREIALGGGNIHCITQQQPVRLS

SEQ ID NO: 55485 - protein, 167 aa, Glycine max
  Clone ID: UC-GMFLMINSOY029D03_FLI.pep
YFFPSLSHQNNLLTKEEKWHLSFPSLCCFSFSTTPSFPSQPTLKLASRLKLGLNSFDLIQIICVGNALHALRSRLSDPNNMLQSWDPTLVNPCTWFHVTCDSNNHVIRLDLGNSNVSGTLGPELGQLQHLQYLYEFFPLPVTAEKFIYELLCLICSLNMCLLTLFKQ

SEQ ID NO: 55486 - protein, 122 aa, Zea mays
  Clone ID: LIB3227-042-C2_FLI.pep
PRRWRRRPWPTPACTRCRRTTGTRRTTSRLQAATTVPPHRPTTTPASTPTAAASITRPRQPTRTAPPTSTRPRCSATRTPTPAPSCELARFAGLPPPPRLGTPFLRVRPRTMGLSWISGVFS

SEQ ID NO: 55487 - protein, 282 aa, Glycine max
  Clone ID: UC-GMFLMINSOY039D12_FLI.pep
RSYMVRYVMRCIFGDPRKAPPPLEKLSPEATVSFLWKGEGSFVEELVQCITPHVEEGILNDLKFKIHAHDPSNSGDIQKELRKSLLWLRDEVRNLPCTYKCRHDAAADLIHIYAYTKYFFRIRNYQTITSPPVYISPLDLGPKYTNKLGAEFQEYRKIYGENYCLGQLIFWHNQSNADPDRSLARASRGCLSLPDTNSFYAKAQKPSRHCVYGPRTVRSMLARMEKLPQRSWPKDRIWSFKSSPKFFGSPMLDAVVNNSPLDREMVHWFKHRPAIFQAMWDR

SEQ ID NO: 55488 - protein, 93 aa, Zea mays
  Clone ID: LIB3596-050-G5_FLI.pep
QGSSPARSQLVVQTIRIHGMKATYVHVVLGLQYHDAHVVSFPAVCLFSISGPYLVIWQTVWFCLLQVMHSKLVNGVASLYFLVIFYHEVDVAF

SEQ ID NO: 55489 - protein, 493 aa, Glycine max
  Clone ID: UC-GMFLMINSOY042G08_FLI.pep
NVKLPETTYVFANGSMNLRECQDLCLRDCSCTAYANIQITNGGSGCVTWSGELEDMRLYPAGGQHLYVRLAASDVDDIVGGSHKKNHTGEVVGITISAAVIILGLVVIFWKKRKLFSISNVKTAPRGSFRRSRDLLTSERMFSTNRENSGERNMDDIELPMFDFNTITMATDNFSEANKLGQGGFGIVYRGRLMEGQDIAVKRLSKNSVQGVEEFKNEVKLIVRLQHRNLVRLFGCCIEMDEKLLVYEYMENRSLDSILFDKAKKPILDWKRRFNIICGIARGLLYLHHDSRFRIIHRDLKASNILLDSEMNPKISDFGMARLFGTNQTEANTLRVVGTYGYMSPEYAMDGNFSVKSDVFSFGVLVLEIITGKKNRGFYYSNEDMNLLGNAWRQWRDGSTLELIDSSIGDSCSQSEVLRCIHVGLLCVQERAEDRPTMSSVLLMLSSESAIMPQPRNPGFSIGKNPVETDSSSSKKDQSWSVNQVTVTLLDAR

SEQ ID NO: 55490 - protein, 84 aa, Zea mays
  Clone ID: LIB3595-030-G11_FLI.pep
SFDIFSLNLWVVTWATDDLQDRTCTIQDAYKLQNIHLQCPCSHLSHKCNTWRFFRTWKSLGCACASRSHGRPERHVAKPGRCFP

SEQ ID NO: 55491 - protein, 697 aa, Glycine max
  Clone ID: UC-GMFLMINSOY043B10_FLI.pep
AIPDFSSISKLTYLDLSWNQITGPIPSNKVADNMTTFDLSNNRLNGSIPHFFYPHLQKLSLANNLLSGSIPGSIWQNMSFSAKDKLTIDLQNNSFSDVLGNLTPPENVTLRLSGNPICKNSNIQSIGQYCGPEADNKAAQDSTNSTFCPVQSCPVDDFYEYAPSSPVPCFCAAPLRIGYRLKSPSFSYFAPYRSSFEDYITRSLDLDLYQLSIDSVAWEEGPRLRMYLKLFPSYNDSGSSMFNESEVHRIKGIYSSWHFPRTDFFGPYELLNFTLLGPYANLNVDSKKKKNNVGIKISAVIAAVACALAISAIIILLISKRNMKYQKKISRKRMSTNVSIKIDGMKAFTYKELAIATNKFNISTKVGQGGYGNVYKGILSDETFVAVKRAEEGSLQGQKEFLTEIELLSRLHHRNLVSLIGYCNEKEEQMLVYEFMPNGTLRDWISGKSRKTKGSLNFSMRLRIAMGAAKGILYLHTEANPPIFHRDIKASNILLDSKFTAKVADFGLSRLVPDLYEEGTGPKYVSTVVKGTPGYLDPEYLLTHKLTDKCDVYSLGIVYLELLTGMQPISHGKNIVREVNTARQSGTIYSIIDSRMGLYPSDCLDKFLTLALRCCQDNPEERPSMLDVVRELEDIITMLPEPETLFSDVSLLNSGNIAPPSSATTSTSNVTREEQHMSSYVSGSDLVSDVIPPVVPR

SEQ ID NO: 55492 - protein, 56 aa, Zea mays
  Clone ID: 700239763_FLI.pep
WSKTSVKGSRMSNRGNPTILVTGLILNYAANTVRSSLSIGAMQYSLCVHSTLYCMA

SEQ ID NO: 55493 - protein, 361 aa, Glycine max
  Clone ID: UC-GMFLMINSOY044F12_FLI.pep
GTWLTGSFNLTSNFTLFLHHGAVILASQDPKEWPIIEPLPSYGRGRERLGGRHISLIHGNGISNVVITGQNGTVDGQGRMWWELWWNRTLEHTRGHLLELISSDNVLISNLTFRNSPFWTIHPVYCSNVVVKGMTILAPLNAPNTDGIDPDSSTNVCIEDNYIESGDDLVAIKSGWDHYGITMAHPSTNIIVRRISGTTPTCSGVGIGSEMSGGISNITIENLHVWDSAAGVRIKSDKGRGGYITNVSISDIRMERVKIPIRFSRGSNDHPDDGWDPKAVPRFKDILISNVVSVNSTKAPVLEGVEGSSFEGLCFKNITLHGVALSARWRCEYVSGFATEVFPVPCPELRNNSYSSWCSAS

SEQ ID NO: 55494 - protein, 49 aa, Zea mays
  Clone ID: LIB3597-001-A6_FLI.pep
GLRSDNIVALSNRFRGSRTFQTPHKYIVTRQVHLNSGVIRHGHPHPGTS

SEQ ID NO: 55495 - protein, 462 aa, Glycine max
  Clone ID: UC-GMFLMINSOY048C11_FLI.pep
EPKLGATPVFIFATAGMRLLPFEKQQILMEHLRNELPQMTKLQILDQHIRVISGRWEGIYSWIAINYMLGRFNLSKSVNKSKSESLEERSQPALSVEKKERPKTAGMIDMGGASAQIAYELPLGHSDAATGGQENVQLLNLGCRDDESRFRFRLFVTTFLGFGVNEGAKAYEKFLWKRLNNKRQAANSTETDNGKDGAKVPTVVDGCLPVNMLKLSHAEENYDQFVRKGNGDWDSCVSDIVSLLFESNSKCSPAKECFFNGVHAPPQLSLSDVELYGFSEYWFSVDDVLSLGGKYEHDKFEQKAKEFCGQPWAVIKRKVKAHFYQKADSERLETQCFKSAWIHAVLHNGFHVDEIQHHFQSAFRINGQEVQWALGAIIYQMRYFPLFAESKGIIQPKQKSRIRPLFSAGPSVFYFLCVLSLAALLIRILWKSKQRQISVAKRRDNGKIVKYWRLDEELSNSP

SEQ ID NO: 55496 - protein, 207 aa, Zea mays
  Clone ID: 700045540_FLI.pep
TALAFAGAFSFEDGLKLVKLRGEAMQDASDAANSAMVSVIGLDSEKVQELCDAANDEVDENDRVQIANFLCPGNYAVSGGVKGIEVVEAKAKSFKARMTVRLAVAGAFHTSFMQPAVSRLESALAATEIRTPRIPVISNVDAQPHSDPNTIKQILAQQVTSPVQWETTVKNLMGKGLEISYELGPGKVIAGILKRINKGTSIENIGA

SEQ ID NO: 55497 - protein, 544 aa, Glycine max
  Clone ID: UC-GMFLMINSOY048F06_FLI.pep
RSRKARSRNHTLANSMPAVHIRTHDMLNPLERQFLDAAEKGNRPVLEACLAKQLRKAPLNINAVDTMGRTAIEIAVDNENLEIVQLLLRQPDVRIGNALLCAIREGVYELVEVLVNHPSITRDMLGEGWAKYLDPTETATSEYSSDISPVIMAAHLNQFEILQMLLRKDANIEKPHKHYCACEMCDSERINDGLHRSLKRINKYRALASPAWISLTSSDPILSAFKLSRELQKRAKVEDEFKDQYLQLAEQCKQYACDLLSQCRSTEEVMAVLNKEDNFCNEEVDLNAAKCSLARLKLAIKYEQKTFVAHPHCQQLLTSIWYEGFPLKRHRSSSLRTLLIALLLVLGWPLMAICYIAFPKSRVGEIVRSPFMKFLYYSTSFGCFLALLTMVTFEVHREQTGEVKGGTATRAADRGPTPTLIEWLVFIWVIGMLWSEIKQMWLEGFTKYIHQWWNWLDFVMVCLYLCTISIRFSAYSIYVMHNVGEQFTPRHVIRTHWNAFEPVLVSEALFAVGNVFRPIPTWDPCRSPWAACWSMWPSSASFSC

SEQ ID NO: 55498 - protein, 60 aa, Zea mays
  Clone ID: 700426301_FLI.pep
GICVLLSRTPILPTSWSSRAVAFCLGKIAYCLLYDTFICVRKFVALHILEGSKENVHAVR

SEQ ID NO: 55499 - protein, 519 aa, Glycine max
  Clone ID: UC-GMFLMINSOY050C02_FLI.pep
KMETSEWHIERRSSFGSESPLAREAGNVPETGSLSIVVLGASGDLAKKKTFPALFHLYLQGFLPPDEVHIFGYARTKISDDELRNRLRGYLVPKKGASPQQLEDVEKFLQLIKYVSGSYDSEDGFRLLDKEISEHEYLKNSVEGLSRRLFYLALPPSVYPSVCKMIKTCCMNKSDLGGWTRVVVEKPFGKDLESAEELSTEIGKLFEEPQIYRIDHYLGKELVQNLLVLRFANRFFLPLWNRDNIDNVQIVFREDFGTDGRGGYFDQYGIIRDIIQNHLLQVLCLVAMEKPVSLRPEHIRDEKVKVLESVLPINDDEVVLGQYEGYKDDPTVPDESNTPTFATVVLRIHNERWEGVPFILKAGKALNSRKAEIRVQFKDVPGDIFKCKKQGRNECVIRLQPSEAIYMKLTVKQPGLEMSTVQSELDLSYGQRYQGVTIPEAYERLILDTIRGDQQHFVRRDELKASWQIFTPLLHRIDEGEFKPLPYKPGSRGPAEADQLLEKAGYVQTHGYIWIPPTL

SEQ ID NO: 55500 - protein, 204 aa, Zea mays
  Clone ID: 700444216_FLI.pep
GATEYCVVHGGGKRCSVPGCTKSARGRTDCCVKHGGGKRCKVDSCGKSAQGSTHFCKAHGGGKRCTWSTGCEKFSRGKSGFCAAHGTLMARQREEEVVKNVGSMIGPGLFSGIVASSATAASSMTNEHSASGVSTASDCDGTVRSQSMIPPLVLVPRSMMPSWSTEPVDGGREGGHVVPEGRVHGGGLLSLLGGSFRDADVEKL

SEQ ID NO: 55501 - protein, 606 aa, Glycine max
  Clone ID: UC-GMFLMINSOY053C01_FLI.pep
KLDIYGDASYLSRASSGVSDDMEPSSTSHMPESDENAALESKKMNHNMLMALIKYLQKKRFSFIEKATAEGTEEVVFDAVGDNFASYNRLKKTNKGRGNVPVSSGAREMASMLDTALLEALLLTGQSSVALELLRGVNYCDLKICEEILRKGNHHVALLELYKHNSLHREALELLHKLVDELKSSQSEITQRFKPEDIVEYLKPLCGTDPILVLEFSMLVLESCPSQTIDLFLSGNIPADMVSSYLKKHSPNMQARYLELMLAMNENAVSGNLQNEMVHIYLSEVLDWHADLSAQQKWDEKDHSPTRKKLLTALESIAGYNPEALLKRLPPDALYEEHAILLGKMNRHELALSLYVLKLNAPELALSYCDRVYESMHQPSAKNSSNIYLVLLQIYLNPRRTTAGFENRITNLLSPQNKTIPKLTPTPSIKSRGRGSKKIAAIEGAEDTKVSLSSTDSGRSDGDADEYNDGSPTIMLDEILDLLSRRWDRINGAQALKLLPKETKLQDLLSFLGPLLRKSSEMYRNCSVIKSLRQSENLQVKDELYSQRKEVVKITGDSMCSLCHKKIGTSVFAVYPNGSTLVHFVCFRDSQNMKAVGKGSQLRKRL

SEQ ID NO: 55502 - protein, 105 aa, Zea mays
  Clone ID: 700337079_FLI.pep
SPWRTWRSSTTTSPSCPASTPRCTGSSSRNRAGWPSLGTGSGRRPSGRCRCAPPARPRNDRRAVLRRQKPFPRVPLSALLRPVRGFCLCFCRPNGASGDGEVCQK

SEQ ID NO: 55503 - protein, 406 aa, Glycine max
  Clone ID: UC-GMFLMINSOY054D02_FLI.pep
WTWGTRLFDKAVFYSSSSLSEPVVLEFPELKGHARRDYWLAIIQEILYVHKFISKYKLKGVARDEALWKAVLGILRLQAIQDISSTIPIQNDALLMFNLCDQLPGGDLILETLANMPNLRESDHENDFKGGSGMYSISALDMVSNLGFVFGASSNNSNESRIAVGEISVGEMTELERAVKESKNNHKKVISAQATVDGVKVDGIDTNLAVMKELLFPLNELGKSLQSLAYWDDPRKSLVFCLFFSYIIYRGWLGYAVALVLLLLAVFMIITRCFSQGRSVPEVKVIAPPPLNTMEQLLAVQNAVSQAEQLIQDGNVILLKFRGLLLSIFPQATEKLAFGLLSTALILAFLPTKYIILLLFLEIFTRYSPPRKASTERLTRRLKEWWFSIPAAPVTLERDKEEKKRK

SEQ ID NO: 55504 - protein, 139 aa, Zea mays
  Clone ID: LIB4302-003-B4_FLI.pep
SGTPALKGDFVRYGKRTTQGILNDLRNALARYYLNNFVDGTKQDAMDLLQGHNMTSVSRDMAVPSKSGLLESYASFRLAFALVMGALVFMMMPLRQARNDARHLMLSFLWAGLCIGISHFVRANGRTFTNRPRFHKSRH

SEQ ID NO: 55505 - protein, 258 aa, Glycine max
  Clone ID: UC-GMFLMINSOY062G02_FLI.pep
RYNVGDGFHVIAAHTDSPCLKLKPKTASCKCNYSMVNVQTYGAGLWYTWFDRDLSVAGRVILRTGHNSFVHKLVKVDRPILRIPTLAIHLDRTVNLDGFKPNLETHLLPLLSMKPEDTSLESNSKEKNSALSSKAHHHRLLMQVLSDELNCDVDDIVNIELNVCDTQPSCLGGGNNEFIFSGRLDNLASSYCALRALIDSCESPGDLASENAIRMVALFDNEEVGSGSVQGAGAPTMFQAMRRIVGDLTNNYVSEGSF

SEQ ID NO: 55506 - protein, 108 aa, Zea mays
  Clone ID: LIB3595-039-F2_FLI.pep
NLLLDISLLLPQPVQGAVCVALSTDKPRESKRCEVTIIQAIRIQVANVDLDRGMVLGSDDPVCGRALPGDIEVHSLTLLVLHGGSWGNYRKSNLQETEQNGGGVRSRR

SEQ ID NO: 55507 - protein, 515 aa, Glycine max
  Clone ID: UC-GMFLMINSOY066A05_FLI.pep
WEMGRSDPRKIIFSAKMGLALILLSLLIFLKQPFEDISKHSVWAILTVVVVFEFSIGATLSKGLNRGLGTLLAGGLALGMGLLSKLAGKWEETIIVISIFTAGFCVTYAKQYPTMKAYEYGFRVFLITYCFIIVSGYRSGEFVETAVDRFLLIALGAAVALGVNVCIYPIWAGEDLHKLVAKNFVGVAASLEGVVNNYLNCIEYERVPSKILTYQASEDVVYKGYRSAVESTSTEDSLMGFAVWEPPHGRYKMLRYPWQNYVKVSGALRHCAFMVMAMHGCILSEIQAPPEKRQVFSREVQKLGSEAAKILRELGNKVKKMEKLGEEDILYEVHEAAEELQQKIDKKSFLLVNSESWEIGNRPRGEGDPQDLLNMNEERHFLEYKSLSEAVLDLRTAKVPRSWGELATPDNKPAAPIGVGDENLFKKQISWPAHISFKADAGTREEESKTYESASSLSLATFTSLLIEFVARLQNLVDSFEELGEKAKFKDPLEQAPPTSGGFWNRLCNCLTFKD

SEQ ID NO: 55508 - protein, 440 aa, Glycine max
  Clone ID: 700747455_FLI.pep
TPFFFSSDSETFPGRSGIMGQDTKNYNNIASSPLLEPLPSSNSKRASKLQTLGNIIVTVVGTGVLGLPFAFRIAGWVAGSLGVAIVGISTYYCMLLLVMCREKLASEEPLGESNTYGDLGYRSFGTPGRYLTEVIIVVAQCAGSVAYFVFIGQNLYSVFQGQGLSMASYIFMLVPVEIGLSWIGSLSALAPFSIFADVCNVVAMGIVVKEDIQRAFGKGFSFGQRTMITSNIGGLPFAAGMAVFCFEGFGMTLALENSMQDRRKFPILLAQTFGGITLVYILFGFCGYMAFGEETRDIVTLNLPRNWSSLAVQVGLCVGLAFTLPIMLHPINEIFEGKLKIILRNNNDSTGLENICMYISRAIVVVGLAVLASFVPEFGVYASFVGSTLCAMLSFVMPATFHLKLFGSSLPIWQKALDSIVLLSGLFFAFYGTYNTIVGV

SEQ ID NO: 55509 - protein, 284 aa, Glycine max
  Clone ID: UC-GMFLMINSOY067A01_FLI.pep
MKMIILSLSLSLSQLNEFHSIPTGWCRGMAVPDPTQPNGVKLLIEDYPYATDGLLIWSAIENWVRTYVNHYYHHSNSSLICNDKELQAWYSESINVGHADLRHERWWPTLNNSEDLVSILTTLIWTVSAQHAAINFGQYPYGGYVPNRPPLMRRLIPEAEVESTSTEYANFLADPQKFFLNALPSVLQATKYMAIVDILSTHSSDEEYLGERRHSSIWSGDAEIIQAFYSFSTEIRRIENEIEKRNRDPTLRNRCGAGVLPYELLAPTSQPGVTCRGIPNSVST

SEQ ID NO: 55510 - protein, 260 aa, Glycine max
  Clone ID: 700745654_FLI.pep
AAAVMSLSYSTISWVACLARGRVENVSYAYKKTTSTDLMFRIFNALGQISFAFAGHAVALEIQATIPSTPEKPSKIPMWKGAIGAYVINAICYFPVALVGYWAFGRDVEDNVLMEFERPAWLIASANLMVFIHVVGSYQVYAMPVFDLIESMMVKRFKFPPGVALRLVARSAYVAFTLFVGVTFPFFGDLLGFFGGFGFAPTSYFLPSIMWLIIKKPKRFSTNWFINWISIYIGVCIMLASTIGGLRNIATDASTYKFYT

SEQ ID NO: 55511 - protein, 291 aa, Glycine max
  Clone ID: UC-GMFLMINSOY074B06_FLI.pep
LIVVWCVSVAMEASLVERGRERAGHVNKVGYVRRVIAKKKKQLYRRVRRPELSVSKTLHQLFDSCREAFKGPGTVPSPQDVQRLTHILDNMKPEDVGLSRDLQFFKPGNIVKENQRVTYTTVYKCDNFSLCIFFIPEGGVIPLHNHPDMTVFSKLLLGLMHIKSYDWVDPEASDDNMLQPQSQLRLAMLKVDKVFTSSCDTSVLYPTTGGNIHEFTAITPCAVLDVIGPPYSKEDGRDCSYYRDHPYTCFPNERIIGEAKEENDSYTWLEEIEMPENSEMNGVEYLGPTPS

SEQ ID NO: 55512 - protein, 167 aa, Zea mays
  Clone ID: LIB3060-046-H11_FLI.pep
LHCILRSGYSISRTGSMASLMAPMAGAFFLLMNSSDFFLYLSTAVIGTCTGAIASVAVSATSELFGAENFGVNHNVVVSNIPVGSLCFGYLAAYLYQRAARGSSSHQCIGAACYRDTFAVWGATCAVGTLLCAVLYARGRRPRSSAGRSKDGTCLARLAIAASCLSS

SEQ ID NO: 55513 - protein, 408 aa, Glycine max
  Clone ID: UC-GMFLMINSOY079D01_FLI.pep
AIQKKAKFDITDLNTIKVAKSCFVPALLGHAIDDDFIQPHHSDRIFEAYMGDKNIIKFDGDHNSPRPQFYFDSINIFFHNVLQPPEDEVGESFFDPMNDYFGKDVWRSVHELGYSNESSSKNKDAEPSTSSTINAIEQVRSRRPMSRMEVPSDISSKDEHREHEEKCGNISPSSSSMISFELSNGDPFGSHVPATLEDDQYVEYQLDDLAGFPSTAEEEERMFMEAVMESLKDLEVRNPNAEQPTTSVSSVYVDAVEPSDKDASSGEISRLVETESSSLKHTTESKFKTTSSTSEEFEPLNGESNSISVKHSQNVVSEPSPVPSVSLEGPAHLQLQPPPSAPTDTSSVTESSNTSGSASSDSSASLQSSSETDVSHNTKATVTVVRNPAGHVMDGLMRRWDFNFFKNK

SEQ ID NO: 55514 - protein, 341 aa, Glycine max
  Clone ID: UC-GMFLMINSOY085A11_FLI.pep
AKPKTKNQTQTKPTKISPISLSASCSFCVPNSFSRLYPDSPESTLKPALMANNPSDAPADDFLEQILGLPNFASADSGLSAADVGLAGAATQAPMMLQLNSADANAHLAGAAFHAPVYQLGLSLDQGKGGFMKPEEASASGKRFRDDVVDNRAKNVFHGQPMPTTMPAAPHPPAIRPRVRARRGQATDPHSIAERLRRERIAERIRALQELVPSVNKTDRAAMLDEIVDYVKFLRLQVKVLSMSRLGGAGAVAPLVTDIPLSSVEEEGGEGARNRPAWDKWSNDGTERQVAKLMEENVGAAMQFLQSKALCIMPISLASAIYQSQPPDTSSIVKPETNPPS

SEQ ID NO: 55515 - protein, 290 aa, Zea mays
  Clone ID: LIB148-004-C2_FLI.pep
KALFLLLLLSNSVSCPCRPRPVSPVFERGKRRRRRGMGRDERFPVWEAALGAGIAAAFAAGLVGVYLSMPDSDYSFLKLPRNLEELQILTGHLENYTSDYTLQVLVGYCAVYIFMQTFMIPGTIFMSLLAGALFGQLRGLALVVFAATAGASSCYFLSKMIGKPLVFTLWPDKLSFFQRQVAKRREKLLNYMLFLRVTPTLPNTFINLASPIVDVPYHIFLLGTLIGLIPAAYVTVRAGIALGELTSLSDLYDTQSIALLFLIGVVSVTPALLGKDEAQEKPPEMAVGAS

SEQ ID NO: 55516 - protein, 262 aa, Glycine max
  Clone ID: UC-GMFLMINSOY086A11_FLI.pep
IKWRRIQFKDSFLSRHCPLWYGYNGKLKPLMRLAYINTIVYPFTSIPLIAYCTLPAFCLLTNKFIIPEISNFASMWFILLFVSIFTTSILELRWSGVSIEDWWRNEQFWVIGGTSAHLFAVFQGLLKVLAGIDTNFTVTSKASDEDGDFAELYVFKWTSLLIPPTTVLIVNLVGIVAGVSYAINSGYQSWGPLFGKLFFAIWVIAHLYPFLKGLLGRQNRTPTIVIVWSVLLASIFSLLWVRIDPFTSDSNKLTNGQCGINC

SEQ ID NO: 55517 - protein, 402 aa, Glycine max
  Clone ID: UC-GMFLMINSOY086H12_FLI.pep
LLHITKLFTLLLLLWKALNQTLCFSFLCFLGTNRVSLFLTMAIKAIELLKGCGSQEEIMEVLAAVASDLGDVIDDVNTLQVIPLNGAMTNEVFQINWPTKNGGEIRKVLVRLYGEGVEVFFDREEEIRNFDCISKHGQGPRLLGRFTSGRVEEFIHARTLSAADLRDPEVSALIASKMREFHNLHMPGAKKVQIWHRMRKWLGQAKSLCSPKDEKNFGLDNLDEEINILEKKLSEGYQEIGFCHNDLQYGNIMMDEETRLITIIDYEYASYNPIAYDLANHFCEMVADYHSDTPHVLDYTKYPGLEERQRFIRNYLSSEGNKPSNAKVNQLAKAAEKYTLANHLFWGLWGLISSYVNKIDFDYKEYARQRFQQYWIRKPTLLDSPSIVSLDETVNGLMPSFT

SEQ ID NO: 55518 - protein, 268 aa, Zea mays
  Clone ID: LIB148-005-A1_FLI.pep
AVPQPLLLSLLVAVLAVAADVANAGHAKPLTPGGRVVHDNHGKFTAGPWKPAHATFYGGRDGSGTTAGACGYKDTRTQGYGVQTVAVSTVLFGDGAACGGCYEVRCVDSPSGCKPDAAALVVTVTDLCPPKDQWCKPPREHFDLSMPAFLQIAQEKAGIVPISYRRVACAKQGGIRYTITGNKYFNMVTITNVGGAGDIAAVSVKGSKRVKWTEMKRNWGQVWQTGEDLTCESLTFRVMTSDHRKATSWHVLPADWKFGVTYQASKNF

SEQ ID NO: 55519 - protein, 303 aa, Glycine max
  Clone ID: UC-GMFLMINSOY087F02_FLI.pep
IMSPAFRGYYFVQKPVHCCSTISVYIILVHLGMRSLTLCLEILGAAAIDPDDPILSADDLADQIAEVLNYFGHSTVMCMGVTAGAYILTLFAMKYRHRVLGLVLVSPLCKAPSWTEWLYNKVMSNLLYFYGMCGVVKEILLKRYFSKEVRGSDYLSESDVVQACQRSLDERQSLNVWRFLEAINGRYDISEGLRKLQCRSLIFVGDMSPFHAEALHMTSKLDRRLSALVEVQACGSMVTEEQPHAMLIPMEYFLMGYGLYRPSKLSVSPRSPLSPSCISPELYSPESMGLKLKPIKTRISVEI

SEQ ID NO: 55520 - protein, 124 aa, Glycine max
  Clone ID: UC-GMFLMINSOY087G12_FLI.pep
NFSLNSIVICTLQNLELTKFLHMSNCSYGNGSRIKLQYTRKIIDAIHSGSLLNAEYKKTEIFGLEIPTEVEGVPSEILDPMNTVSYPRALYLFFFLSFDMVYLLTLEFLMYCSGQTKRPTRRHY

SEQ ID NO: 55521 - protein, 402 aa, Zea mays
  Clone ID: 700448429_FLI.pep
LAFPFLHRGGDGRLHHADAGVHSFRLGLNRFADLTNDEYRATYLGVRSRPQRERRLGDRYLAGDNEDLPESVDWRAKGAVAEIKDQGSCGSCWAFSTIAAVEGINQIVTGDMISLSEQELVDCDTSYNQGCNGGLMDYAFEFIINNGGIDTEEDYPYKGTDGRCDVNRKNAKVVAIDSYEDVPANSEKSLQKAVANQPVSVAIEAGGRAFQLYNSGIFTGTCGTALDHGVTAVGYGTENGKDYWIVKNSWGSSWGESGYVRMERNIKASSGKCGIAVEPSYPLKKGANPPNPGPTPPSPTPPPTVCDNYYSCPDSTTCCCIYEYGKYCFAWGCCPLEGATCCDDHYSCCPHDYPVCNVKQGTCLMGKDSPLSLSVKATKRTLAKPHWAFPGNTAADGMKSSA

SEQ ID NO: 55522 - protein, 354 aa, Glycine max
  Clone ID: UC-GMFLMINSOY090F11_FLI.pep
MNSGKGERSYANNSMLQRKLMIKGKHILEETITRFYSNYSPSCMKVADLGCSVGPNTLLVISNIIDIVDTTCTRLNQEPPTFQFYLNDLFGNDFNTTFKSLPDFYKRLDEDKGHKFGSCFINATPGSFHGRLFPNNSINLFHSANSLHWLSQDPLLEFTKEAESFNKGHCHIVSTSPPAVYQAYLKQFQQDFKFFLKSRSEELVPGGAMVLLFLGKNKTHRRTGWEIISLVLNDMLLEGLIEEEKLDSFNIPVYEPTVEEIRHVIQEEGSFFLQQLEILILPWDEGLNEGVDANIKAQFMAKVARAIMEPLLSAKFGREVIIEVFIRYEKKLAQLMEVEKLESTTFVISMTKNA

SEQ ID NO: 55523 - protein, 358 aa, Zea mays
  Clone ID: 700570069_FLI.pep
PPDQASENKKMKLSAAVLCALVAVQAAVLLATVPTAQASELEVGYYSKKCKGVENVVKWHVIKAIKANRRTGAALVRLIFHDCFVRGCDGSVLLDASYDNPHPEKEAPVNIGLAAFDVLEEIKAAVEKRCPGVVSCSDILIYAARDAASILSNGHVHFAVPAGRLDGFVSKAEEAQAELPDSTHDVQQLIDNFARKNFTVEELVILTGAHSIGQGHCSSFTGRLSEPPSQINPAYRDLLNYKCPQGSNPPVANNVRDEDYGVVARYMPGFTSRVRKIPDFLDNSFYHNNLAKIVTFHSDWTLLTNKEAFGHVVEYAENATLWDEDFSDSLLKLSKLPMPAGSTGEIRNKCSVVNHRLY

SEQ ID NO: 55524 - protein, 268 aa, Glycine max
  Clone ID: UC-GMFLMINSOY091F12_FLI.pep
GLEKAKQALMEMVILPTKRRDLFTGLRRPARGLLLFGPPGNGKTMLAKAVASESQATFFNVTAASLTSKWVGEAEKLVRTLFMVAISRQPSVIFIDEIDSIMSTRLANENDASRRLKSEFLIQFDGVTSNPDDIVIVIGATNKPQELDDAVLRRLVKRIYVPLPDENVRKLLLKHKLKGQAFSLPSRDLERLVKETERYSGSDLQALCEEAAMMPIRELGVDILTVKANQVRGLRYEDFKKAMTIIRPSLNKSKWEELERWNEEFGSN

SEQ ID NO: 55525 - protein, 167 aa, Zea mays
  Clone ID: 700615432_FLI.pep
QLTEKSDVYSFGVVLLEVLCARPVIDPTLPREMVNLAEWGMKWQKRGELHQIIDQRISGTIRPDSLRKFGETVEKCLADYGVERPSMGDVLWNLEYVLQLQDADSTVSDVNSMNRIVELPSQVQNVGALESISVTMAEAGASNEPDHDLSDVSMSRVFSQLIKAEGR

SEQ ID NO: 55526 - protein, 347 aa, Glycine max
  Clone ID: UC-GMFLMINSOY092A09_FLI.pep
SNEKTREPGRRKIGHLESTKVLGLLGGGQPNSSTVNSEKTVKTENATVAELPDLIDTGDSNDYHGTDDTLKGTSDQNIANLTSSTPLVDDLFGDFSASIGASQELKNDDPFADVSFHTNENKEHADDLFSGMTVGSNKQGDHESHRQGNITEPQLFDIFASNSEQGNHKEPVSDLMAGLSMDENTSSTKQKGTSPFMQSESLFSGLNNHIPDNTSGGMLSSQPMGFNVNPMFPTGPMPYNIQPGFMLNQPYSSQPLNYGAMGTLLAQQQFLATMANFQHLSNVNMQDDGVAQIAGPNGRSPLPDIFQPNFQTQTPSSMINTSRKEETKAFDFISDHMSSARDSRRMI

SEQ ID NO: 55527 - protein, 533 aa, Zea mays
  Clone ID: 700804649_FLI.pep
NIDPRTETTVLLLEKLVQLAVTPTQKQIAFHQLACIRLLRKEYSEAEHQFEVAFSAGHVYSIAGIARVAGIQGQKALAYEKLSSVITSNLPLGWMYLERSLYSEGDRKLADLDKASELDPTLTYPYMYRAASLMRKKDAKHALEEINRLLGFKLALECLELRICLYLALEDYKSAICDIHAILTLSPDYRMLEGRVAASKIGTLLGAHVEQWNTAECWLQLYERWSSVDDIGSLSVIYRMLESDAAKGVLYFRQSLLLLRLNCPEAAMRSLQLARHHAATEHERLVYEGWLLYDTGHYGEALQKAEESISIQRSFEAFFLKAYVLADSGVDPSYSATVISLLEDALKCPSDRLRKGQALNNLGGVYVDCGKLDSAADCYTSALKIRHTRAHQGLARVHFLRNNREAAYEEMTKLIEKAKNNASAYEKRSEYCEREQTMTDLQTVTQLDPLRVYPYRYRAAVLMDSHKENDAIAELSRAISFKADLHLLHLRAAFHEHIGDVPSALRDCRAALSLDPNHQEMLELQKRVNSQEP

SEQ ID NO: 55528 - protein, 824 aa, Glycine max
  Clone ID: UC-GMFLMINSOY093D09_FLI.pep
LTMVSISNLRHSSSLPINTKSQFLSPRPHTFLSGTHLRLPDKKQLSISDFRIRRHFFNRVLPVVSFKRRVEEDKEMTIKPVVRVSEGKLVVKERTILTGMPENVVETSTVEGMFIGVDLEKEDSRHVVSLGKLKDVRFMACFRFKLWWMAQKMGDRGRDIPLETQFLLMETKDGSHLESDNDKNKNQIVYTVFLPLLEGSFRACLQGDSDDQLQLCLESGDAETKTSSFTHALFVSAGIDPFATIHHAFRAVRNHLNTFRLRHEKKLPGIVDCFGWCTWDAFYQEVTQEGVEAGIKSLAGGGTPPKFVIIDDGWQSVGGDDDKQNSNSLQRLTGIKENGKFQKKEEPELGIKNMVEVAKKKHSVEQVYVWHAITGYWGGVRPGVKEMEEYGSVMKYPKVSSGVTENEPTWKVDPLAVQGLGLVNPKKVFTFYDHLHSYLASAGVDGVKVDVQCILETLGAGLGGRVELTRNYHQALDASISRNFPDNGCIACMSHNTDALYCSKQTAVVRASDDFYPRDPVSHTIHIASVAYNSVFLGEIMLPDWDMFHSLHPVAEYHASARAISGGPLYVSDAPGEHDFDLLRKLVLPDGSVLRARLPGRPTKDCLFTDPARDGVSLLKIWNMNKLGGVLGVYNCQGAAWSATERKNAFHHSTDSGAAVITGYVRGCDVHLIADAAADDDWNGDCALYSHYSGQLIVLPHNVALPVSLKVLEHEVYAVAPVKKVLGGGAGCSFAALGLVNMFNAGGAVEGLVYEQGLVRVEVKGCGKFGAYSSAKPTRCMLGNNEVVDFDYDADSGLLIFNIDHLPQEGHRVHLVELVYSLSS

SEQ ID NO: 55529 - protein, 68 aa, Zea mays
  Clone ID: LIB3060-021-G2_FLI.pep
APSPRSKNCRKKKCGHNNEVIKLCFHLPSKCSVSTPILLMFLDLLFYLNAYIVCRLDNQKNITPRLDH

SEQ ID NO: 55530 - protein, 174 aa, Glycine max
  Clone ID: UC-GMFLMINSOY095E02_FLI.pep
IVATQDTSYKIPQQEFIGVLELAACHMRPKQQAQVHTEENSPLQAVLDSCHKCQGKDFQHIQHQQCHNLHYTLDLDSQPLQQPVLFSLHWQSPHEASPSPEPSQPISSPSLDHVHSFLQIPSSHTQWQPLHTATLVSWPQHQPSAPEPVSRLRSCGPSPASWPAPVRTGPGGRR

SEQ ID NO: 55531 - protein, 319 aa, Zea mays
  Clone ID: LIB143-006-B11_FLI.pep
EIMKVADFINEIRQAGRNGELSGETFIFFNKQIKGNKREIIQLGVPLFQPTTEDANCHTEPIPLVLQAVIDHLVLWRLIPESRKPNSVVINFFDEDEHSQPYFKPPHLDNPICTLLLSETTMAFGRSLVTDSNGNYKGPLTLSLKQGSLLVMRGNSADMARHVVCPSSNRRVSITFARVRPSTPVDMSPLPSPTKAMTPWQPQPVTASQVPSPVSMTQKPPVSGAIIGYAPTPQAVLAPAAWGMAMRAPVMMVAAAPARPMVMASSGTGGGNISKRMGRSGTGVFLPWTVGPKRYNKHLPPRIQKRRFSAMMSPIEAQG

SEQ ID NO: 55532 - protein, 323 aa, Glycine max
  Clone ID: UC-GMFLMINSOY096E04_FLI.pep
VCMARITDIQKTIEPNFLSIDCVDAANFSCFSDGSPCVMGIDEAGRGPVLGPMVYSCAIVKADGLAKLDSIGVNDSKALTSAKRREIFAKMQELIASVDPKQILTYSLRIVHPRTISAQMQRRVKQSLNEISHLCAISLIEKAIQNGICISEVFVDLVGNKEEVYQTFLNERFPTLKITVSKKADAIFRIVGAASIVAKVTRDDKLAEWVFDEIGFIAPERGLGSGYPSDPITKHFIRTMVDPIFGYPSLVRFSWKTVERVLERKAIKYTWDSSSSLLDTSKQFTLTELWTKAKVTKHCQTKKKYRRHSFFTERGLSNTTELS

SEQ ID NO: 55533 - protein, 101 aa, Zea mays
  Clone ID: LIB143-040-F6_FLI.pep
RSDAHPTSVVDQAQAAEPAGICGRSGRWRRRRWPSSCCSSSSLRRRRRRWRRRACAGAGARASRGSACPTTTARRCACRKATAAATATASCASASASGSAS

SEQ ID NO: 55534 - protein, 297 aa, Glycine max
  Clone ID: UC-GMFLMINSOY097B09_FLI.pep
GCVKMRMSCNGCRVLRKGCSEDCSIRPCLQWIKNPESQANATVFLAKFYGRAGLMNLINAGPESLRPAIFRSLLYEACGRIVNPIYGSVGLLWSGSWQLCQAAVEAILKGEPITPITSEAAANGRAPPLKAYDIRHVSKDENSANETPKAKTRSRFNRTGSTLIKPKASKGTPTGFVPIEPVEPETANRTTSHESGLSHLSEAAVMVEGESKESESDVSVETSNLFHEEPESVAKTSDRTGESGNEIGLELTLGFEPVSRVHHVVPMKKRKIIASKSYGDSAEKDSCKMELGLEYPA

SEQ ID NO: 55535 - protein, 248 aa, Zea mays
  Clone ID: 700465264_FLI.pep
VLAEDNQYDIVKFCKNEGLVLLADEVYQENIYVDNKKFNSFKKIARSMGYGEDDLPLVSFQSVSKGYYGECGKRGGYMEITGFSAPVREQIYKVASVNLCSNITGQILASLVMNPPKVGDESYASYKAEKDGILQSLARRAKALEDAFNTLEGFSCNKAEGAMYLFPQIHLPHKAIEAAKAAKKAPDAFYALRLLESTGIVVVPGSGFGQVPGTWHVRCTILPQEDKIPAVITRFKAFHEAFMAEYRD

SEQ ID NO: 55536 - protein, 820 aa, Glycine max
  Clone ID: UC-GMFLMINSOY103A04_FLI.pep
NFRIQLSSICKDLVKTHLDILDLYEYYLHFSLAWLQKNSEALLYMLEPFLVAQSNDRNPYNIDIVNLKKLIPKIGQLLAQTSFMSNIQNLQLSERAEDKLVADIKHSIPDDERWKIIGTCLWQHMSRFMIFNLNLVLAKLEDGKLSGPFHRKYTYGESYLINMDSESISLPEKIRLVLFSLCDLLMTTVTHISSYHVKQQAEFLWQKVGNDLNVMTLQWLKQKSEFSQNQNLDILELGNMKDNYSVNQLLWDRCADPKLISDCFAQEKLNWPNDLDQMNTKGWNDLSIIMTGLHKTDDTCGDGCKLSTRSSNHEVGTPVKGTSLSGNASARSNQKDITYTNFAVFQSPREMYKRNGELLEALCINSTNQREAAVAGNRKGIMFFHWEDEIPFSGKSDDLLWATADWPQNGWAGSESTPAPTCVSPGVGLGSKKGAHLGLGGATIGVDSSAWPSNDLTGGGVLGMLGYTGIGASGLGWEIQQDFEDFVDPLATLENISTRALSSHPMRPFFLVGSSNTHIYLWEFNKDKATATYGVLPAANVPPPYALASISALQFDHFGHRFASAALDGTVCTWQLEVGGRSNVRPTESSLCFNGHASDVTYFSSSGSIIAVAGYSSNGVNVVIWDTLAPPTTSRASILCQGGAHTVSVFDNHVGSGSVSPLIVTGGKGGDVGLHDFRYIATGKAKRHKRADNIGQSSVSSLTRDKDQNVDGMLWYIPKAHSGSVTKVVTIPNTSLFLTGSTDGDVKLWDAQSTKLIHHWSKIHEKHTFLQPSSRGFGGVVRAAVTDIQVVPHGFLSCGGDGIVKLVRLDNHLRAHGIEL

SEQ ID NO: 55537 - protein, 408 aa, Zea mays
  Clone ID: 700444904_FLI.pep
RFRRHLSLVAAAGMAGVTATGMAGVPATFSSATAQIGGFLSKKPYAPPLWATHLSPMPCHTFSLGHFPTPIHKWNLPNLPEGTEVWIKRDDLSGMQLSGNKVRKLEFLMADAVAQGADCVITVGGIQSNHCRATAVAAKYLNLDCYLILRTSKLLVDKDPGLVGNLLVERLVGAHVDLVSKEEYGKIGSVALADLLKKRLLEEGRKPYVIPVGGSNSLGTWGYIEAIREIEQQIQQSSDVQFDDIVVACGSGGTIAGLALGSRLSSLNTKVHAFSVCDDPEYFYDYVQGLIDGLNSGFDSHDIVSMENAKGLGYAMNTAEELKFVKDIAASTGIVLDPVYSGKAVYGLLKDMAGNPAKWKGRKVLFIHTGGLLGLYDKADQLSSLAGSWRRMDLEDSVPRKDGTGKMF

SEQ ID NO: 55538 - protein, 677 aa, Glycine max
  Clone ID: UC-GMFLMINSOY106C11_FLI.pep
EMCTTEQLDKAMKIWTTFLEPMLGVPSRPQGPVDTEDVVKANKNNSAKTGTGIDDGDSSPATNPKNLNTNRNGDENFPSEQSNSCKQWQTSGDNKVKEDNHLDLERSAHKNETLGSSTQHGKVHINASTTDEVSRANKQDHSIERLVNANVSLTLGMELISRRTNVDNASGLTATPSRPGNISGEGGLGLPSLEGADSTRPVTSTNGAINEDTKVHRYHEEVGHFKSEREEGELSPNGGDFEEDNCEVYGHAGLEAVHKGKDGTICRQYQNRHGEEVRGEAGGENDADDEGEESPHRSMEDSENASENGDVSGTESADGEECSREHEENGDHEHDNKAESEGEAEGMTDANDVEGDGASLPYSERFLVTVKPLAKHVPPVLHDKQRTVRVFYGNDSFYVLFRLHQTLYERIQSAKVNSSSAEKKWRASNDTGSSDQYGRFMDALYNLLDGSSDSTKFEDECRAIIGTQSYVLFTLDKLIYKLVKQLQVVATEEMDNKLLQLYTYENSRKPGRFVDLVYHENARVLLHDENIYRIECSPAPTQLSSIQLMDYGYDKPEMTAVSMDPNFSAYLHNDFLSVVPDKKEKSGIYLKRNKRKYAISDEYSSQTLDGLQIINGLECKIACSSSKVSYVLDTEDFLHQTRRKRRTLYQSSSCHGQEKSPIICSSRAQRSCKLFSI

SEQ ID NO: 55539 - protein, 298 aa, Zea mays
  Clone ID: 700445687_FLI.pep
SLCEFYFMFHLYCLWIMQTIKNDDLEEIRELGSGTYGAVYHGKWRGCDVAVKRIKASCFVGRPSERERLIADFWKEALILSSLHHPNVVSFYGVVRDGPDGSLATVTEFMINGSLKQFLRKKDRTIDRRKRVILAMDAAFGMEYLHGKNIVHFDLKCENLLVNMRDPQRPICKIGDLGLSKVKQHTLVSGGVRGTLPWMAPELLSGKSNMVSDKIDVYSFGIVMWELLTGEEPYSGMRAAEIIGGIVNDSLRPQIPSWCDPEWKGLMESCWSSDPAERPSFTDISQRLRKMAAAMNVK

SEQ ID NO: 55540 - protein, 360 aa, Glycine max
  Clone ID: UC-GMFLMINSOY106E08_FLI.pep
KKKNHNTWVCSRIAVKLEKYSNMERYEILKDIGSGNFAVAKLVRDNYTNELFAVKFIERGQKIDEHVQREIMNHRSLKHPNIIRFKEVLLTPTHLAIVMEYASGGELFERICNAGRFSEDEARFFFQQLISGVSYCHSMQICHRDLKLENTLLDGSTAPRVKICDFGYSKSSVLHSQPKSTVGTPAYIAPEVLTRKEYDGKIADVWSCGVTLYVMLVGAYPFEDPADPRNFKKTIGKILSVQYSVPDYVRVSMECRHLLSQIFVASPEKRITIPEIKNHPWFLRNLPMELTEGGSWQMNDVNNPSQNVEEVLSIIQEARKSLNVPKVGGLLTGGSMDLDDFDADEDLEDLETSGEFVCPI

SEQ ID NO: 55541 - protein, 143 aa, Zea mays
  Clone ID: 700575293_FLI.pep
FFLFTLPAGPPPNGLDSEKSMCFSDSTLSKQPIAVHAAKKRLTLKDTTGVLLVKGEQVPCSITDPAQCILDPPKLTLAPQPILTDQLQFSIKTLLLIRTPWFLERLTIVAVEVDVHHGWCSFPHTLAFACVCSAAAASVWGRS

SEQ ID NO: 55542 - protein, 491 aa, Glycine max
  Clone ID: UC-GMFLMINSOY108E12_FLI.pep
FREMGGSKKRKRNEGQRGGTVYSENPPDFALLASLYPEFHPFLQFSHPHSRPTIDWTDFNATRQLTRVLLHHRHALTWWIPDGHLCPTVPNRCNYIHWLQHLLSSNIIRNTVSSDGKFRGFDIGTGASCIYPLLGASLHGWSFVGSDVTDVAIEWAERNVNSNPHISQLIEIRKVQDNASAPCVEVEESVTGDRITLCRSTDVEVAPLPLDLHSCKNRNYHGPPILVGVVRGDENFDFCMCNPPFFESLEEAGLNPKTSCGGTSREMVCPGGERAFITRIIEDSTQLTEQFRWFTSMIGKKSNLKYLTSKLWEVGVAIVKTTEFVQGRTSRWGLAWSFLTPIQKTPISLPNKKNTSFTLEGLQRQHGAINLLEAVNSYFSSHGLFCTLNTSSFTVDVAASKDDCDSILRNELHIINKSINCQPTQKTSNGSSLNLSSERLCFRISVFQQIPGTLLVKGSLQDRNCAVSGAFSVIFQKLEEALRNNFCTKSA

SEQ ID NO: 55543 - protein, 239 aa, Zea mays
  Clone ID: 700577465_FLI.pep
NLGRHRRWRGTGKKKILSTRGVLESRNGAHPGGLMKRRKVVEHIILLRAKPNISDAEEKDMLDYLYTSQYQMRGILAVSLGRIEDPNSDNFTHAVFMRFQQKQDIAEFQSNAYYSKVVDEHVKPVSYGSVSVDFESEVEDDIIPLFRRGEDFNYGVEFMLLVSFLKTASREATEDALASLDKLISQCSASIVQATCGKPNMISILVALLLLFFPKENLKERNCFYVLLFCTRLLFGSSG

SEQ ID NO: 55544 - protein, 730 aa, Glycine max
  Clone ID: UC-GMFLMINSOY109F02_FLI.pep
NPWNLYCVIDICSRSPLTEEARVRIDFSAHNNNNLICFLENNFAMANWRERDLFHIDEIDPVDASNGEDFDDSSSVDSATSDGSRTQVGLTERLTDILVDERDGDLLIQQTNREDRLLWWLQALDMQVMGACRADERLKPLLKMNASCGVAEDPLLAQLTQHFEPSEVGILARCFCVPLVSFRVGKINKEGTRFSPTSNRGNLTLVLLPSSDLRLSFIGDDGRTERLFTLTNKSQCSAVVVDEIPTDSSGRSFLVRTPDSRAFYFWCSEKSKLLGIELLGKMKDLLKRKPSIVELSGISKSRLDCFATQLRAFLVGTTGGSSHDSSVCASTSANSMSCSNVASESSHPSSSKFPRSRNIGGQTAKGDTTLYQSILSPRSSSFKEVPPRNLSSHRIAAREKIKRRGDNHQPTVDTLTNDSTHILDLSSTSDHDKASEVTKTLAFSPSFLGSLGKLGGVPSSLGLSGEVPPIVSPIFSPYYCWCPPGISTCPSIAAVTQSPNSSIETLPFPSGASLLANPLSVNLLDPVQPLGTSMDFPPFLPDPLVRMSLPTSQQIPTFTPLMCDPIVHVPVIDVCSSGQGYLVSAGPAMSPSIPPLHPNLVKPLIPESDAVVKGARETLRLLLSGSSQGNQQMMRDTLPAILTNPDENQNNILVAGSRGLYTGTRDINAIANSIAAMGLVSLSGVSKVDSGVYSELCENYGNLEAVKNSNDSGGGAFLDDEGGSSLDSKQ

SEQ ID NO: 55545 - protein, 218 aa, Zea mays
  Clone ID: 700479671_FLI.pep
SYRGDRDSTAAYVAAATAFKGHMPPRRQWFKEVARAVRSSVVLLSRPLRLVDAVLCCILDVAGLGRQPRLGVVQLVGARRVLARQVLVHPGEHGQRSDAEAAGGDEPGRHERQRDGGRHQHRAEDHQHGGGHRERDHGAGQDQPGQHQHRPAEGRGRRGLERRHHGALLLLLLRLAVHAAPALEVAVAPATSRRTPVVISHGRLAERARYPTCARCPE

SEQ ID NO: 55546 - protein, 276 aa, Glycine max
  Clone ID: UC-GMFLMINSOY111A06_FLI.pep
ASTRKMGSFIGHILPGTLFLLVGTWHIWGSVMRYVSNPKTFRVQVWNPVPGFNGRLKHLELYVISIGAFIDLCVELLLATRLRFFVGGALNTTYFNNFEHSGMLLMFLIFGVVALLSEKTRRLPLPENALCLIAAAAFCAEYLLFYFHSTTHKGLEGYYHVLLAFLIGLCIISSVSGALLPTSFPVDLCNGIAIALQGIWFYQTAFVLYGPMLPSGCKLRDSNITCHPKESEVRGELFANAQLFVAVLAVLVGTVASYGFAASRYGNCEELASNAS

SEQ ID NO: 55547 - protein, 418 aa, Zea mays; identical to SEQ ID NO: 47294
  Clone ID: 701159674_FLI.pep

SEQ ID NO: 55548 - protein, 231 aa, Glycine max
  Clone ID: UC-GMFLMINSOY112A08_FLI.pep
TVPITYQIHRLRDGKSFASRKVDGIQKGNVIFTLMASFQKEESGMVHQEVAIPSVPAPDKLLPMEELRERRLTDPRLPITYRNKVATSQFIPWPIEIRLCEYETATNMTKSPPSLRYWFRAKGKLSDDQALHRCVVAYASDLIFLQVSLNPHREKGFRTRSVSLDHSMWFHRSVKADDWVLFAIFTPSAHSARVFVTGQMFNQKGELLVSLVQEGLARKINPGNSAIKSML

SEQ ID NO: 55549 - protein, 869 aa, Zea mays
  Clone ID: LIB3245-406-B3_FLI.pep
PDAIDASEQAEASTGQASSARKLGRNIRKSEMPPLNEEDLVPGASFTGKVMSIKPFGVFVDIGAFTEGLVHISRVSDGFVKDISSLFTVGQEVSVRLLEANKETKRISLTMREGDDYVKPQKEMPKAANGGRSATATPKSSPRQTRERQELKETLESKYVPGQSLNGTVKSTTRAGTFVTLPDGSEGFLPREEEALALFTLIGQSAMEIGKQIRVKVLNVAQGQATLTMKGVEDDEDDLKTLNMELKRDWSRGTNAFELAFRRNKEISAFLDQRERTKVPADTSVSAPEAESYQEEAAPEDEESSEELSSVSEVATDVSPPVSDASSQVGIQDSTSAEDQTVGSESSPTISVELSSNGTPDSSIVSSVSETADKPTEPEESSAVEEVLVTASSEAGKEPAADTEAVPALSEKTGAEVAAAAGVAQASTTTATISPTLVKQLREATGAGMMDCKKALAETGGDIDKAQEFLRKKGLAAADKRAGRATAEGRVGSYIHDSRIGVLIEVNCETDFVSRGDIFKELVDDLAMQVAACPQVQYISIDDVPEEVVKKETELEMQREDLLSKPEQIRAKIVEGRVKKRLGEFALFEQPFIKNDKVTISEWLKQTIATTGENMKVRRFARYNLGEGLEKKSQDFAAEVAAQTAAKPPPSAPPKEDKPAETTESAEKKPAVAVSASLVKQLRDETGAGMMDCKKALAESDGDLQKAQEFLRKKGLSSADKKSSRLAAEGLIGSYIHDSRIGCMIEVNSETDFVARNDKFRELVNDLAMQVVACPQVDYVSVDDIPESVVGKEKEIEMQREDLQSKPESIREKIVEGRIAKRLGVMALLEQPYIKDDSKTVKDLVKETVASLGENIKVRRFVRYTLGED

SEQ ID NO: 55550 - protein, 416 aa, Glycine max
  Clone ID: UC-GMFLMINSOY112F04_FLI.pep
QYLCSSKKYFFILLAKLYPQFSLSGAGGRDDQTNRRALHYYRIITQTLVPKIKKEKKNQITNLSLRCEIQFPSIKFSNPNSIPNSASCSEIDSVSLQGKISLHDMSDERAVHPDCRNASNPYHECSDYCFRVIAEAKIRSQQQESVGQASGGNNSKQAIPDESYVEKEIHNGRPDLEENSDSDPDQPAVQEAEQEVDYTKLSARQKKWMELRSKMQEAKKRNQIEIAAEKKRMEAPTESRGVSKQKWLEDRKKKIGKLLDANGLDMTKAYMLDTQEAAEEKYKKWEKDPAPFGWDVFNQKTLYNAYKKRTKNVEVDVEEYNRMKEADPEFYRDASSLQYGKAPKISEEKIDRMVRELKDRDEKRNSFSRRRRFHEEKDIDSINDRNEHFNKKIERAFGKYTLEIKNNLERGTALPD

SEQ ID NO: 55551 - protein, 174 aa, Zea mays
  Clone ID: LIB3245-525-C3_FLI.pep
GLPEAQPRLRHGGAGCRLRRFAPPGAAGVAARAGLLQRPRHQPQGAGEGERRRVQEGVPGRLRLRGGAVRLRHRRRRRLLLPAVGGAVAGDVAAGGGALQLHHASQGAGHAASVTVSQILVGLDHSQGQGHTQPHRAVHHFYIISLLSSNFFCISLQSKHLLIHRCQNEVLFFF

SEQ ID NO: 55552 - protein, 1230 aa, Glycine max
  Clone ID: UC-GMFLMINSOY113F07_FLI.pep
YSFSFIHSTPFPTMALELVGGALLSAFLQVAFEKLASPQVLDFFRGRKLDQKLLNNLEIKLNSIQALANDAELKQFRDPLVRNWLLKVKDAVFDAEDILDEIQHEISKCQVEAEAEAESQTCTCKVPNFFKSSPASSFNREIKSRMEEILDRLDLLSSQKDDLGLKNSSGVGVGSELGSAVPQISQSTSSVVESDIYGRDKDKKMIFDWLTSDNGNPNQPSILSIVGMGGMGKTTLAQHVFNDPRIEEARFDVKAWVCVSDDFDAFRVTRTILEAITKSTDDSRDLEMVHGRLKEKLTGKRFLLVLDDVWNENRLKWEAVLKHLGFGAQGSRIIATTRSKEVASTMRSKEHLLEQLQEDHCWKLFAKHAFQDDNIQPNPDCKEIGMKIVEKCKGLPLALKTMGSLLHNKSSVTEWKSILQSEIWEFSTERSDIVPALALSYHHLPSHLKRCFAYCALFPKDYEFDKECLIQLWMAEKFLQCSQQGKSPGEVGEQYFNDLLSRCFFQQSSNTERTDFVMHDLLNDLARFICGDICFRLDGNQTKGTPKATRHFLIDVKCFDGFGTLCDTKKLRTYMPTSYKYWDCEMSIHELFSKFNYLRVLSLFDCHDLREVPDSVGNLKYLRSLDLSNTKIEKLPESICSLYNLQILKLNGCRHLKELPSNLHKLTDLHRLELIETGVRKVPAHLGKLEYLQVLMSSFNVGKSREFSIQQLGELNLHGSLSIRQLQNVENPSDALAVDLKNKTHLVEVELEWDSDWNPDDSTKERDVIENLQPSKHLEKLRMRNYGGTQFPRWLFNNSSCSVVSLTLKNCKYCLCLPPLGLLPSLKELSIKGLDGIVSINADFFGSSSCSFTSLKSLEFYHMKEWEEWECKGVTGAFPRLQRLSIERCPKLKGHLPEQLCHLNSLKISGCEQLVPSALSAPDIHKLYLGDCGELQIDHGTTLKELTIEGHNVEAALFEEIGRNYSCSNNNIPMHSCYDFLVSLRIKGGCDSLTTFPLDMFTILRELCIWKCPNLRRISQGQAHNHLQTLDIKECPQLESLPEGMHVLLPSLDSLCIDDCPKVEMFPEGGLPSNLKEMGLFGGSYKLISLLKSALGGNHSLERLVIGKVDFECLPEEGVLPHSLVSLQINSCGDLKRLDYKGICHLSSLKELSLEDCPRLQCLPEEGLPKSISTLWIWGDCQLLKERCREPEGEDWPKIAHFCPLLNQRCREPGGEDWPKIADIENVYIR

SEQ ID NO: 55553 - protein, 301 aa, Zea mays
  Clone ID: 700047678_FLI.pep
RRPPRAPAPGALPRRARHVAGDAAAPRGAGPARAAAARAEQPHVHGPHERDPPPGHAGARGRHERLVRGHGAHGEAPARLRPRRPRLAQADADAGQRRGRRRGLSRGGGAHRVRRPVGEGARPRALRGRAQVDQELRGRGPRHPRAPERRAAGGAAREAVLPRAGPQVPDAAAGREELLRLVPARGHVGVALGEAGARCGQRGGAAQGRDRGLPEDGGGRDAEACQGHRRHEDGHGHGRAGEAACRVPVDGRVLGVACELAGGRVQGSTAEQHAGVAARSSLRLQFVFLVFRTYTYNTEYK

SEQ ID NO: 55554 - protein, 603 aa, Glycine max
  Clone ID: UC-GMFLMINSOY115D06_FLI.pep
QMQVPVGGRVPTWFSRRRLLEEKLCDLHKCTNLDSVNQIHAQVLKANLHQDLFVAPKLIAAFSLCRHLASAVNVFNHVPHPNVHLYNSIIRAHAHNSSHRSLPFNAFFQMQKNGLFPDNFTYPFLLKACSGPSSLPLVRMIHAHVEKIGFYGDIFVPNSLIDSYSRCGNAGLDGAMSLFLAMEERDVVTWNSMIGGLVRCGELQGACKLFDEMPDRDMVSWNTMLDGYAKAGEMDTAFELFERMPWRNIVSWSTMVCGYSKGGDMDMARMLFDRCPVKNVVLWTTIIAGYAEKGLAREATELYGKMEEAGMRPDDGFLLSILAACAESGMLGLGKRIHASMRRWRFRCGAKVLNAFIDMYAKCGCLDAAFDVFSGMMAKKDVVSWNSMIQGFAMHGHGEKALELFSWMVQEGFEPDTYTFVGLLCACTHAGLVNEGRKYFYSMEKVYGIVPQVEHYGCMMDLLGRGGHLKEAFMLLRSMPMEPNAIILGTLLNACRMHNDVDLARAVCEQLFKLEPSDPGNYSLLSNIYAQAGDWMNVANVRLQMKNTGGEKPSGASSIEVEEEVHEFTVFDQSHPKSDDIYQMIDRLVQDLRQVGYVPMIHQ

SEQ ID NO: 55555 - protein, 204 aa, Zea mays
  Clone ID: LIB3245-490-B4_FLI.pep
PVLGRKMFSGTQQKCKVCTKTVYPMDQLSTDGVVFHRSCFKCQHCKSTLSLSNYSSFEGVPYCKTHFEQLFKETGSYNKSFQSQSPAKITPEKLAPELTRSPSKAARMFSGTQDKCATCGKTAYPLEKVTVEEKSYHKSCFKCSHGGCAITPSNYAALEGILYCKHHFSQLFKEKGSYNPLIKCASVKRAAEAQPEQPASDSSS

SEQ ID NO: 55556 - protein, 450 aa, Glycine max
  Clone ID: UC-GMFLMINSOY117F06_FLI.pep
SVFHFLFFILMMGEKSNSNSGDAINSTLLHGKYELGRLLGHGSFAKVYHARHLNTGKSVAMKVVGKEKVVKVGMMEQIKREISAMNMVKHPNIVQLHEVMASKSKIYIAMELVRGGELFNKIARGRLREETARLYFQQLISAVDFCHSRGVFHRDLKPENLLLDDDGNLKVTDFGLSTFSEHLRHDGLLHTTCGTPAYVAPEVIGKRGYDGAKADIWSCGVILYVLLAGFLPFQDENLVALYKKIYRGDFKCPPWFSSEARRLITKLLDPNPNTRITISKIMDSSWFKKPVPKNLVGKKREELNLEEKIKHQEQEVSTTMNAFHIISLSEGFDLSPLFEEKKREEKELRFATTRPASSVISRLEDLAKAVKFDVKKSETKVRLQGQENGRKGKLAIAADLYAVTPSFLVVEVKKDNGDTLEYNQFCSKELRPALKDIVWRTSPAENPTLA

SEQ ID NO: 55557 - protein, 208 aa, Zea mays
  Clone ID: LIB3595-011-D5_FLI.pep
DTLQWFADLAVLNINDLAEQAELQACTNDSSNYESDSFESLTLKLEETKIDDLWSRPLEPETATDEQTVSAAHLLTKPRRGQQRRRRQKRDFQRDVLPGLSSLSRPEITEDVQLLEGLVQASGGSWESSLTRRGRCGGRARGRKPRKTVVTVIVEEEEEEEVEVSPPPKPAGTGELEADGRGMIGWGRTTRRCRRARCPSGNSMATAS

SEQ ID NO: 55558 - protein, 657 aa, Glycine max
  Clone ID: UC-GMFLMINSOY119A11_FLI.pep
RYINPFVFLMDARHWKCNLCYRANEMPEDFAWDPQTKTFGDPSRRPELQETTIEYIAPSEYMLRPPQPPIYLFVFDVGSAAIDCGYLNTFAEQLSLDIDKLPGQERAFIGFIGFDSALHFFQFDENEREPRHIIEFDVEESFAPVFSGLFVELNVFKEIIKKFIYNIPSIFERSMSSSNCLGSALTVAKNLINEIGGRITVFTASMPNLGIGALKCLEFNTAKKIAFTPQIDFYKSLALECTGKQIAIDLFVVGCQNVDLRTLSDMSRFSSGTVYHFPEYHFLRDQVEVKRFQMILRRYFIRKLGLEAVLRIRCSRGLSLHTFYGNFFVRSTDLLALPNVSPDSAMGVQIKHDEVITASQVCFQAALLYTSTKGDRRIRVHTLCLPVLTQAAHVFSSLDINSSISLLSKMASDRALQGASLSDCREALINAIVDPTVCYQRSHGQVGSMLRMPPEGGLQYMPIYILGLLKNRAFSDSLQRVTIDERVATFLLFKNAPLEVLLLELCPALYAFHQILYCEPNQDGQVPFPDRLPPTYEHISQNGIYLLDIGTFVYVYVGSALNVCILRSLFGTDSFAKLDSDSTVIEIDTPQSKHLHAFLRHLQEQRGNMYAPAKIIKDDSPRREAFTRRLIQDRSDSSHSYNEFMQFLQREVSKASK

SEQ ID NO: 55559 - protein, 299 aa, Zea mays
  Clone ID: LIB3587-206-E7_FLI.pep
YRCLDRIAGEPFLYWYGAQARICIFDYELARQILSSKSGHFVKNDAHPTLLALVGKGLGFMEGSDWVRHRRVINPAFTIDKLKIVTETMLDFADSMAGELEAEASQNENGETQVDIYKHFSDLTVDNIAYAIFGSSYKLGKQVFEAQTELLGITMATFLDVPIPGSKYLPTQANRRKWMLETKLKSLLTRIIQPRLASGEHGNDLLGVMLDSCTETKQGGKQQQVDRLRLSLSMEEIIHECKLFFFAGHENTALLLTWSVYLLSIYPEWQERLRKEVLREFGREAPNPNALNRLKEARN

SEQ ID NO: 55560 - protein, 614 aa, Glycine max
  Clone ID: UC-GMFLMINSOY120H07_FLI.pep
NFLVFLMDSKTSSRALPKHHQKTAGIQTLEAKDTGSSLQKGEKTELAAPVDLSMYAANASKQNTGETAEIKKLGGLTLKGSADSMSIKSGSGASSSVLDKVVHAANENIGSQESSIDLDKKTSEDGSVKNSSVSAKVSDGASSLAKTSGSAKISNRADFVESGKSSICRGSTSSDVSDESTCSSFSSSINKPHKANDLRWEAIQAVRSRDGVLGLGHFRLLKRLGCGDIGSVYLSELSGTKCYFAMKVMDKGSLASRKKLLRAQTEREILQSLDHPFLPTLYTHFETEKFSCLVMEFCPGGDLHTLRQKQPGKHFPEQAVKFYVAEVLLALEYLHMLGIVYRDLKPENVLVRDDGHIMLSDFDLSLRCAVSPTLVKTSSTDSEPLRKNAVYCVQPACIEPPSCIQPSCVAPTTCFSPRLFSSKSKKDRKPKNEIGNQVSPLPELIAEPTDARSMSFVGTHEYLAPEIIKGEGHGSAVDWWTFGIFLYELLFGKTPFKGSGNRATLFNVVGQPLRFPEAPVVSFAARDLIRGLLVKEPQHRLAYKRGATEIKQHPFFEGVNWALIRCATPPEIPKAVEFEKIPSPASSSGGEKAVNHMSIANQKGSDNYLEFDFF

SEQ ID NO: 55561 - protein, 132 aa, Zea mays
  Clone ID: LIB3689-255-C5_FLI.pep
SSQVPCLKTCMYRFPIKRQFAISFRAAEGSPDLQTIPLVWYAYQYMYNPNQNLQCGVYPHNWKKAPSFTSVALIWERPCQLHMIKGSFQAIALNSRIASSKTTSVCLGRIRFDLVLDECPKLLLEFGLRTLL

SEQ ID NO: 55562 - protein, 348 aa, Zea mays
  Clone ID: 700104953_FLI.pep
TAEAIEKILTHNSKGINYQILSNPEFLAEGTAIEDLFKPDRVLIGGRETPEGRKAVQALKDVYAHWVPEDRILTTNLWSAELSKLAANAFLAQRISSVNAISALCEATGANVTEVAYAVGKDTRIGPKFLNASVGFGGSCFQKDILNLVYICECNGLPEVANYWKQVIKINDYQKSRFVNRVVSSMFNTVAGKKIAVLGFAFKKDTGDTRETPAIDVCKGLLGDKAQISIYDPQVTEDQIQRDLAMNKFDWDHPMHLQPTSPTAVKQVSCVWDAYEATKGAHGLCILTEWDEFKTLDYQKIFDNMQKPAFVFDGRNIVDSEKLREIGFIVYSIGKPLDAWLKDMPAVA

SEQ ID NO: 55563 - protein, 245 aa, Zea mays
  Clone ID: LIB3591-120-A11_FLI.pep
SHPFRLPTQTAHELTATSHVPHPLVHVLLLPMSPPLELDYIGLSPPAAAAAAENDELKGTELRLGLPGSGSPDRRVVAATATTLDLLPAKGAKRGFSDEAPPPSPVATAGKGKKVAEEEYDEKKVAATPQPAAKAQVVGWPPVCNYRKNTMTTTQLEGSKEDGDAKQGQGFLYVKVSMDGAPYLRKIDLKTYKNYKDLSTALEKMFSGFSTGKDGSSEYRKDGEYVLTYEDKDGDWMLVGDVPWE

SEQ ID NO: 55564 - protein, 254 aa, Zea mays
  Clone ID: 700333356_FLI.pep
KLLGQGTFAKVYHARNTATSESVAIKVIDKEKVMKVGLIDQIQREISVMKLVRHPNIVQLYEVMATKTKIYFVLEHVKGGELFNKIQRGRLKEDAARKYFQQLICAVDFCHSRGVYHRDLKPENLLLDENSNLKVSDFGLSALAECHRQDGLLHTTCGTPAYVAPEVINRKGYDGAKADIWSCGVILFVLLAGYLPFHDKNLMDMYKKIEKADFKCPSWFSTDVRRLLQRILDPNPSRRISVEKIMENPGLGRV

SEQ ID NO: 55565 - protein, 109 aa, Zea mays; identical to SEQ ID NO: 38489
  Clone ID: LIB3245-365-E12_FLI.pep

SEQ ID NO: 55566 - protein, 289 aa, Brassica napus
  Clone ID: LIB3034-056-G3_FLI.pep
DSSSCFFSPIPRFLTLRIATTTALRSAATFTLRRSPSHRSLTPSLAVMFPDNSVLSDVCASGITSVVAVSCLGFWGEIGKRGFFDQKLIRKLVHINIGLVFMLCWPLFSSGRQGALLASLVPGLNIVRMLLLGLGVYQDEGTIKSMSRHGDRRELLKGPLYYALSITSACFFYWKTSPIAIAVICNLCAGDGMADIVGRRLGTEKLPYNRNKSLAGSIGMAIAGFLASVGYMYYFSSFGYMESTGWDMILRFLVISIASALIESLPISTDIDDNLTIPLTSALVGTLLF

SEQ ID NO: 55567 - protein, 249 aa, Gossypium hirsutum
  Clone ID: LIB3165-024-B12_FLI.pep
TILFVAVGKMLYENSLVSDLFAAVVCCGVIFAFLLLWQVTAKCGVDQKLNRKLVHISIGLVFMLCWPLFSAGYRGAILAAITPGVNIIRMLLIGSGIWKDEATVKSMSRYGNYRELLKGPLYYAITVTLACVVYWRTSPIGIAALCNLCAGDGLADVVGRRLGRKKLPYNRNKSVAGSVAMATAGFLSSVGYMYYFSYFGYIQEGWGMILRFLVVSLASALVESLPISTELDDNLTVSLTSIFIGSLIF

SEQ ID NO: 55568 - protein, 273 aa, Glycine max
  Clone ID: LIB3138-021-B8_FLI.pep
EEPGYQSEKKRRLSVDQVKALEKNFEVENKLEPERKVKLAQELGLQPRQVAVWFQNRRARWKTKQLERDYGVLKANYDALKLNFDTLDQDNEALRKQVKELKSRLLQEENTGGSGVSVKEEIITRPADSEDKTMEQSKSDPSSETSNINPSSESEEDHLNYECFNNNDDCVGGTAASLLQVDFKDGSSDSDGSSAILNEDNMYSPLKFNNCSISTSPSSSSMMNCFQFQKPYHHHAQYVKMEEHNFLSADEACNFFSDEQAPTLQWYCPEQWS

SEQ ID NO: 55569 - protein, 273 aa, Zea mays
  Clone ID: LIB3959-021-H7_FLI.pep
QGRERIPICVINTIDDMKPAPFKYITEVIYPDWYEKEPPKGCNCTNGCSDSITCACAVKNGGEIMFNFNGAIVEARPLIYECGPSCRCPPTCHNRVSQHGVKIPLEIFKTGKTGWGVRSLSSISSGSFICEYTGELLEDEEAEKRENDEYLFDIGHNYHDKELWEGLKSVVGLGSATSSSETMEGFTIDASECGNVGRFINHSCSPNLYAQNVLWDHDDMRMPHVMFFAVENIPPLQELTYHYNYKIGEVYINGEEKVKHCYCGASDCCGRLY

SEQ ID NO: 55570 - protein, 85 aa, Glycine max
  Clone ID: 700657802_FLI.pep
AGTKTAVIEELFIPGTVYYLKRNLGSQIDAGKDFFTLYKREPGEHFQKVIFSGNFITDHRCDSHYYALRDVLKGVPWCGKEGIFK

SEQ ID NO: 55571 - protein, 326 aa, Glycine max
  Clone ID: 700731980_FLI.pep
DPRLLFTFRWFCLCSSESDDRRICWGRVSIFQILSLIHLGEEDGKKVNNLLEMNRGEGANDGFSGPGPNDSLLPGLIDDVALNCLAWVSGSDYAALSCINKRFNKLINSGYLYGLRKQLGAVEHLVYMVCDPRGWVAFDPKINRWMSLPKIPCDECFNHADKESLAVGCELLVFGRELMEFAIWKYSMICRGWVKCQEMNQPRCLFGSSSLGSIAIVAGGSDKYGNVLKSAELYDSSTGMWELLPNMHTSRRLCSGFFMDGKFYVIGGMSSTTVSLSCGEEYDLKTRSWRKIEGMYPYVNVGVQAPPLVAVVDNQLYAVEHLTNMV

SEQ ID NO: 55572 - protein, 182 aa, Zea mays
  Clone ID: LIB84-002-C8_FLI.pep
VHRQGHPAREGNVPGGAAHQRRPLHRQPGDAGHLQPARRVVPLQPPGLPHRREPAAAGRRGRPRARLPPRGALRAHGPAPQHARARPGRRARRRRPRRHPQRLPHHVRRRLLQRGGPVHGALAHAHRQEEGGRQAADLRRLGQVHRGILLRRHLRRALGLLSPLRARPPLLLQVDIIEDAYT

SEQ ID NO: 55573 - protein, 326 aa, Glycine max
  Clone ID: 700735533_FLI.pep
MLSKPSSAMPTFPSSMVRSGLCVWPNVRQLCFRKGILYGFMRLFSTPLKTLRGASRSLRVAQFCSVANMSSSLQIELVPCLKDNYAYLLHDVDTGTVGVVDPSEAVPVIDALSRKNRNLTYILNTHHHHDHTGGNVELKARYGAKVIGSGTDKKRIPGIDIHLNDGDKWMFAGHEVRVMDTPGHTQGHISFYFPGSGAIFTGDTLFSLSCGKLFEGTPQQMLSSLKKIMSLPDNTNIYCGHEYTLNNTKFALSIEPENEELQSYAAQVAYLRSKGLPTIPTTLKMEKACNPFLRTSSAAIRQSLNIAATANDAEALGGIRQAKDNF

SEQ ID NO: 55574 - protein, 416 aa, Glycine max
  Clone ID: 700839152_FLI.pep
LLSEDDPSFPHLKSGLLILTTHRLLWLPDSAASAGGTAGAIPLAAVSHIFSPKMSLRKVFASPRVRFQVSLSPEGRVSAAGSRSVVATAVVRGKGDCDAFLAKFTENCRARAWQEAESGSSSGSNSAVMAATATSSSSGGIYSSDGTVRMVGVSGILRKEQEMWESTDRSLQEAFQDLNALMSKAKEMVMLAEKMRLKLLSGSNSQTNATNDEEMGSKEEMQDWLLSVGIISPVTKESAGALYHQQLSRQLADFVKVPLEKAGGIINLIDIYCLFNRARGTELISPDDLLQACSLWEKFDVQVVLRKFDSGVMVIQTKSHSDEEVFNKVKMLVLKPDALRAGISASDAARTLGVAPAMAKEHLLSAESKGLLCRDISPDGFRFYINLFVEIDRDYMYLVKDQGIYASWVQANDTHA

SEQ ID NO: 55575 - protein, 634 aa, Glycine max
  Clone ID: 700851869_FLI.pep
NPSGILQFGLMGSDICVVNGSCTHEWRKGWPLRSGGFAQLCCKCGFMEEWKGDILDRLSAYENSVFCNKFHRQQTGWRECNFCNKPIHSGCIVSRSLFGYLDFGGIGCVSCVNTTQLSMMRNTENPNVSVSSIKNNASDRHSAHFDGRLLVGGVDEGKLMQFCKIIEASESSHWNHAQSDGIIAHHGQNNQEAKCSFREGDIGFSNPSFSMYLGNASGNDSVPPSAGEAVEGRLEGKTSPPFQRSRPICPKPLKSGLTMNVETDKGAISQSRVARPPADGRGKNQLLPRYWPRITDQELERLAGDLKSTVVPLFEKVLSASDAGRIGRLVLPKACAEAYFPPISQSEGVPLRMQDVKGNEWTFQFRFWPNNNSRMYVLEGVTPCIQAMQLCAGDTVTFSRIDPGGKLVMGFRKASNSTDTQDASTSAQSNSAKGTISSGTENLPSGSNHANLLHSLTGNVETHLNGHTEHLHLGTGTAGLLKTENNEMTNSSSPQQQISVLEKKRTRNIGPKSKRLLIDNEDAMELKLTWEEAQDLLRPPPSVKPNIVTIEDQVFEEYDEPPVFGKRTIFSACSSGGKEQWAQCDDCSKWRKLPVDALLPPKWTCSENVWDSSRCSCSVPEELSSKELENLLKT

SEQ ID NO: 55576 - protein, 237 aa, Zea mays
  Clone ID: 700170928_FLI.pep
HNNDMGSTTKDVVTKPSTNNERVMLPSAIKANGYTSTFHPVQQWMVPDNATAGKAKADEVANNAGRNSHPGDVQSNLTQQHRPTLHYVHFENSGSGALQCGSSNVFDPPLEGQATNNYGVKAGSNSGSNKGQNNGSTAGASTAAANAGRTDTEIRAIDKSGPGGGSGSGNDTYVRRLAASMTPRQEQLKKYREKKKDRNFGKKVRYQSRKRLADQRPRVRGQFVKQAVQNQEGDGER

SEQ ID NO: 55577 - protein, 253 aa, Zea mays
  Clone ID: 700217877_FLI.pep
EDPCIRLLSYCKKHRQPSAAERPSLESDPPEPIQVVQTDMASSSGCARTEPYNLHRRRGQKQPQVVATASLKRLYVENRPHIVSGYCQNRVGNTCGESIQPFGLSDAVQQEAIGNVSSMVEKYTIVKATFRKRLTFGKSKIHGYGVFAKVAHKAGDMMVEYIGEIVRPPISDTRERRIYNSLVGAGTYMFRIDDERVIDATRVGSIARLINHSCEPNCYSRAITILGDEHIIIFAKRDIDPWEELTYDYRSEG

SEQ ID NO: 55578 - protein, 215 aa, Glycine max
  Clone ID: 700856117_FLI.pep
RRQGNLLAMATLSNSTNIFWQDCQVGRLERQKLLNQKGCVVWITGLSGSGKSTLACSLSRELHSKGKLSYVLDGDNLRHGLNKDLGFKAEDRAENIRRTGEVAKLFADAGLICVASLISPYRRDRDTCRAMLPDANFIEVFMNMPLELCEARDPKGLYKLARAGKIKGFTGIDDPYEPPINCEIEIKQENGDCPTPTLMAGQVVTYLENKGFLES

SEQ ID NO: 55579 - protein, 659 aa, Glycine max
  Clone ID: 700987170_FLI.pep
AQNLEPSLALILHQNIPMKVQFSIVALVLLGSTLCLSGLIVADLNSDQQALLEFASSVPHAPRLNWKKDSVSICTSWVGVTCNSNGTRVVGLHLPGMGLIGTIPENSIGKLDALRVLSLHSNGLIGSLPSNILSIPSLQFAYLQHNGFSGIIPSPVTPKLMALDISFNNFSGSIPPAFQNLRRLTWLYLQNNSISGAIPDFNLPSLKHLNLSNNNLNGSIPNSIKTFPYTSFVGNSLLCGPPLNHCSTISPSPSPATDYQPLTPPTTQNQNATHHKKNFGLATILALVIGVIAFISLIVVVICVFCLKKKKNSKSSGILKGKASCAGKTEVSKSFGSGVQGAEKNKLFFFEGSSHSFDLEDLLKASAEVLGKGSYGTAYKAVLEEGTTVVVKRLKEVVVGKKEFEQQLEIVGRVGSHPNVMPLRAYYYSKDEKLLVYNYMPGGSLFFLLHGNRGAGRTPLDWDSRVKILLGAAKGIAFIHSEGGPKFAHGNIKSTNVLINQELDGCISDVGLPPLMNTPATMSRANGYRAPEVTDSKKITHKSDVYSFGVLLLEMLTGKTPLRYPGYEDVVDLPRWVRSVVREEWTAEVFDEELLRGQYVEEEMVQMLQIALACVAKGPDQRPRMDQVVRMLEEIKHPELKNYHRQSSESESNVQTPTP

SEQ ID NO: 55580 - protein, 479 aa, Zea mays
  Clone ID: 700354935_FLI.pep
PQTLIGDPGRIRQIITNLVGNSIKFTEKGHIYLTVHVVEEIMHCLEVETGTQYTNTLSGYPVANRKRSWENFRLFSRELNSSEMPFAPIASDSISLMISVEDTGAGIPFDAQSRVFTPFMQVGPSIARIHGGTGIGLSISKCLVGLMKGEIGFASKPQVGSTFTFTAVLTRVHSSRNENKSSEFKEINALVVDHRPVRAKVTKYHLQRLGVQTELTTDLDQYISKNNCGSQIAKLVLIDKETWLKESHSMPLLVTKLRNKDQPDSTKLFLLENPKSSVKSNSHIFREYNLNVIMKPLRASMLQVSLQRALGGIDKLHCRNGVVGNSTLGSLLHKKRIIVVDDNIVNLKVAAGALKKYGAEVTCADSGKEAITLLKPPHNFDACFMDIQMPEMDGFEATKRIRVMERDLNEQIECGEAPPECVGVRQWRTPILAMTADVIQATHEQCLKSEMDGYVSKPFEGEQLYREVARFFLNQDQVQ

SEQ ID NO: 55581 - protein, 346 aa, Glycine max; identical to SEQ ID NO: 39316
  Clone ID: 700661776_FLI.pep

SEQ ID NO: 55582 - protein, 222 aa, Zea mays; identical to SEQ ID NO: 46521
  Clone ID: 700479631_FLI.pep

SEQ ID NO: 55583 - protein, 313 aa, Zea mays
  Clone ID: LIB3136-008-B5_FLI.pep
FTNGADVALDLARREAEMAIRARNDFLAVMNHEMRTPMNAIIALSSLLLETELTPEQRLMVETVLKSSNLLATLINDVLDLSKLEDGSLELEIKAFNLHAVFKEVMGFIKPIASIKRLSVSVMLAPDLPLCAIGDEKRLMQTILNISGNAVKFTKEGHITLVASIVKADSLREFRTPEFHPTASDDHFYLKVQVKDTGCGIGPQDLPHVFTKFAHPQSGGNRGFNGSGLGLAICKRFVSLMGGHIWIDSEGTGRGCTATFVVKLGVCDNTNTYQQQLIPLVWPSSADSDLRAPKALPDGRGSTPLKSRYQRSV

SEQ ID NO: 55584 - protein, 246 aa, Glycine max
  Clone ID: 700837971_FLI.pep
PSTCIMGLEEKRCHHPSKVPRGLWKRLGVFCHGAIEAAHAIATGDLVSLSEQELVDCVEESEGCYNGWHYQSFEWVLEHGGIATDDDYPYRAKEGRCKANKIQDKVTIDGYETLIMSDESTESETEQAFLSAILEQPISVSIDAKDFHLYTGGIYDGENCTSPYGINHFVLLVGYGSADGVDYWIAKNSWGEDWGEDGYIWIQRNTGNLLGVCGMNYFASYPTKEESETLVSARVKGHRRVDHSPL

SEQ ID NO: 55585 - protein, 84 aa, Glycine max
  Clone ID: 700841354_FLI.pep
VILPRERKKHEYHEAIKKRYKHLPEVNRIARHRHLPRPIFKASALMRVMADAKRRKEEKRKAHSAPGSITTQPLRRRRIIKEVE

SEQ ID NO: 55586 - protein, 326 aa, Glycine max
  Clone ID: 700843339_FLI.pep
GPHSHGQGVPSSPAAGTPSSVESPTKFSGNTNQGLVKKLKGFDELAMSIGNCNAESAERGAENRLSQSVDTEGSSDGSDGNTAGANQTKRKRSREGTPITDAEGKTELQNGPASKETASSKKIVSATPASVAGTLVGPVVSSGMATALELRNPSTVHSKANSTSAAQPCAVVRNETWLQNERELKRERRKQSNRESARRSRLRKQAETEELARKVEMLTAENVSLKSEITRLTEGSEQMRMENSALREKLINTQLGPREEITLSSIDSKRAAPVSTENLLSRVNNSGSNDRTAENENDICENKPNSGAKLHQLLDTNPRANAVAAG

SEQ ID NO: 55587 - protein, 134 aa, Zea mays
  Clone ID: LIB3591-080-D1_FLI.pep
YHPTIHGLLACCWTVTGSQASRGYLARAGAPCACAAAECGGIQRVCADVEADAAGPGFEAGMGSLRECGDGCASAPSCGNRRTQRGVAVRLCVVCHLHKGWGLHAAEASTAGSLCASTPVKKQVLFHDGRNDSG

SEQ ID NO: 55588 - protein, 299 aa, Glycine max
  Clone ID: 700976572_FLI.pep
ALARQSLINADGVIERSFLPGKYSLEMSSAVYKSWVFTDQALPADLIKRGMAIEDPCAPHGLRLVIEDYPYAVDGLEIWDAIQTWVKNYVSLYYPTDDAIKKDSELQAWWKEAVETGHGDLKDKPWWPKLNTPQDLVHICSIIIWIASALHAAVNFGQYPYGGLILNRPTLTRRFLPEPGSKEYEELSTNYQKAYLRTITRKIEALVDLSVIEILSRHASDEIYLGKRDSDDWTDDQKAIQAFEKFGTKLKEIEAKINSRNKDSSLRNRNGPVQMPYTVLLPTSEEGLTFRGIPNSISI

SEQ ID NO: 55589 - protein, 553 aa, Glycine max
  Clone ID: 700978193_FLI.pep
KVGAKEVRKSGSGYRHGQRFESVKEGYNSSVESYSHDANVAVTGGTEKGTPVVEKSEEHKSGGKVEKVGDKGLASVEEKKDAITNHQSEGSLKSARSTEGSLSNLESEAVVNDGCISNSKGNDLHSVQNQSQSQSLSNIAKTFIGNEMFDGKTVNVVDGLKLYDDLFDSTEVANLVSLVNDLRVSGKKGQLQGSQAYIVSRRPMKGHGREMIQLGVRIADAPAEGENMTGASKDMNVESIPSLFQDIIERMVSSQVMTVKPDCCIVDFYNEGDHSQPHSWPSWYGRPVYVLFLTECEMTFGRVIASEHPGDYRGSIKLSLVPGSLLVMQGKSSDFAKHALPSTRKQRILVTFTKSQPRKSLSSDAQQLASAVASSHWGPPPSRSPNHVRHHVGPKHYATLPTTGVLPAPPIRPQMAAPVGMQPLFVAAPVVPPMPFSAPVPIPAGSTGWTAAPPPRHPPPRVPAPGTGVFLPPSGSGNSSQQLPASTLAEVNPSTETPTMPEKENGKINHNSTSASPKGKVQKQECNGHADGTQVEPALETRLDSNDKAAPSH

SEQ ID NO: 55590 - protein, 279 aa, Glycine max
  Clone ID: 700985273_FLI.pep
DPVLLKDWMRMQIKSDLILLENQLPFFVLKQLYNLAGMNQEFPSFLHISFNCLKRVGCGTWCPTESPKHFTDLMRTSIISSSKFVLRKEEECKVIKHVYSAGQLREAGLKFKVSPNENECLLDLTYSSDGVLTMPILNIADDSEVFFRNIVAFEECHLSDDTNIITQYRKILDFLINTEKDVNVLVDKKIIVNWMGDANAVATMVNSLGSNIGMPRFNPVYFSLCNSLNDFYESPCNKYKAIFKHDYFNTPWKIASTVAAIVLLLLTLIQTICSINSLF

SEQ ID NO: 55591 - protein, 586 aa, Zea mays
  Clone ID: LIB3607-038-E11_FLI.pep
HVRMLTQEIRKSLDRHTILYTTMVELSKALELQNCAVWMPDETRSTMILTHQLRERDIMDPQKHSIPIDDPDVQEIKATKDAKVLGPDSALGVSSRSKHEAGPVAAIRMPMLRVSNFKGGTPEVMQTSYAILVLVLPNDGSLGWGRRELEIVEVVADQVAVALSHAALLEESQLMREKLAEQHRDLLQAKDEAMRAGDARNSFQTAMYDGMRRPMHSILGLVSMMQQESMNPEQRLVMDAIAKTSSVASTLMNDVMQTSTMNCEHLSLVRRPFNLHSFIKEVVGVVRCLTGCKGVEFEFQVENSLPERIIGDEKRVFHIVLHMVGTLTDRCNAGCISLYVNVHNEVEDRHNHDWMLRRANFSGGYVCVKFEIRIRKSKGYLLSSSSSQISQGSKPNNSEMGLSFNMCKKIVQMMNGNIWSVSDSKSIGETIMLVLQFQLEPVTPVSGASSDLYRSSAIPNFNGLRVLLADSDCTNRAVTHRLLEKLGCRVLSVASGVQCISSFAAESSFQLVVLDLDMQTMDGFEVARAIRKFSSNSWLPLIIALAARIDDNIRDRCQRSGVNGLIQKPVTLAALGDELYRVLQNN

SEQ ID NO: 55592 - protein, 529 aa, Glycine max
  Clone ID: 700995727_FLI.pep
NPHFSLPSLLITFQSWLPSSSPPSHQPNLTLPAMVMGAFRHFEPVSKCSTENRFNQTVASDLDGTLLVSPSAFPYYMLVAIEAGSFLRGLVLLGSVPFVYFTYIFFSETAAIKSLIFIAFAGLKVKDIEMVASSVLPKFYTEDVHPESWRVFNSFGKRYIVTASPRVMVEPFVKTFLGADKVLGTELEATKSGRFTGFVKEPGVLVGEHKKVAVVKEFQGNLPDLGLGDSKSDYDFMSICKEGYMVPRTKCEPLPRNKLLSPIIFHEGRFVQRPTPLAALLTFLWLPIGIILSILRVYLNIPLPERIAWYNYKLLGIRVIVKGTPPPPPKKGQSGVLFVCNHRTVLDPVVTAVALGRKISCVTYSISKFTEIISPIKAVALSREREKDAANIKRLLEEGDLVICPEGTTCREPFLLRFSALFAELTDRIVPVAINTKQSVFYGTTVCGHKLLDPYFVFMNPMPTYEITFLNQLPKELTCSGGKSAIEVANYIQRVLAGTLGFECTNLTRKSKYAMLAGTDGTVPSKEKA

SEQ ID NO: 55593 - protein, 110 aa, Glycine max
  Clone ID: 700729832_FLI.pep
LAQGLRQSEKCDVYSFGVILLELVTGRKPVESPTTNEVVVLCEYVRGLLETGSASDCFDRNILGFAENELIQVMRLGLICTSEDPLRRPSMAEVVQVLESIRNGLESQSH

SEQ ID NO: 55594 - protein, 270 aa, Homo sapiens
  Clone ID: LIB3119-094-C6_FLI.pep
PLVDLHGVLRRGLPAGDLPCHWAPGGAADCLRLPRGTEGSWACEVPTPLVSRSCGPGAQMTSREAGGVPRVGLARGAVGPGEKGPQPCCRKQSISLLAQSLPVWGEGRKKQPEWGAPVLRGGLGRWDSAGWLLSGTPLCRQGLHHLHSQGKIHRDIKGANLLLTLQGDVKLADFGVSGELTASVAKRRSFIGTPYWMAPEVAAVERKGGYNELCDVWALGITAIELGELQPPLFHLHPMRALMLMSKSSFQPPKLRDKTRWTQNFHQSTY

SEQ ID NO: 55595 - protein, 279 aa, Glycine max
  Clone ID: 700988184_FLI.pep
LLEDNCTVGVVVSSIDCSKLNTIQVPESDIGAHFGMLLENEEGSDVTFSVGGERFHAHKLVLAARSTAFETEFFNGMEEDDHDVVVTDMEPKVFKALLHFIYRDTLIDDEELFMSRSSFLPSVSESFAAKLLAAAEKYGLPRLKLMCESVLCKDISIDSVAYILALADRYRATELKSVCLQFSAENLVAVMQSDGFEYLKENCPLLQSELLKTVAGCEEEFSGEGKCRSVWAQFSDGGDTNDRSVRQQTWENGVERSQSLWVHLSDGVNNNDRSPGQET

SEQ ID NO: 55596 - protein, 271 aa, Glycine max
  Clone ID: 700729878_FLI.pep
VFSLILFSPLNYLELLILYSYSSHNILLLIMVFCTKYQVVSEQKPVVGMRLYLEGRKCDRLALHINHLSSLPNKMILSSGTSTSSTPSMWRGSDDNESSEQFLERIRWKRFSNVCTAVVKHDPNWLINSGGVYIVTGAQLLSKGSWPRNVLHLRLLFTHIPNCSIRKSEWTAAPEASRKSFLTNLSTTFSFTQHGTTGPPKQAPTALNSGVYPDGPPVPVRAGKLLKYVETAEVVRGPHDAPGHWLVTAAKLVTDGGKIGLQVKFALLDYW

SEQ ID NO: 55597 - protein, 690 aa, Glycine max
  Clone ID: UC-GMRONOIR0001H10_FLI.pep
EQAMAYARALVAGYYPESVDDLICFADAFGASRLREACINFLELCKQKNEDKLWIDEIAAMQAAAQPELPYLRTSGIILAGEDDTSSKLNGIVDASISESTPSHASLDIGHDYSLPTSGQTPSTDGRAQIPMSWPNHLPQYMHNFQGHHPFQQMSPYQGYLYPGMQVPSSYYPGNMQWPSNMEDPHIVHDRDKDYHKSSYKKKKKKHSQTLQQSEEDSSTASSDSSYESDSDNHSRKGKKHSSTEHHHKKKHGKKSSRKVVIRNINYITSNGDGEKGSVTEGSLSNEEEFINGDSLKQQVEEVVGSFERRNKSSSRHRKKQHIAKHSGKLNGSNDADSNGMKGNNNWDAFQNLLLRDDDSTPDTEEQPMKFQEEYIGSQNFENGRSNEFNHEPDFSKTRAVSNDSFVVTERGFDGEVQNRVDNFKDGKDAPSLMKKNINTDEAMLFSQRNDKSGSYSMSNLSGNGPESSLTKCQTEEDWFIINQSGKPGNVDQNRDFSMFDGISVSSSATDSFHVEKNRKDIVTDDSFMIQARSSEDQFNSQSAADLSLVSDIVGATEFMNSTQEGSHNKNETLNSHEPDDLFMVLDRDSTLEQSLAPWSMEMDYDNNISSNEANRKLSEVETDKNHSSNLEGTDTKTPGVKNGKVSSKEAKPKALNASLGKSKSNITSRSKASPGSKTRVTKSKSEKEE

SEQ ID NO: 55598 - protein, 245 aa, Zea mays
  Clone ID: LIB3088-024-F3_FLI.pep
GVQRIAIYEYMESGNLHNLLHDLPLGVQATEDWSGDTWEDNTGGVATTEIVTPEGTATWIFRHKIALGAARALAFLHHGCIPQIVHRDVKASSIYFDCAMEPRLSDFGLSMVAGTRADLLHHSPGYAPPEFSGSENAAATAKSDVYSFGVVLFELVTGKKPLGDEYPGAQKEASLVSWARAMVKASLAPSIIDPKIRDTGPERQMEEALRIAYLCTAELPSKRPAMQQIVGLLKDIEPKVEEEGD

SEQ ID NO: 55599 - protein, 90 aa, Glycine max
  Clone ID: UC-GMRONOIR002H09_FLI.pep
AFSTGQKYIYTGSHNACVYIYDLVSGAQVATLKHHKSPVRDCSWHPFHTTLVSSSWDGDVVKWEFAGSGDTPGSSTKKRVWTRHFYEHYL

SEQ ID NO: 55600 - protein, 944 aa, Homo sapiens
  Clone ID: LIB4119-079-E1_FLI.pep
YTTLSYRAPEMVNLYSGKIITTKADIWALGCLLYKLCYFTLPFGESQVAICDGNFTIPDNSRYSQDMHCLIRYMLEPDPDKRPDIYQVSYFSFKLLKKECPIPNVQNSPIPAKLPEPVKASEAAAKKTQPKARLTDPIPTTETSIAPRQRPKAGQTQPNPGILPIQPALTPRKRATVQPPPQAAGSSNQPGLLASVPQPKPQAPPSQPLPQTQAKQPQAPPTPQQTPSTQAQGLPAQAQATPQHQQQLFLKQQQQQQQPPPAQQQPAGTFYQQQQAQTQQFQAVHPATQQPAIAQFPVVSQGGSQQQLMQNFYQQQQQQQQQQQQQQLATALHQQQLMTQQAALQQKPTMAAGQQPQPQPAAAPQPAPAQEPAIQAPVRQQPKVQTTPPPAVQGQKVGSLTPPSSPKTQRAGHRRILSDVTHSAVFGVPASKSTQLLQAAAAEASLNKSKSATTTPSGSPRTSQQNVYNPSEGSTWNPFDDDNFSKLTAEELLNKDFAKLGEGKHPEKLGGSAESLIPGFQSTQGDAFATTSFSAGTAEKRKGGQTVDSGLPLLSVSDPFIPLQVPDAPDLQRESNPCPVITVEHFKESLGVKGLPLYPDPSRVPGTKTQNNLESDYLARDGPSSNSSFHSSEEEGTDLEGDMLDCSGSRPLLMESEEEDESCRPPPGKLGGAVPFAPPEVSPEQAKTVQGGRKNQFQAFTQPATDGLSEPDVFAIAPFRSSRVPNDDMDIFSKAPFVSKSSMAPSQPEESDVFLRAPFTKKKSMEELTVIQCTSQELPAQTGLLSQTGDVPLPASRERAVYTSVQAQYSTAGFVQQSNLLSHSVQAADHLDSISPRGSCLESGGHSNDRNKGPQLQKEAVSGPMAGKPFRPQSLSKYSRHYSPEDEPSPEAQPIAAYKIVSQTNKQSIAGSVSITSLSSRTTELPAADPFALAPFPSKSGKKP

SEQ ID NO: 55601 - protein, 344 aa, Glycine max
  Clone ID: UC-GMRONOIR007A04_FLI.pep
VELQKYHFSFLMISIQRQFAETAKSIEFCQLCTSLLDLPDILLNTCQVEVPSCFVGLVLENCQLPLENYGHVILADPSPILFYRISSTEVRCLVDIPGQKVSPVGKGGMANYLRAMVASQIPPELRDAFISAIDRGNIRTMPNSSMAADPYPTPGALLMGDVFNMRHPLTGGGMTVALSDIVVLRNLLKPICDLNDATSLCRHLESFYILRKPMASTINTLAGALYKVFSTSPNEARKELRQACFDYLSLGHFFSSGPIALLSGLNPSPLNLILHFFAVALYGVGRLLLPFPSFERTWIGAKIVLCAFGIIFPIIKGEGVRQMFFPTSIPAFYRAPPDRWCIEE

SEQ ID NO: 55602 - protein, 376 aa, Homo sapiens
  Clone ID: LIB4119-131-E2_FLI.pep
PSSAAAAPPCVLPRSATCTDLLCPQMVIMGQCYYNETIGFFYNNSGKELSSHWRPKDVVVVALGLTVSVLVLLTNLLVIAAIASNRRFHQPIYYLLGNLAAADLFAGVAYLFLMFHTGPRTARLSLEGWFLRQGLLDTSLTASVATLLAIAVERHRSVMAVQLHSRLPRGRVVMLIVGVWVAALGLGLLPAHSWHCLCALDRCSRMAPLLSRSYLAVWALSSLLVFLLMVAVYTRIFFYVRRRVQRMAEHVSCHPRYRETTLSLVKTVVIILGAFVVCWTPGQVVLLLDGLGCESCNVLAVEKYFLLLAEANSLVNAAVYSCRDAEMRRTFRRLLCCACLRQSTRESVHYTSSAQGGASTRIMLPENGHPLMDSTL

SEQ ID NO: 55603 - protein, 538 aa, Glycine max
  Clone ID: UC-GMRONOIR007G02_FLI.pep
FLVNHPDHYLTQQVVYNAKKLSSLVSKKKKRQNWLDYYELKYSRNQSTRPSKKTGFLGLCGNRVDAIDFYTDEIKRLSEEIELEKHKVMKNSKYTMPAAFVSFRTRWGAAVCAQTQQSRNPTVWLTEWAPEPRDVYWDNMAIPYVSLTIRKLIIAVAFFFLTFFFMIPIAFVQSLANIEGIEKAAPFLKSFIEMQFIKSFIQGFLPGIALKIFLIFLPAILMIMSKFEGFISTSALERRAATRYYIFQFINVFLGSIITGTAFQQLDKFIHQSANEIPKTIGVSIPMKATFFITYIMVDGWAGCAGEILRLKPLIFYHLKNFFLVKTEKDREEAMDPGTFGFNTGEPQIQLYFLLGLVYAVVTPFLLPYIIVFFGLAYVVYRHQIINVYNQEYESAAAFWPDVHGRIIFALVISQLLLMGLLSTKEAANSTPLLITLPILTISFHLYCKGRYEPAFVKHPLQEAMMKDTLERAREPNFNLKEFLQNAYIHPVFKGDDDSDSDVMSENWEEQEPVLVQTKRQSRKNTPLPSKHSGSLSS

SEQ ID NO: 55604 - protein, 222 aa, Zea mays
  Clone ID: LIB4665-007-G6_FLI.pep
QLEDLTAKMRECKRLIKEFDRILKDEEKKDTPEANKQLNDKKQFMIKELNSYVTLRKTYQSSLGNKRIELFDTGTDQVADKSPVQMASEMSNQELISAGRKQMDQTDQAIERSKMVVAQTVEVGAQTAATLSQQTEQMKRIGNELDSVHFSLKKASQMVKEIGRQVATDKCIMAFLFLIVCGVIAIIVVKIVNPHNKNIRDIPGLAPPAMNRRLLSIDALGL

SEQ ID NO: 55605 - protein, 408 aa, Glycine max
  Clone ID: UC-GMRONOIR018B10_FLI.pep
ANFLPNERVTKFSPSPNMASRVSIGNLTSSAPYINSPHFRSPLKISNNPSLQNASHKVLMRDKTVLVTGGAGYIGSHTVLQLLLGGFRAVVLDNLENSSEVAIHRVRELAGEFGNNLSFHKVDLRDRAALDQIFSSTQFDAVIHFAGLKAVGESVQKPLLYYNNNLTGTITLLEVMAAHGCKKLVFSSSATVYGWPKEVPCTEEFPLSAMNPYGRTKLIIEEICRDVHCAEPDCKIILLRYFNPVGAHPSGYIGEDPRGIPNNLMPFVQQVAVGRRPALTVFGNDYNTSDGTGVRDYIHVVDLADGHIAALLKLDEPNIGCEVYNLGTGKGTSVLEMVRAFEMASGKKIPLVMAGRRPGDAEIVYASTKKAERELKWKAKYGIDEMCRDQWNWASKNPYGYGDQGSTD

SEQ ID NO: 55606 - protein, 252 aa, Zea mays
  Clone ID: LIB3632-047-D11_FLI.pep
PSANSPYPGIRMGSKASFRVTLLLLLLAAAWGPAAQADDAGIAELPDHRAITLKEQVSSTKIPVRLKSGSPLCSACENFTGKAVSYISEKQTQDKVMGFLHDACSQSFSFEQKCDELMDSYATLLFAKITEIKPEAFCKQYGLCRGTALFSGVTSDSTCVFCHHLLDEVMSKLKDPDAEFEIIQILIKECNKIEGHVQQCKRLVLQYIPLILVNGEKFLEKNDVCALVQACPATHKKTFSSALKEALLLSNA

SEQ ID NO: 55607 - protein, 411 aa, Zea mays
  Clone ID: LIB4574-008-F5_FLI.pep
TLEAGQGALARPSSLPDPPRRSLEASAGRLRPAHPQPMAVVEEDAAASADPAAASDPAAGSSENEITVEEASFVHSEPPQDGSAPPVVSSDMEALHDKVKKQIIKEGHGRKPLKFATCFVHYRAWVQGSSHKFEDTWQEQHPIELVLGKEKKQMSGLGIGVGSMKSGERALLHVGWELGYGKEGSFSFPNVPPMADLVYEVELIGFDDVKEGKSRSDMTVEERIAAADRRKIEGNAYFKEKKLEEAMQQYEMAIAYMGDDFMFQLFGKYRDMALAVKNPCHLNMAACLIKLKRFDEAIAQCSIVLTEDESNVKALFRRGKAKSELDQTESAREDFLKAKKYSPEDKEIIRELRLLAEQDKALYQKQKELYKGLFGPSPEAKPKKAKYLVVFWQCLVSFILYLAGMFKRKNE

SEQ ID NO: 55608 - protein, 235 aa, Glycine max
  Clone ID: UC-GMRONOIR028D04_FLI.pep
RAWISLATLKETEHTLMLMCELAKHWNSWIKAIRNVDRKLREKCIHLLAFISRGSQRLGELSSRNAPLLCPPTVKEDFEICLKPSYVNSRNGWFALSPLGCVPKPKISSFSTALSTYGQATESTDPAPKTGFSDTVALQVYRIAFLLLKFLCLQTECAAKRAEEVGFVDLAHFPELPMPEILHGLQGQAIFITTELCEANKLKVSQETQDVCNLLLQICGIRPVRGFFKGSQIFI

SEQ ID NO: 55609 - protein, 119 aa, Zea mays
  Clone ID: LIB3353-006-B2_FLI.pep
RNCSQQLRSASLVLFAWLGKITLETYISQIHIWLRSSMPNGQPKWLLCFIPDYPMLNFMLTTAIYLLLSYRVFEITNVLKSAFIPSRDNSRLYQNFVAGIAISVCLYLCSLILLKIPVV

SEQ ID NO: 55610 - protein, 328 aa, Glycine max
  Clone ID: UC-GMRONOIR029E03_FLI.pep
HSFLFTFCQKMAETEPIVPPFVVPRRDDDLLQCSNTIYYVKELIQDEEEIREAVNAFGDGVRQGDFERIVEHFDHFFALVRSPSSSAPNDVATAAAPFDAQLRTELAELLIDSLENLRLTLQMHICDINAVATAAAASANTTATMVGQEEAVTADTDGHPRQNADERRNGRTTALNSRYSNCLLMHVYLLSSLTNHFEQHLNKRTRSAVATATPGGTRGKRKVMRFDNSEDDPIVQFWDVQDRRYKLIKALYNLISMSVTAEDNDAAVGDEPPRTQSSALRYLWTNRQIAFSQLCVNFWKTRKCVKLAVVPTCSTCSRCSVSFASVGT

SEQ ID NO: 55611 - protein, 225 aa, Glycine max
  Clone ID: UC-GMRONOIR030A04_FLI.pep
VRTVGNIVTGDDMQTQTIINHGALPCLLSLLTHNHKKSIKKEACWTISNITAGNRDQIQAVIEAGLIAPLVNLLQNAEFDIKKEAAWAISNATSGGTHEQIKYLVSQGCIKPLCDLLVCPDPRIVTVCLEGLENILKVGEAEKSLGNTGDVNLYAQMIDEAEGLEKIENLQSHDNNEIYEKAVKILETYWLEDDDETLPAGDGAQPGFNFGNNDLPVPSGGFNFS

SEQ ID NO: 55612 - protein, 331 aa, Zea mays
  Clone ID: 700439712_FLI.pep
TNSSLVWAVAVRRRVKRDETTMRKWALSSALLLLFLLTTLPDPAKKLQVNAEESSDDLANPPKVEEKLGAVPHGLSTDSEVAQREAESISRKTLRSSAEKFEFQAEVSRLMDIIINSLYSNKDIFLRELISNASDALDKIRFLSLTDKEVLGEGDTAKLEIQIKLDKEKKILSIRDRGIGMTKEDLINNLGTIAKSGTSAFVEKMQSGGDLNLIGQFGVGFYSVYLVADYVEVVSKHNDDKQYVWESKADGSFAISEDTWNEPLGRGTEIRLHLRDEAKEYLEEDKLKDLVKKYSEFINFPIYLWSTKEVDVEVPADEDETSEEEDRPQKL

SEQ ID NO: 55613 - protein, 412 aa, Glycine max
  Clone ID: UC-GMRONOIR041G07_FLI.pep
QGSSKLDEALEIASDSPRVSALVVSEFIGCSPSLSGAIRVNPWDIDAVAEALNLAITMPDGEKQLRHEKHYRYVSSHDVAYWARSFEQDLVFSCKDHYNNRCWGFGFGLNFRILSLSPSFRRLSIDHIVPAYERSSCRAIFLDYDGTVVPQASIVKPPSPEVISVLNNICSDVRNTVFIVSGRGKTSLSEWFDQCENLGIAAEHGYFIRWGKHTSWQMSHADTDFAWKKIAEPVMRSYMEATDGSSVETKESALVWHYRDADPDFGSWQAMELLDHLENVLANEPVVVKKGQHIIEVKPQGITKGSVAQEVLSSLTKKGKSPDFVLCIGDDRSDEDMFESILAKPYSTTSSSAPQIFACTVGQKPSKARYYLDDTVDVMALLEGLGATSGPKSRYSTETPFEKREVCFENDV

SEQ ID NO: 55614 - protein, 301 aa, Zea mays
  Clone ID: 700465007_FLI.pep
GSPHLILIQPGGWERDHSYSYLSSRILLRSASKIKVGGTTRQGMSAAATKVKRRVGKYELGRTIGEGTFAKVRFAKNTETGEPVAVKILDKEKVLRHKMAEQIKREISTMKLIKHPNVVRIYEVMGSKTKVYIVLEYVTGGELFDTIANQGRMREGEARSYFQQLINAVDYCHSRGVYHRDLKPENLLLDSYGNLNVSDFGLSALSQQIKDDGLLHTTCGTPNYVAPEVLEDQGYDGAMADLWSCGVILFVLLAGYLPFEDSNLMTLYKKISNAEYTFPPWTSFPAKRLLTRILDPNPMTG

SEQ ID NO: 55615 - protein, 285 aa, Zea mays
  Clone ID: UC-ZMFLB73261D03_FLI.pep
RIVVAGAGSAGIGVVNAASRTMARMLGNNDVAFESARSQFWIVDAHGLITEDREDIDPDARPFARRKSELGHQGLSEGASLVEVVKKVKPDVILGLSAVGGLFSKEVLEALKDSSSSRPAIFAMSNPTKNAECTPGEAFSILGEKVIFASGSPFHDVDLGDGKIGHSNQGNNMYLFPGIGLGTLLSGARVISDGMLQAAAERLASYMKEEEVLEGIIYPPISRIRDITKEVAAAVVREAVAEDLAEGYRDMDARELARLSEEETNEYVKTNMWSPVYPTIIYKKD

SEQ ID NO: 55616 - protein, 136 aa, Zea mays
  Clone ID: UC-ZMFLB73023C09_FLI.pep
RLHYPRPLLPRPPPRHHRRPQRARPTTNSQLGWPLLPSLASKDFFPRDVRSRHEAARVQHRRSPPPCRHCPAPCGPKTVDLMPCPPSPMPSPSPQAGSLSRLAWLYVVGRLWRDVQTGRSCPASSRRAPATSRRCS

SEQ ID NO: 55617 - protein, 418 aa, Zea mays
  Clone ID: LIB3061-070-C12_FLI.pep
LLFSCFLCSSKEKPTLGGTRIKTRKRNIAAPLDPASFSDAIVQIYLDNGGDLELVAKSIESSDLNFSRYGDTFFEVVFVGGRTQPGTVKPEEGDRHPYSMLDCVAQRETILPFVLYIQKTLRRRPFLIKNLENVMRKFLQSLEFFEENERKKLAIFTALAFSQKLSGLPPETVFQPLLKDNLVAKGIVLSFITEFFKEYLKENTLDDLIALLKKGKMEDNLLDFFPSAKRSSEALSEHFIKEGLTSLVEYNEKKMFEVKLKEIKSTLTTMINDEAAIPEVIETVKQQVKDAKFPDLEVIRMLWDVLMEAVQWSGKNQQQNSNAALRQVKAWAELLNAFCTSGRLELELIYKVQTQCYEDAKLMKLFPEIIRTLYDQDVLAEDTVLLWFRKGSNQKGRQSFVKALEPFVKWLEEAEEEE

SEQ ID NO: 55618 - protein, 91 aa, Zea mays
  Clone ID: UC-ZMFLB73028F04_FLI.pep
AQRRRDLHDQILHSGIYCLNHLTSKFEAASHETFPISFMKHLLIKLCFLTCPAKLSFLTCCYCVQRRCRLSPANVAAEEMNFLLLCRGNTY

SEQ ID NO: 55619 - protein, 235 aa, Zea mays
  Clone ID: LIB3637-196-E5_FLI.pep
EEQAHLQFMNPGMEDDPTCGPILDNVAVKKLFTPDKPKDNVVLNGDFEEGPWMFPNTSFGVLLPTNLDEQTSAIPGWMIESNRAVRYIDSDEYKVPQGKRAIELLSGKEGIISQMVETTPQKVYSLTFTLGTAGDSCQPPMAVMAFAGDQAQNFHYSPMGNATSQAANVTFTARAERTRVAFYSVYYNTRSDDHSSLCGPVIDDVRVWALNAAAGLKASIGLVLGIVGVVGMVLF

SEQ ID NO: 55620 - protein, 620 aa, Zea mays
  Clone ID: UC-ZMFLB73030B03_FLI.pep
LSYSWYMHDTDCSGSCSRLIDPPLHFLLQKSLTFAPEASEDVLPLDLGELLAYFVKQSVPLFDQLGIKRDVCDKLVESLCSKRKDHPAYSFLSATESSSLKNDNVGNELDLRIASALQSTGHHYEGGFWSDGHKSDISGKRHVAIVTTASLPWMTGTAVNPLFRAAYLAKSCKQDVTLVVPWLCKSDQELVYPNSMTFSSPEEQEKYMRNWLEERVGFKTDFKISFYPGKFQKERRSIIPAGDTSQFIPSKEADIAILEEPEHLNWYHHGKRWTDKFNHVIGVVHTNYLEYIKREKNGAIQAFFVKHINNLVARAYCHKILRLSGATQDLPKSTICNVHGVNPKFLEVGERIAAERESGQQSFSKGAYFLGKMVWAKGYRELIDLFAKHNSDLEGFKLDIYGNGEDSHEVQSAARKLNLNLNFHKGRDHADDSLHGYKVFINPSISDVLCTATAEALAMGKFVVCADHPSNDFFRSFPNCLTYKTSEDFVARVKEAMARDPQPLTPEQRYNLSWDAATQRFMEHSELDKVLNGDSNSECGGSVGTETGKSAGTMMRRSASAPNMSDVVDGGLAFVHYCFTGSELLRLSTGAVPGTRDYNKQHSLDLRLPPPQVQNPVYGW

SEQ ID NO: 55621 - protein, 193 aa, Zea mays
  Clone ID: LIB3592-072-G9_FLI.pep
AAAHPPGGLRAPLRDPGHRRRRLHQLRLQHRLHQDTVRRRHHGVPPGPAPLPVQRRHRRCRGPRRLQQPQPRPADHRLCALCQQPPVRRRGEGHLLGRRAGEEAQECARRQRLTCFSRQYSAGWVCIVVVVVLVRRHRMERVCLLLLLHACVHLSSRVKVLVVYFILPLFIHLLFIYSGMNSVSILHFVAMKE

SEQ ID NO: 55622 - protein, 393 aa, Glycine max
  Clone ID: 700739836_FLI.pep
NTMSAASLLFSCSMHVGVSHPKVAAKPSPCCLLNQPWNHLKSKTPFGHSGVFEKSKLSHKGDEILWRAGALQVESAPSFSMGQKFHLHDVIEAQQFDRETLNAIFEVARSMESIESKSSRSQMLKGYLMATLFYEPSTRTRLSFESAMKRLGGDVLTTENAREFSSAAKGETLEDTIRTVEGYTDIIVMRHFESGAAKRAATTASIPVINAGDGPGQHPTQALLDVYTIEREIGKLDGIRVGLVGDLANGRTVRSLAYLLAKYQDVKIYFVSPNVVKMKDDIKDYLTSKGVEWEESADLLEVASKCDVVYQTRIQKERFREKIELYEEARGKYIVNQDVLDAMQKHAVVMHPLPRLDEITVEVDRDPRAAYFRQAKNGLYIRMALLKVLLLGW

SEQ ID NO: 55623 - protein, 137 aa, Zea mays
  Clone ID: LIB3357-053-G9_FLI.pep
PIHSAQTFEHAALPFFHFFCWQGRLAFHALFSREKLPQSFSPPQAEGSKEVGKEEEDEVTTVAVDLNKSTTSIDHDLDTIGEPRASFPNELSPLKLKLRRTGFKPYKRCSVEAKENRVPASDEVGTKRIRLDSEAST

SEQ ID NO: 55624 - protein, 191 aa, Zea mays
  Clone ID: UC-ZMFLB73256G07_FLI.pep
GGGGANAFGVATSYSKPAAPSMSGAKFLVPTPVNVASEQMAELGAHSETARQDESSSSPAMETSFSSPPSLIQMQSSIPRYPSGDNIPRYPSGDNIPRYPSGDNIPRYPSMDNVSSPTGSINSSMSRSRASSWSGTYPEQLSSTAASRSPDGQMTQSPSMPGRRPPHSRSNSASSSAQLNGLGEDLHEVEL

SEQ ID NO: 55625 - protein, 206 aa, Zea mays
  Clone ID: LIB3591-087-F2_FLI.pep
IPGGRNPMAGRRGRRRRGGACLLGPSSSQGSHAGRHLSAEAAVPPLPGVVVGALLRHHARRPGNRRRRRWCKRDDCEPRLGSRAAARSCRAAEEAGARPDGGLLHVRWQGEDAQRARPPRRPEPRPQDDRLHRGVNECVPSHRMDPEDSFQQANGRSTRSSLAEGYTTIQEDDDCSRVIINLLAYVITRYMPVRCYGINMIKSIYM

SEQ ID NO: 55626 - protein, 336 aa, Glycine max
  Clone ID: 700740303_FLI.pep
VTGAFPRLQRLSMECCPKLKGHLPEQLCHLNYLKISGCQQLVPSALSAPDIHQLYLADCEELQIDHPTTLKELTIEGHNVEAALLEQIGRNYSCSNNNIPMHSCYDFLLSLDINGGCDSLTTFPLDIFPILRKIFIRKCPNLKRISQGQAHNHLQSLGMRECPQLESLPEGMHVLLPSLDRLHIEDCPKVEMFPEGGLPSNLKGMGLFGGSYKLIYLLKSALGGNHSLERLSIGGVDVECLPEEGVLPHSLVNLWIRECPDLKRLDYKGLCHLSSLKTLHLVNCPRLQCLPEEGLPKSISTLWTYNCPLLKQRCREPEGEDWPKIAHIKRVSLHGG

SEQ ID NO: 55627 - protein, 226 aa, Zea mays
  Clone ID: LIB4667-003-C9_FLI.pep
GRALDVSSVYKYKNTTVDVKVDTESNISTTLTVLDALPCTKLVTSVKLPDYNSGKVELQYFHENATFATVVGTKPSPVIDLSGTVGAQGVAFGAEAGYDTATGKFTKYTAAIGVTKPDYHAAFILADKGDTIKVSGVYHLDEKQKASAVAELTRRLSTNQNTLTVGGLYTVDSQTAVKARLNNNGTLAALLQHELKPKSLLTISGEFDTKALDRPPKFGLALALKP

SEQ ID NO: 55628 - protein, 227 aa, Glycine max
  Clone ID: 700746693_FLI.pep
ENKPFTRMMVFEYAPNGTLFEHLHIREAEQLDWGMRMRIAMGIAYCLEHLHQLTPPIAYRNILSSSIYLTEDYAAKLSDLSFWTDIVSTKKGSEAPQLLETPSAYIKANVYSFGVLLFELITGRIPFAVENGLFEDWAEEYMKGQPLRDLVDTSLNSLQANEIEKWEEVVKSCVHPDPEKRPTMREVTAKLKEITAMGPDGATPKASPLWWAEIEIMSSDLSLDVKP

SEQ ID NO: 55629 - protein, 278 aa, Zea mays
  Clone ID: LIB3078-016-D3_FLI.pep
QTIRSGGEELGRWMLRSEEIEFIDWVGANSFRGVYRGKKVWVNKLRGCDMGSAYEVEIRQDLLQLMSCGQRNILQFHGICFNGNHGLCIVTRMMEGGSVHDILTQRNKRLSLRDTVRIALDVADTLAFMNSYGIAYRDLNARKILLDRQGNACLGDMGIVTPCSNVGEVTEYETSGYRWLAPEIIAGDPETVSETWMSNVYSYGMVLWEMITGEEAYSAYSLVQAAVGIAACGLRPEIPRECPPFLRSLMNRCWDNSPLKRPQFSEIISILQRQQNVR

SEQ ID NO: 55630 - protein, 678 aa, Zea mays
  Clone ID: UC-ZMFLMO17103E01_FLI.pep
WNPMGSSPSKATGEDALVLCKDRMRHIRQAIDSRDALSAAHLSYTQSLRSVGTALRQYAESEISPESSLSISEVDKSPSHSSMASPSPSRAVESVASLGHRASPSITPPSTRIHCMKAAATTPLTFVIDQSAAEFVGRESPVSAFVPPPPPLPPELCTTWDFFDPIDAAGTSSSNNENEEREPKQGGTGKPSQLVDTSTKATSEQVAAKLEESEMEKELCAEAEDPSEFITHRAKDFVSSMKDIETRFMRAAEAGNEVSRMLETKKIRLDICAKIPGSPVKLPSARFVSALRVCCNRDVILNQETAQHVSKVVTWKRSVSSLSSSSKSALMTSIIKDDVDDSNSDFVEEFAMVSGSHSSTLDRLHAWERKLYDEIKASENVRKAYDEKCNLLRRQFARGLNAQVIDKTRAVVKDLHSRVSVVIQAVDAISKRIEKIRDEELQPQLVELIQGLIRMWKLMLECHHKQFITITLAYHVKDSTSARQGEHHHHRQAAMHLWNEMDSFSSSFRNWVTAHKSYVEALNAWLQKCVLQPPQDRRRRKRKVSFPPRQAVSPPIFILCGDWLARTEPLPADELCRSLKDVMQLLRDSFEHRDEQNRPRSGESQECGMLENSIEQEAAAKSGSCAASAEGLQSRLTAVLDRLTKFSEASLKCYEELKQNYEMACADYRRVGPNAQLA

SEQ ID NO: 55631 - protein, 240 aa, Zea mays
  Clone ID: LIB4185-014-E9_FLI.pep
TRSDQIVAAKDSALRGCHEAEAPLSLPSPPRLLCHRGVRGVGVGVARGGRRQGRGRPVAVGVGVGPGEPVRVHGVRADGVHLEGRHGLDHRRDAAGPRRHGHPDPGPGGVGRPHGRRPRLLRARQPGHLQRPGPLHEPGALRHEPHLRRHRRAPRLVLQLPRGHGHGAPPRVRAAALHRRAVARHRRVALPPVRGRRQVQDEAAGAATLAGRRGRGHRDRALGTTSSKSSTEASSCLCCV

SEQ ID NO: 55632 - protein, 658 aa, Zea mays
  Clone ID: UC-ZMFLMO17233D09_FLI.pep
TNNNGTNQYQPRMPLAAAAAAVAACPSPIGLTRSLCRIEAHPRRRRRFRLEANSSASTSAPAPTAADEGGGAGLCPVVRFDMADFTAADRVSVGLHGRSDEMIFEATVCDPSSELYGSTVVLRQLKSLQAKRRGRRALEVLKKLARRQMMYHSYALQVHGYIAPCNAVEEEDVPLVLVHGYHGSHSLRHWLQLSDWIPTLEATLALDEEQVRRVGDDSVGGPAVTRQLRLIRILMRDLLIGVNYLHSHGLAHTELRIENVHVSPIDKHVKVGILGNAADFQDNDLSSSTIASNNDRRKMMIAFDMRCVGFIMAKMVLRELMDPSTFFKFKSFLTKGNDPSCLREFLLPTLYQNSPSGNIGLQMLDRQWGAGWNLLALLLATKPEERISCVDALRHPFLCGPKWRINPSANLIRWGLGSTAVRMAEDYIYGRHQRRRLSYFVELMEVLNPSLRTQNWLHLLPGRWRLLYCTGRHIGLTLRQPSPRVLISAVYLTVSSESVDQVFSLTSDVGFRIMPEPNWPHDKSGSEGVLSVTASARIAAGRIYINEHDSKEDMVTSSMRYLHGNKWRKFSQIKELPSSLPAVNIAMDEIHVSISCTSTMTVNSAQKALKEIRTQTPPEMFDLSKIVCGTYIDARLMILRGVNGSALLFTRANPMIDA

SEQ ID NO: 55633 - protein, 416 aa, Homo sapiens
  Clone ID: LIB3547-170-A5_FLI.pep
SATAGGARPGRRPWGARPMESGLLRPAPVSEVIVLHYNYTGKLRGARYQPGAGLRADAVVCLAVCAFIVLENLAVLLVLGRHPRFHAPMFLLLGSLTLSDLLAGAAYAANILLSGPLTLKLSPALWFAREGGVFVALTASVLSLLAIALERSLTMARRGPAPVSSRGRTLAMAAAAWGVSLLLGLLPALGWNCLGRLDACSTVLPLYAKAYVLFCVLAFVGILAAICALYARIYCQVRANARRLPARPGTAGTTSTRARRKPRSLALLRTLSVVLLAFVACWGPLFLLLLLDVACPARTCPVLLQADPFLGLAMANSLLNPIIYTLTNRDLRHALLRLVCCGRHSCGRDPSGSQQSASAAEASGGLRRCLPPGLDGSFSGSERSSPQRDGLDTSGSTGSPGAPTAARTLVSEPAAD

SEQ ID NO: 55634 - protein, 287 aa, Zea mays
  Clone ID: UC-ZMFLMO17113H05_FLI.pep
ICEVILEKIKGETASWFILLPFLFMLLDHTVISSHLFYLVQHEGFAFVYMEDERDAEDAISRLDGIDFGRKGRRIRVEWTKEDRTVGRKSSSRRSPTNTKPTKTLFVINFDPINTRIRDLERHFDKYGRVANVRIKKNFAFIQFEVQEDATRALEGTNGSHFMDRVISVEYALRDDDEKGERGNGYSPDRRGRERSPGRRRSPSPYGRGRERGSPDYGRSKERGSPDYGRGGRSPDNGRGVSPAGGGRGDHARGGGRSPDYDRQRREASPPGYDRSPSRSPGREARE

SEQ ID NO: 55635 - protein, 144 aa, Zea mays
  Clone ID: LIB3069-041-F8_FLI.pep
VCLGYFIFRNQLFNVYAPKYDTGGKFWPVVHNTTIFSLVVLHIIAIGVFGIKKLPLASSLLLPLPPLTLLFNEFCRNRFLPIFEAYSTESLLKKDREEQSKPDMAEFFSNLVTAYCDPALKPFQRTSNSDERTEPLLASLSSSR

SEQ ID NO: 55636 - protein, 116 aa, Zea mays
  Clone ID: UC-ZMFLMO17068G11_FLI.pep
TRLLASTNIYTLEVPCFLGCLPQLREFPVLLGHVSTSSGFEIDAEPRRARTSNCHRRATSPPQRFHHLKLEFSHGLVLAVERVDGIGNVFGGRDGSPTRRRDGRPCRRAHRAGSSR

SEQ ID NO: 55637 - protein, 517 aa, Glycine max
  Clone ID: UC-GMROMINSOY094F04_FLI.pep
GSKQAFEVSLADVSQTQLQGKNDVILEFHVDDTTGANEKDSLMEISFHIPNSNTQFVGDENRPPAQVFRDKIMSMADVGAGGEDAIVTFEGIAILTPRGRYSVELHMSFLRLQGQANDFKIQYSSVVRLFLLPKSNQPHTFVIISLDPPIRKGQTLYPHIVMQFETDYVVESELAINEDLYNTKYKDKLDLSYKGLIHEVFTTILRGLSGAKVTKPGKFRSCQDGYAVKSSLKAEDGILYPLEKSFFFLPKPPTLILHEEIDYVEFERHAAGGSNMHYFDLLIRLKSEQEHLFRNIQRNEYHNLYEFISSKGLKILNLGDAQPTVGIKKVLENDDDDAVDPHLERIKNEAGGDESDEEDSDFVADKDDEGSPTDDSGADDSDATDSGDEKEKPAKKESKKDLPSKASTSKKKSKDDEDGKKRKQKKRKDPNAPKRAMSGFMFFSKLERENLKKTNPGISFTDVSRVLGEKWKKLSVEEKEPYEAKAREDKKRYKDEISGYKNPQPMNIDSGNESDSA

SEQ ID NO: 55638 - protein, 98 aa, Zea mays
  Clone ID: UC-ZMFLMO17324F04_FLI.pep
LSKQGWILAQNPDSSCAILLKAKHFHSTDILHAKPSEGMSYTWRSILKGMDLLKKGDGQWFPRGLLRGPCTPRGPNMLTFVNDLTDPVTGQWDKDLIE

SEQ ID NO: 55639 - protein, 852 aa, Glycine max
  Clone ID: uC-gmropic025a05_FLI.pep
IGLDSEGMMAVSSACKDGSKVALDNGKYVRYTPEQVEALERLYHECPKPSSLRRQQLIRECPILSNIEPKQIKVWFQNRRCREKQRKEASRLQAVNRKLTAMNKLLMEENDRLQKQVSHLVYENSFFRQQTHNNNATLATTDTNTSCESVVTSGQRNLTPQQHPPRDASPAGLLSIAEETLAEFLSKATGTAVEWVQMPGMKPGPDSIGIVAISHGCPGVAARACGLVGLEPTRVAEILKDRLSWFRDCRTVDVLNVMSTGNGGTIELLYMQLYAPTTLAPGRDFWLLRYTSLLEDGSFVVCERSLNNTQNGPAMPPVQHFVRADMLPSGYLIRPCEGGGSIIHIVDHMVLEPWSVPEVLRPLYESSMLLAQRTTMAALRHLRQISQEVSQPSVTGWGRRPAALRALSQRLSKGFNEAVNGFADDGWSMLESDGIDDVTLLVNSSPSKMMGVSLVYNNNGFPSVSSSVLCAKASMLLQNVPPAILLRFLREHRSEWADSSIDAYSAAAIKAGPCSLPGARSGGFGGQVILPLAHTIEHEEFMEVIKLENMGYYRDDMSIPGDVFLLQLCSGVDEHAVGTSAELVFAPIDASFSDDAPILPSGFRIIPLDSGTDAASPNRTLDLASALEVGTTANKAASDNSAHSGSTKSVMTIAFQFAFEVHLQENIATMARQYVRSIIASVQRVSLALSPSRFGSHNAFHLPPGTPEAQTLARWICNSYRFYLGVELLKCEGSESILKSLWHHSDAVLCCSLKALPVFTFANQAGLDMLETTLVALQDITLEKIFDDNGKKTLCTEFPQIMQQGFMCIQGGICLSSMGRPVSYERAVAWKVLNEEESAHCICFMFINWSFV

SEQ ID NO: 55640 - protein, 302 aa, Zea mays
  Clone ID: UC-ZMFLMO17117A01_FLI.pep
IFGNFGEVVNVELSMDRMVNLPRGYGYIEFKKRADAEKALLYMDGGQIDGNVVKLRFTLQPRQRAVSPMKAPPPPPKRDVAQIEKGLSSAEKDAQQRPRESSPRRKPASPPRKRSPNRRAESPRRPPDPSPRRRPDSPPIRRRPDPSPVRRGGTPPRRRPLSPVRRRSPSPPRRHRSPMRPSPRRGRGSPSPRRRSPGPLRRRSPPPRRLRSPPRRPPPPRRYSRSPPRRPLRSRSISPRRGRGPLLRRGRSGSSYSRSPTPPPRKGPRRVSRSRSPRRPPRGRSISSDSRSSSSPSPRRGR

SEQ ID NO: 55641 - protein, 139 aa, Zea mays
  Clone ID: 700610759_FLI.pep
PGLGLLPAGGRFSALGFFPAGAEKRLPAAKSSGKEGGDKKGKKKAKKSVETYKIYIFKVLKQVHPDIGISSKAMSIMNSFINDIFEKLAGEAAKLARYNKKPTITSREIQTSVRLVLPGELAKHAVSEGTKAVTKFTSS

SEQ ID NO: 55642 - protein, 116 aa, Zea mays
  Clone ID: UC-ZMFLMO17001C05_FLI.pep
RRPLRPTTKMMFLLSTIKAILVSGGLWQSFHLNFRSATCTRLQGYHYIEYWGLLYTRSVYMPAFLNAGMLNMRLLHFFLYLRVKGENGDGRDKTHTHTHLYISSTYSLSIQLFMPA

SEQ ID NO: 55643 - protein, 139 aa, Zea mays; identical to SEQ ID NO: 38774
  Clone ID: LIB3118-006-H3_FLI.pep

SEQ ID NO: 55644 - protein, 641 aa, Zea mays subsp. mexicana
  Clone ID: UC-ZMROTEOSINTE024E05_FLI.pep
DVIRVVDDVANGIPSTYTNGVSSPPSTPSCSQNESLDPAAHLITGNEINNEALTSPSSVQDSPEDKIMQVAKAVSCGSEVVKADTLPYAMLRPIVVPSISRRSSRSEIKGAHDHRRSPCVPSTRRDIPILRRPPSPVVLSVPRVPRPPPPSPAGESRKRGFPIVRSGSSSPRHWGMRGLFSEDKIFHRAQFCLDGPEVVWPSWGNKGTSGTLVQTIEDTVLQDHLVKISQLSCDQHPDVALPVQPLDMLNGSSHKASLSLMHNALHEEIDQFCKQVAAGNLVRRPYINWAVKRVTRCLQVLWPRSRTNLFGSNATGLALPTSDVDLVVSLPPVRNLEPIKEAGILEGRNGIKETCLQHAARCLTNQDWVRSDSLKTVENTAIPVIMLVADVPCDTNMSNEYSSVLDGSQDYSVNMLGEQGSPPRSDTSSSEGSNMLMCSKLNKDDCDIVQSIRLDISFKSPSHTGLQTTELVRELSQQFPAVIPLALILKKFLADRSLDHPYSGGLSSYCLVLLIVRFLQHEHHLGRPINKNLGSLLMDFLYFFGNIFDPRHMRISIQGSGIYLNRERGQSIDPIHIDDPHCPANNVGRNCFRIHQCIKAFADAFAVLENELLQFSSECSMPVSSFNILKKIIPSIDSDEL

SEQ ID NO: 55645 - protein, 397 aa, Zea mays
  Clone ID: LIB148-026-F11_FLI.pep
RFAVAVQIQSQATMICVDNSEWMRNGDYPPSRFAAQAHAFAVLSGAKTEANLESTVGLVAMAGKGVSVLVPPTNDFGKVLSGMNGLEIGGEANLTAAIQVAQFALKNRQNKQLRQRIIVFVGSPVIDEKNWLEVIGKNLKKNNVALDVVNFGESDNEKPEKLEALVAAVNSGGNSHIIHIPAGRDLSDALFSSPIILSEDRGSDSAAAARGASGFEFDVDPNVDPELALVLLISMEEERLRQEAAAKKAREESSKTENEGQSSTSNGDIVMADAEPEPNSYTEDKGLHCKDEGQLLEKARKIRIEDYISFEELFDGVTSDTMSAFQEEETCTQSDAGKDFGHQPFEPSLSDVELLNDLSNKVALEWEELFIDPSKGHKVFILPRSMKKDICSLAEVY

SEQ ID NO: 55646 - protein, 180 aa, Zea mays
  Clone ID: UC-ZMFLMO17335B05_FLI.pep
YSYCFTLRLYNGDWHSDPLGACTVALSMSKVMGQDAKPETVPEALAACIEETCSPAYRHTGGFRFAIGLVDDIIAILSLGQNALICALCDFHRLIEVGKSMLKVEKVGKTERAQNSPKLRSAARKLFFMTCWVHEQPDEAWPSLAHIVQVQKASMEELETGNWKADRKSKPQSAVLIEEL

SEQ ID NO: 55647 - protein, 511 aa, Zea mays
  Clone ID: 700478009_FLI.pep
GGGPGAMEYLTSVLSSKVYDVAIESPLQLASKLSHRLGVNIWIKREDLQPVFSFKLRGAYNMMAKLSREQLERGVICSSAGNHAQGVALSAQRLGCDAVIVMPVTTPEIKWKSVERLGATVVLEGDSYDEAQSYAKLRCQQEDRTFIPPFDHPDVITGQGTVGMEIVRQLQGPLHAIFVPVGGGGLIAGIAAYVKRVRPEVKIIGVEPSDANAMALSLYHGKRVMLEHVGGFADGVAVKAVGEETFRLCRELVDGIVMVSRDAICASIKDMFEEKRSILEPAGALALAGAEAYCKYYNLKGDTVVAITSGANMNFDRLRLVTELADVGRKREAVLATFLPEEHGSFKKFTELVGRMNITEFKYRYDFNAKDALVLYSVGIYTDNELGAMVDRMELAKLKTVNLTDNDLAKDHLRYFIGGRSEIKDELVYRFIFPERPGALMKFLDAFSPRWNISLFHYRAQGETGANVLVGIQVPPVDFDEFKSHADNLGYEYMSENNNEIYRLLLRDPEV

SEQ ID NO: 55648 - protein, 127 aa, Zea mays subsp. mexicana
  Clone ID: UC-ZMROTEOSINTE029C07_FLI.pep
LACTCGIHFPSFTNMYSFGSLSGNKGLCGVPTLPACALFWEKGGLNKTGKIALGASFGFVLLVILIVVYILCIRRGPYDYDFDFPQDLTSISAISAKRNRYQRAKSVMLAEMEAHNPDGFYTNGSPH

SEQ ID NO: 55649 - protein, 384 aa, Zea mays
  Clone ID: 700615854_FLI.pep
DKCGDTDDCVSTSEAAEQAAKLPEVNINNLPVPGEVEFINGGPPCQGFSGMNRFNQSPWSKVQCEMILAFLSFAEYFRPRFFLLENVRNFVSFNKGQTFRLAVASLLEMGYQVRFGILEAGAFGVAQSRKRAFIWAAAPGEMLPDWPEPMHVFASPELKITLPDGQYYAAARSTAGGAPFRAITVRDTVGDLPKVGNGASKLTLEYGGEPVSWFQKKIRGNMMVLNDHISKEMNELNLIRCQHIPKRPGCDWHDLPDEKVKLSNGQMADLIPWCLPNTAKRHNQWKGLYGRLDWEGNFPTSVTDPQPMGKVGMCFHPDQDRIITVRECARSQGFPDSYEFAGNIQNKHRQIGNAVPPPLAYALGRKLKEAVDKRQEASAGVPAP

SEQ ID NO: 55650 - protein, 208 aa, Zea mays
  Clone ID: UC-ZMROB73006E07_FLI.pep
SCTVDGTKLVVSGGCADSGVLLSDTYLLDVTMERPVWREIPASWSPPSRLGHSLSVYDGRKILMFGGLAKSGPLRLRSSDVFTLDLSEDKPCWRCITGSRMPGAGNPAGVGPPPRLDHVVVSLPGGRVLIFGGSVAGLHSASKLYLLDPTEDKPTWRLLNVPGHPPRFAWGHSTCVVGGTKAIVLGGQTGEEWTLTEIHELSLASSLV

SEQ ID NO: 55651 - protein, 473 aa, Zea mays
  Clone ID: 700801716_FLI.pep
FAAVVLKCEYAVRGEIVIHAQRLQQQLQTQPGSLPFDEILFCNIGNPQSLGQQPVTFFREVLALCDHPCLLEKEETKSLFSADAISRAKQILATIPGRATGAYSHSQGIKGLRDAIAAGITSRDGFPANADDIFITDGASPGVHMMMQLLIRNEKDGILCPIPQYPLYSASIALHGGALVPYYLDEKTGWGLEISDLKKQLEDARSKGIDVRALVVINPGNPTGQVLAEDNQYDIVKFCKNEGLVLLADEVYQENIYVDNKKFNSFKKIARSMGYGEDDLPLVSFQSVSKGYYGECGKRGGYMEITGFSAPVREQIYKVASVNLCSNITGQILASLVMNPPKVGDESYASYKAEKDGILQSLARRAKALEDAFNTLEGFSCNKAEGAMYLFPQIHLPHKAIEAAKAAKKAPDAFYALRLLESTGIVVVPGSGFGQVPGTWHVRCTILPQEDKIPAVITRFKAFHEAFMAEYRD

SEQ ID NO: 55652 - protein, 317 aa, Zea mays
  Clone ID: UC-ZMROB73024F01_FLI.pep
QPATSLSLLQLSSAQLSKQIVRSIVVDYGRRLLLAATTAPASTRGGLVSPPAECHHQQLGGVVDAVPRGGPGGAAGRELRAGQPLPLRVVDARHLLLRLVRRGLRQRHGPRRRPHRVRRRQPDGRHPGRHRQPDQPPHVGPAPPPGHLRRHPGLARAARQPHPAHHLLHRRLRPGAVVPVAANGAHPPRPLLQLPRRRHPGDARRPPRPLQHRPQPQPPLGPRPAAAPKQVRRRPGGVPHAVAQQPLRQHPRRVRLRQLRVPGPVAQRLRRRRVGRVRQGEAAAALGPLPQRLRLQPHGRGPAGAAGVPGPEPQRHP

SEQ ID NO: 55653 - protein, 95 aa, Zea mays
  Clone ID: LIB189-006-C11_FLI.pep
VQHILSENSAKTNCLNLNHEAKTGYQCRGERVTQQRKRMTMQEISSLLFLANASVVNRFAAACGSLIDFTRSTASWFFITFHNPSLASMTNPTRG

SEQ ID NO: 55654 - protein, 216 aa, Zea mays
  Clone ID: UC-ZMROB73080C11_FLI.pep
AALASGTMGKLHGCVLIAGTGCIAYGVTEDGKVARAAGAGPVLGDWGSGYGIAAQALTAVIKAYDGRGPQTRLTRDILEKLDLSSPDEIIGWTYADPSWARIAALVPVVVSSAEDGDEVANKILHDSVQELADTVIAVVQRLRLCGEDGKDMFPLVLVGGVLEGNKKWDISGEVIKCISKVFPGTDPIWPEVEPAIGAALLAWSHHHKGLKLENGS

SEQ ID NO: 55655 - protein, 201 aa, Zea mays
  Clone ID: 700466155_FLI.pep
RIQIEYCRFVLPVLPLALMFSGYCLASMSQSKGKNQHRKGSLSRLQLSVILLVITNVPMALYMSLFHQRGTEDVMYYLSKEAYDGRVRSVLFLMPCHSTPYYSTLHYNLPMRFLDCTPSDSKGTLDESDRFLTSPSEFVGDVFGNLSAFSHIVLFESEERHVLQLLLHNSFLEMRRFFHSHFKIDRDLQSAVVVYSWRDVL

SEQ ID NO: 55656 - protein, 318 aa, Zea mays subsp. mexicana
  Clone ID: UC-ZMROTEOSINTE017H04_FLI.pep
RFDHGAPYFTVTNGEVARVVGGWEARGIVAEWKATFACFDLATGKFTDFEKEGTAKKYVGVPAMNSICKSLCLEDGVVAKFGVTVGKMDWLQDRSSWSLASLDGKDLGYFDYVVATDKNIASPAFSGLTGRPPPLDLSSFPRLPTALQDIPVRPCFALMVAFSEPLATVPVHGFSFNNSNSLSWAFCNSSKPGRACVPPNRQSWVLHSTTEYASKVINNIGPRKPSAEALAKVAEELFREFQATGLSIPQPIFMKAHRWGAAFPAIAISGDDKCVWDKSTNLAICGDFCTSPSVEGAVLSATRGVSKILECLRCPSSI

SEQ ID NO: 55657 - protein, 207 aa, Zea mays
  Clone ID: 700619204_FLI.pep
CLRPPSAGAEMPKAASAASSSSLAPPPDTKRVGRRDFVLRSSEIATLAAIFHFSGSKPSYLGVQKSPPSLALCPATNNCVSTSEEISDSNHYAPPWNYNPKDGRSGKPITKEEAMKELIEVVTKTKPDNFTPRIVEKKDDYIRVEYESPIFGFVDDVEFWFPPGNKTMVQYRSASRSGFIDFNANKKRVKELRLALEKKGWASESNF

SEQ ID NO: 55658 - protein, 364 aa, Zea mays subsp. mexicana
  Clone ID: UC-ZMROTEOSINTE019A03_FLI.pep
ENGTPVEVQNRDTNITEINNEIKAEPPSTSHSTSPGDLLLADLLGPLAIEGPPAVEQNPAQGLNANQSPAGDLALATLDDQSNSVQPIVNVEEKFHILCTKDSGVLYEDPYIQIGLKAEWRAHHGRLVLFLGNKNTSALTSVRALILPPSHLKMELSSVPDTIPPRAQVQVPLEVANLLASRDVAVLDFSYAFGTSLVDAKLRLPVVLNKFLQTITLTPEEFFSQWKALTVHSLKVQEVVKGVKPMPLSEMANLFMSLHLAVAPGLDNNPNNLVACTTFFSEATRAMLCLIRVETDPQDRTQLRLTVASGDQYLTFELKEFIKEHLVDIPRTQVAPPRAAVQPQLPTTAPGTYNDPGTMLAGLL

SEQ ID NO: 55659 - protein, 193 aa, Zea mays subsp. mexicana
  Clone ID: UC-ZMROTEOSINTE021A05_FLI.pep
LCLKVPQPILATDRVRRPSDCSELKYKSRSQFGTKVILKDGQISLMGEGSPSIAGSVAGKPSDGRLVNSYNCDLEDLPMMLLQQVASQVIHWLHDEAVVLGMNVTRDFLCLCLDLDQGETLGLVAHVDPDDTYGCVSWYLTLDHPTEEGKMSAGSPELEERRLLGYLSPELLYSTLMDLVKLCSTGVQRCDSD

SEQ ID NO: 55660 - protein, 625 aa, Glycine max
  Clone ID: 700999823_FLI.pep
CNCIGTQHLYSYMQLGDSSVLEISSHTQPEMAVTAAVLPPEEVAHDGSDNSGDGGGGEMIGMDLDANSGEGNEGNNKMSFGGNRWPRQETLALLKIRSDMDTVFRDSSLKGPLWEEVSRKLAELGYQRSAKKCKEKFENVYKYNKRTKDNKSGKSHGKTYKFFDQLQALENQFTTVSYPPKPQPTSTLATTNPLTLPTRPSDHGNKVISYVTTFPSTNPTLISPSPQTNTTTTTTTTTSTTNPRDSSRPQTNNNNNSVTHSLPNMNTSFSTTTASTSSSTASDEDLEERYRRKRKWKDYFRRLTRKVLLKQEEMQKKFLEAMDQRERERVAQQDNWRMQEMARINREHEILVQERSTAAAKDATVIALLQKMYGQQNPTQQVEVEPPPQQKQTIPQSLPPILMPNNNFEVKKINNGHSVTSTTTGTVATAATTTTTSPVNSSSSRWPKAEVHALIRIRTSLETKYQENGPKAPLWEDISIAMQRLGYNRSAKRCKEKWENINKYFKRVRESSKERREDSKTCPYFHELEALYKEKSKSSKNPFGIFQNMKPNEMMLMMTEPLMVQPEQQWRPPPQSLEEGVGMENASEEYHENEENGGDDDDNIEEDGDSVEDEGANPCEIATNN

SEQ ID NO: 55661 - protein, 124 aa, Zea mays subsp. mexicana
  Clone ID: UC-ZMROTEOSINTE036C07_FLI.pep
LPKKKMKQNENLLHTVTVAASSNAVTPGSSFPSNNSKLAPPPVEMWLITSATPTFSTAATESPPPMIVVTPLRLSSANFFATASVPTANLSYSKTPMGPFQMTVWVVSRAALNAAMESGPISSP

SEQ ID NO: 55662 - protein, 79 aa, Glycine max
  Clone ID: JC-GMST02400044H02_FLI.pep
TVVINLVIWDKHSTWVGTVGLLICMLGGIMYQQSTSKPKAAKQVSAQENEEEEQKLLEMQVNSETNINNNEVNKPREES

SEQ ID NO: 55663 - protein, 688 aa, Zea mays
  Clone ID: UC-ZMFLMO17136H02_FLI.pep
WVPRSQSAQDQLLEYTDEEVLEKFQPNETLEHFMLVKYTGNVFPTWMMNKLTSLPYLVNLCLFHLHNCSALPPIGHLQNLRYLHIKDMPNLTNLEMGLSGRPVSLGKLTHLKLEALNLEELSILLSANNESPCFMFPNLEELSVLSCSKLVFKPSVPKCAKYVIKESNMVLSCWQPLGPFSSPPIEKVEISGCVMPSGWLQWLRSIQTLEKVVIDGEAFSSFELQKIYAFQEASGSKISKETVSSSRTNMSRELTTEDGALKAIGIDNSTIKHIPRFNTTSELSVDTISSSKVSTPSKEIPSTLRRPDKSKMPALIPGDGSLNLSLKQVQKVTHNFSPLFELGEGGTWAVYRAVLSDNQVVIIRRAKKGHVQEAKHLMEVKLLTKINHWSLVRFLGFIDEKDECIRITEYVPNGTLREHLHDQRKRILNFNQRIVIALDIAIALTYLHLCSGDALICYNLRTSNILLTESYRAKVCCSELSKSGNIVLLKGTGGYIDPEYLETSELTAKSDVYSFGIILLEIISSHGPQDWDVLMNHRQSSVVQWALEKFYDDLMNEILDYRMEDRVDGDVVRDLLSLALSCVVSRGADRPSIVVVGERLWKIWQDHRRNVGEQHEYQGSWAEFIEQEGILRHHKCVLKRSWEPSTTQQDWSVYVRQIELVQEAYDTPWGEEIFSGSVSLDDITVYSR

SEQ ID NO: 55664 - protein, 271 aa, Sorghum bicolor
  Clone ID: LIB3478-058-G8_FLI.pep
LIAGGPFVLPLAHKHNVKILPADSEHSAIFQCIQGLSKGALRRIILTASGGAFRDWPVDRLKDVKVADALKHPNWNMGKKITVDSATLFNKGLEVIEAHYLFGAEYDDIEIVIHPQSIIHSMVETQDSSVLAQLGWPDMRIPILYTLSWPDRIYCSEVTWPRLDLCKLGSLTFKAPDNVKYPSMDLAYAAGRAGGTMTGVLSAANEKAVELFIDEKISYLDIFKVVELTCDAHRNELVRSPSLEEIIHYDLWARRYAASLQPSSGLSPVPA

SEQ ID NO: 55665 - protein, 387 aa, Zea mays
  Clone ID: UC-ZMFLB73151F04_FLI.pep
RHMDASTEVTDAIGAVGFDNGAAGKLPPSDSVEGHAEEHDVLADGAHSGESEVINPSEEVEMEATSQSQDIKPRVPEGVQGHSMKVGTKSQRQSPRGGDKSQTRKSSFSPSYPKAPIARVSDPDLVDCSLSNGDAGSSKKKAEKSSFRPVAKETPSLEDSNEKKKTQKASNQHSVKKDIEEESNESVKPQRVGSTPSYGFSFKCDERAEKRREFYSKLEEKIHAQELEKSNLQAKSKETEEAELKMLRKSLNFKATPMPSFYKEPPPPKVELKKIPTTRARSPKLGRSKNTSSGGTEGNPNPPARSGRLSLDERVSQNGVKKAPAANAVKKPQRKSLPKLPSEQTTKVDIAPSVPSAEELENKSPTKGLDREPIRAQITPDEPGLTA

SEQ ID NO: 55666 - protein, 245 aa, Triticum aestivum
  Clone ID: LIB3908-016-A6_FLI.pep
YDQVVHDVDLQKLPVRFAMDRAGLVGADGPTHCGAFDVAFMACLPNMVVMAPSDEAELLNMVATAAAIDDRPSCFRYPRGNGIGVPLPENYKGTAIEVGKGRIMIEGERVALLGYGSAVQYCMAASSIVAHHGLRVTVADARFCKPLDHALIRSLAKSHEVIITVEEGSIGGFGSHVAQFMALDGLLDGKLKWRPVVLPDKYIDHGSPADQLVEAGLTPSHIAATVFNILGQAREALAIMTVQNA

SEQ ID NO: 55667 - protein, 309 aa, Zea mays
  Clone ID: UC-ZMFLB73149G09_FLI.pep
RIFLLPVSSPSLLRPFLSPISARVRSSRQVAMMQQPPPQQPQPGMAPPPPPQAAGGQPPQWGGIPPPMAQQYGAPPPQQPPAMWGQPPPQAHYGQAPTPQQYYAAPPVPVQAPAAPAAADEVRTLWIGDLQYWMDENYVFGCFSNTGEVQNVKLIRDKNSGQLQGYGFVEFTSRAAAERVLQTYNGQMMPNVDLTFRLNWASAGEKRDDTPEYTIFVGDLAADVTDYLLQETFRVHYPSVKGAKVVTDKLTMRTKGYGFVKFGDPTEQARAMTEMNGMPCSSRPMRIGPAASRKNTGGVVQERDICWWA

SEQ ID NO: 55668 - protein, 474 aa, Brassica napus
  Clone ID: LIB4153-013-B3_FLI.pep
SLKLLSFSMATFALKSFTGLRQSPTDQITFVSHVPSSLSRSQRRTSLKVTASRASPKLANRSLRVAVIGGGPAGGAAAETLAQGGIETILIERKMDNCKPCGGAIPLCMVGEFNLPLDIIDRRVTKMKMISPSNIAVDIGRTLKEHEYIGMVRREVLDQYLRERAEKSGATVINGLFLKMDLPENWDSPYVLHYTEYDGKTGATGQKKTMEVDAVIGADGANSRVAKSIGAGDYDYAIAFQERIRIPDDKMTYYEDLAEMYVGDDVSPDFYGWVFPKCDHVAVGTGTVTHKGDIKKFQLATRNRAKDKILGGKIIRVEAHPIPEHPRPRRLSKRVALVGDAAGYVTKCSGEGIYFAAKSGRMCAEAIVEGSQNGKKMIDESDLRKYLEKWDKTYLPTYRVLDVLQKVFYRSNPAREAFVEMCGDEYVQKMTFDSYLYKRVAPGSPLEDLKLAVNTIGSVFRANALRREIEKLNV

SEQ ID NO: 55669 - protein, 385 aa, Zea mays
  Clone ID: UC-ZMFLB73157B04_FLI.pep
ASKLCLSGTLDPAAVRGKIVVCDRGVNARVEKGAVVKAAGGAGMILANTAASGEELVADSHLLPAVAVGRAVGDKIREYAARGGGRPMAMLSFGGTVLGVRPSPVVAAFSSRGPNTVVPEILKPDMIGPGVNILAAWTGVAGPTGLAKDGRRTRFNIISGTSMSCPHISGVAALMKAAHPDWSPSAIKSALMTTAYTVDNTNSSLRDAADGSVANAFAYGAGHVDPQRALSPGLVYDISTHDYAAFLCSLNYSAPHVQVITKASNVSCGAPNKSRPGDLNYPSFSVVFGQKRKTKPAAALRFRRELTNVGPAASVYDVKVVGPESVAVTVTPARLTFRQAGQKLRYYVTFASRARQGHAKPDFGWISWVNDEHVVRSPVAYTWKM

SEQ ID NO: 55670 - protein, 442 aa, Brassica napus
  Clone ID: LIB4175-001-G4_FLI.pep
NSMGHENAAVCETQQHDDAASPGFKLVGFSKFVRKNPKSDKFKVKRFHHIEFWCGDATNVSRRFSWGLGMRFSAKSDLSTGNMVHASYLLTSGDLRFLFTAPYSPSLSAGEAQPSATASIPSFDHASCRSFFSSHGLGVRAVAIEVEDAESAFSISVANGAVPSSPPNVLNGAVTIAEVKLYGDVVLRYVSYYNGTVSFLPGFESVDDTSSFPLDYGIRRLDHAVGNVPELGPALTYLAGFTGFHQFAEFTADDVGTAESVLNSAVLANNDEMVLLPINEPVHGTKRKSQIQTFLEHNEGAGLQHLALMSEDIFRTLREMRKRSGVGGFDFMPSPPPTYYKNLKKRVGDVLSEEQIEECEELGILVDRDDQGTLLQIFTKPLGDRPTIFIEIIQRVGCMKRDEEGKVYQSGGCGGFGKGNFSELFKSIEEYEKTLEAKQLVG

SEQ ID NO: 55671 - protein, 366 aa, Allium porrum
  Clone ID: LIB4539-005-B4_FLI.pep
CSNKKMLGIARRRLGCGNITSSVRYYAGAAKEMTVRDALNSAIDEEMAADPKVFLMGEEVGEYQGAYKISKGLLDKYGPDRVRDTPITEAGFTGIGVGAAYYGLRPVVEFMTFNFSMQAIDHIINSAAKSNYMSAGQINVPIVFRGPNGAAAGVGAQHSQCYAGWFASCPGLKVLCPYSSEDARGLLKAAIRDPDPVVFLENELLYGESFPVSEEVLDSSFCLPIGKAKIEREGKDVTITAFSKMVGSALQAAEILSKEGISAEVINLRSIRPLDRAAINASVRKTNRLITVEEGFPQHGVGAEICAAVVEESFGYLDAPVERIAGADVPMPYAANLERMAVPQVDDIVRAAKRACYRSVPMAAAA

SEQ ID NO: 55672 - protein, 535 aa, Zea mays
  Clone ID: UC-ZMFLMO17133H12_FLI.pep
SSVFPLRGSSDLPQPQTSNSTDRRKASTINRTAKGQYAKLSPRVPTSQPLVSCDRRSYGRNDDSSNNQKSSSLLVTESSTRRQQLPRNSSVSMQKNKNSTSPKLLQRKLDPERRARPPIPSAESNKSERQSGDRNNSETVSPRSKFRRKLVRPQGDDGMPIGLNNRTRSLYQHDNDMSIRSDGSISVASELDIISNDRSTGVNISNFEQGIGTPSGRNPQKVKTSYDANMDVPSVDPSAAISERPSPVSVLDSSFDQEDLFPTSRTPNSLAVDDERETLEEPWKPSVAIQSKNNKLANVASLLEKLQQLSVNKDEDAPPVDHIAFLCETESPDHRYVSEILLASGLLMKDLGSGQTGLQLHSSGYPINPDLFHVLEQRKAGWVSTPDGIHQSRSGTKSDPRRAHRKLMFDTVNELLLQKFEKETAVYALSSFTRAKDPPAKTFSGQQLPKFISSGIEELDMERSSISQKDSSVIPDAEILRRLQGWTSFSKELPGMVLEIERSIFKELVDEVVHGESADGPEMKAAGRRRRRLFA

SEQ ID NO: 55673 - protein, 466 aa, Allium porrum
  Clone ID: LIB4539-007-E5_FLI.pep
MALKLPISKQFSGVSFLDSSRGAFQQHKVDFCSKRKARATNSYSKRAQCSIQQGPPSAWPGRAVLEEDRKIWDGPKPISVLGSTGSIGTQTLGIVAEIPDKFKVVALAAGSNVTLLADQIKRFNPQLVAIRNESLVDELKEAIRDVEHKPEIIPGEEGVIEVARHSDAVSVVSGIVGCAGLKPTVAAIEAGKDICLANKETLIAGGPFVLPLAQKHNIKILPADSEHSAVFQCLQGLPEGALRRIILTASGGAFREWPVEKLKEVKVADALKHPIWTLGKKVTIDSATLFNKGLEVIEAHYLFGADYDNIDIVIHPQSIIHSMIETQDSSVIAQLGWADMRIPILYTMSWPERIYCSEVTWPRFDLCKLGKLTFEAPDRLKFPSMDLAYAAGRAGGTMTGVLSAANEKAVELFVDEKISYLDIFKVVELTCSAHRDELNTSPSLEEIIHYDLWARDFAARLQPTLC

SEQ ID NO: 55674 - protein, 583 aa, Zea mays
  Clone ID: UC-ZMFLMO17181D05_FLI.pep
HPISPPLMAALPLLRRLLAHRRPLSTTATTPAASSSKPPTPEAVLYAIHSLSKDPSQALAVFRRSAAAGKPVGSAAYNLMLRTLASHPSSAQRHFWPFLREMQEAGHSVDQGTYLAALASFKKASLTADYASLTAHYDKFRKGDKSAAAAAAEAVRDHDAAGLDSRLADIGLLPFTETAVITVLRELREHPIKALAFFRWAGRQQGYTHSSVSYNAMARVLGREESVPEFWELIREMKGAGMYVDIDTYLKLSRNFQKRHMVREAVELYELMMDGPFKPGQQDGPIIIRRISLGPSPDLELVNRVVNKFEAVWGVKTKELLDGVHRALTSNGLFDKAAEIVQTMRDQGHQPDNVTYSQLVYGLCKADRLEDARKVLDEMEAEGCAPDLKTWTLLIQGHCVAGDVDKAVQYFTEMIEKGLDADGDLLDVILKGLCSHEKVEEAYSLFVEMVDKAELRPWQGTCQHLIGDLLRVNKLEEALALLKTMKTCKFPPFADPFPPYIAKYGTVEDARNFFKALTVKTSPAPAAYLHVLKLFFAEGRYSEAQDLLYKCPIYIRKHPHVAKLFESIKIESASASCLGSTKQ

SEQ ID NO: 55675 - protein, 97 aa, Allium porrum
  Clone ID: LIB4502-004-G9_FLI.pep
GASLHSCMTPHGPDTKSYEAMIAGGENAEPYRIRDTMAFMFESCLIPRVCPWALESPYRDSDYYQCWIGLKSHFYVDNEKSANVNDAGEVHNGENVK

SEQ ID NO: 55676 - protein, 579 aa, Zea mays
  Clone ID: UC-ZMFLMO17011B01_FLI.pep
SNEDTWKIFPPSWHVDYLLCIQFCKITRAQLVDILNNLKEKPDVATLLLAFQRTIEFEEELAEKFSGGTTNARNKETTSDDEDEGGGHNKIVSDIRKKYEKKLAAPSDEDKDKQKDLSVPGAGFNFHGIISSCFEPYMTVYIELEEKSLVDQLEKLVQEERWEIEEGSQTNILSSSMQVFLVIRKSLKRCSALTKNQTLFNLFQVFQRILKAYAAKLYARLPKGGTGIVAAATGTDGQIRTSDRDERMICYIVNTAEYCHQTSGELAENVAKMINPQFADKVDMSEVQDEFSAVITKALMTLVHGLETKFDAEMVAMTRVPWATLESVGDQSEYVNGISSILSSSIPVLGTLLSPTYFQYFLDKLAASLGPRFYLNIYKCKHISETGAQQMLLDTQAVKTILLDIPALGKQSTGAASYSKFVSREMGKAEALLKVILSPVDSVANTYRALLPEGTPLEFQRILDLKGLKKADQQAILEDFNKHAPAPAPAIKHPAVAPTVATPVATASVQIVPSVATPAVSITPSMASLKGALANQEDVLARAAALGRGAATTGFKRFLALTEAAKDRKDGPFRKLFNA

SEQ ID NO: 55677 - protein, 223 aa, Allium porrum
  Clone ID: LIB3803-007-D1_FLI.pep
TSSVSSVCPSFTQSKPRSLFSVSQFLPPQPGRPSRTTLSVRPISAVNLEALTVENPSKSKPAPSLPFRVGHGFDLHRLEPGLPLIIGGIDIPHDRGCEAHSDGDVLLHCVVDAILGALGLPDIGQLFPDSDPRWKGAASSVFMREAVRLMHDAGYELGNIDATLILQKPKLSPHKEKIRASLCDLLGADSSVVNIKAKTHEKVDSLGENRSIAAHTVVLLMRK

SEQ ID NO: 55678 - protein, 196 aa, Zea mays
  Clone ID: UC-ZMFLMO17118A01_FLI.pep
FHLLPYPSSSQGEQSHSTSRGPVNQQGNGRSTFLAFRHLSHAVLFPALRRTRRGDDSCDSGVIAVARRRRELRQGAGDRCHASTQHAPSHALHPGSRARAHRPDAGDEEVQTVHHPRLSGRVDRAPPLHARQERRRQRVATWPRRGADAEAPSRPRGQRARVGALREQPGAWVAQGIPGRFRSGSSGFFNFGAMRS

SEQ ID NO: 55679 - protein, 428 aa, Zea mays
  Clone ID: UC-ZMFLMO17058A07_FLI.pep
QNTDGNVIAIMLDTKGPEVRSGDVPEPIMLKEGQEFNFTIKRGVSTEDTVSVNYDDFINDVEAGDILLVDGGMMSLAVKSKTTDTVKCKVVDGGELKSRRHLNVRGKSATLPSITEKDWEDIKFGVENGVDFYAVSFVKDAKVIHELKDYLKSANADIHVIPKIESADSIPNLQSIIAASDGAMVARGDLGAELPIEDVPLLQAEIVQTCRSMEKPVIVATNMLESMIDHPTPTRAEVSDIAIAVREGADAIMLSGETAHGKYPLKAVKVMHTVALRTESSLYNPTTSPSLVASAQGLQNEDFSPSQLSKMFGSHATMMANTLRTPIIVFTQTGSMAVLLSHYRPSSTLFAFTNEERVKQRLALYQGVIPIHMQFSDDAEETFSRAISSLLKAQYVKKGDYVTLVQSGVTSIWREESTHHIQVRKVQV

SEQ ID NO: 55680 - protein, 311 aa, Brassica napus
  Clone ID: LIB4156-010-D3_FLI.pep
YVLTHSFSNIIQMAGKEDSETFYSAATPLAFELGSLPTTVIPADPSATDLTAPPKPVIITSPTVAGTYPVVLFFHGFYLRNYFYSDVINHVASHGYIVVAPQLCKILPPGGQVEVDDAGKVINWTSKNLKAHLPSSVNANGNYTALVGHSRGGKTAFAVALGHAATLDPSIKFSALVGIDPVAGISKCIRTDPEILTYKPESFDLDMPVAVIGTGLGPKSNMLMPPCAPAEVNHEEFYIECKATKGHFVAADYGHMDMLDDNLPGFVGFMAGCMCKNSKRKKSEMRSFVGGIVVAFLKYSLWVKSQRFDRL

SEQ ID NO: 55681 - protein, 273 aa, Zea mays subsp. mexicana
  Clone ID: UC-ZMROTEOSINTE070D09_FLI.pep
LNPIIQCFGISVAVSVSHDLFVPSGFQVCHSLGGGTGSGMGTLLISKIREEYPDRMMMTFSVFPSPKVSDTVVEPYNATLSVHQLVENADECMVLDNEALYDICFRTLKLTTPSFGDLNHLISATMSGVTCCLRFPGQLNSDLRKLAVNLIPFPRLHFFMVGFAPLTSRGSQQYRSLTVPELTQQMWDSKNMMCAADPRHGRYLTASAMFRGKMSTKEVDEQMINVQNKNSSYFVEWIPNNVKSSVCDIPLVASPCLPPSWVTPPRFRRCSGV

SEQ ID NO: 55682 - protein, 108 aa, Zea mays
  Clone ID: LIB3068-024-B10_FLI.pep
LAGFADIVGRRYGSAKLPFNRKKSWAGSISMFISGFLLSAMMMLYFSSLGYIDVIWEEALGKLALVALAATVVECVPVTEVVDDNISVPLATMLVAFLLFSSNRTIVN

SEQ ID NO: 55683 - protein, 70 aa, Zea mays
  Clone ID: LIB3088-045-A7_FLI.pep
SAMMMLYFSSLGYIDVIWEEALGKLALVALAATVVECVPVTEVVDDNISVPLATMLVAFLLFSSNRTIVN

SEQ ID NO: 55684 - protein, 229 aa, Zea mays
  Clone ID: UC-ZMFLMO17126C11_FLI.pep
PPAVLSSPTRTRAITPTAASRPPPPATSCQTAKSGRVESTVGRALDLAVDGAAAAAAAAAVSLAGAAVRGEALLGAGDLLPVAGPLLGARHGGRHHAAAGVPAGGPAVAAAPPAGAHPGDAEPAHPGDAEAREGRARGAGAGRLHAGLLRDRGRLGGRELGVHGDARARGGGERGVEAEQQQQEERGVARSRRGRGRRHGCGLRWLLRSAFCLLLAEVGVRLRVRLLLA

SEQ ID NO: 55685 - protein, 87 aa, Zea mays
  Clone ID: LIB4726-013-C10_FLI.pep
PSRPAGSISMFISGFLLSAMMMLYFSSLGYIDVIWEEALGKLALVALAATVVECVPVTEVVDDHISVPLATMLVAFLLFSSNRTIVN

SEQ ID NO: 55686 - protein, 378 aa, Zea mays
  Clone ID: UC-ZMFLMO17211G10_FLI.pep
GRVTAISQVGRGPGWWRAVACSTLLFTVACYSIYRLYRSTEIPLFCRCMLCAVGVQRKTDSQSMVLPKSSRVCCMASTLQLLFSIAITALAFFLHPCASTDEFHRELYGWSNGIATWYGAADGAGTDGGACGYQNAVDQPPFSSMIAAGCSSIYDSGKGCGSCYQAVCTGNDACSGNPVTVVITDECPDCPCPDEQVHFDMSGTAFGALAKPGQESQLRGAGAIQIQYTRVQCEWPGVDVTFSVEPGSNPNYLAVLIEYEDSDSDLDSVDMMQTQGGTSGQWVPMQQSWGAVWKINSGSVLQGPFNIRLTFSSGRALVASNAIPAGWNAGVAYRSGGVAVTRARPRSGACRGYEAAGTLDGLVHRHVVVLLFLVLLTL

SEQ ID NO: 55687 - protein, 105 aa, Zea mays
  Clone ID: UC-ZMFLMO17233B03_FLI.pep
QKRKIKALAVLLQSPKLHSMDYPFLLPSIHNRRKHYFCWNYSSKESHSYLSSVIAAAQERAIAVLSLPAGPGGRMCGRCPRTGPPILQSPSLVLSALSSVGFLCT

SEQ ID NO: 55688 - protein, 75 aa, Sorghum bicolor
  Clone ID: LIB3481-019-E6_FLI.pep
ILSCINLFLIIRSHLFRYMHYFHTFGFIEETWYMALGFLVVSVAATLVESHPISTELDDNLTVPLTSFLVGSLIF

SEQ ID NO: 55689 - protein, 438 aa, Zea mays
  Clone ID: UC-ZMFLMO17001G01_FLI.pep
AGRPQYDQHGKAVILVHEPKKSFYKKFLYEPFPVESNLREHLHDHINAEIVSGTISNKEEAIIYLTWTYLYRRLVVNPAYYGLEDTETNTLNSYLSRLVETTFEDLEDSGCIKVDDHSVKYLILGKIASQYYLSYLTVSMFGSNIGPNTTLEVFLHILSAASEFDELPVRHNEDNLNRILSGNVPYPVDQHHLDDPHVKANLLFQAHFSRAELPISDYVTDLKSVLDQSIRIIQAMIDVCANSGWLTSALTCMHLLQMIIQGLWFERDYESLWMLPSMNDDILDHLKSRGVSTVPSLLDLSREELRRVLQPFSASELYQDLQHFPHVDVKVKLHNEQERSKPPTLNIRLQLKNSRRSASRAFAPRFPKAKQEAWWLVLGNATSSELYGLKRISFADRVINTRMELPQTFNVQETKLILVSDCYLGFDLEYSLEHLTKG

SEQ ID NO: 55690 - protein, 193 aa, Sorghum bicolor
  Clone ID: LIB3481-020-F12_FLI.pep
AWAWCSCFFWPLFSSGWYAPFLAALAPGVNVIRMLLLGLGLMKNEAMVKSISRSGDYRELLKGPLYYATTITFATSVLWRTSPVAIALICNLCAGDGIADVVGRRLGKEKLPYNPNKSYAGSIAMAVAGFLASVGYMHYFHTFGFIEETWYMALGFLVVSVAATLVESHPISTELDDNLTVPLTSFLVGSLIF

SEQ ID NO: 55691 - protein, 522 aa, Zea mays
  Clone ID: UC-ZMFLMO17310C08_FLI.pep
YSPSRPHPPPPTSALLRPPARHRSSRAGWPVLLQLPPPPEQSDAGMQQMLALQSVQPPPAAAHLRAAASAKTPPLLPRRAAGPPPASASASASAEFPGSVPDSAQMAPRRRRRRSVAGIDQDELLDPEALADPDSGFYEINGVRLHHKVCSHEDEDSSSDQSTGSTIASDSDVVLKSQIGLPILLLHGFGASVFSWSRVMRPLARIVRAKVLAFDRPAFGLTSRASRSADDAKPLNPYSMAFSVLATLAFIDYLGAEKAILVGHSAGCLVAVDAYFEAPERVAALVLVAPAIFAPRKAVKEGQSGEEEEGGQQTQSIPNDENSPPNLFARISGGFLELWKHIAGLVLKMITAIRDVVRSLCLKAVVAFLRSSLGVVLVRWVMDKFGILGVRNAWYDPSKVTDHVIQGYTKPLKSKGWETALLEHTVSMIIDSVSASRVPVSKRLSEISCPVLLVTGDTDRIVPAWNAERVARAIPGATFEAIKSCGHLPHEERPEEFLSVVEIFLRTAFANPNEQVFQAAVS

SEQ ID NO: 55692 - protein, 316 aa, Zea mays
  Clone ID: 700215674_FLI.pep
LTTAAGRQLKDDRDDERMIYDLGRRIIITSDDAAADGDAVGDGELADLDAGILRKPDVEFPDGGGEPAVEVAERRVGGKRHSTRPQRVVIHDGTPDAHQAEQLLVVPDVVRLVGVDEREVEGAVVGRVGEELVQLLQRGALPEVHLARHPGALDEGPADVVVLAAHVECDDLAVGGQRQRRGQQRVAREHAHLQGAARAAQLDQHPQQRRLVRGRLHEPPLVLVGHQPQLTHALRLVRQHRRVQHVLVEGLALEQRLVAAVDAAVDLRDGGVVAAGSHGRSVRLGAGAVQGGGASCGSRRCLWLRSFGHLLLLYLN

SEQ ID NO: 55693 - protein, 289 aa, Zea mays
  Clone ID: UC-ZMFLMO17297G11_FLI.pep
ELAFNEEENDRNKQIQASIAEAFRKQSEVIGRKSTAKATAAAFVRRSRRNIRPNGQNTYFRGRGKASSDDVALACSEDEEDGNGESCSKEASSAEESSPEKKQKRLPKWPTPRSSPARACNDEVASDEKDDVGISRENFSTSPLRAWGKNGTRSQTRHSSFSGSNGRMVKGGRMIKLVECLRNSDDNEGERDVHLCLLPLDGQTAPNLEKSYLCCGPTLSIKQLCQFVASQTSHKDEEVEMYALKPSCSKPVSTNTCGPDKARLAGEERLSDLRSSFTFPNGVLVRSNT

SEQ ID NO: 55694 - protein, 93 aa, Zea mays
  Clone ID: 700380745_FLI.pep
SYCCDGTDPRTSRPQLVQTPDLHAPLLRSICRCTMFTVCKDKDKICLFRRQYIKASALHIACCDRGFFLLQNLFSFLSCSESTNLPIMIGRFD

SEQ ID NO: 55695 - protein, 512 aa, Zea mays
  Clone ID: UC-ZMFLMO17301G10_FLI.pep
PLSVTLPKNLLFSVRVQFLPLQLKDPLLCCFGRFAMGGGAVNDHFPGASDPLLPTKRDGDGDEDDAGASAFHEFDGASFAGAVFNLSTTIVGAGIMALPATMKVLGLVPGLVMIVLAALLTDASIELLVRFSRAAGARSYSAAMADAFGWWGRRLLQVCVVINNVGVMIVYMIIIGDVLSGSTSGGEHHYGVLEGWFGIHWWNGRLFVLLVTTLCVFTPLACLKRIDSLSYTSTISVALAVVFVIITAGIAVIKLIGGQIPMPKLFPTVSDLASVWELFTAVPVLVTAYVCHYNVHPIHNELKDSTQIKPIVHTSLTLCSTIYITTSFFGYLLFGESTLSDVLSNFDSNLGIPYSSVLNDAVRVSYAVHLMLVFPMIFHALRLNLDGLLFASARPLSSDNRRFGIITASLLLVIFGSAIFIPSIWDAFQFTGATAAVCIAFIFPAAITLRDSQGIAKKWDKILAIFMIVLAVVSNVVAVYSDAYKIFNKESAPSNAWIGESTENRSSWWLVR

SEQ ID NO: 55696 - protein, 210 aa, Zea mays
  Clone ID: LIB3206-075-G4_FLI.pep
EAVPRRAAAALGQVGGGDPAPAQPHPALARHLRHRRGGGARLRPGRLPPARRRGAPQLPRQRRLPRPAPRLRRRQAPEPVPEHRRVQEGRQEAGLRRSCRVVVRPHQQLLLAVVRRRDLVLPRVRHRVLVPVPVAVRLARADGAGDAAAGLQRGAVGRGRRLRAHQVPVVRDRLGLPPRQLIVAPCWLAGWLAPILPTLPSCSRRRVKEG

SEQ ID NO: 55697 - protein, 192 aa, Zea mays
  Clone ID: UC-ZMFLMO17313D08_FLI.pep
PQSSSPRVWSPTPQRDEGKMFLRRILTGGGGLAALRAARAVKETTGIVGLEVVPNAREVLVGLYERTLKEIKAVPEDEGYRKAVESFTGHRLQICQEEEDWKRIEDRIGCGQVEELIEEAEDELKLIAKMIEWDPWGVPDDYECEVIEDDTPIPKHVPQHLPVALPEEFFKALDAVKSDPALQGDAPPQVKA

SEQ ID NO: 55698 - protein, 766 aa, Zea mays
  Clone ID: LIB3353-018-C3_FLI.pep
PPRCCGSPPSSPVPAPRRRRRRLLSLPPFTPSLSSRVPAYLSVREEEGTRPGRSVGRGALGSRRCLPVRSLGSRAMAAVAPPPAPAPAPVPAPAPATVPVADQTTDLLQKLSLDSQPKPADATQPAAATAKKQGAAASQPLSVAIPPEPSITPVIQDFTDPNLFYLPAYYYGGYDSSMSEWDDYPRYLNSDGVEIAPAVYSDIYGYGYAPYGAYSPATSPVPTVDGQMFGAQHYQYPTAYFQPPTPVPSTTQSNLQSSKNPEKPAAKADPAKTTNGVPNGTAHSNSGTVPLASSQQNSSLTPDGTYRAPLLGGVPSAGYLDTTYGYDSTGAHFAWYDGSAYANGQQRTATTNHFPSSTFGNGSPARYQNKSTTTPQMGMQNRRPTTTSPAPTYPNRMYPSSRPYTQYGNSIKTGLPYGSNGYDSRIYGRWGLGMDNRYRPRGRNGYYGYGNESQDGTIELNRGPRSGRFKNQKLYGHTVTIAVKGQSLPSGESKDDSAVPDRAQFNRDDFPVQYDAAKFFVIKSYSEDDIHKSVKYNVWASTTNGNKKLDAAYQEAQSKGSACPIFLFFSVNTSGQFVGVAEMTGAVDFEKTLGYWQQDKWNGSFSVKWHIVKDVPNNILKHIILENNENKPVTNSRDTQEIHLEQGLQMLKIFREHVSKTSILDDFAFYESRQKLMQDKRSKQQQVQKQVWDSRTPISVTGSEQQQEAANGKPNPSVPNGVPAEVKAAKASAENGTATPAISYAAKVAQAATEKPVLANGDAKTG

SEQ ID NO: 55699 - protein, 256 aa, Glycine max
  Clone ID: 700757783_FLI.pep
LAYEYLSNGSLDKWIFKKNKGEFLLDWDTRFNIALGTAKGLAYLHEDCDSKIVHCDIKPENVLLDDHFMAKVSDFGLAKLMNREQSHVFTTLRGTRGYLAPEWITNYAISEKSDVYSYGMVLLEIIGGRKNYDPRESSEKSHFPTYAFKMMEEGKLRDIFDSELEIDENDDRFQCAIKVALWCIQEDMSMRPSMTRVVQMLEGICIVPKPPTSSSLGSRLYATMFKSSSEEGATSSAPSDCNSDAYLSAVRLSGPR

SEQ ID NO: 55700 - protein, 584 aa, Zea mays
  Clone ID: LIB3607-031-G7_FLI.pep
KPSSSSKNKKKKGFFFFLDGAGAGTSAGLVGRSVARLVLDDNNFTGGIPAGVSSLGLLQYFDVSGNQLQGWIPSSVFALPALRYINLSRNRLAGQLPATTACAEALAFVDVSANLLTGARPPCMRGNSSARTVLVAGNCFADAKQQRASSYCNPGALAAVLPPPQGNGGGGGQGTGKGREIGMVLAIAGSVVGAALLIALAMVVVLRRARRQRPEATILPKSPAATPTNKADGWKAPAKATQKIITPADKRHASQAARVNTLEVPAYRVCTLEELQEATDNFSSSNLIKTSPLAQDYNGQLQDGSRVLVRCLRLKPKYSSQSLVQYMEIISKLRHRHLVSIIGHCIVSDEENPNNASSVYLVSECVTNGSLRSHLTEWRKREMLKWPQRVCAAIGIARGVQFLHNLTAPGFVQNNLNIEHILLDKTLTSKISNFSLPMISTSKNGKILSETPFAVHEDNDIGSAQNAAQGDKEDIYQIGLILLEVITGKPTESQSQLESLKAQLSEALTEDPDRLKDMADPAIHGTFAVDSLSTVAEIALKCTAGDPSDRPSIDDVLWNLQYSMQVQDGWASSESLGLSVKSQV

SEQ ID NO: 55701 - protein, 620 aa, Zea mays
  Clone ID: LIB3689-205-A2_FLI.pep
TSKQQAMNGGTQAISLMVHLAVPWLCLASWAALLPALLASANVGAAAPTLRAEYMNLNFSTASATPDKYKSFIASVRAGLVSKAGGNSSGIPVLVDEDDPLALESFLNITLVNKAGRSVSLKMDVSRAYFVAYVAGQRSCLLKRSGRTFSSAICYYGGPWGTSSAPVVTRPRSTRRGSDRAAAAAGDGEDPGVAAWRARDLDEAISSLFLFPTGNATEEELRRGVAACDMMVASAATFPYVERRMSAGMWDSNGVVNDPSLRGLQARWPWLSAAVQQSFQGAFAAPVPVQRSNGNWMRVDNVRSAVPLVSFLEHGGCNRTRGAPALLIRSVVQEPDEDEDMQPGGGARATATATATTATCGAEPTVRLVGPEGRCVDVPYGYYYNGNQVQLWSCKSTSAVNQLWTLKRDGTIRSNGKCLTSSGDAAGARVVVDDCPRFPTGRVVWEVRVDGTVALKWSRGLVLAVTSSTLFAGLTVRQDDRGTGQSWTPTNVTAPLDAAIVGFRDLCLQADYAGSVSVAACRDGVQWSLYPDGSVRPPAWLLLQWQCLAADASGGVTVKLCDGAGSSCERWVFRNDGTIFNTGTGMVLDARPSAGANATASQVIVSPATGSPTQQWALML

SEQ ID NO: 55702 - protein, 250 aa, Zea mays
  Clone ID: LIB3689-238-F12_FLI.pep
RVGTYMGRKMIKCAASNLLSELLLSCTSTQPGDSSPDEYEGHGVDLLKSEASMEYLCNLPPHRYEAVFAKEIPETITGDAFLEKYGDHNDAVTEVDPKRSYCVKAPTRHPIYENFRVEAFKALLTAAKTDEQLSALGELMFQCHYSYNACGLGSDGTDRLVNLVQEIRHRKSSRAGGPSLFGAKITGGGSGGSVCVMGKNCLKSSEEILEIQKRYKAATGYLPTVFDGSSPGAGKFGYLKIRRRSTSPSD

SEQ ID NO: 55703 - protein, 248 aa, Zea mays; identical to SEQ ID NO: 55124
  Clone ID: LIB3069-008-E5_FLI.pep

SEQ ID NO: 55704 - protein, 379 aa, Zea mays
  Clone ID: UC-ZMFLB73091E08_FLI.pep
EDPTCLVRSLGSRPGSRRAIVPRPDMCVEGLDDAAGRLGFGDQDTDRRAGDAMERVCENTVAVDFKQTKLNNFVPFIRSGEWSDIGGRDYMEDAHVCISDLAKNFGYDSVEDEVISFYGVFDGHNGKDAAHYVRDNLPRVIVEDADFPLELEKVVKRSFVQTDSKFAEKFSHHRGLSSGTTALTAMIFGRSLLVANAGDCRAVLSRRGTAIEMSKDHRPCCMNERKRVESLGGYVDDGYLNGQLAVTRALGDWHLDGMKEVGEPGGPLSAEPELKMVTLTKDDEFLIIGSDGIWDFFSSQNAVDFARRRLQDHNDLRLCCREMVDEAVRRGASDNLTAVMVSFHPDAPPPSRANKRTGRVTRSISAEGLHSLRVLLEGQ

SEQ ID NO: 55705 - protein, 551 aa, Zea mays
  Clone ID: LIB4703-002-E1_FLI.pep
PSRPAGTHSLVELFAPYLLFSRKPLSMVRGIILLLLVTPLAISMALPSLSTRIEGSVIGERSNLFSQLHSDNSSPTENKLQPGEKSFASEAYAVNWNEPPDQQSQDSLEQLEPYRVIWKQPVQGEKSFVSEAYPAKWNKPPSPSKQSQDSFEPEAYRVKWNKSPPPHQQSQDSFESEAYRVKWNKSPPPHQQSQDSFEPEAYRVKWNKSPPPHQQSQDSLEQEAYRVKWNKSPPPQQQTQDSFEQEAYRVKWNKSPPPHQQSQDSFEPEAYRVKWNKPPPPHQQSQDSFEPKAYWVGWKKHAQGATDVADETTPARGHGLHVATGMLFTRKSLPPGTALPEGTKFCGHGFLDPERFELRADADAIPFSYSQLDTILRMFRIPRGSKKAEQVAATLRTCEAESPEAHACATSEQAAADFAASSLGVRASKLVALVTTVHGGKDATRYVVAPNGITRIGKAAGAAAVVPCHPMPYPYMVHYCHQPADVEALRVELTGLGDGGVTTAIAMCHANTMNWDDRYFQMLNVTRGEEICHFMPRNYVLWLPAAELLGN

SEQ ID NO: 55706 - protein, 548 aa, Zea mays
  Clone ID: UC-ZMFLMO17055F06_FLI.pep
PPPPPPSSGYTLLRDPRHNKGLAFSEAERDAHYLRGLLPPALASQELQEKKLMQNLRRYEQPLHRYIAMMDLQERNERLFYKLLIDNVEELLPVVYTPTVGEACQKYGSIYRRPQGLYISLRDKGKILEVLKNWPERSIQVIVVTDGERILGLGDLGCQGMGIPVGKLSLYTALGGVRPSACLPITIDVGTNNEALLKDEFYIGLRQRRATGEEYHELLEEFMTAVKQNYGEKVLTQFEDFANHNAFDLLEKYRESHLVFNDDIQGTASVVLAGLLAALKVVGGTLADHTYLFLGAGEAGTGIAELIALEMSKHTGSPIEECRPKIWLMDSKGLIVASRKDSLQAFKKPWAHEHEPVATLLEAVQSLKPTVLIGTSGKGGTFTKEVVEAMASQNEKPVIFALSNPTSHSECTAEQAYTWTKGRAVFASGSPFDSVELDGKVLVPGQSNNAYIFPGFGLGVVISGAIRVRDDMLLAASEALAEQVTEEHFAKGLIFPPFTNIRAISARIAAKVAAKAYELGLASRLPRPDDLVKYAESCMYTPIYRSYR

SEQ ID NO: 55707 - protein, 269 aa, Zea mays
  Clone ID: LIB4171-015-G1_FLI.pep
PQLYCKWEAYSFDTKYYYAVGIGQTVRKFWFLTPPKSGPDVPYTLGLIGDLGQSFDSNVTLTHYESNAKAQGVLFVGDLSYADNYPYHDNVRWDTWARFVERSVAYQPWIWTAGNHEIDFAPELGETKPFKPFSHRYPTPYKASGSTAPYWYSIKRASAYIIVLASYSAYGKYTPQYKWLEAEFPKVNRSETPWLVVLMHAPWYNSYNYHYMEGETMRVMYEPWFVKYKVDVVFAGHVHAYERTVSSSILSISSVANGWVIFFHSAMDF

SEQ ID NO: 55708 - protein, 257 aa, Glycine max
  Clone ID: 700888605_FLI.pep
GSTSTGKRVLELSAHSNLKPVTLELGGKSPFIVCKDADVDAAVEASHFALFFNQGQCCCAGSRTFVHESIYGEFVEKAKARALKRVVGDPFKNGVEQGPQIDSVQFEKIMKYIRSGVESGAQLESGGQRIGSKGYYIQPTVFSNVQDNMLIAKDEIFGPVQSILKFKDLEEVIRRANATSYGLAAGVFTKNMDTANTLMRALQAGTVWINCYDVFDAAIPFGGYKMSGQGRVRGIYSLRSYLQVKAVVTALKNPAWL

SEQ ID NO: 55709 - protein, 71 aa, Zea mays
  Clone ID: LIB3596-059-F6_FLI.pep
AAYGSLFKKEKEKKRVLIHGRRTRASTEQSGRRHLFIYLFLFSDETGEKQTRLGVPCRTSEEDTGHPSPPW

SEQ ID NO: 55710 - protein, 219 aa, Zea mays
  Clone ID: UC-ZMFLB73095F07_FLI.pep
IIYKFVFELMSIGRKGVQGAQPGLALDWMQRVQIAVDAAKGLEYLHEKVQPSIVHRDIRSSNILLFEDFKAKIADFNLSNQAPDMAARLHSTRVLGTFGYHAPEYAMTGQLTQKSDVYSFGVVLLELLTGRKPVDHTMPRGQQSLVTWATPRLTEDKVKQCVDPRLMGEYPAKGLAKLAAVAALCVQYEAEFRPNMSIVVKALSPLLVTKQTPSPVVDS

SEQ ID NO: 55711 - protein, 155 aa, Zea mays
  Clone ID: UC-ZMFLB73119H05_FLI.pep
ISATEHWPSINQNISGFSSGNIVFGGSGNSVGQTKSNQMSWSNTSNLMGTNSTGSYLNQGSAALGFGNPNGGLSTGLSNPSSSSTGLSMMLPKSDSGSLSTSVNNAAHGLLRLAPPPSTSVGRGRGRNQGQSALSRASRPHANSASGQQPILDLL

SEQ ID NO: 55712 - protein, 122 aa, Zea mays
  Clone ID: LIB3606-025-H1_FLI.pep
NTLKIIYDRGLIGSNHDWCEAFSTYPRTYDLLHAWAVFSDLDKRGCSAEDLLLEMDRILRPTGFAIVRDKGTVIEFIKKYLHALHWEAVAAADAEPSSESEENEMILVIRKKLWLPEAGSHT

SEQ ID NO: 55713 - protein, 392 aa, Zea mays
  Clone ID: UC-ZMFLB73191F07_FLI.pep
VPGEVVLDDAIAFARGRLLDIISKGEVRSPVSEQITRALDIPLPRFTRRLETMHYIAEYEHEEAHDGLLLELARLNFVLVRALHLRELKDLSLWWRELYNTVKLPYARDRMVEIYFWTCGMLHEEEYSLARMFFAKTFGMVSLMDDTFDVHATLDECHKLKEAMQRWDESEVSILPEYLRLLYIKTLSNFKEFEEILEPNKKYRMAYTKEAYKLCSKNYLKEAIWSNQKYQPSFKEHEELSIMTSGLPMLTILTLMGFGDEATPEAFEWVSSVPEMVRAGSQVTRFLNDLSSYKLGKNKKDMPGSVETYMVENGLTGDEAAAAIAALLENRWRILNQTRMEIDHTLLPAAQVVLNMARANEIIYLHGRDAYTFGADLKDLVTTLFLKQVLPL

SEQ ID NO: 55714 - protein, 236 aa, Zea mays
  Clone ID: LIB4185-055-C9_FLI.pep
ARGTAGAYSLVRVFDELTERRLIEKSLSRKVVHVLSGVLFMSSWPLFSNSTEARYFAAVVPFLNSMRLLIYGLRLYTDEALVKSVTREGKPEELLRGPLYYVLVLLFSVLVFWRESPIGIVSLSMMSGGDGFADIVGRRYGSAKLPFNRKKSWAGSISMFISGFLLSAMMMLYFSSLGYIDVIWEEALGKLALVALAATVVECVPVTEVVDDNISVPLATMLVAFLLFSSNRTIVN

SEQ ID NO: 55715 - protein, 292 aa, Triticum aestivum
  Clone ID: LIB4312-017-E2_FLI.pep
LCESVCELRGASVGGSMWPESPPLRDAGAAVLTGCVAMAVLRFWEEVGNRALLDQKLCRKLVHISVGLVYFLMWPLFSADDVYAPFLASIVIALNIIKVILIGSGVVKDDGVVNSMTRNGDYRELLKGPLYYACTITLTTVIFWRTSPISIAVICNLCAGDGVADIAGRRFGHVKLPHNPDKSYAGSIAMFFAGFVASILFMCYFHLFGFVEQSWTMVAAFGVTSLAAAIVESLPVSTLLDDNLTTPIASALVGSLVFYYVGGGGGAGSGDGTSISATAAMVFAGSSYYSEG

SEQ ID NO: 55716 - protein, 342 aa, Zea mays
  Clone ID: UC-ZMFLB73135D11_FLI.pep
IEILIIYDDCATDSTWKNSNSYLLLHTTIIAESTLFADGRRKIMTNETTTNWIGEGRNLIVDESMNQAVAAPVVMGTLWSTTVSTVSPGPKPKRTPQSRPSPVVACPSSAERLRISSRMKRTQALDMLPYSERTWRVARILALSSPTLASTWSRMAGPPGCATQKMEFQSEMPSGLNASSSARPMFLEMRPGTSLSRWKVSPTSRRWPSMAPSESGRMVWAAETSWKSGRSTRSSGSAPTTTAAAPSPNSAWPTSESRCDSEGPRNVTAVISEHTTSTRAPRLFSARSLATRSTVPIASTVAGPVARWAFLTSSTVTVAPAIVVVLSPSIFLPTLYQRDRSS

SEQ ID NO: 55717 - protein, 120 aa, Zea mays
  Clone ID: LIB3079-012-D1_FLI.pep
PQMEPTRPDTTADVGLISWCSSTPSSSPKLCSGLQSTSLPRGHFRQLTRPAGPRKQGGPGPLTATGPATTGQHKLFFYWFHCVFYSFPSTLVFTSGRMDIDHISAVVVSSWQGRWQLTRP

SEQ ID NO: 55718 - protein, 544 aa, Zea mays
  Clone ID: UC-ZMROB73002C03_FLI.pep
TIAKFRSDLQPNLGKASSQVAAIKINVVAVAPIVGVCDSNNDMYKEPKDQETITGPVAWSPQAVHADVDLDNHNEPINPPIDGTQSMFGEVPGREKGKSKSVSFALSDVSGIASPIDTNSEMGNIGDSCSDKLTDENLSNSSRHIAEKHSITKDQYSNEQDHEREPLDHAVQQQPKSDVGERASSMKRRCRKKVQKVGTPNHTVDDYFGEDCVEPSLAEEDNDTGDHYTTGNKHKARKKSRGGVEESQQQKAQKNKSKVSSRGRKRTLKDESTEKPEKKLTHRIRQRIPKEVKALLETPREQIKPMKLCASHLRLLQEARERVDPKGIPSGPSSNTRNFQLDDMDDLGYRDEEARFFDNDITEEHVQNATKLNYHSYMNKPARGKWSKSDTDLFYEGLRQFGIDFAMIQQLFPDKTRHQVRQKFKSEERKNPLLVHDAIVHRSGDNLYFKKVIKQLNIEDVVLPDIKSTQKQDGASSERGPGNENVLDDLNEEENSSNWLNEEHDVQMADVEEEHGEQMDDVEEERDLGNDGGDDDLGDVFDWY

SEQ ID NO: 55719 - protein, 471 aa, Zea mays subsp. mexicana
  Clone ID: UC-ZMROTEOSINTE021H11_FLI.pep
DDQNKTINVITELFTSGSLRLYRQKHPHVNLKAIKNWARQILHGLDYLHSHQPPIIHRDLKCDNIFVNGNHGEVKIGDLGLATVMQTPRARSVIGTPEFMAPELYDESYDELVDIYSFGMCLLEIFTLEYPYSECTNPAQIFKKVSTGVKPAALAKISDPQVKQFIEKCLVPASERSSAKELLQDPFLCLDNAHDPAGTKFTSPAPNKTVDMVSLHMEVDTFESSPTNSGKENGCVAPHTPVLEFTRTNKNTELKLKGEKLDNNSVSLVLRIADLSGHARNIHFLFYLDSDTALSVAAEMVEQLELADCDVTFIADFIDLLIVNLIPGWRPVNDAATNSYTQSESELAITSHNNLSKLVPDYALIDGMMHPKDVNVSTGFLDSVSSATNLGGSPCSEGSVISVQRAESFKSVSDYGPEDYGTMDCGGYKEGISKENCSHVVDDGSRLIFHIDQDHFSWSWPMVSSASIIYY

SEQ ID NO: 55720 - protein, 493 aa, Zea mays
  Clone ID: LIB3607-043-A12_FLI.pep
STSVSSRRRNLKTQTYTSDTSAGAAMATPDLSPVSPVRRDDKQCAPSSSSCTILRVQDASAAEAYEQYLRLPELSSLWEAGCFPEWAGEGLVKPALQALEVTFRLASLALSDPRGYASRRELARRLESLAAREVGLVSALCEGDRSAPLAELGASGGVLPRERSASEVWQLPGSAAAVVCQVSEASLLPRLAAWDKSETLAAKIMYAIESQMQGCAFTLGLGEPNLAGKPVLEYDRVVRPHALHALKPKPAPEPKSGYRNRENETLFTMYQILESWLRAASQLLARLNERIEAKNWEAAAADCWILERVWKLLADVEDLHLLMDPDDFLRLKGQLAVRAAPWSDASFCFRSRALLHVANTTRDLKKRVPWVLGVEVDPNGGPRVQEAAMMLYHSRRRGEGEEAGKVELLQAFQAVEVAVRGFFFAYRQLVAAVMGTAEASGNRALFVPAEGMDPLAQMFLEPPYYPSLDAAKTFLADYWVQQMAGASDPSIQS

SEQ ID NO: 55721 - protein, 449 aa, Zea mays subsp. mexicana
  Clone ID: UC-ZMROTEOSINTE024B09_FLI.pep
LVQYLADIMDEYKDKIQNTCGYGPIAFMASVQSLQSLPQDLTSSGRFDFHIELSALAVPERKALLQHQVEEHELLCSEEVLSEIASKCEGYDAYDLEILVDRAVHTAAYRFLLPSNASHNSLKRTLLMEDFSKAMHGFLPVAMRDLRKYAPDDKDGGWEDVGGLDEAVTIIKETLELPSKYPNIFTRAPVRLRSNILLYGPPGCGKTHIVRAAAAACSLRFISVKGPELLNKYIGSSEQSVRDFFAKAVAAAPCLLFFDEFDSIAPQRGTHSAGVSDRVVNQFLTELDGVETLTGVFVFAATSKPQLIDAALLRPGRFDRLVFCDFPRWDERLEILKVHSRTVSLASDASLEDVASLTEGFTGADLAAILTDAGLAAIHELLDNQENGVPETEPCISKELLMSVTRKARPSTPADEKMRYDREFGEFVSSRKSISTKARESKGKKVTLA

SEQ ID NO: 55722 - protein, 1050 aa, Zea mays
  Clone ID: LIB4172-003-B4_FLI.pep
ARGAKRQQGLGDLTQLLTKEQADLGVISVWGTGSELGTTSIIRKAYQDPELCQKFECRGWVKLTQPFNPHEFLRSMVAQFYANSCLQNGMVINVDELKRIEEMATTGGGLIGAFMDKVNENRYLIVLENLSTIGDWDTIGTYLPDRKNGSRVIVSTQQCEIASLCIGHSYQVAEVKQYSAEHSVCVFFEEGLQGNGDKSMESDRVVDNNNEMSMQDEITHGTGFLSDRIPTSKRKDASDWVKNFQLVERKSEMNQLGNYIAKARVYGLQILSVWGIAGVGKSALVRNMYFDRIHRNDQLFEKYGWVDVTHPFNLRDFSRSLLLDFHSEPVQAMGIKDPTQECHKILEDNRCLVVIDDLQSIEEWDLIQAALVSRPSRSIIIVITTEASIATYCADNEGVVFNVKGLEDKAALKLFKKQVHRQKPSSPIKDSIDEELQELILKCGGLPKVIVAVANFLAPKTVSWMDSASSMNLKFMQELESSPEFACLQPLFGWLHSYFRTCPDFLKPCIFYLSIFPRDHSIRRRRLVRRWIAEGYARDTDKISAEERGEQFFCRLLDLSIIMQKPYSVTTGFRDSRMTLCQVNSFVREYIISRQMEENLVFELGGSCTLTSQRMGRHLIILKSWDRDRIVFESIDFSRLRSLTVFGEWKPFFISDRMRLLRVLDLEDASDLKDEDLKQMMKLLCRLKYLSLRGCTGIYSLPNSLGCLRQLETLDVRHTAIATMPRTITKLKKLQYLRASTTKPTKEQPTPDTAVTPKPTKKQPNPHTSVSWTSSLFHRHRQLEGVVVPTGLEKLTALLTIGVVNVNSARGRSILKEVRKLTQLRKLGVSGISRNNSKDFCLAISSRAHLDSLSVKLKKDNQDCLCVTPDGYLPPKNLQSFKLYGLADSFPKWINQLENLRKLVLEMTILTQDTIKGLKDLKVCILRLITKQLPDGKLNFCVMLHGQQLRCYETVKILEISCSSSLDVAFGSQSLQNLELLKVSCCSGSGSVMKLSGLEKLSESELKEVQIKGSDDFIVKTDVEEQLARHPKKPVLKLEKVLSSTGDFEL

SEQ ID NO: 55723 - protein, 174 aa, Zea mays
  Clone ID: UC-ZMFLMO17151G04_FLI.pep
KVGLPVDSSNNLSGFIQSPNPHGHATMMPGNSGSIPIQNSLPPVPSMQQLHANVPVSPIGSLPANPFNVPTSAPVLCNSTSPMLPSHALVNPAHSSMPMRPFIPPLPEGPPPFQQQTSSAVTVQPLDPSSQQSSQQLLAQDLDGDPQKRLQATLQLAATLLKQIQNQSNPGGQK

SEQ ID NO: 55724 - protein, 486 aa, Brassica napus
  Clone ID: LIB4169-006-H8_FLI.pep
EIFDFFLKKRLMMTLNSLSPADSKSLSSFLDTTSRFNPTPKLPGGFSLKKRNQRRGFGKGVKCSVQQPPPPAWPGRAVPEPPRQSWDGPKPISIVGSTGSIGTQTLDIVAENPDKFRVVALAAGSNVTLLADQVKRFKPALVAVRNESLLSELKEALADLDYKPEIIPGEQGVIEVARHPDAVTVVTGIVGCAGLKPTVAAIEAGKDIALANKETLIAGGPFVLPLANKHNVKILPADSEHSAIFQCIQGLPEGTLRKIILTASGGAFRDWPVEKLKEVKVADALKHPNWNMGKKITVDSATLFNKGLEVIEAHYLFGAEYDDIEIVIHPQSIIHSMIETQDSSVLAQLGWPDMRLPILYTMSWPDRVPCSEVTWPRLDLCKLGSLTFKKPDNVKYPSMDLAYAAGRAGGTMTGVLSAANEKAVEMFIDEKISYLDIFKVVELTCDKHRNELVSSPSLEEIVHYDLWAREYAANVQLSSGARPVPA

SEQ ID NO: 55725 - protein, 112 aa, Zea mays
  Clone ID: UC-ZMFLMO17165H12_FLI.pep
TVAYEYDTTILRISQQFQYRVEKGGKRKKERYRTTKLVKDNRSAHNNAGCCQAKLYPITKPAWHGLQLQRRLPKPFIILLSVHLLWSSSQSLIKHTHPAAAMLAGNSRARGR

SEQ ID NO: 55726 - protein, 486 aa, Brassica napus; identical to SEQ ID NO: 55724
  Clone ID: LIB4175-009-D2_FLI.pep

SEQ ID NO: 55727 - protein, 177 aa, Glycine max
  Clone ID: 700893826_FLI.pep
EELTGINDPILAGQEFLKRGIRTKWVIVKMGSKGSILITASSVACAPAFKVNVIDTVGCGDSFVAAIVYGFIHNMPLVNTLAIANAVGAATAMGCGAGRNVATLENVVHILRSSNLSEDDEFWIEILEKNVVAQEITYLSNVMNGNKNRLNLVSFDKVASELLPKLELPQTVGNAPT

SEQ ID NO: 55728 - protein, 346 aa, Lilium asiatic
  Clone ID: LIB3229-016-C3_FLI.pep
LVAVRNESLLGELKEALADADYKPIIIPGEEGVVEVARHPDAVTVVTGIVGCAGLKPTVAAIEAGKDIALANKETLIAGGPFVLPLAHKHNVKILPADSEHSAIFQCIQGLPEGALRRIILTASGGAFRDWDVERLKEVKVADALKHPNWNMGKKITVDSATLFNKGLEVIEAHYLFGAEYDDVEIVIHPQSIIHSMIETQDSSVLAQLGWPDMRLPILYTMSWPERIYCSEKTWPRLDLCKLGSLTFKAPDNVKYPSMDLAYAAGRAGGTMTGVLSAANEKAVELFIDEKISYLDIFKVVEATCDAHRNELVLHPTLEEIIHYDLWARDFAANLKLSSGLSPVPV

SEQ ID NO: 55729 - protein, 91 aa, Zea mays; identical to SEQ ID NO: 41505
  Clone ID: UC-ZMFLB73191B07_FLI.pep

SEQ ID NO: 55730 - protein, 484 aa, Triticum aestivum
  Clone ID: LIB4126-005-E4_FLI.pep
RPATSMALKASFPGELAALLDSGNTRSRRGAAFRPRQHQRKVDFTFQRRDKRAAYLRTCCSMQQGPPPAWPGRAVVEPERRSWEGPKPISIVGSTGSIGTQTLDIVAENPDKFRVVALAAGSNVTLLADQVRTFKPKLVAVRNESLLNELKEALAGCEEMPEIIPGEQGVIEVARHPDAVTVVTGIVGCAGLKPTVAAIEAGKDIALANKETLIAGGPFVLPLAHKHNVKILPADSEHSAIFQCIQGLSEGSLRRVILTASGGAFRDWPVEKLKDVKVADALKHPNWSMGKKITVDSATLFNKGLEVIEAHYLFGAEYDDIEIVIHPQSIIHSMIETQDSSVLAQLGWPDMRLPILYTLSWPDRVYCSEVTWPRLDLCKLGSLTFKAPDNVKYPSVDLAYAAGRAGGTMTGVLSAANEKAVELFIDEKISYLDIFKVVEMTCDAHRNELVTRPSLEEIIHYDQWARKFAANLEPSSSGRSPVLA

SEQ ID NO: 55731 - protein, 368 aa, Zea mays
  Clone ID: UC-ZMFLB73111F11_FLI.pep
EESERAREREREKGEDQNEEREMRGQTQTASAGGRWRGDGAAAWCWWWVAVVLLLGHLPSCARAGLLESNPGLAYNFYKNSCPSVDSIVRSVTWAQVAANPALPARLLRLHFHDCFVKGCDASILLDTAQSEKTAAPNLSVGGYEVIDAIKAQLERACPGVVSCADIVALAARDAVSYQFKASLWQVETGRRDGTVSLASNTGALPSPFAGFAGLLQSFSDRGLNLTDLVALSGAHTIGVASCSSVTPRLYQGNASSVDPLLDSAYARTLMSSCPNPSPASATVALDGGTPFRFDSGYYTRVQQRQGTLASDAALAQNAAAAQMVADLTNPIKFYAAFSMSMKKMGRVDVLTGANGQIRKQCRQVNTS

SEQ ID NO: 55732 - protein, 233 aa, Sorghum bicolor
  Clone ID: LIB3478-001-F8_FLI.pep
IIYECRLTKLIEDPRFDNKISKSDHQCMCSTYLEGSALVVGRQRDANAVASRVPEAGRAVVDGGGGGDHVAELGLVGRCHDDHVGQARHVGDVERAAVGGPVGADEPGPVHGEPDGELLQVDVVHDLVVAALQERRVDGAEGLEALAGEAGRERHGVLLRDPDVEAPAREAAEEVVEPRAAPHGGVDGHDLAVLLRLRDQRLGEVVGVGQRLGRGLELLPRRRIKLGDACRDA

SEQ ID NO: 55733 - protein, 853 aa, Zea mays
  Clone ID: UC-ZMFLB73099F06_FLI.pep
IFEMAVDEADKREKYVKPLFELTEQREGIKDLQMETAVVGNSTRYYVMAVTPTRLYSFTGIGSLETVFASYSDRAIHFMELPGEIPNSELHFFIKQRRAKHFGWLSGSGIYHGELNFGAQHSSTSGDENFVENKGFFDYSKLGDSGIKPRSFALSEFHFLLLIGDKIKVVNRISQQMVEELVVDDTPETSRGIIGLCSDPSTGLFYAYDESSIFQVSTSDEGCDMWQVYLDMNHYAAALSHCRNPFQRDQVYLVQADAAFAAKEYYIAASFYAKINYILSFEEISLKFISIGEQDALRTFLLRRLDNLTKEDKMQITMISTWATELYLDKINRLLLEDTTVTIINSVAEPNSSEYRSIVNEFRAFLSDSKDVLDEATTMKLLESYGRVDELVYFAGLKEQYEIVVHHYIQQGEARKALEVLQRRNVPVDLVYKFAPDLIMLDAYETVESWMMARNRLNPGKLIPAMMRYVSEPHAKNETHEVIKYLEFCVKDLNNVDPGVHNLLLSLYAKKEDESQLLQFLDTKFGKGQTNGPDFFYDPKYALRLCLQEKRMRACVRIYSMMSMHAEAVALALKVDLELAKAEADKVEDDEELRKKLWLKVAKHVIEQEKGVKRENIKKAIEFLSETNNLLKIEDILPFFPDFVLIDDFKEEICKSLKDYNSQIEQLKQEMDDATRGADNIRSDIGALAQRYTVIDREQDCGVCRRKILTVGGLHQVGRSYTSVGHMAPFYVFPCGHAFHANCLIGHVTRCSNQVQAERILDLQKRLSLMDRKAAKDNGASVNGEPITSTTPVDKLRSQLDDAVASECPFCGDLMIKEISQPFILPQESDEKASWEIKPQPTPQKILPMTMSI

SEQ ID NO: 55734 - protein, 473 aa, Triticum aestivum
  Clone ID: LIB3399-042-F1_FLI.pep
TPPQTTMATTVTLKSFTGLRQSSTEQTNFVSHVPSSLSLPQRRTSLRVTAARATPKLSNRKLRVAVIGGGPAGGAAAETLAQGGIETILIERKMDNCKPCGGAIPLCMVGEFNLPLDIIDRRVTKMKMISPSNIAVDIGRTLKEHEYIGMVRREVLDAYLRERAEKSGATVINGLFLKMDHPENWDSPYTLHYTEYDGKTGATGTKKTMEVDAVIGADGANSRVAKSIDAGDYDYAIAFQERIRIPDEKMTYYEDLAEMYVGDDVSPDFYGWVFPKCDHVAVGTGTVTHKGDIKKFQLATRNRAKDKILGGKIIRVEAHSIPEHPRPRRLSKRVALVGDAAGYVTKCSGEGIYFAAKSGRMCAEAIVEGSQNGKKMIDEGDLRKYLEKWDKTYLPTYRVLDVLQKVFYRSNPAREAFVEMCNDEYVQKMTFDSYLYKRVAPGSPLEDIKLAVNTIGSLVRANALRREIEKLSV

SEQ ID NO: 55735 - protein, 197 aa, Zea mays
  Clone ID: UC-ZMFLB73245D10_FLI.pep
PSVVAKISSTISELIQLGAKTLVVPGNLPIGCVPKYLMIFKSNKKEDYDPQTGCLRWMNEFSQYHNKLLVEQLKKLRRLHPGVTIIYADYYGAAMEIFLSPERYGIEYPLVACCGAEGPYGVSPTTSCGLGEYKLCDNPERYGSWDGLHPTESAYKVIAMGLLLGSYTRPPIASTTTSCPQLMELGSSAEYKRLYDL

SEQ ID NO: 55736 - protein, 292 aa, Zea mays
  Clone ID: UC-ZMFLMO17222B11_FLI.pep
GRSSKDMTAMPHPRHRGAAKKPMWIIVLLSLVCVALMGAYVYPPRRYSACYFFASSVCTPFKDWLPAVARERTDEEIVSSVVIRDLLSMPMAMSKNPKIAFMFLTPGSLPFEKLWEKFLQGHDGRYSIYIHASREKPVHSSSLFVGREIHSEKVVWGRISMVDAEKRLLGNALEDVDNQFFVLLSDSCVPLHTFDYIYNYLMGTNVSFIDCFFDPGPHGTGRYTMEMLPEIEQRDFRKGAQWFAITRRHALLILADNLYYNKFKLYCKPAEGRNCIADEHYLPTLFNVSNYF

SEQ ID NO: 55737 - protein, 457 aa, Brassica napus
  Clone ID: LIB3169-093-B6_FLI.pep
VAEEAMGEKLADLQYQPGFGNHFSSEAIPGALPRDQNSPLVCPLGLYAEQISGTSFTSPRKLNQRSWLYRIKPSVTHEPFKPRVPAHTRLVSEFDASNSRTNPTQLRWRPEDVPDSPTDFVDGLYTVCGAGSSFLRHGFAIHMYTANKGMKDSAFCNADGDFLFVPQAGRVWIETECGRLLVSPGEIAVIPQGFRFSIDLPDGKSRGYVAEIYGAHFQLPDLGPIGANGLAAPRDFLAPTAWFEEGLRPDYTIVQKFGGELFTAKQDFSPFNVVAWHGNYVPYKYDLHKFCPYNTVLVDHGDPSVNTVLTAPTDKPGVALLDFVIFPPRWLVAEHTFRPPYYHRNCMSEFMGLIYGAYEAKADGFLPGGASLHSCMTPHGPDTTTYEATIARVNAMAPYKLTGTMAFMFESALIPRVCHWALESPFLDHDYYQCWIGLKSHFSRIALDETNVESTDK

SEQ ID NO: 55738 - protein, 288 aa, Glycine max
  Clone ID: 700888837_FLI.pep
YDFVGAGLTSVKIKGLNNGTIDLSSYAWTYKIGVQGEYLRLYQGNGLNNVNWTSTSEPPKMQPLTWYKAIVDAPPGDEPVGLDMLHMGKGLAWLNGEEIGRYWPRKSEFKSEDCVKECDYRGKFNPDKCDTGCGEPTQRWYHVPRSWFKPSGNILVLFEEKGGDPEKIKFVRRKVSGACALVAEDYPSVALVSQGEDKIQSNKNIPFARLACPGNTRISAVKFASFGSPSGTCGSYLKGDCHDPNSSTIVEKACLNKNDCVIKLTEENFKSNLCPGLSRKLAVEAVCS

SEQ ID NO: 55739 - protein, 507 aa, Zea mays
  Clone ID: UC-ZMFLMO17065F05_FLI.pep
LFPWNFELWKMPRRTGNAASTKSVELVKQDQMEFDHPDEVDEEEEVEYEEIEEEVEYEEVEVEEEEEEEEEEDDEIEGVREVDANHDSKIVDDDPKDGNEKEKHAELLALPPHGAEVYVGGLSSDVSSEDLKQLFESVGEVAEVRMRGKGDNKTYAFINFRTKEMALKAIQKLSNKDLKGKKIKVSSSQAKNRLFIGNVPHDWTPDDFKTAVEEVGPGVLKVDLMKAPGSGRNKGYGFIEYYNQACAEYAKQKMSTPEFKLDTNAPTVSWADHKNASEATSTSQVKSLYVKNLPKTVTQEQLKKLFEHVGEITKVVIPPAKSGHENRYGFVHFKERSMVMKALKNTERYELDGQLLDCSPAKPPADKKDDTGSSPTAKGRPLPPSYAPLGYGLAGAYNPLGKGLAGAYNSPGNGLAGAYGVLSAHAAQPMLYAPGASPGSTMIPMVLPDGRLVYVPQTAGQQPVHVTSPLPQQGGRRFGGGGGSSSGGKRQRGDDRGSSRRGWHRPY

SEQ ID NO: 55740 - protein, 158 aa, Cuphea pulcherrima
  Clone ID: LIB3792-034-B11_FLI.pep
RVIAEIARAVGSTGMAAGQFYDLEGGPDAFEFAQEKKFGEMAECSAVCGGLIAGGDDDEIQRLRRYGRAVGVLYQVVDDILEEKAKESVATDRKGNRGKNYVQVYGVEKALEVAEELRAKAKRELDGFEKYGDSVIPLYSFVDYAADRGFSLGGEVSS

SEQ ID NO: 55741 - protein, 340 aa, Cuphea pulcherrima
  Clone ID: LIB3793-019-B1_FLI.pep
RTIQIAYQARKQFPGEKLWLTNEIIHNPTVSKNFEDMKVEILPLVEGEKQFDMVGDGDVVVLPAFGASVQEMQTLSEKNVQIVDTSCPWVTKVWNVANKHNKGEYTSIIHGKYSHEETVATASFAQKYVIVKNMKEAMYVCDYILGGQLDGSSSTKEAFLEKFKNAVSKGFDPDKDLTRVGIANQTTMLKSETEEIGKLIEKTMMSQFGVENVNEHFMSFNTICDATQERQDAMFELVEQHVDMILVIGGLNSSNTSHLQEIAEDRGIPSYWIDNEKRIGEGNKITHKLMHGELLETENWLPKGPITIGVTSGASTPDKAVGDVLAKIFDLKSKEALLVA

SEQ ID NO: 55742 - protein, 579 aa, Zea mays
  Clone ID: UC-ZMFLB73009H05_FLI.pep
KMRSQFHTSTHLQSQKSRRWPAAKTHVGFRRRRQELGDKATPAGATFMRVPPGSHAYTSAAELNAPLRGKLICCSQVPPATAPSANGDCSDFYAGGVAVYSGLLWSTPCRDLPVLLAQPRSLPVIVTYRPNWEGGQYAGEDEPRFEALLLAMELGAEYVDVEFKVADKFMKYLSGKKPQNCKLIISAYDYKTTPSVHELLNLVAQIRATGADIVKIETTAADIVDTSRMFQVLAHCHEKQVPIIGLVRKEHGFISRIICAKYGGYLTFASLENGKESTTEQPTVADLINKYKIRQIGPDTKVFGIIGNPVSHSKSPIVQNQAFRSVGFDAVFLPFLSDDLVQFLYTFSAPDYAGFSCTMPHKETALRCCDDVDPIARDIGAINTIIRRPDGKLVGYNTDYSGAISAIEDGIRASQPTDSITSPLAGRLFVVIGAGGAGKALAYGAKEKGARVVIANRTFARAQELAHIIGGTALTLSELESYHPEKGMILANATSVGMHPNVDETPLSKHALKSYAVVFDAVFVPRETRLLREAAVCGATVIDGLEMLIRLVMVQFKLFTGGMTAPERLMREAILTKTH

SEQ ID NO: 55743 - protein, 418 aa, Zea mays
  Clone ID: UC-ZMFLB73002B09_FLI.pep
PPASPRLPPPPMAAVFFHHVVGDLTVGKPEVAELHDTDTLDDAARAIAASPEGAVPVWRPRAAPDDPPSGARFIGMISALDIAAFVASAGVGDRSMRAVVGEVVQPNPALLREIDPGTRLIDALELMRHGVKRFLVRKSGSWKGITKRFSVLYNGKWLKNMESTSPSAASSSSTQLSPRSGSAEKFCCLSREDVLRFLIGCLGALAPIPLTQISSLGAINPQYSYVEASAPAMEAIQKIPQDPCAVAVVETMPDGTRSILGDISTYKLWKCDYVSAAWALANLSAGQFVIGADENGSTPISVFPEPPISPSSPVEEISPGRSPRAKKFSSRSIGFLNNTQMSAWRTRSMYHRGRSTPLMCKTTSTLAAVMAQMLSHRATHVWVTDAESEEDGVVVGVVGYTEIFNAATRSTCPSPTAS

SEQ ID NO: 55744 - protein, 129 aa, Zea mays
  Clone ID: UC-ZMFLMO17003B05_FLI.pep
LTDATKHKQTQRPHYQTCPDQPVHTDSPRIIDFSFTPHQRAGEILESSRAHRDGEGRAGHGLLASQPAALRRATRLLHIFAAARGRGTSVSVVGRLLAESHTTIQHERHKVAPMHPAFTGRGRHVARIL

SEQ ID NO: 55745 - protein, 451 aa, Allium porrum
  Clone ID: LIB4521-010-E12_FLI.pep
SISTSFIGQRFRLNSKTHNKPQKCIKIRASNSSPKLSGRNLRVAVVGGGPAGGAAAETLAKGGIETVLIERKLDNCKPCGGAIPLCMVGEFDLPLDIIDRRVTKMKMISPSNVAVDIGRTLKPHEYIGMVRREVLDGYLRERASDAGATVINGLFLKMDKPEPRSNGGYKIYYNEYENGSTTGVKKEMEVDAIIGADGANSRVAKSIGAGEYEYAIAFQERVKIPDDKMEYYKDLAEMYVGDDVSPDFYGWVFPKCDHVAVGTGTVTHKSDIKQFQAATRLRAKDKIEGGKIIRVEAHPIPEHPRPRRVLDRVALVGDAAGYVTKCSGEGIYFAAKSGRMCAEAIVEGSANGTRMINESDLRVYLKKFDQTYWPTYKVLDILQKVFYRSNPAREAFVEMCADEYVQKMTFDSYLYKRVVPGNPLDDIKLAINTIGSLVRANALKREMSKLA

SEQ ID NO: 55746 - protein, 362 aa, Zea mays
  Clone ID: UC-ZMFLMO17004E11_FLI.pep
RLGRHQKFTPAPTDSGRRDRFGGPSPLGRADDIDDWSRGKKPLPARYPSLGSGGGFRDSPAFRDSPAASDSDRWVRGATPLPHNGEGAGERPRIVLNPPKRDPLVASTPPAEVARNRPSPFGAARPREDVLAEKGVDWRKFENEIEHKTSRPTSSHSSRPNSAHSSRPGSPGSQVSAVGSEGAPRARPKVNPFGDAKPREVVLQEKGKDWRKIDIELEHRAINRPESDEERNLKEEINLLKVDLKEIERNMSNGSDQTSVDAKGLSEKISQLESQLEQLSRELDDKIRFGQRPRSGAGRVTALAPTSLGEEPHATVVDRPRSRGGMEPPPRQEERWGFQGSRERGSFGASRNSDRPMARQRW

SEQ ID NO: 55747 - protein, 457 aa, Allium porrum
  Clone ID: LIB4539-001-A10_FLI.pep
FARIMSSISTSFIGQRFRLNSKTHNKPQKCIKIRASNSSPKLSGRNLRVAVVGGGPAGGAAAETLAKGGIETVLIERKLDNCKPCGGAIPLCMVGEFDLPLDIIDRRVTKMKMISPSNVAVDIGRTLKPHEYIGMVRREVLDGYLRERASDAGATVINGLFLKMDKPEPRSNGGYKIYYNEYENGSTTGVKKEMEVDAIIGADGANSRVAKSIGAGEYEYAIAFQERVKIPDAKMEYYKDLAEMYVGDDVSPDFYGWVFPKCDHVAVGTGTVTHKSDIKQFQAATRLRAKDKIEGGKIIRVEAHPIPEHPRPRRVLDRVALVGDAAGYVTKCSGEGIYFAAKSGRMCAEAIVEGSANGTRMINESDLRVYLKKFDQTYWPTYKVLDILQKVFYRSNPAREAFVEMCADEYVQKMTFDSYLYKRVVPGNPLDDIKLAINTIGSLVRANALKREMSKLA

SEQ ID NO: 55748 - protein, 221 aa, Allium porrum
  Clone ID: LIB3803-032-B12_FLI.pep
MHSTCSSSFALYNSVVTHSYDTNKPPGFQNPKHLRINIFQFGGVTSRLDCISPIKTTVLERHLEEVTTDDLADRIKPSLLVVGPGPAHLILVDGDSNDVGSAFCCYGPHRTADAASDVEDLLTGFRVDVIDHPLFVQASLIFVRGVGEGRREVERLAPAPLVDVGDQVVEGVDEGGDVFLDGFLGAAEEGPVLVVVVVDLVVVYGAHFEVHGTFALDLGSC

SEQ ID NO: 55749 - protein, 325 aa, Glycine max
  Clone ID: UC-GMRONOIR043H04_FLI.pep
TNRHLSVLHPIHKLLHPHFRDTMNINALGRQILINAGGALELTVCPSKYSMEFSSVLYKDWVFPEQALPEDLVKRGVAVKDSTSPYGLRLLIEDYPFAVDGLEIWFAIKTWVKDYCSFYYKEDDTIKKDTELQSWWKEIREVGHGDKKDEPWWPKMQTCEELIQTCTIIIWIASALHAAINFGQYPYGGFPPSRPAISRRFMPEKGTPEYDELVANPDKAYLKTVTSQFLAVLGISLVEILSKHSSDEVYLGQRDTPDWTSDAEPLQAFEKFGKKLADIEERILRMNSDEKFRNRYGPVKMPYTLLYPSSKGGLTGMGVPNSISI

SEQ ID NO: 55750 - protein, 129 aa, Glycine max
  Clone ID: UC-GMRONOIR044E11_FLI.pep
LNTSLFIIDLAALREVGSFKADDVSNGLVTASTGGLHSSHTFSSRPSSCLKRLPQIAENGNESLEENCDQSRNLVNDNGSSKCYIPSFTNELWESSAFNAPKTENEDEIMFSTSNILESQVRNKFYIDH

SEQ ID NO: 55751 - protein, 24 aa, Glycine max
  Clone ID: UC-GMRONOIR045E11_FLI.pep
IKYYILVHKCKRTLINQIFETLTA

SEQ ID NO: 55752 - protein, 751 aa, Homo sapiens
  Clone ID: LIB4649-043-C11_FLI.pep
RRSVGTVWVSESKPTLLTITYNPFLFKMPEEVHHGEEEVETFAFQAEIAQLMSLIINTFYSNKEIFLRELISNASDALDKIRYESLTDPSKLDSGKELKIDIIPNPQERTLTLVDTGIGMTKADLINNLGTIAKSGTKAFMEALQAGADISMIGQFGVGFYSAYLVAEKVVVITKHNDDEQYAWESSAGGSFTVRADHGEPIGRGTKVILHLKEDQTEYLEERRVKEVVKKHSQFIGYPITLYLEKEREKEISDDEAEEEKGEKEEEDKDDEEKPKIEDVGSDEEDDSGKDKKKKTKKIKEKYIDQEELNKTKPIWTRNPDDITQEEYGEFYKSLTNDWEDHLAVKHFSVEGQLEFRALLFIPRRAPFDLFENKKKKNNIKLYVRRVFIMDSCDELIPEYLNFIRGVVDSEDLPLNISREMLQQSKILKVIRKNIVKKCLELFSELAEDKENYKKFYEAFSKNLKLGIHEDSTNRRRLSELLRYHTSQSGDEMTSLSEYVSRMKETQKSIYYITGESKEQVANSAFVERVRKRGFEVVYMTEPIDEYCVQQLKEFDGKSLVSVTKEGLELPEDEEEKKKMEESKAKFENLCKLMKEILDKKVEKVTISNRLVSSPCCIVTSTYGWTANMERIMKAQALRDNSTMGYMMAKKHLEINPDHPIVETLRQKAEADKNDKAVKDLVVLLFETALLSSGFSLEDPQTHSNRIYRMIKLGLGIDEDEVAAEEPNAAVPDEIPPLEGDEDASRMEEVD

SEQ ID NO: 55753 - protein, 285 aa, Glycine max
  Clone ID: UC-GMRONOIR053B12_FLI.pep
MNPSSGQPQQMSSQSVEKKPKPHPEQALKCPRCDSTNTKFCYYNNYSLSQPRYFCKSCRRYWTKGGTLRNVPVGGGCRKKRSSSLKRAQDQTLTPNLNPLTTLPHLSYDSNDFTLAVARFQKQSSGQLGYNDRDLSTLGNPTTGSFCDILGNSGMNPSSANPSFLDAIRTGFLETQNHLQNLYCMYGNGDLGEVDNGNSGVVGVSGEMMLPYDQVIMSNATTQSVSVMKQEMCSRREQSERRVLGGFPWQINADTNIGELDSGRTIASWNSFTNSWHGFLQSPLM

SEQ ID NO: 55754 - protein, 142 aa, Zea mays
  Clone ID: LIB3236-107-H12_FLI.pep
LRGPLYYVLVLLFSVLVFWRESPIGIVSLSMMSGGDGFADIVGRRYGSAKLPFNRKKSWAGSISMFISGFLLSAMMMLYFSSLGYIDVIWEEALGKLALVALAATVVECVPVTEVVDDNISVPLATMLVAFLLFSSNRTIVN

SEQ ID NO: 55755 - protein, 399 aa, Glycine max
  Clone ID: UC-GMRONOIR060E03_FLI.pep
CNSSFSSCLVQNRSSSLPSTDHSISLNTRSIYYKIHPLLPLSATTITIFIMHKSSSDSTLGPGGLDLSQAFFRPINNAAPPSPTKRHNKISVIGAGNVGMAIAQTILTQDLTDELVLVDTNSDKLRGEMLDLQHAAAFLPRTKIHASADSSVTAGSDLCIVTAGARQISGESRLNLLQRNLSLFRAIIPPLVRYSPDTTLLIVSNPVDVLTYVAWKLSGFPSNRVIGSGTNLDSSRFRFLIADHLDVNAQDVQAYIVGEHGDSSVALWSSISIGGVPVLSFLENQQIVYEKETLENIHKSVIDSAYEVIKLKGYTSWAIGYSVANLARSFIRNQRKIHPVSVLAKGFYGIDGEVFLSLPAMIGRGGILGVTNVHLNEEETQRLRDSAKTILEVQTQLGI

SEQ ID NO: 55756 - protein, 338 aa, Zea mays
  Clone ID: LIB4185-018-A5_FLI.pep
TRHALDCEVAPSASASRVVAARGRNGMLSLAAHITPLSYSTHRAHLLQSRPLSPSPTVPAGAASASCAPRSLCFRRRRSSRLAAERTRRPTMAAAISLEAGGALAHDLGSAVVTGGVALALLKFFEELAKRGVFEQKLSRKLVHISVGLVFMLFWPLFSSGWYTPFLAALAPGVNIIRMLLLGLGLMKNEAMVKSMSRSGDYRELLKGPLYYAATITFATSLLWRTSPVAIALICNLCAGDGIADVVGRRLGKEKLPYNPNKSYAGSIAMAVAGFLASVGYMHYFHTFGFIEETWYMALSFLVVSVAAALVESHPISTELDDNLTVPLTSFLVGSLIF

SEQ ID NO: 55757 - protein, 339 aa, Glycine max
  Clone ID: UC-GMRONOIR063G10_FLI.pep
LNTHAVVEPFVIATNRHLSVVHPIYKLLFPHYRDTMNINSLARKSLVNADGIIEKTFLWGRYSLEMSAVIYKDWVFTDQALPNDLVKRGVAVKDPSAPHGVRLLIEDYPYASDGLEIWDAIKSWVHEYVSFYYKSDAAIQQDPELQAWWKELVQVGHGDLKDKPWWQKMQTREELIEASATLVWIASALHAAVNFGQYPYGGLILNRPTISRRFMPEKGSAEYAALAKNPEKEFLKTITGKKETLIDLTIIEILSRHTSDEFYLGERDGGDYWTSDAGPLEAFKRFGKKLQEIEQKLIQKNKDETLRNRSGPAKMPYTLLYPSSEEGLTFRGIPNSISI

SEQ ID NO: 55758 - protein, 298 aa, Zea mays
  Clone ID: LIB4764-010-E2_FLI.pep
RTAELQHPVQQQDQRGCTSASRVGTMWTGSPLLRDVGAAVLTGVAAAAVLRFWEEIANRALLDQKLCRKLVHITVGLVFFLMWPLFSSDDVFAPSLAPLIIIINIMKVTVIGLGFVKAEGVVNSMTRHGDRRELLKGPLYYACAITLTTIVFWRTSPISIAVICNLCAGDGVADIAGRRFGHVKLPHNPEKSYAGSIAMFLAGFIASVLFMCYFNIFGFVEKSWSMVAAFGVISLAAAVVESLPISTRLDDNLTVSVASVLVGALVFYSIGARNLCCMSSEVRRSIPATVGMVFAGSS

SEQ ID NO: 55759 - protein, 351 aa, Glycine max
  Clone ID: UC-GMROPIC004D12_FLI.pep
SARKDTAAVEHEDTLSSSYFYYDVKSFHKISFDQREIIESLVDKNIMGHGGSGTVYKIELKSGDIVAVKRLWSHSSKDSAPEDRLFVDKALKAEVETLGSVRHKNIVKLYCCFSSYDFSLLVYEYMPNGNLWDSLHKGWILLDWPTRYRIALGIAQGLAYLHHDLLLPIIHRDIKSTNILLDVDYQPKVADFGIAKVLQARGGKDSTTTVIAGTYGYLAPEFAYSSRATTKCDVYSFGVILMELLTGKKPVEAEFGENRNIVFWVSNKVEGKEGARPSEVLDPKLSCSFKEDMVKVLRIAIRCTYKAPTSRPTMKEVVQLLIEAEPRGSDSCKLSTKDVSNVTVIKKPYEL

SEQ ID NO: 55760 - protein, 448 aa, Homo sapiens
  Clone ID: LIB4803-040-F6_FLI.pep
LLQRISWLEIRGLRFPRPFPAKEKLHKKPGSLIEPPLKPVKALSPRPLAFVWSSATPASWGHRVGTMGPTSVPLVKAHRSSVSDYVNYDIIVRHYNYTGKLNISADKENSIKLTSVVFILICCFIILENIFVLLTIWKTKKFHRPMYYFIGNLALSDLLAGVAYTANLLLSGATTYKLTPAQWFLREGSMFVALSASVFSLLAIAIERYITMLKMKLHNGSNNFRLFLLISACWVISLILGGLPIMGWNCISALSSCSTVLPLYHKHYILFCTTVFTLLLLSIVILYCRIYSLVRTRSRRLTFRKNISKASRSSEKSLALLKTVIIVLSVFIACWAPLFILLLLDVGCKVKTCDILFRAEYFLVLAVLNSGTNPIIYTLTNKEMRRAFIRIMSCCKCPSGDSAGKFKRPIIAGMEFSRSKSDNSSHPQKDEGDNPETIMSSGNVNSSS

SEQ ID NO: 55761 - protein, 374 aa, Glycine max
  Clone ID: UC-GMROPIC008A09_FLI.pep
CFIQKMPIARSQRFSEEITSDERVKMQHPTSSDSTVTEPTHQTAHECCMQMANEMICIQNQLSDIEIKQANMMHQLQMFTTGIMDALSTIQSRITGLENVFDRLSQESLQRGRHSYSENSKLGRQSENVASPRFSICTPTPRPSVEINNKQSDSMSVKNSESWEKKAFSRSQPRIHSGDSLDMWKSNKVKATRKFTEKDVLNSSSKDTLQMGSVKNDGIFSATRITNARNDCSESNNNYWKHVKRLVCEGDLNSAYREALCFSDEFILVELLNTTGPVIESLSVKTMNVLLSTLASYLLEGKLFNTIIPWLQQIVEMSTIHGPNCIAISIEAKKHLLSAVQEAMNLHFFSHAERRRVAELAMKLHHIWGKITES

SEQ ID NO: 55762 - protein, 399 aa, Homo sapiens
  Clone ID: LIB4753-025-C5_FLI.pep
NECSWGALSWILELIVCECQVMATALPPRLQPVRGNETLREHYQYVGKLAGRLKEASEGSTLTTVLFLVICSFIVLENLMVLIAIWKNNKFHNRMYFFIGNLALCDLLAGIAYKVNILMSGKKTFSLSPTVWFLREGSMFVALGASTCSLLAIAIERHLTMIKMRPYDANKRHRVFLLIGMCWLIAFTLGALPILGWNCLHNLPDCSTILPLYSKKYIAFCISIFTAILVTIVILYARIYFLVKSSSRKVANHNNSERSMALLRTVVIVVSVFIACWSPLFILFLIDVACRVQACPILFKAQWFIVLAVLNSAMNPVIYTLASKEMRRAFFRLVCNCLVRGRGARASPIQPALDPSRSKSSSSNNSSHSPKVKEDLPHTAPSSCIMDKNAALQNGIFCN

SEQ ID NO: 55763 - protein, 246 aa, Glycine max
  Clone ID: UC-GMROPIC012A02_FLI.pep
FAMELSFRPQLGLVCVILLFPALCNCQEYFTKSRATYYGTPDGYGTPTGACGYGEFGRLMDGYGGRVTGVSGLWRNGAGCGTCYQVRCKIPKLCDVNGVTLVVTDYGQGDRTDFIMSPRAFSKLGVDKKASEEIKKKGTVDIEFKRVPCKYTGNVLFHVQETSSNPGYFAVVILFVNGKYDVTDVEMWQKSQQRWEPLRRSYGAVFDFANPPSGEILLRFKAGSWKQAKIPANWKPGATYDTKVQF

SEQ ID NO: 55764 - protein, 570 aa, Zea mays
  Clone ID: LIB3151-042-F10_FLI.pep
IVCSRVTRLYPAPQLEADEVASAHARAAMAAAQGGTVVCSSEKVEFLKLQNGSDIRGVAVAGVEGEPVNLTEDVTKAIAAAFAAWLLNKKPDGWRLLRISVGHDSRISAHKLQNAVTHGITAAGHDILQFGLASTPAMFNSTLTEDERSHLPVDGAIMITASHLPYNRNGLKFFTSDGGLNKADIKDILERASKIYEESAHNNLKEQGEASKGVVTNVDYMSIYASDLVQAVRKSAGDKEKPLEELHIVVDAGNGAGGFFVDKVLKPLGAVTTGSQFLEPDGLFPNHIPNPEDKTAMKFITQAVLDNKADLGIIFDTDVDRSAAVDSRGRELNRNRLIALMAAIVLEEHPGTTVVTDSVTSDGLTVFIENKLGGKHHRFKRGYKNVIDEAIRLNSIGEESHLAMETSGHGALKENHWLDDGAYLMVKLLNKLAAARTLGSSIGSKVLTDLVEGLEEADVTVEIRLKIDQNHADLKGGSFRDYGESVLRHLENAISKDPNLHKAPVNHEGVRVSGYGGWFLLRLSLHDPVLPLNIEAQSNDDAIKLGLAVLAAVNEFPALDVTALNKFVHQ

SEQ ID NO: 55765 - protein, 510 aa, Glycine max
  Clone ID: UC-GMROPIC021B03_FLI.pep
VVMIRSVLFTYWGLKTSQSFFSGMLESILHAPMSFFDTTPSGRILSRVSTDILWVDISIPMLVNFVMVAYFSVTSILIVTCQNAWETVFLLIPLFWLNNWYRKYYLASSRELTRLDSITKAPVIHHFSETIAGVMTIRGFRKQNAFCQENIDKVNASLRMDFHNNGANEWLGFRLDYMGVIFLCFATIFMIFLPSAIIKPEYVGLSLSYGLALSSLLAFTISMTCSVENKMVSVERIKQFSSLPSEAPWKIADKTPPQNWPSQGIIELTNLQVRYRPNTPLVLKGISLTIEAGEKIGVVGRTGSGKSTLIQVLFRLIEPSAGKITVDGINICTLGLHDVRSRFGIIPQEPVLFQGTVRSNIDPLGLYSEEEIWKSLERCQLKDVVAAKPEKLEAPVVDGGDNWSVGQRQLLCLGRIMLKSSKILFMDEATASVDSQTDAVIQKIIREDFADRTIISIAHRIPTVMDCDRVLVIDAGYAKEYDKPSRLLERHSLFGALVKEYSNRSAELEA

SEQ ID NO: 55766 - protein, 514 aa, Homo sapiens
  Clone ID: LIB4649-040-B3_FLI.pep
QYRRRLREEFSFIPSAALDLLDHMLTLDPSKRCTAEQTLQSDFLKDVELSKMAPPDLPHWQDCHELWSKKRRRQRQSGVVVEEPPPSKTSRKETTSGTSTEPVKNSSPAPPQPAPGKVESGAGDAIGLADITQQLNQSELAVLLNLLQSQTDLSIPQMAQLLNIHSNPEMQQQLEALNQSISALTEATSQQQDSETMAPEESLKEAPSAPVILPSAEQTTLEASSTPADMQNILAVLLSQLMKTQEPAGSLEENNSDKNSGPQGPRRTPTMPQEEAAACPPHILPPEKRPPEPPGPPPPPPPPPLVEGDLSSAPQELNPAVTAALLQLLSQPEAEPPGHLPHEHQALRPMEYSTRPRPNRTYGNTDGPETGFSAIDTDERNSGPALTESLVQTLVKNRTFSGSLSHLGESSSYQGTGSVQFPGDQDLRFARVPLALHPVVGQPFLKAEGSSNSVVHAETKLQNYGELGPGTTGASSSGAGLHWGGPTQSSAYGKLYRGPTRVPPRGGRGRGVPY

SEQ ID NO: 55767 - protein, 385 aa, Glycine max
  Clone ID: UC-GMROPIC021F10_FLI.pep
LVCIHVELVAIGSSYSLQPTDQGRKMLGVIRHKSIRPAFSAIRHFSSAAKEITVRDALNSALDEEMSADPKVFLMGEEVGEYQGAYKISKGLLDKYGPERVLDTPITEAGFAGIGVGAAYYGLRPVVEFMTFNFSMQAIDHIINSAAKSNYMSAGQISVPIVFRGPNGAAAGVGAQHSQCYASWYGSCPGLKVLSPYSSEDARGLLKAAIRDPDPVVFLENELLYGESFPVSAEVLDSSFCLPIGKAKIEREGKDVTITAYSKMVGYALKAAETLAKEGISAEVINLRSIRPLDRSTINASVRKTNRLVTVEEGFPQHGVGAEICTSVIEESFGYLDAPVERIAGADVPMPYAANLERMAVPQVEDIVRAAKRACYRSVPLAASA

SEQ ID NO: 55768 - protein, 696 aa, Homo sapiens
  Clone ID: LIB4676-046-C4_FLI.pep
DKQDALDFKKDKGAFYLVFEYMDHDLMGLLESGLVHFSEDHIKSFMKQLMEGLEYCHKKNFLHRDIKCSNILLNNSGQIKLADFGLARLYNSEESRPYTNKVITLWYRPPELLLGEERYTPAIDVWSCGCILGELFTKKPIFQANLELAQLELISRLCGSPCPAVWPDVIKLPYFNTMKPKKQYRRRLREEFSFIPSAALDLLDHMLTLDPSKRCTAEQTLQSDFLKDVELSKMAPPDLPHWQDCHELWSKKRRRQRQSGVVVEEPPPSKTSRKETTSGTSTEPVKNSSPAPPQPAPGKVESGAGDAIGLADITQQLNQSELAVLLNLLQSQTDLSIPQMAQLLNIHSNPEMQQQLEALNQSISALTEATSQQQDSETMAPEESLKEAPSAPVILPSAEQTTLEASSTPADMQNILAVLLSQLMKTQEPAGSLEENNSDKNSGPQGPRRTPTMPQEEAAACPPHILPPEKRPPEPPGPPPPPPPPPLVEGDLSSAPQELNPAVTAALLQLLSQPEAEPPGHLPHEHQALRPMEYSTRPRPNRTYGNTDGPETGFSAIDTDERNSGPALTESLVQTLVKNRTFSGSLSHLGESSSYQGTGSVQFPGDQDLRFARVPLALHPVVGQPFLKAEGSSNSVVHAETKLQNYGELGPGTTGASSSGAGLHWGGPTQSSAYGKLYRGPTRVPPRGGRGRGVPY

SEQ ID NO: 55769 - protein, 865 aa, Glycine max
  Clone ID: UC-GMROPIC021H06_FLI.pep
KHLGNITSLTYLMLEANQFSGDVPTELGKLINLQTLVLSSNQLTGSFPPSLAGLQNLTDFRISNNNFTGTIPNFIQNWQQLKRLEMHGSGLEGPIPSNISLLNNLEQLRISDIESPSQDFPFLGNMAGLITLVLRNCNLSGVIPSYIWTMMALENLDVSFNMLVGQIPAVISARRLRYIYLTGNILSGNIPNSVLKDGSSIDLSYNNFTWQDDDQPACQDSMNLNLNLFRSSIKENKLEEYVPCSKNFICPRYSSCLHVNCGGKDVNVKDDKGENLYVGDDVQGGTATYFYSSNDHWGFSSTGDFMDDFDGQNIRYTVSSPSSNMPELYKTARISPITLTYFHNCMENGNYTVNLHFAEIQFTNDKTFRSLGKRIFDIYVQGKLIRKNFDIENETNVAEKPLVLPIYNISITNNVLEIRFYWAGKGTTRIPDVGVYGLLVSAFSVVSNSRVCSNGEKKVSVSIIIAIVVGALCLVLFTSGFIWWKWKGFFRGKLRRAGTKDRDTQAGNFSLEQIRVATDDFSSANKIGEGGFGPVYKGQLLDGTFIAVKQLSSKSRQGNREFINEIGLISCVQHPNLVKLYGYCAEGEQLLLVYEYLENNSLARVLFGSENKQLKLDWPTRFRICIGIAKGLAFLHDESRFKIVHRDIKASNVLLDDKLNPKISDFGLAKLDEAEKTHISTRVAGTIGYMAPEYALWGYLTDKADVYSFGVVALEIVSGKSNNNYLPDDGSVCLLDRACQLNQTRNLMELIDERLGPDLNKMEVEKVVKIGLLCSNASPTLRPTMSEVVNMLEGHADIPDVIPEPSTYNDDLRFKALRNLHQYQSKQSLSGNQSQSSMTHTFTSASGGNTHTTSYIEDHSSVDSS

SEQ ID NO: 55770 - protein, 475 aa, Glycine max
  Clone ID: UC-GMROPIC022E10_FLI.pep
FQMGPGALQSTYVEKKRFTPESDSSSLTEWKWEGTIAKGGTPVCCARCFPVGKVLDMMLPEFLDCTAKTGLDMLSKHYYQAVGVWVVFFVPGSDADMECYNEFMHYLEEKQRAAVAKLDDKTTLFLVPPSEFSEKVLKVPGRLSISGVILRLENPDLNHGPEHIQREMTNKNLLSYNENILHLKSTFPSVRVPTFPSIPEMGNSGISNLSFLGNKFAAAPSVSDSARAVASMSEFHDERSHNYPTQQRTSSQNLQNFSNKALPLQPSSGAGEPIADEHQPIIPRAAQDVNAIQHPSGISGIPFYGDSKLSYPDIRHLDPLSVPVGALAPEQLAQLAATLLEQQRQSGGSSSTSALADPQQINRFGTSDTSSRFISSDNSSRPPQKYATENNVVNSDLSASQMGQSQMLQMQKQQQIVNVPQLSQIVQREPQSEANGNQLDSSLQEDADVDPQRRLQATLQLAAVLLHQIQHGKGS

SEQ ID NO: 55771 - protein, 471 aa, Cucumis sativus
  Clone ID: LIB3089-034-C6_FLI.pep
TSCSDQMASVALKSFTGLRQSSTEKPHFITQTKANQNPQFRRRFYVAAAKTSPKIAGRNLRVAVVGGGPAGGSAAETLARGGVETFLFERKLDNCKPCGGAIPLCMVGEFDLPLDLIDRRVTKMKMISPSNVAVDIGQTLKPHEYIGMVRREVLDAYLRDRAAENGANVINGLVMKLELPKNQNAPYVLHYTAYDGKKGGVGEKMTLEVDAVIGADGANSRVAKAIDAGDYDYAIAFQERIKIPDDKMVYYENLAEMYVGDDVSPDFYGWVFPKCDHVAVGTGTVTHKADIKKFQIATRNRAKDKILGGKIIRVEAHPIPEHPRPRRLAGRVALVGDAAGYVTKCSGEGIYFAAKSGRMCAEAIVEGSENGKRMVEESDLRKYLEKWDKTYWPTYKVLDVLQKVFYRSNPAREAFVEMCADEYVQKMTFDSYLYKKVVPGNPLDDLKLAVNTIGSLVRANALKREMEKVSL

SEQ ID NO: 55772 - protein, 299 aa, Glycine max
  Clone ID: UC-GMROPIC023C12_FLI.pep
TMAAVSLRLLCFLFFLCFTITSQAAQTCDNDTGNYTVNSTYHNNLNTLLSSFSSHKEINYGFYNFSHGQDPDRVYAIGLCRGDQKPDDCLKCLNNSRVSLAKECPNQKHAIDWGIECMLRYSNRSIFSLMETQPMVELVYTLDVKGSVEQFNEALQSLMRNLTRTAASGDSRLKYATASTPAPSFQTIFGYTQCTPDLSSEDCTKCLEEAISKIPECCSGKAGGNVLKPSCRIRFDPYVFYGPTLKLDSDAPSVSTNKTSSSPGKSNNTSRTIIAIAVPVASVVLALSLFCIYLTVRKP

SEQ ID NO: 55773 - protein, 355 aa, Brassica napus
  Clone ID: LIB4154-004-A3_FLI.pep
HHHPSTQSKTPRSRSPSLITLKPITLTPKRTVSSASHTISSSLVTKEDNNLKSTTSSSFDFMSYILRKADSVNRALDSAVPLREPLKIHEAMRYSLLAGGKRVRPVLCIAACELVGGEESLAMPAACAVEMIHTMSLIHDDLPCMDNDDLRRGKPTNHKVYGEDVAVLAGDALLSFAFEHLASATSSEVSPARVVRAVGELAKAIGTEGLVAGQVADISSEGLELNDVGLDHLEFIHLHKTAALLEASAVLGGIVGGGSDEEIERLRKFARCIGLLFQVVDDILDVTKSSQELGKTAGKDLIADKLTYPKLMGLEKSREFAEKLNREARDQLLGFDSDKVAPLLALANYIANRQN

SEQ ID NO: 55774 - protein, 248 aa, Glycine max
  Clone ID: UC-GMROPIC024C09_FLI.pep
FYPLKFLLTMRSPQFTSHLFTHRQFISPQLKNHQCTNLQFTSLQLKNHLFISLQFISHPFTSLQCINLQLKNHRFTSLQFINHLFTSLQCINPQLKNHPFISHQFTSHQCTSLQCISHQFTSHQCTSHQLRSHQYTNHPFISHQFTSHQCTSHHHNNNDDHDIHQARARAFRASISGPVYWTEARSGSATPYRSTSRPSSGPLAGTVTPPAKDDVDTPYLSLRELNMEQQQQLQQRMSTSAMPIYLVT

SEQ ID NO: 55775 - protein, 364 aa, Triticum aestivum
  Clone ID: LIB3350-031-A3_FLI.pep
SYAFPLSLTMAAKARSFNQININATSSSKFSFKLHLPPRSTSLHAKKSTPSLVRCAPTSTSTVFKDKDPFSLERYMASKAMTVNEALDRALPLGHPERLFESMRYSLFAGGKRVRPMLTLAACELVGGDEAAALPVAYAVEMVHTMSLIHDDLPCMDDDHLRRDRPTNHVVFGVSIALLAGDALLARAFEHVARGCTEHGMPANCALRAVAELASAVGTDGLVAGQVVDLASDGTDVDLATLEYIHVHKTARLLEAAAVCGAIVSGGADEEIEGIRRYARYVGLLFQVVDDVLDVTRASEQLGKTAGKDIATDKATYPKLMGMDGTLAYAAQLVASAEAELDRFDGTCTEPLRHLAHFIAYRQH

SEQ ID NO: 55776 - protein, 195 aa, Glycine max
  Clone ID: UC-GMROPIC024G12_FLI.pep
EHIAMVKGDIGDGHDVLVRVHSECLTGDIFGSARCDCGNQLALAMQQIEAAGRGVLVYLRGHEGRGIGLGHKLRAYNLQDDGRDTVEANEELGLPVDSREYGIGAQILRDLGVRSMKLMTNNPAKYVGLKGYGLTISGRIPLVSLITKENKRYLETKRVKMGHVYGSEFNSKLNHQDTGNGKANSDDDSNAAAGL

SEQ ID NO: 55777 - protein, 685 aa, Cuphea pulcherrima
  Clone ID: LIB3792-042-H3_FLI.pep
RASASRSSSASSDGEQRKMTVWKEKNEWKIDFSSRKPTTPLLDTINYPAHMKNLSTQDLEQLSAELRAEIVHSVSKTGGHLSSSLGVVELSVALHHVFDTPEDKIIWDVGHQAYAHKILTGRRSKMNTLRKTSGLSGFPKRDESPHDAFGAGHSSTSISAGLGMAVARDLLGKKNNVISVIGDGAMTAGQAYEALNNAGYLDTNMIVILNDNRQVSLPTATLDGPANPVGALSSALTRLQASENFRKLREAAKNITKQIGGQAHEVAAKVDEYARGLISASGSTFFEELGLYYIGPVDGHNVEDLVTILEKVKAMPAPGPVLIHVVTEKGKGYQPAEAAPDKMHGVVKFDPKTGQQFKPKPATLSYTQYFAESLIKEAEVDNKIVAIHAAMGGGTGLNFFQKKFPERCFDVGIAEQHAVTFAAGLATEGLKPFCAIYSSFLQRGYDQVVHDVDLQKLPVRFAMDRAGLVGADGPTHCGAFDIPFMACLPNMVVMAPSDEAELMHMVATAAAIDDRPSCFRFPRGNGVGATLPPNNKGSPLEIGKGRILVEGTRVALLGYGSVVQQCVESASMLRSRGVPITVADARFCKPLDTELIRQLANHHEILITVEEGSIGGFGSHVAHFLSLSGILDGPLKLRPMVLPDRYIEHGSPKDQLEEAGLTSKHISATVLSLLGRAKEAFQFER

SEQ ID NO: 55778 - protein, 520 aa, Glycine max
  Clone ID: UC-GMROPIC025H11_FLI.pep
FIASDPPWTQLRRPLSDFLFLSLVMGLNRTPRHNPVLPTKSPILSRSHSRSQTMKTTQIFGVSLSLILINLAAIMERADENLLPSVYKEVSETFNAGPSDLGYLTFVRNFVQGLSSPLAGILVINYDRPTILAMGTFCWALSTAAVGVCHDFLQVAFWRAINGFGLAIVIPALQSFIADSYKDGVRGTGFGLLSLVGNLGGIGGGVLATVMAGQQFWGIQGWRCAFILMATLSALIGFLVLLYVVDPRKRFPTTRDASESSDRDDTVYKGNASAASIWIDSWAATKAVIKVKTFQIIVLQGIIGSLPWTAMVFFTMWFELIGFDNNTSATLLSLFAIGCAMGSFIGGSIADQLSQVYPHSARTMCAQFSAFMGIPFSWFLLKVIPQSVSSFPIFSVTLFIMGLTISWNGAAANAPMFAEVVPVKHRTMIYAFDRAFEGSFSSIAAPLVGILSEKMFGYNSKSVDPIKGSSPEALALSKGLLSMMAVPFGLCCLCYTPLYYIFRRDRENARMLAVKEEEMM

SEQ ID NO: 55779 - protein, 358 aa, Allium porrum
  Clone ID: LIB4503-010-A12_FLI.pep
FLVLPSPLSPIQLEMSKTGALDLASGLGGKIAKKEVQSAVEQYEKYHVYHGGDEETRKSNYSDMVNKYYDLATSFYEFGWGESFHFAPRWIGESLRESIKRHEHFLALQLGLKKGMKVLDVGCGIGGPLREIARFSSTSITGLNNNDYQITRGQELNKATGLGEDCNFVKADFMKMPFEENSFDAIYAIEATCHAPDALGCYKEIYRVLKPGQCFAAYEWCITDHYNPNNEEHQKIKAEIELGNGLPDVRSTTQCLEALKQAGFEVIWDKDLAVDSPVSWYLPLDTSRFSITSFRLTAFGRFITKSMVKTLEYIGLAPAGSDRVSSFLEKAAEGLVEGGRKEIFTPMYFFLVRKPISQ

SEQ ID NO: 55780 - protein, 483 aa, Glycine max
  Clone ID: UC-GMROPIC027D05_FLI.pep
TMLPQKQGEETMMSNLNETTIERGEEREEENVGGGSHSSLKSILWHGGSAYDAWFSCASNQVAQVLLTLPYSFSQLGMLSGIIFQVFYGIMGSWTAYLISILYIEYRTRKEKESVSFKNHVIQWFEVLEGLLGPYWKAIGLAFNCTFLLFGSVIQLIACASNIYLINDHLDKRTWTYIFGACCATTVFVPSFHNYRIWSFLGLGMTTYTAWYMTIAAIAHGQVENVTHTGPKKLVLYFTGATNILYTFGGHAVTVEIMHAMWKPQKFKYIYLYATLYVFTLTLPSAVAVYWAFGDKLLDHSNAFSLLPRSGWRDAGVILMLIHQFITFGFACTPLYFVWEKVIGMHDTKSICLRALARLPVVIPIWFLAIIFPFFGPINSAVGALLVSFTVYVIPACAHMLTYKSASARQNAAEKLPFFIPNWTAMYVVNAFVVVWVLVVGFGFGGWASMTNFIKQVDTFGLFAKCYQCPPKVPASNNTMLHH

SEQ ID NO: 55781 - protein, 750 aa, Homo sapiens
  Clone ID: LIB4693-008-F2_FLI.pep
RSVGTVWVSESKPTLLTITYNPFLFKMPEEVHHGEEEVETFAFQAEIAQLMSLIINTFYSNKEIFLRELISNASDALDKIRYESLTDPSKLDSGKELKIDIIPNPQERTLTLVDTGIGMTKADLINNLGTIAKSGTKAFMEALQAGADISMIGQFGVGFYSAYLVAEKVVVITKHNDDEQYAWESSAGGSFTVRADHGEPIGRGTKVILHLKEDQTEYLEERRVKEVVKKHSQFIGYPITLYLEKEREKEISDDEAEEEKGEKEEEDKDDEEKPKIEDVGSDEEDDSGKDKKKKTKKIKEKYIDQEELNKTKPIWTRNPDDITQEEYGEFYKSLTNDWEDHLAVKHFSVEGQLEFRALLFIPRRAPFDLFENKKKKNNIKLYVRRVFIMDSCDELIPEYLNFIRGVVDSEDLPLNISREMLQQSKILKVIRKNIVKKCLELFSELAEDKENYKKFYEAFSKNLKLGIHEDSTNRRRLSELLRYHTSQSGDEMTSLSEYVSRMKETQKSIYYITGESKEQVANSAFVERVRKRGFEVVYMTEPIDEYCVQQLKEFDGKSLVSVTKEGLELPEDEEEKKKMEESKAKFENLCKLMKEILDKKVEKVTISNRLVSSPCCIVTSTYGWTANMERIMKAQALRDNSTMGYMMAKKHLEINPDHPIVETLRQKAEADKNDKAVKDLVVLLFETALLSSGFSLEDPQTHSNRIYRMIKLGLGIDEDEVAAEEPNAAVPDEIPPLEGDEDASRMEEVD

SEQ ID NO: 55782 - protein, 316 aa, Glycine max
  Clone ID: UC-GMROPIC027G02_FLI.pep
RRLNARIEYAKFLQDTVKEMAKEIQNSQSGEMKKTAEDLDEFMNKVRTGARVSNDEILGFAKLFNDELTLDNISRPRLVNMCKYMGISPYGTDAYLRYMLRKRLQEIKNDDKLVQVEGVESLSEAELRQACRDRGLLGLLSVEEMRQQLRDWLDLSLNHSVPSSLLILSRAFSVSGKVRPEEAVQATLSSLPDEVVDTVGVTTLPSEDSVSERKRKLEYLEMQEELIKEEEKKEEAEQAKMVESVGSEGDLGIMKERASTTNQTQGEVKTKTLDKQEHLWELSRALAVLASASSVSREREEFLRLVRKEVYRFYCI

SEQ ID NO: 55783 - protein, 176 aa, Zea mays
  Clone ID: LIB4185-014-E12_FLI.pep
ARGAAAWTGAASPNSLLLSRSPPHAAALAPSLGSSMRRRLLLGVGTPAVAALAAAAPPAVLQDGAVTVLITAGAYSLVRVFDELTERRLIEKSLSRKVVHVLSGVLFMSSWPLVSNSTEARYFAAVVPFLNSMRLLIYGLRLYTDEALVKSVTREGKPEELLRGHSIMSWCCCSAF

SEQ ID NO: 55784 - protein, 381 aa, Glycine max
  Clone ID: UC-GMROPIC027G12_FLI.pep
LRLLKLERIKDYLLMEEEFVANQERLKPQEEKAEEDRSKVDDLRGSPMSVGNLEELIDESHAIVSSSVGPEYYVGILSFVDKDQLEPGCAILMHNKVLSVVGLLQDEVDPMVSVMKVEKAPLESYADIGGLDAQIQEIKEAVELPLTHPELYEDIGIKPPKGVILYGEPGTGKTLLAKAVANSTSATFLRVVGSELIQKYLGDGPKLVRELFRVADDLSPSIVFIDEIDAVGTKRYDAHSGGEREIQRTMLELLNQLDGFDSRGDVKVILATNRIESLDPALLRPGRIDRKIEFPLPDIKTRRRIFQIHTSRMTLADDVNLEEFVMTKDEFSGADIKAICTEAGLLALRERRMKVTHADFKKAKDKVMFKKKEGVPEGLYM

SEQ ID NO: 55785 - protein, 332 aa, Oryza sativa nipponbare
  Clone ID: LIB3432-014-E9_FLI.pep
KNSRWPTSDFASLQSVYRMAAAARPVDVVRHFPCSSSVAASSSLLLSRSKSRLASPAAAAASSMRRRLVLGVGAAAAPAVAALAASATPAALRDCAATLLITAGAYSLVRAFDGLTARRLIEQNLSRKIVHVLSGVLFMSSWPLFSNSTEARFFAAIVPLLNCIRLLTYGLRLSTDEALVKSVTREGKPEELLRGPLYYVIVLLVSVLVFWRQSPIGIVSLSMMSGGDGFADIVGRRYGSAKLPFNENKSWIGSISMFISGFLLSALMLFYFSCLGYFTVCWDLALGKLALVALAATVVECIPVNDVVDDNISVPLATMLAAYLLFGYSSCC

SEQ ID NO: 55786 - protein, 532 aa, Glycine max
  Clone ID: UC-GMROPIC028A03_FLI.pep
RVTTLGAVHEIRQLQMMLRHLTSNLTFQEAYDMTGRILGITVCSPRKHEPPRCLNYLTSPHVVIWSAVTASCAFPGLFEAQELMAKDRSGEIIPYHPPFNLGPEEGSTPARRWRDGSLEIDLPMMQLKELFNVNHFIVSQANPHIAPLLRLKEFVRTYGGNFAAKLAHLVEMEVKHRCNQILELGFPLGGLAKLFAQDWEGDVTVVIPATLAQYTKIIQNPSYGELQKATNQGRRCTWEKLSAIKANCGIELALDECVVILNHMRRLKRIAERAASASQGLSSTVRFSASKRIPSWNCIARENSTGSLEDLTDVAASKHQGISSSCGTNGKTWKTYRGILDGSDSDSESVDLHSWTRSGGPLMRTTSANMFVDFLQNLDVDTDQNNKGLVSRANPNDFQYRSPRLATLDRNSDSTESEPREIGNRVFNVSSILVTEGDLLQPERIHNGIVFNVVKKEDLSPLSGSSHDFENYNIEVAECVQDECPGKEIDAASSASEHGDDEESTVARSLTETQDYNSMDHHSGMDQSIVDS

SEQ ID NO: 55787 - protein, 194 aa, Zea mays
  Clone ID: LIB3957-009-E12_FLI.pep
SGKTTIYYQLRDGSSHQGTVTSMEENSDTFVLHSEQERKDKVKPVHIIDVPGHARLKPKLDEVLPKAAAVVFVVDAQDFLSSMQAAAEYLYDILTKATVVKKKVPVLIFCNKTDKVTAHSKEFIKKQLEKELNKLRESRNAVSSADISDEVQLGVPGEAFNFSQCQNKVAVAEGAGLTGDVSAVEQFIREHVKA

SEQ ID NO: 55788 - protein, 336 aa, Glycine max
  Clone ID: UC-GMROPIC029A05_FLI.pep
KTELYPIFFLLNFPRFSLQNHIFLDLHLLGCFFFLLFFAMESKNPARFTLGKQSSLAPERHNKEAELQNDGEVVDQGVRLMYSAFEGDVDGICEALESGVSVNYKDIDNRTALHVAVCEGFTDVVDLLLQKGAEVDPKDRWGSTPLADAIFYKKNDVIKLLEKHGAKLLMAPMHVNHAREVPEYEINPKELDFTNSVEITKGTFCIALWRGTEVAVKKLGEDVISDEEKVKAFRDELALFQKIRHPNVVQFLGAVTQSSPMMIVTEYLPKGDLRDFLKRKGALKPSTAVRFALDIARYLTLSCLDLFGFFCLQHRISESALSLPMGLFKIFEILFF

SEQ ID NO: 55789 - protein, 180 aa, Zea mays
  Clone ID: LIB4698-005-G5_FLI.pep
TLEAGRDANNSVKSTIERYKKANSDTSNSGTVAEVNAQHYQQESSKLRQAIDSLQNANRTIVGDSIHTMGLRELKQMEGKLEKAINKIRARKNELLYAEVEYMQRRMDLQTDNMYLRSKIAENNNETGQPAMNMIGVPSTSEYDHMASFVDSRNFLQVNMQQQQPQHYSHQLQPTTLQLG

SEQ ID NO: 55790 - protein, 435 aa, Glycine max
  Clone ID: UC-GMROPIC029C12_FLI.pep
LAAAREQSQSAQEEAEEWKRKYDIAVREAKAALEKAAIVQEYTNKQSQLREDALREEFSSTLAEKEDKIKEKTAKIEHAEQCLTTLKLELKAAESKIRNYESEISPLRLEIKKLIERLKTENARAQSYEKDVMVIQQEINHLKEKYNTECIKFEEVQERCQIAEKEAVRATEVADKARTEANLAQKEMSEMQRLAIERLAHIERAERKIENLEREKDNLEGELQRVRDSEKDALVRVSTLEEKVGQREKDIDSLLEKDGTQRRNSTQILDQLLETEREACAQANSRADSLSLQLQSAQAKIDSLHQELTKFQLNETILDSELKTASRGKRLRVDDIGVESGQDMDSSPRILRGTKRSKSTSSPLKFSHLEDVSSIGGDEDNYSQQTNEDDYKKFTIQKLKQELTKHNYGDQLLELKNPNKKAILALYEKCVLQKS

SEQ ID NO: 55791 - protein, 248 aa, Glycine max
  Clone ID: 700657856_FLI.pep
KLLKSRLNYSFKDPYLLVEALTHSSGKRPEIRTCYERLEFLGDAVLDYVITMHFYKEYSNDKFSAEFFTNMRSISVNNECYALSAIKAKLDEHILCDSVVKNNIAQTMEGVKNLSLESTFGWELETYFCQVLADVIESIAGAIFVDSGYKKEVVFQSIKPLLEPLVTPETARRHPISELHELCQKKGYKMKVYPPVRVNGETSVTIEVKTNGITYKNNPPAKASNNDTARKLAAKDVLKQIKICKSLG

SEQ ID NO: 55792 - protein, 236 aa, Glycine max
  Clone ID: UC-GMROPIC029E12_FLI.pep
NMYSLESFYDFLRDKYVEASMFVVPTKLIDVVSKEVIEGNMYSLESYKSSAESFICTLIPESPSSHIEYTPGGLVYRPGGSNLQHATSIAFLELVYANYLTHASQAINCGNVYVSAQTLRQHAKRQVDYILGDNPMGLSYMVGYSNYYPQRIHHRGSSLPSIKDHPQFIACKEGSIYYNSTNPNPNVLVGAIVGGPDENDDYVDDRVDFRRSEPTTYINAPFVGVLAYFAANPNFS

SEQ ID NO: 55793 - protein, 62 aa, Glycine max
  Clone ID: 700734625_FLI.pep
PQHKGNKTLHKGTTPNTHTITRSSKHTHVNLTNGHPVKTKTLHNLYLTPQAHSFIFLVSFIV

SEQ ID NO: 55794 - protein, 216 aa, Glycine max
  Clone ID: UC-GMROPIC029F05_FLI.pep
MLLMYDFLSFCSLHHTYTAEGYNVHTWSMLSSQKIKPTVLIGTSGQGRTFTKEVIEAMASINERPIILSLSNPTSQSECTAEEAYKWSQGRAIFASGSPFPPVEYEGKVFVPGQANNAYIFPGFGLGLIMSGTIRVHDDLLLAASEALAAQVSQENFDKGLIYPPFTNIRKISAHIAANVAAKAYELGLATRLPQPKDLVKFAESCMYTPSYRSYR

SEQ ID NO: 55795 - protein, 92 aa, Glycine max
  Clone ID: 700855128_FLI.pep
CGRSRQSGTWRTWQSTWGRRRRMLGKTFRQGHMHREQPGWYSAFSYHQRRKWFQFMFMSMTCEINVLVSMCFELWRVSFCVPCTVLKLHAVS

SEQ ID NO: 55796 - protein, 334 aa, Glycine max; identical to SEQ ID NO: 40593
  Clone ID: UC-GMROPIC030F11_FLI.pep

SEQ ID NO: 55797 - protein, 364 aa, Glycine max
  Clone ID: UC-GMROPIC031E05_FLI.pep
RILDWQIFDGHNGISAAIFAKESILSNVLSAIPQDMGRDEWLQALPRALVVGFVKTDIEFQKKGETSGTTATFVLIDRWTVTVASVGDSRCILDTQGGVVSLLTVDHRLEENVEERDRVTASGGEVGRLNVFGGNEVGPLRCWPGGLCLSRSIGDTDVGEFIVPIPHVKQVKLSNAGGRLIIASDGIWDALSSDMAAKSCRGVPAELAAKLVVKEALRSRGLKDDTTCLVVDIIPSDHPVLPTIPRKKRNVLTSLLFGKKSQNSTNKGTNKLSAVGVVEELFEEGSAMLTERLGKDFPSNTNPEIFRCAVCQADQPSVDSLSMNTGPFFPPVSKPWEGPFLCTNCQKKKDAMEGKRSTRPSETA

SEQ ID NO: 55798 - protein, 377 aa, Homo sapiens
  Clone ID: LIB4803-023-E11_FLI.pep
FWGVFTTYNHRAVMAAISTSIPVISQPQFTAMNEPQCFYNESIAFFYNRSGKHLATEWNTVSKLVMGLGITVCIFIMLANLLVMVAIYVNRRFHFPIYYLMANLAAADFFAGLAYFYLMFNTGPNTRRLTVSTWLLRQGLIDTSLTASVANLLAIAIERHITVFRMQLHTRMSNRRVVVVIVVIWTMAIVMGAIPSVGWNCICDIENCSNMAPLYSDSYLVFWAIFNLVTFVVMVVLYAHIFGYVRQRTMRMSRHSSGPRRNRDTMMSLLKTVVIVLGAFIICWTPGLVLLLLDVCCPQCDVLAYEKFFLLLAEFNSAMNPIIYSYRDKEMSATFRQILCCQRSENPTGPTEGSDRSASSLNHTILAGVHSNDHSVV

SEQ ID NO: 55799 - protein, 449 aa, Glycine max; identical to SEQ ID NO: 49620
  Clone ID: UC-GMROPIC031F08_FLI.pep

SEQ ID NO: 55800 - protein, 377 aa, Homo sapiens
  Clone ID: LIB3119-054-C11_FLI.pep
FWGVFTTYNHRAVMAAISTSIPVISQPQFTAMNEPQCFYNESIAFFYNRSGKHLATEWNTVSKLVMGLGITVCIFIMLANLLVMVAIYVNRRFHFPIYYLMANLAAADFFAGLAYFYLMSNTGPNTRRLTVSTWLLRQGLIDTSLTASVANLLAIAIERHITVFRMQLHTRMSNRRVVVVIVVIWTMAIVMGAIPSVGWNCICDIENCSNMAPLYSDSYLVFWAIFNLVTFVVMVVLYAHIFGYVRQRTMRMSRHSSGPRRNRDTMMSLLKTVVIVLGAFIICWTPGLVLLLLDVCCPQCDVLAYEKFFLLLAEFNSAMNPIIYSYRDKEMSATFRQILCCQRSENPTGPTEGSDRSASSLNHTILAGVHSNDHSVV

SEQ ID NO: 55801 - protein, 360 aa, Glycine max
  Clone ID: UC-GMROPIC033A03_FLI.pep
HCFLELIEMAVQPEIEHPRKAYGWAARDTSGVLSPFWFSRRKTGEKDVTFKVLYCGVCHSDLHKLKNEWSDSIYPLVPGREIVGEVTEVGSKVDKFKVGDKVAAGCLVGSCHSCQNCVNNLENYCQQVIPTYGAKYVDGTITYGGFSDFMVADEHFVVNIPSALPLDAAAPLLCAGITVYGPLRYFGLDKPGMHLGVVGLGGLGHLAVKFAKALGLKVTVISTSPKKKNEAIQHLGADFFVAAMCTLDGIIDTVSAVHPLMPLIDLLKSHGKLVAVGAPEKPLELLLPPLILGRKSIAGSYIGGIKETQEMINFAAEHNVRPEIEVIPMDYVNTAMERLQKADVKYRFVIDIGNTLKPHY

SEQ ID NO: 55802 - protein, 333 aa, Glycine max; identical to SEQ ID NO: 47663
  Clone ID: UC-GMROPIC033E01_FLI.pep

SEQ ID NO: 55803 - protein, 564 aa, Zea mays
  Clone ID: LIB4171-015-C6_FLI.pep
ARGEIRGGAQVPEVSLILTAAVMTAPKLKLLALPTLLVLILLLLLSAARRRVLLETLLLRAPVLPGDLLPLLPWPVAQPLLRRLALRGPADLLPAFVGAARAPGSDDAYPVAEWKGACFYENRAWVEFRNGTGGGLGGGVVHVETSKAHSWTCIDLYVFATPYRVTWDYYFLGREHTLDIKEWESEAEYEYVKRNGVSIFLMPSGTIGTLRALWDVFPLFTNTAWGENANLAFLEKHMGATFEERPKPWVSELNPDDIQSGDFLVLSKIRGRWGGFETLEKWVTGAYAGHTAVCLRDSDGKLWVGESGNENEQGEDVIAILPWEEWWEFEVTKDDSNPQIALLPLHPDLRAKFNETAAWIYAKSMEGKPYGYHNMIFSWIDTISDNYPPPLDAHVVASVMTVWSKLQPEYAANMWKEALNKRLGTKGLDLSEIIVESEKRGITFDKLLSVPENDSWVYEDGQSASCVAFVLMMYKEAGLFDPITSSIEVTEFTIKDAYILNFFEDNSTRLPEWCNKDDDVKLPFCQIKGKYRMELPGYNTMKPYAHMNERCPSLPPDYNRTKGC

SEQ ID NO: 55804 - protein, 291 aa, Glycine max
  Clone ID: UC-GMROPIC033E03_FLI.pep
KATKGFSQEIGRGAGGIVYKGILSDQRHVAIKRLYDAKQGEGEFLAEVSIIGRLNHMNLIEMWGYCAEGKHRLLVYEYMENGSLAQNLSSNTLDWSKRYSIALGTARVLAYLHEECLEWILHCDIKPQNILLDASYQPKVADFGLSKLLNRNNLNNSSFSMIRGTRGYMAPEWVLNLAITSKVDVYSYGIVLLEMITGKSPTTTGVQNIDGEEPYNGRLVTWVREKRSATSWLEHIIDPAIKTNYDECKMNLLATVALDCVEEDKDVRPTMSHVVEMLQSHESDPRNIINA

SEQ ID NO: 55805 - protein, 300 aa, Zea mays
  Clone ID: LIB4605-001-F1_FLI.pep
TLEAGRGSRLYFLPLRKEFPLFCASSSSGIASMGRGRIEIKRIENNTSRQVTFCKRRNGLLKTYELSVLCDAEVALIVFSSRGRLYEYANNSVKATIERYKKAHTVGSSSGPPLLEHNAQQFYQQESAKLRNQIQMLQNTNRHLVGDSVGNLSLKELKQLESRLEKGISKIRARKSELLAAEISYMAERETELQNDHMTLRTEIEEGEQQLQQVTVARSVAAAAAAATNLELNPFLEMDTKCFFTGGPFATLDMKCFLPGSLQQMLEAQQRQMLATELNLGYQLAPPGSDAADNNPHHQF

SEQ ID NO: 55806 - protein, 389 aa, Glycine max
  Clone ID: UC-GMROPIC034E12_FLI.pep
LRRQRDVLNRRIEFCKQKDAIGMAARLAETTFFAFREYTEEELRLATDNFSERLRLKSGGDWTNVYRGRFNHSTVAIKMLPSLSPQHFQSKVRLLGDIRQPHLVAMVGFCSEPKCIVLEYMRNGSLRDMLFSRRRNRTLRWHDRIRIATEVCSGLGFLNVAEPRPAIHCHLTPSKILLDRHLIAKITGFGLHECHDEHCNIESDLRAIGALLMHLLTGRNWAGLVEEVMTVDIDREALGGVLDEMAGQWPLDLARELAGLAMRCMSIKSEPNLELSIARVLEELNEIRRKGDEIVGRERRKTNTNGGCINREGSSDVPSVFLCPILQEVMKNPHVAADGFSYELEAIEHWLQSGRDTSPVTNLRLKHTFLTPNHTLRSLIEDWQTNKST

SEQ ID NO: 55807 - protein, 278 aa, Zea mays
  Clone ID: LIB3059-046-D11_FLI.pep
GTARPERAEWSLSRRAHGIRLQRHSPSVTNYLNSALYRWAGDANTFDGDTCIELVCSPNNPDGGLRKPVIKSKSSKPVYDFAYYWPQYTPITEAAAHDIMLFTVSKCTGHAGTRLGWALVKDTKVAQKMIKFIELNTIGVSKDSQLRAAKIIGAICNGYEPVPSSGKTSQLFHFAKEKMAARWARLRAAVAASDIFTLPYELSGYCSFSNETVTANPPFAWLRYNKDDIEDLEAFLLEKKIITRGGTRFGVDARAVRVSMVDTDQAFNVFINRLATMK

SEQ ID NO: 55808 - protein, 499 aa, Glycine max
  Clone ID: UC-GMROPIC036B10_FLI.pep
SHQIRVGLALSDNFAHKFSVYGAKMTVFLATRLVLRRSPPLLWRRSFSRAAVEAEKDTVAVPSLPLFDYSPPPYAGPTADEILAKRREYLSPSILHFYKNPVNIVEGKKQYLFDEKGRRYVDAFGGIATVCCGHCHPDVVEAIVNQTKKLQHSTVLYLNNAIADFAQALTSKLPGNLKVVFFTNSGTEANELAILIARLYTGCHDIISLRNAYHGNAAGTMGATAQSIWKFNVVQSGVHHAVNPDPYRGIFGSDGEKYARDVQDIINFGTSGNVAAFISEAIQGVGGIIELAPGYLPAVYNTIKKAGGLFIADEVQAGFGRTGSHFWGFEAHNVVPDIVTMAKGIGNGIPLGAVVTTPEIAEVLTRRSYFNTFGGNPVCTAAGLAVLKVIEKEQLQQNAFVVGSYLKERLTALKDKYELIGDVRGRGLMLGVELVTDRELKTPAKGETLHVMDQMKELGVLIGKGGYYGNVFRITPPLCFTKEDADFVADAMDLTLSRM

SEQ ID NO: 55809 - protein, 196 aa, Arabidopsis thaliana columbia
  Clone ID: LIB3176-087-A8_FLI.pep
QTPLCFTPALFRILLLGFFFLSEMAESQAKSPGGCGSHESGGDQSPRSLHVREQDRFLPIANISRIMKRGLPANGKIAKDAKEIVQECVSEFISFVTSEASDKCQREKRKTINGDDLLWAMATLGFEDYMEPLKVYLMRYREMEGDTKGSAKGGDPNAKKDGQSSQNGQFSQLAHQGPYGNSQAQQHMMVPMPGTD

SEQ ID NO: 55810 - protein, 384 aa, Glycine max
  Clone ID: UC-GMROPIC036E09_FLI.pep
QFRLSLFYISLLLLLIMIMFLMGIYLSTPKTEKASEDGENDKLRFGLSSMQGWRASMEDAHAAHPYLDESTSYFGVYDGHGGKAVSKFCAKYLHQQVLKSEAYLAGDLGTSLQKSFLRMDEMMRGQRGWRELAVLGDKIEKLSGMLEGFIWSPRSSEANDRVNDWAFEEGPHSDFTGPNSGSTACVAVIRGNKLVVANAGDSRCVLSRKGQAHNLSKDHKPELEAEKDRILKAGGFIQVGRVNGSLNLARAIGDMEFKQNKYLPVEKQIVTADPDITSVELCDDDEFLVIACDGIWDCMSSQQLVDFIHQQLKTENKLSAVCEKVFDRCLAPTAGGEGCDNMTMILIQFKKPSSSPDASSVTNQPQSSAQPSEADRSSETIESK

SEQ ID NO: 55811 - protein, 342 aa, Zea mays
  Clone ID: LIB3069-028-C6_FLI.pep
KVIGEVQALIAFPLLPCLILSILYMFWFSATLHLFSSGQVVRNDCNTDCCSYDLKLGKVNCDNCCGYSIHYTPHISIAILFHLFGCYWATQFILACSSTVVAGSVASYYWARGEISHDIPFLTVVSSLKRLMRYSLGSVALGSLVVSVVEWVRFILECLRRKLKLVDSARESCFGKATSSSSECCLGCIDWTLKSVNRNAYIMIAITGKGFFKASVLATGLIMKNILRIGKVNVIGDVILFLGKLCVSLFCALFAFLMLDTHKYKSAHNKISSPVIPVLVTWALGYVVAKLFFAVVEMSIDTIILSFCQDAEEHQGNAQYAPPALMETLDEQGELQRLTQGP

SEQ ID NO: 55812 - protein, 298 aa, Glycine max
  Clone ID: UC-GMROPIC038D03_FLI.pep
AIPSKETKRNLLCFQTSHGKYVECLLSVSKKLDVEGLVTGVFCFLQLASPELQQALHIQRLSEQTALKRLNALSYMKRQIRNPLCGIIFSRKMLEGTALGTEQKQLLRTSAQCQQQLSKILDDSDLDSIIDGYLDLEMAEFTLHEVLVTSLSQVMTKSNGKSIRIVNDVAEQIVMETLYGDSLRLQQVLADFLLISINFTPNGGQVVVAGTLTKEQLGKSVHLVKLELSITHGGSGVPEALLNQMFGNNGLESEEGISLLISRKLLKLMNGDVRYLREAGKSAFILSAELAAAHNLKG

SEQ ID NO: 55813 - protein, 115 aa, Glycine max
  Clone ID: UC-GMROPIC040D02_FLI.pep
NIYKFYYHIPTLREPLPIFFLLSFVIYSEQTLEDAFNKLEGVTCNKAEGAMYLFPQIRLSEKAIKAAEAANATPDNFYCKRLLNATGVVVVPGSGFGQVSLCTYSFCKTLLFNLA

SEQ ID NO: 55814 - protein, 395 aa, Zea mays
  Clone ID: LIB83-005-H11_FLI.pep
HSKVCGTREYRCDCGTLFSRRDSFITHRAFCDALAQESARLPPPGLTASHLYGATNAANMGLSLSQVGSHLASTLGADAHGHHQDLLRLGGSNAASRFEHLLGPSNASAFRPLPPPPSSAFLMGAPQEFGAGDGSGSHGFLQGKPFHSLMHLPDLQGNGAGGASASSATGLFNLGYIANSANSSGTSSHGHASQGHLTSDQFSEGGGGGGSESSAAMLFSGGGNFAGGDHQVAPGGMYNNDPAVMLPQMSATALLQKASQMGSSASAHGGVSSVFGGLVGSSAPSARHARAPMLDQSQMHLQSLMSSLAAGGMFGGANSGSMIDPRMYDMNQDVKFSQGRGGAEMTRDFLGVGGDGVMRGMTVARAGHQDGAGDMNSLEAEMKSASSPFTGDRMQ

SEQ ID NO: 55815 - protein, 268 aa, Glycine max
  Clone ID: UC-GMROPIC040F08_FLI.pep
LQLQTSFYKYLMLLMDTCSNTNVVHDDNFISNLGRTFSESLHIQDAQKSLLASEGSDIYNVNEEKICKAMKDQATKVNMACLKKSATFPIPNTMLPSSSSDKEADTSVTEPLYEHSAHQTYSRSVSLPAPLKLIPAIKGSREKHGGSQVKLNVKWAADVYDPVPTLLSHTVRSNKKQQKSRKKKPEKKNGKKGQKGNSSRGGSSKDKQFRKLGGTSGLCYKSMDSCDKVLGVATELDALDVRSQDSYCGTSFLKKSVTELHYSVAEAL

SEQ ID NO: 55816 - protein, 139 aa, Zea mays
  Clone ID: LIB84-030-B3_FLI.pep
VLGCSSERTSITRRQGETEVVAVVGWLEEGALGGHPADGLHEVGELQHLGQLEAPLGLRRRPLLLRLAPRLGDVVLRLLQRLGALLVQLPLDLLEPRGGLLHLLGLPAVDDHILPLEAVVDLGDLGRLPGRDLGLHLLL

SEQ ID NO: 55817 - protein, 659 aa, Glycine max
  Clone ID: UC-GMROPIC040G06_FLI.pep
GLVRCLSLLPWNKEETDLHNKDATGQRVLHAFEVDVSMSSNGFSYIIKNLKDLVPVLINSFLEFIPLVHAMESLEGKSFGCMISILHSIYLIVRSIAYGTDKDSESPSSQGGPDAAVWDVNISSTFLKKLFPRFPLNPVDHLSEKDCDRLFDLNMIVAKIFFELNEWTSLPPNLLETFLEFFENALLGKFCRATQSGKAVWEECLVQLLSFIPKFLSRGASSWTSRLLQAFTQTFRESKPGSLMKLACVSAIEDMLTPIESMLSIETSNPENLELQDALLAWIRELPLLLIQLGDKHPTCSQVVLRLQLRIGQCSLLNSSLVCMYDNTQYSLLDFYCTCQGGQICYGPFLRLPRESQELSLCSLYYFSYLDLPILKSIACCCLSADLDPYVLFRIIEVLHSAYRDGHIKIADYLSVFITLVLRFKVSPEIGSAGFKSDPLCQTLKSMTTVLCSYMAQMGDNSLVLQIVEKVVIDQIPQMPSLDNSCSLLRMLVTVDSKPTRLSEQSIIILGQHLSEYLMDAVQCIPEDGDEQGTPSIQLSTQHYYLLPCFFLFDRCHKLMNLVLKRMGSAITESSLSPISDKCTQHTRNCLDRVNAVTSVLFLMHKDAKLQPIMSLFKEDIDNVIHKVFSLKTSGRISTTIEERHEIQCAFERLKILTG

SEQ ID NO: 55818 - protein, 270 aa, Glycine max
  Clone ID: UC-GMROPIC040G10_FLI.pep
DDARLAHSSSSSVAVVRALEERVEARHREIQALLSDNQRLAGIHVALKQDLAATQEELRRLSATAAEVKAERDAEVREIYEKSLKVDAEVRAVAAMSSELDRVRADVQELVAERKELAAQLHAVESELAKARAEAQFVPAIKADIEAMRHEIQRGRNAIEFEKKTHARNLEHRRAMDNNMIIMDREVEKLRADLANAEKRARAVMAADAKTNPGYPANYDNPEMGYGGITCPPDSYSMHQLQAVVDTHSPHEAGASLHYPNDLQHTQVPR

SEQ ID NO: 55819 - protein, 671 aa, Zea mays
  Clone ID: 700042820_FLI.pep
APIPIGKVESATSIVERFCTGGMSLGAISRETHEAIAIAMNRIGGKSNSGEGGEDPIRWNPLTDVVDGYSPTLPHLKGLQNGDTATSAIKQVASGRFGVTPTFLVNADQIEIKIAQGAKPGEGGQLPGKKVSAYIARLRNSKPGVPLISPPPHHDIYSIEDLAQLIYDLHQINPKAKVSVKLVSEAGIGTVASGVSKANADIIQISGHDGGTGASPISSIKHAGGPWELGLTETNQTLIQNGLRERVVLRVDGGFRSGQDVLIAAAMGADEYGFGSVAMIATGCVMARICHTNNCPVGVASQREELRARFPGVPGDLVNYFLFVAEEVRAALAQLGYEKLDDIIGRTDLLKPKHISLVKTQHIDLGYLLSNAGLPEWSSSQIRSQDVHTNGPVLDETILADPEIADAIENEKEVSKAFQIYNVDRAVCGRVAGVIAKKYGDTGFAGQLNITFNGSAGQSFGCFLTPGMNIRLVGEANDYVGKGMAGGELVVVPVDKTGFVPEDATIVGNTCLYGATGGQVFVRGKAGERFAVRNSLCQAVVEGTGDHCCEYMTGGCVVVLGKAGRNVAAGMTGGLAYILDEDDTLVPKVNKEIVKMQRVNAPAGQMQLKGLIEAYVDKTGSEKGIAILREWEAYLPLFWQLVPPSEEDSPEACAEFERVLAKQATTQLSAK

SEQ ID NO: 55820 - protein, 196 aa, Glycine max
  Clone ID: UC-GMROPIC042C12_FLI.pep
LIMGRDVSRSAFVFGFGSFIIVSSSYAKDINLSIISVMSYISLVYLAVIFLYRSLICRGIINVEDSNYVVGEEDAIWMLKLILPYLNEFLSKLKALFSGDPGTTIKLAVLLFVLARCGSYITVWKMAKFGFFGVFTVPKICSSYSAQLTEYGNFWIRRFRDAWDSCTHKKAVALGIFGLVWNLSSVVARIWAGKTM

SEQ ID NO: 55821 - protein, 382 aa, Zea mays
  Clone ID: LIB3136-020-C9_FLI.pep
AILLSVVATTLIVRRRSRHRTVSKRSLSRFSVKVDGVRCFTFEEMAIATNNFDLSAQVGQGGYGKVYKGILGDGALVAIKRAHEDSLQGSREFCTEIELLSRLHHRNLVSLVGYCDEEDEQMLVYEFMSNGTLRDHLSAKSKRPLSFGLRLKIALGAAKGILYLHTEADPPIFHRDVKASNILLDSKFVAKVADFGLSRLAPVPDVEGTLPAHVSTVVKGTPGYLDPEYFLTHKLTDKSDVYSLGVVFLEMLTGMKPIEHGKNIVREVNSACQSGAVSGIIDGRMGLYPPECIKRFLSLATKCCQDETDDRPSMWEIVRELELILRMMPEEDLILLETSETDSTDVSKSLSSSATRTLFVSSQASGSLDASSGMISGRVTPR

SEQ ID NO: 55822 - protein, 945 aa, Glycine max
  Clone ID: 700960775_FLI.pep
AIDIPSPIGTALCMAAASKKDHENEGRELVRILLAAGADPSAQDSQNGRTALHTAAMTNDVDLVKVILGAGVDVNIRNVHNSIPLHLALARGAKACVGLLLDAGADYNLKDDDGDNAFHIAAETAKMIRENLDWLIVMLMKPDADIEVRNHSGKTLRDILEALPREWLSEDLMEALVNKGVHLFPTIFKVGDWVKFKRSVTTPTHGWQGAKPKSVGFVQSVPDRDNLIVSFCSGEVHVLANEVIKVVPLDRGQHVHLKEDVKEPRFGWRGQSRDSIGTVLCVDDDGILRVGFPGASRGWKADPAEMERVEEFKVGDWVRIRPTLTSAKHGLGSVTPGSIGIVYCIRPDSSLLIELSYLPNPWHCEPEEVEHVAPFRIGDQVCVKRSVAEPRYAWGGETHHSVGRISEIENDGLLIIEIPNRPIPWQADPSDMEKVEDFKVGDWVRVKASVSSPKYGWEDVTRTSIGVIHSLEEDGDMGVAFCFRSKPFSCSVTDMEKVPPFEVGQEIHVMPSVTQPRLGWSNESPATVGKILKIDMDGALNVRVTGRQNLWKVSPGDAERVPGFEVGDWVRSKPSLGTRPSYDWNSVGRESLAVVHSVQDSGYLELACCFRKGKWITHYTDVEKVPSFKVGQYVRFRTGLVEPRWGWRGAEPESHGVITSIHADGEVRFAFFGLPGLWRGDPSDLEIEQMFEVGEWVRLNYNANNWKSIGPGSVGVVQGIGYEGDELDRSIFVGFCGEQEKWVGPSSHLERFDKLFVGQKVRVKQYVKQPRFGWSGHTHASIGTIQAIDADGKLRIYTPAGSKTWVLDPSEVEVVEEKELCIGDWVRVKASISTPTHHWGEVSHSSIGVVHRMEDEDLWVSFCFTERLWLCKAWEMEWVRPFKVGDKVRIRDGLVTPRWGWGMETHASKGQVVGVDANGKLRIKFRWREGRPWIGDPADLALDED

SEQ ID NO: 55823 - protein, 495 aa, Glycine max
  Clone ID: UC-GMROPIC046B01_FLI.pep
FTMVFPKPSSESDLFLCSNFASHYARDSLPRFSMPENSMPKEAAYQNIHDELQLDAIPKLNLASFVTTSMEEECNKLIMESINKNYVDMDEYPATTDLHNRCVNMIARMFHAEIGENENATGAGTVGSSEAIMLAGLAFKKKWQNKRKAEGKPYDKPNLVTGSNVQVCWEKFARYFEVELREVEVREGYYVMDPAKAVELVDENTICVAAILGSTYNGEFEDVKLLNDLLLEKNKQTGWDTPIHVDAASGGFIAPFLYPELEWDFRLPLVKSINVSGHKYGLVYAGIGWVIWRTKDDLPEDLVFHINYLGADQPTFTLNFSKGSSQIIAQYYQLIRLGHEGYRSIMENCRDNAMVLKESLEKSGHFNILSKDNGVPVVAFSLKDRSQYDEYKISEMLRRHGWIVPAYPMPPAAQHINVLRVVIRAEFSRTLAERLVFDIYNVLHELEKLHPPKVTNFIKEENKALVETGVKKTALDAHREIIAQESNKRQKIMAA

SEQ ID NO: 55824 - protein, 177 aa, Zea mays
  Clone ID: LIB84-025-D10_FLI.pep
GGIGREENSKSHLEKKLYFHLLLSATLLLPVPEELHGLAEHGLEPLEVEPDVLLAEVVLGHLPPPTPVDGLRVLDGRVVAPQRVHQGGLLDAGGVGDVLEPHVHGGDAEVHLPDVLHLAVRVDLDEDGARGEEQRVGEPGAVHAHQHVHGVHLLGELPDVDVEGRVPDDDLEPDAPR

SEQ ID NO: 55825 - protein, 353 aa, Glycine max
  Clone ID: UC-GMROPIC049A02_FLI.pep
LALRDESRLISERMKHLLYEVPVRVAGGLLFELLGQSAGDPLVEEDDIPIVLRSWQSQNFLVTVMHIKGSVSWINVLGITEVQELLSAGGYNMPRTVHEVIALLACRLSRWDDRLFRKSIFGAADEIELKFMNRRNHEDLNLFILILNQEIRKLSTQVIRVKWSLHARDEIVFELLQHLKGNGARTLLEGIKKSTREMIEEQEAVRGRLFTIQDVMQSTVRAWLQDRSLRVTHNLAVFGGVGVVLTIITGLFGINVDGIPGAEQTPYAFGVFTAILVVLGVVLIAVGMVYLGLKNPVAEEQVEVRKLELQELVKMFQHEAETHAQMRKNISPKNLPPTAGDAFRSDADYLVIQ

SEQ ID NO: 55826 - protein, 540 aa, Glycine max
  Clone ID: LIB3242-431-A12_FLI.pep
SVVSKLQTLSTSDHASVVSMNLFVALLCGCIVLGHLLEENRWMNESITALLIGVCTGVVILLFSGGKSSHILVFSEDLFFIYLLPPIIFNAGFQVKKKQFFVNFMTIMLFGAIGTLISCTIITLGATQIFKRLDVGPLELGDFLAIGAIFAATDSVCTLQVLNQDETPLLYSLVFGEGVVNDATSVVLFNAIQSFDLNQIDSSIAVHFLGNFLYLFIASTMLGVLTGLLSAYIIKKLYIGRHSTDREVALMMLMAYLSYMLAELCYLSGILTVFFCGIVMSHYTWHNVTESSRITTKHSFATLSFVAEIFIFLYVGMDALDIEKWKFVSDSPGTSVATSGVLLGLILLGRAAFVFPLSFISNLAKKSPNEKISFRQQVIIWWAGLMRGAVSIALAYNQFTMSGHTSLRSNAIMITSTITVVLFSTVVFGLLTKPLIRLLLPHTPHHKESSITIITDPSTPSPKSVTIPLLGSAQESEVDIDGHDIHRPSSIRALLTTPTHTVHRLWRKFDDAFMRPVFGGRGFVPVEPGSPTERNGHQWR

SEQ ID NO: 55827 - protein, 414 aa, Glycine max
  Clone ID: UC-GMROPIC049H08_FLI.pep
IMAASAMVLDPPPFLPSTKSAYLQGGDATAFDEEDLYSRLKSLVRQLEFVDIQEEYVKDELKNLRRELLRAMEEVKRIQSVPLVIGQFMEMIDQNNGIVGSTAGSNYYVRILSTINRELLKPSASVALHRHSNALVEVLPPEADSSISLLSQSEKPDVTYNDIGGCDIQKQEIREAVELPLTHHELYKQIGIDPPRGVLLYGPPGTGKTMLAKAVANHTTAAFIRVVGSEFVQKYLGEGPRMVRDVFRLAKENAPAIIFIDEVDAIATARFDAQTGADREVQRILMELLNQMDGFDQTVNVKVIMATNRADTLDPALLRPGRLDRKIEFPLPDRRQKRLVFQVCTAKMNLSDEVDLEDYVSRPDKISAAEISAICQEAGMHAVRKNRYVILPKDFEKGYRTNVKKPDTNFEFYK

SEQ ID NO: 55828 - protein, 360 aa, Homo sapiens
  Clone ID: LIB3064-055-A1_FLI.pep
EPRGLRPLPRGVGAWPQPPSSSLRMASSSGSKAEFIVGGKYKLVRKIGSGSFGDIYLAINITNGEEVAVKLESQKARHPQLLYESKLYKILQGGVGIPHIRWYGQEKDYNVLVMDLLGPSLEDLFNFCSRRFTMKTVLMLADQMISRIEYVHTKNFIHRDIKPDNFLMGIGRHCNKLFLIDFGLAKKYRDNRTRQHIPYREDKNLTGTARYASINAHLGIEQSRRDDMESLGYVLMYFNRTSLPWQGLKAATKKQKYEKISEKKMSTPVEVLCKGFPAEFAMYLNYCRGLRFEEAPDYMYLRQLFRILFRTLNHQYDYTFDWTMLKQKAAQQAASSSGQGQQAQTPTGKQTDKTKSNMKG

SEQ ID NO: 55829 - protein, 243 aa, Glycine max
  Clone ID: UC-GMROPIC050D03_FLI.pep
AKCGCLDAAFDVFSGMMAKKDVVSWNSMIQGFAMHGHGEKALELFSRMVPEGFEPDTYTFVGLLCACTHAGLVNEGRKYFYSMEKVYGIVPQVEHYGCMMDLLGRGGHLKEAFTLLRSMPMEPNAIILGTLLNACRMHNDVDFARAVCEQLFKVEPTDPGNYSLLSNIYAQAGDWMNVANVRLQMMNTGGQKPSGASSIEVEEEVHEFTVFDQSHPKSDDIYKMIDRLVQDLRQVGYVPMIHQ

SEQ ID NO: 55830 - protein, 529 aa, Homo sapiens
  Clone ID: LIB4119-206-H10_FLI.pep
HVSKECKDLITRMLQRDPKRRASLEEIENHPWLQGVDPSPATKYNIPLVSYKNLSEEEHNSIIQRMVLGDIADRDAIVEALETNRYNHITATYFLLAERILREKQEKEIQTRSASPSNIKAQFRQSWPTKIDVPQDLEDDLTATPLSHATVPQSPARAADSVLNGHRSKGLCDSAKKDDLPELAGPALSTVPPASLKPTASGRKCLFRVEEDEEEDEEDKKPMSLSTQVVLRRKPSVTNRLTSRKSAPVLNQIFEEGESDDEFDMDENLPPKLSRLKMNIASPGTVHKRYHRRKSQGRGSSCSSSETSDDDSESRRRLDKDSGFTYSWHRRDSSEGPPGSEGDGGGQSKPSNASGGVDKASPSENNAGGGSPSSGSGGNPTNTSGTTRRCAGPSNSMQLASRSAGELVESLKLMSLCLGSQLHGSTKYIIDPQNGLSFSSVKVQEKSTWKMCISSTGNAGQVPAVGGIKFFSDHMADTTTELERIKSKNLKNNVLQLPLCEKTISVNIQRNPKEGLLCASSPASCCHVI

SEQ ID NO: 55831 - protein, 597 aa, Zea mays
  Clone ID: LIB3151-059-B12_FLI.pep
WDLPARSRLRSRDSQWYFFSRLDRKHANRARTNRATSGGYWKTTGKDREVRHGPRLVGMKKTLVFHAGRAPKGERTNWVMHEYRLEGDDAAGIPQDSFVVCRIFQKAGPGPQNGAQYGAPFVEEEWEEDDTDDGLLPVEGVAAADPEVPLASVEIPGALDRGYLQMSDLIQGLDDQNGNGTPSLPVSDTSNNSNHSEDVDGNSGDILSDPNLGSNFLQYAEPGEQNSLMLNGTIISNANAGDFFDNSSHSDGFLELKDFGDAANLDFPLGNGSSIWPLDCWAWKTPDSAESLNGTNDEIPPLPDDQTFQPDELEQLLQSIQEDSHLGSSIIDPPHSSMTNSVLPDEDCLMFYDAPFDSTMCDDGFAQNGILGSAATNLSGIGMVDDGMPYFDAMDGNLFNDILGSIQQPDGSSSHAFNGPVLTQEVNNTMFTYSPTQKVLEPNIVVGAPSSARLPEAGSQLNCVVLPDGQAKSSTIGKGFVRILDSISAPPAFAGEFPSNHRKSLARISGARPNTLHVSAEVIHIGSLAVPSGADKWALQKDQGMELLFSADFEPDARIHCGCNTITAVLRGGFCLFFVSAIMLLVSYEVGMCIYGK

SEQ ID NO: 55832 - protein, 261 aa, Glycine max
  Clone ID: LIB3242-533-E7_FLI.pep
TLSLSLSSNQNPSQFTTTYKSQILSFLFSYKRTLLSNPSRSFPSDLIHAQIQTLIHLSEGLMADQGLEGSQPVDLQKHPSGIVPTLQNIVSTVNLDCKLDLKTIALQARNAEYNPKRFAAVIMRIRDPKTTALIFASGKMVCTGAKSEQQSKLAARKYARIIQKLGFPAKFKDFKIQNIVGSCDVKFPIRLEGLAYSHGAFSSYEPELFPGLIYRMKQPKIVLLIFVSGKIVLTGAKVRDETYTAFENIYPVLTEFRKNQQ

SEQ ID NO: 55833 - protein, 548 aa, Glycine max
  Clone ID: UC-GMROPIC055A02_FLI.pep
LSDNHITGTIPSEIGNCSGIEILELGSNSLAGHIPADISRLTLLKVFDLSGNNLTGDVPEEISKCSSLTTLFVDHNHLSGAIPGSLSDLSNLTMLDLSANNLSGVIPSNLSMISGLVYLNVSGNNLDGEIPPTLGSRFSNPSVFANNQGLCGKPLDKKCEDINGKNRKRLIVLVVVIACGAFALVLFCCFYVFSLLRWRKRLKQGVSGEKKKSPARASSGTSGARSSSTESGGPKLVMFNTKITLAETIEATRQFDEENVLSRTRHGLVFKACYNDGMVLSIRRLQDGSLDENMFRKEAESLGKVKHRNLTVLRGYYAGPPDMRLLVHDYMPNGNLATLLQEASHQDGHVLNWPMRHLIALGIARGLAFLHQSSMVHGDVKPQNVLFDADFEAHLSDFGLDKLTVATPGEASTSTSVGTLGYVSPEAVLTGEATKESDVYSFGIVLLELLTGKRPVMFTQDEDIVKWVKKQLQRGQITELLEPGLLELDPESSEWEEFLLGVKVGLLCTAPDPLDRPTMSDIVFMLEGCRVGPDIPSSADPTSQPSPA

SEQ ID NO: 55834 - protein, 374 aa, Zea mays
  Clone ID: LIB3136-033-H6_FLI.pep
SELKAMLGGSGARCRWFRYEELYDSTNHFSAENLIGNGGNSRVYRGSLACGRQVAIKLCKASAEASKDFLREVDIITKLQHHRIVPLIGVCVEGRNLISVYRYLPRGSLEDNLHGERSKPALSWENRYKAALGIAEALSYLHSGSSRPVIHRDVKSSNILLTEEFEPQLSDFGLAIWAPTNPTSLTHSDVVGTFGYLAPEYFMYGKVTDRVDVYALGVVLLELLSGRKSISSDGSSPKGQESLVMWATPVLSSGNICDLLDPRLDVKHDEVEVRRMASAASLCLRRSARLRPPISQILSILRGESAASIADQGATEPDCVDDEAYPAANVRSHLGLALLDVEDSESISSTEHSSGLSPLEEYLRERWSRSSSFD

SEQ ID NO: 55835 - protein, 461 aa, Glycine max
  Clone ID: UC-GMROPIC055A04_FLI.pep
LELSAAPSIIVVVSVSSLLAADEVGRSETEPSSPHKHNPDTIIDRTSTFLFIPKYMDTDATGDPVDKLKAIQNDDVEYQDEDDDFDDEEEEEDDPITLGFVDKPKNEWSLRRQYFPSKTGGVPAWLDPLNIPSGRSSVCDICGDPLQLLLQVYAPTDKETTFHRMLFVFMCPSMKCLLRDQHEQWKRHPEKPSRSVKVFRCQLPRINPFYSPECPQYNESHEPAGSGAALCDWCGTWKGDKLCSSCRQARYCSEKHQAMSWRTGHKTACQQTKVSSPVFGPNKSGTTSLESHKVGSKNLWPEFEISIEDESEYNRDISEENSLANSLISRNRNDDTMNSLMDNFKGDDDKKSWASFQERIAEAPEQVLRYYRNTNAKPIWPVSSGRPSNADIPKCSYCSGPMSCEFQILPQLLYYFGVDNEVDSLDWASIVVYACEASCEASLPYKNEFAWVQIYSLSTTL

SEQ ID NO: 55836 - protein, 315 aa, Glycine max
  Clone ID: UC-GMROPIC055H06_FLI.pep
LELLALYSFQRFTDKGLRGIGNGCKKLKNLTLIDCYFISDKGLEAIANGCKELTHLEVNGCHNIGTLGLEYIGRSCQYLTELALLYCHRIGDVSLLEVGKGCKFLQVLHLVDCSSIGDDAMCSIANGCRNLKKLHIRRCYKIGNKGLIAVGKHCKSLTDLSIRFCDRVGDGALTAIAEGCSLHYLNVSGCHQIGDAGVIAIARGCPQLCYLDVSVLQNLGDMAMAELGEHCTLLKEIVLSHCRQITDVGLTHLVKSCTLLESCQMVYCSGITSAGVATVVSSCPNMKKVLVEKWKVSQRTKRRAGSVIACLCVDL

SEQ ID NO: 55837 - protein, 100 aa, Glycine max
  Clone ID: UC-GMROPIC056H08_FLI.pep
LNKMSAATFAAHIAGAGFVGLKSNSSNLCPSTGSIGWKRKIVSNGSKTYCMKTWNPINNKKFETLSYLPPLSDESIAKEIDYMLKKGWIPCLEFDEVSFR

SEQ ID NO: 55838 - protein, 470 aa, Zea mays
  Clone ID: LIB3180-016-C3_FLI.pep
FAKLLLGEDMSGSGKGVCTALAISNAITNLSATVFGELWRLEPLAKARKAMWTREMEWLLSVSDSIVELTPSIQELPEGGGQFEVMVPRPRTDLYMNLPALKKLDAMLLAMIDGFKGTEFWYVDRGVMVEDSGGPFPSSSSSSSCGRPSVRQEEKWWLPCPRVPPKGLSEDSRRKLQQSRDCANQILKAAMAINSDVLAEMEIPEMYLETLPKSGKSCLGEIIYRYITAEQFSPECLLDCLDLSSEHHTLEVANRIEAAIHVWKLKGQKNSTPQARSKKSWGGKVKGLVGDKEKSHTLSERANGLLQSLRLRYPGLPQTSLDMNKIQYNKDVGQSILESYSRVLESLAFNIIARIDDVIYVDDATKKSAAAESVSIFNRGTGVPIQKRISLSPFSIQNTPYASPFATPTFCSSTPVTCSPGRVQPPLNKTNLGRPEIKVEKLFSGDLEKVWTYAGNLSARKDAGDAPERD

SEQ ID NO: 55839 - protein, 419 aa, Glycine max
  Clone ID: UC-GMROPIC057C08_FLI.pep
SIVLNFDCLGRIWAGHNIIRFDCVRIRDAFAEINQPPPEPKGTIDSLVLLTQKFGRRAGDMKMATLATYFGLGRQTHRSLDDVRMNLEVLKYCATVLFLESSLPDIFTANSWVSPNATTRSRSNGKSPSQWGLLNINKDSVLSSPATESKDKNRPIISFALSSPKGNVSNIADPNMDQSDPFNLSTLEAEIKRESIKSDVALEEKPMQESTDLASSSSVSQPCSSSIAVLEPDGICIPSIDASLVPSFRGSQRIELLHEGFLFQLHCTDLKVRFGINSKFFDSAGRPRLSFVVDPSPSLCNVLDACDRVAQKLTVDSGSSSDWRPVVIRKEGFFNYPTVRLHIPTAVVADIAIYATEIYQRESSGTVQRLLFSKFDAAELGSLFMPGTFVDAVFSLDPYDYQQNAGIKLVAKKLIIHSK

SEQ ID NO: 55840 - protein, 594 aa, Glycine max
  Clone ID: UC-GMROPIC058D02_FLI.pep
LGEGNTAVVKYLDEHLSLIMEESYEHKYPYDWRTKKPTIFRATEQWFASVEGFRHTAMDAIGHVKWVPPQAANRISSMTSIRSDWCISRQRTWGVPIPVFYHLQSREPLMNEETIDHIKSIIAQKGSDAWWYMTVEDLLPTKYRDKAAEYEKGTDTMDVWFDSGSSWAAVLGKRDSLSYPADLYLEGTDQHRGWFQSSLLTSVATKGKAPYLSVLTHGFVLDEKGLKMSKSLGNVVDPRLVIEGSKNQRESPAYGADVLRLWVSSVDYTSDVMIGPQILRQMSEVYRKLRGTLRYLLANLHDWKTEYTVPYHELPRIDQHALFQLENVVKAIQGNYENYQFFKIFQILQRFVIVDLSNFYFDVAKDRLYVGGSTSYTRKSCQTVLAAHLLSIVRIIAPILPHLAEDVWQNLPFQYITQDGSIAEYVFESRWPISNERRLALPVEEINFWENILELRTEVNRVLEVARTGKLIGASLDARVHIYTSDARLASQLCELSAAKNDADTLRRLLITSQAEILPSLDDEQIVNIPYSGECLIQGKNKIWIGISRAVGSKCERCWNYSEQVGSFLDHPTLCSRCHDVVAVQMPPQVAAVS

SEQ ID NO: 55841 - protein, 37 aa, Zea mays
  Clone ID: LIB3152-039-H4_FLI.pep
FGTILFSFHFNCSFRSLLTLTLPPMVMRDTLLLNHRR

SEQ ID NO: 55842 - protein, 504 aa, Glycine max
  Clone ID: UC-GMROPIC059E01_FLI.pep
ASMGMLLVVVSYAVLFLVLFLGVKFVFQSRKLRNIPPGPPPLPIIGNLNLLEQPIHRFFQRMSKQYGNVVSLWFGSRLAVVISSPTAYQECFTKHDVALANRLPSLSGKYIFYNNTTVGSCSHGEHWRNLRRITALDVLSTQRVHSFSGIRSDETKRLMQRLVLAKNSNEEEFARVEISSMFNDLTYNNIMRMISGKRFYGEESEMKNVEEAREFRETVTEMLELMGLANKGDHLPFLRWFDFQNVEKRLKSISKRYDSILNKILHENRASNDRQNSMIDHLLKLQETQPQYYTDQIIKGLALAMLFGGTDSSTGTLEWSLSNLLNHPEVLKKARDELDTQVGQDRLLNESDLPKLPYLRKIILETLRLYPPAPILIPHVSSEDITIEGFNIPRDTIVIINGWGMQRDPQLWNDATCFKPERFDVEGEEKKLVAFGMGRRACPGEPMAMQSVSFTLGLLIQCFDWKRVSEEKLDMTENNWITLSRLIPLEAMCKARPLATKIGI

SEQ ID NO: 55843 - protein, 407 aa, Glycine max
  Clone ID: UC-GMROPIC060A12_FLI.pep
FRFQFKATQALVRLFYPTHSSLLILRIFHLDPPLHSFTFLFQWERIMSCFSCCEEDDLHKAAESGGPYVVKNPAGNDGNYHASQTAKQGTQPVKPQPIEVPNISADELKEVTDNFGQDSLIGEGSYGRVYYGVLKSGQAAAIKNLDASKQPDEEFLAQVSMVSRLKHENFVQLLGYCIDGTSRILAYQFASNGSLHDILHGRKGVKGAQPGPVLTWAQRVKIAVGAARGLEYLHEKADPHIIHRDIKSSNVLIFDDDVAKIADFDLSNQAPDMAARLHSTRVLGTFGYHAPEYAMTGQLNAKSDVYSFGVVLLELLTGRKPVDHTLPRGQQSLVTWATPKLSEDKVRQCVDTRLGGEYPPKAVAKMAAVAALCVQYEADFRPNMSIVVKALQPLLTARPGPAGETPN

SEQ ID NO: 55844 - protein, 659 aa, Zea mays
  Clone ID: LIB3608-027-H4_FLI.pep
DWLLSMAGPEKTVVWFRRDLRIQDNPALAAAAKGGSVLPIFIWCPSDYGQYYPGRCSRWWLKQSLAHLGKSLELLGCPLVLIRAEDSTLAALLECVRSISATRVVYNRLYDPISLVLDNKIKNELPAHGISIQSFNGDLLYEPWDVYDENGQAFTTFNKYWEKCMSLPIEISQYLAPTRLVAAPGLANVRCCSIDDLGLESSKDVESSNALLSRAWSPGWRNAENMLEEFVSYGLPEYSEHGMKVGGSTTSLLSPYLHFGELSVRMIYQLVKMRQVKWQNEGKSEAEESVRLFLRSIGFREYSRYLCFNYPFTHERSFLGNLKHYPWLLDEGRFKSWRQGMTGYPLVDAGMRELWATGWTHNRIRVIVSSFAVKFLQIPWIWGMKYFWDVLLDADLESDILGWQYISGSLPDGHELSRLDNPEVQGQKYDPDGEYVRTWIPELARMPTEWIHSPWAAPNSILQVAGVELGFNYPKPIVELHMARECLDDAISTMWQLDTAAKLAELDGEVVDDNLNNIRNFDIPKVVLNKKLSPSTSSMEHRVLSTNGKDEKSQPTEVKALYKQIIRDDMMNDSNMDDTCSTANLKVTRKRSSSDSAFNVPSCSSSLVMESRIHHNEPSSVLYSGYFQKTADRDGTSKVEDNDSEDSGTSISRPSKKAA

SEQ ID NO: 55845 - protein, 647 aa, Glycine max
  Clone ID: UC-GMROPIC065E09_FLI.pep
FGFNQGNPLRLTYGLDYKGNVCGDKHAHPGLSELELRYWQNPNQVYQSGLKDSQFKLADARSICLSECPMPSEDSLNWVCDYPEGDIRLSMKDWINRNYDYFEFLTPEMRNSSLQLQGPCYPVIFPTVNVYWSCQFIARASNTSLKHWQQMGGVNINEDIVIDKSIHKSINSRSAVLERYMADIGKAWPVLIVCGGILPLFLSVIWLMMIRHFVAAMPWITVVLFNVLIISVTMFYYLKAGWIGNDAISPIIGEHDPYISVYGRELTHIRVVTILMTFIMVVAILTSIAIVRRILMATSVLKVAAKVIGEVQALIIFPLIPYTVLAVFYMFWISAALHLFSSGQVVQNNCNSNCCTYDLIAKRVNCDRCCGYSIHYTPHIGVAILFHLFGCYWATQFFIACSSTVIAGSVASYYWARGETSPEIPFLSVFSSMKRLMRYSLGSVALGSLIVSFVESIRFLLEAIRRKLKVSSHGHDSCLGKAAYQFSQCFLRCIEWTIKSVNRNGYIMIAITGKSFFSASFIATELIMNNILKIGRLNVIGDVILFLGKLCVSLSCALFAFLMLDTHKYNSAHNKTSSPLLPVVVCWALGYIVATLFFAVVEMSIDTIVLSFCQDSEEHQGTAQYAPPLLVETLSDQNEMQRLTQGP

SEQ ID NO: 55846 - protein, 834 aa, Zea mays
  Clone ID: 700072496_FLI.pep
HRLSTIQRQVSGSDLPQGGEFVPFPVTRRANSYSIMMEEDMENGRSYQERPRTFSTVRSKSSIPLALRLLMRINPRALIILSLLVFSGVLYVGASTSPIVVFVFCICTLSLFFSLYLTKWVLAKDEGPPEMSEISDAIRDGAEGFFKTQYGTISKMAFILAFVILGIYLFRTTTPQQEASGLGRATLAYITVASFLLGALCSGIAGFVGMWVSVRANVRVSSAARRSAREALQIAVRAGGFSAIVVVCMAVFGVAILYSTFYVWLGVDSPGSMKVTDLPLLLVGYGFGASFVALFAQLGGGIYTKAADVGADLVGKVEQGIPEDDPRNPAVIADLVGDNVGDCAARGADLFESIAAEIISAMILGGTMAQRCKIEDPSGFILFPLVVHSFDLVVSSVGILSIRGTRDSGLISPIEDPMAIMQKGYSVTIMLAVLTFGASTRWLLYTEQAPSAWLNFALCGLVGIVTAYAFVWISKYYTDYKHEPVRLLALSSSTGHGTNIIAGVSLGMESTALPVLVISVAIISAYWLGQTSGLVDESGNPTGGLFGTAVATMGMLSTAGYVLTMDMFGPIADNAGGIVEMSQQPESVREITDVLDAVGNTTKATTKGFAIGSAALASFLLFSAYMDEVASFAQLPFKEVDIAVPEIFVGGLLGSMLIFLFSAWACSAVGKTAQEVVKEVRRQFIERPGIMDYKEKPDYGRCVAIVASASLREMIKPGALAIISPMAVGVVFRILGHYTGQPLLGAKVVASMLMFATVAGILMALFLNTAGGAWDNAKKYIETGALGGKGSESHKAAVTGDTVGDPFKDTAGPSLHVLIKMLATITLVMAPIFL

SEQ ID NO: 55847 - protein, 670 aa, Glycine max
  Clone ID: UC-GMROPIC065G01_FLI.pep
ESSLCCEQLPDGECIEVVQKDKEDDTLIELDCQNGFPEGRKEFVAPAVGMEFESYDDAYNYYICYAKEVGFRVRVKNSWFKRNSREKYGAVLCCSSQGFKRIKVVNHLRKETRTGCPAMIRMRLVESQRWRVLEVTLEHNHMLGAKILRSVKKMGNGTKRKPLPCSEAEGQTVKLYRALVIDAGGNGNSNCGAIEDRTFSESSNKLNLRKGDTQAIYNFLCRMQLTIPNFFYLMDFNDDGHLRNAFWVDARSRASCGYFGDVIYFDNTYLSNKFEIPLVTFVGINHHGQSVLLGCGLLASETTESYLWLLRTWLKCMSGCSPQTIITDRCKALQSAIVEVFPKSHHCFGLSLIMKKVPEKLGGLHNYDAIRKALIKAVYETLKVIEFEAAWGFMIQRFGVSDHEWLRSLYEDRVRWAPVYLKDIFFAGMSAARPGESINPFFDRYVHKQTPLKEFLDKYELAFHKKHKEESFSDIESRSSSPLLKTRCSFELQLSRMYTREMFMKFQLEVEEVYSCFGTTQLHVDGPIIIFLVKERVLIEGNRREIRDFEVLYSRTAGEVRCICSCFNFYGYLCRHALCVLNFNGVEEIPHKYILSRWKKDYKHPNHSSGGANDTDCTNDTDRIQWSNQLFRSALQVVEEGILSLDHYNVALQSLEESLSKVHDVERRQE

SEQ ID NO: 55848 - protein, 424 aa, Zea mays
  Clone ID: 700223978_FLI.pep
AWSGSSASALSRTAVLTASASSLTAHRFGSRWERIGSRMLGAFMPEGFPGSVTPDYVPFQMWDTLQGLSTYIRAMLSTQALLGAIGVGEQSATVIGATFQWFLRDLTGMLGGILFTFYQGSNLDSNAKMWRLVADFMNDLGMLMDLLSPLFPSSLIVIMCLGSLSRSFTGVASGATRAALTQHFALANNAADISAKEGSQETLATMLGMGLGMLLAQITRGHALSVWASFLSLTMFHMYANYKAVQSLSLTTLNYERASILLQYFKECGEVLVPRKVSQQEHILPSWSNWRKLNRIKLPHERVHLGAKASMLTHSDMLVIAKTRYHYENANYFLLDKQGIVYVFIHKEATPADVLRSFVHGLVLASSTQNSKPQHLEARRWMDEMYTSFISKLQTEGYSTERLLSHSILWRAHWLHGQLDEKLK

SEQ ID NO: 55849 - protein, 377 aa, Glycine max
  Clone ID: UC-GMROPIC065H01_FLI.pep
KKICISCYNHKPGGSSLLTGFVVIILDDQSLQKKKARIEKVMEAHFLSEAEFHKKNIVSSMSEHNIIGSGGYGAVYRVAVDDLNYVAVKKIWSSRKLEEKLVSSFLAEVEILSNIRHNNIVKLLCCISKEDSLLLVYEYLENHSLDRWLQKKSKPAAVSGSVLDWPKRLHIAIGAAQGLCYMHHDCLPPVVHRDVKTSNILLDSQFNAKVADFGLAKMLMKPEELATMSAVAGTFGYIAPEYAQTTRVNEKIDVYSFGVVLLELTTGKEANRGDEYSCLAEWAWRHIQIGTDVEDILDEEIKEACYMEEICNIFRLGVMCTATLPASRPSMKEVLKILLTCSNLLTNGEKNAGFYDSIPLLKNSKWENQVEYYTDDD

SEQ ID NO: 55850 - protein, 315 aa, Glycine max
  Clone ID: UC-GMROPIC067E08_FLI.pep
YQYSSHNITTMAAKKKNGGGNGNNKENEDSTITVVLKVEMHCDGCASKIIKHLRCFQGVETVKADSDAGKVTVTGKVDPTKVRDNLAEKIRKKVELVSPQPKKEQENEKENKDAKANNKSENNKTQDKKTKDKEVVTTAVLKLALHCQGCLDRIGKTVLKTKGVQEMAIDKEKEMVTVKGTMDVKALAENLMEKLKRRVEVVPPKKDKEGGGGDDEKEVSGKKKNKGGGGGDKNENIEDGIEKIEYNRMEYLAPPAFGFGYGPYGGGYGHGHGHGHGNIGGYSYVPVYPEQMHFHLHAPPPQIFSDENPNACSVM

SEQ ID NO: 55851 - protein, 335 aa, Zea mays
  Clone ID: LIB4863-001-G11_FLI.pep
GRAGQEQETLRSCPELPPFLSPPLLLLPFLLQTSKSVCLLPRLADRNKSMHIREEEATPSTVTGIMSTLTSAGQQKLKEPISPGGGSASVAGSAAERNNGGRGKGKTEIKRIENTTNRQVTFCKRRNGLLKKAYELSVLCDAEVALIVFSSRGRLYEYANNSVKGTIERYKKATSDNSSAAGTIAEVTIQHYKQESARLRQQIVNLQNSNRALIGDSITTMSHKELKHLETRLDKALGKIRAKKNDVLCSEVEYMQRREMELQNDNLYLRSRVDENERAQQTANMMGAPSTSEYQQHGFTPYDPIRSFLQSNIVQQPQFYSQQEDRKDFNDQGGR

SEQ ID NO: 55852 - protein, 598 aa, Glycine max
  Clone ID: UC-GMROPIC068G11_FLI.pep
LCQGNKLEHLITFANRFSGTLPDQYGECVSLQYVRIQNNQFSGPVPPSFWALAGLQFLEMSNNRFQGSVSASISRGLTKLILSGNSFSGQFPMEICELHNLMEIDFSKNRFTGEVPTCVTKLTKLQKLRLQENMFTGEIPSNVTHWTDMTELDLSFNRFTGSIPSELGNLPDLTYLDLAVNSLTGEIPVELTNLRLNQFNVSGNKLHGVVPLGFNRQVYLTGLMGNPGLCSPVMKTLPPCSKRRPFSLLAIVVLVCCVSLLVGSTLWFLKSKTRGCGGKSKSSYMSTAFQRVGFNEEDIVPNLISNNVIATGSSGRVYKVRLKTGQTVAVKKLFGGAQKPDVEMVFRAEIETLGRIRHANIVKLLFSCSGDEFRILVYEYMENGSLGDVLHGEDKCGELMDWPRRFAIAVGAAQGLAYLHHDSVPAIVHRDVKSNNILLDHEFVPRVADFGLAKTLQREATQGAMSRVAGSYGYIAPEYAYTMKVTEKSDVYSFGVVLMELITGKRPNDSSFGENKDIVKWITETVLSPSPERGSGDIGGGKDYIMSQIVDPRLNPATCDYEEIEKVLNVALLCTSAFPINRPSMRRVVELLKDHKLS

SEQ ID NO: 55853 - protein, 157 aa, Zea mays; identical to SEQ ID NO: 37873
  Clone ID: LIB3067-035-C8_FLI.pep

SEQ ID NO: 55854 - protein, 366 aa, Glycine max
  Clone ID: UC-GMROPIC071E08_FLI.pep
NEVKFAELTLDIYRMIQCLEWEPSGVFYQKHTVKPKENGDIIDHSGASGIIDMNLTADMTDPTVPPNPRKASLYRPSVTHVIAVLATICEELPPDCVVLVYLSASGKAGLNNVSQVENFSGSSKYSRHKVLSQTSQGQNSEPSETQNNGKRELSYYDNYLWFGPKGNSGSNNLYPGDLIPFTRKPLFLIIDSDNSHAFKVLHGAERGETAALFLSPLRPIFKNPSDVNSNNGSQFTFFLTAPLSAFCQMIGLSPNESDTDVYNEAENIIANALTEWEIILCSSTTMDLVWAQVISDPFLRRLILRFIFCRSVISFFCPPEESELYLPLCLPHLPSSVAPTSEAVRSAVVQLAMHFDVADSFHFTET

SEQ ID NO: 55855 - protein, 339 aa, Arabidopsis thaliana
  Clone ID: LIB25-044-F1_FLI.pep
NRKRIMDAFDAIPDPVVIDILNRVGDVKTLIRCRSVSKRFNSLATQSESLLLQLDQILGATESDSEIDSPIASFFRSLFKSIHGLLPPIFSKPANSDEILTRSPKTPAQILSGFERIRNLEVELYGGDVKLEKGAAVKWKAEFGKTLKSCVIVAFRSATVNTSAATEAAAVVDGVVESDSEFVCGLKTRVVWTISALMAASTRHYLMRDLVKDHKEMEKLIVRDSDGEGTVVMDAAGMKEYRETEVRGDNKESERVGERTVVPSVRMSMRHAPSLMLKSGICLEAATLVVVRPTGVASDDNDVELVTEAFAGDGDDCMYGEAVTALLKRRRNVLEMNSF

SEQ ID NO: 55856 - protein, 363 aa, Glycine max
  Clone ID: UC-GMROPIC073D10_FLI.pep
KMPPKQQQSKADLAKKQKIVEDKTFGLKNKNKSKNVQKYVQNLKQSVQPRPDAAKVDAKKKKEEDKAKEKELNELFKIAVTQPKVPVGVDPKSILCEFFKVGQCAKGFKCKFSHDLNVQRKGEKIDIYSDKRDEETMEDWDQETLEKVVESKKTEYNQNKPTDIVCKYFLDAVEKKQYGWFWACPNGGKNCHYRHALPPGYVLKSQMKALLEEESEKISIEEEIENQRAKVATTTPMTPELFFEWKKKKIEERDANIAAQQAERAKNDRMSGRELFLSNASLFVDDAEAYDVYQREPESYETEQNGNRNAAEDGPCSSATAASDGEDLDDIDDDDELDMDELDELEASLSKTSIQIKETGAEA

SEQ ID NO: 55857 - protein, 349 aa, Glycine max
  Clone ID: UC-GMROPIC073G04_FLI.pep
LLMVMLLGQYSTGKTTFIKHLLKSSYPGAHIGPEPTTDRFVVVMSGSDERSVPGNTVAVQADMPFSGLTTFGTAFLSKFVCSQMPHPLLEHITFVDTPGVLSGEKQRTQRAYDFTGVTSWFAAKCDLILLLFDPHKLDISDEFNRVISSLRGHDDKIRVVLNKADQVDTQQLMRVYGALMWSLGKVLKTPEVMRVYIGSFNDKPVNDAATGPLGKELFEKEQDDLLSDLKDVPKAACDRRINEFVKRARAAKIHAYIISHLKKEMPAMIGKAKAQQKLIDNLAAEFGKVQREFHLPPGDFPNVEFFRERLSGYNIDKFEKLKPKMTQAVDDMLAYDIPNLLKNFRNPYD

SEQ ID NO: 55858 - protein, 137 aa, Glycine max
  Clone ID: LIB3242-445-G6_FLI.pep
QKQALAKQLNLMPRQVEVWFQNRRARTKLKQTEVDCEYLKRCCENLTEENRRLQKEVQELRALKLSPQLYMQMNPPTTLTMCPSCERVAVSSASSSSSATMPSALPPANLNPVGPTIQRPMPVNPWAAMLNQHRGRP

SEQ ID NO: 55859 - protein, 400 aa, Glycine max
  Clone ID: UC-GMROPIC074H03_FLI.pep
EGKLSGGINQEGIDYYNNLINELLANGLKPFVTLFHWDLPQSLEDEYGGFLSPRIVKDFQDYADLCFKEFGDRVKHWITLNEPWSYSQHGYATGEMAPGRCSAWANPNCNGGDSASEPYLVSHHQLLAHAASVHVYKTKYQTFQNGLIGITLNVNWYVPFSDNKLDHKATERAIDFQYGWFMDPLTTGDYPKSMRFLVRTRLPKFTKEQSKLLIDSFDFIGINYYSTSYASDAPQLKSNAKISYLTDSLANFSFVRDGKPIGLNVASNWLYVYPRGFRDLLLYTKEKYNNPLIYITENGINEYDDSSLSLEESLLDIYRVDYHYRHLFYLRESIKNGVNVKGYFAWSLLDNFEWHLGYTVRFGMNFVDYKNGLERYPKLSALWFKDFLKIEIKLHEDSMQ

SEQ ID NO: 55860 - protein, 255 aa, Zea mays
  Clone ID: LIB3591-097-H8_FLI.pep
IKPFHNMRNPNGTGRSLFPQLSHHSPAQVLRNFTHIRNLRIELPSGDVGTEEGVLLKWRAEYGSTLQSCVILGGTRVDRKPVGGEHEQSLEDNGSMPESFYTNGGLKLRVVWTISSLIAASTRHYLLRSIINDHSTLLSLVLTDADGQGTLCMGAEQLKEFRENQLSASACSNRTQVPACNMKLKYAPYLELPGGMALQGATLVAIKPSPDGSNGSHPNRKEADAFVFGAFDGPFKAAVKALMKRRTYLLEMNGF

SEQ ID NO: 55861 - protein, 891 aa, Glycine max
  Clone ID: UC-GMROPIC074H08_FLI.pep
VESVEMGASRKLQGEIDRVLKKVQEGVEVFDSIWNKVYDTDNANQKEKFEADLKKEIKKLQRYRDQIKTWIQSSEIKDKKVSASYEQALVDARKLIEREMERFKICEKETKTKAFSKEGLGQQPKTDPREKAKSETRDWLNNVVGELENQIDNFEAELEGLSVKKGKNRPPRLTHLETSITRHKAHIKKCEFILRLLDNDELSPEQVNDVKDFLDDYVDRNQDDFEEFSDVDELYSSLPLDKVESLEDIVTIPPGPAKVTPVLSLKPSVAASASASQTSEQADDTASQDSNSDFVARTPPPKSSIVSPTATTPAGNFATPVSMNVPVPNLSSPPAIASVMPGSNSVQSSLEISSLVDASSFVNQSSTMKEEEINSFPGQRPSPSLSDVTLIRNISRNSVSNQATNSIPLASGNMVSSNGPLGSVPSAPEITKRNILVGDDRLGSNGMVQPLVSPLSNRMIMPQVARPNDGTSSVDSSSVNEAATVSGRVFSPSAVPGMQWRSGSPFQNQNDVVQVRGRTEIAPDQRERYLQKLQQVQQQGQSAILNMPSFVAGNPKQFSAQQQNPLLQQFNSQGSSVASQSGVGLGVQSPGLSGIASTSLPQPPNSVHSPSSQQSLLLVVSKDADVGNSKGDEPQQQIFPDDSGTESTASNGIGKNFVNEDELKSTYAVDSPAGVPASLPEPAQTSRDIDLSPGLPLQSNQRTGNLGVIGRSSTDLGALGDNFSASTANSGGVRDQLYYLQMLEAAHLKLPQPKDSERPRTYTPKHPTITPPSFPQVQAPIVNNPAFWERVGIEQYGTDTLFFAFYYQQNTYQQYMAAKELKKQSWRYHRKYNTWFQRHEEPKVATDEYEQGTYVYFDFHIANDDLQHGWCQRIKTDFTFEYNYLEDEPIV

SEQ ID NO: 55862 - protein, 361 aa, Zea mays
  Clone ID: LIB4739-069-F8_FLI.pep
RSEQRRLLNRAMQAKARIHADPVHEFDQFDCLHDSLVLLILNKLEDVRSLGRCSAVSKRFSGLVLLVHDVRVKIDHVVTVDGGADDALNLSSPKPHNIISHLFKMMLFAIAKPFHDMRSPISAGRLLFPQLSQHSPVQVLKNFSHVRNLQVELPSGDVAVEEGVLLKWRAEYGSTLQSCVILGGTLVDRKAAGSGHEPSPDDKGSMPESFYTNGGLKLRVVWTISCLIAASTRHYLLRSIINDHPTLRSLVLADAEGQGALSMGAEQLNDFREHQLSASPCSNRTQVPACNMKLKYAQYLELPGGLALQGATLLVTKPASDGHGNRKEVEAFVSSAFDGPLRFAAKALMKRRTYLLEMNGF

SEQ ID NO: 55863 - protein, 145 aa, Glycine max
  Clone ID: UC-GMROPIC075B10_FLI.pep
NVSGRQKFSSPSWNMAPIPLQGTSTHYNQHIPHYPFPHPVYRYPGYPHPQDLYEMNYNNAYGGQQLPLCWFPAYCQPFYGLSRQFIPTAYVKKAQTPDVSPQEFTVVGFSEPISASPSICSTGLDTGTVPATGVLESHQEQKSST

SEQ ID NO: 55864 - protein, 135 aa, Zea mays
  Clone ID: LIB3059-021-F6_FLI.pep
SSKYDEITAGTQLASAELCLVGSVLVGPEEGAHGEAALAVDVAVGGKAVLAEQAVDAPLRHALVVRLLVARVVQRHPEAAAPTEEDTAVLLPLHLRRLLAAWPGHDAQAHCGAQGSHELRGKVLLGKLLLLLGFE

SEQ ID NO: 55865 - protein, 563 aa, Glycine max
  Clone ID: UC-GMROPIC087H10_FLI.pep
SEFLKALSDMWKDFDSRVLRYKVLPPLCAELRNVVIQPMILPMVLTIAESQDKNDFEQSTLPALVPVFSSAAGETLLLLVKHAEFIINKTSQEHLVSHVLPMIVRAYDDTDARLQEEVLKKSVSLAKQLDAQLVKQVVLPRVHGLALKTTVAAVRVNALLCLGDMVSRLDKHAVLDILQTIQRCTAVDRSPPTLMCTLGVANSIFKQYGVEFVAEHLLPLLMPLLTAPQLNVQQFAKYMLFVKDMLHKIEEKRGVAVTDSGTPEIKLAPMVNGHQSEAMRTSSSSIPASTKSSSWDDEDWGPKPKGTASSIQNSIDVTSQSMAGNPVGQVTSLQKHLSLAALSAKQTTKPCPSVDVEWPPRASSGVTLQFGDTETQTIAAGTSSPSNLESDDPFADWPPRPNGSVSGGSGISNNATLGMPLNKVGFNSMRSTSSNMGPQTSNSWPVNSQSSAESISLNSRNPISTMGSLNSGGLGQQKSLGFVKQGQAFPASIVSYNNVQSTATDLGSIFSSNRNEQIAPKLAPPPSTTVGRGRGRGRGAASTTGSSHTKSHAEQPPLLDLLG

SEQ ID NO: 55866 - protein, 121 aa, Zea mays
  Clone ID: LIB3236-102-B5_FLI.pep
DTIARLVDLLHLALASVILQRRHVGVGLRSLVLVDAEAQLEHAVDAAAEGVGVVKAEARGEQRRLEQEHDKVLDRLVVLVGLRAFAQLLHDGVLRVDLHGLLGGHVPRHARVPERLCLHDP

SEQ ID NO: 55867 - protein, 251 aa, Zea mays
  Clone ID: LIB3595-006-H9_FLI.pep
AAAAPPAVLQDGAVTVLITAGAYSLVRVFDELTERRLIEKSLSRKVVHVLSGVLFMSSWPLFSNSTEARYFAAVVPFLNSMRLLIYGLRLYTDEALVKSVTREGKPEELLRGPLYYVLVLLFSVLVFWRESPIGIVSLSMMSGGDGFADIVGRRYGSAKLPFNRKKSWAGSISMFISGFLLSAMMMLYFSSLGYIDVIWEEALGKLALVALAATVVECVPVTEVVDDNISVPLATMLVAFLLFSSNRTIVN

SEQ ID NO: 55868 - protein, 154 aa, Zea mays
  Clone ID: LIB3606-013-F9_FLI.pep
GLMKNEAMVKSMSRSGDYRELLKGPLYYAATITFATSLLWRTSPVAIALICNLCAGDGIADVVGRRLGKEKLPYNPNKSYAGSIAMAVAGFLASVGYMHYFHTFGFIEETWYMALSFLVVSVAAALVESHPISTELDDNLTVPLTSFLVGSLIF

SEQ ID NO: 55869 - protein, 198 aa, Zea mays
  Clone ID: 700219651_FLI.pep
KMQLLTLRTPSCEQKEPNRSKDSTSRDTEERPNNVDDDNGRSSPLAPDAARELDVLGHDGDALGVDGAEVGVLEEPHEVGLGGLLQRGDSGGLEAEVGLEILRDLTDEALEGQLADEQLRALLVLANLPERDGAGAEAVRLLHATGCRRRLARRLGGQLLAGRLAARRLARRLLRAGHRRFGAWREDGRAEPAVDLGK

SEQ ID NO: 55870 - protein, 76 aa, Zea mays
  Clone ID: 700204372_FLI.pep
RTGDRHQERADRGCSRGRTRRGPVSGLRRSSRRRRNMRNATSTRNNIQVYNPLYFVVLFRQTVHPIDQTRSLQFFF

SEQ ID NO: 55871 - protein, 40 aa, Zea mays
  Clone ID: 701166704_FLI.pep
SNAPCFSFGICVEVPDSLFPEVSFSINIPCSSFKTSLLLL

SEQ ID NO: 55872 - protein, 374 aa, Zea mays
  Clone ID: 700219840_FLI.pep
QRPWLPVGASRMSGRKNAGKVSPWLLVLICLGCFFVTYNLLTMPSRGRDGPRKFLGGGGDRHSTASLGSGSDSDPAKRFHVALTATDALYSQWQSRIMHYWYKEMRDRPGSDMGGFTRILHSGKPDGLMDEIPTMVVDPLPEGKDQGYIVLNRPWAFVQWIQKAKIVEEYILMAEPDHVFVKPLPNLSHGDEPAAFPFFYIKPTENEKILRKFFPEEKGPISNIDPIGSPVIIKKAQLEKIAPTWMNVSLKMKEDQETDKAFGWVLEMYAYAVASALHGVHHSLHKDFMIQPPWDLKTDNTFIIHYTYGCDYSMKGQLTYGKIGEWRFDKRSYLQSPPPRNLSLPPPGVPESVVTLVKMVNEATANIPGWEDDR

SEQ ID NO: 55873 - protein, 88 aa, Zea mays
  Clone ID: LIB3236-144-H2_FLI.pep
RWTTPGHEERPKGYLFNRPPPPAGETRKWEDWELPCYITSFLTVVILGVGLNAKPDLTIETWAHEKALERLKQQELAAVSGGGDADAE

SEQ ID NO: 55874 - protein, 41 aa, Zea mays
  Clone ID: 701185244_FLI.pep
MMPLAAGDCCQGGACAPSPIIIMAVSFLGTSLGFGDGSFAP

SEQ ID NO: 55875 - protein, 72 aa, Zea mays
  Clone ID: LIB3075-021-E1_FLI.pep
RSNPVRNRSDPPIRHKRTRPYTATITVSTRAVQHGFRLVMYNYCTSRAVQYERMVCLSAQTGKLTLSNPFRK

SEQ ID NO: 55876 - protein, 122 aa, Zea mays
  Clone ID: 701185353_FLI.pep
FGCSHFLLRSMPALRATASRPCFSMVLSALVERRSLTKRLPASHHSFLYCRFTNCCFFVLWLEKDTLFARFVFLPVKGHTRPEHTPSSRQSYGDRSAERLTDSTILLEENGTAGTAEDQSNH

SEQ ID NO: 55877 - protein, 390 aa, Zea mays
  Clone ID: 700076360_FLI.pep
SMDSEGVVAAKVADETTKPAIQEDGAESKAGMTDLLMLTDKSQLQALAMLLRNNEELMMSQAIKSETERIEYLKTVSDCYTRTMKLLDDSMAARTTYERSGGMRSLVARDMDDYVVYGLNACLQNVRNCCVRLDAIDKLRAHYDALADAVADPAANVEGLAAEASEYKAAMWQYCYNQRSASARAHSRAYSQALKLEGIDFAELVRRHQLRLGYGSKGEEFEDLDDTQKLEVYNSIIVESGRAGLPVRMFSSGRSAGGPKIAATTWAEAVSVFIMAAGNLAWDVFTTEHEVEAILKGSLNLLAGLGGFAVEAVVGAAVTKAVANVGAGVFACSLAGFVVGAIAGLIFVGVSGLLINLIIGSPRKVPDMSKLMFHTAVMPDGMALAYAVSH

SEQ ID NO: 55878 - protein, 250 aa, Zea mays
  Clone ID: 701169008_FLI.pep
VLYMGDTAQVVETMRILYSSNQEWPLSKNALLSMSYFLISYEHQIEKNADLGHMLSSFPSERNTIRKTEASTTPTLPLDCSFVWQRSDSLRRVVGQGDRVGFPGKSGLSLDLNSHTIGSGLLLGLGVGLDSLDEVLTGSGGLDVLDSDVDALLDVAVLDLLVDNDADRALGDVVDDTSLAVVDLEGHALLDGTVDLDVDDITDVVHLQVGVQGDHALLAKVPAEGISSARSLSVRVTHRALIAVDFSFED

SEQ ID NO: 55879 - protein, 223 aa, Zea mays
  Clone ID: LIB3070-004-C1_FLI.pep
QRATCSRTHTHTSTFVPSTAYASPHTGNKVLLNIRSHRTVSLCLLGGLSGLLGRLCLLAPATGRLLRRLLGQQNRVDIGEHTAVSDGHAAQQLPKLLVVPDRQKHVARNNASLLVVPGSITSELQNLSGEVFEDSGEVDGGAGADTLRVAALLQVAPDAADGELEPGLHGPRHRLLPWPADLAPGRSLLPLTPCSGAGGVHGRISASIGLSGTRRKCSGVGSN

SEQ ID NO: 55880 - protein, 222 aa, Zea mays
  Clone ID: LIB3059-029-D9_FLI.pep
HKNKSGSPLIIVPDERSEKCIHLLAVLIIQTYELATSSFLMHYALRSYLEGIVPPPRIQGHSATPLMVARLHSASVTRVAANPLCTSRGQPGRSSRRPSSCASGPGGIAPSMRMLSAVHRQYAGMSASSRQHLLFSSGHGRRGPMPQVRLVTYQRQLGSGLCGMAHPGTQEVPALALAAASTESRTAAARMRRRWLLLDDDAINSPVDGLSMDFLVQFALVT

SEQ ID NO: 55881 - protein, 115 aa, Zea mays
  Clone ID: 701175617_FLI.pep
IQHNIKGSSLTIRENNILSQLPLTQQNLKQELPSFCRALSSTSIVGHHLFHRSEAELRASPVPALGVVPDGIVGAHADPVGDGAVLAHLLGQLLLDPEGLVGRHGFGGGDDGTRK

SEQ ID NO: 55882 - protein, 153 aa, Zea mays
  Clone ID: 701175788_FLI.pep
MRIAPTSTLRSFLLMWPTLPSAMIQGSTGYAILCTSTGSSVVSPPQARSSVACVARATLTTRIGRRGGPPGSATRPFPSAATVEHIHLDVLLLWNLPHACSDSIWYFCCIVKFCYPCYKLLELCYQCTMEKLKRTMFVVILCYLDENDGLVDY

SEQ ID NO: 55883 - protein, 550 aa, Zea mays
  Clone ID: LIB189-032-E4_FLI.pep
VKRSRLASVLHAGGDALHGEDERVFQAGRVLARRVQLDQSGGLVLVGELLGQRRLGRHLEVGVPYPLQRVGLEHVQGGDVGVAQHQPLLQEWIAFKNILVPSDLEEKLLCLHVFVPELLPKGLEFFRHKQLVIQAGNAGVSLGENHLQQVQGDPEEWPLVVHLFEDLEVPDVLVDGELECGADSQPHGEVEPGLGPREDPGDGAQGRDAAAGPPLGWPAADVHPPVLGLRCSRSEVLDEARLLDDDGAVLLRGHDRHLVHELAPLGLGRDRRVHAVLQRGGREALQSLEAQVLLPEAELDDLALHRHTDGPVDGVRRLGQDGKVRGPATPAHGASAAVEQGELDAVALGHLRHLLLRPVQLPRRGQAAGVLAGVGVADHDLLLALDPVHVPVHREEALHGRGRRLQVGQPLEQRHHGQRLAHAALALQELHGEHVRGGRRHGDDVGAEAVGRELREDVERADDVGDLVGLGKVRGQQRALASQLRQQPLLPLVLGPLAVRPDAEVRGDGVDHVGVPLRLLPDVQLHQGEPEREHLAQEVQEAPVRDGLVA

SEQ ID NO: 55884 - protein, 96 aa, Zea mays
  Clone ID: 701176379_FLI.pep
QAHTQWERSTEVSLAPVRCATTRPRSPRPRTSRSLRSAARRSASCTAAASSARSRPPAAVAPTARSARARRPRPKQLAYFEHYSGMPARLHLKNSC

SEQ ID NO: 55885 - protein, 390 aa, Zea mays; identical to SEQ ID NO: 55877
  Clone ID: LIB143-001-B6_FLI.pep

SEQ ID NO: 55886 - protein, 452 aa, Zea mays
  Clone ID: LIB148-058-H2_FLI.pep
RRPAPSPASRRLRRGAHPAGRHRARPRGAAAAAAAPARGAGARAPRRQRRGRDGVDGAAPRHGAPLRAQGAVREPRRRGAAADRARDRHPPHRRAPGRGAVPRHVRARRGAPDPAGVHGRRVARRPPHRRRAVPRRRRAPGPVRDRVPPPPPHRAPRHQALQPPHRLGAPRQDRRLRRRPHPQPDHGPLQLLRRHHRLHEPRADQHRPQRRQLRRLRRRHLELRPQHPRVLLGQVPLRGEPRQAGRLGRAHVRHLLQRPARATAHRLARVQGVHRLLPAEEPGQAPHGRAAAAAPLRRRPAPAAPRCSSPVMTTPPFRRVGSWDQSTDLVSVWPPSLGCRQCGTPINPAFPWIQYTDLIPDVSREFAGQFRVLSSIIDVRIHPWLLLLQLRSPTNFECCVHLQFSIINSSPRSSSTRSSLLRFKVSFSFLLFDALFFFTSSDDSITRKRKKK

SEQ ID NO: 55887 - protein, 85 aa, Zea mays
  Clone ID: 701160435_FLI.pep
LADPYLDHVSGLAYRRRRSCYIRPEKKTSLVAHITVTPMCISLLPLCRILFPSFFFLYLFWVYKGNLFFVICFLIVVIRWPSVIS

SEQ ID NO: 55888 - protein, 399 aa, Homo sapiens; identical to SEQ ID NO: 55762
  Clone ID: LIB4676-050-E4_FLI.pep

SEQ ID NO: 55889 - protein, 214 aa, Glycine max
  Clone ID: JC-GMST024139A01_FLI.pep
ELLCLSFHNVTTNSHTIKSGEPAFSVLVSRFLLGEAFPMPVYLSLLPIIGGCALAAVTELNFNMIGFMGAMISNLAFVFRNIFSKKGMKGMSVSGMNYYACLSIMSLLILTPFAIAVEGPKVWIAGWQTAVSQIGPNFVWWVAAQSVFYHLYNQVSYMSLDQISPLTFSIGNTMKRISVIVSSILIFHTPVQPINALGAAIAILGTFLYSQAKQ

SEQ ID NO: 55890 - protein, 96 aa, Zea mays; identical to SEQ ID NO: 41063
  Clone ID: 701164415_FLI.pep

SEQ ID NO: 55891 - protein, 262 aa, Glycine max
  Clone ID: UC-GMROPIC069C12_FLI.pep
ERVNLLRYDGLAKVGGTIICVSGAIFMVLYRGPALIGYAELGHVTQNEISARGQPEPSGWLIGGLQNLGFDNFHLGVLCLIGNCICMAAFLAIQASVLKKYPANLSVTACSYFFGALLMVTVSLFMTTESTDWSLTSSEILAVIYAGSIASALNYGLITWCNKIIGPAMVALYNPLQPAFSAILSQIFLGSPIYLGSIIGGSFIIAGLYMVTWASSRERQATVGVTPHSSWVSEPLIHERSAHQRGLVFSVSASVSPKSSSD

SEQ ID NO: 55892 - protein, 31 aa, Zea mays
  Clone ID: 701164465_FLI.pep
VERTQFRLPTNDTLPKYGTYQVNSDQNYNNR

SEQ ID NO: 55893 - protein, 82 aa, Zea mays
  Clone ID: 701164771_FLI.pep
SDLILQFVRPRLAMEDEELVDQKKYLEERCKPQCVKSLYEYEKCVKRVENDDTGHKHCTGQYFDYWSCIDKCVASKLFKKLK

SEQ ID NO: 55894 - protein, 407 aa, Zea mays
  Clone ID: LIB3245-568-G5_FLI.pep
RLLPPAVTGPRARRRARLSVGAAQVRDQLRADRERPPGPGAGGDAPAVDGREQGEAVRRGPPGADGVRQHGRRLHHRRGQRGPAGDGGQPGRGAPLGGGERAALRPGHAHHLRHRRQRGPVGQRHGGDGQPAPGHEGRARRARRRGPRPAGRRLVGALRGRARHQLPAVVGRVPGGPGGVRAPHPRLPRADGVAVPRQRVPLLLVQGEPGAGAGGRVAAVRAVPAQPGRARPGHRPHLRQHAVRADRRRVRRHAGRGGARGRGRHGLGDRVAVQGRRRRARRHGAERRGVQRQPHAEGRRGPGHAAQARRARRRVRVRALQRGLEARAHVGAELRPALPRRLAGVRARRRRSGPGRLAQPVLHVHVLLLLLVRIGGGRNLFDGESGTITAAASNCNTPTITFVLLDC

SEQ ID NO: 55895 - protein, 77 aa, Zea mays
  Clone ID: 701164869_FLI.pep
YRVGERPSQDLSSSTTMTIFQPFNLLRAIRWQNLVLLRLQGPCQNSRCRKEGGKSRYHGAMYLRWLIRCIWNNHVKW

SEQ ID NO: 55896 - protein, 313 aa, Zea mays
  Clone ID: LIB84-014-A1_FLI.pep
SRYKVVKFDLSKTIQSEKFEDRRTWGIFVEGRNAVSILVAINNVSTFIHGRNLDWRCVDTFDEQYMKDKIRSLITDRQRLSQIHKEVQSIPGDDMKAFFDVISNIRKFTLCPRLAGPSAFEVNQPYMLLCHLFTPVFHGWVVSPELSSYDAIKGFTRDELIHYCNALIALEGESDNVRVIRDLLNDSDQLLTAYGFDCLVQEMRDDKFGLIFWRSRYDVVHKHDGDLFLLVSDERVRNEMPQATWMLFEQSPESSIYFTSEYLPVENQHSIDRAREWHQQKLQQKTSSSLETVKKAKKKRNNIHHQSTINSWF

SEQ ID NO: 55897 - protein, 384 aa, Zea mays
  Clone ID: LIB143-068-D11_FLI.pep
VTMGSSGADTSSKPNKASAPQEQQQPATSGAATPAVYPDWSSFQAYPPIPPHGFFPSPVASSPQGHPYMWGAQPMIPPYGAPPYVMYPPGVYAHPSMASGAHPFTPYAITSPNGNADATETTAVACDTDGKPSEGKDKSPTKRPKGTLGSLNMLTGKNPSEHGKTSGASANGATSQSGESGSDSSSEGSEGNSHNDSYKHSGQEQDGDVRSSQNGASRSPSEGKFNQAMAIMPMPSSGPVTGPTTNLNIGMDYWANTASSAPVIHGKVTPTTVPGAVVPAEQWIQDERELKRQKRKQSNRESARRSRLRKQAECEELAQRADVLKQENASLRDEVNRIRKEYEELLSKNNSLKEKLEGKQHKTDEAGLNNKLQHSGNDIQKKGN

SEQ ID NO: 55898 - protein, 569 aa, Glycine max
  Clone ID: UC-GMROPIC089D05_FLI.pep
YNQLVKNYPPLVPIETNLKDGINFSSSNFTGFSNIRNMYITGHSNGAINFWDATCPFFTPILQLKQQSENDFSLSGIPLTELYFDSNSPLLFSGDQSGMVRIYRFKPEPYASNSFMSLTGGTKKGTDHVIHSMKLIKTSGTVICMNIDHSSRHLAVGSDQGNVSVINIDGPSLLYRKHIASEISTGIISLQFKTCSLHGFEKNILAVGTKDSSVLTLDGETGNTLSIGTIHPKKPSKAIFMQVLDGQGEQTAGSVTKDGLELKEGIHIEDATAKQLYILLCSEKALYVYSFAHAVQGVKKVLYKKKFHSSSCCWASTIYSLSDIRLILLFASGKVELRSFPELTLIVETSVRGFTYSPPKLKSFSDSQICCSSKGDLVLVNGDQEIFVVSLLAQRNIFRLLDSVSCIYRKERMPSQEELVPGPVIHKEKKRGIFSSVIKDFTSSKEKHAPLLEKKDPKESIRELSAIFSNANFACNDNVDKPTMDENQLELNIDDIDLEDHVEKRKEQSILGALNKKKLAGTFQSLKGRLKEMKGNNQKTSDKEGQQDQKDGALDQIKKKYGFSSSSNV

SEQ ID NO: 55899 - protein, 228 aa, Zea mays
  Clone ID: 700050660_FLI.pep
RLWSTKLNANLVCYKGHNYPVWDVQFSPVGHYFASASHDRTARIWSMDKIQPLRIMAGHLSDVDCVQWHVNCNYIATGSSDKTVRLWDVQTGECIRMFIGHRSMVLSLAMSPDGRYMASGDEDGTIMIWDLSTGRCVSPLLGHSSCVWTLAFSCEGALLASGSADCTVKLWDVASSTKTLKTEDTKGSSANRLRLLKALPTKSTPVYSLRFSRRNLLFASGALSLSSS

SEQ ID NO: 55900 - protein, 415 aa, Glycine max
  Clone ID: UC-GMROPIC096H09_FLI.pep
ALRNFSKHVQVRDPQTEIPHAREIKLGELLKKKAEEGVAVRVMIWDDETSLPFIKNKGVMKTHDEDAFAYFKHTKVICRKCPRLHHEFPTLFAHHQKTITVDTRAPNSVRAREIMSFLGGVDLCDGRYDTEKHSLFQTLTEESHYHDFYQTNIAGASLNKGGPREPWHDAHASVTGDAAWDVLTNFEQRWTKQCDASLLVPANTLENLIPTCSSPPKERNWKVQVYRSIDHVSASQLFRKLTVERSIHEAYVEAIRRADRFVYIENQYFIGGCHLWQKDRHSGCRNLIPVEIALKVVSKIKARERFAVYIVIPMWPEGVPESEPVQDILHWTRETMIMMYKLIGEAIIESGEPGHPRDYLNFFCLANREKKGKEEYLSPHSPHPETQYWNAQKNRRFPVYVHSKIMIGMIILLSN

SEQ ID NO: 55901 - protein, 202 aa, Zea mays
  Clone ID: 700208991_FLI.pep
RLRYARRPNTSARLRSCLRCPSPRRLFGLLPLVTTCAVGAVRQQDVRSRMMNNNSGGGAGGPGGGMGTGVGGGGDGRHDDEAALTEFLSSLMDYTPTIPDELVEHYLGRSGFHCPDLRLTRLVAVATQKFLSDIASDSLQHCKARVAAPIKDNKSKQPKDRRLVLTMDDLSKALREHGVNLKHAEYFADSPSAGMAPSTREE

SEQ ID NO: 55902 - protein, 173 aa, Glycine max
  Clone ID: UC-GMROPIC101F12_FLI.pep
TVPNKRLIMSPALTTLSPPLSLSVTSAARRPRLTAMVKTEKKQSLGFGSDKKETKWHCVEGCGSCCKLQKGPSFPSPEEIFDDPSDVQLYKSLIGPDGWCIHYEKSTRKCSIYPERPYFCRVEPEVFKSLFGVKEKNFHKEACSFCRDTIKSIYGPNSKELHNFNSSIRNSSS

SEQ ID NO: 55903 - protein, 590 aa, Glycine max
  Clone ID: UC-GMROPIC105H10_FLI.pep
FLLNPMADEAKAKGNAAFSSGDYPAAIHHFSDAIALAPSNHVLYSNRSAAYASLKNYADALADAKKTVELKPDWSKGYSRLGAAHLGLSQYDDAISAYKRGLEIDPHNEPLKSGLADAQKALAAASRPRPSASNPFGDAFSGPEMWARLTADPTTRAYLQQPDFVKMMQDIQRDPNNLNLHLKDQRIMQALGVLLNVKIQTPPTGADTDMPDSPSPSAAASERKRAAEAEPAKQPEPEPEPEPVPMELTGEEKDAKQKKAEALKEKEAGNAAYKKKDFDTAIQHYTKALELDDEDISYLTNRAAVYLEMGKYEECIKDCDKAVERGRELRSDFKMIARALTRKGNALVKMAKCSKDYESAIETYQKALTEHRNPDTLKKLNEAEKAKKELEQQEYFDPKLADDEREKGNEFFKQQKYPDAVKHYTESIRRNPKDPRAYSNRAACYTKLGAMPEGLKDAEKCIELDPTFVKGYTRKGAVQYFMKEYDKALETYREGLKYDSNNQELLEGIRTCIQQINKASRGDLSPDELKERQAKAMQDPEIQNILQDPVMRQVLIDFQENPKAAQEHTKNPMVMNKIQKLVSAGIVQMK

SEQ ID NO: 55904 - protein, 754 aa, Glycine max
  Clone ID: LIB3049-003-E8_FLI.pep
RATYTTPLLQISSSFLTSHPSLSSSLSSLHSLFRFMAGLIDLNNATEDDETPSSGSSSSSSSSTVCLELWHACAGPMISLPKKGSVVVYFPQGHLEQHLHDFPLPASANIPSHVFCRVLDVKLHAEEGSDEVYCQVVLVPESEQVQQKLREGEFDADGEEEDAEAVMKSTTPHMFCKTLTASDTSTHGGFSVPRRAAEDCFPPLDYSQQRPSQELVAKDLHGQEWRFRHIYRGQPRRHLLTTGWSAFVNKKKLVSGDAVLFLRGEDGELRLGIRRAAQLKSGSTFSALSGQQGSPTSLMDVVNALSARCAFSIHYNPRVSSSEFIIPIHRFVKSLDYSYSAGMRFRMRFETEDAAERRFTGLIVGIADVDPVRWPGSRWRCLMVRWDDLEATRHNRVSPWEIEPSGSASTANNLMSAGLKRTKIGLPSAKLDFPVSNAIGTSDFGESLRFQKVLQGQEMLGVNTTYDSFNAQSHQLSDLRRCYPGSNYPRIAATGNSIGISQVSSNVSNNGIGFSESFRFQKVLQGQEILPSQPYGRALSVDEACGNGRFGLFDGFQAMRSRNGWSSHVSNNSSHLHPPVPSGQVSSPSSVFMFQQAVNPVLNSDYNNQIGQVMGDKVHQRVSYASEVKGGKFVSTPYEPLLRGLSQEGTNSFGLSNFHNQLDSSRSHDSVSVLRASQELVPSCKSRCRVFGFSLTEGAPVASKEATDSSAVACAGPSFTRHVEDDFHPGHSLRSKAVASYCTKVINLYPLRCI

SEQ ID NO: 55905 - protein, 429 aa, Glycine max
  Clone ID: UC-GMROPIC109H11_FLI.pep
KMAARSDHQTVPLSVLLRRELANEKIEKPEIAHGQACQSKKGEDLTLLKTECQRVVGDGVSTYSVFGLFDGHNGSAAAIYSKENLLNNVLSAIPPDLNRDEWIAALPRALVAGFVKTDKDFQEKGQKSGTTVTFVIIEGWVVTVASVGDSRCVLESSDGELYYLSADHRLETNEEERVRITSSGGEVGRLNTGGGAEVGPLRCWPGGLCLSRSIGDMDIGEFIVPVPYVKQVKMSTAGGRLVICSDGVWDSLPAEVALDCCRGMPADAAAPHIVKEAVQAKGLRDDTTCIVVDILPQEKPPVSAPQTKRPVKGMLKSMFRKKSSESSSYIDKEYMEPDVVEELYEEGSAMLSERLDTKYPVCNMFKLFMCAVCQVEIKPGEGISIHEGAPDSRKFRPWDGPFLCSSCQEKKEAMEGKRSSGRISSGSDE

SEQ ID NO: 55906 - protein, 352 aa, Arabidopsis thaliana
  Clone ID: LIB25-059-H9_FLI.pep
PYSECNHPAQIYKKVVGGKLPGAFYRVGDIEAQRFIGKCLVSASKRVSAKELLQDPFLASDESWMVYTSGAGNPKPFLNENEMDTLKLEDDELRTEMSIAGKLGAEDNKIDLEVQIAYDNGLANNVFFPFDIMNDTSIDVAKEMVKELEIIDWEPVEIAKMIDGAISSLVSDWKYEEDDETPHDHHRHRTDSFHSSSSHASSSQASLSNYMARGLQDWVQDDLHDETYSQSSSHSGSYSNLNYIAVDEYSSQSPVMSRTHNMTRFCPEESSHLQSGQANAYAASSSTNRSLASDNRTLTRNRSLVDVQRQLLHRSPGEEARKRRLFKTVGDVETVGFQSPYAVSRKPPSSRR

SEQ ID NO: 55907 - protein, 441 aa, Glycine max
  Clone ID: UC-GMROPIC110E02_FLI.pep
IKHKRNKLLHSTHSLFSSTVMASTLGTSSIAVLPSRCISSFSSKPSIHTLSLTSGQSYGRKFYGGIGIHGIKGRSQLSVANVATEVNSVEQAQSIASKESQRPVYPFSAIVGQDEMKLCLLLNVIDPKIGGVMIMGDRGTGKSTTVRSLVDLLPEIKVVAGDPYNSDPQDPEFMGVEVRERVLQGEELSVVLTKINMVDLPLGATEDRVCGTIDIEKALTEGVKAFEPGLLAKANRGILYVDEVNLLDDHLVDVLLDSAASGWNTVEREGISISHPARFILIGSGNPEEGELRPQLLDRFGMHAQVGTVRDAELRVKIVEERGRFDKNPKEFRDSYKAEQEKLQQQITSARSVLSSVQIDQDLKVKISKVCAELNVDGLRGDIVTNRAAKALAALKERDKVSAEDIATVIPNCLRHRLRKDPLESIDSGLLVTEKFYEVFS

SEQ ID NO: 55908 - protein, 358 aa, Glycine max
  Clone ID: UC-GMROPIC111F11_FLI.pep
NKKRNMEDSILCKHTVHHTVTKKLISPKKSSQTNSTTERRIVRISYTDPDATDSSSDEEGFPFVRQRMKRYVNQIEIETAAAEKVVRKRPAGEACRRPAKLHSGKKFRGVRQRPWGKWAAEIRDPARRVRLWLGTYDTAEEAAMVYDNAAIRLRGPDALTNFVTPPQRDSPSPSPPPAAAETPAEVCEMKVVVTEEASGSGYDSSEDHCHHNLSSPTSVLQFRSNSSEENSESQQKAEQVLRECEGETETSLFEETGEFLALDNMPLPAWDDVFNFETPEYPPLLFQEEENLNLLHQSQMLGETVQFSSEEGFSDESSIMLADSLIDFDRACPSPSSLCQVDDFFQDILFASDPLVLL

SEQ ID NO: 55909 - protein, 382 aa, Glycine max
  Clone ID: uC-gmflminsoy034g10_FLI.pep
LLPLHFVLLASTMSNDKDTFNVADLTSALNEDNRADLVNALKSKIQSLAGQHSDILESLSPNVRKRVEVLREIQGQHDELEAKFFEERAALEAKYQKLYQPLYTKRYEIVNGATEVEEGAVKETTPDGEEDQEKGVPAFWLTAMKNNEVLAEEISERDEGALKYLKDIKWSRIENPKGFKLEFFFDTNPYFINSVLTKTYHMIDEDEPILEKAIGTEIQWHPGKCLTQKILKKKPKKGSKNAKPITKTENCESFFNFFNPPQVPEDDEDIDEDAAEELQNQMEQDYDIGSTIRDKIIPHAVSWFTGEAIQGDEFGDLEDDEDDEDIEEDDDEEEEEDEDDDDDEDDEEESKTKKKSSAPKKSGRAQLGDGQQGERPPECKQQ

SEQ ID NO: 55910 - protein, 776 aa, Glycine max
  Clone ID: UC-GMROPIC113B12_FLI.pep
IVLRTLMVDKMNMLIFKSLQISLLLVFSIRNTTAEKKTHHTKHTYIIHMDKFNMPESFNDHLLWFDSSLKSVSDSAEMLYTYKKVAHGFSTRLTTQEAELLSKQPGVLSVIPEVRYDLHTTRTPEFLGLAKYSTLSLASGKQSDVIVGVLDTGVWPELKSFDDTGLGPVPSSWKGECERGKNFNPSNCNKKLVGARFFSRGYEAAFGPIDEKTESKSPRDDDGHGSHTSTTAAGSAVVGASLFGFANGTARGMATQARLATYKVCWLGGCFTSDIAAGIDKAIEDGVNILSMSIGGGLMDYYKDTIAIGTFAATAHGILVSNSAGNGGPSQATLSNVAPWLTTVGAGTIDRDFPAYITLGNGKMYTGVSLYNGKLPPNSPLPIVYAANVSDESQNLCTRGTLIAEKVAGKIVICDRGGNARVEKGLVVKSAGGIGMILSNNEDYGEELVADSYLLPAAALGQKSSNELKKYVFSSPNPTAKLGFGGTQLGVQPSPVVAAFSSRGPNVLTPKILKPDLIAPGVNILAGWTGAVGPTGLTEDTRHVEFNIISGTSMSCPHVTGLAALLKGTHPEWSPAAIRSALMTTAYRTYKNGQTIKDVATGLPATPFDYGAGHVDPVAAFDPGLVYDTSVDDYLSFFCALNYSSYQIKLVARRDFTCSKRNNYRVEDLNYPSFAVPFNTAYGVKGGSRKPATVQYTRTLTNVGAPATYKVSVSQSPSVKIMVQPQTLSFGGLNEKKNYTVTFTSSSKPSGTNSFAYLEWSDGKHKVTSPIAFSWT

SEQ ID NO: 55911 - protein, 227 aa, Zea mays subsp. mexicana
  Clone ID: UC-ZMROTEOSINTE096F02_FLI.pep
GRRAAARYLVAGTATTKPRTRWRSASTTATCFPVTTSSWLSALSATKNRMCSKTVRTAEHVSANTSARNATSSTTMTGGAENFYHCGRCGCCYATPLKDSHRCVDGAMHHNCPVCMEYLFDSMKAISVLHCGHTIHLECLYEMRAHQQFSCPVCLRSACNMSDIWQKLDQQVHGFFLSRPRVVLISSCDFRHQTSPSKPFHSFRLQRPRCQPSIRRRWYGSFATTVA

SEQ ID NO: 55912 - protein, 816 aa, Glycine max
  Clone ID: UC-GMROPIC113C10_FLI.pep
QVAKLVDDTYRKMQISGATDLASKGQGASDSSSVKVKSEFDDAFQRDVKIRCLCGSRLETEDLVKCDDPRCHVWQHIICVIIPEKPTEGIPPVPDKFYCELCRLTRADPFWVSVAHPLHPVKLTTTSNPTDGNNPVQSVERTFQLTRADMDLVSKPEFDVEAWCMLLNDKVPFRMQWPQYTDLQVNGVPVRATNRPGSQLLGANGRDDGPIITPYTKDGINKISLTGCDARIFCLGVRIVKRRSMQQILNSIPKESDGEKFEEALARVCRCVGGGNAADDADSDSDLEVVSDTFTINLRCPMSGSRMKIAGRFKPCIHMGCFDLEVFVEMNQRSRKWQCPICLKNYALENIIIDPYFNRITSMMMNCGEEIAEIEVKPDGSWRVKVKSESERLELGNLAQWRLPDGTLCVSTDGDVKRVDTLKQVKQEGVSDSPAGLKLGIKKNCNGVWEVSKPEGTNTSSGNNLKRVFGNPEQVVIPMSSSATGSGRDGDDPSVNQGGGGHIDYSTTNGIEMDSLCLNNVDLAYEYTAPNTSAQVGGAEVIVLSDSEEDNDLLASPAIAYKNNRNDATDGYSVPPPVIVDSYTEDHNLGGNSCLGLFPNDDDFGMSSLWPLPSGSQAGPGFQLFGSDADVSDALVHLQHGPMNCSSSLNGYALAPDTALGSGGILQESSAGRSVADLNGGLVDNPLAFGGDDPSFQIFLPTRPADSSMHNELRDQANVANGVCTEEDWISLRLGGGAGGNNGDAPTQNGLNSRHQIPTREGAKNTLDDTASLLLGMNDVRSDRARRQRSDSPFSFPRQKRSVRPRLYLSIDSDSE

SEQ ID NO: 55913 - protein, 132 aa, Zea mays subsp. mexicana
  Clone ID: UC-ZMROTEOSINTE108F02_FLI.pep
MPQPSSFRVPEEAEEREATEGCSDGVTRVVEHALPLALSYGGRQGEARSNDRSRPEADQQLVHQPEEEALEAIGGHAVRAHGGCCRWVFWDDPLLRYRHNWTLNHTPLGMTTGQLILVIRSGMWSDDLLGEN

SEQ ID NO: 55914 - protein, 357 aa, Glycine max
  Clone ID: UC-GMROPIC120D11_FLI.pep
AASKALQRTDQMAQSVEIPRVKLGTQGLEVSKLGYGCMGLTGAYNDPLPEEEGISIIKHAFSKGITFFDTSDIYGPDHANEIVVGKALKQLPREKIQIATKFGITKIDSSGMFVKGTPEYARSCCEASLKRLGVEYIDLYYQHRVDLSVPIEETIGELKKLVEEGKVRYIGLSEASPDTIRRAHAVHPITAVQMEWSLWTRDIEDEIIPLCKELGIGIVPYSPLGRGFFGGKGVLETVSTVSSLITHPRFRAENLDKNKKLYGKIESLATKQQCTPSQLALAWVLHQGNDVVPIPGTTKVKNLDQNIGAVSLKLTESDLREISEAVPIDEVAGTRHYYGSANFSWTVANTPPKDPRV

SEQ ID NO: 55915 - protein, 202 aa, Zea mays subsp. mexicana
  Clone ID: uC-zmroteosinte102h01_FLI.pep
RSYEQRRQRNQQHLTTTQGGTSTQEKPTKGERASLGGGELGDGLGALRDGVLGELAGEHEAHGGLDLAGRDGGLLVVARELGGLAGQLLEDVVDEGVHDGHGLGRDADVRVHLLQHLEDVDLVRLHALLPLLPATLALAALLAGGLARGDPLLRLGLLPGGRLLRRGLLLRRLLRRGLLLRLGRHRSWVERGIGNRLQGNAR

SEQ ID NO: 55916 - protein, 235 aa, Zea mays subsp. mexicana
  Clone ID: UC-ZMROTEOSINTE107D12_FLI.pep
KNSSSWATLTAVPYDDGYEWRKYGEKKINGTLFTRSYFRCTYKDDAGCLATKHVQQMDSDDNSSPPMFHVTYHNDHTCSSAKAAAKANTGGSSSNNNSHLAALLADCCDGSGCNKGLTTTTTNGHAAADAAAMNMNMKQEPSLLLPPPLLAEPPSACFPYDQMPQQCHQLLFPVSMEQQFPGNGEEIPSAAGSCISGETSWDGYYYSGDMAAAEDDRFHNLERFLLGDSFMDYQY

SEQ ID NO: 55917 - protein, 338 aa, Glycine max
  Clone ID: 700953529_FLI.pep
TSINNVTEVVFLGQLRHPHLVKLIGYCCEEEHRLLVYEYLPRGSLENQLFRRYTASLPWSTRMKIAAGAAKGLAFLHEAKKPVIYRDFKASNILLDSDYNAKLSDFGLAKDGPEGDDTHVSTRVMGTQGYAAPEYIMTGHLTAMSDVYSFGVVLLELLTGRRSVDKGRPQREQNLVEWARSALNDSRKLSRIMDPRLEGQYSEVGARKAAALAYQCLSHRPRSRPLMSTVVNVLEPLQDFDDVPIGPFVYTVPAEQQQYNEVAKESETPKERKRENGHHHNRRHHHHRHNGHRHHPLKSPKTPMPSDQSQNDEHRNGRKSGSNSPDTFNASEAQRSMG

SEQ ID NO: 55918 - protein, 159 aa, Zea mays subsp. mexicana
  Clone ID: UC-ZMROTEOSINTE092A10_FLI.pep
PVWVLHANRKRRDTKSIRWDERVSRESRRSCCRWRGCRPAGGSESCSDCGWELPAKLPDGAEEQEATGGRGTCCRRPADASRSPDLEHRHPQQRARAAELRVPERGEHDGPGRNLRRGPELGVVPCSAAADGRGVQDAVVWGPEDDHVRIMSTLKPSRS

SEQ ID NO: 55919 - protein, 395 aa, Glycine max; identical to SEQ ID NO: 38715
  Clone ID: 701045367_FLI.pep

SEQ ID NO: 55920 - protein, 194 aa, Zea mays subsp. mexicana
  Clone ID: UC-ZMROTEOSINTE083E12_FLI.pep
VIVFNSYLWWRKQKDDMRMKVMYGSFEDGDAKLDEMEMADGFEIAIKKLTEWLAENIDKNKTRIFFAGSSPTHSWASNWGGEDKNKCLNETEPIYRPGGYKAATTDYSLMAKARSYFRRTLEPRGIRVQILNITELSDYRKDGHPTVFRRQFVPLTKEQIADPASYADCTHWCLPGVPDVWNEFLYGYLVQQRK

SEQ ID NO: 55921 - protein, 334 aa, Zea mays
  Clone ID: UC-ZMFLB73279A07_FLI.pep
NLKLADFGLARSFSSDHNGNLTNRVITLWYRPPELLLGSTKYGPAVDMWSVGCIFAELLNGKPILPGKNEPEQLTKIFELCGTPDDTIWPGVTKMPWYNNFKPPRPLKRRVKDFFKHFDRHALDLLEKMLTLDPSQRISAKDALDAEYFWTDPLPCDPKSLPKYEASHEFQTKKKRQQQRQAEEAAKRQKLNHPPPHSRLPPLQQPGQAHPQMRPGQGMHNVPPVAAGPGHHYAKPRGPGGPNRYPQGGNQGGGYNPNRGGQGGGYGSGPYPQQGRGPPYPGAAGPRGSGGSGYGAGGPNYQQGGPYGTSGPGRGPNYSQGSGSRNQQQYGNWQ

SEQ ID NO: 55922 - protein, 268 aa, Zea mays subsp. mexicana
  Clone ID: UC-ZMROTEOSINTE119G07_FLI.pep
VVHYPHVHFDQSWGNISLLKLMFKMFTQFHNFMEVEYLPVVYPPEIKQENALHFAEDTSYAMARALNALPTYYSYGDSMIMARAVEAGKVNCSNYMVEMAWVKDVYGISTAEVMELLEHFLAMNPDNDGRVKAEDFWAHFGLDCSPLCKKIFHYFDLDIKGLITFRQFLVGCAHLRKQPLFQGSCETAFEKCRGPETSEISRAQLADLLRLSMVPPSDDKMLELFKTFDVDGDEKISRDDFMACLGRFPFLIAFFAALINGEVYIEIV

SEQ ID NO: 55923 - protein, 707 aa, Glycine max
  Clone ID: UC-GMFLMINSOY032B07_FLI.pep
FIVLQVLSDSETVRWLNHAVENIWPICMENIVSQKILFPIIPWFLEKYKPWTAKEAVVQHLYMGRNPPLITEVRVLRQSDDDHLVLELGMNFLTADDMSAILAVKLRKRLGFGMWAKLHITGMHVEGKVLVGVKFLPTWPFIGRLRVCFVEPPYFQMTVKPMFTHGLDVTELPGIAGWLDKLLSIAFEQTLVEPNMLVVDVEKFVSPQQESWFKVNEKEPVAYAKVEVIEASEMKPSDLNGLADPYVKGQMGVYRFRTKIQRKTLTPKWHEEFKVPIITWESDNVLVIAVRDKDHFYDDILGDCTVNINEFRDGQRHDMWLSLKNMKMGRLRLAITILEDNGKGVDTTTRDQETMDFEERKISFEANETTDNSSFSPVPPEKSEKLADNYEPIDIDGQKETGVWVHHPGSEVSQRWEPRKGKSRRLDTEIHGEPNDSVGSGNSTVSGSLNNDSSSPDNNPEEKHRMRTVRKGLHKIGSVFHRSKRREGFSGSVDEEILSPHDNIRSENAKGMIAVKFVMDENISGFQTGKVQAEGGSTEGSGPESPASAKGNVKDMAKNIFKHAEKSARGLRHVLSCKSRKLKFKGESPTVPEREHESDSSDEESIAAQSPIDVIRTPVGSHAVVSGSNGSPGSGVNVVQIVPSNTNLDNEATAKITNEKDDPENACSPDRSSQEVVKSAEVEHDKEEMGAQIKEILSVCPTEESFK

SEQ ID NO: 55924 - protein, 103 aa, Zea mays subsp. mexicana
  Clone ID: UC-ZMROTEOSINTE094A06_FLI.pep
IAEKIKDWSNVVVAYEPVWAIGTGKVATPAQAQEVHASLRDWLKTNVSPEVAESTRIIYGGSVTAANCKELAAQPDVDGFLVGGASLKPEFIDIINAATVKSA

SEQ ID NO: 55925 - protein, 349 aa, Glycine max
  Clone ID: UC-GMFLMINSOY035E10_FLI.pep
QLLVSEGPLMQEVYSYPRTAWEKSPISHSTRIYSGESTVQGFAIEKEYHVELLGHDFNDRELIVRYKTDIDNKKIFYSDLNGFQMSRRETYDKIPLQGNYYPMPYLAFIQGSNGRRFSVHSRQSLGVTSLKNGWLEIMVDRRLVRDDGRGLGQGVMDNRVMNVVFHLTVEANVSATSNLVPTPFPYSPSLLSHRVGSHLNYPIHAFVSKKPQDMSMKPPPRSFSPLAAPLPCDLHIVNFKVPKPLKFLQQPPEGPRFGLILHRRHWDSSYCQKGRSQCTNLANGTMNLFSMFKNLTVSKAKATSLNLLHEDPEVMGFSEQFGDLAQEGHVAISPMEMQAYKLELRPQPQ

SEQ ID NO: 55926 - protein, 185 aa, Zea mays subsp. mexicana
  Clone ID: UC-ZMROTEOSINTE105E03_FLI.pep
YTATFQRLESRPNNPAQGVAPLGSTNPSVNINDNSLNLVSRPPPYDTDPRYARVQREGLVSRREKSINLAQEESLALRRNASSSGIEHLAAQKKRNSTENEGEYKVHRSESTKSLSAKAYSSSYAVVASEDEDVCPTCLEEYTPDNPKIITKCCHHFHLGCIYEWMERSDTCPICGKEMEFCESP

SEQ ID NO: 55927 - protein, 287 aa, Zea mays subsp. mexicana
  Clone ID: UC-ZMROTEOSINTE115G11_FLI.pep
SYLLPSVSQLAQAGDTATLKTLVLPGQRFAMTAPADKGKKAKTDADGGEENEQIDGALVFSIEKLQEIQDELEKVNEEASDKVMEVEQKYSEIRRPVYLKRGDIIKTIPDFWLTAFLSHPLLSELLTEEDQKIFKYLDSIDVDDSDVKAGYSIYLNFSENPYFEDTKLTKTYSFVDDGTTTIKASQIKWKDGMGPANGNGINKKGNKRPLVVESFFSWFSDTELKSLADGVQDEVAEIIKEDLWPNPLKYFNNEVEDEFEGDEEDDDDDDDDNLDGDDNDDDGDQEN

SEQ ID NO: 55928 - protein, 541 aa, Glycine max
  Clone ID: UC-GMFLMINSOY037G04_FLI.pep
PEALFHNRMMMMAHHNHHHRPLSSPFDNNGDGDGPTTYMSFTNHINLVSGASSVLGPAIDAGCGAAPPAPVRTLQPFDISSYTSSPTTTTTTFNFKPPSAGVMAASLGFPFTSAQWRELERQAMIYKYMMASVPVPHDLLTPSSRSSCMDGGFNLRLANSTDPEPGRCRRTDGKKWRCSRDVAPNHKYCERHMHRGRPRSRKPVEVNTNSTTTPTSVNNNNHQIKKARHECNNNPFATPDVTAAISNPTSRKNGSSPHFLGSTTTQPYLDSSLSLDNFGLKAASFDSVASVSANKEPRGLEWMLNGDPISLGASDSQWQSLMHNKDGMTSVSSCNTTESQYLNSLALYNSGLEQQNRRHPLFLNPLVVPMENLQPEKPRGFIDAWSNAESNANTNTTNKNSAASIGKLSLSSLDLSMGGAAVNEDVGNVNMGLGLMEPNGKTHTGTKISLSNWQNPAPWVASSLGGPLAEVLRSSTVTATTTTNEATSNTPSPATTTHAESPSGVLQKTLVSLSDSSNNSSPRVASSRANSEMALLRFQSN

SEQ ID NO: 55929 - protein, 108 aa, Zea mays
  Clone ID: UC-ZMFLMO17321D12_FLI.pep
QHQTVYSTVMMHSITISFLFLGKNKLQSQKILDEISGLERKRTQLIEENSRLKEQVTRMSRMETQLGADPEFVYEEGQSSESVTNTSYPRPSTDTDDCSDTSLRLGSK

SEQ ID NO: 55930 - protein, 366 aa, Glycine max; identical to SEQ ID NO: 37097
  Clone ID: UC-GMFLMINSOY046A09_FLI.pep

SEQ ID NO: 55931 - protein, 742 aa, Zea mays
  Clone ID: UC-ZMFLMO17223C09_FLI.pep
DCKKMALAWMVSKENSSHCAGGILADDQGLGKTVSTIALIQKQRMEQSKFMFVDSDRLKSEALNLDEDDEGEQTVSNEPKKDQGACSLSTSAGTSAELFVNQPNNVVNKMVETKAERKKKAKVSTSSASTSRSMTRPAAGTLVVCPASVLKQWSNELTDKVSESAKLSVLVYHGGARTKDPRELAKYDVVVTTYTIVANEVPKQMADDDADQKNSEEPSASNKRKPSANMQTKAKKKKKKLKDSNFDLDSGPIARVRWFRVVLDEAQTIKNFRTVVARACCGLRAKRRWCLSGTPIQNAIDDLFSYFRFLKYDPYCTYNSFCTMIKHPIARDAINGYKKLQAVLKVVLLRRTKETVINGKPIINLPPKTINLNKVDFTQEERSFYLMLEERSRQQFKAFAAAGTLKQNYANILLMLLRLRQACDHPILVKGNQSEYGGDGSIEMAKKLPKEVVIDLLAKLEVGSTLCGLCNDTPEDAIVTICGHVFCYQCIHERITTDENMCPAPNCSRTLGLELLFSSGALKICISGKSSSAVASSSSDNESSSISQSSFVSSKIQAAIDILNSIIVMDPLTESYTMESSRSGLGPVKAIVFSQWTGMLDLLELSLNINCIQYRRLDGTMSLNLREKNVKDFNTDPEVRVMIMSLKAGNLGLNMVSACHVILLDLWWNPYAEDQAVDRAHRIGQTRPVTVSRLTVKDTVEDRILALQEEKRTMVNSAFGDDKAGGHATRLTVEDLRYLFRI

SEQ ID NO: 55932 - protein, 418 aa, Glycine max
  Clone ID: 701100910_FLI.pep
QNKKDNFGSDAPHFQSGVLRTNCIDCLDRTNVAQYAYGLQALGRQLHAMGLTDVPKVDPDSSIAAALMDMYQSMGDALAQQYGGSAAHNTVFPERQGKWKATTQSREFLKSIKRYYSNAYTDGEKQDAINLFLGYFQPQEGKPALWELDSDYYLHVSGIGDDLIPEKCSEPNISPSGRGGMVFMPIPACRDDFSRIKLTSFDMLIEKTCSKIKNVRLCCEPDQRPGGVSGNSGVAPDAAEIQLKSPNWLFGQRKYEEGSSAAKVASRESGVEGSHANGFCDLNWLSSGNDMNEEDVFQRYLTMTSTNEANGWYGGSLLGDQDESSEIYKHYAELCQGPALELFQNDPEKEQHYADALSTSSYEIVNDAVVAAEMEAALKEYDQVGADLGIIPKSCKFYVDDPSWLTRWLTGDEKVPRI

SEQ ID NO: 55933 - protein, 320 aa, Zea mays
  Clone ID: UC-ZMFLMO17190B11_FLI.pep
SVCVEMDPKFPPPPPLNKTEPTTATTTTTSTAQQQQQQLDPKDYQQQQQQPAQHLQIQIDQSQQDGGGGGKEQQQLQVVAQPGERRQQALAPKRSSNKDRHTKVDGRGRRIRMPALCAARIFQLTRELGHKSDGETVQWLLQQAEPAIVAATGTGTIPASALASVAPSLPSPTSGLARPHHHMWAPSAGFSSPSFLNSAAAGTGDAAGIMQRMGIPAGFELPGASAAGATLGAGGHIGFAPMFAGHAAAMPGLELGLSQDGHIGVLAAQSISQFYHQVGAAAAGGGQMQHAHGHHHHHHQQQEDGEDDREDGESDDESGQ

SEQ ID NO: 55934 - protein, 628 aa, Zea mays
  Clone ID: UC-ZMFLMO170114G01_FLI.pep
GQINSEAEVIPEIDICKCEPWDLPGKSLIRSDDPEWFFLAPKDRKYPNGSRSNRATVAGYWKATGPDRNIKSKGDKSKQFTIGKKKTLVFHRGRAPKGERTGWIMHEYRTTEPQFESGKQGGYVLYRLFWKPEEKTERSSPKEMDRSGNSPTTIRSSRDNQEANEEANTPLNKKSLESALHDPIELPNSAETPAGPRKMCLADRNDNLVATAPVVSHIPFQGHAAGVAKVDPSAAASAHFVNPQNGNDDCNNFMSDFTPILPHENAFFTGTQQGAFGFDGNGIMNHPDALDAFLNQTLVDTDEHSSTTSKVQYDSDIPTEFANHWNMQDEHQDWWEKLDFEPYEPTLLPYDTTDLDVLSVDSGADSFNDLFNVTGITLRPQQLDSTVQPDCVFPDQGTALRRLKLQVVECGESITKDESEDEVSCVESPNYFDESVEFAAEKGVASYGDGADSTGIVIRSRYPAPSSSSESSFTQQGTAMRRLRLQLGLNEGTCPSSGDSSSCIVDESESQQKAEIEEDASTNLAGSVDNLPGNSHDDEQKDIPEHGVKSVLRLRKTSAESLKDVKQEDCLEPDGRAPMQRVGFQSSIIWLVLSVAVLLLLYCGVWMSMICILVRCFAHMGSWHQPDV

SEQ ID NO: 55935 - protein, 255 aa, Glycine max
  Clone ID: 701118818_FLI.pep
YMVMWGDLVCSIGRGEFKFPNWIAPDLRRLLSKILDPNPKTRISMAKIMESSWFKRGLEKPTITRNEDQELAPLDADGVFGACENGDPIEPAKDSKRCNNLNAFDIISYSSGFDLSGLFEETNRKKEARFTSDKPASIIISKLEEICIRLGLKVKKKDGGLFKLEGSKEGRKGSLGIDAEIFEITPVFHLVELKKSSGDTLEYQKLLKQEVRPALKDIVWNWQGEQPQQLQHGVVQKEEQPSYPGISDVAPPQTA

SEQ ID NO: 55936 - protein, 245 aa, Zea mays
  Clone ID: UC-ZMFLMO17280D02_FLI.pep
LFSAGQQANEAVQDQLSALSFSSLAVIFGAGLVTSLSPCTLSVLPLTLGYIGAFGSGKGRSEVVGNSIAFSLGLATTLAILGVAASFAGKAYGQVGQGLPVAASGLAIIMGLNLLEVLELQLPSFFSDFDPRAAAANLPSGVQAYLAGLTFALAASPCSTPVLATLLGYVATSRDPIIGGSLLLTYTTGYVAPLLIAASFAGALQSLLSFRRYSAWINPISGAFLLGGGVYTLLDRVFPATSMAM

SEQ ID NO: 55937 - protein, 115 aa, Zea mays
  Clone ID: UC-ZMFLMO17221B01_FLI.pep
PLLGAAFYCRGGCSLRMPQAWIKSRALPGFISRSCFTVPLNACCGSDAPYNCSPSILCGRPGSTVCPDPSNTSHGMVCTSPRRVTKLSSKECQTSSFRNLQGCGVQSFSTSPMYR

SEQ ID NO: 55938 - protein, 429 aa, Glycine max
  Clone ID: 701064850_FLI.pep
RSASVHKAPAAPFCFGFRVCVTFSFLLPISKMAEAEDAVRRRNAVAEYRKKLLQHKELESRVRSVRENLRASKKEFNKTEDDLKSLQSVGQIIGEVLRPLDNERLIVKASSGPRYVVGCRSKVDKEKLTSGTRVVLDMTTLTIMRALPREVDPVVYNMLHEDPGNISYSAVGGLSDQIRELRESIELPLMNPELFLRVGIKPPKGVLLYGPPGTGKTLLARAIASNIDANFLKVVSSAIIDKYIGESARLIREMFGYARDHQPCIIFMDEIDAIGGRRFSEGTSADREIQRTLMELLNQLDGFDQLGKVKMIMATNRPDVLDPALLRPGRLDRKIEIPLPNEQSRMEILKIHAAGIAKHGEIDYEAVVKLAEGFNGADLRNVCTEAGMAAIRAERDYVIHEDFMKAVRKLNEAKKLESSAHYSADFGKD

SEQ ID NO: 55939 - protein, 294 aa, Zea mays
  Clone ID: UC-ZMFLMO17132D12_FLI.pep
RAMALREIESTLPPGFRFYPSDEELVCHYLHKKVANERIAQGTLVEVDLHAREPWELPEVAKLTGTEWYFFSFRDRKYATGSRTNRATRTGYWKATGKDREVRSATTAAVVGMRKTLVFYRGRAPNGVKSGWVMHEFRLDTPHSPPREDWVLCRVFQKTKAADGDGDGGAQDGDSSSPPAAFTGPSRPRAVSEPPDHSAPPAGGGYYYGLAFGPRQVEVAQQQCYGGGGATVADHHHGFTRDSGGAAGFGATWGRGVAGGECGAGYLDMDGAFDVMMAGCFGGGDMDEFPQVWR

SEQ ID NO: 55940 - protein, 428 aa, Glycine max
  Clone ID: 701068213_FLI.pep
KEKKLHSEREMVGSGASDRSKEAVGMMALHDALRRVCLNSDWTYSVFWTIRPRPRVRGGNGCKVGDDSGSLMLMWEDGFCQGRGSGCLEDIDGEDPVRKAFSKMSIQLYNYGEGLMGKVASDKCHKWVFKEPTECEPNISNYWQSSFDALPPEWTDQFESGIQTIAVIQAGHGLLQLGSCKIIPEDLRFVLRMRHTFESLGYQSGFYLSQLFSSTRNTSSSTSVPSKPSTIPIRPPPPLFNWGQRPLSSATSMLSSPNFQQHEARLGFPKDEAHMFLMPHASSEGARIEDMMGEHENDIKWPNGLSFFNALTGRTDDAKLLFNPESLGNKPGDQNQHHTIGQNPNSDGSNMQNASGGTNPNEFLSLDSHQDDARKMDKFKRSFTLPSRVASSTSSTSMDQHQQQQQQGVEYTNSEGGMYPDVMETFLE

SEQ ID NO: 55941 - protein, 331 aa, Zea mays
  Clone ID: UC-ZMFLMO17057B11_FLI.pep
ISLPPAPSAPDSHRARIGACACGSWLLLALLAVSRGDQQSGRGSGARRPRDTMNMFDGMESAGYGGGAGPMGGVVLSRDPKPRLRWTPDLHERFVEAVTKLGGADKATPKSVLRLMGMKGLTLYHLKSHLQKYRLGKQTKKDTGLDAGRVAFAAQGINFSTPVPPPSIPSTASDNTGETPLADALKYQIEVQRKLHEQLEVQKKLQMRIEAQGKYLQTILEKAQSNLSYHATGAANLEATRSQLTDFNLALSGFMDNVTQACEQNNGELVKAMSEDGLRANNLDFQPYHGVHDGDDVKCATDEGLLLLDLNIRGGYGHRISTDLKMNQHMR

SEQ ID NO: 55942 - protein, 403 aa, Glycine max
  Clone ID: 701068367_FLI.pep
VLLDDFAIKSSHSLFFNSLKSRGFDLQFHLADDPKIALQRYGQYLYDALILFSPTIERFGGSIDAAAILDFVDSGHDLIVAADSNASDLIREIATECGVDFDEDPAAVVVDHSGYAVSATEGDHTLIASDDFIKSDVILGSKKIEAPVLFQGIGHSLNPTNSLVLKVLSASPSAFSANPKSKLTSPPSLTGTSISLVSVIQARNNARILISGSLSLFSNRFFTSGVQKAGSPTKHEKSGNEQFLNELSKWIFHERGHLKAVHVQHHKVGEANEPAIYRINDNLEYSVEVYEWSGTTWEPYVADDVQVQFYMMSPYVLKTLSTDGKGHYFTSFKVPDVYGVFQFKVEYEKLGYTSLSLSKQIPVRPFRHNEYERFIPAAYPYYGAAFSMMAGFFIFTAVHLYSK

SEQ ID NO: 55943 - protein, 386 aa, Zea mays
  Clone ID: UC-ZMFLMO17240H02_FLI.pep
RPDNWRQLLGINGGDLMQVVIACGKAVAENDVFATELLISELGHLVSVSGDPMQRLGAYMLEGIVARLSSSGSMLYKSLKCKEPTSSELMSYMHLLYEICPFYKFGYMSANGAIAEAIKGENFVHIIDFQIAQGSQWVTLLQALAARPGGPPYIRITGIDDSNSAYARGGGLDIVGRTLCDVANSCGLPFEFNAVPAASHEVELQHLAIRHGEIIAVNFAYQLHHVPDESVSTENHRDRIIRMIKSINPRVVTLVEQESNTNTAPFFPRYMETLNYYTAMFESIDVALPRDDRRRMSAEQHCVARDIVNLIACEGAERVERHELFGKWKSRFAMAGFRPYPLSSVVNNTINTLLHTYNSYYRLEERDGVLYLGWKNRVLVVSSAWC

SEQ ID NO: 55944 - protein, 270 aa, Glycine max
  Clone ID: 701105670_FLI.pep
DEWHLRRQLLPFHTVVLLPNKRNKKQIHTLHFRFLSISPFPLERFLSVCLARAKTMNIFRLAGDMTHLLSILVLLLKIYATKSCSGISRKTQELYAIVFVARYLDLFTDFISVYNTFMKVVFIASSLAIVWCMRFHPMVRRSYDRELDTFRHYFVVGASFALALILHEKFTVQEIFWAFSIYLEAVAILPQLVLLQRSGNVDNLTGQYIFFLGAYRAFYILNWIYRYLTEPHFTRWIACVSGVVQTALYADFFYYYFISWKNNSKLKLPA

SEQ ID NO: 55945 - protein, 460 aa, Zea mays
  Clone ID: UC-ZMFLMO17215F02_FLI.pep
LGSISMGASSTCPCHHFSSSSILTKRAIAFVLYALVPLALLHYLLSLPPRLPSPPTTGAATSPSRPQQAEEAPAARCDYSDGEWVRTAAGPRYNGSSCGKTIKAGQNCEAHGRPDTGYIYWRWRPRGCALPPFDPEEFLSAVRGRHVAFVGDSLARNQCESLVCLLASAFPAQLVRGAGGGDGDGDGDELRKFRRWAFPSHNATVSVFWSPFLVNGTERPKSPAAAGGLDHNRIYFDQPDERWAAAVPGFDVVVLSAGQWYLNSAMFYDRGAVIGCHRCPEPNRTETGFFGVFRLAVRNALREVISRVAATSSPARPRLAVVTTFSPAHFQGDWDSPTACVRTQPYARGEREMEYMDLEMLRAGVEEVAAAGADASERGAGLAVEALQVTRLAAMRPDGHPGLYTRAFPFAEGAKDRMPNDCVHWCLPGPIDTWNEILLQLVKGWAVGVGAIADTSSPSP

SEQ ID NO: 55946 - protein, 651 aa, Glycine max; identical to SEQ ID NO: 43825
  Clone ID: 701107882_FLI.pep

SEQ ID NO: 55947 - protein, 337 aa, Zea mays
  Clone ID: UC-ZMFLMO17248F03_FLI.pep
RGEGNPGPGRVVGRGSAAEEMEEREKLVCLAKLAEQAERYDDNDYEEQANLYSEETGNRYNEDPADSYQEEQENAFSGGINQQDNLQVNNVDDNKWPGWPGESVFRILVPAQKVGAIIGRKGEFIKKMCEETKARIKILDGPPGVPERAVMISAKDEPDAPLSPAMDGLLRVHKRITDSSDGESSQPQRSAGNIGPTRLLVPSSQAGSLIGKQGATIKSIQDSSKSIVRIVENVPPVALNDDRVVEIQGEPLGVQEAVELISSHLRKFLVDRSVLPLFEAHMKMHGMPREQPVPPPQHWGPPQTWIRPPNIPPGGPGFGGNPQFMHPRPQDSYYPFS

SEQ ID NO: 55948 - protein, 335 aa, Zea mays
  Clone ID: UC-ZMFLMO17310C06_FLI.pep
HSLFCSVSNPPARPFSCLSLLQEASGYFFCLEDRALLCRDCDVAIHTVNSFVSVHQRFLLTGVQVGLDPADPVPPIAEKHVNAAGGSVNQPVRHQPKRSPTVQFSVEGSASVPTKNVTNGDCSRQNFVPTARGEVVDWTMNNSTIRSVESPPKYISEESPTLLQSSQTTTVFSNQINGNSDGAYHLSFSGGNVTDSLPDWPVDEFFSNSEYGPNFGFSENGSSKGDNAKLGGAGGSPQCRLAEGSVAEELLGQVPGLITDEYMSRVPENSWTVPEVPSPPTASGLNWHGNLCFPAYDSTMLFLKLPPFRTPKVTSPYLPVSSAGEESTERRQEDH

SEQ ID NO: 55949 - protein, 301 aa, Glycine max
  Clone ID: 701108161_FLI.pep
RRKQSLYYIITFTFQYLLFLPVSHTQQLKKKMVDNDSLSEFLASAVDAAQKAGEIIRKGFYQTKNVEHKGQVDLVTETDKACEELIFNHLKQLYPTHKFIGEETTAAYGTTELTDEPTWIVDPLDGTTNFVHGFPFVCVSIGLTIGKTPTIGVVYNPIINELFTGIHGKGAFLNGNPIKVSSQTELISSLLATEAGTKRDKETVDASTDRIKSLLFKVRSLRMSGSCALNLCGIACGRLDVFFELGFGGPWDVAGGAVIVREAGGVVFDPSGADFDITSQRVAASNPFLKDALVDTLRQMV

SEQ ID NO: 55950 - protein, 265 aa, Zea mays
  Clone ID: UC-ZMFLMO17247D08_FLI.pep
CSQFLFLLFLSLPLIIYATTKKQPNILKIIMSDQTFRSERHKDRASRRRRRRRLWLGSPARLGAAGGLLRHSEQGLPARRARRPRQQPPVDAPDMEAVVAFGEDPDMLPCLEVREADRACRVGSIDPQPRRVDQDRHGSERLPPQPALDKPRHLVRFRTHHHPARAPQRAPDDGVEPESADQRAQEDSQDHDHVRVEVASVCGRGSIYWLAWTRGMPGERGVQQCPSWVLHVLVHLCSCTGCILFKPALRLCWMAVNISSSSSQL

SEQ ID NO: 55951 - protein, 580 aa, Zea mays
  Clone ID: UC-ZMFLMO17286G07_FLI.pep
HIRIAPTQQQAQMASSPLQKQFYSHTVTGYNEFQAQMRNGRPRMDSKARSQLLPRYWPRITDQELQHLSSDSNSVITPLFEKMLSASDAGRIGRLVLPKKCAEAYFPPISQPEGLPLKVQDAGGKEWIFQFRFWPNNNSRMYVLEGVTPCIQSMQLQAGDTVTFSRIDPEGKLIMGFRKATNNSFEQEQATKPANGAPATSEVNGKVSAPDCSPNAAVSRQNMVKTETKSSSPVEQATASKMDKDRLTQKEGPGIASSSPGSLKRKTTNLGQKNKRLRMDNEESMELKITWEEAQELLRPPPKVPSIVIVDGHEFEEYEEPPILGRKTYFVADKSGLNHQWVQCEDCSKWRKLPIDALLPSKWTCFDNKWDPERSSCEPAQEISLEELAELIPIKPGKKPRLKIESDAIDASDGLDTLANLAILGEGEALPSQPTTKHPRHRPGCSCIVCIQPPSGKGPKHKQTCTCNVCMTVRRRFRTLMLRREKKVTRDSSRKKETGQSSEKVTQQAVSGPPGANGSTTSSPQKADGNADAPENMAVDHKVASSPVKNHIDLNIQPERDDEQSPKSGAAGLLTRDNPT

SEQ ID NO: 55952 - protein, 162 aa, Glycine max
  Clone ID: 701117446_FLI.pep
VDEAAGKLRAKGIEVLAVVCHVSNAQQRKNLIDKTLQDAAPHLKKGSSVVLIASLVAYNPPPTMAMYGVTKTAVLGLTKAMASEMGPNTRVNCVVPGIVPTHFVALYTSNDATREELERKALLGRLGTTEDMAAATAFLASDDASYITGENLVVSGGMPSRL

SEQ ID NO: 55953 - protein, 221 aa, Glycine max
  Clone ID: 701118503_FLI.pep
GISYVLLLNIVCKCSNKVISLPVSSSFCRQAWQKLGAMPPEDAMQKYIDIVTEIYPTWLDGSSLRNKSGDSGGHGSEAKGPMGPVFSTFVYEEEYGSDSQMEAIHGFAREGDMANLLKCIENGVSMNLKDSEGRTPLHWAVDRGHLNVTELLVGKNADVNAKDNDGQTPLHYAVTCEREAIAEYLVKHNADIYSKDNDGSSPRDICESNWPCMQHVGEEVN

SEQ ID NO: 55954 - protein, 447 aa, Zea mays
  Clone ID: UC-ZMFLMO17288E11_FLI.pep
SPPMSDPFYPYYRGAFPGGDGAQPPPRYSDFEVDLIAARYAGTLLPYPSSADVGAFDSYVGARRSAEVLYHQSFMGSHSTVGQNEALYSSNTMAKRPRLESSLPIYPQRPGQKDCAFYMSTGTCKYGETCKFDHPQRVPEGGVPNWKEAPNVEDSYPERPGEPDCPYLLNNRCKFKSKCKFNHPKDMVNALGTGTNNESLIADSAVLPVRPSEPICVFYAKTGKCKFGAICKFNHPKDIKTSPLIAKETIYTATTDAADAPTEACNAKGLPIRQGEVDCSFYMKTGSCKYGSICRFNHPDRPGPAADIAFMVPLVQATLPSSAPIVPAVVEPLPMIYPQRPGETVCDFYMKTGSCKYSQKCKFHHPISRFAPHSKENGDPQQPATLASLPRREDAEACAFYMRSGMCRFGAHCKFDHPPREEAISELQAAGKEGIEGPSLVQRDHDV

SEQ ID NO: 55955 - protein, 363 aa, Glycine max
  Clone ID: 701120519_FLI.pep
GLCLILEMSLLSDLINLNLSDTTEKVIAEYIWIGGSGMDLRSKARTLPGPVSDPSELPKWNYDGSSTGQAPGEDSEVILYPQAIFRDPFRRGNNILVICDAYTPAGEPIPTNKRHAAAKVFSHPDVVAEVPWYGIEQEYTLLQKDIQWPLGWPVGGFPGPQGPYYCGVGADKAFGRDIVDAHYKACIYAGINISGINGEVMPGQWEFQVGPSVGISAGDEIWAARYILERITEIAGVVVSFDPKPIKGDWNGAGAHTNYSTKSMREDGGYEVIKAAIDKLGKKHKEHIAAYGEGNERRLTGRHETADINTFLWGVANRGASVRVGRDTEKAGKGYFEDRRPASNMDPYVVTSMIADTTILWKP

SEQ ID NO: 55956 - protein, 314 aa, Zea mays
  Clone ID: UC-ZMFLMO17262H09_FLI.pep
SVVKYIRKRTPAKIFLWFEEYIEELVQTNATGAKKKLCEGTFLNPGSWGAALLAAGTTLSSAKHILDGQGNLAYALVRPPGHHAQPDHADGYCFLNNAGLAVQLALDSGRAKVAVVDIDVHYGNGTAEGFYRTDTVLTMSLHMMHGSWGPSHPQSGSVDEIGEGKGLGYNLNIPLPNGSGDAGYEYAMNELVVPSIDKFQPQLLFLVVGQDSSAFDPNGRQCLTMEGYRKIGQIMRRLADRHCNGQILVVQEGGYHITYSAYCLHATLEGVLDLEAPLLDDPIAYYPEDDKYTMKVVDMIKSYWKESVPFLKEI

SEQ ID NO: 55957 - protein, 218 aa, Glycine max
  Clone ID: 701120851_FLI.pep
GSVLPTSPSGGSTDSLGASRSTPSVSGINTSNFASRSGYALLDPTWAAQDNTSTAIGNVVALLHSFFSNLPQEWLEGTNVIIKQLRPVTSVAMLRIAFRVMGPLLPKLANAHALFNKTLSSLLTILVDVFGKNSQTSIAVDASDIADIIDFLHHVVHYEGQGGPVQASSKPRPEVLALIGRASESLRPDIQHLLSHLNPDVNSSVYAAFHPKLAQNPT

SEQ ID NO: 55958 - protein, 256 aa, Zea mays
  Clone ID: UC-ZMFLMO17218B08_FLI.pep
EILAEKYKDRLESSYRGLIHEVFSKVLRGLSSAKVTRPSTFRSCLDGYAVKSSLKAEDGLLYPLEKGFFFLPKPPTLIPHEEIEYVEFERHGAGGASISSHYFDLLVKLTNDQELLFRNIQRNEYHNLFNFISGKHLKILNLGDGQGRTSGVTAVLQSTDDDSVDPHLERIKNQAGNEESDEEDEDFVADKDDSGSPTDDSDAEGSDASMSGGEKEKPSKKEASSSKPPVKKKQKSGPDEGSQKKEAKEEERSQCP

SEQ ID NO: 55959 - protein, 420 aa, Glycine max; identical to SEQ ID NO: 45878
  Clone ID: 701123183_FLI.pep

SEQ ID NO: 55960 - protein, 121 aa, Zea mays
  Clone ID: UC-ZMFLMO17269F10_FLI.pep
PHLIDTILEQKNNVCTLHVFLLGPIMYCCQAKTFVLVMVALAEQFTSPSPINHPNLLRRRSAAYCDSGTSSESGVESGVATGVGMGDERQTGHDALRRSHASRHVRWNLCLHSGITRSISP

SEQ ID NO: 55961 - protein, 492 aa, Glycine max
  Clone ID: 701125903_FLI.pep
LKSPWSQRKRKHALSPQQWKSMFAEDGRFCDGGNKFLKRVRSGGVDPSIRAEVWPFLLGVYDLDSTKDERDVKRTQNRKQYEKLRRQCQKLLKQSNERNKLNEVGEISYEEDGGSLSHDSGSASSDDAASARESLSCEDRSPDVEHSDNPSSALLEGDDVPNANNTDVSTLDTDFSDSDSSEGPEVIQTVPSDDVQEHNDLDKASEEVSSPSKAKIPSKLPTSEDFSTWQRIIRLDAVRANAEWKAYYPSQAAVSDSRACRAAEAVGLKDYGHLEAGRIFHAARLVAILEAYALYDSEIGYCQGMSDLLSPIISVISEDHEAFWCFVGFMKKARQNFRLDEVGIRRQLDIVAKIIKFKDAHLFRHLEKLQAEDCFFVYRMVVVMFRRELTFEQTLCLWEVMWADQAAIRAGIGKSAWSRIRQRAPPTEDLLLYAISASVLQKRKLIIEKYSSMDEIIKECNSMSGHLDVWKLLDDAHNLVVTLHDKIETSLS

SEQ ID NO: 55962 - protein, 168 aa, Zea mays
  Clone ID: UC-ZMFLMO17297E08_FLI.pep
ERRTHKTSAEFFCPSTDLRPLATDPSCQLNVLGHDGHALGMDRAQIGIFEETNQVGLCCLLQSKHGMALEAQIRLEILSNLPDKPLERQLPNQQLSALLVLADLTKSNSPWAVTVRLLHSSSCGCRLPGCLCSELLPRSLSSSGLASGLLGTRHLANDVLNRRRCRSI

SEQ ID NO: 55963 - protein, 150 aa, Glycine max
  Clone ID: 701126043_FLI.pep
TSLTPYLLSLKSRSSLTIIPYVWLVRSQIPDVPLKLRKVVVKVCDVVTRRAARLAAAGIVGILKKIGRDGSGGIAGGRRSDMKMKRTVVAIEGGLYSSYTLFRDYLHEALNDILGEDIARHVILKVTEDGSGVGAALLAASHSSYDVDTV

SEQ ID NO: 55964 - protein, 246 aa, Zea mays
  Clone ID: UC-ZMFLMO17335F08_FLI.pep
RGPSNAFYCFAHDYSAHFFCVASFLWTTTISFTLHRTVVKHKTDVEEFGSIFHLYVWGTSLSTTVLRSIGSDYGRPGTWCWIQQGSMAKVLHLITFYLPLWGAILYNGFTYYEVNRMLNNATQMAAGISDQSNQSDIRAGRKAFNRWGYYPLILIGSWAFATINRLYDFANPGHRIVWLSFLDVGFAGLMGLFNSIAYGLNSSVRRAISERIDTFLPERIKRSLPALSRLRSQQENELTSLIVEGN

SEQ ID NO: 55965 - protein, 69 aa, Glycine max
  Clone ID: 701127927_FLI.pep
GKVPKHLLMIYMALMSYFLNCFTPSTSCQVSDYAEGSSQLKSPSSEKQKSRGAPLVVSYFPINHYPSRL

SEQ ID NO: 55966 - protein, 235 aa, Zea mays
  Clone ID: UC-ZMFLMO17270B10_FLI.pep
ARSRRGRRHQTSRWWSDPIRSGWLDGRGHTSRGTVAGDVAGLAAVVAGAVASTPAAAEPPSATAATAWAVPGHVAGLAAVVAAATTTAAATAVAAAAAGAVPGHVARLAALEAATASSSSSVAAAPVAASAIAASAVGARAVPCHVAGLAALVARAGTAPAAGSPAAAPATTVAATAAARSATAAGAVAAAASSSASAAPDEGSVGAGHVDGLSAAVVTLRDGKLHLLALRERAE

SEQ ID NO: 55967 - protein, 274 aa, Glycine max
  Clone ID: 701128462_FLI.pep
CCGQNHCRILFFKTLDRLECTGNGILCPHGLYLFLSFILPDLPRGRKPIDWNTRMKIAAGAARGLEYLHNKMKPPVIYRDLKCSNILLGEGYHSKLSDFGLAKVGPSGDKTHVSTRVMGTYGYCAPDYAMTGQLTFKSDIYSFGVVLLEIITGRKAIDNTKPAKEQNLVAWAKPLFKNRKRFCEMVDPLLEGQYPIRGLYQALAIAAMCVQEQPNMRPETTDVVTALNYLASQKYDPQVHSIQSCRKGVASPRVRSDGHRHFVSNGSETDSSGD

SEQ ID NO: 55968 - protein, 289 aa, Zea mays
  Clone ID: UC-ZMFLMO17309D06_FLI.pep
LKLILVSEPLRDKLRVSLSCRLVCHPPSQRHLDASKEKSVSHIFASNFKCSPVVLLFEKRKVRSSGYLVNDSLTVECTVTMLRDLDATDKEQHLPVLPPSDLHQHLGELLQTSDGADVTFRVSGESFAAHKIFLAARSPVFKAEFFGGMQEGSSASVEIRDMEAAVFRAMLHFIYTDMAPELDGDQEPEAAAAMAQHLLVAADRYGLNRLKLMCECKLSGGIDIGTAAATLAFAEKHDCPLLKAKCLEFVTKSPETLDAVLATDGYEHLVASCPLVLAELLRAARGRKI

SEQ ID NO: 55969 - protein, 114 aa, Glycine max
  Clone ID: 701128474_FLI.pep
HPREIMTEVLKALQELNVCWKKIGHYNMKCRWVAGIPGHHEGMVNNNVHSNHYFGDDSNIIENDAVSTSNVVKFEVQLYKTREEKYLLDLQRVQGPQFLFLDLCAAFLAQLRVL

SEQ ID NO: 55970 - protein, 433 aa, Zea mays
  Clone ID: UC-ZMFLMO17286E10_FLI.pep
PLHVAAGYNNTEIVKFLLNQQGTETVDLEAKNMYGETPLHMAVKNSSCGSTNLLLEHGAHIEAKANNGMTPLHLAVWHAIQAGDFSTVSVLLSYNPDCFVKDDEGKMPLNHIPGGAGSEKLLKLLTHHMEEQRKRKALMSCLEGKAMSEFEEAMSQIVGLQELKMQLRRWARGMFFDEKRRAMGLGIAKRRAPHMAFLGNPGTGKTMVARILGKLLHMVGILPTDKVTEVQRTDLVGEFVGHTGPKTRRKIHDAEGGILFVDEAYRLIPMQKSDDKDYGLEALEEIMSVMDSGKIVVVFAGYCEPMKRVIASNDGFCRRVTKFFYFDDFSTTELAEILHMKMKSPSDCSLLYGFKLHPSCSIEAIGELIAREITEEQRKQMNGGLVDTLLINARENLDSRLDFNCNDADTMITITLEDLEAGLRQISRQRHLQ

SEQ ID NO: 55971 - protein, 222 aa, Glycine max
  Clone ID: 701128634_FLI.pep
QFSGSAFGTSKDRSCTFNGPANLRAGTNKIALLSVAVGLPNVGFHFETWKAGITGVLLNGLDHGQKDLTWQKWSYQIGLRGEAMNLVAPNGVSSVDWEKDSLAVRSQSQLKWHKAYFNAPEGVEPLALDLSSMGKGQVWINGQSIGRYWMVYAKGSCSSCNYAGTYRPAKCQLGCGQPTQRWYHVPRSWLRPTKNLIVVFEELGGNPWKIALVKRTTHTPAN

SEQ ID NO: 55972 - protein, 180 aa, Zea mays
  Clone ID: UC-ZMFLMO17312G01_FLI.pep
SAVQAGRPREEPAPVNGVGKTTGMEYPERPGQPLCEYYAKNGTCKFGSNCKFDHPRESGFVPVALNNSGFPLRLGEKECSYYMKTGHCKFGGTCKFHHPELGFLTETPGMYPPVQPSPISSPHPYPHHSNWQMGRPAVVPGSFLPGPYPPMMLPPTVMPMQGWNPYVVSFYYLSFCTLLL

SEQ ID NO: 55973 - protein, 474 aa, Glycine max
  Clone ID: 701132665_FLI.pep
KDAITNHQSEGSLKSARSTEGSLSNLESEAVVNDGCISNSKGNDLHSVQNQSQSQSLSNIAKTFIGNEMFDGKTVNVVDGLKLYDDLFDSTEVANLVSLVNDLRVSGKKGQLQGSQAYIVSRRPMKGHGREMIQLGVRIADAPAEGENMTGASKDMNVESIPSLFQDIIERMVSSQVMTVKPDCCIVDFYNEGDHSQPHSWPSWYGRPVYVLFLTECEMTFGRVIASEHPGDYRGSIKLSLVPGSLLVMQGKSSDFAKHALPSTRKQRILVTFTKSQPRKSLSSDAQQLASAVASSHWGPPPSRSPNHVRHHVGPKHYATLPTTGVLPAPPIRPQMAAPVGMQPLFVAAPVVPPMPFSAPVPIPAGSTGWTAAPPPRHPPPRVPAPGTGVFLPPSGSGNSSQQLPASTLAEVNPSTETPTMPEKENGKINHNSTSASPKGKVQKQECNGHADGTQVEPALETRLDSNDKAAPSH

SEQ ID NO: 55974 - protein, 457 aa, Zea mays
  Clone ID: UC-ZMFLB73184G12_FLI.pep
IRRPPPRSVRSAPNRRCSGRNPSPISTCFLAMGAGRVCRGGPFSASPAAGAAAGRPFPPLTASSSSSPSSAPSETASTSVTKTVNGSHHFKIAGYSLSKGIGVGKFIASESFNVGGFDWAIYFYPDGKSGEDGAAYVSLFIALASEGTDVRALFELTLVDQSGKGQDKVHTHFGRSLESGPYTLKYRGSMWGYKRFFKRVALETSDYLKDDCLLVNCTVGVVQSHTEGPKIYTIPVPRSNMALHIGQLLTSGKRTDIAFEVDGEMFPAHKVILSARSPVFRAQLFGPMKDKDMKCIKIEDMEAPVFKALLHFMYWDELPDLEELTGVNTTWVSTLMAQHLLAAADRYALERLKLLCELKLCEDVAINTVANTLALAEQHHCYQLKTVCLKFVALPENLKAVMQTDGFDYLQQSCPSLLTELLEYVAKIGEHSVSPCLYSTEVLDGGDANGRRVKPRI

SEQ ID NO: 55975 - protein, 313 aa, Glycine max
  Clone ID: 701133177_FLI.pep
LIDKNGMLKIADFGLANFYGPDRHRPLTSRVVTLWYRAPELLLGDTDYGVGVDLWSAGCLLAEMFTGIPIMPGRNEVEQLHKIFRLCGTPSEEYWRKLKLSTTFRPPSSLGLLCTLLALDPAFRGSASKALKNQFFITSPLACDLSGLPVIVREDDELVQANEQIKYMNSKIRRSRTYLERRKNSTSKRPIEHTVSSKQELIRNAKPETFVPIEDTDSTSTSSSVNPGGAKDQSPFFLSPFGALDQKLSPKTHHHVNGGEKNIKNLPPLPKSKPNATKKDDIKYRPDHFFRSASTREFRYLKREERLLLEIDD

SEQ ID NO: 55976 - protein, 99 aa, Zea mays
  Clone ID: UC-ZMFLB73198H12_FLI.pep
KKRNKAKKRRPICARLPATELLSFFFNLCCLLLGEEHLEEHVVPDVDGSREAPVDAVVVELHLLVGPVPVAAGVAVGPHQHRRRGVHEHQAPPLLGGGL

SEQ ID NO: 55977 - protein, 296 aa, Zea mays
  Clone ID: UC-ZMFLB73232A09_FLI.pep
ARGKEFKKPEKPINHKGTKEQVSMKPRSPPREGKHLEKPCEIVDVEQYEAVAEALRKSDEAADAKGASLKDVTRNGADEVAGQEQGREQEPVDVEDDDDGVRCAVCASTDGDPSDPIVFCDGCDLMVHASCYGNPLARAIPDGDWFCSPCVAGRGKPAAARRRSCCLCPAGGGAMKRTTEGKWAHISCALLVPEVFFRDPDGRDGIDCSRVPAHRFARGCYVCGGNNNGCALECSQPKCGLGFHVSCGLGAGLCIEYQEGKGGGGAIVAGFCREHTELWEKQQLTGKYKIVARGQE

SEQ ID NO: 55978 - protein, 375 aa, Glycine max; identical to SEQ ID NO: 45592
  Clone ID: 701098073_FLI.pep

SEQ ID NO: 55979 - protein, 234 aa, Zea mays
  Clone ID: UC-ZMFLB73073B12_FLI.pep
VTPIPSQEPSRTGTPLGSRTPTRSPNCSVPSTPVGGRSIASPPGEDCTDDGPFFHRKCGVHANELSDTETRLKTRQEIAALGIQLGKMNIATWASKEELELVSAAPSIADLERIRKEYAARAASYEEAENTKHTARFKKEEVKIEAWEGRQRAKIEYEMRRIEEFAERMRSEAMEKMAEKLEMTRRIAEEKRASANAKMNQQAAIAVQKAEKIRQTGRVPGSSILRCGGCFCGP

SEQ ID NO: 55980 - protein, 288 aa, Zea mays
  Clone ID: UC-ZMFLB73181H02_FLI.pep
PRRSRLPASDPRAAPTKFQAGTPPRPLVHRGYRFPFLDLNFVPRSADAARTGGLISWPMSLPGRKAPAGASGVRRWLVTVVVSVLALVLTLVVISLSQGSSLPRTSLHGYLPIGATDLGKRSSSEHADENRSGAAIGEELSQGERESLVEQNGQGGDVNSSQTSAASGKMDDNEPDPASSSDTTTIPDEDTSNESQKAEQDNCDLYRGEWVTDSSGPLYTNNSCPIITQMQNCQGNGRPDKDYENWRWKPEQCNLPRFDARKFLELMRGRCPTKPRQQKDAQVALQIN

SEQ ID NO: 55981 - protein, 375 aa, Glycine max; identical to SEQ ID NO: 45592
  Clone ID: 701102435_FLI.pep

SEQ ID NO: 55982 - protein, 282 aa, Zea mays
  Clone ID: UC-ZMFLB73045C09_FLI.pep
AASSTFLSSAPSAMWRATRRSPPFLRWLSSDAASSKAPRQRVAALWGNGDYGRLGLGSLESRWSPTVCPFFLARAADPPASLACGGAHTLFLTQNGRVFATGLNDFGQLGIGTSVTHMLEPVEISGFHERVVEVSAGNHHSCAVTADGKLFVWGRNSGGQLGLGKGKVVSTPTKVDCLTDLRVKTVALGSEHSIAVTEEGEVLSWGAAGSGRLGHGRQSSILGFSLTSTYDNIYFIKIFSKKHMLELNCVCTLCQFIVIYLEDIRKFLTIKDENFSTASWHA

SEQ ID NO: 55983 - protein, 314 aa, Zea mays
  Clone ID: UC-ZMFLB73199E11_FLI.pep
RAVWSLQTCSVCSQLFQQQTLLKSLPPPKQVPTLKATPPIIRCWAHAAQMLLIRIFVAYLLRSISDEVPSSSSAAAAAPTSASSASSSSSCLCRNVLSSPCTGRSTEQSRVPAHVLAPAGAWLSASEEEEEEEDVTQLSAERWRIGEGEVEQQEVEDRHPVPVSTAEASSESSASAPVAGEPSMWSARASCARRSTDCMYLPCASILSWRCRCTSICICSCRFLFASLCTRAAMLPEESPCRSATEPSSYSSSWLSEEDDRSLAPPPLSPSPTGDAVPWLTASRYLWRWLLRWYSVSPDTAIALITDLGVALSA

SEQ ID NO: 55984 - protein, 584 aa, Glycine max
  Clone ID: 701102705_FLI.pep
EEKKKVQNPIHFSFRKIVIAMSLSTVRQRRSEPSDPSPSEPYTKLDKPEKAEEKDEGLGWVFPFVALGLLRYMSATSNIIHDCDEVFNYWEPLHFLLYKSGFQTWEYSSQFALRSYLYLLFHEIVGRPASWLFSEDKVRVFYAVRFFLGLLSVLTDTVLVVALSRKYGKRLATYALAMLCLTSGCFFASTSFLPSSFSMYAISLASGLFLLDKLAAAISVAVIGVILGWPFSILAFLPVTLYSLSRKFKQAFIAAAVTSILLLALSIVMDFYYYGKWTSSVLNLLIYNVAGGGESHLYGTEGPLYYLRNGFNNFNFCFVLALLFLGILPIAKKKYAPDLLIVISPIYIWLGFMSLQPHKEERFLYPVYPLICVAASAVIESFPDLFRSKYNPYDRSIIVTVAKVMRPVVLSLILYASHARTFSLINGYSAPLEVYKILEHHDAENNSVLCVGSEWHRFPSSFFIPDYVGQVRWIDDGFRGLLPIPFNSTLGGTASAPPYFNNKNMASDKQYLHDVDACTFLVELQLERPYLTRGSDLSTWEPIAALPYLDRELSPALYRSFFIPYLWQEKNVFGMYKLLKRRTT

SEQ ID NO: 55985 - protein, 469 aa, Glycine max
  Clone ID: 701065633_FLI.pep
RKRSRNQIMCSLLWSSIALCVAFLLLELGVVHPSPSHHRITRLPGQPHVQFHQFSGYVTVDDKNQRALFFYFAEAEKDALSKPLVLWLNGGPGCSSLGVGAFSENGPFRPKGKGLVRNQFSWNREANMLYLETPIGVGFSYSTDTSSYEGVNDKITARDNLVFLQSWFIKFPEYRNRSLFIVGESYAGHYVPQLAELMLQFNKKEKLFNLKGIALGNPVLEFATDFNSRAEFFWSHGLISDTTYKMFTSVCNYSTYVREYYNGAVSPICSSVMSQVTTETSRFVDKYDVTLDVCLSSVFSQTKVLNPQQVTETIDVCVEDETVNYLNRKDVQSAMHAHLVGVQRWSACSNVLDYELRDLEIPTITVVGKLVKEGIPVLVYSGDQDSVIPLTGSRTLVHKLAKELGLNTTVPYRVWFEKQQVGGWTQVYGNILSFATIRGASHEAPFSQPERSLVLFKSFLEGGPLPQEF

SEQ ID NO: 55986 - protein, 283 aa, Zea mays
  Clone ID: UC-ZMFLB73019G10_FLI.pep
RFPAPPRPRRRLLPTPARRSRNRRIHMMYHAKNFSVPFAPQRAQDNEHASNIGGIGGPNISNPANPVGSGKQRLRWTSDLHNRFVDAIAQLGGPDRATPKGVLTVMGVPGITIYHVKSHLQKYRLAKYIPDSPAEGSKDEKKDSSDSLSNTDSAPGLQINEALKMQMEVQKRLHEQLEVQRQLQLRIEAQGRYLQMIIEEQQKLGGSIKASEDQKLSDSPPSLDDYPESMQPSPKKPRIDALSPDSERDTTQPEFESHLIGPWDHGIAFPVEEFKAGPAMSKS

SEQ ID NO: 55987 - protein, 366 aa, Glycine max; identical to SEQ ID NO: 37097
  Clone ID: 701070166_FLI.pep

SEQ ID NO: 55988 - protein, 472 aa, Zea mays
  Clone ID: UC-ZMFLB73267E03_FLI.pep
RDQNLQLHRRGHNLPWKLRQRSGKEVRKRVYVCPEPSCVHHDPSRALGDLTGIKKHFCRKHGEKKWKCDKCSKKYAVQSDWKAHVKTCGSREYRCDCGTLFSRRDSFITHRAFCDALAEESAKARAEAPSAEDGSSAAAVVPPPAPPPAPAPLRQQPPPPAPHHAEPRNETDTNATEAVQFAPPPPPPPPPPPPPPPQLQVPVLSQASVSAAANVGASSSSSSVAGTSQSLLGGMFAPSSMASAPQYADLGGRPERAHPAKPPPLCLATDASSSIFSAAPAVTAERQQFAPPPPSPSPSAHMSATALLQKAAQMGATSSSSSFLRGLGLDVSSSSPGASSSGQQHQHQEAMRVSLPDASLQQWPPRLELEPAPMLSAGLGLGLPYDSTGAQVSLPELMMGQSSLFSGKPATLDFLGLGMSPSGASAGRGLPAFVQPIGGMAGTGAGAAETFGAGRGAQATPWERNPSSSPIL

SEQ ID NO: 55989 - protein, 417 aa, Glycine max
  Clone ID: 701106557_FLI.pep
ELWQGLMGNCLDSSAKVDAAQSSKSTSASGISKTTPSSLSIPSYSEKSNASSLPTPRSEGEILSSPNLKPFTFNELKNATRNFRPDSLLGEGGFGYVYKGWIDEHTFTASKPGSGMVVAVKRLKPEGFQGHKEWLTEVNYLGQLYHPNLVKLIGYCLEGENRLLVYEFMPKGSLENHLFRRGPQPLSWSVRMKVAIGAARGLSFLHNAKSQVIYRDFKASNILLDAEFNSKLSDFGLAKAGPTGDRTHVSTQVMGTQGYAAPEYVATGRLTAKSDVYSFGVVLLELLSGRRAVDKTITGMEQNLVDWAKPYLSDKRRLFRIMDTKLEGQYPQKGAFTAATLALQCLNSEAKARPPMTEVLATLEQIEAPKTAGRNSHSEHHRVQTPVRKSPARNRSPLNLTPTASPLPAHRQSPRVH

SEQ ID NO: 55990 - protein, 154 aa, Zea mays
  Clone ID: UC-ZMFLB73007A09_FLI.pep
DEDFVADKDDSGSPTDDSDAEGSDASMSGGEKEKPSKKEASSSKPPVKKKQKSGPDEGSQKKKPKKKKDPNAPKRAIAPFMYFSKAERANIKSSNPELATTEIAKKLGERWQKMTAEERQPYVEQSQVDKQRYAEESAAYRGAAAQQGSGAGSE

SEQ ID NO: 55991 - protein, 209 aa, Glycine max
  Clone ID: 701106678_FLI.pep
TESLMLTGKVIQLLLKPDNISWNAMFLKIKIGMLVYWPRKKVKKKRKVSGKDTLESSGSQSWKSKVSGTQTSSVGVEQDKGVSVKDYLVDKLRPGDEDRALSEVISETLHKKELPPEEVTEEGVRKVVSDAVHKRDDDPERRMEHQRILGKVTESEEVKRRLGGESVVTEKKYQEMYVNSPGKGVVDKLKGMVGTWFTNPAENQSSQGK

SEQ ID NO: 55992 - protein, 249 aa, Glycine max
  Clone ID: 701106687_FLI.pep
VANDPSGKAINALEQHIKNLLCPSTPLFFNTLYDPFREGADFVRGYPFSLREGVPTAISHGLWLNIPDYDAPTQLVKPLERNTRYVDAVLTIPKGTLFPMCGMNLAFDRDLIGPAMYFGLMGDGQPIGRYDDMWAGWCCKVITDHLGLGVKTGLPYIYHSKASNPFVNLRKEYKGIFWQEDIIPFFQNVVLPKECTTVQKCYIELSKQVKEKLSKIDPYFDKLADAMVTWIEAWDELNPEGASQANGKA

SEQ ID NO: 55993 - protein, 442 aa, Glycine max; identical to SEQ ID NO: 45718
  Clone ID: 701119211_FLI.pep

SEQ ID NO: 55994 - protein, 195 aa, Zea mays
  Clone ID: UC-ZMFLB73017H12_FLI.pep
RVGCSFRRRLADASSPSTTVVRDEGLEDDEDCVGMRSTPSTVVAIAGTVPVPVAAMMAGSDCCSSHRMVSPSDLCPSSRVSWKILAAHAAGMRIRRPRPSTLVCRSRFRGGGLLRTTAIPPKNSTGSGFGTMNPCMEIAPIAIPVAATPPATCCRAPSPSSALLSCACASMARVETSVGERLDFLVTALGDGGSL

SEQ ID NO: 55995 - protein, 391 aa, Glycine max; identical to SEQ ID NO: 46228
  Clone ID: 701119923_FLI.pep

SEQ ID NO: 55996 - protein, 294 aa, Zea mays
  Clone ID: UC-ZMFLB73186E10_FLI.pep
GHSRTKGRIPSPTSKLVQTSGRLSAGIDRGRRDKLLLLLLPPPPALVHQSYYLLANLTPIHRRHRPSMARGKVQLRRVENPVHRQVTFCKRRAGLLKKARELSVLCDASVGIIVFSAHGKLYDLATTGTMEELIERYKAASAGEATTDGCGRHNRMDPKHETTVLQQEINLLQKGLRYIYGNRANEHMNVDELNALERYLEIWMYNTRSAKMQIMAQEIQALKSKEGMLKAANEILQEKIVEQSSLLDVGMVVADQQNGRFSTVPLVEEVISSNPLTVLSGYSSCRGSEMGYSF

SEQ ID NO: 55997 - protein, 133 aa, Glycine max
  Clone ID: 701121508_FLI.pep
MRAKMTLKTAAVAVAIVCISAFSITVVAEDPYRFFNWNVTYGDIYPLGVRQQVFDSLFYFHLIHSKHNNILCVLLSHTLTQTGNTYQRSIPRSRHSFCYQRQPHHQCLQQLGPAISPLLVLTLHLQLVFFFYL

SEQ ID NO: 55998 - protein, 363 aa, Zea mays; identical to SEQ ID NO: 38676
  Clone ID: UC-ZMFLB73175F03_FLI.pep

SEQ ID NO: 55999 - protein, 361 aa, Glycine max
  Clone ID: 701124373_FLI.pep
AGPSGSSDGGVGVNWLCMSPKRDHNPENYDDLQFEFNPNLFASLEHYLPPHMLNLSRDVKLHYIRNILLRYLPENDRNWIQKLREYRLKIILNYPSLHKEIFTMDAENFFVPSFLRAIKENTEANFRSIMAEPCKGVYTFEMLQPQFCKKLMSEVDHFERWVHGTKLKIMRPNAMNKNKHGVILDDFAFEAMLDRFMCDFIRPISQVFYPELGGSSLDSHHGFVVEYGINKDVELGLHEDEAEVTLNVCLGKEFSGGELFFQGVRCDAHVTSNAQPEEAFNYSHVPGHAILHPGRNRHGARPTTSGNRMNLILWCRSSVFRELKRYQRDFYSWCGECKQKKAERVCLSVMATKQELLKSEI

SEQ ID NO: 56000 - protein, 170 aa, Glycine max
  Clone ID: 701125214_FLI.pep
PSQTSSIILPFIMGVFTFEDEINSPVAPATLYKALVTDADNVIPKALDSFKSVENVEGNGGPGTIKKITFVEDGETKFVLHKIESIDEANLGYSYSVVGGAALPDTAEKITFDSKLVAGPNGGSAGKLTVKYETKGDAEPNQDELKTGKAKADALFKAIEAYLLAHPDYN

SEQ ID NO: 56001 - protein, 172 aa, Zea mays
  Clone ID: UC-ZMFLB73227G04_FLI.pep
LPLLLLLHLISSPSPRHLPAPRTPSQSQACDYSAGEWVRDPFAGSSLRYDHTCKEIFKGWNCIANGKGNARDLLSWRWTPAGPGCELPRLDPRRFLERHRDTSIGFVGDSLNRNMFASLVCMLRGVNGEVRKWRPAGADRGFTFLRYNLTVAYHRTNLLVRYGGQGIQMEAL

SEQ ID NO: 56002 - protein, 164 aa, Glycine max
  Clone ID: 701127318_FLI.pep
LSLMVFTCSGYMAPEYISQGQFSVKSDVFSFGVLVLEIVSGQKNSGFQHGDHVEDLISFAWKNWREGTASNLIDPTLNTGSRNEMMRCIHIGLLCVQGNLADRPTMASVALMLNSYSHTMPVPSEPAFFMHSRGLSDIQSREYNSGATESKSKSVKAYSSEEST

SEQ ID NO: 56003 - protein, 214 aa, Zea mays
  Clone ID: UC-ZMFLB73276C08_FLI.pep
SSPSLHPIHTCVHVHTKIVAASPGDAESPSENNSNGNAASKKRPSGNRAAVRKYREKKKAHTASLEEEVVHLRALNQQLMKKLQSHAALEAEAARLRCLLVDIRGRIEGEIGAFPYQRPPAVKNVDLLSSVDQESLLGSAAAQVANSCDFRCNHQMYCNPGMQGAISGQVLGQGACDVASMQCIGSTKSGSTKLPVCGGLDTLPAVCLPNVEKK

SEQ ID NO: 56004 - protein, 352 aa, Glycine max
  Clone ID: 701127365_FLI.pep
KFVIIEISEEILVDTIQVANFEHHSSNLKAFELLGSLSFPTDVWVFFGNFTASNVRHAQRFVLQEPKWVRYLKLNLQSHYGSEFYCTLSAVEVYGVDAVERMLEDLIHTQDNLYAPGDGDADKRTVSPHPNPPESEDVHQNNFGDPASDISSANHEKVNSNVPDPVEETHQQVGRMPGDTVLKILMQKVRTLDLNLFALERYMEDLNSRYVNIFKEYSKDMGGKDILIQNIKDGIRNLVDRQDAITKGASDLKSWKSHISMQLDHLLRDNAVLRSEVNEVRRKQTSLENKGVLVFLVCCIFSLLVILRLSLDMATSVYRVVLSVNRTDCSRKFCAVSSSWFLLLLNCIIVIF

SEQ ID NO: 56005 - protein, 345 aa, Glycine max
  Clone ID: 701127573_FLI.pep
KRKYSKCLWKNKNREDFRNYADFCFKTFGDRVKHWVTLNEPYGYSVNGYSGGSFAPGRCSNYVGKCPTGDSSTEPYIVNHHLILAHGAAVNCYKNKYQAHQKGQIGVTIVTFFFEPKSNSDADRKAARRALDFMFGWFANPITFGDYPESMRSLVGSRLPTFTKAQSESLKGSYDFLGINYYTSNFAEYAPPTATNKTYFTDMLAKLSSTRKGVPIGTPTPLSWLFIYPEGLYKLMTYIRDNYNNPPVYITENGVAESKNDSLAINEARKDGIRIRYHDGHLKSLLHAIKDRVNVKGYYIWSFSDSFEWDAGYTARFGIIYVDYKNNLSRYPKSSAFWLKKFLLK

SEQ ID NO: 56006 - protein, 351 aa, Zea mays
  Clone ID: UC-ZMFLB73284B02_FLI.pep
NFRDSNGWTALHWAAYFGREKMVAALLAAGASATAVTDPTAQDPVGKTAAFLASERGHTGLAGYLSEVSLTSYLASLTIEESDVSKGSAEVEAERAVEGISQRNAQRHGGTEDELSMKDSLAAVRNAAQAAARIQNAFRAFSFRKRQQKTARLRDVYGMTQEDIDELAAASRLYHQAHASSGQFYDRAAVSIQKKYKGWKGRKHFLNMRRNAVKIQAHVRGHQVRKKYRTIVSTVSVLEKVILRWRRKGHGLRGFRAEQQPMVEAIEEDDEEDDDFDDDEAVKVFRRQKVDQAVKEAVSRVLSMVDSTEARMQYRRMLEEFRQATAELEGSNEVTSIFDSDLELLGINNFM

SEQ ID NO: 56007 - protein, 741 aa, Glycine max
  Clone ID: JC-GMFL02220068A07_FLI.pep
ERMSDWQKRLVSQLGKKMVEMTGDYTPDLTALLSANIIISTPEKWDGISRNWHSRSYVTKVGLMILDEIHLLGADRGPILEVIVSRMRYISSQTERAVRFVGLSTALANAGDLADWLGVEEIGLFNFKPSVRPVPLEVHIQGYPGKYYCPRMNSMNKPAYAAICTHSPAKPVLIFVSSRRQTRLTALDLIQFAASDEQSRQFLNLPEETLQMVLSQVSDLNLRHTLQFGIGLHHAGLNDKDRSLVEELFANNKIQILVCTSTLAWGVNLPAHLVIIKGTEYYDGKAKRYVDFPITDILQMMGRAGRPQFDQHGKAVILVHEPKKSFYKKFLYEPFPVESSLREQLHDHINAEIISGTICHKQDAVHYLTWTYLFRRLMVNPAYYGLEDAESEFLNTYLSSLVQTTFEDLEDSGCIKMDEDKVEPMMLGTIASQYYLSYMTVSMFGSNIGPDTSLEVFLHILSAASEFDELPVRHNEEKYNEALSEKVKYPVDKNRLDDPHIKALLLFQAHFSQLELPISDYVTDLKSVLDQSIRVIQAMIDICANSGWLSSSITCMHLLQMVMQGLWFDKESSLWMLPCMNTDLISSLSRRGISSVQELLDIPKAALQTVTANFPASRLYQDLQHFPHVKMKLKVQRKDTDGDRSRILSVRLEKTNSRRHSSRAFVPRFPKIKEEQWWLVLGNTSTSELYALKRVSVSDHLVTSMKLPLTPANLQGVKLILVSDCYIGFEQEHSIEELDVC

SEQ ID NO: 56008 - protein, 480 aa, Glycine max
  Clone ID: JC-GMFL02220103B11_FLI.pep
KTASMSLSICSTNSSQPSLNLTIAKNHHQSSRISLAIVADFNIPISLWTSRPFKPSTKTMRLNDDETLSNLLVNFIEEILHYGSNKHSIIPYIKFPKLDSVSNFQDIFNLAFLTLLFLVCIYEAPSDLRSGCLSTLKEQLAGCQSRQASKFLMKLLGSNLEEQWMRSVNLAITNWIVEIQEAHHTDHTTFRTPSPLFSYAFSTFGLWKVQLYCPVINMDVVNANNHPADERLQFSLKYQQLEGVLQFNYKVTIRERWVEIVVNIDNIRCDVFKLVNDILMRERGAGAAEKHFPSRISLQLTPTIQQQVLTVSVGKSSENPRIEFGVEKGIEASFEPPNPYIGLSVSAGESTTVSLKPWKFEQSVHGYSANLNWFLHDSTDGKEVFSTKPSKVALFNPKSWFKDRYSSAYRPFTRQGGVIFAGDEYGESVCWKVDKGAVGKTMEWEIRGWIWITYWPNKHKTFYHETRRFEFRETVYLKIA

SEQ ID NO: 56009 - protein, 280 aa, Zea mays
  Clone ID: UC-ZMFLB73260G05_FLI.pep
RKGSTGSPPRRRSSLGPPSSPAPSATRPSTDTTTCRCTCGATGRSTARARSRCGARSRRRCCGCRATAARRAAGTTSTTRGRARSRTSARCRRTTAAGTASSPSCAASAASPSPCAATGAPTRRTAAGSGTAPAAPTSSTSAPSRTTSGRSAAATPPAASTTASTTTTTATTRRHPRSTTQPPTLLVTAPLLPLPPPMLTTITTPAGSRRRRHCRRRAEAPATTDYYRSTRVSTYGPTTYILHSNQSICSQMQTYACVRVCITMHIIHLSVSYSVFKIAG

SEQ ID NO: 56010 - protein, 268 aa, Glycine max
  Clone ID: JC-GMLE01810065E09_FLI.pep
KEKYTMAVYYKFKSARDYDSIPMDGPFISVGTLKEKIFESKHLGRGTDFDLVVTNAQTNEEYLDEEMLIPKNTSVLIRRVPGRPRLPIVTEIEQKVENKVVESEPENRSLPAEDPSAMKYPEDSDWDEFGNDLYSIPDQVPVQSSNLIPEAPPPNKADEDSKIKAFVDTPALDWQRQGSDFGTGRGFGRGTGGRMGGGRGFGDSLSILISTCFQLIAVFNTNMLITTDAEVWQGWSEKHLHKAMYATDARCLDILFSTVLQMVTRIMT

SEQ ID NO: 56011 - protein, 136 aa, Glycine max
  Clone ID: JC-GMST02400026F07_FLI.pep
HLSKVGREVLIKSVSQAILAYCMSVFLLPSTLQDEIQKMMNSFWWGSNRNYGKGINWLSWERLTIRKKDECMRFRHLYAFNLSMLGKQGLKLASDGHWEMGKLPKFGRTHRHDLLMVHSSPTPLLMVWRTYQLRLW

SEQ ID NO: 56012 - protein, 277 aa, Glycine max
  Clone ID: 701202579_FLI.pep
FLLLPESVTKSAIMKLDTTGLESFPTLLAPQNDVVGELSAAPSFDGFVKEAIQMVKPAKGTTTLAFIFKEGVMVAADSRASMGGYISSQSVKKIIEINPYMLGTMAGGAADCQFWHRNLGIKCRLHELANKRRISVTGASKLLANILYSYRGMGLSVGTMIAGWDETGPGLYYVDSEGGRLKGTRFSVGSGSPYAYGVLDSGYRYDLSVEEAAELARRAIYHATFRDGASGGVASVYYVGPNGWKKLSGDDVGELHYHYYPVTPSTVEQEMVEATGA

SEQ ID NO: 56013 - protein, 122 aa, Glycine max
  Clone ID: JC-GMFL02220127E09_FLI.pep
KISPCLYGTQVRSKMENMPPGYRFYPTEEELISFYLHNKLEGEREDMNRVIPVVDIYDYNPSELPRKNLIYIYIYTYIFPSSPSFSFHFSNFFFLSIKIELDLKAMVQVDLLHIYRSKAHSG

SEQ ID NO: 56014 - protein, 382 aa, Glycine max
  Clone ID: 701203618_FLI.pep
FFQPLKSNLPLFLLPPTSPSSSSIMSHFKGKYHDELIVNAAYIGTPGKGILAADESTGTIGKRLASISVENVESNRRALRELLFTAPGALKYLSGVILFEETLYQSTAAGKPFVEVLKEAGVLPGIKVDKGTVELAGTNGETTTQGLDGLGQRCAKYYEAGARFAKWRAVLKIGPNEPSELAIHENAYGLARYAVICQENGLVPIVEPEILVDGSHDIHKCAAVTERVLAACYKALNDHHVLLEGTLLKPNMVTPGSNSAKVSPQVVAEHTVRALQRTVPAAVPAIVFLSGGQSEEEASVNLNAINQVNGKKPWSLSFSFGRALQQSTLKAWSGKEENVKKAQEALLVRAKANSEATLGTYKGNSKLADGASESLHVEDYKY

SEQ ID NO: 56015 - protein, 330 aa, Glycine max
  Clone ID: JC-GMFL02220086D01_FLI.pep
KTLVFHSGRAPDGKRTNWVMHEYRLVEEELERAGSGSSQPQDAYVLCRVFHKNNIGPPNGQRYAPFIEEEWDDASGMVPGADPGDNRSFAHQPHVEGKSGVLCAEGRNGALQDTQSFNKAPFDVNKLPIETQNLLAVCKRESMAEYPSPEKDDNNCKHMDDYPSPQTDNPKPFSQIYKRRRHNLNSNNSHVSGDSIRTSQDPCSSTITTAATALPTTNAAAGTATNTAPKKHFLSALVEFSLLESLESKDSLASIKTPDFDVENLESSMPPSCAKFIKEMKSEMQKLSVEKETMRFEMMSTQAMINILQSRVDVLSKENEDLKRMVAQNP

SEQ ID NO: 56016 - protein, 117 aa, Glycine max
  Clone ID: UC-GMRONOIR013C01_FLI.pep
AEKYNQFIYFSKTIIGHSTMVLSKNEVLSRNHATHIPERDDYTTTSSVIATINHKYISPRNFQTIGFPETPSVHFLHSLHDFNYAAGSKTLGQDMAVMDSFANTKAARHMPRLGGKI

SEQ ID NO: 56017 - protein, 392 aa, Glycine max
  Clone ID: 701211444_FLI.pep
SFTLSDCVKMGAGGRTDVPPANRKSEVDPLKRVPFEKPPFSLSQIKKVIPPHCFQRSVFRSFSYVVYDLTIAFCLYYVATHYFHLLPSPLSFLAWPIYWAVQGCILTGVWVIAHECGHHAFSDYQLLDDIVGLVLHSGLLVPYFSWKYSHRRHHSNTGSLERDEVFVPKQKSCIKWYSKYLNNLPGRVLTLAVTLTLGWPLYLALNVSGRPYDRFACHYDPYGPIYSDRERLQIYISDAGVLAVCYGLFRLAMAKGLAWVVCVYGVPLLVVNGFLVLITFLQHTHPALPHYTSSEWDWLRGALATVDRDYGILNKVFHNITDTHVAHHLFSTMPHYHAMEATKAIKPILGEYYRFDETPFVKAMWREARECIYVEPDQSTESKGVFWYNNKL

SEQ ID NO: 56018 - protein, 353 aa, Glycine max
  Clone ID: UC-GMROMINSOY285E09_FLI.pep
GLGQRFLYMLTNSGKSPTLALQLVKCLWETLLSLDGTEMQTIIKVISEPSQVIFIATEVGNFEVLAELVRSCPELMWEVDTKNRSIIHIAALHRHIDIYNLIHETSSIRNFVVTLEDEDKNNLLHYAAKLSPPSKLNLLPGPVLQMKFELMWYEEVKKIMQPCFIEMRNSNGKTPRELFTEEHLELVTKAESWMKSMINSCITISTVTATLVLATAFSIKREDNHKPTITRDFMLYIGIAMISSSISSLIFLSILITSPCVEEDFLKSLLRKIWWGLVTLYTSIAYLSTTFTIAFFTTYQVRVPKSFFWGPLISLLIMEYLLFPYGSLVNINPRYWLPSKYIFYTGKAKGRVN

SEQ ID NO: 56019 - protein, 456 aa, Glycine max
  Clone ID: 701213977_FLI.pep
LTFAYSKTKSMGQGTPGGLNRQGLPGDRKPDGGDKKEKKFEPAAPPARVGRKQRKQKGPEAAARLPTVTPLSKCKLRLLKLERIKDYLLMEEEFVANQERLKPQEEKAEEDRSKVDDLRGSPMSVGNLEELIDESHAIVSSSVGPEYYVGILSFVDKDQLEPGCAILMHNKVLSVVGLLQDEVDPMVSVMKVEKAPLESYADIGGLDAQIQEIKEAVELPLTHPELYEDIGIKPPKGVILYGEPGTGKTLLAKAVANSTSATFLRVVGSELIQKYLGDGPKLVRELFRVADDLSPSIVFIDEIDAVGTKRYDAHSGGEREIQRTMLELLNQLDGFDSRGDVKVILATNRIESLDPALLRPGRIDRKIEFPLPDIKTRRRIFQIHTSRMTLADDVNLEEFVMTKDEFSGADIKAICTEAGLLALRERRMKVTHADFKKAKDKVMFKKKEGVPEGLYM

SEQ ID NO: 56020 - protein, 231 aa, Glycine max; identical to SEQ ID NO: 55548
  Clone ID: UC-GMROMINSOY112A08_FLI.pep

SEQ ID NO: 56021 - protein, 366 aa, Glycine max
  Clone ID: 701139293_FLI.pep
TPIYLAISLLPKTCSTMSFLRSFARNKDISKVGRRGIHCMQKLCAEKISPDSLEKAQNRVIDAALTLVRENTRLKKELVHSLGGAVATSTLLGVPLGHNSSFLEGPAFAPPFIREGIWCGSANSTTEEGKDLKDLRIMVDVGDIPIQEMRDCGIGDERLMKVVSDSVKLVMEEDPLRPLILGGDHSISYPVVRAISEKLGGPVDVLHFDAHPDLYDEFEGNYYSHASSFARIMEGGYARRLLQVGIRSINKEGREQAKKFGVEQFEMRHFSKDRPFLENLNLGEGAKGVYISIDVDCLDPGYAVGVSHYESGGLSFRDVMNMLQNLKGDIVGGDVVEYNPQRDTPDRMTAMVAAKFVRELAAKMSK

SEQ ID NO: 56022 - protein, 249 aa, Glycine max
  Clone ID: UC-GMROPIC071B06_FLI.pep
QSESERDFYEALFERSKVQFDQYVAQGKVLHHYANILDLLMQLRRCCNHPFLVMCGSDTQKRADLSRLARKFFQTNTEFPDESNQNDPRQQAELNKLASRLLLKSASSLHSVQPHAYIAEVLENIQKGDIIECSICMESPEDPVFTPCAHKFCRECLFSCWGTSVGGKCPICRQLLQKDDLITYSSESPFKVDIKNNVTESSKVSKLFEFLQRILNTSSEKSIVFSQWTSFFDLLENPLRRRGIGFFEI

SEQ ID NO: 56023 - protein, 266 aa, Glycine max
  Clone ID: 701139347_FLI.pep
RGFKNSDTTQKREVIDAIEKPNINKPNAVQDNASQHLLTLRQEILAHKRKAVTLKREGKLTEAKEELRQAKLLEKGLEDGSMQPDTASASVKNVVQKKQELSNVSAKPLSSRDRFKLQQESLGHKRQALKLRREGRIEEAEALFERAKAIETQLEELTAQDSNKSDGVDDVTVEDFLDPQLLSALKAVGLDDVSVVSKAPEREETVKSNAKVENSNQERIQLEERIKEEKVKALNLKRSGKQAEALDALRRAKLYEKKLNSLTSGS

SEQ ID NO: 56024 - protein, 216 aa, Glycine max
  Clone ID: UC-GMROPIC006B12_FLI.pep
KSIKKMVRVLRSCIQSILKLVNSVIGMAGLAMILYSAWMIRVWQRKMGELPFGHDSDYPPPWFIYMFLGLGVAFCVITCLGHVAAETANGCCLYLYMVFVVLLIMLEAAVTVDVFVNQDWEKDFPKDPSGSFDQFKNFIRSNYEMCKWVGLSLVSVQGLSLLLAMILKALGPHQYYDSDDEYAPDRVPLLRNAPPHYVVVDPGYVHGIDAWRRQDK

SEQ ID NO: 56025 - protein, 160 aa, Glycine max
  Clone ID: 701139927_FLI.pep
GTSGYLAPEYLDAGNLTYKVDVYAFGIVLLELITGRRISELEQFNGHSYLSEWFHPIRMLEPGHILQNVRSLKPCFDSKESVEFNLQLQAMARAVSLCLRVDPDARPPMSKILRVLEGGNPVRPMGLDINSVGNTSGHLSGLKSHTPPKGTINHSRRLSH

SEQ ID NO: 56026 - protein, 104 aa, Glycine max
  Clone ID: UC-GMROPIC013C02_FLI.pep
GQFGCLFLILLIVFTLFVVMFDLDHKLFDVCSQSWRVIALHSFPILRPMNWRVIVLHTFPLLITVISLRRLWCGQFLIKIKFSFFVIILIMGFALLVFQLLFLG

SEQ ID NO: 56027 - protein, 270 aa, Glycine max
  Clone ID: 701140306_FLI.pep
LRCLVMSLSVLFTLGLARESHARDEDFWHAVWPNTPIPSSLRDLLKPGPASVEIDDHPMQIEETQYPKTFFYKEDLHPGKTMKVQFSKPPFQQPWGVGTWLKEIKDTTKEGYSFEELCIKKEAIEGEEKFCAKSLGTVIGFAISKLGKNIQVLSSSFVNKQDQYTVEGVQNLGDKAVMCHRLNFRTAVFYCHEVRETTAFMVPLVAGDGTKTQALAICHSNTSGMNHQMLHQLMGVDPGTNPVCHFLGSKAILWVPNLSVDTAYQTNIVA

SEQ ID NO: 56028 - protein, 645 aa, Glycine max
  Clone ID: UC-GMROPIC089G02_FLI.pep
CEPRVMTDGHLFNNITLGGRGGTNPGQIKIYPGGIIWKRQGGGKLIEVDKSDIMGVTWMKVPRSNQLGVQIKDGLYYKFTGFRDQDVVSLTNFFQNTCGISVEEKQLSVSGRNWGEVDLNGNMLAFTVGSKQAFEVSLADVSQTQLQGKNDVILEFHVDDTTGANEKDSLMEISFHIPNSNTQFVGDENRPPAQVFRDKIMSMADVGAGGEDAIVTFEGIAILTPRGRYSVELHMSFLRLQGQANDFKIQYSSVVRLFLLPKSNQPHTFVIISLDPPIRKGQTLYPHIVMQFETDYVVESELAINEDLYNTKYKDKLDLSYKGLIHEVFTTILRGLSGAKVTKPGKFRSCQDGYAVKSSLKAEDGILYPLEKSFFFLPKPPTLILHEEIDYVEFERHAAGGSNMHYFDLLIRLKSEQEHLFRNIQRNEYHNLYEFISSKGLKILNLGDAQPTVGIKKVLENDDDDAVDPHLERIKNEAGGDESDEEDSDFVADKDDEGSPTDDSGADDSDATDSGDEKEKPAKKESKKDLPSKASTSKKKSKDDEDGKKRKQKKRKDPNAPKRAMSGFMFFSKLERENLKKTNPGISFTDVSRVLGEKWKKLSVEEKEPYEAKAREDKKRYKDEISGYKNPQPMNIDSGNESDSA

SEQ ID NO: 56029 - protein, 490 aa, Glycine max
  Clone ID: 701140382_FLI.pep
GTSRYDDTNPEAEKKEYIDHIEEIVQWMGWKPFKITYTSDYFQELYELAVELIKKGHAYVDHQTPDEIKEYREKKLNSPWRDRPISESLKLFEDMKNGSIEEGKATLRMKQDMQSDNYNMYDLIAYRIKFTPHPHAGDKWCIYPSYDYAHCIVDSLENITHSLCTLEFETRRASYYWLLHALGIYQPYVWEYSRLNVSNTVMSKRKLNRLVTEKWVDGWDDPRLMTLAGLRRRGMTPTAINAFVRGIGITRSDGTLISVERLEYHVREELNKTAPRAMVVLHPLKVVITNLEANSAIEVDAKKWPDAQADDASAFYKIPFSNVVYIEHSDFRMQDSKDYYGLAPGKSVILRYAFPIKCTEVILADDNETILEIRAEYDPSKKTKPKGVLHWVAQPSPGVDPLKVEVRLFERLFLSENPAELDNWLGDLNPNSKVIIPDAYGVSSIQNAKVGDNFQFERLGYFVVDRDSTSEKLVFNRTVTLKGSYSKGGK

SEQ ID NO: 56030 - protein, 242 aa, Glycine max
  Clone ID: UC-GMROPIC032F05_FLI.pep
YRQQGIFISSTGDQAQSMNGNGAMAFDVEYARWLEEHNRQTNELRTAINSHAGDIELRTIVDNFMTQFNDIFRLKAIAAKADACQILSGMWKTPAERCFMWIGGFRPSELFKLLLSQLEPLVEQQMDIYSFQQSCQQAEEALSQGMDALQQSVSETLANGSPSSSGSPGNVANNMGQITMAMGKLGTLEGFLLQADNLRQRTLEVMLQILTTRQSARALLAISDYFSRLRELGSLWPSRPRE

SEQ ID NO: 56031 - protein, 44 aa, Glycine max
  Clone ID: 701149103_FLI.pep
DLRLVLNPNNMMYHSLTLFFLRFKPLPSHSFTFTPPPSVVLAAV

SEQ ID NO: 56032 - protein, 362 aa, Glycine max
  Clone ID: UC-GMROPIC066E04_FLI.pep
ETDAFVILRVLLCFSSEMCGGAIISDFIPAAAIAGSRRLTADYLWPDLKKRKSDLDVDFEADFRDFKDDSDIDDDDDDHQVKPFAFAASSRLSTAAKSVAFQGRAEISANRKRKNQYRGIRQRPWGKWAAEIRDPRKGVRVWLGTFNTAEEAARAYDAEARRIRGKKAKVNFPEAPGTSSVKRSKVNPQENLKTVQPNLGHKFSAGNNHMDLVEQKPLVSQYANMASFPGSGNGLRSLPSSDDATLYFSSDQGSNSFDYAPEISSMLSAPLDCESHFVQNANQQQPNSQNVVSIEDDSAKTLSEELVDIESELKFFQMPYLEGSWGDTSLESLLSGDTTQDGGNLMNLWCFDDIPSMAGGVF

SEQ ID NO: 56033 - protein, 303 aa, Glycine max
  Clone ID: 701153005_FLI.pep
REDDRRGKKNKVIIKTEISKSQKMALRGLSAVAVTASIRPPGPRFRVDSGTSRIPSSGCRISVRCKAVGESRQGSLEETVVYEGIYGPWTIDDSDVREVILYRSGLVTAAASFVVAGSAAFFPDTLKQNVDLLYVLGSGGLGLSLLLIHIYVSEIKRALQALWGLGVVGSATTYFCLAQPANKNLIQYVVDNPSAVWLVGPLFAALTGLVFKEGLCYAKLEAGLLTFVIPILLLGHLTGLMDDGVKLTLLASWMTLFVIFAGRKFTQPIKDDIGDKSVFMFNSLPGDERKALLEKLEQQKIQN

SEQ ID NO: 56034 - protein, 197 aa, Glycine max
  Clone ID: UC-GMROPIC020D02_FLI.pep
IVQLEMMASFAGTTQKCKACEKTVYLVELLTADNKIYHKSCFRCYHCKGTLKLSNYCSFEGVLYCKPHFDQLFKKTGSLDKSFEGIPRTARLERSADQVQTNTKVSNLFAGTQEKCVACKKTVYPIEKVAVDGTSYHKACFRCTHGGCVISPSNYVAHEHRLYCRHHHTQLFKQKGNFSQLDKQENDEGVTENRITE

SEQ ID NO: 56035 - protein, 517 aa, Glycine max
  Clone ID: 701204606_FLI.pep
AESLKDYEEDFENPEKKPRRNKYAFACAILASMTSILLGYDIGVMSGAALYIQRDLKVSDVQIEILNGIINLYSPVGSFIAGRTSDWIGRRYTIVLAGAIFFVGAILMGFSPNYAFLMFGRFFAGVGIGFAFLIAPVYTSEISPSSSRGFLTSLPEVFLNGGILIGYISNYGFSKLALRLGWRLMLGVGAIPSILIGVAVLAMPESPRWLVAKGRLGEAKRVLYKISESEEEARLRLADIKDTAGIPQDCDDDVVLVSKQTHGHGVWRELFLHPTPAVRHIFIASLGIHFFAQATGIDAVVLYSPRIFEKAGIKSDNYRLLATVAVGFVKTVSILVATFFLDRAGRRVLLLCSVSGLILSLLTLGLSLTVVDHSQTTLNWAVGLSIAAVLSYVATFSIGSGPITWVYSSEIFPLRLRAQGVAIGAAVNRVTSGVIAMTFLSLQKAITIGGAFFLFAGVAAVAWIFHYTLLPETRGKTLEEIEKSFGNFCRKPKAEEGLDDNVEIQLKTRDQTLTSVD

SEQ ID NO: 56036 - protein, 327 aa, Glycine max
  Clone ID: UC-GMROPIC061C09_FLI.pep
IMVFFFPLKINCQVLSMLLDRNMNVDIVNHNNQTPLMYAAKQGKIDCVKKLIQAGANVFMIDSVHGGGCLHDAASHGHVDCLKAILFAAHFTAFEDSRGYLRFVDSRDFNGFAPLHLAALKGQSECVDALLDNDAILCARTSNCGGTALHLAARSGSLDCIRILLARGADRLQFDYHGNTPYTIALEHGQEECAALLGSTSGSSLVWPNHLRFIRELDKKTKALLEKALVELNKERQKAKNKPRSSRNSERNNNNIASMAGKKELCSICYDRVCTFVVRPCGHEMCAHCIMRLCQKKSDIDAPRSSNSKPVCPFCRGDIVRLLAKTK

SEQ ID NO: 56037 - protein, 326 aa, Glycine max
  Clone ID: 701205203_FLI.pep
NEVNFFVCDENVESRFKMPEKSIPKDAAFQIINDELMLDGAPRLNLASFVTTWMEPECDKLIMASLNKNYVDMDEYPVTTELQNRCVNIIANLFHAPISEEETAVGVGTVGSSEAIMLAGLAFKRKWQTKRKAEGKPYDKPNIVTGANVQVCWEKFARYFEVELKEVKLKEGYYVMDPAKAVEMVDENTICVAAILGSTMTGEFEDVKLLNELLTEKNKETGWDTPIHVDAASGGFIAPFLYPDLEWDFRLPLVKSINVSGHKYGLVYPGVGWVVWRSKDDLPDELVFHINYLGSDQPTFTLNFSKGSSQIIAQYYQLIRLGFEGY

SEQ ID NO: 56038 - protein, 227 aa, Glycine max
  Clone ID: UC-GMROPIC025B06_FLI.pep
LNSLVGGKLIKVLLHSMDQLGIIQPSSSTKVERRLVEKNRRNQMKNLYNKLNSLLPSYNPKEALPLPDQVDEAINYIKSLEAKVKMAQEKKENLQGIRKRSRGCFSNNSANFAATSGFPKSPQLEIHEVGSSLQVVLTCGLDHQFIFYEIIQILHEENIEVRSVNSSLAGDSVLHVVHAEIPQSFLQFGATKVSERLKRFVNGSCSDVETQPELWDFEIGTDDMWGF

SEQ ID NO: 56039 - protein, 503 aa, Glycine max
  Clone ID: 701205373_FLI.pep
STIHSTLHKTFKPNSTEFFCFTMPPKPLDYGSINENVKKSQYAVRGELYLRASELQKEGKKIIFTNVGNPHALGQKPLSFPRQVVALCQAPFLLDDPNVGLLFPADAIARAKHYLSLTSGGLGAYSDSRGLPGVRKEVAEFILRRDGYPTDPELIYLTDGASKGVMQILNTIIRGQDDGILVPVPQYPLYSATIALLGGTLVPYYLEETANWGLDVNELRQSVEQARFKGITVKAMVIINPGNPTGQCLSEANLREVLQFCYQENLALLGDEVYQTNIYQDERPFISSRKVLMELGPPISKEVQLISFHSVSKGYYGECGQRGGYFEMTNIPPETVDEIYKVASISLSPNVPAQIFMGVMLNPPQPGDISYDKFVRESTGILESLRRRARIMTDGFNSCRNVVCNFTEGAMYSFPQIRLPPRALEAAKQAGKVPDVYYCLKLLEATGISTVPGSGFGQKEGVFHLRTTILPAEEDMPDIMDSFKKFNDEFMEQYEDDRGYSRL

SEQ ID NO: 56040 - protein, 211 aa, Glycine max
  Clone ID: UC-GMROPIC008H09_FLI.pep
NHTTYESNETSNLYGAMSSHALNTNVNALDHFEIPVTTPFQDVSASVPSIAAFCRSSSFRNIFLTENWAELPLKENDTNDMVIYGALRDAAATGWFPANGNEVSNVSVAVKMENEGQNSKTTAARGTRTPPKKGLSYRGVRRRPWGKYAAEIRDTKRNGVRVWLGTYETAEDAALAYDRAAFKMRGSKAKLNFPHLIGSDHEPIKVTLKKH

SEQ ID NO: 56041 - protein, 369 aa, Glycine max
  Clone ID: 701205720_FLI.pep
RPWRDPPVVKEAVRSSASKGKPPLSAGNNNNGGWDNWDPDDGFGSARGGADLRRNQSTGDVRGFGGGGNVSRSKSTQDMYTRAELEASAANKEDFFARKRAENESRPEGLPPSQGGKYVGFGSGPAPNQTGVNQQNDYLSVVSQGFGKLSLAAANVVQAGTKEFSAKVKEGGYDYKVNETVNVASQKTSEIGQRTWGIMKGVMALASQKVEEFARDNPNWMSDNWQRNESDRNGFYQEFNRENNGRNSSTREGQHSSGGQTNTFHSSSWDDWGHNDSRKEETAKGSAPQSSGGKFDNNYNSSSWDDWDQEDTRKKEPAKGSAAHSSDGWTGWDNAKDDGFDDIYGSASNNKGGAHNDKSGAAWTGGGFL

SEQ ID NO: 56042 - protein, 431 aa, Glycine max
  Clone ID: UC-GMFLMINSOY036D10_FLI.pep
HPYQPHHHQQHNVSNISTNTFSTTPNTDYSYSYSFSPTQPVQDFNFEFSSPNWSHNLLLESARAVADNNSTRLHHLLWMLNELSSPYGDTEQKLAAYFLRALFSRVTEAGDRTYRSLASASEKTCSFESTRKTVLKFQEVSPWTTFGHVASNGAILEALEGNSKLHILDISNTYCTQWPMLLEALATRSEETPHLCLTTIVTGSRIGNNVQRVMKEIGTRMEKFARLMGVPFKFNVVHHYGDLSEFNFSELDIKDDEALAVNCVNSLHSVSALGNNRDALISALQALQPRIVTVVEEEADLDVGIDGYEFVKGFEESLRWFRVYFEALDESFVKTSNERLMLERAAGRAVVDLVACSPADSVERRETAARWAARLHNGGLNAAPFSDEVCDDVRALLRRYKEGWSMAACSDAGIFLSWKDTPVVWASAWRP

SEQ ID NO: 56043 - protein, 539 aa, Glycine max
  Clone ID: 701205731_FLI.pep
KEKEKRAIMAGGGAPAKADEPQPHPPKDQLPNISYCITSPPPWPEAILLGFQHFLVMLGTTVLIPTALVPQMGGGNNEKARVIETLLFVAGINTLLQTMFGTRLPAVIGGSYTFVPTTISIILAGRFSDEPDPIEKFKRIMRSIQGALIVASTLQIVLGFSGLWRNVARFLSPLSSVPLVSLVGFGLYELGFPGVAKCVEIGLPQLILLVFVSQYVPHVLHSGKHIFDRFAVLFTIVIVWIYAHLLTVGGAYNDAPHKTQISCRTDRAGLIDAAPWIRIPYPFQWGAPSFDAGEAFAMMMASFVSLVESSGAFIAVYRYASATPLPPSILSRGIGWQGVGILLSGLFGTVNGSSVSVENAGLLALTRVGSRRVVQISAGFMIFFSILGKFGAVFASIPPPIIAALYCLFFAYVGAGGLSFLQFCNLNSFRTKFILGFSIFIGLSVPQYFNEYTAINGYGPVHTGARWFNDIINVPFQSKPFVAGVVAYFLDNTLFKRAADIRKDRGKHWWDKYKSFKGDTRSEEFYSLPFNLNKYFPSV

SEQ ID NO: 56044 - protein, 400 aa, Glycine max
  Clone ID: 701208271_FLI.pep
FGLVGQLQVSIFFSFLSGRLRRLSCRDGGGGKVMAFCPIFCCGNSSDRKGRGKKQPPWRVFSLKELHSATNNFNYDNKLGEGGFGSVYWGQLWDGSQIAVKRLKVWSNKADMEFAVEVEILARVRHKNLLSLRGYCAEGQERLIVYDYMPNLSLLSHLHGQHSAESLLDWNRRMNIAIGSAEGIGYLHNQSMPHIIHRDIKASNVLLDSDFQAQVADFGFAKLIPDGATHVTTRVKGTLGYLAPEYAMLGKANESCDVYSFGILLLELASGKKPLEKLSSAVKRSINDWALPLACEKKFSELADPKLEGNYAEEELKRVVLTALLCVQSQPEKRPTILEVVELLKGESKDKLAQLENNELFKNPPAVGHTDDGTVAAEGSSDFISEDKESKPELEENTEP

SEQ ID NO: 56045 - protein, 148 aa, Zea mays
  Clone ID: UC-ZMROMO17100D05_FLI.pep
PLHCWMKHGPLSRGAPSLVIIFILLTTLFIILVIDLRLGLVRLLFIFLLFLLGRSLLSCSALALVVGSDGLVVLELELVSLGYIGSLVRLAQGFPPVASSFPHRSDRLVLRVLLLELLAKFLHEHEESAGSPLRLVGVLAGLPFPALG

SEQ ID NO: 56046 - protein, 113 aa, Zea mays
  Clone ID: UC-ZMROMO17104C12_FLI.pep
REGTRELQYVLSHYPIQLFMHCVIIVKREVVVGKHNTTVTSGMYRKGQMVQFQHSRPGFPTNESYINNTMPCHTAAEHPSSDCWANAKLTSIVQRANARERPQLHRAPRNSNL

SEQ ID NO: 56047 - protein, 270 aa, Glycine max
  Clone ID: 701209105_FLI.pep
VEVPKKKNNIMFLGDGRTNTIITASRNVVDGSTTFHSATVAVVGSNFLARDLTFQNTAGPSKHQAVALRVGGDLSAFFNCDILAFQDTLYVHNNRQFFVKCLIAGTVDFIFGNSAVVFQDCDIHARLPSSGQKNMVTAQGRVDPNQNTGIVIQKCRIGATNDLESVKKNFKTYLGRPWKEYSRTVIMQSSISDVIDPIGWHEWSGNFGLSTLVYREYQNTGPGAGTSNRVTWKGYKVITDTAEAREYTPGSFIGGSSWLGSTGFPFSLGL

SEQ ID NO: 56048 - protein, 247 aa, Zea mays
  Clone ID: UC-ZMROMO17107E01_FLI.pep
RPPSRSRRQQQSSSSSISASTTARPSMARGKVQLRRIENPVHRQVTFCKRRAGLLKKARELSVLCDAHVGIIVFSAHGKLYDLATTGTMEELIERYRTASSREAADGCGDNNRMDPKQETMVLQQEINLLQKGLRYIYGNRTNEHMSVEELNALERYLEIWMYNIRSAKMQIMIQEIQALKSKEGMLQAANEVLQEKIVEQSSLLDVGMVVADQQNGHFSTVPLVEEMISNPLTILSGYSNCRGYSF

SEQ ID NO: 56049 - protein, 221 aa, Glycine max
  Clone ID: 701212620_FLI.pep
LCLSRSIGDMDVGEFIVPVPHVKQVKLSTAGGRIILSSDGVWDALSAEMALDCCRGMPPEAAATHIVKESVQAKGLRDDTTCIVIDILPLEKPPTSVPTQKKPVKGMLKSIFRKKSSESSTFIEKEYLEPDVVQELYEEGSAMLSERLETKYPLCNMFKLFICAVCQVEIKPGEGISIHEGLTNPGRLRPWDGPFLCSSCQEKKEAMEGKRTSDRLSSGSD

SEQ ID NO: 56050 - protein, 475 aa, Zea mays
  Clone ID: UC-ZMROB73004G08_FLI.pep
ASIEPGRRGRRPIAALRELPGGRRMEPYAAAKSGGADAGTGTGLEDSMRRLGLGDDGEAGEEKLPERPGEADCAYYLRTGACGYGERCRYNHPRDRPAPVNGVGKTAVTVEYPERPGQPLCEYYAKNGTCKFGSNCKFDHPREGGFVPVTLNSGGFPLRLGEKECSYYMKTGHCKFGATCKFHHPELGFLTETPGMYPPVQPPPISSSHPYPHLANWQMGRPPVVPGSFLPGSYPPMVLPHTVIPMQGWNPYVPPMNQVTPAGGQQAVPVGASYGLSHQGPTSAMTYGSHYAQLYSSSGTSSSNIQEYAFPERPGQPECEHYMKTGTCKYGAACKYHHPQYFSGPKSNCILSPLGLPLRPGSQPCAYYAHHGYCKFGPTCKFDHPMGTPNYSISTSSLTDVPIAPYPQSFPVTPMPSYLPSSDLRPQYTQVKDSSANPPPSPGTTYGPVGSISKVYAPHTLIRSPASAAAGMQAS

SEQ ID NO: 56051 - protein, 444 aa, Zea mays
  Clone ID: UC-ZMROB73019D02_FLI.pep
LLKHSDKDSLTRKNKSGFDALHVAAKEGHRDIVKVLLDHDPSLGKTFGQSNVTPLITAAIRGHIEVVNLLLERVSGLVELSKANGKNALHFAARQGHVEIVEALLHADTQLARRTDKKGQTALHMAVKGTSPEVVQALVNADPAIVMLPDRNGNLALHVATRKKRSEIVNVLLLLPDMNVNALTRDRKTAFDIAEGLPLSEESQEIKECLSRAGAVRANDLNQPRDELRKTVTEIKKDVHTQLEQARKTNKNVYGIAKELRKLHREGINNATNSVTVVAVLFATVAFAAIFTVPGGNANDGVAVAVHATAFKVFFIFNAVALFTSLAVVVVQITLVRGETKAERRVVEIINKLMWLASVCTTVAFISSSYIVVGRHFRWAALLVTLIGGVIMAGVLGTMTYYVVKSKRTRKIRKKVKSTRRSGSSSWQHNSEFSDSEIDRIYAI

SEQ ID NO: 56052 - protein, 410 aa, Glycine max
  Clone ID: 701212714_FLI.pep
NFSSLPSFSLSLSTILFFFFFFSSLSLPSAMAEDKEMSTSVINGNDSLTGHIISTTIGGKNGEPKQTISYMAERVVGTGSFGIVFQAKCLETGEAVAIKKVLQDRRYKNRELQLMRVMDHPNVISLKHCFFSTTSTDELFLNLVMEYVPESMYRVLKHYSNANQRMPIIYVKLYMYQIFRGLAYIHTGPKVCHRDLKPQNILVDPLTHQVKLCDFGSAKVLVEGEANISYICSRFYRAPELIFGATEYTSSIDIWSAGCVLAELLLGQPLFPGENAVDQLVHIIKVLGTPTREEVRCMNPNYNDFRFPQIKAHPWHKIFHKKMPPEAIDLASRLLQYSPSLRCTALEACAHPFFDELREPNARLPNGRPFPPLFNFKQELSGASSELVNKLIPDHVKRQMGIQFMHLGGS

SEQ ID NO: 56053 - protein, 292 aa, Zea mays
  Clone ID: UC-ZMROB73001H08_FLI.pep
PTRRWTAASPASSSPTPTSTRSSRGISQAGKAKMGEKEWFFFCHKDRKYPTGMRTNRATASGYWKATGKDKEIFRGSSSSPRRVLVGMKKTLVFYTGRAPRGGKTPWVMHEYRLEGSLPHNLHRGAKDEWAVCKVINKDLAGKAGQQQMAPPPHAVSVGMERSDSLAFLDDLVLDNADDLPPLVDSTTYAAGSLFAAAGTTTTTNDDSGGYQQATKAEPQPQLPAPSNSPYQHQQQAIRRHCKAEAPAPAMVLSPSRETPGADMFQLQHVDELLQLDGGFMEDYYNMNMWKV

SEQ ID NO: 56054 - protein, 664 aa, Glycine max
  Clone ID: 701212729_FLI.pep
QKMASRFWTQGGSDSEEEESDYGEEDEHSAGEQAPNQDVTSKYFVDNASDSDDSDGQKRVVRSAKDKRFEEMVSTVDQMKNAIKINDWVSLQESFDKINKQLEKVMRVTESEKVPNLYIKALVMLDDFLVQALANKDAKKKMSSSNAKALNSMKQKLKKNNKQYEELITKCRENPESEEEKEEEESEDEYESDDIEPEQLPEAKSDSEASQYDNEKQDAGDGPWDQKLSKKDRLLDKQFMKDPSEITWDTVNKKFKEVVAARGRKGTGRFEQVEQLTFLTKVAKTAAQKLEILFSVVSAQFDVNPGLNGHMPINVWKKCVQNMLVILDILVQHPNIVVDDSVEPDENETQKGVDYNGPIRVWGNLVAFLERIDVEFFKSLQCIDPHTRDYVERLRDEPLFLVLAQNVQEYLERVGNFKAASKVALRRVELIYYKPQEVYVAMKKLTELTEDGDNGVEASEEKGFEESRIPTAFVATPEVVARKPTFPENSRTIMDVLVSLIYKYGDERTKARAMLCDIYHHALLDEFSIARDLLLMSHLQDSVQHMDISTQILFNRAMSQLGLCAFRVGLISEAHGCLSELYSGGRVKELLAQGVSQSRYHEKTPEQERLERRRQMPYHMHINLELLETVHLVSAMLLEVPNMAANVHDAKRNSYLRLSVACLR

SEQ ID NO: 56055 - protein, 239 aa, Zea mays
  Clone ID: UC-ZMROB73020H04_FLI.pep
ESESEMAWNGRFGDDEEGSGLELSLSLPGYFSGSPTQAAAGFEDKADGGSAAAAAAGRAKGSNGFKARPAAAAPVVGWPPVRAFRRNLASASSKPSRDPPPSHRGNESASVGAGGKAVEGGNKGLFVKVNMDGVPIGRKLDLGGHAGYDTLTAAVDHLFRGLLSAQTSGPGGERQAVAGILNGGGEYTLVYEDDEGDQMLVGDVPWQMFAATARRLRVLRSSDLNPSSLRAATRKRAAA

SEQ ID NO: 56056 - protein, 469 aa, Glycine max; identical to SEQ ID NO: 49887
  Clone ID: 701213003_FLI.pep

SEQ ID NO: 56057 - protein, 298 aa, Zea mays
  Clone ID: UC-ZMROB73020D05_FLI.pep
SFQHMKQHVVPRINGPGQAPVHAVVVQGEVLLRRPPPVLARVRVRTQYHGFRGVHQQHPHLTATVRRRLLRRRELLQLQRAELTLEALDRVLAATERRRPDAVAVLVPLTALVLRRVHGAQQGRAAEAAVGAGQRPQRGPRGHAQRVAQREVGDVGQPAVVAADEPAGLVQHGGAVEPAGRGHDGVVELRDVRRPHAVWLVQVEVPDARVRWAVLVDLLVPDKVRRPEVGHGEVVVGVVVHGVLAARPARRRLRDRGQEADERVLVVPAEGVANEGKGLAPHHVEEAPWVEAGKVAAV

SEQ ID NO: 56058 - protein, 227 aa, Glycine max
  Clone ID: 701135508_FLI.pep
RMALRCLVMSLSVLFTLGLARESHARDEDFWHAVWPNTPIPSSLRDLLKPGPASVEIDDHPMQIEETQYPKTFFYKEDLHPGKTMKVQFSKPPFQQPWGVGTWLKEIKDTTKEGYSFEELCIKKEAIEGEEKFCAKSLGTVIGFAISKLGKNIQVLSSSFVNKQDQYTVEGVQNLGDKAVMCHRLNFRLQYFTAMKSVKQQLSWFHWWLVMEPKLRHLLFATQILLE

SEQ ID NO: 56059 - protein, 417 aa, Zea mays
  Clone ID: UC-ZMROB73080H02_FLI.pep
LLHTTNSSSPPPGSSRKQQHCGSRCFVVSLLLVLLALVASDVYLSFPNRRRVLPLFPQQLLSRRQQRGGEGGCDIFRGEWVPDPDAPYYTNDTCKVIHEHYDCMGYGKPDLGFVNWRWQPDGCDLPRFNPWRFLHMMRGKTLAFVGDSLGRNHKDSLICLLTTVAEPTTSWPSSKHTVYYYADYNFTVAHFWAPYLVRHEQIDEDGPAHTGVWNLYLDEPDGVWAAHVAEFDYAVVSASSWFYRPSMLYEAGRLVGCHYCRLPNVTDLTLRYALRMATRAALRALSGADGRFRGTALLRTVDPSQYEGGEWNKDGNCVRTAPFRRGQNAVQGLEREFRTLQLEEFASAEKAATDGGGKVRMLLMDTTEAMILRADAHPSKYRGWTPEKHFTLHNDCVHWCLPGAIDTWNDMLLHMLK

SEQ ID NO: 56060 - protein, 346 aa, Glycine max
  Clone ID: 701136709_FLI.pep
FEFDSIEDCCLGVLMVSVNPNPAQGFYFFDPSNMTLPGVNNLPPPPPPAPAAPAAVEDPNKKIRKPYTITKSRESWTEQEHDKFLEALQLFDRDWKKIEAFVGSKTVIQIRSHAQKYFLKVQKNGTSEHVPPPRPKRKAAHPYPQKAPKTPTVSQVMGPLQSSSAFIEPAYIYSPDSSSVLGTPVTNMPLSSWNYNTTPQPGNVPQVTRDDMGLTGAGQAAPLNCCYSSSNESTPPTWPRSKRINQGDQGKPIKVMPDFAQVYSFIGSVFDPNSTNHLQKLQQMDPINVETVLLLMTNLSVNLMSPEFEDHKRLLSSYDTDSDKSKFVNICSKSFTNKSESAVLSA

SEQ ID NO: 56061 - protein, 298 aa, Zea mays
  Clone ID: UC-ZMROB73006D02_FLI.pep
ELSSSLSLSFSRSLCFLVEVQVPALMATEVAETPAPLAEAVPETPAEAPAAPAAEAKPTKAKKASAPKKRANPTHPPYAEMISEAVTSLKERTGSSQYAIAKFVEDKHKDKLPPNFRKLLLGQLKKLVAGGKLTKVKNSYKLPARAPAAAKPKPKSKTAVKKPKAGAKKPKAATKPKPKPKAKSPAKAKPAAKPKAAAKPAAKPKPAAAKPKAAAKPKAKPAAKAKPKAAAAKPKPAAKKAGRPAKAAKTSAKDTPGKKAAPAKKPAAAAKKAPAKKAAPAKKAATPSRKVPSRKAKK

SEQ ID NO: 56062 - protein, 332 aa, Glycine max
  Clone ID: 701137242_FLI.pep
ANTNTDPSLPSSLPHSLLQFHQHNHQFHQPSHNNSIIMIAVARKDMDRIKGPWSPEEDEALQKLVERHGPRNWSLISRSIPGRSGKSCRLRWCNQLSPQVEHRAFTPEEDETIIRAHARFGNKWATIARLLSGRTDNAIKNHWNSTLKRKCASFMMAGDEAVAVSPRPLKRSFSAGAAVPPPGSPSGSDFSESSAPGVVSVSPSHVFRPVPVRPIVETASSQDDADDAGPATSLSLSLPGVESAEISNRATTVPVMPVNTVAAPAPVPAEVGLGALNLSGEFMAVMHEMIRKEVRSYMEQQKNGMMCFQGMEMMEGFRNVSVKRIGISRVDS

SEQ ID NO: 56063 - protein, 429 aa, Zea mays
  Clone ID: UC-ZMROB73033D11_FLI.pep
SSIPMPSITHYVLDRLLETRSPVHVQKVVPKPPPPPPDKATPVPVSTARTRSSLASLYATPENTTLPDLPSSFPGTWSPYLINHKRRGASLARTFSQGDAGREVSQPNLPVMLPALPRGCEPTQVQEPEFVFQQAGNGQAEGESAVEEALNGKSVMLQKGKGSVIAEIEQEQPEFEFCQSLEALVKPVNVRRPLNGEAPKICESDTFEWRKPSSPLGTSVGTPGAEFYDAFEEISSDGGTRSSRGMDDDLREMRLSLLMEIERRTQTEEALEIWQQEWKNLSHHLSLVALSLPSPSIAEDSDCLKVDPGAELCQQITVSQLVAAAIARGFARAEVESEMETMIATKNFEIGRLSDRVQYYEAANREMSQRNQEAIEMSRQQRKGRKKRQKWFWASVGLAVTLGATAIAWSYVTPSQPQASADPSSAASQ

SEQ ID NO: 56064 - protein, 441 aa, Glycine max
  Clone ID: 701141717_FLI.pep
MGNCGTREESAVVSNAQVVQQLHHATSLGASARSQNAGSEKKHGHGHGHRHNLSECASDLSESCSTPHGNNSNNTLLYTHVIAFTLYELETITKSFRGDYILGEGGFGTVYKGYIDENVRVGLKSLPVAVKVLNKEGLQGHREWLTEVNFLGQLRHPNLVKLIGYCCEDDHRLLVYEFMFRGSLENHLFRKATVPLSWATRMMIALGAAKGLAFLHNAERPVIYRDFKTSNILLDSDYTAKLSDFGLAKAGPQGDETHVSTRVMGTYGYAAPEYVMTGHLTARSDVYSFGVVLLELLTGRKSVDKTRPGKEQSLVDWARPKLNDKRKLLQIIDPRLENQYSVRAAQKACSLAYYCLSQNPKARPLMSDVVETLEPLQSSSVGPGEVSLSGSNSGSAGPFAMNKISDYRMRHKFSNNVGPGATCRSPNPNCSPGGPATLRVR

SEQ ID NO: 56065 - protein, 443 aa, Zea mays
  Clone ID: UC-ZMROB73014A05_FLI.pep
AAALHCRADAARLCVACDRHVHAANALSRKHVRAPLCAGCAARPAAARVSLGADPAFLCADCCEGCAAASAARVSVEGFSGCPSAAELAASWGLDLRRAAVAVGDDGDGGDDDDPFLSVLDYSVLGVGVADTDLRDLYVPCDPPRVPVPDAGARPLRGEALCDQLAEMARRDEADTSHAHPHSDLSPRTPRRTSAASSGRLPSGKMAPPAALPVPAHPPPAAPQEVPLPYTSLLMMASANCSDLIGGGDRVGDTDEQLLWDCAAPSVPPTQIWDFNLGRSRHHDEKSALEVGYGSNHGGFMIKSYSDMLKDISSGTTKDLEDIYDSRYCSTAEDIMSSNICQLSSKNVSTGSNKRKVRSCAASTMDGPTTSGNHNHVPASASGPGAALTREISFGDQTVSAPAAETERPAAVRIDSETLAQNRDSAMQRYREKKKNRRHGSMS

SEQ ID NO: 56066 - protein, 254 aa, Glycine max
  Clone ID: 701151545_FLI.pep
LGRKNIMGRGRVELKRIENKINRQVTFAKRRNGLLKKAYELSVLCDAEVALIIFSTRGKLYEFCSTNSMLKTLERYQKCSYGAVEVSKPGKELESSYREYLKLKARFESLQRTQRNLLGEDLGPLNTKDLEQLERQLDSSLKQVRSTKTQFMLDQLADLQNKEHMLVEANRSLTMKLEEINSRNQYRQTWEAGEQSMPYGTQNAHSQGFFQPLECTPTLQIGSDYRYIPEASEQQLAATTQAQQVNGFIPGWML

SEQ ID NO: 56067 - protein, 447 aa, Zea mays
  Clone ID: UC-ZMROB73053B12_FLI.pep
PIGATDLGKRSSSEHADENRSGAAIGEELSQGERESLVEQNGQGGDVNSSQTSAASGKMDDNEPDPASSSDTTTIPDEDTSNESQKAEQDNCDLYRGEWVTDSSGPLYTNNSCPIITQMQNCQGNGRPDKDYENWRWKPEQCNLPRFDARKFLELMRGKTLAFVGDSVARNQMESLLCILWQVDVPQNRGNKRMHKWLFKSTKTTIARVWSSWLVHRSTEAVGIAPKGIDKVFLDIPDETFMEFLPRFDVLVLSSGHWFAKRSAYILNENVVGGQLWWPRKAGKMQVNNVDAFGISVETCLTAVVNNPNFTGLAIVRTWSPDHYEGGAWNTGGSCTGKVKPLNEVVRNGFTDAMHEKQVAGFRKAVKNAGEHGSRLKLMDITEPFAFRADGHPGPYRSPDPNKKTQRGPDGKPPPQDCLHWCMPGPVDTWNEMLLETIRREFETDRT

SEQ ID NO: 56068 - protein, 191 aa, Glycine max
  Clone ID: 701151606_FLI.pep
GLSIGRYWTALAAGNCNGCSYAGTFRPPKCQVGCGQPTQRWYHVPRSWLKPDHNLLVVFEELGGDPSKISLVKRSVSSVCADVSEYHPNIRNWHIDSYGKSEEFHPPKVHLHCSPGQTISSIKFASFGTPLGTCGNYEKGVCHSSTSHATLEKKCIGKPRCTVTVSNSNFGQDPCPNVLKRLSVEAVCAPN

SEQ ID NO: 56069 - protein, 622 aa, Zea mays subsp. mexicana
  Clone ID: UC-ZMFLTEOSINTE39C11_FLI.pep
HVLPRRAGIDIYGRPVGTRGTPHLPVVRSSLSSSSLLLHRDRDSDVVAVDRTVRRAVPVAVDHRQLVSGAVGGGGVVGGDEAAGGVVGGLPLLHPLDGRGRAAGDARAPRHRLPRRVLREEPLEYHPVVVGLLVHGRVVREHLGGAVHHLIRHLLFGEGFESIDPVVAHSVTELFFLPVQNMLGQVRVLLVVERLPQDPLLDATQVLVVHFPFGVHAHRDVDELLVEERHADLQAPRRRRLVGAQAVVLVQGLHLAAGLPVELLPVGGEVEVEVAAQELVGALPGQHHLHAQRLDLASHQEHGRAGPDRRHVVRLVVVDHLLDRVDAVLYGEMELVMGGSEVVSDLSCGLQVRGALEADDKGVELCAELFGGVGLDEVALGDGGDEGGVEAAGEEDPERDVGHEPLDNRLLEGLSKDERLVRRPGHLLLEPVRGVPPAEPGAGGAGVEVARREDLEAHAVLVQRLHLGRHPDGTVAAPADVERVDADGVACRHVGPVSRVVEHEREDSVQHVHEVLAVLLVQGDDDLAVTSGAEAVRAGELLPDVLVVVDLSIGHHDDGTVLVEQRLVAGQRGDDGEPLLRQEVALVLVEARPVGAPVLQPSGAGEDASPPGLGAVGASEHG

SEQ ID NO: 56070 - protein, 355 aa, Glycine max
  Clone ID: 701204172_FLI.pep
NNFCYFLLQPHFCSAIIMGKVKIGINGFGRIGRLVARVALQRDDVELVAVNDPFITTDYMTYMFKYDSVHGHWKHHDVTVKDEKTLLFGDKPVTIFGHRNPEEIPWGSTGADIIVESTGVFTDKDKAAAHLKGGAKKVIISAPSKDAPMFVVGVNEHEYKPELDIISNASCTTNCLAPLAKVINDRFGIVEGLMTTVHSITATQKTVDGPSAKDWRGGRAASFNIIPSSTGAAKAVGKVLPALNGKLTGMAFRVPTVDVSVVDLTVRLEKEASYDEIKNAIKEESEGKLKGILGYTEDDVVSTDFIGDSRSSIFDAKAGIALNKNFVKLVSWYDNEWGYSSRVIDLLVFVAKKSL

SEQ ID NO: 56071 - protein, 347 aa, Oryza sativa
  Clone ID: uC-osroM202017C02_FLI.pep
QFCSIGLMGRAPCCDKNNVKKGPWSPEEDAKLKEFIEKHGTGGNWIALPQKAGLRRCGKSCRLRWLNYLRPNIKHGEFTEHEDRIICNMFASIGSRWSIIASQLPGRTDNDIKNYWNTKLKKKLLGSSAVAAAAPPRIQRHQQSHHRSSLLLPNSPSLNPGGGYPGFFSGAGGFHPQEPAMPLTLPTTTQEFMLGTHSGLPMVSASALLNHLHGASHHHQLLVKEEISSNMIVFGSDQQSCSSSDGLAAPHSHNHHGNREFILDGYSYGVGYGSSCIDQVDNDKLFQHHHQQDQAQEQQQQLVYNYDEIKQLLMNTSTTSNSINAGQDHGGSMEAGLIGSQGKVTMM

SEQ ID NO: 56072 - protein, 566 aa, Glycine max
  Clone ID: 701204495_FLI.pep
VGSVAVNLGQITLSNNQLSGALSPSIGNFSSVQKLLLDGNMFTGRIPTQIGRLQQLSKIDFSGNKFSGPIAPEISQCKLLTFLDLSRNELSGDIPNEITGMRILNYLNLSKNHLVGSIPSSISSMQSLTSVDFSYNNLSGLVPGTGQFSYFNYTSFLGNPDLCGPYLGACKGGVANGAHQPHVKGLSSSLKLLLVVGLLLCSIAFAVAAIFKARSLKKASEARAWKLTAFQRLDFTVDDVLHCLKEDNIIGKGGAGIVYKGAMPNGDHVAVKRLPAMSRGSSHDHGFNAEIQTLGRIRHRHIVRLLGFCSNHETNLLVYEYMPNGSLGEVLHGKKGGHLHWDTRYKIAVEAAKGLCYLHHDCSPLIVHRDVKSNNILLDSNHEAHVADFGLAKFLQDSGTSECMSAIAGSYGYIAPEYAYTLKVDEKSDVYSFGVVLLELITGRKPVGEFGDGVDIVQWVRKMTDSNKEGVLKVLDPRLPSVPLHEVMHVFYVAMLCVEEQAVERPTMREVVQILTELPKPPGSKEGDLTITESSLSSSNALESPSSASKEDQNPPQSPPPDLLSI

SEQ ID NO: 56073 - protein, 693 aa, Arabidopsis thaliana columbia
  Clone ID: JC-ATXLIB327409P2D06_FLI.pep
MEQEKSLDPQLWHACAGSMVQIPSLNSTVFYFAQGHTEHAHAPPDFHAPRVPPLILCRVVSVKFLADAETDEVFAKITLLPLPGNDLDLENDAVLGLTPPSSDGNGNGKEKPASFAKTLTQSDANNGGGFSVPRYCAETIFPRLDYSAEPPVQTVIAKDIHGETWKFRHIYRGTPRRHLLTTGWSTFVNQKKLIAGDSIVFLRSESGDLCVGIRRAKRGGLGSNAGSDNPYPGFSGFLRDDESTTTTSKLMMMKRNGNNDGNAAATGRVRVEAVAEAVARAACGQAFEVVYYPRASTPEFCVKAADVRSAMRIRWCSGMRFKMAFETEDSSRISWFMGTVSAVQVADPIRWPNSPWRLLQVAWDEPDLLQNVKRVSPWLVELVSNMPTIHLSPFSPRKKIRIPQPFEFPFHGTKFPIFSPGFANNGGGESMCYLSNDNNNAPAGIQGARQAQQLFGSPSPSLLSDLNLSSYTGNNKLHSPAMFLSSFNPRHHHYQARDSENSNNISCSLTMGNPAMVQDKKKSVGSVKTHQFVLFGQPILTEQQVMNRKRFLEEEAEAEEEKGLVARGLTWNYSLQGLETGHCKVFMESEDVGRTLDLSVIGSYQELYRKLAEMFHIEERSDLLTHVVYRDANGVIKRIGDEPFSDFMKATKRLTIKMDIGGDNVRKTWITGIRTGENGIDASTKTGPLSIFA

SEQ ID NO: 56074 - protein, 807 aa, Arabidopsis thaliana columbia
  Clone ID: JC-ATXLIB327413P4A07_FLI.pep
ALVSNNHEAYSSCLPKCVKILERLARNQDVPQEYTYYGIPSPWLQVKAMRALQYFPTIEDPSTRKALFEVLQRILMGTDVVKNVNKNNASHAVLFEALSLVMHLDAEKEMMSQCVALLGKFISVREPNIRYLGLENMTRMLMVTDVQDIIKKHQSQIITSLKDPDISIRRRALDLLYGMCDVSNAKDIVEELLQYLSTAEFSMREELSLKAAILAEKFAPDLSWYVDVILQLIDKAGDFVSDDIWFRVVQFVTNNEDLQPYAASKAREYMDKIAIHETMVKVSAYILGEYGHLLARQPGCSASELFSILHEKLPTVSTPTIPILLSTYAKLLMHAQPPDPELQKKVWAVFKKYESCIDVEIQQRAVEYFELSKKGPAFMDVLAEMPKFPERQSSLIKKAENVEDTADQSAIKLRAQQQPSNAIVLADPQPVNGAPPPLKVPILSGSTDPESVARSLSHPNGTLSNIDPQTPSPDLLSDLLGPLAIEAPPGAVSYEQHGPVGAEGVPDEIDGSAIVPVEEQTNTVELIGNIAERFHALCLKDSGVLYEDPHIQIGIKAEWRGHHGRLVLFMGNKNTSPLTSVQALILPPAHLRLDLSPVPDTIPPRAQVQSPLEVMNIRPSRDVAVLDFSYKFGTNVVSAKLRIPATLNKFLQPLQLTSEEFFPQWRAISGPPLKLQEVVRGVRPLALPEMANLFNSFHVTICPGLDPNPNNLVASTTFYSETTGAMLCLARIETDPADRTQLRLTVGSGDPTLTFELKEFIKEQLITIPMGSRALVPAAGPAPSPAVQPPSPAALADDPGAMLAGLL

SEQ ID NO: 56075 - protein, 98 aa, Glycine max
  Clone ID: 701207942_FLI.pep
RYNMVDQGLLKEPVFSFWFNRNPEEEEGGEIVFGGVDPAHYKGKHTYVPVTRKGYWQVIIFLILNNAFFFYLFLYVNFYFCFQFDMGDVLIGGKPTGM

SEQ ID NO: 56076 - protein, 93 aa, Arabidopsis thaliana columbia
  Clone ID: JC-ATXLIB327431P2D03_FLI.pep
QRREEKKEDFFVFGQLIFTKNSFFFFYLEKRREQYKKKAYGKKGDETKPSWFSFSHFQFFFRDFFLPLSLLLLLLILLFFIYFIVMTICYRLL

SEQ ID NO: 56077 - protein, 552 aa, Glycine max
  Clone ID: 701208018_FLI.pep
QSEHFSLMKMWLGKKIIFLQTLLCFSIVGTNSHGLKEYHFVLKEAHYRRLCSSKPILTVNGQFPGPTVRAYYGETIYVNVHNKGKYNITLHWHGVKQPRNPWSDGPEYITQCPIKPGGKFRQMLIFSIEEGTIWWHAHSDWARATVHGAIYIYPRKGESYPFPTPDEEVPIVLGEWWKSDVSDVYEEFLRNGGSPNESDAITINGQPGDLYPCSKSETFKLNVHYGKTYHLRMVNAAMNLVLFFAVSKHNLTVVGVDSAYSKPLTRDYICIAPGQTADVLLHANQEPNDYYMAARAYSSALGVAFNNGITTARIHYHENHAPNKSPSLPYLPLYNDTKAVFDYYVSIKGLNEADPYQVPTNITTHMLTTLSINTFPCPENQTCAGPNGTRLASSVNNISFENPTIDILEAYYYHIKGVYHKGLPKFPPLKFDFNAEYLPLELQIPKKGTKVAVIKFGSTVELVFQGTNLVTGIDHPMHLHGTSFFAVGYGFGNFDKHKDRKTYNLIDPPLMNTILVPKNGWASIRYRASNPGMWHEKIDLFKCYFLFYCFSR

SEQ ID NO: 56078 - protein, 236 aa, Arabidopsis thaliana columbia
  Clone ID: JC-ATXLIB327411P3G02_FLI.pep
RTVDRTGGHPLGQLCPLVRRSKMGFCSESFRFEGGGRNIRIGLNRTGKSCRLRWVNYLHPGLKRGKMTPQEERLVLELHAKWGNRWSKIARKLPGRTDNEIKNYWRTHMRKKAQEKKRPMSPTSSSSNCCSSSMTTTTSQDTGGSNGKMNQECEDGYYSMDDIWREIDQSGANVIKPVKDNYYSEQSCYLNFPPLASPTWESSLESIWNMDADESKMSSFAIDQFPLSFEHGSGRL

SEQ ID NO: 56079 - protein, 289 aa, Glycine max; identical to SEQ ID NO: 54834
  Clone ID: 701211856_FLI.pep

SEQ ID NO: 56080 - protein, 632 aa, Arabidopsis thaliana columbia
  Clone ID: JC-ATXLIB327407P1G04_FLI.pep
GLVSLEPMKIAEILKDRPSWFRDCRSLEVFTMFPAGNGGTIELVYMQTYAPTTLAPARDFWTLRYTTSLDNGSFVVCERSLSGSGAGPNAASASQFVRAEMLSSGYLIRPCDGGGSIIHIVDHLNLEAWSVPDVLRPLYESSKVVAQKMTISALRYIRQLAQESNGEVVYGLGRQPAVLRTFSQRLSRGFNDAVNGFGDDGWSTMHCDGAEDIIVAINSTKHLNNISNSLSFLGGVLCAKASMLLQNVPPAVLIRFLREHRSEWADFNVDAYSAATLKAGSFAYPGMRPTRFTGSQIIMPLGHTIEHEEMLEVVRLEGHSLAQEDAFMSRDVHLLQICTGIDENAVGACSELIFAPINEMFPDDAPLVPSGFRVIPVDAKTGDVQDLLTANHRTLDLTSSLEVGPSPENASGNSFSSSSSRCILTIAFQFPFENNLQENVAGMACQYVRSVISSVQRVAMAISPSGISPSLGSKLSPGSPEAVTLAQWISQSYSHHLGSELLTIDSLGSDDSVLKLLWDHQDAILCCSLKPQPVFMFANQAGLDMLETTLVALQDITLEKIFDESGRKAICSDFAKLMQQGFACLPSGICVSTMGRHVSYEQAVAWKVFAASEENNNNLHCLAFSFVNWSFV

SEQ ID NO: 56081 - protein, 811 aa, Glycine max
  Clone ID: 701212338_FLI.pep
AQRKLLISASIHYPRSVPAMWPGLVQTAKEGGVDVIETYVFWNGHELSPGNYYFGGRFDLVKFAQTVQQAGMYLILRIGPFVAAEWNFGGVPVWLHYVPGTVFRTYNQPFMYHMQKFTTYIVNLMKQEKLFASQGGPIILAQIENEYGYYENFYKEDGKKYALWAAKMAVSQNTGVPWIMCQQWDAPDPVIDTCNSFYCDQFTPTSPNRPKIWTENWPGWFKTFGGRDPHRPAEDVAFSVARFFQKGGSVHNYYMYHGGTNFGRTAGGPFITTSYDYDAPVDEYGLPRLPKWGHLKELHRAIKLCEHVLLNGKSVNISLGPSVEADVYTDSSGACAAFISNVDDKNDKTVEFRNASFHLPAWSVSILPDCKNVVFNTAKVTSQTSVVAMVPESLQQSDKVVNSFKWDIVKEKPGIWGKADFVKNGFVDLINTTKDTTDYLWHTTSIFVSENEEFLKKGNKPVLLIESTGHALHAFVNQEYEGTGSGNGTHAPFTFKNPISLRAGKNEIALLCLTVGLQTAGPFYDFVGAGLTSVKIKGLNNGTIDLSSYAWTYKIGVQGEYLRLYQGNGLNNVNWTSTSEPPKMQPLTWYKAIVDAPPGDEPVGLDMLHMGKGLAWLNGEEIGRYWPRKSEFKSEDCVKECDYRGKFNPDKCDTGCGEPTQRWYHVPRSWFKPSGNILVLFEEKGGDPEKIKFVRRKVSGACALVAEDYPSVALVSQGEDKIQSNKNIPFARLACPGNTRISAVKFASFGSPSGTCGSYLKGDCHDPNSSTIVEKACLNKNDCVIKLTEENFKSNLCPGLSRKLAVEAVCS

SEQ ID NO: 56082 - protein, 99 aa, Arabidopsis thaliana columbia
  Clone ID: JC-ATXLIB327408P4A09_FLI.pep
EKSKAENRAQKKISDVHAWENSKKAAVEAQLRKIEEKLEKKKAQYGEKMKNKVAAIHKLAEEKRAMVEAKKGEELLKAEEMGAKYRATGVVPKATCGCF

SEQ ID NO: 56083 - protein, 517 aa, Glycine max
  Clone ID: 701215045_FLI.pep
AIPSLINQPQRTPSLTFSFLLFLAICTPLDAAHTDFAGSACLKVSPSHFAGSVTEVIAAIRQLASILSRFGSPLANFRLSTAIADCLDLLDLSSDVLSWALSASQNPKGKHNSTGNLSSDLRTWLSAALAHPETCMEGFEGTNSIVKGLVSAGIGQVVSLVEQLLAQVLPAQDQFDAASSKGQFPSWIKPKERKLLQAIAVTPDVTVALDGSGNYAKIMDAVLAAPDYSMKRFVILVKKGVYVENVEIKKKKWNIMILGQGMDATVISGNRSVVDGWTTFRSATFAVSGRGFIARDISFQNTAGPEKHQAVALRSDSDLSVFFRCGIFGYQDSLYTHTMRQFFRDCTISGTVDYIFGDATAVFQNCFLRVKKGLPNQKNTITAHGRKDPNEPTGFSFQFCNITADSDLIPSVGTAQTYLGRPWKSYSRTVFMQSYMSEVIGAEGWLEWNGNFALDTLYYAEYMNTGAGAGVANRVKWPGYHALNDSSQASNFTVSQFIEGNLWLPSTGVTFTAGLTV

SEQ ID NO: 56084 - protein, 63 aa, Arabidopsis thaliana columbia
  Clone ID: JC-ATXLIB327413P2A08_FLI.pep
VVVDLHMIGYCSVQIRKPIKSNLPVLEFSSLIHIYMTKHFDFVMFVFVFGVYISYQIIILIFL

SEQ ID NO: 56085 - protein, 751 aa, Glycine max
  Clone ID: 701135316_FLI.pep
GFQGTHSIAVSLESTKRHRFIDLLPPRPGLQELVPIQAANILELQLIPHSPLSMASTLKSGGIHTGAINDDLYKELWHACAGPLVTLPREGERVYYFPQGHMEQLEASMYEGLEQQMPSFNLPSKILCKVVNVHLRAEPETDEVYAQITLLPEADQSEVTSPDDPLPESPRVKIHSFCKTLTASDTSTHGGFSVLRRHADDCLPPLDMSQQPPWQELVATDLHGNEWHFRHIFRGQPKRHLLTTGWSVFVSSKKLAAGDAFIFLRGENGELRVGVRRVMRQQSNVPSSVISSHSMHLGVLATASHAIATGTLFSVFYKPRTSRSEFIVSVNKYLEVQSHKLSVGMRFKMRFEGDEIPERRFSGTIVGVGDNKSSSVWPDSEWRSLKVQWDEPSSILRPDRVSSWELEPLVSTTLANSQPTQRNKRARPLILPSTMPDSSLQGGFAGLVVQNFFVILLPILFFYIIIFLCAPGIWKSSVESTSFSYCDPQQGRGLYPSPKFNSSATNFIGFSGNSSVGSPSNKSIYWSNRMENNLESISAIALKEAGEKRQGTGNGCRLFGIQLLENSNAEGNLQTVTLSGRVGDDRSVPSLDAESDQHSEPSNANRSDIPSVSCDAEKSCLQSPQESQSKQVHMQGMAVGRAVDLTRFDGYEDLLRKLEDMFNIKTELCGSLKKWQVVYTDNEDDMMMVGDDPWDEFCSVVRKIFIYTAEEVKKLSPKIRLPMNEKVNPSKQDSEAIVNPEDQSSNMGPSC

SEQ ID NO: 56086 - protein, 270 aa, Arabidopsis thaliana columbia
  Clone ID: JC-ATXLIB327414P4F10_FLI.pep
SMEGCPRNREIGPKLLDLIPQGRKWYQEDKNNTDQEKKLELRLGPPGGDEEDHSAIKKKNTEIRNIKKETEDKSFHCFNGNHFSPSNKTTSVPHISQKRTAPGPVVGWPPVRSFRKNLASTSSSKLGNESSHGGQINKSDDGEKQVETKKEGMFVKINMDGVPIGRKVDLNAYNSYEQLSFVVDKLFRGLLAAQRDISDGQGEEKPIIGLLDGKGEFTLTYEDNEGDKMLVGDVPWQMFVSSVKRLRVIKSSEISSALTFGCSKQEKMMH

SEQ ID NO: 56087 - protein, 350 aa, Glycine max
  Clone ID: 701202303_FLI.pep
ILLMGPTGSGKTLLAKTLARFVNVPFVIADATSLTQAGYVGEDVESILYKLLMVADYNVAAAQQGIVYIDEVDKITKKAESLNISRDVSGEGVQQALLKMLEGTVVNVPEKGARKHPRGDNIQIDTKNILFICGGAFVDLEKTISERRHDSSIGFGAPIRANMRTGKVTEAAVASSLLETVESSDLIAYGLIPEFVGRFPILVSLSALTENQLIQVLSEPKNALGKQYKKMFQMNGVKLHFTENALRSIARKAISKNTGARGLRSILENVLVDAMYEIPDIRTDDDVIDAVVVDEEAVGGEGRGRGAKILYGKGALDQYLSEQKNDSETMEASAADNEADTELPSIVASM

SEQ ID NO: 56088 - protein, 341 aa, Arabidopsis thaliana columbia
  Clone ID: JC-ATXLIB327417P1G12_FLI.pep
SHFPTTKASIIIIIIIMDPDPDHNHRPNFPLQLLDSSTSSSSTSLAIISTTSEPNSEPKKPPPKRTSTKDRHTKVEGRGRRIRMPAMCAARVFQLTRELGHKSDGETIEWLLQQAEPAVIAATGTGTIPANFTSLNISLRSSRSSLSAAHLRTTPSSYYFHSPHQSMTHHLQHQHQVRPKNESHSSSSSSSQLLDHNQMGNYLVQSTAGSLPTSQSPATAPFWSSGDNTQNLWAFNINPHHSGVVAGDVYNPNSGGSGGGSGVHLMNFAAPIALFSGQPLASGYGGGGGGGGEHSHYGVLAALNAAYRPVAETGNHNNNQQNRDGDHHHNHQEDGSTSHHS

SEQ ID NO: 56089 - protein, 478 aa, Glycine max
  Clone ID: 701205807_FLI.pep
EYQRQSHSCLIPHFITPIHLHHNTTYIRTSFVIEAAMEEETSDAMNLDLNLGPGPEPETGPMSNEAVNLDDWIGEPLQRISEAVRRARQRWRWRHLPLPHPEFHAHFPTEATRHFQIPPEARNISVELNHFLVNSGNGSALQAGEGSVAAEERMEEVPKACDNVNGVAEDETSQKKEDVEKGSGNDGDFFDCNICLDLARDPVVTCCGHLFCWPCLYRWLHLHSDAKECPVCKGEVTLKSVTPVYGRGNNVRGPEEDSALKIPPRPQAKRVESLRQTIQRNAFALPVEEMIRRLGSRIDLTRDLVQPPEPDAARETAERTTSLLSRFLTARGMRREHQNLVAPPEDVMGLAQNNVNTSEAGDPRSRVQSHLLRRTQSHRATLSTLSSALTSAERLVEAYFRSNPLGRNQEQPPPPVDDRDSFSSIGAVINSESQLDTAVEIDSMVSLSTSSSRRRNDASRVSDVDSGDSRAPRRRRLN

SEQ ID NO: 56090 - protein, 197 aa, Arabidopsis thaliana columbia
  Clone ID: JC-ATXLIB327419P4D06_FLI.pep
WRIISSIEQKEESRGNDDHVTAIREYRSKIETELSGICDGILKLLDSRLIPAAASGDSKVFYLKMKGDYHRYLAEFKTGQERKDAAEHTLAAYKSAQDIANAELAPTHPIRLGLALNFSVFYYEILNSPDRACNLAKQAFDEAIAELDTLGEESYKDSTLIMQLLRDNLTLWTSDMQDDAADEIKEAAAPKPTEEQQ

SEQ ID NO: 56091 - protein, 302 aa, Glycine max
  Clone ID: 701206518_FLI.pep
KNLVDEVWINRPPAEINAVIVHPVKFAGRSVADKLKDLRKKLVHEQTRGIIFTALDEVAWLYNIRGSDVAYCPVVHAFAIVTSNSAFIYVDKQKVSVEVQTHLVENGIEIQEYTAVSSDATLLATDELDAVSTAKAALAETEARKIPSEIDKSVNGEHQAEENSNDLIWADPVSCCYALYAKLNPDTVLLQQSPLALAKALKNSVELDGLKKAHIRDGAAVVQYLVWLDKKMQDIYGASGYFLEKDSVKKEKHLQSLKLTEVTVSDQLEGFRASKEVELTEQLSIYLDMLFLEKILLKKKKW

SEQ ID NO: 56092 - protein, 233 aa, Arabidopsis thaliana columbia
  Clone ID: JC-ATXLIB327423P2E04_FLI.pep
ELENKLEPERKVKLAQELGLQPRQVAVWFQNRRARWKTKQLEKDYGVLKTQYDSLRHNFDSLRRDNESLLQEISKLKTKLNGGGGEEEEEENNAAVTTESDISVKEEEVSLPEKITEAPSSPPQFLEHSDGLNYRSFTDLRDLLPLKAAASSFAAAAGSSDSSDSSALLNEESSSNVTVAAPVTVPGGNFFQFVKMEQTEDHEDFLSGEEACEFFSDEQPPSLHWYSTVDHWN

SEQ ID NO: 56093 - protein, 428 aa, Glycine max
  Clone ID: 701213564_FLI.pep
LEPESVKFMAREILVLRRLDHPNVVKLEGLVTSRMSCSLYLVFEYMEHDLAGLAAGQGVKFTEPQVKCFMKQLLSGLEHCHSRGVLHRDIKGSNLLIDNEGILKIADFGLATFYDPKIKQAMTSRVVTLWYRPPELLLGATVYGVGIDLWSAGCILAELLAGKPIMPGRTEVEQLHKIFKLCGSPSEEYWRKYRLPNATIFKPQQPYKRCILETYKDFPPSSLPLIETLLAIDPDDRCTASAALNSEFFTTEPYACEPSSLPKYPPSKELDVKLRDEEARRQKALNGKASAVDGAKKVRVRERGRAVPAPEANAEIQTNLDRWRVVTHANAKSKSEKFPPPHQDGAVGYPQDASNKGPVSFGAPDTSFSSGIFNSKPSGTVRNHGAAGLHRGRKTKKDESQMASSWKFMRPFKPSTVGLSMDLLFRSK

SEQ ID NO: 56094 - protein, 162 aa, Arabidopsis thaliana columbia
  Clone ID: JC-ATXLIB327424P4G06_FLI.pep
KTQVNDLKGEHSSLLKQLSNMNHKYDEAAVGNRILKADIETLRAKVKMAEETVKRVTGMNPMLLGRSSGHNNNNRMPITGNNRMDSSSIIPAYQPHSNLNHMSNQNIGIPTILPPRLGNNFAAPPSQTSSPLQRIRNGQNHHVTPSANPYGWNTEPQNDSAW

SEQ ID NO: 56095 - protein, 159 aa, Arabidopsis thaliana columbia
  Clone ID: JC-ATXLIB327431P1D04_FLI.pep
EARGGRPSRTTGSGYWKATGSPGPVFSKDNKMIGAKKTMVFYTGKAPTGRKTKWKMNEYHAVDETVNASTIPKLRREFSLCRVYITTGSSRAFDRRPEGVLQTERMLTSDVAVAETSFRVESSLETSISGGEHIDVSMNTEFVDGLSEPMWDWEQLTWP

SEQ ID NO: 56096 - protein, 378 aa, Glycine max
  Clone ID: 701213893_FLI.pep
SGSKVIIYRKSKGHHITMKALILVGGFGTRLRPLTLSVPKPLVDFANKPMILHQIEALKAIGVNEVVLAINYQPEVMLNFLKEFEAKLGIKITCSQETEPLGTAGPLALARDKLIDDSGEPFFVLNSDVISEYPLKEMIEFHKTHGGEATIMVTKVDEPSKYGVVVMEETTGQVERFVEKPKLFVGNKINAGIYLLNPSVLDRIELRPTSIEKEVFPKIAAEKKLYAMVLPGFWMDIGQPKDYISGLTLYLDSLRKKSPSKLASGPHFVGNVIVHETATIGEGCLVGPDVAIGPGCVVESGVRLSRCTVMRGVRIKKHTCISNSIIGWHSTVGQWARVENMTILGEDVHVCDEVYSNGGVVLPHKEIKSNILKPEIVM

SEQ ID NO: 56097 - protein, 334 aa, Arabidopsis thaliana columbia; identical to SEQ ID NO: 41989
  Clone ID: JC-ATXLIB327432P4F01_FLI.pep

SEQ ID NO: 56098 - protein, 558 aa, Glycine max
  Clone ID: JC-GMLE01810013G01_FLI.pep
RSLRSLYLGVVWPGPTVFPDWFHPGTQSFWSDQFDSFFNADTGVDIDYLWIDMNEAANFCVYGQCSNLTAATQFAEENNFPPEPPPVRDSSPIALPGFPDDFQPGSNSTNMKRQEAPSGSRMGLPGRNLIDPPYMIQNAAGSLSNKTIDTDLVHYNGLVEYDTHNLYGTMMSNTSVNAMRSRRPDERALVITRSTFLGAGKYVAHWLGDNLSNWNLYRTSIAQMLAFNSIFQIPMVGSDICGFGSNTTETLCARWMMLGAFYPFMRNHNELGAISQEAYRWESVAAASRYAINIRYRMLDYFYTAFYEQTVDGTPSLNPLFYIYPEDANTFGIDTQFFWGGSVLISPVLEENSTSVDIYLPDDVFYDWNDGLSPVRGNGETVTLDDVDFQTIPIHIRGGSILPLRTEGANTTTLLRTKPFEVIVAPSLNGTANGSLYLDDGISLEQTSTTYIQFSWNGSLLSVRGSYDYDTGSTIDGISMLGITSPPRRVTYMGTPLTTTYNETTQVLSITCGIPLNADADVYFDQIQSFTGGSERTGLTSMWLLSGLSAAVAGLVLL

SEQ ID NO: 56099 - protein, 208 aa, Arabidopsis thaliana columbia
  Clone ID: JC-ATXLIB327433P1F02_FLI.pep
GRDEPERGNSNQQFTQDLFVPSSGKRKRDDSSAHYQNGGSIPQQDGASDAIPEANFECAALRITYVGDRKIPRDLIGSSSKIPQVDGPMPDPYDEMLSTPNIYSYQGPNEEFNEARTPAPNEIQTSTPVAVPNDIIEDDEELLNEDDDDDELDDLESGEDMNTQHLVLAQFDKVTRTKSRWKCSLKDGIMHINDKDILFNKATGEFDF

SEQ ID NO: 56100 - protein, 1082 aa, Glycine max
  Clone ID: JC-GMLE01810018D04_FLI.pep
IGSNRSCNFPLNDQTISGNLCKIKHTQGDGSAVAVLESMGSKGSVLVNGTHVKKNTSCVLNSGDEVVFGVLGNHSYIFQQLNTEVAVRGAEVQSGIGKFLPLERRSGDPSAVDGASILASLSNRQDLTRWKSPSQTSSKPHQGTDVSSRSVHHDCTETELDGSESTPNVRSDKAAEVRTSDKNSTMDCNPDAGAEAGNVKISGVNDFLRPFFRILAQPSCKLKLSRSICKQVLEERNGTLDMQAASTLGTSVRCAVFKADVHAAILDGKEIDASFDNFPYYLSENTKNVLVAACFMHLRHKEHEKFTADLTTINPRILLSGPAGSEIYQEMLVKALAKYFGAKLLIFDSHLLLVGLSSKEAELLKDGLNAEKSFGCTKLSPTEDMARIMDPLASEIETPSPSNAPTSYGFESQPKLETDNMPSTSGTAKSCSFKLGDRVKFSCSSSCGVYQTSPRGPSNGSRGKVVLLFDDNPLSKIGVRFDKPIPDGVDLGGACEGGQGFFCNVTDLRLESSAVEELDKLLIHSLFEVVFSESRSAPFILFMKDAEKSIVGNGDSHSFKSKLENLPDNVVVIGSHTQNDSRKEKSHPGGLLFTKFGSNQTALLDLAFPDSFGRLHDRGKEAPKQNRTLTKLFPNKITIHMPQDEALLASWKQQLDRDVETLKIKGNLHHLRTVLGRCGMECEGLETLCIKDQTLTNENAEKIIGWALSHHLMQNSEAKPDSKLVLSCESILYGIGILQSIQNESKSLKKSLKDVVTENEFEKRLLADVIPPSDIDVTFDDIGALEKVKDTLKELVMLPLQRPELFCKGQLTKPCKGILLFGPPGTGKTMLAKAIATEAGANFINISMSSITSKWFGEGEKYVKAVFSLASKISPSVIFVDEVDSMLGRRENPGEHEAMRKMKNEFMVNWDGLRTKETERVLVLAATNRPFDLDEAVIRRMPRRLMVNLPDAPNRAKILKVILAKEELSPDVDLDAVASMTDGYSGSDLKNLCVTAAHRPIKEILEKEKKERAAALAEGQPAPALCSSGDVRSLNMEDFKYAHQQVCASVSSESVNMTELLQWNELYGEGGSRVKKALSYFM

SEQ ID NO: 56101 - protein, 320 aa, Arabidopsis thaliana columbia
  Clone ID: JC-ATXLIB327433P2A08_FLI.pep
SLNASKVCPQLYLKKMSVSVAAEHDYIGLSEFPTMEATTMSDKTKTRDNNNGLNFKATELRLGLPGSESPERVDSRFLALNKSSCPVSGAKRVFSDAINDSNKWVFSPGSTTATGDVGSGSGPRTSVVKDGKSTTFTKPAVPVKEKKSSATAPASKAQVVGWPPIRSFRKNSMASSQSQKPGNNSETEEAEAKSGPEQPCLYVKVSMEGAPYLRKIDLKTYKSYLELSSALEKMFSCFTIGQFGSHGGCGRDGLNESRLTDLLRGSEYVVTYEDKDSDWMLVGDVPWEMFICSCKKLRIMKSSEAIGLAPRVMEKCRSRN

SEQ ID NO: 56102 - protein, 450 aa, Glycine max
  Clone ID: UC-GMFLMINSOY028A10_FLI.pep
RDRRMKMKKKRKESEASGRSNLPDEISKSHYSLERRSRLIKRCREDGVVATVPPSRGASLFLTPSRGLKRKIGCIDKATQMGRSVRIEDDYVTGGSAIGQGKFGSVTVCRARANGAEHACKTLRKGEETVHREVEIMQHLSGHPGVVTLEAVYEDEECWHLVMELCSGGRLVDRMKEGPCSEHVAAGILKEVMLVVKYCHDMGVVHRDIKPENILLTAAGKIKLADFGLAIRISEGQNLTGVAGSPAYVAPEVLLGRYSEKVDIWSSGVLLHALLVGGLPFKGDSPEAVFEEIKNVKLDFQTGVWESISKPARDLVGRMLTRDVSARITADEVLRHPWILFYTERTLKMLPVKSKLKLQNAAACQNESGLVGGNKIVDDGSLDEDYSSPFSSSESCNSEYHEDCAWIDALSTAVSRVRISETKRTKLWGSTSPLDQQGSSNMKTNLCKAF

SEQ ID NO: 56103 - protein, 503 aa, Glycine max
  Clone ID: UC-GMFLMINSOY049E06_FLI.pep
ISSLPSPLVAVAARREQGKQRSSVVFSVDYNRFIGVLLRHSRLHLAHHFYRRHVIPRGFSLLPFTYSRFISALCSAPNNINLPLIHRLLLDMDALGFVPDIWAFNTYLNLLCRQNRLETALELFHSMPSKGRDPDVVSYTIIIDALCRAKRFDEAARVWRRLIDRGLNPDYKACVALVVGLCGGGRVDLAYELVVGVIKGGVKVNSLVYNALIDGFCRMGRVDKAMKIKAFMSRNGCVLDLVTYNTLLNYCCDEGMVDEAVRLVETMERSGVEPDLYSYNELLKGFCKANMVDRAYLMMVERMQTKGMCDVVSYNTVITAFCKARQTRRGYELFEEMCGKGIRPDMVTFNVLIDAFLREGSTHVVKKLLDEMTRMCVLPDCIFYTAVVDHLCKNGKVDVAHSVFCDMVENGVNPDVISYNALVNGFCKASRVMDAMCLFDELQSKGLYPDGVTYKLIVGGLIRGKKISLACRVWDQMMERGFTLDRHLSETLVIAIQSSDGTT

SEQ ID NO: 56104 - protein, 366 aa, Arabidopsis thaliana columbia
  Clone ID: JC-ATXLIB327413P4D02_FLI.pep
SAFLAMHWITRFSAFFSAALAMILLSPSLQSFSPAAAIRSSHPYADEFKPQQNSDYSSFRESPMFRNAEQCRSSGEDSGVCNPNLVHVAITLDIDYLRGSIAAVNSILQHSMCPQSVFFHFLVSSESQNLESLIRSTFPKLTNLKIYYFAPETVQSLISSSVRQALEQPLNYARNYLADLLEPCVKRVIYLDSDLVVVDDIVKLWKTGLGQRTIGAPEYCHANFTKYFTGGFWSDKRFNGTFKGRNPCYFNTGVMVIDLKKWRQFRFTKRIEKWMEIQKIERIYELGSLPPFLLVFAGHVAPISHRWNQHGLGGDNVRGSCRDLHSGPVSLLHWSGSGKPWLRLDSKLPCPLDTLWAPYDLYKHSH

SEQ ID NO: 56105 - protein, 754 aa, Arabidopsis thaliana columbia
  Clone ID: JC-ATXLIB327417P1F02_FLI.pep
FHFTTKPSKSSARYGFVSVLLNLFQSRSKKESDSTDGTMCCGSDRLNQIVSSRSSLPISFEEDNNLVTNTDMNHLTVETEDTFASLLELAANNDVEGVRLSIERDPSCVDEAGLWYGRQKGSKAMVNDYRTPLMVAATYGSIDVIKLIVSLTDADVNRACGNDQTTALHCAASGGAVNAIQVVKLLLAAGADLNLLDAEGQRAGDVIVVPPKLEGVKLMLQELLSADGSSTAERNLRVVTNVPNRSSSPCHSPTGENGGSGSGSPLGSPFKLKSTEFKKEYPVDPSLPDIKNSIYATDEFRMYSFKVRPCSRAYSHDWTECPFVHPGENARRRDPRKFHYSCVPCPDFRKGACRRGDMCEYAHGVFECWLHPAQYRTRLCKDGTGCARRVCFFAHTPEELRPLYASTGSAVPSPRSNADYAAALSLLPGSPSGVSVMSPLSPSAAGNGMSHSNMAWPQPNVPALHLPGSNLQSSRLRSSLNARDIPTDEFNMLADYEQQQLLNEYSNALSRSGRMKSMPPSNLEDLFSAEGSSSPRFTDSALASAVFSPTHKSAVFNQFQQQQQQQQSMLSPINTSFSSPKSVDHSLFSGGGRMSPRNVVEPISPMSARVSMLAQCVKQQQQQQQQQQQQHQFRSLSSRELRTNSSPIVGSPVNNNTWSSKWGSSNGQPDWGMSSEALGKLRSSSSFDGDEPDVSWVQSLVKETPAEAKEKAATSSSGEHVMKQPNPVEPVMDHAGLEAWIEQMQLDQLVAQQN

SEQ ID NO: 56106 - protein, 332 aa, Glycine max
  Clone ID: UC-GMFLMINSOY057A11_FLI.pep
VGLDVQLSALKKYVPTIWKQSLVGSSIWAVSTANAGTWREAELKSWDEKAGVGQVVFRDDGSSVKLGAEEMALSEHAEMSDIESDSSLDQSDSSDYEEEEESQGIGFLESTNLQRGIQTETATFATWENHTRGIASKMMANMGYREGMGLGVTGQGMLDPIAVKVLPPKQSLDHALESHKREENKEKQGKKKQSRGGKRKREKKFAEANRAAKEEEESASDVFALINNHLAMHNEAFGGGLMKKQQSKGSEEGKKVDRRALVAYEEEVKDLKIRVEKLEHIVNANRKEKAVYEGAMRKLNETRKALADAEAVHASASNSVTSKEKEKRWLKF

SEQ ID NO: 56107 - protein, 486 aa, Arabidopsis thaliana columbia
  Clone ID: JC-ATXLIB327428P1G11_FLI.pep
EKALKTQTLKNFQCRFKKFCYLICFCVKKMVKDLVGYRFYPTGEELINHYLKNKILGKTWLVDEAISEINICSYDPIYLPSLSKIKSDDPVWYFFCPKEYTSAKKKVTKRTTSSGYWKATGVDRKIKDKRGNRGEIGIKKTLVYYEGRVPKGVWTPWVMHEYHITCLPQDQRNYVICQVMYKGEDGDVPSGGNNSSEPSQSLVSDSNTVRATSPTALEFEKPGQENFFGMSVDDLGTPKNEQEDFSLWDVLDPDMLFSDNNNPTVHPQAPHLTPNDDEFLGGLRHVNREQVEYLFANEDFISRPTLSMTENRNDHRPKKALSGIIVDYSSDSNSDAESISATSYQGTSSPGDDSVGSSNRQFLQTGGDEILSSCNDLQTYGEPSISSSTRQSQLTRSIIRPKQEVKQDTSRAVDSDTSIDKESSMVKTEKKSWFITEEAMERNRNNPRYIYLMRMIIGFILLLALISNIISVLQNLNPAMKFDRER

SEQ ID NO: 56108 - protein, 506 aa, Glycine max
  Clone ID: UC-GMFLMINSOY086E02_FLI.pep
SHFIIYGSEVRLSNWKEDKHRQCKTSNSANKCLLKETHDYILPNYKEDCDTPTVVDAQMSDHLPWAVPLGLDEFKSRAISSKIKSGTSGSSGSVMHRVEPGGAEYNYASASMGAKLLGSNKEAKGASNILSRDKDKYLRNPCSAEDKFVIIELSEETLVDTIEIANFEHHSSNLKAFELLGSLSFPTDVWVFLGNFTASNVRHAQRFVLQQPKWVRYLKLNLQSHYGSEFYCTLSVVEVYGVDAVERMLEDLIHTQDNLLAPGDGNADKMTVSPHPNPPESEDAHQNTFGGINSYPASDISSANHEKLNSNVPDPVEEIRQQVGRMPGDTVLKILMQKVRTLDLNLFVLERYMEDLNTRYVNIFKEYSKDIGGKDILIQNIKEDIRNLVDQQDAITKDGSDLKSWKSHISMQFGHLLRDNAVLRSEVNEVRRKQASLENKGVLVFLVCCIFSMLVILRLSLDMATSVYRVLQSVNRTDCSRKFCAVSSSWFLLLLNCIIIIFILTL

SEQ ID NO: 56109 - protein, 522 aa, Arabidopsis thaliana
  Clone ID: JC-ATXP38C158D14T7_FLI.pep
LRAKKQKKRKKNPKSKSHLPPLSFFFLFFFFFLLYLLFSLLCKNLTSMDPSLGDPHHPPQFTPFPHFPTSNHHPLGPNPYNNHVVFQPQPQTQTQIPQPQMFQLSPHVSMPHPPYSEMICAAIAALNEPDGSSKMAISRYIERCYTGLTSAHAALLTHHLKTLKTSGVLSMVKKSYKIAGSSTPPASVAVAAAAAAQGLDVPRSEILHSSNNDPMASGSASQPLKRGRGRPPKPKPESQPQPLQQLPPTNQVQANGQPIWEQQQVQSPVPVPTPVTESAKRGPGRPRKNGSAAPATAPIVQASVMAGIMKRRGRPPGRRAAGRQRKPKSVSSTASVYPYVANGARRRGRPRRVVDPSSIVSVAPVGGENVAAVAPGMKRGRGRPPKIGGVISRLIMKPKRGRGRPVGRPRKIGTSVTTGTQDSGELKKKFDIFQEKVKEIVKVLKDGVTSENQAVVQAIKDLEALTVTETVEPQVMEEVQPEETEAQQTEAAETQGGQEEGQEREGETQTQTEAEAMQEALF

SEQ ID NO: 56110 - protein, 629 aa, Glycine max
  Clone ID: UC-GMFLMINSOY105H11_FLI.pep
VNSGPNTDSLADALAIAQHHDAVTGTEKQHVANDYSKRLSIGFKEAEELVSSSLACLVESPLLTRCQNPVTKFQQCPLLNISYCPASEVDLVQGKNLVIVVYNSLGWRRNEVIRIPVIEANVRVHDSNGIEIESQLLPQAEKYVDLRNYYVKAYLGQTPPKAPKYWLAFTVSVPPLGFSTYTVSTAKRTGSTRSSVDIYKSSEKSKFDVGQGNLKLTFSMDQEKCTNYVNIRNLVEEQVELSYLYYSGYNGTNQKDPQNSGAYIFRPNGTHPINHEKKVPLTVLHGPVLDEVHQQINPWIYQITRLYKGKEHVEVEFIVGPIPIEDGIGKEVATRISTTMETNNMFYTDSNGRDFIKRIRDYRTDWDLEVNQPAAGNYYPINLGIYTEDNKTEFSVLVDRAIGGSSLQDGQIELMVHRRLLLDDSRGVDEALNETDCVGDDCRGLTVQGKFYYRIDPLGEGAKWRRTFGQEIYSPLLLAFAEKDDKDDWMNSRVLTFSGIDSSYALPDNIAIITLQELDDGTVLLRLAHLYEIEEDKDLSVIATVELKKLLPGRKIKEVKEMSLSANQERTEMEKKRLAWKVEGSSGSKQVSRGGPVDPKELNVELAPMEIRTFILDFDDVSNQLFDAL

SEQ ID NO: 56111 - protein, 356 aa, Arabidopsis thaliana; identical to SEQ ID NO: 41820
  Clone ID: JC-ATXP75C225K13T7_FLI.pep

SEQ ID NO: 56112 - protein, 301 aa, Arabidopsis thaliana
  Clone ID: JC-ATXP88C242A6T7_FLI.pep
EKMKIQCNVCEAAEATVLCCADEAALCWACDEKIHAANKLAGKHQRVPLSASASSIPKCDICQEASGFFFCLQDRALLCRKCDVAIHTVNPHVSAHQRFLLTGIKVGLESIDTGPSTKSSPTNDDKTMETKPFVQSIPEPQKMAFDHHHHQQQQEQQEGVIPGTKVNDQTSTKLPLVSSGSTTGSIPQWQIEEIFGLTDFDQSYEYMENNGSSKADTSRRGDSDSSSMMRSAEEDGEDNNNCLGGETSWAVPQIQSPPTASGLNWPKHFHHHSVFVPDITSSTPYTGSSPNQRVGKRRRRF

SEQ ID NO: 56113 - protein, 171 aa, Zea mays
  Clone ID: LIB3136-020-C3_FLI.pep
PLSNGVVRPLTYEGRVIHGLPWHVLVIRTLGLLPTNQPGRVPNRRAPRRHIYQHHGSGSNLSPGTNFHVTKNGGPCSNQHAIPNLGVPVTHRLPGPAQGDVVEDGDVVADDGRLTDDDAGGVVEEDSLPDDGGGVDVNGEDVGDAGLEREREGPSLLRPEHVRDAVGLDGA

SEQ ID NO: 56114 - protein, 276 aa, Zea mays
  Clone ID: JC-ZMSHLIB3569P046D11_FLI.pep
RPRLGRQREAAGRREQRGERRGPVVGSHGCGGCCSVRDGGGGGCGRRRGRRRCRGGGRAGAGGDALAGGAHGEGGGREAHEEGRRRLERAQLRELLVQPPVLLRQRLAAALQVLAVHLRLLQLRPGSAVLEPDFYLSRPEVELLRQRRLLLRVEGAVLLEALLQERRLLLGEAQLLARGRALVLIAGARRGPLAAGPRRGALGVGAWASQVQREGARAVVGRRRQCRGARLLLVILQRQGAPRHRRRPVHVEAARRRLVAPYMTDAAVRRWPLKAE

SEQ ID NO: 56115 - protein, 304 aa, Zea mays
  Clone ID: LIB3150-051-C10_FLI.pep
TAQTILSLYCLGWGLKHKTLGGLRQQVRVLLERSHGELGLTPEFRRKEAVGLHEAVEGCLDEVAKGLSGATGRGEDILDASELQHLLGHARGDDARTPGRRHHAHGDGPALAGDLAGHGVRLPDLVPPVASPDGNNGELGEDDGAADGGGHLLGALDSQADVAVAVAHDDKGLEAGALSGAGLLLNGRDLHHLVLEPRHEGLDDLVLLDGERVEVDLLDLGDPVLLDEAAELRNGDPLLFLLTRAATAASAPATVAAPATPEATTKPAALAATLAAALRHGWVKGRRRGGIAATLRRVIGVWGL

SEQ ID NO: 56116 - protein, 525 aa, Zea mays
  Clone ID: JC-ZMSHLIB3587P036C07_FLI.pep
GVGPPPPPAPPCRSRPDLRRWGTGVPGSTTPPPRVRMAMRKENPVLNACQASNGRITRAQAAANRRSFGAFPSVPLPAKTERKQTAQGKAKRGSSYDNTSASVALSGPQPKRRTVLRDVTNLSNANSNKSFAAAPKLQTKPSLRTGRTVSKSKPCAKKIPKKPPPAGNGSALTNVLNIAEETQAEKILAERVEPVLLLENRGPLSLQNVERNRDSACHEVFFEERNLRDKCEPSVSKNGDSYVLDIVDIDKDNGNPQMCASYVVEIYSNLMASELMRRPSPNYMEGLQRDITKGMREILIDWLVEVSEEYKLVPDTLYLTVYLIDRFLSRNYIERQRLQLVGITSMLVASKYEEICAPRVEEFCFITDNTYTKAEVLKMESQLLNDLGFNLSVPTTKTFLRRFLRAAQASRKTPSMTLGFLANYLAELTLTEYEFLKFLPSLVAASAVFLARWTLDQSDLPWNQTLEHYTSYKCSDIQLCVCALRELQHNTSNCPLNAIREKYRHQKFECVANLTSPEFPRSFFS

SEQ ID NO: 56117 - protein, 396 aa, Zea mays
  Clone ID: UC-ZMFLB73250H05_FLI.pep
MLQRLTAVWYGRHRFLVVRWRRAGGVRHRRRRSVGGRLGGRRLRCGSVRRWGRLGRGRLGSRWLGAWSVRRWGRLGCRRLGGRRVRRRGRLRCRRLWGRGVRRWGRLGRRVCGRLGAWSVRRRGRLGRRRLGGRGVRRRGRLGCRRLGRRGVRRRGRLGRGRLGSRWLGAWSVRRRGRLRCRRFGGRGVRRWGRLGRRRLGSRWLGAWSVRRRGRLRCRRLGRRGVRRRGRLGRGRLASRWLGAWSVRRRGRLRCRRFGGRGVRRRSGSGFVGRRGGSVCGWRRLGGRRGGSVRRRRGFGARGVRGRRRLVLLGRLLRLGPVLLGRLVLLWRLLRLGPLGGGLLRLRGRGGRRRRRGVPVPGVGLDLHGQAHGHQGQQQSSPAAATHHPLSLTHSQ

SEQ ID NO: 56118 - protein, 248 aa, Glycine max
  Clone ID: 700679653_FLI.pep
TPFAKRKKKNMKIQCDVCEKAPATVICCADEAALCAKCDVEVHAANKLASKHQRLLLQCLSNKLPRCDICQDKPAFIFCVEDRALFCKDCDEPIHLASSLSANHQRFLATGIRVALGSNCTKGHEKGNMEPSNPNAQEVPVKTPSQQVPSFTSSWAVDDLLELTDFESPDKKQSLEFGELEWLADAGLFSEQFPHEALVAAEVPQLPVPHTSSVASHKAPKSLVSYKKPRIEVLDEDDDEHCTVPDLG

SEQ ID NO: 56119 - protein, 642 aa, Zea mays
  Clone ID: UC-ZMFLMO17240F05_FLI.pep
GKEVEASAGRAERVRSFPVAPAHAKRSGQQKGRGGPRRTASTASQSAAAAAAAAPPAPARRCSRLAFTTHSLALPFTPSPSSSFHLDLVLSFARIASHRTDGRRAGSPAAPPPARGSWRRMPLSPSRAAGGLLRRCPRAAVLPAAAADAATARLEAMQIGGYSGKEMRGGEHRAALRQKRLKKAKCFKWRPSKGDMDSKVEAGGAGSGQVCDDAVLCSLSTASFSGLVSWQRVRTLGKVAEGCDAADPPVPRKLRSAINKRAGRFASAPSRHVKKRRHLSAISAQISSVGQETRSNGSSLFTEQEEAIADVLLSLSQVPSHSEVTADKAVADSSNTNDASTSFSKGPTMEDDQTAVLPSAANELASQCACINKAVEQSNIVPNADQVAAAANQSSNSIPLLSANEQMQDLSMETAVNLPSPSKDTSINSVQKHHELQFDDSKCHPAQKPETPLWLVNSDQSEGVLLHEREKAKNNSAQEIVPLVQTLLPCTPAGYLVKPSSSKLAAPANTISESANFTTPGNQNKHPVLRNVGAPKAWKRSITHVYVSHVIQMHVNKEKAAASSSLQSQARPEERLLARCPRPPNGSSTTSHKAAAARDERLYTVHFDVRVPAHQPPAGICDAGAGRQKIVSGSSWQNLPAT

SEQ ID NO: 56120 - protein, 255 aa, Arabidopsis thaliana
  Clone ID: ARABL1-038-Q1-B1-G10_FLI.pep
SLLLFISFADMDGYYSLSPISVLHRIKDSFHFAVSALLANLFSALFTFFFALVGTLLGALTGALIGQETESGFIRGAAVGAISGAVFSIEVFESSLLLWQSDESGIGCLLYLIDVIASLLSGRLVRERIGPAMLSAVQSQVQLPFLFFDASFIILLNFCINNKQMGAVESQFQDHTDIFDTAISKGLTGDSLNRIPKVRITDTSPEIVSCSVCLQDFQVGETVRSLPHCHHMFHLPCIDKWLRRHASCPLCRRHL

SEQ ID NO: 56121 - protein, 388 aa, Zea mays
  Clone ID: UC-ZMFLB73001G12_FLI.pep
VAVAAASSSASSLLLLTMVLAAHDPPPLVFDAARLSGLSDIPQQFIWPADESPTPDSAEELAVPLIDLSGDAAEVVRQVRRACDLHGFFQVVGHGIDAALTAEAHRCMDAFFTLPLPDKQRAQRRQGDSCGYASSFTGRFASKLPWKETLSFRYTDDDDGDKSKDVVASYFVDKLGEGYRHHGEVYGRYCSEMSRLSLELMEVLGESLGVGRRHFRRFFQGNDSIMRLNYYPPCQRPYDTLGTGPHCDPTSLTILHQDDVGGLQVFDAATLAWRSIRPRPGAFVVNIGDTFMALSNGRYRSCLHRAVVNSRVARRSLAFFLCPEMDKVVRPPKELVDDANPRAYPDFTWRTLLDFTMRHYRSDMRTLEAFSNWLSTSSNGGQHLLEKK

SEQ ID NO: 56122 - protein, 640 aa, Arabidopsis thaliana
  Clone ID: ARABL1-045-Q1-B1-E8_FLI.pep
LRSLYKAVDMAPVSMPPGFRFHPTDEELVIYYLKRKINGRTIELEIIPEIDLYKCEPWDLPGKSLLPSKDLEWFFFSPRDRKYPNGSRTNRATKAGYWKATGKDRKVTSHSRMVGTKKTLVYYRGRAPHGSRTDWVMHEYRLEEQECDSKSGIQDAYALCRVFKKSALANKIEEQHHGTKKNKGTTNSEQSTSSTCLYSDGMYENLENSGYPVSPETGGLTQLGNNSSSDMETIENKWSQFMSHDTSFNFPPQSQYGTISYPPSKVDIALECARLQNRMLPPVPPLYVEGLTHNEYFGNNVANDTDEMLSKIIALAQASHEPRNSLDSWDGGSASGNFHGDFNYSGEKVSCLEANVEAVDMQEHHVNFKEERLVENLRWVGVSSKELEKSFVEEHSTVIPIEDIWRYHNDNQEQEHHDQDGMDVNNNNGDVDDAFTLEFSENEHNENLLDKNDHETTSSSCFEVVKKVEVSHGLFVTTRQVTNTFFQQIVPSQTVIVYINPTDGNECCHSMTSKEEVHVRKKINPRINGVSSTVLGQWRKFAHVIGFIPMLLLMRCVHRGNSNKNRGSEGYSRQPTRGDCNNRGTILMMENAVVRRKIWKKKKEKNMVDEQGFRFQDSFVLKKLGLSLAIILAVSTISLI

SEQ ID NO: 56123 - protein, 414 aa, Zea mays
  Clone ID: UC-ZMFLB73237E07_FLI.pep
DQYINHIMKETGVTVVLRGKDSENLGSCHSEASQQPLHLYLTSMHLKNLEAAKVLAENLLDTVAAEFGASRISSSKVYGAVPPPQQLLAGVDTSGTKSDVHYIVGPNVLSGATHSFASTGVIAPVVAPAVTVQSGAPTYSGVPLPSNMAYPIPPANGGAFYSGYGDIYPQATPLQQLAFTLKHASSSATQAVPVTSTPTSMATKGNSILDAEMDKRSRRKFQELPVSKGPATESQNSQQGSKFVKTGLDSSGNIGSSSIAPPKKVHPGSNGMLPQEEADMPSHLSISTKMLPPPLKSMLPLPPRSMPPPPPKSMPPPPPKFPSDEFLSRNENKFFPLKEPTAPPRSFDAISVLPSERRPREPKEEKTKGTPVSDTLLKLIDYGDDDDDGDIDVTDNTPKGNPTPGSEQKPFWAV

SEQ ID NO: 56124 - protein, 291 aa, Arabidopsis thaliana
  Clone ID: ARABL1-01-Q1-B2-F1_FLI.pep
QRRRRPKRSGLETMIKSEADLSDVIVIRDVWAYNLESEFDLIRGIVEDYPFISMDTEFPGVIYKADLDVLRRGNPNYLYNLLKSNVDALSLIQVGLTLSDADGNLPDLGGQKNRRYIWEFNFRDFDVERDPHAPDSIELLRRHGIDFERNRREGVESERFAELMMSSGLICNESVSWVTFHSAYDFGYLVKILTRRQLPVALREFLGLLRAFFGDRVYDVKHIMRFCEQRLYGGLDRVARSLEVNRAVGKCHQAGSDSLLTWQAFQRMRDLYFVEDGAEKHAGVLYGLEVF

SEQ ID NO: 56125 - protein, 277 aa, Zea mays
  Clone ID: LIB3150-041-H3_FLI.pep
SCSVDNTLRARLARFRSHGFSAAQISEFVRVAPCFFRKFNIDVKLGFWMPFLGSPDRFLRLVKRNFYLLSSDLDKVVKPNIQLLQECGLSIQEIGSLCVANPRLLTSKPDRIRAVLVRAGEMGVPRKTLLFRHAVTAVAGLCPETFASKLKMMANILGCSEAEVARMVQKNPLVLRRSMETIQRACEFLINVVGVGTNFILDKPTILMYSLERRLVPRHYVMKVLQDKGLMRKDHSFYTLAAISASVFCSRYVHPHKNVLPNLAAAYASGCNGKIAI

SEQ ID NO: 56126 - protein, 414 aa, Arabidopsis thaliana
  Clone ID: ARABL1-032-Q1-E1-B3_FLI.pep
KISEIRDKAVANRNKYVGLSSTGITYKSGSSASFGGSFQSGSSNFDSYKDRDSREDKNDYESFQKSRRGVKTEEQSYTSKKSFSRYGSTDHDNLSSGKKSPDSAKHRSYVSAAPSNNDDDFDDFDPRGTSSNKPSTGSANQVDLFGGDLIGDFLDSGPTETSSTNNNENFQEADLFADAAFVSASAQGAEFGSQTQKQVDLFSASEPSVTVSSAPPTVDLFASSESVVSPEAKISIPESMATPNIVDPFAAVPMDNFDGSDPFGAFTSHSASVSTGPQAPSVHGSATNTTSPLSFADSKPQHLQKKDPFQVKSGIWADSLSRGLIDLNITAPKKASLADVGVVGDLSNEDGNKASAASYYSGWSMGAGSGLGKTGLYSTQQQQQQQQQQQAPDISDDFFSSLSNQRYQSGGFKQ

SEQ ID NO: 56127 - protein, 433 aa, Zea mays
  Clone ID: UC-ZMFLMO17236D01_FLI.pep
GQKRPLFAVATKNADFSSNQPRLPSEKIRLEASSSGEYSRFNSLSEHSGGPNKWLKLNQQYNQFCSDLTPLAPIGSISEKINVQSSEVTNRSENGITMNLNVNETDIIDTTELADQIQQSGATKSLRHHKDSGGAENHVMLESHDGLAAQPPFIFTDTQTIPEDTSALAPITSAQARQQVLSIGTSPVLDGTPQLQPGKENDECLNNSGQIGVETQNTILFSLLEMEELQDKELEDAQEHRQKCESEAYRKAQRALLEANGRCAILRRKREICSSQDHGLIAENSSLVQSLSIRNPEDGLAMPSLLNSQIHVVSQIPENQGGRHRLCPEEPSQQQIDKHEDEARPHYCDKLAASTTDPSSVSVVNADSILSDYMEDDLLFPTRQARSECALDVENQMEETIHVYAEENRQVSGDGGQDYELLEASLRSRCRRL

SEQ ID NO: 56128 - protein, 291 aa, Zea mays
  Clone ID: LIB3180-047-B3_FLI.pep
YRDTVRQFIKGTDGFAGAFAECLCGSPQLYQAGGRKPWHSINFVCAHDGFTLADLVTYNSKYNLSNGEDNRDGENHNLSWNCGEEGEFASLSVRRLRKRQMRNFFVCLMVSQGVPMFYMGDEYGHTKGGNNNTYCHDHYVNYFRWDKKEEQSSDLYRFCRLMTEFRKECESLGLEDFPTSERLKWHGHQPGKPDWSEASRFVAFTMKDETKGEIYVAFNTSHLPVVVGLPERSGFRWEPVVDTGKEAPYDFLTDGLPDRAVTVYQFSHFLNSNLYPMLSYSSIILVLRPDV

SEQ ID NO: 56129 - protein, 179 aa, Glycine max
  Clone ID: UC-GMROPIC059B10_FLI.pep
FGINNQQSTITNRNSLFRKNQNLNMTLGFEGYSYTTTLGRKRVVLLHNEASSLNSNSAVNPLKRMCSGKFTFDSERSRLEALPLDVLIRVLCGVDHEDLEQLVRVSKTVREAAEIARRMHFEYSTPKKKTFALPKPFDIEGAGGFEEIDTPNAPLRKPKSKLIGKNLASISVALFASAN

SEQ ID NO: 56130 - protein, 227 aa, Zea mays
  Clone ID: 700016636_FLI.pep
SGSTEPRASVSSPPTTVARTYSSTSPPSSPTATAVLTTAMPSNTPSAAATTAAPRPSMSPRPAAARLPAGNVPTAATAVGEADTAAATAVTAAAVTAATGEEATVATAAATVVTVEVATAATAATVATGEAAAMAVGTVEAAVEAAAAASSAARRATWQGTAPRAAATEGEAAAAAAASATTAARRATSPATAPTKGVRRGATVASDPAESHVASRRFPTPPKVSLG

SEQ ID NO: 56131 - protein, 366 aa, Glycine max
  Clone ID: UC-GMROPIC068C07_FLI.pep
QIQFALERGIPAYLGVLGTLRLPYPSRSFELAHCSRCRIDWLQRDGILLLELDRILRPGGYFAYSSPEAYAQDEEDQRIWKEMSALVGRMCWKIASKRNQTVIWVKPLTNDCYLKREPDTRPPLCSPNDDPDAVWGVKMKACISRYSDQMHRAKGAGLAPWPARLTTPPPRLADFNYSTEMFEKDTEYWQQEVTNYWKMLGNKIKPDTIRNVMDMKANLGSFAAALKDKDVWVMNVVPENGANTLKIIYDRGLLGTVHNWCEAFSTYPRTYDLLHAWTIFSDIIEKECSPEDLLIEMDRILRPKGFIIVHDKRSVVLSIKKFLPALHWVAVVTSNVEQDSNQGKDDAVLIIQKKMWLTSESIRISE

SEQ ID NO: 56132 - protein, 234 aa, Zea mays
  Clone ID: 700045593_FLI.pep
LDGLASREAAYYQQGARFAKWRTVVSIPNGPSELAVKEAAWGLARYAAISQDNGLVPIVEPEILLDGEHGIERTFEVAQKVWAETFYAMAENNVMFEGILLKPSMVTPGAEAKDRATPEQVAAYTLKLLHRRIPPSVPGIMFLSGGQSEVEATQNLNAMNQGPNPWHVSFSYARALQNTCLKTWGGQPDKVKAAQDALLCAPRPTPWRSSASTPPTARPPRPRRECSSRTTATN

SEQ ID NO: 56133 - protein, 61 aa, Glycine max
  Clone ID: UC-GMROPIC074F03_FLI.pep
HSSHTAYNFADNQVLKLYGFRHRGLLSPKIKRIRNETVSPLEFVDQFDIRRHSTENTESKS

SEQ ID NO: 56134 - protein, 398 aa, Zea mays
  Clone ID: 700049822_FLI.pep
GLGTLGAIAMEGRGAEQAPEAAAEVKNPRCFMDVTIGGEMEGRIVVELYASVVPRTAENFRALCTGEKGIGAASGKPLHFKGSCFHRVIKGFMIQGGDTTAGDGTGGESIYGSKFEDENFVLKHERKGMLSMANSGPNTNGSQFFITTTRTPHLDGKHVVFGRVMKGMGVVRSIEHVSVGEADCPTLEVKIVDCGELPEGADDGVVNFFKDGDTYPDWPNDLEEKPAEVSWWMDAVESAKAYGNDNFKKQDYKAALRKYRKALRYLDLCWEKEEIDEDKSTALRKTKSIILTNSSACKLKLGDSSGALLDADFALREREGNAKAFFRQGQAHIALNDIDAAVESFKQALELEPNDAGIKRELAAAKKKIADRRDQERKAFARIFQSSGKSDKSNEENN

SEQ ID NO: 56135 - protein, 772 aa, Glycine max
  Clone ID: UC-GMROPIC104F08_FLI.pep
FKELLSRSLIQKDIAIAEEKFRMHDLVYDLARLVSGRSSCYFEGSKIPKTVRHLSFSREMFDVSKKFEDFYELMCLRTFLPRLGYPLEEFYLTKMVSHDLLPKLRCLRILSLSKYKNITELPVSIDSLLHLRYLDLSYTSIESLPTETFMLYNLQTLILSNCEFLIQLPQQIGNLVNLRHLDLSGTNLPEMPAQICRLQDLRTLTVFIVGRQDGLSVRDLRNFPYLQGRLSILNLHNVVNPVDASRANLKNKEKIEELMLEWGSELQNQQIEKDVLDNLQPSTNLKKLDIKYYGGTSFPNWIGDSSFSNIIVLRISDCNNCLTLPSFGQLPSLKELVVKRMKMVKTVGYEFYSSNGGSQLLQPFPSLESLEFEDMLEWQEWLPFEGEGSYFPFPCLKRLYLYKCPKLRGILPNHLPSLTEASFSECNQLVTKSSNLHWNTSIEAIHIREGQEDLLSMLDNFSYCELFIEKCDSLQSLPRMILSANCLQKLTLTNIPSLISFPADCLPTSLQSLDIWHCRKLEFLSHDTWHRFTSLEKLRIWNSCRSLTSFSLACFPALQELYIRFIPNLEAITTQGGGAAPKLVDFIVTDCDKLRSLPDQIDLPSLEHLDLSGLPKLASLSPRCFPSSLRSLFVDVGILSSMSKQEIGLVFQCLTSLTHLLFKGLSDEDLINTLLKEQLLPISLKILVLHSFGGLKWLEGKGLQNLTSLQQLYMYNCPSFESLPEDHLPSSLAVLSMRECPLLEARYRSQNGKYWSKIAHIPAIKINEKVII

SEQ ID NO: 56136 - protein, 137 aa, Glycine max
  Clone ID: UC-GMROPIC063E04_FLI.pep
QAQTPSSPSPAGAVTPPPQNSGAASLGVVGVFATLLSVAEPRYQTGSLMPGFGCGNPWWKKCTNKNLKKQRVQKTEKTTTATLVATKHKLLLALLQPVLSLLPHRTLVLHLLELLEYLPPCFQLPPLFSIRYSTRLF

SEQ ID NO: 56137 - protein, 167 aa, Zea mays
  Clone ID: 700072344_FLI.pep
LYGTRVAVLAGDFMFAQSSWFLANLENIEVIKLISQVIKDFASGEIKQASTLFDCDVTLDDYLLKSYYKTASLIAASTRSAAIFSGVGSGVCEQMYEYGRNLGLAFQVVDDILDLTQSAEQLGKPAAGSDLAKGNLTAPVILALREEPRLRGIIESEFCEPGSLAAA

SEQ ID NO: 56138 - protein, 532 aa, Glycine max
  Clone ID: 701141106_FLI.pep
KMLQRQLRAVLILFCCVQFHVQSCDEIEDVISRSQFPEGFLFGTGTSSYQIEGAYFEDGKGLSNWDAFSHTPGKIKKDENGDIADDHYHRYLEDIELMSSLGVNVYRFSISWARILPRGIYGDINPSGIMFYNKIIDNLLLRGIEPFVTIHHYDLPQELEERYGGWISPLIQSDFVHFAEICFKSFGDRVKYWTTINEPNLFADFGYMEGTYAPGHCSPPFGNCNTGNSDVEPLIVMHNMLLSHAKAVELYRKHFQAKQGGTIGIVAFSFMYDPLRDEECDRQAVSRGLAFDIAWVLDPLVFGEYPPEMRSILGSKMPVFSPVEKSLIKGSLDFIGINHYGTLYAKDCSLSTCSLGADHPIAGFLERTATRDGIPIGDPTGVPDFFVVPRGMEKLVEYIKIRYRNMPMYITENGYSQPPKPDVTIHDLLQDFKRIDYHKAYLAALLRSIRKGADVRGYMIWSLLDNFEWTSGYDIRFGLYYVDRGTLERIPKLSVQWFSSFLNNSSHPNITEHLSKQHIESKDVRNVGFDFI

SEQ ID NO: 56139 - protein, 256 aa, Zea mays
  Clone ID: 700074401_FLI.pep
EETNRPRIHRRVKMSSPAEYYKSLPPISKAYGTLCFFTTVLVQLQILHPLFLYLDYPLVFKKFEIWRLLTSFFFLAPFSMKFGIRLLMIARYGVMLEKGAFDKRTADFLWMMIFGAISLLVLSIIPLFNSFFLGIPMVSMLLYVWSRENPNAQINIYGLVQLRSFYLPWAMLLLDVIFGSSLMPGLLGIMVGHLYYFFAVLHPLATGKSYLKTPKWVHKIVARFRIGMQANSPVRPPANGNSGSGVFRGRSYRLNQ

SEQ ID NO: 56140 - protein, 349 aa, Zea mays
  Clone ID: 700076024_FLI.pep
LARMPTAEATTPVPPELSSGQGRTVCVTGAGGFIASWLVKRLLEKGYTVRGTVRNPVDPKNDHLRALDGAVDRLVLLRADLLDPQSLAEAFSGCDGVFHAASPVTDDPEMMIEPAIRGTRYVMAAAADAGVKRVVFTSSIGTVYMNPYRDPSKPVDDTCWSDLEYCKNTQNWYCYAKTVAEQGAWEVARKRGLDLVVVNPVLVLGPLLQPTVNASTDHVMKYLTGSATTYVNAAQAYVHVRDVAEAHVRVYEAPHAHGRYICAESTLHRGDLCRVLAKLFPEYPVPTKCKDQVNPPVVGYKFTNQRLKDLGMDFVPVLQCLYETVTSLQEKGMLPVLPTKQDHDQLGKS

SEQ ID NO: 56141 - protein, 390 aa, Glycine max
  Clone ID: 701138659_FLI.pep
QVGLGDTSGGDSPNDHYCWMRPEDMDYDRPVTECHSCSDLAAEMAAALASASIVFKDNKAYSKKLVHGATTLFKFSRDQRGRYSAGSSEASIFYNSTSYWDEYVWGGAWMYFATGNSSYLKLATAPGLAKHAGAFWGGPDYGVLSWDNKLAGAQVLLSRLRLFLSPGYPYEEILKTFHNQTSIIMCSYLPVFTSFNRTKGGLIQLNHGRPQPLQYVVNAAFLAALYSDYLDAADTPGWYCGPNFFSTDVLRNFAKTQIDYILGNNPRKMSYVVGFGNHYPKHVHHRGASIPKNKIKYSCKGGWKWRDTSKPNPNTIVGAMVAGPDKHDGFHDVRTNYNYTEPTLAGNAGLVAALVALSGDKSTSIDKNTIFSAVPPMFPTPPPPPAPWKP

SEQ ID NO: 56142 - protein, 353 aa, Glycine max
  Clone ID: 701140721_FLI.pep
ALAAFAFALLFQSASADDVVVLSEDNFEKEVGQDRGALVEFYAPWCGHCKKLAPEYEKLGSSFKKAKSVLIGKVDCDEHKSLCSKYGVSGYPTIQWFPKGSLEAKKYEGPRTAESLVEFVNTEGGTNVKIATVPSNVVVLTPENFNEVVLDEAKDVLVEFYAPWCGHCKSLAPTYEKVATAFKLEEDVVIANLDADKYRDLAEKYDVSGFPTLKFFPKGNKAGEDYGGGRDLDDFVAFINEKSGASRDGKGQLTSQAGIVESLDVLVKEFVAASDEEKKSVFTRLEEEVVKLKGSASRYGKIYLKAAKNYREKGSDYAKNEIQRLQRILDKSISPAKADELTLKKNILSTYAA

SEQ ID NO: 56143 - protein, 718 aa, Zea mays
  Clone ID: 700085782_FLI.pep
ALYQNADIYLLDDPFSAVDAHTATSLFNEYVMGALSDKTVLLVTHQVDFLPVFDSVLLMSDGEIIRAAPYQDLLAHCQEFQNLVNAHKDTIGVSDLNRVRSHKTNENKGSIDIHGSLYKESLKPSPADQLIKTEEREMGDTGLKPYILYLRQNKGFFNGSMGILCHVIFVCGQIAQNSWMAANVQNPDVSTLKLISVYIAIGFITVFFLLFRSIALVVLGVQTSRSLFSQLLNSLFRAPMSFFDSTPLGRILSRVSSDLSIVDLDVPFGLMLAVGASINAYSNLGVLAVVTWQVLFVSVPMMVLALRLQKYYLASAKELMRINGTTKSALANHLGESVAGSITIRAFEEEDRFFEKNSELVDKNAASYFYNFAATEWLIQRLETMSAAVLSFSAFIMALLPAGTFSSGFIGMALSYGLSLNNSFVFSIQNQCQLSNQIISVERVNQYMDIPSEAAEVIEENRPSPNWPQVGRVELRDLKIRYREDAPLVLHGITCTFEGGDKIGIVGRTGSGKTTLIGALFRLVEPTGGKIIIDSVDITTIGLHDLRSRLGIIPQDPTLFQGTIRYNLDPLEQFSDQQIWEVLDKCQLHEAVQEKEQGLDSLVVEDGSNWSMGQRQLFCLGRALLRRCRVLVLDEATASIDNATDAILQKTIRTEFRDCTVITVAHRIPTVMDCSMVLALSDGKLVEYDKPTKLMETEGSLFRDLVKEYWSYASNGNI

SEQ ID NO: 56144 - protein, 167 aa, Glycine max
  Clone ID: 701202518_FLI.pep
RSWALCFSISSLSRLESSVVFPTSTSLAFKLFGFTKLGFSISITPCVPFFLEVSSSDSSPDSSPDTSSGSSSCSASFCLKVRGRLEVPASISSGVENWRRPVGLLLNFPLPIVPFQSQPTLRYDFSNSILLLLRSDYLFMRLLKFERTTKRRCTLHPLSLYSKFQKP

SEQ ID NO: 56145 - protein, 498 aa, Zea mays
  Clone ID: 700086393_FLI.pep
YKAKPGIEESMPTQNDSVLKVSSDVSVHVREEGTSVTENRAESLNTVAKDVETRLSQAIAEKAKAEKLIEELEKASPLSKAEVRETISEDERYMLRKVGLKMKQFLLLGRRGVFDGTIENMHLHWKYRELVKIICKEHRLEDVEYAARTLEAESGGILVAVEKVSKGHAIIVYRGKNYKRPSKLRPKTLLSKRDALKRSLENQRCKSLKVHVLKLSKNIDYLRDQMNSSYYHKDMHDPSVNSVTLQQQDEEMPEVAPMSSEPEVEKWTSVEIDRALDLTKSGVPVEDMQSKVCFNKLEDDSSATAGPCLTGSSIAASSYNLIRHQNQRSSTVTSSPDGRYEGAPSKVVDAPKLDAESLSVSPLRAAPLSNQERLVLRKQALQMKKRPVLSIGRNNAITGVAKTIKTHFKKHPLAIVNIKNRADGTPIQQLISELEEATGSVLVSRETNKVILYRGWGAEVAQKSSRESSTDEGEKEVISPQLLEAIRLECGLLPADSG

SEQ ID NO: 56146 - protein, 181 aa, Glycine max; identical to SEQ ID NO: 44160
  Clone ID: 701210052_FLI.pep

SEQ ID NO: 56147 - protein, 298 aa, Zea mays
  Clone ID: 700087534_FLI.pep
GTELRTRSRYFRRRGKVRRLKYTWKSAGYNFKRITERKDQPCRQYNPCGCQSTCGKQCPCLSNGTCCEKYCGCPKICKNRFRGCHCAKSQCRSRQCPCFAADRECDPDVCRNCWVGCGDGTLGVPNQRGDNYECRNMKLLLKQQQRVLLGRSDVSGWGAFLKNSVSKHEYLGEYTGELISHKEADKRGKIYDRENSSFLFNLNNEYVLDAYRMGDKLKFANHAPDPNCYAKVIMVTGDHRVGIFAKERILAGEELFYDYRYEPDRAPAWARKPEASGAKDDGQPFNGRAKKLAQNNRG

SEQ ID NO: 56148 - protein, 241 aa, Glycine max
  Clone ID: 701142764_FLI.pep
VAYECHGSDYQKFPLQMKTGFGGQYSNEVACASWRLGVEANNVVKWQTVPAACGEYIADYVLGDQYRSDSKTVNQQAYFYAKSLKLTNKDVFVLDVDDTTLSNLQYFANHGFGVEPHNTTAFKNWVLDGEAFALPETLKMYNKLLALGIKIVFLSERPLSLGDVTAKNLKEVGFNTWEKLILRDPSEYSGKLSFEYKSAEREKLEKEGYRIIGNVGDQWSDLLGSNKGTRTFKLPNPLYYD

SEQ ID NO: 56149 - protein, 406 aa, Zea mays
  Clone ID: 700094677_FLI.pep
VPVPFHYPPGAGARVGAGAGSPFPSASRALRLPRPRASVEKREQVAAMEEQGGQAALGWAARDDSGVLSPYSFSRRVPKDDDVTIKVLYCGICHTDLHVIKNDWRNAMYPVVPGHEIVGVVTGVGGGVTRFKAGDTVGVGYFVGSCRSCDSCGKGDDNYCAGIVLTSNGVDHAHGGAPTRGGFSDVLVASEHYVVRVPDGLALDRTAPLLCAGVTVYSPMMRHGLNEPGKHLGVVGLGGLGHVAVKFGKAFGMKVTVISTSASKRQEAIENLGADEFLISRDEDQMKAATGTMDGIIDTVSAWHPITPLLALLKPLGQMVVVGAPSKPLELPAYAIVPGGKGVAGNNVGSVRDCQAMLEFAGKHGIGAEVEVIKMDYVNTAMERLEKNDVRYRFVIDVAGSLGSAA

SEQ ID NO: 56150 - protein, 253 aa, Zea mays
  Clone ID: 700098221_FLI.pep
VKRSRLASVLHAGGDALHGEDERVFQAGRVLARRVQLDQSGGLVLVGELLGQRRLGRHLEVGVPYPLQRVGLEHVQGGDVGVAQHQPLLQEWIAFKNILVPSDLEEKLLCLHVFVPELLPKGLEFFRHKQLVIQAGNAGVSLGENHLQQVQGDPEEWPLVVHLFEDLEVPDVLVDGELKGGADSQPHGKVEPGLSPREDPGDGAQGRDAAAGPPLGWPAADVHPPVLGLRCSRSEVLDEARLLDDDGAVLLRG

SEQ ID NO: 56151 - protein, 708 aa, Zea mays
  Clone ID: 700100701_FLI.pep
GRRDNASSSNSSLHVSQTSGLPPKLPLKKNSKSQNSYIRKGNALIRNPANGNNHLHSSSSLDSQNKLSKPVMRRSMNFVRNVDSKDAAHSHISVERPKTPPLPLHTKSISCAVNVLEPLSQNLQQQVLETEKEDSSGQVNSGADNLSIISLHKSEALDAGKAIYVRPKLNQLVAQGRHLGESSNISLDKVTLLQPSATSDLYFKKRKNQIILGPSTSDAPSSKDTFQAENIKSGESKVLMSSSSNNNITVAKDRLHKALQTTNTVRSFSHVWTLNGQNPRKKSYVGASHMKVLPRILPWKRKIFCQNFRGSYSSLLNTSSIGIMRKLLQTRKRSTIYTVSTDGFSLRKSGVLSIGGSSLKWSRSLEKHSRKVNEEATQAVAEVERKKREKRKRQSLRSKGRNDRYSASVAANQLTNRSRASSDSRVSSTCNEYVRVNKGNQLVRNPKKVIRMLASEKVRWSLHTVRTRLAKKRQYCQFFTRFGECKKSGGKCPYIHDRAKVVICTKFLKGLCSSTSCKLTHKVLPERMPDCSYFLQGLCTNTACPYRHVKVNSNAPVCEDFLKGYCADGDECRKKHSYVCLVFEATGECPQGSRCKLHHPKKKSKSKRSKVDTVQNNSRGRYFETNVGHGSGARIVYLEEDERQKPEQVSGEEFADFIELGAGIEVPEDADTSDDIQLMELDSGNLEVQADNNDAIIKPLRIMRTARV

SEQ ID NO: 56152 - protein, 234 aa, Zea mays
  Clone ID: 700098560_FLI.pep
AALDQFSSQDRYGDSERGDSQGAMDRAGGPATGLNRTGKSCRLRWVNYLHPGLKRGRMSPHEERLILELHARWGNRWSRIARRLPGRTDNEIKNYWRTHMRKKAQERKRNMSPSSSSSSLTYQSGYPDTPSTIGVEGQELHGGSGCITSILKGTPPDMDGYPMDQIWMEIEAPQMPSEESFVGGNHNVCSSLATPLPPPTVWEYYPEACWKVDDEIKMAPQFQFGYSEGVGPCF

SEQ ID NO: 56153 - protein, 356 aa, Zea mays; identical to SEQ ID NO: 38700
  Clone ID: 700074661_FLI.pep

SEQ ID NO: 56154 - protein, 260 aa, Zea mays; identical to SEQ ID NO: 43417
  Clone ID: 700099682_FLI.pep

SEQ ID NO: 56155 - protein, 318 aa, Zea mays
  Clone ID: 700102440_FLI.pep
AHFLSWHSGRPAHASELLSFHSSEYIEELVQTNATGAKKKLCEGTFLNPGSWGAALLAAGTTLSSAKHILDGQGNLAYALVRPPGHHAQPDHADGYCFLNNAGLAVQLALDSGRAKVAVVDIDVHYGNGTAEGFYRTDTVLTMSLHMMHGSWGPSHPQSGSVDEIGEGKGLGYNLNIPLPNGSGDAGYEYAMNELVVPSIDKFQPQLLFLVVGQDSSAFDPNGRQCLTMEGYRKIGQIMRRLADRHCNGQILVVQEGGYHITYSAYCLHATLEGVLDLEAPLLDDPIAYYPEDDKYTMKVVDMIKSYWKESVPFLKEI

SEQ ID NO: 56156 - protein, 24 aa, Zea mays
  Clone ID: 700102549_FLI.pep
INQPNENRSLQVQLIAVFSLSFSN

SEQ ID NO: 56157 - protein, 88 aa, Zea mays
  Clone ID: 700162917_FLI.pep
MIPSNLDCFGWCTSDAFYKAAEPCGIEEDLQRRREGGVPPRFLIIDDGWQEIVDYYPETLHQMFVANAGSSFKLPGNSVKDFLDSKTA

SEQ ID NO: 56158 - protein, 110 aa, Zea mays
  Clone ID: UC-ZMFLB73155G10_FLI.pep
ASDLIHRGEASLGEEDLKAGQTNFSEGVTYINAPTTPIALKHILLIALLRLMQQQFPILIPSLLEPSWPLLTGLIHVFIKIPSLPELSPKYISLYIESGCRAKIGMSKII

SEQ ID NO: 56159 - protein, 440 aa, Zea mays
  Clone ID: 700104722_FLI.pep
AYRGRQDKEGCTPLHWAAIRGNLEACTVLVQVGKKDDLMVKDKTGLTPAQLAADKNHRQIAFFLDNARRVHDRGCGANTRFGKLSKLGLAPFLWCTIIGMLITYVHSVILGQYVMTMTAPFGMFAWSGVFLATAGLVMFYKCSRKDPGYISINTRGSQNQRDDEPLLKMELENPALLFGNWSQLCITCKIVRPVRSKHCSTCDRCVEQFDHHCPWVSNCIGKKNKWEFFMFLTLEVFAMIITGSAAIIRLVRDPDSPSSFGAWIHYSAFQHPGVVSFLALDCFLFFGVAVLTVSQASQIARNITTNEMANSMRYAYLRGPGGRFRNPYDHGIRKNCSDFLLNGYNEDTERLDQTLHTDEEMGMIQMTRAVSQNGDNHLHHGNGTEHSCADSQASPKPHSQVGSPQCCDHSKRTDRTLLGLGLGLGRNSASRQYVRSLIPL

SEQ ID NO: 56160 - protein, 99 aa, Zea mays
  Clone ID: 700104751_FLI.pep
GGGDGSARPNVPGAAILPQPGRRQDVSSGLLGSASADGGGLCSVKTKLKRRNGTAEPPNRAVLQGLKILCMHFVGAFCPCGDRVIHFYSDHVLLHYMSH

SEQ ID NO: 56161 - protein, 168 aa, Zea mays; identical to SEQ ID NO: 39158
  Clone ID: 700105350_FLI.pep

SEQ ID NO: 56162 - protein, 183 aa, Zea mays
  Clone ID: 700208976_FLI.pep
ANRSLPLVTSLPLPAPLRPPRHRPFARQETGPETMADQLTDDQIAEFKEAFSLFDKDGDGCITTKELGTVMRSLGQNPTEAELQDMINEVDADGNGTIDFPEFLNLMARKMKDTDSEEELKEAFRVFDKDQNGFISAAELRHVMTNLGEKLTDEEVDEMIREADVDGDGQINYEEFVKVMMAK

SEQ ID NO: 56163 - protein, 455 aa, Zea mays; identical to SEQ ID NO: 40951
  Clone ID: 700150612_FLI.pep

SEQ ID NO: 56164 - protein, 588 aa, Zea mays
  Clone ID: 700347289_FLI.pep
INPFVPPFSPLSPHRAASPLSLTAQVRPGPAGERSGERRGLLLPSTPLKKRIEASEGAPPRLEGGEGTPRTMTAMEAAVDAMLAAASRAFTSTFAIAIQIQGCMICLVLALGWAAASIVRKGVIKNMRRNIVDGNSFAFLCDNIDELEHSVQENLPRVSVVMPLKGFGEHNLQNWRTQITSLYGGPLEFLFIVESKDDPAYHAVSRLITEYKDNLEAKVVVAGLSTTCSQKIHNQLIGVEKMHNDTKYVLFLDDDVRLHPGTIGALTKEMEKNPEIFIQTGYPLDLPSGSLGSYCIYEYHMPCSMGFATGGKTFFLWGGCMMMHADDFRQDRYGIVSGLRDGGYSDDMTLAAIAGQHKRLIFSPPVAVFPHPLASDLSFSRYWNYLRKQTFVLESYVSNVNWMMNRALFTSHCYLSWGFVWPYIMALVHVLAALRAPYSKVVKEASDSSWGLFLVGLLFTCTLIELVSMWNLTKVEIQLCNMLSPEGPKVSLDSYNWGLVFIAVLVDNFLYPVSAIRSHFSQSINWSGIRYYLRDGKISKIERENSSKYTDLGGKHLYGKRTYPPNKSLLGYLSRTLVQWHQPKKYDV

SEQ ID NO: 56165 - protein, 184 aa, Zea mays
  Clone ID: 700355941_FLI.pep
IAPCLCPLVTSLPLPAPLRPPRHRPFARQETGPETMADQLTDDQIAEFKEAFSLFDKDGDGCITTKELGTVMRSLGQNPTEAELQDMINEVDADGNGTIDFPEFLNLMARKMKDTDSEEELKEAFRVFDKDQNGFISAAELRHVMTNLGEKLTDEEVDEMIREADVDGDGQINYEEFVKVMMAK

SEQ ID NO: 56166 - protein, 442 aa, Zea mays
  Clone ID: 700153752_FLI.pep
VRKMYLNTTTVYDLRKRCPPPWHARTSAGGRAQLHKRRKSNATHARTHTDRSIQPKINNEERSTTHDLDIHVYRFYFFSRISSPPSSSPWRSLLDVDGQRLAVPLLEALEHGVHELALADADEHLVALLAGGLEPLAGQEHAAELLAHEAVQRERPAVRDPVRHGGGALGDRHAGGLHLLGQHRAELLLEPGDLGEHGGLPLRVAAAEGVVHQHGAQLLHQRQAAAGRVLRVREHGLAVDGADQLLLAEAGAGELARGVHGQHLLGHLGHGVLHRRLDVLLEVAQVHGLAQRHDVGGRHELQDVDRLGGLPGRDEAQGVHVLVVLLRALHVVGDGVAQVLELGAVGGHGDLGALEAVVQAGVAAAGQVGGEPVVVELVDELGELREHELADVSDGEAGVVHGHADGGALEVAAVQRLAAVDVDDRVVVDGVDLALDGLGGGA

SEQ ID NO: 56167 - protein, 195 aa, Zea mays
  Clone ID: 700158919_FLI.pep
PSLMKLSKSSHSEVTLLMILQNPASAGVPGHALVPLHPPGRRHGVVVAERVHLLVHQRDVAVHLQAEPGGVAGALRARDAVQVALEVVPGGGARAGPLEVRRLARVQQQLHADVLVEGVGQDGGHDVGRVPDPEQPGAGRRVERLLELVVAHAGAAEDDGGDGDRVVVGAPDVEAVGDDVDGGERGERRAQAVAG

SEQ ID NO: 56168 - protein, 257 aa, Zea mays
  Clone ID: 700452315_FLI.pep
WNYFSLGMDAQVSYEFHSERKRNPEKFRHQLRNQGTYAKLGFKHSLNHLSSRNISQLAKVKIMKRPGSQWEELKIPRSIQSVICLNLPSFSGGLNPWGTPGTRKAQDRDLTAPYVDDGLIEVVGFRDAWHGLILLAPNGHGTRLAQAHRIRFEFHKGAAEHTFMRIDGEPWKQPLPKEDDTVVVEISNLRQVAMLANDPCRSKSVNEPSSPSCHGHEDDDSNSLEDEDEDEWEDGRKKFGAAATFKIPDEVDIAHLS

SEQ ID NO: 56169 - protein, 324 aa, Zea mays
  Clone ID: 700465988_FLI.pep
QKESVRPSSSCFPAKMSRCWSGGMPSLTGKTITLEVESSDTIDNVKAKIQDKEGIPPDQQRLIFAGKQLEDGRTLADYNIQKESTLHLVLRLRGGMQIFVKTLTGKTITLEVESSDTIDNVKAKIQDKEGIPPDQQRLIFAGKQLEDGRTLADYNIQKESTLHLVLRLRGGMQIFVKTLTGKTITLEVESSDTIDNVKAKIQDKEGIPPDQQRLIFAGKQLEDGRTLADYNIQKESTLHLVLRLRGGMQIFVKTLTGKTITLEVESSDTIDNVKAKIQDKEGIPPDQQRLIFAGKQLEDGRTLADYNIQKESTLHLVLRLRGGQ

SEQ ID NO: 56170 - protein, 162 aa, Zea mays
  Clone ID: 700163369_FLI.pep
RYDSHSKTLQRSEPQSSQLQSHMDDGTCARLKEELAETSLKLRQMRGEELQRLSVEQLQELEKTLESGLGSVLKTKSQKILDEISGLERKRTQLIEENSRLKEQVTRMSRMETQLGADPEFVYEEGQSSESVTNTSYPRPSTDTDDCSDTSLRLGLPLFSSK

SEQ ID NO: 56171 - protein, 137 aa, Zea mays
  Clone ID: 700168602_FLI.pep
LEKRVHRSQQRRRLPGRLHHGAGGGPQRRRGVLQADVAVHVEPEPVHAGPAAGEDVVPAAAAVGGPGPVGRPGQGRADPGVLRRHRRRAPAGRPLPARRGAGAGQPRAARVARGPRRPRQVGRAQPTDRLMDRAQGA

SEQ ID NO: 56172 - protein, 552 aa, Zea mays
  Clone ID: 700352082_FLI.pep
AHTRNQISPKSSRRHLRFKMQIFVKTLTGKTITLEVESSDTIDNVKAKIQDKEGIPPDQQRLIFAGKQLEDGRTLADYNIQKESTLHLVLRLRGGMQIFVKTLTGKTITLEVESSDTIDNVKAKIQDKEGIPPDQQRLIFAGKQLEDGRTLADYNIQKESTLHLVLRLRGGMQIFVKTLTGKTITLEVESSDTIDNVKAKIQDKEGIPPDQQRLIFAGKQLEDGRTLADYNIQKESTLHLVLRLRGGMQIFVKTLTGKTITLEVESSDTIDNVKAKIQDKEGIPPDQQRLIFAGKQLEDGRTLADYNIQKESTLHLVLRLRGGMQIFVKTLTGKTITLEVESSDTIDNVKAKIQDKEGIPPDQQRLIFAGKQLEDGRTLADYNIQKESTLHLVLRLRGGMQIFVKTLTGKTITLEVESSDTIDNVKAKIQDKEGIPPDQQRLIFAGKQLEDGRTLADYNIQKESTLHLVLRLRGGMQIFVKTLTGKTITLEVESSDTIDNVKAKIQDKEGIPPDQQRLIFAGKQLEDGRTLADYNIQKESTLHLVLRLRGGQ

SEQ ID NO: 56173 - protein, 362 aa, Zea mays
  Clone ID: 700439643_FLI.pep
HIRSPTSPASPVSVVSSLLLTSPPAMGKIKIGINGFGRIGRLVARVALQSEDVELVAVNDPFITTDYMTYMFKYDTVHGQWKHSDITLKDSKTLLFGEKPVTVFGIRNPEEIPWGEAGAEYVVESTGVFTDKDKAAAHLKGGAKKVVISAPSKDAPMFVVGVNEDKYTSDVNIVSNASCTTNCLAPLAKVIHDNFGIIEGLMTTVHAITATQKTVDGPSAKDWRGGRAASFNIIPSSTGAAKAVGKVLPELNGKLTGMSFRVPTVDVSVVDLTVRIEKGASYEEIKKAIKAASEGPLKGIMGYVEEDLVSTDFTGDSRSSIFDAKAGIALNDHFIKLVSWYDNEWGYSNRVVDLIRHMFKTQ

SEQ ID NO: 56174 - protein, 289 aa, Zea mays
  Clone ID: 700172116_FLI.pep
SGKPSTAPVPDLWRLSTVHRVEELKSVIRMGPIWAAGILVITGSSTQNTFSLQQASTMDRRLAPGLSTFEIPAGSMTVFGLLAMLFTLFVYDRALIRVARRFTGLDRGISFLHRMGVGFAISVLATLVAGFVEAAPQGRGGGGRRHGRRHVPAVGLLAGAAVRTARRGRGVHLRGAPRVHVRPGAREHAQHGDGALLAVHLAGKLREHAAGGRCAPLERGARRRQLAAGQHQSRQAGLLLLGRHGTAGHEPCVLRHLRQAVHVQASAAPQERGGRRRQGTCGVAREGLI

SEQ ID NO: 56175 - protein, 162 aa, Zea mays
  Clone ID: 700432654_FLI.pep
MHATQNDRLPLRLVVQVLFFQQLRAGSGKELALVDNGEHACTRPTQDQCEPCERRIPKHPESLDKQVTSLSARESRQHHRTSDSEHRGGGRNSFKDQLGGLLPQSRSRRIFDKLWSSKGQGEHGGKGSETSGSSQSPPLSAKPAEVKPSPLPAVRNRRYSVS

SEQ ID NO: 56176 - protein, 254 aa, Zea mays
  Clone ID: 700202538_FLI.pep
PDEPRHSGSGSGFRSFLKETVRDVFESEGIHIPHSRRHGDDDQDDGYAQPTGNGRTKNRSLPLSTLIEMLKEQTGKDDIDVGSIRMTLFNIFGDDASPKIKKFMKVMLGKFHQGQSGEQGSGGGGVFGMVGALAQEFLKAKLEGKEEEAFKPALEQEVHSVDEVYAGSKAWAPNNGILISGCQTNQTSADATTPQGVSFGALSNAIQTILADKHGKVTNKDLVMKARELLSKQGYTQQPGLYCSDEHVHVAFIC

SEQ ID NO: 56177 - protein, 400 aa, Zea mays
  Clone ID: 700349383_FLI.pep
DYNIQKESTLHLVLRLRGGMQIFVKTLTGKTITLEVESSDTIDNVKAKIQDKEGIPPDQQRLIFAGKQLEDGRTLADYNIQKESTLHLVLRLRGGMQIFVKTLTGKTITLEVESSDTIDNVKAKIQDKEGIPPDQQRLIFAGKQLEDGRTLADYNIQKESTLHLVLRLRGGMQIFVKTLTGKTITLEVESSDTIDNVKAKIQDKEGIPPDQQRLIFAGKQLEDGRTLADYNIQKESTLHLVLRLRGGMQIFVKTLTGKTITLEVESSDTIDNVKAKIQDKEGIPPDQQRLIFAGKQLEDGRTLADYNIQKESTLHLVLRLRGGMQIFVKTLTGKTITLEVESSDTIDNVKAKIQDKEGIPPDQQRLIFAGKQLEDGRTLADYNIQKESTLHLVLRLRGGQ

SEQ ID NO: 56178 - protein, 89 aa, Zea mays
  Clone ID: 700207977_FLI.pep
MMNLTDSRIQLTTLRSKPKYTAQFSSASAHLMGRCSYQLAEHVARAAKPVTNAARLSRARQKKQRSQSQQEAPLRGQGHRSSASIAACC

SEQ ID NO: 56179 - protein, 308 aa, Zea mays
  Clone ID: 700350042_FLI.pep
SLIIGMVGSLIFPTPNVDPKAENPNEMVTAGVLSSLQNFLRKCLIAILSYGPMPKHIAFIMDGNRRYAKFRSMQEGAGHRMGFSTLIASLMYCYEMGVKYITVYAFSIDNFKRDPSEVESLMQLMEEKINELLENRSVINKINCKINFWGNLDLLYEPVRLAAEKLMASTAGNTGLVFSICMPYNSTSEIVNAVSQVCAERMEMFQSEHIGECNGHAANNGVRSEISVADLDRHMYSAECPDPDIVIRTSGETRLSNFLLWQTTFSHLQNPDPLWPEFSFRHLVWAVLQYQRVYPALEHNRKLAKKQL

SEQ ID NO: 56180 - protein, 315 aa, Zea mays
  Clone ID: 700355692_FLI.pep
LHLVLRLRGGMHIFVKTLTGKTITLEVESSDTIDNVKAKIQDKEGIPPDQQRLIFAGKQLEDGRTLADYNIQKESTLHLVLRLRGGMQIFVKTLTGKTITLEVESSDTIDNVKAKIQDKEGIPPDQQRLIFAGKQLEDGRTLADYNIQKESTLHLVLRLRGGMQIFVKTLTGKTITLEVESSDTIDNVKAKIQDKEGIPPDQQRLIFAGKQLEDGRTLADYNIQKESTLHLVLRLRGGMQIFVKTLTGKTITLEVESSDTIDNVKAKIQDKEGIPPDQQRLIFAGKQLEDGRTLADYNIQKESTLHLVLRLRGGQ

SEQ ID NO: 56181 - protein, 247 aa, Zea mays
  Clone ID: 700209591_FLI.pep
DPAPEPMSGYRNRELETLFTMYQILESWLRVASQLLTRLDERIEDKCWEAAAGDCWILERVWKLLADVEDLHLLMDPDEFLRLKSQLAVRAAPGSESASFCFRSTALLHVASATRDLKKRVPWVLGVEADPSGGPRVQEAAMKLYHSRRRGEGEEAGKVDLLQPSSGGVAVRAFFFGYRQLVAAVMGTAEASGNRALFVPAEEMDPLAQMFLEPPYYPSLDAAKTFLADYWVQLQQMAEASAPSRQS

SEQ ID NO: 56182 - protein, 197 aa, Zea mays; identical to SEQ ID NO: 48556
  Clone ID: 700444401_FLI.pep

SEQ ID NO: 56183 - protein, 780 aa, Zea mays
  Clone ID: 700210018_FLI.pep
RLIVSETKLITVHSCAGRLGDARKVFEGMACRDLLAWSAMIGAYAIRGLYEEVVTLAVAMVREGVIPDRFLITRILQACAYTEDLELGTAMHSMAIRRGFMAEGARDVPVGNSVLAMYVKCGELGRARAAFDMMGQRDLCTWNSMIFGCCRSNEWEEARRLLDDMRRQGTEPGLVTWNTLVSSYARSGELDVAMEMLEQMEESGVAPDVVTWTSLVSGFVHGDRGGEALRCFARMRLAGVEPNGMTIASAISACASLRLLSQGMELHCHAVKVGSVNNVLSGNSLVDMYAKCGEIIAAKRVFDEIPEKDIFSWNSMVAGYAHAGYCGKAYELFCEMESLGVRRNVITWNIMISGYIRNGDDERAFELFQMMESCGVKRDTASWNALIAGSVHNGHSDRALRIFWQMQSLLVRPDFITILSIIPAFANLAGFWKVREIHACIYHNNLEMDGKIANALINAYSKSGDLAGACAVFDRHSSRNIISWNCIILAHLLHGSPSEALDRFCEMKQEGVLPDHTTLTAVIKAYGLQGKVSEAKRIFHNMTHDHNITPDLDHYTAIVDLLGRSGSLQEAYEFIDNMPLIPNLAVWEALLTAATIHGNARLANLAARELSSLDPSDPRIQRLVFNYWGLTGKSVDVPLMTVYNGGRELEDVDSCSVEIKNNVYLFSTGDNLALESTVAELKLIMIQIRMSLLKICNETNAEEEKEELSGIHCEKLAIAFAISNSPPFRSIRIIKTLRMCSHCHIFAKLVSEKYERQILIKDSNCLHKFKDGKCSCEGYW

SEQ ID NO: 56184 - protein, 363 aa, Zea mays
  Clone ID: 700456230_FLI.pep
SHIRSPTSPASPVSVVSSLLLTSPPAMGKIKIGINGFGRIGRLVARVALQSEDVELVAVNDPFITTDYMTYMFKYDTVHGQWKHSDITLKDSKTLLFVEKPVTVFGIRNPEEIPWGEAGAEYVVESTGVFTDKDKAAAHLKGGAKKVVISAPSKDAPMFVVGVNEDKYTSDVNIVSNASCTTNCLAPLAKVIHDNFGIIEGLMTTVHAITATQKTVDGPSAKDWRGGRAASFNIIPSSTGAAKAVGKVLPELNGKLTGMSFRVPTVDVSVVDLTVRIEKGASYEEIKKAIKAASEGPLKGIMGYVEEDLVSTDFTGDSRSSIFDAKAGIALNDHFIKLVSWYDNEWGYSNRVVDLIRHMFKTQ

SEQ ID NO: 56185 - protein, 220 aa, Zea mays
  Clone ID: 700210102_FLI.pep
KAFNLHAVFKEVMGFIKPIASIKRLSVSVMLAPDLPLCAIGDEKRLMQTILNISGNAVKFTKEGHITLVASIVKADSLREFRTPEFHPTASDDHFYLKVQVKDTGCGIGPQDLPHVFTKFAHPQSGGNRGFNGSGLGLAICKRFVSLMGGHIWIDSEGTGRGCTATFVVKLGVCDNTNTYQQQLIPLVWPSSADSDLRAPKPLPDGRGSTPLKSRYQRSV

SEQ ID NO: 56186 - protein, 347 aa, Zea mays
  Clone ID: 700211662_FLI.pep
KMVGWGRLARELTTLEAASWRKFTVGGRVEPSRCNFSACAVGNRLVLFGGEGVNMQPMDDTFVLNLEAATPEWRRVKVSASPPGRWGHTLSWLNGSWLVVFGGCGQQGLLNDVFVLDLDAQQPTWREVASEGPPLPRSWHSSCTLDGSKLVVSGGCAESGVLLSDTFLLDLTKEKPAWREIPTSWSPPSRLGHTTSVYGATKLFMFGGLAKSGSLRLRSSDAYTVDVSEDSPQWRQLATTTGFPNISPPPRLDHVAVSLPCGRIIIFGGSIAGLHSPAQLFLIDPAEEKPIWRILNVPGQPPKFAWGHSTCVVGGTRVLVLGGHTGEEWILNELHELCLASRPDEDG

SEQ ID NO: 56187 - protein, 461 aa, Glycine max
  Clone ID: UC-GMRONOIR068F07_FLI.pep
LFIKASAINVETYESDRIIDLPGQPSSPSVSHFSGYITVNENHGRALFYWFFEAQSEPSKKPLLLWLNGGPGCSSIGYGGVVEIGPLIVNKNGEGLHFNTHSWNQEANLLFVESPVGVGFSYTNTSSDLTKLEDNFVAEDAYIFLVNWLQRFPQFKSRDFFISGESYGGHYIPQLAELIFDRNKDGSKYPFINLKGFIVGNPETDDYYDYKGLLEYAWSHAVISDQQYDKAKQVCDFKQFDWSNECNKAMNEVFQDYSEIDIYNIYAPSCLLNSTSSIADDSNGNGPESFTKERNDYRLKRMRIFGGYDPCYSNYVEEYFNRKDVQSSFHADTKRDTNVAWKVCNNSILRTYNFSVFSVLPVYTKLIKGGLKIWIYSGDADGRVPVIGTRYCVEALGLPLKSRWRTWYHDNQVGGRIVEYEGLTYVTVRGAGHLVPLNKPSEALSLIHSFLTGQHLPTTHG

SEQ ID NO: 56188 - protein, 118 aa, Zea mays
  Clone ID: 700212331_FLI.pep
KIFAKVRGWETENIEEIALKISQLPLASGKQKRIAVITQGADPVVVAEDGKVKTFPVILLPKEKLVDTNGAGDAFVGGFLSQLVLGKGIEDCVRAGCYAANVIIQRPGCTYPEKPDFN

SEQ ID NO: 56189 - protein, 432 aa, Zea mays
  Clone ID: 700213266_FLI.pep
ASRGETEPLEVMVSVLRVVVEHPLPRRQHPPAVLRPHHALVLRLVPHGRHHVVLPEEVGGLVHQRGVPPAGLEPRAGAAEAVQQVQVRLQVVVAREVQGLLEERRHLVVQLQQHAQVRVHAAEAQPVRRPQDELRERRLVEEHAGHLGHAVVHVHDAQRPHAQLPLEPPPEGDVPDARAGEGEHAHRRHPVARRHVRARLRDVEGAQHRQRAAQAVARDRHAHLLAPPVVQIHQLAHLGQHLLPRRVPAEAAAGALVRVQRREPSLHLHVGVRAGDARLAQGDLVGRQIGHPLEAGDGAAPRHGDVPAAEPRRLLVGGHGHVPDERAGLAPHLGVGGRLDAEVGELEVVAGGVEVAGDLVADAAEADVVEEGLRRVLAAAAVGGEAVVVEAVVGGLGELAVADELLEEHAVDGVQQTLPVVAAVDLPPPRGE

SEQ ID NO: 56190 - protein, 165 aa, Glycine max
  Clone ID: UC-GMROPIC033E02_FLI.pep
HSKEENQNLNMTLGFEGYSYTTTLGRKRVVLLHNEASSLNSNSAVNPLKRMCSGKFTFDSERSRLEALPLDVLIRVLCGVDHEDLEQLVRVSKTVREAAEIARRMHFEYSTPKKKTFALPKPFDIEGAGGFEEIDTPNAPLRKPKSKLIGKNLASISVALFASAN

SEQ ID NO: 56191 - protein, 536 aa, Zea mays
  Clone ID: 700215676_FLI.pep
DDRSGINMIHNVAYNCGSDFSRLDFSGFYAFILERGDEVIAAASVRIHGTDLAEMPFIGTRGMYRHQGMCRRLLNGIESALGSLSVQKLVVSAVTEMENTWTTGFGFKPVAPSKKQRMKSLNLLIMNGTGLLEKRLLPTQTVDGQITTKTANAVGSDKMDAKMLGEASGSVTPIHVSSEPDASDNHEINRHESPHPLGNSAGLTLDQSPAADENEAKITTERTPPVSIGDAKTVKVNTLPGATCGVNLQCMVEAENIQQEKYKETNGRLIAENTISEQKCEDRSNSSRSNSCATPVTVDQCSHLSNEIGKGDNCLSSELSVGAAPITGKTESSLTSVHCANQEDEKAYAAPVDTKIPLVIMDEKPDKHEFKTMVVGCSQGSMEPKSLENRTSIVNGTSMDAYRDKSTNEDHSASAVDTGVSVKLYAQQMETIEEKTGSVLPDSEHSSSCKDVLVTLTESKPLKNDMLETDDAIIKVGMTGQSFNEAGITAPALNISDPVGENVVKPTQTCGEGQLRGEDVIYSNNVMEDDLTSRAC

SEQ ID NO: 56192 - protein, 411 aa, Glycine max
  Clone ID: UC-GMFLMINSOY023B06_FLI.pep
EIKEDGKLHVTVRKSNASRSDIFSRRSQGLSSTTPRPSNLTNAEIYSLQSSRNPTPRGSSFNHTDFYSMMAAGGRNSNFGASDVYGLSASRGPTPRPSNYDEDGGKPKFHYHAAGGTGHYPAPNPGMFSPSNGSKSVAANANAKRPNGQAQLKPEDGNRDLHMFVWSSSASPVSDVFGAHEYGGGHDQKEVKLNVSPGKVENNHRDTQEDYLEKDEFSFGNREMDREMNQLEGEKVGDGKPKTMPPASVMTRLILIMVWRKLIRNPNTYSSLIGLTWSLVSFKWNVEMPAIIAKSISILSDAGLGMAMFSLGLFMALQPRVIACGNSTAAFAMAVRFLTGPAVMAAASIAVGLKGVLLHVAIVQAALPQGIVPFVFAKEYNVHPDILSTAVIFGMLIALPITLVYYILLGL

SEQ ID NO: 56193 - protein, 266 aa, Glycine max
  Clone ID: 701207561_FLI.pep
HLSHALFAFSRSVLEPSLVFPSFCRRASPCAEGPQMVETDMDAETVANVVPPKETPNSVPISYHSSHSHPPLNERIISSMTRRSVAAHPWHDLEIGPGAPTIFNCVIEIGKGSKVKYELDKKSGLIKIDRVLYSSVVYPHNYGFIPRTICEDSDPLDVLIIMQEPVLPGCFLRAKAIGLMPMIDQGEKDDKIIAVCADDPEYRHYNDIKELPPHRLAEIRRFFEDYKKNENKEVAVNDFLPASAAFEAVNRSMSLYADYIVESLRR

SEQ ID NO: 56194 - protein, 292 aa, Zea mays
  Clone ID: 700216676_FLI.pep
VQPLEELLIHSFPLPSFLIWPGYYVLYRFIEKHGAEAVAYAEAQHGIGKKDAINNMLFVLGFNAFGGFSVFLPFLVAKVGGAPALRERLRDEVRRAMVGKGKDGEFGFATVREGMPLVRSTVYEMLRMQPPVPLQFGRARRDFVLRSHGGAAYQVSAGEVLCGYQPAGDAGPRGVRAARGVRAGTLPRRRRRQAAAAPLLVQRAGDGAARAREQAVRRQGGGGGHGVHAAGRAVPALRRLRGGGHLLHQARQAPGVAERGAGSRRRRSAAVSALYRIHRWRATSPAPAPAKQ

SEQ ID NO: 56195 - protein, 392 aa, Glycine max
  Clone ID: UC-GMFLMINSOY031A10_FLI.pep
VLSLSLSLSLSLSLSDRSEAGGSGVGDVRVRVSERCGMLQALMNLFSLCWKPFGRDADRIDSIGVIGREGKDGLLWFRDFGKYGSGDFSMAVVQANQVLEDQSQIESGPLGTFVGIYDGHGGPDASRYVCDHLFRHFQAISAESRGVVTTETIERAFRQTEEGYMALVSGSWNARPHIASAGTCCLVGVIFQQTLFVANAGDSRVVLGKKVGNTGGMAAIQLSTEHNANLEAVRQELKELHPHDPQIVVLKHGVWRVKGIIQVSRSIGDVYLKHAQFNREPLNAKFRLPEPMNMPILSANPTILSHALQPNDSFLIFASDGLWEHLSNEKAVDIVNSNPHAVRLFLPCLDFLVVLISVMVVSSSGHKMHGWGGRLIEPSGCIKNWMRASPVY

SEQ ID NO: 56196 - protein, 749 aa, Zea mays
  Clone ID: 700217752_FLI.pep
KDGAFEDVLRAAQEAIVIPPWVALAIRPRPGVWEYVRVNVSELAVEELRVPEYLQFKEQLVEEGPNNNFVLELDFEPFNASFPRPSLSKSIGNGVQFLNRHLSSKLFHDKESMYPLLNFLRAHNYKGMTMMLNDRIRSLSALQGALRKAEEHLSTLQADTPYSEFHHRFQELGLEKGWGDCAKRAQETIHLLLDLLEAPDPSTLEKFLGTIPMVFNVVILSPHGYFAQANVLGYPDTGGQVVYILDQVRAMENEMLLRIKQCGLDITPKILIVTRLLSDATGTTCGQRLEKVLGTEHCHILRVPFRTENGIVRKWISRFEVWPYLETYTDDVAHEIAGELQANPDLIIGNYSDGNLVACLLAHKMGVTHCTIAHALEKTKYPNSDLYWKKFEDHYHFSCQFTTDLIAMNHADFIITSTFQEIAGNKDTVGQYESHMAFTMPGLYRVVHGIDVFDPKFNIVSPGADLSIYFPYTESHKRLTSLHPEIEELLYSQTENTEHKFVLNDRNKPIIFSMARLDRVKNLTGLVELYGRNKRLQELVNLVVVCGDHGNPSKDKEEQAEFKKMFDLIEQYNLNGHIRWISAQMNRVRNGELYRYICDTKGAFVQPAFYEAFGLTVVEAMTCGLPTFATAYGGPAEIIVHGVSGYHIDPYQGDKASALLVDFFDKCQADPSHWSKISQGGLQRIEEKYTWKLYSERLMTLTGVYGFWKYVSNLERRETRRYLEMLYALKYRTMASTVPLAVEGEPSSK

SEQ ID NO: 56197 - protein, 466 aa, Glycine max
  Clone ID: UC-GMFLMINSOY035C06_FLI.pep
RSTAADHWIFQIWNGLMGNMSCSFNQTDSVECCEAEIQKADSQESGPPLKKSKTEILASQNVDNCEMEESEDRLSDMPDCIIHHILSFMETKDAIQTCVLSKRWRYLWASVPCLNFSSKSFMRLVDFKKFVLWVLNHRDSSHVKLLVYYRFGVDYATDQGLLNKVIEYAASHGVEEIKINLRAKTAGRTSGSPPVEIPFSLFTCQSLKKLELKDCHPTNGSSSLLGCKSLDILHLEQFSMHPVAADFSNPFASLAELFGFTTLTTLHLNNFILCYTGTDCLDPFANCVHLKNLHLSEMSFKSDLNPKDFVISAPKLSNLNLMCNRFKCKIVVAAPQLSNFIYLYSTPCAFFEFRLPSMDGLVIDIHEPHDRLEKCRRRKKEETLHGLINMLQGHHNAEAVKLSFCTVKVTCGASALVKPACLPSTKLKSLNFGVGSTYKIFINNLDHITAYFRNCSQHADFEIVTV

SEQ ID NO: 56198 - protein, 300 aa, Zea mays
  Clone ID: 700239711_FLI.pep
NPPAAQPNPPRDSYRGRPHAAMDFLQEQSVETTVAVAVAVAAVAAGGAFLLLRSRKPKGCLDPENFRKFKLVEKKQISHNVARFKFALPTPTSVLGLPIGQHISCRGQDATGEEVIKPYTPTTLDSDLGYFELVIKMYPQGRMSHHFREMKVGDYLSVKGPKGRFKYHVGQVRAFGMLAGGSGITPMFQVARAILENPNDNTKVHLIYANVTYEDILLKDELDDMAKTYPGRFKIYYVLNQPPENWNGGVGFVSKEMIQSHCPAPAEDIQILRCGPPPMNKAMAAHLDELNYTKEMQFQF

SEQ ID NO: 56199 - protein, 408 aa, Glycine max
  Clone ID: UC-GMROPIC090E09_FLI.pep
ANFLPNERVTKFSPSPNMASRVSIGNLTSSAPYINSPHFRSPLKISNNPSLQNASHKVLMRDKTVLVTGGAGYIGSHTVLQLLLGGFRAVVLDNLENSSEVAMHRVRELAGEFGNNLSFHKVDLRDRAALDQIFSSTQFDAVIHFAGLKAVGESVQKPLLYYNNNLTGTITLLEVMAAHGCKKLVFSSSATVYGWPKEVPCTEEFPLSAMNPYGRTKLIIEEICRDVHCAEPDCKIILLRYFNPVGAHPSGYIGEDPRGIPNNLMPFVQQVAVGRRPALTVFGNDYNTSDGTGVRDYIHVVDLADGHIAALLKLDEPNIGCEVYNLGTGKGTSVLEMVRAFEMASGKKIPLVMAGRRPGDAEIVYASTKKAERELKWKAKYGIDEMCRDQWNWASKNPYGYGDQGSTD

SEQ ID NO: 56200 - protein, 151 aa, Zea mays
  Clone ID: 700240855_FLI.pep
RFLHTGGICRRNTTELVVRRHQGQGSRSQNKHNGQQLNQNQDAHHQRPTSLPTTIGATAGDEPTTGGCRATKQCPCQRGTLIKAFLEEEPVQAPGTAAGLPAVWDLRGTRPVPHAVPLRPVQTTLTLLQRSMDTEVLSRFCTYASLDQLPL

SEQ ID NO: 56201 - protein, 344 aa, Glycine max
  Clone ID: UC-GMFLMINSOY047C02_FLI.pep
ENLLSNVLSAIPQDISRDAWLQALPRALVVGFVKTDIEFQQKGETSGTTATFVLVDGWTITVASVGDSRCILDTQGGVVSLLTVDHRLEENAEERERVTASGGEVGRLNVFGGNEVGPLRCWPGGLCLSRSIGDTDVGEFIVPIPHVKQVKLSNAGGRLIIASDGIWDALSSDMAAKSCRGLPAELAAKLVVKEALRSRGLKDDTTCLVVDIIPSDLPVLPPIPRKKHNMLTSLLFFGKKSENSMNKATNKLSAVGVVEELFEEGSAMLTERLGKDFPLNKNSGIFRCAVCQMDQPPGDGLSMNSGPFFSPASNPWEGPFLCTNCWKKKDAMEGKKPSRPTVTA

SEQ ID NO: 56202 - protein, 164 aa, Zea mays
  Clone ID: 700240921_FLI.pep
ELPFIATSVDFRRQGMCRILMSIIEKMLCSFNVKMLVLSAIPELVSTWVSGFGFKPIEDAERKQLHNVNLMLFPGTSLLTKRLDGFIMATKPGEEKDIHEVSGVPNLKRMPNGKANEHFKLHDLDLSGTEFKAEVSVNGPFRTLKHECGSAAWFQSTKLAVGEV

SEQ ID NO: 56203 - protein, 174 aa, Zea mays
  Clone ID: 700550026_FLI.pep
SLSLVEDQLVNINQKGFLTINSQPAVNGEKSDSPTVGWGGPGGYVYQKAYLEFFCAKEKLDQLIEKIKAFPSLTYIAVNKDGETFSNISPNAVNAVTWGVFPGKEIIQPTVVDHASFMVWKDEAFEIWTRGWGCMFPEGDSSRELLEKVQKTYYLVSLVDNDYVQGDLFAAFKI

SEQ ID NO: 56204 - protein, 576 aa, Zea mays
  Clone ID: 700241203_FLI.pep
MKLIAVYFIQLLHAMIHMHGNEHAIQKLRRGDAAEADGVDVVPGAVRRDAGHEQAGGAVEQRDGALAVVLALLGPQEGALEEVPPRVAVHGQQVPGVEVVLVGRVAALGDLAALVPAVEVDAGAAVREVGDGRRVEGHARDHVVAVHHPERLHGHVGAHVAREHLVAHARLPVGDHGEQAVQDAPLPVERQQRREDGRQRGAEAVAGDHDVGVRVLLQLLLDLLAQRVVGQRLARDGVGGGLGERPRGVLAVLLLQAQRLEEADVDVAQLAHAQPRQVYVRGPVPHVEGLRAPERHHHHARVLCLVGEHERLRRVVAHELVPAVVEPHEVELPDVVDDVLDVGGVLVGDLGGHHAHLEHGEGAEADEPPVHVLLLHQRHRRAAALHVQVVVIAAGSGGGGDAHHLQPPVLWAAAGWQRLQLRPPVDHPDHGPEVGRLPVQWDHQLTSEEVEKDAEYAIVERDEVEEELDDGADHESRVVGAGERLLDDLRERDEPVAGRAAQVGGGPVAGLHECVAGDGAPQEQHRQHVYEPHLLRPDDQLLLPHLGVAGGSSSDDWLLRRHMVVVASCYSCCTSC

SEQ ID NO: 56205 - protein, 89 aa, Zea mays
  Clone ID: 700550261_FLI.pep
ELRHHRQREGEDPGQRGHPPRPAASDLRWQAAGGWPHPSRLQHPEGEHSPPGAPPPRWSVSHGSFKLLLYLGICVVWCPLVYLYMDVVV

SEQ ID NO: 56206 - protein, 151 aa, Zea mays
  Clone ID: 700550386_FLI.pep
GPLYAGFDTILGFHIPSYKGPWKRKRIKNPNYKGKWKTPWIDNPEFEDDPDLYVLKPLKYIGIEVWQVKAGSVFDNILICDDPEYARKVVEETWGANREAEKEAFEEAEKERKAREDREGQKAKDDGGRHRIHRRHKKHYRDHWDDYHDEL

SEQ ID NO: 56207 - protein, 200 aa, Zea mays
  Clone ID: 700244211_FLI.pep
MGFGNVGSWAAQLISEAGGKVIAISDVTGAVKNVDGLDIAQLVKHSAENKGIKGFKGGDAIAPDSLLTEECDVLIPAALGGVINKDNANDIKAKYIIEAANHPTDPEADEILSKKGVLILPDILANSGGVTVSYFEWVQNIQGFMWDEEKVNAELRTYMTRAFGDVKQMCRSHSCDLRMGAFTLGVNRVARATVLRGWEA

SEQ ID NO: 56208 - protein, 156 aa, Zea mays
  Clone ID: 700550972_FLI.pep
LHDDIKAHKDIAHFETAYVVKLHRIATLAPPQQVFTFTHPNFSPNASNQRYTKLQFEMLPDMGSCLVHGFAGYFDSVLYKDVHLGIEPNTATPNMFSWFPIFFPLRKPIYVPEGSPIEVHFWRCCAPTKVWYEWAVTTPTPSPIHNSNGRSYWVGL

SEQ ID NO: 56209 - protein, 351 aa, Zea mays
  Clone ID: 700333259_FLI.pep
SVPAAYTMSKSGALDLASGLGGKINKVEVKSAVDEYEKYHGYYGGKEEARKSNYTDMVNKYYDLATSFYEYGWGESFHFAHRWNGESLRESIKRHEHFLALQLGLKPGMKVLDVGCGIGGPLREIARFSSTSVTGLNNNEYQITRGKELNRLAGISGTCDFVKADFMKMPFDDNTFDAVYAIEATCHAPDPVGCYKEIYRVLKPGQCFAVYEWCITDHYDPNNATHKRIKDEIELGNGLPDIRSTRQCLQAVKDAGFEVVWDKDLAEDSPLPWYLPLDPSRFSLSSFRLTSVGRMITRTMVKALEYVGLAPQGSERVSNFLEKAAEGLVEGGKKEIFTPMYFFLVRKPLLE

SEQ ID NO: 56210 - protein, 504 aa, Zea mays
  Clone ID: 700621517_FLI.pep
VVKSPMGSPADDKLRRRRPAGRLLMHCAKATPRGQAHPACMLDYKYPAGCTGQFHPAIDSPPVHRHSSRKRQELKNMANRGLHLALFLVLLGLSSNLAAGQILFQGFNWESWKQNGGWYNFLMGKVDDIAEAGITHVWLPPASHSLAEQGYLPGRLYDLDASKYGNEAQLKSLIEAFHSKGVKVIADIVINHRTAEHQDGRGIYCIFEGGTPDSRLDWGPHMICSDDRAYSDGTGNPDTGADFGGAPDIDHLNPRVQQELTGWLNWLKTDVGFDAWRLDFAKGYSADVAKVYIDGTQPCFAVAEIWTSLAYGGDGKPFYDQNAHRQELVSWLDRVGGKASPATTFDFTTKGILNVAVDGELWRLRGADGKAPGLIGWWPAKAVTFVDNHDTGSTQHMWPFPADKVMQGYAYILTHPGNPSIFYDHFFDWGLKNEIAHLVSIRDRHGIQADSELRIIEADADLYLAEIDGKVIVKIGSRYDCGHLIPEGFQVVAHGDGYAVWEKN

SEQ ID NO: 56211 - protein, 83 aa, Zea mays
  Clone ID: 700334517_FLI.pep
STLQNLNEHPDAWPFKEPVDSRDVPDYYDIIKDPIDLRTMLRRVDSEQYYVTLEMFVADMKRMFSNARTYNSPDTIYYKCATR

SEQ ID NO: 56212 - protein, 121 aa, Zea mays
  Clone ID: 700337210_FLI.pep
YHDPQGLQCYTFINAMQGGTSNGPYQDLLDYKKKIELLPGPSLNLGRRPLITVSLSVSLLLRILEVRMPLSSLHTFIKWYRRSGRELRKPSRICLVTYSTPEMASAAYDAATLALVSRRCD

SEQ ID NO: 56213 - protein, 653 aa, Zea mays
  Clone ID: 700472651_FLI.pep
EREEMAGKGDGPAIGIDLGTTYSCVGVWQHDRVEIIANDQGNRTTPSYVAFTDSERLIGDAAKNQVAMNPINTVFDAKRLIGRRFSDASVQSDIKLWPFKVIPGPGEKPMIVVQHKGEEKQFAAEEISSMVLIKMREIAEAYLGSTIKNAVVTVPAYFNDSQRQATKDAGVIAGLNVLRIINEPTAAAIAYGLDKKATSVGEKNVLIFDLGGGTFDVSLLTIEEGIFEVKATAGDTHLGGEDFDNRMVNHFVQEFKRKNKKDITGNPRALRRLRTSCERAKRTLSSTAQTTIEIDSLYEGIDFYSTITRARFEELNMDLFRKCMEPVEKCLRDAKMDKSSVHDVVLVGGSTRIPRVQQLLQDFFNGKELCKNINPDEAVAYGAAVQAAILSGEGNEKVQDLLLLDVTPLSLGLETAGGVMTVLIPRNTTIPTKKEQVFSTYSDNQPGVLIQVYEGERTRTRDNNLLGKFELSGIPPAPRGVPQITVCFDIDANGILNVSAEDKTTGQKNKITITNDKGRLSKEEIEKMVQDAEKYKSEDEEHKKKVESKNSLENYAYNMRNTIKDEKIASKLAADDKKKIEDAIDAAISWLDANQLAEADEFDDKMKELESLCNPIIAKMYQGAGADMGGSGGMDEDAPAGSGGPGPKIEEVD

SEQ ID NO: 56214 - protein, 217 aa, Zea mays
  Clone ID: 700349182_FLI.pep
LLAFVHPTRTSTISQHIHRRGGVEDTTKNPCKKGRPNKSVDAAGCSIAGELGDGLGSLGDGMFGELSWEDEAHGGLDLAGGDGGLLVVPRELGGLAGELLEYVVDEGVHDGHGLGGDADVGVHLLQDLEDVDFVGLHALLGLLLPLLLAALLAGGLRGRQALLGLGLLTCGRLLRLLLGRRLLLRWLLLGLGRHRVGFVGVEGDGGGLDAVGWRLGN

SEQ ID NO: 56215 - protein, 217 aa, Zea mays
  Clone ID: 700551134_FLI.pep
LLKQRAATNARRLAKADSFFRLREGKKRKKWQGKRHDTPSAPSRSSIDQVCGRRRASLAGGLSLHGQRHGARHGAVLERVQHLQVPPGLAPLQVGHVLPEPVHAGEGHQPLRVELPGVLLLDTLEPALGDLAPVARVRLALVEEVHEQGRRLVALVRVDVVARHAVHDDLGRTAVGCGKRGQAAGHGLNHRQPESLVESRLHEGALGVADVAVQLAV

SEQ ID NO: 56216 - protein, 224 aa, Zea mays
  Clone ID: 700352343_FLI.pep
QRTTCSRTHTHTSTFVPSAAYASPHTGNKVLLNIRSLRTVSLCLLRGLGGLLGRLCLLAPATGRLLRRLLGQQNRVDIGEHTAVSDSHAAQQLPKLLVVPDRQKHVARNNASLLVVPGSITGELQNLSGEVFEDSGEVDGGAGADTLRVAALLQVAPDAADGELEPGLHGPRHRLLPWPADLAPGRSLLPLTPCSGAGGVHGRISASIGLSGTRRKCSGVGTNA

SEQ ID NO: 56217 - protein, 248 aa, Zea mays
  Clone ID: 701164107_FLI.pep
RLAILLVLLAASPLLGATQKAAPGPASSSGSGAGAADAAPPTDVNKALKDEQFSEFRQLLHDTRVDTQINAQLTDSYNGLTIMAPTNAAFDKMKAGVLNGLSPQEQIQMVLYCVLPRFYSLSMLGTLSGKVNTQGSGHDGPYRYDIKRSGNNVNVSTGVNWMLLGSPVSKDFPLAIYPVDKVPLPYELFGPKPPTPAPAPAPAPGPAKAKTKKKKKSAAIAEPPTADDDDTGSTSDDQKAAAAPPRAS

SEQ ID NO: 56218 - protein, 242 aa, Zea mays
  Clone ID: 700378156_FLI.pep
RRQAELIAQFSAQAAALSSAPQLAALVLEATSHPALFAFSELLTLPALSKLTGTQYASSLDLLRLFAYGTLNDYKSNSGFLPALLPDQVRKLKQLSVLTLAESTKILPYDQLMQELDVSNVRELEDFLINECMYSGIVRGKLDQLRRCFEVQFAAGRDLTPDQLKNMIETLSDWLGTSDRLLHQIQEKIKWADTMSEVNKKHQKEFEDRVEEAKKSIKKLNNLSRQTLTYGGMTSFSLNLEE

SEQ ID NO: 56219 - protein, 254 aa, Zea mays
  Clone ID: 701172919_FLI.pep
PLYKESECSFLTEQVTCTRNGRRDDDYQKWRWQPDGCDLPRFEAKLLLEKLRNKRLMFVGDSLNRNQWESMVCLVQSEAPWDKKSLVKNGSLNVFHLQEYNATVEFYWAPFLVESNSDDPDIHSISDRMIKPTSIAKHAANWEGVDYLIFNTYIWWMNTPQMKTVHGGSFSRKHVKYDEIERVEAYRKVLKTWSRWVEAHIDPKRSTVLFMSVSPVHMQSEGWGSPNAVKCFSEMQPAINYTKKLEVGTDWDLF

SEQ ID NO: 56220 - protein, 187 aa, Zea mays
  Clone ID: 700379678_FLI.pep
QRTTCSRTHTHTSTFVPSAAYASPHTGNKVLLNIRSLRTVSLCLLRGLGGLLGRLCLLAPATGRLLRRLLGQQNRVDIGEHTSVSDGHAAQQLPELLVVPDRQKHVARNNASLLVVPGSITGELQNLSGEVFEDSGEVDGELEPSLHGPRHRLLPWPADLAPGRSLLSLPRCSGAGGVHGRISASSG

SEQ ID NO: 56221 - protein, 417 aa, Zea mays
  Clone ID: 700404769_FLI.pep
ASRGETEPLEVMVSVLRVVVEHPLPRRQHPPAVLRPHHALVLRLVPHGRHHVVLPEEVGGLVHQRGVPPAGLEPRAGAAEAVQQVQVRLQVVVAREVQGLLEERRHLVVQLQQHAQVRVHAAEAQPVRRPQDELRERRLVEEHAGHLGHAVVHVHDAQRPHAQLPLEPPPEGDVPDARAGEGEHAHRRHPVARRHVRARLRDVEGAQHRQRAAQAVARDRHAHLLAPPVVQIHQLAHLGQHLLPRRVPAEAAAGALVRVQRREPSLHLHVGVRAGDARLAQGDLVGRQIGHPLEAGDGAAPRHGDVPAAEPRRLLVGGHGHVPDERAGLAPHLGVGGRLDAEVGELEVVAGGVEVAGDLVADAAEADVVEEGLRRVLAAAAVGGEAVVVEAVVGGLGELAIADELLEEHAVDGVQQT

SEQ ID NO: 56222 - protein, 85 aa, Zea mays
  Clone ID: 701181044_FLI.pep
AEYFRYLKFQVPKVLGLGKGILELQGRFCCLPIFSAHLCSPHGPRLGSWLLLAAPAVLPPGPGVLHSAASSQAPSSHHAVTHQVA

SEQ ID NO: 56223 - protein, 144 aa, Zea mays
  Clone ID: 700345709_FLI.pep
GKTITLEVESSDTIDNVKAKIQDKEGIPPDQQRLIFAGKQLEDGRTLADYNIQKESTLHLVLRLRGGMQIFVKTLTGKTITLEVESSDTIDNVKAKIQDKEGIPPDQQRLIFAGKQLEDGRTLADYNIQKESTLHLVLRLRGGQ

SEQ ID NO: 56224 - protein, 109 aa, Zea mays
  Clone ID: 700426261_FLI.pep
CGKPRLLYPCGAGYRGKRERLPGRPSAGIKHGPVHCDGATGRDHDPLAAIPRGGGSCRQEAGAEGVKQLKDGSGTNINRSATRLIFVSMAWVLRLSARRCHSVQNHGCL

SEQ ID NO: 56225 - protein, 139 aa, Zea mays
  Clone ID: 700426407_FLI.pep
GKTIGYKVGTMIEIPRAALVADEIAEQAEFFSFGTNDLTQMTFGYSRDDVGKFIPVYLAQGILQHDPFEVLDQRGVGELVKFATERGRKARPNLKVGICGEHGGEPSSVAFFAKAGLDYVSCSPFRVPIARLAAAQVLV

SEQ ID NO: 56226 - protein, 131 aa, Zea mays
  Clone ID: 700422554_FLI.pep
ERVSVIERTNLRYLSQLPEPVDLVTLDLSFISILLVMPAVIKVMKTDSTLITLIKPQFEARRSQVGGGGIVRDPLVHQEVLDRIISGVEEFGFCNKGWIESPIKGAEGNKEFLACFNRIQYQSHSQRQRNL

SEQ ID NO: 56227 - protein, 287 aa, Zea mays
  Clone ID: 700426784_FLI.pep
IQSRDRMDMDRPEEEGQQRRETMTPVLLRLFGVDVHRGGGSGEPEESPMDLRKSSSMPDLTINPLLSPEEKEGCKGYASDDAELASGQQKRRRRKAQDRKKGIPWTEEEHRKFLDGLRQLGKGDWRGISKGFVTTRTATQVASHAQKYFLRQTNPGMKKRRASLFDVGIADYKDNQVPGPQSIVAAKPAPTQEIIHTDRGDVPIPRYRGLGEILGSNMQVNQLTDYYYFNKNSHVPAGTSLSMASGLETASTVDSLELSIAVNGLELSIAPPSRCVCGGAAGAIKVL

SEQ ID NO: 56228 - protein, 184 aa, Zea mays
  Clone ID: 700346223_FLI.pep
GKPSEYNTYNDIEAVYDCLRTEYGIEEEDLILYGQSVGSGPTLHLASRLEKLRGVVLHSGILSGIRVLYPVKVTLWFDIFKNIDKIKQVDCPVLVIHGTADDIVDLAHGKRLWELAKDKYEPLWIKGGGHCNLETYPEYIRHMRKFISAMEKLAKDSSKAAQAPPPSSMAAEERHTKCLRFGKR

SEQ ID NO: 56229 - protein, 245 aa, Zea mays
  Clone ID: 700440996_FLI.pep
RTVVSIPNGPSELAVKEAAWGLARYAAISQDNGLVPIVEPEILLDGEHGIERTFEVAQKVWAETFYAMAENNVMFEGILLKPSMVTPGAEAKDRATPEQVAAYTLKLLHRRIPPSVPGIMFLSGGQSEVEATQNLNAMNQGPNPWHVSFSYARALQNTCLKTWGGSRTRSRRRRRAAAARQGQLPGAARQVHLRRRGRRGQGGNVRQELQLLINRPAITRDTAAPPRDTCVLIMVKHVLRSIPIP

SEQ ID NO: 56230 - protein, 115 aa, Glycine max
  Clone ID: 701049278_FLI.pep
MESKRVSFPKEQPMRIYSSLWNADDWATRGGIVKTDWSQAPFTASYRNFNANACVHSGASSCTSNSASSNAWFNQQLDSTSQDRLSWVQKNYMIYNYCTDTNRFPQGLPPECQAS

SEQ ID NO: 56231 - protein, 209 aa, Zea mays
  Clone ID: 700442142_FLI.pep
ILMVFSLNFVKLVYVSFCSPRRHGVEYSSLPPLQEPLLILIDEQVPVVLVLHLPSDGPNRIRIQRELPQPCPFVPHLPLPVRLRPLHPVRALARDGVQGALPKQVLLHQHAVVVVPRRHRVHHVEQRRVVEERLPEPRHEQGRAVRAVLHAQDEHVGPHLPDVTEDSVPRARPAIPIHVVLLLLLHPTETEQAVHDEHLVALDAQLVHR

SEQ ID NO: 56232 - protein, 258 aa, Glycine max
  Clone ID: UC-GMFLMINSOY030F06_FLI.pep
SGTRRPQRFIYILPLHHVTFTDKGKFLLAARRYRCGTHTEYIISLDADDLSQGSNAYVGKLSSDFLGTNFTIYDSQPPHSGAKPSSGRASRRFASKQISPQVPAGNFEVGQVSYKFNLLKSRGPRRMVCSLKCPVTPVSPTSGSSDSTPVNGHKMHDKEQAASGYTILKNKAPRWHEHLQCWCLNFHGRVTVASVKNFQLVATVDQSQPGGKGDEETVLLQFGKVGDDTFTMDYRQPLSAFQAFAICLTSFGTKLACE

SEQ ID NO: 56233 - protein, 382 aa, Glycine max
  Clone ID: UC-GMROPIC011F07_FLI.pep
DFEIPPEAQRGSLSTVEGILMRAADELQTLQEERKKVAPETAEAIDQFLVKLRACATGESAFTFILDDPAGNSFIENPFAPSSDPSLTIKFYERTPEQQASLGYLVDSTHIEGIHDETPEGGEAVTADQVRREPHGSIGATAGHRAIAQSNSSEIAEALFRYTAPEEVMTFPSSCGACAASCETRMFVTNIPYFQEVIVMASTCDSCGYRNSELKPGGRIPEKGKRITLNVKNVNDLSRDVIKSDTASVKVPELDLELASGTLGGIVTTVEGLITKISESLERVHGFTFGDSLDEQRKGKWIDFKARLNKLLSLEEAWTLILDDALANSFVAPATDDLKEDNQLSFEEYERSWEQNEELGLNDIDTSSADVAYESTNTTKTE

SEQ ID NO: 56234 - protein, 165 aa, Zea mays
  Clone ID: 700457613_FLI.pep
WTPSKVIARLGKEINDESSYLYWAYKNNIPVYCPALTDGSLGDMLFCHAVRNPGLIIDIVQDIRLMNGEAIHATPRKTGIIVLGGGLPKHHICNANMFRNGADYAVYINTAQEFDGSDSGAHPDEAVSWGKIKGSAKPVKVHCDASIAFPLLVAATFARKVHNSK

SEQ ID NO: 56235 - protein, 81 aa, Zea mays
  Clone ID: UC-ZMFLB73125A08_FLI.pep
FVTRYKENRWDPKRLIGSGGMPSSHSATVTALAVAIGFQDGFSCSLFATATIFASVVGYQFSIPTHVPSEEHKRFYFFNLD

SEQ ID NO: 56236 - protein, 40 aa, Zea mays
  Clone ID: 700548490_FLI.pep
PVPISTCAENRLGSDNHCWKANSACQIIDHVIHYNLYRFT

SEQ ID NO: 56237 - protein, 383 aa, Zea mays
  Clone ID: UC-ZMFLB73129F06_FLI.pep
LSPPLPLFATLYRPPTTPRFSLLHPSLSPAPGPPRPAPPERHPASPPPPMGNPPELYHKILNIPKDTSPHEIRAAYKNLVKKWHPDKHPPSSRPEAEARFKAISEAYEALLDQQENRGVFELCNDGRAGERTRGAFGGAGGGGGGGLGAGVGARMERTRSDGFCTRSAPGTPAREFKKVYSSGDPGGRRAFAEFSSSIVRKAPPLERKLECTLEELCRGCKKEVSFTRDVVTKNGSTVKKEVTQTVVVKPGWRKGKQVVLEGMGDERPGCLPGDAILTVSEKRHPAFKRVGDDLVLKAEVPLVGALTGWSFSFRLLGGRKVSCSFQDEVVRPGYEKVIAGEGMPVPGQKGARGDLRVKLDVVFPKELTPEQRAGLAEILRGSC

SEQ ID NO: 56238 - protein, 84 aa, Zea mays
  Clone ID: UC-ZMFLB73131H04_FLI.pep
IFGKCAQFFAAVLKASLWLMSGLHALILRISSLINLLYAEGTRCLFSGAVVYYKHRTYEIIIRTYIHHRYTYFTKLPLFKSTLI

SEQ ID NO: 56239 - protein, 657 aa, Zea mays
  Clone ID: 700550458_FLI.pep
GVEWRFRHIFRGQPRRHLLQSGWSVFVSAKRLVAGDAFIFLRGDSGELRVGVRRAMRQQANVPSSVISSHSMHLGVLATAWHAVNTGTMFTVYYKPRTSPAEFVVPCDRYMESLKRNYPIGMRFKMRFEGEEAPEQRFTGTIVGNVDPDQAGWAESKWRYLKVRWDEASSIPRPERVSPWQIEPAVSPPPINPLPVHRPKRPRSNAVASLPESSAPTKEAAPKVTLETQQHALQRPLQTQDNVAPKSVFGDNSELDSAHKSSLRPSGFDLDKSTIGMQRKLGSDIWMRMNRPDGYSEMLSGYQPPNEGARNSQGFCSLPDQIAAGRPNFWHTVNAHYQDQQGNHNLFPGSWSMMPSSTGFGMNRQSYPMIQEVGGMSQSCTNTKFGNGVYAALPGRGIDRYPSGWFGHTTPGGRVDDAQPRVIKPQPLVLAHGEALKMKGNSCKLFGIHLDSPAKSEPLKSPPSVATPAAEKWMADGIDTDKSSEPHKTPKQLGATQTQVDPVPERCPQASRGTQCKSQGGSTRSCKKVHKQGMALGRSVDLTKFNGYTELVAELDEMFDFNGELKGCSKEWMVVYTDYEGDMMLVGDDPWNEFCSMVHKIFVYTREEVQRMNPGALNSRPEDSGLANSTERGSASTAAAREAPGYQSASSLNSDNC

SEQ ID NO: 56240 - protein, 331 aa, Zea mays
  Clone ID: UC-ZMFLB73145H07_FLI.pep
GTTKVAIKRGNPLSEQGVHEFQTEIEMLSKLRHRHLVSLIGYCEEKNEMILVYDYMAHGTLREHLYKTQKPPLTWRQRLDICIGAARGLHYLHTGAKHTIIHRDVKTTNILLDEKWVAKVSDFGLSKTGPSMDHTHVSTVVKGSFGYLDPEYFRRQQLTEKSDVYSFGVVLFEVLCARPALNPTLPKEEVSLAEWALHCQKKGILDQIVDPYLKGKIAPQCFKKFAETAEKCVSDQGIDRPSMGDVLWNLEFALQMQEGAEESGSLGCGMSDEGAPLMVGKKDPNDPSIESSTTTTTTTSISMGDQSVASIDSDGLTPSAVFSQIMNPKGR

SEQ ID NO: 56241 - protein, 295 aa, Glycine max
  Clone ID: 700557332_FLI.pep
SWVGYVAVCEDRREITRMGRRDIVISLRGTSTCLEWAENLRAHMIDMPDNDSSEEAQGKPKVECGFMSLYKTKGAQVPSLAESVVEEVRRLIDLYKGEELSISVIGHSLGATLALLVAEEISTCCPQVPPVAVFSFGGPRVGNKAFGDRLAAKNVKVLRIVNSQDVITRVPGIFVSEELEQKIRNVGGGVLEENTPLAYSHVGTELRVHTKMSPYLKPDADMACCHDLEAYLHLVDGFLASNCPFRSNAKRSLARLMQDQSANVKKLYTSKAKSLTVNLSRQGSMSMSNCLPSPS

SEQ ID NO: 56242 - protein, 629 aa, Zea mays
  Clone ID: UC-ZMFLB73149E04_FLI.pep
VSSCHTASGRVSGMLAGCSFSSSRHQMSTAQRFDILPYGFSKRASNRGDGSGAAPRVAAPDARSGGGGGTCSFRAHPAPPVTQAVSWGAKPEPGGNGAAWERSRAVKRAHEEDAGEEYGGPVVRAKRTRMGGDGDKVWFHRSIAGTVQAAGSGDGHEAEEEKAFLVPSAAAFPHGMSAAAAGPSLAVAKKEEFSKSPSNSPASSGGTDGGSSAVPWPEQLHAQNGAAARVEAMELVVALTACADSVAACNHDAANYYLARLGEMASPAGPTPMHRVAAYFAEALTLRVVRMWPQVFDVSPPRELTDGAVAADDDATALRVLNAVTPIPRFLHFTLNERVLRAFDGHDRVHVIDFDIKQGLQWPGLLQSLATRVAPPAHVRITGVGESRQELQETGARLGRVAAALGLAFEFHAVVDRLEDVRLWMLHVKRGECVAVNCVLAAHRLLRDETGAAVADFLGLTRSTGAAILLLGEHEDALNSGRWEARFARALRYYAAAFDAVEAAGLADASPARAKAEEMFAREIRNAVAFEAADRFERHETFTGWRQRMQEGGFQNAGIGDREALQGRMIARMFAPGNYSVQVQGDGEGLTLRWMDQAMYTVSAWTPVSDGGSTVSASVSTTASHSQHS

SEQ ID NO: 56243 - protein, 593 aa, Glycine max
  Clone ID: 700558516_FLI.pep
MKKGRELFVGSYRSLHQTPISPIQFQQTMSHSDPSNRYSYTPTLNWNPQVHHYFLKAYGADHFSRISTALTRPSRYSCIRVNTLRSTGDAVIHKLRSLVPNADVPPPQSDSGDDVANPLKECSAAAAAPISKCEIPGLDYVVFVWGSGPRRIHYGDAPPKEVIVSRKCAEAVLRGAQVYVPGVMACSAHVEKGDTVAVSVAVEKQGADGGWGIAMTRGTVLQGSETDPYYFERNGLYIGQGTAMLSRAGMFRVSEGVGVDMKDRVYELHSFHNVLEGEIFLQNLPSIIAAHALDPQKGERILDMCAAPGGKTTAIAILMKDEGEIIATDRSHNKVLDIQKLAAEMGLSCIKTFKLDALKSVCRRDDIDTFTDPCCNNAKIDVTNQVLDSPNLQVERVSPLVTEDKGKKPNGGAYVSKADIRKNMRRARNGPGRNQCVGGRVDRSKGFSPDSFDRVLLDAPCSALGLRPRLFAGEETIQSLRNHAKYQRRMFDQAVQLVRPGGIIVYSTCTINPGENEALVRYALDKYKYLSLAPQHPRIGGPGLVGSCEFPDGYIEEWLRPGEEDLVQRFDPSSPLDTIGFFIAKFLVGSKDT

SEQ ID NO: 56244 - protein, 146 aa, Zea mays
  Clone ID: UC-ZMFLB73138B03_FLI.pep
SFNINKPLTAHHQIYQTTVVSFQITVFLKKNQMLKLILRLSSFFFISSKDYIFCGEEVDHILNARRKESQTSANHRALLRAICRPKNQPSQIVGFAVENAHLSTRDHHMLRTNLSLALEGPSRNFCLMSNPLSSHLSPFFSSMVDK

SEQ ID NO: 56245 - protein, 350 aa, Zea mays
  Clone ID: UC-ZMFLB73143F01_FLI.pep
QRYRFFCCGCGANAAADGRERDEDGGFGVSDGKAEKGVEAGPRGLSWAQVEAMTGGFTSAVVGEGGFSTVYLARLSGALAAVKVHRSSERLHRVFRQELDALQRVRHPHIVRLLAFCDQQDEGVLVLEFAANGNLHERLHGGGKAAGTMPWARRVSVALQVARALEHLHDRCEPQVVHGDVKASNVLLDASMSAKLCDFGSARMGFSAAVRPRSSARTMLGSPGYVDPHYIRSGVVTKKSDVYSFGVLLLELLTGMEAFCAEEGRLLTAVVAPRLRAGDPPCDARGLVDERLGTAYDAAEAAAVAALAAACVGDNPSLRPSMADVVRTLEQRAQGSISAVERRSDGQRKV

SEQ ID NO: 56246 - protein, 509 aa, Zea mays
  Clone ID: 700611553_FLI.pep
AKDLHGMKWRFRHIYRGQPRRHLLTTGWSSFINKKKLVSGDAVLFLRGNDGELRLGVRRAVQLKNEALLEAVNCTDSKLLMLSAVANSLDNRSIFHICFNPRVGASEFIVPYCKFLKSLNYPFSVGTRFKVGCENEDANERSFGLIIGISEVDPIHWPGSKWKSLLIKWDGATKYSHQNRVSPWDIEGVGSSVLVTHRLSSSVSKRTKLCFPPSDLDTPILDGNGRPDSVETERFHRVLQGQELVHPSIHGAACSHSSDSPRCQGSYGRRFSADVWNCKMNDVMSGPRHLNATGFAYQPLGFSESVKFSEVLQGQEMSQAVPSFMRSAFNSGTQNGRVRPFDYVQRSDATQGYALQQFNLPATEVHSPSSVLMFNQTMVPHAELDGATNREEVHGSRYLSSNAIGREAEPWPSMQQQRASVNGSEPLDTTEASAPARNAESGSVGRGAGRSNCKLFGFSLTEKILGTDGGGVKEGNYEVDRQTPRVLDLFGHGSTPGALHALCAAPLGI

SEQ ID NO: 56247 - protein, 85 aa, Zea mays
  Clone ID: UC-ZMFLB73125E09_FLI.pep
VVVIVGIRHFLDPEPYKQLYLPPHVIVMILRFFPQPDFQKSWSEKSRNKQGQLSCLAALPNLLQNFFSRCLSGVCVDVFFLIQLL

SEQ ID NO: 56248 - protein, 354 aa, Zea mays
  Clone ID: 700612163_FLI.pep
SCAAAVGQDMINSLAADDDKEKYGRYLRRSYIEDNRKTKWCPAPGCEYAVEFVMGSGSYDVNCNCSYGFCWNCTEEAHRPVDCATVSKWILKNSAESENMNWILANSKPCPKCKRPIEKNQGCMHITCTPPCKFEFCWLCLGPWSEHGERTGGFYACNRYESARQEGAYDESERRREMAKNSLERYTHYYERWAANQSSRQKALGDLQSLQNDKLERLSDIQSQPESQLKFIVEAWLQIVECRRVLKWTYAYGFYLPEHEHAKRQFFEYLQGEAESGLERLHQCAEKELQIYLDAESPSKDFNDFRTKLAGLTSVTRNYFENLVRALETGLNDVGPSTSHGTCSKKRNFQEPRW

SEQ ID NO: 56249 - protein, 187 aa, Zea mays
  Clone ID: UC-ZMFLB73131H08_FLI.pep
VDEFRRGGPERGGGLRAAVVPVDGVPARVREHAGPLRGWRGAQPAPAGASGAGGWRRPRAQLLLLHPRRRRRRDEGLRGAGARRGGAAAAVRGRDGADGPCRHTALRLVPQQRPDLGQRRAHRHLHLPRLPRPAVPRWQGQRRRRQGEEEGGGRRAGHQQRAWDCPDLFYEVLIGCIYIFILIYMDF

SEQ ID NO: 56250 - protein, 462 aa, Zea mays
  Clone ID: 700612732_FLI.pep
LRVGVRRLMRQLNNMPSSVISSHSMHLGVLATASHAISTGTLFSVFYKPRTSRSEFVVSVNKYLEAKNHKMSVGMRFKMRFEGDESPERRFSGTIIGMGCMPANSTSPWANSEWRSLKVQWDEPSAILRPDRVSPWEVEPLDRTNPQPPQPPLRNKRARPPASPSIAPELAPVFGFWKSPAEPAQAFSFSGLQRTQELYHSSPSSMFSSSLNVGFNPKYEGPTPNTNHLYWTMRETRTESYSASINKAPTEKKQESTTSGCRLFGIEIGSSAVSPVVTVASVGHDPPPPALSVDAESDQLSQPSHANKAMDAPAASSDRSPNETESRQARSCTKVIMQGVAVGRAVDLTRLDGYDDLRRKLEEMFDIPGELCASIKKWKVIYTDDEDDMMLVGDDPWSEFCRMVKRIYIYSYEEAKSLTPKAKLPAIGGDTGVKPDPSKLPPESDVPQSDSDNSAPVAADKD

SEQ ID NO: 56251 - protein, 142 aa, Zea mays
  Clone ID: UC-ZMFLB73134H03_FLI.pep
DMSAMHHDSSHDLKTLGAKLKDIVGVADTSLEVRYITRHICDLVAERAARLAAAGVYSILKKIGRDKVPSGGGKMPRTVVALDGGLYEHYKKFSSCVEATLTDLLGEEASSSVVAKLANDGSGIGAALLAASHSQYQYGASD

SEQ ID NO: 56252 - protein, 75 aa, Zea mays
  Clone ID: 700617488_FLI.pep
DKQTEGVMVWIRSHGSVRSRGDLHLLPHLLRAAVRALVVLYVIRFRRGDPHALAVEPPLADVAADPELARVVKAA

SEQ ID NO: 56253 - protein, 402 aa, Zea mays
  Clone ID: UC-ZMFLB73139H12_FLI.pep
GPVATLPVTIITGTSRLISQGPGCCCLYRERLEGELEHHVVLVHLPRPDDLGGEIGVVDGVREPLRLEAQRAVLLVHLAALPLDVLEEVARVELHPRLVGPQLQRPAGRAVPDDGHLPQRPGLPVHGVVGVVAVDAGLAAGDLADARAHRGRREEVVGRAGHGRHRARRDEAAAHGRVPGREQLHRVAEDVAAALPAQVPVRVLRQVHRGRLVHGRRVHVHPQHVGGRQLVRHVHVQVAWETLFSIEAVVVQRDVGRVTATDELFNRPYNLTEPPMATMKRVVAIVLEKMVSLSVEHEARVGDPVGHSSDKRSEVAFTTHVSSNGVVAKHDVSKIPFGVRQHNGGDGGAPVGDADGEIARLELVHADHLPPRRIGGAGGGGARAQQREEQRSSSHDYQPTQE

SEQ ID NO: 56254 - protein, 483 aa, Zea mays
  Clone ID: 700622539_FLI.pep
EIRSTLDRHMILKTTLVELGRTLGLEECALWMPSRSGSSLQLSHTLHHQITVGSSVPINLPVINQVFSSNRAIIIPHTSPLARIRPLTGRYVPPEVAAVRVPLLHLSNFQINDWPELSAKSFAIMVLMLPSDSARKWHVHELELVEVVADQVAVALSHAAILEESMRARDLLMEQNVALDLARREAEMAIRARNDFLAVMNHEMRTPMNAIIALSSLLLETELTPEQRLMVETVLKSSNLLATLINDVLDLSKLEDGSLELEIKAFNLHAVFKEVMGFIKPIASIKRLSVSVMLAPDLPLCAIGDEKRLMQTILNISGNAVKFTKEGHITLVASIVKADSLREFRTPEFHPTASDDHFYLKVQVKDTGCGIGPQDLPHVFTKFAHPQSGGNRGFNGSGLGLAICKRFVSLMGGHIWIDSEGTGRGCTATFVVKLGVCDNTNTYQQQLIPLVWPSSADSDLRAPKPLPDGRGSTPLKSRYQRSV

SEQ ID NO: 56255 - protein, 144 aa, Zea mays
  Clone ID: UC-ZMFLB73143F04_FLI.pep
RQQLISPSSVLGSIKGDMLSTISCSVPSEYFFVSTKVDGDRLFAISCPTAPWKSSFVPITFTADMQSCISCPAASSWKSFLVLMSAPWKSSFVPMTFTGDMLSCISCPAKSFLMSTSIEGDALSSTSCSTSSSRSFFMNRPSLS

SEQ ID NO: 56256 - protein, 644 aa, Zea mays
  Clone ID: UC-ZMFLB73146F06_FLI.pep
NLEAATHDVVIGVLDTGVWPESPSFAGGNLPPPPARWKGVCEAGVDFPPSLCGRKLVGARSFSRGLRAANGGAIGVGKRTFRSARDRDGHGTHTATTAAGAVVANASLLGYATGTARGMAPGARVAAYKVCWPEGCLGSDILAGIDAAVADGVGVLSLSLGGGSAPYFRDTVAVGAFGAAAAGVFVSCSAGNSGPSGSTVSNSAPWVATVGAGTLDRDFPAYVMLPTGARLARVSLYAGPSPSPRPAMLPLLYGSGRDNASKLCLSGTLDPAAVRGKIVVCDRGVNARVEKGAVVKAAGGAGMILANTAASGEELVADSHLLPAVAVGRAVGDKIREYAARGGGRPMAMLSFGGTVLGVRPSPVVAAFSSRGPNTVVPEILKPDMIGPGVNILAAWTGVAGPTGLAKDGRRTRFNIISGTSMSCPHISGVAALMKAAHPDWSPSAIKSALMTTAYTVDNTNSSLRDAADGSVANAFAYGAGHVDPQRALSPGLVYDISTHDYAAFLCSLNYSAPHVQVITKASNVSCGAPNKSRPGDLNYPSFSVVFGQKRKTKPAAALRFRRELTNVGPAASVYDVKVVGPESVAVTVTPARLTFRQAGQKLRYYVTFASRARQGHAKPDFGWISWVNDEHVVRSPVAYTWKM

SEQ ID NO: 56257 - protein, 363 aa, Glycine max
  Clone ID: 700685392_FLI.pep
NMNSASPQFVSPRSMSVYDPIHQISMWGEGFKSNGNLSAAMPLIDEADMKFDSQSEDASHGILGEPNKYDQEASKPTDKIQRRLAQNREAARKSRLRKKAYVQQLESSRLKLMQLEQELERARQQGMYIGGGLDSNHLGFAGSVNSGITTFEMEYGHWVNEQNRQITELRNALNAHIGDVELRILVDGMMSHYAEMFRMKSAAAKADVFYVMSGMWKTTAERFFLWIGGFHPSELLKVLGPLIEPLTEQQRLNIYNLGQSCQQAEDALSQGMDKLRQTLADSVAAGQFMEGTYIPQMTSAMEKLEDLVSFVKQADHLRQETLEQMSRILTIRQAARCLLALGEYFQRLRALSSLWSNRPREPA

SEQ ID NO: 56258 - protein, 719 aa, Zea mays
  Clone ID: UC-ZMFLB73149E12_FLI.pep
ALKSRQFFDFFQPFLLLLTEQEGASKTPLRKHGVVFCSKKKKKTLEAKVSKARGEKEKTCTWRAAGQVKGRGKRASATGGAMRWRSPAVLRLQLWLLAVSASLAALGVLAADLSKEPFTIRISCGSFDDVRTEPTNTLWYRDFGYTGGRFANATRPSFIVPPLKTLRYFPLSDGPENCYNINNVPNGHYQVRLFFALLDNPNLDSEPIFDVSVEGTLFSSLLLGWSSDDEKTFAEALVFVQDSSLSVCFHSTGHGDPSILSIEVLQIDDDAYNFGPPREKGTVLRAVKRLKCGSGKPAFDEDLNGIHWGGDRFWLGLQTLSSSSDDQSISSENVIAETLLAPNFYPQGIYQSAIVGTDRQPSLSFEMDVTPNKNYSVWLHFAEIDNGVTAEEQRVFDVLINGDTAFKDIDIIRMTGERFTALVLNKTVAVSGITLKIILQPVKGTRAIINAIEVFEIIPAEKKTLPQEVSALRTLKGSLGLPLRFGWNGDPCVPQQHPWSGVDCQFDSTKGNWIIDGLGLDNQGLKGVIPSDISKLQHLQNINLSGNSIKGNIPISLGTISVVQVLDLSYNELNGSIPESLGELTSLQILNLNGNRLSGRVPASLGGRPLHRARFNFTDNAGLCGIPGLRECGPHLSVAAKIGMAFGVLLAILFLVVFAACWWKRRQNILRAKRLAAAREAPYAKSRTQFTRDVQMAKHQRTHENARSSNSEGSPHLLS

SEQ ID NO: 56259 - protein, 138 aa, Zea mays; identical to SEQ ID NO: 48164
  Clone ID: UC-ZMFLB73125G05_FLI.pep

SEQ ID NO: 56260 - protein, 161 aa, Zea mays
  Clone ID: UC-ZMFLB73130C11_FLI.pep
ILIMVWRKLIRNPNTYSSLIGLAWSLVAFRWHISMPAVVAKSIAILSDAGLGMAMFSLGLFMALQPKLIACGWRATGVSMAVRFLAGPAVMAAASLAIGLRGTLLRIAIVQAALPQGIVPFVFAKEYNVHPAILSTMVIFGMMIALPITLIYYILLGLKPV

SEQ ID NO: 56261 - protein, 278 aa, Zea mays
  Clone ID: UC-ZMFLB73135F02_FLI.pep
SGFIRRHRAASSLAMALFAAARRAAASSVPVLLRASASSGSHRSAVLLRPLAAAVAPPKPRAMPFSSAPATRPSSDAELLSVIDSEIKYAEDCDDHDRVEEIPENFPFKISDEKGTNAVTLKRTYQGEQIEVVVHMPSLVTGDEPDHDRDGEDEDTAGDDNDEDEGQKPEQSSIPLTVTISKGDGPVLEFTCTAYPDEVIIDSMSVTQQSGDDERDMIAYEGPDFNDLDENLQREFHRYLDLRGISPRTTNFLHLYMINKDSREYLLWLRKLKDFFKQ

SEQ ID NO: 56262 - protein, 405 aa, Zea mays
  Clone ID: UC-ZMFLB73140B02_FLI.pep
SRSGGGGDAPRRGGDERARMPPQGQAPVLLLHPVPVAAGEERQQRARLLVGIGAQVHGREPGAAEAAAPLAQRLVALRALRALARHHVADLPAEVHLRHDLVRAAGRGRGGVGGLAGAGAGALERIEHGGVVVQRLGEAVEERAGVVVGLLLDHGHDPRPHRAHRAQDLLEGTGLRKKPVQLEHGVHGDHLGLVIRVIALRLQHERLQVGERGRDEATVLEVHADGVRELGKFPAHLLQGVGLVGLRRPDAGEPERRGAARAEGEGLEKSRPLHPLLDAEVDDVDAAAAGEGLEDGLVRGEVGELQVGAGLVEVRVQEVGEGGVEEGAVRWRAEAIHAAGKRLAEVGGDLAHGTALRRGQHGDLLDQRLRRREVLLLHGLRARQQRVHEPDPGLLRVHHHHRHRG

SEQ ID NO: 56263 - protein, 234 aa, Glycine max
  Clone ID: 700764023_FLI.pep
NQSSMSKDKDGEEPLGIGLQVMLAAAFSLFGMILLIIIFHFCVKYFIRRQQRRRQNDLLYQISTQIAPIDVSSVEPRNSGLDPLIIASLPKLLYKQTDQFKQGEEVVECSVCLGTIVEDTISRVLPNCKHIFHVDCVDKWFNSNTTCPICRTVVDPKVQPEHGHLGATRLHNQVQPTAPPAEGGDELPDGNELERVGCSGLRIGSFHRMVSNRERSGRRTQSCDGSTIVDIERH

SEQ ID NO: 56264 - protein, 169 aa, Zea mays
  Clone ID: UC-ZMFLB73144A10_FLI.pep
FGRNRITYTDTCTGQDLKKYHNMDAINDLVVSGVASRRANHPSGQTDVIVFCSGGFENPGTAKSEGELLSQLVDSLDLSGAKYTVLYASQPSGLLESPSGLPLGRHLAEKKTNGTKAVQGEKCDGECLVKSSLLEGTFVGIVLLIILISGLMCMMGIDTPSRFEAPQES

SEQ ID NO: 56265 - protein, 223 aa, Glycine max
  Clone ID: 700787666_FLI.pep
ILMPNNNFEVKKINNGHSVTSTTTGTVATATTTTSPVNSSSSRWPKAEVHALIRIRTSLETKYQENGPKAPLWEDISIAMQRLGYNRSAKRCKEKWENINKYFKRVRESSKERREDSKTCPYFHELEALYKEKSKSSKNPFGIFQNMKPNEMMLMMTEPLMVQPEQQWRPPPQSLEEGVGMENASEEYHENEENGGDDDDNIEEDGDSVEDEGANPCEIATNN

SEQ ID NO: 56266 - protein, 76 aa, Zea mays
  Clone ID: UC-ZMFLB73125H02_FLI.pep
TILIFVHILQANVGDCRAVLCWKGITVEMSKDHKPTYDAERQRHQRWLPQRRTACDLGFGGLGPETTSRLAIASYC

SEQ ID NO: 56267 - protein, 538 aa, Glycine max
  Clone ID: 700794082_FLI.pep
HSWRFVCSSKTCTIDCLPPLDMTQQPPWQELVATDLHGNEWHFRHIFRGQPRRHLLTTGWSVFVSSKKLVAGDAFIFLRGENGELRVGVRRLMRQQSNMPSSVISSHSMHLGVLATASHAIATGTLFSVFYKPRTSRSEFIVSVNKYLEARSHKLSVGMRFKMRFEGDEVPERRFSGTIVGVGDNKSSVWADSEWRSLKVQWDEPSSILRPDRVSPWELEPLVSTPPTNPQPSQRNKRSRPPILPSTMPDSSLQGVWKSPVESAPFSYCDHQHGRDVYPSTNFNSTATGFLGFGGNCYASNKSIYWSSRMENSTESFSPVALKEFGEKRQGTANGCRLFRIQLHDNSNSNEESLPMVTLSGRMGDDGPLPSLDAESDQHSEPSNVNRSDIPSVSCDAEKSCLRSPQESQSRQIRSCTKVHMQGMAVGRAVDLTRFDGYEDLLRKLEEMFDITGELCGSTKKWQVVYTDNEDDMMMVGDDPWLEFCSIVRKIFIYTAEEVRKLSPKIGLPISEEVKPSKMDSEAVANPEDQSSIVGPGC

SEQ ID NO: 56268 - protein, 185 aa, Zea mays
  Clone ID: UC-ZMFLB73132A08_FLI.pep
FELNGKGTLKHFKIDDVSVTHLDIGDNTDHLEAVDVSNFTIVWPKFYSMISRASNLRMLRFWGVVFDDEDEIVDSETIAVSFPLLRHLSLSYELRDGLLHYSLQGSSLLENVSVLELGWTVISEHFGPWVFGMIGRCPNLKKLVIHGVLSETKTREDRQMLASFTSFIVCVMRKYVHVDVQFEYE

SEQ ID NO: 56269 - protein, 215 aa, Glycine max
  Clone ID: 700835470_FLI.pep
LCDRVLILMAITGDIFRQSITEMLAESPSGAPELHVLAVDDSLVDRKVIERLLKISSCKVTVVESGTRALQYLGLEGENGSLGFDSVKVNLIMTDYSMPGMTGYELLKKIKQESSVFREIPVVIMSSENVLTRIDRCLEEGAEDFLLKPVKLSDVRRLKDFIMKGKVKEGEKISHKRMRSIDCSPPLTATCSLLSLPCDPSPSLLSPLSTKKARL

SEQ ID NO: 56270 - protein, 96 aa, Zea mays
  Clone ID: UC-ZMFLB73136B06_FLI.pep
GKCTNLTEANGSGIHGYKQFSLTATTAGPRKQTMRAAPAQRRPETVYDACTCTRETKRRRAGRERWMLAALRCAPLGRSASAFSSRWRGAARGCGR

SEQ ID NO: 56271 - protein, 338 aa, Glycine max
  Clone ID: 700839353_FLI.pep
FNSTNYFIFIYMDSPAVSSIHFHNAHVLPEPDLFMHTPGGNRIPAHATILASASPVLENVIASNRVVKIHGVPDGAVTAFVAFLYSSRCTEEDMDKYGIHLLALSHVYSVPQLKQRCIKGLAQRLSTENVVDVLQLSRLCDAPDLYLKCVKLLRNRFKAVKETEGWKFLESHDPWLELDVLRLMGELEKRKRRVRKWREEERLYVQLSEAMECLEHICTEGCTEVGPYEVEVGRQKTPCSKFATCQGLQVLIRHLGTCNRKLKGGCLRCKRMWQLFRLHSSICLCQNSCKVPLCRQIRLKMEQENMKDDARWKLLVRKVASAKALSSLALPKRKLDQS

SEQ ID NO: 56272 - protein, 438 aa, Zea mays
  Clone ID: UC-ZMFLB73140E10_FLI.pep
QQSSSSTAPSPVLSKSRRIPSTAKPSHLPQVRVCARACCTAGGVGGGWRSCRRGSVMDYGPSDTSGTDDDLPQLPHRSIRGSGRVSGNGRTIVPAGSYARAPTDMEAQIQQLEQEAYCSVLRAFKAQSDAITWEKEGLMTELRKELRVSDKAHRELLNKVNNDNIICSIREWRSTGGLQASMSNNPQPIHDPVPSPTTSGRKRQKTSQSVPALPAPPAMHSQQLATPTQPSSSTARKAVPPVPKGKKTKPGQKVPGGSAAKPMPSSAGPSGRGPHMNRNFPGGSAPEAQAQNVDPLVGRKVMSRWPEDNSFYEAVISDYNAETGLYVLVYDINTANETWEWVDLKEMGPEDIRWKEDDSGIDPVVYLRSRGAPSSGVRKPTGRGGPMPGSGRGRGLPKNMSRKDFPPPQNGVGKRSSDDIDILHTESLIKEVECLLLQ

SEQ ID NO: 56273 - protein, 343 aa, Zea mays
  Clone ID: UC-ZMFLB73144A11_FLI.pep
RREPALPAHEHMASTTLLAVLLLVAASAAPARSCSPRDLQALLSVKQALGNPSTLSTWTPASPDCCSWDHLRCNDAGRVNNVFIDGADDVRGQIPSAVGGLTELMSLTLFRLAGLTGPIPACLAALSNLQFLTVSHTNVSGAIPESLARLRGLDSVDLSSNQLTGGIPASFADLPSLRSLDLGHNQLTGSIPAGLVQGQFRSLVLSYNQLTGPIPRDDARDEINTVDLSHNKLTGDPSHLFAAGRPIGKVDLSWNYLDFDLSQLVFPPEMTYLDLSHNLIRGTVPLSLERLSTLQKLDLSYNRLCGPLPKGHGVIKHGCKPYAHNQCRKGTPLAGCQDLEWSE

SEQ ID NO: 56274 - protein, 340 aa, Glycine max
  Clone ID: 700841301_FLI.pep
KKFVKHSMIQNADMRLESGTCNVCSAACSSCMHPNRALMGSKAEEFSDENCRLGEVNQYCDESDRSSLGSRACERLKHGVSETSHKPSVSSTHDSLSENAENSQALSEKYQDSKCLESLDDSTSCISRTSNANLASSCHQINTDRINISCSSTSVSHLVAEGSGNGPTVDISSLSECCMENVDSSLTKERVPIIVPGEKSLADKENLNNGTAKVSIEICPKSEEDTENNVDVAEDDDHKYSAHDGLHEKVEELIKSSGRAEPQSEDESDESDVVEHDVKVCDICGDAGREDLLAICSRCSDGAEHIYCMREMLEKVPEGDWLCEECKCAEETANRKLDIE

SEQ ID NO: 56275 - protein, 226 aa, Zea mays
  Clone ID: UC-ZMFLB73146H09_FLI.pep
GGATNGTWDGIVPPECAPSDRIVRLSPALRWEEAREPLHAGVDVGNVLGVGPGMPFAHAVLASEGAAAEPPVVVGLVPCAQGGTPIANWSRGTELYERMVTRARAAVAECSGRGHLAALLWYQGEADTMRRQDAELYQRRMETLVRDVRCDLGRPDLLVIQVGIATAQYNGKFLGVVREAQKAVKLPNVKYVDAMGLPIASDHTHLTTEAQVQLGNKLAESYLETL

SEQ ID NO: 56276 - protein, 107 aa, Glycine max
  Clone ID: 700842924_FLI.pep
KFSLGNISMNNNNMSNEMVPKLEQEMKELKERHEEEMNQMKELNQKQVAELTIMRQNQEKMMLELSFMREVMCRFMHTELPTPNFNRSYGQVSDSNGGRERAPRVPH

SEQ ID NO: 56277 - protein, 391 aa, Zea mays
  Clone ID: UC-ZMFLB73149F07_FLI.pep
KSLLTSRSRPPFLSLPPSQTSPRRWISASPTRPPARPRVGRGMGLLGRRTLLRLLALASAAVAVAVTVEAYEGDADPLYRACVEGCQKTGSLKETSIKHCMVPTDGQPVDKSWYTHEPLYLQWKDWNCKSECRYHCMMERENERAKLGLQPVKYHGKWPLKRASVFQEPLSAALSALTLVVQFNGWLSFFLLLYYKLPLRPETHKTYYEYTGLWHIYGLLAMNSWFWSAIYHSCDTIWTEKLYFSSDAAFLGYSLILAILRTLNLRDEASRVMVAAPILAFVTTHILYLNFYELDKGLNMKVCTVIIIAQCLLWALWAVMTRHPSRLKIIFVAIGGAAAVLLEASDIPPRWGYVDGRAICLAVAIPLSYLWWSFAKEDAEMRTSAILKKAR

SEQ ID NO: 56278 - protein, 537 aa, Glycine max
  Clone ID: 700847764_FLI.pep
SCAIQSQSHRNNIIQILETENIMANLDLDPFQTSILILVPIALLVALLSRTRRRAPYPPGPKGLPIIGNMLMMEQLTHRGLANLAKHYGGIFHLRMGFLHMVAISDPVAARQVLQVQDNIFSNRPATIAISYLTYDRADMAFAHYGPFWRQMRKLCVMKLFSRKRAESWQSVRDEVDAAVRAVASSVGKPVNIGELVFNLTKNIIYRAAFGSSSQEGQDEFIKILQEFSKLFGAFNIADFIPYLGCVDPQGLNSRLARARGALDSFIDKIIDEHVHKMKNDKSSEIVDGETDMVDELLAFYSEEAKLNNESDDLQNSIRLTKDNIKAIIMDVMFGGTETVASAIEWAMAELMRSPEDQKRVQQELADVVGLDRRAEESDFEKLTYLKCALKETLRLHPPIPLLLHETAEDATVGGYLVPKKARVMINAWAIGRDKNSWEEPESFKPARFLKPGVPDFKGSNFEFIPFGSGRRSCPGMVLGLYALELAVAHLLHCFTWELPDGMKPSEMDMGDVFGLTAPRSTRLIAVPTKRVVCPLF

SEQ ID NO: 56279 - protein, 449 aa, Zea mays
  Clone ID: UC-ZMFLB73125H10_FLI.pep
GASEDQALEARNSKTVVAVILGGGAGTRLFPLTRRRAKPAVPIGGAYRLIDVPMSNCINSGINKVYILTQFNSQSLNRHLSRAYDFSNGVAIGDGFVEVLAATQRPGTEGKRWFQGTADAVRQFDWLFDDAKSKDIEDVLILSGDHLYRMDYMDFVQSHRQRGAGISICCLPIDGSRASDFGLMKIDDTGRVISFSEKPKGDELKAMQVDTTVLGLSKEEAENKPYIASMGIYIFKKDILLNLLRWRFPTANDFGSEIIPASAKEIDVKAYLFNDYWEDIGTIKSFFEANLALAEQPPRFSFYDADKPMYTSRRNLPPSMVNNSKITDSIISHGCFLDNCRIEHSVVGVRSRIGSNVHLKDTVMLGADYYETAVERGELLAEGKVPIGIGENTTIQKCIIDKNARIGKKVVISNSEGVDEADRTSEGFYIRSGITVVLKNAIIADGLVI

SEQ ID NO: 56280 - protein, 267 aa, Glycine max
  Clone ID: 700849456_FLI.pep
SGFGPRTIIICDQCEKEYHVGCLRDHKMAYLKELPEGDWFCCNDCTRIHSTLENLLIRVAERLPESLLDVIKKKQVGRCLEPLNEIDVRWKLLNGKIASPETRPLLLEAVSMFHECFDPIVDPAAGRDLIPAMVYGRNLQTQDFGGMYCALLIVNSSVVSAGMVRIFGRDIAELPLVATRYKNRGKGYFQTLFACIERLLAFLNVKNLVLPAAEEAASIWTEKFGFSKMKPNQLTNYRMNCHQIMAFKGTNMLHKTVPQCRVINTQL

SEQ ID NO: 56281 - protein, 347 aa, Zea mays
  Clone ID: UC-ZMFLB73130G11_FLI.pep
LPALADHHFPAPNRGEKRVTSASLSLSLSLSTSAAACAVRSIAKSTLDRPSIYRNAIGRLPHLGGAALHGGAPNPPAAQVQHPAHHVRPPALPLFIGLRRHLAAALLRFGLRASLFRDILLVLGEARRGGRWWRGTRAGREERRRGFMRHLGWGLLGLGAAPRRRLWRRCSSGRSPAALSLVAALGGGRGGGGGGGGLGGVEVLLEGVEDGVYAVVLRGAVPPRPEAAVALEAQAPDGGRVAAPATRAPARLLRRRRRDGVPAQQERARDEVGQHPLVLGAQPGDEDEDGGREEAECRRGGVLGGRRVDLAALSGLGAQRLHGRRWASGAVGFKPHSASSSRRVVGC

SEQ ID NO: 56282 - protein, 220 aa, Glycine max
  Clone ID: 700865466_FLI.pep
QDSQLKSGGRQDSFEDEPSQNGSSAYTPQNGGLNIPHTVVNQTMSIIPISAGGAPGAVPGPTTNLNIGMDYWGTPGSSNIPGLGRKVPSTAVAGGMVTVGSRDSAQSQLWLQDERELKRQRRKQSNRESARRSRLRKQAECDELAQRAEALKEENASLRSEVNRIRSDYEQLLSENAALKERLGELPPNDDHHHRSGRNDQHVGNDTQQSGQTEAVQGGH

SEQ ID NO: 56283 - protein, 262 aa, Zea mays
  Clone ID: UC-ZMFLB73136D05_FLI.pep
LPREQVQVATKFGIGQGAAGMTVCGTPEYVRACCEASLRRLDAGYIDLYYQHRVDTTVPIEDTIGELKKLVEEGKVKYIGLSEASPDTIRRAHAVHPITAVQMEWSLWSRDIEPEIVPLCRELGIGIVAYSPIGRGFFGGRGVIQQVSSESSLQRHPRFTTESLEKNKQIYLKIEDLAKKYQCSPAQLALAWVLRQGDDVVPIPGTTKTKNLDANVDSLKVKLTAEDLKEIGSQIRAEDVAGGRQYNSYAHTSWKYADTPKK

SEQ ID NO: 56284 - protein, 104 aa, Glycine max
  Clone ID: 700866481_FLI.pep
ELKKFKALDKTYICPSCKVTLTNTMSLVALSTCGHVFCKKCADRFMAVDKVCLVCNKACKERNLVNLEKGGTGFAGHGDHLEATDFKHLGSGSGLGLVRPAMKT

SEQ ID NO: 56285 - protein, 279 aa, Zea mays
  Clone ID: UC-ZMFLB73140H05_FLI.pep
SQSSDSMKSSSDEDGDLMPKQFWKRKQHSVRESGASSHSDKKTNMRNDNNLCLTPLQSSPIAKTRDAKRRRQYHAYSKQASHAPLSFWPRWVYEMYDSYTLARSAAELWRQIIANPSMDDHVRKPDILSFHIGSKLPVSESVRQKLLEIDGVSYRLQKEIQLLKAFNHIKCRNCQSHIAKRSDMVVMSTDGPLGAYVNPHGCVHETITVSNATGLALIGNPSKVHSWFPGYSWTIAACMACESHIGWLFRATKKNLRPRSFWGIRSSQIADDTQVDQGD

SEQ ID NO: 56286 - protein, 169 aa, Zea mays
  Clone ID: UC-ZMFLB73145A06_FLI.pep
VPWWYLAANKMMSPFLTQRTKSKFVFASPAKSAATLFRYIAPEQVPVQFGGLFKEDDPEFTTSDTVSELTIKPSSKETVEIPVTENSTIVWELRVLSWEVSYGAEFTPDAEGGYTVIVQKTRKVPANEEPIMKGSFKAGEPGKLVLTVNNPASKKKTLLYRSKVKSTSE

SEQ ID NO: 56287 - protein, 111 aa, Glycine max
  Clone ID: 700872266_FLI.pep
SSVFLIYHRLLLIYNSLNSVGPLISVREKRERLLTAMICSGRWPLSVSRIIWILLKFTSLDTERWRVIRRALPRVETHLLREMFSQVLMLSLLIKVLSHKMLLTRILRVDI

SEQ ID NO: 56288 - protein, 728 aa, Zea mays
  Clone ID: UC-ZMFLB73126C02_FLI.pep
EVHRSALAAARRRRYVSWYPLASHSHMAAAAQARSSFLVLLVATWSLSPRLAGASTSTEAAAAGRGVTLRLDASQVVVDNGAVQVALSAPEGRITGVSYSGDGETTNLLGYDAGEGDSGGYWDSVWNYPGSGLPGQYNTLDSTEFNVVSSSEDQVELSFRSTYNPSHRNSLRLNIDKRLVMLRGSSGFYCYAIFEHDRAYPALNITEARLVFKLNTAKFNYMAITDDIQRYMPSAADREEPRAVPLAYKEAVLLVDPKEPQFRGEVDDKYQYSLDNKDNVVHGWISRGDPNAVGFWVITPSNEFKSGGPLKRELTSHVGPTSLTMFMGTHYVGKYMVANINDGEAWKKVLGPVFIYLNSGPSRGELWEDAKARARAEAASWPYSFLASPEFPKAAERGSVVGRLLVRDSHEKHGMPAGSSAFVGLASPGPPGSWATESKGYQFWTRAAPDGTFRIANVREGVYGLYAFVPGFLGDYCYGSPLTVAPGRAIGVGDLVFEPPRSGPTVWEIGVPDRTAAEFYVPDPDPRYVNRLFVVRDRYRQYGLWERYADLYPDKDLVFTVGESDESKDWFFAHVTRKVGQVAVPTTWQIRFSLDRVVADDDTYTLRISLAASQMCRLQVQVNGDARRGRDFTTPDMGDDNAITRHGIHGSQWSLECVVGGHLLRQGDNTIDIKLIAQQGPKGPAMVAGVMYDYIRLEGPPSRGVASSRIPAFSLHRILFLLAFLVMS

SEQ ID NO: 56289 - protein, 78 aa, Glycine max
  Clone ID: 700888487_FLI.pep
VDVLDDGYKWRKYGQKVVKNSLHPRSYYRCTHNNCRVKKRVERLSEDCRMVITTYEGRHNHSPCDDSNSSEHECFTSF

SEQ ID NO: 56290 - protein, 233 aa, Zea mays
  Clone ID: UC-ZMFLB73130H10_FLI.pep
GLQMTTAARPTWAPAKGGNEQGGTRIFGPSQKYSSRDLAAHTSLKLRKDGQQTQEELQKRNLREELEERERKHYSSKDKSYAEERDRRKSSSQLLLEGSKREAEDKIVPREIDADDSDVEPKSDDESDEDGDDDDTEALMAELERIKKERAEEKLRKERQQAEEEAKMKEAELMRGNPLININNPGSFSVKRRWDDDVVFKNQARGETKTPKRFINDTIRSDFHRKFLHRYMK

SEQ ID NO: 56291 - protein, 95 aa, Glycine max
  Clone ID: 700894927_FLI.pep
KLTIFFCFPQCLRFKALETTKEFLWSCSSCSILCSLLLCLKKIFPFLCLNYCSSFFSFLVDCSNFVFYFLCSFCLFLLQFFFNLFQVRLHCSFLT

SEQ ID NO: 56292 - protein, 516 aa, Zea mays
  Clone ID: UC-ZMFLB73147A05_FLI.pep
GTEMSTTGEILRSELSSRTPPFGLRLWIVIGICIWVAILFIIGFMCFWSIYRRKPTKSSFDSTNDIPVSQIPDVSKEIAVDEVREHAAVQTFHVHESCRALAVQEKPCEKDSGRMLGHLVRSKSSDADNLSQCSSAAYQCERAASSYSGDEGSSGNARRQYPTVSASPLVGLPEFSHLGWGHWFTLRDLEHATNRFSKENVIGEGGYGIVYRGRLVNGTDVAIKKLLNNMGQAEKEFRVEVEAIGHVRHKNLVRLLGYCVEGIHRMLVYEYVNNGNLEQWLHGAMRQHGVLTWEARMKVVLGIAKALAYLHEAIEPKVVHRDIKSSNILIDEEFNGKLSDFGLAKLLGAGKSHITTRVMGTFGYVAPEYANTGLLNEKSDVYSFGVLLLEAVTGRDPVDYGRPANEVHLVEWLKMMVGTRRAEEVVDPDMELKPAIRALKRALLVALRCVDPDAEKRPTMGQVVRMLEAEDVPSREDRRSRRGHSSHADNESKASSSEFEISSDRRESGPSSRFQA

SEQ ID NO: 56293 - protein, 426 aa, Zea mays
  Clone ID: UC-ZMFLB73126E06_FLI.pep
SCLVLSWLPARNSAPRSLARTDQQIARGSERATGRGREVGMGSEGRVWNGAGVAAGSGYGGSVEAKATTAAPADVPTSAASVDISLPLPEMSPHIIGLCKELVKGWSSIDSSRFSIETVSGGITNLLLKVSVKGNNGNDSSVTVRLYGPNTDLVIDRKRELQAIPYLSAAGFGARLLGMFENGVVQSFIYARTLSPADMKEPKIAAEIAKELRKFHQVDIPGSKEPQLWNDIFKFLKKAAALKFEDNEQQKRYVKISFTEIQDEVKELKDLLDILHAPVVYAHNDLLSGNLMLNDLEGKLYFIDFEYGSYSYRGYDIANHFNEYAGFDCDFNLYPDKDAQYHFFRNYLHPDRPSEAQDMEVLYVETNTFRLASHIYWALWALIQAKVSPIDFDYLGYFFLRYGEYKKQRDSCFALAQSFLSGLRNG

SEQ ID NO: 56294 - protein, 177 aa, Zea mays
  Clone ID: 700930466_FLI.pep
KTGTPIAVQHAPAPPAEKPRVAPKPPTPATTSYADRPYVCPYEGCDKAYIHSYKLNLHLKTQHPEHGQEENGKVGASGGQHAANEHTYQYNYAEVGEIAPNPKRSKTNHGHKVHSSKAYNAKVSRAMPSDIGVRNQWPGKATYQDDSEETEEDGGNNIEDGWRYGNNDDDEETPDED

SEQ ID NO: 56295 - protein, 369 aa, Zea mays; identical to SEQ ID NO: 42422
  Clone ID: UC-ZMFLB73131C04_FLI.pep

SEQ ID NO: 56296 - protein, 180 aa, Zea mays; identical to SEQ ID NO: 52264
  Clone ID: UC-ZMFLB73132G01_FLI.pep

SEQ ID NO: 56297 - protein, 260 aa, Glycine max
  Clone ID: 700960153_FLI.pep
HSHKPSSISHQIKTHTYTNNTKMKYSEISHFSHPQHKLRFEYSEFPFKCDGCKEVGIGSRYKCSICDFDLHMHCAMITSPTLLHPFYTKCNFQFMSKPPGDTPRYCNACEKDVRGFLYHCKACGFDLHPCCAKLPMVLDDGEVKLYLYRKVSSPCHRCGRKGRSWSYRSKCKNYNLHVACVRDMLVENWHEVYVKGRSVNSNIPSLRNTLYTPHNSRRSKGKVKKCCEIAGLAVQVVISAVLGDPTALIAGLVGSFMSRA

SEQ ID NO: 56298 - protein, 177 aa, Zea mays
  Clone ID: UC-ZMFLB73136H01_FLI.pep
SPFAKTISSKSRVTLKNGHSLYISLSIWMFLMSFCMMCFIAKGDPGIAAVYDKLLVADDLQSFGEQLRKNYEETKELLLQVAGHKDVLEGDPYLKQRLRLRESYITTLNVCQAYTLKRIRDPSFQVSPQPPLSKEFTDESQPAELVQLNQQSEYAPGLEDTLILTMKGIAAGMQNTG

SEQ ID NO: 56299 - protein, 148 aa, Zea mays
  Clone ID: UC-ZMFLB73142B12_FLI.pep
YTKKPKPLSYPRIVHHQPSNSFHPMIVTASKPEPNESISIIVQNEQEFAPPRYSLSSPPCCCCCSCCNLYTAPPLTVLYSRRRQLACGSSCGGSRQWECIARQFHYRPRTTGTRDQRIIVYMNFYHATNDDKADRDGPDAGEESFSPM

SEQ ID NO: 56300 - protein, 494 aa, Glycine max
  Clone ID: 700962277_FLI.pep
AMEEMIRLLQTNEPLWMKGADGRDVLDLDSYERMFPKANSHLKNPNVHVEASRDSGVVIMNGLTLVDMFMDPNKWMELFPTIVTMARTIEVISSGMMGSHSGSLQLMYEELQVLSPLVSTREFYFLRYCQQIEQGLWAIVDVSYDFPQDNQFAPQYRSHRLPSGVFIQDMPNGYSKVTWIEHVEIEDKTPVHRLYRNLIYSGIAFGAQRWLTTLQRMCERIACLMVTGNSTRDLGGVIPSPEGKRSMMKLAQRMVTNFCASISASAGHRWTTLSGSGMNEIGVRVTVHKSSDPGQPNGVVLSAATTIWLPIPPQTVFNFFKDEKKRPQWDVLSNGNAVQEVAHIANGPHPGNCISVLRAFNSSQNNMLILQESCVDSSGSLVVYCPVDLPAINIAMSGEDPSYIPLLPSGFTISPDGQADQDGGGASTSTSTGSRVMGGGSGPGSGGSLITVAFQILVSSLPSAKLNMESVTTVNSLIGNTVQHIKAALNCPSS

SEQ ID NO: 56301 - protein, 414 aa, Zea mays
  Clone ID: UC-ZMFLB73145C05_FLI.pep
FNHGLCGHAGRVTPFFFSSTSSGGRVRENMERQGMEGNNLLHFLDTPSAHYRRTCDGFEAQHGGDEHSETSDTDPANAREMLEYLLNQPANKICADCGSPDPKWVALPFGTFICIKCSGTHRSLGVHISKVISVNLDEWTDDEVNCLAESGGNSVVNSRYEAFLPENKKLKQDCSTEERNDFIRKKYQFQQFVCDPQFSCPLPLNRKHAPPDKNHQQHNSSKYGFGHTFRNSWRKKDSDSKSLKKMSDVGMIEFVGLVKVNIVKGTDLAVRDVMSSDPYVLIHLGHQSMKTKVIKNTLNPIWNERLMLSIPDPIPPLKLQVFDKDTFSSDDRMGEAEVDIRPLIAATKEHENSTITESTELYRWSASEDSNGVLAKDSVISVASGKVKQEITLRLQNVERGEVEIEIECVPLSQ

SEQ ID NO: 56302 - protein, 384 aa, Glycine max
  Clone ID: 700963984_FLI.pep
QGRTAENSQVDGKEVSSDIDALVIYKRKRLPRRRSSGQIGKSPKKTVPTEPPTAAISSSTTASPPHQDPPAAAPANADASHIENTNTAEPVLSKSLVEEVGKVNPAPANAQEQIASSKGQESPDQVDSKADEVSTGNTPLDLEAINKMIEDDPLSAIENILTGKVSISSKTPQSITQAEQPKVQGSPADVLSKELKDLMQTFSLGDFVTDYEQMSKVLLILEELQKNEKFLSHEQQTFIKAFRLFFNNAVTHRKECDMARIKKVDLNRAKEDILRKLQEVKHTQEQITMSISNADNRVNEISSCIEQLEEQLYKLKEERETFQLAIKEREKQRETLKNDSILWAHQTKDLVFDLAEIEAKEKILGQQLEADNDAYDQFKASFPF

SEQ ID NO: 56303 - protein, 326 aa, Zea mays
  Clone ID: UC-ZMFLB73126G05_FLI.pep
IDRAMDGLWHLGDELRGQPKVVEDRQWSLMTSKLAEITRSRGERTNDLDYARMNAAPDAKQWGKAASYQHHDEGRMDHHVGLSLKMNDLKMNEAAAAAVMKLPFRGVPYNVNPMYPKGSNANANVNAFKMNVGVNKYSSSTNGKDSGGKSGGGSNNNSGGGGNGNGTANGSSAVDKRFKTLPTSEMLPKNEVLGGYIFVCNNDTMQEDLKRQLFGLPARYRDSVRAITPGLPLFLYNYTTHQLHGVFEAASFGGSNIDPTAWEDKKCKGESRFPAQVRIRVRKLCKPLEEDSFRPVLHHYDGPKFRLELSIAETLSLLDLCEKEGI

SEQ ID NO: 56304 - protein, 151 aa, Glycine max
  Clone ID: 700975650_FLI.pep
NPKIISVVEQEANHNQDRFLERFTEALHYYSTVFDSLEACPVEPDKALAEMYLQREICNVVSSEGPARVERHEPLAKWRERLEKAGFKPLHLGSNAYKQASMLLTLFSAEGYSVEENQGCLTLGWHSRPLIAASAWQAAPMQDRETLRFEQ

SEQ ID NO: 56305 - protein, 411 aa, Zea mays
  Clone ID: UC-ZMFLB73131C10_FLI.pep
AHPLLIRVFQGWQPLHDPKFGLEVMKKWKDLLQGDQPYDFSDSAASMTPYVQLVSEVILPAVRISGTNSWEAREPEPMLHFLELWDNKKLLPPVLLQSLLEHVIMPKLSAAVDSWDPRRESIPIHVWVHPWLPMLRERIETLCHSIRYKLSTVLHVWQAHDASAYAVLSPWKDVFDSASWEDLIVRYIIPKLRLALQDFQINPANQKLDQFNWVMLWTSAIPVQLMVHMLEVDFFSKWQQVLYHWLCSPNPDFNEIMNWYKGWKGLFPPELLANERIRMLLTAGLDMMNQAAEGLEVVQPGARENVGYLRATEKRQFDAAQQAYHAVPGAAMADLSFKESIQAYAMEQGLLFMPRVGKFYNGMPVYEFGTVSICIDSVKRLLYAQLQEGIDRWSPVTLTQLMDMNRIGRPH

SEQ ID NO: 56306 - protein, 350 aa, Zea mays
  Clone ID: UC-ZMFLB73132G03_FLI.pep
RQFSYSELAAATKNFSDDRRLGSGGFGSVYRGILTTDGRNRCVAVKRVSKTARQGWKEFVSEVVIISRLRHRNLVQLIGWCQGSGNKLLLVYELMPNGSLDDHLHRPDSVLMWPVRYGIALGVGAALLYLHDDAEQRVVHRDVKPSNVMLDASFNAKLGDFGLARLIDDGRRSHTTGVAGTFGYMDPESMLAGKASVESDVYSFGVFLLEITCGRRPAVLVREEDYVHLVQWVWDSYGGGSILDAADPWLGNNFNSQEMACAMLVGLWCAHPDRSLRPTIRQAVNVLRFEAPPPRLPAKMPVATFGPPAAHASGSTTSSAEALMTWGSSLPTMAMAASSLDIEHSSTKTS

SEQ ID NO: 56307 - protein, 434 aa, Glycine max
  Clone ID: 700993386_FLI.pep
QKPVAEVWRKIHGEDNWAGLLDPMDPVMRGELTRYGEMAQACYDAFDFDPYSKYCGSCRFPLPEFFDSLGMTNVGYTMTRYLYATANINLPNFFRKSRWPHKMWSKHANWAGFIAVSDDETSKRLGRRDIVISWRGTVTHVEWVADLLNFLKPISPDIPCSDRKVKVEAGFLDLYTDREPGCGYCKYSAREQVLGEVKRLMEKYADEEVSVTIAGHSLGSAMAILSAFDIVETGVNVGKDGRKAHVSVFSFSGPRVGNVRFKERLEGELGIKVLRVHNAHDMVPQSPGLIFNEDSPQWLLKLVEGWFPWCYLHVGEELQLDHKKSPFLNPDGDASCAHNLEAHLHLLDGYHGKNRGFERTSERDLALVNKDCDFLKDEHSVPPRWRQDLNKNMVRTEDGRWVLADRPLAQDPHEDIDHHLGELGLASSHTHTHN

SEQ ID NO: 56308 - protein, 326 aa, Zea mays
  Clone ID: UC-ZMFLB73136H02_FLI.pep
AASCWSPQPPWKAIRAGISKKEGSMWKLVAAAVALIVLCACTTPARGGDDYTAFVYAGCSQGRYDPGSQYAADVDTALSSLVNSAGFVAYANYTSPGQLVGVYQCRSDLPAAVCGGCVRSAVSKLSSLCNAAAGAAVQLRACFVRYGNDSFLGRQDTTVLFKKCGGGESAGGDTGVVAMRDAALGALVAAAAPGAGEGSYRAGAAGYVQAMSQCVGDLGAKACTDCVSAAASQLKAGCGYASAGEVYLGKCYARFWSNAAPGGGGGEGTGTGGGLPVVGGGGGNVIGGGGVGGAGNGYGYGGFVPNTYGQHDESGKTLAIIIGLVA

SEQ ID NO: 56309 - protein, 121 aa, Zea mays
  Clone ID: UC-ZMFLB73148E11_FLI.pep
VIHPHVRIKPYNSNKTATGTQKRIAPCDCPMPSRWRWLVRPFIHLSSASTEVWRITANSIRHKRDRAVLDDLVDEPPFMCLLRVHEHVPLHTLLDAVDGLARVLGIDLIEPVARVMIHQPS

SEQ ID NO: 56310 - protein, 324 aa, Zea mays
  Clone ID: UC-ZMFLB73131D06_FLI.pep
PEMEDAVAIVPRFFDLPLWLLTGNAMVDGLDPMTFRLPAHFFGVYDGHGGAQVANYCRERLHVALLEQLSRIEETACAANLGDMEFKKQWEKVFVDSYARVDDEVGGNTMRGGGEEAGTSDAAMTLVPEPVAPETVGSTAVVAVICSSHIIVSNCGDSRAVLCRGKQPVPLSVDHKPNREDEYARIEAEGGKVIQWNGYRVFGVLAMSRSIGDRYLKPWIIPVPEVTIVPRAKDDECLILASDGLWDVMSNEEVCEIARKRILLWHKKNSTSSSSAPRVGDSADSAAQAAAECLSKLALQKGSKDNITVVVVDLKAQRKFKSKT

SEQ ID NO: 56311 - protein, 180 aa, Glycine max
  Clone ID: 701068966_FLI.pep
RTRINHIDYRDSKKLKAETIFISSKILIYNQPFLIQNITSDSTHFFHGIPPLLNTLFRKLVCMGPERILKGTLLLSDMGRVDPVENRKDQPPTLANLGKFVEAPMGRRVIGRENDDGGGGVFNGFQKLLLDLVAALQPVVVAEDAEAAAVESVVEAHGESVPRVGAPEAQEHVPTKPERG

SEQ ID NO: 56312 - protein, 191 aa, Zea mays
  Clone ID: UC-ZMFLB73132H03_FLI.pep
LHSQPKSTVGTPAYIAPEVLLKKEYDGKIADVWSCGVTLYVMVVGAYPFEDPEEPKNFRKTIQRILNVQYAIPDNVNISPECRHLISRIFVGDPATRITIPEIRNHSWFLKNLPADLMDDDSMSNQYEEPDQPMQTMDQIMQILTEATIPPACSRSINVLADGLDMDDDMDDLDSDSDLDVDSSGEIVYAM

SEQ ID NO: 56313 - protein, 583 aa, Zea mays
  Clone ID: UC-ZMFLB73142E06_FLI.pep
FWTNRWLVFVGAMWMQSMAGTTYIFGAISPVVKARLGYDQPQVAALGVAKNVGGCLGLLAGALSATWPPWALLAIGAAQNFLGYGWLWLVVSGNAPALPLWLMCVVIFIGTNGQTYFITASLVTSIQNFPKSRGPTVGILKGFMGLTSAILTQVYTVMHTPDHAALIFMVAVGPSLVAIGLMFVIRPVGGHRQIRPSDKNSFMFIYTVCLLLASYLVGAMLVQDFLQPSYDVVVFLTVILFVLLISPIAIPVIVSFMPEKAQHLMEDALLSEPLTGEASSSRQKEDQPEVILSEVEEEKSKETDSLPPSERRKRIAELQAKLVEAAARGGVRIKRRPHRGDNFTLMQALVKADFWLIWLSLLLGSGSGLTVIDNLGQMSQAIGYKNAHIFVSLVSIWNFLGRVGGGYFSEIIVRERTYPRHIALAVAQIVMAAGHFLFAMAWPGTMYIASLLVGLGYGAHWAIVPAAVSELFGVKHFGAMYNFLILANPAGSLIFSELIVSNLYEHEAEKQASQHQMSALLSPRLLRDTGFLADDALKCEGPACFFFSSLIMSVFCAVAAGLSLLVVQRTRQVYPRLYSSVRT

SEQ ID NO: 56314 - protein, 408 aa, Glycine max
  Clone ID: 701097238_FLI.pep
SMPGLTCNACNTEFKDDTEQKLHYKSEWHRYNLKRKVAGVPGVTEALFLARQSVLAQEKNKLGETPMLYSCGLCGKDYKSSKAHAEHLKSRGHMMQASEGTSHADEKAIVKPLPQRVVNRPPPRREVDNSENEESEDEWEEVDPEEDLVDGAAKSLTDLNVNEHGENVDMEVDDDFEELDPSCCFMCDQEHKSIENCMVHMHKHHGFFIPDVEYLKDPKGLLTYLGLKVKRDYMCLYCNDRCYPFSSLEAVRKHMEAKSHCKVHYGDGDDDEEVELDEFYDYSSSYVDDQGKQLVASCDASNNVELVGGSELIITTKSGERSSTKTLGSREFLRYYRQKPRPSLANMAITAALASRYRSMGLTTIQSREKIVRMKVLKEMNRSGVDNMRTKMAMKSNVIRNLPKNVPY

SEQ ID NO: 56315 - protein, 585 aa, Zea mays
  Clone ID: UC-ZMFLB73145E09_FLI.pep
SLCSSEMAAATSSSTYLAIGRKTLNPAPSVATAATSVSFPATQHPCLVAASADRRRAVAAKVSSPSVIGTAMPSLDFETSVFKKEKVSLAGHEEYIVRGGRDLFPLLPEAFKGIKQIGVIGWGSQGPAQAQNLRDSLVEAKSDIVVKIGLRKGSKSFEEARAAGFTEESGTLGDIWETVSNSDLVLLLISDSAQADNYEKIFSHMKPNSILGLSHGFLLGHLQSLGFDFPKSISVIAVCPKGMGPSVRRLYVQGKEINGAGINASFAVHQDVDGRATDVALGWSVALGSPFTFATTLEQEYRSDIFGERGILLGAVHGMVEALFRRYTEQGMDEDSAYKNTVESITGIISKTISKKGMLEVYNSLTEEGKKQFIEAYSAAYYPCMDILYECYEDVSSGSEIRSVVLAGRRFYEKEGLPAFPMGKIDQTRMWKVGERVRSTRPQGDLGPLHPFTAGVYVALMMAQIEVLRKKGHSYSEIINESLIESVDSLNPFMHARGVAFMVDNCSTTARLGSRKWAPRFDYILTQQAFVTVDKKAPINQDLISNFMSDPVHGAIEVCAQLRPTVDISVTADADFVRPELRQSS

SEQ ID NO: 56316 - protein, 105 aa, Glycine max
  Clone ID: 701118076_FLI.pep
LLQKTDDHQDQSSQNMRPWIRRKKGNKKSVYHFKAGECDHSSWCCPQKVGGTTSVKTLYTFLLKNLSNTINHTRVPFLRMMPLFLQSGTYNLVRICQCGCKNFRN

SEQ ID NO: 56317 - protein, 551 aa, Zea mays
  Clone ID: UC-ZMFLB73149B09_FLI.pep
AHTARSPISDPRSPRRSKMQIFVKTLTGKTITLEVESSDTIDNVKAKIQDKEGIPPDQQRLIFAGKQLEDGRTLADYNIQKESTLHLVLRLRGGMQIFVKTLTGKTITLEVESSDTIDNVKAKIQDKEGIPPDQQRLIFAGKQLEDGRTLADYNIQKESTLHLVLRLRGGMQIFVKTLTGKTITLEVESSDTIDNVKAKIQDKEGIPPDQQRLIFAGKQLEDGRTLADYNIQKESTLHLVLRLRGGMQIFVKTLTGKTITLEVESSDTIDNVKAKIQDKEGIPPDQQRLIFAGKQLEDGRTLADYNIQKESTLHLVLRLRGGMQIFVKTLTGKTITLEVESSDTIDNVKAKIQDKEGIPPDQQRLIFAGKQLEDGRTLADYNIQKESTLHLVLRLRGGMQIFVKTLTGKTITLEVESSDTIDNVKAKIQDKEGIPPDQQRLIFAGKQLEDGRTLADYNIQKESTLHLVLRLRGGMQIFVKTLTGKTITLEVESSDTIDNVKAKIQDKEGIPPDQQRLIFAGKQLEDGRTLADYNIQKESTLHLVLRLRGGQ

SEQ ID NO: 56318 - protein, 179 aa, Glycine max
  Clone ID: 701121545_FLI.pep
CSFQWGYVSAKSLIRAGADPNKADYDGRSPLHLAASRGYEDITIFLIQERVDVNIIDNFGNTPLLEAVKNGHDRVASLLVKEGASMKIENAGSFLCTAVARGDSDYLKRLLSNGMDPNLKDYDYRSPLHVAAAEGLYFMAKLLLEAGASVFTRDRWGNTPLDEARMCGNKNLIKLLEDA

SEQ ID NO: 56319 - protein, 47 aa, Zea mays
  Clone ID: UC-ZMFLB73128F01_FLI.pep
RSWSKSRRGPRRKEAEAASSRSSAAGDESSQSLGCRWCTGSEFMNAF

SEQ ID NO: 56320 - protein, 73 aa, Glycine max
  Clone ID: 701137240_FLI.pep
DLNDKISHFCLINSVCLFNLVSLLRPLYSSHLEGAGIIDFHAIQLIIQVRLLVSVVNVECLLTISAIKFCLNF

SEQ ID NO: 56321 - protein, 219 aa, Zea mays
  Clone ID: UC-ZMFLB73145E12_FLI.pep
RPGCTCIVCIQPPSGKGPKHNPACTCNVCMTVRRRFKTLMMRKKQRQSEREEAEASKKIAWVNRDEPEGSSLSRSPQTLDTTRDSSDVTMFDKVAADVNKGHIDLNFHPAAPAVRGAGDQGQNGAQQPRAVSMMGLLEVASRPLDNYMKQNGLTSLAGEQGGGSSSTATVPPAPVESEDRTSDEGRVASAEREADAMAIDEAGENQQDKPADSAAAAAT

SEQ ID NO: 56322 - protein, 272 aa, Glycine max
  Clone ID: 701142328_FLI.pep
ATPSSDLSMSSNFSTVVKNPAESSIPNLSFSIPSVFSTPTADPLPNHNYHHLPNSTPTRWAHRSPAHPLLRQISDSRIMGLKSPDNSISEGRPSFVLSTCSNEMAAGSICGSSDGWSMRTFSELVASSQRERWSFDSECFGSGRHKISGSSSRFSYSPSMELQSCGACSKLLTERSTWSNQKFIANSDLSVVAVLVCGHSYHAECLEAMTSEADRYDPACPICMVGDKNLSKLLSRKGLRAESEMKAKNHKISRNRVVDSYLDGVITTIIRE

SEQ ID NO: 56323 - protein, 216 aa, Zea mays
  Clone ID: UC-ZMFLB73131G05_FLI.pep
KLPSSLALLCLPCYTSMNAHIVLAAGCRRPSQARDAVALPATHANAQRSRRPDQKEACILPPPPTGALMTCRIWTTSAMDGRLDGICDAHHAQLQHRHHLLLRDVPASAHARVHALQRVAVLQQRAHLVSQHHHVVVPVLHRAPPRHQLQDQHAHPVHVALVVRPQALARQLRGHVPHPAAAALPEPAARHRHLPATATAMQQPRQPEVAHRRVAL

SEQ ID NO: 56324 - protein, 185 aa, Zea mays
  Clone ID: UC-ZMFLB73145F04_FLI.pep
IAAGSGMGTSPVIPATMLFVALLVAVCFGATAARSSHARHTDADDAIRLPSSFGAGGRPWNCCDSAIKDASLPAWRCNDVVDKCSADCQDCEASPAGDGFVCGDFILSLTEPPVCTPRPWDCCDSVACTRDYIPNCMCLDKVESCSSNCERCEFLYHSDPPRFQCRDIFHGYPGPKCRTWISTSN

SEQ ID NO: 56325 - protein, 147 aa, Zea mays
  Clone ID: 701161434_FLI.pep
ACSKRQLTAQLVPRLTIRQVCSEDQARSFSVPPPVPAAWVAADEVQRHGLFSLSRGLKKGSFWMVAVVTSDASGARQARISCCILQDIFGLTTRLTDNPFVHTSISGNLLMLARLARVQEGARLLVLPRVQHVVAFPAELESAHGGL

SEQ ID NO: 56326 - protein, 362 aa, Zea mays
  Clone ID: UC-ZMFLB73150H03_FLI.pep
ASEVVRPSDAELLKAQADIWRLSLSYLTPLSLRCAVELGIPTAIYRHGGAASAAELVTALSLPSTKLPFLRRLLRLLAASGVFTVDKQSSEEERYRISPVSYLLVDGIPHEDHMNHTALVLTCTSTRYIEAGIGLAEWFKRDVVTSPFEELHGATLFHESMGSLDADFHDMASEALDAHDNFGIEIAMREFRDLFEGIQSMTYCCGNFGDDKGARAIVKAFPHIKCTVLAPPKIIATKPADGAMINYVEGDMFSFIPPAQTVVLKLVLHHLTDEECVKLLAQCRKAIPSRKDGGKVIIGDIMIDHSGPMLETHLLMDIGMMTMTKGRQRDEKEWSELFTKAGFSEYKILKEFGARVAFEVYP

SEQ ID NO: 56327 - protein, 104 aa, Zea mays
  Clone ID: 701170728_FLI.pep
EQDKNHQTDDQRKKFLMKYNHTLRDDFFFFLVSLELKEILKKIFRKILHRHLHQPSKWPSGPRNASCRRRPCLRMACARRRSIPSTAHRAYDQGHQRQCLGFRL

SEQ ID NO: 56328 - protein, 179 aa, Zea mays
  Clone ID: UC-ZMFLB73185D11_FLI.pep
QNLFLDITTAAVAKQALEGHCIYDGGYCKLHLSYSRHTDLNVKAHDERSRDYTLSDPNVQLQAAAQTPVLRSPGVAWQNTASVPAAPFYASTATSTPIGVGQVAAWNPNMQAGSFASASTAYPNQPLMANSMPHYPAIGSSSGAPPVAFQASQQMTQYSMPPGAPPHAPPAGQSIYYPK

SEQ ID NO: 56329 - protein, 108 aa, Zea mays
  Clone ID: 701174366_FLI.pep
QFGLSNSSLELPGMDDYLQLQQDSVACRVRARRGCATHPRSIAERERRTRISKRLKKLQDLVPNMDKQTNTSDMLDLAVEYIKELKDQVEKLKHDQANCCCLGNKSCC

SEQ ID NO: 56330 - protein, 775 aa, Zea mays
  Clone ID: UC-ZMFLB73188B05_FLI.pep
SMGNLSQLIFLDFRQNELSGVIAPELGECQQLKILDLADNALSGSIPETFGKLRSLEQFMLYNNSLSGAIPDGMFECRNITRVNIAHNRLSGSLLPLCGTARLLSFDATNNSFDGAIPAQFGRSSGLQRVRLGSNMLSGPIPPSLGGITALTLLDVSSNALTGGFPATLAQCTNLSLVVLSHNRLSGAIPDWLGSLPQLGELTLSNNEFTGAIPVQLSNCSNLLKLSLDNNQINGTVPPELGSLASLNVLNLAHNQLSGQIPTTVAKLSSLYELNLSQNYLSGPIPPDISKLQELQSLLDLSSNNFSGHIPASLGSLSKLEDLNLSHNALVGAVPSQLAGMSSLVQLDLSSNQLEGRLGIEFGRWPQAAFANNAGLCGSPLRGCSSRNSRSAFHAASVALVTAVVTLLIVLVIIVLALMAVRRQAPGSEEMNCSAFSSSSSGSANRQLVIKGSARREFRWEAIMEATANLSDQFAIGSGGSGTVYRAELSTGETVAVKRIADMDSGMLLHDKSFTREVKTLGRVRHRHLVKLLGFVTSRECGGGGGMLVYEYMENGSLYDWLHGGSDGRKKQTLSWDARLKVAAGLAQGVEYLHHDCVPRIVHRDIKSSNVLLDGDMEAHLGDFGLAKAVRENRQAAFGKDCTESGSCFAGSYGYIAPECAYSLKATERSDVYSMGIVLMELVTGLLPTDKTFGGDMDMVRWVQSRMDAPLPAREQVFDPALKPLAPREESSMTEVLEVALRCTRAAPGERPTARQVSDLLLHVSLDYYRACEKR

SEQ ID NO: 56331 - protein, 127 aa, Zea mays
  Clone ID: UC-ZMFLB73193A01_FLI.pep
NTNQLERKEKEKNTPPRAQLRPRHPCWPSGPFLKQHLIKVPHPCTQATSQQYRNFGHETYIADETKFISNRLTVPLVAHSPQLRDILGDLIYGFHLLLEELTLDEVYQLRIIAPCCHLLITIIACYM

SEQ ID NO: 56332 - protein, 581 aa, Zea mays
  Clone ID: LIB143-002-B12_FLI.pep
PLASAPPPSAGEMALYLLFESASGYGLFHAYGIDEIGQSVEAVRSSVLDLDRFGKAVKLTAFNPFSSAVDALNQCNAISEGIMTDELRSFLELNLPKPKEGKKAKYSLGVVEPKVGSHISEVTGIPCQSNEFVQELLRGVRLHFDRFINELKDSDLEKAQLGLGHSYSRAKVKFNVNRVDNMVIQAIFLLDTLDKDINSFSMRVREWFSWHFPELVKIVNDNYLYAKLAKFIVNKSDLAEKDIPALADIVGDEDKAKEIVEAAKASMGQDLSPVDLINVQQFAQRVMNLSEYRKNLYEYLVTKMNDIAPNLTSLIGEVVGARLISHAGSLSNLAKCAASTLQILGAEKALFRALKTRGNTPKYGLIFHSSFIGRASTKNKGRMARYLANKCSIASRIDCYSEASTSVFGQKLREQVEERLEFYDKGVAPRKNLDVMKAAIDSMVNDTLMDDDGKADNEKADTSAKKSKKKKTKTETDGDAMDVDKPSNVADGEAELGTEKKKKKKKHKLEEAQEENGAAHANGDAEETQTPKKKKKKSREISEEAEPKTATEGKKKKNEEAEPKTATEGKKKKKKAVKADE

SEQ ID NO: 56333 - protein, 391 aa, Zea mays
  Clone ID: UC-ZMFLB73194F04_FLI.pep
ARSNALPPPPAATAAKTPARLGVLRQPPPGQRGRGDMASEDVVGKSRGDTAVTTIVNLAEEAKLAREGVKAPGHQILTICKSLVAGGVAGGVSRTAVAPLERLKILLQVQNPHSIKYNGTVQGLKYIWRTEGLRGLFKGNGTNCARIVPNSAVKFFSYEQASKGILWAYRQQTGEEDAQLTPLLRLGAGACAGIIAMSATYPMDMVRGRITVQTDKSPYQYRGMFHALGTVYREEGFRALYKGWLPSVIGVVPYVGLNFAVYESLKDWLLQTNSFGLANDNELHVVTRLGCGAVAGTIGQTVAYPLDVIRRRMQMVGWSHADSIVTGQGKEALQYNGMIDAFRKTVRHEGVGALYKGLVPNSVKVVPSIAIAFVTYEVVKDVLGVEMRISD

SEQ ID NO: 56334 - protein, 190 aa, Zea mays
  Clone ID: LIB143-004-B11_FLI.pep
HGDTIFTRKGYKRHVEIYSMETASGHSALRHKASNPAKTPVDISDRMIGDTKGSKHKHTKFQKHSYCLLPQATLTSMVLGFLGSGGGSFSTVTVSTPSLHTAATLSTSALSGSTNLRMNLPIRRSMRRYLASSSRSSRRRSPLTTSTRSSSTCTRMSPVPSPGMSTTNAYAPGSSFTSAGVAAMARASRT

SEQ ID NO: 56335 - protein, 507 aa, Zea mays
  Clone ID: UC-ZMFLB73197B06_FLI.pep
NKEPQSSVQLGHDDRAALQEELSMLHGKVAFLEEELSKSRQDATNYHQLSDRVAKELKDLKDHDQQMRSKQMKVLSDLLIAVSKAERQEARMRIRQESFRLGNVGVMRAGTIISEIWEDGQAIKDLNSHLKSLLETKETIERHRKSLKKRQSDKGDGSDAETSMSEEDIVLQDEICKSRLTSIKREEEQYMRERDRYELEKGRLIREMKRLRDEDGSRFNNFQILHHRYALLNLLGKGGFSEVYKAFDLVEYKYVACKLHGLNAQWSEEKKQSYIRHAIREYNIHKTLVHPNIVRLWDIFEIDHNTFCTVLEYCSGKDLDAVLKATPILPEKEARIIIVQIFQGLVYLNKRGQKIIHYDLKPGNVLFDEVGVAKVTDFGLSKIVEDDVGSQGMELTSQGAGTYWYLPPECFDLSKTPFISSKVDVWSAGVMFYQMLYGRRPFGHDQTQERILREDTIINARRVEFPSKPAVSNEAKDLIRRCLTYNQSERPDVLTITQDHYLSYAKK

SEQ ID NO: 56336 - protein, 329 aa, Zea mays
  Clone ID: LIB143-005-G2_FLI.pep
GIVTLQSSPILTIIFSLLTNSLRNIWFEAATVVAVSPPIEISTGSVLKSALAGGLASALSTSLLHPIDSMKTRVQASTLSFPELISKLPQIGLRGLYRGSIPAILGQFSSHGLRTGIFEASKLVLINVAPTLPEIQVQSIASFCSTVLGTAVRIPCEVLKQRLQAGIFDNVGEAIVGTMRRDGPKGFFRGTGATLCREVPFYVAGMCLYAEAKKAAQHVLRRDLEAWEVVAVGALSGGLAAIVTTPFDVMKTRMMTAPPGTPVSMQMIILSILGNEGPLGLFKGAIPRFFWIAPLGAMNFAGYELAKKAMIKDEKNSSESTREILPRKQ

SEQ ID NO: 56337 - protein, 158 aa, Zea mays
  Clone ID: UC-ZMFLB73201B01_FLI.pep
EAWLELETRKRREEGPTEPTQREEAGRTTVFPIPVPPCHRDTVSLSLSVLRSAALKPKPNHCSAHSIPAPSSRAILGFLSPSAPPQIWPPPPLTQVVLMAPAVEAVKETGTFQKVPALNERILSSMSRRSVAAHPWHDLEIGPGAPTIFNCVRPPCHA

SEQ ID NO: 56338 - protein, 254 aa, Zea mays
  Clone ID: LIB143-006-A5_FLI.pep
PLSYADRPGKMSSEAVKVAVPESVLRKRKREEQWAAEKKEKSLAERKKSIESRKLIFTRAKQYAEEYDAQEKELVQLKREARLKGGFYVSPEAKLLFVVRIRGINAMHPKTRKILQLLRLRQIFNGVFLKVNKATINMLRRVEPYVAYGYPNLKSVRELIYKRGYGKLNKQRIPLSNNQVIEEGLGKHNIICIEDLVHEIMTVGPHFKEANNFLWPFKLKAPLGGLKKKRNHYVEGGDAGNRENYINELIKRMN

SEQ ID NO: 56339 - protein, 217 aa, Zea mays
  Clone ID: UC-ZMFLB73206H01_FLI.pep
VLQFVEVTFGYTPDNLLYKKLDFGVDLDSRIALVGPNGAGKSTLLKLMTGELVPLDGMVRRHNHLRIAQFHQHLAEKLDLDMSALQYMMKEYPGNEEERMRAAVGKFGLSGKAQVMPMRNLSDGQRSRVIFAWLAYRQPQLLLLDEPTNHLDIETIDSLAEALNEWDGGLVLVSHDFRLINQVAHEIWVCENQAVTRWEGDIMDFKEHLRSKACLSD

SEQ ID NO: 56340 - protein, 378 aa, Zea mays
  Clone ID: LIB143-011-G3_FLI.pep
PQPSDSEHRRHPAMCGGAILSDIIPPPPPRRVTAGHLWPESKKPRRAAAGRRRAPVEQEQEEDFEADFEEFEVESGESELESEDEPKPKPFAAPSSALARGGLNTGAAGVDGPAANSVKRKRKNQFRGIRRRPWGKWAAEIRDPRKGVRVWLGTFNSPEEAARAYDAEARRIRGKKAKVNFPDEVPTAVSQKRRAAGLASLKAPKMDVEEEKPIIKLAVNNMTNSNAYHYPAVVGHHNIIPEPFMQTQNMPFAPLVNYAALVNLSSDQGSNSFGCSDFSLENDSRTPDITSVPAPVATLAAVGESAFVQNTAGHAVAPPATGNTGVDLAELEPYMDFLMDGGSDDSISTLLSCDGSQDVVSNMDLWSFDDMPMSAGFY

SEQ ID NO: 56341 - protein, 395 aa, Zea mays
  Clone ID: UC-ZMFLB73182D12_FLI.pep
GMLVTLMNLLRACWRPSSNRHARTGSDVTGRQDGLLWYKDAGQHVNGEFSMAVVQANNLLEDQCQIESGPLSFLDSGPYGTFVGVYDGHGGPETACYINDHLFQNLKRFASEQNTMSADVLKKAYEATEDGFFSVVTKQWPVKPQIAAVGSCCLVGVICGGMLYVANVGDSRVVLGRHVKATGEVLAVQLSAEHNVSIESVRKELQSMHPEDRHIVVLKHNVWRVKGLIQVCRSIGDAYLKKQEFNREPLYVKFRLREPFHKPILSSEPSINVQPLQPHDQFLIFASDGLWEHLTNQEAVDIVHSSPRSGCARRLIRAALQVAAKKREMRYSDLKKIDRGVRRHFHDDITVIVVFLDSSLVSKASTHRGPTLSLRGGGASAGLRSNTLAPTSMWL

SEQ ID NO: 56342 - protein, 77 aa, Zea mays
  Clone ID: UC-ZMFLB73188C11_FLI.pep
VLHAAISYSLADSVTIKLVTIQWTSIFTTTIHFTVHTFPAEGCFQGFHFNIEPISIKHGILFGNRCLWWCHGPVRPL

SEQ ID NO: 56343 - protein, 402 aa, Zea mays
  Clone ID: LIB143-012-B8_FLI.pep
IPSSNSASRTSSIRQILQPTKSPHRILHPESAAFARYPVPSIIILFHDNMVGPFLLLLVAHAVLMDHLPEEIREDSLVSWHLGVAREVVDVNDEIAVAGADVADHVEVEELQAQRAAEAARDLVDECGGRHDGVLETLFAVVLLRRALSGEVGDLGEGDGSLGRCVILGGHVGQATALDASDVAADDVDLEDDAAMVDELLEHKRRAELAEALAVVDERHLVGLGGAVGDEGLGDEREAERGKESEVGERGSVVDDDLAGDTESAVLVGGVVELGDDLEHGDAVVEAVDGVGRVDDGDGRVARGEGHELGAPVVSVELVDEEVEGPLLCQGLRRIHGDEVHAPRRRLGHQRRLDEALLLLRRERVTDDVARGVGDAGGGLGGGVGGHRVGFGRNRSMEIEIC

SEQ ID NO: 56344 - protein, 136 aa, Zea mays
  Clone ID: UC-ZMFLB73193A08_FLI.pep
KGMSGQVTPMLTETWVQEGTWQLNPSLTIISSVIELQIRHYIALSSLLIVVALVEVMQDVERGRRQEDADRVAEEVQPRGDCHHLAPLEHLHQQDHHDDVPHYCLQLVEGGDLHPLGAFLHEQELITRNDECSSQT

SEQ ID NO: 56345 - protein, 203 aa, Zea mays; identical to SEQ ID NO: 37013
  Clone ID: LIB143-013-A1_FLI.pep

SEQ ID NO: 56346 - protein, 237 aa, Zea mays
  Clone ID: UC-ZMFLB73201C03_FLI.pep
SKLACSSSLVNMMKVDLVMHELCLIHTDLKPENILLVSPEYIKVPDYKVSSRSPKEGSYYKRVPKSSAIKVIDFGSTTYDQQDQSYVVSTRHYRAPEVILGLGWSYPCDIWSVGCILVELCTGEAIFQTHENLEHLAMMERVLGPLPYHMFKRADRHSDKYIRKGRLNWPEGCTSRESMKAVMKLSRLQNLVMQNVDQAAGDFIDLLQGLLKYDPSSRLTAREALRHPFFTQGFWRR

SEQ ID NO: 56347 - protein, 674 aa, Zea mays
  Clone ID: LIB143-015-H8_FLI.pep
VGSLDLKQPAQELFCSPVVYDRRKKKGSQTLASLMDDGDGGLSFDFEGGLDSAPAAGGPVPSSTDPGAGGGDGPGMHGRGRGRGSYRQTVCRHWLRGLCMKGEACGFLHQFDKARMPVCRFFRDFGECREPDCAYKHSYDDVKECNMYKMGFCPNGPNCRYKHIKLPGPPPSVEEVLQKILQMRSFNRYSQNRNSNYNQQGERPQHPQGSALPNQNSAENATAAAPPAGGQQAQTLNQQPPQQQQKPNTNDQAQGVSNGHQATRIATPLPQGPSRYFIVKSCNRENLEISVQQGIWATQRSNEAKLNEAFESTENVILIFSINRTRNFQGCAKMTSRIGGYIGGGNWKSAHGTAHFGRNFSMQWLKLCELSFQKTHHLRNPYNDNLPVKISRDCQELEPFVGEQLASLLYLEPDSELTAMLIAAEAKREEEKAKGVSADEAADNQDIVLFDDNEEDEEEESEEEEGNAQESQGRGRGRGMMWPPQMPMMRGAMLAGRGFPPNMMGDGFGFGGGFGMPDPFGMPRGFPPFVGPRFPGDFARGPMPGMGFPGRPPQPFPLGLDMMMGPGRGPLMGGMGMGGPGRPNRPMGMAPFMPPPPPNNRAAKREQRRPGGDRGDRFETASALDQGSRGHDNTGNPGADGARAQSGDRYGRSALRDDDSESEEEAAPRRSRKR

SEQ ID NO: 56348 - protein, 346 aa, Zea mays
  Clone ID: UC-ZMFLB73188D09_FLI.pep
DVRRTAVLALGFVLYNEPEQTPRIVSLLSESYNPHVRYGAALAVGISCAGTGLSEAISLLEPLTSDVVDFVRQGALIAMAMVMIQTNESYDPRVGAFRRQLEKIILDAGGRNVTIKLKSRSKHDRLTAVVGLAVFTQFWYWYPLTYFISLAFSPTALIGLNSDLKVPKFEFLSNAKPSLFDYPKPVTQQTTATSVKVPAAILSTYAKSKSRARKDAESKAKAKAEDSSSASTSMQVDGASAAGAAAEKAPEPEPTFQILTNPARVVPAQEKFIKFLEDSRYKPVKAAPSGFVLLQDLEPTEAEELALTDAPSTAATTSTPASSAGEPVGMAVDDEPQPPPAFEYTS

SEQ ID NO: 56349 - protein, 894 aa, Zea mays
  Clone ID: LIB143-018-A10_FLI.pep
FTDISIEKAVEYDEYCHSHQPPIAFIKSEVCGLFGSVFCDFGPEFTVLDVDGEEPHTGIVASISNDNPALVSCVDDERLEFQDGDLVVFSEVHGMTELNDGKPRKIKNARPYSFTLEEDTTSYGTYFRGGIVTQVKPPKVLKFKTLKDAIKKPGEFLMSDFSKFDRPPLLHLAFQALDKFRSELARFPIAGSDDDAQKLIDLAISINETLGDSKLEEIDKKLLQHFASGSRAVLNPMAAMFGGIVGQEVVKACSGKFHPLYQFFYFDSVESLPVEPLEPSDLKPENSRHDAQISVFGAQLQKKLEQSKIFMVGSGALGCEFLKNLALMGISCSQNGKLTVTDDDVIEKSNLSRQFLFRDWNIGQPKSTVAATAAMAINPELHVEALQNRASPETENVFNDAFWESLDAVVNALDNVTARMYIDSRCVYFQKPLLESGTLGAKCNTQMVIPHLTENYGASRDPPEKQAPMCTVHSFPHNIDHCLTWARSEFEGLLEKTPTEVNAFLSNPGGYATAARTAGDAQARDQLERVIECLETDKCETFQDCITWARLKFEDYFSNRVKQLTFTFPEDAMTSSGAPFWSAPKRFPRPLEFSSSDSSHLNFLLAASILRAETFGIPIPGWAKNPKKLAEAVDKVIVPDFHPKEGVKIETDEKATSLSSASVDDAAVIEELIAKLQAISKTLSPGFRMNPIQFEKDDDTNFHMDLIAGFANMRARNYSIPEVDKLKAKFIAGRIIPAIATSTAMATGLVCLELYKVLAGGHKVEDYRNTFANLAIPLFSMAEPVPPKTMKHQDMSWTVWDRWTVTGNMTLRELLEWLKEKGLNAYSISCGTSLLYNSMFPRHKERLDKKVVDVAREVAKVEVPSYRRHLDVVVACEDDDDNDVDIPLVSIYFR

SEQ ID NO: 56350 - protein, 153 aa, Zea mays
  Clone ID: UC-ZMFLB73194H01_FLI.pep
TMVKAVAVLGSSDGVKGTIFFTQEGDGPTTVTGSVSGLKPGLHGFHVHALGDTTNGCMSTGPHYNPASKEHGAPEDENRHAGDLGNVTAGADGVANINVTDSQIPLTGPNSIIGRAVVVHADPDDLGKGGHELRKSPGNAGGRVACGIIGLQG

SEQ ID NO: 56351 - protein, 394 aa, Zea mays
  Clone ID: LIB143-018-G4_FLI.pep
GFRWSLRRRRAPSSSVEMADGEDIQPLVCDNGTGMVKAGFAGDDAPRAVFPSIVGRPRHTGVMVGMGQKDAYVGDEAQSKRGILTLKYPIEHGIVSNWDDMEKIWHHTFYNELRVAPEEHPVLLTEAPLNPKANREKMTQIMFETFNVPAMYVAIQAVLSLYASGRTTGIVLDSGDGVSHTVPIYEGYALPHAILRLDLAGRDLTDSLMKILTERGYSFTTSAEREIVRDIKEKLAYIALDYEQELETAKNSSSVEKSYELPDGQVITIGAERFRCPEVLFQPSMIGMEAAGIHETTYNSIMKCDVDIRKDLYGNIVLSGGSTMFPGIADRMSKEITSLAPSSMKIKVVAPPERKYSVWIGGSILASLSTFQQMWISKEEYDESGPAIVHRKCF

SEQ ID NO: 56352 - protein, 435 aa, Zea mays
  Clone ID: UC-ZMFLB73197E11_FLI.pep
QHNHGVVWSSYARKARATARFTRESKATTKRCAGIIHLQKLARRPWWVVSLEEELMAASSCIACNNGSTDEKEEKRKCDLVGYEALPEWLKDNEFIHGYYRCEWPMKETVLSIFSIHNETLNVWSHLLGFLLFLCLAIFTAMVIPRNGSSRSSNSAAYQLGDLVEMANMTVALRHEALAACFLLPPSAAALSEDGQQQIPTSCPPNTSSSHHHAIQIQSSTGTAATVDAGTAADPITRWPLFAYLVGAMVCLLTSSVCHLILCHSERTAYVTLRLDYAGIAALIVTSFYPLAYYSFLCNPALQRLYMGSITALGAAAVTASLVPAFQAPELRPLRAALFSCMGASGAVPIAHKLLLYGGTAPGAVASAGYEALMGVLYGLGVAVYAARVPERWAPGRFDLVGHSHQLFHLFVIAGAYAHYHAGVEYLKWRDVDKC

SEQ ID NO: 56353 - protein, 144 aa, Zea mays
  Clone ID: LIB143-020-H2_FLI.pep
PPHSQTARASELAERRQAPPSSRNMARTQQLAVVATAVVALVLLAAATSEAAISCGQVASAIAPCISYARGQGSGPSAGCCSGVRSLNNAARTTADRRAACNCLKNAAAGVSGLNAGNAASIPSKCGVSIPYTISTSTDCSRVN

SEQ ID NO: 56354 - protein, 202 aa, Zea mays
  Clone ID: UC-ZMFLB73202C01_FLI.pep
DNPRLDHPRSPLDVFLLRSSLSTVDDACEGAKTSARVRSVHTSKGGGWLVVPGGVALSYASDDDFLLNRPPAPANGEMGGVVPSGEAGGVLAALLGDDGYPAGRLIMMLRVTFTGVSSLPEAGEGGTNAAASPAGSLILTAAGRTGCLRRRPSPVSGRGPATVSSHSLSRRPISLRRNHPTATARCQTLDLQSLVLYPQNFP

SEQ ID NO: 56355 - protein, 332 aa, Zea mays
  Clone ID: LIB143-021-B8_FLI.pep
LIDCSLYPINSTHLLLGRRRALGRRALREPVLIGAVVVDHVAGLRPAELLLAGAVELLRHPCAVGARAGGGVRRGAPGGGVPAVRRDEGRLGPVGPDAPPLRGPLLRVPHAGVHPHRLRRRERHGPVAAAPELPDGDAVHVEDDVGGVPQHGVGVEGRRGVEPHPELLLPPALPLAVHVRVHRVRLPARVPQELEVDLVVLRTLRRKIEGGDGAGGVPRDELELHVEAAVEVLGLGLEARAGGPVHGQRQELAVVEDLAAAVAPGDVHVLVEVAAGARGSPVLQQQHRRQNQRLHGSSLARSIDRSVHFRLQFVSQQDWLAAIDRQDDGACA

SEQ ID NO: 56356 - protein, 142 aa, Zea mays
  Clone ID: UC-ZMFLB73186B05_FLI.pep
WRVSYVCKYRLLVLEKSAKLRTGRWRGRPAAAHARRIVPARPRPGRHWRRPTEDSKDEAQGHRRIRCMELSESESSRSASLQSATYGYHHLSSRTLPRWPLLAALHACTLFVMRFTYWPPAGATSEPSFFPFFFGTCKDTAG

SEQ ID NO: 56357 - protein, 449 aa, Zea mays
  Clone ID: LIB143-024-C4_FLI.pep
ATSSPGVPPEIHPDPPPRASAMAGAPTTVTKSPPSLVPPAGPTPGGSLPLSSIDKTAAVRVSVDFIQVFPAPTSVKDDWSPSSTIAAMREGFAKALVPYYPVAGRIAEPVPGEPEIECTGEGVWFVEAEASCSLEEARNLERPLCIPKEELLPRPPAGVRVEDTLLLAQVTKFTCGGFAVGICFSHLVFDGQGAAQFLKAGGEMARGLPEPSIKPIWARDAIPNPPKPPLGPPPSFTAFNFEKSVVEISLDSIKSVKDQVASETNQKCSTFDVVTAIIFKCRALAVDFAPDAEVRLGFAASTRHLLGNVLPSVEGYYGNCVYPGGLTKTSQEVKEASLVEIVTTIREAKEALSSRFLDWLSGGAKENHYNVSLDYGTLVVTDWSHVGFNEVDYGFGEPSYVFTLNDDVNIVPSVVYLKPPKPKQGIRLVLQCVEGHHSAVFGEELQKHA

SEQ ID NO: 56358 - protein, 229 aa, Zea mays
  Clone ID: UC-ZMFLB73188H12_FLI.pep
GGIFTRLINRNTTIPTKKSQVFSTAADNQTQVGIRVLQGEREMAADNKLLGEFDLVGIPPAPRGLPQIEVAFDIDANGIVTVAAKDKATGKEQNITIRSSGGLSEADIQKMVQEAELHAQKDQERKALIDIRNTADTTIYSIEKSLGEYRDKIPAEVASEIEAAIADLRQEMASDDIEKIKAKLEAANKAVSKIGQHMSGGGSGDSQSGSGPQGGGDQAPEAEYEEVKK

SEQ ID NO: 56359 - protein, 92 aa, Zea mays
  Clone ID: LIB143-024-E11_FLI.pep
HEQYTDPVTVSHVQIHPTSTGNCPCPCHMIKGRDTYSWVYLIIYGTLNITALTRQHSPAQPRIGAAQCCPGSFSLILSIMPFFSPVPSVPVA

SEQ ID NO: 56360 - protein, 325 aa, Zea mays
  Clone ID: UC-ZMFLB73193D01_FLI.pep
GSRSRHRVAEAMATSMLSTVKVSNVSLKAAQRDIKEFFSFSGDIVHVEMQSFDELSQVAYITFKDKQGAETAMLLTGATIVDMAVIVTPANDYELPSSVLAALEPKDTKPSALQKAEDIVGTMLAKGFILGRDALDKAKALDEKHQLTSTATARVSSFDKRIGLSEKISVGTSVVNDKVKEMDQKYQVSEKTKSALAAAEHSVSTAGSAIMKNRYVLTGAAWVTGAFSKVTSAANEAGAKAKEKIAVEQEHKNAEGGPAQANISETHEAHRGLDGGFSRLHDSETPEDIPISTASVPAVTDEEPSKASPPAGVPEKPEAAHELVL

SEQ ID NO: 56361 - protein, 77 aa, Zea mays
  Clone ID: LIB143-025-D11_FLI.pep
AAATRPASIAMTTSRRLADRKIARFEKNITKRGSVPETVKKANDYPVGPILLGFFVFVVVGSSLFQIIKTASNAGLF

SEQ ID NO: 56362 - protein, 431 aa, Zea mays
  Clone ID: UC-ZMFLB73194H03_FLI.pep
CRHHRSFFSPGQEKRGERGEARCPPDLLCPDAAVTTSSVSVRSKMGAGGRMTEKEREKQEQLARATGGAAMQRSPVEKPPFTLGQIKKAIPPHCFERSVLKSFSYVVHDLVIAAALLYFALAIIPALPSPLRYAAWPLYWIAQGCVCTGVWVIAHECGHHAFSDYSLLDDVVGLVLHSSLMVPYFSWKYSHRRHHSNTGSLERDEVFVPKKKEALPWYTPYVYNNPVGRVVHIVVQLTLGWPLYLATNASGRPYPRFACHFDPYGPIYNDRERAQIFVSDAGVVAVAFGLYKLAAAFGVWWVVRVYAVPLLIVNAWLVLITYLQHTHPSLPHYDSSEWDWLRGALATMDRDYGILNRVFHNITDTHVAHHLFSTMPHYHAMEATKAIRPILGDYYHFDPTPVAKATWREARECIYVEPEDRKGVFWYNKKF

SEQ ID NO: 56363 - protein, 391 aa, Zea mays
  Clone ID: LIB143-030-C6_FLI.pep
GDCSQKALARKNPTRETNLPNLSVAMALSDRSRESLLPSFLYASSARSFAATGAAARLPVSSPAPATAGAGGGVPFSIQAPKEKIEMYSPAFYAACTAGGIASCGLTHMAVTPLDLVKCNMQIDPAKYKSISSGFGILLKEQGARGFFRGWVPTLLGYSAQGACKFGFYEFFKKYYSDIAGPEYAQKYKTLIYLAGSASAEVIADVALCPFEAVKVRVQTQPGFARGLSDGLPKFVRSEGVLGLYKGIVPLWGRQIPYTMMKFASFETIVELIYKHAVPVPKSECSKTTQLGISFAGGYIAGVFCAIVSHPADNLVSFLNNAKGATVGDAVKKLGLWGLFTRGLPLRIVMIGTLTGAQWGIYDAFKVMVGLPTTGGVTPAPAAEAELKASA

SEQ ID NO: 56364 - protein, 542 aa, Zea mays
  Clone ID: UC-ZMFLB73189A06_FLI.pep
LQSRALGMIRSHVLSILKGASSQVQAAIRSSDSGKNIVTEGVEASLIYVRFKAAASELKPILGEIESRSSRKEYAQILSECHSLFCEQRLYLVRGMVQQRILEFARKEALPSLTRSGCAYLMEACQFEHQLFAHFFPASAADVSSMAPLMDPLCTYLYDTLRPRLIYEGNIDSLCELVDILKVEVLGEQLSRRGESVAGLRPILQRILADVHERLAFCARTHIREEIANFRPSVEDLDYPGKLERPVDMSSSATVGDNSDIYITWYRPLEKTVSCLSKLYRCLEPSVFTGLAQEAVEVCSTSLQNASRVISKKATPMDGQLFLIKHLLILREQIAPFDIEFSVTHKELDFSHLLDHLRRILRGQVSLFDWSRSTSLARTFSPRVLENQIDARKELEKSLKATCEEFIMSITKLVVDPMLSFVTKVTAVKVALSSGSQGQKLDSVLAKPLKTQAFASPDKVAELVQKVAAAIQQDLPKVMTKMRLYLQNPSTRMILFKPIKTNIVEAHIQLHSLLKSEYSSEEMQSIGMLPIPDLQSQLDSLL

SEQ ID NO: 56365 - protein, 78 aa, Zea mays
  Clone ID: LIB143-031-B8_FLI.pep
VLAGAGEVPIGLGGSGVQLRYRHWPRVRRLAGAGAGAIPLDAGDYDLGRDAVRRRQRLPSRLSHYESDDIVICYVHER

SEQ ID NO: 56366 - protein, 88 aa, Zea mays
  Clone ID: UC-ZMFLB73193D12_FLI.pep
TNTWMKHGTIEEMAICRPCCMHLSFGYVLLLDSARASAVCTLYMLKRQHLKYQLNGFAFMLLRSWDGDRWTLLSSSWLLIPINSAPCD

SEQ ID NO: 56367 - protein, 196 aa, Zea mays
  Clone ID: LIB143-033-A12_FLI.pep
VKAHTVRLHCIALPKTDQSTNQPQPRMLRHPHLPSGHDGRCRLERLAPVHEDVLQQRVAAGVADDGVEHGARGVHGVGGEGPLPLADLGLALHLPVARQLLRGQHLLRAAGVVRVQPRHRVRRPVVVRRQLRERRGQPARRRHERLLLRRGAHRRRGEHRLVVAAGRRRRRLLQPAALLVVDAAQDPVIQLHPSTQ

SEQ ID NO: 56368 - protein, 573 aa, Zea mays
  Clone ID: UC-ZMFLB73207F07_FLI.pep
LDLEKKFVPNPNRRGARRREMSEYDERYQGNADMPAAEGGYPQAEYAAAAAPAAGGSPPADSKPSGFSDHADGRSSQHQHETQSHDSGSSKSRERDRERDKGKDRERDRDRGREKGRDRDRDKDRERSDRDRDRDRHHRDHRERSEKREHRDRSDDRDRHRDGRDRHRDDRDSERRRDRDRDGHRRHRSRSPSKSRDRDRRSRSRSRSRSKSKRVSGFDQAPPQHALPIVAAGAIPGQLPGITAPIPGVGVLPNLYNLAAGQFNPLVIQPQAMTQQATRHARRVYVGGLPPTANEQTVAIFFNGVMAAIGGNTAGPGDAVLNVYINHDKKFAFVEMRSVEEASNAMALDGIMFEGAPVKVRRPTDYNPSLAAALGPSQPNPNLNLAAVGLTPGSAGGLEGPDRIFVGGLPYYFTEAQVRELLESFGPLRGFDLVKDRETGNSKGYAFCVYQDLNVTDIACAALNGIKMGDKTLTVRRANQGASQPRPEQESILLQAQQQVQMQKLVYQVGGALPTKVVCLTQVVTADELRDDEEYNDIVEDMREEGRKYGKPHEAHRVLLYLLCFKISYIQLL

SEQ ID NO: 56369 - protein, 101 aa, Zea mays
  Clone ID: LIB143-039-D1_FLI.pep
ISFNHTDVKIKFTTKTLTIQEMHLSPQTQASSHSSDSASQLFLLPFLEYLKFLRNLGSIPLVEVWRWRLGFLMPFLCALNDWLCAVWFLDLAIPNPSCSCS

SEQ ID NO: 56370 - protein, 261 aa, Zea mays
  Clone ID: UC-ZMFLB73183D04_FLI.pep
LQIKLSCTCWSSSSLFLVLAGCRELGSKVLLLFARRGGGGDRSEGMSSAQIAPADHVCYVHCSFCNTVLAVSVPGNSMLNIVTVRCGHCANLLSVNLRALMHSLPEQDHQLQENIKVHGINGTLHDDHQYCGHLDQLGSSSSSRFRRLPVMCSPQNEQHLLQEQTLNNNARPPEKRQRVPSAYNRFIKEEIRRIKANNPDINHREAFSTAAKNWAHYPNIHFGLDDSGREGKKKLVDHEAAASVVAVAAAPTAAKKIQGFY

SEQ ID NO: 56371 - protein, 119 aa, Zea mays
  Clone ID: LIB143-041-F6_FLI.pep
KCTGNQVPYSLHRITLAGGKKTKLRCKRQANQATLELLITMINDKIWRELIRCALPLLERANWFLKCSIEREHLALGHVRHQLVHEDQRGHGFHHRNSSRGDAWVMAPSCQKLNVLTLP

SEQ ID NO: 56372 - protein, 514 aa, Zea mays
  Clone ID: UC-ZMFLB73186F01_FLI.pep
ASCGRGTLWPRCGSSRGLAWLGRLLGSSFPRGPEFLDCTARTSLDMLSKHYYQATGSWVVFFVPENDADMTAYNDFMSYLGDKQRAAVCKLGESSTLFLVPPSDFSEQVLRVPGNVSISGVILRFQQSNPDYSSPNRKPLDRAHPSSASNFNTDVRNCEDLHALRRLNPSDISTFPQGPDYVCSSGGSYTPANADFIPPYKPESAPPYVVPQSPQERPPAELPMGIAQGQHQQLPNRLPSGWSNNLDNPNPNLGSGNFSLAQGAISNRTQDPYTFAPGVVSTGTASGYASGEASNSMSWASMQYNSQQVARSDQPTIPVSLPPDQLAQLAALLARQNQPRKVGLPVDSSNNLSGFIQSPNPHGHATMMPGNSGSIPIQNSLPPVPSMQQLHANVPVSPIGSLPANPFNVPTSAPVLCNSTSPMLPSHALVNPAHSSMPMRPFIPPLPEGPPPFQQQTSSAVTVQPLGPSSQQSSQQLLAQDLDGDPQKRLQATLQLAATLLKQIQNQSNPGGQK

SEQ ID NO: 56373 - protein, 274 aa, Zea mays
  Clone ID: LIB143-046-E2_FLI.pep
LKKKTGKENGSDRRQGQWLRRSLARGAGVRGQQAGCEGPGRLRRQVHPGHVPPPAGVPQGCHFSTSSALLRRCAGHPSGGPVRGAARGSGGPGEARGRDGGLLLGGEPRRAGGADGQHAQRGAPVQRGLSGGQAGALLTGPRSQRALRFQLRPLRVRGGRLARHALLQDCAGSGAAGARAGASPERDDGIRRGTDEAGAVHVRAAVGVPRHAQRPPAQDGVHAAAPHRVPVLPAMPGAAPHHGRQEALGHRFLHHPPAGRHGRPAGASRSRRRP

SEQ ID NO: 56374 - protein, 237 aa, Zea mays
  Clone ID: UC-ZMFLB73190C12_FLI.pep
TSNKNNTADRGSKSEIGGLSAILKLLSPNLIRSTLLLWTVFLGHAFLYYGLVLLTSELNHGNRICGSEEGAEVTTTAHIHDENLYRNVFITSFGEVPGLLLSAAIVDMIGRKLSMSSMLYISCLCISPLMFAQTESLTTIFLFCARVCISASFTVLHIYAPEIYPTAVRATGVGFASSIARFGGILCPLVAVGLVHACHQMAAILIFITVMLASGIAVSYFPLETSGRKLSDHVAAA

SEQ ID NO: 56375 - protein, 136 aa, Zea mays
  Clone ID: UC-ZMFLB73195A04_FLI.pep
CIGATTLDEYRKHIEKDPALERRFQPVKVPEPTMDETIQILRGLRERYELHHKLRYTDDALIAAAQLSYQYISDRFLPDKAIDLIDEAGSRVRLRHAQLPDEAKELDKELRQISKQKNEAVRGQDFEKVYCCLAQR

SEQ ID NO: 56376 - protein, 332 aa, Zea mays
  Clone ID: LIB143-052-G1_FLI.pep
SRSPPLIPILSPPLALHQHAPADEEHGVYDGTVITFIITSLVHRPPARRLLVGQGQPLSRASHEARRRDLRRSRPRPQGRHRLLQPLRRGGLRRPAPAHRHQARRPLPVLEPDAGLRRPRPRALPFLPIDVSVFHDRRLQDHNALRPQTFLGRVRINGASVAPSPQEAVLQRYPLEKRSFFSRVSGDIAIRIYLVGDDVNNESVQVPAPPNHHHHPQQQQQQQESVAAAAATGDPERMVRSAFAPQQPSAVEQPAAAGNGGDEHEARPPRIFRSVPAAEPRRATLHAVAAPPPPPGQTVVMPKPAASAPPGPLRPGRDQAASAGQDGPARGR

SEQ ID NO: 56377 - protein, 123 aa, Zea mays
  Clone ID: UC-ZMFLB73207H06_FLI.pep
DLSVCHWLIFNKQSKKVTTGEAAVSQHDSPRTSLPTSAVEHSHPRHLVMNLYDGRISGTKIGTPLHIGIRKSMAVKICKLFVKRNHVIKLIEANPTFPLITHGQDATSSVACTGRTHCFVAIG

SEQ ID NO: 56378 - protein, 179 aa, Zea mays
  Clone ID: LIB143-054-F12_FLI.pep
VFLFNPHLDRGGHQPPYGGREGLLVRGGEEAQRPQGLLAHHRRQGVRRHAVHGGAPRRRRGPAGVRRQGRHRGLRGHRPQRLRQGAHAPVLHRQGRRGYLPGQARLRRHQGRRQVVREGRDERRRLGHAPAARRARPAAGAGLRAAAELCQGQGGVDKIQIDTIVDSAESRPCGLFGSI

SEQ ID NO: 56379 - protein, 450 aa, Zea mays
  Clone ID: UC-ZMFLB73183G03_FLI.pep
RAPTPTPTQRSQSPLRSLCTLQLPVPAMARAPSSWTPSLAMVLLVVAAAAVVASSEAARVPAAVGNWTGEELRGAAARRGGRRSRRRAFENGLGRTPQMGWNSWNHFGCGINENLIKQTADALVNTGLAKLGYEYVNIDDCWAESDRDYQGSFVANRQTFPSGIKALADYVHAKGLKLGIYSDAGTRTCSQKMPGSLDHEEQDVKTFSSWGIDYLKYDNCNDAGRSVMERYTKMSNAMKTYGKGIFFSLCEWGRQNPATWAGGMGNSWRTTDDIADNWGSMTSRADQNDRWASYAGPGGWNDPDMLEVGNGGMSEAEYRSHFSIWALAKAPLLIGCDVRAMSQQTMGILSNSEVIAVNQDSQGAQGKKVQSSNGLEVWAGPLSNNRKAVVLWNRQGYQATITAQWSSIGLASSTAVTARDLWAHSSFSAQGQLSASVPPHDCKMYVLTPN

SEQ ID NO: 56380 - protein, 76 aa, Zea mays
  Clone ID: LIB143-057-H5_FLI.pep
GKDVMQCRAAVFAMQHKTEQSELLEVAPRWDAEARFLPDAVVLAVRRRVEIRRDHAAHVVPCPDLHHDLLVDDGHV

SEQ ID NO: 56381 - protein, 490 aa, Zea mays
  Clone ID: UC-ZMFLB73187A02_FLI.pep
AYFDLHKNEDWLRNKYHPTNLENVIERRNELARTTANDFFLKLQSGDLDIGPGLTGSAVSKSGNNSSKNLDAVEGDGKKGKHGKGSDDSYYAASKAHPVSSEVRRIRIDIEQAQVLIRKLDSEKGIENNVLSSSDHEKSDRDKSHGSVGPIVIIQGSSTVKGLEGAELLDTLVTYLWRIHGVDYYGMSETNEPKGLRHVKADARTYNGASSNGAEWENKLDSFWQDRIQGQDPLEMLKGKEKIDGAATEVLDPYVRKIRDEKYGWKYGCGAKGCTKLFHAAEFVQKHLKLKHADLVVDLTSKVREDIYFENYMNDPKAPGGTPIMQQPAPRGKGRQRPPIESRLRDERGNHRFDRNVDSPKRDGSGENPDDPIYDSFGDPAMHGAFPPDIPAPPVLMPVPGAGPLGPFIPAPPEVAMHMLRDQGAPPPIEPTGGPHPRKAGTGGGPSMRGPSPIFGAPSPHHMHDPRRIRSYQDLDAPEDEVTVMDYRSL

SEQ ID NO: 56382 - protein, 313 aa, Zea mays
  Clone ID: LIB143-059-B1_FLI.pep
SADRSMAIISDFKDDEAPEQQLAAGHGVEEALVAALERSGGALPFLQAAIDVAHRRSGLFRDPSAVSKVTAMAAAARAQIEAEERVTREAEAKRKAEEDERKAEAEAQRAAKEAVMATAEEKPESTVEKDIMEVDKKEEANVRQPNAGNGLDLEKYSWTQQLPEVNITIPVPQGTKSRFVVFDLKKNHLKVGLKGQPPIIDGELYKPVKVDDCFWSIEDGRTLSILLTKHDQMEWWKSVIKGDPEVDTQKVEPENSKLSDLDPETRQTVEKMMFDQRQKQMGLPTSDEMQKQEILKKFMSEHPEMDFSRAKLD

SEQ ID NO: 56383 - protein, 332 aa, Zea mays
  Clone ID: UC-ZMFLB73190E09_FLI.pep
SYEDLRSAQMRPPMVTGLPVEDQAAKVYTAEIFQKFFNEIGHSFHCNYNILERNESVVTYIVSEHVDQTNKVDYKVAYDNVQGDIWCLCRLYQSKGILCRHALTVLRQELVLMIPQKYIIHRWCKDCKQTCASISQPVSAGNQELGSYDDLYKLGHLYFAEVVEFGSMNSESKEYALSIMREVRDKVISYEKSLRDQRVDSHVSTANFAYNPVNEDFTDDALPISLSTKGWDLTQGQSKRSRKKKLATPTVLDTLKKKTKRAYNKRRNATANTLNTSATATDGITDGTNVQQNPVNEGWQLASTSAPETFSYGVIPDITFPFFTSLCSFRSW

SEQ ID NO: 56384 - protein, 341 aa, Zea mays
  Clone ID: LIB143-068-A4_FLI.pep
DCGNRTCPKTQQKLQNLSLTPNYVLRSLILQWCEEKGMEPPSRSKSDGSPLEVAGNRLAIEALVRNLSSSSLDDRKSAAAEIRSLAKKSTDNRILLAESSAIPALVKLLSSKDPKTQEHAVTALLNLSIYDQNKELVVVAGAIVPITQVLRTGSMEARENAAAAIFSLSLMDDNKIMIGSTPGAIEALVELLQSGSSRGKKDAATALFNLCIYQANKVRAVRAGILVPLIRMLQDSSRSGAVDEALTILSVLASHHECKTAISKAHAIPFLIDLLRSGQARNRENAAAIILALCKRDAENLACVGRLGAQIPLAELAKTGTDRAKRKATSLLEHLSKLQVL

SEQ ID NO: 56385 - protein, 162 aa, Zea mays
  Clone ID: UC-ZMFLB73195E05_FLI.pep
SRFRYWIHFQKSLHIQTESIQLETCTVRFAYYPCNNILQPSKANIKALFLSSFAHYALDCIYPLTGRHDYSSNSIARDETQLRTMFQKHVACTLLGVDANSIVGDDGAGLGRDLELLRGVLEHRGKGRRLGHAEPSLLRRRQPPPWGCSPPTLIEAAASLDR

SEQ ID NO: 56386 - protein, 118 aa, Zea mays
  Clone ID: UC-ZMFLB73199A07_FLI.pep
GPAGRHQHDHGVVVQDDVKTGTPPHAPEEEKKGLLDKIKEKLPGGHNKKPEAAAAAAPAPPVHAPAPAPQAENVSSPDGKEKKGLLGKIMDKIPGYHKSSAEEADHKADAAGEHRTSS

SEQ ID NO: 56387 - protein, 250 aa, Arabidopsis thaliana
  Clone ID: LIB146-006-B7_FLI.pep
DNGLLVRCCVGVVKSRTEGPRCYNIPVPVSGLGQQFGKLLESGKGADVTFEVDGETFPAHKLVLAARSAVFRAQLFGPLRSENTNCIIIEDVQAPIFKMLLHFIYWDEMPDMQDLIGTDLKWASTLVAQHLLAAADRYALERLRTICESKLCEGISINTVATTLALAEQHHCFQLKAACLKFIALPENLKAVMETDGFDYLKESCPSLLSELLEYVARLSEHSLTSSGHRKELFADGCDLNGRRVKQRLH

SEQ ID NO: 56388 - protein, 236 aa, Zea mays
  Clone ID: UC-ZMFLB73205A08_FLI.pep
NFDALFKNSNKQTVPLSGGGWLEVNEVMVRIITMVTFLLQLRLLQQAWSARSVDASKAESWAAEKKVLWICLPLYIIGGAITWVVHMRSNHSRRMLRQVVHLKPVEQHAFWEDLVSYCGLILDGFLLPQVILNVFSDSKVRALSPGFYIGSTLIRVLPHVYDVFRRQHFVPSLRPSYMYAGPRDDLFSLAWDIVIPCGALLLSALLFFQQWRGGAFFLCSKNRRTREYEMVSVASS

SEQ ID NO: 56389 - protein, 372 aa, Zea mays
  Clone ID: LIB148-001-C11_FLI.pep
TMAGSAVAVVLLSAVALLCLYHLLFLSLSVPDPAAAAAVPRRAGGHHGSNVPSGSGTANVVLRFGLSGQPLRLHDPASAAGLPDIDTFRGKLERLLPPDDHDPGWSRRFDAELGPVHRYFGPDAPLDVRQRIAYLFAILDRSPRGVGVGVGVGELEAWLRWQAAARLDAVTRREMAPHDTDRDGAVTLREFFAGWWMHKFASADRDGDGSLNAVEFNDFLHPEDSSQESVMLWLLKDKLSEMDHDGDGRLSQEEFVAQSHIIISGARHADDGGHAHDLERAEAAKKFTELDADKDNYLTVEEARCVLQSLVTGEFSYATSHAKFLMKADVNHDGKLSLEEMLDDYISFYSTVYMDDHYASEGEVDSDSRDEL

SEQ ID NO: 56390 - protein, 649 aa, Zea mays
  Clone ID: UC-ZMFLB73207H12_FLI.pep
NLPRNSMLDTTISASSKQESGEGSRLFKVMAKSFSKRWQSGEITNFQYLMHLNTLAGRGYSDLTQYPVFPWVLADYESDVLDLRNPQTFRRLDKPMGCQTEESEEEFCKRYDSWDDPDVPKFHYGSHYSSAGIVLFYLLRLPPFSTENQKLQGGQFDHADRLFNSVKDTWVSAAGKSNTSDVKELIPEFYYLPEFLENRFNLDLGEKQSGEKVGDVVLPPWAKGSAREFIRKHREALESDYVSENLHHWIDLIFGYKQRGKAAEDAVNVFYHYTYEGNVDIDAVSDPTMKASILAQINHFGQTPKQLFQKPHPQRRTDRKVPPHPLRYCAYLTQQEIRKTASSVSQIVSYNDKILIAAVNCLLKPLTYNEYISWGFPDRSLRILTYDQDRLLSTHENLHGGSQIQCTGVSHDGNILITGGDDGVVAVWRFVKDGIRRLLRMEKALCAHTGKITCVSVSQPYSLIVSGSDDCSVILWDLTSLVFVKQLPRFPASVSALHVNSLTGEILTGAGVLFAVWSINGDCLAVVNTSQLPSDLILSVTSATHSDWQDTNWYVTGHQSGAVKVWKMLHCSSDEAVNSKSKSPAVSSGGLSLNGQAPEYRLLLQKVLKSHKHPVTALCIPPDLKQLLSGDGSGHLLSWSLKDDSFKGS

SEQ ID NO: 56391 - protein, 541 aa, Zea mays
  Clone ID: LIB148-004-C4_FLI.pep
SVRPRPTSQPARDPSLPSGDEGYYGSALTTAHAQPGVETTASPYLTPHRPTPVSASPSCASSSPFPLRVQPGATHSAADPRRRSDPAMASTAARRLRELQAQTGNKTCVDCAQRNPQWASVSYGVFMCLECSGKHRGLGVHISFVRSVTMDSWTEAQLRKMEAGGNDRLNAFLTARGVPKETPHVAKYNSNAAAAYRDRIAALAEGKPWTDPPVVKETPGSGAPAPARKPPVHTSAASGGGGWDDWDDDFRPDMRRNQSVGSFAAAGAQSGRQPPRSKSTQDMYTRQQLEASAANKEDFFARRMAENESKPDGIPPSQGGKYVGFGSSPPPSANRNGGAAQGDVMQVVSQGFGRLSLVAASAAQSAASAVQVGTKEIQSKMRDGGYDQKVNETVSVVANKTAEIGSRTWGIMRGVMALASQKVEEYAKEGGVGGWGEDWQHSEQKSEPYQRFEHETNGNSWNSSQNSSSKNNSSSWDDWDDPGKKDEPAKPHQSSDSWAGWDDGKDDGFDSPSYNNHSTSNKGSNQNGTSGGTFWTEGGFR

SEQ ID NO: 56392 - protein, 606 aa, Zea mays
  Clone ID: UC-ZMFLB73199F06_FLI.pep
RALAAAGGEGRGSVSACESYLPMGKLTRRVLRANGMENKVKVFHKRSDELGVGVELDSRPDILVSEILDSELLGEGLIPTLQHAHDMLLVKNPKTVPYRATTYGVLVESTSLWKMHDLHSNEANAEDGVRLIPSGTQIVLSVKSQQHAMQCDALADEIRLLSEPFKVFEFDFSERPDSHRETKIEIKATADGHAHAIVSWWVLQLDSSGSVFYSTAPRWVRQSSGVDLPQYANGTKDWCDHWKQCVWFIQGTGAPAKKDQTLSLSASHNQTSISYQLNINDEGSRSPKSNHLTLLPERVALYGDKVWRSALISVIRNYTSERSSPICIVADDSVFLALIVSFLLPSSKVLAMFPCLRDSGLNYLQAVADANNLSMDRIKVIGKKASSLTTNDLNHEKVNMLVGEPFYHGSEGMLPWQNLRFWNERTLLDPLLSEDAFIMPCKGILRFCAMSLPDLWRSRRSLKDVEGFDHSVVNDTLGACGDLPGEQQGPCLPYYVWQCGYTKKLSEVYSLMDLNFSEPIHSCFGETKVEFAHDGTCHGFAVWIDWVLDKENSIVISTGPESRYWKQGVQLLSTPVQVNPANSVMHVEANFDADIGELTFKSTTLS

SEQ ID NO: 56393 - protein, 248 aa, Zea mays
  Clone ID: LIB148-012-E9_FLI.pep
FLDANPSEVVTVFLEDYAAPGSLSNTFNAAGLSKYWFPEAQMPSPSKGGGDWPLLRDMIADNHRLIVFTSKKGKQGTEGLAYQWDYVVETQYGSEGMADGSCPKRTESKPMDSKAQSLVLLNFFTSNPSQSWACSNNSAPLISRLNACYHASAKRWPNYIAVDFYMRSNGGGAPLATDIANGRLQCGHDNIAHCKISSASAPAPASASSPAPASASSPSPAPAPDFAATSPAISSSPGPAPGPLNSYY

SEQ ID NO: 56394 - protein, 143 aa, Zea mays
  Clone ID: UC-ZMFLB73205G03_FLI.pep
VYKSSKYKGLGWSFPCDIWSVGCILVELCSGEALFQTHENLEHLAMMERVLGPLPEHMIRKSSSSAQKYFRRATRLNWPEGAVSRESIRAVKKLDRLKDLVSRNAGHSKAELADLLYSILRFEPSERLTAQEALEHPFFRNPT

SEQ ID NO: 56395 - protein, 401 aa, Zea mays
  Clone ID: LIB148-018-F2_FLI.pep
TIIYTHLQAVSLAGQESTSKTRLTRAGIPVLMKGRTLGGTVRSVQPEPGEVVDVAPGARHGRGGDNAGGVGERRGVVVVVPATDAVEEGVLQEIGGRGPVPGLADAALDEAPQLGVLEPLERRGRDAPGDVVEDLHDAAALGVGHLPRDHLQHAHAVRVDVHRLSVRLRVQLRRHELRRAQDGVRHVRLVHDRRQPEVADLDLAVVAIDEDVAAVEVAVDDAGVVGVEVVEPLEDLARPLLERLDGDVAVSVAVLAEAPGGADLGDEVEDAGVAVQPHLVEADDVVVAERAEEAHLGVEALHHAGVAVGQRPQPDTVPRHLDPLLLVEPAVHLLDGPEPQHVRVPPEPPRRVHLLERLLAVHAVHRHGGGGSGFARARDAARRAADAAVRARVEGWGGAQE

SEQ ID NO: 56396 - protein, 410 aa, Zea mays
  Clone ID: UC-ZMFLB73208B10_FLI.pep
RQITKQKNEAVRGQDFEKAGELRDREMELKAQITAIIDKSKEMIKAETESGDVGPLVTEADIQHIVSSWTGIPVEKVSSDESDRLLKMEETLHTRIIGQDEAVKAISRAIRRARVGLKNPNRPIASFIFSGPTGVGKSELAKALAAYYFGSEEAMIRLDMSEFMERHTVSKLIGSPPGYVGYTEGGQLTEAVRRRPYTVVLFDEIEKAHPDVFNMMLQILEDGRLTDSKGRTVDFKNTLLIMTSNVGSSVIEKGGRKIGFDLDYDEKDTSYNRIKSLVTEELKQYFRPEFLNRLDEMIVFRQLTKLEVKEIADIMLKEVFDRLKAKEINLQVTEKFRDRVVDEGYNPSYGARPLRRAIMRLLEDSLAEKMLAGEVKEGDSAIVDVDSDGKVIVLNGGSGVAEPLEPALST

SEQ ID NO: 56397 - protein, 182 aa, Zea mays
  Clone ID: UC-ZMFLB73193H05_FLI.pep
GLFFSVQLKHEHTPIAIHIISLQISTTKIPWFQIFSSTYKLFRSLSLEFSMATSIIIADQSVPFIGILGVVRGIRYDQYDREGTADRAELFLLLLLQSDGDVDRRRIFRYPNLPAPGDEPSKTVGRYPVAALYLFWISRISSLLFRQFFPITQTEPPDPPPVIFAPNRLGPPARELFLCRIS

SEQ ID NO: 56398 - protein, 254 aa, Zea mays
  Clone ID: LIB148-028-G10_FLI.pep
FDGHSVSFSTSTPTTVDATMVGNRAWFGGLFSGSGKRRQVSAEKIVLDLTPVQEQRLQSLKERLNVPYDETRTDHQDSLRALWNASFPDTELTSLVSEQWKDMGWQGVNPATDFRGCGFVSLENLLFFARTYPASFKRLMLKQQGMRTTWEYPFAVAGVNISYMLIQLLELNSVRPKSLPGINFIKVLTEHEDAFDVLYCIAFEMMDAQWLAMRASYMQFKEVLEATRQQLERELSLEDLNSIHDLPACNLLYK

SEQ ID NO: 56399 - protein, 322 aa, Zea mays
  Clone ID: UC-ZMFLB73196D09_FLI.pep
FEQEVAILSRVRHPHLVTLLGACSEVSTLVYEFLSNGSLEDFLMCAEKRQTLPWQIRVRIISEICSALTFLHKNKPHPVVHGDLKPANILLDVNLVSKLSDFGISRHLIQSSSNNTTMYHTMHPMGTFQYMDPEFFATGELTCQSDIYSFGIVVLRLLTGRPPDGIKKIVEDAMEKGDLNSVVDTLAGDWPALHVQQLALLALSCTEMSRRHRPDLSAVVWAVDEAMKDATTVPSASSSRPVSDENNTPSYFICPISQDVMSDPRIAADGFTYEAEAIRSWLDSGHDTSPMTNMPLEHDELVPNRALRSAIQEWLQRQKTAL

SEQ ID NO: 56400 - protein, 389 aa, Zea mays
  Clone ID: LIB148-029-F9_FLI.pep
VSSPPEAEKSSPPLAPISSPPSEPKSPSSPPMVEKTSPPPATVSSPPPTPKSSPPPAPVSSPPPVVKSSPPPAPVSSPPPTPKPLPPPAPVSSPPPVVKSSPPPTPVSSPPPTPKPLPPPAPVSSPPPVVKSSPPPAPVSLPPPTPKPSPPPTPVSSPPPVVKSSPPPTLVSSPPPAPKSLPPPTPVSSPPPEVKSSPPPTPVSSPPPAPKSSPPPTPVSSPPPELKSSPPPAPVSSPPSAPKSSPPPAPVSLPPPEVKSSPPPAPISSPPPPAKSPPPPAPVSSPPPPVKSPPPPAPVSSPPPPMKSPPPPAPISSPPPAPVKPPSLPPPAPVSSPPPAVTSAPPKKEEDSTAPPAEALPPPSFNDIILPPIMANKYASPPPPLFQGY

SEQ ID NO: 56401 - protein, 402 aa, Zea mays
  Clone ID: UC-ZMFLB73206D12_FLI.pep
LQSQQRKRAIGDVWPSPIASYEEISSACQRFSSDQCVSETLGSTSYKATFRDEFIDTRTTEATVARLLPSTQSLKEFKTQATTLASLQHPNLCKLIGYYAKEDSNERMLVYERLYHGSLDKLLFGRSDGRFMDWSKRLKVALGAARGLAFLHDEGPFQAMYSEFSTLNIQIDKGFTAKLSGYGCVGFNTEEISNAPVSAANLSVETLEKGLLTPKSNVWSFGVVLLELITGRKNLDPNYSKEERNIVNWSRPFLTDDSRLSLIMDSRIKGRFPTKAARIVADIILKCLRKDPSERPTMRDVVEALARVQEIKVPCRYPLQEPSAAPRKVMLKSTSLNGIVPHHPVITFSPSPPSHNQHLISPRSSTSALFHPRACSSTLDDPSVSSIKKTPPIMRRSSVEGF

SEQ ID NO: 56402 - protein, 273 aa, Zea mays
  Clone ID: LIB148-032-B1_FLI.pep
AGSWMAAPRPLLLSLLVAVLAVAADVANAGHAKPLTPGGRVVHDNHGKFTAGPWKPAHATFYGGRDGSGTTAGACGYKDTRTQGYGVQTVAVSTVLFGDGTACGGCYEVRCVDSPSGCKPDAAALVVTVTDLCPPKDQWCKPPREHFDLSMPAFLQIAQEKAGIVPISYRRVACVKQGGIRYTITGNKYFNMVTITNVGGAGDIAAVSVKGSKRVKWTEMKRNWGQVWQTGEDLTCESLTFRVMTSDHRKATSWHVLPADWKFGVTYQASKNF

SEQ ID NO: 56403 - protein, 211 aa, Zea mays
  Clone ID: UC-ZMFLB73208D10_FLI.pep
FEAKRANTSTNTSAEQPSATHTPTRTNQPAGSRFAALTMMPRRALLFAAVLLAASAAAVSGFHLGGDESGLVRGVLAALRERAEAEDAARFAVAHYNKNQGAALEFTRVLKSKRQVVTGTLHDLILEAADAGKKSVYRAKVWVKPWEDFKSVVEFRLVGDSESEPEPSVASDVSSGQAIAKLSLEADIVQEEARLHTIENDGLSGDFTSSS

SEQ ID NO: 56404 - protein, 203 aa, Zea mays
  Clone ID: LIB148-035-A9_FLI.pep
GGWSASHYPPPRRSGLISPRPASAILWLDRSVGRKASEQAIYIYRRFFERASSEMGSAVLFYCICIAVVVALSSSMVAVGAAAPGETPKFISASALECSANVTEIAKARKLIDVHGHGLCPVRFDHTRGISAVASSCKDRPLPSPERCCGALKAYACPYSELINDNANNGCASEMFYVIMTRGRLRPGLFSQLCVEGPLGLQC

SEQ ID NO: 56405 - protein, 173 aa, Zea mays
  Clone ID: UC-ZMFLB73187D09_FLI.pep
KGLEELEVQSVSTGITTSNPGKLEVPDSKEKKKVKEAKTKKSEEPYHANNSSLKNKEVQSFVYDTSTKDKKEAKRKKFVDEEDVDAEGIDNTEISFADLMFSNVGNPETKLKNISTLEAAPDGKSVGGLVIDHTKKRKKPKGVVTITDSSALKMFSSMPEVGAGGLGLSGWDE

SEQ ID NO: 56406 - protein, 302 aa, Zea mays
  Clone ID: LIB148-048-C4_FLI.pep
FSRHVIRSVIYGEQPRNRLDLYIPKDNSKSSPVVAFVTGGAWIIGYKAWGALLGRRLAERGIIVACIDYRNFPQGTISDMVSDASEAISFICNNVVSFGGDPNKIYLMGQSAGAHIAACALLEQAIKESKGENTYWNVAQIKAYFGLSGGYNIQNLVDHFHERGLYRSIFLSIMEGEESLPHYSPEIVAKKLSAETISLLPQIVLLHGTADYSIPSSASETFADVLKQAGGKVELQLYKGKTHTDVFLQDPLRGGRDKLVEDVLSVIHVDDASARERDASAPTPERLVYEWQIKLARQISPF

SEQ ID NO: 56407 - protein, 212 aa, Zea mays
  Clone ID: LIB148-064-F1_FLI.pep
SRMSYAYLFKYIIIGDTGVGKSCLLLQFTDKRFQPVHDLTIGVEFGARMITIDNKPIKLQIWDTAGQESFRSITRSYYRGAAGALLVYDITRRETFNHLASWLEDARQHANANMTVMLIGNKCDLSHRRAVSYEEGEQFAKEHGLVFMEASAKTAQNVEEAFIKTAGTIYKKIQDGIFDVSNESNGIKVGYAVPNSSGGGAGSSSQAGGCCS

SEQ ID NO: 56408 - protein, 205 aa, Zea mays
  Clone ID: UC-ZMFLB73191H11_FLI.pep
LPCSLKIQTPFYSTVYTSGLCLTCTFVFLFHFSGHLTSKSDVYSFGVVLLEMMSGRRSMDKNRPNGEHNLVEWARPLLGERQRFYKLIDPRLEGNFSVKGAQKAAQLARVCLSRDPKARPLMSQVVEVLKPLQNLKDMASASYFFQTMQAERMAHSSSMNGRSSMNGGFKTQSPFGRHGQPPPVRSLSDGPRASPFRYSPKPNVK

SEQ ID NO: 56409 - protein, 336 aa, Zea mays
  Clone ID: UC-ZMFLB73206E02_FLI.pep
RVMLLQCLDLDKMDKKPSKILWDVPWEEVLSLELAKAGYQRPSHVIIHLKNFRRSENFVRLIKCNIDNEREPQALSLCCSIRKMWRSHQAAMKVIPLKVPSGQRHVYFVSDDDKKESHSLSRPLLSSGGTSTDVEQQFINNTVHFQKMWSSEPEIQSRCKLVAKQIADDGRVFSIWRPLCPNGYVSIGDIAHVGIHPPHFAAVYKNINGNFALPLGYDLVWRNCAEDYKSPVSIWLPRPPGGYVALGCVAVPSFKEPTLDCAFCVDERLAEDAAYEEQIIWASSDAYPWGCYIYQVQSASMQFMALRVPKEQSELRPKKILESFLQQASETQTSRA

SEQ ID NO: 56410 - protein, 359 aa, Zea mays
  Clone ID: LIB189-001-C7_FLI.pep
APPLRNYFLGDRHNRFLCPRRTPVRHRASDADRVACLACDLDEIYSAAFNGDRTPYSPAKFLYSWWQHASNLASYEQQDAHEFFISILDHIHENIKDDQQKSYAQGHGDCCIAHRVFSGILRSDVTCTSCGFTSTTFEPCMDISLDMDAGDNSSFGVANTKSHVRNGERGLAGVNSKVLTLMRCLERFTRSERLDAEQKFFCEHCNERQESLKQMSIRRLPLVSCFHIKRFEHSSVKKVSRKVDHCLQFPFSLDMAPYLSSSILRSRYGNRIFPAEASDADAVSEVSSEFEIFAVITHSGKLEAGHYVTYLRLNNHWYKCDDAWVTRVEEHTVRTSQAYMLFYVQKTFYYKACERAATV

SEQ ID NO: 56411 - protein, 397 aa, Zea mays
  Clone ID: UC-ZMFLB73208E07_FLI.pep
QLPQLSYIDAMALIQGKRKKDYLPEEAEVLRKFDERLGRLSFGLWVVGSLLSELMIAPSTLFEAVDRISLNENLFPIGANDDGFCRNNSFLVKVLVFCFALMDRAKGGSLTSRMVIAGSWLAPTPVSSTLLAATASKLPMKGSGMHLFGESLRTAFLCGTHCFLAPNGRKAEVESALLLVNLGLARKANRHPGCWIQFHPITQLFGKIRGGLVPTTAAVNGVMRTGNPSVYSDHLWASAFLVFGFKSEPPAVQLKAVDMVLFIKKTALPLAVDSFMSFSRCGSALELLKVCTNVLEEVEKSYASRMQDWSRGSLCWRKKLQPNHRVDELVWQEVTLLKATLLETRAKLLLRGGLFDTGEELCRTCISIRTVMLGHGHAQTLAAQETLAKLVRYRSKI

SEQ ID NO: 56412 - protein, 242 aa, Zea mays
  Clone ID: LIB189-002-E4_FLI.pep
EEAEGEGGAGALTGTLVAGALLVGFVGGFGAAGYVYKDQINTFLTQFSGFIDGYGPAGYALFVLVYAGLEVLAIPAIPLTMSAGLLFGSVTGTIIVSISGTLAAAVAFLIARYFARDRILKLVEGNKKFLAIDKAIGENGFKVVTLLRLSPLLPFSLGNYLYGLTSVKFLPYVLGSWLGMLPGSWAYVSAGAFGRAIIQEESEIGWGGNGQLWTLGVGLLFTAMAAAYVTRLAKDAVKEIDD

SEQ ID NO: 56413 - protein, 172 aa, Zea mays
  Clone ID: UC-ZMFLB73184G07_FLI.pep
DSSATDGARLPPPRAGSRLCVRCGERKAALKRPKTLEQICRECFYIIFEDEIHQTIVQNSLFKAGERVAIGASGGKDSTVLAYVLSELNRQHNYGLDLFLLSVDEGITGYRDDSLETVKRNEIQYGLPLKIVSYKDLYGWTMDDIVKAIGLKNNCTFCGVFRRQMTLQKPSC

SEQ ID NO: 56414 - protein, 126 aa, Zea mays
  Clone ID: LIB189-004-G5_FLI.pep
PFLNAVAELAPPLSHGHDDLQPFLVAKPIFLLAPRLFPPLRVSARPTPMVFPPSRLPCSLPMAFPLDVGDLFPTVQANVLSLPAAAPWWLSSSTSHLRSLGHDVVHLANHWCHTSRVMCSTKCLNM

SEQ ID NO: 56415 - protein, 217 aa, Zea mays
  Clone ID: UC-ZMFLB73187E07_FLI.pep
FISRPVVEPSPSLLRGIRQSLLSHLTLVLGNDELAAQCLLLHLLSRLRNRVDVVTVGRLSLNFTGFNRESASIFGNQLYSLIQKLVPYSQAIPLSIEYLNTATLQPRKDNKSGRLVTGVLQLPQGTHLIFDETLLQTGSLTSKGVENTMLLKNLMESQKVDYDFEYYKLEMAADVQLLTLSEGKSNILPSDLVVPFRPSSVPQLMQVLRKLRAGGGF

SEQ ID NO: 56416 - protein, 139 aa, Zea mays
  Clone ID: UC-ZMFLB73194C05_FLI.pep
EIFIYISRTIKPQFPTEASSNHLRRRLSSLALSSWVERAEEFQPTGSGSQWCTLGRTPALLLPVRVLPSIEPQPHLSSVAAAHWPATPPIARREPHSGEESVRRGKLIKLAVWSRRWGETVGGIGGEACTARAKREESS

SEQ ID NO: 56417 - protein, 285 aa, Zea mays
  Clone ID: LIB189-011-G2_FLI.pep
IQRHDDEYTIEVSGHRVPLQQRPRIPQVRSGADEGVVQAIVLVRDVVVVLAGRRRVLGGVYCSRRRRGAVVLHEGAGAIVPLVVRRRLRVVDLAAAALVLPLVQPPPQLVYLRGERDLLLPERLDAGVHRVELSPERGVVMLQLLGAPPRTLILEPDGHLARLQAKLPRQLRLLPGLQLGAPRVERRLQRPHLLLREPPLPLPAGGGSSPPRARGVLLVAGHHQLVHELGLVVLPRRHHRELAVAALHALLRLNRKHLSPERRRRRRCSPKPTWQRRLAVFVCSS

SEQ ID NO: 56418 - protein, 479 aa, Zea mays
  Clone ID: UC-ZMFLB73206F11_FLI.pep
LQIRLSKIGSSDSGAAATGSAAAAGAAAAVGSAAALGGGIPESVTVACPDHLVIADLPVAKSLGAVTTSAAAATRAIGRRSRRPLGERVHICSRCEFPIAIYGRLIPCEHAFCLTCARSDSSCYLCDERIQKIQSVKMMEGIFICAAPMCLKSFLKKADFEFHVPDVHANLLQTNLEKEEERNEPDAPNISRASAGDTQRQSQMPEMSTARAPSRPGVSQDRDERSRYHQSREQTPLRPPTLSKPPSFHGRHSYPPGDTQAENNPPQGFDRAYNWASQSRQESPGAATPLRQESDQSIQDKQQLMANAPFMFPPIPPHQGNFMMPMNMNQPLIPNAPFNYPLQQDGNPQYFSAPFQMQLPDTGSEQGSMSNVQPPAGPMSFPEGPQRPWGMRLMSNPFQSMALGQGMIDGAGDPQGGGGLAFMQAGFGGMPDGSMNTGMPDRGDGRGILAQMHMQMQMSLPPPPPTQPPPGSQQTFNRT

SEQ ID NO: 56419 - protein, 233 aa, Zea mays
  Clone ID: LIB189-013-D6_FLI.pep
SCASWIRGSRLATRRQTSRGADRDRAAMSTSRRRTLLKVIVLGDSGVGKTSLMNQYVHKKFSQQYKATIGADFVTKEVLIEDRLVTLQIWDTAGQERFQSLGVAFYRGADCCVLVYDVNSNRSFDTLNTWHDEFLNQASPSDPKTFPFILLGNKIDVDGGKSRVVSDKKAMEWCASKGNIPYFETSAKEDYNVDNAFLTVAKLALEHERDQDIYFQSVADPVPETEQRSGCAC

SEQ ID NO: 56420 - protein, 242 aa, Zea mays
  Clone ID: UC-ZMFLB73208F12_FLI.pep
VSGLSPSTEYFFKVLPFSSVQGFTEWEAKCSTRSLDHGSSQCSTQNSESMCLKVDPMQHQKKDLNVQNHQRTIQYDSPKGSTNSSENNLLCDRYSKRAKVARLDGASDNDESQLPPTSEVLPFASSNYSPSEAPSKPDLLIGTPDSASKNYVEQQYEYCVKVVRWLEHEGHMDNDFRVKFLTWFSLKATAQDRRIVGALVDVLIGDPASLVAQLVDAFKDIIYTKEKPFQTQQKDARCKIWH

SEQ ID NO: 56421 - protein, 416 aa, Zea mays
  Clone ID: LIB189-017-F9_FLI.pep
PFSVSFSHLRRWWSYVSVRSSSSGAGSQSSVADEPEAAEWALQDFYILRKDVELALERVNEVRQSAGLQQLEEDIASLENKSSDSSLWDDPSKAQGILVSLTEVKDKVKLLNDFKLQIEEAETIVKLTEELDSIDTGLLEEASKIIKALNKALDNFEMTQLLSGPYDKEGAVINISAGAGGTDAQDWADMLLRMYVRWGEKQRYKTRVVEKSPGEEAGIKSATVELEGRYAYGYLSGEKGTHRIVRQSPFNAKGLRQTSFAGVEVMPLLPEESMAVDIPEEDLEISFTRAGGKGGQNVNKVETAVRMVHIPTGIAVRCSEERSQLANKIKALSRLKAKLLVIALEQRASEIKQIRGDIVKAEWGQQIRNYVFHPYKLVKDVRTGCETSDITGVMDGELDPFIRAYLKYKLTAAATS

SEQ ID NO: 56422 - protein, 385 aa, Zea mays
  Clone ID: UC-ZMFLB73187G09_FLI.pep
PFFLRWEALRRSVHLLRPIITNAAPRITAIITDITLTSCVIPIAKELDVPCHVLFPTAATMLSLNAYYPVYLEKLKGGPEPGVIGDAVDIPGVFRVPRSALPPALLDVNKLFTKQFIDNGRAIVKADGVLVNTFDAVEPAPLAALRGGKIVPGYPPVYTIGPLKSHATKAGDKPGDALLDEWLGKQRARSVVYVAFGNRSAARLDQIREIAAGLEDSGYPFLWVLKTTKVDREDDAELAEVLGDGYLERVKGRGIVTKGWVEQEELLKHPAVGMFVSHGGWNSALEASSAGVPLLVWPQLGDHRVNAMAAVRAGIGAWAEHWSWDGEDTLVTRQEIADKVKEVMADGKLRASVAVAREEAAKAVAEGGTSYRNMHDFIAKLKGGA

SEQ ID NO: 56423 - protein, 109 aa, Zea mays
  Clone ID: LIB189-018-B5_FLI.pep
STFFNSISDICKQMKYQLQTTTDRPHPGPDGEIRSDGGEELEHGGLGLGVHADDDDEGDEAVVRHHLRLLHRPRGPLLHEPHRGRRRGGVLVVGGGLLPALALGLRLQR

SEQ ID NO: 56424 - protein, 256 aa, Zea mays; identical to SEQ ID NO: 44857
  Clone ID: UC-ZMFLB73194C12_FLI.pep

SEQ ID NO: 56425 - protein, 368 aa, Zea mays
  Clone ID: LIB189-021-F2_FLI.pep
NIASPAVEMAPRRLLVLAVVALAATAAAANSGFADSNPIRPVTDRAASALESTVFAALGRTRDALRFARFAVRYGKSYESAAEVHKRFRIFSESLQLVRSTNRKGLSYRLGINRFADMSWEEFRATRLGAAQNCSATLTGNHRMHAAAVALPETKDWREDGIVSPVKNQGHCGSCWTFSTTGALEAAYTQATGKPISLSEQQLVDCGFAFNNFGCNGGLPSQAFEYIKYNGGLDTEESYPYQGVNGICKFKNENVGVKVLDSVNITLGAEDELKDAVGLVRPVSVAFEVITGFRLYKSGVYTSDHCGTTPMDVNHAVLAVGYGVEDGVPYWLIKNSWGADWGDDGYFKMEMGKNMCGVATCASYPIVA

SEQ ID NO: 56426 - protein, 130 aa, Zea mays
  Clone ID: UC-ZMFLB73201A12_FLI.pep
NKNLDGCVYDRCYYTVALAVNSIFICAGIGDVDTKETPLPMEAALNDYKRLDYIQRHIATLKESIEYESTLELISSIYFASVFIALCSVAIIYMWHMHGSIKIMLALMDPFMQLGIKCARLLRLVSAGQL

SEQ ID NO: 56427 - protein, 455 aa, Zea mays
  Clone ID: UC-ZMFLB73206G04_FLI.pep
PNVEENLKHRKEEESPQSRGSQEGCSSSSSPSASAAGKEISPPPATPRPQQQAQSAALPPPPSPSPASTSREDDPCRTAHSGSSGNQSPEPAARNAPPSEASSPGPSEYRVCRPVGAQDAATQTDDSERDAAENHSTRVAGASTMDTTSDAEIQECHRRSSPLSPKVPETVRESPPAVCSSDAASPGGRVETLESLIRAEASRRSSFRTLEEGHMLGPVGVKLKPANLLMQLITCGFVSVKEHRGFGFIPTYRPRFTQVEFPSPVFSTPVALRHLDRIPCNTKATGSTRAPEPECFSGSLVVETKQQDEPGRGIASLKRSSSYDEDRVYRAAHPKSNTESSCEAGSFRCLPQTIRIISCKQSRSGTVLSPPASDVRNGSIQQEHSTMSSPLGSSKSASNRMADPSPPGKLSCARAESLFREEKDMIKIEERLPSGARVIIQSAPLCEEESDDSSE

SEQ ID NO: 56428 - protein, 73 aa, Zea mays
  Clone ID: LIB189-025-C12_FLI.pep
GQATGVARQRTPSLLTSQLACLRAKSRRELLAGLSAWPNTTSCSGSRRSSVMPRSTPEQSSGHQWSPTKKGRG

SEQ ID NO: 56429 - protein, 853 aa, Zea mays
  Clone ID: UC-ZMFLB73214B10_FLI.pep
VLRTRSAPAMAAAAASFSALPFLLLLLLVPSLDGASNVTYDHRSLIISGRRRLVISTSIHYPRSVPEMWPKLVAEAKDGGADCIETYVFWNGHEIAPGQYYFEDRFDLVRFVKVVRDAGLLLILRIGPYVAAEWNYGGVPVWLHYVPGTVFRTNNEPFKNHVKSFTTYIVDMMKKEQLFASQGGNIILAQIENEYGDYYEQAYGAGGKPYAMWAASMALAQNTGVPWIMCQESDAPDPVINSCNGFYCDGFQPNSPTKPKIWTENWPGWFQTFGESNPHRPPEDVAFAVARFFEKGGSVQNYYVYHGGTNFGRTTGGPFITTSYDYDAPIDEYGLRRFPKWAHLRDLHKSIRLCEHTLLYGNTTFLSLGPKQEADIYSDQSGGCVAFLANIDSANDKVVTFRNRQYDLPAWSVSILPDCRNVVFNTAKVQSQTSMVTMVPESLQASKPERWSIFRERTGIWGKNDFVRNGFVDHINTTKDSTDYLWYTTSFSVDGSYSSKGSHAVLNIDSNGHGVHAFLNNVLIGSAYGNGSQSRFSVKLPINLRTGKNELALLSMTVGLQNAGFAYEWIGAGFTNVNISGVRTGTIDLSSNNWAYKIGLEGEYYNLFKPDQTNNQRWIPQSEPPKNQPLTWYKVNVDVPQGDDPVGIDMQSMGKGLAWLNGNAIGRYWPRTSSINDRCTPSCNYRGTFIPDKCRTGCGQPTQRWYHIPRSWFHPSGNILVVFEEKGGDPTKITFSRRAVTSVCSFVSEHFPSIDLESWDESAMTEGTPPAKAQLFCPEGKSISSVKFASLGNPSGTCRSYQMGRCHHPNSLSVVEKACLNTNSCTVSLTDESFGKDLCPGVTKTLAIEADCS

SEQ ID NO: 56430 - protein, 242 aa, Zea mays
  Clone ID: LIB189-026-F11_FLI.pep
FSAPYVCSSALFSGNGSGGRYISNGKLLSRRPRGIDSKKRLWTNVLLALNVLAYVAQVASQGKLLMWGAKINSLIDRGQFWRLATSSLLHANLTHLAFNCFSLNSIGPMVEMLSGPRRYLAVYFSSALAGSLMSYRCSASPAVGASGAIFGLVGAYAVYMWRHRRFFGNSRESLEHIGRVVVLNMGMGLLSRGIDNWGHLGGLLGGVAMAWFLGPAWQYQYVAKDGRAVFKDRAPVLRLIKG

SEQ ID NO: 56431 - protein, 421 aa, Zea mays
  Clone ID: UC-ZMFLB73224C04_FLI.pep
HICILHPRFTSPPLPSKNKLSGTLETKRDMGLRGGALALLLLLFVHGGQRAAEAGGDAFVRVQGTRFVQDGKPFFANGFNAYWLMTFGADPARRGKVTSALSQAAGAGLSVARTWAFSDGGGGGGSALQYSPGRYNENTFQGLDFVLSEARKHGIKMILSLVNNYDSFGGRKQYVQWARERGQTIGSDDEFFTNPFVKGIYKNHIKAVLTRVNTITGVAYKDDPTIMAWELMNEPRCQSDVSGHAIQSWITEMAAHVKSIDGNHLLEAGLEGFYGASSARRSANPSGYQVGTDFIAWLDAHIADARAVLRKPLLVAEFGESRHDPGYSGGQRDAVFGTVYARVYDSARAGGPAAGALFWQLLAEGMDSYGDGYEVVLPQAPSTAGVIATQSRRLQGLARAFVRARKAHQGKAGKGAKGGGN

SEQ ID NO: 56432 - protein, 142 aa, Zea mays
  Clone ID: LIB189-028-F5_FLI.pep
TVTGGTSVGKKDVSYVLFVIKLLKERTTYRSTCYPLVIKYQVSVVFLDGPMAGALPLGQKVIPFFFCYVFVLNQIFDIFLLFLVKPPFLCVCGRKYHHLGNLTRHKKFECGQEKRFVCSTCGKAFKRKDQLTAHSIQHYPHQ

SEQ ID NO: 56433 - protein, 144 aa, Zea mays
  Clone ID: LIB189-030-F9_FLI.pep
RRAVAHSASRPPVLSRPSVLRLAAARLALVNKSPPQASERATLPAAATAPVPPPPRLLLTAGVGCPGSTSGDDTLPAARAPTACSVCGGSRGSGLGGFQSPLPHNRIQNPVLDFFYLPFQNFLFWHPGRSISTPFDFDSSLLID

SEQ ID NO: 56434 - protein, 245 aa, Zea mays
  Clone ID: UC-ZMFLB73214C02_FLI.pep
DGRARLASQLLAPADEPMAGADVDVGTELRLGLPGGGAAAAKKDTIDLKLKLPTAGMEEAAAAARPEPAAEKAKRPAEAPAADAEKPPAPKAQAVGWPPVRSYRRNAMTVVQAVRSKKEEEPEKQQQPAAANAFVKVSMDGAPYLRKVDLKTYGSYKDLSAALKKMFGTFVTATGNSMNEGRLVDPAGDADDVVTTYEDKDGDWMLVGDVPWEMFVDSCKRLRIMKSSEAIGLAPRTKDKCKNKS

SEQ ID NO: 56435 - protein, 341 aa, Zea mays
  Clone ID: LIB189-032-C5_FLI.pep
PLAHAVGAGNLSLELEDLSFRYLFPHSYDHVDQWLRSQEGDCKAIINLYKEQLLQALQADNELRRIAQDISIQGRYKSRFSTMKKLVKDGRKPEEVKDILGLRVILEPRCGGNSSDWGPRACHRTHEIIQAMWKEIPGRTKDYITHPKRNGYQSLHVAIDVSEPGKVRPLMEVQIRTKEMHRFAVGGEASHSLYKGGLTDPGEAKRLKTIMLAAAELAALRLRDLPGSDHVVGNCKNPAFCQLDKNGDGRISIEELTEVMEDLGAGGEDATELMHLLDANSDGSLSSDEFESFQRQIEVMRNLEDDDNHYRKILKEKLHTIDSAGLIHVYRKELSDKLLVG

SEQ ID NO: 56436 - protein, 187 aa, Zea mays
  Clone ID: UC-ZMFLB73218A01_FLI.pep
ENIKCRIYISTMDIFSCQERITIPEILEDEWFKKGYKRPEFDEQYDTTLDDVDAVFNDSEEHHVTEKKEEEPVALNAFELISMSAGLNLGNLFDSEQEFKRETRFTSKCPPKEIVRKIEEAAKPLGFDVQKKNYKLRLEKVKAGRKGNLNVATEILQVAPSLHMVEVRKARVTLWNFISSTRTFPRP

SEQ ID NO: 56437 - protein, 174 aa, Chlorella vulgaris
  Clone ID: LIB191-016-B10_FLI.pep
AGGRASSQDGVLYEEAGHGVRVHVGGGAAVLQIALAGQLDRQGDADGRAAVGHAVAEGVDVACLVLAGQPLLVAVPVLRNVLRVALGQLLDRVLNRTHAAVLAHALRGVVGVRAGAVPVALHGLGREGGNDAKLLPQPVQQPAGNHDLVPNLQGAHRPNLELPLAGHDLGVDAR

SEQ ID NO: 56438 - protein, 292 aa, Zea mays
  Clone ID: UC-ZMFLB73225B11_FLI.pep
SGLSSSAAVGIAYLLALEHVNDLVISPVDNIQLDKYIENKYLGLENGILDPSAILLSRYGYLTFMDCKTASPSYVCFSELNKSQQPQGQLPFKILLAFSGLQHNLPKKRGYNTRVSECKEAARALLHASGCEDTPNILCNVDPVVYETQKCVLEENLSRRAEHYFFEMKRVTKGRDAWAHGNLQELGQLISESGRSSILNYECGSKEMIQLYEILLKAPGALGARFSGAGFRGCCLAIVESDRAEDAAAYVRAEYEKAQPELVSRIPADRRVLVCEPGDSARVILPDPHLSS

SEQ ID NO: 56439 - protein, 175 aa, Chlorella vulgaris
  Clone ID: LIB191-030-E4_FLI.pep
VRVEGKPVLLFWYRNQIYAIEARSPAEGAYSEGFANAKFTQDYCIECPSTGTLFSLKDGTIVSWYPTNPVLRVLTPQDTCRNLEVYPVRLTQEAIEVDVSGSSSGGRLTKGGSNTSLENNNVYGLEPKQYVDIDSQTGEASTTGSTTAVAATVVVGGLAALLTGAAIYFFAFQPL

SEQ ID NO: 56440 - protein, 138 aa, Zea mays
  Clone ID: UC-ZMFLB73214C10_FLI.pep
SSRGSRGAWRRGTAPRRRATRRRPGGQCSCRPASCRCRQAAWRRRRRRRCSRRCPCGASASRSAPARSSCIGNAGSCSPCPPGDASTLLLLNLPLFKDPDICILDRIHKSARALYNQMGVIWCMKCSLHSGIGCLFFL

SEQ ID NO: 56441 - protein, 187 aa, Chlorella vulgaris
  Clone ID: LIB191-035-F1_FLI.pep
LTCKAHMLRKEGCSMSPLSPMSLHNRSDIPCQTLSQLAVIATLTSRRVPCSGQTHGMDHDAVLCVHAVLRLVKNDAGRRLHDAVRALDAALRRQAVHELDLGPGSLQHGLVHLEPLKQPLPLLRLVFLAHGRPHVCVDHVRPLHRLQRLVADANAAQPGLSGKVNCGLVRLKALWTDADKVELEPRR

SEQ ID NO: 56442 - protein, 487 aa, Zea mays
  Clone ID: UC-ZMFLB73218A06_FLI.pep
VRYTPSATNSSAVPPVAVPPKPTADTILGKQYEDVRSVYSLGKELGRGQFGVTYLCTEIASGRQYACKSISKRKLVSKADREDIRREIQIMQHLSGQPNIVEFRGAYEDKSNVHVVMELCAGGELFDRIIAKGHYTERAAATICRAVVNVVNICHFMGVMHRDLKPENFLLATKEENAMLKATDFGLSVFIEEGKMYRDIVGSAYYVAPEVLRRSYGKEIDVWSAGVILYILLSGVPPFWAETEKGIFDAILHEEIDFESQPWPSISESAKDLVRKMLTRDPKKRLTSAQVLQHQWLREGGEASDKPIDSAVLSRMKQFRAMNKLKKMALKVIASNLNEEEIKGLKQMFMNMDTDNSGTITYEELKAGLAKLGSKLSEAEVKQLMEAADVDGNGSIDYVEFITATMHRHKLERDEHLFKAFQYFDKDNSGFITRDELESALIEHEMGDTSTIKEIISEVDTDNDGRINYEEFCAMMRGGMQQPMRLK

SEQ ID NO: 56443 - protein, 95 aa, Arabidopsis thaliana
  Clone ID: LIB22-004-D12_FLI.pep
INLFDINITNPLNNNKISAMTKNSIAESSKVPKIPLWQHLIYKTRTLKNRIPIDLVRRILLQRVLVPRRLNLLLRITKRQLRQRRRRSTRSITLR

SEQ ID NO: 56444 - protein, 196 aa, Zea mays
  Clone ID: UC-ZMFLB73224A09_FLI.pep
EDPATHTAELCLGKMNRKPGDWDCRACQHLNFSRRDICQRCSEPRGVADRGGGGGGGDYASFGGRGGSSFGGGFGAAGSDVRPGDWYCSCGAHNFASRSSCFKCSAYKEEAAVNSGAGGFDGDMSRSRGYGFGSGAAGAGAGAARTTNRPGWKSGDWICTRSGCNEHNFASRMECFRCNAPRDSGSAAMTYENYLH

SEQ ID NO: 56445 - protein, 389 aa, Arabidopsis thaliana
  Clone ID: LIB22-010-E6_FLI.pep
SDKKKRKTRKSYTQEEEEKIRARRLNTKAIYQLEGRDFDFQISSPIDCVVSGKEMAVYDQSGDRNRTQIDTSRKRKSRSRGDGTTVAERLKRWKEYNETVEEVSTKKRKVPAKGSKKGCMKGKGGPENSRCSFRGVRQRIWGKWVAEIREPNRGSRLWLGTFPTAQEAASAYDEAAKAMYGPLARLNFPRSDASEVTSTSSQSEVCTVETPGCVHVKTEDPDCESKPFSGGVEPMYCLENGAEEMKRGVKADKHWLSEFEHNYWSDILKEKEKQKEQGIVETCQQQQQDSLSVADYGWPNDVDQSHLDSSDMFDVDELLRDLNGDDVFAGLNQDRYPGNSVANGSYRPESQQSGFDPLQSLNYGIPPFQLEGKDGNGFFDDLSYLDLEN

SEQ ID NO: 56446 - protein, 344 aa, Zea mays
  Clone ID: UC-ZMFLB73212D12_FLI.pep
ALRDAPSKEAHARLWADVRATLVASGFSGEYDGLLVAEEDVRSRRGNRGMKAMSVRKWPEEAAAAARFLGVAEIGAHRNGDLAVCHEHRFVSAHDHAGTSGVVEESFHQGEDVECEDDSDDDYNGILKPAFAVDGDPDFESGEPLDGFEYLRRVRWEANQIPRVKVAKIYSSAARNEQTPYMPEIPDIPKCLPDLRASKQWEDRFIVDFEETRMVLSELDNSDEPSVSSGTKISTKPGSGTEPQTDPTLTMIRSMDAVSRAATLRNYIDMIQSLDALSRNNCMWLFALCVAVHTPLDAETCASLRSLLRKCASILATKTEMDDEVVMLNILMTISGRYFGQDES

SEQ ID NO: 56447 - protein, 84 aa, Arabidopsis thaliana
  Clone ID: LIB22-016-G1_FLI.pep
SVYFPRVYDIKHLMKFCNSLHGGLNKLAELLDVERVGICHQAGSDSLLTSCTFRKLQENFFIGSMEKYSGVLYGLGVENGQIVH

SEQ ID NO: 56448 - protein, 215 aa, Zea mays
  Clone ID: UC-ZMFLB73214D12_FLI.pep
DPAYVHSKPQATGYPSLRRPSRPHRRTPLPPNLRHLSRPRLRTLQAPSHRLPSLPRPSRPRRRTPLLPSLRHPSRPRRRTPLPPSLRRPSRPRRRTLQAPSLPHTRRPSRPHRRTPLPQSLRHLSRPRRRTRLPPSLRHPSRPHRRTLQAPSHRLPSLPRPSRPHRRTLPHRSRRPPSRPPTLRRRRCLTPPARRHLTTRNRCLPYHTAVSLWSI

SEQ ID NO: 56449 - protein, 409 aa, Zea mays
  Clone ID: UC-ZMFLB73218F02_FLI.pep
VLPPHLFIVILVQVSEGLDFADRAGRAVIVTGMPFATPTDAKVRLKREYLDKQGTPSNKNTKMLTGEEWYVQQAARAVNQAVGRVIRHRHDYGAIIYCDERFVWPNYQSQMSYWLRPHIKCYSKYGEVVQGLTRFFRDKASSDPLTLEPTDCNNCIAPPANKHMLKEKLSDLAASAQDECPQITLSGNSTMRRSNFMKLAQITPANRSTLTTKHNFVSTSTKHNLPEDQLSQDTNVDITVDLAIQGHLKEHTFKSLGLKKAKTMDRSKDAVVLDDVSSKLPQNIGSRALARYQCGGPTPESKKSTIATACGKNDGACEKTEGQESNSGPAFLKLVQEKLSPAEYTEFVEYMKALKLKTMHTKDSLEAITKLFSSPGRLPLLEGFRVFVAKNHLPLYEQLVRRHNNVSST

SEQ ID NO: 56450 - protein, 320 aa, Arabidopsis thaliana; identical to SEQ ID NO: 56101
  Clone ID: LIB22-020-H8_FLI.pep

SEQ ID NO: 56451 - protein, 450 aa, Zea mays
  Clone ID: UC-ZMFLB73222D01_FLI.pep
PASLSGSASGLLRRIPSSEPSIECHGCTLHEPCSATFSSKTRNSQAGRLELVNSVFSALPMFIMCTLKIPKTIIKEIDIFRKHCLWRGNDINSKRPPLIAWNSVTQRKVNGGLGVLRLETQNEALLIKFLHKFFNHSDLPWVHLIWNNYYLTRGLPGNRSVGSFWWKSIVKLLPNFKGLATPVIGNGRLISFWDDQWSQGIPRHIFPELFSFAKNSKMTIKEVKDQEQFHDLFHLPVSDQAFDQFLVLKGSWEQIILNNVHDRWKYIWGSDKFSSQKAYRSFMGQMQTHPIYKLVWKSKCQPKHRVFYWLWLKNRLNTRNMLRRRNMELDSYSCENCLWQREETLYHLFLRCNFAKACWNSIGITPPRISNPEEASVNLKHQLNVPFSMEITILMTWSIWKSRNEWLFSNRDPSVLRCTQEFSRELRLIIHRARGEFDTSIPNWLNLWQI

SEQ ID NO: 56452 - protein, 350 aa, Arabidopsis thaliana
  Clone ID: LIB22-061-F6_FLI.pep
FHNFLVIFSQFLISFHNMDAMSSVDESSTTTDSIPARKSSSPASLLYRMGSGTSVVLDSENGVEVEVEAESRKLPSSRFKGVVPQPNGRWGAQIYEKHQRVWLGTFNEEDEAARAYDVAAHRFRGRDAVTNFKDTTFEEEVEFLNAHSKSEIVDMLRKHTYKEELDQRKRNRDGNGKETTAFALASMVVMTGFKTAELLFEKTVTPSDVGKLNRLVIPKHQAEKHFPLPLGNNNVSVKGMLLNFEDVNGKVWRFRYSYWNSSQSYVLTKGWSRFVKEKRLCAGDLISFKRSNDQDQKFFIGWKSKSGLDLETGRVMRLFGVDISLNAVVVVKETTEVLMSSLRCKKQRVL

SEQ ID NO: 56453 - protein, 348 aa, Zea mays
  Clone ID: UC-ZMFLB73226C03_FLI.pep
AQADIWRLSLSYLTPLSLRCAVELGIPTAIYRHGGAASAAELVTALSLPSTKLPFLRRLLRLLAASGVFTVDKQSSEEERYRISPVSYLLVDGIPHEDHMNHTALVLTCTSTRYIEAGIGLAEWFKRDVVTSPFEELHGATLFHESMGSLDADFHDMASEALDAHDNFGIEIAMREFRDLFEGIQSMTYCCGNFGDDKGARAIVKAFPHIKCTVLAPPKIIATKPADGAMINYVEGDMFSFIPPAQTVVLKLVLHHLTDEECVKLLAQCRKAIPSRKDGGKVIIGDIMIDHSGPMLETHLLMDIGMMTMTKGRQRDEKEWSELFTKAGFSEYKILKEFGARVAFEVYP

SEQ ID NO: 56454 - protein, 693 aa, Zea mays
  Clone ID: UC-ZMFLB73218F09_FLI.pep
TRSWDFLQQTTTAVKIDDAAGAGPARRSGNKKGKAAAPANDPSSSSPAADTIIGLLDSGIWPESPSFNDAGFGRPPSRWKGVCMAGDDFNSSNCNNKLIGARYYDLSSVRGPAPSGGGSPRDDVGHGTHTSSTAAGSAVTGASYYGLAPGTAKGGSAASRVAMYRVCSQAGCAGSAILAGFDDAIADGVDVISVSLGASPYFRPDFSADPIAIGSFHAVAKGVTVVCSAGNSGPGAATVVNAAPWILTVAATTIDRDFESDVLLGGNNSAVKGVAINFSNLDRSPKYPLITGAAAKSSSVSDTDSASHCEPGTLDSSKIRGKIVLCHHSQSDTSKLVKADELQSAGAAGCILVMNDNESSVATAYLDFPVTEVTSAAAAAIHKYIAAASEPVATITAAATVTECKPAPVVAYFSSRGPSGQTGNVLKPDIAAPGVNILASWIPASSLPPGQKQPSQFNLVSGTSMACPHVAGAAATVKAWNPTWSPAAVRSAIMTTATTLNNEREPMTTDSGSPATPYDYGAGQVHPAGALDPGLVYDAGEDDYLRFLCNYGYNASTVRLVASTLPSGFSCAANVSKDLISDLNYPSIAVTGLLGNKSAAAGRSRTVTRTVTNVGAQEAASYTVAVSAPPGLDVKVTPSKLEFTRGVKKLAFQVSFSRSGNDDDAAAAKGALSGSITWSDGKHMVRSPFVVTS

SEQ ID NO: 56455 - protein, 83 aa, Zea mays
  Clone ID: UC-ZMFLB73222E06_FLI.pep
AKRVYCLVASRIMYCLVLLSCNKVSSNHLHSNFSHKRTSPLLWRRNHIYLPGGWIVIFVFRYIISGAYDIHIACMPNKLTSHP

SEQ ID NO: 56456 - protein, 482 aa, Zea mays
  Clone ID: UC-ZMFLB73224D06_FLI.pep
ASSYSPTSAAQTFPPSPNSFRRPPLHPYDDTMRECISIHIGQAGIQVGNACWELYCLEHGIQADGQMPGDKTIGGGDDAFNTFFSETGAGKHVPRAVFVDLEPTVIDEVRTGTYRQLFHPEQLISGKEDAANNFARGHYTIGKEIVDLCLDRIRKLADNCTGLQGFLVFNAVGGGTGSGLGSLLLERLSVDYGKKSKLGFTVYPSPQVSTSVVEPYNSVLSTHSLLEHTDVAILLDNEAIYDICRRSLDIERPTYTNLNRLVSQVISSLTASLRFDGALNVDVNEFQTNLVPYPRIHFMLSSYAPVISAEKAYHEQLSVAEITNSAFEPSSMMAKCDPRHGKYMACCLMYRGDVVPKDVNAAVATIKTKRTIQFVDWCPTGFKCGINYQPPSVVPGGDLAKVQRAVCMISNSTSVVEVFSRIDHKFDLMYAKRAFVHWYVGEGMEEGEFSEAREDLAALEKDYEEVGAEFDEGEDGDEGDEY

SEQ ID NO: 56457 - protein, 188 aa, Zea mays
  Clone ID: UC-ZMFLB73226E11_FLI.pep
DEQRQIPLDILVFRLVKQYLRATPLKRLALKALSKALREDELLYLRLQFKLLEPRDGLVSLDNFRTALTRYVTDAMRESRVLEFLHALDPLAYRKMDLEEFCAAAISPYQLEALESWEEIAGTAFQHFEQEGNRVISVEELAQELSLAPTHYSIVQDWIRKSDGKLNFLGFTKFLHGVTIRGSNTRRH

SEQ ID NO: 56458 - protein, 204 aa, Zea mays
  Clone ID: UC-ZMFLB73212G11_FLI.pep
QLELTFREILNNYKREAQCKPEVFSSIYIGSTNRNGVLVSRHVGIITFYNEVFVPAAKPFLVSLISSGTHPEDKKNASGQIPGSPKPSPFPNLPDMSPKKVSASHNVYVSPLRQTKLDLLLSPSSRSFYACIGEGTHAYQSPSKDLAAINSRLNYNGRKVNSRLNFDMVSDSVVAGSLGQINGGSTSDPAAAFSPLSKKRETDT

SEQ ID NO: 56459 - protein, 429 aa, Zea mays
  Clone ID: UC-ZMFLB73214G10_FLI.pep
AHTKQPVHQGHHSPPPTTNGNSSQLRTSRHNTKTHVGGNLKLQSSMAQQQTNPEEVVLGQEVGAARVATLNRPRQLNGISDRVVYLLAQFLEKWEKDENAKFVIFKGAGRAFSAGGDLKMFYEGKSNDSCLEVVYRMYWLCYHIHTYKKTMVALVNGLVMGGGAAMVAPLKFAVVTEKTIFATPEASVGLHTDCSFSYIHSRLPGYLGEYLALTGARLNAKEMISAGLATHFVSSEKLEELEKRLLDLDTGAESAVRAVIEEFSTDVQTDEDSILNKLSTINKCFSAETVEDIIKAFESEASIDGNQWIAPVLKGLRRSSPTALKITLRSIREGRKQSLPECLTKEFRLTMNILRSVVNGDVYEGIRALSIDKDNAPKWNPTTLEEVKYEDIDRLFQPFSPELELQVPSDDSNRWSGKYENTVYGRASQ

SEQ ID NO: 56460 - protein, 420 aa, Zea mays
  Clone ID: UC-ZMFLB73218G08_FLI.pep
SFSSDQNQRTHDMTSSCLITHTSSNLTTTHLEGELVEHVVPVHLSGPECQRRELGVVDGVHVAHGLEAEASVPVVHPAALAGGAVEGVPRVELQGGLVGPQLQRPAGRGVPGLRHRPHPFAVDDVVGVVPDGAAPHDDDPADARADRRGRAEVQGRAGHGLHAPRRRQELVVQHGVPRRADPERVAQHVAAALPAQVPVHVQQQAHRRRPVQRRRVHVHAQRVGARHAVRHVRVHVPRQALLSVEAAVVEGHVRRFAAGDVLLHRPDAPAEPSVAAVDRVPAVVPVHVVDLAVEDEPAPGNSLCYAPRYRPEVRGIVDVFSDGVSAKDDISQIPFAIWEDDGHHPGAPVGEPDGEIPLPELVHPDHLAGVRGAGGQRAGREAHAQQREGQLAPRRHWRGGGGQRWLAEARERVSTQHPGA

SEQ ID NO: 56461 - protein, 263 aa, Zea mays
  Clone ID: UC-ZMFLB73222G10_FLI.pep
QAMWRRALAMVLFMAGAALLAGAAGAGAQQGVWSIITRPMFQSMLSHRGDSGCQGAFYTYDAFIEAASKFPGFGTTGDEQTRRRELAAFFGQTSHETTGGWATAPDGPFAWGYCRVKEQKQTDPPYYGRGPIQLTHKYNYRLAGQALNLNLVGDPDLVARDPVVAFKTAIWFWMTPQSPKPSCHAVMTGDWRPSATDRAAGRLPGYGLTTNIINGGLECGEDRSTDGAKAAKDRVGYYKRYCGMLGVGYGDNMACGSQKPYGG

SEQ ID NO: 56462 - protein, 386 aa, Zea mays
  Clone ID: UC-ZMFLB73224A12_FLI.pep
IIHPRISPLNPHPKERGISLSHPITNPPPPCLGTRSSVGKQGSLLAPPRSERSHGHAVLPLPGAAANGLLLLLVLHVRPLRSRRRFLLLLTHFAVLLLPRLPVLRRGLPRGDGRAAAPRPPAPPRRPPRRRLPRLALQPRHRSPPLPARRRRRRWLLLSRRRHRQQLRAVLRRRGGVGPPPAPGEHVGLPHGLRLRAAAGAAGPDGGRRRSGGARPRRAAGVQGRRGLHARAPRRRRPRRGRRALRRLQGGLRAGRRGQGDALRPHLPCRLHPALARAPQLLPRLPPRDARRQRRPARCRRRRRGRGRQGRPHHLEAPRRRVRGREVRRRAEARREGAPRGVHGDGKRVQLQQRPRAQADLVGRQAGRGHGQGHRPPLPPQRLRLL

SEQ ID NO: 56463 - protein, 367 aa, Zea mays
  Clone ID: UC-ZMFLB73224D08_FLI.pep
RTLAMASEVVRPSDAELLKAQADIWRLSLSYLTPLSLRCAVELGIPTAIYRHGGAASAAELVTALSLPSTKLPFLRRLLRLLAASGVFTVDKQSSEEERYRISPVSYLLVDGIPHEDHMNHTALVLTCTSTRYIEAGIGLAEWFKRDVVTSPFEELHGATLFHESMGSLDADFHDMASEALDAHDNFGIEIAMREFRDLFEGIQSMTYCCGNFGDDKGARAIVKAFPHIKCTVLAPPKIIATKPADGAMINYVEGDMFSFIPPAQTVVLKLVLHHLTDEECVKLLAQCRKAIPSRKDGGKVIIGDIMIDHSGPMLETHLLMDIGMMTMTKGRQRDEKEWSELFTKAGFSEYKILKEFGARVAFEVYP

SEQ ID NO: 56464 - protein, 910 aa, Zea mays
  Clone ID: UC-ZMFLB73226G11_FLI.pep
PMPPASNRTDLGASVLNDHWVSVTSGSEDYSFKHMRKNQYEESLFRCEDDRFELDMLLESVNAATKRVEELIEKMQDNSVKPESPIRMDEHLTPLNLRCIERLYGDHGLDVMDVLRKNASVALPVILTRLKQKQEEWSRCRSDFNKVWAEIYAKNYHKSLDHRSFYFKQQDTKNLSTKSLLTEIKEINEKKRKEDDVLLAIAAGNRRPIVPNMSFEYVDSEIHEDLHKIIKYSCGEICNSSDQLDKVMRIWTTFVEPILGVQRKHGSEDPDLVKPKSRTTKSGIANVGESNTGAGIVSKHNNDDESEQGLPSRARIANGVAANAQNGFHDADRIARRGEESLNVTLNGRVHGAASADETPSLSTQNIASTERSAENAAVVRTEQHKANLELTPGVNGSRSSHGAVEVAGEGKAVNETLPSAVGGETGRLGPSFNGISEGIKGRLNNDGSAPHISKVEREEGELSPNGDFDEDHFVPFEDGTSKGKEGSTSRSFQGRHGEVVPSAEAAGENDADADDEGEESAQRSTEDSENASEAGEDASGSESGDGEECFREDHDEEEEDMDHDDQDTKAESEGEAEGTTETHDVEGGISLPLSERSLYSVKPLAKHVPTALHDREKFSRIFYGNDSFYVLFRLHQILYERLLSAKTNSFTAEKKWRNSKDTNPPDLYAKFMSALYNLLDGSSDNTKFEDDCRAIIGTQSYVLFTLDKLIYKVVKQLQAIATDEMDNKLLQLYLYEKSRSPGRFFDLVYHENARVLLHDESIYRFECCSSPTRLSIQLMEYGHEKPEVTAVSIDPNFSSYLFGEYLCSTSDKKLSEGVYLARNKRKYSDNDEPSDFLKAMDGIKVVNGLECKISCKTSKVSYVLDTEDFLSRLRKRRKILRGGSVSDSSQFSKIYAAKVQRFNRFLSKA

SEQ ID NO: 56465 - protein, 621 aa, Arabidopsis thaliana
  Clone ID: LIB24-075-C11_FLI.pep
KKMFDGGVPEQIHRFIASPPPPPPLPPHQPAAERSLPFPVSFSSFNTNHQPQHMLSLDSRKIIHHHHHHHHHDIKDGGATTGEWIGQTDHDDSDNHHQHHHHHPWCSDEVLALLRFRSTVENWFPEFTWEHTSRKLAEVGFKRSPQECKEKFEEEERRYFNSNNNNNNNTNDHQHIGNYNNKGNNYRIFSEVEEFYHHGHDNEHVSSEVGDNQNKRTNLVEGKGNVGETVQDLMAEDKLRDQDQGQVEEASMENQRNSIEVGKVGNVEDDAKSSSSSSLMMIMKEKKRKKRKKEKERFGVLKGFCEGLVRNMIAQQEEMHKKLLEDMVKKEEEKIAREEAWKKQEIERVNKEVEIRAQEQAMASDRNTNIIKFISKFTDHDLDVVQNPTSPSQDSSSLALRKTQGRRKFQTSSSLLPQTLTPHNLLTIDKSLEPFSTKTLKPKNQNPKPPKSDDKSDLGKRWPKDEVLALINIRRSISNMNDDDHKDENSLSTSSKAVPLWERISKKMLEIGYKRSAKRCKEKWENINKYFRKTKDVNKKRPLDSRTCPYFHQLTALYSQPPTGTTATTATTATSARDLDTRPEENRVGSQDPDISVPMHVDGDGAGDKSNVQFSGFDLEF

SEQ ID NO: 56466 - protein, 452 aa, Zea mays
  Clone ID: UC-ZMFLB73224B05_FLI.pep
EQVLEGANASAVEQTVPINTPALTVQEIVNRIRANPGDPRILETQEPLQDLVRGVLKVLSSRTAPLGAKGWKALVAYEKSNKSWFWVGPAPSVSSYDDPDEETSAEAWSIPHKMLVKLVDAFSNWLKSGQETLKQIGSLPPPPPPNPANLDLKERFKELKAQKSLNTISPSSDEARTYFQREEFLRYSIPDRAFCYTAADGEKSIVAPLRRGGGKPTAKARGHPMLLPDRPPHVTILCLVRDAASRLPARTGTRADVCTLLRDSQYLNHEEANKEAAINQVVSGALDRLHYERDPCVLYDNDKKLWTYLHRGREEEDFEDDGTSSTKKWKRPRRDVSDAAEPGAANDDIDDDGAGTPPSNNVKKQKTTLSGEAANDEGNHPTQNPASGGLEGDSDLNAVPSSKFFEEPCGDAYIDARPDDGGPNSVDAKPGSTADDNTALPGNTGMDATTPP

SEQ ID NO: 56467 - protein, 338 aa, Arabidopsis thaliana
  Clone ID: LIB24-080-D11_FLI.pep
ATINDGPGCLMLKCPDPSCPAAIGRDMIDKLASKEDKEKYYRYFLRSYVEVNREMKWCPAPGCEHAIDFAGGTESYDVSCLCSHSFCWNCTEEAHRPVDCDTVGKWILKNSAESENMNWILANSKPCPKCKRPIEKNHGCMHMTCTPPCKFEFCWLCLNAWTEHGERTGGFYACNRYEAAKQEGLYDEAERRREMAKNSLERYTHYYERWASNQVSRQKAMGDLQKMQSEKLGKLSDIQCTPESQLKFIAEAWLQIIECRRVLKWTYAYGYYLQDHAKKPFFEYLQGEAESGLERLHKCVEKDIEVFELAEGPSEEFNHFRTKLTGLTSIQKPSLKIW

SEQ ID NO: 56468 - protein, 101 aa, Zea mays
  Clone ID: UC-ZMFLB73224F08_FLI.pep
DFFCSVVHTYYEVSLHRGDVHGRKGGGKQAPGATAVTMLNILQLSPYLQSRAADEISLAVKWGLIVILYHLEWLRVATGAVKVPHLVVCPFKVAHPSSCIK

SEQ ID NO: 56469 - protein, 377 aa, Arabidopsis thaliana
  Clone ID: LIB24-090-A8_FLI.pep
ETDLIPFLLLLLSSKPLVFVAMSLVSDLINLNLSDSTDKIIAEYIWVGGSGMDMRSKARTLPGPVTDPSQLPKWNYDGSSTGQAPGEDSEVILYPQAIFKDPFRRGNNILVMCDAYTPAGEPIPTNKRHAAAKVFSNPDVAAEVPWYGIEQEYTLLQKDVKWPVGWPIGGYPGPQGPYYCGIGADKSFGRDVVDSHYKACLYAGINISGINGEVMPGQWEFQVGPAVGISAADEIWVARYILERITEIAGVVVSFDPKPIPGDWNGAGAHCNYSTKSMREEGGYEIIKKAIDKLGLRHKEHIAAYGEGNERRLTGHHETADINTFLWGVANRGASIRVGRDTEKEGKGYFEDRRPASNMDPYIVTSMIAETTILWNP

SEQ ID NO: 56470 - protein, 860 aa, Zea mays
  Clone ID: UC-ZMFLB73219B02_FLI.pep
ASVSKAMFETIARNILLERTDCTLELYEGSGSNWRLTKSGTPGNIGSFEDILFANNDMEDSPVIVALFPACRESQLYVGLSFLDMTNRKLGLAEFPEDSRFTNVESALVALGCKECLLPADCEKSIDLNPLQDVISNCNVLLTEKKKADFKSRDLAQDLGRIIRGSVEPVRDLLSQFDYALGPLGALLSYAELLADDTNYGNYTIEKYNLNCYMRLDSAAVRALNIAEGKTDVNKNFSLFGLMNRTCTVGMGKRLLNRWLKQPLLDVNEINNRLDMVQAFVEDPELRQGLRQQLKRISDIDRLTHSLRKKSANLQPVVKLYQSCSRIPYIKGILQQYNGQFSTLIRSKFLEPLEEWMAKNRFGRFSSLVETAIDLAQLENGEYRISPLYSSDLGVLKDELSVVENHINNLHVDTASDLDLSVDKQLKLEKGSLGHVFRMSKKEEQKVRKKLTGSYLIIETRKDGVKFTNSKLKNLSDQYQALFGEYTSCQKKVVGDVVRVSGTFSEVFENFAAVLSELDVLQSFADLATSCPVPYVRPDITASDEGDIVLLGSRHPCLEAQDGVNFIPNDCTLVRGKSWFQIITGPNMGGKSTFIRQVGVNVLMAQVGSFVPCDQASISVRDCIFARVGAGDCQLHGVSTFMQEMLETASILKGASDKSLIIIDELGRGTSTYDGFGLAWAICEHLMEVTRAPTLFATHFHELTALAHRNDDEHQHISDIGVANYHVGAHIDPLSRKLTMLYKVEPGACDQSFGIHVAEFANFPEAVVALAKSKAAELEDFSTTPTFSDDLKDEVGSKRKRVFSPDDITRGAARARLFLEEFAALPMDEMDGSKILEMATKMKADLQKDAADNPWLQQFF

SEQ ID NO: 56471 - protein, 177 aa, Arabidopsis thaliana
  Clone ID: LIB24-108-D12_FLI.pep
HKTKQTPKKTEMGLVTDEVRARAEKYTGDEICREKTKEFLKEVSMPNGLLPLKDIEEVGYDRETGIVWLKQKKSITHKFEAIGKLVSYATEVIAQVEVGKIKKLTGVKAKELLIWVTLNELVLEQPTSSGKINFRTPTGLSRTFPVSAFVVPEVEKPATEKNNGTTEVKEAVAVTDA

SEQ ID NO: 56472 - protein, 335 aa, Zea mays
  Clone ID: UC-ZMFLB73222H09_FLI.pep
QTNRLLLFFAVACLVLAAASFAFAVSTSRNRQSLPQPPPTVAFRCGRAEDSLRSFLAASSHGNFSAGDREKVLAVVGVHTEHGNFSAARRAALRATWFPLNPEGIVSLEHGTGLSFRFVARRPKDKDKMEDLQKEADTYHDFLFIDADEATKPPQTMLAFFKAAYYMFNAEFYVKASDDIYLRPDRLAALLAKERPQHKTYIGCMKKGPVVNDPNLKWYESSWELLGNEYFMHASGSLYALSSEVVEALATAKSDSLRMFDYEDVTIGAWMLAMNVKHEDNRAMCDSVCTPTSIAVWDSKKCSGTCNVADKIKQLHNTTVCSKSPTLPPEVEEEE

SEQ ID NO: 56473 - protein, 78 aa, Arabidopsis thaliana
  Clone ID: LIB24-131-G6_FLI.pep
YKNKIQIYQILKDTLLFFFRFAFASLLLLCQFLDLALKSLHILHSFFQHVCSVGLLIHVRNKLLQPPNPITYSRSSHP

SEQ ID NO: 56474 - protein, 198 aa, Zea mays
  Clone ID: UC-ZMFLB73224E01_FLI.pep
GEPDTANRIRRQGEREEMGLTFTKLFSRLFAKKEMRILMVGLDAAGKTTILYKLKLGEIVTTIPTIGFNVETVEYKNISFTVWDVGGQDKIRPLWRHYFQNTQGLIFVVDSNDRDRVVEARDELHRMLNEDELRDAVLLVFANKQDLPNAMNAAEITDKLGLHSLRQRHWYIQSTCATTGEGLYEGLDWLSSNIATKS

SEQ ID NO: 56475 - protein, 171 aa, Arabidopsis thaliana
  Clone ID: LIB24-135-G8_FLI.pep
AIKPTQSQISLNLETSRKTVSMAPKAEKKPAEKKPASEKPVEEKSKAEKAPAEKKPKAGKKLPKEAGAGGDKKKKMKKKSVETYKIYIFKVLKQVHPDIGISSKAMGIMNSFINDIFEKLAQEASKLARYNKKPTITSREIQTAVRLVLPGELAKHAVSEGTKAVTKFTSS

SEQ ID NO: 56476 - protein, 116 aa, Zea mays
  Clone ID: UC-ZMFLB73226H11_FLI.pep
LPLGDFHENKYYLFDTKHRKSGLPYKLYPRSGQSREGLCLHSGQEQNSYSKTPEMLFIFESMQNTPHIRNIIIESMPFLFSFFWEIFASLSPPICKRLLLGPQHMVNKYTPAGRKL

SEQ ID NO: 56477 - protein, 361 aa, Arabidopsis thaliana
  Clone ID: LIB24-135-H4_FLI.pep
GNRWPREETLALLRIRSDMDSTFRDATLKAPLWEHVSRKLLELGYKRSSKKCKEKFENVQKYYKRTKETRGGRHDGKAYKFFSQLEALNTTPPSHPHAHQPEQKQQQQPQQEMVMSSEQSSLPSSSRWPKAEILALINLRSGMEPRYQDNVPKGLLWEEISTSMKRMGYNRNAKRCKEKWENINKYYKKVKESNKKRPQDAKTCPYFHRLDLLYRNKVLGSGGGSSTSGLPQDQKQSPVTAMKPPQEGLVNVQQTHGSASTEEEEPIEESPQGTEKPEDLVMRELIQQQQQLQQQESMIGEYEKIEESHNYNNMEEEEDQEMDEEELDEDEKSAAFEIAFQSPANRGGNGHTEPPFLTMVQ

SEQ ID NO: 56478 - protein, 444 aa, Zea mays
  Clone ID: UC-ZMFLB73216B09_FLI.pep
TMRPHAVGTGGGGVGRRKAGAAAAAASREWMVVPASGPARVEEAGKHAVMARTGLPARDLRVLDPLLSYPSTILGRERAIVVNLERVKALITATEVLLPNTKDPAFARFVRDLQTRVLASSSDQAAEFTDMEGESSNVASPFPLPSASKGHEMEMTKKTTAVVPEMTSSSSMPNLAIAKDGNTNVLPFEFRALEVCLESACRSLEDETSTLEQEAYPALDELTSKISTLNLERVRQIKSRLVAISGRVQKVRDELEHLLDDEMDMAEMYLTEKLTQQEISEASSRAEVDDPSQTEEDRDEDYRSEPDGSNDSFIGYKPNIEELEMLLEAYFVQIDGTLNKLSHLREYVDDTEDYINIMLDDKQNQLLQMGVMLSTATVVITAGVAVVGLFGMNIGISLYADPTTEEETRAANRKFWETTFGTVAGCVILYIIAMGWGKRSGLLQ

SEQ ID NO: 56479 - protein, 152 aa, Arabidopsis thaliana
  Clone ID: LIB24-136-F6_FLI.pep
SQQSKASNFSLSRILKMARTKQTARKSTGGKAPRKQLATKAARKSAPATGGVKKPHRFRPGTVALREIRKYQKSTELLIRKLPFQRLVREIAQDFKTDLRFQSSAVAALQEAAEAYLVGLFEDTNLCAIHAKRVTIMPKDIQLARRIRGERA

SEQ ID NO: 56480 - protein, 407 aa, Zea mays
  Clone ID: UC-ZMFLB73224B07_FLI.pep
KKDGENFHEMYNCNSKAVPCSLLAHEHHRHLKTQRTESAGNLKVCTLPDQQTANELADKSNGDLLTYGPKPKKGSCNRRSLYLFEKLTIPSKSQSAYPKNSASSGKSSGFGVCMYGTNIGSQLFGAQNQSSSKTETLHSDALIGSKSSAGIASLSAQKDNGCPAPAPAPAPDEAKSEQLAAPSSNTKQGGESAYSKEDGSHNLNEGHDVSSKAAIGSKQPCMPGAGITNLDLILSQMSRMRNQIPSGGVTQPPIGAEPSDRWLKRLQLGVPDPDVLGSKTKRPKVGDSPPPPRQINRSFDVALPCNPGKQEEQSLNGGGKVQGRAPPIPEKSVNRWIGRWCQGGTPVFREGPGQGRQATKPAGRLSEELEGQFFPSTAAMAMMGRAMHKLRPCEQQQKGPFVVWKID

SEQ ID NO: 56481 - protein, 336 aa, Arabidopsis thaliana
  Clone ID: LIB25-015-E3_FLI.pep
KMGYMCDFCGEQRSMVYCRSDAACLCLSCDRNVHSANALSKRHSRTLVCERCNAQPASVRCSDERVSLCQNCDWSGHDGKNSTTTSHHKRQTINCYSGCPSSAELSSIWSFCMDLNISSAEESACEQGMGLMTIDEDGTGEKSGVQKINVEQPETSSAAQGMDHSSVPENSSMAKELGVCEDDFNGNLISDEVDLALENYEELFGSAFNSSRYLFEHGGIGSLFEKDEAHEGSMQQPALSNNASADSFMTCRTEPIICYSSKPAHSNISFSGITGESNAGDFQDCGASSMKQLSREPQPWCHPTAQDIIASSHATTRNNAVMRYKEKKRLASLTSE

SEQ ID NO: 56482 - protein, 94 aa, Zea mays
  Clone ID: UC-ZMFLB73224E04_FLI.pep
LGMTAQCSHRNTRHLFLQFKDQLDGQHCNMYMVSSGHKACYLPSIQRFDILADCFSIQQFVTRVININLTKFEVFRSTVLAPFEPQLRYDFFLE

SEQ ID NO: 56483 - protein, 254 aa, Arabidopsis thaliana; identical to SEQ ID NO: 38866
  Clone ID: LIB25-016-F11_FLI.pep

SEQ ID NO: 56484 - protein, 347 aa, Zea mays
  Clone ID: UC-ZMFLB73213B10_FLI.pep
GEATTSCFHACSCSARCNDVCVHSYNRALHRRLLRHAGQQPAVQQRRGAALQVQGHQRHAHLLPRRQSPRRPAQLRHRAHPRHRQRRRRPGPARQERLVRGLVGAEQRAALLPRRRHQVRRGGQRGAGRRHAQPPPGDAQPGRRPGARRLPGHQVLHVGALRRGRQLVPALQRLLRAGLHGGRRALPGRHRRAAARQRVPLLRVPGQPARHQPGLRHVPAGHHRQGQRQRPQLQQPVRRHGGRRRRRAREGRRAQRQGRRVRERLALGRRLRGQRRQRAEIQPGTHRPRRPRHAQEDRPAGDLRLRHVQREPEGRRSHGEELRPLLRQQAARVPDPVQLIKSGGSEE

SEQ ID NO: 56485 - protein, 161 aa, Arabidopsis thaliana
  Clone ID: LIB25-022-H12_FLI.pep
NFLFPRKSERKFTMAPRAEKKPAEKKTAAERPVEENKAAEKAPAEKKPKAGKKLPPKEAGDKKKKRSKKNVETYKIYIFKVLKQVHPDIGISSKAMGIMNSFINDIFEKLAQESSKLARYNKKPTITSREIQTAVRLVLPGELAKHAVSEGTKAVTKFTSS

SEQ ID NO: 56486 - protein, 593 aa, Zea mays
  Clone ID: UC-ZMFLB73219G02_FLI.pep
STATTRLLSSQSVWPSMAGQTSKAKEAGKDDREEPGAEAAKEKLVPSHQQQESPASVVDKDSSGVSSVPGDESPVLEGDSVELKVEENLDGNGNKENKTSQKSSTSDGFASAKVSDGTSSLRKTSGSVAMSTRADFTESGKSSMCRASTASDISDESSCSSMSSATTKPHKGNDSRWEAIHVVKSRDKVLGLNHFRLLKKLGSGDIGSVYLSELSGTRSYFAMKVMDKTSLASRKKLLRAQTEREILQSLDHPFLPTLYTHFETDKFSCLVMEFCPGGDLHTLRQRQPGKYFSEQAAKFYVAEVLLALEYLHMLGIIYRDLKPENVLVREDGHIMLSDFDLSLRCSVSLTVIKSANPGLDALQRNNAAYCAQPACIEPSCIQPSCVAPTTCFGPRFFSKSKSKSKSKPKKEKSKPDGPNQENLFPELIAEPTDARSMSFVGTHEYLAPEIIKGEGHGSAVDWWTFGIFLYELLFGKTPFKGSGNRATLFNVVGQPLRFPESPIVSFSARDMIRGLLVKDPQHRLGYKRGATEIKQHPFFEGVNWALIRCASPPDIPKPLELECRPKQVPSANGKVAPVANQKGPDNYLEFEFF

SEQ ID NO: 56487 - protein, 110 aa, Arabidopsis thaliana
  Clone ID: LIB25-027-A10_FLI.pep
KEWLSEMILAGKRFCGEEWSKLKVKYPTFKDENLLRYCFSSAYIISMLHDSLGVALDDERIKYASKAGEEDIPLDWALGAFILNTATATFDYSGKSRKILDLSNVAKYKI

SEQ ID NO: 56488 - protein, 144 aa, Zea mays
  Clone ID: UC-ZMFLB73223C01_FLI.pep
AGSIEGKVVEIGLTSTSLINPEKLPVIVPNSLFSSQMIVNRSRANWRASVTKIPIRIEDIEKVPSASEEIKTMLRSNQNVSFDSDVPYCYLSRLESSYGELIIGCNLKNMRKDEWLSAQQEILLGAARIIKSHGIELGSTMQCC

SEQ ID NO: 56489 - protein, 171 aa, Arabidopsis thaliana; identical to SEQ ID NO: 56475
  Clone ID: LIB25-044-B10_FLI.pep

SEQ ID NO: 56490 - protein, 203 aa, Zea mays
  Clone ID: UC-ZMFLB73224B11_FLI.pep
VTGLDKKKASVFFKTTADGYSLCAKEMTKLSGISDIIPEMEICDFDFEPCGYSMNAVHGPALSTIHVTPEDGFSYASYEVMGFNPGSFSYGDLVKRVLRCFGPTEFSVAVTIFGDRDNAKTWGTKLDAEAYACSNMVEQVLPFGGLLIYQSFTVTAETTHGSPRSVLHNFAGDIVKNRSESDAPWEADAVDESEERDVKKMKC

SEQ ID NO: 56491 - protein, 462 aa, Arabidopsis thaliana
  Clone ID: LIB25-050-H1_FLI.pep
SVATAKSSTAVMSSIPPFLSKTYDMVDDPLTDDVVSWSSGNNSFVVWNVPEFAKQFLPKYFKHNNFSSFVRQLNTYGFRKVDPDRWEFANEGFLRGQKQILKSIVRRKPAQVQPPQQPQVQHSSVGACVEVGKFGLEEEVERLQRDKNVLMQELVRLRQQQQVTEHHLQNVGQKVHVMEQRQQQMMSFLAKAVQSPGFLNQFSQQSNEANQHISESNKKRRLPVEDQMNSGSHGVNGLSRQIVRYQSSMNDATNTMLQQIQQMSNAPSHESLSSNNGSFLLGDVPNSNISDNGSSSNGSPEVTLADVSSIPAGFYPAMKYHEPCETNQVMETNLPFSQGDLLPPTQGAAASGSSSSDLVGCETDNGECLDPIMAVLDGALELEADTLNELLPEVQDSFWEQFIGESPVIGETDELISGSVENELILEQLELQSTLSNVWSKNQQMNHLTEQMGLLTSDALRK

SEQ ID NO: 56492 - protein, 145 aa, Zea mays
  Clone ID: UC-ZMFLB73224E07_FLI.pep
KKETDIGPERYISSHLEKGEAAAMGAGAGSLGARGGTDDVRVTWVDDTEAAHPVVLAAGSAKINIVSVEMVHTNFGQHGVVLNLRLPKWRAVVCDDDQLSLGVAQRLEDGLVAQGVLAALHHQLQLVVDALCALLRLLRGSHRIE

SEQ ID NO: 56493 - protein, 361 aa, Zea mays; identical to SEQ ID NO: 42448
  Clone ID: UC-ZMFLB73224G06_FLI.pep

SEQ ID NO: 56494 - protein, 268 aa, Arabidopsis thaliana
  Clone ID: LIB25-081-D3_FLI.pep
MEKRSSIKNRGVLRLPPGFRFHPTDEELVVQYLRRKVTGLPLPASVIPETDVCKSDPWDLPGDCESEMYFFSTREAKYPNGNRSNRSTGSGYWKATGLDKQIGKKKLVVGMKKTLVFYKGKPPNGTRTNWVLHEYRLVDSQQDSLYGQNMNWVLCRVFLKKRSNSNSKRKEDEKEEVENEKETETEREREEENKKSTCPIFYDFMRKDTKKKRRRRRCCDLNLTPATCCCCSSSTSSSSVCSSALTHTSSNDNRQEISYRENKFCLFL

SEQ ID NO: 56495 - protein, 295 aa, Zea mays
  Clone ID: UC-ZMFLB73228E11_FLI.pep
CSNIYYINDRLDKRTWTYIFGACCATTVFIPSFHNYRIWSFLGLGMTTYTAWYLAIAALLNGQAEGVAHSGPTKLVLYFTGATNILYTFGGHAVTVEIMHAMWKPAKFKYIYLLATLYVFTLTLPSSAAMYWAFGDELLTHSNAFSLLPKTRWRDAAVILMLIHQFITFGFACTPLYFVWEKVIGMHDAKSIFKRALARLPIVVPIWFLAIIFPFFGPINSAVGALLVSFTVYIIPALAHVLTYRTASARMVRIHMHACICIALHPRRLANNNNGVLWPGRPSRCLMPTGSGTSK

SEQ ID NO: 56496 - protein, 398 aa, Arabidopsis thaliana
  Clone ID: LIB25-093-E6_FLI.pep
VSMASATSVIAWGSGEDGQLGLGTDEEKELASVVDALEPFNVRSVVGGSRNSLAICDDGKLFTWGWNQRGTLGHPPETKTESTPSLVKSLANVKIVQAAIGGWHCLAVDDQGRAYAWGGNEYGQCGEEPSKDETGRPVRRDIVIPKRCAQQLTVRQVAAGGTHSVVLTREGYVWTWGQPWPPGDIKQISVPVRVQGLENVRLIAVGAFHNLALKEDGTLWAWGNNEYGQLGTGDTQPRSYPIPVQGLDDLTLVDIAAGGWHSTALTNEGEVYGWGRGEHGRLGFGDNDKSSKMLPQKVNLLAGEDIIQVSCGGTHSVALTRDGRIFSFGRGDHGRLGYGRKVTTGQPLELPIHIPPPEGRFNHTDEEDDGKWIAKHVACGGRHTLAIVEWKYDQEETE

SEQ ID NO: 56497 - protein, 254 aa, Arabidopsis thaliana; identical to SEQ ID NO: 38866
  Clone ID: LIB25-111-C9_FLI.pep

SEQ ID NO: 56498 - protein, 360 aa, Zea mays
  Clone ID: UC-ZMFLB73216H08_FLI.pep
TIDLDQDEFKYWFKILSDHSPDLVDKAVASEGGTDDAKRRGDAFAHAFSAHLARLMEEPAAYGKFGLANLLELREECLREFQFVDAYISIKQRENEASLAVLPDLLMELDSMNEEARLLALIEGVLAANIFDWGSRACVELYHKGTIIEIYRMSRKKMQRPWRIDDFDMFKKRMLTDRKDQSYKRALLFVDNSGADVVLGMLPLARELLRHGTEVVLVANSLPALNDVTANELPEVIAEASKHCGILRKAAEAGGLIVDAMAGIQDDLKDETVSVPLMVVENGCGSPCIDFRQVSSELAAAAKDADLLILEGMGRSLHTNLNARFKCDALKLAMVKNQRLAEKLFNGSLYDCICKFEPVP

SEQ ID NO: 56499 - protein, 489 aa, Zea mays
  Clone ID: UC-ZMFLB73220F11_FLI.pep
SPNHKKEPSVGQNVETGRVVEWLRNLGLSKYEEVFIREEVDWETLQWLTEEDLLGIGISSLGPRKKIIHALGELLKKHDDPSEMEAVLNSGNTKKTKLPMNGNKLITEYFQCSSFDQRQRRVCKANKPSNLNEKKISSAKVPTRRTAGKGKIKDTPLWCCIPGTPFRVDAFRYLRGDCSHWFLTHFHVDHYQGLTRSFCHGKIYCSSITASLVHHKIGIPWDRLHVLTLNEKLNIAGVNLICFDANHCPGSIIILFEPPNGKAVLHTGDFRFSSKMANNPVLQSSCVHTLILDTTYCNPRYDFPSQEIVIQFVIEAIQAEAFNPKTLFLIGSYTIGKERLFMEVARLLQKKVYVGAAKLQILKHLELPQEIMHWFTANEAESHIHVVPMWTLASFKRMKYLSNQYAGRYDLIVAFCPTGWAFGKGRKKTPGKRWQQGSIIRYEVPYSEHSSFTELQQFVKFISPEHIIPSVNNDGPESANAMLAQLLNE

SEQ ID NO: 56500 - protein, 524 aa, Glycine max
  Clone ID: LIB3-01-B9_FLI.pep
GEYLAENKFTPQPNTNTFSFFLSSILIPFFFFSLPSFGIEFSISMNSRSQDQRSRPAKPATIHGCALSGDLVGLQRLLRDNPSLLNERNPVMAQTPLHVSAGHNRTEIVKFLLDWQGTDKVEMEAKNMYGETPLHMAAKNGCNEAAQLLLACGATVEARANNGMTPLHLAVWYSLRAEEFLTVKTLLEYNADCSAKDDEGMTPLNHLSQGPGTEKLRELLLWHLEEQRKQRAIEACSETKAKMDELEKELSNIVGLNDLKVQLRKWAKGMLLDEKRRSLGLHVGRRRPPHMAFLGNPGTGKTMVARILGKLLHMVGILPTDKVTEVQRTDLVGEFVGHTGPKTRRKIKEAEGGILFVDEAYRLIPMQKSDDKDYGLEALEEIMSVMDSGKIVVIFAGYCEPMKRVIASNEGFCRRVTKFFQFNDFNSEELAQILHIKMNNLAEDSLLYGFMLHPDCCIKALAALIERETTEKQRKETNGGLVDTMLVNARENLDLRLSFDCMDTEELLTITLVDLEAGLQQLTQ

SEQ ID NO: 56501 - protein, 180 aa, Glycine max
  Clone ID: LIB3028-001-B2_FLI.pep
SISTTVNATRVSDLESPTSTLSENNAPPINITSVIEFVGSSERGTVKEEGEQEWNKLGYHESFTHLGEYKDGKENSMPFTSSLHELTMTMATTWGSSTSGAHAHAHVAEEGCFTNLLLNANSGARSLSPQDGGESNNCHDNARNSGSGSSNADLYEENKNYWNNILNLMNYSSPSDSPMF

SEQ ID NO: 56502 - protein, 233 aa, Zea mays
  Clone ID: UC-ZMFLB73224B12_FLI.pep
TQRRTSAAGEHCKPSCRGPERRPEEGDVACDVTGSIRRRNRRRRRRRKRPEPAAEQPPRRGAVRPVVLRRLGEGAVRRLQLYDDVVVVCHLPTAAAAARGSKKERKGGRHGGGGGQVRVLRVHGGVHAGVHRGGARPVPGPLGLRPLRRGGGRRDPARGDHHHGRGARPPRRVRARAALPEGARGGRPRGGRGAAAPPLPRLAARVACAAATEPEGGRRARLPRWSRRLKLLA

SEQ ID NO: 56503 - protein, 122 aa, Glycine max
  Clone ID: LIB3028-002-G9_FLI.pep
RCWSPELHSRFIKALEVLGGSQAATPKQIRELMRVDGLTNDEVKSHLQKYRLHTQRVPVATAANFSRSAVDLGGLWMHNESLKGGSSGSPQGPLQLATQSGEATSQTEGDNMIDDDDVKSDL

SEQ ID NO: 56504 - protein, 192 aa, Zea mays
  Clone ID: UC-ZMFLB73224E08_FLI.pep
SLEFLFNNAPEAAKWLKDNSELSFEEKYRSDRSSWLALYPVPFLFSGSLKFQAQTEEIKKYYQHFPQLAVQEIWDNNGQRRVHLKLALGSLSEIWTSVLNITGPLSNWSFADNMLPAPQTVSGGPPSYICRLSGKSDVDWSFWLEANSSESLRVDVAVLDQYLVDSTKKLKSLFPSWADLTAFTTFFSTYHL

SEQ ID NO: 56505 - protein, 272 aa, Glycine max
  Clone ID: LIB3028-049-C11_FLI.pep
VAHGASRLALNCNGWLPLDIARMWGRHWLEQLLAPSSDATMPTFSHSNYLSLPLMSVLNIAREYGLQSSTASSDEIDFCAVCLERPCSVAAEGCGHELCVRCALYLCSTNNVSSEMVGPPGSIPCPLCRHGVVSFVKLPGSQAKENKLHVSLGLCTPCMLHPRDLDKPSLSHTPEVGRNRVASVPFEILCPVTCSPFPSMAIPLCTCNDGPCPSFEPREVETQDGLPHHSQASTVDQDKIEGPRLDKTTCSSMFWGRRSCSREHQCNSEINA

SEQ ID NO: 56506 - protein, 721 aa, Zea mays
  Clone ID: UC-ZMFLB73224G07_FLI.pep
ASVPPLPPRAAWVCCDDCQKWRCIPAELADVIGETNCRWTCKDNGDKTFADCSIPQEKSNAEINAELDLSDASADEADNGGSNSKACKPPSWTLVRSNLFLHRNRRTQSIDESMVCNCKPPQDGRMGCRDGCLNRMLNIECVKRTCPCGEQCSNQKFQRRSYAKLRWFHSGKKGYGLQLQEDVTEGRFLIEYVGEVLDITSYESRQRYYACKGQKHFYFMALNGGEVIDACTKGNLGRFINHSCSPNCCTEKWMVNGEVCIGIFALRSIKKGEELTFDYNYVRVSGAAPQKCFCGTAKCRGYLGGDISIVDTIITQDDTEADHFEQMVVDKDSKELLGPNESDSDGSHPNISEPEFSIQGEDLHDCSAAKVELDLLEGTRGTSLETSEPEHPLEAWSPPEDEDVIRTPVHVSRTFESSLQKFSVHDTQSSDLLRKTANSMEGSKAPNITNGSTLGSDFRGNLVPTFRPAERKNLKQHKNQKRQPSSPIDNEHILGVEGTLNSLLDVDGGISKRKDATKGYLKLLVVTAAEDGSAGGTSKSLRDLSLILEALLKTKSHSVLLDIINKNGLQMLHNILKQSRGIFHRRPIIRKLLKVLEFLAQKGILTSEHINGGPRFAGVESFRDLMLSLTRHSDIQVQQIARSFRDRWIPPNNARSEPTEYPHTSTFVHDIQGTNTVWSSARRKRKSRWDYQPDEHYKMPGLKIQKVCSGHGEFDVQFGFM

SEQ ID NO: 56507 - protein, 373 aa, Schizochytrium aggregatum
  Clone ID: LIB3033-038-B7_FLI.pep
QKDNLSRFTSLDLEGKAVRGDDRSLDINEEIALLVVELKGVLVLGVTARLVGAEGNVEGLVLRDRAVLDDALDRVGERSLAERAAHPDEHGLKGQVVHEGVMGVSVRGKLAASGVGAGDSAALGHKLALGAREHVIDAAEGRAVEEGLAVVDGALERRIGIERGRLHGGVGRGRALVGEHDDGAVGRDQLAAGKGLERGLDVDAARGRRRRGEGHLAVDVAVDSDTLEELGVVNGPERVAGEEAEAGLRERANGQRHGQHAAALDDVVLEEGVGLGGNLAVQGDGVRADLLGRGAPVADKDLSRRGAEHDARHGISAALAGDDLHAHLLELLLELRRHHATVPGTEADRLDRDVLGELEAHLVKGLVGHGVVS

SEQ ID NO: 56508 - protein, 378 aa, Zea mays
  Clone ID: UC-ZMFLB73217E02_FLI.pep
LRPAISVSSSASPHPIFAVFAILDGHNGNAAAIYTRDNLLNHVLSAMPRGLSREEWLHMLPRALVAGFVKTDKEFQSKGQTSGTTATFVIIDGWTITVASVGDSRCILDAQGGAVSLLTVDHRLEENVEERERVTASGGEVGRLSVVGGAEIGPLRCWPGGLCLSRSIGDIDVGEFIVPVPYVKQVKLSNAGGRLIIASDGIWDALSSEAAAKSCRGLPAELAAKQVVKEALRTRGLKDDTTCIVVDIIPPGQTIRPLSPPKKTSKLKSFIFRKKAKDPSQKLTKQHSAVGIVEEIFEEGSAMLSERLGPDLDGRRTSSLFTCAICQLDLEPSEGISVHAGSIFSSTSRPWEGPFLCSDCREKKDAMEGKRPSGVKVL

SEQ ID NO: 56509 - protein, 385 aa, Schizochytrium aggregatum
  Clone ID: LIB3033-038-E10_FLI.pep
NWRFQSLELLDHLGDGLEEVSLEANVADLEDGGLGVLVDADNGLGVLHAGKVLDGTGDTHGNVQARGDDLAGLADLELVGHVAGVDGRARGADSAATELVGEGVEHVKVLAVFEATAAGDDLVGGGELGAVRLGDLVGDPGGLAGVAGAGNLLDAGGATLGSGLVKVGDADAGELDAVRGLHGGDGVASVHGALEGVLAEDLEDVGDGLHVELGAEAGHDVLAVVGGGKEDVREALGVLDGLEEGGDVLGDAVVVGGVAGREDRGDAVDLGGLLGDLGGISAGHEQGHVASDGLGGGHHRQGRVRDRALGVLREHQRRRHARLRARREAAPGHEPGALEAARQHLPSLLRSAAAALLLPLPLLLLPEQRQQAPGQSCQRSRPSWR

SEQ ID NO: 56510 - protein, 371 aa, Zea mays
  Clone ID: UC-ZMFLB73224A04_FLI.pep
HKHKRTLAMASEVVRPSDAELLKAQADIWRLSLSYLTPLSLRCAVELGIPTAIYRHGGAASAAELVTALSLPSTKLPFLRRLLRLLAASGVFTVDKQSSEEERYRISPVSYLLVDGIPHEDHMNHTALVLTCTSTRYIEAGIGLAEWFKRDVVTSPFEELHGATLFHESMGSLDADFHDMASEALDAHDNFGIEIAMREFRDLFEGIQSMTYCCGNFGDDKGARAIVKAFPHIKCTVLAPPKIIATKPADGAMINYVEGDMFSFIPPAQTVVLKLVLHHLTDEECVKLLAQCRKAIPSRKDGGKVIIGDIMIDHSGPMLETHLLMDIGMMTMTKGRQRDEKEWSELFTKAGFSEYKILKEFGARVAFEVYP

SEQ ID NO: 56511 - protein, 439 aa, Glycine max
  Clone ID: LIB3039-030-F11_FLI.pep
FVTYIARLNNMGRSPCCEKTGLKKGPWTPEEDQKLIAFIEKHGHGSWRALPAKARLRRCGKSCRLRWSNYLRPDIKRGKFSLQEEQTIIQLHALLGNRWSAIASHLPKRTDNEIKNYWNTHLKKRLDKMGIDLTTHKPKNESLAYSKDGSNLGHMAQWESARLEAEARLVRESKLQEQQNNLGPMSSPSSTQITRLVLNKITPLQQKQHSLPPCLDVLKAWQSSWSNNNNNINKYSSLNDKKKTMHVRSMYAMMLSNDDLESPTSTLCFPESVQMNNNNNNSNAMVSTDHLGLINENYLLPPTTLDEFIITKSLGTTSSEGAIETVNGGGSDSWRYFTKHNNEEEQVETDEKTIMYDTISCLQDDDGDIMVAVEALRGAGYYDDDNNSNNNNVTFTHLSSNVNNMVGFENDFDSNEDLAAVNLHVNFEENKDYWNGMLN

SEQ ID NO: 56512 - protein, 59 aa, Zea mays
  Clone ID: UC-ZMFLB73224C01_FLI.pep
VDSRAEKLTDEEELIGQKCSTTMSLRCVIRLSKVVLPQALDCFPPLLSQEKFTGGCSDE

SEQ ID NO: 56513 - protein, 364 aa, Zea mays
  Clone ID: UC-ZMFLB73255D12_FLI.pep
ELATPRKGSTSEALSQEEKSAAGGFSPSKGSRFSWSPDSGEAYGQEGLARLDVRSPDRLAGELHFLDETITLTPEELSRAPAEVLGRSSHGTSYRATLENGVFLTVKWLREGVARPKKEFAKEAKKFANIRHPNVVGLRGYYWGPTPHEKLILSDYVAPGSLASFLYDRPGRRGPPLTWAQRLKIAVDVARGLNYLHFDRAMPHGNLKATNVLLDGLDLNARVADYCLHRLMTQSGVAEQILDLGVLGYRAPELAASKKPAPSFKADVYAFGVALLELLTGRCAGDVVSGPEGAAGVDLTDWVRLRVAEGRGSDCFDAAMASDSESNPQAVKGMKEALGIALRCIRPVSERPGIKSVYEDLSSI

SEQ ID NO: 56514 - protein, 220 aa, Glycine max
  Clone ID: LIB3049-010-H5_FLI.pep
GGGALSPSISSNADTCSLFSSDHFRMFQFKVRNCPRGRSHDWTECPYAHPAEKARRRDPRKYHYSGTSCPDYRKGNCKRGDTCQFAHGVFECWLHPSRYRTQLCKDGTNCRRRVCFFAHTSDQLRVVTDSSSSSFVSSPTSVLINSSFSDSSPYSFVRGIVKLDEEGSYSGLTRCVFGSPRGGFMSVNGCEEEPAMERVESGRDIRAGIYAKLSRENSIG

SEQ ID NO: 56515 - protein, 276 aa, Zea mays
  Clone ID: UC-ZMFLB73257G03_FLI.pep
EGKEKAASQARDRAAAERAAVERAQQEARKRAERAAVERAAAEARERQAAAARDKTSKPDDLESFFGMGARANSAPKQRAPTVDSMFHSQTQNRGSSTSTSMKKASSTTNIADDLSAIFGGAPTSEEFQEVDGESEERRRARMERHQRTRERAAKALAEKNERDMQQQREQAERHRLAETLDFEIKRWAAGKEGNLRALLSTLQYVLWPECGWQPVSLTDLITAAAVKKVYRKATLCIHPDKVQQKGANLQQKYIAEKVFDLLKEAWNKLNSEELF

SEQ ID NO: 56516 - protein, 329 aa, Zea mays
  Clone ID: UC-ZMFLB73230D10_FLI.pep
LALPSLSCLQVRPSGRRREERMASTASPPVFERVAGIRAIAESGRFKAWLLDQFGVLHDGKKPYPGAILALEKLAENGAKMVIISNSSRRSSVTMKKLKSLGFDTSCFLATITSGELTHQHLQKRDDPWFAALGRKCIHITWDDRGAISLEGLGLQVVNNVDDAEFILAHGTEALGSPSGVPLPKSLEELEQVLMLGIEKRLPMVVANPDYVTVEARDLRVMPGTLAAKYESLGGEVKWMGKPDKVIYTSAMSLAGVDARECIMVGDSLHHDIKGANASGMASAFVTGGVHADELGLGEFGETAGEDAVSSLCSKHGSYPSYVLPSFAW

SEQ ID NO: 56517 - protein, 346 aa, Glycine max
  Clone ID: LIB3051-084-H7_FLI.pep
RDLDRVEPSKLSQIPCKLIEKDMHKGNKGNHDVEQPAGSLKACSSVCFVTSKCRICGDTTCHCVIPSNSIQVSSDISSEGSEGGDVITRGADSLRQNCPTKCTSPIEKKSDPDSDGAVSSLDSEHVCPSSQHVTPTTDASSGEVWSTPVLPVQLSPKKALRAAMLKSRFADTILKAQQKTLLDHGDKGNPQKMQQEKERLERIQREERARIEAQIKIAEAAARMRAEEESRQRREKEREAARAAIEKMKRTVDIEHNVEIIKELESLSGCTLSYKAVGCRNGYKVALETLDKPQFENPLERLGLFIKEDFTADEDEEVLNGGFEEGEIFNCMKVYSVLPALTVYIL

SEQ ID NO: 56518 - protein, 125 aa, Zea mays
  Clone ID: UC-ZMFLB73235D10_FLI.pep
QMLMAKAHCAWGQSSWRSSERTSCRPRHVPTGLRSQPAIWSILELHVAGWDLKLKYAPYVELPGGMALQGATLVAIKPSPEGSNGSHPNRKEAEGFVFGAFDGPFKAAVKALMKRRTYLLEMNGF

SEQ ID NO: 56519 - protein, 165 aa, Glycine max
  Clone ID: LIB3051-098-C8_FLI.pep
QRKLVLGLISMENYSMLFSVSNSSSYPIGVGSSQIGYSGQSSNAFLGLRPSNELASDDHEKRQGGGDGNMLMSQISGGSINVSDELGGSGNSNNNKKKGEKKVRKPRYAFQTRSQVDILDDGYRWRKYGQKAVKNNKFPRLVVSTLFHVIAFFFCLKRGIKRRYQ

SEQ ID NO: 56520 - protein, 579 aa, Zea mays
  Clone ID: UC-ZMFLB73239A10_FLI.pep
AALLAQSSCLGKGKSRSKKVSLAMASSWTLPDHPKLPKGKPVAVVVLDGWGEANPDQYNCIHVAQTPVMDSLKNGAPEKWRLVKAHGTAVGLPSDDDMGNSEVGHNALGAGRIFAQGAKLVDQALASGKIYDGDGFNYIKESFENGTLHLIGLLSDGGVHSRLDQLQLLLKGVSERGAKKIRVHILTDGRDVLDGSSVGFVETLENDLLELRGKGIDAQIASGGGRMYVTMDRYENDWDVVKRGWDAQVLGEAPYKFKSALEAVKTLRAQPNANDQYLPPFVIVDDSGKAVGPVLDGDAVVTINFRADRMVMLAKALEYADFNNFDRVRVPKIRYAGMLQYDGELKLPSRYLVSPPEIDRTSGEYLVKNGIRTFACSETVKFGHVTFFWNGNRSGYFDETKEEYVEVPSDSGITFNVAPKMKALQIAEKARDALLSGKFDQVRVNLPNGDMVGHTGDIEATVVACKAADEAVKIILNAVEQVGGIYLVTADHGNAEDMVKRNKSGKPLLDKNGGIQILTSHTLQPVPVAIGGPGLHPGVKFRNDIQIPGLANVAATVMNLHGFEAPADYEQTLIEVADN

SEQ ID NO: 56521 - protein, 940 aa, Zea mays
  Clone ID: UC-ZMFLB73242C04_FLI.pep
RPSARDPCPNKNQKMGEGRGRRDLTPRFLSTSQMAPPSANRSHQQLVVLPVLLLLLIRIPASAVAAADTSLSTLSYSHHCPNLPSALDLPGGEVSALGPDARVPVPEVSTGYFVGGDRIFGPDPSSQPRSFSLLPSSVARTTNASLLHVSATLTVSGGRRPFRDRGGRNLFEYDGRARHFRPRLPRFTGRRGSITFGLEGYYSTGSGDLCMVGTGSGRAADGSPVHFLPVVLRLGFPSPANVTRPFVTGRLENVDTISPIEPISLVAYTQEGYAYGESASCPPPPAGRLDALQVFENRNFSCAHLSSMLKSPFRLDYPSGSESTASSLGIHQSYMYVNRMHCNDDGAVRAYVAFTNQTELSRYYFMLGEKAVVVDGFWDQKSSRLCLKGCHVVKSGPSRADLAVGECGIGMSFWFPAVWSLQQRSFSAGLVWNASLKSGEAVAAGSSAITPNYRGNLSGLKYNYTKVDEAMKYYEKSGLNKNRKGKFPDSNSYQDLEFRFFVKRGGGSGYASPVTIGSMLFDGNSLVVQDPFSRHVTAEMKQRLLNVSYDIYYVGKWSLESFHRRHISAEGVYDTKTGSLCMIACRELNVSSDCEILVTAQFSSLDAKVAQHVKGAIKSLRKKTDPLFFETLDIASYGMYVEQVDASIWRMDIESTMTLISMTLACVFIAVQLFHVNKVPEALPAMSITMLVVLALGYMIPLVLNFDALFKNSNKQTVPLSGGGWLEVNEVMVRIITMVTFLLQLRLLQQAWSARSVDASKAESWAAEKKVLWICLPLYIIGGAITWVVHMRSNHSRRMLRQVVHLKPVEQHAFWEDLVSYCGLILDGFLLPQVILNVFSDSKVRALSPGFYIGSTLIRVLPHVYDVFRRQHFVPSLRPSYMYAGPRDDLFSLAWDIVIPCGALLLSALLFFQQWRGGAFFLCSKNRRTREYEMVSVASS

SEQ ID NO: 56522 - protein, 857 aa, Zea mays
  Clone ID: UC-ZMFLB73245F09_FLI.pep
PVWYSLQEVKSLLQRIDEGNRSTGGLAFVTKAYGIAGCIKFLESYYLILVTKRRQIGCICGHAIYCIDESQMITIPHSSVQTDVATSKNELRYKKLLASVDLTKDFFYSYTYPIMQSLQQSVTSAGMKEMPYENLFVWNTFLTEPVRSRCHNTLWTVALVHGHFKQVKLSIFGREINVVLSSRRSRHFAGTRYLKRGVNDHGKVANDVETEQIVFEEEAGSWKGRMSAVVQMRGSIPLFWSQEASRLSPKPDIFVQRYDPTYEATKLHFDDLARRYGHPIIILNLIKTVEKRPREMMLRREYCRAVEYLNQNVPEEKKLRFIHWDFHKFAKSKSANVLGVLGKVAGEALDLTGFYYSGKPKVQKKRLIQLSRTSTARDGSLDIRASSGDLSRLRDGSLDIRASSGDLSRLSSNAEALSSTGFQDMRNQANKQEFLGDTPCYQTGVLRTNCIDCLDRTNVAQYAYGLAALGRQLHAMGLTDVLKIHPDSSIASALMEMYQSMGDALAHQYGGSAAHNTVFPERQGKWKATTQSREFLKSIKRYYSNAYTDGEKQDAINLFLGYFQPQEGKPALWELDTDYYLHVTTAGDDLMSDSYHLSSAPGNNVFVGSGAALNPGTILSPVPACKEDFSRKKLTSFDKLIERTCSSIRNVRLHCDADLKPSGGVGTSGMAPDAAEIQLKSPNWLFGQRKHTETISTARVAPVENVNEGNRDESNVSLCGELIWLSSSVESCEEDIFRRYLAFTTADVENGWYGGTLLYDRDENSGAYRHYSELCQGAVMDPFEHDPEKERHYAEALSVDLGDARVEAEMQAALDDYQVIGSDLSIIPSCGALAEDPSQLTRWIIGDERLLVGAAAQ

SEQ ID NO: 56523 - protein, 151 aa, Zea mays
  Clone ID: LIB3059-011-A12_FLI.pep
QGHNPSRRTLGGGGASCIPHRSGSEPATSSSSRGSAGAKRCEASFGDPSSRSNAGIGLRQERTEMTQKQTLFKGQSKKKTIPPNRHGKAPHVRKGKRAVKPTKFTKDMDAEKELTKFINQCNEIKAANLASKEGGDLNIVKADGEESKSKK

SEQ ID NO: 56524 - protein, 267 aa, Zea mays
  Clone ID: UC-ZMFLB73251D11_FLI.pep
GTQLMTPERRKAVWAIYVWCRRTDELVDGPNASYITPTALDRWEKRLEDLFEGRPYDMYDAALSDTVSKFPVDIQPFKDMVQGMRLDLWKSRYMTFDELYLYCYYVAGTVGLMTVPVMGIAPDSKASTESVYNAALALGIANQLTNILRDVGEDARRGRIYLPLDELAQAGLTEEDIFRGKVTGKWRRFMKGQIQRARLFFDEAEKGVTHLDSASRWPVLASLWLYRQILDAIEANDYNNFTKRAYVGKAKKLLSLPLAYARAAVAP

SEQ ID NO: 56525 - protein, 162 aa, Zea mays
  Clone ID: LIB3059-013-C6_FLI.pep
HSSMQSHSTATDPSGASLHMKFFTETVKRAMYNGIKPKILMRRAEGSPLVLGLDKDVLVELSRVVPAEVLRHAARLETLPALLVVPVRVEAVPERLDQLVGLGAVKSPPEPGVAERVERRHGVPEPAHGVHHRDGAVCHRVELVQPAGLEAGGHHQHVGARR

SEQ ID NO: 56526 - protein, 84 aa, Zea mays
  Clone ID: UC-ZMFLB73255F04_FLI.pep
SGMKRKTKTNSLFITTQKNLAIRMPYDFLSLVPVIEGAGGSITDWRGDKLYWPVTAESQPTSFNVVAVGDARVHKEALDALRWR

SEQ ID NO: 56527 - protein, 400 aa, Zea mays
  Clone ID: LIB3059-013-F7_FLI.pep
PKSCSPSSQRLHQIEQNSSAQLDLPLPPAWRLGLATGVRRMLPTGCRCSLLSCLRRDKGEAGRTDPRVADEPTASSLGKGSAAARRFAWAEIESVTAGFSSRVIGQGGFSTVYLACLSSSRLGAVKVQRSSERLHRAFRQERDVLLALRHPHIVRLLGYCDEREEGVLVFEYAPNGDLHGRLHGSGGKATLPWARRLAVAFQVAMALEYLHESRDPAVVHGDVKASNVLLDASLDAKLCDFGSAHVGFSAALQPPEAAAASRASSARARPDPVVGSPGYVDPLFLRSGVATRKSDVYSFGVLLLELLTGREAICADTGCRLAAAVGPTLSEGEVADVVDRRLGDEYDAHEAATVAALALRCVSEGSGMRPSMTEVVRVLQEKTTALISAAGCRPAGKMDS

SEQ ID NO: 56528 - protein, 469 aa, Zea mays
  Clone ID: UC-ZMFLB73230D12_FLI.pep
CPRSLSNRSPRRLTRLLLRSFPAIPTMEGDGTNLDAAIESLLNVEKQMRLAGDVAGTRKAVIDIVELCYKAGAWKTLNDQIVLLSKRRGQLKQAITAMVQKAMEYIDLTPGIDTSIELIKTLSSVSAGKIYVEIERARLIKRLAKIKEEQGQIYEAADLMQEVAVETFGSMAKTEKIAFILEQVRLCLDRQDFVRAQILSRKISTRVFDADPSKEKKKPKEGDSIVQDAPADIPSLLELKRVYYELMIRYYSHNNDYLEICRCYKAIYDIPAIKEDPTKWIPILRKICWYLVLAPHDPMQSSLLNATLEDKNLSEIPNFRLLLKQLVTMEVIQWTSLWEFFKEEYEKEKDLLGGALGAKASEDLRLRIIEHNILVVSKYYARVTLERLADLLCLTLQEAEKHLSDMVNSKSLVAKIDRPMGVVSFRTTQDSNGTLNSWATSLEKLLDLVEKSCHEIHKETMIHKTALKV

SEQ ID NO: 56529 - protein, 181 aa, Zea mays
  Clone ID: LIB3059-017-A9_FLI.pep
QQMPSQAPQLLLQQQAALQSSYQSSQQAIYQLQQQLQLMQQQSNLNQQPSAQVGSSAVSSTCNWTEHTSPEGFKYYYNSITRESKWEKPEEYVLYEQQQQKLLLLQQHQQNIAVQQLQSPPQGQSLPSMQPIQQLPQAQGQTQMHMKQQELNYSQFQAAGSIDPNRIQQGIPAAQERAWKN

SEQ ID NO: 56530 - protein, 71 aa, Zea mays
  Clone ID: UC-ZMFLB73236B02_FLI.pep
WFNDYINTSFSSPPAVALIVAVLLDNTLDVRDAARDRGMPWWARFRTFRGDSRNEEFYTLPFNLNRFFPPT

SEQ ID NO: 56531 - protein, 49 aa, Zea mays
  Clone ID: UC-ZMFLB73251E08_FLI.pep
EKNKLRFYYGTGIHGHEKNYGVNIFNKSLSNVETRTLRILYFCTRKPYA

SEQ ID NO: 56532 - protein, 159 aa, Zea mays
  Clone ID: UC-ZMFLB73255F10_FLI.pep
AGTHIPDADCAAAAQMAFSGNAVAGEMQMGGSMSPGRLPAATATEASSLEDANFKSARITVEERREKIIRYIKKRNKRNFRKKIKYACRKTLADSRPRVRGRFAKNDDYGEPSSRVMQNHEEYDQMAASMKAEDILDPDAAHFNGMNSYLFNHTVESWL

SEQ ID NO: 56533 - protein, 253 aa, Zea mays
  Clone ID: LIB3059-022-E6_FLI.pep
PNSRSPADAMAAPSAAVIGVLVLLVVGASGARLPGRGSTTRGAALPRGGAPATAVFALGSFWRSEAAFGCLHGVIRTSVGYAGGSKSNPEYRNLADHAECVKVEYDPRLIHYRQLLDVFWASHDPREVFGQGPDVGNQYRSVIFTNGTIEARLAGLSKEKEQAKDRSSVVTTQIQPLGVFHHAEPEHQKFELKRKPFLLQLIGNLPEEELLTSTLAAKLNAYAAELCPVNTQKRINSKIDEVTKKGWPILRDI

SEQ ID NO: 56534 - protein, 74 aa, Zea mays
  Clone ID: UC-ZMFLB73257H10_FLI.pep
NYPCLSSPDRLTRHRLVAHQNLPTGVRAFGSVTYSTTPPHGIRYFFDLLYNFFPVTNICFTTWSEYPVHLQQDA

SEQ ID NO: 56535 - protein, 404 aa, Zea mays
  Clone ID: UC-ZMFLB73232A01_FLI.pep
VIVVGFSSDIGAALGDTKEHCSLYHGPRWHAAIVYVLGFWLLDFSNNTVQGPARAMMADLCDHHGPSAANSIFCSWMALGNILGYSSGSTNNWHKWFPFLKTSACCEACANLKGAFLVAVVFLVLCLTVTLIFAKEVPYRANENLPTTKAGGEVETEPTGPLAVLKGFKDLPPGMPSVLLVTAITWLSWFPFILYDTDWMGREIYHGDPKGSNAQISAFNEGVRVGAFGLLLNSVILGFSSFLIEPMCRKVGPRVVWVTSNFMVCVAMAATALISFWSLRDYHGYVQDAITANASIKAVCLVLFAFLGVPLAILYSVPFAVTAQLAATRGGGQGLCTGVLNISIVIPQVIIALGAGPWDALFGKGNIPAFGVASAFALVGGVVGVFLLPKISKRQFRAVSAGGH

SEQ ID NO: 56536 - protein, 323 aa, Zea mays
  Clone ID: LIB3059-025-B8_FLI.pep
SEVQELVRTKGLFSFYEDGHQECCRVRKVRPLRRALKGLRAWITGQRKDQSPGTRASIPIVQVDPSFEGLDGGAGSLVKWNPVANVDGKDIWTFLRTMDVPVNTLHAQGYVSIGCEPCTRPVLPGQHEREGRWWWEDAKAKECGLHKGNIDKDAQAAAPRSANGNGSAGAPDIFESPAVVSLTRTGIENLLRLENRAEPWLVVLYAPWCPFCQAMEASYVELAEKLAGSGVKVAKFRADGEQKPFAQAELQLQSFPTVLLFPGRTARPIKYPSEKRDVDSLLAFVNSLRFVEKEVEGTGFGRDTGREEGSGEKKSGVAFVTAK

SEQ ID NO: 56537 - protein, 317 aa, Zea mays
  Clone ID: UC-ZMFLB73236G04_FLI.pep
AAWSFNVTTSVGLIMVNKALMATYGFSFATTLTGLHFVTTTLMTILFRWLGLSQPSHLPLADLVKFVIFSNLSIVGMNVSLMWNSVGFYQIAKLCMIPASCLLEVVFDHVHYSRDTKLSIMVVLIGVAVCTVTDVSVNARGLIAAVIAVWSTALQQYYVHFLQRKYSLNSFNLLGHTAPAQAGSLLLVGPFADYLLTGKRVDQFSLSSLALFFLALSCFIAIGVNLSQFICIGRFSAVSFQVLGHMKTVLVLSLGFLFFGKEGLNLQVVLGMVLAVLGMIWYGNASAKPGGKERRSILPVRSASLKGSSEEKAGAEK

SEQ ID NO: 56538 - protein, 142 aa, Zea mays
  Clone ID: LIB3059-030-H12_FLI.pep
LIMAENTKSARSQSPCLLLSGALSLSHLHLLIALHLFRGLKQQVRSMELATLQDVFIVILPVEHQYPLLLLPPLLAGFAVPMPLGHLSSWRTEAVEMIALIAAVTQDDLVIVRVAQADTAEARWTVPALAAHLHITCNLLGS

SEQ ID NO: 56539 - protein, 409 aa, Zea mays
  Clone ID: UC-ZMFLB73245G09_FLI.pep
YHCPEEEIAFGPSCWLWDYLRRSQASGFLLPLSGGADSSSVAAIVGCMCQLVIKDIEKGDEQVKADALRIGQYKDGAIPMDSRELAKRLFYTVYMGTENSSEDTRSRAKRLAEEIGSFHLNVPIDSIVSAFLSLFETLTGKRPRYKVDGGSNTENLGLQNIQARIRMVLAFMMASLMPWVHNKSGFYLVLGSSNVDEGLRGYLTKYDCSSADVNPIGSVSKQDLRAFLRWAAIHLKYSSLAEVEAAPPTAELEPIRANYNQLDEIDMGMTYEELSIYGRLRKIFRCGPVSMFQNLCHSWCGRLSPSEVADKVKHFFKYYAINRHKMTVLTPSYHAESYSPEDNRFDLRQFLYNSRWPYQFRKINELVQEMDKDGKWGTSAEGKLGAQTGAQGTGMGVVAAGSANPSAGF

SEQ ID NO: 56540 - protein, 75 aa, Zea mays
  Clone ID: LIB3059-045-C7_FLI.pep
ILLPLSQVWVMLFNSWFLFPGYSEEHCLSWIQGDAEALSFEDGSMDGYTIAFGIRNVTHIEKALSEAYRSANLEP

SEQ ID NO: 56541 - protein, 325 aa, Zea mays; identical to SEQ ID NO: 54104
  Clone ID: UC-ZMFLB73256C06_FLI.pep

SEQ ID NO: 56542 - protein, 289 aa, Zea mays
  Clone ID: LIB3059-048-F2_FLI.pep
AMGAPKQKWTSEEEDALRAGVRKHGAGKWRTIQKDPEFSPVLSSRSNIDLKDKWRNLSFSASGLGSSKLRVPKITGPSSSPSSSSQPLLLPAANKFTEATLPADAEKKPQDGKTLPKYGAMIMEALLELNEPNGSDIAAIFGFIEQRYAVQPTFRRFLASKLRRLADSNKIEKIDKSYRIPDSLATRTPAPMNASAPKQKDPSKPSKVSKAIGLFSASSPALEAAMAAAVKVADAEAKAHDAHDQTMEAERIFKMAEDTESLLIIAAEIYDRCSRGEITTLVPVAQREI

SEQ ID NO: 56543 - protein, 479 aa, Zea mays
  Clone ID: UC-ZMFLB73258G03_FLI.pep
GAVKKAGSEKLTQVGSGNAALALLRRATKMTLSVLSNLPLAISEMFAIAALMALGTVIDQGEAPSYYFEKFPEDNPVFGFITWRWILTPGFDHMFSSPVFLGLLALLATSLMACTYTTQLPMVKVARRWSFTHSGERIRKQEFADSLPQASIQDLGVILMGAGYEVFTKGPSLYAFKGLAGRYAPIGVHLAMLFIMAGATLSATGSFKGSVDVPQGLNFVIGDVMKPRGVLSVAPDVFNTEVHVNRFYMEYYDSGEVSQFYSDLSLFNLDGKEVMRKTIKVNDPLRYGGVTIYQTDWGFSALQVKKNGEGPFNLAMAPLKLNGDKKLFGTFLPLEDSDSSNPNVKGISMLARDLQSIVLYDQDGKFVGVRRPSSKLPIEINGNEILIEDAIGSTGLDLKTDPGVPIVYAGFGALMLTTCISYLSHSQIWALQDGSTVVVGGKTNRAKLEFSEEMNRLLDKVPELISADENLLDTKSTAT

SEQ ID NO: 56544 - protein, 68 aa, Zea mays
  Clone ID: LIB3059-058-C11_FLI.pep
KQKFQGFTVDEALMEIAGPQAYLMHCLPAERGVEVTDGAIEAPNSIVFPQAENRMHAQNAIMLHVLGA

SEQ ID NO: 56545 - protein, 230 aa, Zea mays
  Clone ID: LIB3060-013-D7_FLI.pep
LLCTPHPRTSSPAADPPLVRVRHRRDVEENRGEAAPAGQQGQAEGHEGCLGAHRHRRDIRGHGVAQDDGGRHGGPRERGEQAAQGVVVGDHRVRRPGQGAGEEGRGGSQEGRRRGGEEGRRRGGEEGSRRGGEEGSGRREGQGRQEGGAADADADADGAAGPAGRAVEPVLPGLLLLPVPARGHALPRPEHGGGPQLLHRLLRRLMAWRMIYEGEEGSVEPACSFFFFHF

SEQ ID NO: 56546 - protein, 96 aa, Zea mays
  Clone ID: UC-ZMFLB73239E03_FLI.pep
AALVRLRLGGLLLAALPLRDGVLHAQKEEQSSDQRQILGELRKEACKFCLLHIVVVEVMDDRSDQSKVQQQEISTERAAQNKKEASKTLKTNCSSN

SEQ ID NO: 56547 - protein, 252 aa, Zea mays
  Clone ID: LIB3060-029-D9_FLI.pep
VAPTTLAQTILQHKRWSEGNFGIFVSRYCPFVFGRRGKTRLPHQMGYSIYGLWAPNSLPTLYYAVVPSLCLLKGTPLFPELTSPWIAPFVYVAVAKNVYSAWEALWCGDTLRGWWNGQRMWLVRRTTSYLYGFVDTVRDSLGLSKMGFVVSSKVSDEDEAKRYEQEMMEFGTASPEYVIVAAVALLNLVCLAGMAAALDVFFVQVALCGVLVLLNVPVYEAMFVRKDRGRMPFPITLASVGFVTLALIVPFF

SEQ ID NO: 56548 - protein, 364 aa, Zea mays
  Clone ID: UC-ZMFLB73252G01_FLI.pep
SAPISAPLPLQHPPVSVVSSPLLTSPAMGKIKIGINGFGRIGRLVARVALQSEDVELVAVNDPFITTDYMTYMFKYDTVHGQWKHSDIALKDSKTLLFGEKPVTVFGIRNPEEIPWGEAGAEYVVESTGVFTDKDKAAAHLKGGAKKVVISAPSKDAPMFVVGVNEDKYTSDVNIVSNASCTTNCLAPLAKVIHDNFGIIEGLMTTVHAITATQKTVDGPSAKDWRGGRAASFNIIPSSTGAAKAVGKVLPELNGKLTGMSFRVPTVDVSVVDLTVRIEKGASYEEIKKAIKAASEGPLKGIMGYVEEDLVSTDFTGDSRSSIFDAKAGIALNDHFIKLVSWYDNEWGYSNRVVDLIRHMFKTQ

SEQ ID NO: 56549 - protein, 430 aa, Zea mays
  Clone ID: UC-ZMFLB73236G10_FLI.pep
PHVRSAKADSVRNLPKTLGSMRDGRVSFQLQHTGEIYISQGCNVTQTVFNGINVLAGVGLLSTPFTIHEAGWTGLAVLACFAIVCCYTGILLKHCFESKDGISSYPDIGEAAFGRIGRVLISIILYTELYSYCVEFIILEGDNLTSIFPKAGFDWLGIHVDGKHFFGVLTAILVLPTVWLRDLRVLSYLSAGGVIATLLVFLSVGLVGVTDGIGFHSTGKAVNWSGMPFAIGIYGFCYSGHSVFPNIYQSMSDRSKFPKALFICFAICTAIYGSFAVIGFLMFGKNTLSQITLNLPKHSFASEVALWTTVINPFTKFALLLNPLARSLEELRPEGFMNETSCAIILRTALLASTVCIAFLLPFFGLVMSLIGSLLSILVAVIMPPLCFLKIAQNKATCAQVIASICIVMLGVISAALGTYSSVKKIVENY

SEQ ID NO: 56550 - protein, 268 aa, Zea mays
  Clone ID: LIB3060-053-B9_FLI.pep
NCRASELAPCAMEGDEKSAGGAPAYWGLGARPCDACGAEAARLYCRADAAFLCAGCDARAHGAGSRHARVWLCEVCEHAPAAVTCRADAAALCASCDADIHSANPLARRHERLHVAPFFGALADAPKPFASAAPPKATDDDGSNEDEAASWLLPEPDHGQKEGATTEVFFADSDPYLDLDFARSMDDIKTIGVQQSGPPELDLAGTKLFYSDHSVNHSVSSSEAAVVPDAASGMAPMVAVVSRGLEREARLMRYREKRKSRRFEKTIR

SEQ ID NO: 56551 - protein, 739 aa, Zea mays
  Clone ID: UC-ZMFLB73242G02_FLI.pep
DDFVAAALAQANVTRTDHIMWTMGDDFNYQYAESWFRNMDKLIQHVNKDGRVHALYSTPSIYTDAKHASNESWPVKYDDYFPYADSTNAYWTGYFTSRPTFKRYVRVHSGYYLAARQIEFLVGGRSSLGLFTSSLEDAMGIAQHHDAVSGTAKQHTTDDYAKRLALGAAKVEKGVNTALACLTSSNGTCGSSVVKFSQCSLLNISYCPSTEEAISSTKRLVVVVYNPLGWERSDFIRVPVNDQNLVVKGSDGNIVESQLVEVDNVTRNLRKFYVKAYLGITTHKAPKYWLLFQASVPPMGWNSYFISKSTGAGYNSTEHVSDVVSPSNSTIEVGPGHLKMSFSKASGQLNRIFNSISGVDLPVQQSFLWYRSSEGDASDSQASGAYIFRPDGNTPTTVSSSVPLKVIRGPLVDEVHQQFSSWIYQITRLYKNKEHAEVEYTIGPIPVDDDVGKEVITRLTANMVTNSTFYTDSNGRDFLKRVRNYREDWNLQVTQPVAGNYYPVNLGVYVADEKYELSVLVDRAVGASSIQDGQLEIMLHRRLLKDDGRGVGEPLDEVVCVDQDCQGLTARGNYYVNVEKLGHGAHWRRTYGQQVYSPFLLAFTHEDETSSKSYSVAKAGMMNANYSLPDNVAIVTLQNLDDGTTLLRLAHLFQAAEDPRYSKVAKVDLKKVFGKRTIKELTETSLSANQKKSDMKKLSWRVIGNTETGPAAVKGGPVDSRALVVELGPMEIRTFLLKF

SEQ ID NO: 56552 - protein, 184 aa, Zea mays
  Clone ID: LIB3061-007-B10_FLI.pep
VSVCYQHQPSTPPRLGFSAPMAAARADGERRIGVAIDYSESAKKALDWAIDNLLHHGDTLVVVHVLHHGAEETKHTLWAKSGSPLIPLSEFREPEVMQGYGVRPDAEVLDAIDTAARQKQLKVVAKLYWGDAREKLCDAVEDLRIDSLVMGSRGLGPIQRILLGSVTNYVLSNASCPVTVVKGK

SEQ ID NO: 56553 - protein, 501 aa, Zea mays
  Clone ID: UC-ZMFLB73252G10_FLI.pep
SMSSLLFSQQHQRLAPGQPPLQNYINMQPHLFHHHQPPDVPSPRDKRSRSGRGGKHNIRFSQQPSDAGSQHSESSGIKFRSKYMSSEEIESILKMQHSANHSNDPYFDDYYHQACKAKRSVTFQKSNFCPMSIKDFPSKSRSGVDQHSYLQVDANGGVSFSAIRRPRPLLEADLPGSGDGFYDHKSSKRSLEKEPMLAARITVEDSLRLLLVVDDIDRFLQSSQPQDSSFQLKRRREVLLEGLATSLQLVDPFGPNKHGHSGGLAPKDDLIFLRIISLPKGRKLLARYLRLLFSGSELTRIVCMAVFRHLRSLFGGLPSDYSAAETTIVLAKAVSSCVRHMELSALSACLAAVVCSSQQPPLRPLGSASGDGASLIIKSVLDRATELLADPHSAANYSRSARSLWHASFDAFFGLLTKYCDSKYESIVQRFAMQGSNSMGGPETTKAVSREMPVELLRASLPHTNEQHRQTLLDFARKSTHLPGFSPTANRGLVNSESVPG

SEQ ID NO: 56554 - protein, 175 aa, Zea mays
  Clone ID: LIB3061-026-C2_FLI.pep
DAMMSVKRHLRGPGAIPIGRPSIHPSPIDLKGKAYELLREKASSFLLDDFYRTPGGIQFEGPGSDAKPITLTIENQDYMGDIEILKEYLGKVRTMVKPGCSREILKAVISSMVSVTDVLTVMSHPLNAELPLYHFKLHIFNIMNAWFMYFLCHFDFTNTLCFMFYNFHVMHFIFT

SEQ ID NO: 56555 - protein, 375 aa, Zea mays
  Clone ID: UC-ZMFLB73256D08_FLI.pep
LAFRKKLRRAEVEREILRALDHPFLPTLYADFEASHYACLVMEFCPGGDLHVARQRQPGRRFSISSARFYVAETVLALEYLHMMGVVYRDLKPENVLVRGDGHIMLSDFDLSLKCDVVPRLLRHNSLPAQNGSSAGGGRADSGKPSCVPPIQPVLSCLFNGVHKCHQAKEGAAAAARDGGEADDSTEPCDRNPELVVEPVSARSRSFVGTHEYLAPEVISGQGHGSAVDWWTLGVFMYEMVYGRTPFKGADNEKTLVNIIKQPLAFPRVVAASGREWDEHLRAQDLMTQLLAKNPKKRLGGCTGSAEVKRHDFFKGVNWALVRSVRPPEVPKPPVVPAPAPALAPQKKVLMMSRKERQEPYNYNPRPDDERFEYF

SEQ ID NO: 56556 - protein, 272 aa, Zea mays
  Clone ID: LIB3061-035-E8_FLI.pep
VTIALDPSLYPENPLIIWENARAAAQQEGFEVKRKGDKEFVANIRLEMNYSPEKFKLSQPLMEVLGVEVDTRARVIAALWQYIKAKKLQNPNDPSFFMCDPQLKKVFGEDKLKFAMLSQKISQHLSAPPPINLEHKIKLSGNGAHSSACYDVLVDVPFPLQKEMMAFLANTEKHKDIEACDEVISASIKKIHEHRRRRAFFLGFSQSPVEFINALIASQSKDLKLVAGEANRNIEKERRADFYNQPWVEDAVIRYLNRKPANEGPGGGAGGS

SEQ ID NO: 56557 - protein, 413 aa, Zea mays
  Clone ID: UC-ZMFLB73232D01_FLI.pep
LRSYASILYLMLPDNFQMILRGKKIDHHNIINDLMLKKQLTYNPTVGDGLPKDMHVAAKVTIGFVKDARQHIDIQGFNVYHKNRLIKPFWRVWTSAGVAGRGIIGVLEVNFVEPAHDKQDFERTNCLARLEARLNRMQKKYWSDNRHRIGYGTNDASTDSVKRKTGLSLRPFGQGSWKSGYLQTIRSDGRSCSNTTNNIMNASMSSPETSKLSGPNREFSSTTVCQHRAEKSANTIRSERSVLHGLSNTDGGKTETANAPSKSTSPILRTSLPPTPNEGKRSERIAAKYQSKQVNATTNGDRESIVDPEAIIKKLKEENSSLKERILMVQESLSRELQIERDKNKSLTERFEDVERQLELAIKEQEATVELFAEERKCHDQEVENLKRKLTEASSTIQDLMEQLNAARNCCKR

SEQ ID NO: 56558 - protein, 207 aa, Zea mays
  Clone ID: LIB3061-049-E10_FLI.pep
GAEVQNLIQRLRVMEQNQQQMMALLAIVVQNPDFLNQLVQQQRRSNWWNDDGNRKRRFQALEHGPVDDQETSGGGAQIIQYRPPVPETSNQPIPANEAFYSTPAQPASSPALEMPMDVEMTSNNVNTFDSTGNDFTDTSALCEWDDMDIFGDELEHILQQPEQDFQVDPPLTVEDYGYDHPRLEQDYQMEAQQNCKNPQYADVITEA

SEQ ID NO: 56559 - protein, 325 aa, Zea mays
  Clone ID: UC-ZMFLB73237H05_FLI.pep
GRGGGPTHLAILSQPPDTIHGSLRVTVQGEVIEHSFGEELLCFRTLQRYTAATLEHGMHPPISPKPEWRALMDEMAVVATKEYRSIVFQEPRFVEYFRSATPETEYGRMNIGSRPSKRKPSGGIESLRAIPWIFAWTQTRFHLPVWLGFGAAIKHIMQKDIRNIHILREMYNEWPFFRVTLDLLEMVFAKGDPGIAAVYDKLLVADDLQSFGEQLRKNYEETKELLLQVAGHKDVLEGDPYLKQRLRLRESYITTLNVCQAYTLKRIRDPSFQVSPQPPLSKEFTDESQPAELVQLNQQSEYAPGLEDTLILTMKGIAAGMQNTG

SEQ ID NO: 56560 - protein, 226 aa, Zea mays
  Clone ID: UC-ZMFLB73240B12_FLI.pep
FDLPVWQVFIGMDVAASEFFSEKDKTYDLNFKEENNDGSNKISGDSLKDLYKSFVSEYPIVSIEDPFDQDDWTTYAKLTGEIGQQVQIVGDDLLVTNPTRVAKAINEKTCNALLLKVNQIGSVTESIEAVRMSKRAGWGVMASHRSGETEDTFISDLSVGLATGQIKTGAPCRSERLAKYNQLRLGSRKSSVLPQSTPERSSEHQWSPTEPRVPRAWRKKMRMFPH

SEQ ID NO: 56561 - protein, 266 aa, Zea mays
  Clone ID: LIB3061-051-H4_FLI.pep
PTKTTGRRRDGGKNTAQAQAGRDVKPPLRARRRHLAAGARLAAGSLRAPFRRRTGRSPDGSGSDDLRGLAGMAGKKRKAEAARLEETDRALYGAFRGAANSLSQLYTLGMGAQKASFHAGERHAMEKLYEWILRQHENGLRLTVADVASHIQHEIQYGGDNASASPRSQYPSQSTAPTMHIPNTSNQQPSPSLFASGNPGLTQSKNSMVFSSALSSPIRRSLQPYHLEQDGDAGYFANGASRDVNPTASNDSSMDMHSDSPAHDSY

SEQ ID NO: 56562 - protein, 504 aa, Zea mays
  Clone ID: LIB3061-053-B4_FLI.pep
LLLLLLCSPVTGTRRKAGRKEGRKAGMAEETVRELRASFAAGQTRPAEWRAAQLKGLIRMIDEKEAEISAALHEDLAKPHMESFLHEISLTKSSCKFALKGLKNWMKPEKVPAAITTFPSSAQIVPEPLGVVLIISAWNYPFILSIDPVIGAIAAGNAVVLKPSEIAPATSSLLAKLLPEYVDNSCIKVVEGSVPETTALLEQRWDKIFYTGNGTVGRIVMAAAAKHLTPVALELGGKSPVIVDSNVDLHVAAKRIVVGKWGCNNGQACIAPDYIITTKSFAPELVASFKRVLERFYGEDPLESADLSRIVNSKQFKRLTNLIEEKRVADKIVYGGKADEKQLKISPTLLLDVPEDSEIMTGEIFGPLLPIVTVEKIEESFDLINAKPKPLAAYLFTKNRKLQEEFVASVPAGGMLVNDTALHLTNPYMPFGGVGDSGMGCYHGKFGFDCFSHKKGVLIRGFGGEANARYPPYTTEKQKILRGLINGSFIALILALLGFPREKR

SEQ ID NO: 56563 - protein, 371 aa, Zea mays
  Clone ID: UC-ZMFLB73260B03_FLI.pep
RPCLPMFAWSRPRPHQPPAPISSSITPPNQNPNSTSPAIADVDGGFAGRSSADGCFAPPSSGPAAQASMPSIAPPSSSVAALTRQPVQFFKGCSVSKETKGPVRSFFTANSKSTTVKSADLKVASSFKNDGGYPAGGVSWKDDTLLPKSTTIRGQDHPVADPVLPMDSMITPEILSANVERVIDMFADDDTDTELDLDSPTEDFTSIAEAIEDIQQGKLVIVVDDESRENEGDLIMAASLVTPEAMAFIVRHETGIVCVSMKEDDLERLSLPLMVTTKENEKLCTAFTVTVDAKEGTTTGVSAKDRAKTVLKRAGHTEASVDLAMLAGLPPVAVLCEIVDDADGSMARLPKLHVFAEKENLKIISIADLIR

SEQ ID NO: 56564 - protein, 266 aa, Zea mays
  Clone ID: LIB3061-054-H6_FLI.pep
ACEKLWQRAWRRARGGGERLHRAGVPREKLPFYISRDVYEASIDFFLPDPRITSAYALQVQLHADEETYRSMGKEHALVISNHRSDIDWLIGWILAQRSGCLGSTLAVMKKSSKFLPVIGWSMWFAEYLFLERSWAKDEKTLKWGLQRLKDFPRPFWLALFVEGTRFTPAKLLAAQEYAASQGLPAPRNVLIPRTKGFVSAVSIMRDFVPAIYDTTVIVPKDSPQPTMLRILKGQSSVIHVRMKRHAMSEMPKSDDTFQNGVKTFL

SEQ ID NO: 56565 - protein, 588 aa, Zea mays
  Clone ID: UC-ZMFLB73238B06_FLI.pep
SRNPSGLAPAMAAPRATKRPKFASGAAPPQRGEDDYVPGNIVEIELFNFMTYDRLVCCPGPRLNLVVGPNGSGKSSLVCAIALGLAGDPSILGRASSVGAFVKRGEVAGHVKISLRGDTADDKICVTRKIDTKNKSEWLLNGATVTKKEVIDVIKKFNIQVNNLTQFLPQDRVSEFAKLSPIQLLEETEKAVGDPDLPIQHRQLVERSKELKAFEVAIRQNEQTLNNLKALNAEQERDVERVRLRDNLLRKAESMKKKVPWLKYDMMKKEFIEVIQEKEKIAKQEMEEAARVWEDSKGPIDKLKKHKATHTSNIKKISGQVNQNMDNRHKVMDHDLKLNAELKATFDEMDDLKKQEKSRQRRILKTKEDLAAAEKELEDLQPYELPKAEMAQLTDQIARISVEIKNLKAERNAMESQLAREEESLRRCSDRLKEMESKNSKLLQALRSAGADKIIEAYHWVQANKKNLRQEVYGPVLLEVNVQDKLHATYLEDHVPNYLWKSFITLDASDRDYIAREMKQYGIPVLNYLVREGTRRRPLNITPEMEQLGIYSRLDQVFQAPDTVKDVLISQAGLDDSYIGTDKFIVQV

SEQ ID NO: 56566 - protein, 115 aa, Zea mays
  Clone ID: UC-ZMFLB73247H01_FLI.pep
SMMLEEIWMMLEMCFGVVHLSRIKVHTPLFWFPKLIGTTRNYRVMSNFPTCLAMQSLVYGAKVEAAIAIGFNDFITYALRGIGFYQKDNMEIKKANGNGTLIPEQIFEKTRRSSR

SEQ ID NO: 56567 - protein, 275 aa, Zea mays
  Clone ID: LIB3062-012-D2_FLI.pep
ARHFASPLLHSIAVLRAPTSLWCLAMADYHFVYKDVEGASTEWDDIQRRLGNLPPKPEPFKPPPFAPKVDADEQPKSKEWLDVREPEELEELEDDLDDDRFLEKYRKMRLAELREAAKAARFGTILPITGSDFVREVSQAQSDVWVVVFLYKDGIPECGLLQNCLEELATRYPATKFVKIISTDCIPNYPDRNVPTILVYNNSAVKGTYVGLQKFGGKRCTPESVALALCQSDPVLNDGHGGSDSSRGNVFEGVRRKFIEKVVAQHEEREEEDSD

SEQ ID NO: 56568 - protein, 671 aa, Zea mays
  Clone ID: UC-ZMFLB73238E05_FLI.pep
ARPQLTRVVHPSPPTRQELALPPPVPGGGGEAAAARERHQAQGVRRAAGRMFGRDPWGGPLEISNADSATDDDRSRDLDRAALMRQLDETQQSWLLAGPGDQAGKKKKRYVDLGCVVVDRKIFMWTVGTILGLGVFIGFIMMIVKLVPHKRPPPPPPDQYTQALHKALMFFNAQRSGPLPKHNGVSWRGNSCMKDGLSDSTVRRSLVGGFYDAGDAIKFNYPMAWSMTMLSWSVIEYRAKYEAIGELDHIKELIKWGTDYILKTFNSSADTIDRIVAQVGVGDTSKGSSQPNDHYCWMRPEDIDYKRPVTECHSCSDLASEMAAALAAASIVFKDSKTYSDKLVKGAKALYKFGRLQRGRYSPNGSDQAIFYNSTSYWDEFVWGGAWMYFATGNNSYLTVATAPGMAKHAGAYWFGSPNYGVFTWDDKLPGAQVLLSRLRLFLSPGYPYEEILRTFHNQTDNVMCSYLPLFNSFNFTKGGLIQLNHGRPQPLQYAVNAAFLASLYSDYLEAADTPGWYCGPNFYTTEVLRKFARSQLDYILGKNPLKMSYVVGFGNKYPKRPHHRGASIPHNGVKYGCKGGYKWRDTKKANPNILVGAMVAGPDRRDGYKDVRTNYNYTEPTLAANAGLVAALISISDIKTGRFGIDKNTIFSAIPPMFPTPPPPPSAWKP

SEQ ID NO: 56569 - protein, 207 aa, Zea mays
  Clone ID: LIB3062-013-G8_FLI.pep
NPSLLVLCQTTTLSLADSRLIPRGGFASSASGTGRVLRRTVGGEQGERSSEMETAASAARLVNYPLVAALLAFALAQSSKFFTTWYKDGRWDARQFIASGGMPSSHSATVTALAVAVAIQEGFHSATFATALVFACVVMHDAFGVRLHAGKQAEVLNQIVYELPEEHPLSETKPLREILGHTVPQVVAGCILGILMAVVMHLALGSS

SEQ ID NO: 56570 - protein, 126 aa, Zea mays
  Clone ID: UC-ZMFLB73241D07_FLI.pep
FILLFSASVTNISEVVPLIHLQVWQLYEEDHPLDIADPKLTEFDSVELLRAIRIALLCIQSSPRQRPSMSRVVSMLTGDSEAPEAVSKPSYVAEWQSNTEGTSSSVSTAEAVSVAPFLNPVVDDGR

SEQ ID NO: 56571 - protein, 67 aa, Zea mays
  Clone ID: LIB3062-020-B9_FLI.pep
NSWTVPEVPSPPTASGLNWHGNLCFPAYDSTMLFLKLPPFRTPKVTSPYLPVSSAGEESTERRQEDH

SEQ ID NO: 56572 - protein, 326 aa, Zea mays
  Clone ID: UC-ZMFLB73260E03_FLI.pep
PPTLLSPVPSPMESLGVLLLHPFNAYLEQELDRRFRLYRFWETPREEFLRAHAGAVRAVVGNASYGADAALIDALPALEIVASFSVGIDRVDLAKCRDRGIRVTNTPDVLTDDVADLAVGLAIAVLRRIPQADRYVRAGLWKSRGDYTLTTRFSGKRVGIIGLGRIGQAVAKRVEAFDCPVSYHQRTEQRATYPSYTYYPSVVELAANSDVLVVACPLNAQTRHIVSREVMEALGPSGVLINVGRGPHVDEREMVAALADGRLGGAGLDVFEDEPNVPEALLGMDNVVLLPHVGSGTNETRKAMADLVLGNLEAHVLSKPLLTPVV

SEQ ID NO: 56573 - protein, 243 aa, Zea mays
  Clone ID: LIB3062-040-F3_FLI.pep
VKSELPSTFKAYRFQQHRWSCGPANLFKKMMVEILENKKVSLWSKIYLWYNFFFVGKVAAHTVTFIYYCCAIPVSVLLPEIQIPLWGVVYIPTLITLLKALGTPSSFHLVILWVLFENVMSLHRIKAAASGLLDAGGRVNEWVVTEKLGDTSKAKPGANGSDDVKVIDVKLTEPLVPKLVKRRARFWERYNCSELFVGTCILLCGFYDLLFAKKGYYIFLFLQGTAFLVVGFGYVGTLPHCNA

SEQ ID NO: 56574 - protein, 199 aa, Zea mays
  Clone ID: UC-ZMFLB73233D01_FLI.pep
NSPDARPQIALCPRSPVASLPLPCLPNPSGHPETARSLARSPRPETSPETMADQLTDDQIAEFKEAFSLFDKDGDGCITTKELGTVMRSLGQNPTEAELQDMINEVDADGNGTIDFPEFLNLMARKMKDTDSEEELKEAFRVFDKDQNGFISAAELRHVMTNLGEKLTDEEVDEMIREADVDGDGQINYEEFVKVMMAK

SEQ ID NO: 56575 - protein, 129 aa, Zea mays
  Clone ID: LIB3062-040-F8_FLI.pep
RSLDRVQEVPHEGPMCDLLWSDPDDRCGWGISPRGAGYTFGQDISEQFNHTNNLKLVARAHQLVMEGYNWAHEQKVVTIFSAPNYCYRCGNMASILEVDDCNSHTFIQFEPAPRRGEPDVTRRTPDYFL

SEQ ID NO: 56576 - protein, 339 aa, Zea mays
  Clone ID: UC-ZMFLB73238G09_FLI.pep
SVLSPSHTHYTLLCCSKKEEASASLALVVSNGHHRRVQPPQVLLRGLPAPFGHAHHHPVVRGRGHPARRRRPHPRVHLLLPHPALRPDVLPVQPHQGVHRVPRDDPALHDGHDHPRRHRRGDRGRRVRGPVLRVRAVQGPHRERGHRGAVRVPGRRRVAGRAAVLGHGGAQAGAPVPGRAGRGLRRGRGLRGGQARGAVHVHRDEPAPGAAQREAVQRRGGGGPDRAAGARRRRGHQLGARVHEPRHAVVHGPQRDGGQGGGQLLRPRRALRRHRRQEAPGHRHDQRRARDEGARHERRRGRDRAPHARGRARHDRHRDGGRRDRRRPEDGQSLIEEDS

SEQ ID NO: 56577 - protein, 368 aa, Zea mays
  Clone ID: LIB3062-041-H9_FLI.pep
LKKKMVLRSCSPSSWSAAGAAVATRASANPPPPLPSSPPSRPSRRAMDSSAGAGRHRVRIAVVGDVHNDWALEEDSKALRFLQPDLVLFTGDYGNENVELVRSISDLQLPKAAILGNHDCWHTHQFSEKKVDRVRLQLASLGEQHVGYKCLDFPSIKLSVVGGRPFSCGGDRLLRPRLLSKCYGVNDMAGSAKKIYDAAAGAPEGHSVVLLAHNGPTGLGSKMDDICGRDWVPGGGDHGDPDLERAISDLQREARVSIPLVVFGHMHKSLAYGRGLRKMIAFGANHIIYLNGAVVPRVKFAQTTPGHEQNQPEGSGSIAPTLRAFTIADLYEGRVEKISEVWVLVSGARTEVEEEIVLYKHPREQHML

SEQ ID NO: 56578 - protein, 366 aa, Zea mays
  Clone ID: UC-ZMFLB73241D10_FLI.pep
FLGPAMARVELLALLCLAGTLGAQATAGPRPDARVGVYELKLGDFSVKVTNWGARLMSVVLPDCKGNLADIVLGRDTVAEYFNDTSYFGPITGRVAQRISRGRFVLDGKVYHLQRNDGRNTIHGGGTAFSKSVWTVKEYVGGGDSPYVTLYYHSFDGEQGFPGNLDAYVTYRVSGPYTLGVHMSATALDRATPVNLLLHAYWNLGGQGSGDVLGHELRLHASRYAVLDEELLPSSGRVAPVAGTPLDFRTPTPIGARIRQVTGGKVVGYDANYVVDGEGMRPVAQVRDGASGRAVELWANQATVQLYTGNWLNHTQGKGGGVYDQYAGFTLETMGYVDAVNHPEFPSQTLLPGQEYKHDMVFKFSF

SEQ ID NO: 56579 - protein, 101 aa, Zea mays
  Clone ID: LIB3062-043-B1_FLI.pep
HLDTSTLITNIRNIEKAIRDCLDHFKSTRHMILYYEDIISNSNALSRVQEFLGVPVRRLMSRQVKIHTRPLPDLVKNWEEVSSKLNGTEFAHFLDGSDYAK

SEQ ID NO: 56580 - protein, 466 aa, Zea mays
  Clone ID: UC-ZMFLB73244B10_FLI.pep
IRDECTKSFLVLIRGTHSMKDTLTAATGAVVPFHLSLLDEGDVSKLVLGYAHCGMVAAARWIARGVTPCLREAVRQCPEYQIKIVGHSLGGGTAALLTYILREHKEFSSTTCVAFAPASCMTWELAESGKHFVTTVVNGADLVPTVSTASIDDLRSEVTASSWLNDLRDQIQQTRFLNVVYRSATALGTRLQSFSGARERVAGAGAFLRPVSNKTQVVMKQAQNVAQAVARSRSAFSSWSCMGARRRGVGVVTACSKDDMRVETHVTSTVESKSVLVEHCGAKTIEELQYTAASVSVHDAAEEEEALLSEHETSRENAEEETTEGELWYEFEKDLDRQAEMEARTREEEAAAAKEIMEEESAVLKGVDDRQSFTPDSLERQQFYPPGRIMHMVAMPPTDADPDDPVAADECCVGIYETPRDLYSKIRLSNTMINDHYMPMYKKMMETLIEKFARDEDCYCTGSTAE

SEQ ID NO: 56581 - protein, 300 aa, Zea mays
  Clone ID: LIB3062-044-D7_FLI.pep
RDILSMPMPMPKNPKIALMFLTPGSLPFEKLWEKFLQGHEGRYSIYVHASREKPVHTSSLFAGRDIHSDAVVWGLISMVDAEKRLLANALEDVDNQVFILLSDSCVPLHSFDYVYNYLMGTNVSFIDCFKDPGPHGSGRYSIEMYPEIDERDFRKGAQWFAVTRRHALMILADSLYYKKFKLYCKPAEGRNCIADEHYLPTLFNMVDPGGISNWSVTHVDWSEGKWHPRSYSADDVTYDLLKNITAVDENFHVTSDDKKLVMQKPCLWNGSKRPCYLFARKFNPEALDNLLKQFTSYTSV

SEQ ID NO: 56582 - protein, 394 aa, Zea mays
  Clone ID: UC-ZMFLB73245A11_FLI.pep
PRDRESSQKALARKNPTRETNLPNLSVAMALSDRSRESLLPSFLYGSSARSFAATGAAARLPVSSPAPAAAGAGGGVPFSIQAPKEKIEMYSPAFYAACTAGGIASCGLTHMAVTPLDLVKCNMQIDPAKYKSISSGFGILLKEQGARGFFRGWVPTLLGYSAQGACKFGFYEFFKKYYSDIAGPEYAQKYKTLIYLAGSASAEVIADVALCPFEAVKVRVQTQPGFARGLSDGLPKFVRSEGVLGLYKGIVPLWGRQIPYTMMKFASFETIVELIYKHAVPVPKSECSKTTQLGISFAGGYVAGVFCAIVSHPADNLVSFLNNAKGATVGDAVKKLGLWGLFTRGLPLRIVMIGTLTGAQWGIYDAFKVMVGLPTTGGVTPAPAAEAELKASA

SEQ ID NO: 56583 - protein, 82 aa, Zea mays
  Clone ID: LIB3062-045-B11_FLI.pep
VYVSHKSSGGRCSEKKFHHKVKHGGDDTLPGTVTTRNNFTHSSLTNLIPNYVVTERGKKVSLLRCAEILQVFFLGVGIRDEP

SEQ ID NO: 56584 - protein, 422 aa, Zea mays
  Clone ID: UC-ZMFLB73249G10_FLI.pep
DDDAMDVSENGHGNSSFCKKPKEGDVHVSSSSTEVAGTIPEMNGGDHHIPGSSFSCLVKIYDMPDSQVKLNDVIEFIGVYTFDPELAAPSDNPDDIMLDLIEDVTVQLPPSKVPRLHCLVWRKLSFHDFISRPVVEPSPSLLRGIRQSLLSHLTLVLGNDELAAQCLLLHLLSRLRNRVDVVTVGRLSLNFTGFNRESASIFGNQLYSLIQKLVPYSQAIPLSIEYLNTATLQPRKDNKSGRLVTGVLQLPQGTHLIFDETLLQTGSLTSKGVENTMLLKNLMESQKVDYDFEYYKLEMAADVQLLTLSEGKSNILPSDLVVPFRPSSVPTVNAGAEETESWRWFLTTVRSLPQSTEPETYQMIQDEMVSAMRDDRSLGCSELSRWLTMAQIMASSFGEKSLSLEHWQMVKELERLRKQRMQ

SEQ ID NO: 56585 - protein, 242 aa, Zea mays
  Clone ID: LIB3066-006-B1_FLI.pep
ARPSLQITAMAPKILVILVFLAVASPAALAAFDVIEMLADKPTYSTFLKLLQDTKVAGEANQLRSATLLVVPDKLAKPLASLPADKVRPAVENHVLLSYFDPIKLDEMKTRTAILPTLLSVTDKKLGVLNYTRADDGQMYFGAPGAPCVAKLVKVVAARPYSVSIMEISEPILPAALPSPVAAPGRRGKGGKRKIKPSAATHEDSNMIPRKPVEAVVVGKGKVAKDTVSESPAPSPAPVSAP

SEQ ID NO: 56586 - protein, 226 aa, Zea mays
  Clone ID: UC-ZMFLB73254F02_FLI.pep
ATPIDLPASSMAAGAGARAKAAGALALALVLALAGANSEGDALSALRRSLRDPGGVLQSWDPTLVNPCTWFHVTCDRDNRVTRLDLGNLNLSGHLVPELGKLEHLQYLELYKNSIQGTIPSELGNLKNLISLDLYKNNISGTIPPSLGKLKSLVFLRLNGNHLTGPIPRELSGISSLKVVDVSSNDLCGTIPTSGPFEHIPLSNFEKNPRLEGPELQGLAIYDTNC

SEQ ID NO: 56587 - protein, 271 aa, Zea mays
  Clone ID: LIB3066-010-E5_FLI.pep
RIYPSHSPQGSVPSAAAAMSLPPGPADSGTGTGDDWFLDCGILDDLPAAACGAFPWDASPSSSNPSVEVGSYVNANDAFKEPNDVFKEPGSSKRLRSGSSDMPTSKACRERMRRNKLNDRFLELGSALEPGKPVKADKAAILSDATRMVIQLRSESQQLKETNGSLEEKIKELKAEKDELRDEKQKLKLEKESLEHQMKLMASAPAYMPHPTLMPAPFAQAPLTPFHAQGQAAGQKLMMPFVGYPGYPMWQFMPPSEVDTSKDSEACPPVA

SEQ ID NO: 56588 - protein, 117 aa, Zea mays
  Clone ID: UC-ZMFLB73257A10_FLI.pep
DRHNDPMDVLVLMQEPVVPGSFLRARAIGLMPMIDQGEKDDKIIAVCADDPEYRHYNDISELSPHRLQEIKRFFEDYKKNENKEVAVDAFLPATTAREAIQYSMDLYAQYILQSLRQ

SEQ ID NO: 56589 - protein, 80 aa, Zea mays
  Clone ID: LIB3066-014-E3_FLI.pep
GETAGGRRRFHGHVYGARDRARRCLQRRREGACAGPGPLRVAVGLRSGVLLGHQRVRRHRPGAVPEPAVSRDNATASMLN

SEQ ID NO: 56590 - protein, 386 aa, Zea mays
  Clone ID: UC-ZMFLB73234H09_FLI.pep
LVDYIASASGKFSEASMQEITKMVSANLFRTLSTPPRDNKVDGFDVDEEEPVMDPAWPHLQIVYELFLRFIQSQETDAKLAKRYIDHSFVLRLLDLFDSEDPREREYLKMILHRVYGKFMVHRPYIRKAINNIFYQFIYETEKHNGIAELLEILGSIINGFALPLKEEHKLFLVRALIPLHKPKCIAMYHQQLSYCITQFVEKDCKLADTVIRGLLKYWPITNSSKEVLFLGELEEILEATQPAEFQKCMVPLFRQIARCLNSSHFQVAERALFLWNNDHIESLIKQNSRVILPIIFPALERNASGHWNQAVQSLTLNVRKLFSDNDPGLFTESLRKYEEEKAREKEVKSKQEATWRRLEEMASAKATSGAAVLVSRPLSRQSSAV

SEQ ID NO: 56591 - protein, 483 aa, Zea mays
  Clone ID: LIB3066-017-C6_FLI.pep
VPPPPSSPPPRLNLLLPRSLLALAARAMPSRRPSPVLLLLLALSLALLFLLLSPSFPSTSRFSRSLSSGSAFASSSPASTSASPAPVKIYLYDLPAKFTYGVVRSYKAARATSGSANAAATLPDEQLRYPGHQHSAEWWLFKDLLRRRPQDRPVARVDDPSDADLFYVPFFSSLSLVVNPIRSPLAANASGAGTAYSDEALQEELLEWLERQLYWQRHRGRDHVFICQDPNALYRVVDRISNAVLLVSDFGRLRSDQASLVKDVILPYSHRINSFKGEVGVDGRPSLLFFMGNRYRKEGGKVRDALFQILENEDDVTIKHGTQSRESRRAATQGMHSSKFCLHPAGDTPSACRLFDALVSLCVPVIASDYIELPFEDIIDYNKISIFVGTSKAVQPGYLTSTLRRISSERILEYQREIKKVRHYFEYEDPNGPVNEIWRQVSLKAPLIKLLTNRYKRLLERGTNGTDCSCICSTTPTDITAAS

SEQ ID NO: 56592 - protein, 219 aa, Zea mays
  Clone ID: LIB3066-019-G9_FLI.pep
SRTSSQIECSLECPVVCSISLYDSCMEATDSDHKPVKCVFNLDIAHVDKQTMRQKYGEIMSSNKEVLDSLQGLEALPEVDISTNDIMLQDQNPFVVKLHNRSTKELACFEIIGQTPMSSGTAFSGFPSWLKVSPAVGIISPRQSVEVTLQHGQIRSQDYLTGTSGDSSGAAQEKVATLLVTVTRVDSTAGRRHKIQVQHRCRRETYSSRGYNLADRFFA

SEQ ID NO: 56593 - protein, 338 aa, Zea mays
  Clone ID: UC-ZMFLB73255D11_FLI.pep
RNQPCICILSVCAASNKPCISLTWDITMPKDRSSRVSSYESRRAGASPYFSSSHGQSSSCRRSEESCGAAAAAAAKQAAEWEDVRCPVCMDHPHNAVLLVCSSHEKGCRPFMCDTSSRHSNCYDQYRKASKDSRTECSECQQQVQLSCPLCRGPVSDCIKDYSARRFMNTKVRSCTTESCEFRGAYQELRKHARVEHPTGRPMEVDPERQRDWRRMEQQRDLGDLMSMLRSGFNSNIEDDSGGLGDTEEGGEEAEMTPASITMVFIMPSRGSIMQYLSERSRTIILVSRRRASSSSGGDAEATAPDSEEGDDPMPSAEASAGSQHSSEQEEADGDPAQ

SEQ ID NO: 56594 - protein, 87 aa, Zea mays
  Clone ID: LIB3066-026-F1_FLI.pep
PNTNTMEQGVTPKLFKTTGSFRAIRPWSYQTTSFRAGKLGADELGGRDHVGQGGLDLRVLACLETTVRVHPEDVGVEHGEHLLDAVC

SEQ ID NO: 56595 - protein, 431 aa, Zea mays
  Clone ID: UC-ZMFLB73257C08_FLI.pep
EKLRDLSVTLAPQPESGSAEIAGEMAREAASEATASRESGAEAAGECWSEALKSFLDHIPVSSVPGALQPTASPAVEVKLHGSVLGALDAMYSSNAAGAVIIDVVHSSLGKYVDRDIGFVEFSSLVLWALEELGKVESEPTDSTSDFLSTLKQHHQIAETKIAWLAKLFLWEPFFPVRTHDTLFHAMLLFSKHHRLNVAPVVESMNSSVIGFVTQDAVMELLLQSSGLEWLDKIADKQLSEFRFANVRKPVLVYSDQTLADGLHILSKEKTGVAVIDRKTSRLIGSLQCSDLYLFLDDSTLFSKRTTTTLEELISLNNKTDRKCSTAENSCAPGRNILALRSRQSGMVGLPATNLESDTLKQAMEKLTTLRSSCSFIVDEHGRVQGVVTTRDIISVFSPLCMDSRIDGATFFSAALEQAGCRVENGQMFQN

SEQ ID NO: 56596 - protein, 320 aa, Zea mays
  Clone ID: LIB3066-032-C12_FLI.pep
PMVVPSGPKVPALLAFGDSIVDTGNNNYLVTVVKANFPPYGREYPNHKATGRFSDGKITVDFLASALGLKETLPPYLNKSLTLEDLKTGVSFASAGSGYNNATCRTSSTMTIERQLQLFSEYKAKVGGIHERALFVVCSGSNDIVEHFTLADGMTSPEYADMMARRAIGLVEALIGQGARQIALTGAPPVGCVPSQRRIAGGVRMQCATDRNQLALLFNRKLSLEVAKLSGKYRGVNIFYVDLYSVLADVVQRYQALGFKDGKDACCGYVGLAVGPLCNIGSRTCPDPSKYVFWDSYHPTERAYKLMMDDFLTRYMRYIH

SEQ ID NO: 56597 - protein, 298 aa, Zea mays
  Clone ID: UC-ZMFLB73262A01_FLI.pep
PHTQTVTHLRARDLTLLTSALREEGHCGRAMASVEGKRETVLVTGASGFIGSTLVGLLLDRGYNVHASVLNPDDKAETEHLVALGAGAGEGRLRVFPGDLLDGAALMAAARGCSGVFHLATPCTVYPVSDPQGQMVVPAVEGTLNVLRAAKEARTVRRVVVTSSSSAIIPSPAWPAGEPRDERCWADVDYCKKNEVWYPVSKTLAEKAAWRFAEENGVDVVVVNPVTAMGPMIPPTINCSMIVLLRLLQGCPGFFRPNGEWVTCFCSWHWHGGSEVYFGKDRVAEERASCPFYTQESR

SEQ ID NO: 56598 - protein, 240 aa, Zea mays
  Clone ID: LIB3066-036-F6_FLI.pep
VGRGRDRMLGFRQMSWSSAEAQAPSEQLCEGVAAVVAARQGMETPLTAVAEAFEELVRGMDADGGELRVAPFSDTCALVSVLFSSLGMAFRFAEMEYVTKVNDLIGAGKSYRTLSDILDKDIQNDCVKKQGSHSRNLRRVRLGLGLIKALFEQFLATEGSLYDAATTAYGQVCAPFHSWAIRKAVGAGMYTLPTREQLVVRLNETDLSVQKQMRRYIDASSPIIEYIDNLFLSRNISLDW

SEQ ID NO: 56599 - protein, 448 aa, Zea mays
  Clone ID: UC-ZMFLB73277E12_FLI.pep
ISILEKLHAKGFVHGDVKPENFLLGQPGSPDEKKLFLIDLGLASRWKESGSSGQHVEYDQKPDIFRGTIRYASVHAHLGRTGSRRDDLESLAYTLIFLLRGRLPWQGYQGENKSFLVCKKKMATSPDLLCCFCPTPFKLFLETVTNMKFDEEPNYSKLISLFDELIEPQHLRPIRIDGALKAGQKRGRLHVNPEEDEQPKKKVRLGSPANQWISVYNARRPMKQRYHYNVADARLHQHIEKGNEDGLFISSVASSANLWALIMDAGTGFTSQVYELSPIFLHKDWIMEQWENNYYISAIAGAMNGSSLVVMSKGTPYTQQSYKVSESFPYKWINKKWKEGFHVTSMTTAGSRWGVVMSRNSGYSEQVVELDFLYPSEGIHRRWENGYRITSTAATGDQAAFILSIPKRKLMDETQETLRTSAFPSNHVKEKWAKNLYIASICYGRTVS

SEQ ID NO: 56600 - protein, 256 aa, Zea mays
  Clone ID: LIB3066-038-D6_FLI.pep
AGSSGAPPAPNMTEPPAGWAWSINQARSFRWNLTASAARPNPQGSYHYGQINITRTIKVMVSRGHIDGKLRYGFNGISHRDTETPLKLAEYFNVTDGVFSYNQMGDVPPAVNGPLHVIPNVITAEFRTFIEIVFENPEKSIDSLHLDGYAFFGVGMGPGTWSPEMRKTYNLLDTVSRHTIQVYPRSWTAIMLTFDNAGMWSVRSNVWERYYLGEQFYISVISPARSLRDEYNMPDNALRCGKVVGLPLPPSYAPAR

SEQ ID NO: 56601 - protein, 336 aa, Zea mays
  Clone ID: UC-ZMFLB73284B06_FLI.pep
RGEKRKFDPTKQCPEKTKKKSENKKKINKEETEYQCPSTCRHQEPMQLNPAKDIYPASCVVTASGRREACPPTAPPPTWRARPRSPPSWSGRRGRRRSPRPSLPRRGRRGARRGPWPRTPWPPAAGPPSPPRRWRPGAPARRRTPRRSTPPAPRTAPSGAGPACRRPPATRARGTCPSGAPAAARPGSTRPTCTSAAARPPPPGRGTRRPAPPSTPRTAGAARSRRAPPRPRPGGAARSTPSRCRAPGCAPCAGAPARARRTAPPACAPPSPAASGPSPGSRGAWRRGCRWGGSRRRAASRPWRSSRRGRGARSGAPPCRPPPCARRTRAAAPPRP

SEQ ID NO: 56602 - protein, 201 aa, Zea mays
  Clone ID: LIB3066-043-D10_FLI.pep
PSIDKMEVPRLPQGALPSMALPRPSPQSTPRSRAHLPAIKVVTPDEDGRESPHGGPGPSDSSGAGARKKLRLTNEQSTLLEDTFRAHNILSNAQKQELGRQVDLSARQVHIVFCVYVVVSSSILFVGKTLIGIFPAISLIGDIIIVGIFYFIGFALFCLEAFLNMWVIQLLHPSDQFRREPGEPCTCGVVHLESDTIIEYD

SEQ ID NO: 56603 - protein, 431 aa, Zea mays
  Clone ID: UC-ZMFLB73262H05_FLI.pep
NRANPCSDPPLLGLLDGSSRAGAEAMWPGCGGRFYWAPESAPPGQARGVAVLFAWVWSDEAQLRPFVELYSSLGWRCLVCHPDLVALYLSEKATSLATGVISELVKELRVKPVPTVLASFSGGSKGCMYKVIQLLAGICEGDATMKDYRLVRNCICGQIYDSSPVDFVSDVGTQFLQKPAVGNLSQSTILRSWMAKVLASGMDTLFPSRIEAQRAEYWHTLYSAAGLGPVLIFCSEDDNLAPCHIICGFARRLIELGTDVKLMKWSDSQHVGHYNSHEIEYRKAVDDTLKKALVTFCHRSQLYDSNMAGDQEYKIAHSVCSLHNAAANSNESLRRVANSPSDHFFLPSSKDHDESREPSSLIEDQRRHISHPPCMEPKGVLGQILFDVCVPNNVEGWDIKPTVSPNGRPTFASARQLGPFNPIRYFRRSRL

SEQ ID NO: 56604 - protein, 431 aa, Zea mays
  Clone ID: LIB3066-048-D11_FLI.pep
CIPVMGGVLELGTTDTVPEAPDLVSRATAAFWEPQCPTYSEEPSSSPSEANETGEAAADDGTFAFEELDHNNGMDIEAMTAAGGHGQEEELREAEALPDDASLEHITKEIEEFYSLCEEMDLQALPLPLEDGWTVDASNFEVPCSSPNPAPPPVDRATANVAADASRAPVYGSRATSFMAWTRSSRQSSCSDEAAPAVVPAIEEPQRLLKKVVAGGGGAWESCGGATGAAQEMSATKNHVMSERKRREKLNEMFLVLKSLLPSIHRVNKASILAETIAYLKELQRRVQELESGREPASRPSETTTRLITRPSRGNESVRKEACAGSKRKSPELGRDDVERPPVLTMDAGTSNVTVTVSDKDVLLEVQCRWEELLMTRVFDAIKGLHLDVLSVQASAPDGFMGLKIRAQFAGSGAVVPWMISEALRKAIGKR

SEQ ID NO: 56605 - protein, 166 aa, Zea mays
  Clone ID: UC-ZMFLB73275G11_FLI.pep
LFSNSRPEETPTGGGRICAAMATSNTARMEDGGGDLRSTIKKWNIIYPVYLNSKKTVAEGRRIAAAKACPDPTCIEIADCCSHLKIPHAIELDKAYPRDFFQVGRVRVQLKKDDGSPVNPAIKTKKQLMIQVAELVPKHHGRTKKQEPAPNPGGSSKNTKGGKKKK

SEQ ID NO: 56606 - protein, 84 aa, Zea mays
  Clone ID: LIB3067-001-B12_FLI.pep
PTHRLLIQPLNPCCMQCNRKVQAMCKRTRCVETTCISHSCFIIQVEQTGSASPGVLLSLLLGFAREGVRRRAQGLKAPPSTDAA

SEQ ID NO: 56607 - protein, 418 aa, Zea mays
  Clone ID: UC-ZMFLB73278B02_FLI.pep
QDDTDTASGSDYVNGKAGSGFFGITQLDGTLFLTRSVDLRTLLGLTPDPDSQTRVAFATQFQRSFMTLLRNAQFEELSAQDLLLTYALNNDYLLTLPIYVDWKKAAQSNAIIFRRGYATERQKGLLLVEKLDYLQSKLLQNVFFSLSKPLKKPGKWLNEALKRSTDNQGFQIWIDKLRLWLKEQTYADNSLLLIESSSWDKLSSDQLPDADVPIWIAAQRAVSRYEGILSPVGPRGRLLRRLLKWTGLIPSLPEATIKSNNETKHLEGHVRPNFLPRITLANIWEPASRESCNNNIWEMVKASFRILFGRSTLQEPAFQELILLYTDEVVPSETKDEMVPLQLKIYERIPIPDLPVVFPHKKLSFRILDTVRLDIATVIGLLAYVVNYKFESLASSPCWYCTRHTCFPCSTGLQTDPG

SEQ ID NO: 56608 - protein, 238 aa, Zea mays
  Clone ID: UC-ZMFLB73279D05_FLI.pep
LDLIRGKNFLVLMDSCLEGHVSSSDGTDLMRLASRCLQYEARDRPNLKTVVSGLECLQKDVSTPSHTLLGIQHDNKNSDRISLSAIGKAFARADLNEVHEILLHDGYDEDDTANAELSLQSWNDDVSESFVVKRHADNAFRSKDYSTAIECYSRFIDSGAGVAPTMLGRRCFAYVVAGNPQEGLEDAKRAEVIASDWPMGHYLQALALHNLGREAESQEALKNGTALEAAMNSRARTV

SEQ ID NO: 56609 - protein, 232 aa, Zea mays
  Clone ID: LIB3067-008-H4_FLI.pep
ASDSNLEGPGHIVVSRKPIAEIKPMSVIRIQSYTTLLPLFLCKFKWKSKNANAQLPMQTHRTMHTGHSLPVTPRSDARQQQTEKSLQHADGQVERRRHGGLELGLAVLHQQSHGEPSREVRVDVAVHEPHPGVVGHEAHDGPAADGHSDGVAAGRVHQVEPGGVAARVVVAEPRGQHVEVVAVDVHGVLLGGEDARVLEHDLHHGAVPDAVQAGALDGLPQRARDVLRGEVE

SEQ ID NO: 56610 - protein, 76 aa, Zea mays
  Clone ID: UC-ZMFLB73286E12_FLI.pep
FARNMTTNHSRTQTERLTKESSCISVSIHSSPVCPPSTIAFVPPTTQVLWPQAKRGGRPGIFNILQVGFSSVGSNR

SEQ ID NO: 56611 - protein, 275 aa, Zea mays
  Clone ID: LIB3067-009-B7_FLI.pep
HLQQQQELHSLDTTYKLPLLLSSHRVPVLPRSDGVQGSRHFQNRPEKPPGCCCCPWPPPPPLAPACGGLGGAPLDDSLRLNVPLDGGLLGPAATPVGARFSGAGDGASCCCCCFGCFFPPASKLPTTICTVQITMVVTDHSAVGGRQLSGVDEEIWRYSRRPTTLCNLRYHDEMNGTRKVVIFQPAGSRGRQQTCTGEAAVRSPATQPPRTRPSGPASETLSPPVRLRWPPFSDRRNDPDRDSISKRPCFRYSGDQDFSFHSSSPTPTAQYIYQR

SEQ ID NO: 56612 - protein, 248 aa, Zea mays
  Clone ID: UC-ZMFLB73265G06_FLI.pep
HFKLSSRQYPLIEDEKEHMSHIPYSNAVGNLMYVVICTRPDLAHVVSVVSRFMHNPGKEHWNAVKWILRYLKGTSHFGLLFDKNSVNEIGVMGFVEGIIDFDFAGDLDKRRSISGYVFSLCGSVMSWRALLQSITALSTTEAKYVSTTKRVKEAIWMQGLISELGVTQDVINVYCDSHSAICLTKNDMYQFNTKHIDIKYHFIRDIVVEGKIKVDKIHTDANSADMLTKPLSNTKFKHCLDLVGVRGG

SEQ ID NO: 56613 - protein, 252 aa, Zea mays
  Clone ID: LIB3067-022-B12_FLI.pep
RGGRVRGRRGAGGVDPRRRHQPAAHGPDPGRLPLPRRRGRLPEDPPRGRRPRPVPRVWPVHPHLRAVERGVVVHLRRGAAVPVARRGDRALRELRLPDGCAGRERGPGRGHRGAGDDAAGHREDAAAGDGGRRGGAAHAGQHRARAAQGGRLGGVLPWAGAQVGVHVAVRGHHGDHLRVPQAALRQGGLLGLDPSLAVLKRLYGIARASPPSSKSKIDAIDRSMGMKLMIIRILFSLVHIAHQVYFPSFLFP

SEQ ID NO: 56614 - protein, 483 aa, Zea mays
  Clone ID: UC-ZMFLB73272H09_FLI.pep
WIPSQLKKINSLQTDGNSWSTGPAPPPPPYTAPPPPPNHWNADGSSSSSSSGGRSGIGGGGVAGIIISLLVVGSVVAFLVIKRRKRKAAMKEHFEQHQPFTSFPSNEVKDMKPVYEATTVDIESLASPASVNLKPPPKIERNKSFDDDDDFSNKLVAKKSNITPINATVYSVADLQMATDSFSFDNLVGEGTFGRVYRAQFNDGKVLAIKKLDSTVMPFQSSDDFAELVSNISKLHHPNLNELVGYCMEHGQHLLVYDFHRNGSLHDLLHLSDEYSKPLSWNTRIKIALGSARALEYLHEICSPSIIHKNFKSSNILLDSEFNPHLSDAGLASFIPDAEFQAAEQSAGYTAPEVDMTGQYTLKSDVYSFGVVMLELLTGRRPFDSSRPRSEQSLVRWATPQLHDIDALDRMVDPALKGLYPAKSLSRFADVLALCVQPEPEFRPPMSEVVQALVRLVQRANMTKRMLDGDTSRRPDDLDQDFI

SEQ ID NO: 56615 - protein, 732 aa, Zea mays
  Clone ID: LIB3067-025-B5_FLI.pep
NRRRDALADSSAPIPPPPCPAGDVGPAAMATSAAAGSRRKAPSPPKHRHDGTSPLPLGMDWSPPPKRWEGRNTIWPHNPQTGWSYCVMMPSWITQTPETGVTADSFLKSVVFYRIHVGIQSSEGFSSIHGILRRFSDFLKLSSDLKSAFPRKDVPSAPPKHAFLRINSSRLLLEERRHALEEWMQKLLSDIDLSRSAPVAAFLELEAAARSYFQERNGRPSEVGPSAKSSTKSSSHSDGPASGSLAESNEINQGLTRGSSLTGATGNGVLGEAILDQSDEHVSSALNHRKGNLVLEHDGRNGSVASYRGVLSEEDRDSYPGHARKDSAESIGSDLSSLRGSELSVPGASNSLWDGAVVDGHVSQTEHLTGLDMHLLYDMDAQVILPNDKKQKLTRLLITMQRRIGTAKTDMEDLIARLNQEGAVKEYLTTKVKDLEVELEATKQKGRETLQQAILAERERITQMQWDMDELRRKYSEMESNLKTEHNEKTRAESERTTASGENETLLEELEIKQKEVESLKQQLVEAEAKSKADKKVLVKEVKSLRNSQTEMKKVLNQYLEEKTDLERVINRDKQRSARTKLSRVKILHECRLLRERLQDCSAKFLAEEQDNFTIDPSSLPDALDLLATSDNRIRLLVAEAQLLARDDEQGSSDGGDDSDSRSSLTMSSEDAKVTDEDTTKMLSDLLIDNAQLRLRLNAVIRNAVNTSVKPEKEGSGEVLPKKTVLNWLLDR

SEQ ID NO: 56616 - protein, 410 aa, Zea mays
  Clone ID: UC-ZMFLB73275H07_FLI.pep
GFPLSLLLPDAMAIPPRTPSPPPSWSRSVTETVRGSHQFTVRGYSLAKGMGPGRYLASDVFAVGGYHWAVYLYPDGKNAEDNSNYVSVFVALASDGIDVRALFELTLLDQSGRGCHKVHSHFDRSLKFGPYTLKYRGSMWGYKRFYKRTLLEESDFLKNDCLVMNCTVGVVKNRIETPKDIQIHVPRSDMGRCFKELLSRCIGCDITFEVRDEKVRAHKWILAARSPVFKAQFFGPIGKPDLHTVVVEDVEPVVFKAMVNFIYADELPSIPELAGSASTWTSTVVVQHLLAAADRYGLVRLRILCESKLCDELTPETVATTLALAEQHHCAELKSVCLKFIALRGNLGAVMETEGFDYLEDTCPSLLSDLLATVAVVDDDLASLNRKRGVSGNQVMALVGSVERRTRRKL

SEQ ID NO: 56617 - protein, 154 aa, Zea mays
  Clone ID: LIB3067-028-B9_FLI.pep
GDLLDVILKGLCSHEKVEEAYSLFVEMVDKAELRPWQGTCQHLIGDLLRVNKLEEALALLKTMKTCKFPPFADPFPPYIAKYGTVEDARNFFKALTVKTSPAPAAYLHVLKLFFAEGRYSEAQDLLYKCPIYIRKHPHVAKLFESIKIESASAS

SEQ ID NO: 56618 - protein, 430 aa, Zea mays
  Clone ID: UC-ZMFLB73278C07_FLI.pep
YHGARPGRQLVHEAGQEARRARPADEAEAGQIRAPHLPAVAGPADRSDPLCHQVHRARDQLRQRQPAHRCVPWQGAPRRQLPGNSHRRVHGQHPSRARRHRQAHVRAVLGAGERLLQQRPPVQPVRRAQPQLGLRLQGRRDRHGLLLLGAPVPGQPGDQPRPERGAAQPGRELPGPHLVQEDRRGSGHPEADDVHVPDRAVPGHRPAAPRGEREGRGEELRDAGGQEVAEPERPGRAPQRALLREGPADGDRPRGGVRVRGRPVQPQLPADAEAPRGAGRARAGQRRRRARRGDVHLRQGGRVRAAGPRGAAQGGGGRARGRGERQPPGPQQDQGVPVLPAVPVRARGRRHRVPDRREDQVPRRGAQQGARGHQPAQAHRPAARVPQGVERRAPAALLSSAARTCSAQRRKKQKYSGSRQCFKIVYLQPD

SEQ ID NO: 56619 - protein, 202 aa, Zea mays
  Clone ID: LIB3067-031-B1_FLI.pep
PETGSKQPRARAMAKPRSGGGGGLLDLEGHYAFYGAYHSNPVNVGIHELFVWPIFLTALMLLHLTAPSTHAAGISAAVYAAYYFLLDRRAGALAALLCYLCWAASGALSARLGFSVGWKVVLVAQLFCWIMQFIGHGVFEKRAPALLDNLVQAFLMAPFFVLLEILHTFGGYEPYPGFHDKVSKLIEEARKEWEDKKSKKSS

SEQ ID NO: 56620 - protein, 299 aa, Zea mays
  Clone ID: UC-ZMFLB73286F02_FLI.pep
VARQSMQEQELLAEDVFSFWLNRSPDAAAAGGELVFGGVDPAHFSGNHTYVPVSRKGYWQFDMGDLLIDGHSTGFCAKGCAAIVDSGTSLLAGPTAIIAQVNEAIGADGIISTECKEVVSQYGEMILDMLIAQTDPQRVCSQVGLCVFDGARSVSEGIESVVGKENLGSDVMCSACQMAVVWIENQLRENKTKELILQYANQLCERLPSPNGESTVSCQEISKMPSLAFTIANKTFTLTPQQYIVKLEQGGQTVCISGFMAYDVPPPRGPLWILGDVFMGAYHTVFDFGNDRIGFAESA

SEQ ID NO: 56621 - protein, 80 aa, Zea mays
  Clone ID: LIB3067-031-D11_FLI.pep
RGLRTIYYIVQNGNTHSSSIQWSGTIEYILKITQPLTTRELLISQLLNSRLPRHPHHRHPLHRLPHSPSQKPVRTWLLLR

SEQ ID NO: 56622 - protein, 112 aa, Zea mays
  Clone ID: UC-ZMFLB73263E06_FLI.pep
PWTLYLKTTIFLIKLSWLRCLPEIKDSDEWHQTDPIQGCQWVLLPDIFLLSFLSPSARPDSLAQVSCRGKMSMGVTLLSCLKSAGAEELCLDYAVVLIEPADKSSSPFNSAI

SEQ ID NO: 56623 - protein, 170 aa, Zea mays
  Clone ID: LIB3067-032-B1_FLI.pep
SSNYSQEVKTPLDTEINYQDYLKLRTRVEFLQTTQRNILGEDLGPLSMKELEQLEDQIEISLKHISSRKNQMLLDQLFDLKSKEQELLDLNKDLRKQLQETRPENALRVSWEEGGHSGASGNVLDPYQGLLQHLDNDPSLQFGYHHQAYMDQLNNEDLVDPNEHGRSGWI

SEQ ID NO: 56624 - protein, 163 aa, Zea mays
  Clone ID: UC-ZMFLB73266A11_FLI.pep
LIEYRAHPFWVQKYCPSHEMDGTPRCCSCERMEPRESKYVLLDDGRKLCLECLDSAVMDTNDCQPLYLEIQEFYEGLNMKVEQQVPLLLVERQALNEAMEGEKAGHHHLPETRGLCLSEEQTVSTILRPRMAGNKIMGMITEPYRLTRRCEVTAILILYGLPR

SEQ ID NO: 56625 - protein, 73 aa, Zea mays
  Clone ID: LIB3067-034-F5_FLI.pep
MRIFQIHQSSNIRKICSLYFTYYRRRKILKYIHQMYKKNKFKGAFSSPFLILYNDSHATKEKLNLIVLIIYRS

SEQ ID NO: 56626 - protein, 220 aa, Zea mays
  Clone ID: UC-ZMFLB73276A10_FLI.pep
QNLIHQHLIRAQTRMKKQADKHRSERSFSVGDWVYMKLQPYVQSSVLPRAHQKLSYKFFGPYRVANRVGSVAYRLELPNSSRIHPVVHVSQLKLAKGFSGSATSSLPDELPEFSIPLRILQTRGFAKGKRFVKQVLVQWSNLPTELATWEDQDNLRQCYPFAPAWGQAGFQGGENVNNESMDSPTVSRGVPNGEPEAAPVVRTRRVCRANVRQQGPEWVQ

SEQ ID NO: 56627 - protein, 325 aa, Zea mays
  Clone ID: LIB3067-038-B7_FLI.pep
CFRHLMQNYVKQFVGSEYMYPAARAYRREVFDHYFSDVQEIPKVSSWLHEHHDSLWYRSGFNPAIKCDYVTNNIAEVFNNWIKDWKDLPVCDLADKIRKEIMELFQKRREIGQRLQGRILPSVVHILHVRTRGLGHLTVKKADNYIAEVRDNNDEHSKHIVNAQLRQCSCNEWQHTGKPCHHALRLITTQQFRDVRMEDFVDDYYSVDKFMKAYSRVVEPIGDKSFWPTVPFAKEVCASIGKRGVGRQRKNMIKGCLEGGSGKKPNENENVKTKKMIRGKFKCPNCGELGHRKASYKCPLNGTKKRKRRARKNVTKGWFPKDVEA

SEQ ID NO: 56628 - protein, 374 aa, Zea mays
  Clone ID: UC-ZMFLB73278C08_FLI.pep
GSERGADTTDNDRQTRIEGAEINKSLLALKECIRALDNDQIHIPFRGSKLTEVLRDSFVGNSRTVMISCISPNAGSCEHTLNTLRYADRVKSLSKGGNTRKEQSTGPTTTSSRDSLSALSYSLPAEAEEIPNQVQEKRPVDTYRKGTENFISNPSVESDRNSFSTIPNYSNRGREENGAASGNDRESYDLKSSQPAYTSKPQLVQNSANTQEEEKVTKVSPPRRKAYREDKSDRQSNYMKKDNGPETSRVGYKMQQAKQLQQQQRPASASASSRQSEKESSCDDVEIDAILEEEEALIAVHRKEIENTMEIVREEMNLLAEVDQPGSLIDNYVTQLSFLLSRKAAGLVSLQSHLARFQHRLKEQEILSRKKPSR

SEQ ID NO: 56629 - protein, 172 aa, Zea mays
  Clone ID: LIB3067-042-D12_FLI.pep
RGRRPGRGLGLGRHPAAPLLRLPLPLLRSRGCFGCCDKTVKQLGELSRNLITQDQITIGEPFWSTTTIEVEPADLSGVTSVNTSNLASGTGSSHNLPGLGNNGLVLWEHTRQEWTETRSLRLKVKQVREPVLSWNAAYESLLGSNKPFPQPIPLHEMVDFLVDIWEQEGLYD

SEQ ID NO: 56630 - protein, 119 aa, Zea mays
  Clone ID: UC-ZMFLB73279G11_FLI.pep
TIEKNESHPQCFSLFLTIPIFVCSLSFSNTSACKKYVNVSVTITFYPHYHYCHLQNLADFRYEREKNSPPYTKDALMFKITEVLENTIEYMTFSSPFLHVTSHTNVIPTTNITNPHIGQ

SEQ ID NO: 56631 - protein, 513 aa, Zea mays
  Clone ID: UC-ZMFLB73284D03_FLI.pep
SANMGTRGVALLLLAAVLLLQALLLASSEGLVRVALKKLPVDQNGRVAARLSAEERQRLLLRGANALGSGGDDDSDVIALKNYMNAQYFGEIGVGSPQQKFTVIFDTGSSNLWVPSSKCYFSIACYFHSRYKSGQSSTYKKNGKPAAIRYGTGSIAGFFSEDSVTLGDLVVKDQEFIEATKEPGLTFMVAKFDGILGLGFQEISVGNATPVWYNMVKQGLISDPVFSFWFNRHADEGEGGEIVFGGMDSSHYKGDHTFVPVTRKGYWQFNMGDVLVDGKSTGFCAGGCAAIADSGTSLLAGPTAIITEINEKIGAAGVVSQECKTVVSQYGQQILDLLLAETQPAKICSQVGLCTFDGTHGVSAGIRSVVDDEAGKSNGGLKSDPMCNACEMAVVWMQNQLAQNKTQELILNYINQLCERLPSPMGESAVDCGSLASMPDIAFTIGGKKFKLKPEQYILKVGEGQAAQCISGFTAMDIPPPRGPLWILGDVFMGVYHTVFDYGKLRVGFAESA

SEQ ID NO: 56632 - protein, 194 aa, Zea mays
  Clone ID: LIB3067-050-F1_FLI.pep
VATQRPYTQQPFCSPRERSLSLSTGDDSATAAALRETPRSSPTTSIRVREEEIATETMAADSGARRQPSFTKVDQLRPGTHGHNLILKVVDSKMVVQRGREGGPQGRQMRIAECLVGDETGIIVFTARNDQVDVIRPGTTVELRNAKIDMFKGSMRLAVDKWGIVKAAESSAEWTVKEDNNLSLIEFELVTVTE

SEQ ID NO: 56633 - protein, 295 aa, Zea mays
  Clone ID: UC-ZMFLB73289C01_FLI.pep
IACRLGNWLPVAGTWARGHACKGEMRTNWTGFAMVCAVVAVAKYSANVEMCRLTEQVVFSDPYRVSKFNRWTSPYLDKDAEAVREDDELKLEVAGLKSMFIERAQALIHGDLHTGSIMVTEGSTQVIDPEFGFYGPMGFDIGAFLGNLILAYYAQNGHADQANDRKAYKKWILKTIEESWNLFQKKFVELWNKHKESNGEAYLPDIYNKPKLLSVVQKKYMTNLFHDSLGFGSAKMIRRIVGIAHVEDLESIKDASKRAECERAALNCAKTILKGRHQFETIEQVVEHIQSFDQD

SEQ ID NO: 56634 - protein, 365 aa, Zea mays
  Clone ID: LIB3067-054-H6_FLI.pep
SLADKQGRKRACVTYCISYILSCITKHSPEYRVLMIGRILGGIATSLLFSAFESWLVAEHNKRGFDPQWLSITFSKAIFLGNGLIAIVSGLFANLLAENLGFGPVAPFDAAACFLAIGMAIIMSSWSENYGDPSESKDLMAQFKVAAKAIASDEKIALLGAIQSLFEGSMYTFVFLWTPALSPNEEDIPHGFIFATFMLSSMLGSSIASRLLARKLKVEGYMQIVFSISAVTLVLPVATNILVPTSSVKGGSLSIGGSLQLLGFCTFEACVGIFWPSIMKMRSQYIPEEARSTIMNFFRIPLNLFVCVVLYNVNAFPITVMFGMCSIFLFMAAILQRRLMVVSDLVHKSSTKAQEMIGEDEPLNP

SEQ ID NO: 56635 - protein, 349 aa, Zea mays
  Clone ID: UC-ZMFLB73263F05_FLI.pep
LQKWTVHIYFLCRVMIQLSTLSTVHSLILILYYIHSVATQSRQDCLLHQSRTRRGSRVEQSRKQVLPPIRAIGIVARPRRGVHRQVTCETGVGAAAVDPCAGSGGLQRRVLVALVEPVAERVGHRAGDHAGDVDHHAVRADVAARRHERRRLGTVQRPVERPRALPGALRGGVADPDVRGPGGPGVGAVQAAAARAEPVHAHGLRGEHQRDPALPRPGPRRQLRELGQRQALPQRAPFVGGLADERHPRAAAAAAAAPAPRLGEVQLVDGAPPLRHGRGRCQRRGGGGGEGPEEVGDHGLLRWREAAVPDYGHRDAALQHGAVVVRQDRAGRRLVQLQQAPAARGETCR

SEQ ID NO: 56636 - protein, 340 aa, Zea mays
  Clone ID: LIB3067-056-G8_FLI.pep
KKKDDELMKRIKQDPYTEYAVIECYDTLLDILYSIIVVQSDKKVVDRIRESIKDSIHRKSLVKEFRLDELPQLSAKFDKLLNLLKEYDENDPVNRNTHIANLLQDIMEIITQDIMKNGKGILKDEGQKQQLFAKLNLDSLKHVAWREKCIRLQLLLTTKESAIYVPTNLEARRRITFFANSLFMRMPRAPPVRSMMSFSVLTPYFKEEVLFSPEDLHRKNEDGISILFYLRKIYPDEFRNFLQRIDFEVKDEEELKDKMDEICNWASYRGQTLTRTVRGMMYYRKALEIQCLQDMTDPAKVDRDRSIGSYQELQYDIEMAQAIADIKFTYVVSCQVYGMP

SEQ ID NO: 56637 - protein, 465 aa, Zea mays
  Clone ID: UC-ZMFLB73273B05_FLI.pep
IGRDALVPVLGYLYTGRLKPPAQDATVCMDDACGHGTCRPAIDFVVESMYAASGFQISELASLFQRRLSDFVCEALDEDVVPIIHVASTCDLQDLLNLCIQRVAVSALDSRYLDKELPADIYNKIKEIRRQPENAIILDPEHDKRVRNILKALDSDDVDLVGLLLKESTVTLDDAFAIHYAAAYCEPKVFAELLKLDSANVNLKNSGGYTPLHIACMRREPDIILSLVERGACVLERTLDGRDALTICKRLTREKDCNRKLDKYEEKSKAYLCIDILEQELKRKSFVLDPISISIEESIATPLLVDNFHMRLINLENRVAFARIFFPSEAKLVMRIAQADSTQEFAGITNFSRLKEVDLNETPTMQNRRLRERLDALTKTVELGRRYFPHCSDVLDKFLNEESTDPIFLETGTPEDQQVKRMRFSELREDVRKAFTKDKAAVAAIASSASSSSSPRCRRPNRKSR

SEQ ID NO: 56638 - protein, 196 aa, Zea mays
  Clone ID: LIB3067-058-F3_FLI.pep
VDACATASLPSRHKKKIRLGCLSLANCNGCCCHCYCYSVRGAGGRRPEGGGTASRRGGSGAGAGAGGEARAGGGRQLRGPRGDRQDPAQLQVQSDDRGFGDARAGAAGAGAGPRREHDHHGLLDARDDRVRAAEARLPPLQPDPVTARARMEDLVARSDLIRGVVRIQFFVCSFVRSFFSFFLLGHRSAAAAAAVD

SEQ ID NO: 56639 - protein, 370 aa, Zea mays
  Clone ID: UC-ZMFLB73264A05_FLI.pep
PPYVPLHTGTWLFKLKHMHPTKGEHGSIMCSRGGDGRRLHGLEPGLLGLELVARVQVHVVLEHEPRVRGGLLLGSLLLADERGGREDDGVGARVVEGRDGHAVAVGAGEHAVHRALVPPVGDHLQLVADVGDDGVAQRRHVHPLPAVAAPEQLQPAHLVVLEQQDEAAGVGVRAQAGHQVRARARRVRAHLGAERRAAVRPREGRLQVPGLQAQVLAQQVQHLLRQLLHLRCELLHHLPVVVVDVGEVGEVGGREVADEEGALPVHVADVGALVAGRGQRPRRELLELGLPEGGVVRLGQPLHLVHQLVRDAMVQQLEEAPVLAGVADDRHGRVPLLGLQLLHVHHREGHRGCHLPLARSLTTSLAGLLN

SEQ ID NO: 56640 - protein, 210 aa, Zea mays
  Clone ID: LIB3067-060-F3_FLI.pep
CDTAMSAVFSQYQEIDIYNIYAPRCNLPPSSAALALAVDKAVVANRQEHFRRRIRMFSGYDPCYSSNAEKYFNDAGVQTAFHANASGARKWEVCSDSILRSYNFSVLSVLPIYSKLIKAGLRVWLYSGDADGRVPVIGSRYCVEALGLPVKTQWQPWYLNKQVAGRFVEYHGMTMVTIRGAGHLVPLNKPAEGLALIDTFLQGKQLPTHR

SEQ ID NO: 56641 - protein, 103 aa, Zea mays
  Clone ID: UC-ZMFLB73266E02_FLI.pep
CNKYICMLAQTVVIVTRNQRNQASLRRAARRLLVDGLPADLHRRWPCVGRGWLAGHPVLDGCSHSHEGLLHVGGVFGTRLHERDAHLISKCLCCLSCHNFVGS

SEQ ID NO: 56642 - protein, 173 aa, Zea mays
  Clone ID: LIB3068-012-E5_FLI.pep
PPSSSSSSSSSSSPDHQEIDVSLIITDYCMPGMTGYDLLKRVKGSSSLKDIPVVIMSSENVPARISRCLQDGAEEFFLKPVKPADMKKLKSHLLKRKQPKQKNKPQAQAVESPEQQLDPHPQPVHEPEEAAADRNGVNKRKAAAMEEGLTVVVTAPESTKPRRLSTSSLTVET

SEQ ID NO: 56643 - protein, 131 aa, Zea mays
  Clone ID: UC-ZMFLB73274A09_FLI.pep
SMLLRLINSIAALPFCTRPSAVQSDGQMMRSNKPVNQPIGNPQKKKSQEPHQVKTKEKGSQKKVIVFTARSTSVRVAGDRVESASRVGRRLRLRLRLGGQRAVQRGREQSRERRGPLLRCRGRNASSGGRR

SEQ ID NO: 56644 - protein, 164 aa, Zea mays
  Clone ID: LIB3068-013-F9_FLI.pep
KDRLREYELNLPSSNKGLDVGRVYFVILEMSPVTYIDSSAVQALKDLHQEYKARHIQIAIANPNRQVYLLLSRSGIIDLVGAGWCFVRVHDAVQVCLQHVQNSSSNALKLPVQASGVLTDSVSTPKPEQQHQKQHGLFKDLWKAQDSNADAGGEVQPLLRQNLV

SEQ ID NO: 56645 - protein, 153 aa, Zea mays
  Clone ID: UC-ZMFLB73276D12_FLI.pep
VIPRSLMPREVTGEPVGEVRAVSGMHERKAEMARFADAFIALPGGYGTLEEVLEVITWAQLGIHRKPVGLVNVDGFYDPLLSFIDMAVNEGFIKEDARRIVVSAPTAKELVLKLEEYVPEYEVGLVWEDQMPAAELESPGSPPPRLWTSAALL

SEQ ID NO: 56646 - protein, 306 aa, Zea mays
  Clone ID: LIB3068-021-E12_FLI.pep
DQGKVVVVKCSLLGSVLSNLLLVLGTSLFFGGLANLGTEQLYDKMQVDVSTGLLILGVLCHSLPLMLRYAVSSGEHAESSWDSGLELSRACSIVMLLAYVAYLFFQLKTHRQLFEPQPQEVEDGDDSVSQDEAVLGFSSAMIWLGVMTLMTALLSEFVVSTIEAASESWELSVSFISVILIPIVGNAAEHAGAVIFAFKNNLDITLGVSLGSATQISMFVVPLSVLVAWIMGVPMDLDFNLLETGCLFLAILVTAFTLQDGSSHYLKGLLLVFCYIVISLCFFVLRQHGNGSNDDQLGVASKPWRI

SEQ ID NO: 56647 - protein, 227 aa, Zea mays
  Clone ID: UC-ZMFLB73292A03_FLI.pep
QDPRPPPPRPAPRGGARPHAILYALVAGSTPGGMAYHDPDKLKKYDLEDLRKTPNPFYLESDKKAGNGYSFVRTPSPAPGVDESPFMTWGEIDGTPLRLDPDETPGGSERAHFKMPPPPARDVKAHLLSRDAARKIKERSKPFHRPPLPSPARGVSASPRTLSPAAQKFVRNAISKSSKSSSAIDESLRASYRGSTPSASTPKSRFSRDPGLASRSPSTRQGSTPPW

SEQ ID NO: 56648 - protein, 394 aa, Zea mays
  Clone ID: LIB3068-036-C5_FLI.pep
GPGLAHPGRVARLRLPPRAPPPRGGPPPPAPPRQPPPRLRGRAGGLRRAARALLPRPRLLRAPLRPRRGRVQGLLVPRRRGLRRRGRLLGVPRRALLHGLRPLPGHLLPADPADGRVRARVRQVRRRRHRAAAPPPDQGAAQEDQSPVPQVHSLQPRARLRQPVRRATRHHQAARHRQSRHRRRARVVLGQPCGGSADVPVQRGEDHAQDAGDDERGGGVARGRHGARLRQRPGEPGPGPAAHRGLPGARQRLPRGRRRRVRQRRRRRRRQPERVLLARRPKVRAVPGQQHQLPEEAGAGDVPGEQPGGDHGVRLRGGPGVAARALHDRVLARHVAAREDRRHLLSSRTPFFLPALAPVRCRVLSGGLYKVSADTRYSDHLMEIRTAALICRFI

SEQ ID NO: 56649 - protein, 287 aa, Zea mays
  Clone ID: UC-ZMFLB73264B10_FLI.pep
DERNTQQHQGGEQAQDQENEVKDRGLLDSLLGRNKHDDQEKKNQQEEEELATGMEKVTVAEPDHKEEGHEAAEKKDSLLAKLHRTSSSSSSSSDDEEEEVIDENGEIVKRKKKGLKEKVKEKLAAHKAHDEGDHHQPGVPAPAPAPPVAVDTHAHHQEGEHKPHFPAPAPPPHVETHHPVVVHKIEDDDTKTQTPPQAPEEEKKGLLDKIKEKLPGGHKKPEDAAAAAAAPAVHAPPPPAPHAEVDVSSPDGKKGLLGKIMDKIPGYHKSSGEEDRKDAAGEHKTSS

SEQ ID NO: 56650 - protein, 445 aa, Zea mays
  Clone ID: LIB3068-036-E2_FLI.pep
QTHAPLRTSHQPRRAAMTGTVSKLAAPRPAAPPLRPASLRTAALAFAPSPRRVRVSVAGRARSPIIAMASAKEGSGAPTKRTALHDLYELQGLSPWYDNLCRPVTDLLPIIASGVRGVTSNPTIFQKAISSSSAYDDQFKQLISAGKDAESAYWELVIKDIQDACKLFEPIYDETDGADGYVSVEVSPRLANDTQGTVEAAKWLHKVVNRPNVYIKIPATAECVPSIQEVIANGISVNVTLIFSIARYEAVIDAYLDGLEASGLSDLSRVTSVASFFVSRVDTLIDKMLDKIGTPEALALRGKAAVAQAKLANRLYQKKFSGPRWEALAKKGAKKQRLLWASTGVKNPAYPDTLYVDSLIGPDTVNTMPDQALQAFIDHGTVSRTVDANVSEAEGVYSALEKLGIDWEEVGKQLELEGVDSFKKSFDSLLVSLQEKGNSLKMASV

SEQ ID NO: 56651 - protein, 101 aa, Zea mays
  Clone ID: UC-ZMFLB73285G08_FLI.pep
GGAARAPTTGRRSSPTRLRLHLRFQDQSALKWTPKMHPDSNCDGLDMVRKIRRLSNQPNWFHPKIRPESTGIVETSHHSDSVLVLRHRLLGRWAVYRVGAH

SEQ ID NO: 56652 - protein, 57 aa, Zea mays
  Clone ID: LIB3068-051-A1_FLI.pep
WHMSIFVQTLTVAVCYQKCVKRVENDDTGHKHCTGQYFDYWSCIDKCVASKLFKKLK

SEQ ID NO: 56653 - protein, 126 aa, Zea mays
  Clone ID: UC-ZMFLB73278F05_FLI.pep
KHQGRRQCPVSSQSTDYLLRIHDIQIARLKQSEEKSGKKQQNIEFLKEVELKKLEVQTKELEMQQTKMMIEERIRKDAELKELLAMECFTRGCETCIHREEKRFNRVFHQQSCLKSTIVFHNLLRT

SEQ ID NO: 56654 - protein, 304 aa, Zea mays
  Clone ID: LIB3068-052-D4_FLI.pep
GIHQISTPAMAAAASTTSRTNSRVNYSNEIHDLSTVQSGSAVPTLFYPDKSIADIFPPHLGKKVISEVVATFLLVFVTCGAASIYGEDNRRISQLGQSVAGGLIVTVMIYATGHISGAHMNPAVTLSFACFRHFPWIQVPFYWAAQFTGAMCAAFVLKAVLHPIAVIGTTTPSGPQWHALLIEIVVTFNMMFVTCAVATDSRAVGELAGLAVGSAVCITSIFAGPVSGGSMNPARTLAPAVASNVFTGLWIYFLGPVIGTLSGAWVYTYIRFEEAPAAKDTQRLSSFKLRRMQSQLAADEFDTV

SEQ ID NO: 56655 - protein, 68 aa, Zea mays
  Clone ID: UC-ZMFLB73285G10_FLI.pep
VNICVRLDRNILDDLFSRYYPRNPGVTHHGVQSGLNLHVLNNHHGQSAWALASHGRRGPHRSMMMHSL

SEQ ID NO: 56656 - protein, 196 aa, Zea mays
  Clone ID: LIB3068-053-G11_FLI.pep
KHNTLVLYSIFSLQLSWEEPNHSHDSQSIDASRLRSSSVTMNSLSLSRITSIESISAPSSLTINAFSASTFSFSPTMTLNSSMVPGRLISLPASEVRFLRKGWPLYTLTRGQRWLSELVLCNLPGRLCPDEPPFGTTAGESWIVIEWPSSRFCSSSRSSVGDIASRAAPEPEPEPEPSSSSRLALSTLAPFKIRNL

SEQ ID NO: 56657 - protein, 426 aa, Zea mays
  Clone ID: UC-ZMFLB73292A10_FLI.pep
KRRHAGRLETIRATAGQDPLPGRKVAPRRVTAVSWVKHYFADVPQEAVQAHFNRRMVFSECYDHKVSADSIRTQKHHLKKIKHNDAMEPGMRIHLPVSVAESDIKKRYETIPTATLHPNKDEIEYLRRLVIYRDSAILVLNKPPKVPMKGHLPVHNSMDVLAAAALSYGSEEGPKLVHRLDRESSGLILMGRTKESFTRLHWLLTSVNLARTSSQTWNKACEAYAQKYWALVIGTPKEREGVISAPISKVLLDDGKAERVILAHPSGIDGAQEAITEYRVMGPTINGCSWIELQPLTGRKHQLRVHCAEALGTPIVGDYKYGWFVHQTWKQNPQPDFEPFTGEPYKLRRPEGLEIQKGSVLSKVPLLHLHCREMVIPNIAKFLSSTGGWHENGTPWAKEKPNLLRFVAPMPPHMKISWNIMSSYLV

SEQ ID NO: 56658 - protein, 279 aa, Zea mays
  Clone ID: LIB3069-006-G5_FLI.pep
SKMIMLFIGGQAVAPHKLAATTRTSVVSNVVSERRTTKSKTARCDTIHRLLGREVCLDVLDLPAADPECLGEDVGGHGRRGPEERHGDGLRALELAVEGGDDGGGAVPPVLLEVDEAAGEDEDVPRGDGLAEEPVGGGEEADLERALEDEDDLGGARVRVRRVLAARGVVDARHGDAQRVHPRELVHVGRRHRGARRVVGVARAPQPVEEEVVRRDVRLAREPVQLDRGSVVSHADVLEHVRVAGEGRDGEREGDGAGRGDDVKVDPRHDRPVSGRTAC

SEQ ID NO: 56659 - protein, 293 aa, Zea mays
  Clone ID: UC-ZMFLB73274F06_FLI.pep
WMLAGDAPVDGLDRASFRLPAHFFGVYDGHGGLQVANYCRERIHEVLAEELTKAEEAASDADLGGLDPNTQKHWEKAFVGCFSRVDAEVGGDAATEAKPVAPDTVGSTAVVALVCSSHVIVANCGDSRAVLCRGKQPVALSVDHKPNREDEYARIEAQGGKVINWNGYRVLGVLAMSRSIGDRYLKPYIIPVPEVTIVARAKDDECLIIASDGLWDVMSNEEVCDAARKRILLWHKKNSDASSSAQRSGDSPDEAAQAAAEYLSKLALHKGSKDNITVIVVDLKSHRKIKSRA

SEQ ID NO: 56660 - protein, 148 aa, Zea mays
  Clone ID: LIB3069-017-C10_FLI.pep
ESAVAEKSHEDHAEHDHEHHEHENEHDHDHHHHHDHDHDHHAHDHTHDPGVSSVSIVCEGEMDLEKADMWLGNLLLEHSEDIYRMKGLLSVSGMPQRFVFQGVHDIFQGSPERMWEPNEPRINKIVFIGRNLNKEELDKGFKDCLLKK

SEQ ID NO: 56661 - protein, 541 aa, Zea mays
  Clone ID: UC-ZMFLB73276H04_FLI.pep
LTKINRQVPAGNLITDWSSQHRACHPLSSSSVVGDVARNLEPLGVERARHVDPLVGVSPEVVPLGLHQVGRQPVPAVGVEVGQASGHSRGADAVVDGEAHHPAPRRLPVHDLLRELGVYEQAGEARVPVVGLLDAVQEDGADDAPALPDPGQLAEVEPPAFLRALGLDDVHALRVAADLGRVQGLPHVLHQLRLVHRRAGGVVVTLEDLGGLHPLVLQPAQEPRVQGRLDRRSGHRQLGGLLHRPLPCPFHPGLVKDLVHQVAIAMLVLDAKDVGRDLDQEAQELALVPLGEHLVQLTVGELTDRLENVVCLGNQLHIAILDSVVNHLDKVARSTFANVRDTRATVRDLSSHLEDNVFDVLVSLERASGHQGRAVAGTLLSSRDTHAKIQEAALLHGLLPPLRVLVPLVPPIDDAVALLQVSCERRDGLVNWRAGLDEHDHHPWLLNGLHKGRGVMEAVDGKVSFCLGTLHGLVHLGGCPVVHRDGEPFLCNVEGKVLPHDRKASKTDSCERHLLLWSWRAAECRFRCGVELAMPPPSGHL

SEQ ID NO: 56662 - protein, 299 aa, Zea mays
  Clone ID: UC-ZMFLB73270E01_FLI.pep
RRAVLLVPAVRRGVPPRGGPLHGASARVPGPHGRAVPGERVPLLRVQGGPGAGGPGLRAVRARRRRRGRRRHGAALRQHAPRAGGRRARRHLRGQLRQGAGDPRVGDRVAVAGRRRRGRRHAGERRQVQRQPHAPRGAGQGHARCARRAAAGLRVRALQRGPEARPGVGAALRAVQARRHPRVQRRRQGAHHHGAQRQREWERHRHWRLGCGARTRRRRRRRAGHRVLHRVCRISVQCEEQTAAAAEPGGGGCRPGHGVRALVVWDWERTDDERQSMKVSARMQLRHIDRIISYASEFD

SEQ ID NO: 56663 - protein, 162 aa, Zea mays
  Clone ID: LIB3069-017-F6_FLI.pep
FSIELHGNVIGAVETCLESFHRYHKYLNFSHPTISSKIDPHTCGWAFGMNIFDLIAWRKANATSLYHYWQEQNSDLLLWRTGTLPAGLLTFYGLMEPLDRRWHVLGLGYDVDIDDRLIESAAVVHYNGNMKPWLKLAIRRYKYIWERYVNISHPYVRECMLH

SEQ ID NO: 56664 - protein, 447 aa, Zea mays
  Clone ID: UC-ZMFLB73274F11_FLI.pep
KNENIQSQPSDASVMLPQHNYKLDVHALNSHQPGQFECREFRESILGIMPHHWDRREDTTLQLAHFRKHKRKQVKRTPGKAVINSVNKPIEHNPPGKDASNRIARALGKAADMANSNKARKAQRMQYVPTITNHTQVWWVPNVVVVHEKEGIEVVHLASGRTICKLHLNEGGLHADINGDGVLDHVQVVGGNGIKEQTVVSGSMEVLKPCWAVATSGVPVREQLFNVSICHYNHFNLFHHGDFSRSFGRTFDTAGLEVATPILVQTDDGHKHRRGSHGDIIFLTSRGEVTSYSPGLLGHDAVWRWQVSSGATWSNLPSPSGMMENIVVPTLKAFSLRAYDPKEVIIAGGDQEAVVLSPSGGILAMIELPAPPTHAHLLEDFSGDGLTDMIVVTSGGIYGFVQTRQPGALFFSTLVGCLIVVIGVVFVSLHLSSSNAAKPRASSSEYR

SEQ ID NO: 56665 - protein, 210 aa, Zea mays
  Clone ID: LIB3069-020-E12_FLI.pep
AECVVAEAGRETTAAMATSFQGTTTKCTACDKTVYLVDKLTADNRIYHKACFRCHHCKGTLKLANYNSFEGVLYCRPHFDQLFKRTGSLDKSFEGTPKVVKPERNVGNENATKVSSAFAGTREKCVGCSKTVYPTERVTVNNTMYHKSCFKCCHGGCTISPSNYIAHEGKLYCKHHHIQLIKEKGNFSQLENDHEKTSQAGSLEEDEQEY

SEQ ID NO: 56666 - protein, 425 aa, Zea mays
  Clone ID: UC-ZMFLB73276H05_FLI.pep
TLFLEECIIEDEGSEWLHELAVNNSVLVTLNFYMTELKVEPADLELLAKNCKSLISLKMGDCDLSDLIGFFQTSKALQEFAGGAFFEVGEYTKYEKVIFPPRLCFLGGLTFMGKNEMPVIFPYSTMLKKLDLQFTFLTTEDHCQLIAKCPNLSVLEVRNVIGDRGLEVVAATCKKLRRLRIERGDDDPGQEEQGGVSQIGLTAVAVGCRELEYIAAYVSDITNGALESIGTFCKNLYDFRLVLLDKQKKITDLPLDNGVRALLRNCVKLRRFAFYLRPGGLSDVGLGYIGLYSGNIQYMLLGNVGESDNGLIQFATGCTNLRKLELRGCCFSERALAVAVLQMPSLRYIWVQGYRASRTGQDLMLMARPYWNIEFAPPIPESAYRVMADGQPCVDTHAQVLAYYSLAGRRPDCPQWLVTLHPASL

SEQ ID NO: 56667 - protein, 515 aa, Zea mays
  Clone ID: LIB3069-022-C8_FLI.pep
NDLKSPKKQDLERTAASVLFDWETEIYVARAPGRLDVMGGIADYSGSLVLQMPLREACHVAVQRNHPSKQKLWKHTKARQLVNGGLVPVIQIVSFGSDLSNRAPTFDMDLSDFMDDGKPISYEKARELFCQDPSQKWAAYVAGTILVLMTELGAQFTDSISILVSSAVPEGKGVSSSASVEVATMSAIAAAYGLNIIPRDLALLCQKVENHVVGAPCGVMDQMASACGEANKLLAMVCQPAEVKELVSIPTHIRFWGLDSGIRHSVGGGDYGSVRVGTYMGRKMIKCTASDLVSESLTSGSPAQSDCYKENGVGVLKSEAALEYLCNLPPHRYEAVYAKDIPEVISGEAFSEKYGDHDDTVTVIDPKRSYSVKAPTRHPIYENFRVEAFKTLLEAGNTDEQLSALGELMYQCHNSYSACGLGSDGTDRLVNLVREVQHRRTSEGGSPSLFGAKITGGGSGGTVCVVGKNCARSSEEIAEIQHRYKAETGYLPILFDGSSPGAGKFGYLKIRRRCP

SEQ ID NO: 56668 - protein, 248 aa, Zea mays; identical to SEQ ID NO: 55124
  Clone ID: UC-ZMFLB73276H11_FLI.pep

SEQ ID NO: 56669 - protein, 646 aa, Zea mays
  Clone ID: LIB3069-028-E5_FLI.pep
QYGDVQTFDTSCKSHGIVTVSYYDIRAAQDAVRAVHNKPLGLMKLDVQFSLPKENVPNKDPNNGTLVVSLIDSSISSHDLLQKFSVYGDVKEIYKSPTSCNKKFVEFYDIRAAQEALNDLNKGEISCSQIKVEHSFSGGAGSCFAEQYSGEQKQNAVAHQLKNSPPGTIGKLDTKSWDSSTVHNLYSPVRPQHDKSQHGFSVNPPQKLSSPIRIESTQQHSNQTAFGEHSGSLGHGNFGGGLQAFHPHSLPECHNGICNGYNSMTLNARNSNFRFTEGIDYNNHKVDHSDLHGHSSDQNEAIRVAGIGSCPLHGHHYTWSNSNGFPQSPSAPMMWPNFQQPVHMHCYPAMPPHIRRSAAHPMDQHHLGSAPNSVGGFANAHSFHPGSLESVGFPGSPQLYPSDLSVFASARGNYRETMFSAISAGFPSIQQILHATNGRNPMMHVSTSYDATNDRIRSRRHDGNAAQSENKKQFELDLDRIAKGEDSRTTLMIKNIPNKYTSKLLLAVIDENHRGTYDFIYLPIDFKNKCNVGYAFINMTDPQQIVPFYKTFNGKKWEKFNSEKVASLAYARIQGRNALIAHFQNSSLMNEEKWCRPMLFHKDGPNAGDQEPFPVGNNVRSRSGRNRPLSSGSETTKEASPSTSPN

SEQ ID NO: 56670 - protein, 88 aa, Zea mays
  Clone ID: LIB3069-029-B9_FLI.pep
ASGGHIIFFQSLSLLGYCLFPLDVGALVCMLKDNVILKIVVVTITLAWSSWAAYPFMSAAVNPRRKALALYPVFLMYISVGFLIIAID

SEQ ID NO: 56671 - protein, 397 aa, Zea mays
  Clone ID: UC-ZMFLB73278H10_FLI.pep
AGQKDEAYFAANAAAQASRRSSPRVTNEEVQKAAAALKGSDHRRATTVAARLDAQQKKLNLPVLPTTTIGSFPQTVELRRVRREYKAKKISEEEYISAIKEEISKVVKIQEELDIDVLVHGEPERNDMVEYFGEQLSGFAFTANGWVQSYGSRCVKPPIIYGDVSRPNPMTVFWSKTAQSMTARPMKGMLTGPVTILNWSFVRNDQPRFETCYQIALAIKKEVEDLEAAGIQVIQIDEAALREGLPLRKSEHAFYLDWAVHSFRITNCGVQDTTQIHTHMCYSNFNDIIHSIIDMDADVITIENSRSDEKLLSVFREGVKYGAGIGPGVYDIHSPRIPSTEEIADRVNKMLAVLDTNILWVNPDCGLKTRKYTEVKPALTNMVSATKLIRTQLGSAK

SEQ ID NO: 56672 - protein, 351 aa, Zea mays
  Clone ID: LIB3069-031-B5_FLI.pep
PIQSKQLRLEATRQSRRHKAETPEVAFPSAISSSRLSSMGVQCLPDQILRSAAAAACGAPGLQCGSPECLPCKHICVPEGGCGIGQPMLLAKVTHRRRNLPKVAPRQAGEQMVLNLELQAAMEPIHPRRAQDVERACRLLLEPVVALGWPDVHIGREVVQAELDVLDPADGKAEKHERHPLPPIRQARHQQRVPSPERGDTGDLKQPLRHPLLGQDEDSGLRQKIYPGDAHYRVEGPVLVADEEFRGGVEGQGPLVEVGPYVAEQLGGDSEERHVLEVRVMVQAVAGDVVRVVVAFPPGDAEASEAVSGEHLHDAVQERMARDAVVARVVAHPAGLDPDEADEPPSEHVRR

SEQ ID NO: 56673 - protein, 279 aa, Zea mays
  Clone ID: UC-ZMFLB73292H02_FLI.pep
SRSTPLPLSLFAVRSSAPQSNRHLTEMGRKFFVGGNWKCNGTTDQVEKIVKTLNEGQVPPSDVVEVVVSPPYVFLPVVKSQLRQEFHVAAQNCWVKKGGAFTGEVSAEMLVNLGVPWVILGHSERRALLGESNEFVGDKVAYALSQGLKVIACVGETLEQREAGSTMDVVAAQTKAIAEKIKDWSNVVVAYEPVWAIGTGKVATPAQAQEVHASLRDWLKTNASPEVAESTRIIYGGSVTAANCKELAAQPDVDGFLVGGASLKPEFIDIINAATVKSA

SEQ ID NO: 56674 - protein, 226 aa, Zea mays
  Clone ID: LIB3069-032-H12_FLI.pep
RLFTPYALPPLRLTQKHGWSGLEGPQPGIIRLWQVETTARRPKKNNNNEISGKFIPIFSTGLFHDRFQGKTRSVSGTWGTQLELLDRVDLLCRVQAFGAGVRAVLDGVAAVQLELVVDGVQALLGELVTAVLYPPVGVEQRGRAEVLLRVPPVGRAGGGAAGAEDALVHAVELGPVGLGLRDLLALLRGLVLALEPWLDALVLAVEVGHVHHQVLDDEHVGQRRDR

SEQ ID NO: 56675 - protein, 194 aa, Zea mays
  Clone ID: UC-ZMFLB73298B07_FLI.pep
MILLYGQEILLQYKCSQKGKKSGEVVDKQEKPHCSISLGLLCLVELNRARLETTSLAGLQSVRHVCSKDLVPHDKEGLREVVLVAVELMVDVMVSAVVAEEYMEDVPRKPQTTVVVDGLDGREREEEYASPWGHARDEERERATDGVQDESLQGVVVQSSKSVGDDKSVVLRVDVLVQELVDVHVSVHEILPCV

SEQ ID NO: 56676 - protein, 322 aa, Zea mays
  Clone ID: LIB3069-033-B10_FLI.pep
QEKRQGEQAGKEAAEAKEGEGGSSMSISVNGQSCVPPGFRFHPTEEELLNYYLRKKVASQEIDLDVIRDVDLNKLEPWDIQEKCKIGSGPQNDWYFFSHKDKKYPTGTRTNRATAAGFWKATGRDKAIYNAVKRIGMRKTLVFYKGRAPHGQKSDWIMHEYRLDDPAAAAAAGSGDAVANDDAAATAAAAAAASSDGGQEDGWVVCRVFKKKHHHKESGGGGGNKHGSSNSEHGHGGAGKASAAAAAAAHQHQHHGGLQYSSSDEALDQILQYMGRSCKQEHELVSPAPAPPGRAAASRYLRPIETVLGGHAFMKLPALESP

SEQ ID NO: 56677 - protein, 323 aa, Zea mays
  Clone ID: UC-ZMFLB73302E05_FLI.pep
SINTTKNQQRRTIDGTRSGHTRVQVLFFFPRISSPPSSSPWRSLLDVDGQRLAVPLLEALEHGVHELALADADEHLVALLAGGLEPLAGQEHAAELLAHEAVQRERPAVRDPVRHGGGALGDRHAGGLHLLGQHRAELLLEPGDLGEHGGLPLRVAAAEGVVHQHGAQLLHQRQAAAGRVLRVREHGLAVDGADQLLLAEAGAGELARGVHGQHLLGHLGHGVLHRRLDVLLEVAQVHGLAQRHDVGGRHELQDVDRLGGLPGRDEAQGVHVLVVLLRALHVVGDGVAQVLELGAVGGHGDLGALEAVVQAGVAAAGQVGGEP

SEQ ID NO: 56678 - protein, 338 aa, Zea mays
  Clone ID: LIB3069-034-A11_FLI.pep
PGLCRRRHRSLARLPAWARSTDSDSARPASCTGRRGSGLRECDGGNAGAASASASAGGGRGDDALPRHRPHSRRVCRRRRRRLAERARHVLRRQRRFGHHGRRLRVRQPVQPGVRREQRGAEHGAVRRGAPLRRVLRDQVRGAARVAVVPAREALHPGHGHQLLPSQLRAPFRRRRLVQPAPPALRPRHAHVPPHRRVPRRHRPRLLPPGAVPQVRRGAVHHQRLPVLQPGADHERGRRGGRGARERQGGQHRVAAHVQELGPELAVQRHPRRPGALLPRHRQRPPHLHLLERRPEHLAVRPDLRGQELQGLMHGMGCDLGEEAKTLFFLSFFLSSDT

SEQ ID NO: 56679 - protein, 259 aa, Zea mays
  Clone ID: UC-ZMFLB73307E02_FLI.pep
DQYNQADFAETYSDAKFFIIKSYSEDDVHKSVKYNVWASTPNGNKKLDAAYQEAKEKSSETPVFLLFSVNASGQFVGLAEMVGRVDFEKTVEHWQQDKWTGCFPVKWHIVKDVPNSLLKHIILENNENKPVTNSRDTHEVKLEQGLQVLKIFKDHVCKTSILDDFGFYDNREKMMQERKAKQQQSLKKVIDVKLPSVTDMERSPKVETGSTELTGVGTDVLNKERLLGKAGEKNGEKGNDVAPQDLKTQTEKLAGLNGC

SEQ ID NO: 56680 - protein, 391 aa, Zea mays
  Clone ID: LIB3069-034-F6_FLI.pep
PLPQLIAAGGMCGGSGFGLGSGLGSGCGFGSGLGSGFGWGSGFGSGLGSGFGSGLGSGFGCGSGSGFGFGSGLGSGFGSGSGLGSGLGSGFGSGFGSGLGSGFGSGFGSGLGSGFGCGSGFGSGFGFGSGFGSGLGSGLGSGLGSGFGSGFGSGLGSGFGSGFGSGLGSGFGCGSGFGSGFGSGLGSGLGWGSGFGSGFGSGLGSGLGSGFGWLWLWLWFRFGFRLWLWLRFMLWLRLWFWFRFWLWFYFRFGLRLWLRFGLRFRLRCRQWLWFGFWLRLGHWLRFRVGLWLRFRLWLWMWHRFRFRFWLGQWLHMGLRLSFRLWLRLGHLSGSTSMLARETRAVAKPEAGSSRFVEGGGSGHSCQKHGEEKAREATRRRHSCCSCKLLAC

SEQ ID NO: 56681 - protein, 237 aa, Zea mays
  Clone ID: UC-ZMFLB73347H06_FLI.pep
EEKEQDVGSSKDTSVDGFKSLLNFFKSRIPEFKVQVINVDVSEETELAANSSEESVQDDVKSTPEGSLEEPTTEELEQEEDVPEEDMDEESKSTKVKLFISGVVHNKEDAGTKSYVRVPAEINNMEKDSFDLYIPGNGSGHDLPETKAAKQKVADMAAKLASELMPSDVAKALWGTTKSSSKINKEVQELLRLTLSKARVKLTDDTFFNRIIMDTNSMDPFNGKVSPVKLMSISCMI

SEQ ID NO: 56682 - protein, 75 aa, Zea mays
  Clone ID: LIB3069-034-G9_FLI.pep
VPLVHRKQEGQGLILSIYDIDMNCGQCSKNRGAFDESCKMNLPGRAANRFEYFVWILSALVLEMPQNIVSVLINC

SEQ ID NO: 56683 - protein, 302 aa, Zea mays
  Clone ID: UC-ZMFLB73298D02_FLI.pep
LYSYCVEFIILEGDNLTSIFPKAGFDWLGIHVDGKHFFGVLTAILVLPTVWLRDLRVLSYLSAGGVIATLLVFLSVGLVGVTDGIGFHSTGKAVNWSGMPFAIGIYGFCYSGHSVFPNIYQSMSDRSKFPKALFICFAICTAIYGSFAVIGFLMFGKNTLSQITLNLPKHSFASEVALWTTVINPFTKFALLLNPLARSLEELRPEGFMNETSCAIILRTALLASTVCIAFLLPFFGLVMSLIGSLLSILVAVIMPPLCFLKIAQNKATCAQVIASICIVMLGVISAALGTYSSVKKIVENY

SEQ ID NO: 56684 - protein, 200 aa, Zea mays
  Clone ID: LIB3069-035-A3_FLI.pep
SPENVKYAAMLGLSAAAMKSKLFADQEEREVQRLTATVINHQLKRLELKLKQFAEVETLLLKECEQVERVRHRISAERVRMRSALLGPTGSGLPGGSCSTMPSNPAGMSPRPVGVPGYMPQTSMPATYANNLQGHGNPQMPFLHQRPQMLSFGPRLPLSAIQTQPSPQSSNMFNSGMPNSIAPNHHQLLRSSSGNNSSAG

SEQ ID NO: 56685 - protein, 184 aa, Zea mays
  Clone ID: UC-ZMFLB73302F07_FLI.pep
FFREMGVDKKTTGKILCRSPEIFASNVDNTLKKKIDFLTNFGVSKHHLPRIIRKYPELLLLDINCTLLPRMNYLLEMGLSKKDLCSMIFRFSPLLGYSIELVMKPKLEFLLRTMKKPLKAVVEYPRYFSYSLEGKIKPRFWVLQSRNIDCTLTEMLAKNDELFAEEYLGLGGLLEKPLQSSIGS

SEQ ID NO: 56686 - protein, 310 aa, Zea mays
  Clone ID: LIB3069-037-D1_FLI.pep
ANAILFASIISNGPCFGKALRMILQLGVKPSWFECNNSDKLTGDSFKVAPTFGDLRSYMIETTLPPIGDAVVAELLLKVLEPYRKEGCILDDGRASLYSAIVNKGACARFAFAAAIFGDFQEALFWLQLPQALRHFLGKSTSRSREKISQSSLHPDSEQSSRFNRIASRERSASEKFTKNAANYGQLSSMAFNQEQLWFNASERIPWHDKLDGEDALQKHVHELVSLGNLEAAVSLLLSTPPEGSNFYPNALRAVVLSSAVSQSLHELAVKVVAANMVRTDKSAIWHTSSLCCWKISGSMFTASRCWVLE

SEQ ID NO: 56687 - protein, 85 aa, Zea mays
  Clone ID: UC-ZMFLB73306C04_FLI.pep
LNHPWANPCGISSFRSQSQEPQRRYTTSVGFCLQFFFLNASVARICSFASCKVPRQFSVICSSFCNISIHVSIDASVRRRDRSIL

SEQ ID NO: 56688 - protein, 323 aa, Zea mays
  Clone ID: LIB3069-042-C1_FLI.pep
TNQQQAEQRLAARQAGRGCCKSATNNGHRALLQGLGTGRAPLHGRRLWRSRRATVQAQRHHRLAGQILVVLQQWLAAGQGHLVRRPHRRRPPRQRWCVRVQGHQPVPVLVHDVLWQRAHLQGRQGLRLMLPDTVPEEQPPGLLRRGSDGDHHGHELLPGGQVPLRPERHGVRVHGQLGPERQAPARRDHRHAVQAGAVQLPGPDHHLPRPARLQPHVPGRAHRAREQGRRRGAGGHHAEQLRPLGAHARVLGLHLEDRPQPPAPWPLLHAHHQRVRQAAGGQERHPGQLHPRRRLPLLRPVLMIDLGHCLPLIKRLIVSSLFN

SEQ ID NO: 56689 - protein, 75 aa, Zea mays
  Clone ID: UC-ZMFLB73307E12_FLI.pep
KASNPKVQAARSCLRYGASKVKLAKSVARRQPNGGFCRLAKVKACDRKSGNVLYCHIVIPRYRRIAQIHLDGLEV

SEQ ID NO: 56690 - protein, 562 aa, Zea mays
  Clone ID: UC-ZMFLB73308A03_FLI.pep
FVPAIKGQGTEEQQHKWLPLAYKFQIIGCYAQTELGHGSNVQGLETTATFDPKTDEFVIHSPTLTSSKWWPGGLGKASTHAVVYARLITEGKDYGIHGFIVQLRSLEDHSPLPGVTLGDIGGKFGSGAYNSMDNGVLRFDHVRIPRDQMLMRLSQVTREGKYVHSNVPKQLLYGTMVYVRQSIVADASKALSRAVCIAVRYSAVRKQFGSQDGGPETQVLNYKTQQSRLFPLLASAYAFRFVGDWLNWLYTDVTQKLEAKDFSTLQEAHACTAGLKAVTTSVTADAIEECRKLCGGHGYLNSSGLPELFAVYVPACTYEGDNVVLLLQVARILMKTVSQLASGKQPVGTMAYMGKVQYLMQCKSAVSSAEDWLNPDAIQEAFEARALRMAVNCAQNISQAASQEEAAGFYERSPDLLEAAVAHIQLIIVTKFIEKVHQEIPGHGVKEQLQALCNVYALYILHKHLGDFLATGCITPRQGALANEQLGKLYAQVRPNAVALVDAFNYTDHYLGSVLGRYDGDVYPALYEEAWKDPLNETVVPEGYHEYLRPLIKQQQLKLSRL

SEQ ID NO: 56691 - protein, 431 aa, Zea mays
  Clone ID: LIB3069-048-G7_FLI.pep
LRGSIYRGLGLMVAASPCALAVAPLAYATAISSLASKGILLKGGHVLDALSSCQSIAFDKTGTLTTGKLMCKAIEPIHGHLGVKSGRSNPSCCTPNCESEALAVAAAMEKGTTHPIGRAVLDHSVGKELPVVAVESFECLPGRGVVATLSGVKVRENENELSEASIGSVDYISSLYRSNGESEQIRAAAKSSAYGPEFVQAALSVDKKVTLFHFEDEPRSGVCEVISTLREKAKLRIMMLTGDHESSAQRVAKAVCIEEVHFSLKPEDKLNKVKAVSREGGGGLIMVGDGINDAPALAAATVGMVLAQRASATAVAVADVLLLQDNICGVPFCIAKARQTTSLVKQSVALALTCIVFAALPSVLGFLPLWLTVLLHEGGTLLVCLNSIRALNTPTWSLVDDIRKLVDSLRNYFPSKFNSSPSSYTANTAPL

SEQ ID NO: 56692 - protein, 388 aa, Zea mays
  Clone ID: LIB3069-049-A1_FLI.pep
ANRLNITKTVRKYSIDRNLVPTGSEFHPGPIPILNKHGDDVEEDHVDGAFSLSSRNFDSFSHQYPVLVVNFYAPWCYWSNRLKPSWEKTAKIMRERYDPEMDGRILLGKVDCTEEVELCRRNHIQGYPSIRVFRKGSDIKENQGHHDHESYYGERDTESLVAAMETYVANIPKEAHALEDKSNKTVDPAKRPAPMASGCRIEGFVRVKRVPGSVVISARSGSHSFDPSQINVSHYVTQFSFGKDFPRMLHEFIRLTPYLRGYHDRLAGQSYTVKHGEVNANVTIEHYLQVVKTELVTQRSSKELKVLEEYEYTAHSSLVHSFYVPVVKFHFEPSPMQVLVTEVPKSFSHFITNVCAIIGGVFTVAGILDSIFHNTLRMVKKIELGKNI

SEQ ID NO: 56693 - protein, 164 aa, Zea mays
  Clone ID: UC-ZMFLB73349A11_FLI.pep
ADFGLTKLTEVGNTSLPTRGIVGTFGYMPPEYARYGDVSPKVDVYAFGVVLYELISAKDAIVRSTESSSDSKGLVYLFEEALNTPDPKEGLQRLIDPALGEDYPIDSILKMTVLARACTQEDPKARPTMRSIVVALMTLSSTSEFWDMNAIQENQGVVNLMSGR

SEQ ID NO: 56694 - protein, 368 aa, Zea mays
  Clone ID: LIB3069-050-E2_FLI.pep
PRAPLLLSCLAEQAERPVSRALPMASGAAAAPVVQTVVLKVAIHCHGCKKKVRKVLRGIEGVQDVTVDASQHKVTVTGTVDADTLIKRLYKSGKKGVPWQCHPPAKNSEPAPEAPPAPQPAGDGGKDAAAVAAADKKSEEAVKEPQGESSEEEKKKKPEQEQEDGAAEKKQPEAESKEVEKVEAKTDGGDSEGAETKQAKGAAAEPAKEAPAGAANDEDEAKKSDKAKDAGTAEPAAVTTERSLPLAPAPKHAYEHEYRPPYYAAPAQPVLSYHAAQRSSSVSHFAPQAQPAYSTQQAHPHQAYYSAQPQPGKQWSPSYLYMPYPHAAAPEPYYQQDYYGPPGMHASPMHDSSYRIFDDENPNSCSVM

SEQ ID NO: 56695 - protein, 95 aa, Zea mays
  Clone ID: UC-ZMFLB73298H10_FLI.pep
PRQRARAALHGGRELFQLACAQRCRVDHGARRGTRVAPGRPEQGSYGLFLLDDGRSWNAQPAALLALLQQTIQRQQQQHFLTCAVMLCAPCFSKS

SEQ ID NO: 56696 - protein, 823 aa, Zea mays; identical to SEQ ID NO: 53296
  Clone ID: LIB3069-052-F8_FLI.pep

SEQ ID NO: 56697 - protein, 274 aa, Zea mays
  Clone ID: UC-ZMFLB73295D11_FLI.pep
SEHNRTVPLPTLLPPEIPRRQRLPEHGLEPPGPGAGLDGPAPPGLLRVGAERGAAVLVAGLGAPAAVGEVGGGVPAAEDVPVDAVQHGVAVPELAREGGPAEQHPAVVPGGEVERVLLGRGVPADEVQVVVDRGVAEPARVAGHRLEVELGRGDDVGVVQQQRPRQVVVPPHRHVLRERPRQHRPRRPCEELECRGQPPEVGGDVHRADQLRPPVLVQRRVQDHRPRPLLYLPAQVARVLDEVEVPGQPGERLHQICNPQNSETVCPSSGRPTA

SEQ ID NO: 56698 - protein, 206 aa, Zea mays
  Clone ID: UC-ZMFLB73299A08_FLI.pep
EKCANIKPETGLRRDSGSGCRDEILVASDGVPGVFVPRSDVQERRHPLQFLVVVIIHERRHRDGVLRLQGVGIGIVVDDDSAVQRPTGGGQILDERPVTGVAAGAAVEAVREHLPVWIQAVEHEGGVLLQPGGEDDDLEGIRRRAEERLDTRALDDVEGDRMATYDGAHGEVEPRGRRLRLGVDERLVEVQEQRPPPWRRRRRQRR

SEQ ID NO: 56699 - protein, 97 aa, Zea mays
  Clone ID: LIB3069-055-G6_FLI.pep
YLSGGIELESQSICGYTLDLTSTNSHPSQLCHSRAAPFLLLLCFMLGAVKALTNRYPDYDHKEQKDSKNHQLNFHVLQPCLPTNLHPLFLELLGLTM

SEQ ID NO: 56700 - protein, 395 aa, Zea mays
  Clone ID: UC-ZMFLB73306D02_FLI.pep
LHRNTNSAFELARTDVGCVFANQGDNNVERIQRSKYFQALLQKSKANVSEQRNATCQEFSVQWAPCVDESQAEMENEKLSIRASKLMMQTKLTSLYSSKSLKTNGVPNKNMFKSENSSKVCAGVENRTSQNSNRRHAYLDVEEDEKSHGQLQNAKWKHTGFRSPIFEVANSPSSNDEADAPANEFTTAKRMMGLDVVQKPAQNGPQGASVSPQCDNNYSTRNYGVRPSWNSRRGPRGSFIPPIRNNGGSGTTISRVTGKNDESMEDSTRKCIEMLCAPDGELPEKLRNLEPRLIEHVSNEIMDRDPNVRWNDIAGLEHAKKCVTEMVIWPLLRPDIFRGCRSPGRGLLLFGPPGTGKTMIGKAIAGEAKATFFYISASSLTSKWRGVTSLESGWG

SEQ ID NO: 56701 - protein, 164 aa, Zea mays
  Clone ID: LIB3075-003-D11_FLI.pep
TGKTGWGVRSLSSISSGSFICEYTGELLEDEEAEKRENDEYLFDIGHNYHDKELWEGLKSVVGLGSATSSSETMEGFTIDASECGNVGRFINHSCSPNLYAQNVLWDHDDMRMPHVMFFAVENIPPLQELTYHYNYKIGEVYINGEEKVKHCYCGASDCCGRLY

SEQ ID NO: 56702 - protein, 320 aa, Zea mays
  Clone ID: UC-ZMFLB73319E06_FLI.pep
LAIQSIHKHNYIHRDIKPDNLLLDKNGHMKLSDFGLCKPIDCSKLSTLNEDEPMGDDNMRESMDIDSSLSNTANGRRWRSQHEQLQHWQMNRRKLAFSTVGTPDYIAPEVLLKKGYGMECDWWSLGAIMYEMLVGYPPFYADDPITTCRKIVHWRNHLKFPEDAKLSNEARDLICRLLCDVDHRIGSAGADQIKAHPWFQGVAWDKLYEMEAAFKPQVNDELDTQNFMKFEELENPPAKTGSGPSRKMMLNSKDLSFVGYTYKNFDAVKAIKISDLQRNSSLTRPSIGSIFGPSGMDSPMEPNGRDTHMHTVSSGDPMIP

SEQ ID NO: 56703 - protein, 256 aa, Zea mays
  Clone ID: LIB3075-008-E3_FLI.pep
RIVPGKDYIIDCGKGKKVYQKGDMASESLFSWLGDDVLRKPTYSRFCALLDNYNPHQGYKEVVTQQDKHEEIAFVEEIARTAPIKYLHRYLVQKGAVPQDYEDFKRMLTSLWFDLYGRGGNSSCSSAFEHVFVGEIKGRGQGESEVSGFHNWIQFYLEEAKGNVDYQGYIFPRRRGESPDSEIQLLTVQFEWHGVLKSVSSTLVGVSPEFEVALYTLCFFVGGEDNRVDIGPYSVNVKCYRLGNNKIGSAFPIVEN

SEQ ID NO: 56704 - protein, 170 aa, Zea mays
  Clone ID: UC-ZMFLB73296D12_FLI.pep
LEASFLGTARVIGWFSLMLGTYTYNRYFKQKKLRNILVFAHVGLAVITLLDIVLVSRLHVQYGIADKYMVLWGSALADAINQFKMMPFLILSGQLCPPGIEGTLFALFMSINNLGSTLGSFLGAALASALNLSTAQFDNLALGLGVQMICTLLPIGFLSLIPKEVTGLTS

SEQ ID NO: 56705 - protein, 125 aa, Zea mays
  Clone ID: UC-ZMFLB73306D09_FLI.pep
PGLAASQNNQTTTTKLRRYKINNSEANRPQKPVLLIKHSRLLLHGIRFLLPAEKISQLVVLLHRRRSTLHVLAVKAVENRFGRGSNSVFSSTEALVHEEPASRQLLLHHVVAVIDLCTKCLSPCP

SEQ ID NO: 56706 - protein, 456 aa, Zea mays
  Clone ID: LIB3075-009-F6_FLI.pep
DFFCSRPPPSTVATSLPLPPTPLLAVAAAAQAMDHEEVTEFLGQVPLLQCLPGSSIRRIAEAVQVKNYEPGDYVAREGEPVNGLYIIVDGQAEVSAPANAEEANRPDYVLNKYDYFGYGTNSSVHQVNVVALSKLTCFILPNQYGHLLQPKTIWNAEETPEHSLLEQILHLEPLEVDIFRGFTLPEAPTFRQVFGGQFIGQALAAASKTVDCLKMVHSLHAIFLVAGDNNIPIIYQVHRARDGSSFATRKVEAKQKGLAVFTLIASFQKEEVGFEHQAAIMPDVPPPEQLLNLEEIRERRLTDPRFPSQYRNLAAKKKFIPWPIEMRFCEGSASQHKPSLNYWFRARGELSDDQALHRCVVAYASDLLFSGVSLNPHREKGLKTYCLSLDHSIWFHKPVKADEWMLYVIESPSAHGGRGFVTGRMFNRQGELIMSLTQEALIRREKPRGPNPSPKL

SEQ ID NO: 56707 - protein, 415 aa, Zea mays
  Clone ID: UC-ZMFLB73326D08_FLI.pep
DLANKIGGAQVSGHHLVSEFSGLELKKSIMLGGQSETVKYRVFAGTWNVGGLAPPDDLDLEDWLDTKNDSYDIYVLGFQEIVPLNARNVLGPKQRRAAMKWQLLIGDALNSTRHGAAGMHGQGQGGAFRCLMSKQMVGIFVSVWTRSSLCRHVRHPGVCSVGAGVLGRLGNKGAVSVRFLLHGTSFCFVCCHLASGGEKGDALRRNADAAGILSRTSFLGFGGVAAAPGEVPKKILGHDRVVLLGDLNYRIAMDDDEARQLVRARKWGMLLEGDELLLELSSGRQFHGWHEGHVTFAPTYKYSRNSDHLHWCADGVAAGREKQHRAPAWSDTDAQAQPARHIHASEMVSFSRCSPLLLFNYLQVRPHPLAREGDEAGPVRALRLLPALRSPPGQGFVPRRVRTGGWLSCRLACVL

SEQ ID NO: 56708 - protein, 413 aa, Zea mays; identical to SEQ ID NO: 52982
  Clone ID: LIB3075-048-C9_FLI.pep

SEQ ID NO: 56709 - protein, 633 aa, Zea mays
  Clone ID: UC-ZMFLB73299H05_FLI.pep
LRSALRLSRIHPVSSPIRPPHPSPPWPYPSRHRRGHEPVTAHAASSVCARARGRRVSIAAVRDRPWGSMASAAGSAGGAGAGSGGLKTYFKTPEGRHKLQYEKTHSPAVVHYSHSGKTVSQMTVAYLKEKPAGQGSTPSTPSAGSGMRSAAARLLGTGNGSRALSFGSNGTSRAVSGSSRMGGGIGVSTSASGSQGMANYDGKGAYIIFNTADTLFISDLNSHDKDPIKSIHFSSSNPLCHAFDPEAKDGHDLLVGVFSGDVYSMSLRQQLQDPGKKPVSYQHFVNRDKDKDKDPSQGGAASSRSTCVAWVPEREGIFVVSHADGNLYVYDKCKDGNTDWTFPTVKDQSQVLISHAKSSKSNPIARWHICQGAINDISFSPDGAYLATVGRDGHLRVFDFAKEQLIFGGKSYYGALLCCSWSADGKYLLSGGEDDLVQVWSMDDRKIVAWGEGHNSWVSAVSFDPYWSPPNSDETEENVMYRFGSIGQDTQLLLWDLALEEIAVPLRHPSGGSPTFSSGSPSAQWDNACPPAGVLQPSPRMRDVPKLSPLVAHRVHVDPLSGLEFTSESILTICREGLIKIWARPIHSESNQQPDSSEQVVGNATAKDKMLTSSNKAGASSPSFKQPPPVLFT

SEQ ID NO: 56710 - protein, 165 aa, Zea mays
  Clone ID: LIB3078-001-F1_FLI.pep
QRRRRDLADDLVEGAGVLEPEHDADAEDVADGAAGQRVGEGEPGGVTRLQAGVARLQLQPRRRLAVRRRRQPEPPREQHQRRRRHHDQVGGGADVVAADALRRRPLPAHPHGRQRCHRGPGRGVAPEAVEPGHGGGELGCHVWRLRRRRRTSHLCAAVPSSASAD

SEQ ID NO: 56711 - protein, 198 aa, Zea mays
  Clone ID: LIB3078-002-A6_FLI.pep
LSQEARTKRRADRSLGGRRRRREASGAAMACSKPLSFLAEAAALIDIRCPLLPGRVPGRNMPGRHHRRRLPHRRIVVGHPGGWRPARGASPDDAGPRRREAEGAAGLLLGLLAGHDVYEEIEDVGARDGRGDVVALQGAALVLLGVEPGADSELEDEELAGLGEQHGRLGGDHAHVLVGLHDLLDPGQRQLVVLEVRR

SEQ ID NO: 56712 - protein, 94 aa, Zea mays
  Clone ID: UC-ZMFLB73306E02_FLI.pep
TYRLHDQNIYVKLCTYTKPTNHIRPLATNSRRPSRKQGACHPPRSSSVSYLLVELLESCSELWHPGPRIACRAPCAPLQRNCPPGPDTCGTVSA

SEQ ID NO: 56713 - protein, 74 aa, Zea mays
  Clone ID: LIB3078-003-B2_FLI.pep
STAWWIPSATSPRTASASSSAATSPTARSSPRWRRGRRSGSSSWASSASSLSSSSSPSTTSSSVPARLTGVQGD

SEQ ID NO: 56714 - protein, 177 aa, Zea mays
  Clone ID: UC-ZMFLB73317F06_FLI.pep
QIAHLSASQLYFTHGQANKLRRSPGFIRTYDTHQEGKGWGVKILATGRSVEAGDVSEHDRVRAHGPRLPAAFHPPARAPALGCPRRRQLPEHGRSAAPAGSADRRPWERGGTPLLLRAARLLRQAQGKGSDQASPRSLPPRTLCLCALARDVDAVRAVAVKVDQEQRTLPDLFAQCA

SEQ ID NO: 56715 - protein, 163 aa, Zea mays
  Clone ID: LIB3078-006-A2_FLI.pep
ARHAPSLARARGPARALRPARLLRRLPPGARQPRALRRQLRARRPARRLRLPALAAGLHARLPRLLRRLARALLPPRPRRGRDARDLRAGRRGRRGRRGPLRGHARPAAAHRRHGLHPHLAAGRASARPAPRTAAPPRRQHRRRGREMVHASAAVQLLASLSL

SEQ ID NO: 56716 - protein, 288 aa, Zea mays
  Clone ID: UC-ZMFLB73351H04_FLI.pep
EVLNGLLSRDDFDVAIRFPIGIIPAGSDNSLVWTVLGIRDPVSAAIALAKGDFTPIDVFAVKWIQAGVTHFGLTASYYGFVADVLQLSEKFRVQLGPFRYVVAGLLKFLSLPQYRFEVDYLPSSLQGRSSESRPLAEKRHEQLSDDGKVRRGTQTNGRIKDDWVTRNGEFLGIFVCNHFCKPAQGLLSPVIAPKARHDDGSLDLILVHGSGRLRLFCFFVAYQLCWHLLLPYVEYVKIKEVKVRPVGSTHSGCGVDGELLDGERGAEWQCSLLPAQGRLLGQDPGAFN

SEQ ID NO: 56717 - protein, 164 aa, Zea mays
  Clone ID: LIB3078-009-H3_FLI.pep
NWVLQVDGPNNLVSTLEIIDHIIWDGSYGLNGGALDHEAGLGTQWLPLGADNLAALFGIRLQLVILRLPQAELFCAAGRLHMLHTDMDTLPDDAPIDLLVDLDADGALGDVPDATGAAVVELVRHPLVDGAVHLDIDVIADLVGAEVGGERDVALLAEGAREEV

SEQ ID NO: 56718 - protein, 435 aa, Zea mays
  Clone ID: UC-ZMFLB73296F04_FLI.pep
ASTAPLPMEDEDTGPGDGGEASPPHHVAASSDRARDMVASPTSSRSVTQTVNGSHHFVIQGYSLAKGMGVGKHIASETFTVGGYQWAIYFYPDGKNPEDNSTYVSVFIALASDGTDVRALFELTLLDQSGKGKHKVHSHFDRSLESGPYTLKYRGSMWGYKRFFRRTALEQSDFLKDDCLKINCTVGVVVSTMDYSRPHSIEVPESDIGFHFGTLLDTQEGVDVIFSVAGEKFHAHKLVLAARSPFFRSEFFDHELGEEKNGTDTGDEIKEIVIDDMDPVVFKAVLHFIYRDNLVNDDELSASSSDCSIFDRLSGKLMAAADKYELPRLRLLCESYLCKHISVNSVATTLALADRHHAMELKSVCLKFAAENLSAVIRTEGFDYLKDNCPSLQSEILRTVAGCEEPCSSGLKSQSVWAQLSDGGDTSGRRVRPRV

SEQ ID NO: 56719 - protein, 139 aa, Zea mays
  Clone ID: UC-ZMFLB73300D07_FLI.pep
SGRTTIEEVQNYALPATSLSMRSAASSTVAIVCALDSSTLISKCSSRLITISTVSSESAPSSENFDSPQTSVWSGRASCFFTISQTLSVVSFLAAQETDLIGIGCRRRNVLPFLAGEKAREFVLIALTGLAKERAEDPA

SEQ ID NO: 56720 - protein, 146 aa, Zea mays
  Clone ID: LIB3078-018-G4_FLI.pep
SGTVAPCVLYGSNVERLAAGQGTFANSCLPYTGLYLLGNSLFGWNCLAPWFSHPTRTAIRQRYNLEGSFEAFTRQCGCCGDLVEDEERREHLEAACDLATHYLCHPCALCQEGRELRRRVPHPGFNNGHSVFVMMPPMEQTMGRGM

SEQ ID NO: 56721 - protein, 330 aa, Zea mays
  Clone ID: UC-ZMFLB73306E06_FLI.pep
TNRQLSVTHPVHRLLLPHYRDTMNINALARQKLINAGGIFEMTVFPRKYAIEISSKVYGSWNFTEQALPDDLIKRGMAVPDPSSPYKVRLLIEDYPYASDGLAVWHAIEQWVTEYLAIYYPNDGVLQADVELQAWWKEAREVGHADLKDEHWWPKMQTVPELVKACTTIIWIASALHAAVNFGQYPYCGYHPNRPSVSRRPMPVPGSDAYKELEKNPEKFFVRSITAQFQAVVGISLLEILSSHSSDEVYLGQRDTKEWTSDAKAQEAFKRFGARLTEIEKRVEAMNKDPRFKNRYSAAQFPYTLLFPNTSDKGDNTGVTAKGIPNSISI

SEQ ID NO: 56722 - protein, 113 aa, Zea mays
  Clone ID: UC-ZMFLB73333H05_FLI.pep
RKYVLDLLAETGMLGCRPCGSTIDKNHQTCAELGDPMDRERYQRIVGRLIYLCHTRPDIAYAVSVVSRYMHDPRVGHMRVIYQILRYLKGTPGKGLWFRANQHLNLEGYCDAD

SEQ ID NO: 56723 - protein, 105 aa, Zea mays
  Clone ID: LIB3078-024-B2_FLI.pep
ESCKKQTVMKNGQPVPLPSPDPIQWSTSDELSDRGHVLKPGVERLADGVDDEADLPQLLRVDDVAAVEDEGGLLHVVEDLLVVQGLELVPLGQDAHPVGALGGLV

SEQ ID NO: 56724 - protein, 420 aa, Zea mays
  Clone ID: UC-ZMFLB73366G04_FLI.pep
VGSPQQKFTVIFDTGSSNLWVPSSKCYFSIACYFHSRYKSGQSSTYKKNGKPAAIRYGTGSIAGFFSEDSVTLGDLVVKDQEFIEATKEPGLTFMVAKFDGILGLGFQEISVGNATPVWYNMVKQGLISDPVFSFWFNRHADEGEGGEIVFGGMDSSHYKGDHTFVPVTRKGYWQFNMGDVLVDGKSTGFCAGGCAAIADSGTSLLAGPTAIITEINEKIGAAGVVSQECKTVVSQYGQQILDLLLAETQPAKICSQVGLCTFDGTHGVSAGIRSVVDDEAGKSNGGLKSDPMCNACEMAVVWMQNQLAQNKTQELILNYINQLCERLPSPMGESAVDCGSLASMPDIAFTIGGKKFKLKPEQYILKVGEGQAAQCISGFTAMDIPPPRGPLWILGDVFMGVYHTVFDYGKLRVGFAESA

SEQ ID NO: 56725 - protein, 293 aa, Zea mays
  Clone ID: UC-ZMFLB73306E12_FLI.pep
RHMEGFGVNTYTLINRDGKPHLVKFHWKPTCGVKCLLDNEAVTVGGTCHSHATKDLYDSIAAGNYPEWKLYIQTIDLDHEDKFDFDPLDVTKTWPEDIIPLQPVGRMVLNKNVDNFFAENEQIAFCPAIIVPGIHYSDDKLLQTRIFSYADTQRHRLGPNYLMLPVNAPKCAHHNNHHDGFMNFMHRDEEVNYFPSRFDPARHAEKVPIPPRVLTGCREKCIIQKENNFKQAGERYRSFDPARQDRFIQRWVDALTDPRVTHEHRTIWISYWSQCDAALGQKLASRLNLKPSM

SEQ ID NO: 56726 - protein, 97 aa, Zea mays
  Clone ID: LIB3078-029-C11_FLI.pep
SGKCTNLTEANGSGIHGYKQFSLTATTAGPRKQTMRAAPAHRRPETVYDACTCTRETKRRRAGRERWMLAALRCAPLGRSASAFSSRWRGAARGCGR

SEQ ID NO: 56727 - protein, 78 aa, Zea mays
  Clone ID: LIB3078-029-E7_FLI.pep
RQRLQPAQLRAHARGQGEGARQREAGHAGVPGLPDPAQRHRQGALRQPAAAPVRPMAQHHHPDPVGLSRRSIRSCGPS

SEQ ID NO: 56728 - protein, 124 aa, Zea mays
  Clone ID: UC-ZMFLB73337C10_FLI.pep
VLFRPTSTLRCDEKAADRNIDGVTTQIVTARLESRASCNVQTHSNIPDNNVLCHAAFKSVCRRCLIESMADFLLLVSEVLTYTIRCSNLVHQEIMLVPRSFKSVIKCRKGIKKPISSCKSFCFF

SEQ ID NO: 56729 - protein, 355 aa, Zea mays
  Clone ID: UC-ZMFLB73301E06_FLI.pep
LQLGFNLLLIFFLHLAAGRRRHRRRRLDTVLRGLEHEPTNPGLVARVLVVVDVGEAAVPGQVHAGHLVVGRDAQQAQLLERVEERAHGAAHPPGDHQDLDDLRGEELPAAAHEQPVGPPGAVDLLHVLSPREEPREEDAPGATPAVQLRRLQRVVEPEARREGVGADEHPRGHEPADDGRPRLHHAAPGRDGREPAEEAVADVHHVPVARLEPLPEQRGERGDAAGEGGGDGGAAHGRPLPVDGPGGAVRLEDGGEGPGVEPVPAEPQQEGAEHHERRAVALERHGAAGVVEAPDAGALDERAPQPRDAADHVDDAGAGEVDDAGPEEQRAGRAAGAGPAVGGPEPVRHHGVDEP

SEQ ID NO: 56730 - protein, 174 aa, Zea mays
  Clone ID: LIB3078-052-H1_FLI.pep
ENLATCGGGGTLRGCKLGNRLGPFGDGVLGELAGEDEAHRGLDLPGGDGGLLVVAGELGCLGGELLEDVVDEGVHDGHGLGRDANVRVHLLEHLEDVDLVRLDALLRLLLSLLLAALLARHALLRPWLLLGLLLRRLLLRGLLLGLGRHQESIKWGAKEMGEGAAWEFAGEWRR

SEQ ID NO: 56731 - protein, 153 aa, Zea mays
  Clone ID: UC-ZMFLB73305H07_FLI.pep
LLLLLVIRRAGGVERCLLGAITVVARVLTADAHEIKVILVVRDYNVHGVDVSLAADRLAVEYVHGGAEPRQAFAERVVLGGLPVAHEGVVRRRLALLDRRHPPPHRRHECQRRVLLQVLWVVEQIRLDPVTGSAVVVVPERSARPERDSGLGC

SEQ ID NO: 56732 - protein, 106 aa, Glycine max
  Clone ID: LIB3106-040-G11_FLI.pep
TTILQHTLYNCSIDNLQSFSSFIIHLSRSVQNQFSIFAIKTLTSMHVAIESRKKKKLFALFASASAILHFFVKLLNLSLKTFNVLNGQIEHVCIACLLIHIGYKVL

SEQ ID NO: 56733 - protein, 118 aa, Zea mays
  Clone ID: UC-ZMFLB73306F03_FLI.pep
LPHKLLYAKAPCTSPKDCFWNKTASYPVHHSSHVKSIPSFSCKSSQASQKNGGSGCCLSRTFLGWWLYAPIQGVVPNLHKQVSVSKTIPGKAYTILQCYNECSCERILSPKGKLISHG

SEQ ID NO: 56734 - protein, 153 aa, Glycine max
  Clone ID: LIB3138-005-B3_FLI.pep
VLQATELKCGSLVVACTFDHRIADAYSANMFLVSWAEIAQSNKPIISIQPSFARSLFIPRNPPSFHSSLHDLYVSISASPRPSDPKPEFQSEPLINRIYYVTGENLNLMQKLASSNGVKRTKLESFSAFLWKMVAEAAAAKVKGKKNLVAKMG

SEQ ID NO: 56735 - protein, 478 aa, Zea mays
  Clone ID: UC-ZMFLB73346C08_FLI.pep
SGRRIRQGAAMNEKASVSKELNAKHKKILEGLLRHPENRECADCKSKGPRWASVNLGIFICMTCSGIHRSLGVHISKVRSATLDTWLPEQVAFIQSMGNEKANSYWEAELPPNYDRVGIENFIRAKYEDKRWVPRNGTSKSSSSVRDEKSQESPASANRSGHGHRSSFEQNRASPALPSKVAHAASRISSQASPQPPKVETPVPKVVLPPQSQKSPAKVDATPPKVEKPSVTPPPKVDYATDLFNMLSMDGTTEKESASSSNDDNGWDGFQSAQPVPSSEKKDSAKPAESKTQSTSGMEDLFKDSPAVPLSSAPAVSQVNAKNDIMSLFEKSNMVSPFAAHQQQLALMSQQQALLMAALKAGNAPQMMIPGTANQLNANGTLPFQNWTNLYQNPGSTPAAAQNGATKVANNNQDFSSGTFGFGTPGVYNISPTVPANGATTAGAINNGTASTASSTLPSQSGKDYDFSSLTQGFFTKR

SEQ ID NO: 56736 - protein, 95 aa, Zea mays
  Clone ID: UC-ZMFLB73354B06_FLI.pep
QYNDGKPCLVQKIGRTGKDTGSVHAEPLVTCLSIALVEVRLLWVGTAWALDDNIGGVATSRHAVLDALALDQPREKASDESVTCAVGVNKLLLGQ

SEQ ID NO: 56737 - protein, 334 aa, Arabidopsis thaliana
  Clone ID: LIB3168-028-B4_FLI.pep
FHSHKISMTTKRIDRDFPSSDDPSSAKRRIEFPEETLENDGAAAIKLLSLLLQCAEYVATDHLREASTLLSEISEICSPFGSSPERVVAYFAQALQTRVISSYLSGACSPLSEKPLTVVQSQKIFSALQTYNSVSPLIKFSHFTANQAIFQALDGEDSVHIIDLDVMQGLQWPALFHILASRPRKLRSIRITGFGSSSDLLASTGRRLADFASSLNLPFEFHPIEGIIGNLIDPSQLATRQGEAVVVHWMQHRLYDVTGNNLETLEILRRLKPNLITVVEQELSYDDGGSFLGRFVEALHYYSALFDALGDGLGEESGERFTVEQIVLGTEIRN

SEQ ID NO: 56738 - protein, 191 aa, Zea mays
  Clone ID: LIB36-013-B8_FLI.pep
PCQLNAATEQIQRDRGLSDSIFESRHLHAPVGHRLLAAEELVGDDLELLALLGLGDLLDRLWVGDPLQFGARAEHVLLLPLLTLLAGLPLGHLVLPDLFLELRLAGLVRALQRLLPDALLQRGRLPRHRHGRRSPGAGLLPPPSRQPPCDDAVVGGLAEGGRLRGVGEGRHGAELRRPVRVGIEVHGIRGR

SEQ ID NO: 56739 - protein, 154 aa, Zea mays
  Clone ID: UC-ZMFLB73369D05_FLI.pep
RKQNVARRLDPNERCTRRTDVVRLDDAVPSVAGRIRRRRLRLDVATGDVDDEAVADVVALQPLQRLVHVPHLDHLDLGGESLVDAELKHLSGLVDAADEAPRDGLPPQHHHGRHEAQGLADDAQQHELAVQLQQRQVRLQRVVHGHRVDDVVQR

SEQ ID NO: 56740 - protein, 137 aa, Zea mays
  Clone ID: UC-ZMFLB73306B04_FLI.pep
EEPNAKFIFKKSTGMLISEQFNVSLQASMLTHRHSTFVIEDTSLNKQTTQNRLGLFHSPIDRATVSSRWLHQGSDLLDRRPLHQTRPPGLHMRVGVEHRCVGRSEQAESDRHMVQVGEAEEVSSKVLALGQACLVHL

SEQ ID NO: 56741 - protein, 347 aa, Glycine max
  Clone ID: uC-gmrominsoy090a03_FLI.pep
KMKNNRDKEKGNDVDQSYRQHHTLSMPMMFSGLNREKEMSAMISALTHVVCGEDEHHGADYSLLNHNINNTNSAVVGDDDFTVTSNMASGSMPPSSTCSSQGGNSVLKRRREYDNTNDFSRGGSFPAISTIAESSSTVTRRTANTVYDYEYRTENVKVVEEEPRRKYRGVRQRPWGKWAAEIRDPFKATRVWLGTFETAEDAARAYDQASLRFRGNKAKLNFPENVRLRQQQEPPLNLNPPPPPNHGAILSIPSTTVHTEALQGSLGSSNFYEHSYSHLHEFPVSLYDQIAESTSTTMASHHLQFLPPASSSTMTMTSPQAPPSIYPTHPAAWSSGYSYNSSSSASG

SEQ ID NO: 56742 - protein, 835 aa, Zea mays
  Clone ID: UC-ZMFLB73369H04_FLI.pep
ASELRSLYAAVSSRLDDAGGRHQPRSARRRTTGHLPSKRRRRGAGEVGPGDDDGLPARKQSRRVRRRRELAANPAEGFSVAGDGARRLRTHLWYAKRFSMERRWTFILPVGAQGRGKGSRSVLKRLKNGTTIHDAGYFIPIELDGPEDALLSVLRMVLRPSPAEKTPDLKHLQDQVMRGVCYENAMLWDVRSMHSQIVGPVTYMWRPFSRADDKSGIEGDQCTSHCIHDESGNSSRRQLWIWIHPAALDDGISAIQFACERQIQDSGGVVKCCSLEGKIGRLEVNGCKAMQSLKKILHPTSSSKINTISTSDISASTDTLLDSCIAPHLLKASVISNAEILQPGAILSMVVHDPREVSVKGIDSSKIVSHDKQSEVLEEDVAPNANEASSEVANILPLMWMHPGKHDILLSDCRELWDSRQTINPPVSDEVLCKEKHSERIKFFCLDSGNDQEQTTQEKDNFIRSCPVILLKHAREGIPSLGWSIILPLSWVKPFWLFLVSHGAHAIGLRERRWIAAKLRMPCFPYDYPDSKAYASYMSKEAAGFDKVVERRPVAKRPPRVPVPPLWHCIMTCFRKDYDGILGVLEVDDLVRANMVLPKNSSAHCESGDAEPSQANVASLQLHVPRTTQMLRQYVEEFDRKYLSSSSDMKVDSDEPNLASDNTVGMTRFASELCLTRVLIRAFKEGSFEEGAVVCAPLPAELSAWKIRSKEEEEECVEKWELQLPQSHVSSYFSWFDPSTSSLQLPTDGVAREAFRWPIGFVTSGFIHGSNGQDAVAVAFCEAKLLAALRRQQWTHGNLQSREVCVLVRNARSAAYRRALATTVLEHQESDLAFL

SEQ ID NO: 56743 - protein, 129 aa, Homo sapiens
  Clone ID: LIB3064-064-A2_FLI.pep
DWKQKGFNWTYSSTWLGRPQNQVGGKRYFLRGGIKSKMRKKQKQKLFINPPDLVGLIITRIAQKRLASMIQLPPTASLPQHVGILGDTIQVEIWVGTQPNHIIPPWAPPNFIILTFQNQSFLPNSSPKS

SEQ ID NO: 56744 - protein, 134 aa, Zea mays
  Clone ID: UC-ZMFLB73306B05_FLI.pep
AKRHCTCCSVVIPKQQSKVHAHYHLVLTTLQTSLHHQGIAVSPVVRASSHLVGDEHRMVVVVARGLPPGNEAVPGGADERWVVWMPGAVSDDGAMPRKPLDSLPGYHVINMYRLVTGSRVYVPLTRAETESTTI

SEQ ID NO: 56745 - protein, 214 aa, Zea mays
  Clone ID: LIB3088-001-H12_FLI.pep
ADRVGRDGAGEASEEQGAAAHGQHGDGAVGGEAGAPGAGRRRAVVLLTAGCLRRDGGRAGGLLLLWHLVRGGGDGGLPEGVRPLQTPPRARPRHLHLQGRGGILQPGVPGEADRVRRPRRAHGADLLRDLHEGGPVRVRRQRLRPVRQRRGDRGPRLGAPRGSGARGRAGCVLLRPGGAGAATPADRSARPGRFRHAIERLCIQLLALESGFRQ

SEQ ID NO: 56746 - protein, 378 aa, Zea mays
  Clone ID: UC-ZMFLMO17019F10_FLI.pep
DIACHNVWLGMFFDRVFITHLCHLPDVFYCLGSSRIWNETWLSGFFYKPCNYELFVKQSLNMEMAIVMARDGGMDWIIHLDTDELLYPGGAAEYSVRRLLAEVPRDVDMVIFPNYESSVEHDNIKDPFSEVSMFKRNYDHLPKDTYFGMYKEATRGNPNYFLTYGNGKSAARIQDHLRPNGAHRWHNYAKSPNEIKLEEAAVLHYTYTKFSDLTSRRDRCGCKPTKEDVKRCFMLDFDRAAFIIASTASEEEMLRWYNERVVWTDKQLNLKLLRKGVLTRIYTPMTIVQSLRESGVFTSAIAAGQPAVNAKLSPKETNAQSQNVTASGNMTRVVRSTDSKASGRKILQAVDLAFSDTNVTAVPPLSPPSLDEHRHHSE

SEQ ID NO: 56747 - protein, 298 aa, Zea mays
  Clone ID: UC-ZMFLMO17023D03_FLI.pep
AYTGFVHMREDSHAVPADTCSFLNSFLDKAAVILWNECDGPRNSWRLCTVTQVEELKILLRMFPIWATGIVFFTVCAQNSSMFIEQGMTLDNQIGPFKIPAATLSSLDVISVVVWVPIYERLVVPIARRFSGKERGFSELQRMGIGLFVSTVAVAVAALVEINRLQVAVAEDLVHQKVPVPMSILWQAPQYLLVGVGEVFTSIGQAEFFYNQSPDAMRSLCSAFALVTVSLGSYLSSFILSLVSYFTTRNGQLGWIPDNLNEGHLDRFFWLIAGLSSLNFLVFIYYAQQYKCKIASVA

SEQ ID NO: 56748 - protein, 170 aa, Zea mays
  Clone ID: 700209004_FLI.pep
SIANEHALRVYYCVRSHRVCASETDKTGKSRDAFFYRSADRLGVHCLWAHIVRVFLLRCRRVQAASATSKWIPGRHPKRLVLLSACAVDASCNNRGCLPALAQHEDVQARMKQSCSFLPVSESWSKSRMHSQSQGIGSAAGNALIPPQLRGRSNVVTEDMSKLFVAKRKE

SEQ ID NO: 56749 - protein, 74 aa, Zea mays
  Clone ID: UC-ZMFLMO17036C08_FLI.pep
DSSKNIRICAFHIFKVFVANPNKPREIIQVLVENHREVLKLLHNLPTSKGEDEQLDEERDLIIKEIEKLVRLSV

SEQ ID NO: 56750 - protein, 199 aa, Glycine max
  Clone ID: LIB3242-022-G6_FLI.pep
DQARVYNKLLIETNVEIAVVESSAPDTDSFDQNISMSGSDMAGREQFTVGMHKPQQQQQQQQQPQLHQNMRMDYAADGTAVFAPPTVTVNINGGDSSPAVPPGLGLPQPQPMMVNSPEPIKRKRGRPRKYGPDGGMTLGALKTTTPPGGGVPVGQSGGAFPAGPLSDSASAGTVKRRGRPRGSANKNKKNDSSNSSKYS

SEQ ID NO: 56751 - protein, 232 aa, Zea mays
  Clone ID: UC-ZMFLMO17038C03_FLI.pep
RQYLDNKLRTCSHESCKFTGTYEQLREHARTAHVLTKPAHVDLSRKRAWDRLEREQEVGDVISAIRSQVPGAIIVGDYVIETRDDMSPDIDSGDDESSEWWSDQVESPDARLDPPRVWPHEALGSPSIWSDERRNLGRIPQNNRVPPRFSLGSRRPLHSGWQGGRRSSTRNRLQRGFSNHHSGHRSNYRGHRHLLLDRSYVGTRDSGSGRSLNSSVVPSRRQRLRYTHRSHY

SEQ ID NO: 56752 - protein, 85 aa, Glycine max
  Clone ID: 701155323_FLI.pep
LLQILTDRRIKNQGEKGGNHHYEIRKTLTILSSNTFIFDKKLKQERPCLISHLYLLEQFISCHPGHGIIRHYQINLHTLPKQSSK

SEQ ID NO: 56753 - protein, 491 aa, Zea mays
  Clone ID: UC-ZMFLMO17021G08_FLI.pep
KLQKELAVSLLYCGVEVKFPQEFSQERNLVTPGNNLEEAILLLLMLTRKLFLREIQWDPDLVNHLVYALSLSGHYEVLASHLEMLLPGTYTRSERWYILALCYSAAGMDDSALNIIRNGFSVLERKGKPHVPSLLLGAKLCCKNPKHASEGIKFANKAMKSFRSRDLHFISTTKHFLGVCYGPFSRSSTSYLDKSRLQDNALRLLQDAATTAKYNPEIMYSLAWENAMQRKLNAAVESATECLEMVMGGSVSAWKLLILVLSAQQNLQEAEAVADFAMDEAEKNDQLDILRLKAQIQASRGQFKSAVETFRVLLAAIQVKKEVWKLTTCNEVKCLQKLEMDAWLDLASIYSKLEAWHDSNICLDKAISIDFYYPKCWHVRGLLLEDQFLHKEALMALSFALSIDPDYVPGMVCMAGILRNIGGDSLSIARTYLRNALRLEPTNHRAWLSLGLVLKAEGSLQEAADCFQAAYELRELSPIQDFSEQLPIMLH

SEQ ID NO: 56754 - protein, 176 aa, Zea mays
  Clone ID: UC-ZMFLMO17025G10_FLI.pep
TVIRGLLKYWPVTNSSKEVMFLGELEEVLEATQLAEFQRCMVPLFRQIARSMNSSHFQVAERALFLWNNDHIENLIKQNYKVLLPIIYPALERNSRDHWNQAVRSLTLNVRKIFSDHDSAFFGECVQRFSDEELKQEESDSKREALWMRLEEMAALKPRENSPLGAPNGKPSQAAG

SEQ ID NO: 56755 - protein, 327 aa, Zea mays
  Clone ID: UC-ZMFLMO17036C12_FLI.pep
RLHPLTSARSPRSRVPSAGKMSSPHGGLDDQIERLMQCKPLAEPEVRALCEKAKEILMEESNVQPVKSPVTICGDIHGQFHDLAELFRIGGKCPDTNYLFMGDYVDRGYYSVETVTLLVSLKVRYPQRITILRGNHESRQITQVYGFYDECLRKYGNANVWKTFTDLFDYFPLTALVESEIFCLHGGLSPSIETLDNIRNFDRVQEVPHEGPMCDLLWSDPDDRCGWGISPRGAGYTFGQDISEQFNHTNSLRLIARAHQLVMEGFNWAHEQKVVTIFSAPNYCYRCGNMASILEVDDCREHTFIQFEPAPRRGEPDVTRRTPDYFL

SEQ ID NO: 56756 - protein, 92 aa, Zea mays
  Clone ID: 700157806_FLI.pep
RNSIHSFDHLGPFTYNLKMGTGGASKNKLQEDLFLLDKDWRINIDAHVSGGASDDPHSRVDALAVQVRQLLLSYCTHLIHCYLSHLLPLWLF

SEQ ID NO: 56757 - protein, 228 aa, Zea mays
  Clone ID: UC-ZMFLMO17038D04_FLI.pep
LSENRSDHSRQSISFLGSSVGEPSKIQTNRSNTSPRSHAIADTGRIYPAECCATQGETHVINVENDTSEEFQLGSTLRRTPPPKWPTPDQKHRRRVSGDDNHNGSVPLKDNTYHSRLDLEVIAGPSHGISCSRQSSRPSMLPITLGRVPPSDLVLKDSEVSGKHAQINWNGKTLKWELVDMGSLNGTFLNSQAVHHPNAGSRHWGEPAELAHGDIITLGTSSKLSVSS

SEQ ID NO: 56758 - protein, 133 aa, Zea mays; identical to SEQ ID NO: 51607
  Clone ID: 700163910_FLI.pep

SEQ ID NO: 56759 - protein, 228 aa, Zea mays
  Clone ID: UC-ZMFLMO17025H09_FLI.pep
QIFVKTLTGKTITLEVESSDTIDNVKAKIQDKEGIPPDQQRLIFAGKQLEDGRTLADYNIQKESTLHLVLRLRGGMQIFVKTLTGKTITLEVESSDTIDNVKAKIQDKEGIPPDQQRLIFAGKQLEDGRTLADYNIQKESTLHLVLRLRGGMQIFVKTLTGKTITLEVESSDTIDNVKAKIQDKEGIPPDQQRLIFAGKQLEDGRTLADYNIQKESTLHLVLRLRGGQ

SEQ ID NO: 56760 - protein, 246 aa, Glycine max
  Clone ID: 700556204_FLI.pep
TAISRTLEGRFHFLFEGRFHFLLEAASFSLDELVDILNVPVALMIADSACSKSHRMVLPSNLWSISWVSWKIRATQALVYGIGLSEERHGQAAGRRLLGLVRGQPLCDDGQLFSAMVVRKPLGTELLTKANFNWKITWASKLEKCYCIVVLPQNELEVKAEDTTYTIPCLLLLPNSTQVLCILSIPYSLYMQGPMFWAMMISEQKVAHLALKPLGRNNAIDGTCGVGTKEPQLIFASADSEEIVDD

SEQ ID NO: 56761 - protein, 108 aa, Zea mays
  Clone ID: UC-ZMFLMO17030B04_FLI.pep
SNAQHEHHFHSFKGNTQRHALISGVSTIRWSLRPSTAPAGAWLTHAFGNIHIDHAVGKKRKENIAELNIIVQENTAYFVIIIVPSYWISKADFTDWQDRRGSSLHTPS

SEQ ID NO: 56762 - protein, 93 aa, Zea mays
  Clone ID: LIB3843-020-H12_FLI.pep
KMLSSTGDLSRCPWDELIFEDESERGSNALLARAWSPGWQNADKALTAFLDGPLVDYSANHKKADSASTSLLSPYLHFGELSVRKVFHQVRMK

SEQ ID NO: 56763 - protein, 451 aa, Zea mays; identical to SEQ ID NO: 38697
  Clone ID: UC-ZMFLMO17033C08_FLI.pep

SEQ ID NO: 56764 - protein, 427 aa, Zea mays
  Clone ID: UC-ZMFLMO17020E02_FLI.pep
PCPSLPRNAAMGTRPRGVVLAPWAVVLVLALRLAGASHVIHRSLEAEAPPSVPASIVSPLLRTGYHFQPPMNWINDPNAPLYYKGWYHLFYQYNPKGAVWGNIVWAHSVSRDLINWVALEPAIYPSIPSDKYGCWSGSATILEDGTPAILYTGIDRPDINYQVQVLALPKDASDPLLREWEKPEEYNPVATPAAGINATQFRDPTTAWRHAGHWRMLVGSVRGARGMALVYRSRDFRTWTKAKHPLHSAALTGMWECPDFFPVSGPGMQAGLDTSAPGRKYVLKSSLDLTRYDYYTIGSYDGGKDRYYPDDPAGDYHHRRRYDYGNYYASKTFYDPVERRRVLLGWANESDSVPDDKAKGWAGIHAIPRKIWLDPTGKQLLQWPIHEVEKLRGKAVSVDAKLVKPGDHFEVTGIATYQVSFYTLATF

SEQ ID NO: 56765 - protein, 81 aa, Zea mays
  Clone ID: 700803389_FLI.pep
ATSHRYAILSCCALVCANMVCDGSRMSMALRIFKQCLSSPVFPKDMSQELPSLITPTELYIFVIFMCIPIPLRGSCEPARE

SEQ ID NO: 56766 - protein, 471 aa, Zea mays
  Clone ID: UC-ZMFLMO17023E12_FLI.pep
DGMTTRGAKRAATSDPAAPDLPSKRVMDGPSFDVHRAESSHQHVMAGPASLDPRRAEAASKHVRALNTQFASWVQLQLQNHPAELWEDGLKDYISHASEIMEKFKDVVNWLRQNQAGSIVVSSPSSLKDDKSNLPAADDSKLLVQPSSDNKQKAPIMASSSSSFQNSSLPNLFSSPSQQKTPDYSGMFADKKNTSSDSSKPAFQFGGNNVIFGGKKDAPVDSSKPFQFGPNNGIFGDKKDTTSDSSKPFHFGANKGIFGDKNTTSGDSSNPFQFGANNGFPTSNAPSIFSSVAQSFNPQSPPLFSMNQQSVIPGNQNTSEASADADEDAEPEKPSSPSVKKAEEKGVVVVHETKCKVYVKHDDATKGWKDIGVGQLSIRSKEGTEKASKESTPTIVIRNDVGKILLNALIYKGIKMNLQKNTVASIFHTSDAQSSESAGDTVVARTYLFRLKNVEEATKLSTAIKENAPSD

SEQ ID NO: 56767 - protein, 188 aa, Homo sapiens
  Clone ID: LIB4218-091-D2_FLI.pep
LSIFLYIGNNCLKSRLRWGILWRRGGCGLLLQNQVGQGAESQAQHTHWSHLGLWVVAAQVAPWHPEANPPLGFRNLKPSNIILISSDHCKLQDLSSNVLMTDKAKWNIRAEEGGRGSPRLWERGLAPRIQAALATLGAGVRQHQTAVCSEGPHKALALCKLQRDLLWVATEQACHHQGRGRAPQTPNI

SEQ ID NO: 56768 - protein, 347 aa, Zea mays
  Clone ID: UC-ZMFLMO17030C03_FLI.pep
AEDPSIAGMVLDSAFANLYDLMMELVEVYKIRVPKFTVKMAVQYMRCVIQRRAKFDIMDLNVVQFAPKTFIPALFGHASNDMFIQPHHTDHIHQAYAGDKNLIKFEGDHNSPRPQFYYDSVSIFFYNVLHPPQFPSTCTHKLDKYYNLGAFKGAAGTNESLLYEIINGLRAAGTDAGSSSAATASFTNATKSVVELLTERVNQLSVKNDNDLDFLLDENHNLTEMDGNTGECHLEDKSNRQTDECCSYTSSNRESWGRCSSLGGASDGLSSGEQPEIPNHKLKSLTLRALATPLRRVRRKPLAIPKEKNRSLWKRLKKERQQMGENISQRLRLCLQGQARHKRTKSS

SEQ ID NO: 56769 - protein, 141 aa, Zea mays
  Clone ID: 700244123_FLI.pep
RTCRSCQPRHAENSYRSFPIALVREIAKQLLECIAFMHELCLIHTDLKPENILLVSPEYIKVPDYKVSSRSPKEGSYYKRVPKSSAIKVIDFGSTTYDQQDQSYIVSTRHYRAPEVILGLGWSYPCDIWSPIMPRRHNITL

SEQ ID NO: 56770 - protein, 348 aa, Zea mays
  Clone ID: UC-ZMFLMO17033C11_FLI.pep
GDKLKFGLSSMQGWRATMEDAHSALLDLDNDTASFGVFDGHGGKVVAKFCAKYLHREVLHTEAYAAGDLGAAVHRAYLRMDEMMRGQRGWRELQALGDKINQFTGITEGLIWSPKASDSNDRHDDWAFEEGPHSDFTGPNCGSTACVALVRNRQLVVANAGDSRCVISRNGQAYNLSRDHKPELEAERERIQSAGGYIKMGHVNGSLNLSRAIGDMELKQNKFLSPDKQILTANPDINIVELCDDDEFIVLACDGIWDCMSSQQLVDFIREHINTEESLSAVCERVLDRCLAPSTMGGEGCDNMTMILVQFKKPFAQVKDASDAEQLTGDAGCSETHGAEENGSDKQI

SEQ ID NO: 56771 - protein, 155 aa, Homo sapiens
  Clone ID: LIB4655-027-G6_FLI.pep
QAQAAREVRAGSAPGPRPSAARPRLPIPRAGAGALGCRGGSRLGCWARGQGGPGEAAPAADRAEGGGLGWPNHGGPGAGAEAGPGTGAGAGGRERGRERHPGPLRMSAPGSLPLSHSTPGSVLEISMPSWILPLPSWPLDSWLASPPIPNLVKWP

SEQ ID NO: 56772 - protein, 534 aa, Zea mays
  Clone ID: UC-ZMFLMO17036G10_FLI.pep
EEMMLLGFISLLLAATSRIISGICIDSKYYNSRFSPCTKEEVQESINAEHAIAHARKHLLEVILHHSPRRNLKTSYHNHEGCREGYESFVSHEGLEQLHRFIFVMAVTHVTYSCLTMLLAILKIHKWRKWEDEAFRDNHESFSQIAYESATRRQPALTKSYSFRSWSQNNVVMWLVCFIAQFGQSVVRADYLILRKGFIMTHNLPPTYDFHNYMIRSMEEEFEKIVGVSGLLWGFVVAFMLFNVDGSNLYFWIAILPVTLVLLVGAKLQHVIATLTAEGAKMSTYGPRIQPRDDLFWFKKPEFLLWLIHFVLFQNAFELASFFWFWWQFGYDSCFIKNHLLVYCRLILGFAGQFLCSYSTLPVYALVTQMGSKYKAALIPRRIRETIHGWGKATRKKRRRRRGDDSTVRTETSTVCSLTDDDEDFEDDHHHHHHGPSYETPRAGGRPPYLKIETHRQSGSGHDGPRPGGTPCFHPSGSGSGHAMLLRQASVSAPSSPSYRGGNNVTRSASMPGIAALRTTGSGTPTRVSHEEPT

SEQ ID NO: 56773 - protein, 295 aa, Allium porrum
  Clone ID: LIB3803-009-F4_FLI.pep
CRTLPVARPLSNRLSRRSSAVLYPIRASAPKREADPKKRVVITGMGLVSVFGNAVDAYYDKLLEGESGIDFIDRFDASKFPTRFAGQIRDFSSEGYIDGKHDRRLDDCLRYCIVSGKKALESAGVGVGTKELAKIDKLRAGVLVGTCMGGLTVFSDGVQTLMEKGLRKVNPFCIPYVITNMGSALLAMDIGFMGANYSISTACATSNCCLYAAASHIRRGEADIMIAGGTEAAVIPIGIGGFVACRALSRRNDDPKTASRPWDQGRDGFVMGEGAGTLVLESLEHALKRGARAEF

SEQ ID NO: 56774 - protein, 413 aa, Zea mays
  Clone ID: UC-ZMFLMO17020E07_FLI.pep
EGFCPGMSSSGKMEGPSAPVVRRDPYEVLSVPRDSSDQEIKSAYRKLALKYHPDKNASNPEASELFKEVAYSYSILSDPEKRRQYDTAGFEELENEGMDMEIDLSNLGTVNTMFAALFSKLGVPIKTTISPTVLEEAMNGTVTVRPLPVGTSATGKVDKQCAHFFGVTISEEQAHSGMVVRVTSPAQSKFKLLYFEQEVNGGYGLALQEDSQKTGKVTSAGMYFLHFQVYRMDSTANALAMAKDPEAAFFKRLEGLQPCEVSALKSGTHIFAVYGDNFFKPASYMIEAMCAKSYEDTTERLKEIESKILAKRNDLRQFETEYRKALARFQEVTNRYTQEREAVDDMLRERDNIHCSFTTERTLANPVGVGSSSRYTIEQSIPESPENGSVDGRDKSGKKKWFNLNLNRSDKKA

SEQ ID NO: 56775 - protein, 319 aa, Glycine max
  Clone ID: 700849962_FLI.pep
KMNHVEHIAYDMVMITLSMSLIVLAIILFLACKKKPVESEETLPVKLCARAHPLMEIDAATDGFNPRRIIGQGRLGTVYAGTLDKEKEQLVALKRIHPFLVLSNAGFGFSSVLKWLSLAQHPNVVPIIGFSEAPGERVIVMEFVHMASLDFYLHQNQDGASLLDWNKRFRIAAGVARGLQYLHEVVAPNIVHGCVKSSNILIDVNFCARICDYGLNFLAPVEKRGIVGYVDDEYWSERRGGVATKESDVYGLGVVLLELLSGKGCEGGLLVKWALPLIRETSFSELLDPRLVIPSDMKPLVRLAKVVSACVGNSRKCRP

SEQ ID NO: 56776 - protein, 120 aa, Zea mays
  Clone ID: UC-ZMFLMO17022C01_FLI.pep
AWVDLPPRLRRGGLGRRLRGLHGRRGLRGARHGQGALPVQGHRRLQARRAGLHGHRQPHPRRLPEHLLPHEARRHALRPARRRRLARRPAQEEARAPPHAAPVSGASTCTTPGRTAQAMV

SEQ ID NO: 56777 - protein, 145 aa, Zea mays
  Clone ID: UC-ZMFLMO17023F12_FLI.pep
GGSDNDKIWKNDVTCVNMIRLSRASFFRFCKLIRDRGLLQDTTHMCVEQQVAMFLHTIGHNVRNRVVATNFGRSGETVSRYFNKVLHAIGELRTDFIKPPSSTTPSKIQGNPRWDPYFKVVFGLFAQIILIIGRLLRPYILSSWF

SEQ ID NO: 56778 - protein, 221 aa, Glycine max
  Clone ID: JC-GMLE01810033B05_FLI.pep
QPHYSLRGNMALAANATPSLAFASSSLLNHNPQFGAAPKRFVSSSSSSLCLAAGLSSKARAFSFSASAAALDGEELAVEETWKLARPTEVYVCNLPRSCDTEQLLHMFNPHGTVLSAQVYCLFNILLSSVFLFFCLSLVISLFQVCRSAETGESRGSAYVTMASINSARKAIAALDASVSHSHSLLLFRSYLLAAVLSEISVFYDSRILVGVKCGLDFQLR

SEQ ID NO: 56779 - protein, 227 aa, Zea mays
  Clone ID: UC-ZMFLMO17026D09_FLI.pep
IQTPPVDPTYAKFVTTFHHGTILRHYDHIDKHHNSCNPILFHGTTEANCRSSNHAGTTTADRGLAGDLNGLHFRLLGVLLRHSDCKHAVLHGGRDLLRLGVLGQSEPAQEPPAAPLHAVPGVRLLLLLLVALAADLKDVAVLDLHLDLLLLQPRYVGLEHVRLWSLLPVDPRASEGRGLRAGPRERVEETAAVAGAEGEALKGVPEVEGEGIEHVAAADQRHGQVRF

SEQ ID NO: 56780 - protein, 276 aa, Zea mays
  Clone ID: UC-ZMFLMO17033D07_FLI.pep
KLSRRRRVLLGFLHAAAHLTSAVLLMLLMELAIEICIRNHLLATSGYHTLYEWYRKVESEHFPDPTGLRARLEHWTFGLYPACIKYLMSAFDIPEVMAVTRSTICKKGIESLPRGGAIIYYVCVFLYFWVLSTPVVSLVFGSYLYLCINWFHIHFDEAFSSLRIANYKAFTRLHIKKNGDLEVFTLAVDKVPKDWMLDPDWDMEPKQPFQMSYTRKFPSKWRAASGLDPINAVRIVDRFVIPRTPSSPTTPGGSVSSPTTPGGSVSSPTTPGGFMR

SEQ ID NO: 56781 - protein, 609 aa, Zea mays
  Clone ID: LIB3732-039-F9_FLI.pep
RALTVSVSSSHKKQLNCSVGVMCGILAVLGCSDCSQARRARILACSRRLKHRGPDWSGLYQHEGNFLAQQRLAIVSPLSGDQPLFNEDRTVVVVANGEIYNHKNVRKQFTGAHSFSTGSDCEVIIPLYEKYGENFVDMLDGVFAFVLYDTRDRTYVAARDAIGVNPLYIGWGSDGSVWMSSEMKALNEDCVRFEIFPPGHLYSSAGGGFRRWYTPHWFQEQVPRTPYQSLVLREAFEKAVIKRLMTDVPFGVLLSGGLDSSLVASVTKRHLVETDAAEKFGTELHSFVVGLEGSPDLKAAREVADYLGTTHHEFHFTVQDGIDAIEEVIYHDETYDVTTIRASTPMFLMARKIKSLGVKMVLSGEGSDELLGGYLYFHFAPNREELHRETCRKVKALHQYDCLRANKATSAWGLEVRVPFLDKEFVDVAMGMDPEWKMYDKNLGRIEKWVLRKAFDDEEHPYLPEHILYRQKEQFSDGVGYNWIDGLKSFTEQQVTDEMMNSAAQMFPYNTPVNKEAYYYRMIFERLFPQDSARETVPWGPSIACSTPAAIEWVEQWKASNDPSGRFISSHDSAATDRTGDKLAVANGGGHGAANGTVNGNDVAVAIAV

SEQ ID NO: 56782 - protein, 316 aa, Zea mays
  Clone ID: UC-ZMFLMO17036H07_FLI.pep
VNHESRQGLREFVAEIASIGRLRHRNLVQLQGWCRRRGDLLLVYDYMPNGSLDRHLFGDHLKASRLTWPVRYRILRDVASALLYLHEGWESVVLHRDVKASNVLLDADMSARLGDFGLAKLHERGTNPSTTRVVGTLGYLAPELTRTGKATTAADVFAFGALVLEVVAGRHPIEPRAPPEELVLAEWAWERYAAGEVEKVVDARLAGAYDFAEAAAAVKVGLWCSHPAPATRPTMREVARYLDGGDASEVPEPPPPPPMPPAYSGEVGFDDFVHSYPSSSFERAAAAGGGWDGGTQMSVATFPFSSLSMRSSHVST

SEQ ID NO: 56783 - protein, 448 aa, Allium porrum
  Clone ID: LIB3803-041-B4_FLI.pep
GCARPLSNRLSRRSSAVLYPIRASAPKREADPKKRVVITGMGLVSVFGNAVDAYYDKLLEGESGIDFIDRFDASKFPTRFAGQIRDFSSEGYIDGKHDRRLDDCLRYCIVSGKKALESAGVGVGTKELAKIDKLRAGVLVGTCMGGLTVFSDGVQTLMEKGLRKVNPFCIPYVITNMGSALLAMDIGFMGANYSISTACATSNCCLYAAASHIRRGEADIMIAGGTEAAVIPIGIGGFVACRALSRRNDDPKTASRPWDQGRDGFVMGEGAGTLVLESLEHALKRGAPIIAEYLGGAVSCDAYHMTDPRADGLGLSTCIQRCLEDARVSPEEVNYINAHAASSLVGDLAEVNAIRQVFKDPTGIKINATKSMIGHCLGAAGGLEAIATIKAITTGWLHPTINQLNPEPAVEFDTVPNKKQQHEVNVAISNAFGFGGHNSVVVFAPYKP

SEQ ID NO: 56784 - protein, 339 aa, Zea mays
  Clone ID: UC-ZMFLMO17039A06_FLI.pep
ARLALVGGEADGAPGGVEADAGALLLHVPDDGHGRVRRRERQAVGAGSVHGDQVVLRRQPQRAAALEPQRHRGHLHARPVRQVVARVEQRHPGGPGQRRRALDEGVAERRVGGGLEPRHGGAGVHDDAARARRGVHGEGGGRDGQRLPAHRDARQRHVVEGARARAAHERRRHGARLGGAVAELERGRGRGVAVHEAVGEGGRGDLGREGERPAAQRQQPRGADEEALVVVAAPDGDVADRGGVPQRERLGGEVAHGVGAVAVGHLVEAGARGVAARRGVQVPAALGVAGDGGVGGGERRVEHRVGLLVAVGAGLALHPGDVAAGVQHHVQLPRGAADA

SEQ ID NO: 56785 - protein, 136 aa, Zea mays
  Clone ID: LIB3600-006-E8_FLI.pep
IRARLTHTSNQTPPYRIAIKRVHNPQGQLVAEPSSSAANQSCFASLGVSKELVDSWHDLGGLVVHKASEAMHGVTPPLLMVLKHAGCPPCLVYPDFRVAGDVPEELKPADANGNSHRREQRVHLGSDPAAGHQTRT

SEQ ID NO: 56786 - protein, 79 aa, Zea mays
  Clone ID: LIB4719-020-E10_FLI.pep
RNRHPILLPFVSSSTVQHWYKLPRARQVKARQNLIKKRRPKQKKPPSLPSSRSVRGSGRLFRAAGPCKARGHDPGRPRG

SEQ ID NO: 56787 - protein, 388 aa, Zea mays
  Clone ID: UC-ZMFLMO17020G10_FLI.pep
LVAWQCRSLIPPADRVGGRESESGMASEPVARAVAEEVGRWGSMKQTGVTLRYMMEFGSRPTQRNLLLSAQFLHKELPIRFARRALELDSLPFGLSNKPAILKVRDWYLDSFRDIRYFPEVRSRNDELAFTQMINMVKVRHNNVVPTMALGVQQLKKELGRSRKVPFEFDEIDEFLDRFYMSRIGIRMLIGQHVALHDPKPEPGVIGLINTRLSPIQVAQAACEDARSVCLREYGSAPDINIYGDPNFTFPYVTLHLHLMLFELVKNSLRAVQERYMNSDKDVPPVRIIVADGEEDVTIKVSDEGGGIPRSGLPRIFTYLYSTAKNPPELDRPNTEGVTMAGYGFGLPISRLYARYFGGDLQIISMEGYGTDAYLHLSRLGDSEEPLP

SEQ ID NO: 56788 - protein, 222 aa, Zea mays; identical to SEQ ID NO: 46163
  Clone ID: LIB3600-038-G5_FLI.pep

SEQ ID NO: 56789 - protein, 377 aa, Zea mays
  Clone ID: UC-ZMFLMO17023G10_FLI.pep
TGAPPNLLGGQTRITGISQANYILALQPSVGSDEAHDGVNQLLRPLSCAGVHVNGELVEVERMAHAAADQHLHLLTGGAQGVTVLEVCVADEVLLADGHHHRRERHGLQGRRLRTHGARERVLLGGANRQRHGLALVQHVQREEHRLSHLQLRPAPCCAHESRLDQNAPGDAQGRPDASAVLAHTRGGEVADVRARAVADEEHPGDVGGLTEELSCLVTKSSVLRQRDAAEPADRGDGRVDVRWQASLGRERELDRDDHGRNGARETRVELVVHEPGRVGEAEAAAVEVHDDGQAPALAVVVDLGEVDPEIGLPWEVVQRVPVAGHVVRRHGLHHREDLGWAGPRAVDAAVVQNAQPAGHLVHHLAATRRLNLRLQL

SEQ ID NO: 56790 - protein, 187 aa, Zea mays
  Clone ID: LIB4071-023-E2_FLI.pep
QDPRTENNPYLGFIYTSFQERATFISHGNTARHAKDFGDLKLAQICGIIASDEKRHETAYTKIVEKLFEIDPDGTVVALADMMKKKISMPAHLMFDGQDDKLFEHFSMVAQRLGVYTARDYADILEFLVDRWKVADLTGLSGEGNKAQDYLCTLASRIRRLDERAQSRAKKAGTLPFSWVYGREVQL

SEQ ID NO: 56791 - protein, 590 aa, Zea mays
  Clone ID: UC-ZMFLMO17033E03_FLI.pep
AALLPLLALGSSIPLQSPSQEHATRATGRKGKNMAAANGDACRSVGGVPRPTNPMVTPLLTDLYQFTMAYAYWKAGKHLDRAVFDLYFRKNPFGGEFTIFGGLEECIRFIANFKFTEEEIKFLRSVMPACEDDFFEYLRSIDCSDVEVYAIPEGYAVFPKVPLMRIEGPVAVVQLLETPFLSLVNYASLVTTNAARHRLVAGKSKNLLEFGLRRAQGPDGGISASRYCYMGGFDATSNVAAGRLFGIPIRGTHSHAFVSSFMGLDEITDKTLTSSDGSNTCEDFISLVQNWLIRIQDSSSLHGTFGETSQSELAAFTSYALAFPNSFLALVDTYDVMRSGVPNFCAVALALNDMGYKAVGIRLDSGDLAYLSVEARKFFHAVEKEFVVVGFGKTSITASNDLNEETIDALNKQGHEVDAFGIGTYLVTCYAQAALGCVFKLVEINKQPRIKLSEDVMKVSIPCKKKCYRLYGKEGYPLVDIMTGEDEPGPKIGERLLCRHPFNESKRAYVVPQHVEELLKCYWPGNSSNSREELPSIHEIRTRCIHHLDRMRPDHMRRLNPTPYKVSVSAKLYDFIHFLWLNEAPVGELQ

SEQ ID NO: 56792 - protein, 145 aa, Zea mays
  Clone ID: UC-ZMFLMO17030F06_FLI.pep
TGKTITLEVESSDTIDNVKAKIQDKEGIPPDQQRLIFAGKQLEDGRTLADYNIQKESTLHLVLRLRGGMQIFVKTLTGKTITLEVESSDTIDNVKAKIQDKEGIPPDQQRLIFAGKQLEDGRTLADYNIQKESTLHLVLRLRGGQ

SEQ ID NO: 56793 - protein, 149 aa, Zea mays
  Clone ID: LIB4074-017-F7_FLI.pep
QHKPRRCWCMRTKHSLHQQNYKPHQQKDQLAEAERPSRRDRPVGARRSRRVVAGSRAGAEHDHDPVALARDPGAGELAVVEEPVVLRLGVVGEDDGGGEARHARRHHLAVLGHRRVEVAAVQVPGVVRELLLGADDGVGARRVGALLPL

SEQ ID NO: 56794 - protein, 211 aa, Zea mays
  Clone ID: UC-ZMFLMO17035A06_FLI.pep
LIILGAWTLWNHRNKCIFDGCNPSMSLCLRAADEEIRRWKVAGAKDLAHLAAPLVNILTHTDEIKLKAKRIAAVEKKKRCLGMKILSTKEASGGLQRCADYVGMPTAPSESNKEPRPEECVNELGIKQPVQHVASEEQEGVQDDAKADANVMNVSFGKGKSEDSFGTINGTNSGDKIESPSGLAERTLTQPTTKGCSKQRGRSSNGRGNRT

SEQ ID NO: 56795 - protein, 446 aa, Zea mays
  Clone ID: UC-ZMFLMO17037B09_FLI.pep
TAKCKPNTAHEKAEEGAMAEPSQQQQLRSFVEVPAGSHFPIQNLPFGVFRRRGVQAQAPLPAVAIGDFALDLAAVADAGLFDGPALSGSPCFHQETLNMFLGMGRPAWREARATLQKILSADEPVLRDNEALRNKCLVPMSDIEMVLPITVGGYTDFFCSVHHARNCGFIFRGPQTPVNPNWFYLPIGYNGRASSIVVSGTDVTRPRGQGHPTGNSAPYFGPSQKLDFELEMAAIVGPGNELGKPIDINDAEEHIFGLTLMNDWSARDIQAWETIPLGPFLGKSFSTTVSPWIVTLDALKPFMCDAPKQEPEPLPYLAEKNHINYDIPLEVWIKPKDQNDASIVTKTNFKHLYWTLTQQLAHHTINGCNMRPGDIFATGTLSGPERDSLGCLLELTWNGQKEIPVGNLTRKFLEDGDEVILTGCCKGEGYNIGFGTCTGKVLPALP

SEQ ID NO: 56796 - protein, 163 aa, Zea mays
  Clone ID: UC-ZMFLMO17022F08_FLI.pep
TRLIISISSWITLRVGRERRRAGRPEDALPRRQDGPRVELGLEPREPVPPRGAEVLRPLVPRLVARQVLLGADARARAEVEDPLVLPRQRLQALRRARQRRPQERHQVEHLLVRGHRRAPRVPLVLVHGVDEDGAAGAGGAAPQHATEDAAVEVGDAGRRHEE

SEQ ID NO: 56797 - protein, 119 aa, Zea mays
  Clone ID: UC-ZMFLMO17024F10_FLI.pep
ANRGQGVQPAEGARRDGGGGGVHSGGRSAERPARGAERAHRPGRPFPSRLLPPAEERREVPGLRPRHDAKAAAAPWERRGVPARHTGIDRANRGQGAQQTEAAYGAALLALKGAKSLAG

SEQ ID NO: 56798 - protein, 232 aa, Zea mays
  Clone ID: LIB3608-016-B9_FLI.pep
LSSNCDGKYSTVRNNNCSGWKHKQELLEELGVYMVAFDRAGYGESDPDPRRSPESAALDIQDLADALGLGDKFHLVCSSLGSHAGWAAVRYIPHRLAGLAMMAPVINYRWRGLPRGLARQLYGRQPVGDQWSLRVAYYAPWLLHWWMSQPWLPTSTVVDGSAPFPNALDEKNRVMALSNGMFHSVRLASLGCPALVSFSLSPTTMKRTSIFLSCRGRGWRRSRAYRSPSTAT

SEQ ID NO: 56799 - protein, 240 aa, Zea mays
  Clone ID: UC-ZMFLMO17026H12_FLI.pep
LAMDLNSLNPLQSTWIEMKPNKPSSCALGFAQNLNRLDASSQLLLKRLQARTAPSSAGAHLPRHSVCPAPLPWPPPPAASSSAAQFPGARVPAPFHTARLQTEEQSAPGACSRPAAQVWPWWSARWLSGHVETCGGEQGVLPLISCSAPSLLLFLSLGFVSGLCSNFVCASSPWSSSTSHGARPQARSCARAQPKIPVCAPWCPYVAACACSPAISSSLKARAKLSYWPRAAPFFSCSRA

SEQ ID NO: 56800 - protein, 338 aa, Zea mays
  Clone ID: LIB3596-032-E1_FLI.pep
IRTQHCWGSKLLKLNNGMVSVDDEGGTHEGIKTIPVQRACEFTTNSVLCVCIVTWNMNSKMSAEDVAKLVSSDRKFDLLVVGLQEAPKPDVSRVLQEALAGTHVLLGQKSMQSLRMLLFGSRSSEKYIREMKVDKHAVGGCGGIIGRKKGAVAMYINFSGIRMVFVSCHLAAHEHKVEKRNAEFQHISQSLFARYGAPTPYAQSADITVWLGDLNYRLQGISSTPARKMIEENRQSKLRGRDQLLQEAEKGQVFSGYCEGTLSFKPTYKYDVGGSVYDTSYKVRVPSWTGRILFKVGQSSGLDAVLSSYESLDCVRSSDHKPVKAHLCLKVRSDGDAD

SEQ ID NO: 56801 - protein, 116 aa, Zea mays
  Clone ID: UC-ZMFLMO17035A07_FLI.pep
CPDGKTIEAEAAHGTVTRHFRVHQKGGETSTNSIASIFAWTRGLAHRAKLDDNARLLDFALKLEAACVETVESGKMTKDLAILVHGSSSVTRSHYLNTEEFIDAVATELRSRLGAN

SEQ ID NO: 56802 - protein, 179 aa, Zea mays
  Clone ID: LIB3060-090-B3_FLI.pep
IDMAGRDREPLVVGRVVGDVLDPFVRTTNLRVSYGARTVSNGCELKPSMVVHQPRVEVGGPDMRTFYTLVMVDPDAPSPSDPNLREYLHWLVTDIPGTTGAAFGQEVICYESPRPTMGIHRFVLVLFQQLGRQTVYAPGWRQNFNTRDFAELYNLGPPVAAVYFNCQREAGSGGRRMYS

SEQ ID NO: 56803 - protein, 236 aa, Zea mays
  Clone ID: UC-ZMFLMO17039E11_FLI.pep
HPRDAERDCVGRPDPHRRHHRALPARVRVRGPSMVLPPHRLPVLRLRPRRGRLGPGAEAGQRVRRRHLPAPPQHRHRHLLPGHPPGAGAAAQARQEEQIQALLEHLPSLRRLRRHRPQRRQHLQGAPHPRAGQRLQDRLHCHPGHARRHRALPRGHHVAHRHPEAQAQRRQGVRRQRLAAGCVVGTRSPGLCLVLNAREGCDIDVLISLFRLQRDRCCLCFLSLPVITTSLVCTCT

SEQ ID NO: 56804 - protein, 250 aa, Zea mays
  Clone ID: UC-ZMFLMO17021A11_FLI.pep
SMWMLYCLSGLNSCTSCGFWRKATNRFLARTMVTTFLPSLGNASPSELPPTSSTWRLACWLMSGRFPDRLLDASTSDRSEGGASQGLRHGALERVVPQAQDGQQRQGADPGRHLAAQHVVVEDQCLETGEARHAPRDLAEEIVAAHVDDLQRREAAELARQRAPEPEPGQREHLEVREPRQRRDHDPDGEVPGQRRRGARHVELRHGVPVGQDGGRARRAHGAAAAVEVGAERGKRREWVAAEGEEAGGG

SEQ ID NO: 56805 - protein, 353 aa, Zea mays
  Clone ID: LIB189-002-D6_FLI.pep
HRPISSLHRIPFPLRAGLSSTPPSMALCCFYSLPCSPMEVAPLPSSLRAVVLQLGLLPSSLGRSALLALLRRALAPSLRAPPSRRPLHAMAAAPRVACSTVPSSLALALPSAMDVVGLDSLWLRHPSCSLLRPIRLGSTMARRGRVEMWRIEESLRVLPALRCRGPSLGCAQLQLRALSLVARVLASLSCARSTSSMASRPSCPPARPLGSLGLNLHRAALLPLSLLHCRQLPVSPQSPSRRAPPPVPATLSATPCFPGVARALGPCESTLVRQRHPCRLCNACTRLSTSLAARSLRVSSSTSRHRNSIMSVCVWKNGVDGEESEARVVLAFIWCGIGAMVEEENEVRKRRLS

SEQ ID NO: 56806 - protein, 344 aa, Zea mays
  Clone ID: UC-ZMFLMO17024G05_FLI.pep
KTLLAKTLARFVNVPFVIADATSLTQAGYVGEDVESILYKLLAAADFDVAAAQQGIVYIDEVDKITKKAESINLSRDVSGEGVQQALLKMLEGTVVSVPEKGARRHPRGDNIQIDTKNILFICGGAFVDLEKTISERRHDSSIGFRAQVRSNMRSGGVINAEITSSLLKSVESGDLIAYGLIPEFVGRFPILVGLSSLSEDQLVEVLTEPKNALGRQYTKLFEMNDVKLHFTEEALRLIAKRAISKNTGARGLRSILESILTEAMYEIPETRTGKDKIDAVVVDEESVGSVNQHGIGAKILCGEKALDVYLANHNNKESTGQLQERPNGESEIDTEAPSRVASM

SEQ ID NO: 56807 - protein, 394 aa, Homo sapiens
  Clone ID: LIB3105-042-B11_FLI.pep
RLRGSLRVSGFRGQEEGSQGRGGGPHSQGSPSALAPGARVGADRWGAPPCPRPYLHPGGHLEHNRKFQITGNQDQQGGWLHPASGLSQPPGEAMNATGTPVAPESCQQLAAGGHSRLIVLHYNHSGRLAGRGGPEDGGLGALRGLSVAASCLVVLENLLVLAAITSHMRSRRWVYYCLVNITLSDLLTGAAYLANVLLSGARTFRLAPAQWFLREGLLFTALAASTFSLLFTAGERFATMVRPVAESGATKTSRVYGFIGLCWLLAALLGMLPLLGWNCLCAFDRCSSLLPLYSKRYILFCLVIFAGVLATIMGLYGAIFRLVQASGQKAPRPAARRKARRLLKTVLMILLAFLVCWGPLFGLLLADVFGSNLWAQEYLRGMDWILALAVLNSA

SEQ ID NO: 56808 - protein, 170 aa, Zea mays
  Clone ID: UC-ZMFLMO17035B12_FLI.pep
SDLIWSVSGFLRPCDDADALRGGAHHTLHQLRHAHLAHGPGPASGAEPRAGHVLAHLGADHLLHRGNQLAAERVRRLRRSRLRREGGWSRLRRRGRRGGELLEVAPGAVVVLNGVVGAPREKARDGGPPVAQPGVRGQDRGVLLGREGAALHLRRQLVAPPQPARLPRPP

SEQ ID NO: 56809 - protein, 333 aa, Zea mays subsp. mexicana
  Clone ID: uC-zmroteosinte119c10_FLI.pep
NTEDQQEARDISLQAQDVDSMKDSGEVPDRTIEASTDDELELGTSADVEKNDQPTLLEPRPESVSVPELSVLDESDDKMQCGVSGKDEEAHVDEKTVTIVVDKVTGGSANCEDPLCEASRKESDIEKSHPSLGEEADDTTVFPGSGSCELSCPQDGGIAVYEGPEMVSPESQTDARKENIHSDVSETDECTKTQKAALAGTEGENYAEDSGVPVSEMDKCNEMPKDAPTLTAAGANPAEDEASLKDLSVQTENKASSASPAPDDPKASDEKTLAEENQKLKELLQKLLASGNDQMGVITDLSEKVKVLERRLARKKRPKVRVHRPSRHASCVH

SEQ ID NO: 56810 - protein, 273 aa, Zea mays
  Clone ID: UC-ZMFLMO17039G01_FLI.pep
QKILEECTNDQRTHMIREITKAPIKLHKASCNVHGTRVVQKVIDTMNTPDQVSMLVSALNTGMMCLMTDSYGNHVVDHCLQKLLPEHKAFILEAAASCYLQLARDRHGCCVLQKCIGHSSDEQRNNLLCKITSSALTLSEDPYGNYVIQFILDLNIEWITVRVVDELAGHFGNLSMQKCGSHVVEHCLKLAPRLICDRIINELMHDPKLLDIILDQYGNFVIQTALKQCQGEHHAAFVETIKPHTAVMQSNMYGKKVLSRICLKNKHCRFDLH

SEQ ID NO: 56811 - protein, 475 aa, Homo sapiens
  Clone ID: LIB4649-005-B4_FLI.pep
CYDTDDADLTMKPLFLPPGQHGRIPSLLKIQKFAGCGGIRLWSQLLRRPKWKDHPSPERPRLQGAMIAPLHSSLGNRARPCLKKKKKERNHCSRLNPSQSWSHPAKLACFPSFPSPKVCLCQDEVTDDYIGDNTTVDYTLFESLCSKKDVRNFKAWFLPIMYSIICFVGLLGNGLVVLTYIYFKRLKTMTDTYLLNLAVADILFLLTLPFWAYSAAKSWVFGVHFCKLIFAIYKMSFFSGMLLLLCISIDRYVAIVQAVSAHRHRARVLLISKLSCVGIWILATVLSIPELLYSDLQRSSSEQAMRCSLITEHVEAFITIQVAQMVIGFLVPLLAMSFCYLVIIRTLLQARNFERNKAIKVIIAVVVVFIVFQLPYNGVVLAQTVANFNITSSTCELSKQLNIAYDVTYSLACVRCCVNPFLYAFIGVKFRNDLFKLFKDLGCLSQEQLRQWSSCRHIRRSSMSVEAETTTTFSP

SEQ ID NO: 56812 - protein, 108 aa, Zea mays
  Clone ID: UC-ZMFLMO17021C11_FLI.pep
IVYGTSKYFHLRMCIRWESQETIHATYLKLIPRALSGSRDDSVAHCSTVHGGPVCCARMFARVIYSMYTVRVFRTPPLLVSGAGHRSGLISCRFHLGISISDSILVGL

SEQ ID NO: 56813 - protein, 289 aa, Allium porrum
  Clone ID: LIB3807-005-H8_FLI.pep
TGPPLVPLTPHLTTVKSTNTTVTTRPANFPTRIHIDRSAAKLSLRNQWSLTASILPVNPLAQDACAAVITAGAALGLLRFFEELAKRQTFDQKLNRKLVHILVGLVFMLFWPIFSSEWQAPLLAALAPGINIFRMLFMGLGIIKNEAMVQSISRHGDYRELLKGPLYYACTITLATSVFWRTSPVGMAAVCNLCAGDGLADIIGRRFGKHKLTYNPDKSIEGSAAMALAGFVASVLYMHYFAIFGFIEESLGMVVRFFLLSFASAVVESLPISSELDDNLTVPLTSPRA

SEQ ID NO: 56814 - protein, 396 aa, Zea mays
  Clone ID: UC-ZMFLMO17023A05_FLI.pep
HITRSVLSTQLSRRLLSGHVTTDVADVLVVRVLAEELHGVLQALAHRLRQEEVHEHPPCGGDAGVEVEAAGDGDGVGEREEGHGGGAAHDPVQPRADGGGLRAQPQRVDLGAVDPGDGAQPGRERRHERQHGRDADRAQRGGLPLGAPVHHVQGRGQREEEDGHPAAARQQQWPPADAVQEQRRDGYEEGLARAHRHGRAQRVGLGLDARPLEHPRAVHDHAVHARGLLDEHEPEPRHEHAAHGAGRVDEKLLPHPVVARRRRALAAGADYGGHVVGVGHALGDANHLLDVEQALLGLGGGVGGLLQHAARVVDSAPHDEPAGRLRHGEDGDAQEDGRHGADQEHGAPAEVDGEAREGEVGDVPEEDAEVVEHLREGGEEAARRGGRHLGGVDGGD

SEQ ID NO: 56815 - protein, 94 aa, Glycine max
  Clone ID: 700968271_FLI.pep
LLLFCVCVCFFSHLKMSCCGGNCGCGSSCKCGNGCGGCKMYPDLSYTESTTTETLVMGVAPVKAQFEGAEMGVPAENDGCKCGPNCSCNPCTCK

SEQ ID NO: 56816 - protein, 258 aa, Zea mays
  Clone ID: UC-ZMFLMO17024H02_FLI.pep
CEMDTVMQTYFSCISHTAFLDYHRRAYMINDLFWQPASIATLRQLGWADDELFLREGARLALRGELRARLGRDVGGDPLDVGAVPLQLLGVRREAGGHVGYADPGVGVLRDALHPAGHGHVLGEHVAVVDAGDLGHGVGVGRVVGVLPVVAGHPEHPLHGVEAEAAHEDVLDEAAPPGTGLDPDGRLRVDGDAVLGAHVADAAGHLAAQRDHGARGGDAGQPPDDDVLARHVEPDAVLVPPALHGHAVVAGDDVAVLD

SEQ ID NO: 56817 - protein, 164 aa, Glycine max
  Clone ID: 700743470_FLI.pep
QRPVEGNATMKQDLRSFKLILEYIKALPTGQETDFVLVSCSGLGIEPSRREQVLKAKRAGEDSLRRSGLGYTIVRPGPLQEEPGGQRALIFDQGNRISQGISCADVADICVKALHDTTARNKSFDVCYEYIAEDGRELYELVAHLPDKANNYLTPALSVLEKNT

SEQ ID NO: 56818 - protein, 347 aa, Zea mays
  Clone ID: UC-ZMFLMO17035D05_FLI.pep
SASSSSRRPFEGLHCVHLPASTSYGYIEQTHEMTRVNGATDALSIGPSAGHFSAGGFAAALKPSEPFDGTFYKRWRSKMILWLTAMNCYHAAQGKPEQFTPEEERMFDVADNLFRGAVIGALANKYVDSYLTCTSAKELWDALDEKFGVSDAGSELYIMEQLFDYKMVENRPVVEQAHEIQALAKELEQFPCVLPDKFVAGGIIAKLPPSWTDFATTLKHKRQEFSVAELIGSLDVEERARAKDTRGKGVETSSANMVQKKNSNASHNNKKKNKQQNATKPKQAASFKKKNKGAGCFVCGSTDHWASACPDRKFKQEKKPAQEKKTVNMVVSETAEGTSGAKGLEPC

SEQ ID NO: 56819 - protein, 219 aa, Zea mays
  Clone ID: uC-zmflMo17059a07_FLI.pep
LRHTHCHTQRDGEKPSRSLLLNSRRQRATTTTGTPRAHAETSISRPAVRRCSARTAHGLTRWPSRPPQPQRPARSSRAPQRPAQPPRAPRQQQPRAQRLPVLLLSRQRALPLPPSPLQPPPAPAPAPPPLPSLPPLASLPPPPRGPPRAQRRQLARSPPGQLARPPWPRRRGQPPRARRRAEPGSPPPALPRSPRRSGSGPRQWPWVTIRRLMTTRPSG

SEQ ID NO: 56820 - protein, 316 aa, Zea mays
  Clone ID: UC-ZMFLMO17037E05_FLI.pep
LPGRRSTAPADLLSPTPHQAVSGCSWASLALPDGPELALHLRPSSRHLGASSSSSALLWPLPGSMRRRPGIAGLQNAAATRDQFRLVGENVAKVRTDVMKEQLATFRSQLEEFARKHKSDIRKNPVFRQQFHEMCAKVGVDPLASNKGVWAELLGIGDFYYELGVQIVDICIATRSHNGGLIDLLDLRKLLGQKRKATLESLSEDDCLRAISKLKVLGSGFEVISVGRRKLVRSVPTELNKDHSGILGLAQADGYVTVEQVEKEFSWSTGRAIDALETLLKEGLAMIDDGHRDGKRRYWFPCVTVSSDTAAVEVKS

SEQ ID NO: 56821 - protein, 475 aa, Zea mays
  Clone ID: UC-ZMFLMO17364H11_FLI.pep
QHQSDSDDNNSHYLPSSLHRSVSWRRLVLLKTMATFFSTSTNQRDLAGGGGDMSSFHHYAYSDPPAGGLMPFPATIVSSEGHVAHGGDDGGRGAFVDVNARDGPTGGAEMGLQTQLLMANAASAVQHQGLSLSLGTQGVPVSLYQYRQAEAGMAAAAFLSPNQASVAATRSAQSIYVQNSRYLKAARELLDEVVNVQDAIKRKGDKSQQGKDSGGGGGGGEGKDAETSDEKAGEHEGNSSAPELSPSERQDLQNKVSALMALLDQVDRKYRHYHHQMQMVMSSFDAVAGAGAARPYTALALQTISRHFRSLRDAVGAQVQSLRRSLGEKDGSAQGGGLPRLRYIDQQLRQQRAMQQFGMMQQPQHAWRPQRGLPESAVSVLRAWLFEHFLHPYPKDSEKLMLARQTGLSRGQVSNWFINARVRLWKPMIEEMYREEFGAEMDSHSSSENAAGNKGKDEAISSEDHEEFQSPSSAA

SEQ ID NO: 56822 - protein, 237 aa, Zea mays
  Clone ID: UC-ZMFLMO17025A11_FLI.pep
SSSRSNIQLAPLPDSYDLDRGLLLSVQAIQALLENRGYPIIVGIGGPSGSGKTSLAQKMANIIGCEVVSLESYYKPEQVRDYKYDDYSSLDIALLTENIMDIKKRHKAEVPCFDFENFSRKGFKELQVSEESGVVIFEGVYTLHPAIRKFLDLWIAVVGGVHSHLIARIQRDKNRAGFSISQTEIMTTVFPLFQQYIEPHLVHAHLKIQNDFDPVLSPESSLFVLKSKKQLPSCCIY

SEQ ID NO: 56823 - protein, 321 aa, Zea mays
  Clone ID: UC-ZMROB73002F12_FLI.pep
RCDNEPAPWTSDDHGDRPRPLPKIKELQGATDITERKGRPSWDYDDKDGWKWVVPPPVSRKPVLSGDPETDKQIRRATKRVHLSVAERLLKEFACSICRAVIKEPLTTPCAHNFCKTCLLGAYDSQSSIRERSRGGRTLRAQKIVKTCPSCPTDICDFLENPQINREMMELIETLQRKAVEEAKMTSDDAEECGDGDSEENDGDLVKGEDVSGLNEGEQDSADADANVEGSVKIVVEIKEEGKDDKRSKMGATEVVDVLVDEDAVKQTKKRKVDAEAGTNGGKRMKSSSTVEEVAVCVTPVKRSRKSGDMDDERNGSPAVS

SEQ ID NO: 56824 - protein, 238 aa, Zea mays
  Clone ID: UC-ZMFLMO17031A07_FLI.pep
LLLVVVAGGMQILSPQLEPLAEAQRMLVGGLQHTSAQAEDALSQGMEKLQQNLAETLTAEADPFGPPDPYMLQMATAVGILKELVNFVTQVNRTGRQRAIHHSISMWMQMQGLAWPGQLERARRVCVCVPVALTRTCPAASARRAGCACACAGGPSPADDAAADAQDPDAAAGGQGPPGARRLLPAPPHAQLDVGGAPAGGGGQLDAPAAWQAKSSLTGEATVPKNTTPTTTKTKDEW

SEQ ID NO: 56825 - protein, 117 aa, Zea mays
  Clone ID: UC-ZMROB73050C02_FLI.pep
SCNFYMSTINRKEREKENKYIWHQKLLPCYNINLMTEIINIFTILANLSTCSLNRQNISRVIFVTFIVPNVVSRQSLFGFSVFLNTGFSIAFSMCICTSLTSVAIVILPGISSVHHL

SEQ ID NO: 56826 - protein, 525 aa, Zea mays
  Clone ID: UC-ZMFLMO17036A07_FLI.pep
ASSPVLSTPSNLPTPPHPPCSPRDLSGQLRRAPTSPLIPPRRRRQPTGGGEEGRGAMETADYSGKLFVGGISWETDEDRLREYFGRFGEVTEAVIMRDRSTGRARGFGFVVFADATVAERVTIEKHMIDGRMVEAKKAVPRDDHSIVSKSNTSSIGSPGPGRTRKIFVGGLPSNVTEADFRGYFEQFGVITDVVVMYDHNTQRPRGFGFITYDSEDAVDKALHKSFHELNGKMVEVKKAVPKEQSPGPVARSPAGVGQNYAMNRVHSFLNDFNQGYNPNPIGGYGMRVDGRFGQLSGARNGLSSFGPGYGMGMNVEGRMSGTFGANSGFISNSNGRQMGSYFNGSSNRLSSSIGYLGYDSGSMLSSMSRNFNAGVNYPINPTNMSAFAALGNGGGVNYMGLPSIAPELAQLGNISSLGSGNFSRGAGVNNLSLPSGSYGRSNSTGTIGEPFSASGNAYEVNNPDTYGNNSIYGGTSWRFPSSEVDVPSFSHDLGNVDPNMKSDISANYMGNYSVSNNQPSRGITS

SEQ ID NO: 56827 - protein, 294 aa, Homo sapiens
  Clone ID: LIB4675-056-F9_FLI.pep
AGRALRPRATDASPVPQAAGAGRTAPGDREHGTQSGPRPRRPGEAQTSRHAPAPTRPKPPVPAQRPRGTQAPAWSTSEASRTRGRPAARPAPTNRLLGGRLSPQNRSSGPKSRLFGGRHGTGRSWAPRGRLARTSTVGARRALTLPRERASRGRGGAAGARGSHAVRQRLRQQPGPRAPGVAELRVPVFDDPAEDLLAHLEPTCAAMEAAVRAGGACLVYCKNGRSRSAAVCTAYLMRHRGLSLAKAFQMVKSARPAAEPNPGFWSQLQKYEEALQAQSCLQGEPPALGLGPEA

SEQ ID NO: 56828 - protein, 313 aa, Zea mays
  Clone ID: UC-ZMFLMO17037G07_FLI.pep
GSVYLGTLPDGSRIAVKKLEGIGQGKKEFRSEVTIIGSIHHIHLVKLRGFCAEGAHRLLAYEYMAKGSLDRWIFQRNEDSSLLDWDTRFSIALGTAKGLAYLHHDCESKIIHCDIKPENVLLDDNFLAKVSDFGLAKLMTREQSHVFTTLKGTRGYLAPEWITNYAISEKCDVYSYGMVLLEIISGRKSYDPVEGSEKAHFPSYAFKKLEEGDLRDISDSKLKYKGQDSRIEMAIKVALWCIQEDFYQRPSMSKVVQMLEGVCDVPQPPMSSHIGYRLYANAFKSSSEEGTSSGMSDYNSDALLSAVRLSGPR

SEQ ID NO: 56829 - protein, 634 aa, Zea mays
  Clone ID: 700101255_FLI.pep
ISPKVSHFGVNPKARWRVRSYKVLLQCNASLPLVGADVSEVDDPLRVAPLVVVPGDDLDHVVAHDHGEGGVDGGGDVGAPEVDGHERHVADLEDARELVGRGVAERLVHLLGEGLLGDLHDEVDDGDVRGGHPERDPVELALKVGEHQRDGLGGTGGRQETDERLFYKLLIDNVVELLPFVYTPTVGEACQKYGSIFGRPQGLYVSLKDKGKVLEVLRNWPHRNIQVICVTDGERILGLGDLGCQGMGIPVGKLALYTALGGVDPSVCLPITIDVGTNNEKLLNDEFYIGLRQKRATGEEYDELIEEFMSAVKQFYGEKVLIQFEDFANHNAFDLLEKYSKSHLVFNDDIQGTASVVLAGLLAALKMVGGTLAEQTYLFLGAGEAGTGIAELIALEISKQTNAPIEECRKKVWLVDSKGLIVDSRKGSLQPFKKPWAHEHEPLKTLYDAVQSIKPTVLIGTSGVGRTFTKEIIEAMSSFNERPIIFSLSNPTSHSECTAEQAYTWSQGRSIFASGSPFAPVEYEGKTFVPGQSNNAYIFPGLGLGLVISGAVRVHEDMLLAASKALADQATQDNFEKGSIFPPFTSIRKISAHIAAAVAAKAYELGLATRLPPPSDLVKYAENCMYTPVYRNYR

SEQ ID NO: 56830 - protein, 162 aa, Zea mays
  Clone ID: 700166211_FLI.pep
PLPHGVKLHALIDACHSGTALDLPYLCRMNRSGQYVWEDHRPRSGVWKGTSGGEAISFSGCDDDQTSADTSALSKITSTGAMTFCFIQAIERGQGTTYGSILNSMRSTIRNTGDSAGVGGGAVTSLITMLLTGGSLSAGGLRQEPQLTACEPFDVYAKPFSL

SEQ ID NO: 56831 - protein, 205 aa, Zea mays
  Clone ID: UC-ZMFLMO17031D04_FLI.pep
GAFKVGNITNENFFFEIINGLRPANTAGCSSSTDAPNIPHDGTSVIELLSDSMNQLSIKNENHLDFLLDENHSLPEIDSDSVGSRLQDKRSRRNEESFSFTSSNRESWGRCSSLGAASDESFSGDNNDKQNLTVKALATPVRQNQRQSQRKPIEKAKQKKIQALWKKIKREKVEMGDSLSSRLKMCLGQSPQHKRNRSSGTITTS

SEQ ID NO: 56832 - protein, 283 aa, Zea mays
  Clone ID: 700170801_FLI.pep
AACGDIEAARRVFDGMPTTNGMAWATMVSAYSDGCLHHEAMRLFAHMCHRTPVLDGDCYSHAIVAVLRSCTRAGELRLGEQVHALVVKKGRIHGDIGSSLVQLYCDGGGFHRSARRVLATTMQHHCQEPVPEAAWTSLITSCHRESLLSEAVDVFRDMASSGVPRSSFSMSSILAVFAESQDPGCCCGQQVHADAIKRGMDTNQFVGSGLIHMYAKQGRLADAARAFETIGGKPDAACWSALAMAYARGGRYREVTRIMYQMKAAGMNPSKEMTDAVRLACFR

SEQ ID NO: 56833 - protein, 227 aa, Zea mays
  Clone ID: UC-ZMFLMO17040A03_FLI.pep
EKRCPGTVSCADILAIAARDAVSLATKVVTKGGWSRDGNLYQVETGRRDGRVSRAKEAVKNLPDSMDGIRKLIRRFASKNLSVKDLAVLSGAHAIGKSHCPSIAKRLRNFTAHRDSDPTLDGAYAAELRRQCRRRRDNTTELEMVPGSSTAFGTAYYGLVAERRALFHSDEALLRNGETRALVYRYRDAPSEAAFLADFGASMLNMGRVGVLTGAQGEIRKRCAFVN

SEQ ID NO: 56834 - protein, 80 aa, Zea mays
  Clone ID: UC-ZMFLMO17040B01_FLI.pep
CCIDCPNRTNVAQYAYGLSAFGRQLHAMGLTDASEIHPDRVYIFSVSFFAILIIFSPSISIAAFGQSSTSIFGHNSFGAS

SEQ ID NO: 56835 - protein, 357 aa, Zea mays
  Clone ID: 700240470_FLI.pep
AFLTILLLARISSSIAISSNYISRSAEQQVIATVAPAIVPDIDGQGAQPFLTSPSGSYAAYLRRAVDGAGGLGGDACYVQVQQDGASGSVWESDCTPVGGADACDLAFSPVGLELFAGGQSLWDTGVDADPGTLSLDDGGDMKIVSKEGVTVWTASSEPWTGQQCGAPLPVSTTAPSMEALPPPPSTATATASTKLVTPPAATLAGAGSAVSPYGDQPVVPPPVDTLPDFPGQPPVDTAPEQPLPPPPADASPALPDLSLPPPPAYTPPDSPDQPLLAPPPADMLPDEPLYSSPPPAPATFGPQTPLPPFGVPLAAPPTGDTVPDTATPSGEPGSPGRVPFSGPSPAGMPRQHGHPH

SEQ ID NO: 56836 - protein, 189 aa, Zea mays
  Clone ID: UC-ZMFLMO17050B12_FLI.pep
FLFLRAEIACSFPSSSFFPARASSLLGAREALYSPSNRLLAVRTDEISSPCVLASAAADLAIKFTSAPCSAHFVVGNFSTPQIRAACPVCARSSSIGFRACSRLLSSRRTRYPLLNLTSPARPRYNPVVVRASPRNPKNRVKTKLAEWYSPSTRQKLEHPARLKFGSSKLFSQGEDLHQLITEEKKAPG

SEQ ID NO: 56837 - protein, 335 aa, Zea mays
  Clone ID: 700241443_FLI.pep
HEQNTKKLKKAEASPEEGKKSLEGEMGRSEGSTSPAPGGAACACAVCGGAAVVYCAADAAALCSPCDTAVHAANLLASRHERVPLSMVTAASGVYDDDLFAPDDIDAASSWASAPAQGQRQGQGSSQNGSSSASFTTGDSGAEGRGLFDLLSDVDLAACVTGGGGYLPDGVAPVVHHGAAPLWAQPGLPAAAWTATWSPTVVVQGAAVVAAAAAERRRRCKGTARSARGASSRRPSATRPQGLCRGAAQDQGPLCQARRRHLLLLLLGRRHIGQHRRCCQVLALLLRRRQGRLLRGRRGLRGRAKLLESSCLENEWHHSSASGLLTVAFAQLEAS

SEQ ID NO: 56838 - protein, 299 aa, Zea mays
  Clone ID: UC-ZMFLMO17055A08_FLI.pep
PRTTATAMAQIIDGKAIAADVRREVAADVAALSSAHGLVPGLAVVIVGSRKDSQTYVNMKRKACAEVGICSIDVDLPEDISETALVAEVHRLNADPAVHGILVQLPLPKHINEEKILSEISIEKDVDGFHPLNIGKLAMKGREPLFVPCTPKGCMELLSRSGVTVKGKRAVVVGRSNIVGLPVSLLLLKADATVSVVHSRTPDPESIVREADIVIAAAGQAMMIKGDWIKPGAAVIDVGTNSVDDPTRKSGYRLVGDVDFAAASKVAGYLTPVPGGVGPMTVAMLLKNTVDGAKRGIVE

SEQ ID NO: 56839 - protein, 405 aa, Zea mays
  Clone ID: 700282438_FLI.pep
LHVVVFVCIYAWYTSPHADQSVVVVRIYIYVYTYVPPICNNQQAGAHARTHHACIRLIVYESHDRVREVERDAAQSPAPDVAAHPQVSALAPALPPRVLDEPVLEARGGVGAVADDGDGVVHPGPALPREDAAAVELQAAAHLDGRGHGLLRHRLLQLALARRQLHVVGDGGGVLGGPGAAARVPPRLVRVVGLGGEPAVLDHPPVAVHEVAQVAAAVVGVAVDQLLLRQRHQPPCRDLGDALDRRRRHECPAARARRALVLDRRDGALGPPVDAGRSVHGGGGGGDVGPLLAGVTADGHPLHGVQVQELLLREVGELVLAERVRQVARPVGGLDVLNVAAVHLEPTLPLLRRRVRPVVRRLPAEEPVHHQPVTTDAVVVHAAAARRRRQHYEAAAREKDQREPS

SEQ ID NO: 56840 - protein, 144 aa, Zea mays
  Clone ID: UC-ZMFLMO17057G06_FLI.pep
HFLLAAAAALLSMAATSLSAARKFFLPWCSWLLFLWPCRVPLLPNAHPSSGPCSSSSRPLPARSPPPFPLPVRPSTPRRRFPSLDRALLGFLQHMSSPCVQGHGAATTMKPPSCRALDVLDEIPQQAPPRSMPTRSPLRRTSVR

SEQ ID NO: 56841 - protein, 226 aa, Zea mays
  Clone ID: UC-ZMFLMO17040B08_FLI.pep
QWTSNLVSRILPKIKKNESFTGEAERIRQQSGRVFSLPDEPDVVRVWLPTFNSPGLAMARSFGDFCLKKYGIISMPDVFYHRITDKDEFVVLATDGVWDVLSNAEAVSIISNAPSQASAARFLVEKAHRAWRTRYPTSKTDDCAVVCLFLKTVAASTSSSAVTKDSVKNREMSNGKHSLAVKTSTKVPANLVTAKDEWSFVDGSSGCVALPTLPEPTSVVKDSSKD

SEQ ID NO: 56842 - protein, 163 aa, Zea mays
  Clone ID: LIB189-033-B1_FLI.pep
GDAVEQDVASSNAHCVAFLIKDPQKVKTVDEMRERLRMRGLRCHIMYCRNSTRLQVVPLLASRSQALRYLSVRWGVSVGNMYLITGEHGDTDLEEMLSGLHKTVIVRGVTEKGSEALVRSPGSYKRDDVVPSETPLAAYTTGELKADEIMRALKQVSKTSSGM

SEQ ID NO: 56843 - protein, 358 aa, Zea mays
  Clone ID: UC-ZMFLMO17043F07_FLI.pep
TVLQEVFQSIGPVEGCKLIRKEKSSFGFIDYYDRRYAALAILSLNGRQLYGQPIKVNWAYTSTPREDTSGHFNIFVGDLCPEVTDATLFAFFSGYSTCSDARVMWDQKTGRSRGFGFVSFRNQQDAQSAINDLNGKWLGNRQIRCNWATKGANAGEEKQILDTKVDLSNGSSESGKENPNDDGPENNPQFTTVYVGNLPHEATMNDVHLFFHSLGAGSIEEVRVTRDKGFGFVRYSTHEEAALAIQMGNGQLIGGRQIKCSWGSKPTPQGTASLPLPPPALAPFSTGVSATDLLAYQRLTLSKMASNPALMGQHALKQVAALGIGGGASQSIYDGGFQGINTATGTTSVQQQQQLMYY

SEQ ID NO: 56844 - protein, 326 aa, Zea mays
  Clone ID: UC-ZMFLMO17051G09_FLI.pep
RLYATLLRPSLLDVAGRPPVPPQRGNVLPQVAVPVQHHVGIDKRVGELLPVPVLVALALLLHRRLYRHVDHLALAVVVVAVFHHDGEHKRAYLKVVVHVQDGLQGLDHLPHGGPGLGVLAQALVRHHSGASGPLARVLALHGWIHDPVELVGLLEVGSGPVHQALLPGPPRPIDGPTARQELQQHYPEAVDVALGGEVPRHDVLWRRVPVGPHDARCYVGRVALSSAQVKACRLEPDSVRDRSSGVSVPDEPPRLDSDTRDAADEDDGSSSSWSRSRSRSLLLRPFLCPRDDGGGSSASSYPAAAQQSSDLHGCVADIARGRSSHP

SEQ ID NO: 56845 - protein, 118 aa, Arabidopsis thaliana
  Clone ID: LIB25-024-C1_FLI.pep
TIMGSAPAQIPTSFGHELRACLRCRLVKTYDQFRDAGCENCPFFKMEEDHERIVEVTTPNFNGIISVMDPSRSWAARWLRIGKFAPGCYTLAVSEPLPEEMQHLCQEERVQYVLPKRM

SEQ ID NO: 56846 - protein, 163 aa, Arabidopsis thaliana
  Clone ID: LIB25-040-E1_FLI.pep
LETQVNDLKGEHSSLLKQLSNMNHKYDEAAVGNRILKADIETLRAKVKMAEETVKRVTGMNPMLLGRSSGHNNNNRMPITGNNRMDSSSIIPAYQPHSNLNHMSNQNIGIPTILPPRLGNNFAAPPSQTSSPLQRIRNGQNHHVTPSANPYGWNTEPQNDSAW

SEQ ID NO: 56847 - protein, 244 aa, Arabidopsis thaliana
  Clone ID: LIB25-044-G8_FLI.pep
RNPNSMADNDGAVSNGIIVEQTSNKGPLNAVKKPPSKDRHSKVDGRGRRIRMPIICAARVFQLTRELGHKSDGQTIEWLLRQAEPSIIAATGTGTTPASFSTASLSTSSPFTLGKRVVRAEEGESGGGGGGGLTVGHTMGTSLMGGGGSGGFWAVPARPDFGQVWSFATGAPPEMVFAQQQQPATLFVRHQQQQQASAAAAAAMGEASAARVGNYLPGHHLNLLASLSGGANGSGRREDDHEPR

SEQ ID NO: 56848 - protein, 144 aa, Zea mays
  Clone ID: UC-ZMFLMO17043G08_FLI.pep
EKTIYCGGAGNGSAAKICNNMAMAISMLGVSEAFALGQNLGIKATTLTDIFNCSSARCWSSDTYNPVPGVMEGVPSSRNYSGGFTSKLMAKDLDLAMASASGVGFKCPMGSNALEIYRKLCEDGCELKDFSCAFRHYYSGKNEE

SEQ ID NO: 56849 - protein, 684 aa, Schizochytrium aggregatum
  Clone ID: LIB3033-047-B5_FLI.pep
QKDNLSRFTSLDLEGKAVRGDDRSLDINEEIALLVVELKGVLVLGVTARLVGAEGNVEGLVLRDRAVLDDALDRVGERSLAERAAHPDEHGLKGQVVHEGVMGVSVRGKLAASGVGAGDSAALGHKLALGAREHVIDAAEGRAVEEGLAVVDGALERRIGIERGRLHGGVGRGRALVGEHDDGAVGRDQLAAGKGLERGLDVDAARGRRRRGEGHLAVDVAVDSDTLEELGVVNGPERVAGEEAEAGLRERANGQRHGQHAAALDDVVLEEGVGLGGNLAVQGDGVRADLLGRGAPVADKDLSRRGAEHDARHGISAALAGDDLHAHLLELLLELRRHHATVPGTEADRLDRDVLGELEAHLVKGLVGHGVVRLADVAVEAGERAEEDHVLEVGAVDGGEEVLETGDLGAKDGVELVGELLLDETVAEHARGMNDARDAGTELGLGIAHGLGHVGGRVHVARRVDGLAAERFNRSNRAAHLASAKNRAHKLSDSAGRGLGALASAKGALELLGSSLLHSLLVSDASAPCRFARRDLAAAKQNVLAARDLARDLPDAKRRDAASAARNEQHVVLGDLALRVAGLELGGTDRAALLVCANADLANANVSARHLAHNRHGGILGVHALSNVHAAGKDVRLGPLEADGLAEAKDGTTLGTLERVRSALRSESEAAVKARHTDKGRAAA

SEQ ID NO: 56850 - protein, 319 aa, Zea mays
  Clone ID: UC-ZMFLMO17046B05_FLI.pep
RMYWTVWNLQGGVQIQHGALLGLQWGTLNLSWSNMSQLENEDCGKKFYRGNYLKFYNAIREAYPDIQMISNCDGSSRPLDHPADLYDFHVYTDSKTLFNMRSTFDRTSRSGPKAFVSEYAVWRSDAGRGSLLASLAEAAFLTGLEKNSDIVQMASYAPLFVNDNDQTWNPDAIVFNSWQHYGTPSYWMQTIFRESSGAMIHPVNISSRYSSSLAASAITWQDAENSFLRVKVVNFGSDTVNLTVSTSGLGASVNALGSTATVLTSGNVMDENSFSNPNKVAPVKSQLSNAAEQMQVTLAPHSFTAFDLALAEPKLVAEI

SEQ ID NO: 56851 - protein, 361 aa, Zea mays
  Clone ID: LIB3066-006-C7_FLI.pep
CATDAAALSPAVTTKHRRAADENIREEAARHPAPKQGLSAWYEPFPPAPNGDPNERYSLDEIVYRSSSGGLLDVRHDMEALARFSGAYWRDLFDSRIGRTTWPYGSGVWSKKEFVLPEIEPDHIVSLFEGNSNLFWAERLGRDHLGGMNDLWVKHCGISHTGSFKDLGMTVLVSQVNRLRRAPLSRPIAGVGCASTGDTSAALSAYCAAAGIPAIVFLPANRISLEQLIQPIANGATVLSLDTDFDGCMRLIREVTAELPIYLANSLNSLRLEGQKTAAIEILQQFDWEVPDWVIVPGGNLGNIYAFYKGFEMCRVLGLVDRVPRLVCAQAANANPLYGYYKTGWTEFQPQVARPTFASAI

SEQ ID NO: 56852 - protein, 240 aa, Zea mays
  Clone ID: UC-ZMFLMO17051H12_FLI.pep
IAAGRYVFPASTLGYARGVAAGMAPKARLAAYKVCWVGGCFDSDILAAFDAAVADGVDVVSLSVGGVVVPYYLDAIAIGAFGATEAGIVVSASAGNGGPGGLTVTNVAPWMATVGAGSMDRAFPANVRLGDGQVLDGVSVYGGPALESGKLYELVYAGASGGGASSASDGYSASMCLDGSLDPAAVRGKIVVCDRGVNSRAAKGDVVRRAGGVGMVLANGAFDGEGLVADCHVLPATAVG

SEQ ID NO: 56853 - protein, 168 aa, Zea mays
  Clone ID: UC-ZMFLMO17055D06_FLI.pep
PNLGEMPANPEASTRDIYLVLLLTKAAYEGLFIGSVHFSYYERVWKTWPPSKCRFFLWLMALNMCCTVDRLAKRGLDHLEMCTLCDYDFETLYHIMVSCVFAREFWFLMLHQFRLHRLAPNPGTNSFMGWWEKVVKSNGDLAMRGLSSLIALGVWILWNHWNRIVFDG

SEQ ID NO: 56854 - protein, 148 aa, Zea mays
  Clone ID: LIB3068-020-E9_FLI.pep
SSIVFSAKYCLVQVVAAGANPVQITRGIEKTAKALVEELRKLSKEVEDSELADVAAVSAGNNYEIGNMIAEAMSKVGRKGVVTLEEGKSSENFLYVVEGMQFDRGYISPYFVTDSEKMTAEYENCKVTVKYEISILFFLLFIAFLFQK

SEQ ID NO: 56855 - protein, 138 aa, Zea mays
  Clone ID: UC-ZMFLMO17050D12_FLI.pep
LLDEAMAILSILSSHPEGKAAIGAAEPVPVLVEMIGSGSPRNRENAAAVMLHLSVQSVHLARAQECGIMVPLRDLALNGTERGRRKAVQLLERMSRFLVRQQEGISSHEQMLDELERQLDAFGPGVTEADILEQSGLL

SEQ ID NO: 56856 - protein, 323 aa, Zea mays
  Clone ID: LIB3070-005-H4_FLI.pep
TTTERESRRGKGEKRPRRQTLAPRKRPWGSSTPPRRPPSPFRDMADSPRRRYSRSPSYSRGHPKGRSRSQSPARSQSRSPVPDPRSQARSRSRSQEREEDAVNRGNTLYVTGLSSRVTERDVKDYFSKHGRVVGCHVVLEPHTRVSRGFAFVSMDTVEEAERCIKYLNGSVMEGRNITVEKSRRGRPRTPTPGSYLGHRYERRERGRFHRGYGGGRDEYYGNGGGGYGYRRSPPPMYSSYRESRDYYPSYKDSRDYPPYRDGRDYSPPHRDPRDYYESRGGRGYSPPPYGGGRSRRDRSVSPYRMPERGYGGGRRVGGGGYDR

SEQ ID NO: 56857 - protein, 374 aa, Zea mays
  Clone ID: UC-ZMFLMO17052C02_FLI.pep
PGARLDTPAAMAAQLAVAFLALLSSSAFLAVSGQKFNAIFSFGDSMSDTGNLCVNGPPAGLTLTQPPYGETFFGRATCRCSDGRLVVDFLAEKFGLPLLKPSKQGGSDFKQGANMAIIGATTMDSGFFQSLGIADKIWNNGPLNTQIQWFQQLMPSICGSTQACKSYLSKSLFVLGEFGGNDYNAQIFGGYTPEQASGQSATIVDAIGKGVEQLISLGAMYVVVPGVLPVGCFPIYLTLYQTSSAGDYDQYGCLKRFNALSAQHNSLLQAKVSSLQSKYPGARVMYADFYSHVYDMVKSPGSYGFSTNLRACCGAGGGKYNYQNGARCGMPGAYACSDPASSLSWDGIHLTEAAYRKIADGWVSGAYCHPAISA

SEQ ID NO: 56858 - protein, 163 aa, Zea mays
  Clone ID: LIB3158-014-E2_FLI.pep
LRRLDPRVVTVVEEEADLVAFDPGAPDESGDTEAAFLKVFGEGLRFFSAYMDSLEESFPKTSNERLALERGAGRAIVDLVSCPASESMERRETAASWARRMRSSGFSPVAFSEDVADDVRSLLRRYREGWSMRDAGLDDSEAGAGVFLAWKEQPLVWASAWRP

SEQ ID NO: 56859 - protein, 392 aa, Zea mays
  Clone ID: UC-ZMFLMO17055F09_FLI.pep
RTLKAYRFKEVLPVTMRLNVGLLVPLMAQYSAPTWATLVAGFFMLLALSLSTYLIFEHLSAYNNPEEQKFVLGVILMVPCYAIESCISLINPSTSVYCGILRDGYEAFAMYCFGRYITACLGGEDKTIAFLKREGGSGSGQSLLHHTSEKGIIHHHFPVNYVLKPWRLGTRFYLIIKFGIFQYVIIKTLTATLSLLLESFGVYCDGEFNLRCGYPYFAAVLNFSQYWALYCLVAWYTATKDELAPIKPLAKFLSFKSIVFLTWWQGVVIAIMYALGLLRSPLAQSLELKSSIQDFIICIEMGIASVVHLYVFPAKPYALLTNQSHGNISVLGDYVSSEPVDPFEIKESNRPTKMKLPQLEPDERSVTNIKESVRDFVVGSGEYVSAGTKSSF

SEQ ID NO: 56860 - protein, 106 aa, Zea mays
  Clone ID: UC-ZMFLMO17058E03_FLI.pep
FCLSKCLDTSAECFGSIITKQLDMSPLQKDQASPLELLLHSIHKLILDNKSYRQPRSILSVQDEPSTIRVWVLACRRKGRERTYPAASQLAIHLTNLNIVLTTLGI

SEQ ID NO: 56861 - protein, 248 aa, Zea mays
  Clone ID: LIB3136-020-F12_FLI.pep
AEPNCEDGLSMMTIDDSDVTNHHGASDDKRLLEIANTALMSDPPSPDKLKPLIGSSSGDGFDVLPLATDQPAGPVSATPKVPYARDDNKFNDGMYEDLCVDDADLTFENYEELFGTSHIRIEELFDDAGIDSYFEMKETPPFDFNEQPKIVQLQCSDVVPADCAMSNPGERADSSLCIPVRQVRSSISHPLSGLTGESSAGDHQDCGVSPILLMGEPPWHSPGPEGSLAGGSRDSALTRYKEKKKRRM

SEQ ID NO: 56862 - protein, 245 aa, Zea mays
  Clone ID: UC-ZMFLMO17060D04_FLI.pep
MCDPARIHYCKLGLNSKSARFLIHTHIQPGVCLHGEFRPGDKNAIGVGVEPLAVANPGSSDVDGDVLLAHPLLVGLHRVRAESPDTDVAAVDLIHVPDAAVDQDTSPPVVLRLLDGVAAKDGAAHAAAAVDHEDPTVAFLLEELADQDVVLVDLERDDGAGEDLAPSVDLEDWLERAELAVHDQVRVSVAYFGGGQWQGSHIFLLLTPAAAQAQTDRIGSDQISGGGEGRGAAPMECGWRGRDLG

SEQ ID NO: 56863 - protein, 225 aa, Glycine max
  Clone ID: uC-gmflminsoy027c02_FLI.pep
LRSSLQKMCNTLKFNPFKNRLLIMFMLVLSLPFNVQSQAKDSEEQNLAELPQTVHPSKGIVIAVLSTMFAITLLLLLYVKFCRTIPHELLRQNSNLQNFQGLTRSRSRVSGIDKQVVETLPFFKFSSLKGSKEGLECTVCLSKFEDTETLRLLPKCKHAFHMNCIDKWFESHSTCPLCRRRVEAGDIKNLNFSLSSRFLRVPSNLTEDPNLEIFVHREPSHGGSA

SEQ ID NO: 56864 - protein, 309 aa, Zea mays
  Clone ID: UC-ZMFLMO17040E02_FLI.pep
VFVRAKWESKITSGMQMSTDPNHYGVFPHSFCNQHVVSFQTSSVTSVSGAIPVCLDTSSGMNGNMAMLNTTTSTIVSTGSPNMSAESSCPNLKYTAPLAVEWSYPELQLLNDGLNKYANEPGIMKYIKIAATLPDKTVRDVAMRCQWMAARKEATRRRKPEEHYLGKKIKDRKDKMAEPSSWGTNPPVQTEMRSSSSMPPNAKDNGFLSADSQIDHGMLNVLEENAKLLNQIEVNILTSQAHNNIELFHHARRNINGLLQSMSQIPGIMSKMPPLPISVDERLASYILPRAPTAQVLGSSHLKEERRVW

SEQ ID NO: 56865 - protein, 194 aa, Zea mays
  Clone ID: UC-ZMFLMO17044E03_FLI.pep
PSSHIGSMFFGCPKISSNEQTTLRNLARRQEFQNGHAKRSNSVLVVLDVEALGVGGSITLVGAEGSLRVGLAPGEEGSSSLLQVLHLASPGLEGARLEGTAEGERQGPRLLGAELVHGIEVAGGLLLALSTREEDNSRHSSRDGPLEGTDGVLSNHLRGHLLGVGAWKGACQWCQWTHQQQGYPCRGCQCRQHS

SEQ ID NO: 56866 - protein, 484 aa, Homo sapiens
  Clone ID: LIB4119-226-G4_FLI.pep
LKQSPRTGLEVPGSRVGGGGAALHRRGGAGTPAAVPPPSWTSCGTSARAWPPERCLILEGTIPQSEAAGGVTVNTIGAENKQRRSRSWSSSSDRTRRRRREDSYHVRRRCSRTFSRSSSQHSSRKAKSVEDDTEGHLIYHVGDWLQERYEIVSTLGKGTFGRVVQCVDHRRRGARVALKIIKNVEKYKEAARLEIKVLEKINEKDPGKNLCVQMFDWFDYHGHMCISLELLGLSTFDFLKDNNHLPYPIHQVHHMASQLCQAVKFLHDNKLTHTDLKPENILFVNSDYELTYNLEKKRHERSVKSTAVRVGDFGSATFDHEHHSTIVSTRHYRAPEVILELGWSQPCDVWSIGCIIFEYYVGFTLFQTHDNRQHLATMERILGPIPSRMIRKTRKQKYFYRGRLDWDENTSAGRYVRENCKPLRQYLTSEAEEDHQLFDLIESMLEYEPAQRLTLGEALQHPFFSRLWAEPPNKLWDSSQDISP

SEQ ID NO: 56867 - protein, 242 aa, Zea mays
  Clone ID: UC-ZMFLMO17050E08_FLI.pep
RHQASHPRAVPRREDNLPPQPVWPLRHRRTSRRRRPHWPEDHHRHLRWLGSPRRGRLLRQGPDQGGPQRGLRREAGCQEHRRRRPRPPRHRPGLLRHRRARAPIGVRGHVRHRRDPRQGDPEDREGELRLQARHDHHQPRPQERRQRALPQDGGLRALWEGRPRLHLGGGEAPQGGEAVFCMRRLLCFGRSFWSGLPALYHAFLWLLRVVILDLPLAYHLYCTVTVLISGTCAGSYCVCLFT

SEQ ID NO: 56868 - protein, 596 aa, Zea mays
  Clone ID: UC-ZMFLMO17052C08_FLI.pep
DSRNMRPALLLFYTLALVEASLFLFEKAYWTWKVSVCKLLHQVSAECELGPYGLVSLKRFFYDAYSRCIAGSIFDGIKMDLVTFAEDLILSDFLDEQIIGVRILQQFANSERSASDTLRKVGTTPRSIDRLVEMLNWKRTEEDEVRLCAAEIVSKLASKRQNALRVSGIPGAIESVTSLLYTATSPPVSGTHPQLPGAPAEHGASPPAGSRGYDHLQFNLLGLLILKRLARDHDNCGKIGNARGLLAKVINFTQASRALLQNPHVTDSQVRAMKRALKVVKMLVSTTGSTGKALRESVAENVFTVSNLRGILRYGQQHRELQKLATDVLTGLAMHDSGKEAIVATGGVVKLLLSIFFNAQDTELGREAGEALAMLALESEAGCAAILRQTDVLDQFVSALQDGDARRRLNAARVLRNLCAYSGQQQRERLRVVTKALPAVLNATKVDKDRILEVSVGLSTEICQFIDGEQFAAELRGAGVADERAYVELLASILKQYRYPDIRVPRMRRFVVQQVIWLMTSSGGGGDHSGGYVQLLREVGMKRLLESIADTTSELECYHVFSGSVGISKHRESFSAIVDSALELIAGSGDGARAED

SEQ ID NO: 56869 - protein, 609 aa, Zea mays
  Clone ID: UC-ZMFLMO17058F06_FLI.pep
SDQSMASAFGTASTCGIKHAPAGVALAAPMKHLSLVSPSLVSLPRKMRPRRKYNFRVNAAKELHFNKDGSAIRKMQNGVNKLADLVGVTLGPKGRNVVLESKYGSPKIVNDGVTVAKEVELEDPVENIGAKLVRQAAAKTNDLAGDGTTTSVVLAQGMITEGVKVVAAGANPVQITRGIEKTAKALVSELQKMSKEVEDSELADVAAVSAGNNYEIGNMIAEAMKKVGRQGVVTLEEGKSAENNLYSVEGMQFDRGYISPYFVTDSEKMTVEYENCKLLLVDKKINNARDLITILEDAIRSGYPILIVAEDIEQEALATLVVNRLRGALKIAAIKAPGFGERKSQYLDDIATLTGGTVIREEVGLSLDKADNAVLGTAAKVVVTKDSTTIVGDGTTQEEVNKRVTQIKNQIEATEQEYEREKLNERIAKLSGGVAVIQVGAQTETELKEKKLRVEDALNATKAAVEEGIVVGGGCTLLRLASKVDAIIETLENDEQKVGAEIVRKSLSYPLKLIAKNAGVNGSVVTEKVLANENFRYGYNAATGEYEDLMAAGIIDPTKVVRCCLEHAASVAKTFITSDAVVVDAKVAEQAPSSPANPMAMGGGSGFGF

SEQ ID NO: 56870 - protein, 130 aa, Zea mays
  Clone ID: UC-ZMFLMO17060D09_FLI.pep
GQLGIGLDSPGWIDSLMVFELLAEVEEPHIFVIVDHRNALLGSNDTHRKSTDEDNRGEDEDNKRCSLEHMHDLPNQTLAPESSQYGNEDEVASKRQGESVQEVKLHHREGGGEHHHECCCCTCHLPDNGM

SEQ ID NO: 56871 - protein, 189 aa, Zea mays
  Clone ID: UC-ZMFLMO17040G03_FLI.pep
FKRRALRVIADHLSAEEVEDIKEMFKVMDTDNDGIVSYEELKSGITNFGSHLAESEVQMLIEAVDTNGRGALDYGEFLAVSLHLQRMANDEHLRRAFLFFDKDGNGFIEPEELQEALMEDGGADTMDVVNDILQEVDTDKDGKISYDEFVAMMKTGTDWRKASRHYSRGRFNSLSIKLIKDGSVKLGSE

SEQ ID NO: 56872 - protein, 579 aa, Zea mays
  Clone ID: UC-ZMFLMO17300A10_FLI.pep
ESKSVREAASRKGSSDNFLYCPVATGIQDDDIVHFQMHWAKGEPVVVSDVLQLTSGLSWEPMVMWRALRERSKGKAEDEQFAVWAIDCLDWCEVEINIHRFFSGYTTGRTHARTHWPQMLKLKDWPPSSSFDKRLPRHGAEFISALPFREYTDPRYGPLNLAAKLPAGVLKPDLGPKSYIAYGFYKELGRGDSVTKLHCDMSDAVNILTHTAEVTCQTDIGLIEKIQKDMREQDLQELYGGLNSHSELKLSPAPTECRDESVDEGLKTSYSREGNCVNRDNYNGLDINALPPDDDGDIAKDKESSPGSEWQSELGQSSDHNNGVNTTDEMYNGAHYISHNQKSTGRKVGIKPQEEKSEKADCSGTCAYLKGSSEDNPEMPIVESSEEQSTGGALWDIFRRQDSDKLQDYLRKHCSEFRHIYCNPVKKVFHPIHDQSFYLTEEHKRKLKEEYGIEPWTFEQKLGEAVFIPAGCPHQVRNLKSCIKVALDFVSPENVGECVKLTEEFRRLPSFHKAKEDKLEIKKMAVHALNEAVNFLDPRSSEELKIGVGENICEDESVDEKELPPRRGVEVSGVDEKPK

SEQ ID NO: 56873 - protein, 440 aa, Zea mays
  Clone ID: UC-ZMFLMO17047A09_FLI.pep
HAHDDIHAHPSVIIVCSFMHPSFEWPDDRSDGDRSGVVLVGEDVEEREGLGDGELEPELGPVVVVQDGAEGVLLQRVVDLPRCHPHLRREARLAGALLVLPRRRVDVGPAEARGLEDAVELVRGVVVEEEGQSRADSTHRVPVPGRQPEQLPPEVLVHGVVVADEDVPADGLAPRQRLRRRQRLEPLLVRGRRRRRALALGVLLPAVLPGAALLVAAAGVAVVVVVVVARRPPGGLVEVALHLHAVAVVVGITAAVVAVAPHLVERQHVGVVVVVLGVAAAVAHEAVAGVVHGLVVGVGEVVVVVAVGLVGAAASGAAAEGQLPGADEAGPSVVELEPDDGVALGGGVGGRRGGGEEDVVAVVAPAGGGPDGVAEGEAREGGRLQAQLVAELVELAVVAFHGRVLLFCRGGGGGGGRETRSSADADADADAEQWKSRSLR

SEQ ID NO: 56874 - protein, 214 aa, Glycine max
  Clone ID: JC-GMST02400015D12_FLI.pep
LIEIQDTLKSPPPENVTMKRASTISVIVTTFFYLCCGCFGYAAFGNDTPGNLLTGFALYKKHWLVDFANACIVIHLVGAYQVYSQPLFANVENWLRFKFPDSEFVNRTYSLKLPLLPAFPLNFLRLTFRTAYVASTTGIAMIFPYFNQILGVLAGIIYYPLSIYFPVEMYLSLGNIEAWTAKWVMLRTFSIVGFLVGLFTLVGSIEGIVSAKLS

SEQ ID NO: 56875 - protein, 379 aa, Zea mays
  Clone ID: UC-ZMFLMO17055G12_FLI.pep
LYGRLKSLQRHMEFVEIQEEYVKDEQKNLKRELLRAQEEVKRIQSVPLVIGQFMEMVDGNNGIVGSTTGSNYYVRILSTINRELLKPSASVALHRHSNALVDVLPPEADSSISLLGSSEKPNVTYNDIGGCDIQKQEIREAVELPLTHHELYKQIGIDPPRGVLLYGPPGTGKTMLAKAVAHHTTAAFIRVVGSEFVQKYLGEGPRMVRDVFRLAKENAPAIIFIDEVDAIATARFDAQTGADREVQRILMELLNQMDGFDQTVNVKVIMATNRADTLDPALLRPGRLDRKIEFPLPDRRQKRLVFQVCTAKMNLSDEVDLEDYVSRPDKISAADIAAICQEAGMHAVRKNRYVILPKDFEKGYRTNVKKPETDFDFYK

SEQ ID NO: 56876 - protein, 203 aa, Zea mays
  Clone ID: LIB3632-029-B12_FLI.pep
PAPLDSASLPRGCYRILAEMGLTFTKLFRRLFAKKEMRILMVGLDAAGKTTILYKLKLGEIVTTIPTIGFNVETVEYKNISFTVWDVGGQDKIRPLWRHYFQNTQGLIFVVDSNDRERVVEARDELHRMLNEDELRDAVLLVFANKQDLPNAMNAAEITDKLGLHSLRQRHWYIQSTCATSGEGLYEGLDWLSNNIANKARSI

SEQ ID NO: 56877 - protein, 167 aa, Zea mays
  Clone ID: UC-ZMFLMO17041B08_FLI.pep
LLPRHAVLQLGFPLHGAPEHSGSLLELAQLPAAVTSAQRPAPWVLALLAAILLDPLHGARSSRVSSSTALSSASNWVLLCPGRRSQSLVDRAPLCLLVVAPSCSPSFDMPPRPRLVSVARLPVSFLAMSSSLPVLSNSPCGWNLRARCHRHHGRLPVRCVPRLQPTH

SEQ ID NO: 56878 - protein, 379 aa, Homo sapiens
  Clone ID: LIB4117-006-A5_FLI.pep
RAASEALGIPGTMDDAAVLKRRGYLLGINLGEGSYAKVKSAYSERLKFNVAIKIIDRKKAPADFLEKFLPREIEILAMLNHCSIIKTYEIFETSHGKVYIVMELAVQGDLLELIKTRGALHEDEARKKFHQLSLAIKYCHDLDVVHRDLKCDNLLLDKDFNIKLSDFSFSKRCLRDDSGRMALSKTFCGSPAYAAPEVLQGIPYQPKVYDIWSLGVILYIMVCGSMPYDDSNIKKMLRIQKEHRVNFPRSKHLTGECKDLIYHMLQPDVNRRLHIDEILSHCWMQPKARGSPSVAINKEGESSRGTEPLWTPEPGSDKKSATKLEPEEEAQPQAQPETKPEGTAMQMSRQSEILGFPSKPSTMETEEGPPQQPPETRAQ

SEQ ID NO: 56879 - protein, 500 aa, Zea mays
  Clone ID: UC-ZMFLMO17053A01_FLI.pep
DNRWSWAEVKHLSKCLVQALDAGLEHALLDSVVTVDRYAAAEGFYKLAMAYAPVPDLHIMWLQHLCDAHQEMQSWAEAAQCAVAAAGVIMQALVGRNDAVWSKEHVTSLHKICPIVNTDVSAEASAAEVEGYGASKLTVDSAVKYLQLANKLFTQAELYHFCASIQELIIPVYKSRRAYGQLAKCHTSLTNIYESILEQEASPIPFIDATYYRVGFYGERFGKLNKKEYVFREPRDVRLGDIMEKLSHIYEVKMDGSHTLHIIPDSRQVNADELQPGVCYLQITAVDPVMEDEDLGSRRERIFSLSTGTVRARVFDRFLFDTPFTKNGKTQGGLEDQWKRRTVLQTEGSFPALVNRLPVTKSESLEFSPVENAIGMIETRTAALRNELEEPRSSEGDQLPRLQSLQRILQGSVAVQVNSGVLSVCTAFLSGEPATRLRSQELQQLIAALLEFMAVCKRAIRVHFRLIGEEDQEFHTQLVNGFQSLTAELSHYIPAILSEL

SEQ ID NO: 56880 - protein, 261 aa, Zea mays
  Clone ID: UC-ZMFLMO17056D12_FLI.pep
VHSYQSYLWNHAASMRVEKYGISQVVEGDLVYNKECPSEESTSVDILETDDDHTNSIEIDLCSEAQPEESIQSAKIVDSGDFTKGIYTFDDVVLPLPGSQALFPGNEIAEIYHEMARKDGISLTENAHGVKEFSITSMKGGYRRVFQRPIGFEWELITYTDDTSSLAETDLDVLSRTKPKEANELISKQESQDKLEKAPDTSVPTNGNSSQEKLIGSPDIRPKKLALKLAFTLPTSCYATMAIRELLKTSTSVAYQKTLSC

SEQ ID NO: 56881 - protein, 263 aa, Zea mays
  Clone ID: UC-ZMFLMO17368G12_FLI.pep
VEIKRIENNTSRQVTFCKRRNGLLKKAYELSVLCDAEVALIVFSSRGRLYEYANNSVKATVERYKKAHTVGSSSGPPLLEHNAQQFYQQESAKLRNQIQMLQNTNRHLVGDSVGNLSLKELKQLESRLEKGISKIRARKSELLAAEISYMAKRETELQNDHMTLRTKIEEGEQQLQQVTVARSVAAAAAATNLELNPFLEMDTKCFFTGGPFATLDMKCFLPGSLQQMLEAQQRQMLATELNLGYQLAPPGSDAANNNPHHQF

SEQ ID NO: 56882 - protein, 422 aa, Zea mays
  Clone ID: UC-ZMFLMO17058G09_FLI.pep
AACVLSSAAKSNGFALRLGPGHAARDAFLGARLAWTSAGADRLVLRVRRHDRTRVLRPYLQHLESVADEMEARRRELRLYASTSASGAGPSPAPRWTSAPFTHPATLDTVVMDPELKARVRADLESFLKGRGYYHRLGRVWRRSYLLYGAPGTGKSTFAAAMARFLGYDVYDMDLSRAGVGDDLRALLLDTTPRSLILVEDLDRYLRGGGDGETAAARTARVLGFMDGVSSCCGEERVMVFTMSGGKDGVDPAVLRPGRLDVHIHFTMCDFEAFKALASSYLGLKDHKLYPQVEEGFQAGARLSPAELGEIMLANRGSPSRALRTVISALQHVAPSAPPAAQPQRTLAAARPPRLTSRWSGHFDEASGSAGGFAKDAPIREIKKLYGLIKYRSRKDAGVVPVDDSAASQNGRGSDVSYEKDR

SEQ ID NO: 56883 - protein, 153 aa, Zea mays
  Clone ID: UC-ZMFLMO17041G02_FLI.pep
TALFIHRLHTQFGHFLWVISISMKVFFPSQPYLHESRHRHAMKRVRGPGGRFLNKKELQEQQLKALPSLQTPTGGVSKMAFGRNLCPESSTSHSPSTSSTISSASNWSGTLAHQEHVSFASANKFLPSMNFHAENGGEKMAINGVRHHTPVLR

SEQ ID NO: 56884 - protein, 162 aa, Zea mays
  Clone ID: LIB3332-031-G7_FLI.pep
ILPFCSSALCGRMTGFCTTMPPSAGHVDGGFRRTCLGYAFMISPASTGPPLISSTRPLECTIRTTSSAPHGRMHAMQHLMVSIDPFWPSDYRPVGSCWLLRVLAVHIWRQRHQGERSIEEDEEGANALVHEAQLSWLDFVGSFWCGYVRAARFLYSCTCSLL

SEQ ID NO: 56885 - protein, 235 aa, Zea mays
  Clone ID: UC-ZMFLMO17048C02_FLI.pep
ELAYICQEIKNPLSGIRFTNSLLQMTDLNDDQRQFLETSSACEKQMSKIVKDASLKSIEDGSLVLEKSEFSLGDVMNAVVSQTMSLLRQRDLQLIRDIPDEIKDASAYGDQFRIQQVLADFLLSMAQSAPSENGWVEIQVRPNVKQNYDGTDTELFIFRFACPGEGLPADIVQDMFSNSQWSTQEGVGLSTCRKILKLMGGEVQYIRESERSFFLIVLELPQPRLAAGRENQLIC

SEQ ID NO: 56886 - protein, 383 aa, Zea mays
  Clone ID: LIB3607-011-E12_FLI.pep
VIPDQIPCHAKTCMTTLSSKIVNRCKRALAEIAVKAVLAVADLERKDVNLDLIKVEGKVGGKLEDTELVYGIIVDKDMSHPQMPKRIEDAKIAILTCPFEPPKPKTKHKVDIDTVEKFQTLREQEQKYFDEMVQKCKDAGATLVICQWGFDDEANHLLMHRNLPAVRWVGGVELELIAIATGGRIVPRFQELSPEKLGKAGLVREKSFGTTKDRMLYIEKCANSRAVTIFIRGGNKMMIEETKRSLHDALCVARNLIRNNSIVYGGGSAEISCSIAVETAADRHPGVEQYAIRSFADALDAVPLALAENSGLSPIDTLTAVKAQQVKESNPHCGIDCNDVGTTDMKEQNVFETLIGKQQQILLATQVVKMILKIDDVISPSEY

SEQ ID NO: 56887 - protein, 194 aa, Zea mays
  Clone ID: UC-ZMFLMO17054B09_FLI.pep
YRASVDAEVVKTSCLLQRLLTASCKSLSLACCVVSSCGVHEKFVDRVSGVPFPVPMCINLTLLASYYAARIMDPKEKPNVSSSPPTPRLDCIKCFDMLWFCYSPFHQMQNYYRYGEFDTCFGKWGDLMGCLALKTKRKAEVEEILIAREKAKPHIWTYRTVDEASENWWRMYKHAVMMSPLPGSAQLPPRSDES

SEQ ID NO: 56888 - protein, 66 aa, Zea mays
  Clone ID: LIB3114-025-F6_FLI.pep
RLTVGNPVQQTNRKYIIVQSSRLTHPGHTFVRAVPRKMESDDKHVKAQLDGIRCIALGLLRNRPVA

SEQ ID NO: 56889 - protein, 97 aa, Zea mays
  Clone ID: UC-ZMFLMO17057B09_FLI.pep
ELNDEVSDFGLHVMIFLRYNGNTSPLRNLDIPLPAFLCLIFINRTLINTIPQVSYDDFVAAGFLGVAREKGLEKFQKHRVKKFWQHFHFILIAVPRQ

SEQ ID NO: 56890 - protein, 266 aa, Zea mays
  Clone ID: UC-ZMFLMO17061H05_FLI.pep
QLPADVLVSVISRAAAGPRDTCIAATVSPAFRAAADSDTVWSRFLPADLAPLVYPTPPPRSKKELFLRLSETHALVEDGLMSAWLDRETGAKSYMIAARAMAIIWVDTPDYWRWIVREDSRFSTCAELLAVCWLDISGCMPCRMLSGDTRYAAYLVFKMADDCFGLDSPLQEASVSVGEGGTSTAHWIRLQSYHVGDEENGVTEEGAPPRLPHERPDGWMEVELGDWYNHGGDDDLVVRASVKEARFGGNWKKGLIVQGLEIRPKN

SEQ ID NO: 56891 - protein, 418 aa, Zea mays
  Clone ID: UC-ZMFLMO17042G06_FLI.pep
LSHHTSVMATTGGGKAALVLGRLLLLLCVLGHGAAQRYNAIWSFGDSISDTGNLCVGGGCPSWLTTGQPPYGETFFGRPTGRCSDGRVIVDFLGMWLCAHTDTGRTQEGWKRRTGCWTGLTRWYTNTVPYVCMDYAAEHFGLPLLPASKAGGDLKKGANMAIIGATTMDFDFFKSIGLSDKIWNNGPLDTQIQWFRQLLPSVCGKDCKNYLSKSLFVVGEFGGNDYNAALFSGRSMAEVRGYVPMVVSKLVRGLEAIVRSGAVDVVVPGVLPIGCFPIYLTLYGTSNAADYDRDGCLRAYNGLSSYHNALLRRSLSGLRRTYPHARIMYADFYTQVTHMIRAPHNFGLKYGLKVCCGAGGQGQYGYNNKARCGMAGASACADPGNYLIWDGIHLTEAAYRSIADGWLKGPYCSPPIQH

SEQ ID NO: 56892 - protein, 118 aa, Zea mays
  Clone ID: LIB4315-046-H9_FLI.pep
AYSDRKSAVQLSQKEKVGTKEFLRGALYKVQGKSDSSLTTKGEHLCEIRLKKSGKRLYWPRSSEYMSQQNLFPLDHMQLESLPKMNRRVQSDTTSILVRQLICLVAYTEYQSHWELWP

SEQ ID NO: 56893 - protein, 233 aa, Zea mays
  Clone ID: UC-ZMFLMO17048D05_FLI.pep
LGELAMSTGKLEMAEECLLQAKDLSGLLLLYSSLGDAEGIEKLASLAKEHGKNNVAFLCLFMLGKVEDCIQLLVDSNRIPEAALLARSYLPSKVPEIVAIWRDDLSKINPKAAESLADPSEYPNLFEDWQVALTVEKSVASQRGNYLPADQYLNHAEKSDMTIVEAFKRMQVVQHEEPEDVAEENGELDQQAFEETEMQNTDDDADEPEETVLVNGNKGEEHQGTDNEGALSA

SEQ ID NO: 56894 - protein, 576 aa, Zea mays
  Clone ID: LIB3205-006-E12_FLI.pep
SVCSVCVCGRARALQLEEARAIKMAHDPSLGFADYFSAAAAAAAAGATAMDDDVGASELYGLHADDMEFLGMRGLAAMPPAAAHHQHHHHHGHSKAGALLDDDDAGVGPDVSGSADDATMRFLSEQQQQQQHQAPLSLSLCRPDVTTTLHEQHHLAGGGSSSRYHQEQQPAAWVQQQQHDYSPSPQIQAMDALELQRLKDKLYIMLEEVDRRYRRYCEQMRALAGGFEAVAGERAAAAYTALASRTISRHFRSLRDGVVAQLQAARRALGEKDVAVPGMTRGDTPRLRVLDQCIRQHKALTQAAGMMESHPWRPQRGLPERAVTILRAWLFEHFLHPYPSDVDKHILARQTGLSRSQVSNWFINARVRLWKPMVEEMYVEEMKAEGQQDGGGQQQAGVANNPNPSSAAHAHASEAAEDDGRGDSGGAAAVVDRKPTRAQLLHDAGSLASVVNIGGGSRAGFGIMDHLDFDAYGGHHAGAVSLTLGLQQHDSHADTGGVNIAFGAPPPAHHHGYLFAPTTAAAGHQMGAGVHPGIHHHVQFSGAGAGIDGGEAAHGQEHYRGLQGGGGFHLLRDLAG

SEQ ID NO: 56895 - protein, 494 aa, Zea mays
  Clone ID: UC-ZMFLMO17054D05_FLI.pep
GISPNLALFFGGQDSLPWILARHEIPWLDVVVDPCASFLVFVVTGLLCVGIKESSFVQGVVTVLNCFVMLFVIIAGSYIGFQTGWVGYKVAGGFFPYGANGMLAGSATVFFAYIGFDSVASTAEEVKNPQRDLPLGIGTALSICCSLYMLVSVVIVGLVPYFAMDPDTPISSAFAKHGMHWAMYLVTTGAVLALCSTLMGSILPQPRILMAMARDGLLPSFFSDVHKTTQVPVKSTVVTGICAAALAFFMDVSQLAGMVSVGTLLAFTIVAVSILILRYVPPDEVPLPSSLQASFRLSQENDEEKLRGTLGDDDHEQGSAEISDVVVEPITDPLIEKQLYASNLSEAKRRKTAACSITSVCIGVLILTTSASATFLPFPVRCSVCVLGGMLLLAGLGMLCWIDQDDGRHSFGHSGGFICPFVPLLPVMCILINTYLLINLGGGTWMRVGVWLVMGVFVYIFYGRTHSSLTDVVYVPVAEANEIYGSSSSLGFVA

SEQ ID NO: 56896 - protein, 313 aa, Zea mays
  Clone ID: UC-ZMFLMO17042G10_FLI.pep
DGCEETISGSHDDDSPEGQETSSIKEPDVEGDTQEDKRVNQDSLKLIDEESAPPKSPAKSATASSRSERPKRVVPRPFSLSNQRSLFGVNGGVANPLANKDKSGDKSSISPASMTKKSTQMALRKTLQPEKVFHPLEEDSCSVTSSTTTSTRAGRTKMTVPVAPSFVCANRADKRKEFYTKLEEKHKALEAEKDEAEARKKDEQDVALKQLRKSLVIRAKPMPSFYQEGPPPKAELKKVPPTRAKSPKFTSSRRRSCSDTPLTPGGENTNATSTRPHRHSIGSPRDANRVQQCSPKSGVATKTRSVKAELKAL

SEQ ID NO: 56897 - protein, 352 aa, Glycine max
  Clone ID: JC-GMFL02220146E12_FLI.pep
KREKLHLLSFFLTHHRTQKNISKFQVWEMHETHSIGGGRFYGGGDRRLRPHHQQQQPPPLKCPRCDSLNTKFCYYNNYNLSQPRHFCKNCRRYWTKGGVLRNVPVGGGCRKSKRSNKPKTTTTTTTSNTNNNRSSFSATAPATAPTPPAPELEHHSHSHSSSESSTLTVTATEEMSAPPPTTSNAPSKNSLLLDNDHREAKMFANPNPNPSLDSGGIFSEIGNFTSLINLNNNEAFGFGNNKNNNSILDATSFRFGISVTNQVQAAAGGGHGQWQQQNHQEFGTASFLDHTVPLEFSSLQHKTGHQGGFGSLDWQPGADQGLFDLPNTVDQPYWTHAHWSDQDNTSSLFHLP

SEQ ID NO: 56898 - protein, 564 aa, Zea mays
  Clone ID: UC-ZMFLMO17045C09_FLI.pep
IFYLPESPRWLVSKGRMAEAKKVLQKLRGKDDVSGELSLLLEGLEVGGDTSIEEYIIGPATEAADDLVTDGDKEQITLYGPEEGQSWIARPSKGPSMLGSVLSLASRHGSMVNQSVPLMDPIVTLFGSVHENMPQAGGSMRSTLFPNFGSMFSVTDQHAKNEQWDEENLHRDDEEYASDGAGGDYEDNLHSPLLSRQATGAEGKDIVHHGHRGSALSMRRQSLLGEGGDGVSSTDIGGGWQLAWKWSEKEGENGRKEGGFKRVYLHQEGVPGSRRGSIVSLPGGGDVLEGSEFVHAAALVSQSALFSKGLAEPRMSDAAMVHPSEVAAKGSRWKDLFEPGVRRALLVGVGIQILQQFAGINGVLYYTPQILEQAGVAVILSKFGLSSASASILISSLTTLLMLPCIGFAMLLMDLSGRRFLLLGTIPILIASLVILVVSNLIDLGTLAHALLSTVSVIVYFCCFVMGFGPIPNILCAEIFPTRVRGLCIAICAFTFWIGDIIVTYSLPVMLNAIGLAGVFSIYAVVCLISFVFVFLKVPETKGMPLEVITEFFAVGAKQAAAKA

SEQ ID NO: 56899 - protein, 238 aa, Zea mays
  Clone ID: 700469751_FLI.pep
LACQRMHLLHPEEIVVVVGSRAGVAAGNSRSNPGSIVAGGALVASRSRNHSSSSSIRNVAGIAVALLAAAVLLSHYYCTSGGAPHDAAAGVVVVVAATGAHREVHVHAAGAVSLVSRSRELPLLLLLLLVVQGEQRPVVLLGRRHGGLRSGSSPGEHHRSSAPRLQRVQRELGGAPGGSAPDGEVAAEDALHVVAAHVEVGDGVEPAELDRSDVVRLRRLFLSTESAQVQVLVSGHPA

SEQ ID NO: 56900 - protein, 186 aa, Zea mays
  Clone ID: UC-ZMFLMO17048F09_FLI.pep
GEQCAWAIGNVAGEGAELRNTLLAQGALWPLARLMLSNKGSTTRTAAWALSNLIKGPDSKAANELIGIDGIPNAIIRNLEKADEELATEVAWVVVYLSALSEKATSLIVRSSMPQLLIGRLLASENLQLLIPVLRGLGNLVAGDGYMVDSVLIVGNSVTDQALSSLIKCLKSDHRVLKKVCYPFIC

SEQ ID NO: 56901 - protein, 173 aa, Zea mays
  Clone ID: UC-ZMFLMO17054E05_FLI.pep
PEMEICDFDFEPCGYSMNAIHGSAFSTIHVTPEDGFSYASYEVMGLDATALSYGDLVKRVLRCFGPSEFSVAVTIFGGRGHAGTWGKALGAEVYDCNNMVEQELPGGGLLVYQSFCAAEDAVATSPKSVFHCFDGENVESAPPPMKKDYKLANLLCWEEEADAMEEKAGVLDE

SEQ ID NO: 56902 - protein, 487 aa, Zea mays
  Clone ID: 700455962_FLI.pep
ASPSSSLARSLPRPRLPPQTTTTIQDRSAARERGVSRSGKMREILHIQGGQCGNQIGAKFWEVICGEHCVDSTGRYSGTSSQQLELERINVYYNEAGGGRYVPRAVLMDLEPGTMESIRAGPFGGIFRPDNFVYGQSGAGNNWAKGHYTEGAELIDSVLDVVCKEAENCDCLQGFQVCHSLGGGTGSGMGTLLISKIREEYPDRMMLTFSVFPSPKVSDTVVEPYNATLSVHQLVENADECMVLDNEALYDICFRTLKLTNPSFGDLNHLISATMSGVTCCLRFPGQLNSDLRKLAVNLIPFPRLHFFMVGFAPLTSRGSQQYRALTVPELTQQMWDAKNMMCAADPRHGRYLTASAMFRGKMSTKEVDEQMINVQNKNSSYFVEWIPNNVKSSVCDIPPVGLPMASTFVGNSTSIQEMFRRVSEQFTAMFRRKAFLHWYTSEGMDEMEFTEAESNMNDLVAEYQQYQDATAEEYEEEEHDGEEEHA

SEQ ID NO: 56903 - protein, 415 aa, Zea mays
  Clone ID: UC-ZMFLMO17042H09_FLI.pep
KEEAEGRQESPARASIALPATAHMPTAYSLRAPPSASQQRLRLPLPPPPPPLPFCPGGGAARRRRGVGVASASASPFDELHARGRPVHGPSKKSMLWNLIQDIEPLDLSVIQKDVAPETVDAMKRTISGMLGLLPSDQFRVIVEALWNPFFKLLVSSIMTGYTLRNAEYRLSFERNLELPEEGVECLKSDVTEDNHHNINLGRPVTIFRLSEEDMPQDPGKTDEASSYENMGEELGDLTPQAEEYIIQMQSHLNAMKKELHDLRRKNSALQMQQFVGEEKNDLLDYLRSLTPEKVAELSESTSPGVQETIHSVVHGLLATLSPKVHSKAPPPLDNISGGVLNLGGEDDDRAELVENASLPFQPLISVPRDYLARLLFWCMLLGHYIRGLEYRLELARLLRISSVGSFSGGDDHVV

SEQ ID NO: 56904 - protein, 153 aa, Glycine max
  Clone ID: 700725452_FLI.pep
RITTEIKLLSEDASKPSATCNYQEAISIYKRIEKLQTELFHPLSINLMHTREKILKSLMELEHWTEALAYCKLTIPFYQRVYPAVHPLPGLQYYTCGKLEWYLGDTEEAVKSLTKAVDILRITHGTNTPFMKDLLMKLEEARTEASYKFSSKE

SEQ ID NO: 56905 - protein, 266 aa, Zea mays
  Clone ID: UC-ZMFLMO17045E08_FLI.pep
TESIQGISDVVGRGCIDGEEMGQRVILPASHIGGRRYMFQNYHDGLAICRVYGPPDFFVTFTCNPNWPEIVESLFEPGQKASDRSDIITRVFHLKLDDLLGDIRSGDIFGRQLAVLYTIEFQKRGLPHVHVIFWVSTDTSQPTPALIDSVITAEIPDPEKDPLGYALIVEHMIHGPCGPNHMNAPCMKNGICSKGYPKDFQEETTIDGNGFTVYRRRNNGRFIDKGGVRFDNRSVVPTNLLLLKRFQAHINVEWCNKSIFIKYLFK

SEQ ID NO: 56906 - protein, 151 aa, Zea mays
  Clone ID: UC-ZMFLMO17048G02_FLI.pep
VRIRCASLIIYQQMQIFFNPEIYSADFSTPLPELIDNCVQSAPIDTRRALYKNIVLSGGSTMFKDFHKRLQTDIKKIVDDRVAATNARHRVEVRPIEVNVVAHPIQSYAVWFGGSLAASNPDFFEFCHTKEDYEEHGASICRTSPVFKGMY

SEQ ID NO: 56907 - protein, 99 aa, Glycine max
  Clone ID: 700953259_FLI.pep
IIRWDNRMSASIPDEDIFYTVGFLHSSGFDNWKAYDAQNKEILQFCNDSGIKVKQYLPHYRTQEDWTNHFGPKWRTFVERKHQFDPKMILSPGQRIFNN

SEQ ID NO: 56908 - protein, 207 aa, Zea mays
  Clone ID: UC-ZMFLMO17054F11_FLI.pep
KDPEAKKPEDWDDKEYIPDPEDKKPEGYDDIPKEIPDPDAKKPEDWDDEEDGEWTAPTIPNPEYKGPWKQKKIKNPNYQGKWKAPMIDNPDFKDDPYIYAFDSLKYIGIELWQVKSGTLFDNIIITDDPALAKTFAEETWGKHKEAEKAAFDEAEKKKEEEDAAKGGDDEDDDLEDEEDDEKADEDKADSDAEDSKDSDDEKQHDEL

SEQ ID NO: 56909 - protein, 525 aa, Zea mays
  Clone ID: 700345995_FLI.pep
DNNNILTTTDCDGGLPASPRLRFNREGSLLAVTTSDNGIKILANTDGQRLLRMLESRAFEGSRGPPQQINTKPPIVALGPVSNVSSPIAVNAERPDRILPAVSTSGLAPMDASRTPDVKPRITDESEKVKTWKLADIVDNGHLRALHLTDTDTNPSKIVRLLYTNNGVALLALGSNAVHKLWKWQRSDRNPSGKSTASVAPHLWQPANGILMTNDTNDGNPEEATACIALSKNDSYVMSASGGKVSLFNMMTFKVMTTFMAPPPAATFLAFHPQDNNIIAIGMEDSTIQIYNVRIDDVKSKLKGHQKKITGLAFSQSMNVLVSSGADAQLCVWSIDGWEKKKSRYIQPPANRPGTLVGDTRVQFHNDQTHLLVVHESQLGIYDGNLDCLRLWSPRDALPAPISSAIYSCDGLLVYAGFCDGAIGVFEAESLRLRCRIAPSAYIPPSILACAGRVYPLVVAAHPMEPNQIAIGMSDGKVHVVEPLDGDPKWGSAPPQDNGAHPHPHPAISAAPSTATNQASDQPTR

SEQ ID NO: 56910 - protein, 197 aa, Zea mays
  Clone ID: UC-ZMFLMO17057E03_FLI.pep
FIILATDGVWDVLSNKEAVDIVASAPSRATAARALVDCAVRSWRLKFPTSKSDDCAVVCLFLGHEKSADSVQGSEPNVETAEPTVEVSSSTQDSSAGVDEDIADAGMHVSSAVHISEATLQHSTTLREVDEIVPVDEPTASKEPGRCGSARSLADCISTNEEEEWSALEGVTRVNSLLNLPRLLSGDKRSTSWRKRR

SEQ ID NO: 56911 - protein, 158 aa, Zea mays
  Clone ID: UC-ZMFLMO17059G10_FLI.pep
AAPYTCWSVFVIPINLPPGVCFQRQNIFVSLIIPGHPGNKMGMYMEPLIDELVCAWEEGVWTYDRATKTNFIMHVWYQYSMHDLPAYGLFCAWCVHDPARRREEGTPDRSAEDGGDVSIHAEPWRRTGFRSAASIVPYNGPCSIPYSWSIWGGIQQPS

SEQ ID NO: 56912 - protein, 221 aa, Zea mays
  Clone ID: UC-ZMFLMO17063F02_FLI.pep
KTHTSSGSTGRRHLFLSPRRRRKWVEERESFLPNEAGVEDDDDDFTQFLIDGEDDYPDALEPSAFCKFGSMKASSRNPLSKLDERDEEDGDGTEEDDDDDILTGALPQRISSISKLSSSMKGLGFIGKPKPYRTCLRKGKATGRTKYTGKASEHQSGSRSANELLPPSASFVKLSDMSPKQWSAFLDKFQELLPGALSARKHAAGVVGQRSMPRLGTSCQF

SEQ ID NO: 56913 - protein, 328 aa, Zea mays
  Clone ID: UC-ZMFLMO17063G08_FLI.pep
RTIVALQREFAMKDLGLLHHFLGITAERRPQGLFLHQRQYAIDILERADMSDCKPCSTPVDTQAKLSEDDGPPVADATSYRSLTGALQYLTFFRPDIAYVVQQVCLHMHTLREPHFTALKRILRYLRGSLDHGLLLRPSPMLELVVYTDADWAGCPDTRRSTSGYAVFLGANLVSWAAKRQPVVSCSSAEAEYRAVANGVAEASWLRQLLHELNSPLQRATLVYYDNVSAVYLSTNPVQHQRTKHVENDLHFVRERVAAGDVRVLSVPTMLQFADIFTKGLPTSVFLEFRFSLNICTGQSCDCGGVRLSLCNGPGPSTLIYQYNSNPG

SEQ ID NO: 56914 - protein, 455 aa, Zea mays
  Clone ID: 700151543_FLI.pep
EERRKMRECISVHIGQAGIQVGNACWELYCLEHGIQPDGQVPGDKTAGHHDDAFSTFFSQTGAGKHVPRAIFVDLEPTVIDEVRTGTYRQLFHPEQLISGKEDAANNFARGHYTIGKEIVDLCLDRIRKLADNCTGLQGFLVFNAVGGGTGSGLGSLLLERLSVEYGKKSKLGFTVYPSPQVSTSVVEPYNSVLSTHSLLEHTDVSILLDNEAIYDICRRSLDIERPNYSNLNRLVSQVISSLTASLRFDGALNVDVNEFQTNLVPYPRIHFMLSSYAPVISSAKAFHEQLSVAEITSSAFEPASMMVKCDPWHGKYMACCLMYRGDVVPKDVNAAVATIKTKRTIQFVDWCPTGFKCGINYQAPTVVPGADLAKVQRAVCMISNSTSVVEVFSRINSKFDLMYAKRAFVHWYVGEGMEEGEFSEAREDLAALEKDYEEVAAEGGSDDGDEEEEY

SEQ ID NO: 56915 - protein, 100 aa, Zea mays
  Clone ID: UC-ZMFLMO17071F09_FLI.pep
LAIIEHACVLDNHKDQQTWPLHCPSISPDLAVVAPGLVAVEPVVDGGGVGLRPVEEVGAHALGGQVAPRVEDAAPHVAGAARRRRRRRRHRRRRGRRRRL

SEQ ID NO: 56916 - protein, 240 aa, Zea mays
  Clone ID: LIB3593-003-H4_FLI.pep
FSQFLPHLLGRRLPQRAGAASSLPVPTPTPIPSASNAMNPEYDYLFKLLLIGDSGVGKSCLLLRFADDSYLESYISTIGVDFKIRTVEQDGKTIKLQIWDTAGQERFRTITSSYYRGAHGIIVVYDVTDQESFNNVKQWLNEIDRYASENVNKLLVGNKCDLAENRVVSYEAGKALADDIGIPFLETSAKDATNVEKAFMTMAGEIKNRMASQPAASGASRPATVQMRGQPVSQQSSCCS

SEQ ID NO: 56917 - protein, 75 aa, Zea mays
  Clone ID: UC-ZMFLMO17078A11_FLI.pep
ISLPLLILKGIIFLLLMHNIGTYFTSKLTNQKIYHYTCIATVSIYNIGKPVIGTKQKAMGVGATCFSISLVVENR

SEQ ID NO: 56918 - protein, 219 aa, Zea mays
  Clone ID: UC-ZMFLMO17086D05_FLI.pep
KFRCRCPRTGVCATSPTNKGTRLFPPVKLGAFTPNTVIKQVSCGAVHVMALSEDGLLQAWGYNEYGQLGRGRTSQGLQGARVLNAYARFLDDAPEQVKIVRVSCGEYHTAAISENGEVYTWGLGSMGQLGHCSLQSGDNELIPRRVVALDGIVVGDVSCGGVHSCAVTEGGALYAWGGGHVGQLGVGPQGGFFSCSLNGSDMLLRNIPVLVIPSGVLVK

SEQ ID NO: 56919 - protein, 517 aa, Zea mays
  Clone ID: UC-ZMFLMO17066E04_FLI.pep
AWRLAVAGLGDPRAGVLESLGQPEAHLHTCTMDVPQLTAEGATQLGDRVSLLHQTGTLQSETPCLTLGRDSNAVSMEKLHASDCLPCGKENVGTGLQPKSDPERADNRMSVARLGLDLNTVDSPDVAEPNPFFPYKKLGQSKVSDPSECGSTTGAIEESESHRKWREMKQNGFLSSSHGNAVVPRPRGRPPKRKRDDEFKKSSSTQHVQANKSVKVAAPSGLLSGLNPGIINHVRNSKQVYSIIKAMVHSERLENENHSSQTGERGREVNERIQDQKYGGGFMKCHLLIKDNNAVFHQTLPNTSQFLAQDGDSLKLQLPSAVTMSSDRTFSTSADDPASNHDYMTVLSVKAASVASQWLELLHQDIRGRLAALKRSRKRVRNALHTELPYLTATEFSSNQENESSIANTSEIGCTDKAVSEAHVARWRSLFVQMDKTLQEEGKQLENKLKQVQEMQLNCDKGLKHMACEAPLLGPMAELWKLKNPNISESEWAVQAAAASIYSTCNMVMRTENVPCF

SEQ ID NO: 56920 - protein, 244 aa, Zea mays
  Clone ID: UC-ZMFLMO17071G08_FLI.pep
SRLSHENVAKMVGYCKESDPFSRMLVFQYPPNGTLYEHLHDGDGWQLSWPRRMKLALAISRALRYLHTELQPPFAVAALTSSSVYLTEDFSPKIIDFERWRYLATKPGFGSLNGGSVNSITDSRHKRFMDVQANTYAFGVILLELVSGRASVSKDTGGLVDWARKHLEQPEEFGKLVDPRLQSVNQESLGIVCNVANLCIDLEPSRRPSMSMIAAILEEGIEASAATLLRNSSLAWAEAELAIS

SEQ ID NO: 56921 - protein, 222 aa, Glycine max
  Clone ID: uC-gmrominsoy099c12_FLI.pep
KGFVLILMGAPKQKWTAEEEAALKAGVVKHGAGKWRTILTDPEFSSILRMRSNVDLKDKWRNINVTAIWGSRQKAKLALKKNLLPSTKIDNNHLALSTVVQRDKEVANPKPLAVSSGTSPNSKEKISKLQNFQLDNLILESIIKLKEPRGSDQAAIAAYIEDQYCSTPTLRKLLSTKLKHMVASGKLMKVILLLVNPLTRHIVLGLLELSFPIINIFICKPL

SEQ ID NO: 56922 - protein, 443 aa, Zea mays
  Clone ID: UC-ZMFLMO17078B08_FLI.pep
SLSSFKIPLAKGKREKLGSSSRGISSLSVRLRLLNACLVSGEPWWHLCFMAEICCEAAAAGSDQKGECAGSRAARRRRMEIRRLRVVAEEASAKRRRLEADEEDAVGGRAPRYGVTSVCGRRRDMEDAVTARPEFINGHHFFGVFDGHGCSHVATSCGERMHQIVAEEATAAAGSSVSDETARWRGVMEKSYARMDAEAVVSRETAGPAPTCRCEMQLPKCDHVGSTAVVAVVGPRHLVVANCGDSRAVLSSGGATIPLSADHKPDRPDELERIHAAGGRVIFWDGARVFGMLAMSRAIGDSYLKPFVISDPEVRVVERKDGEDEFLILASDGLWDVVSNEVACKVVRTCLRNRAPRGGREQSSPTSNLSPRQSSGSGSGSSSGDEEAGGPSGDGAGSESDGESAEDRACAEAAILLTKLALARQSADNVSVVVVNLRRRPRS

SEQ ID NO: 56923 - protein, 472 aa, Glycine max; identical to SEQ ID NO: 53419
  Clone ID: LIB3242-397-E8_FLI.pep

SEQ ID NO: 56924 - protein, 215 aa, Zea mays
  Clone ID: UC-ZMFLMO17083D10_FLI.pep
GSCFSPSSPHPTPHQTDSIRQDKHPCRRHAGARAPTATTRRTSASGSGCCPTGSRRGGRARGSSSGWRSWWRRWPACRRRTRRRRPAPRRWSATWAGWTATTRCCAPATPSWPAACSRWAASSRCSRWPAPPSTSRRWSPTTPCSAPGSRPSPRCSPSGSENLSLSRRERANFCRRAAVYLVLVSIHKSSLSWFALLVSVINLLLVSVINLAIGK

SEQ ID NO: 56925 - protein, 260 aa, Zea mays
  Clone ID: UC-ZMFLMO17086H05_FLI.pep
THCRSNPKFDFHRYMMRALEADFKKVVGISWYLWIFVVVFMLLNINGWHTYFWISFIPLLLLLAVGTKLEHVITQLAQEVAEKHSAVEGDLVVNPSDDHFWFGRPKIVLYLIHFILFQNAFEIAFFFWILTTYGFNSCIMDHVPFIVPRLVVGAIIQLLCSYSTLPLYAIVTQMGTFFKKEIFDEHVQQSLLGWAQKAKKRKALRNNGNGSNGAAAGSSHPSATARLELMRRAVALEEGSAGGNGSEASAAELHDTGPKL

SEQ ID NO: 56926 - protein, 850 aa, Homo sapiens
  Clone ID: LIB4119-128-E10_FLI.pep
QRRRRGPGPSNPARARLPQQPPPLPPLGHEPSFLLPPAALPAAAAASRLWASAGNMPLAAYCYLRVVGKGSYGEVTLVKHRRDGKQYVIKKLNLRNASSRERRAAEQEAQLLSQLKHPNIVTYKESWEGGDGLLYIVMGFCEGGDLYRKLKEQKGQLLPENQVVEWFVQIAMALQYLHEKHILHRDLKTQNVFLTRTNIIKVGDLGIARVLENHCDMASTLIGTPYYMSPELFSNKPYNYKSDVWALGCCVYEMATLKHAFNAKDMNSLVYRIIEGKLPAMPRDYSPELAELIRTMLSKRPEERPSVRSILRQPYIKRQISFFLEATKIKTSKNNIKNGDSQSKPFATVVSGEAESNHEVIHPQPLSSEGSQTYIMGEGKCLSQEKPRASGLLKSPASLKAHTCKQDLSNTTELATISSVNIDILPAKGRDSVSDGFVQENQPRYLDASNELGGICSISQVEEEMLQDNTKSSAQPENLIPMWSSDIVTGEKNEPVKPLQPLIKEQKPKDQDQVAGECIIEKQGRIHPDLQPHNSGSEPSLSRQRRQKRREQTEHRGEKRQVRRDLFAFQESPPRFLPSHPIVGKVDVTSTQKEAENQRRVVTGSVSSSRSSEMSSSKDRPLSARERRRLKQSQEEMSSSGPSVRKASLSVAGPGKPQEEDQPLPARRLSSDCSVTQERKQIHCLSEDELSSSTSSTDKSDGDYGEGKGQTNEINALVQLMTQTLKLDSKESCEDVPVANPVSEFKLHRKYRDTLILHGKVAEEAEEIHFKELPSAIMPGSEKIRRLVEVLRTDVIRGLGVQLLEQVYDLLEEEDEFDREVRLREHMGEKYTTYSVKARQLKFFEENMNF

SEQ ID NO: 56927 - protein, 229 aa, Zea mays
  Clone ID: UC-ZMFLMO17064D12_FLI.pep
AQQTTKSFLLKKKAALGRRFLRLEWLHHLPGEVRVVPSKVAIGRRLEVAPVAAFLEVKVDDDHARPEIEVLLDNLEDLLVGDRAGAVRVDEHGERLGHADGVRHLDDGAASKAAGDDALGSLPRDIGSAAVNLGWVLAGESATTMGSPATVGVNDDLAASETSIAVRSTNDKAAGWVKVEDGLLVKVLLRDDRLDDMLLQVSSDLIIGHCLVVLGGNEDGVDTDGDHGT

SEQ ID NO: 56928 - protein, 850 aa, Homo sapiens; identical to SEQ ID NO: 56926
  Clone ID: LIB4119-128-G9_FLI.pep

SEQ ID NO: 56929 - protein, 199 aa, Zea mays
  Clone ID: UC-ZMFLMO17066E05_FLI.pep
PIHLVSPLHTSSSSGTVCILQQLYSHQMYSRQAGCILNVAMPMLVIPPTYLHPATDPLKPSNLYTMCCFRQDAKLGNSTQALEDGRSRRVLRGRLHSIWFSTNIIYMCQFPDSTISGNSTIIPTTLRPSLVYRRQIVYRSQAPLQVCSDSSAVSDSHHQGPVNVLRKHRRFFRPNGSFNISGSCRAKFAVVIAKCRNTW

SEQ ID NO: 56930 - protein, 845 aa, Zea mays
  Clone ID: LIB3067-019-H7_FLI.pep
AVTVAVLPHPRPSRPRRPQQPAAAAARAPRSPRRRGSRLVSVTATPRRLPPLPAGCIVLRSSEGELQSPTTIHKMTTKLEQSSAEHRPAKFAAPSSLTPKISMFGAKAGFIIPKNKLAGSLVIRSTSDKNETPTASNEDSSRHVHRKTKWGPDLALDPVVCKGRALAYQTRVEQISKQLKSGALDTSEIDGSVSAGNELNSIGPDILKENELGNVELLELERRELIGEILRLNPGYKTPENYKPVLRETKIPVPAEAHPGNNIIGVLLGSESNTQKRLHEETGAVIRVYGTKKINGEKSEIRHQDINETQDAYEDLYINVSADSYDKVDAAVVLIELLLAPVSVKSTATSTAATVSSADTSKDAVSANVQLEQNTTSQPDLLHYQSHNAPWLPTPQTNAPSIPSTGPVLSTLPNNPSQPQPPAGSFSMPPYTGQPPHMNSMPANPFPVPGPQQPVPSNQQHPPQFRANSSIGPFFGQPPGIVSQQMPPSSSMPPPVRPLQIPHASGGWPPFSPVTSQSHRPLQAPPTFMAVRPPISVSPLGATPPQGPIALTPPNMPTMYRGQHPPVPNFTGSAPLVSRPPGGGAQSFPTAAPQGPSSVAFPGGPSLRPPYPPAPDQARGPPPAFSPVGSTPGMVPPPIASSGLPAPRPANTSCIQTQVVAPLRPPLPAAGDFTFRPAIPPAHAPEFAAPGSQMGAIHGRTHHPGPFSSHPGDQKNPSQGFQGPFDGSRPMYTTNQARMHAPPPPHFHGAFPRNASPLEFPAGFRGAWPSVQAPPMPAPSHPSSFPPFQLRPPPPPQQDMSGAGGTRWPGGNQIYNPFAPTAAAAAQRAEADPEYEDLMASVGMK

SEQ ID NO: 56931 - protein, 165 aa, Zea mays
  Clone ID: UC-ZMFLMO17070B08_FLI.pep
LGVMDQSIGQQSGRLGEALVGLPDDVDLVGGDVGGGGGMEVLVAVPPPERVRVVPDLQDAVPEAALPVRAVLRLAVPAEAARGGARREVGGAEAAPHEGVRRRRRVRAVAGLVRVRRRHLLAVAAVAHRDVHGAARVQRVVEHPVRPLVRVHLVTDHHHVRSCSA

SEQ ID NO: 56932 - protein, 295 aa, Zea mays
  Clone ID: LIB3245-499-H10_FLI.pep
TVLLCFGATVQCAQPASSAAEQSPAVSPDQRGFSAMERPAQAPTQLPPGFRFHPTDEELVVLYLRRKALARPLPAAVIPVVHDVAGLDPWDLPGASEGEGYFFSLRRAPATGRGSRRRRAGSGYWKATGKEEPVFLQCGGGGVGGKRQLLVGGKTALAFHRSEPSPPSSSRTGWVMHEYRLAAASRGVAEQRKKNASHGCCDAEPGEWVVCRVFLKKGARRSRPGRDGNHSRALRHRASAAPSQQREDVGGRQPLLFPAPQSPSSSCVTGVTDLSDEEDEVSSGSITRVAPQREA

SEQ ID NO: 56933 - protein, 151 aa, Zea mays
  Clone ID: UC-ZMFLMO17078F05_FLI.pep
MKLSLLFALLTLCISIFSGNISRGEVSGCHYQVSCVCSVFRDFEWPVHNLCLKILKLEGVKEEVADDLGLTAHEEGEHGGHEVPDEDLVVVEHLHALGVLRRHRPHGLAAVADDRPPQQSPRLPLCLRLLPQGDSRCHRRDRVQQVGTGCR

SEQ ID NO: 56934 - protein, 149 aa, Arabidopsis thaliana
  Clone ID: LIB9-033-F4_FLI.pep
VIQYKRKQEFPMVKEGMVMTEKPKRNLISSNEKRYKGIRMRKWGKWVAEIREPNKRSRIWLGSYKTAVAAARAYDTAVFYLRGPSARLNFPEEVFKDGNGGEGLGGDMSPTLIRKKAAEVGARVDAELRLENRMVENLDMNKLPEAYGL

SEQ ID NO: 56935 - protein, 201 aa, Zea mays; identical to SEQ ID NO: 55197
  Clone ID: UC-ZMFLMO17064G08_FLI.pep

SEQ ID NO: 56936 - protein, 200 aa, Zea mays
  Clone ID: UC-ZMFLMO17067B08_FLI.pep
RITILRGNHESRQITQVYGFYDECLRKYGNANVWKTFTDLFDYFPLTALVESEIFCLHGGLSPSIETLDNIRNFDRVQEVPHEGPMCDLLWSDPDDRCGWGISPRGAGYTFGQDISEQFNHTNSLRLIARAHQLVMEGFNWAHEQKVVTIFSAPNYCYRCGNMASILEVDDCREHTFIQFEPAPRRGEPDVTRRTPDYFL

SEQ ID NO: 56937 - protein, 295 aa, Zea mays; identical to SEQ ID NO: 56932
  Clone ID: 700241117_FLI.pep

SEQ ID NO: 56938 - protein, 431 aa, Zea mays
  Clone ID: UC-ZMFLMO17071H09_FLI.pep
CRHHRSFFSPGQEKRGERGEARCPPDLLCPDAAVTTSSVSVRSKMGAGGRMTEKEREKQEQLARATGGAAMQRSPVEKPPFTLGQIKKAIPPHCFERSVLKSFSYVVHDLVIAAALLYFALAIIPALPSPLRYAAWPLYWIAQGCVCTGVWVIAHECGHHAFSDYSLLDDVVGLVLHSSLMVPYFSWKYSHRRHHSNTGSLERDEVFVPKKKEALPWYTPYVYNNPVGRLVHIVVQLTLGWPLYLATNASGRPYPRFACHFDPYGPIYNDRERAQIFVSDAGVVAVAFGLYKLAAAFGVWWVVRVYAVPLLIVNAWLVLITYLQHTHPSLPHYDSSEWDWLRGALATMDRDYGILNRVFHNITDTHVAHHLFSTMPHYHAMEATKAIRPILGDYYHFDPTPVAKATWREARECIYVEPEDRKGVFWYNKKF

SEQ ID NO: 56939 - protein, 345 aa, Zea mays; identical to SEQ ID NO: 53407
  Clone ID: 701163268_FLI.pep

SEQ ID NO: 56940 - protein, 177 aa, Zea mays
  Clone ID: UC-ZMFLMO17078H06_FLI.pep
VKRCLSRSKTSVRVQPVHTSKGGGWLVVPGGVALSYASDDDFLLKRPPAPANGEMGGVVPSGEAGGVLAALLGEDGYPAGRLIMMLRVTFTGVSSLPEAGEGGTSAAASPAGSLILTAAGRAGCLRRRPRPVSGRGPATVSSHSLSRRPIPLRRNHPTATTRPRSGTVSSASSTHET

SEQ ID NO: 56941 - protein, 338 aa, Zea mays
  Clone ID: LIB3245-071-A9_FLI.pep
PRARIRVVVSSFFVKVLQLPWRWGMKYFWDTLLDADLESDALGWQYISGSLPDGRELDRIDNPQFEGYKFDPHGEYVRRWLPELARLPTEWIHHPWDAPESVLQAAGVELGSNYPRPIVELDAANSRLQDALSEMWELEAASRAAMENGMEEGLGDSTDERPIDFPQELRMEVDRQPVQPAIHAQGVTGRRREDQMVPSMTSSFIRAETELTADFGHTSEDSRPEVPSNIHHLQARPEREETVDGGTGNAVRVHGNHHQQNLQNNIHRVLGIAPSISEASSSWTGRDGGVVPVWSPPAASGNSDPYAADEADISSRGYLDRHPQSHTMMNWSQLSQSL

SEQ ID NO: 56942 - protein, 188 aa, Zea mays
  Clone ID: UC-ZMFLMO17064G12_FLI.pep
AYQGFASGDPERDAKAIRIFLEDGHQIGCAQSYAKNMGLYGQRAGCLSILCEDEMQAVAVKSQLQQIARPMYSNPPVHGALVVSIILSDPELKSLWLKEVKGMADRIIGMRKALKENLEKLGSPLSWDHITNQIGMFCYSGMTPEQVDRLTNEYHIYMTRNGRISMAGVTTGNVGYLANAIHEVTKPN

SEQ ID NO: 56943 - protein, 338 aa, Zea mays; identical to SEQ ID NO: 56941
  Clone ID: LIB3245-499-H2_FLI.pep

SEQ ID NO: 56944 - protein, 278 aa, Zea mays
  Clone ID: UC-ZMFLMO17070C12_FLI.pep
HSSSVPHFHPRKEPWQLLLCMWESFRSRRSRPLLPLLVLRLVGRVLEHDDEDADEDGHEVGEEGEGVLDVVHVAAVRPLDDLLRVVHHVAQEDEQPEVDLEHEAGCGVAEDGGGELQPEQDGEPRREQPAQVEVLPAPGHHGRAGEARERDGSPHERRHQDAWVKFHGELDEGSDRSAFQEGSRHQQPIPLPLLVDGHREEPGDAADATEHCQRPADVPDHVQVSAHRRRGQRRAQGEVDELEVGLDGRGDLAEVLERVVAPSAGAVAVGRRRGGGRE

SEQ ID NO: 56945 - protein, 162 aa, Glycine max
  Clone ID: JC-GMLE01810013F09_FLI.pep
FLEAEGIMDYSLLVGLHFRDDNTYEKMGLSPFLLRTGKWDSYQSEKFMRGYRFLEAELQDRDRVKSGRKSLIRLGANMPARAERMARRSDFDQYTPCCSGETYDVVIYCGIIDILQDYDISKKLEHAYKSLQVDPSSISAVDPKLYSKRFRDFVGRIFIEDW

SEQ ID NO: 56946 - protein, 404 aa, Zea mays
  Clone ID: UC-ZMFLMO17079A04_FLI.pep
FSDASVQSDIKHWPFKVIPGPDDKPMIVVQYRGVEQQFAAEEISSMVLVKMREIAEAYLGTTVKDAVVTVPACSTDLQRQATWNAGVLANLNVIRIIPEPTAAALAYGLNRKAAQIMGEYDVLVFDLGGGTFDVSVLAIEQGIFEVRATAGAAHLGGEDFDNRMVNHFVEEFKRKKKKDISGNPRALRRLRTACERAKRTLSSYLEASIEIDCLYEDIDFYSAITRARFEELNMDLFRKCMAIVEDCLSDASYVRSIHDVVLVGGSSRIPKIQQLLQELFDGKELCNSINPDEAVAYGATMQAAILSREGGYEIQNYLLLDATPLSLGLETDGGLMTFFSLFAAACCGCNPAAAAASTVFFSLWIAAAAVQTAATVSACSQPNTPLDDSKEYHHSNQKGEGLID

SEQ ID NO: 56947 - protein, 320 aa, Zea mays
  Clone ID: UC-ZMFLMO17084B02_FLI.pep
LQPHGAHLGLELLPHLAPPHLALHLQLLLHALQPPRRLPPVRRPRAPPLLQLAAALGELRQRLPVHDRHARGRGAAVLRRAREPVRRLVGRGAIRHPWRGRGRARRHRGGREAERHGRRRRSGRRVRDGGGGGGGRPGVGRQPGRQHGRGHEQRRRRSGSLLWPLSDELLREVLEQPLVPAPLVGARLRRRAAAVPQLPLLLLLEHLPPLAEALGRAPGHLGGDLLPLVAVLGLQADHQALLLLGERALLDPGAEVVLPALQARLGVAVEGHVHALRHQVPLAGAVLPDVGAQDGVFLRPPALSLLHLQRPSPIPHHHTS

SEQ ID NO: 56948 - protein, 189 aa, Zea mays; identical to SEQ ID NO: 42264
  Clone ID: UC-ZMFLB73178A01_FLI.pep

SEQ ID NO: 56949 - protein, 324 aa, Zea mays
  Clone ID: UC-ZMFLMO17065A11_FLI.pep
GTSSFPVAAVHRIGILDIRIFNTDRHAGNVLVRKLNGGTGRFGCQTELFPIDHGMCLPENLEDPYFEWIHWAQASIPFSEEELEYIRNLDPRKDVQMLRRELPMIREACLHVLALCTIFLKEAAAFGLCLAEIGEMMTREFRGMEEEPSQLEVMCMEARKRVAEWEPFSATAEHGEDTDFQFSVDMLGEYSDVVRSPRFNGSGSKVSSFRSPLSKLVESVDEGSDGHEDQNESDRVLYAGWNTSSVPSKAMGHSGNASKSAMNRSADEQLPSSMCFVRLSDMSADEWDVFLEKFQELLKEALHESARAAAGQRMKQRLGTSCKF

SEQ ID NO: 56950 - protein, 266 aa, Zea mays
  Clone ID: LIB3597-039-B11_FLI.pep
SSSERTYVFPQLASYLPWWWRLIYRLNMAPQSLDLGLSLGLGVAAFQPSFCHPAGNDAAEREASPTADERERRCSPAGSPTSSGSGKRVAAERSAGSGSGDEDDDGGARKKLRLSKDQAAVLEECFKTHHTLTPKQKAALASRLGLRARQVEVWFQNRRARTKLKQTEVDCEYLRRWCEQLAEENRRLGKEVAELRALSAAPAPAAPLTALTMCLSCRRVSSSSCSSSPPNTHAHAAAAGTGRSVAAAAATTLPAHRQFLCGFRDG

SEQ ID NO: 56951 - protein, 515 aa, Zea mays
  Clone ID: UC-ZMFLMO17079A05_FLI.pep
HLAATKLRHLVLFPPKTPVPGRLDLLIRCLCPRIGLWEAGSVSDSLEWWAYAGISFFLVLFAGIMSGLTLGLMSLGLVELEILQRSGTDAEKAQAAAILPVVQKQHQLLVTLLLCNAAAMEALPIFLDRMFHPVVAVVLSVTFVLAFGEVIPQAICTRYGLAVGANFVWLVRILMVICYPISYPIGKVLDCALGHNESALFRRAQLKALVSIHGKEAGKGGELTHDETTIISGALDLTEKTAAEAMTPIESTFSLDVDSKLDWEAIGKILARGHSRVPVYSRNPKNIIGLLLVKSLLTVRAETETPVSAVSIRRIPRVPSDMPLYDILNEFQKGSSHMAAVVKAKPKTEPPPDRTEPNREAVGPAQLTVTLLSNAEESADNVVVDIERPHNRQINGIPASNAVPRSSEDIEDGEVVGIITLEDVFEELLQEEIVDETDEYVDVHKRIRVAAAAAASSVARAPSVRRLTGQKAANLQGAQNRQGQQPPGILKKPTEGDSNSSKQVNLVEPLLEKRR

SEQ ID NO: 56952 - protein, 266 aa, Zea mays; identical to SEQ ID NO: 56950
  Clone ID: LIB3597-055-A11_FLI.pep

SEQ ID NO: 56953 - protein, 216 aa, Zea mays; identical to SEQ ID NO: 46506
  Clone ID: UC-ZMFLMO17084D08_FLI.pep

SEQ ID NO: 56954 - protein, 567 aa, Zea mays
  Clone ID: UC-ZMFLMO17089A12_FLI.pep
ARVGKKAGGKSRARAEEKRAEKKSAQKKLARGRIAWRVQRRKKRAEKSAWRAQRRKKRAEKSAAENRRAEKKSAQRRKGRAQRRKGRAPEKKIDPCLLISCTRDFLLSIRGLGLKSVECVRLLTLHHMAFPVDTNVGRICVRLGWVPLQPLPESLQLHLLEMYPMLEHIQKYLWPRLCKLDQRTLYELHYQMITFGKVFCTKSKPNCNSCPLRAECKHFASAFASARLALPAPEEKRLATSEDPNVVEFCHQTYINSGAVGELEWSANYPKHAVCGNLQPFIEEPLSPEPEPENVEAKDGAIEDFFNEDPDEIPTINLNIEEFTQNLKNYMQANHVEIEYADMSKALVAITPEAASIPTPKLKNVSRLRTEHQVYELPDSHPLLEGFEQREPDDPCPYLLSIWTPGETAQSTNAPKTFCDSGETGQLCGSLTCFSCNSLREMQAQKVRGTLLIPCRTAMRGSFPLNGTYFQVNEVFADHCSSQNPIDVPRSWIWDLPRRTVYFGTSVPTIFRGLTTEEIQQCFWRGFVCVRGFDRTVRAPRPLYARLHFPASKVVRGKKPGAASVEE

SEQ ID NO: 56955 - protein, 107 aa, Zea mays; identical to SEQ ID NO: 53360
  Clone ID: LIB3245-483-D5_FLI.pep

SEQ ID NO: 56956 - protein, 602 aa, Zea mays
  Clone ID: LIB3068-051-B10_FLI.pep
KTARLLLLLRRAGIMCGILAVLGCSDWSQAKRARILACSRRLKHRGPDWSGLYQHEGNFLAQQRLAVVSPLSGDQPLFNEDRTVVVVANGEIYNHKNVRKQFTGTHNFSTGSDCEVIMPLYEKYGENFVDMLDGVFAFVLYDTRDRTYVAARDAIGVNPLYIGWGSDGSVWIASEMKALNEDCVRFEIFPPGHLYSSAGGGFRRWYTPHWFQEQVPRTPYQPLVLREAFEKAVIKRLMTDVPFGVLLSGGLDSSLVASVTKRHLVETEAAEKFGTELHSFVVGLEGSPDLKAAREVADYLGTIHHEFHFTVQDGIDAIEEVIYHDETYDVTTIRASTPMFLMARKIKSLGVKMVLSGEGSDELLGGYLYFHFAPNKEEFHRETCRKVKALHQYDCLRANKATSAWGLEVRVPFLDKEFINVAMGMDPEWKMYDKNLGRIEKWVMRKAFDDDEHPYLPKHILYRQKEQFSDGVGYNWIDGLKSFTEQQVTDEMMNNAAQMFPYNTPVNKEAYYYRMIFERLFPQDSARETVPWGPSIACSTPAAIEWVEQWKASNDPSGRFISSHDSAATDHTGGKPAVANGGGHGAANGTVNGKDVAVAIAV

SEQ ID NO: 56957 - protein, 260 aa, Zea mays
  Clone ID: UC-ZMFLMO17070H08_FLI.pep
LSTADHQKLLTEKKAALGRRFLRLEWLHHLPGEVRVVPSKVAIGRRLEVAPVAAFLEVKVDDDHARPEIEVLLDNLEDLLVGDRAGAVRVDEHGERLGHADGVRHLDDGAASKAAGDDALGSLPRDIGSAAVNLGWVLAGESATTMGSPATVGVNDDLAASETSIAVRSTNDKAAGWVKVEDGLLVKVLLRDDRLDDMLLQVSSDLIIGHCLVVLGGNEDGVDTDGDHGTTLIAVLDCHLGLPIRPEPGAGSVLADLSET

SEQ ID NO: 56958 - protein, 197 aa, Zea mays
  Clone ID: LIB3245-487-D2_FLI.pep
SIDKARLNNHLREFGELLGERRSMRFLDAAKHEPDAALGRGRFEVDHRRDDVDVVVEREDVPRFAEAVVHLVEPDAAPVRHRHRAVVQRHVVVVVLGAAAHPVREPRGERLLGLPHHADHLRKRRLTDRLAGPGDAHGVHAIAVVAVHRRQHAVEEVPRAGGEAEPDLGVVGERHRQRAALEHHRRDSVEGGAGLPR

SEQ ID NO: 56959 - protein, 312 aa, Allium porrum
  Clone ID: LIB3805-020-H12_FLI.pep
LRKMLNLPLNSSTSISASSVAKYQYIRTHEHSVNPCPNLSFSRSIVQVRIANVAKRAALTPKRFVRTTINEAKAKSDITVKEKSVSVVLLAGGKGKRMGVNMPKQYLPLIGQPIALYSFFTFCKMKEVKEIVVVCDPSYKDVFEDASEGISVELKFGKPGKERQDSVFNGIQEIDGCSELVCIHDSARPLVSASDIEKVFKDAWLYGAAVLGVPAKATIKEANSESFVVKTLDRKTLWEMQTPQVMKPDLLRKGFEFVNRNKLEVTDDVSIVEHLKHPVYITEGSYTNIKVTTPDDLLLAERILNMEAEASS

SEQ ID NO: 56960 - protein, 289 aa, Zea mays
  Clone ID: UC-ZMFLMO17089E06_FLI.pep
SMPLAAVKYSRGTFIFPGAQPAPHRSFSEEVAALNRYFGGLKSGGNAYVIGDPARPGQKWHVFYATEYPEQPMVNLEMCMTGLDKKKASVFFKTNADGNTACAKEMTKLSGISEIIPEMEICDFDFEPCGYSMNAIHGSAFSTIHVTPEDGFSYASYEVMGLDATALSYGDLVKRVLRCFGPSEFSVAVTIFGGRGHAGTWGKALGAEVYDCNNMVEQELPGGGLLVYQSFCAAEDAVATSPKSVFHCFDGENVESAPPPMKKDYKLANLLCWEEEADAMEEKAGVLDE

SEQ ID NO: 56961 - protein, 312 aa, Allium porrum; identical to SEQ ID NO: 56959
  Clone ID: LIB3805-003-F10_FLI.pep

SEQ ID NO: 56962 - protein, 161 aa, Zea mays
  Clone ID: UC-ZMFLMO17071A05_FLI.pep
KCLSYSKPCNLVYVCDTQVAFRTKVFHPNINSNGSICLDILKDQWSPALTISKVLLSICSLLTDPNPDDPLVPEIAHMYKTDRHKYENTARTWTQSTVPRVVLNAECCCIVSLGSCNSQCQKKLVLGTILRRMALQASRCLRPSSLHQSSCWKKHNVLSLE

SEQ ID NO: 56963 - protein, 329 aa, Triticum aestivum
  Clone ID: LIB3853-020-A6_FLI.pep
KMAASAKMMTKSSAEPGKSVTLVFEQGRLAVEEKEIKVGHNATPPVPVLIVAPKDAGTYPVAMLLHGFCLENHHYKHLLRHIASHGFIMVAPKIHQTIMHTGQHDINEAAKVADWLPDGLPSVLPKGVKPELLKLAVAGHSRGGHTAFSLALGHAKTRLRFSAFIGIDPVAGQGKDSHLEPTILIDNPSYFDMAARPVLVIGTGLGEVGKTIHNIPILPFSHWPPGAPKGVNHVQFYGKCRPPCYYFVTKDYGHVDMLDDDAIGLHNLFCKRGDGCKDKMRRCVAGIMVAFLNAALGEKHDGDLEAILTDPAVAPIMLDPVKHHPTSPK

SEQ ID NO: 56964 - protein, 187 aa, Zea mays
  Clone ID: UC-ZMFLMO17066A07_FLI.pep
TSERGTRGGRRERRRLSPLGVPVPQPLVCCLPACKKEFVMASKRILKELKDLQKDPPTSCSAGPAGEDMFHWQATIMGPPDSPYAGGVFLVNIHFPPDYPFKPPKVSFKTKVFHPNINSNGSICLDILKEQWSPALTISKVLLSICSLLTDPNPDDPLVPEIAHMYKTDRPKYESTARSWTQKYAMG

SEQ ID NO: 56965 - protein, 329 aa, Triticum aestivum; identical to SEQ ID NO: 56963
  Clone ID: LIB3853-020-C8_FLI.pep

SEQ ID NO: 56966 - protein, 141 aa, Zea mays
  Clone ID: UC-ZMFLMO17071C03_FLI.pep
NQRNSVIIITPKTLSARLPPPFSALRAFVSCTSFPSAHARARRGSFRRGSEPNHLGRAHHRVLPGDGVPGGALVVVAAAVPVRVPVRAAEELAAAAPEPREPHALPAAGAPARGRPRRGFRSLARGGGHGRRSGQRIGRPA

SEQ ID NO: 56967 - protein, 263 aa, Zea mays
  Clone ID: UC-ZMFLMO17073A06_FLI.pep
KAYVSVRPFFDAHDAACSCLKELDALPGPGMGPTPNFIFLQYLLTLQSIHPSIHPSVRIGRRERVPGAGGAAGRVRVARVGHQRQPAAADGQRRAAHADLRHQGPDAEGDGHPVGRAHHRLLALQLLQRPAVGVGHDSGRAGPDHGPGVRGAAGAAVPAGRRPARAHGLRLPQRLRRGLLQGRHVQPRPAVLGPGAAQRQEHRRAGRHLRQRPGHLPGRLRRRHGQDGLRRRAHRHQRQGQGQLQSRLIHHHHHSCGVVDSLY

SEQ ID NO: 56968 - protein, 249 aa, Zea mays; identical to SEQ ID NO: 54913
  Clone ID: 700350443_FLI.pep

SEQ ID NO: 56969 - protein, 460 aa, Zea mays
  Clone ID: UC-ZMFLMO17076F11_FLI.pep
GLSCLHICILHPRFTSPPLPSKNKLSGTLETKRDMGLRGGALALLLLLFVHGGQRAAEAGGDAFVRVQGTRFVQDGKPFFANGFNAYWLMTFGADPARRGKVTSALSQAAGAGLSVARTWAFSDGGGGGGSALQYSPGRYNENTFQGLDFVLSEARKHGIKMILSLVNNYDSFGGRKQYVQWARERGQTIGSDDEFFTNPFVKGIYKNHIKAVLTRVNTITGVAYKDDPTIMAWELMNEPRCQSDVSGHAIQSWITEMAAHVKSIDGNHLLEAGLEGFYGASSARRSANPSGYQVGTDFIANNRAPGIDFATVHSYPDQWLGGLDAQAQLRFLGAWLDAHIADARAVLRKPLLVAEFGESRHDPGYSGGQRDAVFGTVYARVYDSARAGGPAAGALFWQLLAEGMDSYGDGYEVVLPQAPSTAGVIATQSRRLQGLARAFVRARKAHQGKAGKGAKGGGN

SEQ ID NO: 56970 - protein, 466 aa, Glycine max; identical to SEQ ID NO: 53482
  Clone ID: LIB3242-535-G12_FLI.pep

SEQ ID NO: 56971 - protein, 494 aa, Zea mays
  Clone ID: UC-ZMFLMO17089H06_FLI.pep
ALENEMLLRIKQQGLDITPKILIVTRLLPDAAGTTCGQRLEKVIGTEHTDIIRVPFRNENGILRKWISRFDVWPYLETYTEDVSSEIMKEMQAKPDLIIGNYSDGNLVATLLAHKLGVTQCTIAHALEKTKYPNSDIYLDKFDSQYHFSCQFTADLIAMNHTDFIITSTFQEIAGSKDTVGQYESHIAFTLPGLYRVVHGIDVFDPKFNIVSPGADMSVYYPYTETDKRLTAFHPEIEELIYSDVENSEHKFVLKDKKKPIIFSMARLDRVKNMTGLVEMYGKNARLRELANLVIVAGDHGKESKDREEQAEFKKMYSLIDEYKLKGHIRWISAQMNRVRNGELYRYICDTKGAFVQPAFYEAFGLTVIESMTCGLPTIATCHGGPAEIIVDGVSGLHIDPYHSDKAADILVNFFDKCKADPSYWDKISQGGLQRIYEKYTWKLYSERLMTLTGVYGFWKYVSNLERRETRRYIEMFYALKYRSLASQVPLSFD

SEQ ID NO: 56972 - protein, 288 aa, Glycine max
  Clone ID: UC-GMROMINSOY049D08_FLI.pep
LINFAGKAIFGEKEWYFFSPRDRKYPNGSRPNRVAGSGYWKATGTDKIITTEGRKVGIKKALVFYVGKAPKGTKTNWIMHEYRLLDSSRKNTGTKLDDWVLCRIYKKNSSAQKTAQNGVVPSNEHTQYSNGSSSSSSSQLEDVLESLPSIDERCFAMPRVNTLQQQQHHEEKVNVQNLGAGGLMDWTNPSVLNSVADFASGNNQVVQDQTQGMVNYNCNDLYVPTLCHLDSSVPLKMEEEVQSGVRNQRVGNNNSWFLQNDFTQGFQNSVDTCGFKYPVQPVGFGFRN

SEQ ID NO: 56973 - protein, 334 aa, Zea mays
  Clone ID: UC-ZMFLMO17076G10_FLI.pep
KNAYFDEYDYRVKLLQKKQWKDEIRRLKEMKKRGKTDLDDYGYANIAGENDQDPPPENVSVPLPDMVLPPSFDCDNPTYRYRFLESTSTVLARPVLDAHGWDHDCGYDGVSVEETLAILSRFPANVAVQVTKDKKEFSIHLDSSIAAKHGENASSLAGFDIQTVGRQLAYILRGEAKIKNIKKNKTTGGFSVTFLGDIVATGLKVEDQLSLGKRLSLVASTGAMRAQGETAYGANLEARLKDKDYPIGQSLSTLGLSLMKWRRDLALGANLQSQFSIGRGSKMAVRLGLNNKLSGQITVRTSTSEQVQIALLGLVPVAASIYRSFRPSEPSFAY

SEQ ID NO: 56974 - protein, 602 aa, Zea mays; identical to SEQ ID NO: 56956
  Clone ID: JC-ZMXLIB3526P040AA08_FLI.pep

SEQ ID NO: 56975 - protein, 271 aa, Zea mays
  Clone ID: UC-ZMFLMO17085H03_FLI.pep
HLAIVMEYASGGELFERICKNVRFSEDEARYFFQQLISGVSYCHSMQVCHRDLKLENTLLDGSDAPRLKICDFGYSKSSVLHSQPKSTVGTPAYIAPEVLLKKEYDGKIADVWSCGVTLYVMVVGAYPFEDPEEPKNFRKTIQRILNVQYAIPDNVNISPECRHLISRIFVGDPATRITIPEIRNHSWFLKNLPADLMDDDSMSNQYEEPDQPMQTMDQIMQILTEATIPPACSRSINVLADGLDMDDDMDDLDSDSDLDVDSSGEIVYAM

SEQ ID NO: 56976 - protein, 527 aa, Zea mays
  Clone ID: UC-ZMFLMO17071E02_FLI.pep
RRWGVSELRAAATPAAAVDRRPRTEMDARWAVLLALLVASGGVRVCAAAGAKGANWLGGLSRASFPKGFVFGTATSAYQVEGAASTNGRGPSIWDSFAHVPGNIAGNQNGDVAVDQYHRYKEDVDLMKSLNFDAYRFSISWSRIFPDGEGKVNPEGVAYYNNLINYLLQQGMTPYINLYHYDLPLALEKKYGGWLSAKMADLFTDYADFCFKTYGDRVKHWFTFNEPRIVALLGYDTGSNPPQRCTRCAAGGNSATEPYIVAHNFLLAHATAVARYRTKYQAAQKGKVGIVLDFNWYEALTNSPDDQAAAQRARDFHIGWFVDPLINGHYPQIMQDLVKERLPRFTPEQAKLVKGSADYIGINEYTSSYMKGQKLVQLAPSSYSADWQVQYVFARNGKPIGPQANSKWLYIAPTGMYGCVNYLKEKYGNPTIYITENGMDQPGNLTRDQYLRDATRVRFYRSYIGQLKKAIDQGANVAGYFAWSLLDNFEWLAGYSSKFGIVYVDFNTLERHPKASAYWFRDMLQKH

SEQ ID NO: 56977 - protein, 325 aa, Zea mays; identical to SEQ ID NO: 53389
  Clone ID: 700243466_FLI.pep

SEQ ID NO: 56978 - protein, 267 aa, Zea mays
  Clone ID: UC-ZMFLMO17074B08_FLI.pep
RGRRGRVPAAEAIRDAQRRDGQPDARRLPHHQPRAAAGLVQPPAARRGGGRVEEGARPDVAARALPHLRRTLAPGPHRRPPLLHLPQGAPRGTYVYVSTCSAAPHAWKHVHDEDAADCDLISPQGPCCVHIIRSFKSSVTGTAQASYLASLLLVQVLEAFVHGDGDLFSRHPELEEATVWVYFHSNLARFNRVECWGPLRDAAAPAPAEDDSTAPAAASIAMEGQMPVGEWPHRCPQQCDCCFPPHSLIPWPNEQDMAAAAGQVRQQ

SEQ ID NO: 56979 - protein, 283 aa, Zea mays; identical to SEQ ID NO: 39568
  Clone ID: 700282376_FLI.pep

SEQ ID NO: 56980 - protein, 581 aa, Zea mays
  Clone ID: UC-ZMFLMO17077D12_FLI.pep
VEAMRGGAMKALRRSSTSSAPSPRVPSSPRSYSWIHSRSLLVTSPASPATSSVSESANLPAEGSDSAPASVVAASSSPSLAASSPNMECTFHSRGGIKSPWSRRKRKRALTCQHWNRLFSANGKLRDGGRKFLKKVRSGGIEPGIRAEVWPFLLGVYDLNSSEEDRNTIKIKKRKEYEKLRRQCHRILHCNRENGLNVINEFMNEDFSDGAEGSESPYSNGVSKRVCVMPKELKSLGSKAEESESSNWDAVKCIDEDITSVDPCLVESESSESESSYEEDPDRTPVSTNMEENCGPKPKFARTASSKSEIIISDRTPEDFATWQRIIRVDAIRANTEWVLFARNQAEVSKEKALQSAISVGLKDFDHLEPYMIYHAARLVALLEAYALYDPEIGYCQGMSDLLSPIIAVMEEDHEAFWCFVGFMRKARHNFRLDEVGIKRQLKTVSQIIKRKDSHLYRHLQKLQAEDCFFLYRMVVVLFRRELTFEQTMCLWEVMWADQAAIRAGIGRSTWARIRLHAPPTDDLLLYAIAACVLQKRKLIIEKYSSMDEILRECNSMAGQLDVWKLLDDAHHLVVDLHDKI

SEQ ID NO: 56981 - protein, 269 aa, Zea mays; identical to SEQ ID NO: 52166
  Clone ID: 700614347_FLI.pep

SEQ ID NO: 56982 - protein, 150 aa, Zea mays
  Clone ID: UC-ZMFLMO17099H02_FLI.pep
HISHPVGEIICDSLDKLAILGLPIWITELDVTAENEHIRADDLEVFLREAFAHPAVGGIILWGFWEMFMFREHAHLVDADGTINEAGRRYLALKQEWLTRMNGSVDHQGEFKFRGYHGSYTVEVNTPSGKVARSFVVDKDSPVQVIALNV

SEQ ID NO: 56983 - protein, 493 aa, Zea mays
  Clone ID: UC-ZMFLMO17104B04_FLI.pep
VVSSDHLRSCLIIANCAAREGSRMFAEADPYEDEHIMLELVCRHFISSLLDEGAFEVFLSALSWSGRALQRTPEISFQGAFVLVQRTYLSLPAVVQAHLLLLMSRCTSGQNLNSHMLAFGYAMNLYVRYLPALCVFNITRSAIPPLNYLGKKRSFSCIKDSTDQKLRSQIYRLLSFCELHCGDDLPVNESDIGCIIEMNQHMFLEKFRQECIVFVKGILSSILCCAKQKEVSEPDTEVSDEIICLAAATRVMGSSILYILHNKNYEANCKEYNVICEIISLLGQYGTDELHRYDLLAIIGESVESESASMLMLAHFASLSTCCLRRRLGFLWKGCIIMMMIATNLIAEEQSWGTFHPPMDVSKYSPVFCNTEKGIVEVSARTKEIILRYKSIHKSHNKGRRFYVDGISLGTPEECNSRVGKAAGQRFFECHPEYSRKSWADILDYVECEEGKDYSNALKQLQKFKKFKYRKWFNKRQSKRQCIMDTFGLKSRS

SEQ ID NO: 56984 - protein, 401 aa, Zea mays
  Clone ID: UC-ZMFLMO17109E06_FLI.pep
DLEAAPAAVARLFSIDWYMNRINGKQEVMIGYSDSGKDAGRLSAAWQMYKAQEELIKVAKHYGVKLTMFHGRGGTVGRGGGPTHLAILSQPPDTIHGSLRVTVQGEVIEHSFGEEHLCFRTLQRYTAATLEHGMHPPISPKPEWRALMDEMAVVATKEYRSIVFQEPRFVEYFRSATPETEYGRMNIGSRPSKRKPSGGIESLRAIPWIFAWTQTRFHLPVWLGFGAAIKHIMQKDIRNIHILKEMYNEWPFFRVTLDLLEMVFAKGDPGIAAVYDKLLVADDLQSFGEQLRKNYEETKELLLQVAGHKDVLEGDPYLKQRLRLRESYITTLNVCQAYTLKRIRDPSFQVSPQPPLSKEFTDESQPAELVQLNEQSEYAPGLEDTLILTMKGIAAGMQNTG

SEQ ID NO: 56985 - protein, 115 aa, Zea mays
  Clone ID: LIB3066-009-A4_FLI.pep
RKESAESTMVAYKAAQDIALAELAPTHPIRLGLALNFSVFYYEILNSPDKACNLAKQAFDEAISELDSLGEESYKDSTLIMQLLRDNLTLWTSDLTEDGADEGKDAPKGDAGEGQ

SEQ ID NO: 56986 - protein, 237 aa, Zea mays
  Clone ID: UC-ZMFLMO17115E07_FLI.pep
ATPESARENDAAGEHIRQTRRRDRRAAAAGVLGGWAARRRGVGLGRRVQRVDEHRRRRHHVDPGSDAGARGGPRGAPHRRRRRARRRLRGVHAAVHGAGVGRRRQGRGGHVVRGDHGRRLRPRRRRIAQRLRRPHHHGHARRLPHHHRGRDVWERRRRRRARRGAAGAVRRAVVDGEGVRAARHRRLRSAAARAPPPCREESEVMDGVLRNFGPSTLNVAYFQELMVVLCSQGEKHR

SEQ ID NO: 56987 - protein, 247 aa, Zea mays
  Clone ID: UC-ZMFLMO17118G04_FLI.pep
EVSNLVMGMEYSSPLQWRSRGKVVIAGSESIGLWDVNSLNPQPLLSVASGKKVYCLHVNNTDAEVGGGVRQRVSSSEVEGNDGVFSTQESVNVFDFRVPAGIGLKIARHGGTANSIFSRGDSVFIGSTEGRLQIKGGSRSRVQQYSLRKGKLVATYELPEFNAHIHHSAITQVWGDSNLVLAACGMGLFAFDTFKEDTQPTYSFDRGNTIAAREAIGPDDLYCPTFDYSSSRVLLVSRDRPAHWRYL

SEQ ID NO: 56988 - protein, 115 aa, Zea mays; identical to SEQ ID NO: 56985
  Clone ID: LIB3066-009-C10_FLI.pep

SEQ ID NO: 56989 - protein, 283 aa, Zea mays; identical to SEQ ID NO: 39568
  Clone ID: LIB3070-003-H1_FLI.pep

SEQ ID NO: 56990 - protein, 364 aa, Zea mays
  Clone ID: UC-ZMFLMO17104E05_FLI.pep
KCMLLKLNLLLQLHKCLAAFFLLFLVELHWLEREPLGANGVVHKVHDLQYRDDPVKVIQLAVIDVVRQPVGAAGPRAPAVHSVHQQRARVASQRDGQPEERRRRAAHALGRLVVHELEVPHGGERLGHAVQCVLRHQPVGRQRGRAGVRGAGRRRRVPAVPLHESSDQGGEHADGEADAHAVQEGDAAVQPREAARHADERAVVDEEGEEHGQQPEDGHGPRGDLERGEARREAAVHGARLLQREGVLRRRPRDHQDARRPDRTHADHRLELLHAVHGAQAPQVRDGGRRRLAGVRVRQRDQVAVGDDRRAVKEAELIRVHKLAVHGDGRVELVVLVQQRGVDVRRRQPPLLDSGDDNLREPRP

SEQ ID NO: 56991 - protein, 197 aa, Zea mays
  Clone ID: UC-ZMFLMO17095F09_FLI.pep
GVVSQECKTVVSQYGQQILDLLLAETQPAKICSQVGLCTFDGTHGVSAGIRSVVDDEAGKSNGGLKSDPMCNACEMAVVWMQNQLAQNKTQELILNYINQLCERLPSPMGESAVDCGSLASMPDIAFTIGGNKFKLKPEQYILKVGEGQAAQCISGFTAMDIPPPRGPLWILGDVFMGVYHTVFDYGKLRVGFAESA

SEQ ID NO: 56992 - protein, 152 aa, Zea mays
  Clone ID: UC-ZMFLMO17109H04_FLI.pep
QIFVKTLTGKTITLEVESSDTIDNVKAKIQDKEGIPPDQQRLIFAGKQLEDGRTLADYNIQKESTLHLVLRLRGGMQIFVKTLTGKTITLEVESSDTIDNVKAKIQDKEGIPPDQQRLIFAGKQLEDGRTLADYNIQKESTLHLVLRLRGGQ

SEQ ID NO: 56993 - protein, 298 aa, Zea mays
  Clone ID: UC-ZMFLMO17113D07_FLI.pep
FIQPARMASKAIKRRPISAETDKTGGKQMDTALSDPVTEPLLGNTPQEEKSKTYEPITRSGFWDGTAQECLRWTHLLAAFVAQSARNIVNVLSEFGYFLARLFGCSSASKSSQNGQTLPVNLSPLQEERLRLLRQRIDVPYDCSSVKHQDALKELWRLAYPNRQLPPLKSDLWKEMGWQNSDPSTDFRAAGFMSLENLIYFARNYPDSFHRLLHKADGKMRTKAGVHFVQLLDDDGVAFDNLFCVAFQVLDSQWLARRASYMEFNEVLKSTRGQLEQELTIGGISRIQDMPSFRMLRR

SEQ ID NO: 56994 - protein, 172 aa, Zea mays
  Clone ID: LIB3075-053-D11_FLI.pep
EFPPPPPLPQSLSSFPSPVAIALCSASVRQGLLLRRSSSPNPPGSPRCVPDAVEARRVRCMQGMATFELYRRSTIGTCLTETLDELVSSGAVSPELAIQVLVQFDKSMTEALEMQVKSKVSVKGHLHTYRFCDNVWTFILTDATFKSEEIQETLGRVKIVACDSKLLQPQHP

SEQ ID NO: 56995 - protein, 113 aa, Zea mays
  Clone ID: UC-ZMFLMO170112A10_FLI.pep
LRCFGPSEFSVAVTIFGGRGHAGTWGKALGAEVYDCNNMVEQELPGGGLLVYQSFCAAEDAVATSPKSVFHCFDGENVESAPPPMKKDYKLANLLCWEEEADAMEEKAGVLDE

SEQ ID NO: 56996 - protein, 402 aa, Zea mays
  Clone ID: UC-ZMFLMO17113G11_FLI.pep
PKIGSSPHTNRNNEVSSDLPLVGKHNKGCHCKKSGCLKKYCECFQANILCSENCKCMDCKNFEGSEERRNLFQGDHKNAINIQQATNAAVNGAIGTTGFPSPSTSRKRKHIDPSLDHSNKEHAAHRNCHIPQKNAVPDGSIPISQSAHPPTLGPFKVTYRPLLADIVQAEDVKELCKLLVVVSGEAAKTYADRKAKEERVGKKEDERAEQKEDDRAGSLALTNHDREGNNQDPDKKASIDDHSSRGTHTGKANQEESRPNCADDQKSNRPMSPGTLALMCDEQAFEKMCDEQDTVFTASQNAVPQQTVTVNQNQSALYAEQERIVLTEFRDCLRKLVTYGRMKEERYAMEIKSETSGHPGQVNGVSQVPYSKVEVPVVKTDPQSSSSHPVAGKPVTGLLDKN

SEQ ID NO: 56997 - protein, 499 aa, Zea mays
  Clone ID: LIB3060-021-D10_FLI.pep
RSESELASDREQADQILLHILSRARIWPPRPSAAAAATATTTMGLEMEAMAGSIGVSVPVLRFLLCFAATIPTGLLWRAVPGAMGRHLYAGLTGATLSYLSFGATSNLLFVVPMTLGYLAMLLFRRHAGLITFLGAFGFLIACHVYYMSGDAWKEGGIDATGALMVLTLKVISCSINYSDGILKEEGLRDAQKKNRLTKLPSLIEYFGYCLCCGSHFAGPVYEMKDYLEWTERKGIWASPTPSPLLPTLRALVQAGICMGLYLYLSPKFPLSRFSEPLYYEWGFWHRLFYQYMSGFTARWKYYFIWSISEASIIISGLGFTGWSESSPPKAKWDRAKNVDVLGVELAGSSVQLPLVWNIQVSTWLRYYVYERLIQKGKKPGFLQLLGTQTVSAIWHGLYPGYIIFFVQSALMINGSRVIYRWQQAASSSLLSGILAFLNFAYTLLVLNYSCIGFQVLSFKETLASYRSVYYVGTIVPIVCLLLGNVIKPARKAKARKTE

SEQ ID NO: 56998 - protein, 341 aa, Zea mays
  Clone ID: UC-ZMFLMO17116E07_FLI.pep
FSTLCHEALMHARTMGYKVVFTDHSLYGFADAGSIHMNKVLQFTLADIDQAICVSHTSKENTVLRSGISPEKVFMVPNAVDTAMFTPSPKRLNCDEIVIVVVSRLVYRKGADLLVEVIPEVCRLFPKVRFIVGGDGPKRVRLEEMREKFSLQDRVEMLGAVPHAQVRSVLISGHIFLNSSLTEAFCIAILEAASCGLLTVSTRVGGVPEVLPDDMIVLAEPAPGDMVRAVKKAIDMLPGIDPQIMHLRMKELYSWDDVAKRTEIVYDRAMESPTTNLLDRLPRYLTCGSWAGKLFCLVMIINYLLWRLLEFLQPAVGIEEVPDIGPLHAHLGSRNDEAQEK

SEQ ID NO: 56999 - protein, 284 aa, Zea mays
  Clone ID: 700075656_FLI.pep
RGGGGGLWQDLTSPMVPSEMGSVATAVSTPAADKLLHGPISGKKCKKPGPRKIHKAEREKLKRDHLNDLFVELGNMLEADRQNNGKACILTDTTRILRDLLVQVDSLRKEHSDLQNESHYVTMERDEMQDENGVLRKEISELQNELTMRVSGSPAGWGHGTARSDPPLPHSTAVFSSEQAMQPPTIASVVFPLQQPLAPSAMTKPPHAAPPLELKLFPEVASAEGHEPCEDHKAPNHVARPQARYPTQSASWPVNLFSGLPRMEDEQCSSSTSGSSKEDNTDIE

SEQ ID NO: 57000 - protein, 132 aa, Zea mays
  Clone ID: UC-ZMFLMO17122A11_FLI.pep
PSFWRITLEAMMFCCLPLVIKLHTPHIRSLKLVNEGVISNFLLIQNAAKDATDDFEDVGHSSTARAMMDEYLVGEIDAATIPTKVKYTPPKQPHYNQDKTQEFVIKILQFLVPLAILGLAVAVRMYTKSESA

SEQ ID NO: 57001 - protein, 173 aa, Zea mays; identical to SEQ ID NO: 44878
  Clone ID: 700098513_FLI.pep

SEQ ID NO: 57002 - protein, 255 aa, Zea mays
  Clone ID: UC-ZMFLMO17092C04_FLI.pep
AFFVSAATVIRDEVGLSLDKADKSVLGTAAKVVLTKESTTIVGDGSTQDEVTKRVAQIKNLIEAAEQEYEKEKLNERIAKLAGGVAVIQVGAQTETELKEKKLRVEDALNATKAAVEEGIVVGGGCTLLRLAAKVDAIKDTLENDEQKVGAEIVRRALSYPLKLIAKNAGVNGSVVTEKVLSNDNFKYGYNAATGQYEDLMAAGIIDPTKVVRCCLEHAASVAKTFLTSDVVVVDIKEPESAPLANPMDNSGYGY

SEQ ID NO: 57003 - protein, 344 aa, Zea mays
  Clone ID: UC-ZMFLMO17097C06_FLI.pep
EDIFGCAKHEQQPRNSSMGSGNLVTKKVVRRPSSIDQDIKFDQSWVEDVACPICLDSPHNAVLLRCASYEKGCRPFICDTDQTRSNCLERFRGAHGLPLPVPANARASSRTVAPLNSIHTITISSSNANNNRPACPLCRGDVMGWFVIGEARSHLNQKRRCCEESRCSYVGSFHELQRHTQQKHPDSRPSAIDPARRADWENLQRSSDVVDVLSTIHAQVPNGVVLGDYVIEYGDGDEAGDDDYEVYHGVRASWWTSCIFCKAFCRSSPPGGVRRRTRTRERRSSGGSGTRSSSNRSRSSQERFTLDEVDDGYVVAGAMARVAVSGTMAARYRDPTLGHRRSHS

SEQ ID NO: 57004 - protein, 260 aa, Zea mays
  Clone ID: 700220213_FLI.pep
PSPAPVREIPVVAASAQEQPLEAAKDDGGYEVVELDAAELLAEHVHFCEICGKGFRRDANLRMHMRAHGDRFKTLDALSRPGHGQPKPPVGSNVRFSCPFAGCNRNRTHRRFRPLKSAVCARNHFRRSHCPKLYACERCGGKKRFAVLADLRSHLRHCGEEAQWRCSCGTTFSRKDKLFGHLALFEGHTPAVTKPNKDVVTGPTESTIDAMEEGGFEEGIPDREEDEEGGYDPEFFKEWMDELRGGAGGSNWPGPAADGH

SEQ ID NO: 57005 - protein, 382 aa, Zea mays
  Clone ID: UC-ZMFLMO170112B05_FLI.pep
VGFVETLENDLLELRGKGIDAQIASGGGRMYVTMDRYENDWDVVKRGWDAQVLGEAPYKFKSALEAVKTLRAQPNANDQYLPPFVIVDDSGKAVGPVLDGDAVVTINFRADRMVMLAKALEYADFNNFDRVRVPKIRYAGMLQYDGELKLPSRYLVSPPEIDRTSGEYLVKNGIRTFACSETVKFGHVTFFWNGNRSGYFDETKEEYVEVPSDSGITFNVAPKMKALQIAEKARDALLSGKFDQVRVNLPNGDMVGHTGDIEATVVACKAADEAVKIILNAVEQVGGIYLVTADHGNAEDMVKRNKSGKPLLDKNGGIQILTSHTLQPVPVAIGGPGLHPGVKFRNDIQIPGLANVAATVMNLHGFEAPADYEQTLIEVADN

SEQ ID NO: 57006 - protein, 277 aa, Zea mays
  Clone ID: UC-ZMFLMO170114A12_FLI.pep
ISVERVHQYMDIPSEAAEIIEENRPAPDWPQVGRVDLKDLKIRYRQDAPLVLHGITCSFHGGDKIGIVGRTGSGKTTLIGALFRLVEPTGGKIIIDSIDITTIGLHDLRSRLGIIPQDPTLFQGTIRYNLDPLGQFSDQQIWEVLGKCQLLEAVQEKEQGLDSLVVEDGSNWSMGQRQLFCLGRALLRRCRILVLDEATASIDNATDAILQKTIRTEFRDCTVITVAHRIPTVMDCDMVLAMSDGKVVEYDKPTKLVETEGSLFRDLVKEYWSYTSN

SEQ ID NO: 57007 - protein, 377 aa, Zea mays
  Clone ID: 700441126_FLI.pep
KLMTMLDEVDRKYKHYYHQMQLVMSSFNMVAGAGAAKPYTAVALQTISRHFRCLKDAINDQISVIRKKLGEDDNTSGKEGKLTRLRYIDQQIRQQRAFQQYGMLQQNAWRPQRGLPENSVSILRAWLFEHFLHPYPKDSEKLMLSRQTGLTRSQISNWFINARVRLWKPMIEDMYKEEIGEAELDSNSSSDNGQRNKDKAPSPEENEDLQTPTSQACQTSQLGQSKAIVGGVMGFSGVLAGGFHTEANPDDSFMSLMLKAQRPGETEGTGLLHDAVAHHSDDGARFMAYHLAEFGRYGNSSNVSLTLGLQHAENSLAVPPNTQPGFPGVRDQDMYNATAPPLNVASTSSEYDSASQIDQQQQRQRFEPSPLMHDFVA

SEQ ID NO: 57008 - protein, 396 aa, Zea mays
  Clone ID: UC-ZMFLMO17116F06_FLI.pep
EREYQRYSEKEKERDRDHNRRREILKQEDESDDEDNRKRKRRSISSLEDRKRRRQREKEEDLADKIREEEEIAEARRLAVELQRQADEAAAAAAAAAEESASLMEIDGDDEKETDAQNKSAVVEADNISSFANGVGAGRLSKGNNGEETCMTPGQTADTKQNNNVPAKKLGFGLIGLGKRTSVPSVFAVEDDENNVDKSIRPLVPIDYSTEELQAVHANSSTGANVTAAAEFAKRISVSNSKEEKAEAEKDRNRRSSEARPNDERREKLHDREKDKPKSENKKILDAKQLIDMIPRTKEELFAYDINWAIYDKHELQERMRPWISKKIIEFLGEEESTLVDYIVSCTKDHVQAEKMLDLLQSIFDVEAEMFVLKMWRMLIFEIKKVESGLSGRAKS

SEQ ID NO: 57009 - protein, 230 aa, Glycine max
  Clone ID: 700977648_FLI.pep
VLSLFGSAKAKMEAEHHHQTSNAGGIIGGLYVKVMTDDQMELLRQQISVYATICQQLVEMHKAVTIQQDLAGLRLGNLYCDPLMACSGHKITARQRWTPTPLQLQVLERIFDEGNGTPSKQKIKDITIELGQHGQISETNVYNWFQNRRARSKRKQLTPALNVVEPEVETEVEVESPKEKKTRAEGFQVQPYEKSSPHRIKDMYIQSPDIGFDQLMSKIEVAGCYSSYFL

SEQ ID NO: 57010 - protein, 82 aa, Zea mays
  Clone ID: UC-ZMFLMO17122C08_FLI.pep
QICTVPFFSRAVAASVGAVQLCRSREGCEGLGGKGDAAPSERNRGALAPASFAHGIRVEEHHDDGYIVVEMPPHATVDLLEV

SEQ ID NO: 57011 - protein, 147 aa, Zea mays
  Clone ID: UC-ZMFLMO17097G01_FLI.pep
WSGMPNCFSKTKQARMMIMYLLENKLSKTYLLLHFSKTIDHTQEVQIRKQAVATPVRFSDGSRQGLTMEKSTVVVSVPVVVMAETAETDYSSSFSHLCRMQSPRKMLGRVINQGIRELLRSLQYIRSIVLRWQTLFNSGGQLLQLPV

SEQ ID NO: 57012 - protein, 354 aa, Homo sapiens
  Clone ID: LIB3547-090-D2_FLI.pep
RMAAILGDTIMVAKGLVKLTQAAVETHLQHLGIGGELIMAARALQSTAVEQIGMFLGKVQGQDKHEEYFAENFGGPEGEFHFSVPHAAGASTDFSSASAPDQSAPPSLGHAHSEGPAPAYVASGPFREAGFPGQASSPLGRANGRLFANPRDSFSAMGFQRRFFHQDQSPVGGLTAEDIEKARQAKARPENKQHKQTLSEHARERKVPVTRIGRLANFGGLAVGLGFGALAEVAKKSLRSEDPSGKKAVLGSSPFLSEANAERIVRTLCKVRGAALKLGQMLSIQDDAFINPHLAKIFERVRQSADFMPLKQMMKTLNNDLGPNWRDKLEYFEERPFAAASIGQVHLARMKGGR

SEQ ID NO: 57013 - protein, 683 aa, Zea mays
  Clone ID: UC-ZMFLMO17101B04_FLI.pep
QLGNTLGNFTSLITLDLSNNNIGGTIPDGLPLTMQRFFLSANQLSGSLPSTLSSLTLLTSMSLNSNHLTGAIPDVFSALTGLANLDFSDNNLTGPLPPSMGNLTSLTSLHIQNNQISGTLNVLQDLPFQDLNVENNLFSGPVPVKLLNLPNFKKDGNPFNTSIAPSAQPPIAPTPLPSIPPSSGHVPLKEPAHSSSVPGGSTSGSGKHTTLKLVGYILIGVVLAVVLVLIAMYCLSKYKEKRSRDDIYMKNKIGRVPQKLGEPKIKEPPLKLKNDAEKAPNVVSDGREEHKLKVPTSETSNVVYDPSPRDGQNLDSSPTAVPLAVTMNKKEHVIDMEKADNFVEDQLHPPQPMALRTEKVTVNPSVRTRRGRVPSVEKVESTTTVKSFSIASLQQYTNSFSEENIIRDSRFGKVYLAKLPDGELLEILKIDSSNSKVPVDAFLELVVRISELRHPNILGLVGYCAEFEQRLLVYEYCSKMTLHDELRHVDDSSKPLSWNARLQVASEAAKALQHLHDGCQPPVVHQNFEPSVVLLNSTLVVHISECGLASLASKSVSQLSGHTLFHYEAPEVHESGSVSDRSDVYSFGVVMLELLTGRKPYDSSYPRAEQHLVRWATSQLYDIDAITKMVDPSIRGQCSDKALSRFADIISRCIQHEPEFRPPMSEVVQDLTRMVSNVSRASM

SEQ ID NO: 57014 - protein, 333 aa, Glycine max
  Clone ID: 700945512_FLI.pep
DMGLSSKQVSSSGLDWKQTLLEAQNLELPKPNLMRKQQQQQQQQQQQTQPNSESLKCPRCDSTNTKFCYYNNYNKSQPRHFCRACKRHWTKGGTLRNVPVGGGRKNKRVKKSITPITTSSTTTTPITTATSTCTATVTTSIGNNMDAMLGCYSHMTIQTPLADDQKNMSSSLYQALIRPPPLLLQQNLLNTRELEGKDFGIGIGNNGIFPSSTLALPTHQSQSLLFPFSASSRSFDTNPCSVVSTSLRSSNVYNYGEDQFKAIEEPTINSTTATIVPSTGGTNNTHHPWEIAAATSGVGLGTSSNSNYWNWEDFDSLVSTDLKDPWDDSDIKP

SEQ ID NO: 57015 - protein, 548 aa, Zea mays
  Clone ID: UC-ZMFLMO17108C10_FLI.pep
RVQCAAAGLPTRHCIGPARPGLSPPVASGHESAAACGHGGRRRRRGRQRGVHQGRLRRPPRQPRPPLQARRLDRLHLHRRVRALRANGVLRRGGEPGGVPDGAAAPGHRPGRQQRHQLVGHRLPHAAPRGLRRRRLPWPLLDLRRRLCRLPNGNAAADAGGLRAGTEAASLRPRRRRHLPARVGAAAGRLLRGAVHHRAGTRWHEAQHLDHRRRPVRRIPPGRAAAEALLLQLVDVHRVHGHPLLHHRAGVPPGQRELVVGVRRAHAGARGLGRRLPRRHAAVPAQAAAARHHVRAVRGDGAGGHAVREAGRDAGPPRRARLVPGASRQPRRGGDADDARLRGGLRPGPRPRRPKAHREPARDHAAAAHRRRAGPPGGDDGGDGGGGEPEAELREQEPRRHGRRRAAADHLRPAPAVRADGRRRRVPGGGADRVLLRPGTREHEEPRHGHVPDGVRRRQHVEQRHPRRRGAGDGPARDAVGDRRPQRVAPRLVLRVPRRAGCGQPGRLRGAEPRVLVQGGGHRRHGESALGAGGGAVTSASTCTVFSS

SEQ ID NO: 57016 - protein, 107 aa, Glycine max
  Clone ID: 701044843_FLI.pep
PHISKLLPSSPLSAYKPPFTRFPFALYSFKVSSVYCCVSNLLLPCWLLTTICMEAPSSFFVGSVLDFRGMHFARTASPSCSTICNREPLFNSNNIFYVFNLKMLSTS

SEQ ID NO: 57017 - protein, 492 aa, Zea mays
  Clone ID: UC-ZMFLMO170112C05_FLI.pep
DYCRGIQSAVAEIIPGVRHRMCLFQIMRKAAERLGGLSEYRAINKAMHKAVYDSLTIDEFEEEWNTLITYSGLQSNDWLRSLYECRSSWVPVFIKDTFWAGMSTTQRNETITPFFDGYVDLKTTLKQFLVKYEMALQSKYEKEAQADFETFHKQRPPVSKFYMEEQLSKVYTHNMFKKFQDEIEAIMYCHVSLISVDGPVSTFNVKECIFFEDGKRTMSKIFAVTYKADEKNISCICGGFQFSGILCRHSLSMLKFQLVREIPQHYILDRWKKDFRQLHVMRRPPSDLVPNNRMDRYDYLSIRCLQLVDSAVLSDKYRLALRLVRETEKFLLNSNTHDDTQPRIKSRVPKVNKPNIVTGQTMVGTATGNGNDGLKGPEATAVTQVPQSQKGGAEKGIVPTGYIGVPANLQQFVGNQTAFRPSIVYMVPSGVDPHAFGNVMMPVMYQQMFQVPPKPNETVQDTSANGKSKRPRGQKLTETSQQANGTPASASG

SEQ ID NO: 57018 - protein, 562 aa, Zea mays
  Clone ID: UC-ZMFLMO17209H09_FLI.pep
ASFQKRKDYLDAVASDGCLTQSSQGLAAGEMIYSLRDYLKDSVSNNISNLNWSASKRRSGRRFRQGDTGTSTPTFSGSPGKGGFGHSTDTSEKKGTEETHSENTGDPLSIDGVKSDSPLPTAVTTNHSKHDSTNLGLSLSSPVKITQRPLRNCSIDSKSKESKTRDTTLHPLIFKEDGLADNTLLTYKLKNGEALKQGYKRGTCIICNCCNQEFSPSHFEEHAGMGRRRQPYHNIYTLEGLSLHKLALQLQDHLNPNGFDNASVSSVSDYHNLTSSGCGREPSTTSGPIVPLKRTLQERVVETESCYFCGYGHTTIGNINPDTIIFCNQCERPCHIKCYNNRVVKKKVSLEILKEYMCFRFLCCQECQSLRARLEEGLEKCVGITVLRRIRSNICWRLLSGMDASRDVKLYMPQVIDIFKDAFMDSTDEHSDIISDMVNGKNGDQEKDFRGMYCALLTASTHVVSAAILKVRIEQIAELVLIATRSECRKKGYFILLLKSIEANLRAWNVSLLTAPVDPEMTQIWSEKLGFTILSAEEKESMLESHPLVMFKNLVLVQKSLA

SEQ ID NO: 57019 - protein, 106 aa, Zea mays
  Clone ID: UC-ZMFLMO17122E07_FLI.pep
KAKPSCIAEHTQDSCPYPITVRPSVANSKGETKGYGLDTSLCHLSCAGGHTTPILKLPWSRFQFLTPHSSNSSFNFSVSAAASSSSSSMAKYGLCTSGRNLYPVKT

SEQ ID NO: 57020 - protein, 339 aa, Homo sapiens
  Clone ID: LIB4119-176-D12_FLI.pep
SDGARWTEVGVGGFKFATVYKARDKNTNQIVAIKKIKLGHRSEAKDGINRTALREIKLLQELSHPNIIGLLDAFGHKSNISLVFDFMETDLEVIIKDNSLVLTPSHIKAYMLMTLQGLEYLHQHWILHRDLKPNNLLLDENGVLKLADFGLAKSFGSPNRAYTHQVVTRWYRAPELLFGARMYGVGVDMWAVGCILAELLLRVPFLPGDSDLDQLTRIFETLGTPTEEQWPDMCSLPDYVTFKSFPGIPLHHIFSAAGDDLLDLIQGLFLFNPCARITATQALKMKYFSNRPGPTPGCQLPRPNCPVETLKEQSNPALAIKRKRTEALEQGGLPKKLIF

SEQ ID NO: 57021 - protein, 320 aa, Arabidopsis thaliana
  Clone ID: LIB22-061-E5_FLI.pep
QLRSSSYDLDVKKPQDVVLPGSLSLLGEAYDRCGEVCAEYAKTFYLGTLLMTPERRKAIWAIYVWCRRTDELVDGPNASHITPMALDRWEARLEDLFRGRPFDMLDAALADTVARYPVDIQPFRDMIEGMRMDLKKSRYQNFDDLYLYCYYVAGTVGLMSVPVMGIDPKSKATTESVYNAALALGIANQLTNILRDVGEDARRGRVYLPQDELAQAGLSDEDIFAGKVTDKWRNFMKMQLKRARMFFDEAEKGVTELSAASRWPVWASLLLYRRILDEIEANDYNNFTKRAYVGKVKKIAALPLAYAKSVLKTSSSRLSI

SEQ ID NO: 57022 - protein, 227 aa, Zea mays; identical to SEQ ID NO: 56779
  Clone ID: UC-ZMFLMO17108F12_FLI.pep

SEQ ID NO: 57023 - protein, 316 aa, Zea mays subsp. mexicana
  Clone ID: UC-ZMROTEOSINTE015B01_FLI.pep
KVKERSISSLVVNTPRVTPAALTGRRTRAVTRKAAALRGLGPIIVDPLKKDNDNPNKQTDNSSLLDSLNKIPQTRRQLLSNGDTTSHLSVKDKAGDNKDLDKSEFWKPLNCLVEAASKTKPLTSAPRPALKGDKPRKSPSSDSEHSSRTKTREPLQKSKAEVDKSDPGPIVMLRKRGRPGRKRKNPLPETNADSTATAIQARKALSPIWFSLIASFDQKGVPPLPQIPAHYLRIKDGSIPASSIQKYIVQKLSLLSESEVEISCCGQTVNPGQPVRNLVERWLRVGPARPLHTVIGSSGGDYVMVISYGRPKSASC

SEQ ID NO: 57024 - protein, 217 aa, Zea mays
  Clone ID: UC-ZMFLMO170112D06_FLI.pep
GPIDGQPNGSHKELAVTWVHKCFQGILTNETRCLRCETVTDRDETFFDLSLDIEQNSSLTSCLKNFSSTETLNAEDKFFCDKCCSLQEAQKRMKIKKPPNILVIHLKRFKYIEQLQRYKKLSYRVVFPLELKLLNTVDNSDLEYSLFAVVVHVGSGPNHGHYISLVKSHNHWLFFDDENVEMTDESMVQAFFGSPQEFSGNTDNGYILFYESLAERS

SEQ ID NO: 57025 - protein, 68 aa, Zea mays
  Clone ID: 700344463_FLI.pep
LKDGEQQAAAAGAAAARLPDGGCFCKRDLLKLFYRPELQQHLICLFGVLLVGRASSALLLLIIILCCT

SEQ ID NO: 57026 - protein, 120 aa, Zea mays
  Clone ID: UC-ZMFLMO17122H07_FLI.pep
EMRYTKQNTNYLTAFSYQDEHLQEFPKHPYLEFFARLEKTHLQQLLITAPNHVAPSCKLQSCSTRPCSHSSPCRIRSTWPHRIAELRPPKSRPRRGTMHPSLWRNPAAVPFLTPAADGLI

SEQ ID NO: 57027 - protein, 482 aa, Zea mays
  Clone ID: UC-ZMFLMO17092H12_FLI.pep
DSDKKQCTYERQYAEMSSSSGVLGEDIVSFGRESELKPQHAIFGCENSETGDLFSQHADGIMGLGRGQLSIMDQLVEKGVISDSFSLCYGGMDIGGGAMVLGGMLAPPDMIFSNSDPLRSPYYNIELKEIHVAGKALRVESRIFNSKHGTVLDSGTTYAYLPEQAFVAFKEAVTSKVHSLKKIRGPDPSYKDICFAGAGRNVSKLHEVFPDVDMVFGNGQKLSLTPENYLFRHSKVDGAYCLGVFQNGKDPTTLLGGIIVRNTLVTYDRHNEKIGFWKTNCSELWERLHIGDTPSPAPSSDTSSEHDMSPAPAPSNLPEFDVGLITVDMSINVTYPNLKPHLHELAELIAKELEIDSRQVRVMNITSQGNSTLIRWGIFPAESDNAMSNATAMGIIYRLTQHHVQLPENLGSYQLLEWNVQPLPRRSWFQEHVVSMLLGILLVILVTLSAFLVVLVWRKKFSGQAAYRPVDSVVPEQELQPL

SEQ ID NO: 57028 - protein, 423 aa, Zea mays
  Clone ID: LIB3356-022-C1_FLI.pep
ADTSATSTLESFPTMASQGSSVFAALEQAPEDPILGVTVAYNKDPSPMKVNLGVGAYRTEEGKPLVLNVVRRAEQMLINNPSRVKEYLPITGLAEFNKLSAKLIFGADSPAIQENRVATVQCLSGTGSLRVGGEFLARHYHERTIYIPQPTWGNHPKVFTLSGLNVRSYRYYDPATCSLHFEGLMEDLGSAPSGSIVLLHACAHNPTGVDPTIEQWEQIRQLMRSKSLLPFFDSAYQGFASGSLDKDAQSVRMFVADGGELLMAQSYAKNMGLYGERVGALSIVCRSADVAVRVESQLKLVIRPMYSNPPLHGASIVATILRDSEMFNEWTLELKAMADRIINMRQQLFNALKSRGTPGDWSHIIKQIGMFTFTGLNSEQVAFMRQEYHIYMTSDGRISMAGLSMRTVPHLADAIHAAVTQLK

SEQ ID NO: 57029 - protein, 735 aa, Zea mays
  Clone ID: UC-ZMFLMO17102G05_FLI.pep
LSLTSSQLFHYSDYDVEDTALPLQPSLNYTAPELVQSRDSKVGSACDMFSFGCLAYNLVARRPLLDCHNNVKMYMNALTYLTSEAFSNIPSDLVLDLQRMLSMDALSRPSAMAFTGSSFFRDDTRLRALRFLDHLLERDNMQKTEFLKALSDMWKDFDSRVLRYKVLPPLCAELRNMVMQPMILPMVLTIAESQDKGDFELATLPALVPVFASASGETLLLLVKHADLIINKATQEHLISHVLPMLVRAYDDNDPRLQEEVLRRTVPLSRQLDTKLVNKAVLPRVHGLALKTTVAAVRVNALRCLGDLVPSLDKEGIMGILETVRRCTAVDHTAPTLMCTLGVANAIYKQCGVEFAAEYVIPLIFPLLTAHQLNVQQFAKYMLFVKDITSKIEEKRGVTVTDNGNTEVKSSPSLANGIHSEPMSGQIPVAKSSPAWDEDWGPTKKSGVPSLSVDSSAQTKQPSVDPFDFGTQTKQSTTLPFDLSTQAKQPPSVSHVTAATIPPAQPQPSLQSLAASSGPKISGSCVPVDIEWPPRRSSSSNFNAPLSISKDNGSGRLSSDGVDDIDPFADWPPIPSNVNSISATEHWPSINQNISGFSSGNIVFGGSGNSVGQTKSNQMSWSNTSNLMGTNSTGSYLNQGSAALGFGNPNGGLSTGLSNPSSSSTGLSMMLPKSDSGSLSTSVNNAAHGLLRLAPPPSTSVGRGRGRNQGQSALSRASRPHANSASGQQPILDLL

SEQ ID NO: 57030 - protein, 202 aa, Zea mays
  Clone ID: LIB4073-022-E3_FLI.pep
ALEFKHPQTLSTTKAKHRTDAHHTSRANPVTEKLRPLATDPPCQLNVLGHDGHALGVDGAQVCVLKQTHQVCFRSLLQRKDRVALETQISLEILGNFPDKPLEWKLPYEQLSALLILADFTKSNSSRAVTVRLLYSSSCRCRLTGSLGGKLLPRSLPSSGLASSLLSTSHESQTMVYLERLPNPKSAESGLRHARLFSPTSD

SEQ ID NO: 57031 - protein, 210 aa, Zea mays
  Clone ID: UC-ZMFLMO17108G03_FLI.pep
ADHSSTSPLSGCPLLRVGACASACPHQPAARSHQTHTRTMASASKEEVIGKLNIRVVRGNNLAIADPLTHTSDPYVVLQYGAQKVKTSVQKKNPNPVWNEVLQLSVTNPTKPVHLEVFDEDKFTADDSMGVAEINITDIYDAAKLDLKHASDGTRIKTIYPVGVNYLGGESHVQWKDGKVVQDLILKLRKVESGLIVVQLEWVHVPGVKL

SEQ ID NO: 57032 - protein, 189 aa, Zea mays
  Clone ID: LIB3591-102-H3_FLI.pep
GAAAAAAEGDNLGKEAGEALGLLGCVNEVVAAVAATWGPMTDGARVETAPRLAQWRVDPLPCYTYRKSLPFLIGLWNWCISVERNNKQTCVKLFAENTSSLKNGSSAPIASFIAKLIVSLPPNQQTIVPPGIFDKQLKYDGFVWTIDSTVTGRFVIEIEFLDLKVADPSVSTVSLSCCVFFVNGWYNNN

SEQ ID NO: 57033 - protein, 305 aa, Zea mays
  Clone ID: UC-ZMFLMO170112E07_FLI.pep
DMAEDLQIPAGFDLKVYTKSDINGLLGASSINLSGHSCRYFGYLVSRKKYVISIDDNCLPAKDTAGSTVDVVAQHMANLKTPATPFFFNTLYDPYRKGADFVRGYPFSLREGVECMLSCGLWLHNADYDPMTHVVKRNQRNTTYVDAVMTVPLGAMLPVSGINVAFNRDVLGPAMFPGLRLRNEGKHRWDTLEDIWNGLCAKVVCDSLGYGVKTGLPYVMRSDAEAGKALESLKEWEGVKVMDDVLPFFQSLKLSRTAVTVDDCVKELAGIVREKLGPKNAIFTKAADAMVEWNNLWKVHGAQNA

SEQ ID NO: 57034 - protein, 457 aa, Arabidopsis thaliana
  Clone ID: LIB24-119-C8_FLI.pep
KKSWEFDSSNCRRNRVNRRKLKKLRFFSHALKNLSMSSSVAVLWVATSSLNPDPMNNCGLVRVLESSRLFSPCQNQRLNKGKKKQIPTWSSSFVRNRSRRIGVVSSSLVASPSGEIALSSEEKVYNVVLKQAALVNKQLRSSSYDLDVKKPQDVVLPGSLSLLGEAYDRCGEVCAEYAKTFYLGTLLMTPERRKAIWAIYVWCRRTDELVDGPNASHITPMALDRWEARLEDLFRGRPFDMLDAALADTVARYPVDIQPFRDMIEGMRMDLKKSRYQNFDDLYLYCYYVAGTVGLMSVPVMGIDPKSKATTESVYNAALALGIANQLTNILRDVGEDARRGRVYLPQDELAQAGLSDEDIFAGKVTDKWRNFMKMQLKRARMFFDEAEKGVTELSAASRWPVWASLLLYRRILDEIEANDYNNFTKRAYVGKVKKIAALPLAYAKSVLKTSSSRLSI

SEQ ID NO: 57035 - protein, 477 aa, Zea mays
  Clone ID: UC-ZMFLMO17118B06_FLI.pep
RPPGARLKAMATERRRASVVVLGDIGRSPRMQYHSLSLANQASMEVDIVANGGSDPHLSLRENPSIHIHEMKTVQLTGISKISGALSLLLKAAVQFILLVWFLCFKIPRPDVFFVQNPPSVPTLAAVKLASWLRGAKFIVDWHNFGYTLLGLSHGRSHIIVKIYFWFEKYFGQMADGAFCVTKAMQHELAQNWGIRATVLYDQSPDFFHPASLMEKHGLFSRLGNSMCSAMGNADCISVEEVGEDMNTTAFTSKIDGQVFLKPNRPALVVSSTSWTPDEDFSILLEAALMYDRRVAAALGEDDSMDEGQLWIDIKNGKQFVYPRLLFIITGKGPDRKKYEDQIKRLKLRRVALRTMWLASEDYPLLLGSADLGVSLHTSSSGLDLPMKVVDMFGCGLPVCAASFSCIEELVKVNKNGLLFSTSSELADELMMLFKGFPEECNALKSLKEGAMKSASSSKWSTEWETNALPLVDQVIG

SEQ ID NO: 57036 - protein, 218 aa, Zea mays
  Clone ID: LIB3069-011-F1_FLI.pep
YDRETIHMHASHDGAGVDVLVAEHGHVLDLRSAGVCHGLRRAADEARGSLLVVGAADVGVGGERVGHVGPHLGVLAGGLDALQHLGGLHVPGHRALALLRVHRHARHAAHRLHRALHATLATFAVHLHLDVHRLQPPPMHQNSSGMHADAWEEIKYIMIKGKHYLQRSLLPELERLLRLRDAAHMRHVVQDAHGATASGVCCCCRRRRRLASSRPLLL

SEQ ID NO: 57037 - protein, 379 aa, Zea mays
  Clone ID: UC-ZMFLMO17123F01_FLI.pep
CPRSLSNRSPRRLTRLLLRSFPAIPTMEGDGTNLDAAIESLLNVEKQMRLAGDVAGTRKAVIDIVELCYKAGAWKTLNDQIVLLSKRRGQLKQAITAMVQKAMEYIDLTPGIDTSIELIKTLSSVSAGKIYVEIERARLIKRLAKIKEEQGQIYEAADLMQEVAVETFGSMAKTEKIAFILEQVRLCLDRQDFVRAQILSRKISTRVFDADPSKEKKKPKEGDSIVQDAPADIPSLLELKRVYYELMIRYYSHNNDYLEICRCYKAIYDIPAIKEDPTKWIPILRKICWYLVLAPHDPMQSSLLNATLEDKNLSEIPNFRLLLKQLVTMEVIQWTSLWEFFKEEYEKEKDLLGGALGAKASEDLRLRIIEHVLVTLCLV

SEQ ID NO: 57038 - protein, 154 aa, Zea mays
  Clone ID: 700164276_FLI.pep
RKEGLRHSQSETDTKRAKQQYAQRSRVRKLQYIAELERRVQSLQTEGIEVTAEMDFLGQQNIMLDLENKALKQRLESLSQEHLIKRYQQEMFEREIGRLRTLFQQQQQQQHVPQQQAPTHSRSNSRDLDSQFANLSLKHSDPSSGRDAISGLRI

SEQ ID NO: 57039 - protein, 342 aa, Zea mays
  Clone ID: UC-ZMFLMO17092B06_FLI.pep
REPALPAHEHMASTTLLAVLLLVAASAAPARSCSPRDLQALLSVKQALGNPSTLSTWTPASPDCCSWDHLRCNDAGRVNNVFIDGADDVRGQIPSAVGGLTELMSLTLFRLAGLTGPIPACLAALSNLQFLTVSHTNVSGAIPESLARLRGLDSVDLSSNQLTGGIPASFADLPSLRSLDLGHNQLTGSIPAGLVQGQFRSLVLSYNQLTGPIPRDDARDEINTVDLSHNKLTGDPSHLFAAGRPIGKVDLSWNYLDFDLSQLVFPPEMTYLDLSHNLIRGTVPLSLERLSTLQKLDLSYNRLCGPLPKGHGVIKHGCKPYAHNQCRKGTPLAGCQDLEWSE

SEQ ID NO: 57040 - protein, 496 aa, Zea mays
  Clone ID: 700552304_FLI.pep
LKDVEKSFTGVTESLSSLRSKFESLPSGVLIIGSHTQMDSRKEKAHPGGFLFTKFASSSQTLFDLFPDSFGSRWLHERSKESPKAMKHLNKLFPNKILIQLPQDEALLTDWKQQLDRDVETLKAKSNIGSIRTFLSRNGIECNDIEELFIKDQSLSNENVDKIVGYAVSYHLKHNKIETSNSKDNKLVLTSESLKHGLNMLQSMQSDNKSSKKSLKDVVTENEFEKRLLVDVIPPNDIGVTFDDIGALENVKDTLKELVMLPLQRPELFCKGQLTKPCKGILLFGPPGTGKTMLAKAVATEAGANFINISMSSITSKWFGEGEKYVKAVFSLASKIAPSVIFIDEVDSMLGRRENPGEHEAMRKMKNEFMVNWDGLRTKDKERVLVLGATNRPFDLDEAVIRRFPRRLMVNLPDASNREKILKVILAKEELGSDVDLDSLANMTDGYSGSDLKNLCVTAAHYPIREILEKEKKVHNVVSAFDYPSQQGAVICFSVK

SEQ ID NO: 57041 - protein, 203 aa, Zea mays
  Clone ID: UC-ZMFLMO17099D09_FLI.pep
IICLVLVTNHLFLASQGIFTGTCGTALDHGVTAVGYGTENGKDYWIVKNSWGSSWGESGYVRMERNIKASSGKCGIAVEPSYPLKKGANPPNPGPTPPSPTPPPTVCDNYYSCPDSTTCCCIYEYGKYCFAWGCCPLEGATCCDDHYSCCPHDYPVCNVKQGTCLMGKDSPLSLSVKATKRTLAKPHWAFSGNTAADGMKSSA

SEQ ID NO: 57042 - protein, 451 aa, Zea mays
  Clone ID: 700336611_FLI.pep
PIGYSGREKVSTHLNPPAAMALRRITPRRRPVLPVPRAFSSSPPFPPPPPPANDPDPDAAQPPSSSPPPNSGAPRNPESSFFQDIKDRLRSSPTSPSPRRIPTTLPRPDPARGAPSSGPPIGDIRRMLQNFRLTGSTSDAPSTSAPGSNPSFMDLLKNHLDQGANARQAELGFNAIGESLKRPRPPKPFITPSSRNIFCRELERTSKALGARQEENGSAIELKGSYSYEELGKRLGELRPAGAGKDGKEWFSLKELQGRIAKLAEQESQLAGPFSEMRRGIRNLQKQGKPGRPVNIQALLNPVGQPTPDYMSGPPQVELLEKYFHPDHMSSEEKMKLELQRVRDEFKMSENDCGSARVQIAQLTLKIKHLSTVLHKKDKHSRKGLQEMVQRRKKYLKYLRRTDWDSYCLVLSKLGLRDVPEYKAPDYKSKATTKAKSKKKSKSKGKKKVKA

SEQ ID NO: 57043 - protein, 346 aa, Zea mays
  Clone ID: UC-ZMFLMO17108G10_FLI.pep
DEETEDLVEAVQKEIGRIEETQAWSSSHSWSTPVENMQIAEISAAGRVEIPTDGASEWEIDVKLLKFGNKVASGSYGDLYRGTYCSQDVAIKVLKPERINADMQREFAQEVYIMRKVRHKNVVQFIGASTKPPNLYIVTEFMSGGSVYDYLHKHKGVFKLPTLVGVAMDVSKGMSYLHQNNIIHRDLKTANLLMDENGTVKVADFGVARVKAQSGVMTAETGTYRWMAPEVIEHKPYDHKADVFSFGILMWELLTGKIPYEYLTPLQAAVGVVQKGLRPTIPKHTYAMLSELLQKCWQQDPAQRPDFSEILETLQRIAEEVGDEHEGKHKDRTLGGFFSALRGRSH

SEQ ID NO: 57044 - protein, 284 aa, Glycine max
  Clone ID: 700556809_FLI.pep
ASKTHTKGNTIYYTQTKPYILFYFLPLHHSPSFSSSSTLIMENIGEEYKHYWETNMFLQTQELDSWGLDEALSGYYDSSSPDGAASSAASKNIVSERNRRKKLNERLFALRSVVPNISKMDKASIIKDAIEYIQHLHEQEKIIQAEIMELESGMPRKSPSYGFEQEQLPVVLRSKKKRTEQLYDSVTSRNTPIEVLELRVTYMGEKTVVVSLTCSKRTDTMVKLCEVFESLKLKIITANITSFSGRLLKTVFIEANEEEKDHLQIKIQTAIKALNNDPLSPMSI

SEQ ID NO: 57045 - protein, 467 aa, Zea mays
  Clone ID: UC-ZMFLMO170112F04_FLI.pep
AAESMARSGREADPGEEERKLVLGKYELGRLLGQGTFAKVYYARDLSAGAGTGHSCSVAIKVIDKARLRRTEGMVEQLRREISIMRMVRHPNVVGIREVLASRSRVFVVMEYARGGELFAKVARGRLPEDHARRYFQQLVAAVGFCHRRGVAHRDLKPENLLLDEAGRLKVTDFGLAALPEQLRHDGLLHTQCGTPAYVAPEVLRKRGYDGARADLWSCGVVLYVLLCGFLPFQHDNYVKLYQKIFKADYQVPPWVSGDARRLIARLLVVDPAKRASIAEIMCTPWFRKGFVPPVLSPPVTPKKQQLDEGAALFDNDDDDDNSNHSGATSPRSCNAFQLISSMSSGFDLSGLFESEQKTATVFTARAPAATVVEKLESVARALGFEVTRGKGWKVRMEAKAEGTNGRLAATAEVLEVAVDVAVVEFVHDAGDALDFNKFCAVDVRPGLTEIVWAWQGDSPAAAVGTA

SEQ ID NO: 57046 - protein, 318 aa, Glycine max
  Clone ID: 700787578_FLI.pep
LDQTALERNKKGHLPLHLACKRGCVEMVKEFFEPGSGWPINPYVLLNQKGQNILHIAAKNGRDNVVEYLLGNCNTGDLHINQKDYDGNTPLHLASKNLFQQVISLITEDKRTDLNLTNEDGLTAGDISKTFEHPMLRGREILSMELSKGAGVPVNHMLHSQRQPQPEKDTSDFQRKSLSEKDTREAFLIVAALLMTVSFAAGFTVPGGLYSSDDPNPKIRGTAVFAGDPGFWIFIIFNTITMYSSAMACGLLSVGIVNQSKLTRNIHFPHLFLTCAFLAASVAFLSAVALVVASNRLLAGATILIGAFHYILYIFLIK

SEQ ID NO: 57047 - protein, 327 aa, Zea mays
  Clone ID: UC-ZMFLMO17118D08_FLI.pep
SQEFSLQICVSAMGSGNLIVKKVVKHSSFDLDIQLDKSWMEDVTCPICLDYPHNAVLLRCTSYEKGCRPFVCDTDQTRSNCLERFKSAYELPSNAKVSSFAMPPLDSIIHIVPSNANNRPSCPLCRGDVIGWIVIGEARQHLNQKKRCCEEDCCSFVGNFNELQKHTQQKHPDSRPSEIDPARQVDWENFQQSSDIVDVLSTIHAQVPNGIVLGDYVIEYGDDDNGEDYEVFRGVRTHWWSCIFCKAFSRSSRSRRRARERRGSGRRIGNQANLENFNIEVPAQSVELREIRFDEIDDEYIVTGAIPSMATPGRMASFHYRDTRYGR

SEQ ID NO: 57048 - protein, 372 aa, Zea mays
  Clone ID: UC-ZMFLMO17093B05_FLI.pep
IHKHKRTLAMASEVVRPSDAELLKAQADIWRLSLSYLTPLSLRCAVELGIPTAIYRHGGAASAAELVTALSLPSTKLPFLRRLLRLLAASGVFTVDKQSSEEERYRISPVSYLLVDGIPHEDHMNHTALVLTCTSTRYIEAGIGLAEWFKRDVVTSPFEELHGATLFHESMGSLDADFHDMASEALDAHDNFGIEIAMREFRDLFEGIQSMTYCCGNFGDDKGARAIVKAFPHIKCTVLAPPKIIATKPADGAMINYVEGDMFSFIPPAQTVVLKLVLHHLTDEECVKLLAQCRKAIPSRKDGGKVIIGDIMIDHSGPMLETHLLMDIGMMTMTKGRQRDEKEWSELFTKAGFSEYKILKEFGARVAFEVYP

SEQ ID NO: 57049 - protein, 366 aa, Glycine max
  Clone ID: 700753375_FLI.pep
TPQFSCLGSRDSDPQQKKKPRICYFRRIRLGTLMTRRCSHCSHNGHNSRTCPNRGVKLFGVRLTDGSIRKSASMGNLTHYAGSGSAPLHVGLNNPGSPGETPDHAAAAADGYASEDFVPGSSSSSRERKKGVPWTEEEHRMFLLGLQKLGKGDWRGIARNYVISRTPTQVASHAQKYFIRQSNVSRRKRRSSLFDIVADEAADTAMVQQDFLSANELPTETEGNNPLPAPPPLDEECESMDSTNSNDGEPAPSKPENTHPSYPMLYPAYYSPVFPFPLPYWSGYSPEPTKKEETHEVLKPTAVHSKSPINVDELVGISKLSLGESIGDSGPSTLSRKLIEEGPSRQSAFHATPTCGDMNGSAIHAV

SEQ ID NO: 57050 - protein, 199 aa, Zea mays
  Clone ID: UC-ZMFLMO17103H10_FLI.pep
DFISIVHTLAAPAAVARLPGHGRGGARSLTRFWCWRGGVRSPARLAVVPVPVPAWRRLRLLVYSGCAASLPWCFHATSSSLSSITDRSSVRARLEGGCARTRLFDGDAHPHVLGCGGACPCAMWSRWRTSARSQPCGSGWCCTLARPRSGGSSVRHARLPARRRQGPCSPVMRQQRGQGPHIRSYMLAATTYVPSSGGY

SEQ ID NO: 57051 - protein, 250 aa, Glycine max
  Clone ID: 700844710_FLI.pep
RTTGDQNCEKGFLDFHQFMAFQHYISRDLKTIPNAATETENSNGCFDCNICLDFAHEPVVTLCGHLYCWPCIYKWLHVQSDSLAPDEHPQCPVCKADISNSTMVPLYGRGHAATAEGKTSSCDVFIPPRPSASCVQALLATSSQRGQHLPYRNPYQGHYFSSHPYQEEDDATSQMLNLGSHHHPVTGMFGEMVYARVFGNPENLYAYPNSYQLMGSATPRLRRQEMQAHKSLNRISIFLFCCFLLCLVVF

SEQ ID NO: 57052 - protein, 553 aa, Zea mays
  Clone ID: UC-ZMFLMO170112H06_FLI.pep
LRATARSAPDVKPEEFAVLVRDIPRPSPDETIKDSVDSYFRALHPNTFYRSMVVTDHTKADKIYQEIEGHKQKIARAEVVYANSKTESNTEGTRPTHRTGFLGLIGTKVDTIEYCSEQIKELLPKLEAEQKTTLHEKQQRAAIVVFNSRSAAAFASQTLHAQVYDKWTVMEAPEPRQIIWSNLPRKLYDRQIRQCVVYCIVFLIVVFYIVPLTAIAAVTTLENLEAKLPFLKPVVEQPAIKTVLEAYLPQIALIVFLALLPTLLMFLSKQEGIPSQGHAVRAASGKYFYFIVFNVFLCYTLGSTLFKSLTTIINHPAEIVNMLAKSLPGSATFFLTFVALKFLVGYGLELSRLVPLIIFHLKRKYLCKTEEEVRAAWAPVDLGYNTRVPNDMLIATVVLCYSVIAPLIIPFGVAYFALGWLIARNQILRVYVPSYESYGRMWPHMHTRIIAALMVYQTTMIGFISLKKFAYASVLVPLLPASIIFAYVCHMRFYPAFAKTPLEVVVRHDLKETPNMEAIYTAYIPPCLKPDKLEDLDAFEDAQSRATSRVPSI

SEQ ID NO: 57053 - protein, 91 aa, Glycine max
  Clone ID: 700895654_FLI.pep
WSLGCTVLEMLTGQIPYSHLECMQALFRIGRGEPPHVPDSLSRDARDFILQCLKVDPDERPSAAQLLNHTFVQRPLHSQSSGSASPYIRRG

SEQ ID NO: 57054 - protein, 513 aa, Zea mays
  Clone ID: UC-ZMFLMO170114H08_FLI.pep
SANMGTRGVALLLLAAVLLLQALLLASSEGLVRVALKKLPVDQNGRVAARLSAEERQRLLLRGANALGSGGDDDSDVIALKNYMNAQYFGEIGVGSPQQKFTVIFDTGSSNLWVPSSKCYFSIACYFHSRYKSGQSSTYKKNGKPAAIRYGTGSIAGFFSEDSVTLGDLVVKDQEFIEATKEPGLTFMVAKFDGILGLGFQEISVGNATPVWYNMVKQGLISDPVFSFWFNRHADEGEGGEIVFGGMDSSHYKGDHTFVPVTRKGYWQFNMGDVLVDGKSTGFCAGGCAAIADSGTSLLAGPTAIITEINEKIGAAGVVSQECKTVVSQYGQQILDLLLAETQPAKICSQVGLCTFDGTHGVSAGIRSVVDDEAGKSNGGLKSDPMCNACEMAVVWMQNQLAQNKTQELILNYINQLCERLPSPMGESAVDCGSLASMPDIAFTIGGNKFKLKPEQYILKVGEGQAAQCISGFTAMDIPPPRGPLWILGDVFMGVYHTVFDYGKLRVGFAESA

SEQ ID NO: 57055 - protein, 240 aa, Glycine max
  Clone ID: 700981519_FLI.pep
ETKKRRINQTQTQKPPRKNDNYVNSEHSDSDCPTLPTATTPTTSEPKKRGRKPILGRETPVNHVEAERQRREKLNHRFYALRAVVPNVSRMDKASLLSDAVAYISELKAKIEYLESQQPRDSSKKVKTEMTDTLDNHSTTTISTVVDQSGPEPRLGPSPLGLEVDVKIVGPDAMVRVQSENVNHPGARLMGALRDLEFQVHHASMSCVNDLMLQDVVVKLPNGMRSEEGLKSAILMRLDQ

SEQ ID NO: 57056 - protein, 214 aa, Zea mays
  Clone ID: UC-ZMFLMO17125D12_FLI.pep
VAAAPPPAPPDARTQEMINEKLKKAEELGEQGMVDEAQKALEEAEALKKLARRPEPPSDPSKYTAADVWITDQKLRLCDICGAFLSVYDNDRRLADHFGGKLHLGYMLIRDKQKELQEQRNKRRTGKTEDDRRSREQSKDRNGPPSRDRDSERRDRVESRDGRRDYDRERDRRHDRDRRHDRDRDRDYDRSRGYDSRRRERSRSRERSRRHERY

SEQ ID NO: 57057 - protein, 106 aa, Glycine max
  Clone ID: 700985478_FLI.pep
AFTLSISLDKGLLTTFFPVKKIYAHSVASGLVQRVIVIDITSFDKSALHTLSDISPSLARGISYFLLELPGLLFFLVAHDSIASVSRMQRTLRARRTPGRFSHEKH

SEQ ID NO: 57058 - protein, 303 aa, Zea mays
  Clone ID: UC-ZMFLMO17093F02_FLI.pep
IKYTDGRGAINPKGIEYYNNLIDELVTHGVQVHVMIYQLDLPQILEDEYGGWLSPMVVEDFTAYADVCFREFGDRVSHWTTLDEVNVAAIGSYDIGQIAPGRCSDPFGTKKCTVGNSSVEPYIAAHNMLLAHASATRLYREKYQAVQKGVVGINIYTMWSYPLTNSTADLEATQRFLDFYSGWILEPLVFGDYPSVMKKNVGSRLPSFSKVQSEAIRGTLDFIGINHYYSFYVNDRPLEKGIRDFSLDIAADYRGSRTDPPIGQVRFFINNLQNFDMIDTSFLFYCSMPQHLFPLIPEDCNFW

SEQ ID NO: 57059 - protein, 383 aa, Glycine max
  Clone ID: 700985623_FLI.pep
RFETFETQRVSYIYIYIERERDREKKLEIDMGHHSCCNKQKVKRGLWSPEEDEKLINYITTYGHGCWSSVPKLAGLQRCGKSCRLRWINYLRPDLKRGSFTPQEAALIIELHSILGNRWAQIAKHLPGRTDNEVKNFWNSSIKKKLLSHDVVPSLATFSDHIHGPPNGSMESFFPLTDNPILNSHHHLDQLFLPIIPSPILQAFDHHHHNNDIKIDINKFFNNNANFLQYFQNPMPETVPPISNTTIPSLYEEDAWSSLGCVPIHLNPNQENQIMITKSDHTTPHLIVEKFINPSTWQQQQHSVEVEPPILPKVCESIEDYVCSIPYSSSVNSQDQHVEAVACFTPVICPQDQVEYIDALIMSSLPSSTTTSSSVVSFFQADK

SEQ ID NO: 57060 - protein, 179 aa, Zea mays
  Clone ID: UC-ZMFLMO17099G07_FLI.pep
KEVINRAWKEAEIIEVSRDELEFLLDHEYYEYKRNTPPQYYLEGFHFTRNWPQYYHYSPEEIAPIWHDGIKILLVTYGTLRIHYYTPKFHGCVVGTEDALITPYTTDRTGSGDAIVAAAIRKLTTCPEMYEDQDTLERQLRFAVAAGIISQWTIGAVRGFPTESATQNLKEEVYVPSMW

SEQ ID NO: 57061 - protein, 441 aa, Zea mays
  Clone ID: 700166721_FLI.pep
RHPRNTQKRGALLVGWILFSLAASPVKFQTHMGSIGRGTANCATVPQPPPSTGKLITILSIDGGGIRGLIPATIIAYLEAKLQELDGPDARIADYFDVIAGTSTGALLASMLAAPDENNRPLFAAKDLTTFYLENGPKIFPQKKAGLLTPLRNLLGLVRGPKYDGVFLHDKIKSLTHDVRVADTVTNVIVPAFDVKSLQPIIFSTYEAKTDTLKNAHLSDICISTSAAPTYFPAHFFKIEATDGRPPREYHLVDGGVAANNPTMVAMSMLTKEVHRRNPNFNAGSPTEYTNYLIISVGTGSAKQAEKYTAEQCAKWGLIQWLYNGGFTPIIDIFSHASSDMVDIHASILFQALHCEKKYLRIQDDTLTGNASSVDIATKENMESLISIGQELLNKPVARVNIDTGLYESCEGEGTNAQSLADFAKQLSDERKLRKSNLNSN

SEQ ID NO: 57062 - protein, 68 aa, Zea mays
  Clone ID: UC-ZMFLMO17104A02_FLI.pep
LQVTTIVMATKMGGEYAVQALFSHSTKYGACSVFTLSLRTFCQLDVPRKIRLGCQQTPDIEFTFVQKG

SEQ ID NO: 57063 - protein, 58 aa, Zea mays
  Clone ID: 700237560_FLI.pep
LAAIVTVPSEFRLQDVQGERKNDESISQGTENSRARVRALNLRQLLVRVAGLHEHSEP

SEQ ID NO: 57064 - protein, 323 aa, Zea mays
  Clone ID: UC-ZMFLMO17109D11_FLI.pep
VGVLPNLYNLAAGQFNPLVIQPQAMTQQATRHARRVYVGGLPPTANEQTVAIFFNGVMAAIGGNTAGPGDAVLNVYINHDKKFAFVEMRSVEEASNAMALDGIMFEGAPVKVRRPTDYNPSLAAALGPSQPNPNLNLAAVGLTPGSAGGLEGPDRIFVGGLPYYFTEAQVRELLESFGPLRGFDLVKDRETGNSKGYAFCVYQDLNVTDIACAALNGIKMGDKTLTVRRANQGASQPRPEQESILLQAQQQVQMQKLVYQVGGALPTKVVCLTQVVTADELRDDEEYNDIVEDMREEGRKYVPHNAIAECFIVRPYAILAIGL

SEQ ID NO: 57065 - protein, 175 aa, Zea mays
  Clone ID: 700622640_FLI.pep
LLLYWILRLHRLSRLHRPRRLVRPAPPLLTPVDPDLNLVKGRGGALLREKMVEAASDKFIVIVDETKLVDGLGGSGLAMPVEVVQFCWKYNLVRLQELFKEEGVEAKLRFEGDKPYVTDNSNYIVDLYFKTPIKDALAAGQEIAALEGVVDHGLFLNMASSVIIAGTDGVSVKTK

SEQ ID NO: 57066 - protein, 375 aa, Zea mays
  Clone ID: UC-ZMFLMO17118G01_FLI.pep
LGIYKQRAILVLTLVSLVVAIIWSYTGQILLLFGQDPEIAAGAGSYIRWMIPALFVYGPLQCHVRFLQTQNIVLPVMLSSGATALNHLLVCWLLVYKIGMGNKGAALANAISYFTNVSILAIYVRLAPACRNTWRGFSKEAFHDITSFLRLGIPSALMVCLEWWSFELLVLLSGLLPNPKLETSVLSISLNTGSLAFMIPFGLSAAISTRVSNELGAGRPHAAHLATRVVMVLAIVVGVLIGLAMILVRNIWGYAYSNEKEVVKYISKMMPILAVSFLFDCVQCVLSGVARGCGWQKIGACVNLGAYYLIGIPAAFCFAFMYHLGGMGLWLGIICALVIQMLLLLTITLCSNWEKEALKAKDRVFSTSVPADMMT

SEQ ID NO: 57067 - protein, 295 aa, Zea mays
  Clone ID: LIB3591-102-D7_FLI.pep
RSCWKNEEMSFLLKEKEMIIAAGIASMGRGRIEIKRIENNTSRQVTFCKRRNGLLKKAYELSVLCDAEVALIVFSSRGRLYEYANNSVKATIERYKKAHTVGSSSGPPLLEHNAQQFYQQESAKLRNQIQMLQNTNRHLVGDSVGNLSLKELKQLESRLEKGISKIRARKSELLAAEISYMAKRETELQNDHMTLRTKIEEGEQQLQQVTVARSVAAAAAATTNLELNPFLEMDTKCFFTGGPFATLDMKCFLPGSLQQMLEAQQRQMLATELNLGYQLAPPGSDAADNNPHHQF

SEQ ID NO: 57068 - protein, 251 aa, Glycine max
  Clone ID: 700891850_FLI.pep
QNSNWLFQESKEARWTAEENKLFENALAYYDKDTPDRWMRVAAMIPGKTVGDVIKQYRELEEDVSVIEAGLIPVPGYTTASSFTLEWVNNQGYDEFKQFCNVGAKRGASTRPTEQERKKGVPWTEEEHRQFLLGLKKYGKGDWRNISRNFVTTRTPTQVASHAQKYFIRQLTGGKDKRRSSIHDITMVNLQETKSPSSDTTKPSSPLQNQALSSMVKEEYEWKLPCEGMPIVFNSTSGNVHVSTTAWHFFI

SEQ ID NO: 57069 - protein, 415 aa, Zea mays
  Clone ID: UC-ZMFLB73417G05_FLI.pep
DTERRQVGVGHNLSLSSAPQPGMACGGKGGTGWSSLPADLLLSIFALLPADAHRVRFRAVCADWGAAAAAWRPRPWLVGSRTDRSGQGASEISSFWLAPSVALLPFAANVPSGLEYLSSSHGYLALSDPRISPKVILLLNPLTGRRVRLPPIGFFKKWLDLTTIVLSGDPATATEWAAVAVGFPTTCLAYYSSVTGAWTRLDFSVTGYAAVEHYRGRFYVAFKSSICICEVDGDAPAVIPLEHVDANGDAVVSDNDKLPGEGRRVVETHLVECDRQLLLVSVHDDVMYNSDDDMAGVDDGGIKIGSGFARAVEVHRVDWLGDRTVRLVRVVDLGWNSLFLGRNRAFALSRAEFPWYRARVNRIYLVDRGHPDGVVRVLGMERQRGRHLEILTIKPDDGRRESAGWARRGWFFPNY

SEQ ID NO: 57070 - protein, 193 aa, Glycine max
  Clone ID: 700943089_FLI.pep
SKRIRGDKAKLNFPATAPPPSKKVVSSCEKKKKKSVSAEKKSGGRARKNVYRGIRQRPWGKWAAEIRDPHKGVRVWLGTFPTAEEAARAYDDAAKRIRGDKAKLNFPATAPPPSKKQRCLSPDTTTEQSSSSQSTTGSTGSPPSAAFHGGGDELDLKQLERFLGLDNMGAEWDNMDDLWMLDDVVVPNRHLIY

SEQ ID NO: 57071 - protein, 609 aa, Zea mays
  Clone ID: UC-ZMFLMO17007E01_FLI.pep
PVKPCVDSLYNQDNTNIIIIIHAHIAHDHRSRDKIPIFQLLSTARFASPCGTASTRGQLVSRGTGTVRAIYSSCFGLCMRLHVLAVTVTVVVPGALGAVLLVMTVVVTVVVVVVVVVTVVTVVVVVVVQVPAVAVGLDPSAVAGADHALVLVLAPARGHAVVVLEEVARLVHQRRVAPARQHEPLTASVVPVDEVEVRLQVVVARGVQRVLEERRALVVERQLHADVGVAPGHTQQAFRHAPHHLGRPLVQQDPRHPRHVVVHVHHPQRPHPELLLEAPLERRVAHPRAPEREHAHGRGLHVRAGLRDVVGAQHGQRAAEAVPGHRHAHVLPRRRVAAHQPADLRQDLLARRVLAEPAAGVPVRVQVHEPGQHLHLPVRARDALLRHGPEEVHEVRHPFQPRHRAAPRDGDVAPPQPRALLVRGHGHVPDPARALAPDPGARPGLREQVGEPDVGRREQVPGHHVAARRVRHAQPLEQVAPRVLAAAAVAGRRVVVEGVVAGLRQLAVPDQLRPQQRVHGVQEPRPVVAPVDLAPPTAQLVPMLPRAAAPSVVVVKELLLLFFLLPLLFVFFFQNVVAVLGVRHVVLEPSDEGGDRVVLSGRQAKPQSV

SEQ ID NO: 57072 - protein, 184 aa, Glycine max
  Clone ID: UC-GMROPIC078B12_FLI.pep
VRVHAMEAVMACWELEQSLQSLTGVSPGEGTGATMSDDENDQVDSDANLFDCSFDGADSMGFGPLVPTESERSLMERVRQELKHELKQGYKEKIVDIREEILRKRRAGKLPGDTTSVLKAWWQSHSKWPYPTEEDKARLVQETGLQLKQINNWFINQRKRNWHSNPSTSTALKSKRKRSNAGDN

SEQ ID NO: 57073 - protein, 155 aa, Zea mays
  Clone ID: UC-ZMFLMO17010A04_FLI.pep
VGWPPVRNYRKNTLAASASRSKAPAAEDAASAARPMYVKVSMDGAPYLRKVDIKMYSSYEDLSVALQKMFSCFIAGQSGLHKSSSKDRLTNGSKVDALKDQEYVLTYEDKDADWMLVGDLPWDYFTSICRKLKIMRGSDAVGIAPRTIEQTGQNK

SEQ ID NO: 57074 - protein, 231 aa, Zea mays
  Clone ID: 700220203_FLI.pep
CLDLQVSLLFGGSRFTAELISDIPLAHRTLSCCKWQLRRRSSRGRCLSRSCLVILVLHHARVDQNRDFRREPRREAEAQRVRQAEPRAVLGPQRLEVHGEADLPTAVHLVSLAVEGGELDLGGDLGVGDGHVELERELIAAEVVDVPAGPLPAGSLRVGGGDAEPVVVLGLVHRRVGDERAVLLLEPLPPRLAVPRTRARRQQRDLAHRALGPLVPALHRSDADVRRRRGA

SEQ ID NO: 57075 - protein, 334 aa, Zea mays
  Clone ID: UC-ZMFLMO17012H07_FLI.pep
VVLFNFGDSNSDTGGVAAAGGIRIMPPEGRTYFHHPTGRLSDGRVIIDFICESLGTRELNPYLRGIGSDYSNGVNFAMAGSTVTHGVSPYSLNVQVDQFVYFRHRSLEMFERGLEGPVSKEGFESALYMMDIGHNDMVGVAHTPSDQWDKKITEIVGEVRQAISILYDNGARKFWIHGTGALGCLPALVVQETKGEQDKHGCLAGVNRAAKAFNRKLSQLCDDLRFHLKGATVVYTDMFAIKYDFVANHTKYGIEWPFMVCCGNGGPPYNMKQGRPGCGDLCPPEAKVVSWDGVHFTDFGSGLAAKLAMSGEYSKPRVKLASLIHGGSKKTSDS

SEQ ID NO: 57076 - protein, 289 aa, Zea mays
  Clone ID: 700102802_FLI.pep
AKMGSAGDPALADELGEGSTATRTLLASYSQTPRLGMTPLRTPQRTPAGKGDAIMMEAENLARLRESQTPLLGGDNPELHPSDFSGVTPRKKEIQTPNPMATPLASPGPGITPRISMTPSREGHSFGLTPKATPLRDELNINEVEMQDNTKLELRRQAELRKSLRSGFASIPQPKNEYQIVMPPITEDEKEEAEEKIEEDMSDRLARERAEEQARHEALLRKRSKVLQRSLPRPPAVSVEIIRQSLIRSGESRSRSTFMPPTSLEQADELINEELLRLLEHDNAKYPLD

SEQ ID NO: 57077 - protein, 298 aa, Zea mays
  Clone ID: UC-ZMFLMO17016D07_FLI.pep
GGEGVNFQGTSSLLVLLAGGWISEAEAFSQAGSGAGTSMAGKEILHKVKDKVKDAFSSSGPETGKGKTKLSGKRVKHGYHLVKGKSNHPMEDYLVAEYRQVGEHDLGLFAIFDGHLGHTVPDFLSSHLFNNILSEPEFLSDPETAIRNAYQLTDQKILENTAELGRGGSTAVTAILIGSDKFVKLVVANVGDSRAVISKNGVAKQLSVDHEPNMERQTIEQKGGFVSNLPGDVPRVDGQLAVARAFGDRSLKKHLSSDPYVVEQTIDENTEFLILASDGLWKVIHMKLLQTMSEGFTV

SEQ ID NO: 57078 - protein, 98 aa, Zea mays
  Clone ID: UC-ZMFLMO17022F02_FLI.pep
GNPPLPQIPAHYLRIKDGSIPASSIQKYIMQKLSLVSESEVEISCCGQTVGNLGQPVRNLVERWLRVGPARPLHTVIGSSGGDYVMVISYGRPKSASS

SEQ ID NO: 57079 - protein, 388 aa, Zea mays
  Clone ID: UC-ZMFLMO17018B05_FLI.pep
LLDSKTVVSDAKSVDSSVATLSTDLESTELVSVDQLKSALASTRKSLNTLYSELENERNAAAIAADETMAMINRLQEQKAAMQMEAIQYQRLMEEQSEYDQEALQRLNELVVKREKEKQDLERELELYRHKVHLYEVKVRKMSRHKADDQNGSSSASSSAEDSDDLSQSFYEGDESSHGINGSNGSIPTDVVLQETARHLVTLDGSLADFEEERLSILEQLKVLEDKLFDLEDEESDNMKHFSEENHLSGASNGFSDDDSCFKLHDKRKNVTYRGKKLLPLFDDATVEAGNVPQGNDAQTEVTLDLAREQHKLAIANEIDQVHERLHALEADREYIKQCVRTLKKGGKGFDLLQEILQHLRDLRRIEQRASARNSGELSPHYLHHHTD

SEQ ID NO: 57080 - protein, 264 aa, Zea mays
  Clone ID: 700103072_FLI.pep
SRHGALSVLREDGAEEGSVDGRGGQDSGGARRAPRPQQLARAAQAKQAGLLRCGKSCRLRWINYLRPDIKRGNFSREEEDAIIQLHQMLGNRWSTIAARLPGRTDNEIKNVWHTHLKKRLEPKPASQQAPKRKPTKKQQPQPEPEPVTTLEGPAGAVPPVSPERSLSTTTSTTTSTADYSAASSLENAGDSFTSEEDYYQIDDSFWSETLAMTTTVDSFESGVQQAEGSFGKSAAAPSSTNDDMDFWLKLFMQASDMQNLPQII

SEQ ID NO: 57081 - protein, 705 aa, Zea mays
  Clone ID: UC-ZMFLB73372G03_FLI.pep
CLAKAVEGAGPGPGAIGMFGKLGPRICKLLGGQGVQAKAGLLGIMGSLAQVGAISSQNMQQTLQSIRDCLENSDWATRKAAADTLSVFATHSVHLIGDGTAPTIAALEACRFDKVRPVRDSMIDAVQLWKKLTGEDANDGRNKDLADGEGKLDSRRSIQRGGKSESFDDSSPDSPSNNVKGSSIAEKAAFLLKKRPTLTDRELNPEFFQKLETRKTDDLAVEVVVPHKTLQSHLRGEDETEEDDDPVGPADSNGSAEDEANLTQMRASFNFQNIRDKWAGQRGNRNKITKARTTDVEDRGEPSTKDSTAAAMNISGEGPFINNKTNWLAIQRQLSHLERQQTSLMNMLQDFMGGSHDSMVTLENRVRGLERVVEEMAREISLSSGRRGGGPALGFDSSPGRSSKHNGFHEYSNSKYGRSGDGRMGFAERYFSADAMASGTKNQSWRPDSEPWDSYAYSGSRSGMNVRRGLDSVSSDNRMARNERSNDQVGPRRGWDKGQGPFRFGEGPSARSAWRASKDEATLEAIRVAGEDNGNSRAAARVAIPELDGEALNDDNQGDERGPLWEAWTRAMDAVHLEDMDSAYAELLSTGDAELLVKLMEQTGPVVDQLSNEVANEVLHAVGQFLMEESLYDVALNWLQQLTDLVMENGSDYLGIPLDAKQDVLLGLHEATAIDLPDDWEGATPLQIMKQLASSWHIDLQQLIN

SEQ ID NO: 57082 - protein, 858 aa, Zea mays
  Clone ID: UC-ZMFLMO17370F01_FLI.pep
SARFARLRFCVAEGAREPMAAAVAMRGGSSDSGGFDKVPGMDSGKYVRYTPEQVEVLERLYIDCPKPSSSRRQQLLRECPILSNIEPKQIKVWFQNRRCRDKQRKESSRLQAVNRKLTAMNKLLMEENERLQKQVSQLVHENAHMRQQLQNTSLANDTSCESNVTAPPNAIRDASNPSGLLAIAEETFTEFLSKATGTAIDWVQMPGMKPGPDSVGIVAISHGCRGVAARACGLVNLEPTKVIEILKDRPSWFRDCRSLEVFTMFPAGNGGTIELIYMQMYAPTTLVPARDFWTLRYTTTMEDGSLVVCERSLTGSGGGPNAASAQQFVRAEMLPSGYLVRPCEGGGSIVHIVDHLDLEAWSVPEVLRPLYESSRVVAQKMTTVALRHLRQIAQETSGEVVYALGRQPAVLRTFSQRLSRGFNDAISGFNDDGWSVMGGDGIEDVVVACNSTKKIRNNSNAGITFGAPGGIICAKASMLLQSVPPAVLVRFLREHRSEWADYNIDVYLASSLKTSACSLPGLRPMRFSGGQMIMPLAHTVENEEILEVVRLEGQPLTHDEALLSRDIHLLQLCTGIDEKSVGSSFQLVFAPIDEHFPDDAPLISSGFRVIPLDMKTDGVSSGRTLDLASSLDVGSAAPQASGDAPPDDCNLRSVLTIAFQFPYEMHLQDSVATMARQYVRSVVSAVQRVSMAISPSQSGLNAGQRMLSGFPEAATLARWVCQSYHYHLGVELLNQSDEAGEALLKMLWHHPDAILCCSFKEKPMFTFANKAGLDMLETSLIALQDLTLDKIFDESGRKAIFSDISKLMEQGYAYLPSGVCMSGMGRHVSFDQAVAWKVLGEDSSVHCLAFCFVNWSFV

SEQ ID NO: 57083 - protein, 378 aa, Zea mays
  Clone ID: UC-ZMROB73019A10_FLI.pep
CAVAAPCACCRQSLGLVKPLEEMLMAASAGAANPSQGSNPNPPPLAAPLTDAGSTERRARPQKEKALNCPRCNSTNTKFCYYNNYSLQQPRYFCKTCRRYWTEGGSLRSVPVGGGSRKNKRSSSSSSSSSSSAAAASASTSSSATSSSMASTPGAASKSPELAHEGAHDDLNLAFPHHGGLHAAEFAAFPSLESSNDMCDQGGGMTSNGRGGGAGPAVGALSATELLRSSGCYMPLQMPGGDYTAAGFALGEFRTPLLPPPSSQSPLGFSLDAHGPGSSGAAAAAGYGSSAGLPQGVPGNAGRLLFPFEDLKPPVSPGGGGVGGGGASATGGAGDGNSSHDQFDHNKERGGGGGRGAGAGHDTPGFWSSMIGGSGASW

SEQ ID NO: 57084 - protein, 541 aa, Zea mays
  Clone ID: UC-ZMFLMO17004E08_FLI.pep
EAAATTMGNCCATPSTTEESGKSRQKKPKQKTNPYNVAYNRGAAPAPARPGLVVLRDPTGRDLGAQYELGGELGRGEFGVTYLCTESATGARYACKSISKRKLRTPVDVEDVRREVDIMRHMPPHPNIVSLRAAYEDEDAVHLVMELCEGGELFDRIVARGHYTERAAAAVTRTIVEVVQMCHRHGVMHRDLKPENFLYANKKESSPLKAIDFGLSVFFRPGERFTEIVGSPYYMAPEVLKRNYGPEVDVWSAGVILYILLCGVPPFWAETEQGVAQAIIRSVVDFKREPWPRVSEPAKDLVRRMLDPNPLTRFTAAQVLEHPWLHDSKKMPDISLGDTVRARLQQFAAMNKLKKKALRVIAEHLSVEEVADIKQMFDKMDVSKNGKLTFEEFKAGLRKLGNQMPDSDLQIMMDAADIDKNGTLDYEEFVTVSVHVRKIGNDEHIQKAFTYFDRNKSGYIEIEELREALADELEGTDEDIINGIIRDVDTDKDGKISYDEFAAMMKAGTDWRKASRQYSRQRFSNLSLKLQKDGSLGAETR

SEQ ID NO: 57085 - protein, 378 aa, Zea mays
  Clone ID: 700150130_FLI.pep
SISSARGPSRVTRVTRDPLIERMDTFSHVPPGFRFHPTDEELVDYYLRNKVASNKIDLDVIKDVDLYKIEPWDLQEKCKIGTEEQNEWYFFSHKDKKYPTGTRTNRATTAGFWKATGRDKPIYTKSCLVGMRKTLVFYRGRAPNGHKSDWIMHEYRLETTENVTAAPEEGWVVCRVFIKKRVEAVRRMADGAPPWFDGHVPGGFMAPAGLGSPRQLMHHHPNPAAAAPLLYSGQQLYHCKPELEYHHLLQPSQEALLQQLPQLVESPKPPPPAFIDQGSCSLQSPDEASGYNTTPQQPPPMTTEAAYMDDDSVTDWRVLDKFVASQLFSHGDGMAKEDGYPNPGQALFQAENKQPEEALDYASTSASGGGGGEANMWK

SEQ ID NO: 57086 - protein, 246 aa, Zea mays
  Clone ID: UC-ZMFLMO17010A06_FLI.pep
SGIHPFFSVAMSCTYVQSIPRTVLLDTKTGSNLLQWPVVEVENLRMSGKSYDGVALDRGSVVPLDVGKATQLDIEAVFEVDAEGVRVAEEADVTFNCSTSAGAASRGLLGPFGLLVLADEDLSERTAVYFYLVKATDGSLKTFFCQDELRSSKANDLVKRVYGSLVPVLDGENLSVRILVDHSIVESFAQGGRTCITSRVYPTRAINDSARVFLFNNATGVHVKAKSVKIWQLNSAYIRPYPASSL

SEQ ID NO: 57087 - protein, 285 aa, Zea mays; identical to SEQ ID NO: 36650
  Clone ID: UC-ZMFLMO17016E06_FLI.pep

SEQ ID NO: 57088 - protein, 129 aa, Zea mays
  Clone ID: 700151586_FLI.pep
GEKEAALATDLNSTPTIFDKIIRKEIPSQVVYEDEKVLACRDISPQAPTHIIIIAKVKYGLSRLSKAEEGHVELLGNLLYAAKVVAEQEGLADGFRIVMDDGPRGSQSVYHRHLHVHLLGGRQMNWPPG

SEQ ID NO: 57089 - protein, 201 aa, Zea mays
  Clone ID: UC-ZMFLMO17001A09_FLI.pep
QLEYHSFSFFCLSPVYEESPQLGASRPYNDDHKRCTKVREGRATHTRLKSQHYHAHKSQLELKTQRTEFTTQVELKSLSQRIKCTKLESRSLRMFLECLGSSSIRLGVPFIAPRQLGAVGGQHGMISLPSVGWRTGQSGAPPDSHCRRSGADLLPILAQTTVASPGQMAHQTLSGAHRTVRCPLPTVGAGHTSPADCATDR

SEQ ID NO: 57090 - protein, 352 aa, Zea mays
  Clone ID: LIB3069-035-H2_FLI.pep
VTVHAMPMTPLGCECDMAPAASRQSWPLPRCGLLVLALALATTAAVGSAQLSSESYYDASCPAALLTIRTAVSTAVLLEPRMGASLLRLHFHDCFVQGCDASVLLDDTASFTGEKGAGPNAGSLRGFDVIDNIKMLLELLCPQTVSCADILAVAARDSVAQLGGPSWAVPLGRRDATTASASLANSDLPGPTSSLNGLLNAFSNKGLSSTDMVALSGAHTVGRAQCKNCRARIYNDTDIDASFAASLRASCPAQAGAGDGALEPLDGSTPDAFDNAYFGDLLSQRGLLHSDQALFGGGGGGGGGATDGLVSAYASNAGQWGADFAAAMVKMGSISPLTGTDGEIRVNCRRVN

SEQ ID NO: 57091 - protein, 542 aa, Zea mays
  Clone ID: UC-ZMFLMO17004G04_FLI.pep
YMIRRRLLLTGTPIQNSLQELWSLLNFILPNIFNSSQNFEEWFNAPFACDVSLNDEEQLLIIHRLHQVLRPFLLRRKKDEVEKYLPVKTQVILKCDMSAWQKAYYEQVTSREKVALGYGIRKKALQNLSMQLRKCCNHPYLFVEHYNMYQREEIVRASGKFELLDRLLPKLQRAGHRVLLFSQMTKLLDILEVYLQMYNFKYMRLDGSTKTEERGRLLADFNKKNSEYFMFLLSTRAGGLGLNLQTADTVIIFDSDWNPQMDQQAEDRAHRIGQKNEVRVFVLVSVGSIEEEILDRAKQKMGIDAKVIQAGLFNTTSTAQDRRALLQEILRRGTSSLGTDIPSEREINRLAARNDEEFRLFEKMDEERRLRENYKSRLMDGNEVPNWVFANDNETLRKKTVADEFRNIIVGSKRRRKEVVYSDSFGDQWMKSDEGFEEIAKMTPRVKRTAYSPDIQVEYNERRKRPKSVENSADGASNPTRTPDKGRAGVSSYSKDETEDDGEDEVITSGLQKGNSFTWKTLGRKRSSHLSSSSDSKGRPPF

SEQ ID NO: 57092 - protein, 468 aa, Zea mays
  Clone ID: UC-ZMFLMO17007H12_FLI.pep
ECGFKPTIISYGCLINLYVKVGKVPKAIAISKEMESHGIKHNNKTYSMLINGFIHLHDFANAFSIFEDMIKSGLQPDRAIYNLLVEAFCKMGNMDRAIRIFERMQKERMQPSNRTFRPIIEGFAVAGDMKRAFDTLDLMRRSGCAPTVMTYNALIHGLVRKHQVEKAVSVLDKMSIAGIAPNEHTYTIIMRGYAASGDIGKAFEYFTKIKESGLKLDVYIYETLLRACCKSGRMQSALAVTREMSFQKIPRNTFIYNILIDGWARRGDVWEAADLLKQMKEDGIPPNIHTFTSYINACCKAGDMQRAENVIQEMADVGLKPNVKTFTTLIKGWARVSLPDRALKCFEEMKSAGLKPDEAAYHCLVTSLLSRETVMEGSTYTGIFSVCREMFENDLTVDLRTAVHWSKWLHKIERTGGALTEALQRIFPPDWNSSENLEASNSASDGDSESCSDAEFSDNDEDHDVDDL

SEQ ID NO: 57093 - protein, 584 aa, Zea mays
  Clone ID: UC-ZMFLMO17010B02_FLI.pep
AVRIVDLLNTGSDYIAEVETLQTYQMQTDSERNEVKDMSNRLEACELSTALSKNSSDAMYPIVSKESLLQEMFFSAKTTSGRLHLAKELLKLPTDVLKSFAGSKEGLSTLNFWILDSLGKNATQLLRHCVRLLVLVSTDLVAVRLSGIGKTVKEKVCVHTSRDIRAIARQLVSVWIEVFRREKDSNGGLKLLRRMPSIESSKTKSKDLQSGKPTLRVPNGTLDNNKVVSQRQRTRFASSQSPPKINKKYDNKEMKLETVTAAMSDGKLLSQKQQHGIESKVEECGIPMSEEEAAAFAAAEAARAAAIAAAQAYASVEAEISVPRELPKIPSFQSFVMRDHHLDESDARKRTLKDDFGRLECISENDSKNGEVKDLPENTKYADGDSLKMSHDNFTQQSHSNETACLANAQDHSTDTVVVDGRFTRAWVDTDTICIDGVKDPLAIERWQAQAMEADKEFYSRIRIPDEDDSSSQKHTCRSSASQGADSKPASERQSRGVEHIKQGLVNFIASLLMPLYRGKKIDREGYKTIMRKSVNKIIDTCSEGEKSMTTLEFLDDKRKIKIESFVGKMVDKHLHVVSKSAKP

SEQ ID NO: 57094 - protein, 146 aa, Zea mays
  Clone ID: UC-ZMFLMO17013E02_FLI.pep
MKLSLLFALLTLCISIFSGNISRGEVSGCHYQVSCVCSVFRDFEWPVHNLCLKILKLEGVKEEVADDLGLTAHEEGEHGGHEVPDEDLVVVEHLHALGVLRRHRPHGLAAVADDRPPQQSPRLPLCLRLLPQGDSRCGWGNWGHRT

SEQ ID NO: 57095 - protein, 165 aa, Zea mays
  Clone ID: UC-ZMFLMO17017F01_FLI.pep
VESVHSTNASLYKNVFISSFAEIPGSFLSAMIVDRFGRKRSMASMLFTSCVFLLPLVFSRTDILTRISLFGARLCISASFTIVYIYAPEIYPTAVRTTGIGIASSVGRIGGILCPLVAVALVHSCQQTTAILLFELVIFLSGLAVSFFPFETKGCRLNDTDVDMN

SEQ ID NO: 57096 - protein, 104 aa, Zea mays
  Clone ID: UC-ZMFLMO17004D11_FLI.pep
GAKGGGGGGRAVAEGDHDGGAVPAAGLLRGHLLRRPRPPPRAGAAAALAAAQPAAGLRQARRQRRVLARDGTGRSPPFSSLLLVLASDSVNGFPCRLPSASPPP

SEQ ID NO: 57097 - protein, 437 aa, Zea mays
  Clone ID: LIB4572-001-D3_FLI.pep
MSFRSIVRDVRDGFGSLSRRGFEVKFLGHRRGRSHGAVHELRDPAPVIQSSCWANLPPELLRDVIERLEASEATWPNRKSVVSCAAVCRTWREICKEIVKNPEFSGKITFPVSLKQPGPRDVTIQCFIKRDKSTQTYYLYLCLSTAVLVESGKFLLCAKRTSRPTCTEYTIFMNSENLSRSSKMYIGKLRSNLLGTKFAIYDTQPPCNAAEPGKTSRRFYSRKVSPKVSSSTYNIAQVSHELNVLGTRGPRRMNCVMHSIPTSCLEAGGSVPSQLDSILARSTDESFGSISFSKSSVVDRSMRFSSSRFSDISMSSSRRIGDTASGDNDECKERPLILRNKAPRWHEQLQCWCLNFRGRVTVASVKNFQLVAATQPAAGAPTPSQATPVPPPEHEKVILQFGKVAKDMFTMDYRYPLSAFQAFAICLSSFDTKLACE

SEQ ID NO: 57098 - protein, 134 aa, Zea mays
  Clone ID: UC-ZMFLMO17227D08_FLI.pep
VQQEYGHIQEVILQPHSPGQKQTDNISAYSPQKLVQVITLARAILPAEITLQIPPNLVPNFSDLLACLAAGVRDLGGIVPIDEVNPDYHHQSVNQLSQLLEENGYLLQPRFPVYPTYFSWLNCDLQQRLSVFIN

SEQ ID NO: 57099 - protein, 448 aa, Zea mays
  Clone ID: 700076722_FLI.pep
NTCPDANYLALSDLRTTRRKSKRKFRKGEPQKERESEREGKCAAVLRSCAGEKRRRCQPLPKETASSAAARPTSPSTRLAFLRAPARKRNPAPPDALPMATPRKPIKLTLPSHETTIGKFLTHSGTFTDGDLRVNKDGLRIVSRREGGEAPPIEPLDSQLSLDDLDVIKVIGKGSSGNVQLVRHKFTGQFFALKVIQLNIDESIRKQIAKELKINLSTQCQYVVVFYQCFYFNGAISIVLEYMDGGSLADFLKTVKTIPEAYLAAICTQMLKGLIYLHNEKRVIHRDLKPSNILINHRGEVKISDFGVSAIISSSSSQRDTFIGTRNYMAPERIDGKKHGSMSDIWSLGLVILECATGIFPFPPCESFYELLVAVVDQPPPSAPPDQFSPEFCGFISACLQKDANDRSSAQALLDHPFLSMYDDLHVDLASYFTTAGSPLATFNSRQL

SEQ ID NO: 57100 - protein, 202 aa, Zea mays
  Clone ID: UC-ZMFLMO17230D06_FLI.pep
NQELDKLLGNIPYLNGGFFDVHQLEIKYENIQIPDDAFEQLFVFFGNWDWHLDNRITKNQNEINPDILGYIFEKYINQKQMGAYYTKEDITEYISKNTIIPFLFDATKKECEVTFRADGEIWSLLKENPNRYIYDAVLKGVDVDLPLEIAAGINDVSQRQDWNQSASDEFALPTETWREHIVRRQRCLDIREKLKSGEMTSI

SEQ ID NO: 57101 - protein, 102 aa, Zea mays
  Clone ID: UC-ZMFLMO17230H02_FLI.pep
TLPYLVFCPYNETPRTLDMESCSGKTDGKMNHLQEWRQSCVDDQLTRLNVTPLLGDAPAQHLLYAEALQRRNDGRVSDGLMKRYAHVASGGWWCSGIDLLSG

SEQ ID NO: 57102 - protein, 125 aa, Zea mays
  Clone ID: 700422954_FLI.pep
QGPGLAELGLDDAPQPGLLPQRQDHGRRQVALGKVAPRRRLPELLRRLRQVQDVVHHLECQTQVPPVLVHLLAHAAAHAAEDGGGPRARRDQGGRLVVALQQIVVQGHVAVEKRRRLLYLAAREI

SEQ ID NO: 57103 - protein, 241 aa, Zea mays
  Clone ID: UC-ZMFLMO17241D08_FLI.pep
FSRRRCSSHIPREDACSSPIDTMAVFSDLHTADGLKSLEAHLAGKTYVSGDSITKDDIKVFAAVPSKPGAEFPNAARWYETVSAAVASRFPGKAVGVNLPAGSAPAAAAPADEAEDDDDLDLFGDETEEDKKAADERAAAAKASSKKKESGKSSVLMDVKPWDDETDMKKLEEAVRSVQMEGLTWGASKLVPVGYGIKKMTIMLTIVDDLVSIDTLIEDHLTQEPINEYVQSCDIVAFNKI

SEQ ID NO: 57104 - protein, 131 aa, Glycine max
  Clone ID: uC-gmflminsoy044a10_FLI.pep
FSRYHVIGYQLWQVGNGITNPISSSNCKSSKCEIEDDVTLSLVQLQDTKLDEQKDSDKYCEAGPAGAEHEAVPLWLHLQMKSSNNNVAAVVPDLELTLAVSKGKAKTLLGLEQTQTKSSPDSFLLGPISVT

SEQ ID NO: 57105 - protein, 426 aa, Zea mays
  Clone ID: UC-ZMFLMO17235C06_FLI.pep
YCAIRRDLLDECLTVLGVERLSIDEVQRIEWKHLNDKMKKWVHGVKTVVRCLLTGERRLCDQVLAVSDELRDECFVESTKCCIMQIRNFGDAVSVCTRSPEKLSRILDMYEALAEVIPELKELFFGSYGGDVIHDLEGVLERLGDAVKGTLLEFGKVLQQESSRRPMMAGEIHPMTRYVMNYLRLLVVYCDTLDILLDDSGAGAVDHNILHNGTDEDQEYLKSLTPFGRRLVKLISYLEVNLDEKSKLYEDGALQCIFSMNNTLYIVQKVKDSELGRILGDHWIRRRRGKIRQNSKSYLRVSWTKVLSYLKDDGHGSSGSGSFGSSGNSSSRIKEKIKNFNLAFEELYRSQTVWKVPDPQLREELKISISENVIPAYRAFTGRYGSLVDSGRNSGKYIKYTPEDLENHLSDLFEGSLGSANHSRRR

SEQ ID NO: 57106 - protein, 127 aa, Glycine max
  Clone ID: uC-gmflminsoy027c07_FLI.pep
HYTKRMCNFVCFVISYFSILQALLHVIYWDSLPDMQELTGLSSKWATTLMAQHLLAAADRYGLERLRLMCEASLCDDVAINTVATTLALAEQHHCFQLKAVCLKFVARPENLRGVFYCLNFIFMNMH

SEQ ID NO: 57107 - protein, 180 aa, Zea mays
  Clone ID: UC-ZMFLMO17245C08_FLI.pep
FGGYYDERMYWRQNDEIRDADKEASAPCSLAPVAHLGAHQQESWQHSSFGSQHQHHDNQNLLEMEVRVRGEMSQIHQEIYQLRKLVESCIASQVKMQHSIKEEVCSALREAGLMRSQPDTAAAKRGNCCICHRMQVDSLLYRCGHVCACFDCADQLKSSGMSCPICQSPIDDVVLARLNF

SEQ ID NO: 57108 - protein, 166 aa, Zea mays
  Clone ID: 700204307_FLI.pep
QRFIALSKIVPGLKKMDKASVLGDAIKYVKQLQDQVKGLEDDARRRPVEAAVLVKKSQLSADDDEGSSCDDNSVGAEASATLLPEIEARLSGRTVLVRVHCDNRKGVLIAALSEVERLGLSVMNTNVLPFTASSLDITIMAMAGDDFCLSAKDIVKKLNQAFKSPF

SEQ ID NO: 57109 - protein, 157 aa, Zea mays
  Clone ID: UC-ZMFLMO17255E11_FLI.pep
GRVGSAFAAEIGTMRVTEQLDALYMLRTDPIDYLVVPRVIACGLMLPILTGLSLFVGMAGGLVISSSLYAINPTIFLNSVQNFTQLWDVFACLFKSLVFGVIIAIIGCSWGLTTTGGAKGVGESTTTAVVTSLLAIFISNFFLSWLMFQGTGDTALG

SEQ ID NO: 57110 - protein, 672 aa, Glycine max
  Clone ID: UC-GMFLMINSOY078C06_FLI.pep
VLSKLSRGARVPLEYISYMDRHRRKSVLVTVDRHEWYAPPQIYTRDDSTGLWNAKPAFKLDSPFLSLGAKDVENLSRQSVSLTGEHACGGHVCGDNSQELVDGVTSMETNCEDPSECVSHHNASDGVVKKRKVDEDLSADGNVVADFSLNDSRETKLEKSSIIQDDMLMDYQGATAATANASVAERVIEPTLVMFEVHVPPSCMLDGVHSQHFFGTGVIIYHSQDMGLVAVDKNTVAISASDVMLSFAAFPVEIPGEVVFLHPVHNYALISYDPSALGPVGGSVVRAAELLPEPALRRGDSVYLVGLSRSLQATSRKSVVTNPCAALNIGSADSPRYRATNMEVIELDTDFGSTFSGVLTDEQGRVQAIWGSFSTQLKFGCSTSEDHQFVRGIPIYAISQVLDKIISGANGSPLLINGVERPMPLVRILEVELYPTLLSKARSFGLSDDWIQALVKKDPVRRQVLRVKGCLAGSKAENLLEQGDMVLAINKEPVTCFRDIENACQALDKSDANDGKLHLTIFRQGQEVELFVGTDVRDGNGTARAINWCGCIVQDPHPAVRALGFLPEEGHGVYVARWCHGSPVHRYGLYALQWIVEINGKPTPNIDSFVKVTKELEHGEFVRVRTIHLNGKPRVLTLKQDLHYWPTWELRFNPNSAMWHRNIIKGLNCSSV

SEQ ID NO: 57111 - protein, 101 aa, Zea mays
  Clone ID: LIB3078-054-B1_FLI.pep
QLDFRSYLTNSDTNNWENRINSLTTTAGEWMPRKGTISTCRKFSTADPTVAPAASPPTVINAALPKFIFFFARKYSDAPNPVARIKPGTSGLVYADGKDVD

SEQ ID NO: 57112 - protein, 244 aa, Glycine max
  Clone ID: 701108468_FLI.pep
ARMARIASLESMLNISSNSLVAMASQLSEAEERERAFTNRGRWNQLRSMGEAKNLLQYLFNSVGDARCQLWEKDTEIKEIKDQIKELVGLLRQSEMKRKETEKELKAREQAVATTLATPTSGNSPNSLKHYAEDIKEPLSPESVPVQKQRKYMPGITNGQVRESAAFVDQSRTMIPIGQLSMKKLAIVGQASGKLWRWKRSHHQWLVQFKWKWQKPWRLSEWIRHSDETIMRTRPRSQALPHIM

SEQ ID NO: 57113 - protein, 636 aa, Homo sapiens
  Clone ID: LIB4656-038-E1_FLI.pep
APRRAEGAGLRNAKRRARDPARRPRAHVSAMRRRAARGPGPPPPGPGLSRLPLLPLPLLLLLALGTRGGCAAPAPAPRAEDLSLGVEWLSRFGYLPPADPTTGQLQTQEELSKAITAMQQFGGLEATGILDEATLALMKTPRCSLPDLPVLTQARRRRQAPAPTKWNKRNLSWRVRTFPRDSPLGHDTVRALMYYALKVWSDIAPLNFHEVAGSTADIQIDFSKADHNDGYPFDGPGGTVAHAFFPGHHHTAGDTHFDDDEAWTFRSSDAHGMDLFAVAVHEFGHAIGLSHVAAAHSIMRPYYQGPVGDPLRYGLPYEDKVRVWQLYGVRESVSPTAQPEEPPLLPEPPDNRSSAPPRKDVPHRCSTHFDAVAQIRGEAFFFKGKYFWRLTRDRHLVSLQPAQMHRFWRGLPLHLDSVDAVYERTSDHKIVFFKGDRYWVFKDNNVEEGYPRPVSDFSLPPGGIDAAFSWAHNDRTYFFKDQLYWRYDDHTRHMDPGYPAQSPLWRGVPSTLDDAMRWSDGASYFFRGQEYWKVLDGELEVAPGYPQSTARDWLVCGDSQADGSVAAGVDAAEGPRAPPGQHDQSRSEDGYEVCSCTSGASSPPGAPGPLVAATMLLLLPPLSPGALWTAAQALTL

SEQ ID NO: 57114 - protein, 276 aa, Zea mays
  Clone ID: 701160612_FLI.pep
AGRRHPVQQGVRDDGVRVPRHGLALQPRVQRGHEEPLGDHHQEAAGLLHGLRGRVDAGGRGRRRGRHAARHHVPPPAHLRGQLRPAARHLRGAAVPRRAPRGRGHVRVRARRRRHPHEVDPPRLERRALRHAAQELLRRAAGKWQGHRRRVRAAGQHGGHPQGAGRLPRRHDHARAQPRRQGAVRARVPRARKGRRLLRVQGHLHLRQRLGHRVHQVNHRRRDEMAWLPHALLAWSSYRTSPSSSSSGYCAATSLLSRMHVLLLNFLSSYHALWLA

SEQ ID NO: 57115 - protein, 169 aa, Zea mays
  Clone ID: 700171752_FLI.pep
GARKHTAATPRHHPVRSHSKRAQQQRQHGSGAVLRQDECEAGAVVARGGRGAAELRPEPRHGRQLDRAPAQSRAQPVRQELPAAVAQLPAPRHQARRLHGAGGPGHLLPLQLHREQVVHHRVQAAGADGQRRQELLEHQAQEEGDRHAAAAARVLPPPAAAAQLRRPRP

SEQ ID NO: 57116 - protein, 93 aa, Zea mays
  Clone ID: 700237873_FLI.pep
QHQALTVRFAWYHILIQDTSSGFFKLSLDSSILYYPATTKTKRREYTVLDIVLARRVVELAARTEPARARPHVEGTGLSILSPRKASKSKCHR

SEQ ID NO: 57117 - protein, 196 aa, Glycine max
  Clone ID: JC-GMST02400039E04_FLI.pep
DVEKLKSGLDFIGVNHYTSAFAKDCIFSACEQGRGSSRTEGFTLRSPQMNGISIGEPTALDWLYVHPQGMEKILTYLKHRYNNIPMFITENGIGMRENSNHATKEIINDVERVEYLRGYLDSLATAIRKGADVRGYFVWSLLDNFEWTDGYSIRFGLHHVDYATLNRTPRMSAFWYKNFIALHAPRAGTRPQHTQE

SEQ ID NO: 57118 - protein, 250 aa, Zea mays
  Clone ID: 700244127_FLI.pep
VCPPSTQPPSSPASESRTPRPTPVMATSSDGGGDQRRLLSIPKEGERIIAPTRRPDGTLRKAIRIRAGYVPQEEVAIYQSKGALMRKSGPDVPPGYDPALVADAKPKTKAAKRNERRKEKRQQQASLANDKGKSMNIEGTDAGETDKVLSSKTDKQKDSVESVTKQMSGIAISESHAMPSTNTINNSQPESSAPDIDKKIRALKKKIRLAEAQVQGDPEKLKSETLEKIKKIDGWCMELKLLEDSRAPAA

SEQ ID NO: 57119 - protein, 146 aa, Zea mays; identical to SEQ ID NO: 51085
  Clone ID: UC-ZMFLB73007E03_FLI.pep

SEQ ID NO: 57120 - protein, 212 aa, Zea mays
  Clone ID: UC-ZMFLB73005C09_FLI.pep
STLLVWWTYLEGLGLLVYGLEGRRIYKRNLDQEVCREALSYSIENKIPFVAFSQDHCYSMFDHPLVDSLHYIYHEPKAKIVPSIGQLLETAEIQKVLFLETPERISSALRPYWAKAIEGRAHVVQAQPDMLELVPPATSKGNGVKVLLNHLSISPDEVMAIGDGENDIEMLQLASFGVALANGSDKTKAAANVIGATNDEDGVAQAIYEYAF

SEQ ID NO: 57121 - protein, 165 aa, Zea mays
  Clone ID: UC-ZMFLB73010B10_FLI.pep
QRIPRFRRQGVHPIRDDPQATAMAMAYKMATEGMDVKEECQRWFMEMKWKKVHRFVVYRIDERSRAVLVDRVGGPGEGYEELVAALPGDDCRYAVFDFDFVSVDNCQKSKIFFIAWSPAASRIRAKILYATSKQGLRRLLDGVHYEVQATDPSEMGFDVIRGRAQ

SEQ ID NO: 57122 - protein, 131 aa, Glycine max
  Clone ID: 700746763_FLI.pep
IKAPKQASGEHKKKKKIKVTFPSGQERNAPSQAIRKCLHCEITKTPQWRAGPMGPKTLCNACGVRYKSGRLFPEYRPAASPTFCAAMHSNSHKKVLEMRNKTGTKSGFATVSAASPELIPNTNSSLTLEYM

SEQ ID NO: 57123 - protein, 123 aa, Zea mays
  Clone ID: UC-ZMFLB73018F08_FLI.pep
LVATAKRGNSERPTNPRPAPRPHGMALHDLWARRHQPGSHGLGEAGSCSGGQPITTGGMNTREATMNSMPSKSKHSSTTSLCMIHITFASQEIVRCPTSYIWLSPSWGWLKLDESMLSAIIHF

SEQ ID NO: 57124 - protein, 221 aa, Zea mays
  Clone ID: UC-ZMFLB73005G10_FLI.pep
PGPRELAVPQRGVVQELQVVEVTEAVGDRAHGLEEVGAGTERRDVGRVQSQRAVAVRDGVGRTATGLERGGAAHEAGGGERVRQHAAARLQDLGEMAHGLGRQAGVQRRHGSRAAPEQELHVRQELGHGLRLRRRDYEKRRTRLGCFAGRDGGSRGSGGGRRREAVVRPAHALAAESRRSEAAPGLEQHHSVLDEPEVEASLAEDQVPPLGVRVRVLGEAG

SEQ ID NO: 57125 - protein, 286 aa, Zea mays
  Clone ID: LIB3969-002-B2_FLI.pep
VQRHDDEYTIEVSGHRVPLQQRPRIPQVRSGADEGVAQAIVLVRDVVVVLAGRRRVLGGVYCSRRRRGAVVLHEGAGAIVPLVVRRRLRVVDLAAAALVLPLVQPPPQLVYLRGERDLLLPERLDAGVHRVELSPERGVVMLQLLGAPPRTLILEPDGHLARLQAKLPRQLRLLPGLQLGAPRVERRLQRPHLLLREPPLPLPAGGGSSPPRARGVLLVAGHHQLVHELGLVVLPRRHHRELAVAALHALLRLNRKHLSPERRRRRRCSPKPTWQRRLAVFVCSSS

SEQ ID NO: 57126 - protein, 321 aa, Zea mays
  Clone ID: UC-ZMFLB73013G04_FLI.pep
SPPMAARRGPHVIKLHDPNPPLLGRAPGAAPAAVPASSRDEGLLAQHLRASAAHPAFALIEERLAARDQDIQELLVDNQRFAATHVALQQQLIAAQHELRAVSVAATRARAEREGEVRSLADQAAHMEAEARAIAAARAEIDQVHADVQVLAAARTDLVNRLQVLREKLAHKKAEASKTDSVRPQIETMRREIQNGRAAVDFEKKAHSDNLEQSKAMEKNMIAVASEIERLRGELANAEKGATAVNPAAAVGNSGYAAPYGNSASTYTGMYGNPDATYTAQAYPDAYSTNQGHMHTVANPHYMSQPVPYGQYESQHTNVQR

SEQ ID NO: 57127 - protein, 432 aa, Zea mays
  Clone ID: 700208768_FLI.pep
LFKCHSHPPQGLAWWEEDKRRHAHADTMAICSAHTTTSLRSPCTTVSNAGLRQKQVIFVTSNRRSGGGRRHGGARSFQVSCSVDKPVVIGLAADSGCGKSTFMRRLTSVFGGAAEPPKGGNPDSNTLISDTTTVICLDDYHSLDRNGRKEKGVTALDPRANNFDLMYEQVKAIKEGQAVEKPIYNHVTGLLDPPELIAPPKIFVIEGLHPMFDERVRDLLDFSIYLDISDEVKFAWKIQRDMAERGHSLESIKASIEARKPDFDAFIDPQKQYADAVIEVLPTQLIPDDNEGKVLRVKLIMKEGVKNFNPVYLFDEGSTISWVPCGRKLTCSYPGIKFSYGPDTYFGNEVSVLEMDGQFDRLDELIYVESHLSNLSTKFYGEVTQQMLKHADFPGSNNGTGLFQTIIGLKIRDLYEQIVAERAGVPAEAAKV

SEQ ID NO: 57128 - protein, 187 aa, Zea mays
  Clone ID: UC-ZMFLB73003D09_FLI.pep
FASVLLLPQQILLPPLHQRRRRTDVTFTFADAPNMLSGAITSTWMYPLVCPTKRTPPVAISVIQILSTLPTIPWYGDNDSKTEVSSRLRFFHFIARYLLHPSSRASLEKPRCRCTCRKRMSTTKTCRFTERCVLRELILLYEVNSLREILISLTSKWDVSLVQTISSNVFWGIQLIKCRSDVLINDN

SEQ ID NO: 57129 - protein, 309 aa, Glycine max
  Clone ID: UC-GMROPIC036A11_FLI.pep
YFFIMMAVARKEMDRIKGPWSPEEDEALQKLVERHGPRNWSLISRSIPGRSGKSCRLRWCNQLSPQVEHRAFTPEEDETIIRAHARFGNKWATIARLLSGRTDNAIKNHWNSTLKRKCASFMTADEAAGGGFSPRPLKRSFSAGTAVPPPGSPSGSDVSESSAAPGVVSVSVSVSPSQVFRPVPVRPVVETASSQDDADAEDAGPTTSLSLSLPGVESSEISNRTSTVPVMPVNTVAVAAPVPLPAPEVGLGALNLNAEFMAVMHEMIRKEVRSYMEQQNGMMCFQGMEMMEGFRNVSVKRIGISRVDS

SEQ ID NO: 57130 - protein, 315 aa, Zea mays
  Clone ID: UC-ZMFLB73021H06_FLI.pep
HSLRCALRYPIPSTAASLSTSGLRRLSSHHRTPPPLRSATTGEDEWNDAWETAWLPGDSPASSPAPAAPWESPASASESAIPVISAEVDPDTKAFVADMDERWAERRIASRRGQQQRASRAAEGGEGGVVARKKAQADDYRTRKQRVHAALWVKEIEKMEEARLGGGGGGADDIDRLLDSCSDIFDSGNTDFGDSKIPNTTEIKTKPDGWETTSRGQDGNIWDISQREDDILIQEFERRIAFSKQQIASFIKTHIFSRRRPIDGWKYMIEEIGPNARKGKGSVQRLPSVSDPATQPYREETPAIASSSSFRGNRP

SEQ ID NO: 57131 - protein, 274 aa, Zea mays
  Clone ID: UC-ZMFLB73091F05_FLI.pep
GTKLNIGKYFFWIPSFSVTAHHHLSPCPLLLPLPLPCQGPAAASVDDVGDPTDVGATGVAGNSALPAKPLEHLRAEGAAGLHPLHGLLVAAEADVERVQVGHVAGCGGGPRGGGQAVDRAPRRRSVRDRGCRVAAPPARRGRVGPAEAELAERGEDVVDGGPGARPAPTAEVGRQWRGLRRGRLGRRQEGAGRRRAHDALGEVALERLAPERGAVVGLGERGRAGGAPGAGLLLLRGREHAQLVRGVREEADPAAAGRAVLAGLGAVARRVEPA

SEQ ID NO: 57132 - protein, 134 aa, Zea mays
  Clone ID: UC-ZMFLB73014E10_FLI.pep
LTIAHWKPRSLADVLANPFHALFYVVFMLSACALFSKTWIEVSGSSAKDVAKQLKEQQMVMPGHRESNLQKELNRYIPTAAAFGGVCIGALTVLADFMGAIGSGTGILLAVTIIYQYFETFEKERATELGFFGF

SEQ ID NO: 57133 - protein, 159 aa, Zea mays
  Clone ID: UC-ZMROB73044D01_FLI.pep
GLQSMHMLTPAERCFMWLGGFRSSELLKLLAGHLEPLTDQQLVGISNLQQSSQQAEDALSQGMEALQQSLAETLASGSLGPAGPSGNVANYMGQMAMAMGKLGTLENFLRQADNLRLQTLQQMQRILTTRQSARALLAISDYFSRLRALSSLWLARPRE

SEQ ID NO: 57134 - protein, 295 aa, Zea mays
  Clone ID: UC-ZMFLB73017E03_FLI.pep
SLISDPVFSFWFNRHAGEGEGGEIVFGGMDSSHYKGDHTYVPVTQKGYWQFNMGDVLVDGKSTGFCAGGCAAIADSGTSLLAGPTAIITEINEKIGAAGVVSQECKTVVSQYGQQILDLLLAETQPAKICSQVGLCTFDGTHGVSTGIRSVVDDKAGKSNGGLKSDPMCNACEMAVVWMQNQLAQNKTQELILTYINQLCERLPSPMGESAVDCASLGSMPDIAFTIGGKKFKLKPEQYILKVGEGQAAQCISGFTAMDIPPPRGPLWILGDVFMGVYHTVFDYGKLRVGFAESA

SEQ ID NO: 57135 - protein, 551 aa, Glycine max
  Clone ID: UC-GMROPIC013E04_FLI.pep
MVQDMKQQDNGESKKKERHIVTWTQEEDDILREQIGIHGTENWAIIASKFKDKTTRQCRRRWYTYLNSDFKKGGWSAEEDMLLCEAQKVFGNRWTEIAKVVSGRTDNAVKNRFSTLCRKKQKYAALAKENSTSYINSNNKRMMLQHCNNMDTTSESGVPIKNLRRADIADDAEKIKFEDRSHLRNGTPINQQPRAPLAVLAQNSHNSNNLTDQHHLCNPKFSSSAQNNKIQGTFLKKDDPKISALMQQAELLSSLALKVDTENMDQSLENAWKVLQEFLNRSKESDIPGQKVPDVRLVDLKDMIEELKSGNEEGRVLQELLNRTKESDSTGHKIPDLRPADFKDMVEDSKSGNEEGQVLQEFLNRTNKSDIPEHKIPNLQLVDLKDMIEDLKSGNEEGQACWRKMDCYENSPGSSGYSTGSILICQSASDNLEHSLHQDIGTEMKSKQLEDEKGVKVVMPTANVDQDMVPCCMEQINNDGIVSTSSRLEFSSPLQVTPLFRSLAAGIPSPQFSESERNFLRKTLGMESPSINPSANSSQPPPCKRALLPSL

SEQ ID NO: 57136 - protein, 326 aa, Zea mays
  Clone ID: UC-ZMFLB73003H02_FLI.pep
VVRKEAENCDCLQGFQVCHSLGGGTGSGMGTLLISKIREEYPDRMMMTFSVFPSPKVSDTVVEPYNATLSVHQLVENADECMVLDNEALYDICFRTLKLTTPSFGDLNHLISATMSGVTCCLRFPGQLNSDLRKLAVNLIPFPRLHFFMVGFAPLTSRGSQQYRSLTVPELTQQMWDSKNMMCAADPRHGRYLTASAMFRGKMSTKEVDEQMINVQNKNSSYFVEWIPNNVKSSVCDIPPRGLSMSSTFVGNSTSIQEMFRRVSEQFTAMFRRKAFLHWYTGEGMDEMEFTEAESNMNDLVSEYQQYQDATADEEADYEEEEAAAE

SEQ ID NO: 57137 - protein, 510 aa, Zea mays
  Clone ID: LIB3066-021-G7_FLI.pep
GGAAMAAGDLEVLTALDTAKTQWYHFTAIVVAGMGFFTDAYDLFCISLVTKLLGRIYYTVEGSATPGTLPPHVSASVNGVAFVGTLSGQLFFGWLGDKLGRKKVYGMTLMLMVLCSVASGLSFGHTPASVMATLCFFRFWLGFGIGGDYPLSATIMSEYANKKTRGAFIAAVFAMQGFGIMAGGLVAIVVSAWFKASFPAPAYAVDPAASTPPQADFVWRIILMLGAMPAALTYYWRTKMPETVEISAGAAEEGAAAATATATEPAPASASASFGLFSGEFLRRHGLHLLGTSSTWFLLDIAFYSQNLFQKDIFSAVGWIPKAATMNALEELFSIARAQSLIALCGTVPGYWFTVALIDVLGRFAIQVTGFLMMTVFMLGLAVPYEHWTTPGHHIGFIVMYGLTFFFANFGPNATTFIVPAEIFPARLRSTCHGISAASGKLGAIIGSFGFLYLAQNRDPAKTDHGYPAGIGVRNSLFLLAGCNLLGLAFTFLVPESKGKSLEEMSGEND

SEQ ID NO: 57138 - protein, 158 aa, Zea mays
  Clone ID: UC-ZMFLB73019G11_FLI.pep
RRSCGSWAPGSTPTSPTRGRCCASRCWWPSSASRATTRATAAANATRCSARCTPGSTTRRAPEAPRRARSSGSSWRRGWTPTGTATRSSSRRRRPPPESSPRRAGGCRASPGRSCARARPTRGRRARALRVAATESGVKRVWRDQEECVCVCVDVSSR

SEQ ID NO: 57139 - protein, 823 aa, Zea mays; identical to SEQ ID NO: 53296
  Clone ID: 700221147_FLI.pep

SEQ ID NO: 57140 - protein, 120 aa, Zea mays; identical to SEQ ID NO: 53650
  Clone ID: UC-ZMFLB73022H07_FLI.pep

SEQ ID NO: 57141 - protein, 934 aa, Zea mays
  Clone ID: UC-ZMFLMO17201A10_FLI.pep
QCFLKQIRCQKSGIPTKEVGNIGGKEFSESLAPDVQKLLISSSCRPVVRKKAALCLLRLYRKNPDVVNIDGWADRMAQLLDERDLGVLTSVTSLFVSLVSNNVEAYWNCLPKCVRILERLARNQDIPQEYTYYGIPSPWLQVKTMRALQYFPTIEDPNARRTLFEVLQRILMGTDVVKNVNKNNASHAVLFEALALVMHLDAEKEMMSQCVALLGKFIAVREPNIRYLGLENMTRMLLVTDVQDIIKRHQAQIITSLKDPDISIRRRALDLLYGMCDVTNAKEIVEELLQYLDTAEFAMREELSLKAAILAEKFAPQLLWYVDVILQLIDKAGDFVSDDIWYRVVQFVTNNEDLQSYAATKAREYLDKPALHETMVKVSAYLLGEYGHLLARRPGCSPKELFAIINDKLPTVSASTVAILLSTYAKILMHTQPPDVGLQQQILTIFKKYESYIDVEIQQRAVEYFELSRKGPALADVLAEMPKFPERESALLKKAEDAEIDTAEQSAIKLRSQQQTSSALVVADHPPANGSAPPVNNLTLVKMPSQTVSDTQESGVSYEEAPKPPVEAPKENGTPVEVQNRDTNITEINNEIKAEPPSTSHSTSPGDLLLADLLGPLAIEGPPAVEQNPAQGLNANQSPAGDLALATLDDQSNSVQPIVNVEEKFHILCTKDSGVLYEDPYIQIGLKAEWRAHHGRLVLFLGNKNTSALTSVRALILPPSHLKMELSSVPDTIPPRAQVQVPLEVANLLASRDVAVLDFSYAFGTSLVDAKLRLPVVLNKFLQTITLTPEEFFSQWKALTVHSLKVQEVVKGVKPMPLSEMANLFMSLHLAVAPGLDNNPNNLVACTTFFSEATRAMLCLIRVETDPQDRTQLRLTVASGDQYLTFELKEFIKEHLVDIPRTQVAPPRAAVQPQLPTTAPATYNDPGTMLAGLL

SEQ ID NO: 57142 - protein, 222 aa, Zea mays
  Clone ID: UC-ZMFLB73038F06_FLI.pep
RREVGAGARRIRGRGHRGGRDGVADQGRRRGARRHGGERQGLRVQPGGAPAVRRRHAADAGEVGGHVPVRAVRRGPQAGADVGALVRAVPHGPDHGVRRRADLQLQRRGRYRYCGAGAAQGGRVVRGTATSGRPPRSPPRTQATAHACTPGEANNTPRGSARLVLRVPCMMPSEGSWAHRLQQGGLDYHGCQCDPRRRSILLFGASFPDALPARLGCVCNFV

SEQ ID NO: 57143 - protein, 199 aa, Glycine max
  Clone ID: 700786045_FLI.pep
STPSTTFSRAINKDMVQTKKFRGVRQRQWGSWVSEIRHPLLKRRVWLGTFETAEAAARAYDQAAILMNGQNAKTNFPTSKNQAEADDNNNTDTFLSPKALSELLSTKLRKYCKDPAPSLTCLRLDADNSHIGVWQKGAGPHSGSNWVMRLELGKKQITEEGSESTESPQSSTNGATENNEVEEEDRVALQMIEELLNWN

SEQ ID NO: 57144 - protein, 329 aa, Zea mays
  Clone ID: UC-ZMFLB73047B12_FLI.pep
AGDPEAGHDRAGGEHPGVVDGQGRADGPRRRHPPRGLQHHLRHVHVVPARERAGGAAPERAPGVEPRRRALGAHDHGLRQLLRRVVAAGRGDGRDGHAVRLRRGARGPRAGAGPGARLRSGHPRLRGLPVRAQVQLHHDRRRGAEPGVRVRREQDLLRGRPQLPVLLGGLLDGQRRRRRGLGHRDTHADADQRGRGGHVQGVHVARRCQGRGRGRGAGGAGVHVGGGEEELHGEVHVQVAAVGHRRFRAARVVGREAQRGQPDSVHVDLNLMDGWIIPYDSGFWRLSLKERPIIHHPCDGLVPYTTQSKGPKCRVGRFGGGTVQIGGFF

SEQ ID NO: 57145 - protein, 349 aa, Glycine max
  Clone ID: uC-gmflminsoy056f07_FLI.pep
DFTQREREREREREREREREMGRAPCCDKASVKRGPWSPEEDTKLKEYIEKHGTGGNWIALPQKAGLKRCGKSCRLRWLNYLRPNIKHGDFSDEEDRIICSLYVNIGSRWSIIAAQLPGRTDNDIKNYWNTKLKKKLMGLLPLSHHRKQPSFPSSFTLQNPPLSPSAHQLYGEYCTYTPTTTTSFTSNIEPPFSLPSSNYASTSDITTSVSHPFYQNQDSMQCYYPIMRDNSSNNNNNMLMFGSEGSCSTSSDGSCTNQGREIIKQEERIGCHSYNNNNDNFMLSHSNNINDGEKSCAAGEWFSQTLLAPLGYDIEDIKQLISSSSSTTIFNNVDENKTEEKAMYYYYY

SEQ ID NO: 57146 - protein, 387 aa, Zea mays
  Clone ID: UC-ZMFLB73027D05_FLI.pep
SKCRFRHNNGRWYNGCIIGFEGSGDARISFLTPTSENMSICKFFLQQRCRFGSNCRMSHGIVMPSKALKRFTPTRWEQSLVGSSILATSGYNSGLWRRAELESWDDNLKIGQVVFQDDGSSASLPSDSLSVSEYADMSDEDEGSLSDEESEFSDDADQEDGSVHQGLGLLEFTNFSGIQTDTMIFAKWEHHTRGVASKMMAKMGYREGMGLGVSGQGMLDPIPVKVLPPKQSLDHALASSEADGGSGKKRSRGGKRKREKKFAEQARAAKAEEAERSVFNFINSHLVSQEGSTTKVRKGSSVETNGLAKKEDRRSLVAYGEEVKELRIRVEKLEEMKNRNCKDKAFFEAASRKLEETRKALADAEATHASATSAVTRKEKEKKWLKF

SEQ ID NO: 57147 - protein, 110 aa, Glycine max
  Clone ID: uC-gmflminsoy120d10_FLI.pep
NWNGKCAGAVDLMQETQTMVTILPCNCSCLGLLSPLILDQADTQFVTLAHTPFVERGLHHEFELDACHIPSLQLRDSVGVDLFDTLPTATNQIKSFIPINFRYHNISCIL

SEQ ID NO: 57148 - protein, 218 aa, Zea mays
  Clone ID: UC-ZMFLB73042E09_FLI.pep
DFRTLPTPTPTRSNRVPAAMAAAATNADVEVVDFDLDDDDLMDEDAGPDPAPPPASRLRSTIAGDDAPRRTKGRGFREDPNSSATRDSRFGAGGRADLDSLGGPGPIQSIEGWIVLVTGVHEEAQEDDLQNAFQEFGQVKNLHLNLDRRTGFVKGYALIEYEKFEEAQAAIKELDGAELYKQRMSVDWAFSSGPAKRRNTRKRSPPRARSRTPPRRRH

SEQ ID NO: 57149 - protein, 229 aa, Zea mays
  Clone ID: 700051948_FLI.pep
LAAIVTVPSEFRLQDVQGERKNDESISQGTENSRARVRALNLRQLLVRVAGLHEHSEPVVQVGVGANGRRGGGGGHVAERAGAGLHGDVVEAVQRHGQRLRPERVVELELLGGLRGRGEALLLGEPGRARPRVSLLLLRRLGHRRRGRRPFRRRRRGGGRGDGGRRRLPGTRALGPAALPGGATTCMRPVLLLLQLLGGGLQPLLEVRVPDVLDLVVRPPGQPGGDGGP

SEQ ID NO: 57150 - protein, 344 aa, Zea mays
  Clone ID: UC-ZMFLB73047C08_FLI.pep
KNPNASAPGLSASPPSAKTLACIRARTKLRLRGASSCRQKLSGASAMVWFQCEDCGENLKKPKLAGHFRSCSAYKLSCIDCGELFSHDTVQGHTQCISEAEKYGPKGQTKPSNGAQGKADKPKPNADVDINVGLSTRPPWFCSLCKTTTTSKQTLLLHADGKKHRAKAKAFHVSQKQKDGAEQTPDVKEAGVVPTKESAQVNGGVSGDHERNEDKDAGKRKRMDDMTIEPGNTKRQLTQSGDEKSENKAKSKADELASGTDCKSVQKQKIKWKKIITKTLKANADGVMKLKKLQKLVSKELQECGVSKDKEELRATLMDKIASSSRFYVDGKNVRLVAKNEEES

SEQ ID NO: 57151 - protein, 123 aa, Zea mays
  Clone ID: UC-ZMFLB73034F08_FLI.pep
HSRHSSPPIYRNHHSSKSHKQKLKGTQLCLGSIFYVAAKKDTFPACEVDSASYFPARRQQNQRSLPCFKGTTPPNCLDDSLLTVARTALSGLRPASRRPPRTPPGQRELASCASLPRCCSHHA

SEQ ID NO: 57152 - protein, 402 aa, Zea mays
  Clone ID: LIB3595-015-H8_FLI.pep
LADYNIQKESTLHLVLRLRGGMQIFVKTLTGKTITLEVESSDTIDNVKAKIQDKEGIPPDQQRLIFAGKQLEDGRTLADYNIQKESTLHLVLRLRGGMQIFVKTLTGKTITLEVESSDTIDNVKAKIQDKEGIPPDQQRLIFAGKQLEDGRTLADYNIQKESTLHLVLRLRGGMQIFVKTLTGKTITLEVESSDTIDNVKAKIQDKEGIPPDQQRLIFAGKQLEDGRTLADYNIQKESTLHLVLRLRGGMQIFVKTLTGKTITLEVESSDTIDNVKAKIQDKEGIPPDQQRLIFAGKQLEDGRTLADYNIQKESTLHLVLRLRGGMQIFVKTLTGKTITLEVESSDTIDNVKAKIQDKEGIPPDQQRLIFAGKQLEDGRTLADYNIQKESTLHLVLRLRGGQ

SEQ ID NO: 57153 - protein, 442 aa, Zea mays
  Clone ID: 700240324_FLI.pep
HRMARPLLCLALLCTSLAFTTCAGIRLELTHVDAKEHYTVEERVRRATERTHRRLASMGGVTAPIHWGGQSQYIAEYLIGDPPQRAEAIIDTGSNLIWTQCSRCRPTCFRQNLPYYDPSRSRAARAVGCNDAACALGSETQCLSDNKTCAVVTGYGAGNIAGTLATENLTFQSETVSLVFGCIVVTKLSPGSLNGASGIIGLGRGKLSLPSQLGDTRFSYCLTPYFEDTIEPSHMVVGASAGLINGSASSTPVTTVPFVRSPSDDPFSTFYYLPLTGITAGKVKLAVPSAAFDLRQVAPGMWTGTFIDSGAPLTSLVDVAYQALRAELARQLGAALVQPLAGTTGFDLCVALKDAERLVPPLVLHFGGGSGTGTDLVVPPANYWAPVDSATACMVVFSSVDRKSLPMNETTVIGNYMQQNMHVLYDLAGGVLSFQPADCSSI

SEQ ID NO: 57154 - protein, 437 aa, Zea mays
  Clone ID: UC-ZMFLB73046B08_FLI.pep
TGSATPCFTASASAKASWRDSLSPVPKAQNPRAARASANTMLPALIALLLSLLPAVADAASMDPTERETLFRVMEAVSSDRDWRVESPDPCGGPWPGLECKPAADAGAARMHVTRLDFGVEPNPTCKDSASFPPEVFTLPHVQSLFFVDCFTNPAATTALALPPPANLSATGLQQLSIRANPALSGVMPPALASLRSLQVLTISQNGLVRGEIPPGIGDLTSLLRLDLSYNSLSGPVPSQIGQLKSLVGLDLSYNSLSGAIPSRLGELRQLQKLDLSSNNLTAGIPDAVANLTSLTFLALSNNGLTGRFPPGISGLRSLQYLIMDSNPMGVPLPSELGSLARLQELRLAGSGYSGPIPDAFGQLASLTTLSLQDNNLTGPIPAALSRLGRMYHLNLSNNALGGAVPFDRAFLRRLGGNLDLSGNSGLCLDDRSALRG

SEQ ID NO: 57155 - protein, 297 aa, Zea mays
  Clone ID: 700211270_FLI.pep
YILVAGRTRSMGRPPCCDKAGVKKGPWTPEEDIVLVSYVQEHGPGNWRAVPVSTGLMRCSKSCRLRWTNYLRPGIRRGNFTPHEEGIIVHLQALLGNRWAAIASYLPQRTDNDIKNYWNTHLKKKLRKQQAIGAIFAPPTPSEPTAGHADCRRHDMTRSSKDSHACPADSTPAADEVVTQLIAQQFAATDGDTSSSSSYSYASSTDNISKLLDGFMKSASPARDDATDTIKPSSAIDIDPFDHKSGGAALPPPKKRQQQQHLSSIENWLFDDATEQVVVQLMEEISGGSCSVPMLLY

SEQ ID NO: 57156 - protein, 303 aa, Zea mays
  Clone ID: UC-ZMFLB73025G12_FLI.pep
KLHRSNEHEPWQNEAEVVRCEPSMANAPRILALGLLALLCAAAGPAAAQNCGCQPNFCCSKFGYCGTTDAYCGDGCQSGPCRSGGGGGGGGGGGGGGSGGANVANVVTDAFFNGIKNQAGSGCEGKNFYTRSAFLSAVNAYPGFAHGGTEVEGKREIAAFFAHVTHETGHFCYISEINKSNAYCDASNRQWPCAAGQKYYGRGPLQISWNYNYGPAGRDIGFNGLADPNRVAQDAVIAFKTALWFWMNNVHRVMPQGFGATIRAINGALECNGNNPAQMNARVGYYKQYCQQLRVDPGPNLTC

SEQ ID NO: 57157 - protein, 160 aa, Zea mays
  Clone ID: UC-ZMFLB73028E02_FLI.pep
LAYIALDYEQELETAKNSSSVEKSYELPDGQVITIGAERFRCPEVLFQPSMIGMEAAGIHETTYNSIMKCDVDIRKDLYGNIVLSGGSTMFPGIADRMSKEITSLAPSSMKIKVVAPPERKYSVWIGGSILASLSTFQQMWISKEEYDESGPAIVHRKCF

SEQ ID NO: 57158 - protein, 348 aa, Zea mays
  Clone ID: UC-ZMROB73066A07_FLI.pep
LRDLRLGLPDESVEPLVPKKKAGVMSVQVTKFKCGGAVVGCTFDHRVCDAYSFNMFLVAWAAAASGSSAPPAPCFHRSFLAPREPAAAPLRTAGSLADRLFVPVSRAPALPDTATANRIYRVSAADVAALQASAGAGRTKLEAFTAHLWGLHAKAAAASRRQQPRSCCMGVVVDGRSRLRRDGAMGAYFGNVLTIPYGVMGTGALGEMALADVAGDVHRWVAEAATGEHFRELVDWVEAQRPEPTVARAYLGRGHGGEDAMACVVSSGMRLPLGEVDFGWGRPAFASYQFPWPGGAGYVMPMPSARGDGDWVVYVHAALEVVEVMEAEPTVFRALESSYVFDRSGELN

SEQ ID NO: 57159 - protein, 263 aa, Zea mays
  Clone ID: UC-ZMFLB73048H11_FLI.pep
HHALNPDPFRGAFGSDGEKYARDVQEIIEFGTTGRVGGFISEAIQGVGGIVELAPGYLPVAYSMVRKAGGLCIADEVQAGVARTGSHFWGFEGHGVIPDIVTMAKGIGNGIPIGAVVTTPEIAQVLTRKSYFNRSTFDGNPVSTAGGHAVLKVLEKEKLQENAFVVGSYLKEQLNNLKDKHEIIGDVRGKGFLLGVELVTDREKKTPAKAEISRVMNHMKDMGVLVGKGGFYGNVFRITPPLCFTKEDSDFFIEVMDIALSKL

SEQ ID NO: 57160 - protein, 184 aa, Zea mays
  Clone ID: UC-ZMFLB73051H07_FLI.pep
TAVFHTSTFHLFSATLVLLALDFTDAQACLEKVSYSLLIFFCGMFITVDGFNKTGIPNTLWELVEPYSRIDSAKGVALLAVVILILSNVASNVPTVLLLGTRVAASAASISHGSERKAWLILAWVSTVAGNLTLLGSAANLIVCEQARRAQFFGYNLTFWSHLRFGVPSTIIVTAIGLLIVISY

SEQ ID NO: 57161 - protein, 417 aa, Zea mays
  Clone ID: UC-ZMFLB73061D06_FLI.pep
VAARWLSSEMASAGVAPSGYKNSSSTSIGAEKLQDQMNELKIRDDKEVEATIINGKGTETGHIIVTTTGGKNGQPKQTVSYMAERIVGQGSFGIVFQAKCLETGETVAIKKVLQDKRYKNRELQTMRLLDHPNVVALKHCFFSTTEKDELYLNLVLEYVPETVHRVVKHHNKMNQRMPLIYVKLYMYQICRALAYIHGTIGVCHRDIKPQNLLVNPHTHQLKLCDFGSAKVLVKGEPNISYICSRYYRAPELIFGATEYTTAIDIWSAGCVLAELMLGQPLFPGESGVDQLVEIIKVLGTPTREEIKCMNPNYTEFKFPQIKAHPWHKVFHKRMPPEAVDLVSRLLQYSPNLRCTAMEALVHPFFDELRDPNTRLPNGRFLPPLFNFKPHELKGVPSDIVAKLIPEHAKKQCSYVGL

SEQ ID NO: 57162 - protein, 98 aa, Zea mays
  Clone ID: UC-ZMFLB73055H09_FLI.pep
SSTVQSIGCYRCIMTNTMITDQRRSYFTMSPNVQARLLGTAGDGPLRHPQVRRSFSALESNDPTSNTATGVSSALAELVPTLSKIIRISVNNNSSAND

SEQ ID NO: 57163 - protein, 375 aa, Zea mays
  Clone ID: UC-ZMFLB73066B12_FLI.pep
FLLRQPRRRPPPQLSGAAMEALHEEMPFDLDFHPSSPLVVTSIITGELCLFRYGPESQPERLLLLKAHKESCRAVRFVDSGKVILSGSADCSVLASDVESGKAIARLEDAHENAINRLVCLTESTIATGDDEGCIKVWDTRERSCCNSFEVHDDYISDMTYVAETNQILATSGDGTLSVNNLRRNKVRSRSEFSEDELLSLVLMKHGKKVVCGTPSGALLLYSWGYFNDCSDRFIGHTQSVDTMLKLDEDTLVSGSSDGVIRLVGILPNRIKQPLAEHSEYPIEALALSNDKKYLGSISHDKMLKLWDLEELLSGPQVANGDEPAEAGSDDSDDDSDDDVMDVDMAATSSKGSRSKKAGKGQSSSRPASDFFADL

SEQ ID NO: 57164 - protein, 375 aa, Zea mays
  Clone ID: UC-ZMFLB73068G06_FLI.pep
RGSWQGHARDHVQGRDRVWAGHGGEAPQGDLVARTRVPGQGRGHRRDRPPKCRAPAGLLLQQGREAYGVRVRGHGQPFLHASRQSRLRPVATELGVEEAHRFGLGARSRVHPRHGLHGHARQHQVVQHPLEPHRGRARGRPRARAPRQPGGRGDDDPRRGVPRARGGGGPAAGVAEGGRVQLRRAAPGAADGEGPGARGAARRGRGPPALGAVRGEGGVDVRGVRHGAAQAPGRRGRDGGDAAAGHGLHRARSGPAAGHARDRGAHRGARRHGVDVDGDGAVRPECVRGRGGRPAAEDHRIDPSELRSVRVRSLVLLSLTEGSEQGGKKEEIFLFCLLALVVGALSCAVYSFMRLLTLVRPQMNSFVLAAVMSVR

SEQ ID NO: 57165 - protein, 95 aa, Zea mays
  Clone ID: UC-ZMFLB73061F11_FLI.pep
KSQHTSFNPKPKHIHDSWDRPGQILSALALITEINKVNKALQTCATHKKVESSNEAQNQLSRSQAIFQTAYKEYVYLLFCETVFPNSQLLQSLYV

SEQ ID NO: 57166 - protein, 225 aa, Zea mays
  Clone ID: UC-ZMFLB73064A06_FLI.pep
DEEAAMGQQSLIYAFVARGTVVLAEYTEFTGNFTTIASQCLMKLPASNNKFTYNCDGHTFNYLVEDGFTYCVVAVESVGQQIPIAFMDRVKEDFTKRYGGGKAATAAANSLNREFRLKLKEHMQYCVDHPEEVSKLAKVKAQVSEVKGVMMENIEKVLDRGEKIELLVDKTENLRSQAQDFRQQGTNVRRKMWLQNMKIKLIVLGIIIALILIIILSVCHGFKCH

SEQ ID NO: 57167 - protein, 77 aa, Zea mays
  Clone ID: UC-ZMFLB73062C08_FLI.pep
KRMERALHQSRVQRIQDPEGIWSSCCLRSLSVRLHLDYTYIFTYIYVCVWVPCVAWRDDVINKEGGCACGIHGWPWI

SEQ ID NO: 57168 - protein, 420 aa, Zea mays
  Clone ID: UC-ZMFLB73064B05_FLI.pep
APPDGKPYEIRLLQIPGAIFAAACGLVVDAIMFTLIALYKFPVMLFKGWKRLIEDLIGREGPFLETACMPFAGLAILLWPFAVIGAFIASVICSVPFGVYAAVVVYQESSLFLGLSYAISSVSIFDEYTNDVLDMAPGSCFPRFKYRTNEASSHGGSLSRPASFKDKHDGKKAPQRVTSFKSSFDEFNPFKLLDHLFIECKHHGKDLVAEGVITPKDIEGTKAGKASTGVLNVGLPAYVILKALLRSAKANSDGLVLSNGSEITSDNRPTSKIFEWFFDPLMVIKDQIKAENFTEEEEAYLEKQVLLISDPKRIKENLIRLPPLSERKQAEIEAFARRLQGITKSISRYPTSKRRFDALVKALSEELARTMGGNQSANGSQVRKIRSGIVRMLSQRSLGKTTGIPGDDHEAQLTSDGFTS

SEQ ID NO: 57169 - protein, 340 aa, Zea mays
  Clone ID: UC-ZMFLB73069E11_FLI.pep
SLLSPEASAAMPALPAFPLTRRPSDARRRGRLVLSLVVFVAVSAAAALAYLSFPSAGRTSPPAVRTEADCCRGMEGLELWGPAVKWGSDHRLPSAAACCAACKAMCPHPKDGACRCDSWVFCGDERKCKDRLGECWLKKQKDVMAPAVIAKGEDVMWTSGLIFGKGEGIVGLETNLGTLHIQLLPGCAPRSVDHFIELLGLRNCAGCRFYRAEGRGNVWDAKGDHEKNVAFGPPYALLQGTLEVDGVPFKKIPREACPAVKRGSVAWVGSGPEFLISLADHEEWRDAYTVFGNVLPMDMAIAEEMTLLPTSTDVWSNVKVKVLKDPVYFKVKRSSNASAV

SEQ ID NO: 57170 - protein, 320 aa, Zea mays
  Clone ID: UC-ZMFLB73067E05_FLI.pep
KFRENNYHAGIVRAAIYPGDVLSIHMKKPQGFKYKSGMYLFVKCPEVSPFEWHPFSITSAPGDDYLSVHIRTLGDWTSELRMLFGKACQAQVTSKKATLTRLETTVVADAQTEDTRFPKVYIDGPYGAPAQNYRKYDILLLIGLGIGATPFISILKDMLNNLKSNEEVESIHGSEIGSFKNNGPGRAYFYWVTREQGSFEWFKGVMNEVAGSDHSNVIEMHNYLTSVYEEGDARSALIAMVQSLQRAKNGVDIVSGSKIRTHFARPNWRKVFCDLASAHKNSRIGVFYCGSPTLTKQLKDLSKEFSQTTTTRFHFHKENF

SEQ ID NO: 57171 - protein, 459 aa, Zea mays
  Clone ID: UC-ZMFLB73051E09_FLI.pep
MIEEVERSLATPTALLRGIADAMVAEMERGLRGDIHAQLKMLISYVDNLPTGDEHGLFYALDLGGTNFRVLRVQLGGREKRVVKQQYEEVSIPPHLMVGTSIELFDFIAAALAKFVDTEGEDFHLPEGRQRELGFTFSFPVNQTSISSGTLIKWTKGFSINGTVGEDVVSELSRAMERQGLDMKVTALVNDTVGTLAGGRYMDNDVVAAVILGTGTNAAYVEHANAIPKWTGLLPKSGNMVINTEWGSFKSGKLPLSEYDKAMDFESLNPGEQIYEKMISGMYLGEIVRRILLKLAHDASLFGDVVPTKLEQPFILRTPDMSAMHHDSSHDLKTLGSKLKDIVGVADTSLEVRYITRHICDLVAERGARLAAAGIYSILKKIGRDKVPSSGSKMPRTVIALDGGLYEHYKKFSSCVEATLTDLLGEEASSSVVAKLANDGSGIGAALLAASHSQYGESD

SEQ ID NO: 57172 - protein, 260 aa, Zea mays
  Clone ID: UC-ZMFLB73051F04_FLI.pep
ARLQPALAAGARGLGTAAEVAATARWEPMGAREYYDYRRAMYGDITHKAILVDAAGTLLAPTEPMAQVYRTIGQKYGVDYSEDEILMRYRWAYAQPWGRSRLRYVNDGRPFWQYIVSSSTGCSNLEYFEELYQYYTTEKAWHLCDPDAGRVFEALRKAGVKTAVVSNFDTRLRPLLQALKCDRWFDAVAVSAEVAAEKPNPTIFLKACELLRVKPEEVVHIGDDRRNDLWGARDAGCDAWLWGSDVYSFKEVAERIGVEV

SEQ ID NO: 57173 - protein, 255 aa, Zea mays
  Clone ID: UC-ZMFLB73070D11_FLI.pep
DLTWQKWTYKVGLKGEALSLHSLSGSSSVEWGEPVQKQPLSWYKAFFNAPDGDEPLALDMSSMGKGQIWINGQGIGRYWPGYKASGTCGICDYRGEYDEKKCQTNCGDSSQRWYHVPRSWLNPTGNLLVIFEEWGGDPTGISMVKRIAGSICADVSEWQPSMANWRTKGYEKAKVHLQCDHGRKMTHIKFASFGTPQGSCGSYSEGGCHAHKSYDIFWKSCIGQERCGVSVVPDAFGGDPCPGTMKRAVVEAICG

SEQ ID NO: 57174 - protein, 428 aa, Zea mays
  Clone ID: UC-ZMFLB73083D04_FLI.pep
SCLVLSWLPARNSAPRSLARTDQQIARGSERATGRGREVGMGSEGRVWNGAGVAAGSGYGGSVEAKATTAAPADVPTSAASVDISLPLPEMSPHIIGLCKELVKGWSSIDSSRFSIETVSGGITNLLLKVSVKGNNGNDSSVTVRLYGPNTDLVIDRKRELQAIPYLSAAGFGARLLGMFENGVVQSFIYARTLSPADMKEPKIAAEIAKELRKFHQVDIPGSKEPQLWNDIFKFLKKAAALKFEDNEQQKRYVKISFTEIQDEVKELKDLLDILHAPVVYAHNDLLSGNLMLNDLEGKLYFIDFEYGSYSYRGYDIANHFNEYAGFDCDFNLYPDKDAQYHFFRNYLHPDRPSEVQAQDMEVLYVETNTFRLASHIYWALWALIQAKVSPIDFDYLGYFFLRYGEYKKQRDSCFALAQSFLSGLRNG

SEQ ID NO: 57175 - protein, 140 aa, Zea mays
  Clone ID: UC-ZMFLB73071B04_FLI.pep
RVWSVDFSIVDPTKLVSGSDDGSVKLWDMNQAGSIGTIKTRENVCSVQFQPDTARSIAIGSADHKIYCYDLRHIRAPYCTLVGHTKTVSYVKYLDASTIVSASTDNSLKLWDLSMSPGRIIDSPVQTFKGHTNTKQGHWS

SEQ ID NO: 57176 - protein, 176 aa, Zea mays
  Clone ID: UC-ZMFLB73073F08_FLI.pep
GIEHRRVVAHRRGHPLWQVIGAVVAAGAVGFLLNDGHHGGVHGFNPLQECTLTSSGRSRNWHYKLCVGRWLVLPASPATSRGQQPYYHGAYAESGSDRFHYAYQRAGSSTASALRLRMRGAMSNRNITLSVSAHTNLLAGNEEGNGEVEIVAGSSEEDEAKEWRRRTSSLSGAMRG

SEQ ID NO: 57177 - protein, 271 aa, Zea mays
  Clone ID: UC-ZMFLB73083G10_FLI.pep
SSEMARAAAPPPLHRLPGLALLCLAVAVCFSGGENAAAAAWTRKIVGVHELRVGDFSVKVTNWGATLMSVILPDSKGNLGDVVLGYDTVAEYVNGTAYFGGLIGRVANRVAGARFTLDGKAYRLYRNDGNNSLHGGHRGFSKVVWTVKEHVGGGDSPYITLYYHSFDGEQGFPGDLDVYVTYRLSRPYVLSVRMNATARSRATPVNLAHHAYWNLGGHGSGPVLGETVQLFASRYTPVDAALVPTGALAPVAGTPYDFRAPAPVGARLADL

SEQ ID NO: 57178 - protein, 325 aa, Zea mays
  Clone ID: UC-ZMFLB73092C09_FLI.pep
ATGERPIGHRRARLRVSGGGLRARRRPVRHARVAENGLDEGCVQPDVLLPQCSSAGLLELVPAELAAQELGEAAEVELGALGPQPPHDLRLELDRVHAAELLRPRLHRYLAGERHKIYAAPPAGRSGPLAAPGRAANPSLRRRRPRAPAIRGGRARRDKRAPDHGPTLPTPAGPDPETAIQHGSTRTREAAPRPNSAALLIESSSEQARTRILRSGASSESPTKSVRGNRVERLELGAAVKRIEGETKRIAWGLTSTRIPARWWRRWRVRIGGEKLERERKNISSLSLSLPAVIGNFLPKLLVCGRRTVVGDAIWWVNVSPACGS

SEQ ID NO: 57179 - protein, 166 aa, Zea mays
  Clone ID: UC-ZMFLB73084F02_FLI.pep
GFFASLPSAPPLPSPTSPLLLAKYRRRPGPPMQHRGPPPMARLRPEPIDREKTCPLLLRVFTRVAGHHQNEEFAVRGKEPKDEVQIYTWKDATLRELTDLVKEVALPARKRNARLSFAFVYPDKNGRFVVRQVGSTFAYGHGRGDDAKTLAELGFQIGDYLSVAIM

SEQ ID NO: 57180 - protein, 86 aa, Zea mays
  Clone ID: UC-ZMFLB73080F09_FLI.pep
YAEEQKAKASATVKIIQSKHRSSNDHPPNQLSMSPFPSTVRLSECTLQGRCTACHEIPARPGLIMLVMAEVGRPPALSISKMPPVL

SEQ ID NO: 57181 - protein, 149 aa, Zea mays
  Clone ID: UC-ZMFLB73093D02_FLI.pep
VQTMHTIKEKRSEMSKWKACSPFPHGSTNGGSTQKKRHRCLQTVSGTRFLCSAGFYYRPLRLIAPTIRGAGKIGSQTKMQGASIVRSRARCLVPVGKLDTLVDGRLELALEVFQPLLLELVELTQTKHFLHSILAEPNLGGKEWQLCHS

SEQ ID NO: 57182 - protein, 123 aa, Zea mays
  Clone ID: UC-ZMFLB73078F06_FLI.pep
EGELRLQARHDHHQPRPQERRQRALPQDGGLRALWEGRPRLHLGGGEAPQGGEAVFCMRRLLCFGRSFWSGLVWSGVPALYHAFLWLLLVILDLPLAYHLYCTVTVLISGTCAGSYCVCLFTY

SEQ ID NO: 57183 - protein, 202 aa, Zea mays
  Clone ID: UC-ZMFLB73122B12_FLI.pep
CNQSDHPVVPSNTRCGDDDGSGKRWCDRRRRRHRVGAPGRPLRGDECPAGRRGGGVVHGRRLRRVEVQRRQVGQGEDLPRRRRARVQLQPCGARRGGGERGGVPELRGAQQGREGAAERARQGEARQRHALLRLHRAGTLPSRHEARRQGRVVVPPGNGGHAQLPESRSIDPCLRSAACGILKNLDLLAILRCLVNLMASYL

SEQ ID NO: 57184 - protein, 71 aa, Zea mays
  Clone ID: UC-ZMFLB73100A03_FLI.pep
ADLVALILYRRNCFPVYVLPYSQSLGTTLKLVSALPSLELSSNDRGCPLMSQLMCHTWPQLRPIGSHPNSV

SEQ ID NO: 57185 - protein, 77 aa, Zea mays
  Clone ID: UC-ZMFLB731237D08_FLI.pep
SEKGLLFKKNKNNSPCHDVSRVLAHDENTCRLTSDMMYVNTLSTIVYSILRPQVNTLSNREACQFSSRCQQIRPWSH

SEQ ID NO: 57186 - protein, 314 aa, Zea mays
  Clone ID: UC-ZMFLB73120D09_FLI.pep
DCTYKAMNREYTVGEFRKVVDTLCELVPGMQIATDIICGFPGETDEDFSETVNLVKEYQFPQVHISQFYPRPGTPAARMKKVPSNEVKKRSRELTSVFESFSPYQGMEGKVEKIWITEIASDGVHLVGHTKGYIQVLVTAPDSMLGTSADAKITSVGRWSVFGVVVEGSVAVIEAPIQTSAELQEEHVQNQVEEAGCCATDSCGACACSNEAQPCGPDRCGDALRAPQTCGGDVVTTRQEALQPTLVRRSVDGTTKGSDSTAAHSAGKEQRVEVVTRRGVDIDTVLWCGLAASFAVTVALLALLTSKILSTTSH

SEQ ID NO: 57187 - protein, 410 aa, Zea mays
  Clone ID: UC-ZMFLB73100F03_FLI.pep
AAEIADDRVAQSKTEDGKFSRKETMKGREEQKGEGASDGVTQTKTEDMNVTRKETMKGGERKGDGSRKEMMKGREERVKTEEKTGKEKEEEKSGSGFIFMCSARTKPECYQNGVFGLPRGKMDVVEKIQRGTKLFLYDFDLKLLYGVYKADTRGGLDLVRHAFDGKFPAQVKFSVFKDCLPIPESSFKHAIKENYSSKGRFTQELNTKQVQRLLALFKPISLSKPAPQHIEDIRKPSDYEERRQLQHIEERAAPINVHAHPLEDRYKMTRSLHPPLFDEPRRGLVLNPYHMQEPQHVPLNYYHQVATRSPYHQPHMDIMHERTAAEVTVRDHQALPGELAARSERVDELYRSYKLSTRAMDLSPGASYLTTYEHPTSVYGEGIQRPALTRVSGPSVPVSTRYSFAGPPAY

SEQ ID NO: 57188 - protein, 50 aa, Zea mays
  Clone ID: UC-ZMFLB73111G08_FLI.pep
RISEVDVAMGLSPPDRLTCGLAWRVYVAPLIYVVSCQDVSLIPYIGKVSL

SEQ ID NO: 57189 - protein, 368 aa, Zea mays; identical to SEQ ID NO: 46496
  Clone ID: UC-ZMFLB73114B10_FLI.pep

SEQ ID NO: 57190 - protein, 123 aa, Zea mays
  Clone ID: UC-ZMFLB73098E05_FLI.pep
DRTTWSATQGGPCWRSWRGCWRSWSLSRRGSRGRLAAGGSISQKAEPSKRRRGRRASEVHRWVVACLGSLVCAMRTIEFEFVLLPNRGPPYPVEMFDSWTFCAVVFVDQNVVLCNKLACAAFC

SEQ ID NO: 57191 - protein, 133 aa, Zea mays
  Clone ID: UC-ZMFLB731216F08_FLI.pep
KDSMVRVSVLNDALKSMYNAEKIGKRQVMIRPSSKVIIKFLTVMQRHGYIGEFEYVDDHRAGKIVVELNGRLNKCGVISPRFDVGVKEIEGWTARLLPSRQFGYIVLTTSVGIMDHEEARRKNVGGKVLGFFY

SEQ ID NO: 57192 - protein, 320 aa, Zea mays
  Clone ID: UC-ZMFLB73114H09_FLI.pep
SNSHHGVPSDLPQSHCKKLAPEYEKLGASFKKAKSVLIAKVDCDEHKSVCSKYGVSGYPTIQWFPKGSLEPKKYEGQRSVEALAEFVNSEAGTNVKIAAIPSSVVVLTSETFDSIVLDETKDVLVEFYAPWCGHCKHLAPIYEKLASVFKQDDGVVIANIDADKHTDLAEKYGVSGFPTLKFFPKGNKAGEDYDGGRDLDDFVKFINEKCGTSRDPKGHLNQEAGLVPSLNPLVKEFLNAADDKRKEVLSKIEEDVAKLSGSAAKHGKIYVTAAKKIIDKGSDYTKKETERLHRMLEKSISPSKADEFIVKKNILSIFSS

SEQ ID NO: 57193 - protein, 130 aa, Zea mays
  Clone ID: UC-ZMFLB73160E09_FLI.pep
LTRRRSQYPNHPPLHSGDAFFFPACISIRAPHGKESLRCVLDSPLINISDPQKLHHPSSRSLSYGWLLLWVAFSAADGSFDALHGAGDEAVHRGYRAQRELGGGDGVHQDLERHRQEGPAGGLQLLQAAA

SEQ ID NO: 57194 - protein, 425 aa, Zea mays
  Clone ID: UC-ZMFLB73172B02_FLI.pep
APPHPSRLRFVATASPTPPIGAPPAAAAPDPMEAEVGPPNPPRPEPAGSEPDDARLSPPPPAPAPPPPPPPPPAAEAAAAPTASAAFSLQAPAPAPAEANGSSDRKRRRKAEDGDGCKTCSCKKSRCLKLYCVCFASGLHCTESCGCEPCHNKPQLQGTLRMATVLPLKPVQTFEAGQDIVEQVIRSPMDLIRRKCTCKKSGCLKKYCDCYQGGAGCSINCKCDDCRNPFGRKVGVILDGKSSLTAPILHERNGTEVDSSDEEDDFYMNRQLSPIPPSPVSRESSFQQETLVGVEVQTMNGHLYPKPLTQVRPEPSSWQLSRRPIEEPRGEIWRFSRRPSEDGTSDAMEVHAVAPRESKKAAEVRGDRFGIPRCIEVMSAMAELSPVEKSLAPDVFLDASNREIFLSLSVDIRPIWLRRKMKSLV

SEQ ID NO: 57195 - protein, 61 aa, Zea mays
  Clone ID: UC-ZMFLB73177E12_FLI.pep
KSFQLIKPYAADWLDCCPWPASGEHAPWETEVSSVPAHAALRDIFLLALHLPVQLDLVLCT

SEQ ID NO: 57196 - protein, 264 aa, Zea mays
  Clone ID: UC-ZMFLB73179A10_FLI.pep
KQAMWRRALAMVLFMAGAALLAGAAGAGAQQGVWSIITRPMFQSMLSHRGDSGCQGAFYTYDAFIEAASKFPGFGTTGDEQTRRRELAAFFGQTSHETTGGWATAPDGPFAWGYCRVKEQKQTDPPYYGRGPIQLTHKYNYRLAGQALNLNLVGDPDLVARDPVVAFKTAIWFWMTPQSPKPSCHAVMTGDWRPSATDRAAGRLPGYGLTTNIINGGLECGEDRSTDGAKAAKDRVGYYKRYCGMLGVGYGDNMACGSQKPYGG

SEQ ID NO: 57197 - protein, 227 aa, Zea mays
  Clone ID: UC-ZMFLB73151E12_FLI.pep
LPKHRRSRSRLQLQRVHRGLVHIHRRRPGGHQERVGRVRDRVRAAERRRHGPAREGLVPLQRHRHRQRGLRRGARRPGGGLRHLRQRLRHPHQDQRRPGRLHPQRHRRRRAPDRRAQRRPHRRRRRRPPRRALQPARRAHGRRRAHQQRVGRQRPAARVTGGDPGLALHPHMPLQRQALRVAERRRLEVQGRARRCARGAAVALRRARHQLRVRTVLMQLVSVVMPS

SEQ ID NO: 57198 - protein, 139 aa, Zea mays
  Clone ID: UC-ZMFLB73177G09_FLI.pep
SFTAKATVLPATAASTTTNLSSCRTTAPSAWAAPISATDILRTSAAATPAPATVHVPTTATMHVPEVVMEIKVDIHGVHVFVPKLLVRGVRVSVTPNKNRALLRIELSSQGSLFKLGWHASSYLGRKPSGSLLHVWVEF

SEQ ID NO: 57199 - protein, 124 aa, Zea mays
  Clone ID: UC-ZMFLB73157G06_FLI.pep
RLLPFSFFSVVLYVSLYIKVSLLPYVWLSIGGRWSAESVNGGGGAGAVARARDEVVVGEADRLHEGVDDGGADEAEPAPDHVLADALRLGRLRRDLPAVLVARRQRPVVHERPHVPVQRAQVPP

SEQ ID NO: 57200 - protein, 193 aa, Zea mays; identical to SEQ ID NO: 48053
  Clone ID: UC-ZMFLB73174G09_FLI.pep

SEQ ID NO: 57201 - protein, 368 aa, Zea mays
  Clone ID: UC-ZMFLB73152D05_FLI.pep
FAIAFGTAIGCIGLLVLAAGFLFWWRHRRNRQVLFDVDDQHMENVSLGNVKRFQFRELQSATGNFSSKNILGKGGFGYVYRGQFPDGTLVAVKRLKDGNAAGGEARFQTEVEMISLALHRNLLRLYGFCMTATERLLVYPYMSNGSVASRLKGKPPLDWVTRKRIALGAGRGLLYLHEQCDPKIIHRDVKAANILLDDCCEAIVGDFGLAKLLDHRDSHVTTAVRGTVGHIAPEYLSTGQSSEKTDVFGFGILLLELVTGQTALEFGKTANQKGAMLDWVKKTHQEKKLDVLVDQGLRGGYDKMELEEMVRVALLCTQYLPGHRPKMSEVVRMLEAGEGLAERWEASHSQSQSADSHEFKAVELSGPR

SEQ ID NO: 57202 - protein, 356 aa, Zea mays
  Clone ID: UC-ZMFLB73162C03_FLI.pep
ATCPPSHSAPLSKTKSRCSKPAALQQAWSSRCDSSGPLYSLHLPSTPHTRVASSPALTTTTTSHALATTTTSSAIWHRRLGHPGPDVMSQLAGHSDISYTRGSSERLCHACQLGRHSRLPFSTSTSRAVQAFDLVHCDLWTSPVLSLSGYKYYLVILDDYSHFLWTFPLRLKSDTFTTLTHFFAWVSTQFRRPVRALQCDNGREFDNNASHSFFLTHGVQLRLSCPYTSAQNGRAERMIRTTTNMIRCLLFQASLPATYWAEALHTATHLLNRLPSKAVSHPTPHFALYGTTPSYDHLRVFGCACYPNTSATAPHKLSPRSTRCLFLGYSPDHKGYRCLDLTSHRIIISRHVVFDE

SEQ ID NO: 57203 - protein, 486 aa, Zea mays
  Clone ID: UC-ZMFLB73152G04_FLI.pep
GPHGIGDLGDEALAFLHWLRDAGCTLWQVLPLVPPGRTAGEDGSPYSGQDANCGNTLLLSLEELVKDGLLMSDELPDPVDTEYVEFDTVANLKEPLIAKAAERLLLSHGELRTQYDCFKKNPNISGWLEDAALFAAIDKSINAFSWYEWPEPLKNRHLGALEDIYEKQKDFIETFMAQQFLFQRQWQRIRKYAQKLGISIMGDMPIYVGYHSADVWANRKSFLLDKNGFPTFVSGVPPDAFSETGQLWNSPLYDWKAMEADCFSWWIKRIKRALDLYDEFRIDHFRGLAGFWAVPSDAKVALVGSWRAGPRNSFFDTLFKAVGRIDIIAEDLGVITEDVVQLRKSIGAPGMAVLQFAFGGGSDNPHLPHNHEMDQVVYTGTHDNDTVLGWWQNLPEEEKKIVIKYLPEAENIDITWTLITAALSSVARTSVVTMQDILGLDSSARMNTPATQKGNWRWRIPSSVGFDSLSPEAAKLKELLALYNRQ

SEQ ID NO: 57204 - protein, 278 aa, Zea mays
  Clone ID: UC-ZMFLB73162F09_FLI.pep
GPNYRAPEILKPDVIAPGVNILAAWTGAASPTDLDIDSRRVEFNIISGTSMSCPHVSGLAALLRQAHPEWSPAAIKSALMTTAYNLDNSGETIKDLATGVESTPFVRGAGHVDPNAALDPGLVYDAGSDDYVAFLCTLGYSPSLISIFTQDASVADCSTKFARPGDLNYPAFAAVFSSYQDSVTYRRVVRNVGSNSSAVYQPTIASPYGVDVTVTPSKLAFDGKQQSLGYEITIAVSGNPVIVDSSYSFGSITWSDGAHDVTSPIAVTWPSNGGAAAM

SEQ ID NO: 57205 - protein, 98 aa, Zea mays
  Clone ID: UC-ZMFLB73178D07_FLI.pep
RRRTPRPWHRPQCRRRPPRPSISSPCVTASRYKILLIMLVLISRPLICCSKAARVTPEMLTIFVRNSKVHTESKSGCTALCMCNDLDQFIHAPNFFDA

SEQ ID NO: 57206 - protein, 255 aa, Zea mays
  Clone ID: UC-ZMFLB73177B06_FLI.pep
VARYRTKYQAAQKGKVGIVLDFNWYEALTNSPDDQAAAQRARDFHIGWFVDPLINGHYPQIMQDLVKERLPRFTPEQAKLVKGSADYIGINEYTSSYMKGQKLVQLAPSSYSADWQVQYVFARNGKPIGPQANSKWLYIAPTGMYGCVNYLKEKYGNPTIYITENGMDQPGNLTRDQYLRDATRVRFYRSYIGQLKKAIDQGANVAGYFAWSLLDNFEWLAGYSSKFGIVYVDFNTLERHPKASAYWFRDMLQKH

SEQ ID NO: 57207 - protein, 358 aa, Zea mays
  Clone ID: UC-ZMFLMO17126C12_FLI.pep
LVKNEYSWNKEANVIYLETPAGVGYSYSADAAYYQGVDDKMTAMDNMVFLQRWLQKFPQYRGRDLYIAGESYAGHYIPQLAEAMVEFNKKDRIFNLRGVALGNPVLEFATDFNARAEYFWSHGLISDATYRVFTSACNYSRYVTEYYGGSLSPLCARVMNQVTRETSRFVDKYDVTLDVCLSSVLSQSKILSPHEQVGQRIDVCVEDETVRYLNRRDVQAALHARLVGVDKWAVCSSVLEYELLNLQIPTISVVGSLVKSGIRVLVYSGDQDSVIPLTGSRTLVQNLARDMGLKTTTPYRVWFEGQQVGGWTQVYGGGALSFATIRGASHEAPFSQPGRSLVLFRAFLQGQPLPETFS

SEQ ID NO: 57208 - protein, 382 aa, Zea mays
  Clone ID: UC-ZMFLMO17126E11_FLI.pep
GQAPVGVGAPHGSHGRQVQARHVPQRRRPQEGEAGGGRGAGRGAAVPRVPQEPRREPGRARRRRLRRVHALAGGQPRRPDVAQVRGVRVPPQLPPPDAGGFPSAARARAAGAPASAERDARPAAPRPGGDARGPPPGGRRRRRLRFRLGRLGVRRGAVGVPAAAAAPPAAGAGGAAAPATVLLPDGAAHGALARFRRARARGGGIPGAEAGPDPADAVQRAAPRRGRDAHAQEAVPHQVHRRAEAADAGAVGAARVAAAEARRGHRRRVVPRHRRRQGRLQGLDAQQQAQLPGRAQRPPQRLLARPRRRVAPNPSRRRRLRRCCSTVIQPVQDHPSPSCPHLVPDGRHRLQHQRRRLLGAHRRHRLHHGQRQRSFVAALRLN

SEQ ID NO: 57209 - protein, 212 aa, Zea mays
  Clone ID: UC-ZMFLMO17132E11_FLI.pep
IRRSYCTTTSLPVILPPPPHLQVTSPCPASAPSSAPGPLGTVTTSWPSTYPATAMAGQVGSGSRDRHLSSSMLSLAASSSAARSAAPACTTTLVTPGWILTVRTRTVAAARAPAAGAATKWKASGPSNTWTSVSAGSGSSSTLLYTCGRRRRSFLPPAVGDAGWILMWSRDRSRRCKSKSEGSSLLDLSLGSFPFVVSLVLSFGCWFLDRLL

SEQ ID NO: 57210 - protein, 189 aa, Zea mays
  Clone ID: UC-ZMFLMO17132G02_FLI.pep
PTSGGQGAQVPAAEEVQWLPEQPQAGVFQEEEEREAPKGGQAETPPLVGAALQVAVPFRDGEDCARRINGPRPEADQQLVHQPEETALEAVGGHAFRDDGRLPPAERRCSVHGRAVHGRRHVSPRFMNYTSMDDCVGPIYPIVGPWEYISVYQDQDALQCKDIVVEFLLLIAKGWVGRCSVYAWLVVLL

SEQ ID NO: 57211 - protein, 373 aa, Zea mays
  Clone ID: UC-ZMFLMO17138E07_FLI.pep
LVALGDRLRRPGAVALSYARFPGLGRSLHRRRAPTRRAGAWIRRKCCGFRRFVSLVVSGGVMKAVGYNLYDSSGTDDDLPPAQNRGLRGRVFSGNGRASAGAFPYMRANNDLESEIHRVEQDAYTGVLRAFKVQSDAISWEKESLITELRKELRVSDEEHRELLNKVNEDGSIRQMRELRQAGGIPSGLHRGNRVLYDAEPGPTTKRQRASHSIPSQSAGLQSPMMPSHSVSSAKWGPLSARGKKAKMMAPEDIRWEFDGHLSNHDGWGPSGPMLKRHMTNNGAMAGSIRGRGRLSINEPIKDYAPPQNDINRNFDYIDIPNTESVVTEVERVLANPNMPEIEKARKLLKDQEQSLLDAIARLDEASDSDSGN

SEQ ID NO: 57212 - protein, 365 aa, Zea mays
  Clone ID: UC-ZMFLMO17130C03_FLI.pep
VSDSTAALTIETSVPFTSHLVDPPSRDVTTTPAELVTFFRDMSLMRRMEIAADSLYKAKLIRGFCHLYDGQEAVAVGMEAAITRSDSIITAYRDHCTYLARGGDLVSAFSELMGREAGCSRGKGGSMHFYKKDANFYGGHGIVGAQVPLGCGLAFAQKYKKEETATFALYGDGAANQGQLFEALNISALWKLPAILVCENNHYGMGTAEWRAAKSPAYYKRGDYVPGLKVDGMDVLAVKQACKFAKDHAVANGPIVLEMDTYRYHGHSMSDPGSTYRTRDEISGVRQERDPIERVRKLLLAHDLATAAELKDMEKEIRKQVDDAIAKAKESSMPDTSELFTNVYKKGFNVESFGPDRKELRATLP

SEQ ID NO: 57213 - protein, 84 aa, Zea mays
  Clone ID: UC-ZMFLMO17133F11_FLI.pep
LVVQTIRIHGMKATYVHVVLGLQYHDAHVVSFPAVCLFSISGPYLVIWQTVWFCLLQVMQSKLVNGVASLTFLVIFYHEVDVAF

SEQ ID NO: 57214 - protein, 327 aa, Zea mays
  Clone ID: UC-ZMFLMO17176G04_FLI.pep
VTKEAFEWVIGEIESRFLQSLVAPGEMIGCVAAQSIGEKGYSPLSPSYSPASPSYSPTSPSYTPGSPTYSPTSPNYSPTSPTYSPTSPSYSPTSPSYSPTSPSYSPTSPSYSPTSPSYSPTSPSYSPTSPVYSPTSPAYSPTSPAYSPTSPSYSPTSPSYSPTSPSYSPTSPSYSPTSPSYSPTSPSYSPTSPAYSPTSPGYSPTSPSYSPTSPSYSPTSPSYNPSSAKYSPSHAYSPSSPRMSPYSQTSPSYSPTSPTYSPTSPSYSQPSPSYSPTSPFNTSGGPSPDYSPTSPNYSPSGSYSPTAPGYSPSSTGQGNDKDDKSAR

SEQ ID NO: 57215 - protein, 249 aa, Zea mays
  Clone ID: UC-ZMFLMO17177A10_FLI.pep
QWFRLLKTGSGLHISTPPLSLIGIQQFLFLWDTLGDVQLSQEEDRHVWRHETSGVFSSKSCYKVLLLGSTVFEPWKRLWKTWAPPKCKFFLWLAIRNKCWTADRLQLRGLPHPDVCPMCDQAQETIQHLLTACIFARQFWHTILAAIGLGHLTPTADEGNFSEWWGQVCLRVTKTRKKGLNSLIILGAWCLWLQRNRAVFHGESPSLPRILRCFSDECVCWVLAGAKEVGSMGLVAALGEVGSSFSTSM

SEQ ID NO: 57216 - protein, 123 aa, Zea mays
  Clone ID: UC-ZMFLMO17161B07_FLI.pep
GGLAPLTSLFPQKTTRDRSAPTRSRGRSSNRFPPICHGPLYCRKHARHPGRWSTGIMPPPFDVSIASSMDTASAISGRLSGLASQQRFITFDRELGQQRGISGLRFCKPGSIVVSSTCSELSG

SEQ ID NO: 57217 - protein, 129 aa, Zea mays
  Clone ID: UC-ZMFLMO17183H07_FLI.pep
DQSTAGLDWPNNTEMACLSLYAGAHSSCSDGVRSARLWCAAHLPGCGLRMVCPVVADVGQQRQDGVPSLWVHSVGTPSFALPRGLAPRGLGRPLRLVDLLDGDLVVRLADLLDKWAGKRLWALPWVPHS

SEQ ID NO: 57218 - protein, 373 aa, Zea mays
  Clone ID: UC-ZMFLMO17179F11_FLI.pep
PGNRGGGSEEVRMDKYEAVRDIGSGNFGVARLMRNRETRELVAVKCIERGHRIDENVYREIINHRSLRHPNIIRFKEVILTPTHLMIVMEFAAGGELFDRICDRGRFSEDEARYFFQQLICGVSYCHYMQICHRDLKLENVLLDGSPAPRLKICDFGYSKSSVLHSRPKSAVGTPAYIAPEVLSRREYDGKLADVWSCGVTLYVMLVGAYPFEDPDDPKNIRKTIQQIMQVQYKIPDHVHISTECQQLIARIFVANPMRRITMKEIKSHPWFLKNLPRELTETAQGMYYRRDNRVPSYSDQTSEEIMKIVQDARTMPKSSRSGYGWSSEYSDEEEEKEEEHRPEEHEEEEDEYDRRVKEVHASGELRMDALHI

SEQ ID NO: 57219 - protein, 256 aa, Zea mays
  Clone ID: UC-ZMFLMO17212E08_FLI.pep
ESPATPKADAFFVPRENPRNLVIRPIEQWPSRRETDRQLTVKNATDLNKYEDASIESERGKSASAMSPSSRPPAVENDNQHEARAMAQHGNGNATSVERLLPKLPRADYFTEPSIEELAAKERAEAGYCGRVRDFVVGRHGYGSIIFLGETDVRCLDLESIVEFNNREVVVYKDDSKKPPVGEGLNKAAEVTLLNIKCVNKKTGEEYCEGTRVERYREMLMKKAEEQGAEFVSFDAAKGEWKFRVKHFSAYGLPCC

SEQ ID NO: 57220 - protein, 220 aa, Zea mays
  Clone ID: UC-ZMFLMO17199D05_FLI.pep
GDLKQEQDEIEDLAKRLCWKKVVEKGDLAIWQKSINHVECVDSRKVYDAPQICKSNDVDSAWYKKMDTCISPLPDVKSEDEVAGGVLETWPKRAFAVPPRVIRGSVPGLTPEKFQEDNKVWSERVDHYKKLIPPLGKRRYRNVMDMNAGIGGFAAALMKYPLWVMNVVPSGLAHDTLGVIYERGFIGTYHDWCEAFSTYPRTYDLIHADKVSAVTRTGVT

SEQ ID NO: 57221 - protein, 312 aa, Zea mays
  Clone ID: UC-ZMFLMO17194G11_FLI.pep
QNQVRSAVEGVKEVIVASTNRRIERTERARAEDFDSEEEELLREENEQEDEIFDQIGDCLGTLVKTFKTSFIPFFDELSMYLTPMLGKNKSPEERRIAICIFDDVAEHCREAAVRYYDTYLPSLLEACMSENPDVRQAAVYGIGICAECGGSAFRPHTGEALSRLYNVIKHPNALDLDNAMAYDNAVSALGKICRFHRDIIDVSQVIPAWLSCLPIKNDLIEAKLVHEQLCVMLEQSERELLGHNNQYLPKIVSVFAEILCAGKDLATEQTASRMVNLLRQLQATLPPSVLASTWSSLQPQQQLALQSVLSS

SEQ ID NO: 57222 - protein, 139 aa, Zea mays
  Clone ID: UC-ZMFLMO17214H03_FLI.pep
IEALGGKVIQWNGYRVSGILAMSRSIGDRYLKPFVIPKPEVTVVPRAKDDDCLILASDGLWDVVSNEEACKAARRQIQLWHKNNGVTSSLCDEGDESNDPAAQAAADYLMRLALKKGTEDNITVIVVDLKPRKKAKSNS

SEQ ID NO: 57223 - protein, 237 aa, Zea mays
  Clone ID: UC-ZMFLMO17217C02_FLI.pep
SRRQADRRRPDDPGGPDRGGGGARVRAVRGGVGGREHLGRAREPGRDLRRLRGRQHHPVPGAPVLGGAAAGVHRGVLPAPLLDGRAGHGHLRADGRVGVGGAGAGDRDDLRAGVHGVRHGGGPEEGQPGHHRPHRHRLHRGGQHPGGRRLRRRVHEPRRVLRPRPRQLGVGLPVGVLGRPPHRRRPRRRHLRAALHLPHPRAAPLHRLLKAEADRPRGAQRSAASIQLSLPGPLAAV

SEQ ID NO: 57224 - protein, 361 aa, Zea mays
  Clone ID: UC-ZMFLMO17186H07_FLI.pep
RMHHCYYPDANIPTQRTLRNVCGVHDSPPVTPNQFESQRASRPPTNTQLTHRPHPIRAPHTHSLRALGGESEAEREERVVVRVAHVHGQLVHRLEPRPRQLPREPVVAEQHVRHALPLRPRQPRRHQRVHVAQVRLHHQRPAGDEDHYALGGPAHRLDHARPGRRDRQVQVVAERLRVWRLTDHHDRVVVLVGQHAAVRALRVHHLRAGVHGGLDPGEDRRAGSGVAAASLPRDRPPPALVAQVVGVAAGDQDLAGLLREGQQRSVGGLAVLQENQGFPDGFARQFPVFLLPELAGEARVGVRVLEQTHCELDTKDPVDGVVDSAHGDYLVLNLCRQIVDEFCVSEWNHDHVNSSTNTSLN

SEQ ID NO: 57225 - protein, 440 aa, Zea mays
  Clone ID: UC-ZMFLMO17209C02_FLI.pep
HFHSIRFLPTTVCTESRIGQVSAGRSMAQRRLLGTAPAPAGDAASHGSGSSPDAMRIMVGVLVTVIVCTLLYCVYCWRWRKRNAIRRSLLDSLWRRSSSDLPLMDLASILAATDNFSKANKLGEGGFGPVYRGVLSGGSEIAVKRLSARSRQGAAEFRNEVELIAKLQHRNLVRLLGWCAEREEKLLVYEYLPNRSLDAFLFDPSKSAQLGWSTRHNVILGIARGLLYLHEDSLLKVVHRDLKASNVLLDHKMSPKISDFGMAKIFEDDSDAINTGRVVGTYGYMAPEFALDGVFSVKSDVFSFGVLLLEILSGQRNGALYLEEHQQSLIQDAWKLWSEDRAAEFMDQSLGRSYSKDEAWRCYHVGLLCVQEDPDVRPTMSNVLLMLISDHTKLPEPAMPPLFARLRNISLLAPPLTTKTESTTSPLSINDVSITMIEPR

SEQ ID NO: 57226 - protein, 93 aa, Zea mays
  Clone ID: UC-ZMFLMO17204G09_FLI.pep
TPRLWRGGSTYTVKRLAWKFRGNQTILVDGLPVEVFWDVHSWLFGSTASNAVFMFQTCQAPEKSLPWSYSQIFRESQLQGLGFSLILHAWKLE

SEQ ID NO: 57227 - protein, 71 aa, Zea mays
  Clone ID: UC-ZMFLMO17217G12_FLI.pep
EQLYIFTISCWVANVMFILTNFIRTLHSGIWHLTVPLCRKKGSDCETKDICTISLLLYQASVLIMYIVLPL

SEQ ID NO: 57228 - protein, 256 aa, Zea mays subsp. mexicana
  Clone ID: UC-ZMROTEOSINTE093H11_FLI.pep
TSLTCSIFLKAASDVYHLYWFLTPLSCSFCSVIWWPLGKHDKLISIDDRNIFLWNVDMSNKSAKVISQGSADMLPNLSGGAWDPHNHNSIASISDSSLHLWDLRSMEKSSAIEHAHIRDVDYNPKKQHIIATTEDDFGICLWDLRMLKLPLKDLPGHSHWTWAIQHNPEYDELLLSAGTDSTVNLWLAKVSNNDSEPNSPSGSPNRQEEPLLNSYTDYEDSIYGIAWSSHDPSLFASLSYDGRVVLESVKPYLQRK

SEQ ID NO: 57229 - protein, 312 aa, Zea mays
  Clone ID: UC-ZMFLMO17042C10_FLI.pep
CVWRCKKWLGLGMETTLARSVRHVDRYLSAVIKARKLELSAATRKDLLSATPHDDLLSRFMRKGTYSDESLQHVALNFILAGRDTSSVALSWFFWLVSTHPAVERNIVRELCAVLAGSRGVEDPALWLAAPLDFEELDRLVYLKAALSETLRLYPSVPEDSKHVVADDVLPDGTFVPAGSSVTYSIYSAGRMKTVWGEDCLQFRPERWLSDDGTRFQPHDSYRFVAFNAGPRICLGKDLAYLQMKNIAGSVLLRHRLTVAPGHRVEQKVSLTLFMKHGLRMEVRPRDLSVVIDELRGAGEYDAAARATAASA

SEQ ID NO: 57230 - protein, 252 aa, Zea mays
  Clone ID: UC-ZMFLMO17079B02_FLI.pep
TTGETPCTQSSRGNRSNFASLDAPDAVAKRFARRHSSGTMIRPTNSLWPRRLAWRGAQARDRGRGDRRRRRRHAVQGRRHGRRGLLRGVLPLLRQLRQGGRQLLRGDRAHLQRRRPRARRRAHQGGILRRPGRERALRGPRPRRPGAGPHRAAALRRRHRVQPHDAPRPQRARQAPRRRRPRRPRPRRRQVRQGLRDEGHRHQHVRQQAPGGHREPRRGRVPHQPGREPDEGVPLPSHLGCDEPPFSTLTAM

SEQ ID NO: 57231 - protein, 280 aa, Zea mays
  Clone ID: UC-ZMFLB73106F11_FLI.pep
QFQEFIVGLMSLPIKLPGTRLYRSLQAKKRMATLIQGIIQEKRRRRRAALEDGGEGEGEAGPPRDVIDVLISGGDELTDELISDNMIDLMIPAEDSVPVLITLAVKYLSECPLALQQLEEENMQLKRRKTDVGETLQWTDYMSLSFTQHVITETLRMGNIINGIMRKAVRDVEVKGHLIPKGWCVFVYFRSVHLDDKRYDEPYRFNPWRWKEKDTSTMGFTPFGGGQRLCPGLDLARLEASIFLHHLVTSFRWVAEEDHIVNFPTVRLKRGMPVRLTSKD

SEQ ID NO: 57232 - protein, 135 aa, Zea mays
  Clone ID: UC-ZMFLB73131F10_FLI.pep
KYISIFTASHSQQTIVISHLASSPSEVKPSRHGERPWAKVIQRLDLDGSAEAEADGSAEAEADGTADPRAEGRGRTVDCGPAGLDLQVRLLGLRFSSPRRPPLSGDAELSRQGQRCGGGCARSGIPKPKCRARNT

SEQ ID NO: 57233 - protein, 403 aa, Zea mays
  Clone ID: UC-ZMFLB73145H08_FLI.pep
NFPSFISQSQASLPPPRRQPTSNPQPIASEMLGVARRRLGSGCVLAQLAQALRPAAAPARTYSAAAKEITVREALNTALDEEMSADPSVFLMGEEVGEYQGAYKISKGLLDKYGPDRVLDTPITEAGFTGIGVGAAYHGLRPIVEFMTFNFSMQAIDHIINSAAKSNYMSAGQISVPIVFRGPNGAAAGVGAQHSQCYAAWYAHVPGLKVLAPYSAEDARGLLKAAIRDPDPVVFLENELLYGESFPVSAEVLDSSFCLPIGKAKIERQGKDVTITAFSKMVGYALQAADILAKEGISAEVINLRSIRPLDRATINASVRKTNRLVTVEEGFPQHGIGAEICMSVVEDSFEYLDAPVERIAGADVPMPYAANLERMAVPQVDDIVRAAKRACYRAAVPMAATA

SEQ ID NO: 57234 - protein, 570 aa, Zea mays
  Clone ID: UC-ZMFLB73238F08_FLI.pep
FRRNLSLLPLLPASAGTGPPWSGHSSRLGPFLPLLVLFSIAEAPPELTPEENRCPRVFSQNYFPEDLQIESNPMPHVKPAAGLPPYHHRALPGPGQGPVPTGHGMMHREVRDQYGPLGPRMHLPPLGHGPAPFPYDMLPPLPPPEVLEQKLVAQHGEMQKLVIENGRLAASHASLRKELAAAQQELQRLQAQGEAAKAAEEEEMRGLLDKVGKMEADLKARESVKVELQQAHAEAQSLVAMRQNMVADVQKLSKDLQRNLGEAQQLPALLAERDVARQENQHLRSTYDYERKLRVDHSESLQTMKRNYDSMVTELEKLRAELRDTSNLDKSGFFYNSTTQKADGISSHLSVGQIAYDTGYGSTQARATPTGLADLSGVPGGAGLRSGFDPSRGNAYDGSHVANFSSSKTGTHDASRGATGFDSLKGSGYDASKAHVTGQASATAAHGGIAGYYGSNQAAHAWGQSASPYGSVQVPPSYASGSNTSYGAAAAAAVRPYGSAQAQPSYGQTQAPSAYGHTQLPSSYSLAQAQSPFTAAQGSSPYGLAAQPPAYGSGRAGSNAGSYEAPQGRK

SEQ ID NO: 57235 - protein, 427 aa, Zea mays
  Clone ID: UC-ZMFLB73246G04_FLI.pep
ISNCLQYKNQIPHSNGFSMLQIGSQEQREKHTTVMGHDHMSRIKMHMAEGSFGDRIRCQQPGCNEVVDRRVVYCKIHSGELSCQQFSYLQSGLESSGLSVRPVNDSQFKGSVSIAAVPCTEQELHVKHEGGDRGKLKDSSGYTLGQAAQFIFSGASMLCKNDNCSKQAHENSIHCKLHSGGVNKGCMARGCTRGAHGGTPLCIGHGGGRRCVVPGCPNAACGQGRSDRCVRHGGGKRCKFEGCAKGAQGNTDHCIRHGGGRRCRFQGCTKSAQGRTDFCIKHGGGSRCRFQGCGASAKWGTDLCSVHRKSLLGGDNAIPEALAAPSEKRRRAKTPQREAKPSEVFQENVTTAATAGNSTQHTGFLLVAAPVANRDILTNGMAVTGQAAIAPQRIVAPMFMRSPTPSGSVAASAQRWEAGASRGMLGL

SEQ ID NO: 57236 - protein, 143 aa, Zea mays
  Clone ID: UC-ZMFLB73247H08_FLI.pep
QQWLTYWVLYSFVSLFELTFAPIIEWLPFWSYAKLFFNCWLVLPWFNGAAYVYDHFVRPMFVNRRIVNIWYVPRNEKLGKSDDVLSAAERYIEQNGPEAFEKLISKSTKSSKSRSTKRSILEEAEAERESWGENPFYDKNYRH

SEQ ID NO: 57237 - protein, 219 aa, Zea mays
  Clone ID: UC-ZMFLB73131A03_FLI.pep
KRQARERQRTTHPLPPPLLCCSPSLSNPLVPGHRPASSSSSGAGDERRRIATILYHIIHIHKEEEKVCSEVEVRRMPSSAMSSGLEPVLCAPRPRRVQQLHPCSADLILGAPPFPRNANSKASGSSSREGGRKTTRPAAEDEDCRWAAFGGSPPARADNPLVHDPRFLRNQRHPAPLELGSPNHRRPTYSSGGDGSGFASSSFAPAVRIQGFDVAACRA

SEQ ID NO: 57238 - protein, 505 aa, Zea mays
  Clone ID: UC-ZMFLMO17278G09_FLI.pep
RHQCIATVPEGAAPKKGKREGGRACSSCLGERPKKRRERRSAAQRRRASPPSPCRLAPAAALLRSALPPRSADCSAAAAVAGAPPTRRCARSGVGTIIIHPRDDPPPTPAVCSIPFPTPGWSAAATPAPIHLRCFLPQYIRPPRRLRPRHRRPSRTLRPLTSAPPRSTLLLPGRPTPMAVVEAAAADHAAPPLQEEAPGAGAGAGADAGEREMRDLEDLLSKLNPMAEEFVPPSLASPAALTPAPLSPAAYGFYPAGAGFAVASPGHGGVVGFPAVADAHAARGRKKGGAGGGFSGHGHPARRRTNSRTSMAQRDEIIRRTVYVSDIDHQVTEENLAALFINCGQVVDCRMCGDPNSVLRFAFIEFTDEEGARAALNLSGTVLGYYPVRVLPSKTAIAPVNPTFLPRSDDEREMCARTIYCTNIDKKVTQADLKLFFESICGEVFRLRLLGDYHHSTRIAFVEFVMAESATAALNCSGVILGSLPIRVSPSKTPVRPRAPRQLMH

SEQ ID NO: 57239 - protein, 202 aa, Zea mays
  Clone ID: UC-ZMFLMO17282A09_FLI.pep
QSLDIFRSYGAKVAFLDTPYTHSLTASAQDDITGAQPLQSRWKKPRKIICRTNCFVCKEASTSGQNPDDVADNSRTICENQKWVWSEGHFLSVGAAVISCRNERAPDGLVADAHLSDGFLHLLLIRDCPLPLYLWHLTQFTKKGSDPLSFKFVEHHKTQAFTFISSHDESVWNLDGEMFQACEVSVQACRGLVNFFASGPEL

SEQ ID NO: 57240 - protein, 220 aa, Zea mays
  Clone ID: UC-ZMFLMO17270G06_FLI.pep
PKPKVPSTKSEFEELVAVPTSAAIDGPLEPPPASAAVVLDTPDESLISYFSGAASIGSVSNAQPSGRVHPSTESIPSSHVPLIVPSAASTHQLPPSVASTASPLPVHGTNAHTSRPTNLVTPDFFAPPPSSSAPLAPPGASVVPTAPPLHPTSAASIQRSQYGTPLLQPFPPPTPPPSLNPSHSDRLTVTRDRVKDALQRLVQSDEFVDLVCRELQRSLV

SEQ ID NO: 57241 - protein, 469 aa, Zea mays
  Clone ID: UC-ZMFLMO17289B04_FLI.pep
RALRPRTSHRIGGLRASATPMASQPPPEPAPAEAGLESMEGLVLDTVISRAGARPAAALACASTRLRTAVADDSLWRRFCGEDLGLDAPVDPEGRPLPSFQVAYKVWSESFGMYPLPMVKRVRQFWTSMKTWLSENFPEAYKTLCEGVSEAQLKSAEDDLGFKLPMPTKLLYRFCNAQLPFSEDHDTNKSISTYGLIGGYAFYDHWVNVHLSPLEQIVEETKDFYREFPDVFHGRKFIVVATSWFHPKTFLLDCSNGELYVGTYNLPIGGMLPCVPKALIKPAGNDLAQDGLLLWLEEHLRRLQSGMIKTRMLMASRYISLYPEAPPSCSSAVTNGIKVRSSAVFVPEHPGRPGEKFMFTYSIRMSVPEACMLGGVYYSSCQLCSRHWTIRSCDRVVSDVSGGGVIGEYPLLLPGEDEFVYESCTPLPQVPGSVEGSFSFVPGKLSRPEGKPFEVMVAPFPLDVPEYIF

SEQ ID NO: 57242 - protein, 104 aa, Zea mays
  Clone ID: UC-ZMFLMO17286D02_FLI.pep
RADGNNIMSCNEAFFDVYQEEQRRLFHPTYPQILPRILRKDGLHFTITASLEFMSSKLSFQFVMVIDLFVHLDSRFLVMFWKSCNDNTHRHEQQVHLRSDPVVG

SEQ ID NO: 57243 - protein, 204 aa, Zea mays
  Clone ID: UC-ZMFLMO17286F02_FLI.pep
DLRVCPFHGPIVPRDAEGNPIEQNSGSSDAEVNPVEHLDIGGHSNELNGISDDDCMEGTSSRMAGVNNDYGDIAGTCDLGKITAEQLARQSVKNVRKREMDRKAQERAQRARIRQHNEDVLRNAALASTSYSAAAYEQPTEAHGRRGRRGKAKAPTLASMLKKKVTTKDRIAERLLNARATDATVRDVSHNEDMSYREAFPNQW

SEQ ID NO: 57244 - protein, 249 aa, Zea mays
  Clone ID: UC-ZMFLMO17291D05_FLI.pep
SFIDGPTLRALLRPSTNGRRTKISDSGGGGGGGGIFKMFKLMPMLSSGCKMVALLGKHNNRALLADHATTVTLFGPRRGRVSLAIHEDTRAPPLFLIELPMLTSALHREISSGALKLALESDTRSARRRLVEEYVWAVYCNGRKAGYSIRRKEASDDERHVLRLLRGVSMGAGVLPAAPGPEKEGGVPAGPDGELTYVRARVERVVGSKDSEAFYMINPEEGGNGADNNGGGGGAGGAPELSIFLVRMK

SEQ ID NO: 57245 - protein, 892 aa, Zea mays
  Clone ID: UC-ZMFLMO17310D02_FLI.pep
QLSSSSPSPHQFPFPIRPPQIRRPHSRPPRRSGIRHRRIPRCPRRPGTRVILPTTVKLAPQRRSQRLSGGGAGSAAAQPPGASGAQAAMGDSGDAVMARWLQSAGLQHLATSSAAGAGGADYRGGMPGLGGSGAGSMLSSLLMQGYGPESVEEKHRLYTLLRGLNFNGESAPTSMSEPYTPTAQSFGGGNPVEGFYSPELRGELGAGLLDLHAIDDTELLSEDVASEPFEPSPFMPKDIDDDDEDVISGSQQAPLDNYGLVTSEKESTTRENNVAKIKVVVRKRPLNRKELSRKEEDIITVHDSSCLTVYEPKLKVDLTAYVEKHEFCFDAVLDEHVSNDEVYRETVEPIIPIIFQRTKATCFAYGQTGSGKTYTMQPLPLRAAQDMVRLLHQPVYRNQNFKLWLSYFEIYGGKLFDLLSDRRQLLMREDGKKQVCIVGLQEFEVSDVQIVKEYIERGNAARSTGSTGANEESSRSHAILQLAVKKHIIVKDTRRQRDRDANEAKNTKAVGKISFIDLAGSERGADTTDNDRQTRIEGAEINKSLLALKECIRALDNDQIHIPFRGSKLTEVLRDSFVGNSRTVMISCISPNAGSCEHTLNTLRYADRVKSLSKGGNTRKEQPTGPTTTSSRESSSAPSYSLPAEAEEIPNQIQEKRPVDTYRKGTENFTSNPSAEPDRNSFSMVPNYSNKGREDNGAASGNDRERYDLKSTQTAYTSKAQLVQNSTNTQEEKVTKVSPPRRKAYKEDKSDRQGNYVKKDNGPETGRTGYKIQQAKQLQQQQRPTSASASSRQSEKESSCDDVEIDAILEEEEALIAAHRKEIENTMEIVREEMNLLAEVDQPGSLIDNYVTQLSFLLSRKAAGLVSLQARLARFQHRLKEQEILSRKKPPR

SEQ ID NO: 57246 - protein, 243 aa, Zea mays
  Clone ID: UC-ZMFLMO17287F01_FLI.pep
SGASSAHCLRSSQAFSSFICLATEGSHFSPLTFFSSCTLSSSLLAFAFAAASLTSNLANDLSDAFFAETTMSLPSTTTDRSICRNFFDFSSTSSPGTILGRLSCTCHLSVESMLIPGGAFLNNFIPPPVSMGSTKFKHGALTISRFFSNISSNMFLTLTWYSLSPGLFGFPSRGSSRSARLFTSRLPLEAAFATPLDEGTLNPTDAMESMAAFHAASPSSSLLLLPPLAAGLPPPPPILLLLL

SEQ ID NO: 57247 - protein, 147 aa, Zea mays subsp. mexicana
  Clone ID: UC-ZMROTEOSINTE018C11_FLI.pep
IRGSGLDSLTTLEIVWCGDLRAVFPLDTDAQSYQDHRRNQAITVEFPSLERIHLHESPKLHGLCGRGRVYAPKLESMVIRGCWNLARIPSVGDGGDRITKKVKCDCEKEWWDRLEWDGLEENHHPSLYEPTHPKYYKKTMLRTSVLR

SEQ ID NO: 57248 - protein, 173 aa, Zea mays subsp. mexicana
  Clone ID: UC-ZMROTEOSINTE027G01_FLI.pep
TAESHSSHPFKLRDVLAQLLLQFLLPPFNQLLVLGNELRLALQLFLHCRNLLSKHLFCRWRFLTLQADEIRLELLGSLHEIPCVPLNINLVGGLEGAVDGLELARGEARQQRGLQRRHTRQHVLEPTRRGSLLRRRRGRRLRWRLRRRRLSHDGECGERRTRRDWERLGLRFA

SEQ ID NO: 57249 - protein, 241 aa, Zea mays
  Clone ID: UC-ZMFLMO17152B11_FLI.pep
GSYRSLLCPLQSPRRSRSRQPSLAAAPQQPPPLQGSPIETTRPTTMAFASSLLPVPPSRVCATPASEVAAFSPAKKSVSLAAARQRRGSRHGVRAEVNESGSVLAVDALSQVKHVLLPVLDRNPYLSEGTRQAAATTASLAKKYGADITVVVIDDKPKESVPEHDTQMSSIRWHLSEGGFSEFRLMERLGEGQKPTAIIGEVADEWDLDLVVLSMEAIHSKHVDGNLLAEFIPCPVLLLPL

SEQ ID NO: 57250 - protein, 195 aa, Zea mays subsp. mexicana
  Clone ID: UC-ZMROTEOSINTE018G04_FLI.pep
CLSFAVIISVLKQQHFTNFVQVASLKDTILRKDMEIEQIQVIKDKVKSPNLLLDRNVPGLTKTTANQPSQLLSGERMLKSSDRVLSDRQSYGEVNVDPNHHVMDTAPVSIDEAGYENNASDDGLSGETENDNSAAEMTAERLHRFPSRISRFTLTKNGQPSMSRSNPKDAKTPSNTKAPSSRLTGGSSARSKRRQ

SEQ ID NO: 57251 - protein, 249 aa, Zea mays subsp. mexicana
  Clone ID: UC-ZMROTEOSINTE021H05_FLI.pep
VSWDNTATRIRHSQSSRVIGTGTFGCGTFIVEGEDFIAENITFENSAPQGSGQAVAVRVTADRCAFYNCRFLGWQDTLYLHYGKQYLRDCYIEGHCDFIFGNSVALMEHCHIHCKAAGYITAHSRKSTSESTGYVFLRCTITGHGEAGYMFLGRPWGPFGRVVFAYTFMDRCIKPSGWHNWDKSENERTACFYEYRCSGPGALPSNRVAWCRQLLDVEAEQFLAHTFIDPDVDRPWLLQMMAIRIPASA

SEQ ID NO: 57252 - protein, 119 aa, Zea mays subsp. mexicana
  Clone ID: UC-ZMROTEOSINTE031G07_FLI.pep
ILISQTLHEEGLSRLFLYNESCVFMIINTIVTKLTAMVTLKSQPTKKNSISSVYLYEGTIHCLDSSIIKIFIFFLSHKNYLHSHSANSDEVALVSQRRSKPCSLVPAVLASSYYPDRFK

SEQ ID NO: 57253 - protein, 267 aa, Zea mays subsp. mexicana
  Clone ID: UC-ZMROTEOSINTE031H07_FLI.pep
QFNSEPMVPVPATPHPGPYLAYFQPAPTPVSSSSLVAERTMDGAAYHDHWNTLAGLSDGRRPWAYYPQPNSDNGIAEQQGLPLGAMAVGGVDSESQQRGSLSLFYGNGSGRPRIPGVPPMAPQFTRAHGNINDQFQQTASLFAGSQQSGGMRPLGALGPSVPPPPENTSFCLFPPASSVPSTMEAEDVNRANQFYAWERDRLAPYPLMPVNSEGTWWSSSQQQPPPEPAASASRRLSGQWIGRLPLPPPENRSPDGSSFRPLHIPRM

SEQ ID NO: 57254 - protein, 117 aa, Zea mays
  Clone ID: UC-ZMFLMO17053E07_FLI.pep
FNFKDQTGSKSFRSSWQSNIYLLLADSHNIRTRGRPRPHFKQKKDTLYVPIQPLVAKYRPPDKKQNKTPTKFLKFRWTLKFSLRPLYFLRKPSCHEARSSMQSSKFRLRLLSTGGGT

SEQ ID NO: 57255 - protein, 79 aa, Zea mays
  Clone ID: 700471374_FLI.pep
MPLEPIWKYCERPARMESWNIGRRSAAAATDVSLEQSGFDKMQINLVYIVFHTCKDCLANYKIISVFWFGLRVHLCMKY

SEQ ID NO: 57256 - protein, 208 aa, Zea mays
  Clone ID: 700352208_FLI.pep
FPFFPSTPAKFTAALSGGNYCWIVGRRKEGRGAMGNASSMLTQYDIEEVQEHCSYLFSQQEIVSLYERFCQLDRSAKGFISEDEFLSIPEFSLNPLSKRLLRMVDGLNFKDFVAFLSTFSAKASLRQKIEFIFKVYDIDGKGKITFKDLLEVLRDLTGSFMSEEQREQVVTEVLEEAGYTRDYAFSLEDFIQIIDHPGLKMEVEVPID

SEQ ID NO: 57257 - protein, 242 aa, Zea mays; identical to SEQ ID NO: 46973
  Clone ID: 700549095_FLI.pep

SEQ ID NO: 57258 - protein, 100 aa, Zea mays
  Clone ID: 700552234_FLI.pep
AEVNAIKQVFKDPSGIKINATKSMIGHCLGAAGGLEAIATIKAITTGWVHPSINQFNPEEAVEFDTVPNVKKQHEVNVGISNSFGFGGHNSVVVFAPFKP

SEQ ID NO: 57259 - protein, 120 aa, Zea mays
  Clone ID: 700611992_FLI.pep
NALFLLVSVRTSRSHLPEDAHHLLSLLLCPLVSSKLSLGKLQSALVLANLQKLGDTLLIRSKASNLSDQAPDHGHPLRCFPLAVGRAQRQLALGDDMALVDAHEEARLRLRRRHEDEHFP

SEQ ID NO: 57260 - protein, 55 aa, Zea mays
  Clone ID: 700343518_FLI.pep
IILAWKEQDICDIISFCIFCGSYIYKSYPALLYHTSLNCTLLVNCIKSKFYVCGL

SEQ ID NO: 57261 - protein, 174 aa, Zea mays; identical to SEQ ID NO: 42880
  Clone ID: 700340634_FLI.pep

SEQ ID NO: 57262 - protein, 507 aa, Zea mays
  Clone ID: UC-ZMFLB73130B04_FLI.pep
GFTCYSPWLAAQTAVSKGHENATAENGPWVITLDAPSYIPVMQHARNRELREEVYRAYLTRASSSELDNTNIICQILKLRLEKAKLLGYKNYAEVSMAQKMATVERVEELLEKLRAASWDHAVKDMEDLKVFAKDSGSPEANDLTHWDLTFWSERLRESKYDINEEELRPYFALPKVMDGLFTLAHKLFGVTVEPADGLAPIWHSDVKFYCVKDSSSSPVAYFYFDPYSRPSEKRGGAWMNVVFSRSRVLARNGLAARLPVAHIVCNQTPPVGEKPSLMTFREVETVFHEFGHALQHMLTKQDEGFVAGIRGVEWDAVELPSQFMENWCYHKNTLLSIAKHYETGETLPEEIYAKLVAAKNFRAGTLSLRQIRFASVDMELHTSYDPNGSVSIYDVDQRVAERTQVLAPLPEDRFLCSFSHIFAGGYAAGYYSYKWAEVLSADAFSAFEDAGLDDEKAIEETGRRFRDTVLALGGGKSPLEVFVSFRGREPSPEPLLRQNGLLPVAA

SEQ ID NO: 57263 - protein, 290 aa, Zea mays
  Clone ID: UC-ZMFLB73125G09_FLI.pep
SPLLNCGRAPAAAASVEHLAVVSPLLSPAVAAPRHGPVLCRAMSEGDLAAPLVPKKDDGHGRAPRLSLSASLSSSASIFVEEEDGEGEEEEDLVAVAGAGVDVPLPLRRLLTNTGLDVSAAAALAFVEQGVGGSGGGGKACGSSGGKGGIGDGDGGSNRAATDAHYRQMIEADPGNSLLLVNYARFLKEVAGDAARAQEYCERAILASPGDAEALSLYAGLVWETSRDAGRAEDYYSRAVQAAPDDCYVLGSYAGFLWDAEEDEEENSEPLPPPSLFQGAAQRPSITAAS

SEQ ID NO: 57264 - protein, 225 aa, Zea mays
  Clone ID: UC-ZMFLB73129G10_FLI.pep
EAHTQRRRRACNCIFFHMSPSPPPSSGCSLAVLVGGTSTAGSSNMSLRERRDAVRHAADAALAAARGAAPRWSRALAAELSSQSQSQQHGRWHWHDDDAPHLLVAGADARPSGHQTCLPCGTAAAVAAAGCRKTVPRRRRLRVRARPKSGATTAWSAGAVARVVARRRARAGALRRMVPGGRGMADECTLLGETLDYAVSLRAQVDAMQLLLRTLQPPGHANNNP

SEQ ID NO: 57265 - protein, 175 aa, Zea mays
  Clone ID: UC-ZMFLB73127E11_FLI.pep
FMSLCSKWVMMNKLTRKLARIPDEVRTEIEPYFFEHSAIVDEDNRKLPKLPEGQSTSVAKYVRTGLTPRWADLDINQHVNNVKYIAWILESAPISILENHELASIVLDYKRECGRDSVLQSHTSVHTDCNSESGETTLHCEHVLSLESGPTMVKARTMWRPKRTKAQETVVPSSI

SEQ ID NO: 57266 - protein, 192 aa, Zea mays
  Clone ID: UC-ZMFLMO17269H06_FLI.pep
NMPGNTLSDNMVTNVQRKPSKCICLPTFYLSNAKLPQPQVGFSCLNGKLSASLILLRTSRSGTHATAGPPAFTTTGFWSALSLRLPAKDDSLRIFLGEDAGFLIWGRQDLSKSCSEAFLRPLGFDFDRDAGEDLACLGSATLLFGKEPRLPIGGRCSFLLVVGRLSSKTSTVTGYPTIGLPVHLLMRETRGT

SEQ ID NO: 57267 - protein, 562 aa, Zea mays
  Clone ID: UC-ZMFLMO17006B02_FLI.pep
PLQECKRQGPENVTTGNARGASSLRPPNGPPEKASSVGKAGEQPYLYQQNVYAPQPQPLYPGGYMNPSGQWEEYPHYVNMEGLHSVSPGIYNDNQSLMLSAGYANNPQMMYGAYSPVSTAGDGQQYFPVHYSFSNPYYQPPASPSMGYSNSATGMSQGDPMLQQEYFLPDGLLYSPTPGYHQPFSSFDRALTQPNNAPGLFGQGSLPLASGMHHGSMYGPGSYKGRQYGSKFGGTTPSWSSAGRRFGTFDLSGNQQRGSMSFGSHNGSLEFMNEQNRGPRATKPKIQDTENSGDEKSEKTVLLIDSELYNRSDFITEYKDAKFFVIKSYTEDHVHRSIKYNVWASTASGNRKLDSAYRAAREKEEHCPIFLFFSVNGSGQFCGVAEMIGPVDFDRSVNYWQQDKWSGQFPVKWHIIKDVPNNLLRHIILENNDNKPVTNSRDTQEVKLEQGLQMLTIFKSHEAETTIVEDFDFYEQREKALQENRRQQHAASTDTQKLVDTKAQDPVADISDAFAKAVQLKNTENSGTTPKTEGASAEKGSAATAKVEGSANLNTGPVEESS

SEQ ID NO: 57268 - protein, 274 aa, Zea mays
  Clone ID: UC-ZMFLB73127E08_FLI.pep
RDEQRMSSSSDLEQQVATALRRVTPVAAAPAVDRGGAPDLAAAIQRRMASQRARGADAFYAKFASARSLADQTFSRRRVQLKGLKDQLRDLQSQLRESLTLQSCKEWKYRIATEPMSEATATNERLRSWVADFRDKRNKGAAIVFEQLQAVESLEANSNEDAEMAEKVPKAVLWYNKFLGFRVIGGERGVKFVFDKIDPQRPEKEYSFRVSPRSQFIDSDPHVKDIDELAKDLDLNEHLFEFVRMAREKFQSPFMNGNQQFLYSFYDNVTKYHT

SEQ ID NO: 57269 - protein, 361 aa, Zea mays
  Clone ID: UC-ZMFLB73130E04_FLI.pep
FRASRRPFSAVVQLSLSAASAAGFLCLSSSFRRVGLRRLLHLDKLRSKSDRVRASYTARLAFSFRLLASLVAPCFAAEAAYKAWWYATSADRVPFFANDVLSDVLVCSLEMASWMYRSAIYLLTCVLFRLICHLQGLRLEDFAGSLLEEVEEGRAGVDAVLREHLDIRKQLKVISHRFRKFIVAALLIATASQFASVLLTTRRDSVDDLLNTGELALCSVVLMSGLIIILSSAAKITHQAQALTGHTTKWHACCTIEPVLEEGEPGSNQNSMIDQEPESDSDTEDSEETGDEDLLENTKIHMPHAHVISFQKRQALVTYLENNRAGITVFGFTLDRSYLHTIFMLEWTLFLWLLGKTIGFS

SEQ ID NO: 57270 - protein, 357 aa, Zea mays
  Clone ID: UC-ZMFLB73069G05_FLI.pep
RLALPMPSRIAACFRCAAAPSSGAGAGAAGPSLATSIYETHLGLVALSWSRTSLGLSLRAVLRLSATPPPGSSSSASGAGYLDDDADEEILAFRVSPWLFWRRRGSRRFRAGDRLVDLAWDLSRARFPVSGSPEPSSGFFVAVVVCGEMVLAAGDLTDLAYRRTRARRPSGPRPVLLSRREHVSLRDGERVLHVRRLRWKFRGSERVDLGGGDGVQVSWDLHNWLFPPREPPPTEASTHAHAVFVFRFELASGGEESEADLGKNPSPSKDARRNTGVWGGYLARWGQRDWSETGSNGERRKGRGRRLAKESSSSSASVASSTASWASGSTVMDWASPEEVEMQRGDGFSLLIYAWKS

SEQ ID NO: 57271 - protein, 432 aa, Zea mays
  Clone ID: UC-ZMFLB73136E12_FLI.pep
RRRAAPPVAAAMPARARWRLLALPLALLLVAGSAHGLVKPEAAAAPKPPVPKAISDLRDAIVKGLGFQAEGLKVSGFDVRDALVGHAVAYEFDIEVGRKVLPVRLLEDVSRWDFVDLPIFRSQADADDTALAEIRRTGTGSIVEPTLPPFQLAGPMELWIQNGDDVRLALPHDVDAGTLKKVVLSDGAVVTVKGARAVSLRLPLELPLPLNRTTYKGRLSSLISIAQALRGAARSNQKPLLSLRVEGPVSLSSTPSMSPKDKLKLKRLAPGQVELSSQAGAIPAITEDEDEPHNPGLWPLLSLNGSDGSLQGFEELLASVLGKKAGEKGTFKLLKARASAQTYVKMAFTVEKKLAEGDVNWSNIPEWKTKPKRMRAHYEVLARVEEGQAIPERIAQVQPFQANEAMSESVLTGNVTRSKMEIVHPPPVYFTL

SEQ ID NO: 57272 - protein, 233 aa, Zea mays
  Clone ID: UC-ZMFLB73109H11_FLI.pep
YGILQSFNKAKDFVWRHDLFEDSMVAAGLSGIESGTKLYISNLHYGVTSEDLQELFSEMGHLKHCAVHYDSYRHPTGSAEVIFTRRSEALAALKRYNNMRLDGKAMKIEVIGAELGLSAAAVPQISVVPGASRRGQREVVMMPGGSGFGQGASGPSSSLPGWKRGGFVRRGQGRVSFPQRGRGQVRSRGRGRGRSSFVQSRGRGYVRRGNAEKSAKQLDNELDNYNSGAMNVD

SEQ ID NO: 57273 - protein, 599 aa, Zea mays
  Clone ID: UC-ZMFLB73113E12_FLI.pep
FDESFGLRVFKIGYEVYADGLTRVLRICEHADNPKIEKIQWPIANIQFRISYVCIHLLDKDQNGENVQLPSTILAARLQHVSSDSVVTNRFKQVSVAIHSLNVDEKWEGASIGTILRRNKLQDATLDENILRMIFVLNSTDSSVKQIQYCAIILQPVDLKIDEETLMKLVPFWRASLAPSGTTSTQFYFRRFEVHPIKIIASFRPGGRRTTYSSAQEALRALLHSVIKVPEISNSAVELNGVLLNHALVTFRELLLKCAQHYSWYVLRAIYVTKGSKLLPPSFASIFDDSASSVLDVFFDPSDGSLNVPGLTIGMFKFISKNMKSGGFSGTKRYLGDLGKTVKTASSNALFAAVTEISDSVVRGAETNGLNGMVTGFHQGMLRLAMEPSVLGQAIMEGGPDRKIKLDHSPGLDELYIEGYLQAMLDVMYKQEYLRVRVIDDQVILKNLPPNSALINEIVDNVKSFLVSKALLKGDSSTVRPMRHLRNEPEWRIAPTVLTLCEHLFVSFAVRVLHREASKAIAGVMSRVKKPTGEEVEGDSPASGGVLCKRNRLWTVGRFAVSGMVAYVDGRLCRHIPNPIARRIVSGFLLSFIENRGNE

SEQ ID NO: 57274 - protein, 1104 aa, Zea mays
  Clone ID: UC-ZMFLB73169H10_FLI.pep
KPVKYDDEEEISSSSAEEDDDQSAAAASGSGEEGDDDEEDAAALPTEEEEAEGEGQQEEEVDEEEIEAVTTGAGAEDGEDASAATAAEGEEESQSTEDDESVARDKDNGDETDAVVGKREKTRLKELQKMKKQKIQEILDTQNAAIDADMNNKGKGRLKYLLQQTEIFAHFAKGSQSNEKKPRGRGRHASKMTEEEEDEEYLKEEEDALAGAGGTRLVSQPSCIKGKMRDYQLAGLNWLIRLYENGINGILADEMGLGKTLQTISLLGYLHEFRGIAGPHMVVAPKSTLGNWMKEIQRFCPILRAVKFLGNPEERNHIRDNLLQPGKFDVCVTSFEMAIKEKSALRRFSWRYIIIDEAHRIKNENSLLSKTMRIYNTNYRLLITGTPLQNNLHELWALLNFLLPEIFSSAETFDEWFQISGENDQQEVVQQLHKVLRPFLLRRLKSDVEKGLPPKKETILKVGMSQMQKQYYRALLQKDLEVINAGGERKRLLNIAMQLRKCCNHPYLFQGAEPGPPYTTGEHLIENAGKMVLLDKLLPKLKERDSRVLIFSQMTRLLDILEDYLMYRGYQYCRIDGNTGGEDRDASIEAFNSPGSEKFVFLLSTRAGGLGINLATADVVVLYDSDWNPQADLQAQDRAHRIGQKKEVQVFRFCTEYTIEEKVIERAYKKLALDALVIQQGRLAEQKTVNKDDLLQMVRFGAEMVFSSKDSTITDEDIDRIIAKGEETTAELDAKMKKFTEDAIKFKMDDNAELYDFDDEKDENKVDFKKLVSDNWIEPPRRERKRNYSESDYFKQALRQGAPAKPREPRIPRMPHLHDFQFFNNQRLNELYEKEVRYLMQANQKKDTIDGEDEDQLEPLTAEEQEEKEQLLEEGFASWTRRDFNTFIRACEKYGRNDIKSISSEMEGKTEEEVQRYARVFKERYKELSDYDRIIKNIERGEARISRKDEIMKAIGKKLDRYKNPWLELKIQYGQNKGKFYNEECDRFMLCMVHKLGYGNWDELKAAFRMSPLFRFDWFVKSRTTQELARRCDTLIRLVEKENQEYDEQERQARKEKRLAKNMTPTKRAALKNSEGENTPPSSFKRRRQSLMDDYVGSGKRKRG

SEQ ID NO: 57275 - protein, 553 aa, Zea mays
  Clone ID: UC-ZMFLB73181B11_FLI.pep
ARVVMEGRGNPPHTTTDAVIKKPRSVASRKPRSTEQLTYEYNGICPPSWSAPHDDDTGVGAGGHRRKELHLNSPEMKGSMAHRSDVPRKIRRDDRSGGDHDGHGRSSKAKDAAKHGSENVLALECTARNNGSPDNPQLVPRDDSMPCENRSRKVKLKVVSRTLHAKNGQDAGGSGIPATLDGSIHQYKQKDSGGHTNKETHGNRVEGKHGNGHEIFPSSDLVRKSKRIPKKKTLDGDSDDEDGELRYLEKLKGAKVAPDPVNTSHKGYDFGDDALKKKKLSKLSRNKSTPYEVDDDFRMSRSGRDGRKKLNLGDDNEFIEEEESEMDETNGLKEPDSPQGVKIETPGLTTRQRALQGRGGNGESFIEFPDGLPAASSRKQKEKLSDMEIQAKKAEAALRRKMQVEKAEKEQQAEAMRKILGIDSEKKKEEKKLKEREEREKQARLEEYRKNCVQTVMGPTGTVITFPESMGLPSIFNSKPVSYPPPREKCAGPSCTNPYKYRHSKTLVPLCSLACYKAVEDRPPAQGSEGGGGQGSDAGQGTDAAQESAGKQA

SEQ ID NO: 57276 - protein, 325 aa, Zea mays
  Clone ID: UC-ZMFLB73065F02_FLI.pep
STNSMCVSIYCVHFVTFCHCKQVTTFPFSSVKCNWLLPVVPLSLCRRQLESNSSHGDDGSDRLVGKGDLRLKLMRKGLLPRSNGSAEQNDIDLREKLSRNHKLPNYDSRGHAAESRASYDMRDEPPELSSRYSSREDVLGSRHSSVVSRVPYARSVDDLLKLDYSRKSYPSWTDDGLRHRSPERMLKVRSDMYPRIAYDQIRPMPPLRSAGSSRPQSFITRDAPDTSRSQPYAGKSTISIDTVQRTNGITPSTAALPKAPVMDEAPLTVTGLLNSLGLEKYVVLFQAEEVDLSALRQMGESDLKDMGVPMGPRKKILLAVGPQSK

SEQ ID NO: 57277 - protein, 439 aa, Zea mays
  Clone ID: UC-ZMFLB73076H11_FLI.pep
KATNNSQGPKPTRTHPRSPTMAVGDVETAAPLLPPPASALADEPSAGPPPDDRLGIGYLIFFTLGAGFLLPWNAFITAVDYFDFLYPGAPVDRVFSISYMVSALLPLLVIVLFFPKSSAPIRINTGLTLFTLTLVLVPAMDLIYVKGRAGLYGAFDVTVAATALCGVADALVQGGVIGFAGELPERYMQAVVAGTAASGVLVSALRVFTKALYPQDANGLRQSAILYFVAGIVLMVICIVCYNVADRLPVVIYYKNMKKRAQKAEVGGGMTGPAWRSTLWSIVGTVKWYGIGVALIYAVTLSIFPGYITEDVHSEALGDWYPIILITAYNVFDLVGKALPAVYLLQNGSAAIAGSFARLLFYPLFYGCLHGPSFFRTEIPVTVLTCLLGLTNGYLTSVLMILAPKAVPIHHSETAGIVIVLFLVVGLVIGSIVAWFWVI

SEQ ID NO: 57278 - protein, 102 aa, Zea mays subsp. mexicana
  Clone ID: UC-ZMROTEOSINTE085G02_FLI.pep
QLHLVHPVGVKNPQSTKLASSSLLSERPLVPLELELGDTLVLGLAIDNTLGQRPLPTTTPHTDKVHNITLATPVVAVENELEVVATVTPKKGPINSLLRQSH

SEQ ID NO: 57279 - protein, 155 aa, Zea mays
  Clone ID: UC-ZMFLB73272C12_FLI.pep
FIDYPYMAPAFSHIPPEPIHKAASSFRAMPLSLPFQNGHRQAASLTQRDMNLERRPAKLTKPTGKDPPENKNKSGLKDLPEDKSKSWDADASFSLFQFNLPIASPVTPSSKDKSGELAARTPLAQVQAQLCSREQADVKEYSLFSSKDNGIFSFM

SEQ ID NO: 57280 - protein, 112 aa, Glycine max
  Clone ID: 700894874_FLI.pep
VEGLKNALAAGADKDEEDSEGRTALHFACGYGEVKCAQVLLEAGAKVDALDKNKNTALHYAAGYGRKECVALLLENGAAVTLQNMDGKTPIDVAKLNNQNEVLKLLEKDAFL

SEQ ID NO: 57281 - protein, 236 aa, Zea mays
  Clone ID: UC-ZMFLMO17122F06_FLI.pep
RPTHSRSNIKLQQPESGDRRTSSSRGFEVLKHGVPLDVAVTGAAVLVLVVSHLLLLVLVPVMKHQTRLLRRRRRQPRAATASEAVAVPSSGDAAVGDHEHHLLGGAATSALPLHCSDADGVFAAADPRDDGDRRRRGPPRAASCQPARAPGQAPGGPAPEPRGRGRRGAGVLLPGQLEDLEAVLGDGDAHALEQVVVEVRRVPGLQLVPAEEAPVLVRQRRRQPRPRQPRVPAVHG

SEQ ID NO: 57282 - protein, 57 aa, Zea mays
  Clone ID: UC-ZMFLMO17169A10_FLI.pep
TIPYCTHSMPPQEDVERNSRYTQQHYTYLHSHESIYGLSASHRTHTSTRIRNRTRYK

SEQ ID NO: 57283 - protein, 737 aa, Zea mays
  Clone ID: UC-ZMFLMO17278G10_FLI.pep
IELPSADHGEATQIHPIATRTSPLAFSPPVHPSGAFPPSLSLVRHLGDPPTPLRQVPRPSSGSLPATSTHQGTGGLPSASLSEKKKFRHNYHPKMPGITMDGFVAEEVPNRVNSSPQNENLPAPNSTAASTMAPSMESEALEMHVESSGTGEPSIEQLYNNVCEMKSSSEGGSLSHESFGSDGEESRIDSELRHLVAGEMEAMKVIEEEEENGSVANVVPPVPAENGTPVKEQPSKSSNKSKKDSKSQLESDASVGPNRKASTEEGEREVSKQATRVGRRRKSNANPQNGTEDAGLDNPDLGPFLLKHARDLLASENSRRALKYALRATKTFEKCAGGKPSLNLVMSLHVVAAIYCNLGKYEEALPVLHRSLEIPVIEEGQEHALAKFSGCMQLGDTYGMLGQTALSLQWYASGLEIQKQTLGEQDPRVGETCRYLAEAHVQALQLDEAQRLCQIALDIHREHGGTASLEETADRRLMGLIYDTKGDHEAALEHLVMAGTAMIANGQETEVASVDCSIGDIYLSLGRYDEAVFAYQKALTVFKTSKGENHATVASVFVRIADLYNKSGKLRESKSYCENALKIYQKPIPGTSLEEIATGLTDVSAIYETMNEHEQALKLLQKALKMYNNSAGQQSTIAGIEAQMGVLHYILGNYGESYDSFKSAIAKLRTCGEKKSAFFGIALNQMGLACVQRYSINEAAELFEEARTVLEQEYGPYHPDTLGVYSNLAGTYDAMGR

SEQ ID NO: 57284 - protein, 224 aa, Zea mays
  Clone ID: UC-ZMROB73054G08_FLI.pep
SCCWSHHPSKTDMASAVAAVKEACLLAAVCVVLLHSSSSMGQQPLAPESSSASPYYYTGQQPPPPPASPVDCPYTGQQPTPPPVVVPPAPTPTPTPTPAPAPSPTINCSYSDCGAQCTTSCQASYNATARNCTALGDGAFQGCYGSCTNNSCPGKSCVHSVCDSSCSCDNPHASSCCQSCRTAVNAAMGVGGEYQRCLSYNDRYMGYCMMSCVDSCYKNCTQGA

SEQ ID NO: 57285 - protein, 292 aa, Zea mays
  Clone ID: UC-ZMROB73059G12_FLI.pep
QQLVHDDLLFHYSDQDLADDLASSEESVRDARRGVFDDAQPWRRKIQRLLPADGITVKHIRTGEDVSLSRRIAATFLLMTIADFSDQLFDWQDRLFDNSNGRLEFSGNTWTSLWPGTGKPGLWVTSSSRMAALYTLIVREEEIHITQRARDTHGRDEDMDLVIPPVFNGCTRLLNAEDQKVARDLYWEAVCGEEASDWLKVEQLLQQSIAKNPFVGEPHLVLAQVYLNMERYGEAQMQAEEGLRLLLEWGSSWDKRMPWEGWVSWGRAMLTKATDKDWPHTSFGILSLGLVK

SEQ ID NO: 57286 - protein, 94 aa, Zea mays
  Clone ID: UC-ZMROB73075E02_FLI.pep
FVASTMSIDGQASEKPCTVAVNTLCGLSAALRSAQNLAPVVCTSGEPWIFVCIHMSVIIFRSENMNILAGTQLQRCTFVVDEQKVLSGCCFIHM

SEQ ID NO: 57287 - protein, 332 aa, Zea mays subsp. mexicana
  Clone ID: UC-ZMROTEOSINTE083E06_FLI.pep
SLALLLATLVSILVLGAAAVFFEHIRKIGCMHSLERSAVSDAFFEDPNSFKKVPCPSVLDPPEKYISLIVPAYNEEYRLPEALTETLNYLKRRSTADKSFSYEVLIVDDGSTDGTSKVAFSFVKQHKIDNVRVLLLGRNHGKGEAVRKGMLHSRGELLLMLDADGATKVTDLEKLEAQIHALAKKAKSSPGTSTSSSQNLSDVEVAVFGSRAHLEKQALATRKWYRNFLMKGFHLVVLLTAGPGIKDTQCGFKMFTRAAARKLFTNIRLKRWCFDVELVYLCKRLRIPMVEVSVNWTEIPGSKVRMTSIMHMVFELLLIKVGYGLGIWKIGS

SEQ ID NO: 57288 - protein, 270 aa, Zea mays subsp. mexicana
  Clone ID: UC-ZMROTEOSINTE086B12_FLI.pep
QELNHHGFVIKALPLASTRAMEHLFDQVIIVIREGLRSGSCKLSFMLLLHGHINLHFRWLQSNGFDKVKVLIPCQLPCEVKEGLLKVVIALGRNLIVLQVLLPVECNLLGFDLPVLYINLVSAENDGDVLTHPAQVPVPCWNILVCQPRSDIKHNDGTLTMNVVAIPEATELFLPSSVPAIEANFATVSAKIQRVNFNTNGGLIFLLKLASKMPLHKCGFASSTVANDDELEAGVIHNLLIRQRHFCGGARRTETEAAAKSLKCTLTREK

SEQ ID NO: 57289 - protein, 235 aa, Zea mays subsp. mexicana
  Clone ID: UC-ZMROTEOSINTE091H01_FLI.pep
ITEFLSGGSLRAFLRKLERETLPLEKVISIALDIARGLEYIHLQGIVHRDIKPENILFDGEFCAKVVDFGVACEEKYCNLLGDDPGTYRWMAPEMYKHKPYGRKVDVYSFGLVLWEFVSGSLPYQDMTPLQAAFAVVNKNLRPAIPLSCPAALKLLIEQCWSWQPERRPEFQQIVSVLENLKTVLERDGTLDKIPSSICQALEPNDQNKKKAGNWIQRLSYAQPAFSGPPPPKLL

SEQ ID NO: 57290 - protein, 240 aa, Zea mays subsp. mexicana; identical to SEQ ID NO: 48295
  Clone ID: UC-ZMROTEOSINTE094H04_FLI.pep

SEQ ID NO: 57291 - protein, 602 aa, Zea mays subsp. mexicana
  Clone ID: UC-ZMROTEOSINTE102A08_FLI.pep
SASTSVGEMVKRSKKSKSKRVTLRQKHKVQRKVKEHHRKKRKEAKKAGKAGQRRKVEKDPGIPNEWPFKEQELKALEARRAQALQELELKKQARKERAQKRKAGLLEDEDIASLASAASAQGSEFAAKENAPLLVAKINDHSERSFYKELVKVIEASDVIMEVLDARDPLGTRCIDMEKMVRKADPSKRIVLLLNKIDLVPKEAAEKWLTYLREELPTVAFKCNTQEQRTKLGWKSSKLDKTSNIPQSSDCLGAENLIKLLKNYSRSHELKLTITVGIVGLPNVGKSSLINSLKRSRVVNVGSTPGITRSMQEVQLDKKVKLLDCPGVVMLKSSNSGVSVALRNCKKVEKIEDPVAPVKQILSICPHEKLLSLYKVPNFGSVDDFLQKVATVRGKLKKGGVVDVEAAARIVLHDWNEGKIPYFTLPPKRDAGEDSDAVIISEDGKEFNIDEIYKAESSYIGGLKSIEEFHHIEIPPNAPLAIDEEMLEDGGKKPSEAIQESRDREEQMPDVKDSGGSKAASASTQNDKLYTAEGVLDPRKSKAEKKRRKASRPSALNDMDADYDFKVDYRMEDGGSEGAHADDEDGGDGSEDNEPMTGVDDA

SEQ ID NO: 57292 - protein, 366 aa, Zea mays
  Clone ID: UC-ZMROB73051H02_FLI.pep
NYMQSQASRMARSSGSRPVALVLLALCAAALSSATVTVNEPIANGLSWSFYDVSCPSVEGIVRWHVAEALRRDIGIAAGLIRIFFHDCFPQGCDASVLLSGSNSEQIEVPNQTLRPEALKLIDDIRAAVHAVCGPTVSCADITTLATRDAVVASGGPFFEVPLGRRDGLAPASSDLVGTLPAPFFDVPTLIESFKNRSLDKADLVALSGAHTVGRGHCVSFSDRLPPNADDGTMDPAFRQRLTAKCASDPSGNVVTQVLDVRTPNAFDNKYYFDLIAKQGLFKSDQGLINHPDTKRAATRFALNQAAFFDQFARSMVKMSQMDILTGSAGEIRRNCSVRNTALGDVSSSAHQLETTAGDEGLAADA

SEQ ID NO: 57293 - protein, 156 aa, Zea mays
  Clone ID: UC-ZMFLMO17285B12_FLI.pep
LHIQQVTMDLVKIKLPKQAVLRKVSAEKVPITSLAPGRSAAEEVAERRAAARRGVHLGRRAVREEVAAVLPLRPEVVVGLALVAADAGRDPLELLAVCCRRHRRRRRRRRRRGRLGGRRGGLVAAAAEEVAQRALPAPVAHAPAAAHPPPPRSPLD

SEQ ID NO: 57294 - protein, 228 aa, Zea mays subsp. mexicana
  Clone ID: UC-ZMROTEOSINTE104B02_FLI.pep
RKRSISGCVVRQTDKPTMASSAATTAKLIALPPAPTRGGCCCWRTRRPAIPAAAARLKVSASAASSDVPDFLSSNWLETRKRKPFGPRLNFSAEEAVEYQLESLKYNDLPRPDYGIEVMYRFAGFDPFERSTYFGRQFDLGQFERFRRLFHHSTYRVLLGHRERRILSSLWVEENQFKQRVWVQGARPEEEEIFQFTMVQRVGGSWDGYWLTESLINDGDAFSGGIAY

SEQ ID NO: 57295 - protein, 123 aa, Zea mays
  Clone ID: 700346030_FLI.pep
ANMPSSMGGGGAGGLGSVGGQVPTGLAGAGGFGPGGLGGGSFGGSSQFGAAGMGAYGGLGMGGGSMYRMQQGAGGLPAGAFGEGGNYPLPGSGFRGHDPQGGMSPPGPGGRAPPMYPNVPPYF

SEQ ID NO: 57296 - protein, 170 aa, Zea mays
  Clone ID: UC-ZMFLMO17212G04_FLI.pep
FLLIIYFCHTKCWHHQVVRLFNEAAQMSPEDADVHIVLGVLYNLSREYDKAIASFKTALQLKPQDYSLWNKLGATQANSIQSADAILAYQQALDLKPNYVRAWANMGISYANQGLYEDSIRYYVRAVAMNPKADNAWQYLRISLSNASRADMIAACDARNLDALQKEFPL

SEQ ID NO: 57297 - protein, 405 aa, Zea mays
  Clone ID: UC-ZMFLMO17212G06_FLI.pep
VGKKETCNGICLDVSANGDDSNLPSERTYKLNLSEHAAADNAAETDYSKMKEVISYVYTAQQRVEDIQLCIGRPIADFENFVYSASPVVHCSSCSVGCKSCLQECVKDGLCLHQTPDITLRTVWQWYEEPSCYGLDVKAQDLWRSKALWNSHCQFTTYFVPYLSAVQLFSQPKRTSGGSIDKESIHRDVTCETSPQLNLPPIFAKLFPKQSVPVNKPSTLRTEDDQQSADGELVFEFFEYEQPYSRRQLFDKVNELIAGAKPSNCQISGDPKNLEASLHDLHPASWYCVAWYPIYRIPDGKFQATFLTYHSLGHWIRRSSSAGGAAVLPVMGLQSYNAKAEWWFEMSKSESEGGQSQASEASEILKERSRTLSEAAAVLSRASVLKNGQMSRNRHPDYEFFLSRS

SEQ ID NO: 57298 - protein, 134 aa, Zea mays
  Clone ID: UC-ZMFLMO17198F01_FLI.pep
WLRRLQTGSILAHEMMHAYLRLKGFRNLSIEVEEGICQVLSHLWLESEIIAGSSSNVASSSEASSSSSSSAPTSSKKGAKTEFEKKLGAFIKHQIETDSSEAYGGGFRAGYPAVERYGLKRTLDHMKLTGSFPY

SEQ ID NO: 57299 - protein, 159 aa, Zea mays
  Clone ID: UC-ZMFLMO17258B07_FLI.pep
FCDRFPLKAVKVMHTVALRTEATIPGGETPADLGQAFKNHMSEMFAYHATMMSNTLRTSIVVFTRTGFMAILLSHYRPSGTIFAFTDEERVRQRLALYQGVCPVQMEFSDDAEKTFGNALSYLLKHGMVKDGKEVALVQSGKHPIWRSQSTHNIQVRKI

SEQ ID NO: 57300 - protein, 513 aa, Zea mays
  Clone ID: UC-ZMFLMO17261D07_FLI.pep
SLSGMSQMNLSHNQLTGGIPAGLGSMPELTLLDLSSNQLSGAIPPALGTLRVNQLNLSSNQLTGEVPDALARTYDQSFMGNPGLCTAPPVSGMRSCAAPSTDHVSPRLRAGLLAAGAALVVLIAALAVFVVRDIRRRKRRLALAEEPWKLTAFQPVDFGEASVLRGLADENLIGKGGSGRVYRVTYTSRSSGEAAGTVAVKRIWAGGSLDKKLEREFASEVDILGHIRHSNIVKLLCCLSRAETKLLVYEFMGNGSLDQWLHGHNRLAGTGSAMARAPSVRREPLDWPTRVKVAVGAARGLYYMHHECSPPIVHRDVKSSNILLDSELNAKVADFGLARMLVKAGTTDTMTAVAGSFGYMAPESVYTRKVNEKVDVYSFGVVLLELTTGRLANDGGEHGSLADWAWRHLQSGKSIAEAADKSIADAGYGDQVEAVFKLGIICTGRQPSSRPTMKGVLQILQRCEQAHQRTFDEKVADYDAAPLLQVHGGSRRKQLSDAEVIDDDGKGGFDCNV

SEQ ID NO: 57301 - protein, 121 aa, Zea mays
  Clone ID: UC-ZMFLMO17256G12_FLI.pep
APNLEEIRQLLHKGEQTVNTIISFGQFLDILPIRASKGYAVRWLSQQWNIPLEHVFTAGGSGADEDMMRGNTLSVVVANRHHEELSNLGEIEPIYFSEKRYAAGILDGLAHYRFFELLDPV

SEQ ID NO: 57302 - protein, 634 aa, Zea mays
  Clone ID: UC-ZMFLMO17261E01_FLI.pep
RHRPKPPRETGAGAGMSSISRNLRRSLAPDRLRRLSQHPREYVTSECHRPVVLHKRGPDILHDPWFNRGTAFSMTERDRLGLRGLLPPNVVSSQQQIDRFMLDLKRLQRYARDGPSDTYPLAKWRILNRLHDRNETMYYKVLIDNIEEYAPIVYTPTVGLVCQNYSGLFRRPRGMYFSAEDRGEMMSMVYNWPADQVDMIVVTDGSRILGLGDLGVHGIGIAIGKLDLYVAAAGINPQRVLPVMIDVGTNNEKLLKDPLYLGLQEHRLEGDEYVSVIDEFMEAVFTRWPNVIVQFEDFQSKWAFRLLQRYRKTYRMFNDDVQGTAGVAIAGLLGAVRAQGRPMIDFPKQRIVVAGAGSAGIGVVNAASRTMARMLGNNDVAFESARSQFWIVDAHGLITEDREDIDPDARPFARRKSELGHQGLSEGASLVEVVKKVKPDVILGLSAVGGLFSKEVLEALKDSSSSRPAIFAMSNPTKNAECTPGEAFSILGEKVIFASGSPFHDVDLGDGKIGHSNQGNNMYLFPGIGLGTLLSGARVISDGMLQAAAERLASYMKEEEVLEGIIYPPISRIRDITKEVAAAVVREAVAEDLAEGYRDMDARELARLSEEETNEYVKTNMWSPVYPTIIYKKD

SEQ ID NO: 57303 - protein, 397 aa, Zea mays
  Clone ID: UC-ZMFLMO17258D02_FLI.pep
ERMASWSSPSAAASGARFGPFPSGGQRLAPCPSLVRGTPAPTLVLRPHPDGRGHGLLAHTGPSPSSRCRAVAAEVGGLNIANDVTQLIGNTPMVYLNNVVKGSVANVAAKLEIMEPCCSVKDRIGYSMINDAEQKGLITPGKSVLVEATSGNTGIGLAFIAASKGYKLILTMPSSMSMERRVLLRAFGAELVLTDAAKGMKGALDKATEILNKTPNSYMLQQFDNPANPKVHYETTGPEIWEDSKGKVDIFIGGIGTGGTISGAGRFLKEKNPGIKVIGIEPSESNILSGGKPGPHKIQGIGAGFVPRNLDSDILDEVIEISSDEAVETAKQLAVQEGLLVGISSGAAAAAAIKVAKRPENAGKLIVVVFPSFGERYLSSVLYQSIREECENMQPEP

SEQ ID NO: 57304 - protein, 256 aa, Zea mays
  Clone ID: UC-ZMFLMO17256G01_FLI.pep
EDSARVALQTLEEPIKDLIPVQRQGINEDDFLNQFSNSLKVKGLDFHERIVKAFHTSLKVQDISALVILAGISGTGKSELPQKYADFIGAPLVMLPVQPRWDSPQDLQGFYNYIEKKYKPTQLMHYLYQYQQDRKMHGRIIMVLLDEMNLARVEYYFSDFLSKLETRRSKPTYLSLDVGSLKLPEKQRDILIPEEFLFIGTMNEDETTQSLSDKVLDRANVLTFGRPNELKLRGRKIKYEKAENYLPWNEFVKWTK

SEQ ID NO: 57305 - protein, 323 aa, Zea mays
  Clone ID: UC-ZMFLMO17258F01_FLI.pep
NLFAGKLQCRIKNSGLEVITQFPYRPVDEKDIIDPRNNVESQALQHPRVALQDRLPNILVELDLAGVQGGLRQAREAVLDAEQEALGPVGQRHVLVVVVGRELLDLAPRQLAVAAASLAPPHVHGGLHPVGHRQRVVLRRDVKRVQQELRRELVGAKHDAIHRVPHACPTALGEHGHERLGHLHVAEDAAVDGDSGLVDLVGAVAPLLEVLARLVGEACVRDAGHRQPPLIVVPVSRPPERRRRRHPRRRGRGDRAERPRPGVRVPELRLLEAVQNVDEHGVELLERGKVDVDVRPWSGRHDLHESIHPDQQRNNVDWYLEES

SEQ ID NO: 57306 - protein, 197 aa, Zea mays
  Clone ID: UC-ZMFLMO17262C06_FLI.pep
LSLSLSLSLSLSRPLSLSDDRWAAAADAAAALSQVLRLLLVSSPARSTQQDQYKDDIKYEEKQALHLQVDTEEIGVQSFDLYLPRIRSRVQHIHGRHGRSISTPCIRCSRNRPRGPRQIFRLERLLVELRRRRQRLLGPFQECLCEIGEQAEEEVPLRLLHGRNRGASAPQEGSSLLGRCRAACPNVQGLLYINSQQ

SEQ ID NO: 57307 - protein, 246 aa, Zea mays
  Clone ID: UC-ZMFLMO17258G01_FLI.pep
TIDPFKCNVCQSIMVSRIDLWIPHFSTTMQCIVLHPTYLKKQASNPQSAPARSLSSNSQLNLAPQLHAFPRRDDRPLRAPTKGAHLHERDEELARGVADGLLAVAEALDGGGDEGVEVDLEVVARDDGGDGERLEAALGDAEVGVPRQIHAGVHQRGDLGRRQPAPRRQAPRAAARPRPDAPWCPWPDLMRRERGSDRERTQRDESETNHRPWFEHHPQSIPSARACGRRKWLRGGMRRSVSIHLA

SEQ ID NO: 57308 - protein, 277 aa, Zea mays
  Clone ID: UC-ZMFLMO17258G10_FLI.pep
CNVYVLVCPYMRGRNILEGVAILHETIHELHRKRLSGVILKIYFEKAYDKVKWPFLFQTLRMKGFAPKWISWVRSFIMGGSVAVNVNDDVGKFFQTKKGLRQVDPLPPILFNIVADMPAILINRAKEHGQVSGVVPHLIGGLSILQYADDTIIFMENDLEKARNMKLLLGAFEQISGLKINFHKSEVLCFGDAQDSLESYLELFGCKHGDFPLKYLGLPIHFKKLRNSDWKIIEERVEKRLASWKGKHLSIGGRLTLINSVLNSLPLYMMSFFALGS

SEQ ID NO: 57309 - protein, 313 aa, Zea mays
  Clone ID: UC-ZMFLMO17257B12_FLI.pep
RVVWPPPAASFSPSIPLLVTSPTRQALRSTRASSPVCPTHTPTGARVPRSAEQGREEGMAVVGVLALQGSYNEHMAALRRIGVKGVEVRKPEQLLGIDSLIIPGGESTTMAKLANYHNLFPALREFVGGGKPVWGTCAGLIFLANKAVGQKTGGQELVGGLDCTVHRNFFGSQLQSFETELSVPKLSEKEGGNDTCRGVFIRAPAILEVGPDVEILADCPVPVDRPSITISFGEGTEEEEYSKDRVIVAVRQGNILATAFHPELTSDSRWHRFFLDMDKESPAKAFSALSLSSSSRDTEGLPKNKPFDLPIFE

SEQ ID NO: 57310 - protein, 85 aa, Zea mays
  Clone ID: UC-ZMFLMO17263E01_FLI.pep
WDERALRHSATPLAANVNRPQTLPQTGTIGSSALSCGRSDGVVCSRTRPNCCYRVAIYLHRNWLLLLTWGSLLLQLNIEESLKRD

SEQ ID NO: 57311 - protein, 162 aa, Zea mays
  Clone ID: UC-ZMFLMO17257E05_FLI.pep
AIGCTPGSRVPMANGGCNDAANSMAQNFNKLLRLEVAKAVASSMPGMRYSIASTYNFVTDLMDSHLVAGLRVVDRACCGSGKLNAAVMCAQPNTTYCSDRDDYMFWDMLHPTQATNERGVVAIFYGPQEYADPINFAQLAAATANDDGDINTAMTAGVYAAI

SEQ ID NO: 57312 - protein, 561 aa, Zea mays
  Clone ID: UC-ZMFLMO17257E12_FLI.pep
RSPHTQGRKRAAHRKVPGSDTRRPHCSMAAMAAAGGVGLHLIGAATATLIVAVLVAAVLGRRRRARARAQAPPVEGKPAPEAGCAVGDGAGPDVGTDVIIVGAGVAGSALAYTLGKDGRRVHVIERDLTEPDRIVGELLQPGGYLKLIELGLQDCVEEIDAQRVLGYALFKDGRNTKLAYPLEKFHSDVAGRSFHNGRFIQRMRQKAASLPNVQLEQGTVTSLLEENGTVKGVQYKTKSGEELKAYAPLTIVCDGCFSNLRRALCSPKVDVPSCFVGLVLENCQLPHPNHGHVILANPSPILFYPISSTEVRCLVDVPGQKVPSIASGEMANYLKTVVAPQIPPEIYDSFIAAIDKGSIRTMPNRSMPAAPLPTPGALLMGDAFNMRHPLTGGGMTVALSDIVVLRNLLKPLRNLHDASSLCKYLESFYTLRKPVASTINTLAGALYKVFSASPDQARNEMRQACFDYLSLGGVFSNGPIALLSGLNPRPLSLVAHFFAVAIYGVGRLMLPLPSPKRMWIGARLISGACGIILPIIKAEGVRQMFFPATVPAYYRAAPTGE

SEQ ID NO: 57313 - protein, 372 aa, Zea mays
  Clone ID: UC-ZMFLMO17259E08_FLI.pep
AMAASTIAQRGIQLVATAHGVTIENLIMNPSLEMLVGGIQSVTLGDEEANRRGVQKTVLERKGPSTFTCAAEIVSKKELRVHRSLEATVDALLAGKLPNFEIRKLGSKGSMQEVSVQKEQSHLGIYDATEFGSDSLRNARRSLDSAFSLDSAEGHIVRSDGADSSFNLYAYGISESTALQAIHQLELDDSVTSTYNISEADAVIALHSKLKKNYQIQAVLKSQDIPVFLVKTNSLPQITRALRALVDDHMDEVIDYNDKEEARSSEETDALEEARLAIEQVVIPKGESVQLLPRPSSIISSQVGLVESFSLKWEVVGQEPKACVRILPHFAPKQVEAVARETPAEPADSDWESHDDSDHTQSGITRLPFLPD

SEQ ID NO: 57314 - protein, 490 aa, Zea mays
  Clone ID: UC-ZMFLMO17264A02_FLI.pep
HAGPVEFLYYWFHRALHHHFLYSRYHSHHHSSIVTEPITSVIHPFAEHMVYYVLFAIPMLSTLYMGNASVLGIVLYIAYIDFMNNMGHCNFELVPRWMFQLFPPLKYLMYTPSFHSLHHTQFRTNYSLFMPLYDYVYSTMDKSSDQLYETSLRGAEETPGLVHLTHMTDLQSVYHLRIGFASVASRPSATSAMWWYMWVLWPVAWLSMALAWAYGSSAFVVERIKLGKLRMQTWAVPRYNFQYGLSWERESINGLIERAILDADARGVKVLSLGLLNQAKQLNGGGELFRHRYPKLRVRLVDGSGLATAVVLRSIPRDAKQVLLHAGPSKIACATAAALCERGVQVVMNPNKEYDMLKSQIADSKASYWERRSDNHHTPQVWLVDNIDDEEQKMAPQGAVFVPISQFPIKKIRKDCTYLSTPAMKIPETMQNIHACENWLPRRVMSAWRIGGILHALEGWTVHECGDAMVHAEKAWSAAIRHGFVPLTKA

SEQ ID NO: 57315 - protein, 295 aa, Zea mays
  Clone ID: UC-ZMFLMO17257G02_FLI.pep
TWQEEEEEEGHGVADLLTQGAPVSDEQFQLRQQARRGRVRQCVLGPALGRITDRREEAQELEQQGRNGVRCRGGGSGTRAAQEPSKPARVLRRRPGAPDSLRLHAEPEHTLLAPWAARGGVQPQLGEEDEDRRGLRGRDRLPAPLRDAAHHPQRREGEQRAPGRRLPGAGRRLRLRQAGPGRRDARHHQGERHAGVPGAGVRDAREGLRELRRLQLRGHAAGAGQREEARGEAEPHHEREADRDGVGAPAGPRQEVRRDRRPQAPGPIRRGGAQAGGARRARLRPGQAGAAAHHV

SEQ ID NO: 57316 - protein, 286 aa, Zea mays
  Clone ID: UC-ZMFLMO17264E01_FLI.pep
ASLSLGYFFTAGHRIYLRRGCSPQPKPRPWAMACSSHVLAGAPPSPMPQRSSSHPLPALVLQLGSPPCRTSLPLLGVPSARFQLRVRAPISHGRVPWCSGVISSVPALGFPFFHGARPAVELPCARVLLPCSHRRAAPCVHPWLNASPWSASDSLLLGQNSSSPSHRSSLFSHGHTVVGTGTSWSVHGRSLRRWCSAINPLRRARSCPSHRARIPSVSPPSSSLAKSSPCCRALRPRRVPSPSRSLSQCTWRCLLRKNAKPCGVRWTIRTEERGRSREVKSNWSWI

SEQ ID NO: 57317 - protein, 128 aa, Zea mays
  Clone ID: UC-ZMFLMO17265A11_FLI.pep
LSFITILGVATIAFSLLPVFQNPEFRTIRACLFFGMGASGVIPVLHKLVLFWHQPEALHTTGYEILMGLFYGLGALVYAARVPERWMPGKFDIAGHSHQLFHVLVVAGAYTHYHAGLVYLKWRDLQGC

SEQ ID NO: 57318 - protein, 231 aa, Zea mays
  Clone ID: UC-ZMFLMO17266C08_FLI.pep
PPVPYLFVPQVPETPLHRPTELSPLLNHSPVNESTDHHSQDQGIPTLITWSQGGDEVFLEGSWDNWTSRRALERSGKDHAVLLVLPSGVYHYRIIVDGELRYIPELPHAADERGRVANVLDVHDYVPESLDSVAEFEAPPSPVHSYDLHCPGDEEFAKEPPTLPPQLLVSVLGGDVDSAGHGNQALKPQHVVLDHLFIEKGWGSQSLLALGVTHRFESKYVSFVLYKPLER

SEQ ID NO: 57319 - protein, 97 aa, Zea mays
  Clone ID: UC-ZMFLMO17273C07_FLI.pep
VNYQVTKWLCLIMHVIFLALYVSLRHSTTCSISASLICIYVLMFVIQDQIHPARSLLANVHLILLLLGWKCFLAAFSVNQYHRITFLDTQMLRDAHS

SEQ ID NO: 57320 - protein, 142 aa, Zea mays
  Clone ID: UC-ZMFLMO17280E06_FLI.pep
GLGMTLRSFSAFATAATQLGAFGTLLNSTLRLRLLGLGHLSLLRLLLILGLLDALLDLTKSSFSSSITDFRLLSSLLLDHFQGSTHNGPRVWLLGSAAPLLDSFSMDVLLVLLPVHCCPGKLCRLQAVVEVALAFRVGKKEN

SEQ ID NO: 57321 - protein, 237 aa, Zea mays
  Clone ID: UC-ZMFLMO17287E10_FLI.pep
LERLAHINHKNLVRPVGYVIYDDVALLLHQHMLNGTLLQLLHSSGGDTDGKKQKPDWPRLLSIAIDVAEGLAFLHQVATIHLDICSGNVFLDSHYNALLGEVEISKLLDPSKGTASISTVAGSFGYIPPEYAYTMQVTVPGNVYSYGVVLLEILTSKLPVDDVFGEGVDLVKWVHTAPARGETPEQIMDPRLSTVSFAWRRQMLAVLKVAMLCTERAPAKRPRMRKVVEMLQEAKNS

SEQ ID NO: 57322 - protein, 423 aa, Zea mays
  Clone ID: UC-ZMFLMO17268H09_FLI.pep
GRQASRVKDTERRQVGVGHNLSLSSAPQPGMACGGKGGTGWSSLPADLLLSIFALLPADAHRVRFRAVCADWGAAAAAWRPRPWLVGSRTDRSGQGASEISSFWLAPSVALLPFAANVPSGLEYLSSSHGYLALSDPRISPKVILLLNPLTGRRVRLPPIGFFKKWLDLTTIVLSGDPATATEWAAVAVGFPTTCLAYYSSVTGAWTRLDFSVTGYAAVEHYRGRFYVAFKSSICICEVDGDAPAVIPLEHVDANGDAVVSDNDKLPGEGRRVVETHLVECDRQLLLVSVHDDVMYNSDDDMAGVDDGGIKIGSGFARAVEVHRVDWLGDRTVRLVRVVDLGWNSLFLGRNRAFALSRAEFPWYRARVNRIYLVDRGHPDGVVRVLGMERQRGRHLEILTIKPDDGRRESAGWARRGWFFPNY

SEQ ID NO: 57323 - protein, 145 aa, Zea mays
  Clone ID: UC-ZMFLMO17277H08_FLI.pep
RFQSVAYLQQIWWFEVVGEVDFCFPVGTYSLYFRVHLGKFYRRFGRRQCTSEHVHGWDKKPVRFQLSTSDGQQALSQCYLEEPGSWVLYHAGDFVASKPDQLMKLKFSMAQIDCTHTKGGLCIDSVLIYPKGKGFHQERVVRSQK

SEQ ID NO: 57324 - protein, 316 aa, Zea mays
  Clone ID: UC-ZMFLMO17285A04_FLI.pep
SASAPSGRSTSATRRATAWTRPAAGSASRGWRPPHCWRPPRGRCTRASSGARGRRSRTFPCSSPTMPPPPPRAPAAGSPRSSRPTATAPSAARGRRRPAPRPPRTYARCRGACPAPGRRRASCRPSEPAWPRRAPPRPPAASPRRPTPWAACSTSPPGRSLPPCRARTAPPRCRRTTSRPRRRAPRSPGRRRSSRSRNASPRRGGARTAAARAACSGKSTRWTSARSGSRRPSTPRRSRLPASGRPSCVRLQRNSPRRAPPSRTGWTRWRDRCGSSSTASCAAEWRASIHRWPMQIELYSRSSSSCLRSHSVAVLL

SEQ ID NO: 57325 - protein, 425 aa, Zea mays
  Clone ID: UC-ZMFLMO17269A06_FLI.pep
LDHIKELIKWGTDYILKTFNSSADTIDRIVAQVGVGDTSKGSSQPNDHYCWMRPEDIDYKRPVTECHSCSDLASEMAAALAAASIVFKDSKTYSDKLVKGAKALYKFGRLQRGRYSPNGSDQAIFYNSTSYWDEFVWGGAWMYFATGNNSYLTVATAPGMAKHAGAYWFGSPNYGVFTWDDKLPGAQVLLSRLRLFLSPGYPYEEILRTFHNQTDNVMCSYLPLFNSFNFTKGGLIQLNHGRPQPLQYAVNAAFLASLYSDYLEAADTPGWYCGPNFYTTEVLRKFARSQLDYILGKNPLKMSYVVGFGNKYPKRPHHRGASIPHNGVKYGCKGGYKWRDTKKANPNILVGAMVAGPDRRDGYKDVRTNYNYTEPTLAANAGLVAALISISDIKTGRFGIDKNTIFSAIPPMFPTPPPPPSAWKP

SEQ ID NO: 57326 - protein, 195 aa, Zea mays
  Clone ID: UC-ZMFLMO17278A06_FLI.pep
TPFWIDGSKVGVYGKPANEDFEADNAHWKRVVSKSYVNGMGIDWSKVRNVMDMRAVYGGFAAALRDQKVWVMNIVPIDSPDTLPIIYERGLFGMYHDWCESFSTYPRTYDLLHADHLFSKLRKRCKLAAVFAEVDRVLRPQGKLIVRDTADTINELESMAKSVQWEVRMTYTKGSEGLLCVEKSMWRPKELDAST

SEQ ID NO: 57327 - protein, 267 aa, Zea mays
  Clone ID: UC-ZMFLMO17281C08_FLI.pep
DLLLGVACPVCALARTCLFPRLERREKVEMGACASVHKDPGHPKKQFLDSPTKAKAANGKGGGGGGVAPVGDGFGDLKSKVDAEAEQLRAEFNPKNPDSGSKDEVFFESRAWLDSDCEDDFYSVNGDFTPSRGSTPVYQPRAQTVMSSIFQPDTRSSKSPEPSPTGRRKLAELLQEAMQDGPEESADEQQQQQQSRSAGAAADGKPPVSESTSSSACSTVPTPVAVAKSRKEKAWYTGRCCLPSFVHSLTLDESERGQKMSSRPCAV

SEQ ID NO: 57328 - protein, 266 aa, Zea mays
  Clone ID: UC-ZMFLMO17288A11_FLI.pep
AKPTSVSPFSFGLQIKQFFAFKNKVTKLLSEGDMHSRYIPQQDYFSEGLYTFDIGQNDLAGEFYSRTEDQVIASIPTILLEFENGLKKLYDQGARKFWIHNTGPLGCLPQNIALFGKDPSQLDELHCVAKHNRAAKLFNLQLHALCTKLRAEFDGASITYVDIHTIKYSLIANYSRYGFEHATQACCGYGGPPLNYDGNVPCGHTVSLDGKMVTAKGCSDTTEFVNWDGIHYTEAANFHIASQILTGKYSDPPFVDKMPFVIKPRF

SEQ ID NO: 57329 - protein, 260 aa, Zea mays
  Clone ID: UC-ZMFLMO17265B04_FLI.pep
LNGVQYNLSINNPPNTLHGGFKGFDKTIWEVAEYNKGDKPSITFKYYSKDGEEGYPGDVSVTARYSLLPSATLKLEMEAIPLNKATPISLAQHTYWNLAGHSSGDVLSHSVQIWGSQITPVDQTSIPTGELMPVTGTPFDFLTGTRIGSRIDQVPGGYDHNYMVDSGEVRSGLRHVAHVADPSSSRALDIWADAPGVQFYTGNSLGGVVGKGGAVYGKHAGLCLETQGFPNAVNQPSFPSVVFGPGERYSHTMLFELSTE

SEQ ID NO: 57330 - protein, 482 aa, Zea mays
  Clone ID: UC-ZMFLMO17269G08_FLI.pep
AGAAGGGGKKLPGGAGEMTEDELARVPGRLCGKGASAVACLHTQQGRKGTNQDAMVVWESFNSSDSIFCGVFDGHGPYGHFVAKKVRDSLPVKLRTQWQTSANGGSSPHQNGSINSEETGSIVDDEWGDGDDTEKLPEMFLPLKQSYLKAFKLMDKELKLHPTVDCFCSGSTAVTLVKQGLDLVIGNLGDSRAIMGRRDASNNLTALQLTVDLKPNLPREAARIQQCKGRVFALQDEPEVARVWLPNNDSPGLAMARAFGDFCLKDYGLISVPEISYRRLTEKDEFIILATDGVWDVLSNKEAVDIVASAPSRATAARALVDCAVRSWRLKFPTSKSDDCAVVCLFLGHEKSADSVQGSEPNVETAEPTVEVSSSTQDSSAGVDEDIADAGMHVSSAVHISEATLQHSTTLREVDEIVPVDEPTASKEPGRCGSARSLADCISTNEEEEWSALEGVTRVNSLLNLPRLLSGDKRSTSWRKRR

SEQ ID NO: 57331 - protein, 191 aa, Zea mays
  Clone ID: UC-ZMFLMO17278C10_FLI.pep
PVRPLDEQSSDHKPGFTSNITKTSNVESVLPNSPQNRPLVILGLQLSKLSVKKTGYFSDKTEVQKSSTVLGYAAHAVSLIASYLNVPLRYPLRFGGSRSYVLDPAPSVEPSSITSVGTSVPPSTSMRTTEFPLFLDSQETTRSSYAIFLLNKDIEQLLNYIGAESLGPRHVLANLKQLTTIIQSQGYISDG

SEQ ID NO: 57332 - protein, 481 aa, Zea mays
  Clone ID: UC-ZMFLMO17285B07_FLI.pep
HILFFPFLAPGHLIPIADMAALFAARGVRCTILTTPVNAQLIRSAVDRANDASRGIEGALAIEIAVVPFPDVGLPPGVECAPALNTMDDREKFFHGAQLLREPFDRFLAENRPDAAVTDSFFDWSADAAAEHGVPRIAFLGSSLFSRACSESTLRNNPVEAAPDDPDALVLLPGLPRRVELRRSQMMEPKKRPERWAFFQRMNAADQRSYGEVFNSFHELEPDFMEHYTTTLGRRAWLVGPVALASKDVATRGANNGLSPDAGACQQWLDAKPEGSVVYVSFGTLTHFSPPEMHELARGLDLSGKNFVWVVGGADTEESEWMPDGFAELVTRGDRGFIIRGWAPQMLILTHPAVGGFVTHCGWNSTLEAVSAGVPMVTWPRYADQFYNEKLVVELLKVGVAVGSTDYASMLETRRAVIGGEVIAKAIGRVMGDGEDAEAIREMAKELGEKARRAVANGGSSYDDVGRLVDELMARRRSVKV

SEQ ID NO: 57333 - protein, 203 aa, Zea mays
  Clone ID: UC-ZMFLMO17281G11_FLI.pep
LAPLIIIINIMKVTVIGLGFVKAEGVVNSMTRHGDRRELLKGPLYYACAITLTTIVFWRTSPISIAVICNLCAGDGVADIAGRRFGHVKLPHNPEKSYAGSIAMFLAGFIASVLFMCYFNIFGFVEKSWSMVAAFGVISLAAAVVESLPISTRLDDNLTVSVASVLVGALVFYSIGARNLCCMSSEVRRSIPATVGMVFAGSS

SEQ ID NO: 57334 - protein, 150 aa, Zea mays
  Clone ID: UC-ZMFLMO17285F05_FLI.pep
LTHLSHDTCTSSITTEISSRLTVHRRPTAAAARPEGGGLIDYRSGRRMGLKPKGIAPHAGGICMDLMSGAGVRQSGHASFACPPLSCPSRSACPALPPPRFVVAASIFAAISFAVCFFGFAFPVMADPSSCSSSRALAAGRRLPNPTCVL

SEQ ID NO: 57335 - protein, 433 aa, Zea mays
  Clone ID: UC-ZMFLMO17277B01_FLI.pep
KEPHPTYREPAMATVAMDISKPTPAASGDEAAAAAKGRSGGGGEGLRQYYLQHIHDLQLQIRQKTHNLNRLEAQRNDLNSRVRMLREELQLLQEPGSYVGEVVKVMGKSKVLVKVHPEGKYVVDIDKSIDITKITPSTRVALRNDSYMLHLILPSKVDPLVNLMKVEKVPDSTYDMIGGLDQQIKEIKEVIELPIKHPELFESLGIAQPKGVLLYGPPGTGKTLLARAVAHHTDCTFIRVSGSELVQKYIGEGSRMVRELFVMAREHAPSIIFMDEIDSIGSARMESGTGNGDSEVQRTMLELLNQLDGFEASNKIKVLMATNRIDILDQALLRPGRIDRKIEFPNPNEDSRFDILKIHSRKMNLMRGIDLKKIAEKMNGASGAELKAVCTEAGMFALRERRVHVTQEDFEMAVAKVMKKDTEKNMSLRKLWK

SEQ ID NO: 57336 - protein, 194 aa, Zea mays
  Clone ID: UC-ZMFLMO17278D03_FLI.pep
EPLHLAAWAGHVDVVRCLCKHKADVGAAAMDDTAALHFASQKGHVEVARELLASGASVKAKNRKGFTALHFAAQNSHLDLVKYLVKKGVDVTAKTKGGQTALHVAEDDEVRAFLKECEQSLKKGAELPSEKDDSAEKEGDSKSSGEVMKDEEDAEQGEKRKSELVGASSLSGVKKAKVSLGHLVCENDMDEEEE

SEQ ID NO: 57337 - protein, 453 aa, Zea mays
  Clone ID: UC-ZMFLMO17281H12_FLI.pep
AMRMVSRRGAVRLVLVSATAWAMLGLVALAFHLRPCSSRVAFLSALCKKDSKVLSVLDSMGLSSKPLHRCPIPVADDPNVVVIPKRTPNTIVKKLAYITVDKQDKDPSPLFGGRQNWKQREESFKLNSTMKVHCGFMKNSGADMDIIDVKYIQKCKFVVASGIFDGYDIPHQPSNISRRSQKLFCFLMVVDEVSLDFIQKNTTVKIDSAGGKWVGIWRLLTVHRLPFDEPRRNGKIPKILTHRLFPQAWYSIWIDGKMELIVDPLLILERYLWRGKYTFAVAVHKHHRSIYEEGDAIKRRKRYARPLVDLQMKMYYYEGMEPWSPKKKMPGDVPEGAVLIREHTATTNLFSCLWFNEVNLFTPRDQISFGYVARRLGDALELFMFPNCEYNSLFVLHRHTREHSSKVEWAKTVDEIVEKGLRESRGGLGLWTPYPADLSSVELPAVRRTSPAG

SEQ ID NO: 57338 - protein, 137 aa, Zea mays
  Clone ID: UC-ZMFLMO17285G03_FLI.pep
LIDPFFMTHNNRRCSPRSQTASRIRIFLARRRPYDSGPAKTFIRARARRHPQSLTLTELLLQQLRRVAMRLNWKRRWAYEAAAGGAAFSSAWASETRPRLRSSCCCCCSRLACPAPSPQNRSRRARGPWISRASWVP

SEQ ID NO: 57339 - protein, 534 aa, Zea mays
  Clone ID: UC-ZMFLMO17267E03_FLI.pep
RGALYALGLIHANHGEGIKEFLRESLRNTTSEVVQHGACLGLGLAALGTSDEEICEDIKNILYTDSAVAGEAAGIGLGLLMVGTASEKATEMLAYAHDTQHEKIIRGLSLGIALTVYGREEEADTLIEQMTRDQDPILRYGGMYALALAYRGTANNKAIHQLLHFAVSDVSDDVRRTAVLALGFVLYNEPEQTPRIVSLLSESYNPHVRYGAALAVGISCAGSGLSEAISLLEPLTSDVVDFVRQGALIAMAMVMIQTNESYDPRVGAFRRQLEKIILDKHEDTMSKMGAILASGILDAGGRNVGIRLKSRSKHDRLTAVVGLAVFTQFWYWYPLTYFISLAFSPTALIGLNSDLKVPTFEFLSNAKPSLFDYPKPATQQTAAASVKVPAAILSTYAKSKARAKKDAESKAKEKADDSSNASTSMQVDGAAAEKKAAEPEPAFQVLTNPARVVPAQEKFVKFLEGSRYKPVKAAPSGFVLLQDLKPTEAEELALTDAPSTAAATTNALASSASEPAAMAVDDEPQPPPAFEYTS

SEQ ID NO: 57340 - protein, 290 aa, Zea mays
  Clone ID: UC-ZMFLMO17278E07_FLI.pep
YFVILMIFFQIKAKLEASSLDKWLLINLQSTAEFSSHMLNRDTWGNDAVAQLIRSNFIFWQVYYDTSEGRKVCTYYHLVSMPAILLIDPVTGQKMHAWNGMVHPDRLLEDLLPYLDKGPKEHHAAQPQKRPRKVDPEASTGKQGKIAVEDEDEELARAVAASLEESKEVIEASDASDDMVEAEPEEENEPTLNTKPDYPPLPEEPTGSRDLLCRVAIRLPNNRRIQRNFLHTDPIKLLWSFCAPQVEDGERRAFHFVQAIPGASQKLELGSDLTFKEAGLANSMINLLLD

SEQ ID NO: 57341 - protein, 149 aa, Zea mays
  Clone ID: UC-ZMFLMO17282C08_FLI.pep
SCFFDLLIQINKIRQKIGNTRNGCTRQIQLQCNGDRFINMSNMLFPDSRVKLSVIGDSKCQLECMKKCSCTAYTYSVLDGCSLWYGNLTNMQDGYNNGSGAGTLYLRVAASELESTNSSGHNLVWIAGVLPSIGFLIFCLILFIWIRRS

SEQ ID NO: 57342 - protein, 401 aa, Zea mays
  Clone ID: UC-ZMFLMO17286B09_FLI.pep
AFPVSSSSSCCLLLSIFILPIARLDFSLEFAPPASPLTSLCLINAGITARTGPALPPFLLPPPLLLTATTGRALPPLCARCPGLPRALHRRRAPIRSEMDEAVPALATGQASTDGVTEQPVNVYIWDMDETLILLKSLLDGSYAGAFDGLKDHEKSTEIGKRWENLILELCDEHFFYEEIENYNEPYLNALNEYDDGRDLTSYDFEADCFSSPYDDANKKKLAYRHRAIGEKYAKGLEKVLDGHMVKVCNDQYSLTDKYTDGWLSSAHKLLEEALGKSASAPSANSSSINCIVTSGSLIPSLAKCLLYHLDDVVSSENVYSSWEVGKLQCFKWIKERFDGPNVRFCAIGDGHEECSAAQVMKWPFIKIEFRPEAHHRFPGLDLPTVQTYMDVIYESSSKDG

SEQ ID NO: 57343 - protein, 529 aa, Zea mays; identical to SEQ ID NO: 41166
  Clone ID: UC-ZMFLMO17272E12_FLI.pep

SEQ ID NO: 57344 - protein, 187 aa, Zea mays
  Clone ID: UC-ZMFLMO17286E11_FLI.pep
MLQRKEFSEERKISKFYRALVTGILDDDEVVVTQPIGLVHYPGVAEGLYAACSSGKPAMSKVCVLERLAHQNHTLVQVEIHSGRPHQIRIHLAYIGHPLVDDPLYGIGGHPNFVEPESTGTDSSFASDGGYERPLLPVPGDCGYHLHAHWLVLCHPTTNKMVKITASLPQILQTREERRAAAEQTGG

SEQ ID NO: 57345 - protein, 187 aa, Zea mays
  Clone ID: UC-ZMFLMO17289B12_FLI.pep
KKLTYCRHVFNIQVIAESLSEEEIGGLKELFKMIDTDNSGTITFDELKDGLKRVGSELTENEIQALMEAADIDNSGTIDYGEFIAATLHMNKLEREENLVSAFSFFDKDGSGFITIDELSQACREFGLDDVHLEDMIKDVDQNNDGQIDYSEFTAMMRKGNAGATGRRTMRNSLHLNLGELLNPSKT

SEQ ID NO: 57346 - protein, 265 aa, Zea mays
  Clone ID: UC-ZMFLMO17265H07_FLI.pep
SRALSLSSLCATTLAAAKPPQHPVPFAPAHRALPHRLAAAMSSSSSPTPAASVDAGAPAPSASNAIDFLTLCYRLKTTKRAGWVKRGVQAPESVADHMYRMGVMALVAADLPGVNRDRCVKMAIVHDIAEAIVGDITPSDNVPKEEKNRREKEALDHMCELLGGGSRAQEIRELWMEYEENASLEAKVVKDFDKVEMILQALEYEKEQARDLEEFFQSTADRLGKSMGSGDCIEKKNKVIKRCSFYHVGSKTTCWHSISVELCFY

SEQ ID NO: 57347 - protein, 188 aa, Zea mays
  Clone ID: UC-ZMFLMO17282G12_FLI.pep
ASSKKKSGARPSGEGKKSRLVELEEARGPRRAEGGEARKGNTQQQQEKAKAKRLVKWKCASGCGACCKLDKGPDFPIPDEIFADHPDDLQLYRSMIGSDGWCINYDKATRTCNIYQDRPSFCRVEPKIFDELFGVPRSRFDREACSACVDTIKMVYGDDSAELSNFKRVIREESNKLESKNQDKLLDA

SEQ ID NO: 57348 - protein, 330 aa, Zea mays
  Clone ID: UC-ZMFLMO17286G10_FLI.pep
ATPASLKITMMRALAVVAMLATAFFAVPARAEQCGSQAGGALCPNCLCCSQFGWCGSTSDYCGSGCQSQCSGSCGSTPNPPSSGGVASIIPESLFNQMLLHRNDAACPANGFYTYAGFIAAANAFPGFGTTGAPDVQKRELAAFLAQTSHETTGGWATAPDGPYAWGYCFKEEQGGASGPDYCEPSAQWPCAAGKKYYGRGPIQISYNYNYGPAGQAIGAGILANPDMVATDPTVSFETAVWFWMTPQSPKPSCHDVMTGQWTPSAADTAAGRLPGYGVVTNIINGGLECGHGADSRVADRIGFYKRYCDLLGVSYGDNLDCANQTPFNG

SEQ ID NO: 57349 - protein, 468 aa, Zea mays
  Clone ID: UC-ZMFLMO17268C09_FLI.pep
QVGAGEELPSERSRSGSFSSSSSSSGTPGVSSEPPLLSFSVDNIDTVKLLELLGPEKVDPVDVKAIKEKLFGYTTFWLTKEEPFGDLGEGVLFIGNLRGKREEIFAKLQRQVRELTGDKYNLFMVEEPNSEGDDPRGGPRVSFGLLRKEVSEPGPTTLWQYVISLLLFLLTMFSCIELGIASKISSLPPEIVSYFTDPNATGPPPDMQLLLPFVESALPVAYGVLSIQLFHEIGHFLAAFPKNVKLGIPFFIPNFTLGTFGAITQFKSILPDRKTMFDISMAGPVAGAALSFSMFFVGLLLSSNPVGASDLVEVPSQLFQGSLLLGLISRATLGYRAMHAATVSIHPLVIAGWCGLTTSAFNMLPVGCLDGGRALQGAFGKDALFGFGLTTYSLLGLGVLGGPLSLPWGLYVLICQRTPEKPCLNDVSDVGSWRRAALIASVFLVVLTLIPLWDELAEELGVGLVSSF

SEQ ID NO: 57350 - protein, 437 aa, Zea mays
  Clone ID: UC-ZMFLMO17283A11_FLI.pep
RRPPDRAAMTTAARERRLPPTLPLATLIGRELRAGGSERPALRYGHAGFAKRGEDYFLVKPDCVRVPGDPASAFSVFAVFDGHNGVSAAVYSKEHLLEHVMSALPPDIGRDDWLQALPRALVAGFVKADIDFQRKGEVSGTTATLVVIDGFTVTVASVGDSRCILDTQGGELQLLTVDHRLEENAEERERVTASGGEVGRLNLFGGQEVGPLRCWPGGLCLSRSIGDMDVGEYIVPIPHVKQVKLSNAGGRLIIASDGIWDALSNEAAAKACRGLPAELAAKLVVKQALKTSGLKDDTTCVVVDIIPSDHLTSPQLSPKKNHNKLKSLFRRRSHSSVGKLGGKSASIGSVEELFEEGSAMLEERLGRNLSLKAVSAPFRCAICQVDQEPFEDLMRDNGGGYCSSPCAPWGGPYLCLDCRKKKDAMEGKRSSCSTACR

SEQ ID NO: 57351 - protein, 367 aa, Zea mays
  Clone ID: UC-ZMFLMO17286H05_FLI.pep
VLKATALASAQVASAIESYHHLLKLRLLNEADESVYWRADWLVDKLGTKVHSYYWLDEFSGKNSFSRYWRSEWSSGPNPWCQGMQIPDSDVVIEGNYASVVSQKNKEKSHVVLNPGSEFALCDCSWSMKGNLCKHVIKSAKVCRDRGLALPSLAMFHYYQALANLVHCPPSDTLISDHAMALAVSVKTQLDAVLCAVNGSSSIRPGFQDPQSTSKTREAEIEEANSENGVCTSQPQPGAGDDEDQAIRTGKRRKSGNASGDTEDGSIYQDSLARKKCKSGEASGDDEEASTEEGSRACESRKPGEASTNNEEVSIGQDSRDHEKRKSGEPPGNEGTSATQATEPSETETSQATNGLVRSLLPSSECT

SEQ ID NO: 57352 - protein, 274 aa, Zea mays
  Clone ID: UC-ZMFLMO17277G04_FLI.pep
HYTTSYRGLPALSRAEEDHGQSHRPRRSSPRCHCQLHDGDHADHPQPLPSPGVASGDPQLRPPFHLRQHRATRPQRAAHPLLPAHLLGRPGGRAHGLRRRRVRLLDGRRAARHRRAGHRPRRHEPGPGRLQRQPRRRLQRARGGQPAGGRRRAVPSAGVPRRPQLRLPPAAARRRGRRVPRPAGVLQEPVPAHQDHAHRRGARAAELPRAGRAQGRLLPGDHRHRRCRRCRRSRDGHPNRRRRQLDYWPRQTSSSTGPASLNRYLSRFLLSCVC

SEQ ID NO: 57353 - protein, 357 aa, Zea mays
  Clone ID: UC-ZMFLMO17280A03_FLI.pep
LYFIVLPLVVLLIGIACMLLLCRTKSGTTIGPWKTGLSGQLQKAFVTGVPKLQRSELEGACEDFSNIVSSYPQYTVYKGTLSSGVEIAVVSTMVISSKDWSKHSEGRFRKKIDSLSRINHKNYINLLGYCEEEEPFTRMMVMEYAPNGTLYEHLHVEGFDPIDWNGRMRIIMGVAYCTLHMHELSPPVTHPDIKSSAILLSEDGAAKIVDMSVWHEVYFRGNMPKDGDLVDHQERVAADPAGNVYSFGLLMLEIISGKPPYSEEKGSLSDLALECIRDNRSMSCLLDPSLKDHKEKDLETICDLVQDCIQSDPKKRPAMREVTTRLREVLSISPEAATPRLSPLWWAELEILSVEAS

SEQ ID NO: 57354 - protein, 234 aa, Zea mays
  Clone ID: UC-ZMFLMO17283B01_FLI.pep
VNLDLKMNEAAAMKLPFRGMPYNMNQMYLKGSNANSNVNAFKMNVGVNKYSNSPNGKDANGKNNGGSGGNNNNGSANGTSVADKRFKTLPTSEMLPRNEVLGGYIFVCNNDTMQEDLKRQLFGLPARYRDSVRAITPGLPLFLYNYTTHQLHGVFEAASFGGSNIDPTAWEDKKCKGESRFPAQVRICIRKLCKPLEEDSFRPVLHHYDGPKFRLELSIAETLSLLDLCGKEGI

SEQ ID NO: 57355 - protein, 137 aa, Zea mays
  Clone ID: UC-ZMFLMO17268E10_FLI.pep
ELEEVLEATQPAEFQRCMVPLFRQIARCLSSSHFQVAERALFLWNNDHIEGLIKQNNKVILPIIFPALERNTKGHWNQAVQSLSLNVRKIFMDHDPALFEECHKKFEEEEAQEAGVRSRQEARWRRLEEIASSNSPQ

SEQ ID NO: 57356 - protein, 425 aa, Zea mays
  Clone ID: UC-ZMFLMO17292G10_FLI.pep
TLPTLSRCLVELEGLHHLPGEVGVVTAEMAVSGGLDEPVAALLQVEVDADHPGPEVEVLLHDLEDLLVGDRAGAVRVDEHGQGLRHADGVRHLHEAAAGEAAGHDALGGLPGHVGAAAVHLGGVLAGEGATAVGSPAAVRVDDDLAAGEAGVTVGPADDEAPGRVEVEDGLLVEVLLRDHGLDDVLLEVGGDLVVGDGLVVLGGDEHGVHADGHHGAALVHVLHRHLGLAVGPQPGAGAVLAHLGEARAQLGGQHVAERHQLGGLVGGVPEHVALVARADLLGPLREVPVHALRDVGGLLLDVHQHLAAVGVEAHVVGGEPDLAAGIAHDLLVVHGRLGRDLAEHHHHVGLGAGLAGHLAVGVLREACVKHGVRHLVAQLVGVPLVHGLRGEQEALGRHCLLLALPTSCAAALYSGPARGRRGKR

SEQ ID NO: 57357 - protein, 321 aa, Zea mays
  Clone ID: UC-ZMFLMO17295A12_FLI.pep
WSIHKDIHARCLRWTISDVSLSPDQRYLAYSSLAPIIHIVNVGNAARESYANVTDIHDGLDFSQHEDVQYSFGIFSVKFSSDGRELVAGSNDDSIYVYDLHANKLTLRLSAHTSDVNTVAFADETGHLIYSGSDDTLCKVWDRRCLSAGQAAGVLTGHLHGITHIDSRGDGRSFISNGKDQAIKLWDIRKMMSNADSCADGAPTWDYRYSRYPHQHKQLKHPHDQSIATYRGHTVLRTLIRCYFSPSYSTGQKYIYTGSYDSNVCIYDVVSGSQVAKLKWHQLAIRDCSWHPFEPTLVSSSWDGRVVKWTSARDEGASDVD

SEQ ID NO: 57358 - protein, 312 aa, Zea mays
  Clone ID: UC-ZMFLMO17306F09_FLI.pep
YVNLSERLDQDISGILATTCDHSFRCSCVSVWTNSSCPVCQFCQKQSENSTCSVCQTTGNLWICVICGFVGCGRYQEGHAKQHWKDTQHCYSLDLETQRVWDYVGDSFVHRLNQSKSDAKHAKFKSKSKYSGDECVNCSCNDDSDMGGAMFSSKAETIVDEYNRLLASQLETQREYYEGLLSEAKRNKEHQISEAADKAVSDKLEEMQLKLENLIVEKKKVADMNEKLTRSQDMWRQTLRDIEERERAQLKSKDEMILDLEEQIKDFKFSIKLQKSIEKNDGVKGGTLVPLPTVSDSGGKGKRSSRTSKRRN

SEQ ID NO: 57359 - protein, 156 aa, Zea mays
  Clone ID: UC-ZMFLMO17309D04_FLI.pep
YLKKREFAVDPSTARFHLSEPLRRPVLTSEPSISSRILGSQDRFLIFASDGLWEHLSNQQAVEIVHNSPREGVARRLVQTALKEAARKREMRYGDIKKLEKGVRRYFHDDITVVVVFIDHELRAEHSSSTSVPELSVRGFVDAGARSSFSGMNDIT

SEQ ID NO: 57360 - protein, 244 aa, Zea mays
  Clone ID: UC-ZMFLMO17312D02_FLI.pep
VSDHTDGTKFCKGSKEVEQPSPVSILEPPINEDICFPRCFNYDLQGMANKQRGCHQYHNESEVNMSSDDEDHSFYQSLEAFQVEENWDFSYLLDILICSGIIVVDWQLICKSWYLPGYPVGPHVFDRLERKYNKIATWAKPERRLLFDLVNSILSEVLAPCVDVHPWVQPSRHCVAFWGPEGPVEKVWQTIVRLQEDCVTRHPDEMVLDTNWLEVGTDINMVGKQIARMLHGDLLEEVIVDFLG

SEQ ID NO: 57361 - protein, 219 aa, Zea mays
  Clone ID: UC-ZMFLMO17293D03_FLI.pep
LIVHFSVGIARSGTQVAFGQGNSYYARNFPMPKKDSSAGGASKLPKEYAEPWDYSHDYPVTLPLRKPYSGNPEILDEEEFGESSASRTQDDELSAAEQLGLMDMSSESQFLFFQLPSSLPLPRQPQSGADPNEVRDEKREDMRPSSHNGSKLKEVPEGYMGKMLVYKSGKVKMKIGDTLFDVIWLELHVFPGGCSNQHQRKTLLYGGRDQQACYHHPRY

SEQ ID NO: 57362 - protein, 382 aa, Zea mays
  Clone ID: UC-ZMFLMO17295D01_FLI.pep
RKGVNQDAMVVWENFGSKDDTIFCGVFDGHGPNGHLVAKRVRDLLPVKLSANLGKGECKEISTSDVKSGTTKGVATEHRVEDTDASPGNEENGEYPEFFTALRASFLQAFYVMDRDLKAHRNIDCEFSGTTAVTVIKQGQNLIIGNLGDSRAVLGTRGEHNQLVALQLTVDLKPSIPSEAERIRQQSGRVFSLPDEPDVVRVWLPTFNSPGLAMARSFGDFCLKKYGIISMPDVFYHRITDKDEFVVLATDGVWDVLSNAEAVSIISNAPSQASAARFLVEKAHRAWRTRYPTSKTDDCAVVCLFLKTVAASTSSSAVTKDSVKNREMSNGKHSLAVKTSTKVPANLVTAKDEWSFVDGSSGCVALPTLPEPTSVVKDSSKD

SEQ ID NO: 57363 - protein, 151 aa, Zea mays
  Clone ID: UC-ZMFLMO17300A05_FLI.pep
SVHSPGAVSSRDKDSRALFLVPAADPNAGAVVPANKTKRSPEQGHRRIRRPFSVAEVEALVLAVEKLGTGRWRDVKLRAFDNAKHRTYVDLKDKWKTLVHTASISPQQRRGEPVPQELLDRVLAAQAYWSQQQAKLQPKTPSLAEARLLTQ

SEQ ID NO: 57364 - protein, 111 aa, Zea mays
  Clone ID: UC-ZMFLMO17303D03_FLI.pep
SISLSEVQAGRPLDVEVQAKEILTNKRNVIRIVSGFTGRTPEQVEKDIDRDRYMGPLEAVDYGLIDGVIDGDSIIPLEPVPERVKPKYNYEELYKDPQKFLTPDVPDDEIY

SEQ ID NO: 57365 - protein, 407 aa, Zea mays
  Clone ID: UC-ZMFLMO17306G12_FLI.pep
KDEFQKARDWVAESLDFDKDYDASVFETTIRVVGGLLSAYDLSGDKVFLDKAKDITDRLLPAWDTTSGIPYNRINLAHGRAHNPGWTNGDSILADSGTEQLEFIALSQRTGDPKYQQKAENVITQLQKIYPSDGLLPIYINPHSGTASYSTITFGAMGDSFYEYLLKVWIQGNKTEHVKHYRQMWETSTEGLLSLTKKTTPSNYYYICEKNGGSLSDKMDELACFAPGMLALGASGYGPEKSEQIMNMAKELARTCYNFYQTTPTKLAGENYFFHAGQDMSVGTSWNILRPETVESLMYLWRMTGNTTYQDWGWDIFQAFEKKSRVESGYVGLRDVNTGEKDNMMQSFFLAETLKYLYLLFSPPSVISFDEWVFNTEAHPLRIAPVNYNKGIGTPVRPFGRKQGKPE

SEQ ID NO: 57366 - protein, 314 aa, Zea mays
  Clone ID: UC-ZMFLMO17312E09_FLI.pep
HCTPEWLQELVVSYDQDSDTKELLTKLSLHSRQLDRFSLQQGVIRHKGRIWLASSPAMQLKVIRAMHDTAIGGHSGVPATYSKLKSLFYWPGMKAVVREYVQSCAICQQAIQAWHTISLDFIEGLPRSLQSNCILIVVDKFSKYGHFIPLLHPFTASKVAKVFLDNVYKLHGLPVNIVSDRDCIFTSSFWQHLFQLTDTKLCMSSVYHPQSDGQTERLNQCLETFLRCFVHTYPTRWSQWLSVAEYCYNTSFHSALGQTPFEVLYGYAPRHFGISSEVVVPVPELADWLQERELMSRIIQLHLSRAQQRMIYST

SEQ ID NO: 57367 - protein, 444 aa, Zea mays
  Clone ID: UC-ZMFLMO17289G09_FLI.pep
PSLFHLPPQAPPQPVPAPSRSPRQSCDSATAAMAFEKIKVSNPIVEMDGDEMTRVFWQSIKDKLILPFLDLDIKYYDLGILHREATDDKVTVEAAEATLKYNVAIKCATITPDETRVKEFNLKHMWKSPNGTIRNIINGTVFREPIICKNVPRLVPGWTKPICIGRHAFGDQYRATDAVLKGPGKLKLVFEGKEEQIDLEVFNFTGAGGVALSMYNTDESIRAFAEASMTTAYEKKWPLYLSTKNTILKKYDGRFKDIFQEVYEADWKSKFEAAGIWYEHRLIDDMVAYALKSEGGYVWACKNYDGDVQSDFLAQGFGSLGLMTSVLVCPDGKTIEAEAAHGTVTRHFRVHQKGGETSTNSIASIFAWTRGLAHRAKLDDNARLLDFALKLEAACVETVESGKMTKDLAILVHGSSSVTRSHYLNTEEFIDAVATELRSRLGAN

SEQ ID NO: 57368 - protein, 680 aa, Zea mays
  Clone ID: UC-ZMFLMO17303G09_FLI.pep
TRTDHPLPSSAIPGPQRTNTRSPPLRPHFPRLHHQFTISFPAPRPGSPARNSGVKFPSTATVMGGSHSREDVDLTSSDEEEEFEDDYDARSPIAEAAASAGQRDDDLLRTATPSSLEAIDAKLRSLDLKYQRPTAAKLYLHVGGASPSARWVPAERRATYAFVDQSSDDASSPRWFLEVGPGPRVSAPVDSALQLKTIPAQRRADFAASGSVWALRLPTDAELRRFRVEYERCLFENTYGVEATDEGRKEVFGADFAAWARPAEADDTVWADAEESLTPPAAAPGKDLLKEFEEEAGDGDSIQSLALGALDNSFLVGGAGIQVVKNFRHGLHGKGASVKISGGRGGSGSAYSTPKKALLMRGETNMLLMSPGEALHSNGVHHVDVETGKVVAEWRFEKDGADITMRDIANDSKGAQLEPSGSTFLGLDDNRLCRWDMRDARGRVQTIGSSSDSPVLNWSQGHQFSRGTNFQCFASTGDGSIVVGSVDGKIRLYSKSSMRMAKTAFPGLGSPITHVDVTYDGKWILGTTDTYLILICTIFKDKDGKEKTGFSGRMGNRIAAPRLLKLTPLDSVLAGTDNKFHGGQFSWVTENGKQEKHLVATVGKFSVIWNFQQVKDSNHECYRDQQGLKSCYCYKVVLKDESIVDSRFMHEKFATSDSPEAPLVVATPMKVSSFSIANRR

SEQ ID NO: 57369 - protein, 542 aa, Zea mays
  Clone ID: UC-ZMFLMO17307A09_FLI.pep
IFNSDNPEEDKVKLGEPGWRERYYEEKFGARTPEQIEEIRRDVVLKYTEGLCWVMHYYYEGVCSWQWFYPYHYAPFASDLSGLGQLNIKFELGTPFKPFDQLMGVFPAASAHALPLQYRRLMTDPNSPIIDFYPTDFEVDMNGKRYSWQGIAKLPFIDEDRLLAEIKKVEHTLTPEEARRNSIMCDMLFVNGSHPLSPYIYSLNSKFGHLPDKRRNEIKEKLDPSASGGMNGYITLCSGDPCPPIFRSPVDGLEDIMDNQVICSIYNLPDHHKHIAQPPVGVIMPKKIVEAGDLKPPPVLWHEDSGRRPHDNSNRQNPSGAISGRQLGEAAHRLVINSLNAQGRGQHSGTSMPYRTIMNGLHHLDVASPVSDQGMRPQVGQSAGPPGWYVPRGSVSNGQPPAYASSGSGHYQYESSGHSQYEQGNHGRQQSHPYARDGFHDTRGRVPPAYGYQQSNMYPSGPGLYGQPPSAYPGVHGGGYQPPPYGGGQQWQQQSYSSYAVRGPYGGRPPPTRADSGSQQPQNRYGALDRSNNRRPSSGYRR

SEQ ID NO: 57370 - protein, 219 aa, Zea mays
  Clone ID: UC-ZMFLMO17309H12_FLI.pep
EDDGAGGGGVAGGRRGAAAGRGRPPRRGAGQPPRRMHPHHAHHVPVRGPLRVRPAHRLPQEVQQRRALPQRHAPRRARPPAAPPPGVPRRLRRLLHALHTVRAHTAPLRLQARRSAGLLRRRRAVQLQRERVVRAPRRHHLRGPRRARQLGRHPPHRGALPLHRQHLGQGPLRAPAARHRRARGHGRLILLWFGTREELICNVNSIRSCPCILGTTGAE

SEQ ID NO: 57371 - protein, 210 aa, Zea mays
  Clone ID: UC-ZMFLMO17312G11_FLI.pep
EVAEKRWKVLVWKTAVYLITLGMLIALLMGLNMSWTAITAALVLLALDFTDAQACLEKVSYSLLIFFCGMFITVDGFNKTGIPNTLWELVEPYSRIDSAKGVALLAVVILILSNVASNVPTVLLLGTRVAASAASISHGSERKAWLILAWVSTVAGNLTLLGSAANLIVCEQARRAQFFGYNLTFWSHLRFGVPSTIIVTAIGLLIVISY

SEQ ID NO: 57372 - protein, 84 aa, Zea mays
  Clone ID: UC-ZMFLMO17290A09_FLI.pep
TLDREGRPNGLWSQTNFAASLSRVVPMAFGRRQAAKLVYAENKCERCPWTLDPCWFWTRLSFCVLTYMLPSCNEFASFSSFVLC

SEQ ID NO: 57373 - protein, 373 aa, Zea mays
  Clone ID: UC-ZMFLMO17293G07_FLI.pep
ISTGKEANVYHATKTDGQELAIKVYKTSVLVFKDRDRYVQGDYRFRHGYCKHNPRKMVKTWAEKEMRNLLRVRAAGIRCPAPLLLRLHVLVMEFIGKGGWAAPRLKDAALSDDKLHESYFEIITTMRTLYQTCKLVHGDLSEYNILYFEGHLYIIDVSQSVDLDHPSALDFLKEDCLHVSEFFKKRGVPVMTVTDLFNFVIDQSISDEDVDDYLEKAQQKILENGGAVPNDDEITPTVMVQTLDYVKQCEADIVNMSIMQRSSSGYEPTADKLYDQPLLGFVRTKNTNTEKEQGQPARNLVEVEEDESESCLSSDEDDSWHEDDPKVGPEERKAARKENKKKVKEEKREARKTKIPKAEKKKRKKMAKAKCKR

SEQ ID NO: 57374 - protein, 570 aa, Zea mays
  Clone ID: UC-ZMFLMO17295E02_FLI.pep
TSSTQVLLNGSPGNHIFHRRGLRQGDPLSPMLFVMVMDVLSSLFRVAENRGLLQGLGGADVRSRVSIYADDVVLFIKPIEADLNCAKIILNCFGSASGLVTNMLKSSAIPIRCDGQQVLAGCSVLHCSPAAFPCRYLGLPISDKKLRKCDLKLWIEKIADRLPNWKARLLNLAGRTALVKFVLSAIPTYLLIAINVPRWVIKSIDKIRRGFLWRGRKEVNGGSCLVPWEVVTRPLRLGGLGIPNLKLKSWALQAKWLWLEKTDQSRPWRGLSLPVQRQVRQFFDLSVFTILGNGATTLFWSDRWIHENTIQDIAPEVVGMVGRKAYSSRTVAQALDNWHWVSDIRGALSLSGLQQYLLLWDTLGDVRLSHDADRHVWMHSSSGMFSSKFCYKAFFMGSISFEPWKRLWKSWAPPKCKFFLWLAIRNKCWTADRLRRRGLQHPAVCVLCDQEQETVQHLLCTCSFARQFWHAILVPLCLGDLIPAVDEISFADWWRKALKKVPKFRKKGFNSLIILGSWCIWLTRNKAVFDGVNPSMCFVKSLFLNELSCWERAGAKQLASFGLPAIMSRV

SEQ ID NO: 57375 - protein, 528 aa, Zea mays
  Clone ID: UC-ZMFLMO17300B04_FLI.pep
ELDRASMAVKVWVFAVALMMCAGVGLGADDDDGSSSAGSMDAAGSRLISRCRLSSPNYRGALAKAILFFEGQRSGRLPANQRVRWRGDSALTDGQPENVNLTGGYYDAGDNVKFGFPMAFSVTLLSWSAVEYRDEVAAAGQLRHLRSAIQWGADFLLRAHTTPTTLYTQVGDGNADHQCWERPEDMDTPRTLYKITRSSPGSEAAGEAAAALAAAYLVFRDDRDKTLATQLLAASRSLFDFANDYRGSYQLSCPFYCSYSGYQDELQWASAWLYRATKDSKYLDFLQNNQGGRATEFSWDNKYPGAQLLATQEYLAGRTELEGYKRGLDSFVCAVMPNSGNTQIRTTPGGLLFTRDSVNLQYTTTATLLLSIYAKALLASAAGAVQCSAASFSPDQISSFATSQVDYILGDNPRSASYMVGFSSKFPRRIHHRGSSIPSIKVLPRKVTCSEGFSSWFPTANPNPNFHVGAIVGGPDGNDQFGDNREDSTHSEPATYINAAFVGACAAALGRSQQVPVDETASAHSDVM

SEQ ID NO: 57376 - protein, 218 aa, Zea mays
  Clone ID: UC-ZMFLMO17303H02_FLI.pep
LSLAEIEQYLQLWEVIESFQLQNSNDQHVWIFSNDGLYTSKSAYKALFIGAESFEPWKRIWKSWAAPKCKTFVWLAINNKCWTADRLKKRGLQHPEFCVLCDQEDETVQHILSNCVFTRQFWHKILTPIGLSSVSPKRRDSVFAEWWRKASTKIPKSKKKGFNSMIILGAWSIWKQRNRCVFEGARPCLNTLEDGFKDEMRLWVSAGAKNLRSLFDPG

SEQ ID NO: 57377 - protein, 46 aa, Zea mays
  Clone ID: UC-ZMFLMO17310C12_FLI.pep
AVLTLHSLRAGKTCIWRKDSTVLHIPTSHSLLYTRSDGTYITHSIT

SEQ ID NO: 57378 - protein, 239 aa, Zea mays
  Clone ID: UC-ZMFLMO17290B02_FLI.pep
HAQHDTPCAEDHHARDTEPPLVPEEPPGRPGGRQRDDDEQAVRGARAADAGHGRDHADPGRGHHSGGGVPRAQPVPERRPGPRRRHGGPGLGRRPRPGEQRGDRVRYVTAPSAQRRGNVSLRSQVAEITRETERVGVCCCCLQPACSCVLSGLCCSCLMPSFVMAPFYRPVVFGRCYLVRLQCSVLQRFSHLESLLLQPRSSERTLCFCIPSDVLVLLHCIICYIWCRKIKELHCPFSV

SEQ ID NO: 57379 - protein, 442 aa, Zea mays
  Clone ID: UC-ZMFLMO17295E05_FLI.pep
VSRLWHQSPLPLPSPRSLSAAANSRSCGTEVRSSRRWSCSCRGKKRARAAGMISAKSNAAVYPCPEYAEVDPTGRYGRFSDVLGKGASKIVYKAFDEYQGMEVAWNQVKLHDFLQSPEDLERLYCEIHLLKTLKHRNIMKFYTSWVDVSRRNINFITEMFTSGTLRQYRQKHRRVNMWAVKHWCRQILSGLLYLHSHNPPIIHRDLKCDNIFVNGNQGEVKIGDLGLAAILRKSHAVHCVGTPEFMAPEVYEEEYNELVDIYSFGMCVLEMVTFEYPYSECTHPVQIYKKVISGTKPEALYKVKDPMLRRFVEKCLVSSSQRLSARELLEDPFLQGDDVAVSLDGGDYHVPTKYVRQPSYLGHTYSNGSMVSNGFSESMDEDALSEDCEDDDMKGQDGIDLFNENEDEPLGNVDITIKGRKSEDGGIFLRLRISDNDGMHNL

SEQ ID NO: 57380 - protein, 259 aa, Zea mays
  Clone ID: UC-ZMFLMO17307H07_FLI.pep
TLVVGSGHGHHPGEHPEGEVPADQAAQGRAAHLPGRRRRQGQGGEPPHGPEEAAVQLLRQDPAHLLRVGRRVGVPPLQVGALPRRRLRRGGRLPEAVVAVGRRLAPVQEARVRGRPRDERGGGRRAGPPEQGHLGPRPLQDAVRRPPPRRVRALAPHHAQAAVPAVVVGLGGAQRPVQAGGVVRLRAAAELPPHRPRHGALGSVSRLPVPSAAGLLQIQGWRALRGAGRRRFRLQVREIDGEDVVELMMNEMECRITVL

SEQ ID NO: 57381 - protein, 280 aa, Zea mays
  Clone ID: UC-ZMFLMO17310D11_FLI.pep
LTSVFEIIDREPRIDPDDTTGLKPPNVYGSIEFKSVDFSYPARPDILVLSNFNLKVSGGQTVAVVGVLGSGKSTLISLIERFYDPVAGQVLLDGRDMKSFNLRWLRSHMGLIQQDPVIFSTTIRENIIYARHNATEAEMKEAARIANAHHFISSLPHGYDTHVGMRGVDLTPGQKQRIAIARVVLKNAPILLLDEASSAIESESSRVVQEALDTLVMGNKTTILIAHRAAMMKHVDNIVVLNGGRIVEQGTHDSLMDQNGLYVRLMQPHFGKGLRQHRLM

SEQ ID NO: 57382 - protein, 239 aa, Zea mays
  Clone ID: UC-ZMFLMO17290C02_FLI.pep
ESTFVIYANFMMMIQTKGSTILTPQLMHTCDTGCFVSQVCISCGVNMGEYFCDICKFYDDDTDKGQYHCIDCGICRVGGKENFFHCVKCGSCYSVILRDNHQCVENSMRQNCPICYEYLFDSLQGTRVLNCGHTMHLTCFEEMVAHNKYTCPICSKTALDLTHHWEMLDQEIEATIMPLVYRYKIWVLCNDCNKVSEVNFHVIGHKCSHCRSYNTRTTSRPADLSGSSSPSTDSSDNNI

SEQ ID NO: 57383 - protein, 112 aa, Zea mays
  Clone ID: UC-ZMFLMO17294D07_FLI.pep
RYCFFCRGIYIHHSPTRRIRRKMRNCKLILRHSILYRRNCFPVYVLPNSQSLGTTLKLVSVLLSLELSSNDRGCPLMSQLMCHTWPQLRPIGSHPSSVPLIFTDLTSPAPPT

SEQ ID NO: 57384 - protein, 242 aa, Zea mays
  Clone ID: UC-ZMFLMO17308A11_FLI.pep
RVPGQRVRRALHAAHQRVHAGAGAAGAAVPPLVRPHRRLPHLLHPLEPQARHLHGGRHAHQGLPQPGEQGGGVPQEPADAALLQPVERGRLGDAGRARQDGLVPRPLLRLLPRVQGRRLRRRRGRPDPLRRHRRHRGHRRPRLRRRRRGLVQPGAGPHPAAADALDAAQVHDLQLLHRPQALPAGPPRRVLHAVAPGYSSPVQQWRARACVCMWSALLLPLRRSVSITGSRQDERHRNMVDK

SEQ ID NO: 57385 - protein, 219 aa, Zea mays
  Clone ID: UC-ZMFLMO17310F09_FLI.pep
MPRDRDEPAAVRVYTVCDESRYLIVRNVPSLGCGDDLASLFGTYGPVEECTPMDAEDSEPYTDVFFVKFSQVNNARFAKRKLDESVFLGNRLQVTYAPQFESPQDTKEKLEVRRKEVLGRIKSSAGRPEGSSPAQGSSSGNHHQMNSNKREYMKTIHASPIEDPRFSHVPSDKDYFPSESMNATVKLVRGKLDKIQSGGDNSSTSAASRKPGVDKRRRI

SEQ ID NO: 57386 - protein, 319 aa, Zea mays
  Clone ID: UC-ZMFLMO17313D07_FLI.pep
YANHLSPVRSGAVEAKRESTTAALSLVQISSGPDRELGSLHDIIMDAAPLLALLLAAVSLSAAAAGDGAHPGYSDEGTCTVDAAGAGVGSGPELRRLEERRPGRIIDITHAYVPDLLAFAPGAVTGPLVHLKESMANGSEYNLSELRLECHMGTHVDAPGHMNQGHFAAGLDVDTLDLDVLNGPALLVDVPRDTNITAEAMEFLNIPRGVRRVLFRTLNTDRKLMWRKGGDMSYVGFTEDGAQWLVDNTDIKLVGIDSLSVAAFEHLISAHVVFFKTPDIIPVEGLKLDNIETGIYMLHCLPLRLVGAEGAPTRCILIK

SEQ ID NO: 57387 - protein, 355 aa, Zea mays
  Clone ID: UC-ZMFLMO17290C06_FLI.pep
FDFMRSFRVEFDEYFEDGIISEIEIGLGACGELRYPSYPAKHGWKYPGIGEFQCYDRYLQKSLRKAAEARGHTIWARGPDNAGHYNSEPNLTGFFCDGGDYDSYYGRFFLSWYSQALVDHADRVLMLARLAFEGTNIAVKVSGVHWWYKTASHAAELTAGFYNPCNRDGYAPIAAVLKKYDAALNFTCVELRTMDQHEVYPEAFADPEGLVWQVWIHCYIACFAFRSNSLLADVLYSLVSKHMLLFGRFSLNEWLTLSTTPYAFYLNLESIFQVLNAAWDAGIQVASENALPCYDRDGFNKILENAKPLNDPDGRHLLGFTYLRLGKDLFERPNFFEFERFIKRMHGEAVLDLQV

SEQ ID NO: 57388 - protein, 322 aa, Zea mays
  Clone ID: UC-ZMFLMO17295G12_FLI.pep
ENGHIWQVKNPNDFFTGRLGNVEFVVCRDANGKLHAFHNVCRHHASLLACGSGHKTCFQCPYHGWTYGLDGTLLKATRISGIKNFNKNDFGLIPIKVATWGPFVLIRFDDESTGDNVYDTVGNEWLGSASDLLGTNGIDTSLPHICRREYIINCNWKVFCDNYLDGGYHVPYAHGALASGLQLQSYETLTYERVSVQRCESAPAEPDDFDRLGTKALYAFVYPNFMINRYGPWMDTNLAVPLDSTKCKVVFDYFLDKSLLDDQCFIKKSLEDSEQVQIEDIALCEGVQRGLESPAYSVGRYAPSVEMAMHHFHRLIHANLSE

SEQ ID NO: 57389 - protein, 95 aa, Zea mays
  Clone ID: UC-ZMFLMO17308D02_FLI.pep
QALLMLQGALIGAQNVRLSWGRSLSNKQAQPQQESNQWGAAAGAGGYYGGYGQGYEAYGSGYAQPQDPNMYGYGAYGGYPNYQQQPAAQQQQQQQ

SEQ ID NO: 57390 - protein, 473 aa, Zea mays
  Clone ID: UC-ZMFLMO17310H06_FLI.pep
PCTNNFNEATFGKLKLPENFNSGNIDSNNVLLTNQHSHYSHGLWSLLHIAHRLSGSLASYHPRALIQYLYSGEWKRADAALHHLVRSMKVSETSKGMSNYSTCHSIPELPLSEYFAATVSNNISTKGFMWGENRSNTTFNLLSPSTSFLYEDGNLGINTTTSASEKPDIVELLDKSFSKYGISDSEKNQILAISDLMAGITDQSHSSPYKNLDEAGRRFWVAVQFEQFHALRRSADSSSNEGCRVDSASIAWAFQSDCQDDLLNSVLPAEPTWPEMRKLGIGLWYTNVSQLRTRMEKLARLQYLKSKDPKDCALLYIALNRIKVLVGLFKISRDEKDKRLYEFLSRNFQEERHKAAALKNAYVLMGRHQWELAIAFFLLGDDTSSAVNVCAKNLQDEQLAIVICRLIEGSGGPLERNLISNVLLPDAVERGDNWLSSLLEVCHIRGFCLIAFLFFYVENQYKLSCFQSYNPST

SEQ ID NO: 57391 - protein, 610 aa, Zea mays
  Clone ID: UC-ZMFLMO17290F04_FLI.pep
EISNADSATDDDRSRDLDRAALMRQLDETQQSWLLAGPGDQAGKKKKRYVDLGCVVVDRKIFMWTVGTILGLGVFIGFIMMIVKLVPHKRPPPPPPDQYTQALHKALMFFNAQRSGPLPKHNGVSWRGNSCMKDGLSDSTVRRSLVGGFYDAGDAIKFNYPMAWSMTMLSWSVIEYRAKYEAIGELDHIKELIKWGTDYILKTFNSSADTIDRIVAQVGVGDTSKGSSQPNDHYCWMRPEDIDYKRPVTECHSCSDLASEMAAALAAASIVFKDSKTYSDKLVKGAKALYKFGRLQRGRYSPNGSDQAIFYNSTSYWDEFVWGGAWMYFATGNNSYLTVATAPGMAKHAGAYWFGSPNYGVFTWDDKLPGAQVLLSRLRLFLSPGYPYEEILRTFHNQTDNVMCSYLPLFNSFNFTKGGLIQLNHGRPQPLQYAVNAAFLASLYSDYLEAADTPGWYCGPNFYTTEVLRKFARSQLDYILGKNPLKMSYVVGFGNKYPKRPHHRGASIPHNGVKYGCKGGYKWRDTKKANPNILVGAMVAGPDRRDGYKDVRTNYNYTEPTLAANAGLVAALISISDIKTGRFGIDKNTIFSAIPPMFPTPPPPPSAWKP

SEQ ID NO: 57392 - protein, 347 aa, Zea mays
  Clone ID: UC-ZMFLMO17308G12_FLI.pep
DTLLHCSSNSSENGSRSKPCPPRPGEKGEMHVVPVPLPLVSGLSSVRINIPPDLRPPEARQNILSAVQELGKRYPQGLPKLHPINDMGIQEPELVDLVHKLEDLEQKQCSHRLHKSGQSEQELSWYQKKADLNTEIQQLKSKMRDSQLQKFRDELRSRSRVLKMLGHIDADGVLQLKGRAACLIDTGDELLITELMFNGTFNDLDHHQVASLASCFVPCDKSSEQIRLRNELSRPMMQLQEAARKIAEVQRECKLEVNVEEYVESTCRPYLMDVIYCWSRGATFAEVMEMTDIFEGSVIRLARRLDEFLNQLRAAAEAVGEVNLEKKFKNASESLRRGIMFSNSLYL

SEQ ID NO: 57393 - protein, 185 aa, Zea mays
  Clone ID: UC-ZMFLMO17297D08_FLI.pep
PLTAHHACLSSVARISHKLYQLWELDRSIEKRVRGSTVEKCGDRPCLLGEEGERAEEEEHEQHAGVLEVDEAVRADPGAAGEDAAAELQAHVQERAAGHQVELQQAGALGEGVPRADAERRRVGGEARDAGPHPPQAHRQEQRPRQDVAVERPHFGARRRAALLGSARLVGSPDHGEAGAGSRDF

SEQ ID NO: 57394 - protein, 310 aa, Zea mays
  Clone ID: UC-ZMFLMO17308H11_FLI.pep
QGLSYSCPSSHGSRLIESATAHATQKLMASAACGVTARAHLPSAVPAAARKLFFRCRAASTMNEASASSPDAEEKKTTTVFVAGSTGRTGKLVVEKLLAKGFGVVAGTTDVSRARGSLPQDPNLQLVRANVTEGVDKLVEAVRGVDAVVCATGFRRSFDPFAPWKVDNFGTVNLVEACRKAGVARFVLVSSILVNGAAMGQLLNPAYIVLNLLGLTLVAKLQAENHIRKSGIDYTIVRPGGLTDQPPTGNIVMEPEDTLYSGSISRSQVAEVAVEALVCPESSYKVVEIIARTDAPNRALKDMYAAIKQN

SEQ ID NO: 57395 - protein, 183 aa, Zea mays
  Clone ID: UC-ZMFLMO17317B03_FLI.pep
FFFETMDIWAMYLFLLGEHCTNPKSLFSQASVHLELLLSLFEDLLGNQRAIAIGLLDLHVGLLVEPSASQSICNEVVEPNGDGSLRLGPINQPLDPGEMNCTKAHWAWLAGRVNFAVRELDFPELFASLSNCSYFSMRSRVSVLQNHVMAANYHFIITYDNCSKWTSVTAIDSSVCFFHCFCQ

SEQ ID NO: 57396 - protein, 155 aa, Zea mays
  Clone ID: UC-ZMFLMO17301C12_FLI.pep
DDQQQHSHSACAMYRSICLLIILSSHRIACSEYNYRLAGQALNLNLVGNPDLVASDPVVAFKTAIWFWMTPQSPKPSCHAVMTGAWTPSATDRAAGRLPGYGLTSNIINGGLECGKGQSTDGAKDRVGYYKRYCDMLRVGYGDNVPCKDQKPYGG

SEQ ID NO: 57397 - protein, 464 aa, Zea mays
  Clone ID: UC-ZMFLMO17309A08_FLI.pep
KALPATGLSQPATASRSRGCWPPLSEALWKDTAMAMRAAARQAILSPPLGPRSPRPFLCGCSLSIAPRLEPCRAASSTTAPAAGKHLPPLFSVAPMMDWTDNHYRTLARLISRHAWLYTEMVVAETIVHQKDNLDRFLAFPEEQHPIVLQIGGSNLENLAKATELANDYSYDEINLNCGCPSGKVAGHGCFGARLMFDPEFVGDAMSTIAANCDVPVSVKCRIGVDDRDSYEELCEFVDKVISKSPTRHFIIHARKALLSGLSPAENRKIPPLKYEYYFALLRDFPEIKFTLNGGITNVSQVSASMRQGAHGVMVGRAAYNKFAGLSSPWNMLGHVDGEIYGKQTRYISRRQILENYQAYGDSIIDQYGPSRPNVRQLVKPLLNLFHSEPGNSLWKRKADSALRHCKTVKTFLEETLDAISDSVLDKPVNREPSSDEEYFASVDSLLPPKYTTPMHERLVAAST

SEQ ID NO: 57398 - protein, 117 aa, Zea mays
  Clone ID: UC-ZMFLMO17317G06_FLI.pep
CVAHRFSSPGSSEQVKRYYSRKKERQTDRQGSKLAPCTGVVWRIGTKPLTVTGAGLLTFTLKAGLGGQKATGSLLRIQGDQTSSQAPASLSSSSPSMCAVEQRTLNVWRWRLSVEMR

SEQ ID NO: 57399 - protein, 103 aa, Zea mays
  Clone ID: UC-ZMFLMO17301F01_FLI.pep
AVTHTTYLIVSVSVRQDRKSPASSSAKNFTTAVGGQVLLSGVLHLDDRTIGDHLVFLSSVGSAAAAAAAGSLPSKVSWAAGSSSPPKPNSLTRFLSTGYFHLW

SEQ ID NO: 57400 - protein, 269 aa, Zea mays
  Clone ID: UC-ZMFLMO17292D01_FLI.pep
HLVVRRHPLRPPRRVAAVPGRQRCRHVPEDEPRRLPVPAVAVHGGAQAHPQAARPRPRHPHHHRPARRDAVVQQAVRLEVRQSRRRRRNRAAGRACLLGKGRRRQGRATGDDERVPPDLPLRGVRPLTAVRRGRRSGEGAPGGRHAVRDAGAGERRRLPSRGGGRPRRRADAGDQERRPRRSARGRGARGPQGPASRGGRHLLRGAVGARRRREEGRRRLPRVPLLLQRGAPAGAQRHRLGGRPPARRRVTPVLPPARSLFLDRSGAIV

SEQ ID NO: 57401 - protein, 248 aa, Zea mays
  Clone ID: UC-ZMFLMO17297G02_FLI.pep
SSSSSSSSTYSLLMLPQTHAHNIQKNANMPSASSVVAYWRLICSNSAVQRADHHPVVDGGAPGPDGRLRPVGDLGFPAEPPPDVRLGRGSCGERRVGRAGRGGRDGGGAVGLDGERRRAGDGDAARHRRRRRRRGSQDGRRRGGGGGEGGVLAELAEAGVRSRAGHRLVPELIEEAHSGHHQTRTDAIGWLAPACLGRRMRARRVVLSRRGECGTDEREEKTGLGWPGCRAVPCLDLEQLWVGRMTIP

SEQ ID NO: 57402 - protein, 303 aa, Zea mays
  Clone ID: UC-ZMFLMO17324C04_FLI.pep
NWLERFPQYKHRDFYITGESYAGHYVPQLSQLVYRNNKGIEKPILNFKGFMVGNAVIDDYHDFIGTFEYLWTHGLISDETYGKLRLACQFDVSEHASKECNKVFDIAEAEEGNIDAYSIYTPTCKKTSLHKRRLIRGRTPWLPRGYDPCTEKYSTKYYNLPEVQRALHANVTGIPYPWVTCSDPVYDFWKDSPRSMLPIYRELIAAGIRIWVFSGDADSVVPLTATRYSIDALFLPTITNWYPWYDDEEVGGWCQVYEGLTLVTVRGAGHEVPLHRPRQGLKLFEHFLRGEPMPRPVDSVQSF

SEQ ID NO: 57403 - protein, 357 aa, Zea mays
  Clone ID: UC-ZMFLMO17342C03_FLI.pep
EFLVEVLMLSLLHHDNLVNLIGYCADGDQRLLVYEFMPLGSLEDHLHDIPPDKEPLDWNTRMKIAAGAAKGLEYLHDKASPPVIYRDFKSSNILLGEGFHPKLSDFGLAKLGPVGDKTHVSTRVMGTYGYCAPEYAMTGQLTAKSDVYSFGVVFLELITGRKAIDNTKPHGEQNLVAWARPLFKDRRKFPKMADPSLQGCFPMRGLYQALAVAAMCLQEQAATRPFIGDVVTALSYLASHTYDPNAPAQHNRSNSSTPRVSRGGGSNDQRRLRSSNHHSPDLRREVTTASRYDDEVSRANSGTGSGRRSGLDDADMSGSQLGSPAHTGRKRGSPRTSESQHAIAEAKTYGENSRGRK

SEQ ID NO: 57404 - protein, 131 aa, Zea mays
  Clone ID: UC-ZMFLMO17344G01_FLI.pep
TSSLPAIRRTPLSRRRPASERYPYIPTSFAPGLASSSTTTGTLFAIPKSQNKGKSKGTDLGAGMTSRSFTKEEISKHNTRKDCWIVIKDKVYDVTPYVEEHPGGDAILNNAGGDSTEGFFGSVTYIASYTS

SEQ ID NO: 57405 - protein, 180 aa, Zea mays
  Clone ID: UC-ZMFLMO17405C02_FLI.pep
PDDSVRQLPPLNQACPSVCYPHNILISWDKVSRPFDLGGLGIPNLLTMNWALQIHWLWLQKTAPSKPWSGLDLKISPQVRALFQAAVATTIGNGSTTFFWKDRWIHGCCVKDTAPLIVAAVPKKYRDERTVQQALTDLTWVQDIQGNLSLTGIEQYLQLWVVLGGFQLQNNNDNRVWRWR

SEQ ID NO: 57406 - protein, 287 aa, Zea mays
  Clone ID: UC-ZMFLMO17334E01_FLI.pep
AYNTVFLGEFMQPDWDMFHSLHPAAEYHGAARAIGGCPIYVSDKPGNHNFELLRKLVLPDGSVLRAQLPGRPTRDCLFSDPARDGESLLKIWNLNKCGGVVGVFNCQGAGWCRVTKRTRVHDASPGTLTGTVRADDVDAIARVAGDGGGWDGETVVYAHRTRELVRLPRGVALPVTLGPLQYEVFHVCPLRAVVPGFSFAPVGLLDMFNAGGAVEECDVISNVGGKAMALRVRGCGRFGAYCSREPARCLLDSAEVEFSYDADTGLVSVDLPVPEQELYRWTLEIMV

SEQ ID NO: 57407 - protein, 214 aa, Zea mays
  Clone ID: UC-ZMFLMO17382H06_FLI.pep
TVLNGGSGQSGVSGLIVPAATVGALGYGYMWWKGISFSDLMYVTKRNMANAVSSMTKHLEQVQSSLAAAKRHLTQRIEKLDDKLDQQKALSGQIRDDVTDARLKLENIGSEIKNIKELVWGLDGKIDSMEAKQDFSCAGVMYLCQFMEQNGGKLPDRLEGSKMTTKRFGGQKFLQGLQLAIESGNCGKDTIDMLLKDADSSDKINRTSSIKSAS

SEQ ID NO: 57408 - protein, 533 aa, Zea mays
  Clone ID: UC-ZMFLMO17334G01_FLI.pep
TYELSGVSTPGNVPGSYREPAIGWMTGFLLAVSFVGLLTLLPLRKVLVIDYKLTYPSGTATAVLINGFHTPQGDKNAKIQVRGFLKYFGISFLWSFFQWFYTAGDHCGFAQFPTFGLQAFNQTFSFDFSLTYVGAGMICSHLVNLSLLFGAVVSWGVMWPLIGKQKGNWYPADASQNSMTGIYGYKAFLCIALLVGDGLYNFVKVIAITVKNIRERSRRKNLNRVADADTMALDDMQRDEVFNRDNIPTWLSYAGYAALSLIAVIAIPIMFREVRWYYVVVAYALAPALGFCNAYGTGLTDMNMGYNYGKIALFVLAAWAGKDSGVVAGLVGCGLVKQLVLVSADLMHDFKTGHLTLTSPRSMLVGQAVGTLMGCVLAPLTFMLFYRAFDVGEPDGYWKAPYALIYRNMAILGVEGFSALPRHCLQLCAGFFAFAVLANLARDLLPRRLARLVPLPMAMAVPFLVGASFAVDMCVGSLVVFAWHKLDGKKAALLVPAVASGLICGDGIWTFPSSLLALAKVKPPICMKFTPGS

SEQ ID NO: 57409 - protein, 522 aa, Zea mays
  Clone ID: UC-ZMFLMO17342D09_FLI.pep
ASDPGDDENSIAMEFLASLDGEENDFFKDRRAKKLEKNKICEVADATSKTSSQGSTKNPVAPNHKDEVELLATEELEEFDDQENKSSMMLQEETEESCNSQLSGIGNKSSTGGWFVSEGEAVLLAHGDGTCSYYDIANHEFKSEYKPPSLVSNNTWGDCWLIRAPGVDGCSGRFVVAASAGNALEPGFCSWDYYTREVKSFHVEEEASQTFAPTSRAILGALSNVGSSRSSSALSNTERQQWWYKPCGPLLLSTASKQKMVTAYDIRDGDVVMKWEVSNLVMGMEYSSPLQWRSRGKVVIAGSESIGLWDVNSLNPQPLLSVASGKKVYCLHVNNTDAEVGGGVRQRVSSSEVEGNDGVFSTQESVNVFDFRVPAGIGLKIARHGGTANSIFSRGDSVFIGSTEGRLQIKGGSRSRVQQYSLRKGKLVATYELPEFNAHIHHSAITQVWGDSNLVLAACGMGLFAFDTFKEDTQPTYSFDRGNTIAAREAIGPDDLYCPTFDYSSSRVLLVSRDRPAHWRYL

SEQ ID NO: 57410 - protein, 188 aa, Zea mays
  Clone ID: UC-ZMFLMO17351E12_FLI.pep
EFKSIEKFKIFNTNNLWVNLKAVKRLVEAEALKMEIIPNPKEVDGVKVLQLETAAGAAIRFFDKAIGINVPRSRFLPVKATSDLLLVQSDLYTLVDGFVIRNPSRANPANPSIELGPEFKKVANFLARFKSIPSIVELDSLKVSGDVWFGSGITLKGKVTITAKSGVKLEVPDGAVFENKDVNGPEDL

SEQ ID NO: 57411 - protein, 300 aa, Zea mays
  Clone ID: UC-ZMFLMO17328A04_FLI.pep
DSLPFGLSNKPAILKVRDWYLDSFRDIRYFPEVRSRNDELAFTQMINMVKVRHNNVVPTMALGVQQLKKELGRSRKVPFEFDEIDEFLDRFYMSRIGIRMLIGQHVALHDPKPEPGVIGLINTRLSPIQVAQAACEDARSVCLREYGSAPDINIYGDPNFTFPYVTLHLHLMLFELVKNSLRAVQERYMNSDKDVPPVRIIVADGEEDVTIKVSDEGGGIPRSGLPRIFTYLYSTAKNPPELDRPNTEGVTMAGYGFGLPISRLYARYFGGDLQIISMEGYGTDAYLHLSRLGDSEEPLP

SEQ ID NO: 57412 - protein, 160 aa, Zea mays
  Clone ID: UC-ZMFLMO17335A07_FLI.pep
VPNPLFDLAGIMCGQFGVPFWEFLFATLIGKAIIKTHIQTLFIVSLCNNQLLYLIEKELIWIFGHVPGFSATLPSVIARLHAAKDKYLSPPAPVSPSSQMGEKQWNFSFTSVWNSIVWLVLLNFFIKIVTSTAQDYLKKQQDTEMELISDSPIQDHSKTN

SEQ ID NO: 57413 - protein, 265 aa, Zea mays
  Clone ID: UC-ZMFLMO17342D11_FLI.pep
SEKNLRPLEWKKRLSIALDVARGVEYLHSLAQQTFIHRDLKPSNILLGDDMKAKVADFGLVRLAPADGKCVSVETRLAGTFGYLAPEYAVTGRVTTKADVFSFGVILMELITGRKALDETQPEDSMHLVTWFRRMQLNKETFRKAIDPVIDLDEETYASVSTVSELAGHCCAREAHQRPDMGHAVNVLSTLSEVWKPADPDSDDSYGIDLNMSLPQALKRWQAFEDSSHFDGATSSFVASLDNTQTSIPTRPPGFADSFTSADGR

SEQ ID NO: 57414 - protein, 96 aa, Zea mays
  Clone ID: UC-ZMFLMO17328G01_FLI.pep
RATTEFFLTTFFHILFDIKLVYKVNNSKLVKDEFNLGPFFSQLQALANRPTSCICISLASTYLYGSSIWLHIWLIMTLIYMFRFPMKIHSYQYMLP

SEQ ID NO: 57415 - protein, 575 aa, Zea mays
  Clone ID: UC-ZMFLMO17339G03_FLI.pep
ASLPATRTRPLSAHHRFHAPRLVSRSRDVAPDPLPHPRQHRITLRSTPASLISDPPMRLPVLFALQLVALAAAASAAEAAATFSSRMVHRLSDEARLEAGPRMGLWPQRGSGGYYRALLRSDLQRQKRRLAGKNQLLSLSKGGSTFSPGNDLGWLYYAWVDVGTPTTSFLVALDTGSDLFWVPCDCIQCAPLSSYRGNLDRDLGIYKPAESTTSRHLPCSHELCQPGSGCTNPKQPCTYNIDYFSENTTSSGLLIEDSLHLNSREGHAPVNASVIIGCGRKQSGDYLDGIAPDGLLGLGMADISVPSFLARAGLVRNSFSMCFKEDSSGRIFFGDQGVSSQQSTPFVPLYGKLQTYAVNVDKSCIGHKCLEGSSFQALVDSGTSFTSLPPDVYKAFTTEFDKQINASRVPYEDSTWKYCYSASPLEMPDVPTIILAFAANKSFQAVNPILPFNDEQGALARFCLAVLPSTEPIGIIGQNFLVGYHVVFDRESMKLGWYRSECRDVDNSTTVPLGPSQHGSSEDPLPSNEQQTSPPVTPATTGTAPPSSATTNRQMLFASSYPLLFLTMSTVFFIS

SEQ ID NO: 57416 - protein, 187 aa, Zea mays
  Clone ID: UC-ZMFLMO17342D12_FLI.pep
AKEMTKLSGISEIIPEMEICDFDFEPCGYSMNAIHGSAFSTIHVTPEDGFSYASYEVMGLDATALSYGDLVKRVLRCFGPSEFSVAVTIFGGRGHAGTWGKALGAEVYDCNNMVEQELPGGGLLVYQSFCAAEDAVATSPKSVFHCFDGENVESAPPPMKKDYKLANLLCWEEEADAMEEKAGVLDE

SEQ ID NO: 57417 - protein, 279 aa, Zea mays
  Clone ID: UC-ZMFLMO17335F04_FLI.pep
DDSLINMQIEGGAEGVIVGGTTGEGHLMSWDEHIMLIGHTVNCFGSRIKVIGNTGSNSTREAVHATEQGFAVGMHAALHINPYYGKTSAEGMISHFEAVLPMGPTIIYNVPSRSAQDIPPEVILAISGYTNMAGVKECVGHERVKHYADKGITIWSGNDDECHDSKWKHGATGVISVTSNLVPGLMHSLMYKGENATLNEKLSPLMKWLFCQPNPIALNTALAQLGVARPVFRLPYVPLPLEKRAEFVRIVESIGRENFVGQKEAQVLDDDDFVLISRY

SEQ ID NO: 57418 - protein, 63 aa, Zea mays
  Clone ID: UC-ZMFLMO17366B11_FLI.pep
HLFCIVRFSGRITNSCRPDDNVASIDYKLGYKQMHYPENGSYKWLDDGPSQLNDDISSVNPTC

SEQ ID NO: 57419 - protein, 385 aa, Zea mays
  Clone ID: UC-ZMFLMO17330A11_FLI.pep
KSAFWGHLLRHVMQQGQKNMVEFFDLLLSPASKILNTWFESEVLKATLATDAVIGAMAGVHTPGSGYVLLHHVMGETGGQRGVWAYVQGGMGSVSSAISKAALEAGVQIVTNAEVSQVMVNETSGMVEGVALVDGTEVHSPVVLSNATPYKTFVDLVPSSVLPEDFLCAIKAADYSSATTKINVAVDRLPQFQCCNTNLEGGPEHMGTIHIGSESMEEIDVAYREAADGISSKRPVIEMTIPSVLDKTISPPGQHVINLFVQYTPYKLSEGSWQDSNVRKAFAERCFSLIDEYAPGFSSSVVGYDMLTPPDLEREFGLTGGNIFHGAMGLDSLFLMRPAKGWSDYRTPVKGLYLCGSGAHPGGGVMGAPGRNAAAVVLEDHVKTK

SEQ ID NO: 57420 - protein, 417 aa, Zea mays
  Clone ID: UC-ZMFLMO17335H08_FLI.pep
LSQRILPSHVWSIAMEIGLSGGDYVSLGWHEKEDLKCAVSCLRDNKQVSTIGLWGRSMGAVTCLLYGAEDPSIGGMILDSAFTNLYDLMMELVDVYKIRVPKFTVKMAVQYMRRIIQKRAKFDIMDLNVLRLAPKMFIPVLFGHGLNDMFIQPHHCDRIHQAYGGDKNIIKFDGDHNSPRPQSYYDSVSIFFYKSLHPPLLPAARSKLHMGAFKVGNITNENFFFEIINGLRPANTAGCSSSTDAPNIPHDGTSVIELLSDSMNQLSIKNENHLLQDFLLDENHSLPEIDSDSVGSRLQDKRSRRNEESFSFTSSNRESWGRCSSLGAASDESFSGDNNDKQNLTVKALATPVRQNQRQSQRKPIEKAKQKKIQALWKKIKREKVEMGDSLSSRLKMCLGQSPQHKRNRSSGTITTS

SEQ ID NO: 57421 - protein, 277 aa, Zea mays
  Clone ID: UC-ZMFLMO17321G06_FLI.pep
TRLAAALLPQILEKGELQVSGKEREAQLSSQFRDIATIVMEKTINPETRRPYTITMIERLMHEIHFAVDPNLTSKEQALKVIKKLTEHFPIKRAPLRVRFTAPKPNFPGLTEKIGGWNATIISKDELSTQPSIVCEIEPSLLRSCEERLKDVQGRVEVLSVSTHVESGPSVEQHNSVEVPQAAPVKEPDAVAQISETMQKQSISTESQGNAQGKQQRRCKECDVLVEDKLYREHCKSGWHKHNYTRHKNGLPPLSQEECMVEMELADSKKDLKDYDF

SEQ ID NO: 57422 - protein, 302 aa, Zea mays
  Clone ID: UC-ZMFLMO17330A12_FLI.pep
CTNVLVELEAGEHVVVDGVGEVVEQVLERANAGDEPLDEVTEDGEHGEPAVLDLLELELIHLLLGLAEAERVEEGPAGVGRVAGAGEELLEAEEVLLAHGARVVPVLEAAVLGEAHERHVEDEERVGVGPVVVGARGRDDARLEPRQRGLRGDDAHLAEDLRGDGAHRAQHGVAAVDHLAVGQPLGLDEAPGALRVREAQRVEAIVAGQRAIEVGEGLLGREPQLPVGTLLGWRAGAGPDDEGRLPRRRPRDGRLHGAAQQLPAGEESLGRHRSGTGASSNLSFRQRAYVRALAIVSLPLLL

SEQ ID NO: 57423 - protein, 321 aa, Zea mays
  Clone ID: UC-ZMFLMO17342H05_FLI.pep
CCAPAAAELARLEHPAKDGGSLSLLVVGDWGRKGTFNQSRVAHQMGRVGEQLSIDFVISTGDNFYENGLTGTDDEAFEQSFTDIYTAKSLQKPWYLVLGNHDYRGDALAQLSPVLRKIDSRFICIKSFVVNAEIVEFFFVDTTPFQLKYWTHPKDDHYDWRGVAPRENYINNLLKDLDGAMKTSTAAWKVAVGHHTMRSVSDHGDTKELLQLLLPVLQANGVDFYINGHDHCLEHISSRDSPIQYFTSGGGSKAWRGVQNPTEDDLKFFYDGQGFMSLQLDRSQAKFTFYDVDGKALYSYTRSSLMETGHHLQASGYVNEE

SEQ ID NO: 57424 - protein, 71 aa, Zea mays
  Clone ID: UC-ZMFLMO17367A07_FLI.pep
HNADAYTPNISLAIPTTIVLTYSCTSKPERVDTTLPGTFYSTHGASTQYTCTSRFQQFNFRGSRPPGHSPT

SEQ ID NO: 57425 - protein, 340 aa, Zea mays
  Clone ID: UC-ZMFLMO17399B11_FLI.pep
ECPDFFPVSGPGMQAGLDTSAPGRKYVLKSSLDLTRYDYYTIGSYDGGKDRYYPDDPAGDYHHRRRYDYGNYYASKTFYDPVERRRVLLGWANESDSVPDDKAKGWAGIHAIPRKIWLDPTGKQLLQWPIHEVEKLRGKAVSVDAKLVKPGDHFEVTGIATYQADVEVSFELEAGTSLLDKAEAFDPAYDDDAQKLCGVKGADARGGVGPFGLWVLASADLQERTAVFFRVFRDGHGKPKVLMCTDPTKSSLSPDLYKPTFAGFVDADISSGKIALRSLIDRSVVESFGAGGKTCILSRVYPSIAVGKDAHLYVFNNGEVDVTVSGLTAWEMKKPLMNGA

SEQ ID NO: 57426 - protein, 354 aa, Zea mays
  Clone ID: UC-ZMFLMO17322B10_FLI.pep
FHSIPIPISPPAFPLPRADLPPEASSTGRSSSRAAAFSSISCRTSSTDPPSCEAIDRLLRWLARGVRQPCSGRRRRGRRLWQGPGSGQAARSPTRARRRCGARAATRPTPSSATTTTTRCRSRATSARRASATGRAGARSATSPSAGAAARTSAPPGAAAAGGTGPSPPRRIRRRCPSRRLRRRRGPCRRRWGCLGAPRSSSAPLSLAVPVTTTTSASSRRPCSRWFPPTRPPTTRCSRRSWTTCWASATEAPARRSSSSRGCRRPPGLAARPGSWTASTRRCCPAPSCRGWRSCTSRRRPPAPGITSRSRHPGTSRAPAGTGSCRRRRRPTSTPTSRRLTRSWPPPPPLPPRP

SEQ ID NO: 57427 - protein, 135 aa, Zea mays
  Clone ID: UC-ZMFLMO17330D01_FLI.pep
RVACLASQTYYLTASIPLPLHTSLLPSIHKQHKWITSRDCSSTIYGITIITADQSLLLRGVDCGHGRDHGIDAALVANVGTPAYLVVSVLPPVLAPRVLDDPVRLVLQANGGETRSTISNKENTMVKVPATDVWA

SEQ ID NO: 57428 - protein, 112 aa, Zea mays
  Clone ID: UC-ZMFLMO17336E09_FLI.pep
PHYSTLLHQFHHAATASRNWTTGSSSRRPRCAPCCCSATACRPHPPRGARGSGATACSGQVPPRWPPRLTRRSWPTSPSPSSRRPPGEVSGPVTSQVESATTSSCKARPRAS

SEQ ID NO: 57429 - protein, 209 aa, Zea mays
  Clone ID: UC-ZMFLMO17342H10_FLI.pep
PQHIALLISAMAEVEQQQDTPKLFNRWTFDDVQVNDISLNDYLAVNATKHAMYLPHTAGRYSKKRFRKAQCPIVERLTNSLMMHGRNNGKKVMAVRIIKHTLEIIHLLTDANPIQVVVDAIINSGPREDATRIGSAGVVRRQAVDISPLRRVNQAIYLLTTGARESAFRNIKTIAECLADELINAAKGSSNSYAIKKKDEIERVAKANR

SEQ ID NO: 57430 - protein, 141 aa, Zea mays
  Clone ID: UC-ZMFLMO17399D11_FLI.pep
VGDQVSTLRGYNGDPNRFTRLRISNHTTYVSRKPCMSTIPTDPPLHEQVRATREHTTLFRRSFARRVRATLVISPLPVRDCLFMYGIAGFKLTLSHFQGMWLVKIVLDQQAYIRIQSLTNLGRTSPVPSPSPDLSTSILRI

SEQ ID NO: 57431 - protein, 368 aa, Zea mays
  Clone ID: UC-ZMFLMO17330F04_FLI.pep
SKTKIYIVMELVTGGELFDKIASRGRLKEDDARKYFQQLINAVDYCHSRGVYHRDLKPENLLLDASGTLKVSDFGLSALSQQVREDGLLHTTCGTPNYVAPEVINNKGYDGAKADLWSCGVILFVLMAGYLPFEDSNLMSLYKKIFKADFSCPSWFSTSAKKLIKKILEPNANNRITIAELINNEWFKKGYQPPRFETADVNLDDVNSIFDESGEPAQLVVERREERPSVMNAFELISTSQGLNLGTLFEKQTGSVKRETRFASRLPANEILSKIEAAAGPMGFNVQKRNYKLKLQGENPGRKGQLAIATEVFEVTPSLYMVELRKSNGDTLEFHKFYHNISNGLKDVMWKPESGIVEGDEARQRRSP

SEQ ID NO: 57432 - protein, 235 aa, Zea mays
  Clone ID: UC-ZMFLMO17336F10_FLI.pep
RLGFGKRAPVMSTTTEAAKSGSAAPVRCQRIGCDAVFTDDDNREGSCQYHPSAPMFHDGMKEWSCCKQRSHDFSLFLQIPGCTTGKHTTEKPITKAVSSNRTKATPIQSSKQGVGVDVCARCRQGFFCSDHGSQPKPQKPAATDDSNKEPVEKSAVPPPKKRIDVNELRTCKNKGCGKSYKEKDNHDSACDYHPGPAVFHDRMRGWKCCDVHVKEFDEFMEIPPCTKGWHNADAV

SEQ ID NO: 57433 - protein, 401 aa, Zea mays
  Clone ID: UC-ZMFLMO17322G02_FLI.pep
IGSVGAAEIRDQLRADREQSPGPDAGGDPPPVDEREQGEALRRGPPGADGVRQHGRGVYHRRGQREPADHGRQPRRGAAVGGGERAALHPGHAHHLRHRGQRGLLRQRHGHDGQPPPRHEGRPRGARGPGPRRPGHRLVGALRERARRQLPAVVGRVPGGPGGVHEAHPGLPRPDGVAVPHQRLPLLRVQGEPGQRVAAVRAVRAQPGGARPQHRPQLRQHAVRPDRRRVRRHEGHGAHGRGRPDLGDRVAVQGRRGRDRGHGAERRRVQRQPHAEGRHEPGDAAQAQRARRRLRVRALQREHEARAHVGAQLRAVLPQRLAGVRAQRRLRRRFRSGRVAQPVLHIHVLLLVQIRGERDLLDRESDAVTAAASNCNTPTLLLVSEYLVILYTKKKMHLNST

SEQ ID NO: 57434 - protein, 551 aa, Zea mays
  Clone ID: UC-ZMFLMO17341G08_FLI.pep
NVRPIPTPKSKLAIQRELLALKKKALALRREGKVDESEEELRKGSVLEKQLEELENSSKPPVAKETRSFPSNPPYKVEPPNINLTDEVYEPEVTDKDMQDPALLSVLKNMGWEDAGSDSVETTDKASFSAHVVHHKSSKTKGQLQKELLGIKRKALALRRGGKNTEAEEELEKAKVLEQQLAEMEESNNLSASQGVTTAGGDEILLVHASESGTPVVTLCGSPSKPQIETTNPNQGDVGEESRAGRSPALSQPAFTDPLGSEKGSHSPSVVHDRNEHQKTQGDDTLKDEILLHKRKAVAFKREGKMAEAREELKLAKQLEKHLEGAQQDTMDGVGDSITPAVEQNSLVQQPASSSNHTDDITSPPPAQASKRTQPQKAMSSRDRLKIQRESLAHKRNALKLRREGKTAEADAEFELAKELESQLEESDNQSSSSGGKSSEPNDASVENLLDPQIMSALRSIGWSDMDLSMQSSSAQPLKPVQSSSSQPPQKVEAKSSVAATSKPQSERSQLEEQIKAEKLKALNLKREGKQAEALEALRSAKRLEKKLNSA

SEQ ID NO: 57435 - protein, 485 aa, Zea mays
  Clone ID: UC-ZMFLMO17344C04_FLI.pep
QLPGDGLALFHPGRAGGRAGTSSDGEPAHELPLLIVFLLGGAGGRPLRVAALAAGHHGGLGVEHQVRHCAEGPGEGGGRGAVGPLLQHLVHHLGLVLHRAEHVGAGRARGGARHGEAVGPVALGHAHHAGPAEEVVQPAEGLLVGAPEEHAQVVAAGGVGGQLVQRQAVPPADELAHLAVAVAGEVREHAVDGGSLLQPLDRDDGELLPDGPHVRQGGEHGQVDVVGARRLGRAHAAGDELAEGVHRGEVLQAKDPLLEQLRGPPLQLVGVQAARVVVAAHGGGHDVAVVGAAVVRELVEEVGRGRVQASRRRSREGLEHQDRVVRHQRAPALAADDGVLHPLAVTHAAHGGHHGARVLLQAVRHRHVGLRRVGPVVVNAEAAADVDDAHVRAEAGELAVDLRGLADAVGEQGGGRDLGADVEVQQLEAVEHTNGLELGDHGQYLRGAEAELALLPGRGAEVAGVLGAQLGAHADDGAHAEATAG

SEQ ID NO: 57436 - protein, 205 aa, Zea mays
  Clone ID: UC-ZMFLMO17403A09_FLI.pep
GSLDEVLHEKSEQLDWDARINIILGAAKGLSYLHHDCSPRIIHRDIKSSNILLDGSFEARVSDFGLAKLLEDEESHITTIVAGTFGYLAPEYMQFGRATEKTDVYSFGVLVLEILSGKRPTDASFIEKGLNIVGWLNFLAGENREREIVDLNCEGVHTETLDALLSLAKQCVSSLPEERPTMHRVVQMLESDVITPCPSDFYDSE

SEQ ID NO: 57437 - protein, 165 aa, Zea mays
  Clone ID: UC-ZMFLMO17427E03_FLI.pep
NVLVTGTPGTGKTTTCSLLADAAGLRHVNIGDLVREKSLHDGWDADLECHVINEDLVCDELEDMMEEGGILVDYHGCDFFPERWFDLVVVLQTDNSILHDRLTGRGYMGSKLANNIECEIFQVLLEEARESYREDIVMPLRSDNVEDISKNVGALTDWVNNWRPS

SEQ ID NO: 57438 - protein, 320 aa, Zea mays
  Clone ID: 700051004_FLI.pep
DRLAALKAKDKKHGAESATPEPNSEVLFLCSYEGCGKTFFDAGALRKHAHVHGERQYICHYENCGKKFLDSSKLKRHFLIHTGEKNFVCPHEGCGKAFSLDFNLKAHMKTHSADNYHVCQYPECGRRFTQESKLRAHIRAQHEKAVCLQNPGASAMNHSAIGEQHQPPKPAKVSATPPAPSAERPYVCPYDGCDKAYIHEYKLNLHLKKEHPNHYQDGGPQGAAPSKRSISKSSHRSRPDITARMPPAKVSKRKGGYAAPSPAVNLPEEHLPEEQQWPRKVMYEDDSEETEEEEGGNNVEDRWNYNRVASSDDEETEDEQ

SEQ ID NO: 57439 - protein, 274 aa, Zea mays
  Clone ID: 700095271_FLI.pep
THGNRRMATCSCTHTDFDLCLDGGASSSLPDADLHEPVLGGAAPEHAGAVESVRHLAGAGDGDEAGESLVEALLDAVVDGLLQGQSLVLHDGGHVARERAADDGLALARARHGAGAARVGAGADERRVPDAAGHLVHEPARGRGRRAGPRRVHHRAPHRLRRVHADGQPVHDHPRLVHAAAVAVRRARQRAARVRPRQRDPVVEQDAAGLLGELEHADVVIRDEVAVVHGLQALRTGELLGAVEGEVRVGRVVHDAARQGHGVLDGGDAGHGAA

SEQ ID NO: 57440 - protein, 304 aa, Zea mays
  Clone ID: 700102965_FLI.pep
VHNLSRYQARWNKPRPESATIDEELASKLNSMAAKEKLYCEIASTAESGWDFSSRWMRNSTDMTTLATTYIIPVDLNTFLFKMELDIGALAKVVGDNATSEFFLNASKARHIAIDSILWNSEMEQWLDYWLPGDADCQEVHEWKPNSQNRNIFASNFVPLWLNAYHSEFVRFADEAKSNRVMASLKASGLLHAAGIATSLTNTSQQWDFPNGWAPLQHLIAEGLLHSGSEAKKLAEDIATRWVRTNYAAYKATGAMHEKYDVEACGESGGGGEYKPQTGFGWSNGVVLSFLEEFGWPEGKEIAC

SEQ ID NO: 57441 - protein, 319 aa, Zea mays
  Clone ID: 700201134_FLI.pep
MSEIHNVAIADNHGRVHNLSRYQARWNKPRPESATIDEELASKLNSMAAKEKLYCEIASTAESGWDFSSRWMRNSTDMTTLATTYIIPVDLNTFLFKMELDIGALAKVVGDNATSEFFLNASKARHIAIDSILWNSEMEQWLDYWLPGDADCQEVHEWKPNSQNRNIFASNFVPLWLNAYHSEFVRFADEAKSNRVMASLKASGLLHAAGIATSLTNTSQQWDFPNGWAPLQHLIAEGLLHSGSEAKKLAEDIATRWVRTNYAAYKATGAMHEKYDVEACGESGGGGEYKPQTGFGWSNGVVLSFLEEFGWPEGKEIAC

SEQ ID NO: 57442 - protein, 142 aa, Zea mays
  Clone ID: 700345850_FLI.pep
KDASAVLLSEEFHEVFPLYLYTGTSDQADDEYSLDSIVKFGINGKKTSGGKPGFLYSSLRNSQSAQGTMRVKKNLVVSGLGKTHQVYKYVGTDGCYFRDVSSRNYTIVSDRSDDSCSKRAYSSVSAKLNDQPARRKLLANKL

SEQ ID NO: 57443 - protein, 316 aa, Zea mays
  Clone ID: 701165994_FLI.pep
LRAVFINSSLNLARANGFDGLDLSWIFPATQADMQNLGALLAEWRARITEESVAKSLPPQPQPLLLTATLYFSNHLFGTPDGNLDYPVDAIASSLDWANVLTFGFRGDSGVTAADAPLYDTSSHFSASYGVVSWLDAGLPPCRLVMGIPLFGRSWFLRNKAKNGLGAPAAAAGTKQRRSNQTGIIAYAETEEYLSSQGTVVTYDDQSVAEYFCSGDLWVSFDGAQVVQRKLEFAARSQLLGYFLWTVGFDDSNSTISRKASESWHQYAQGGFGIMHAGGSNQYVAFNSSSVSLGSCYSRSLSCLLSSVLLLVILFR

SEQ ID NO: 57444 - protein, 271 aa, Zea mays
  Clone ID: 701179331_FLI.pep
AFESVLAAAKGKKIVMFLDYDGTLSPIVRDPDSAVMSEEMRDAVRGVAEHFPTAIVSGRCRDKVFNFVKLAELYYAGSHGMDIKGPTTQSKHTKAKAGAVLCQPARALLPVIEEVYRALTASTAPIPGATVENNKFCLSVHFRCVQEEKWRALEEQVRSVLKEYPDLRLTKGRKVLEIRPSIKWDKGNALQFLLESLGFAGSNSVFPIYIGDDSTDEDAFKVLRNLGQGIGILVSKIPKETRASYSLREPSEVEEFLRKLVSWSKESRQRD

SEQ ID NO: 57445 - protein, 374 aa, Zea mays
  Clone ID: LIB3732-012-D10_FLI.pep
SSPIPMDMGSGSSPVITDPISISPPLLGGLTSNLMPFSVMSGGCSSSPSMSASSRRKIEEVLVNGLLDAMKSSSPRKKHNLAFGQDNSPDEDPAYTAWLSKCPSALASFKQIVANAQGRRIAVFLDYDGTLSPIVDDPDKAFMSPVMRAAVRNVAKYFPTAIVSGRSRKKVFEFVKLTELYYAGSHGMDIVTSAAAHATEKCKEANLFQPACEFLPMIDEVSKCLVEVASSIEGARVENNKFCVSVHYRNVAEKDWKVVAGLVKQVLEAFPRLKVTNGRMVLEVRPVIDWDKGKAVEFLLRSLGLSDSEDVVPIYIGDDRTDEDAFKVLRERSCGYGILVSQVPKDTEAFYSLRDPSEVMGFLNSLVRWKKHPL

SEQ ID NO: 57446 - protein, 246 aa, Zea mays
  Clone ID: 700027772_FLI.pep
ARRGGALPDSDRQRAVPGQGVQLRAASGALLRREPRDGHPGAHRRRQPPPRQRQGGGGGVVGALPAGERVPAGDAGGVRGAGGQGGARHPGRQGGGQQVLPVGPLPVRGGGVLGRALRAGPRRAEGPPGPAPHPGPQGAGGPPHDPLGQGQGAGVPAPRPRLRRRRRPRRRLPHLRRRRPHRRGRLQGAARARAGRRDPRVQVPQGDKRVLHATRPRRGQGVPAQARRRQRRQLMIRPAIRFPFPP

SEQ ID NO: 57447 - protein, 193 aa, Zea mays
  Clone ID: 700027972_FLI.pep
LTGKRSPVPTGDGERVPTHDRGRARAPGGDDAQHTRCQGGEQQVLRLRPLQMRRRKDVGRAVGVGEGRSAGVPQAAADAGADGAGGAAHHQVGQGQGARVPARVARLRGLHQRPARVHRRRPHRRGRLQGAAAPGPGPGPGRRHPGVQAPQGDQRLLLAPGARRGDGVLAAARRVEAPLQAESDAIRRRNGPS

SEQ ID NO: 57448 - protein, 697 aa, Zea mays
  Clone ID: 700086688_FLI.pep
YVLANKFFFEKVVEVINPEDDYVWVHDYHLLALPTFLRRRFNRLRIGFFLHSPFPSSEIYRTLPVRDEILKALLNCDLIGFHTFDYARHFLSCCSRMLGIEYQSKRGHIGLDYFGRTVGIKIMPVGVHMGQLESGLRLPDREWRLSELQQQFQGKTVLLGVDDMDIFKGINLKLLAFENMLRTHPKWQGRAVLVQIANPARGRGKDLEAIQAEIEESCQRINGDFGQSGYSPVVFIDRDVSSVEKIAYYTIAECVVVTAVRDGMNLTPYEYIVCRQGAPGSESVSEVGGPKKSMLVVSEFIGCSPSLSGAIRVNPWNIEATAEAMNEAISMPEQEKQLRHEKHYRYVSHDVAYWSKSFILDLERACRDHFKRTCWGIGLGFGFRVVALDAHFRKLNMDSIVNAYEISGSRAILLDYDGTLVPQTSINKEPSPEVLNIINTLCSDSRNIVFLVSGRDKDMLGKWFSSCPKLGIAAEHGYFLRWSSEEEWQTCTQAMDFGWMQMAKPVMNLYTEATDGSYIETKESALVWHHQDADPGFGSSQAKELLDHLESVLANEPVSVKSGQFIVEVKPQGVSKGIVAERILASVKERGKQADFVLCIGDDRSDEDMFENIADIIKRNMVAPRTSLFACTVGQKPSKAKFYLDDTFEVVAMLSALADATGAELESDSADELAASISSLDIGDEQSETSDTPIGGS

SEQ ID NO: 57449 - protein, 185 aa, Zea mays
  Clone ID: 700091915_FLI.pep
PDITCNDPEDISQDGSRLWAIDKPNIAQPPHGWERQIRIRGEGGTKFADVYYTSPTGRKLRSLVEVDRFLQENPEHVAQGVTLAQFSFQIPRPLRQDYVKKKPKLINASDEASTITSKSYEPEEVNPIAWAVPTKHEGDASEEASFADETLASEVVLTRKRKIGSSLSVEPNHLSDELEPKLEDA

SEQ ID NO: 57450 - protein, 159 aa, Zea mays
  Clone ID: JC-ZMSHLIB3587P027H06_FLI.pep
RDLVLNNIRKMRPDIFIQIVNSGTYGAPFFLTRFREALFYYSALFDMLDATIPRDNDERLLIERDIVGRSALNVIACEGADRLDRPETYKQWQVRNHRAGLKQLPLNPEVVKLARDKVKKYYHKDFLIDEDRQWLLQGWKGRVLFAMSTWVAEDNNSTF

SEQ ID NO: 57451 - protein, 316 aa, Zea mays
  Clone ID: UC-ZMFLB73095C05_FLI.pep
VCKQIHGSCTQCYRCSTYYHAICASRAGYRMELHCLEKNGRQTTKKISYCAQHRSPNPDNVLIIQTPAGTFSSKKLVHSNGKVAASRLIRKDIPLDLPSEVKISENLSAARCRVYVRKDLKRSREGTIVHHVRGPCQHRWEEIDNLNPPREERDPESFCTFKERLCYLQKTEHGRVCFGRSGIHRWGLFARRDIQEGEMVLEYRGEQVRRSVADLREEKYRVQGKDCYLFKISEEVVVDATDKGNVARLINHSCTPNCYARIMSVGHDESRIVLIAKKKVCAGDELTYDYLFDPDEADERKVPCLCQTANCRKFMN

SEQ ID NO: 57452 - protein, 463 aa, Zea mays
  Clone ID: UC-ZMFLB73111B07_FLI.pep
KHGPRYREHSPGKRQKVFTSDISFEGNIMNKLSIPEIRDTRLESRESGGDKLRILDESTKKTSRKDMCGESPATTMENVGRQSNKVSSTKNFLESTLSCWSALERDLYLKGIEIFGKNSCLIARNLLSGLKTCIEVANYMYNNGAAMAKRPLLNKSISGDFAENEQDYMEQDMAARTRIYRRRGRNRKLKYTWKSAGHPTVRKRTDDGKQCYTQYSPCACQQMCGKDCPCADKGTCCEKYCGCSKSCKNKFRGCHCAKSQCRSRQCPCFAASRECDPDVCRNCWVSCGDGSLGEPLARGDGYQCGNMKLLLKQQQRILLGRSDVAGWGAFIKNPVNKNDYLGEYTGELISHKEADKRGKIYDRANSSFLFDLNDQYVLDAYRKGDKLKFANHSSNPNCYAKVMLVAGDHRVGIYAKEHIEASEELFYDYRYGPDQAPAWARRPEGSKKDEASVSHRRAHKVAR

SEQ ID NO: 57453 - protein, 439 aa, Zea mays
  Clone ID: UC-ZMFLB73120B04_FLI.pep
EMCLVGLNSQSMAGIDYMSAKFGNEEDPVAISVVSAGVYDNTGDDPDVLVYTGHGMSGKDDQKLERGNLALERSLHRGNPIRVIRSVKDLTCPTGKIYIYDGLYKIKEAWVEKGKSGFNVFKHKLLREPGQPDGIAVWKKTEKWRENPSSRDHVILLDISYGVENNPVCLVNEVDDEKGPSRFTYTTNLTYGNSLSSMRKMQGCKCISVCLPGDNNCSCTHRNAGDLPYSASGILVSRMPVLYECGDSCTCSQNCRNRVVQKGTQIRFEVFKTGDRGWGLRSWDPIRAGTFICEYAGEIIDINRVNGEDDYIFETSPLEQNLRWNYAPELLGEPSLSDSNETPKQLPIVISAKRTGNIARFMNHSCSPNVFWQPVLYDHGDEGYPHIAFFAIKHIPPMTELTYDYGQNQRNSIQMGTHSGFRKSKSCLCWSPKCRGSFG

SEQ ID NO: 57454 - protein, 171 aa, Zea mays
  Clone ID: UC-ZMFLB73250B03_FLI.pep
LVGGAQNLTLTTMFSLFYGLWKHVFSKAEFHVLILGVHKAGKTTLLEKLKSIYLKGEGLPHDRIVPTVGLNIGRIEDANVKLVFWDLGGQPGLRTIWEKYYEEAHAVIYVIDSASASSFEDAKSALEKVLRHEDLHGAPILIFANKQVDIYLYLSWFIYSLKLHALAQQFF

SEQ ID NO: 57455 - protein, 600 aa, Zea mays
  Clone ID: UC-ZMFLB73280E02_FLI.pep
RGRPKRLQDSSDIVTPIDSKDSESSPQPPIAAPAESGKRKRGRPKRIDGSVTPSSHSVFSIDDDAVDTMKRGRPRKIDTKLLQFPSLFSDDPRQTADNVLMMFDALRRRLMQMDDVKQAAKQQPNLKAGSIMNNAELRVNKDKRIGEVPGVEVGDMFYFRIEMCLVGLNSQSMAGIDYMSAKFGNEEDPVAISVVSAGVYDNTGDDPDVLVYTGHGMSGKDDQKLERGNLALERSLHRGNPIRVIRSVKDLTCPTGKIYIYDGLYKIKEAWVEKGKSGFNVFKHKLLREPGQPDGIAVWKKTEKWRENPSSRDHVILLDISYGVENNPVCLVNEVDDEKGPSRFTYTTNLTYGNSLSSMRKMQGCKCISVCLPGDNNCSCTHRNAGDLPYSASGILVSRMPVLYECGDSCTCSQNCRNRVVQKGTQIRFEVFKTGDRGWGLRSWDPIRAGTFICEYAGEIIDINRVNGEDDYIFETSPLEQNLRWNYAPELLGEPSLSDSNETPKQLPIVISAKRTGNIARFMNHSCSPNVFWQPVLYDHGDEGYPHIAFFAIKHIPPMTELTYDYGQNQRNSIQMGTHSGFRKSKSCLCWSPKCRGSFG

SEQ ID NO: 57456 - protein, 509 aa, Zea mays
  Clone ID: UC-ZMFLB73344G09_FLI.pep
VGTSGSKIISSVSAEESTTPPSADTSETENASSDMPPSSLRKYKISKRGPRYRERSPGKRQKVFTYDISFASNILNKLSIPEIRDTRLESREPGGDKLQILDESTKKTSSKDICGESPITTTENVGRESKKVSSTKNFLEHTLSCWSALERDLYLKGIEIFGKNSCLIARNLLSGMKTCMEVANYMYNNGAAMAKRPLLNKSISGDFAETEQDYMEQDMVARTRIYRRRGRNRKLKYTWKSAGHPTVRKRIGDGKQWYTQYNPCVCQQMCGKDCPCVENGTCCEKYCGCSKSCKNKFRGCHCAKSQCRSRQCPCFAASRECDPDVCRNCWVSCGDGSLGEPPARGDGYQCGNMKLLLKQQQRILLGRSDVAGWGAFIKNPVNKNDYLGEYTGELISHKEADKRGKIYDRANSSFLFDLNDQYVLDAYRKGDKLKFANHSSNPNCYAKVMLVAGDHRVGIYAKEHIEASEELFYDYRYGPDQAPAWARRPEGSKKDEASVSHHRAHKVAR

SEQ ID NO: 57457 - protein, 244 aa, Zea mays
  Clone ID: UC-ZMFLMO17074F02_FLI.pep
GKQCPCLSNGTCCEKYCGCPKICKNRFRGCHCAKSQCRSRQCPCFAADRECDPDVCRNCWVGCGDGTLGVPNQRGDNYECRNMKLLLKQQQRVLLGRSDVSGWGAFLKNSVSKHEYLGEYTGELISHKEADKRGKIYDRENSSFLFNLNNEYVLDAYRMGDKLKFANHAPDPNCYAKVIMVTGDHRVGIFAKERILAGEELFYDYRYEPDRAPAWARKPEASGAKDDGQPFNGRAKKLAQNNRG

SEQ ID NO: 57458 - protein, 507 aa, Zea mays
  Clone ID: UC-ZMFLMO17224B11_FLI.pep
IPPPVPARGGGGERGFRGGRQTQEGHHRGHRKRRCSPRHGRAQECYRGTAVPGRVKVDKACWDQLGWWVGYAKDTDDSIGRIVRISPGVGRYVAKSYNPRQLVTASSGTPLFEIFLVKEDDETYTMKVVHMRPTKGTSGAPSISSTITESPAKVENENSSESSAISDSVTEEANTDTTVRGNEDAEEKAQDVGSSKDSSVEGLKSVLNFFKSRIPEFKVQVINVDVAEETELAANSSEELVQDDVKSTPESSLEEPATEELEQEEDVPEENTDEESKSTEVKLFISGVVHNKEDAGAKSYVRVPAEINNMEKDSFELYIPGEGSDRDLAETKAAKQKVADMAAKLASELMPSDVAKALWGTAKSSSKINKEVQELLRLTLSKARVKLTENTIFKRIIMDTNSTDPFNGLYVGAFSPYGPEIVQLRRKFGHWNSTDDVEFFEYVEAVKLTGDLSVPAGQITFRAKIGKGKRLENRGAYPEEFGVVISSCRSDCLKDAKILPVTKVRVE

SEQ ID NO: 57459 - protein, 413 aa, Zea mays
  Clone ID: UC-ZMROB73045H08_FLI.pep
PQPKRPHPMAGAPAPKLPSFPGPVAQAGGGFVSALKPKAEAGNDEAAAAVDQLAEAARLAEAGDAFGAREILARLNYRLPAVPTAGTPLLRSAFYFKEALRVALSPTGEALAPPAVSTPYDVVLKLGAYKAFSEVSPVLQFAHLTCVQAVLDELGAAGRIHVLDLDIGMGEQWASLMQELAQRSPAATLKVTALVSPASHHPLELNLIHENLSGFARELGVFLQFAAYNVDALDPAELVAITSGDAVAVHLPVGSAHVAAMPAVLRLVKRLGAKVVVSVDRGCDRTELSFSTHLLQAFQSCVSLLDSIDAVGGADAEVVGRIERFMVQPDVERRVVSRHRAAVAVDKPPPLPWRTVLASAGFVPVQASTFAESQAEALLKRMALMGFRVEKRGGALCLYWQRGELVSVSAWRC

SEQ ID NO: 57460 - protein, 346 aa, Zea mays subsp. mexicana
  Clone ID: UC-ZMROTEOSINTE015B02_FLI.pep
NSCLIARNLLSGLKTCIEVANYMYNNGAAMAKRPLLNKSISGDFAENEQDYMEQDMAARTRIYRRRGRNRKLKYTWKSAGHPTVRKRTDDGKQCYTQYSPCACQQMCGKDCPCADKGTCCEKYCGCSKSCKNKFRGCHCAKSQCRSRQCPCFAASRECDPDVCRNCWVSCGDGSLGEPLARGDGYQCGNMKLLLKQQQRILLGRSDVAGWGAFIKNPVNKNDYLGEYTGELISHKEADKRGKIYDRANSSFLFDLNDQYVLDAYRKGDKLKFANHSSNPNCYAKVMLVAGDHRVGIYAKEHIEASEELFYDYRYGPDQAPAWARRPEGSKKDEASVSHRRAHKVAR

SEQ ID NO: 57461 - protein, 225 aa, Zea mays subsp. mexicana
  Clone ID: UC-ZMROTEOSINTE021E09_FLI.pep
LINRCSKSCKNKFRGCHCAKSQCRSRQCPCFAASRECDPDVCRNCWVSCGDGSLGEPPARGDGYQCGNMKLLLKQQQRILLGRSDVAGWGAFIKNPVNKNDYLGEYTGELISHKEADKRGKIYDRANSSFLFDLNDQYVLDAYRKGDKLKFANHSSNPNCYAKVMLVAGDHRVGIYAKEHIEASEELFYDYRYGPDQAPAWARRPEGSKKDEASVSHHRAHKVAR

SEQ ID NO: 57462 - protein, 185 aa, Zea mays subsp. mexicana
  Clone ID: UC-ZMROTEOSINTE110C01_FLI.pep
ELSCPQDGGIAVYEGPEMVSPESQTDARKENIHSDVAETDECTKTQKAALAGTEGENSAEDSGVPLSEMDKCNEMPKDAPTLTAAGANPAEDEASLKDLFVQTVNKASSASPAPDDPKASDEKTLAEENQKLKELLQKLLASGNDQMGVITDLSEKVKVLERRLARKKRPKVRVHRPSRHASCVH

SEQ ID NO: 57463 - protein, 220 aa, Zea mays
  Clone ID: UC-ZMFLMO17191G08_FLI.pep
EWGNHFRCSCHEWGNCQATMEIGAVAAMRYVKDGIKAAKLVMEHSEHTLLVGEKATAFAISMGLPGPTNLSSPESIEKWEKWKQNHCQPNFWKNVDPVGKCGPYHPINLASVEVEGSVKNEVVGSQGGLCQGYFESDNLLEPIKSNLKVVNRHNHDTISMAVIDKMGHIAVGTSTNGATFKIPGRVGDGPIPGSSSYGDDEVGACGATGDGDIMMRFLPW

SEQ ID NO: 57464 - protein, 639 aa, Zea mays
  Clone ID: UC-ZMROB73014E01_FLI.pep
FFLHSPFPSSEIYKTLPVREELLRALLNSDLIGFHTFDYARHFLSCCGRMLGLSYESKRGHICLEYYGRTVSIKILPVGVHMEQLKTVLGLPETEAKVSELMEMYSGKGRVVMLGVDDMDIFKGISLKLLAMEELLRQHPEWRGKLVLVQVANPARGRGKDVAEVQTETYAMVRRINEAYGEPGYEPVVLIDEPLQFYERVAYYVIAEVCLVTAVRDGMNLIPYEYIVSRQGNEKLDRMLRQGKPEEKKSMLVVSEFIGCSPSLSGAIRVNPWNIEAVADAMETALVLPENEKRLRHDKHFRYVSTHDVGYWANSFLLDLERTCKYHSQKRCWGIGFGLRFRVVSLDLTFRKLSLENILMAYRRAKTRAILLDYDGTLMPQAINKSPSTESVRILNSLCRDKDNVVYLCSGYDRRTLHEWFPCENLGIAAEHGYFLRCKRDAEWKTCVAATDCSWKQIAEPVMCLYRETTDGSTIEDRETVLVWNYEDADPDFGSCQAKELVDHLESVLANEPVSVKTTPHSVEVKPQGVSKGLVARRMLVSMKERGQCPDFVLCIGDDKSDEDMFQLIATAACGDSLASKAEVFACTVGRKPSKAKYYLDDAAEVVRLMQGLSYVSEELALANQRDEDEDSSLDDVWE

SEQ ID NO: 57465 - protein, 270 aa, Glycine max
  Clone ID: UC-GMFLMINSOY019E06_FLI.pep
DSNTLLHYTNVFDAIVDAAYFAMSYLKFTNIPILVTESGWPSKGDSSEPDATVDNANTYNSNLIRHALNNSGTPKQPGIAVSTYIYELYNEDLKSGPVSENNWGLFYASGAQVYTLHLTNSGTVFANDTTNQTFCVAKSNADSKMLQAALDWACGPGKVDCSPLLQGQSCYEPNSVASHATYAINSYYQQMAKSAGTCDFKGVASITTTNPSHGSCIFSGSGGKNVTSVNGTALAPSTNSTNSGCLSQYYNGGFFTSTVILTLILSVVVL

SEQ ID NO: 57466 - protein, 213 aa, Zea mays
  Clone ID: 700457284_FLI.pep
EDTAARVLPPLPPPPSLPPLPPRPPMQSDMLAPGVMRFPPPPPPPDSRPSLMAAGVNRPPPPPPGFPPSQMPMPPYGVLPGPPPMLRPPFLPGPPMQLDEFAAFAPRPQLPQQPSYVKSAAPTVVKRPLAQHTPELTAMVPASVRVKRESALPKPKPKVQQQPQLSTVSISKPSVTLIRSDARPPSAAPKPPSIDDSYMAFLEDMKELGALDG

SEQ ID NO: 57467 - protein, 192 aa, Zea mays
  Clone ID: 700552550_FLI.pep
QIRRIASSNTPERIGLGTSMSGVVVLGKVARVTFEVHVDSVLAAPQLALADDDGWHDLLPEVGLTLLDGGHDHVTDAGGRQAVEPTLDALDGDDVEVLGACVVRAVHGRCDGETQRHAELVPRRPSPPCGSSSISTLKRAEFADKREKQQENESDRPKRMGDRSVRTALRHGGGSSGGGARRRGRLGFALAR

SEQ ID NO: 57468 - protein, 63 aa, Zea mays
  Clone ID: UC-ZMFLB73194H11_FLI.pep
TLNSNIITHQTKNIYSAGRRHLTGCNCDSVLSFHDTSGAPSQFAVDIQGRPQALLAMLLDSQS

SEQ ID NO: 57469 - protein, 142 aa, Zea mays
  Clone ID: UC-ZMFLB73199H08_FLI.pep
SCIGMWDQTVLGGVKHLSLGLIGGRLRLGLGLGLSRGERLLDGDGVDLRHVRRQRGVHHPVPLQQPLPLELLRHHLDLVARATPSGRVRHHEIGRAESGGDGRLDVLLGHAHRFFASSSPVCSGGATDWQARRRLGPGGSSE

SEQ ID NO: 57470 - protein, 241 aa, Zea mays
  Clone ID: UC-ZMFLB73196H10_FLI.pep
IVRDVMLIVSQHLSSMSRQDRSDPLSSCILVPKQGNLVLTGPSMATSAESPIAFTFYLHDGSPQAGEAAEDDEDIGRIICDCIGDDFSNYNRAIVETVQMGYGLAEVIYAVLNNGVQGRVAVKLARLPVSKAGEEDATAILGRIVARSKLFDVGCVLFYKEGDNGVSVRPGGLIQLAREALAVPLHMPLTIELDLHRCSGDEIVGGVLEFNPAIDGQHTERLVGQNGAELEVAISWSEYPW

SEQ ID NO: 57471 - protein, 193 aa, Zea mays
  Clone ID: UC-ZMFLB73221H10_FLI.pep
LPRRGQLPGGGLPEAQPRLRHGGAGCRLRRFAPPGAAGVAARAGLLQRPRHQPQGAGEGERRRVQEGVPGRLRLRGGAVRLRHRRRRRLLLPAVGGAVAGDVAAGGGALQLHHASQGAGHAASVTVSQILVGLDHSQGQGHTQPHRAVHHFYIISLLSSNFFCISLQSKHLLIHRCQNEVLFFFCVCYILSAS

SEQ ID NO: 57472 - protein, 201 aa, Zea mays
  Clone ID: UC-ZMFLB73214F03_FLI.pep
DDVSVWEWSGSAYDEGAEASEWFSTYFGKPSRLVRFKEASETRPTDPDYAQGYKIMFTDCFPFLIASQGSLDALNEILKEPVPMNRFRPNILVDGCHPYSEDLWKTIKINNLTFLGVKLCNRCKVPTINQEDGVPGTEPTETLQTFRSDQVLRPSHKNKRQVYFGQNLVCKESLSGEGKVIKVGDPVYVVQAFASSNEAPA

SEQ ID NO: 57473 - protein, 207 aa, Zea mays
  Clone ID: UC-ZMFLB73224F07_FLI.pep
TLEIRDRSYRLKIGVMSEAHPPVYGDDESAASAADSDGEEFSRNVKEAAEILRKARASMADEETADALLYKSARLLSTAVALRPTSLVAVGQLGNTYLLHGELKLKVSRELRTLLASSGAFLNGRERAPRSRKVDRRMVSRESISSALVDVCEECESLLVEAGRSYRMALSIDSGDAKALYNWGLALIFRAQLLADIGPQPTLTGCI

SEQ ID NO: 57474 - protein, 332 aa, Zea mays
  Clone ID: UC-ZMFLB73213A02_FLI.pep
MANRARWMMKYEKGLVDILHENNTSHYRTQNGWRTEGWRKIVRDFNVRYPEAKFSKMQIQEHETQLKKDYKLIKSILQRDGVSWDQSASMVRTTDEIWDDIIEDMPKARKYQSKSFPLLDSLELLFDGPIPEGGQKSPSSVPQNVGENVDDGGNNTSTVPGLSERPSGTFNTSVTEAWNNISLLQQTALGPQGIDDLDTLQKRGEEVLERLQHGADRRLPRADDQAQSSSCVELQRDRRKKRKAPDVQQMMETYLNFRMKQAHVKEQRAKDAGQFTISGCIKALHTMADVSDEVKVLASDVFKDAENREIFLSYEPRLRSLWLKREVGKLLS

SEQ ID NO: 57475 - protein, 265 aa, Zea mays
  Clone ID: UC-ZMFLB73213A07_FLI.pep
QQVELEAAKSEIEKWHSAFQSIPAVPSGTIPDPVSVVSYLSTLKSSEESLKEQLEKAKKREAAFIVTFAKREQEIAELKSAVRDLKTQLRPPSMQTRRLLLDPAIHEEFTRLKNLVEEKEKKIKELQDNVAAVNFTPSSKLGKMLMAKCRTLQEENEEIGTMASEGKIHELGMKIAVLKSQNNELRNQFDVLYKHMDGVTNDVERSNELVSILQEELEAKDLELTRLKEVLAQKGATQDAPVETSDDAGNGQEADSDTLQVKAES

SEQ ID NO: 57476 - protein, 249 aa, Zea mays
  Clone ID: UC-ZMFLB73224G01_FLI.pep
RAREWWREEYAEELTKKQKRRALAKSKSDAGAMSGLQWWERDCDFEEKGHSRWTMMKSWSRRSSNGNGNSNSSISWWVDGVRRSSRDWASGEFVPKSGGAVSSTPSMRGTVCYVAPEYGGGGPLSEKCDIYSFGVLLLVLISGRRPLQMTTSPMSEFEKASLISWARHLAQVGRLLDLVDPALQDVDRDQALLCITVALLCIQRSPARRPSSAEVLDMLAGEGEPPPLPIEFSPSPPGGFPFKSRRKGR

SEQ ID NO: 57477 - protein, 167 aa, Zea mays
  Clone ID: UC-ZMFLB73219D12_FLI.pep
TPHIKHFTREVARRSYDTDLIVDGYEDYITEAIEFKEEYDFRLGNLMDHYGIKSEAEIISGCILKMAKNFTKSSDADAIRMAVRSLRKEARSWFNEMSTGEDGQDAMEAKASAWYHVTYHQQYWGSYNEGYDRPHLISFPWCVYDKLVAIKQGRNLLTRMDRNLRFR

SEQ ID NO: 57478 - protein, 197 aa, Zea mays
  Clone ID: UC-ZMFLB73228B09_FLI.pep
LAVTRETNTHNVQKHSYCFLPFALPHQSPAGCHPAHWHCSDNGLPSGDLNLDGLGLLGLRRGQLLDGHREHAVPAHGGDLVHVGVVRQHELAHELAHPPLHAQVLGVLALLPAPLAADHQHPLVLHLHPDVARAQPRHVHHERVRSRELLDVGRGGRHGARVADVGARGAAARLVAVGHVQQVMQRRHPGGLQPEHP

SEQ ID NO: 57479 - protein, 257 aa, Zea mays
  Clone ID: UC-ZMFLB73242D05_FLI.pep
SPEYQGSAEWSSMQNDDTVSPFTWFKTMFDAPEGNGPVTIDLGSMGKGQAWVNGHLIGRYWSLVAPESGCPSSCNYAGTYSDSKCRSNCGIATQSWYHIPREWLQESGNLLVLFEETGGDPSQISLEVHYTKTICSKISETYYPPLSAWSRAANGRPSVNTVAPELRLQCDDGHVISKITFASYGTPTGGCQNFSVGNCHASTTLDLVVEACEGKNRCAISVTNEVFGDPCRKVVKDLAVEAECSPPSVNQEPRYDI

SEQ ID NO: 57480 - protein, 257 aa, Zea mays
  Clone ID: UC-ZMFLB73256C12_FLI.pep
GTLSPIVDNPENALMSDEMRAAVRHAASLFPTAIISGRSRDKVFDFVKLNELYYAGSHGMDIMGPVRKTTDSNGVECIRSTDVHGKEVNLFQPASEFLPMITEVYEKLGESVKDIDGARMEDNKFCVSVHYRNVAEDDYKKVFHRVTAVLEGYPCLRLTHGRKVFEVRPVIDWNKGKAVEFLLESLGLSESEDVLPIYVGDDRTDEDAFKVLKASNRGFGILVSSIPKESDAFYSLRDPAEVMEFLRMLAAWKEQST

SEQ ID NO: 57481 - protein, 145 aa, Zea mays
  Clone ID: UC-ZMFLB73240F04_FLI.pep
SAVEVRGRGAGAGEEGPGGGPGDPGGGARRQALLRRRRPRLRGRGSGALHVLVPRLREAGRVQHPGALPQDRGLGGALQGAGERGQGAVRPCQGARVRPVPPEQVRGQVIGSTACAAMQAAGHAGALICSISSMPMLALHSAVDV

SEQ ID NO: 57482 - protein, 230 aa, Zea mays
  Clone ID: UC-ZMFLB73243H12_FLI.pep
AWGAGIGCSFRIERCCIFKKGGGTIGLEPRLSHVSAVEPTLAPVAVERTMTTRAAASNALRQQRFVREVTIQYNLCNEPWLKYSINIVADKGLKKSLYTSARLKKGEVIYLETHINRYELCFSGDKPCIIGSSSNASESETEKHQSGSHHSQNGDRGCVEHELRDVFRWSRCKKAMPESAMRSIGIPLPADQLEVLQDNLEWEDVQWSQTGVWVSGKEYPLARVHFLSAN

SEQ ID NO: 57483 - protein, 135 aa, Zea mays
  Clone ID: UC-ZMFLB73244B07_FLI.pep
ASTCSVCSGLQLRVHCAEALGTPIVGDYKYGWFVHQTWKQNPQPDFEPFTGEPYKLRRPEGLEIQKGSVLSKVPLLHLHCREMVIPNIAKFLSSTGGWHENGTPWAKEKPNLLRFVAPMPPHMKISWNIMSSYLV

SEQ ID NO: 57484 - protein, 189 aa, Zea mays
  Clone ID: UC-ZMFLB73247H03_FLI.pep
LLANVYIYIYIFHSSFIAQPPRPPAGHEAQLPDRPSRACLRIQICLRKSSHLFSFLQIVLYLELYASCVEYITPLRDSMSSVFPSAHLAFASIDLNAHTVFAITTALAILQTVCLRNLSLLSFFLPCDQSGYTPCPMPLPLPCACYLSIKKGAVPLWEIILCIVIIMIGVVCACVGSYTSVSQMISSTK

SEQ ID NO: 57485 - protein, 207 aa, Zea mays
  Clone ID: UC-ZMROB73019A05_FLI.pep
ALDWLIQFHSTKYDLREHRKKKSSTGFQFSLCCWGRCNTSRCWESNHHFECIVNSPLSTSKGTNHDDTKRKSSSEETPETKLLNSISHCSSLGIVQERHKVVSRVRNNSTEDTGNVTTSKANTQLGSLAALRLRNRHSMLVDKLNDGLKGSKLHHGIRNLTTPERNNSLVEPKNTLRSDKFGEPITQSTSKSRLCLHTYLHSFKRAE

SEQ ID NO: 57486 - protein, 362 aa, Zea mays
  Clone ID: UC-ZMROB73002D12_FLI.pep
RAVTVRNRQRRLFTNNPSGSWNSYRGKSVWSHVPFEHPATFDTLAMDPDDKEDILDELRAFRDAKAYYTKVGKPWKRGYLLYGPPGTGKSTMIAAMANFLDYDVYDLELTAVKNNTELRKLFIETTGKSIIVIEDIDCSIDLTGKRKDDKKRASAEADDKPKTPTDPDKDEGSKVTLSGLLNFIDGLWSACGGERIIIFTTNHKDKLDPALIRRGRMDRHIEMSYCRFRTFKVLAKNYLDVEEPHELFGQIEKLLEETDMSPADVAENLMPMSKKKKRRDANACLESLVEALKQAKEDAAAAAAAKALADARAAKEEAEEAKEKEAKEKDEATNSKGAADPAGKDTKMSNGDVTANKEGDDE

SEQ ID NO: 57487 - protein, 148 aa, Zea mays
  Clone ID: UC-ZMFLMO17428G07_FLI.pep
SCSTYMQAVLQSLKIRSSDIMGRCSTIGHETLSAQVLQPVHLQLALVCGELSELACLQWLPGVECLERGCPCPDSWLMGGQNEYYSSNRADHQKSRIINNYLTSASRTRITTPVCHDHENLQQSRSMFYTNFLLPSQRTGTHLVSLYE

SEQ ID NO: 57488 - protein, 256 aa, Zea mays
  Clone ID: UC-ZMROB73011H09_FLI.pep
GIQECSAHGEGGATTPCYRRRRQEGARAGAAEAELVVAGHRARRGVGAPAQGHAPRGHGAAPRPQRHGRRPRRAPRLHRPGLRLRAGARRRVRLRLRREEPPPGDAARARPLLRRPRRGGGGAAVLVRRRVGGVLVRGVAARQPHVHTLSRRHAGDGEDAAEAVGAGGCAVHAEPPLSSPGHGRRYLVALGGERKNHSRCTQQQKEGISGGRLKQKKEEEKKNLLGFGHLVGRRRLPPCSSYLGLLANHLSSTMIV

SEQ ID NO: 57489 - protein, 485 aa, Zea mays
  Clone ID: UC-ZMROB73024E12_FLI.pep
RTTAPCMVMEGRTGSLYGRLNKSSTRGFLAYTAAGAACAAVLACFVLSAADSPASAARNDGERLRLSSRSPRVWPDLAFNWRVVVATVVGFLGSAFGTVGGVGGGGIFVPMLNLVVGFDTKSAAALSKCMIMGASASSVWYNLQVSHPTKEAPVIDYKLALLFQPMLMLGITIGVELSVIFPYWLITVLIIILFVGTSSRSFYKGILMWREESRILMETRGREEQSKSTCAASDVVIDPSYGEPLLTQPQPKKSAWETFMFNLRWKNILVLMSVWSLFLVLQVLKNNSKSCSSFYWVINVLQVPVAVSVFLWEAMQLCRESHARRMNGNLECVCEASIEWSPAQLIFCAFCGLLGGTVGGLLGSGGGFILGPLLLELGCIPQVASATATFVMMFSSSLSVVEFYFLHRFPLPFAGYLIFISILAGFWGQCLVRKIVHVLKRASLIVFILSSVIFVSALTMGVVGTQKSISMINNHEYMGFLNFCE

SEQ ID NO: 57490 - protein, 234 aa, Zea mays
  Clone ID: UC-ZMROB73012D02_FLI.pep
DITFYVDRKPVEAHRVILCARSPFFEKKFKTDWKDRKEVRFSNQKLYFGALYSLIHFFYSDRLEVAVDDMENLARACKVCKCEELQKVLDKEVVHQKYAEYKSARELDMDSSQKRFILQAQSLPEEDRLPSALQRILQTCLANSREGYCSEESNEMIRNSEDDDLADLYIKVGDKVFHCHQVILASRSEYFRARLSRTVDFLEGNCGFEAAQNVPLLEEHDISAEAFEKMLEYM

SEQ ID NO: 57491 - protein, 300 aa, Zea mays
  Clone ID: UC-ZMROB73012F06_FLI.pep
SRVVTLWYRPPELLLGATEYSVGVDLWSAGCILAELLYGKPIMPGRTEVEQLHKIFKLCGSPSEEYWKKSKLPHATIFKPQQPYKRCIRETFKDFPTSALPLVETLLAIDPAERQTASAALHSDFFSTEPYACNPSSLPTYPPSKEMDAKLRDEEARRLRAAAKAKGEQKRTRPRDRSRRAGPAPEANAEIQANLDQRRRMITHANAKSKSEKFPPPHQDGGTGNPLGSYHHMEPMFEHQDASFSTVVPIEKGTSQTWSGPLFDPAALGQSRRKKQTTLDAKAAAYSKQLQKEKGGIRAR

SEQ ID NO: 57492 - protein, 379 aa, Zea mays
  Clone ID: UC-ZMROB73006A02_FLI.pep
SQPLFTSARAARSQAGMGYLPALGGKAAHLVNDLATVILNPVSERERQPHHPTHLPEATEGEDTLFVDDDSDQNSDGPDTSSFRAFLMSFVPSSTASKNSMETIPEHNLDVEYPTLTPVGKACSGRKGLFSRGKHSLGRIISKAGLGNLRQKQTHSIDGEIIGQTESVAPRFEVKGSKESTLHDKLPAMSEPSLLLTEMMRAVLYTSLPVLVQGRNWMLVYSTWRHGISLSTLYRRSRLCAGYSLLIVGDRRGAVFGGLVEAPLQPIVKRKYQGTNDCFVFTNVDGCPVICHPTGANNYFTFCSTDYMAMGGGGHFALYLDGDLMTGSSSTSETFNNPCLSHTQEFKIKDVELWGFVNASKFEEMLMICRTEKQGIWNL

SEQ ID NO: 57493 - protein, 336 aa, Zea mays
  Clone ID: UC-ZMROB73037H10_FLI.pep
AVALLVLCYRSSSVVTVRPWATGLSGQLQKAFVTGVPSLKRSELEAACEDFSNVIGSLSDYMVYKGTLSTGVEIAVVSTTKNSAKEWSKHCESQFRKKITSLSRVNHKNFVNLLGYCQEEQPFTRMMVFEYAPNGTLFEHLHVREDGYLDWPTRLRVAVGVAYCLEHMHQLSPPEILRALDTSTICLTDDFAAKISDVFFCDEPRRQEGSLSLSALSDRESVVYSYGMVLLETMTGRFTASDGGLLEAWAAAYLRGERQLRDVMDPALRRSFHAATVDRLDGVIRGCTDREPRRRLTIAEVAKRLREITAMSPDAATPKVSPLWWAELEIICAEVN

SEQ ID NO: 57494 - protein, 396 aa, Zea mays
  Clone ID: UC-ZMROB73020E06_FLI.pep
QQHGPALHVRQPDPGEGGRQDRPLRPRHQCQGPEGLRRQRRRRRRHGSRQHRRQRRGARRRRARSPGLRRGGESRQRHEGLRHVGSESDGHHRVRRDEGRRQAVSRRRGILLPGPQHCDVERPEAGHHRARREHPGGVVGVRRPVGAPRRRPPRRLQHHLRHVHVVPARERARRAAPRGAPGVEPGSHPVGADDDGVQRVPRRRQRHPGRGHGAAGHAAGRGRRPRRPREGRRPGAGVRHRGGGLRGLPLRQQLRGGADRGAHQAARVRGVQRQPHLRGDRAQLPVLLRGVPGRRRHGEAHPHGNQRRAARDVQGGRERRRRRHPGDGDRGAVDAELQQGRREAELHGELHGGRDAVGHQRVRAARLVQRPPRGRQPDRGDVDLMASGGRTVAIAR

SEQ ID NO: 57495 - protein, 164 aa, Zea mays
  Clone ID: UC-ZMROB73030C10_FLI.pep
HTACYPRKYYYIIPIIACSNTTTKPKLQLERKPGPETVQYAAGSKITLLVMDLLLVLVLLLIGSGILVLLVLRHQIVHVALSFGELHLIHALASVPMQESFPPEHSSELLAHTAEHLLDGGGIANEGGGHGEAARRDITNTGLHIVGDPLHEVGRVLVLDIDHL

SEQ ID NO: 57496 - protein, 493 aa, Zea mays
  Clone ID: UC-ZMROB73039B10_FLI.pep
AVLVQIANPARSEGRDVQGVQDEARAISARVNARFGTPGYTPIVLIDGPVTPQEKAAYYAAAECCVLSAVRDGLNRIPYIYTVCRQESTALGDDAPKRSAIVLSEFVGCSPSLSGAIRVNPWSVESVAEAMNAALRMPEAEQRLRHEKHYKYVSTHDVAYWARSFDSDLQRACKDHFSRRHWGIGFGMSFKVVALGPNFRRLSVEHIVPSYRRTENRLILLDYDGTVMPENSIDRTPSSEVISVLNRLCEDPKNRVFIVSGRGKDELSRWFAPCEKLGIAAEHGYFTRWSRDAPWEASALAADLDWKNTAEPVMRLYTEATDGSYIEHKESGMVWHHDEADPDFGSCQAKELLDHLENVLANEPVVVKRGQHIVEVNPQGISKGVVVDSLLSSMVRTGKPPDFVLCIGDDRSDEDMFESIVCPASSSGGVRLPASSEVFACTVGKKPSMAKYYLDDTVDVVKMLDGLASAPSPPRRPGPAAAVQLRVSFEGSL

SEQ ID NO: 57497 - protein, 492 aa, Zea mays
  Clone ID: UC-ZMROB73013B11_FLI.pep
GGSGVTAPFYLDPIAIGAYGAVSRGVFVATSAGNEGPASMSVTNLAPWLATVGAGTIDRNFPAEIVLGDGRRLSGVSLYSGKPLTNSSLPLYYPGRTGGLSASLCMENSIDPSLVKGKIVVCDRGSSPRVAKGMVVKEAGGAAMVLTNGEANGEGLVGDAHVLPACAVGEKEGDAVKAYAANASSPMATISFGGTVVGVKPAPVVASFSARGPNGLVPEILKPDFIAPGVNILAAWTGATGPTGLEGDTRRTEFNILSGTSMACPHASGAAALLRSAHPGWSPAAIRSALMTTAIVTDNRGGPVGDEAEPGRGATPFDYGAGHITLGKALDPGLVYDAGEDDYVAFMCSIGYEPNAIEVVTHKPVACPATASGAKASGSPSGSDLNYPSISVVLRGGNQSRTVTRTVTNVGAQASATYTARVQMASSGGVTVSVKPQQLVFSPGAKKQSFAVTVTAPSAQDAAAPVYGFLVWSDGGGHDVRSPIVVTWLQPM

SEQ ID NO: 57498 - protein, 392 aa, Zea mays
  Clone ID: UC-ZMROB73020F12_FLI.pep
HEQKKSHLFCPPSCRLYSKNQEEDELISDDSFLSFYRFFFPARISCDDECRRSNGAMAEAGLPLRLPGLHPRQEPVRLAEDAEEHEPGDQAVGRDADAAALRGDPADEVHGVGGHEHPARGLQRGPRPRAEALLAVDAAHHPRAEREDDRQRRLGEAAVPHRRAAHEQRLHPAQARRALPGEAGPPERLQPRVVGQHDGVQVQAGVQHAGHRGRLQHRVPDVAVGLVPERQRRRLQQQQQCRPELRQREHGVHPLPPGERKQHQREQERARRDQVLPPDASDARRRRRRAVAPPDEVEDGEREGGEEAVRGEGSDEDADGRGVVARVGAVAVVVVGAGDEVGGLLQLPPHALEYLPRHRVAAAVLSRSPRRSPGTEEHLIIGHGGWQRATVS

SEQ ID NO: 57499 - protein, 337 aa, Zea mays
  Clone ID: UC-ZMROB73030E04_FLI.pep
FCWNCTEEAHRPVNCETVSKWILKNSAESENMNWILANSKPCPKCKRPIEKNQGCMHMTCTPPCKFEFCWLCLGAWSDHGERTGGFYACNRYESAKKEGVYDETDARRERAKNSLERYMHYYERWASNQTSRQKAQADLLKAEKDQIANLTDIFGIPETQLKFIIEAWSQIIECRRVLKWTYAYGYYLDDKIKSEFFEYLQGEAESGLERLHQCAEKDLQIFLPSVKSDSTETTTPTVAEFGEFRVKLAGLTSVTRNYFENLVQALEAGLEDVRATGQAAGTSSTATSSKKGGTKSKKKQHTAPSSDHTDDGWPCERCTFLNPPTVDACSVCEKSRY

SEQ ID NO: 57500 - protein, 288 aa, Zea mays
  Clone ID: UC-ZMROB73004G09_FLI.pep
HTFYNELRVAPEEHPVLLTEAPLNPKANREKMTQIMFETFNVPAMYVAIQAVLSLYASGRTTGIVLDSGDGVSHTVPIYEGYALPHAILRLDLAGRDLTDSLMKILTERGYSFTTTAEREIVRDIKEKLAYVALDYDQELENAKSSSSVEKSYELPDGQVITIGAERFRCPEVLFQPSFIGMEAPGIHETTYNSIMKCDVDIRKDLYGNIVLSGGTTMFPGIADRMSKEITALAPSSMKIKVVAPPERKYSVWIGGSILASLSTFQQMWISKAEYDESGPAIVHRKCF

SEQ ID NO: 57501 - protein, 164 aa, Zea mays
  Clone ID: UC-ZMROB73030H08_FLI.pep
PLTLVPLAVSRSHSLHFSSDGGAASSTMADSKATSAVTLRTRKFMTNRLLARKQFVLEVIHPGRANVSKAELKERLAKMYEVKDPNTIFVFKFRTHFGGGKSTGFGLIYDNLESAKKFEPKYRLIRNGLATKVEKSRKQMKERKNRAKKIRGVKKTKAGDAKKK

SEQ ID NO: 57502 - protein, 284 aa, Zea mays
  Clone ID: UC-ZMROB73014A03_FLI.pep
FKHFDILQCPPDHHYLENIAQGTGGRKWVKKVQQEWSILEKNLPDYIYVRVFEDRMDLLRAVIVGASGTPYQDGLFFFDFYLPPEYPQVPPSAYYHSGGLRVNPNLYVDGKVCLSLLNTWTGRGNEVWDPSSSSILQVLVSLQGLVLNEKPYFNEAGYEKQVGTVEGEKNAVPYNENTYLLSVKSMLYILRRPPLHFEDFVKSHFRKRGHYILKACEAYLQGNVVGTLTDDACTTNRSTEHSSSVGFKLALAKILPRLITALKEHGADCDQYEHLGKTDPVRES

SEQ ID NO: 57503 - protein, 173 aa, Zea mays
  Clone ID: UC-ZMROB73022B12_FLI.pep
LANGPEVTKSLLETSRRGYLAAISASSYSYVSLLQHFLPIMNPGGASISLTYIASERIIPGYGGGMSSAKAALESDTRVLAYEAGRKGKIRVNTISAGPLGSRAAKAIGFIEKMIEYSYVNAPLQKELLADEVGNTAAFLVSPLASAITGSTIYVDNGLNTMGLALDSPTLST

SEQ ID NO: 57504 - protein, 144 aa, Zea mays
  Clone ID: UC-ZMROB73033E10_FLI.pep
DRLRRMRGWRHSPGGLEEEIRMFQTRVLLGGMNMYDRYQDWRLDVDNMTYEELLELGDKIGYVNTGLRDDEITRNLRKVKHPSFSSLRFATEMERKCSICQEEFETNEEMGRLDCGHSYHVYCIKQWLSQKNICPVCKTAVSKN

SEQ ID NO: 57505 - protein, 57 aa, Zea mays
  Clone ID: UC-ZMROB73001F01_FLI.pep
GGLFCVQRSCSTESNRSWIKHAAIRQSKDQSIQRANYNVAFIFTCYTNAVANYLHCS

SEQ ID NO: 57506 - protein, 405 aa, Zea mays
  Clone ID: UC-ZMROB73006H07_FLI.pep
SKSKANNRLPLIVGASVGGAVLVAIVLALVTIVARRKKRPKQNEERSQSFVSWDMKSTSGSSVPQLRGARTFNFDELRKITSNFSEANDIGNGGYGKVYRGTLPSGQLVAVKRCQQGSLQGSLEFRTEIELLSRVHHKNVVSLVGFCLDQAEQILVYEYVPNGTLKESLTGKSGVRLDWRRRLRVLLGAAKGIAYLHELADPPIVHRDIKSSNVLLDERLNAKVSDFGLSKPLGEDGRGQVTTQVKGTMGYLDPEYYMTQQLTDKSDVYSFGVLMLEMATARKPLERGRYIVREMKVALDRTKDLYGLHDLLDPVLGSSPSALAGLEQYVDLALRCVEEAGADRPSMGEVVGEIERVLKMAGGPGPESASNSMSYASRTPRHPYGGDSPFDHSNSGLPSARVEPK

SEQ ID NO: 57507 - protein, 272 aa, Zea mays
  Clone ID: UC-ZMROB73014A07_FLI.pep
TCVCSCSSPKTKPIVCHPLMTKAVNDPAAVSLSQRPGPASGRPAAQERVLGDGVLVAQRRGRRPDAEVELLPQVLPGPVLRPDVPHAHVVQGHVNRRPRSGVHLNSVPRNAVPQVVALPACRRPFPSIHPNDPEGVSVDVPRLHLVLAVLEHDLDVVPVAGAHDRRPQVGGAAVGGGAVGDGAHGEDAADLVVVCDLERGVGAHVRRAVHRVAPLPADGRRRVGQADGPGHRHQAVVVRPLRVGPRPAGRQVPPDRAGLVERPVDLDGGATG

SEQ ID NO: 57508 - protein, 207 aa, Zea mays
  Clone ID: UC-ZMROB73022E01_FLI.pep
KKLISGPILASGSVTDGSRKGSKSAKHVQTQHEPGDPEARAIHIYSRHTQAATIHEKQGEKTPLLGLEHVADQVDDAVAVAPLVVVPRDELDEVVVQSDPGLGVEDARPAVTKEVGRNQILLRITHDTLEWTLGSSLNSFLDILIGGPLLDSDGEVNNRDIHSRNTEGHTSELAIQIRKNFTNSLGSTGAARNDVKAGSPATSPVLG

SEQ ID NO: 57509 - protein, 201 aa, Zea mays
  Clone ID: UC-ZMROB73068B07_FLI.pep
KLVVSGGCADSGVLLSDTYLLDVAMDRPVWREVPASWKPPSRLGHSMSVYGGRKILMFGGLAKSGPLRLRSSDVYTMDLSEEEFCWRCLTGSGMPGAGNPAGAGPPPRLDHVAVSLPGGRILIFGGSVAGLHSASQLYLLDPTEEKPTWRILNIPGRPPRFAWGHSTCVVGGTKAIVLGGQTGEEWMLTEIHELSLVSRSV

SEQ ID NO: 57510 - protein, 437 aa, Zea mays
  Clone ID: UC-ZMROB73060F04_FLI.pep
SNTTTSLQSLVAEVSQWREIHLGGGAAAAHGVRPSTVVAWALSFLAASVSSAGGVGGGSLFLPILNLVAGLSLKRATAYSSFMVTGGAASNVLYNLACTGGGGRGRLIDYDIALLFQPCLLLGVSIGVVCNVMFPEWLITLLFSLFLAFCTAKTCRAGVKIWRSESSGCGSGARSSRGGHSHSKEPLLPRGTSDGDAEGGGGNGAGFPWGDVALLVIIWLCFFALHVLIGDKHGKGVIRIRPCGVAYWLITFFQLPAAVAFTGYIVYAKRKKRAVHSESQEDGSKADLADAGVEALPLPTLPLAAFVTGALSGLFGIGGGLLLNPVLLQIGIPPQTAAATSSFMVLFCASMSMVQFILLGVEGVGQACVYAGVCFAGSVAGVVVIERAVSKSGRVSLIVFLVTAIMALSAVIVTCFGALDVWMQYTTGEYMGFKLPC

SEQ ID NO: 57511 - protein, 222 aa, Zea mays
  Clone ID: UC-ZMROB73079G12_FLI.pep
APLNYARNHLADLLPRCVPRAIYLDSDVLAVDDVRRLWETRLPAAAVVAAPEYCHANFSRYFTEAFWDDPVLGARVFAGRRRAPCYFNTGVMVIDLRRWRVGNYRQRIERWMEMQKEKRIYELGSLPPFLLVFAGEIEAVDHRWNQHGLGGDNVFGSCRPLHNGPVSLMHWSGKGKPWDRLDAGKPCPLDHTWKSYDLYIGENDSSPASGPSRSALSSLVAW

SEQ ID NO: 57512 - protein, 504 aa, Zea mays
  Clone ID: UC-ZMROB73057G11_FLI.pep
DKHDPMMAPPISADALVEAASAVAAYPAIAPNRMLCKDAPAPAISVVSKQTVRPAGASAAVGSGDLRLSVSDMPMLSCHYIQKGLFFPPPPPGVLAASLVSSLVAALSRALGVFPALAGRLVTLHDDSIVIRCGGDDAAVEFYHAVAPSLSLGDFLVPGADVPTRLTNGLFPMDRTVSYGGHGRPLTAFQLTVLGDGAVFVGFVANHAVVDGTSFWHFFNTWAGLCRGAPVREPDFRRNFFGDSTAVLRFPGGASPAVTFDADAPLRERILHFSAAAISELKATANRSKRAGQEAEANGKLAHDDSRLEGRSGEISSFQSLCAHIWRAVTRARRLLAADKTTTFRMAVNCRHRLRPAISPLYFGNAIQSVATTATVAELASNDLGWAAARLNATVASHKDGAIRRAAAEWEAAPRCFPLGNPDGAALTMGSSPRFPMYDGNDFGWGRALAVRSGRANKFDGKMSSFPGQAGDGSIDVEVCLAPDTMAHLLLDKEFLQYVSSPAP

SEQ ID NO: 57513 - protein, 341 aa, Zea mays
  Clone ID: UC-ZMROB73070G05_FLI.pep
TFGVPRYPAASVLTSPAGPQPLEEHEDDGSAGWRRRWSTSCSRRLGLRAALRGQRAVMLAASARRLSAAASFSSSSMRSSQLAAVLNQQRWMHDRNKKAMELVAKGWSALQEVDRVIDYADLNDKRLIPLLRGAKENFELALEIDNGNTHARYWLGKMHFKYHVPGACKAVGAALLVEAANMGDPDAQYELGCRLRIENDYVQSDQQAFHYIEQAVDQLHPGALYLLGAVYLTGDCVKRDMASALWCFHRASEKGHAGAAIAYGSLLLKGAEIPEVITRFNSGKSPSTGKMRKRTQQQDPVKLAKEQFQIAAEAGCDLGLRWLKRLEAYENQEEKLKQVQQ

SEQ ID NO: 57514 - protein, 304 aa, Zea mays
  Clone ID: UC-ZMROB73077D04_FLI.pep
DFSMSNFVGEGGFGPVYKGRVDERVRPGLRQPQAVAVKLLDLEGSQGHKEWLAEVIFLGQLRHPHLVKLIGYCYQDEHRLLVYEFMARGSLEKHLFKRHSASLPWSTRMRIAIGAAKGLAFLHDAAKPVIYRDFKTSNILLDSDYTAKLSDFGLAKAGPGEDETHVSTRVMGTQGYAAPEYIMTGHLTTKSDVYSFGVVLLELLTGRKALDKNRPPREQSLVEWARPCLRDARRLERVMDRRLPRPTTPTRAAQKAAGIAHQCLSVSPKSRPQMSHVVQALESLLALDDAAVEPFVYTAPPESR

SEQ ID NO: 57515 - protein, 366 aa, Zea mays
  Clone ID: UC-ZMROB73079H02_FLI.pep
QWKRVTPQALMDKYGGFLDKSIVKDYTDFAKVCFDNFGDKVKNWFTFNEPETFCTFSHGTGQCAPGRCSPGIITPTGSTSCANPIGNSLTEPYIVGHNLLRAHAEVVDLYNKHYKIDYKGENGRIGIVFDVMGRVPFEKSAFIDQQAEERSWDINLGWFLEPVVRGDYPFSMRSLVRDRLPFFTNEEREKLVGSYDMLGLNYYTSRFSKHIDITQHNTLRLNTDDAYASQETKGPDGEPIGPPMGNWIYLYPQGLKDLLKIMKEKYGNPPMYITENGMAEVDLGHNLNDQKRIDYLQSHLAALQDSVESGANVKGYFLWSLLDNFEWFCGYTQPYGIVYVDRNDGCKRYMKQSAKWYKSFIAANDK

SEQ ID NO: 57516 - protein, 427 aa, Zea mays
  Clone ID: UC-ZMROB73057H05_FLI.pep
VPVAGRQRAALRPGDHHLRRGRRQRGAGVRGRHPGRRAAPGHAEPPRRRRGGGGRRRGDQVLHREHHGRDGAVGPAVDGRVPPGRGSAAAADPGVPQQDRRAVHDQPVPVVRVPVGPAAGHAGLLPVPAQRGARGRRVQDQVHQHVRRAAGRREVGAGARRVRGRGRRGGGDGVADQGRRRGARRHGGERQGVRVQPGGAPAVRRRHAADAWEGGGDVPVRAVRRGPQARAHVGALVRAVPHGPQHGLRRRAGLLRGGGGSGRGRGRRGAAQGRRVVRGAGRRLGRGAAGGPGLRVLAGGRRLQRHPARRRLLRAQHGARARRVRREPAVPGGRAAPVELRLPGVRHAHLRRPKLRGMRVHRGRPIMHGALEEISRSFSAAGYGACSADPLVCFVVPEEISRSFSAALTACLPWDRLGCVMCECDFV

SEQ ID NO: 57517 - protein, 245 aa, Zea mays
  Clone ID: UC-ZMROB73064D01_FLI.pep
ITLVFLISVQELASLSYAAKRGMEPLVDGELRSLTHTSCTDTGEAAFFAAVSGPPKLTSIWMSIILTGRSLDPAGSSGSAPSGAADRIRCSSAATSRMDGRTSFWNARHRKASSLTWRTEPMTQSSPAPRRAGSTISATWPLPMRSSAREARLTSAGGRSKSTTFIAVTSSSSTTPKLYTSLLSERWKFWWYSGSTYPGVPCGAVDTCERAASRRSTARDRPKSASLGRSAASSKMLLDLTSRWK

SEQ ID NO: 57518 - protein, 300 aa, Zea mays
  Clone ID: UC-ZMROB73076B04_FLI.pep
VVAFLESTAGGVSYTGDGWLHECAKWDAEGGRFLASTFFGGGVAEVRAGEGEERVVVADPDAAGRVALGLAVDAPRRRLLLVYCDRPPRFGYAALAAYDLGSWRRLFLTRLDVPGESTFPDDVAADEEGNAYVTDASGNKIWKVSPSGVLLGVIKNSTFVQRPGLRHNLVGLNGIVYHPNGYLLVVHTFGGDLFKVDPKTEAVHAVKVQGSLGRGDGMELLSPTRLVVAGTPSSRLVESSDDWETARVTGQYVGPVHRVGSSATVKDGDVYINHIVGFGLGKKKTHVLARAVFSPLAAES

SEQ ID NO: 57519 - protein, 527 aa, Zea mays
  Clone ID: UC-ZMROB73055D09_FLI.pep
LVHPSGGGSLRVGWPGIGPGREGRRRGAPVGARVFARYSQAQDFSTRLQDRAGELPKLVEDLIQTSISTGPRGAFRMAQGIQAVLGVGGEWLNDLSKTANTSAGIPSQMQLGLLSPLYLRRLFERMGATYIKLGQFVASAPTLFPAEYVEEFQKCFDQAPAVPYDVIESILREELQRPLDSVYEYIDPVPIASASIAQVHGARLKSSQKDVVIKVLKPGIEDTLVADLNFIYVVARVLEFLNPELQRTSLVGIVKDIKESMLEEVDFRKEAANIQAFQGYIDAMGFDRQAKAPFVYQHCSTKRVLTMERLYGVPLTDLDSIRSLVPDPELTLVTALNVWFGSLISCESFHADVHAGNLWLLRDGRIGFIDFGIVGRISPRTWAAMEVFLASFATEDYDAMASALSEMGATGNDINTNEFAKDLRKIFSSIQDLDTEIIVATARTPDATAVSANVVLDERQMNALFLDLVRVSESYGLKFPREFALLMKQLLYFDRYTRLLAPSMNMLRDERINISTNRQPRRTDRFQ

SEQ ID NO: 57520 - protein, 160 aa, Zea mays
  Clone ID: UC-ZMROB73078A08_FLI.pep
LLDGNFTAKISDFGLAKLLRTNQTQTNTGIRGTRGYVAPEWFKNIGITAKVDVYSFGVILLELVCCRRNVELEATDEDQKILTDWANDCYRCGRIDFLVEGDEEAISDLKNVERFVAVALWCLQEDPTMRPTMLKVTQMLDEAAAVPSPPEPTSFVSALA

SEQ ID NO: 57521 - protein, 409 aa, Zea mays
  Clone ID: UC-ZMROB73059F04_FLI.pep
QPSTTASTPIPAPNPPPPSLSSSLRSLSLSSPRGRGRGAVGRHPLASTKIFRAAGCISRWFPLPPFSPAGDGEEYTLRLEPFPCSPIEHRTGAKPLALVVASTPGQGSSGSTAAAVTSIAEQFLPDLLAAAERAKAEGAPKDELVKLSLVARLGTVLFECQPGGSPVSLDELRQAAKAGEDGSRSQLRKTFYTSLSSECLDDMERTMVKRIGLDFDSSKKHYHVKVSDKNRSDSTISCKCTVEEDGSLAIHKVELNQVRHLVEDISCLFKGLDLRLMLSKKRILKNLDSEVENAVKSLVSTAIIDPNVKGGVRWPLGKESIGERFSIVGVWHTGYKAFRNETMRLKLRHADRFDHRTSTGGVSDEVTFKLTAISCKLEEDDLAESAVKEMLESAVQMLWDNALNYRVVP

SEQ ID NO: 57522 - protein, 442 aa, Zea mays
  Clone ID: UC-ZMROB73076E12_FLI.pep
RLRRDELPSHPNSGTNKLPSHPNSASTGSRRTRIRPTTPRRRRSKKMAAVDTFLFTSESVNEGHPDKLCDQVSDAVLDACLAEDPDSKVACETCTKTNMVMVFGEITTKANVDYEKIVRETCRNIGFVSNDVGLDADHCKVLVNIEQQSPDIAQGVHGHFTKRPEEIGAGDQGHMFGYATDETPELMPLSHVLATKLGARLTEVRKNGTCPWLRPDGKTQVTVEYRNEGGAMVPIRVHTVLISTQHDETVTNDEIAADLKEHVIKPVIPEQYLDEKTIFHLNPSGRFVIGGPHGDAGLTGRKIIIDTYGGWGAHGGGAFSGKDPTKVDRSGAYVARQAAKSIVASGLARRAIVQVSYAIGVPEPLSVFVDTYGTGAIPDKEILKIVKENFDFRPGMIIINLDLKKGGNGRYLKTAAYGHFGRDDPDFTWEVVKPLKSEKPSA

SEQ ID NO: 57523 - protein, 129 aa, Zea mays
  Clone ID: UC-ZMROMO17007A04_FLI.pep
VVSINATIVSGTHTRRGSISSGPASWRPSSGGARGTRTRPRPEPPPPPPPPSPCGRARSRGPSSPCASRELRMHRRLWRRARRAAPGACGASPSCRSPPRRRRSPPPRRRPCGGGTGGGASSPQPWPIR

SEQ ID NO: 57524 - protein, 185 aa, Zea mays
  Clone ID: UC-ZMROMO17008C09_FLI.pep
LEAAYTQATGKPISLSEQQLVDCGFAFNNFGCNGGLPSQAFEYIKYNGGLDTEESYPYQGVNGICKFKNENVGVKVLDSVNITLGAEDELKDAVGLVRPVSVAFEVITGFRLYKSGVYTSDHCGTTPMDVNHAVLAVGYGVEDGVPYWLIKNSWGADWGDEGYFKMEMGKNMCGVATCASYPIVA

SEQ ID NO: 57525 - protein, 77 aa, Zea mays
  Clone ID: UC-ZMROMO17009A01_FLI.pep
SRHSRMSLCRLKDRRPGLPFSHQHVLRLIDLGGDVMAATSIRVVSYHDPPVSLLDLVHRSTFSDAEDQCSFPSIHFP

SEQ ID NO: 57526 - protein, 89 aa, Zea mays subsp. mexicana
  Clone ID: UC-ZMROTEOSINTE001A12_FLI.pep
HVLGKTGDDKHCLKILRAIDILVLKYVSIWNLQLHSRLGDNCHLALECNSRAKPDITRNLQAVKLNYAGDGLEPTKEIGNLLELRSKLN

SEQ ID NO: 57527 - protein, 187 aa, Zea mays subsp. mexicana
  Clone ID: UC-ZMROTEOSINTE011E01_FLI.pep
PYRPRRPRRPWWWTRMLTTCRRESTSRTSRRRRLPRTWRRTTTPSSSTRSRTTTRRLRPHHRHRRRRRKACWTRSRRSYPVATRSRKTLLPPPPRRPSTRRRRRRRTPRSTSAALMARRACWARSWTRYPATTRARVKKTARTPPASTRPAPKVAACACPSYVLAGRALLGARSEALRWRVCASGLL

SEQ ID NO: 57528 - protein, 205 aa, Zea mays subsp. mexicana
  Clone ID: UC-ZMROTEOSINTE013F06_FLI.pep
LTSKISTLNLERARRLKSRLVALTRRVQKVRDEIEQLMDDDGDMAEMYLTEKKMRMESSVFGDQSLLGYNSAGAVGASVSAPVSPVSSPTESRKLEKSFSLCRSRHDSTKGSDNTMTEHIQELEMLLEAYFVVIDSTLNKLTSLKEYIDDTEDFINIQLVCQHIFMLSIRDMNIRVYAFLTLLVCVTYLAFHMFLGQCAEPADPV

SEQ ID NO: 57529 - protein, 162 aa, Zea mays
  Clone ID: UC-ZMROMO17030H10_FLI.pep
LGCLPQNIALFGKDPSQLDELHCVAKHNRAAKLFNLQLHALCTKLRAEFDGASITYVDIHTIKYSLIANYSRYGFEHATQACCGYGGPPLNYDGNVPCGHTVSLDGKMVTAKGCSDTTEFVNWDGIHYTEAANFHIASQILTGKYSDPPFVDKMPFVIKPRF

SEQ ID NO: 57530 - protein, 111 aa, Zea mays
  Clone ID: UC-ZMROMO17091A09_FLI.pep
KDLLKIMKEKYGNPPMYITENGMAEVDLGNNLNDQKRIDYLQSHLAALQESVQSGANVKGYFLWSLLDNFEWFCGYTQPYGIVYVDRNDGCKRYMKQSAKWYKRFIAANDK

SEQ ID NO: 57531 - protein, 417 aa, Zea mays subsp. mexicana
  Clone ID: UC-ZMROTEOSINTE001F01_FLI.pep
LSANQNFDHYAQPYNTSRILNPDYTVNLTAYKEYSPILLGPAFSLSYGMGFAGLISTLTHIALFYGPDVWRRSVDSRSEEPDIHLKLMRKYKEAPEWWFLAVFLVSFGFGLAACLGWQTHLPAWAYILCIIIGLFFFIPVGMVQAITNQQTGLNIITEMIFGYMLPGRPVAMMLFKSWGYMMTFNGLQYVSDMKVGHYMKIPPRSMFGAQAFAVIWLSIVQIASYNFLRGNIEGICTPHQAQGLTCPNARTFYNASVIWGVIGPKLVFGAGQLYSWTNYFWLIGFLCPFIQWLLARRYPRSPLRYVVFPALFGAAGMIPPATTWYLAQWCIIGLVFNWWIRRRWLGWWTQYNYVLSGALDIGTALCTVVIGLGLGLGNAEFPDWWGNSVVANNLDYNGAAVLKVAPTSGPGIGPSTW

SEQ ID NO: 57532 - protein, 386 aa, Zea mays subsp. mexicana
  Clone ID: UC-ZMROTEOSINTE006D05_FLI.pep
FEVATEDGTVLAMKLHRLGRTSFRAVKSKRDYLRHRRSFNWLYLSRLAALKEFAFMKALGDHGFPVPTAVDCNRHCVIMSLVQGYPLVQVKELQNPDDVFDTILGLIVRLAEHGLIHCDFNEFNIMIDDDEKITVIDLPQMVSVSHRNAQMFFDRDIECIYKFFNKRFNLTTEKNEEQAGSESDDEGNSRPSFLSVKKTAGSLDKELAASGYTRKEQVEMDKYIEEDAERHDSSSDDDDDDDNDKVGDAVSLVSLKIDQDDSAEPDCNLASRDSDVPGTFSEEHETSCSSEKRLESPSDDNGEAMKPLESDGKTLSQKDDNNDDDSSEDADEEEEDAELMKQLNKQRKKAIAAASGRRRPVSSRNAYKDKGKGTMNSKIQRQACQW

SEQ ID NO: 57533 - protein, 268 aa, Zea mays subsp. mexicana
  Clone ID: UC-ZMROTEOSINTE013F08_FLI.pep
TSRRAMTAGEIHPMTRYVMNYLRLLVVYSETLDALLSDDSSDHDTFRSSDDQDQEHLERMTPFGRRLLKLISYLEANLEEKSKLYDDAALECIFAMNNLLYIVQKVKDSELGKGLGDHWIKRRSGKIRQYSKSYLRVSWTKPLSYFKEDGHGSGSGSGSGSGSGSGHSSSRMSIKERFKNFNMAFEEIYRNQTLWKVPDPQLREELKISISENVIPAYRAFLGRYGNQVDGGRNPGKYIKYTPEDLESQLSDLFEGSPVSANHSRRRA

SEQ ID NO: 57534 - protein, 176 aa, Zea mays
  Clone ID: UC-ZMROMO17096D03_FLI.pep
REEENMQGGGGGVDQPPMQMVLRVRHPSSLGGSGADEDDSEGSSRSALSVFKAKEEQIERRKMEVREKVFAHLGRVEEESKRLAFIRQELEGMADPTRKEVESIRKRIDTVNRQLKPLSKSCVKKEKEYKEVLEAYNEKSKEKALLVNRLIELVSESERMRMKKLEELNKTVDSLY

SEQ ID NO: 57535 - protein, 86 aa, Zea mays subsp. mexicana
  Clone ID: UC-ZMROTEOSINTE004A03_FLI.pep
LASMECGSKKAAGGVLALLLLQLVLAPTTATARLLQADTSTVVGLDIIAREFGHPVRGIPCGETCVFLPCYTAAMGCQCIGQICMT

SEQ ID NO: 57536 - protein, 163 aa, Zea mays subsp. mexicana
  Clone ID: UC-ZMROTEOSINTE011G10_FLI.pep
IHFQKSLHIQTESIQLETCTVRFAYYPCNNILQPSKANIKALFLSSFAHYALDCIYPLTGRHDYSSNPIARDETQLRTMFQKHVACTLLGVDANSIVGDDGAGLGRDLELLRGVLEHRGKGRRLGHAEHFERELGVGGEDDLEGYLPSCAAASRRHGGVRLRL

SEQ ID NO: 57537 - protein, 138 aa, Zea mays
  Clone ID: UC-ZMROMO17010D11_FLI.pep
YTGFQEQIVLVAANTSFQRRLAEKTGQIYSETRRTGPAAPLLPLLVLVHPEDAAQTFPLQEQVEGLVDVLQSKLMRDQRVQLQLIVHAFLGEDGDVGLGLQAAEERPHDAPPEQQLQRRQAHLVAVPPQPQHDRLALP

SEQ ID NO: 57538 - protein, 49 aa, Zea mays
  Clone ID: UC-ZMROMO17037E11_FLI.pep
FQIWVKFAYGQLNINNITDPTPFPFPDLNYSFRNSAKKPCTNPMKFHFN

SEQ ID NO: 57539 - protein, 110 aa, Zea mays
  Clone ID: UC-ZMROMO17098D10_FLI.pep
VAAQTKAIAEKIKDWSNVVVAYEPVWAIGTGKVATPAQAQEVHASLRDWLKTNASPEVAESTRIIYGGSVTAANCKELAAQPDVDGFLVGGASLKPEFIDIINAATVKSA

SEQ ID NO: 57540 - protein, 95 aa, Zea mays subsp. mexicana
  Clone ID: UC-ZMROTEOSINTE008D07_FLI.pep
TLPTLSRCLVELEGLHHLPGEVGVVTAEMAVSGGLDEPVAALLQVEVDADHPGPEVEVLLHDLEDLLVGDRAGAVRVDEHGQGLRHADGVRHLHE

SEQ ID NO: 57541 - protein, 79 aa, Zea mays subsp. mexicana
  Clone ID: UC-ZMROTEOSINTE012E02_FLI.pep
QRCFPTVYVPSLVTSHERWSHNDGQASLEYNPDSENGEQRYIVKTKRASKLAFYLVKSFTRRYPIFSVLVGVWFIGTKH

SEQ ID NO: 57542 - protein, 183 aa, Zea mays
  Clone ID: UC-ZMROMO17011B12_FLI.pep
YLTVLFGSCTGSRVQPHHSRTEAKIRTKSLLEGNETGGVGGTNTGPSVLHGLVGDGEFAEVVSDHFRLNFHTVEGLAIVHTNLASDHLGHNDHITQMSLNHFGFVTSGSLLLGSPQLPEEVSVLLLQPTLGEPPAGTSVHQLGELLSVEVKEVLEVHTTVGELLEHSLFISRLLFTHSPQMRM

SEQ ID NO: 57543 - protein, 183 aa, Zea mays subsp. mexicana
  Clone ID: UC-ZMROTEOSINTE004F03_FLI.pep
GLVGNDLRITNVLVDQNHVAKIGSYNIPILAEAMRSEQGGAGNKLQADSRVKSDKTDIFDFGVILLEVVSGKTITSMYEVEILKELLAWAIADEDRVRRRSFADPAVSKGCSDESLRTVMEICQRCLAKEASQRPSVEDVLWNLQFAAQVQDDWETDAWSSGGGSPVSSSSRATRPSRLHLSR

SEQ ID NO: 57544 - protein, 119 aa, Zea mays subsp. mexicana
  Clone ID: UC-ZMROTEOSINTE014H05_FLI.pep
GTKHRALSAFSFWGMYRHYTTGTGKPYVVGTLIHISYNFTHTPAELYSLVSWSHGLFHFASSGACAASSSALSETAAFVPLSFIPGLSIQARQNEIAKKKLATIKLKPLQSKGASSEMK

SEQ ID NO: 57545 - protein, 108 aa, Zea mays
  Clone ID: UC-ZMROMO17017A08_FLI.pep
RYSEVRIVSDSDEETGWYDGQIWVKTPEVLARDRLLGSFSVKPVLNRVKFTLVGLAGSLILCILLYVNTETPKEPYGNTGGRSIPGVYSDAAARSFEPDAFCGGPDLS

SEQ ID NO: 57546 - protein, 204 aa, Zea mays
  Clone ID: UC-ZMROMO17068A01_FLI.pep
SQSPASSSTSSADDNLRRIVESEIECVVQSEESNTDKHIDLPEDFPFEIIDNPGDQSITLQREIAGETIKAVIYTNFDTDEHLDDEDDKSGTDEESFKPLLQMVVTIKKPEGPILEFDCNFNDDELTIENMRALNRDNPDAKNVYEGPQFSDLDKSLQKALHRYLEVRGFKHSLHDWLYEYMMRKDEKEYVVWLKSMKEFIGGN

SEQ ID NO: 57547 - protein, 151 aa, Zea mays subsp. mexicana
  Clone ID: UC-ZMROTEOSINTE010A01_FLI.pep
TKLCYNRRPEKQSALVQWLIKLAAIAAMVAAYSIPFFVIPRTVHPIMGWSVYLFGALALSVLVFNVFLLPPLDVLTTWLAIVGMLIVMAFPWYHDGVVRALAIFGYAFCSAPILWASMVRMMDSLQTMLERDSFFPRIGEPAQETEFSKLY

SEQ ID NO: 57548 - protein, 84 aa, Zea mays
  Clone ID: UC-ZMROMO17104G01_FLI.pep
MDHVDKPEDAVPQTFLALILILLSFFFGSVQGRPWTGAGGAVAPGLQELRDPSFFPQVYDFPSALSQTEATVCPGFRLYSYSYF

SEQ ID NO: 57549 - protein, 86 aa, Zea mays subsp. mexicana
  Clone ID: UC-ZMROTEOSINTE010B08_FLI.pep
ITITQKKSEYVAAKFKDTRFYSSTLVLVGHVHVKEEHHSAVGSSHLHASVQQPPSITAEVSQMEGFGVLLTKKAGIQWRQGEEVVS

SEQ ID NO: 57550 - protein, 128 aa, Zea mays subsp. mexicana
  Clone ID: UC-ZMROTEOSINTE012G05_FLI.pep
WHLNRTSLRSYTLIIGFFHTTTERGSSHIYVSSHIVQRRAPFHIRNKNISSAVHEWLLHLPRGETGHPDVRPPVVEHVEASLAADGERRVHPRQDAGPAPGSKALHHRPVDQGSERYLPVRNVCVDKT

SEQ ID NO: 57551 - protein, 109 aa, Zea mays
  Clone ID: UC-ZMROMO17113B01_FLI.pep
LGKKTNPQPVRSLGPENIRWTNLSTGRKGNGVAIASTQKSGLHKKAYIMADVLRTSVYHILSAFIDDLQANAKPFSLEKNWISEGRKPVYGSQAVLVQKLILFIEYRAV

SEQ ID NO: 57552 - protein, 140 aa, Zea mays subsp. mexicana
  Clone ID: UC-ZMROTEOSINTE002H11_FLI.pep
FFLYTLAVQLAAHGEPKPKPWQHISPAPSSSLPSPSASPACTRSTRARSAPSRWRATATSSCTEGTRPSAARSAATSRCSSTPSAPGSRTRQGRRRGGGTGRPARCPRWRPDERPPEGGPELRLHRLRDSSQRFGWSFAS

SEQ ID NO: 57553 - protein, 68 aa, Zea mays
  Clone ID: UC-ZMROMO17068H05_FLI.pep
GDHPRGVAGAARGVRDCVQGRRGRGRLSEHPRASMQAVSYLGRGAITGFLLIWDFVVVGRMNSLPSIG

SEQ ID NO: 57554 - protein, 85 aa, Zea mays subsp. mexicana
  Clone ID: UC-ZMROTEOSINTE005A10_FLI.pep
ATCLQTEIIEWHGHIPSQNYRTKIGHSWPVFSCQPLQLGFARSQQGPQIHGGSSQLRLHWRAQGFECRSGISLRGEDQGLQWQPA

SEQ ID NO: 57555 - protein, 213 aa, Zea mays
  Clone ID: UC-ZMROMO17080B03_FLI.pep
ARQYPCFGFAAKMPNIEWWRTCVKNSFVKAGYDYDEETFEKVFRRIYSAFGSSAPYSAFPDSQPFLRWAREKGLTVGIVSNAEYRYKDVILPALGLNQGSEWDFGVFSGVVGVEKPDPRIYKIALEMAGNVAPEEALHIGDSMRKDYTPARSIGMHALLLDRFKTADAESWRQSGATVLPDLVATQEWLTKDQNEEQEETVAARVLKRMSEKL

SEQ ID NO: 57556 - protein, 111 aa, Zea mays
  Clone ID: UC-ZMROMO17119C08_FLI.pep
NLKQTGALLSQLILLLVYSFNMFYINLCCPVTIHSTSRELKQHSMLILLTGPNNHRGKLRLVDGIREPLGFQAHSSMLRVDSARLATDAIHVVGSVQLHAGCVSPQVQGPH

SEQ ID NO: 57557 - protein, 120 aa, Zea mays subsp. mexicana
  Clone ID: UC-ZMROTEOSINTE003D01_FLI.pep
LMTNMTNMAKFSIINVAVFTSRLLNKTSKLLEIKLQLRLYHMVHCHLISAVLDEANVLGIAAEALPAAHQPVLPDQSMRVRTDTADAGSGPVVLGVRVPDVGVPHRLLIPPPPQAFVGKR

SEQ ID NO: 57558 - protein, 119 aa, Zea mays
  Clone ID: UC-ZMROMO17027H01_FLI.pep
LGDCLGHGAAASSDACHVRRRGSQTQRRRKSCPRRGARVVRGAKAVRDGEKNTTQTACEHGDGNGERRLISVCSAPIDCLVSILEFACCLRLQNREAIGNASNLSKPLVWCFIMAIVSF

SEQ ID NO: 57559 - protein, 170 aa, Zea mays subsp. mexicana
  Clone ID: UC-ZMROTEOSINTE003D07_FLI.pep
NDYLAVTAAKHATFLPHSAGRYSKKRFRKAQCAIVERLTNSLMMHGRNNGKKVMAVRIMKHTLEIIHLLTDANPIQVVVDAIINSGPREDATRIGSAGVVRRQAVDISPLRRVNQAIYLLTTGARESAFRNIKTIAECLADELINAAKGSSNSYAIKKKDEIERVAKANR

SEQ ID NO: 57560 - protein, 383 aa, Zea mays subsp. mexicana
  Clone ID: UC-ZMROTEOSINTE021F08_FLI.pep
ARDKIGGAAREAEVRLMATAGLRLLEERAQEAILASCRDVLRASGFRFEDAWAKVIPGSDEGVYAWVAANYALGRLGGDPNKTVGIIELGGASAQLTFVSDEVLPPKLSYNYTFGETTYTLYTNSFLNFGQNAAQDSFHEMLRSRGSFKNGTLADPCAPRGYSRNEGASRSTLENQYVNNGTGNFTECISSSQLLLQKGKEKCQHQQCHLGSTFVPELRGYFLGTENFYFTSKFFGLKKSSSLSDFMFAGEQFCNQHLSSLRKKHPNRSDEDFSRYCFSMAYIVALLHDSLGVPLDDKRIEYSNQVGDIQVEWALGAFITLMQNMSLKPLHTTAESTHSNRPLFAVMGMFLLCGILFVSRWRKPKTKIIYDLEKGRYIITRIS

SEQ ID NO: 57561 - protein, 154 aa, Zea mays subsp. mexicana
  Clone ID: UC-ZMROTEOSINTE032A03_FLI.pep
ELLAKEPLFNGKTEFEQLDKIFRTLGTPSEKIWPGYAKLPGVKVNFVKQPYNRLRDKFPAASFSGRPILSEAGFDLLNRLLTYDPDKRISADDALKHKWFSEVPLPKSKDFMPTFPALNELDRRTKRYLKSPDPLEEQRLKELQGNIGNRGLFG

SEQ ID NO: 57562 - protein, 183 aa, Zea mays subsp. mexicana
  Clone ID: UC-ZMROTEOSINTE042B03_FLI.pep
SAAAHQAGSGEGYTIAGRVKIDGMSVKGFGLATKTSNTKVILNGGQRVTFARPDGYFAFHNVPAGTHLIEVSSIGYFFSPVRVDISARNPGYIQAALTETRRVLNELVLEPLKEEQYYEVREPFSVMSLLKSPMGLMVGFMVLMVFVMPKMMENIDPEEMKQAQEQMRNNPVSLSGLLARAQG

SEQ ID NO: 57563 - protein, 93 aa, Zea mays subsp. mexicana
  Clone ID: UC-ZMROTEOSINTE032C02_FLI.pep
LAIIEHACVLDNHKDQQTWPLHCPSISPDLAVVAPGLVAVEPVVDGGGVGLRPVEEVGAHALGGQVAPRVEDAAPHVAGAARRRRRRRRHRRR

SEQ ID NO: 57564 - protein, 139 aa, Zea mays subsp. mexicana
  Clone ID: UC-ZMROTEOSINTE035G05_FLI.pep
VFALKKDGSGGTVIDSGTSLTTLPEAVFELLQEELVAQFPLPRYDNTSEVGDRLCFRRPKGGKQVPVPKLILHLAGADMDLPRDNYFVEDPDSGVMCLQINGAEDTMVLIGNFQQQNMHVVYDVENNKLLFAPAQCDKL

SEQ ID NO: 57565 - protein, 138 aa, Zea mays subsp. mexicana
  Clone ID: UC-ZMROTEOSINTE019C05_FLI.pep
ASQKIVTVEQKLTRGWGGENAYHVSGYRYLLVDPERRVSRASPPGKVTTLAKDSLLALNMLRQEVDLEKSRYKRGDPCRDKDFEVCIRTKNNAWVIAKISQGRELYMALEKGGETLLYASTAVEKFSNRYCEGAFSTD

SEQ ID NO: 57566 - protein, 421 aa, Zea mays subsp. mexicana
  Clone ID: UC-ZMROTEOSINTE029H01_FLI.pep
IVDPENGYTQTEPDKRKYSGGPCLNEHYRTAFNDENLKFMKLNDHQIVLLLSSIWSQASLDDNLPANFEAMGLVYSIALLCSKSKSSSHVTRIRCFQLAFSLRRNSLSPESDLKPSRRRCLYTMASAMLILSAKIADLHQIIPLVKAAAPEKMVDPHLRLMDDCQLVNTSAESSNSEMVYGSEEDESDALAFLSAINKPDTELIETVMCHFREKFENLPEKVNGIEEQLLQEFSLDDSFPLGAPLFMEMPHSCSMYAEKDEECFDEDTVPSELDDDDIIFEHSGSQSDRKTSGSMASSDVLTVNQLIESVHETARQVANVPVPANPVPYDQMKSQCEALVMEKQQKMSVLLSLKHSRTDSHGSAGVDGLETNESSLLSEPELQSTRKGRMRRCDSASSESDCSFRLPPASPYDKFLKAAGR

SEQ ID NO: 57567 - protein, 333 aa, Zea mays subsp. mexicana
  Clone ID: UC-ZMROTEOSINTE035G09_FLI.pep
EFEEETSPVKLNPAEKFLKAVLDVPFAFKRVDAMLYIANFDSEVNYLKKSFETLEAACDELRSSRLFLKLLEAVLKTGNRMNVGTNRGDAHAFKLDTLLKLVDVKGTDGHTTLLHFVVQEIIRTEGSRQSGSTQTTPRTQANPLREELECKKLGLQAVAGLANELSSVKKAAGMDSDVLSSYVTKLAGGIEKVTEVVLRLKNEGTESRDGAWRFHDRMQRFLKKADGEIIRIQCQESVALSLVKEITEYFHGDSAKEEAHPFRIFMVVRDFLAVLDQVCREVGRVNERTIASSARHFPVPVNPTTPQLFPRLHALRAGFSDDDESSAASVSSP

SEQ ID NO: 57568 - protein, 182 aa, Zea mays subsp. mexicana
  Clone ID: UC-ZMROTEOSINTE029H07_FLI.pep
GTKIADLDDDAAPLAAYAPYNGYRIHVVDLDPSSLTSGGWLEDTSLVDKYKMSDETYDKLDTNFRKFKEKMVPKNSPSEDKEESEKHMEELCSKIKVGDRCEVEPGAKRGTVKFVGRAEALGRGFWVGVQYDEPLGKHDGMVKGIRFFECPQGHGAIVRPEKVKVGDFPERDPFEDEDDDEI

SEQ ID NO: 57569 - protein, 150 aa, Zea mays subsp. mexicana
  Clone ID: UC-ZMROTEOSINTE038F09_FLI.pep
AGNGVAALRDDNLDTYWQSDGAQPHLVNIQFQKKVQLQLVVLYVDFKLDESYTPSKISIRAGDGFHNLKEIRTVELAKPVGWVHISLSGIDPRETFIHTFMLQIAVLSNHLNGRDTHVRQIKIYGPRPNPVPHQPFHFTSREFITYSTIR

SEQ ID NO: 57570 - protein, 465 aa, Zea mays subsp. mexicana
  Clone ID: UC-ZMROTEOSINTE042E03_FLI.pep
EPFGLTLIEAAAYGLPMVATRNGGPVDIHRVLDNGILVDPHNQNEIAEALYKLVSDKHLWSQCRQNGLKNIHKFSWPEHCQNYLARVVTLKPRHPRWQKNDVAAEISEADSPEDSLRDIHDISLNLKLSLDSEKSGSKEGNSNALRRHFEDAAQKLSGVNDIKKDVPGENGKWSSLRRRKHIIVIAVDSVQDADFVQVIKNIFEASRNERSSGAVGFVLSTARAISELHTLLISGGIEASDFDAFICNSGSVLCYPSSSSEDMLNPAELPFMIDLDYHSQIEYRWGGEGLRKTLIRWAAEKNKESGQKIFIEDEECSSTYCISFKVSNTAAAPPVKEIRRTMRIQALRCHVLYSHDGSKLNVIPVLASRSQALRYLYIRWGVELSNITVIVGECGDTDYEGLLGGVHKTIILKGSFNTAPNQVHANRSYSSQDVVSFDKQGIASIEGYGPDNLKSALRQFGILKD

SEQ ID NO: 57571 - protein, 71 aa, Zea mays subsp. mexicana
  Clone ID: UC-ZMROTEOSINTE019H06_FLI.pep
RFATLSPQPKKRRGGYWSAWRQMVYATNLSADPLVSEFGRALLDICLTYRSTVPAKTGGFGDDLSSSQQLP

SEQ ID NO: 57572 - protein, 140 aa, Zea mays subsp. mexicana
  Clone ID: UC-ZMROTEOSINTE036A11_FLI.pep
SGKCTNLTEANGSGIHGYKQLNLTATTAGGPRKSKRCERRRRSGGLRQSTMHARARDKLNDRRRAGRESWMLAALRTPWVGRLRLLVVGGGELLVGVGDEEQLVDDAGESAADEGPDPVHPLVAPLPADEGGAEGHGGVH

SEQ ID NO: 57573 - protein, 206 aa, Zea mays subsp. mexicana
  Clone ID: UC-ZMROTEOSINTE038G01_FLI.pep
PDSQLPLATHLVWIIVVLEHNLESKASLYKDAALSHLFLMNNVHYIVHKVKDSAELRGLIGDEYLRRLTGKFRQAATSYQRTAWLKILNCLRDEGLHVSGGFSSGVSKSALRERFKAFNAVFEEAHRVQSAWYVPDTQLREELRISVLEKLLPAYRSFLGRFRHHIENSRHPELYIKYSVDDLEIAMADFFEGSPPSLHNRRRSHG

SEQ ID NO: 57574 - protein, 215 aa, Zea mays subsp. mexicana
  Clone ID: UC-ZMROTEOSINTE042H02_FLI.pep
EPAWGRKEFLKFIILINSICGILAFCFAIGLYYVTGKESFLVTPLSGFHGCLAGFLVALKQLLPNLELPMCFFWKIKAKWMPFFVVCFSSIMAFIVPDSINFLPTLVSGMYVSWLYLRYFQRNPLTGLKGDPSDDFSFPSLFPAAMRPVTDPVANLFDRLLCARSRPLEVALPISDPTKASRRRERGERVLEERLAADNAGDTEASPRGHGTAED

SEQ ID NO: 57575 - protein, 172 aa, Zea mays subsp. mexicana
  Clone ID: UC-ZMROTEOSINTE030A11_FLI.pep
LDALHQTGRDARLIGQGNPNDFLVSAAVAEFKGPVAFGVVRLAQVNMELARVEATFSGLSPGKHGWSINQFGDLTRGAESTGNVYNPPDHLSDKPLGDLGTLEAGENGEAHFSGPKEKLRVVDLIGRSIALYATEDRSDPGIAAAVIARSAGVGENYKKLCTCDGVTIWESS

SEQ ID NO: 57576 - protein, 370 aa, Zea mays subsp. mexicana
  Clone ID: UC-ZMROTEOSINTE026E11_FLI.pep
GDFQAVRNENDLQCVSVPQKYRTMNTFWKYYSGEAVAPYPTIFIGGNHEASNYLWELYYGGWAAPNIYFLGFAGVVKFGNIRIGGLSGIHNKHHYHLGHYERPPYNKDTIRSVYHVRHYDVLKLMHLKEPLDVFLSHDWPLGITEYGNWQKLISVKKNFEDEVNNRTLGSKPAAELLNKLKPPYWFSAHLHCKFPAVIQHGKNGPTTKFLALDKCIPGRNFLQVIDIPSNPGPYEIQYDEEWLAITRKFNSVFPLARTQFTMRDEQLDTQEDRQWVRSKLNTRGAKPFDFVQTAPSFNPSSTTSKQPITVCCRNPQTESFLQLLELPYLLDSSKSEMFGRNESTSQTGNTLDNEDIELPDEDEDALEDDE

SEQ ID NO: 57577 - protein, 219 aa, Zea mays subsp. mexicana; identical to SEQ ID NO: 38731
  Clone ID: UC-ZMROTEOSINTE030B06_FLI.pep

SEQ ID NO: 57578 - protein, 340 aa, Zea mays subsp. mexicana
  Clone ID: UC-ZMROTEOSINTE036E10_FLI.pep
VDEMNEKASHTPDFRSSVGSDRKKLKISSNRYVSRGSRNEDVHTRHSPQDYSHSKQERSSHNMNYEYRRHKRDSSAADKHRRQDVGDTNDRQFSTMGNDSKSHRHKHEERHRSDHGNGEKEDDSKTRPRKHCSVRRGSLEVGYSDWSPDFTGTDISKGPSGEKSTSRYDDAKGSRRGSSEYYNLERHHSTAQKQSRNEHSTTRRRRHDIEDYHDEKNDGRGESRKHNRHESNDRWVATNSDVDSDVDRYQSSSCKGTRLGRKDDDPGIEVRHQRSGRSTKDDKRRKHHSGNRWHSGTEEGTSDSSGGDLSSDSWSGRSRNSENFSAHRSKRKRSRSKESG

SEQ ID NO: 57579 - protein, 195 aa, Zea mays subsp. mexicana
  Clone ID: UC-ZMROTEOSINTE036F01_FLI.pep
SHPSGTHSTQQTKLKYCSYSQHSTKAAQTTREPETNANYSYWLYGEPSLLLNSLTSQYISSTLASQMFGASDDSQSQLPQYTRRQGSLDTHTPSDGDHHAPLRGQVFLHQRAYRCGNQEPVHPCRRVHIHGHHAQPSSDHMNLPADCHERAGGSRDLVGEPAEHGPLLGVLPPHHQLRAHGLLQHVQRPVHDHRR

SEQ ID NO: 57580 - protein, 284 aa, Zea mays subsp. mexicana
  Clone ID: UC-ZMROTEOSINTE039G12_FLI.pep
QKQWLFLPPSQSHCIFDRNMRSSVYNLHDVSEKQFPEFSKTEWLECIQEQNEIIFVPSGWYHQVHNLEDTISINHNWCNAYNLHWVWNLLYEDYKVAKEYIEDIRDICDDFEGLCQRNLAANTGMNFYDFFVFIVRFALANVVELYHLQQPEVATLSTETAHHLVYNLMSIRNVASKMTTTEAFTTENRLCSVSEDNRSAFSNIKQILEEESFRRLSMTLSKAYDHIDRGQRSLKSSISYRKGCSSVICLKSDCNVVDYITSLVDEICGPEDLTRLIDSALSHG

SEQ ID NO: 57581 - protein, 150 aa, Zea mays subsp. mexicana
  Clone ID: UC-ZMROTEOSINTE037A10_FLI.pep
RRAADAKAWSGELQRRGGYVKMQIFVKTLTGKTITLEVESSDTIDNVKAKIQDKEGIPPDQQRLIFAGKQLEDGRTLADYNIQKESTLHLVLRLRGGIIEPSLQALARKYNQDKMICRKCYARLHPRAVNCRKKKCGHSNQLRAKKKIKN

SEQ ID NO: 57582 - protein, 179 aa, Zea mays subsp. mexicana; identical to SEQ ID NO: 38879
  Clone ID: UC-ZMROTEOSINTE021C08_FLI.pep

SEQ ID NO: 57583 - protein, 302 aa, Zea mays subsp. mexicana
  Clone ID: UC-ZMROTEOSINTE033G05_FLI.pep
GNPFWRLVRNLLKTPGKEQVECQAPKPILLDTGEMKEPYDWAPAILPIQIIRIGQLAILCVPGEFTTMAGRRLRDAVKAVLTSDNSGEFNNIHVVLAGLTNTYSQYITTFEEYEIQRYEGASTLYGPHTLSAYIQEFQKLATAMVANKEVPTNFQPPDMLDKQIGLLPGVVFDSTPPGVEFGDVSSDVPASSTFRKGSSVVNATFYSACPRNDLLTDGTFALVEKLDGSNSWVPAYDDDDWSLRFKWSRPSKLSPRSFATLEWTVPEDAPSGVYRLRHFGASKPLIGSIKHFTGTSRAFAVR

SEQ ID NO: 57584 - protein, 117 aa, Zea mays subsp. mexicana
  Clone ID: UC-ZMROTEOSINTE037G08_FLI.pep
SPRHLATCSNCISSRHSYIANPKPHWQKHNLCSNIHYYKFVRAETNHPHLITPDKHYYILAQHLGIPSLHCSSLRKSVLSTRTTFQPSGSTKEAILVLIPGRGPGCRKILPPSSLVA

SEQ ID NO: 57585 - protein, 169 aa, Zea mays subsp. mexicana
  Clone ID: UC-ZMROTEOSINTE063B04_FLI.pep
AKDGPTGDKSHVSTRVMGTHGYAAPEYLATGHLTTKSDVYSFGVVLLEMLSGRRALDKNRPNGEHNLVEWARPYLRSKRRIFRILDPRLGGQYSLARAQKAAALALQCLSVESRHRPSMDEVVTALEQLQDTKEGGNHHLQKRPGSRSLDNNGGKAAGKGKPAPHVKPV

SEQ ID NO: 57586 - protein, 407 aa, Zea mays subsp. mexicana
  Clone ID: UC-ZMROTEOSINTE072A08_FLI.pep
DCCILSQDFFCTPDYITPEMPQVANEFDDDDKENIPCPKSPEKSANPRSKRYRTDCSPKARDDHQITPVLFDSLTRDDSEEEQPKQPALEKRGGYVSQSAVALRCRVMPPPCVKNPYLNTDPCIDAAVYGGRQCNSAVFSPSIGGNGLSRYRTDFHEIEKIGYGNFSVVFKVLNRIDGCLYAVKRSIKQLHNDMERRQAVKEVQAMAALGSHENIVRYFTSWFENEQLYIQMELCDRCLSMNRNQPVKRGEALELLYQICKGLDFMHERGIAHLDVKPDNIYVRNGIYKLGDFGCATLVNRSLAIEDGDSRYMPPEMLNDKYEHLDKVDIFSLGAAVYELIRGTPLPESGSHFASIREGKIALLPGCPMQFQSLIKSMMDPDPVRRPSAKEILRHPSFDKLHKASSK

SEQ ID NO: 57587 - protein, 387 aa, Zea mays subsp. mexicana
  Clone ID: UC-ZMROTEOSINTE047C11_FLI.pep
GGSLFLYSSTDESTLPQDIYKMLSRPYAFGCVMRLRTSSQFKIVDSYGHFFPDPQYMHVQHINCCDSFATYSYDFEFEKDSQFSRKSSPPIIQIAFKYTVLVHNGDISDLPNSGCRFKYLLERRLRVRTIQYNTTANIWDLYDFVDPDVVLTILVHQVILASLSDALETRLWLQDWLVVVIAQYNKAYKNVTSGGGTEIYNIDVNFSHCSQLQPLSRFVFAILLSPLLQVSSEGIHPDYVTYLQCLLSALEPASLRQAIWPTLISYSSPDVEAEVHQSLSRTVFTSERPIYILDAYKDLLVYYSPTASSEIPFPPRNCLLRSTVDRLKQERNITPKLVFIHGAHDDTTEFEKYLVEDQTLDGSPLSSSTGFSSFLDEVRSKVAEHGI

SEQ ID NO: 57588 - protein, 239 aa, Zea mays subsp. mexicana
  Clone ID: UC-ZMROTEOSINTE069C08_FLI.pep
STMTREELMTFMSLMDYSVSQVNPPGFLVHGFGNYHVGIHGPFGSELVNTSLLNLYFLDSGDREMVNGVKTYGWIRESQLAWLRSTSLELQKKIHAPALAFFHIPIPEVRGLWYSGFKGQYQEGVACSSVHSGVLGTLVSMGDVKSVFLGHDHLNDFCGNLNGIWFCYGGGFGYHAYGRPHWPRRARIIYSELKKGQRSWLEVDSISTWKLLDDVKLSKIDEQVIWRHSTDDSDHRVYL

SEQ ID NO: 57589 - protein, 244 aa, Zea mays subsp. mexicana
  Clone ID: UC-ZMROTEOSINTE063F05_FLI.pep
ETGTCGVVGYIWTSVDTGIMEEWRQSIAPIPKEKLEELQHAVPDDDRSEDESNNPTLPDKDDSSDSLVEDDDHISKFEKEVEETFQRALGGGVNRDNLILEINGLRLAYSLQHADCAGAVFYSVMKSALLAAQSSNDTLLKTTADALGKWKDLLRNYTKTVDEEMEILLKFEEMCQETTKDFSPLFPKILPYLYDTEVVSEDAILRWAEEKEHADESDKVFVKQSEAFIQWLKEAEEEDDEEEE

SEQ ID NO: 57590 - protein, 74 aa, Zea mays subsp. mexicana
  Clone ID: UC-ZMROTEOSINTE069C10_FLI.pep
LAIIEHACVLDNHKDQQTWPLHCPSISPDLAVVAPGLVAVEPVVDGGGVGLRPVEEVGAHALGGQVAPRVEDAA

SEQ ID NO: 57591 - protein, 144 aa, Zea mays subsp. mexicana
  Clone ID: UC-ZMROTEOSINTE072H12_FLI.pep
LLAAADVVVHLVVVPIPYHEATVVGRLLGELQHVVVEVLLEHVRVLVRLGRRHDADEHAAGRVRRGPLLPRLPVGPGALEVAVQADVDAGDEPRGERRLRARVRVRAPHRGRQRHPEPAAVAPVVGVEAPGQLVVVAVDAGAAL

SEQ ID NO: 57592 - protein, 190 aa, Zea mays subsp. mexicana
  Clone ID: UC-ZMROTEOSINTE053B10_FLI.pep
LLRQGPDQGGPQRGLRREAGCQEHRRRRPRPPCHRPGLLRHRRARAPVGVRGHVRHRRDPRQGDPEDREGELRLQARHDHHQPRPQERRQRALPQDGGLRALWEGRPRLHLGGGEAPQGGEAVFCMRRLLCFGRSFWSGLVWSGVPALYHAFLWLLLVILDLPLAYHLYCTVTVLISGTCAGSYCVCLFT

SEQ ID NO: 57593 - protein, 210 aa, Zea mays subsp. mexicana
  Clone ID: UC-ZMROTEOSINTE059H09_FLI.pep
VKHTPYGCGTWPALWLTDPNNWPTNGEIDIMEAVNQAASGNIMALHTTADCTMADIRRNMTGAAGQGDCHNATNFNTGCNVSGAPATYGPEFNAAGGGIVAMEWRDEGIRVWVFSRGGDKGGDPFPAQGVPDPSTWGSPLADFPATSCDVGSHFRNQSIIVNIDLCGYLTNAVWESSGCPSNCTDFVANNPSAFTNAYWEFGAFQVYKAR

SEQ ID NO: 57594 - protein, 241 aa, Zea mays subsp. mexicana
  Clone ID: UC-ZMROTEOSINTE047H06_FLI.pep
PATVFPEPHRADDRSRRDPPRVTARKSPMATAGSSPPASQQPFKLILGSSSVARKHILEEMGLEFQVMTADIDEKSIRRENPDDLVMVLAEAKADAIMSRLNIDDYQKEGSQPTLLITSDIVVVHEGIIREKPTTKEEARQFLKGYSGGHVSTVGSVVVTNLTTGKRLGSLDKAEVYFHDIPDEVIKSLIDEGVVFRVAGGLLLEHPLTLPFVEAVVGSSDSVMGLSKEVANKLIHDALST

SEQ ID NO: 57595 - protein, 178 aa, Zea mays subsp. mexicana
  Clone ID: UC-ZMROTEOSINTE067C05_FLI.pep
GHPWIRGTQEVKINLDMIIYMLMRAYISSSSLRKSALRALAKALMTDQLFYLREQFTLFGPNKSGHISLQNMKTALMKNSSGAMNDSRILDFVNSICNIQYGMIDFEEFSAATISVYQMEGLETWEEHAQQAYELFDKEGNRPIVIEELASELGLGPSISFHVVLKDWIRHSDGHPGS

SEQ ID NO: 57596 - protein, 172 aa, Zea mays subsp. mexicana
  Clone ID: UC-ZMROTEOSINTE069H02_FLI.pep
ISIDACICYGKSRNMEQRQTYVQQHAAAQHTTRIQFGITTQTAHTLVIHAWSHGLVATRSTATPAGRWASESVAVRGAEAAAAEAAAPAAGEPLGPADVGAVGPAEAGAPEPVALRLARPRLRHRHRPDLCGQQQQHDEEDGREELARELHFFLARISAATGDAATEWEYTS

SEQ ID NO: 57597 - protein, 132 aa, Zea mays subsp. mexicana
  Clone ID: UC-ZMROTEOSINTE045G03_FLI.pep
ESTKRIIMYTSSLNDQYHFFLILFEKFISHHHLSLGTFQGKRPLLSKILRRRRRRAWRLPLQLHEPGENPDHGRRVVRAGLGLHVRAAVVVEDVLAVGPADDGADEVVRVLLPRAVPRVEPLQAADEVPVVP

SEQ ID NO: 57598 - protein, 434 aa, Zea mays subsp. mexicana
  Clone ID: UC-ZMROTEOSINTE048F12_FLI.pep
ASGGRRVLRPEGEAMGRLRDGRAFLHRALVLSSLLLLASGEIFFEERFDDGWDSRWVKSDWKKSQGQAGTFRHTAGTYSGDPDDKGIQTTGDAKHFAISAKFPQFSNNDRTLVIQYSLKIEQDIECGGAYIKLMSGYLNQKKFGGDTPYSFMFGPDICGDQKKKLHLILSYQGQNYPIKKELKCETDKLTHFYTFILRPDATYSILIDNREREFGSMYTDWDILPPRKIKDVNAKKPKDWDDREYIEDPDQVKPEGYDSIPKEIPDPMDKKPESWDDDDDGTWKPRMIPNPEYKGPWKRKKIKNPNYKGKWKTPWIVNPEFEDDPDLYVLKPLQYVGIEVWQVKAGSVFDNILICDDPDYARHVVDETFAANKEAEKEAFEGAERKRKAREEEEARRAREEGERRRRERDRDRGRDRYKDRYKRHRHYDYHDEL

SEQ ID NO: 57599 - protein, 127 aa, Zea mays subsp. mexicana
  Clone ID: UC-ZMROTEOSINTE062B11_FLI.pep
LGNGRSDRQRFMSSTRGVSPFSTENVLCTFPVAVASCTMYVPWYPLNLKCPALSICPRACDVHSLRRSTNLSPASLTLPSASMRHASWRHMWPCMQPQKMTPSTAGCAYASRSTTSRSSARRSTSDS

SEQ ID NO: 57600 - protein, 148 aa, Zea mays subsp. mexicana
  Clone ID: UC-ZMROTEOSINTE070F02_FLI.pep
LSRECCIFFSFTGWRTVCMYHDQLNWLSTIYATFTVLESHLIFAYDINKTLLTGWRLGDAADHAQRDARLVGRHKVASPKNPVEVQVLVGPDERLGPFAGAAVQRLPGQAQEGPEPVPLELLNPCFCAVGRADHVELPVVYSNIHTIR

SEQ ID NO: 57601 - protein, 108 aa, Zea mays subsp. mexicana
  Clone ID: UC-ZMROTEOSINTE091C10_FLI.pep
CKLNCRYFLKFQPTTKELMELCLAVCTSLQIETIKTGFQRQNSFPSLPTSYICSLEKELPYLPVTHLSQEVATKDTFLFHESSKLPGATIGTNQVLLGSHVQDSIRRT

SEQ ID NO: 57602 - protein, 125 aa, Zea mays subsp. mexicana
  Clone ID: UC-ZMROTEOSINTE077A12_FLI.pep
CDGVDSPRTLQRWSGVERRSLMIQQYGNAVDDKTSEYHRHSSFKGQNCFGFYSSSSTSGGNVGLFEHTVVLWSCFILSATLQVPEHFLLSHTAMEVGVHTESHIARLSSCFTFIASIHAPIVTSS

SEQ ID NO: 57603 - protein, 202 aa, Zea mays subsp. mexicana
  Clone ID: UC-ZMROTEOSINTE082C05_FLI.pep
NDGQCKHGGSVERSISKVSREVSEEPWPLNDLNSFTAMDVKDDPVQTAPDTSPRARHITDHCSITQVVDPPYLSRPAAKIGAFRPYYLGHTEPTQQEMPGAVVKFDSTHKVSTPESEVFKFVDPICFAAEVPDKCGYGCCGAHEQHRKNSLLGPEFSEFEGHPPVLNISFASLVSEISSIAWMRSGMQSSDSSNLMQSIPPT

SEQ ID NO: 57604 - protein, 75 aa, Zea mays subsp. mexicana
  Clone ID: UC-ZMROTEOSINTE108A02_FLI.pep
RSGPGAASSRSSTVWRCSPRTTTPTCAGGPGTTAPSRLSSRACRIGRSSSPTSLRTSIGTRRPSMRRYRNRSSNK

SEQ ID NO: 57605 - protein, 105 aa, Zea mays subsp. mexicana
  Clone ID: UC-ZMROTEOSINTE082D08_FLI.pep
QIYYEKDNTTICLFTLTPDAKDHMQQNVSLQDRVYLSISKPQFGELEVGLFVVIKESLLIRSIFLDKRAEDRVTQQGFVTWELKKALLITTQKFLEVRVVKDQRV

SEQ ID NO: 57606 - protein, 148 aa, Zea mays subsp. mexicana
  Clone ID: UC-ZMROTEOSINTE087B03_FLI.pep
CTLINEHSTSVRVHAYSNNRKGTIQARYELTRYYYTVVVRTNATTQTPSVHGTPPPCTHVRDGDGMDGPWTATQSKRLILLDHSGGVVVEDVERQLAGLGGLEVHLHAVQLLAEPLAGAGVHHLAPDARRLRGPGHEDDPAARRLELP

SEQ ID NO: 57607 - protein, 261 aa, Zea mays subsp. mexicana
  Clone ID: UC-ZMROTEOSINTE101A03_FLI.pep
AQQTTKSFLLKKKAALGRRFLRLEWLYHLPGEVRVVPSEVAVGRRLEVAPVAAFLEVKVDDDHARPEIEVLLDNLEDLLVGDRAGAVRVDEHGERLGHADGVGHLDDGAASKAAGDDALGSLPRDIGSAAVNLGWVLAGESATTMGSPATVGVNDDLAASEASIAVRSTNDKAAGWVKVEDGLLVKVLLRDDRLDDMLLQVSSDLIIGHCLVVLGGDEDGVDTDGDHGTTLIAVLDCHLGLPIRPEPGAGSVLADLGETST

SEQ ID NO: 57608 - protein, 250 aa, Zea mays subsp. mexicana
  Clone ID: UC-ZMROTEOSINTE109C05_FLI.pep
RGPRWRKWWRPLTCGLATSRMKKSEAEAAAMLMRFGIARCSAKPEHVQFHDLIRLYARKLGGTRTAPAMVQSVYLQGSIKHSSEHLWASCFMVFGFGSDPLLVELRPSELMFYVKQIVMPLAIHTFITYSRCNAALELLRLCTDALERAAESMLAHAGKWRETSFSCFRQAHSEAQYTYLWQELALLKASVLETRAKLMLRGGQYDIGDDLIRKAIFIRTSICGEHHPDTVSARETLSKLTRLLTTVQLS

SEQ ID NO: 57609 - protein, 162 aa, Zea mays subsp. mexicana
  Clone ID: UC-ZMROTEOSINTE077F12_FLI.pep
FTDKDKAAAHLKGGAKKVVISAPSKDAPMFVVGVNEDKYTSDVNIVSNASCTTNCLAPLAKVIHDNFGIVEGLMTTVHAITATQKTVDGPSAKDWRGGRAASFNIIPSSTGAAKAVGKVLPDLNGKLTGMSFRVPTVDVSVVDLTVRIEKGASYEDIKKAIK

SEQ ID NO: 57610 - protein, 185 aa, Zea mays subsp. mexicana
  Clone ID: UC-ZMROTEOSINTE094B11_FLI.pep
FSGVDRCSKGENPPTVDGTDMGDIDSGWVILKNSDVVSADLAAAAVCGGQRLGSSTIPSWARWVLGGVVYTLVPFYNRVRHLEDETVGFVENAVEVVEHIAEVTEKLAANVAKQLPEDGSLQKAVEEVEHIAEVVDDDAEKVETVTEKIDKVSDEIDTAVEPVIAELEKELDQSTTSDDGVDTKN

SEQ ID NO: 57611 - protein, 555 aa, Zea mays subsp. mexicana
  Clone ID: UC-ZMROTEOSINTE098E04_FLI.pep
EDELQFCFESGDPDVQTMEAVDAVFVNSGDNPFKLLKESIKMLSKIKGTFSHIEDKEIPSNLDWFGWCTWDAFYKAVNPSGIEEGLQSRREGGVPPRFLIIDDGWQETVDEIKEVDEALREQTVFAQRLADLKENHKFRGETCKNLEDLVKTIKGKHGVKCVYMWHALLGYWGGTLATSEVMKKYNPKLVYPVQSRGNVANLRDIAMDSLEKFGVGIVDPDKIYEFYNDQHSYLSSVGVDGVKVDVQNVLETLGRGFGGRVAVTRKYQQALEESIAQNFKTNNLICCMSHNSDSIFSALKGAVARASEDFMPREPTLQTLHIASVAFNSLLLGEIFIPDWDMFHSKHESAEFHGAARALSGGGVYVSDKPGVHDFSVLKKLVLPDGSILRARYAGRPTRDCLFTDPVMDGKSLMKIWNLNNFTGVIGVFNCQGAGQWVWPVKQTAYVPTNINITGQLSPSDVESLEEIAGDDWNGETAVYAFGSCSLSRLQKHQSLEVSLSTMTCEIYSISPIKIFSEVVQFAPLGLIDMFNSGGALDNISSVADSSATTVHIRC

SEQ ID NO: 57612 - protein, 228 aa, Zea mays subsp. mexicana
  Clone ID: UC-ZMROTEOSINTE084E11_FLI.pep
TQSHKFTVYIHNRGFPRRISLGKYGTWHATSNASTCLMPRRSEARGGELLPPCFPPAISGMSQPTLRCRSIPYTTTTRLLLEPRDEQRDRHRAVIAHGRVAHLQHVELSEPLQNPHLALLGRHDTRGEGAVHRARVLDARGLSREEQVVHGDTQLLVQVTGFVHAIERVRTKRVLVRAPARHQVVYRLSCIGKDLLQLRKGELGSSLVRRLLDITSKAAGRHVDKDGV

SEQ ID NO: 57613 - protein, 186 aa, Zea mays subsp. mexicana
  Clone ID: UC-ZMROTEOSINTE098G12_FLI.pep
FVVFPDSIPNVYYQCWSRLPATWNTLKSFLDPKTTAKIHILGNKYQSKLLENLMLVKCQNSLVALVLILNTEVALRLKRDNGRTQTYLRHVSLEHVIDPPTICYLLTGNYNLLILMYLLFVTHCTDTNGGVHCARQIVTISNGEEKLVFMQIEVPCVTFESIFIDFISRIFCIKSLVMCCFVKNML

SEQ ID NO: 57614 - protein, 89 aa, Zea mays subsp. mexicana
  Clone ID: UC-ZMROTEOSINTE080C02_FLI.pep
QILEDWFLRHDDCKPPSIRQIANSPSNDVLSLQPKLPMCIQDSVIPGIIVTFRENVRVHRIMALMNVESLQTGCCRRRRNFKMLRKVQK

SEQ ID NO: 57615 - protein, 94 aa, Zea mays subsp. mexicana
  Clone ID: UC-ZMROTEOSINTE084H12_FLI.pep
YKKSMGPPVSGTIQAEAFAQYKDELGTRVPQERFKTVHHDHHFEFYIADESFLSVIYFCTVALHDAAQYTSSLGKGSSNNLPIQCPLQVFHCTV

SEQ ID NO: 57616 - protein, 55 aa, Zea mays subsp. mexicana
  Clone ID: UC-ZMROTEOSINTE085E08_FLI.pep
TLSMTTREGISQAEVDGTPCKLHTKKVVVRTGQRVRVEFCAEIGTSFHLIQPHLT

SEQ ID NO: 57617 - protein, 107 aa, Zea mays subsp. mexicana
  Clone ID: UC-ZMROTEOSINTE099C10_FLI.pep
ESKGQQHLQSGFLRNMGILLCISWNQSPELNQNPQKNTSTQTLDNILKKCRRFRRAARQEVAKQQAVHRVKSQNAPGASLMLIFKLFLIVLRPTPILPLVIMATNSP

SEQ ID NO: 57618 - protein, 55 aa, Zea mays subsp. mexicana
  Clone ID: UC-ZMROTEOSINTE105G10_FLI.pep
FSAIIEVKESLDRCLFKLSEVVNEVTSLPVSSSLYLSRHQLGSLPLHRLHDLSQT

SEQ ID NO: 57619 - protein, 282 aa, Zea mays subsp. mexicana
  Clone ID: UC-ZMROTEOSINTE086C07_FLI.pep
LGISHDKGFDISDPNVAGQNDLLIVGPGVLGRIIAEKWKKEHPSCKVYGQTASKNHHNELTDLGIIPSLKGTTIHQKVPHVIFCAPPSGSDDYSRDVRLAASNWTGEGSFLFTSSTALYDCSDNSMCNEDCLSVPIGRSPRTDILLKVENVVLEAGGCVLRLAGLYKIDRGAHVFWLRKGTLDTRPDHIINQIHYEDAASLAVAIMKKGLRSRIFLGCDNKPLSRQEIMDAVNNSGKFDTKFGGFTGTDGPLGKRMENSKTRAEIGWEPKYPSFTEFLGISS

SEQ ID NO: 57620 - protein, 81 aa, Zea mays subsp. mexicana
  Clone ID: UC-ZMROTEOSINTE118G09_FLI.pep
KRRSTNYFISDKLCYPEQTTFKTIEQHSSLYFSIHIGHACLEASICSSPETKKAVLFTFLVSAILATDLFAAYCWHVVDRQ

SEQ ID NO: 57621 - protein, 295 aa, Zea mays subsp. mexicana
  Clone ID: UC-ZMROTEOSINTE119H08_FLI.pep
RDAFYADMKSVQQKESLTSELKKHLSLECDLLNFFEQFERLLCDRRSAEMEADVNANQSTKKPPSMRMLRQAANAYTPSAFKMFEREFELYMDCMLYICGEMSTIFEYRISVEDKSRDHFVKFDSLNSMMNCTCKTFEFIGIPCRHMLKVLDMRNIKDLPAQYIMKRWRKDAKSGSSNGGCAFLFDGDPDFSHIKRYNFLCRMFSVAAARAATSDESFAYMENQSNILMDQIEQVIQTRPPDIADLIGANCDRTQNPVDNIVAEGIQSHTNFLNGSTDGSLTFPFTLGAGTLDYR

SEQ ID NO: 57622 - protein, 178 aa, Zea mays subsp. mexicana
  Clone ID: UC-ZMROTEOSINTE120A09_FLI.pep
THHSLLAHSHLPAPSSTATKMNKERLMKMAGAVRTGGKGTMRRKKKAVHKTVTTDDKRLQGTLKRVGVNTIPAIEEVNIFKDDLVIQFLNPKVQASIAANTWVVSGSPQTKKLQDVLPGIINQLGPDNMEHLKRIAEEMQKQVAAAGAAAQVKEDNDDDVPELVPGETFEEVAQETKA

SEQ ID NO: 57623 - protein, 464 aa, Glycine max
  Clone ID: JC-GMFL02220069E05_FLI.pep
GSVSGGATMPEIGQAAVAAAADDTALFGKYELGRILGCGAFAKVHYARNVQTGQSVAVKIINKKKLAGTGLAGNVKREITIMSKLHHPHIVRLHEVLATKTKIFFIMDFVRGGELFGKISKGRFAEDLSRKYFHQLISAVGYCHSRGVFHRDLKPENLLLDENGDLRVSDFGLSAVRDQIRPDGLLHTLCGTPAYVAPEILGKKGYDGAKVDVWSCGVVLFVLAAGYLPFNDPNLMVMYRKIYKGEFRCPRWMSPELRRFISKLLDTNPETRITVDGMTRDPWFKKGYKELKFHEEDYHASGSGSFFGPKDERVVNLNAFDLISFSSGLDLSGMFGGEWGERLVTREPPERVLEAAEEAGAAAGMAVRWKKECGVELEGFNGRFGIGVEVYRLTAELAVVEVRKRGGDAAVRGVWEERLKPLLLGGATTSYSNSSEDEQQHQEEEQQHQEEKQEQEPESKVACE

SEQ ID NO: 57624 - protein, 168 aa, Zea mays
  Clone ID: UC-ZMFLB73272F02_FLI.pep
QIQMLQNTNRHLVGDSVGNLSLKELKQLESRLEKGISKIRARKSELLAAEISYMAKRETELQNDHMTLRTKIEEGEQQLQQVTVARSVAAAAAAATNLELNPFLEMDTKCFFTGGPFATLDMKCFLPGSLQQMLEAQQRQMLATELNLGYQLAPPGSDAADNNPHHQF

SEQ ID NO: 57625 - protein, 254 aa, Zea mays
  Clone ID: UC-ZMFLB73284C10_FLI.pep
HVRSALASVIMGMAPVLGKDATMEQLLPIFLSLLKDEFPDVRLNIISKLDQVNQVIGIDFLSQTLLPAIVELAEDRHWRVRLAIIEYIPLLASQLGVGFFDDKLGALCMQWLEDKVFSIRDAAANNLKRLAEEFGPEWAMQHIIPQVLEKINNPHYLYRMTILQAISLLAPVMGAEITCQKLLPVVINSSKDRVPNIKFNVAKVLKSLVPILDQSVVEKTVKPCLVELSEDPDVDVRYYANQALQACDQMMVSS

SEQ ID NO: 57626 - protein, 168 aa, Zea mays
  Clone ID: UC-ZMFLB73284F05_FLI.pep
DLTGLWEVDLNGNVNGAVETCGESFHRFDKYLNFSNPNIAQNFDPNACGWAYGMNMFDLEEWKKKDITGIYHKWQNMNENRLLWKLGTLPPGLLTFYKLTHPLDKSWHVLGLGYNPTVERSEIDNAAVIHYNGNMKPWLEIAMTKYRPYWTKYINYEHPYIHGCKFSQ

SEQ ID NO: 57627 - protein, 66 aa, Zea mays
  Clone ID: UC-ZMFLB73292A09_FLI.pep
RELRTGTLLPSFQRLLKESRPDILNTGSRPQQLRRSAKRINRQQPDCSLISICPCYNIMPDTSSYT

SEQ ID NO: 57628 - protein, 196 aa, Zea mays
  Clone ID: UC-ZMFLB73280D01_FLI.pep
RWNANLFHVSFVPLQPMEIYVDDEAKLTLHGLVQHYIKLSEAEKNRKLNDLLDALDFNQVVIFVKSVSRAAELNKLLCECNFPSICIHSGMTQEERLTRYKNFKEGHKRILVATDLVGRGIDIERVNIVINYDMPDSADTYLHRVGRAGRFGTKGLAITFVSSASDSDVLNQVQERFEVDIKELPEQIDTSTYMPS

SEQ ID NO: 57629 - protein, 609 aa, Zea mays
  Clone ID: UC-ZMFLMO17021H09_FLI.pep
FLSCCSRMLGIEYQSKRGHIGLDYFGRTVGIKIMPVGVHMGQLESGLRLPDREWRLSELQQQFQGKTVLLGVDDMDIFKGINLKLLAFENMLRTHPKWQGRAVLVQIANPARGRGKDLEAIQAEIEESCQRINGDFGQSGYSPVVFIDRDVSSVEKIAYYTIAECVVVTAVRDGMNLTPYEYIVCRQGAPGSESVSEVGGPKKSMLVVSEFIGCSPSLSGAIRVNPWNIEATAEAMNEAISMPEQEKQLRHEKHYRYVSSHDVAYWSKSFILDLERACRDHFKRTCWGIGLGFGFRVVALDAHFRKLNMDSIVNAYEISGSRAILLDYDGTLVPQTSINKEPNSEVLNIINTLCSDSRNIVFLVSGRDKDMLGKWFSSCPKLGIAAEHGYFLRWSSEEEWQTCTQAMDFGWMQMAKPVMNLYTEATDGSYIETKESALVWHHQDADPGFGSSQAKELLDHLESVLANEPVSVKSGQFIVEVKPQGVSKGIVAERILASVKERGKQADFVLCIGDDRSDEDMFENIADIIKRNMVAPRTSLFACTVGQKPSKAKFYLDDTFEVVAMLSALADATGAELESDSADELAASISSLDIGDEQSESSDTPIGGS

SEQ ID NO: 57630 - protein, 49 aa, Zea mays
  Clone ID: UC-ZMFLB73378G12_FLI.pep
QEKGSKATTIIIQGATSHPGNKGSTTPDCTHTTTTNVPSQPTQRKLLTV

SEQ ID NO: 57631 - protein, 366 aa, Zea mays
  Clone ID: UC-ZMFLB73379B11_FLI.pep
TLAMASEVVRPSDAELLKAQADIWRLSLSYLTPLSLRCAVELGIPTAIYRHGGAASAAELVTALSLPSTKLPFLRRLLRLLAASGVFTVDKQSSEEERYRISPVSYLLVDGIPHEDHMNHTALVLTCTSTRYIEAGIGLAEWFKRDVVTSPFEELHGATLFHESMGSLDADFHDMASEALDAHDNFGIEIAMREFRDLFEGIQSMTYCCGNFGDDKGARAIVKAFPHIKCTVLAPPKIIATKPADGAMINYVEGDMFSFIPPAQTVVLKLVLHHLTDEECVKLLAQCRKAIPSRKDGGKVIIGDIMIDHSGPMLETHLLMDIGMMTMTKGRQRDEKEWSELFTKAGFSEYKILKEFGARVAFEVYP

SEQ ID NO: 57632 - protein, 134 aa, Zea mays
  Clone ID: UC-ZMFLMO17012G08_FLI.pep
KRYGGGKADTALAKSLNKEYGPVIKQHIQYVLDHSEELDKMLKVQAQVSEVKNIMLDSIEKTLGRGEKLSELQDKTSELHIQAQQFKKQGVKIRRKTWLQNMKIKLVILGILLLLVIIVWVSVCQGFDCTKHET

SEQ ID NO: 57633 - protein, 268 aa, Zea mays
  Clone ID: UC-ZMFLB73286E07_FLI.pep
AVARVANQELRMADSMVASFWGPVTSTTELCEENYAHSSYIAEFYNTISNVPCVLLALIGLVNAFCQGFEKRFSVLHISNMILAIGSMIFHATLQLLLQQSDETPMVWEILLYMYVLYSPDWHYRSTMPTFLFLYGAAFAVVHFFARFQVVFKLHYVGLCLLCIPRMYKYYIQTKDVGAKRLAKLWVLTLTLGTLCWLVDRVFCKKLSHWYVNPQGHAWWHVLMGLNSYYANTFLMFCRAQQRGWEPRITHLLGFLPYVKVQKPEKRE

SEQ ID NO: 57634 - protein, 212 aa, Zea mays
  Clone ID: UC-ZMFLB73319A04_FLI.pep
KKPFAAIVGGSKVSTKIGVIESLLAKVDILILGGGMIYTFYKAQGYSVGKSLVEEDKLELATSLIEKAKAKGVSLLLPTDIVVADKFAADAESKIVPATAIPDDWMGLDVGPDATKTFDEALDTTKTVIWNGPMGVFEFQKFAAGTEAIAKKLAELTTTKGVTTIIGGGDSVAAVEKAGLADKMSHISTGGGASLELLEGKTLPGVLALDDA

SEQ ID NO: 57635 - protein, 362 aa, Zea mays
  Clone ID: UC-ZMFLB73317A03_FLI.pep
PISAPLPLQHPPVSVVSSPLLTSPAMGKIKIGINGFGRIGRLVARVALQSEDVELVAVNDPFITTDYMTYMFKYDTVHGQWKHSDIALKDSKTLLFGEKPVTVFGIRNPEEIPWGEAGAEYVVESTGVFTDKDKAAAHLKGGAKKVVISAPSKDAPMFVVGVNEDKYTSDVNIVSNASCTTNCLAPLAKVIHDNFGIIEGLMTTVHAITATQKTVDGPSAKDWRGGRAASFNIIPSSTGAAKAVGKVLPELNGKLTGMSFRVPTVDVSVVDLTVRIEKGASYEEIKKAIKAASEGPLKGIMGYVEEDLVSTDFTGDSRSSIFDAKAGIALNDHFIKLVSWYDNEWGYSNRVVDLIRHMFKTQ

SEQ ID NO: 57636 - protein, 90 aa, Zea mays
  Clone ID: UC-ZMFLB73349B01_FLI.pep
ATLSTSSNHRYFDLKEQTTTAAAARSKAARGAAAFLMSSPSEPSEAGGSRGERCSWGCRRTWSASRRSWVSPGTPAGRRRRPSGRSCSAP

SEQ ID NO: 57637 - protein, 560 aa, Zea mays
  Clone ID: UC-ZMFLB73317A04_FLI.pep
WPPPVLWVNLHAGGRYITSLLEECQLVFTIFFGGVCSLAKIQWPYMVLEYLANLHVIHGKIHMHPVQVCVRSYAVMPSAKGLVAETHLHFIGTYRGVVSTAFCTEIVESADAYIFAGSIFKDYSSVGYSFLLKKAKAIIVQPERVGVGNGLSFRCLMMKEYWTEIAKKVKKNTTTYENYKRNFVPEGQALESEPNEPLRVNVLFKYIQKMMTVNSVVMAETDDSWFNCHKLKLPESCGYQFQMQYGLIGWSMGALLGYAQGANHKILSPLTALHPLVAVCYDHDIIMDAAGFGDELVVISLGADCQIIASYHRWPFGQTGTGHFSPIGGYQVRQDMVLILDVARFIPLQFFWEAMNTTNDSTLRGSMLISRKVAESSLLYTVSCRDENWKIMPKFCVEDLPSLLKAGIGACVGLVTSGLSVVSSGQGNFSVFVWDPGDSGLVTSSLSAVSSDQGKFSVFVWDPGDRGLVTYGLRVVSIARVTAIMSGTYARGAATTSSPKMRQTQFRWRAEERHDAFNNDANPQIKLILHRQRLGGKPYFKEWGMLDILGVVDELWVMWA

SEQ ID NO: 57638 - protein, 420 aa, Zea mays
  Clone ID: UC-ZMFLB73349B04_FLI.pep
STIEEASLEHHKELELPYTKSQRSERRSKIKREISIMKIVRHPNIVRLNEVLAGRTKIYIVLELVTGGELFDRIVRHGKLRENEARKYFQQLIDAIDYCHSKGVYHRDLKPQNLLLDSRGNLKLSDFGLSTLSQNGVGLVHTTCGTPNYVAPEVLSSNGYDGSAADIWSCGVILYVLMAGYLPFEENDLPHLYEKITAAQYSCPYWFSPGAKSLIQRILDPNPRTRITIEEIREDPWFKKNYVTIRCGEDENVSLDDVQAIFDNIEDKYVSDEVTHKDGGPLMMNAFEMIALSQGLDLSALFDRQQEFVKRQTRFVSRKPAKTVVATIEVVAESMGLKVHSRNYKVRLEGPASNRASQFAVVLEVFEVAPSLFMVDVRKVAGDTPEYHRFYENLCSKLCSIIWRPTEVSAKSTPLRTTTC

SEQ ID NO: 57639 - protein, 101 aa, Zea mays
  Clone ID: UC-ZMFLB73317C05_FLI.pep
DNHDQLVKIAKVLGTDGLNVYLNKYRIELDPQLEALVGRHSRKPWTKFINADNQHLVSHEAIDFLDKLLRYDHQDRLTAREAMTHPYFQQVRAAENSRTRA

SEQ ID NO: 57640 - protein, 456 aa, Zea mays
  Clone ID: UC-ZMFLB73318C11_FLI.pep
GLRPTSNAFNKVIDGWVKVDMLNEAHGFFDMMPEKDIDDVTVVIFYFGGQHVGWEMKTEWLSNGWLCLVCGASDTQELPLHFIKLAKDTYTSDCMFKKIGYGTVSEALVYMLSLLFVRRDYCNEEPFFRNVLEHYQCGVEMIRRDLFIGHWKHYLQSAIPLQPCFDGLINVGKVAARTLQDTVVGNSCIVSRQPPWPPPTRHHFRTMHAETVANWNHLFSWCFANSDLGELLTLNCPADRAMVLLMYQIELRLLNWAWEDECVFNLCLLGLHSAVHSSLANAYKSWLITMIHRTHSIGQDHFWHNVDRCVVCGIKDRCCARLAKLVLSATLTQDSGKLSQLELHHPLLLNTQSSGLRTSRISSSGECQHIIFSSSQRWYQKNTDNAATTTMTIHGVYEDGGIAGKGTGVPGERARCLMKTSVRLAWAGVGLVNVGRSIGRVDRVVVWLQVTPKPWL

SEQ ID NO: 57641 - protein, 216 aa, Zea mays
  Clone ID: UC-ZMFLB73318E03_FLI.pep
EKELLLNFRLLFCRLVSVNIVLMACHISGFRNTSSQISACLAGNGRYIISASEDSHVYIWRNNDGPKPSRKKGIVSVTDSHEYFHCQSVTVAVTWPFASTAMTCLMNPGKQEELERGSEPQDLQTKLAKAQEMPDVEYRSTNITSNNSNHNNGDRTSPTWPEKLNTPPNQSLRATTCHANEGDQALNRSAWGLVIVTAGRGGQIRTFQNFGFPVRV

SEQ ID NO: 57642 - protein, 363 aa, Zea mays
  Clone ID: UC-ZMFLB73301G02_FLI.pep
MDHARLKASLAMARTHAGGVPKLLLAVVRARGCSGGACLEPVYDIVEHLLHVLLGLADNLVPHPWVDAKRLVLAPGAPAELLDAGRVADGVLGAVHDEERQLHLLESPLQLAADAEELERRGRPGRRRGAARGGERERPLPVHLEGALGDVAPREGDAPGGDDGGGCGEQVLERPRRLEPRADPAHGAVEHGPVPPQVPVPQVEQQRDGAAERLPVEEAGERRRVVGAEGREGGVAVVEHGVDVGEVALEALGEAVALVVERGDGEARGGEVDGGELDCPARLSGEAVHDGDGAQDGGVPTGHPALGEDAEPPRVDEGRGGVGHAVARVELVRRQAAEGAPLVGLRDRVHHLAVAAACWVDES

SEQ ID NO: 57643 - protein, 274 aa, Zea mays
  Clone ID: UC-ZMFLB73318E08_FLI.pep
ADPTGHAQNIHFPFDIEADTSISVATEMVVQLDLTDQDVTAIAEMIDAEIRSHIPDWAAEESIDNQGDEAAHSETHSSEGDEGTSELRDEIGASHNGFVQEQLPSGRKYWSDSPRRDGEISQSVVEHQIGDSSANGIPKRNKVDGIVICARDEEDQSFGSSIHPAEAMFERISSSVDLSNPSAVDSMSRDASVGGSPHSLDGEEEHNSDQHLAAGVTERLIDLLAQQQEELRALQRKHKADIEEMLKIVPAEDREETLTLCHLKAEQKNRAAEP

SEQ ID NO: 57644 - protein, 227 aa, Zea mays
  Clone ID: UC-ZMFLB73301G05_FLI.pep
PPLSRQAVTGQSGTTTAPSGQCVGVALPVVENVGAVVDSGDGELARERGAPVGKLVSVEDGEEVEQVRYAPCVQSRSPITAPLGISVAGGSGMRVRRKLDDSVVSCYDSGQLLDTGSLCEGLQRWLYSNGTGVTVQAVDALNHGLDELLRRLIKPTVDLSRVRASSRRISKVNQKFAGRMNSLQHPNQGQCTTLQDFAVAVQSDPRLLGPNCPTQIEKIQAMTFGGE

SEQ ID NO: 57645 - protein, 171 aa, Zea mays
  Clone ID: UC-ZMFLMO17223E05_FLI.pep
QRHIPLIFLQNITGFMVGSKSEASGIAKAGAKMVMAVSCAKVPKITIIVGGSFGAGNYGMCGRAYSPNFLFLWPTARISVMGGIQAAGVLAQIEKNNKRRQGVEWSKDEEEAFKAKVVEAYDREGSPYYSTARLWDDGVIDPADTRRVLSLCLSASAKPVPEDTRYGVFRM

SEQ ID NO: 57646 - protein, 126 aa, Zea mays
  Clone ID: UC-ZMFLMO17223E11_FLI.pep
EILGNYFRDRCWLRDFVHHSHGLGKEKWITAMMRKHDCMSVLYPVNTGFTKISKMRDSACSLRLAAAAIRLRLRLLQYFSLYGLQLQQSKQLQQCRLVANRTRPLYWHAARSYCCQKIRLVPLCWK

SEQ ID NO: 57647 - protein, 63 aa, Zea mays
  Clone ID: UC-ZMFLMO17229A01_FLI.pep
RQDATFCPRNGLNSQGGVSFESNNYPGHYIRHRNFELWLDKFSGFTESTIFRNDATFIQRDVP

SEQ ID NO: 57648 - protein, 222 aa, Zea mays
  Clone ID: UC-ZMFLMO17239F10_FLI.pep
KTATAVLPTELEQKNGEVDEEYIKRLKSFVEKQCNEMQDLLARNAMLAEELLRTGGGTTTDTSQKPSSGRERVQIEALRQELEGAKRQIGALKSEKSQIEAEANNQRNLSVKLESDLKSLSEAYNSIEQANYRLDAEVKALRQGGSVPYPDVEAIKAQAKEEAEKDSEAELNDLLVCLGQEQTKVEKLSTRLAELGEDVDTLLQGIGDDTAIPDDDDEDDEE

SEQ ID NO: 57649 - protein, 208 aa, Zea mays
  Clone ID: UC-ZMFLMO17235F03_FLI.pep
NVRYPDRITLIRGNHESRQITQVYGFYDECLRKYGSVNVWRYCTDIFDYLSLSALIENKIFSVHGGLSPAITTLDQIRVIDRKQEVPHDGAMCDLLWSDPEDTVDGWGLSPRGAGFLFGGNVVSSFNHSNNIDYICRAHQLVMEGYKWMFNSKIVTVWSAPNYCYRCGNIAAILELDENLNKQFRVFEAAPHESRGVPAKRPAPDYFL

SEQ ID NO: 57650 - protein, 154 aa, Zea mays
  Clone ID: UC-ZMFLMO17251G04_FLI.pep
EFKRFKFLQTETEVDGRVLAEAKAHLNRCLEELRTELDRYLAEEYELGLSKKEKAFQEWKESHQPFHWFVEFYGIIHSGGFDVIIGNPPYVEYSKIKKEYTIKGYQTESCGNLYAYSMERASSILKLSGHIGFIIPVASVCTDGYLPLRNILVT

SEQ ID NO: 57651 - protein, 264 aa, Zea mays
  Clone ID: UC-ZMFLB73009C11_FLI.pep
SEATWRIKDCLPDSNWPTKGDINVIDLKFRYRHNTPLVLKGITISIHGGEKIGVVGRTGSGKSTLIQALFRIVEPSEGRIIIDGVDICTLGLHDLRSRFGIIPQEPVLFEGTIRSNIDPLEQYSDDEIWQALGRCQLKEAVASKPEKLDASVVDNGENWSVGQRQLLCLGRVMLKHSRILFMDEATASVDSQTDAVIQKIIREDFAACTIISIAHRIPTVMDCDRVLVIDAGLAKEFDRPANLIERPSLFGALVQEYANRSSDV

SEQ ID NO: 57652 - protein, 278 aa, Zea mays
  Clone ID: UC-ZMFLB73123E01_FLI.pep
HQQAAPSYSTTATVFWPYATRRRKRAEDGSDLSLASDMDLDADAQRAADKLKAVSEELGHEIRVFSSENFALQPSKLPSADHEEGDDFYELQPADYYNLISNRMGELSKMLKTRKMREAELAAQRAKRTKAVMRVRFPDGYILEADFLPSERIHSLVDLLMKVLARPDLPFYLYTVPPKKRILDTSQDFYTSGFVPGANVHFSYDLPEGLLLNADDLKAGPFLREGILSLDGLSLLLKPASQPDDSRMNSSTHQSGASQSDPVPTTNKKPGRPKWLKR

SEQ ID NO: 57653 - protein, 207 aa, Zea mays
  Clone ID: UC-ZMFLB73021A01_FLI.pep
CICTFWNGWSYIGCSTLIFLSIIVTLQPMEIYVDDEAKLTLHGLVQHYIKLSEAEKNRKLNDLLDALDFNQVVIFVKSVSRAAELNKLLCECNFPSICIHSGMTQEERLTRYKNFKEGHKRILVATDLVGRGIDIERVNIVVNYDMPDSADTYLHRVGRAGRFGTKGLAITFVSSSDSDVLNQVQERFEVDIKELPEQIDTSTYMPS

SEQ ID NO: 57654 - protein, 132 aa, Zea mays
  Clone ID: UC-ZMFLB73011A02_FLI.pep
CTSITWRQHERGHHQASHLTASPHMPSAGSSSSSYSASSSSSAVASWYCWYSDTRSFILLSASVNSISSMPSPVYQCKKAFLLNMAVNCSLTLRNISWMEVELPTKVDAMDRPLGGMSHTLDFTLLGIHSTK

SEQ ID NO: 57655 - protein, 144 aa, Zea mays
  Clone ID: UC-ZMFLB73061A05_FLI.pep
EEVSLAEWALHCQKKGILDQIVDPYLKGKIAPQCFKKFAETAEKCVSDQGIDRPSMGDVLWNLEFALQMQEGAEESGSLGCGMSDEGAPLMVGKKDPNDPSIESSTTTTTTTSISMGDQSVASIDSDGLTPSAVFSQIMNPKGR

SEQ ID NO: 57656 - protein, 85 aa, Zea mays
  Clone ID: UC-ZMFLB73071E05_FLI.pep
HNVSSCSWCNIVIVICSCLWRGIHLMSKFTIWSLCDLTDSDCVGISCFLMLFLGIMSGLTLGLMSLGLVELVILQCSDIGISRDH

SEQ ID NO: 57657 - protein, 178 aa, Zea mays
  Clone ID: UC-ZMFLB73071G04_FLI.pep
RFNVRLWKIFCDCFNCLPMAALIDDKILCMHGGLSPELTSLDQIKDIERPTEIPDYGLLCDLLWSDPSHDTEGWGESDRGVSCTFGADKLVEFLEKNDLDLVCRAHQVVEDGYEFFAERRLVTIFSAPNYCGEFDNAGALLSIDESLMCSFQILKPNETGAPHSRKPLPSKAPKGENV

SEQ ID NO: 57658 - protein, 93 aa, Zea mays
  Clone ID: UC-ZMFLB73075E03_FLI.pep
NSFKQYKARENKMNKRIESINGVMETVACSRIDLQSVLPNLLQPLENTQYKKDLIGIVSLKSPSRKRKGQLEHYPEKNSYQQEDNHDQHRPVR

SEQ ID NO: 57659 - protein, 181 aa, Zea mays
  Clone ID: UC-ZMFLB73095E01_FLI.pep
NPRYQILEWQGCLEGTKTNSTRIGSSVHLATCLLNTQWKAFFSVKSDVYGFGVLILEIITGKRAVSFHCHEDSLNIAGYAWRQWNEDNAAELIDPVIRASCSVRQVLRCIHIALLCVQDHADERPDIPTVILMLSNDSSSLPNPRPPTLMLRGREIESSKSSEKDRSHSIGTVTMTQLHGR

SEQ ID NO: 57660 - protein, 158 aa, Zea mays
  Clone ID: UC-ZMFLMO17227B05_FLI.pep
LCQIPFTADLPGVLLTGPFMPESVRQKLKVSAQNNPDLTILPYFSEPTMLMWAAERVITMGGYNTTCEILSFQKPALIIPRIKPRQEQWLRATRLKQLGLVDVLHPDQVNAQNLTAWLHSAPTNQYNKPVLNLRATQQLPLVLGQLLSTRNCFMSQAC

SEQ ID NO: 57661 - protein, 97 aa, Zea mays
  Clone ID: UC-ZMFLMO17283B10_FLI.pep
ERWRSGGRCDCGGWDLGCPIRVLNGDGCGSLPEGESRDRRSVEISIKGAKNETMLKLVNITEDLYILYFDSSISPLQCFSTGIAIVHSRAPELCPKL

SEQ ID NO: 57662 - protein, 175 aa, Zea mays
  Clone ID: UC-ZMFLMO17295G05_FLI.pep
SSSFSRVRRALSVSGGGDWAASAAALRQDPRLHLPYARRRASPQVGWEAEMSRGRSPEPLDFFIWTVQDVGLWLEEINLGSYRQAFEENGVNGEYLESLSVFTTEQILRFIRRCHMKWGDFITLCKELRRIKVACLKGEQEVRRPWWAPSCLSVVFTRVARHNRQSRVVSLKLEA

SEQ ID NO: 57663 - protein, 121 aa, Zea mays
  Clone ID: UC-ZMFLMO17305H05_FLI.pep
DKHSGKPLQLTLNAQRNENCISSRVLPFVSGTQRTTKTMVKALTTMYERKVPPTLHVSIKFVVIVMAKDVSQLASVAMLPPRLLMLTGRISDIMSHGMAPIPNEKVMTKDTIPTREIIVKM

SEQ ID NO: 57664 - protein, 102 aa, Zea mays
  Clone ID: UC-ZMFLMO17337D05_FLI.pep
REQYGGTVHLFIGTGRSLCKITLMSFMFTIDLRTLMFLFLLLSRSFLARSFRTGSTFVPTMLFILCTASFRVRKFLYIYHTWETLLIMFLRTFGRRRPPTAH

SEQ ID NO: 57665 - protein, 390 aa, Zea mays
  Clone ID: UC-ZMFLMO17341C06_FLI.pep
IMDELASHPAVGPDGAGCACEHLYGTHLDDGGDEVGLEGGGAVGVGEHLRGGGRVGEQRLVGGEQAAPGDQVGVVVGVEGGGRDGVHGQGRVGGAGPLRRALLRQRRQVRGVHGRVLPRAAGPVRVEAGREGAAARRAHRVRPRQRHHLGLAQPLGAERLRQLARARRRRRQVRARLLRRGDVAVPPPRRHLVRVAPDQREGVAGGEGEDVGAGDDAEAGLLQPRLGAVDHLEPAQAGVGRRVLLRLVARRRVQQHRRVAPPDEAVVEVEAQEARGDAGVAGRRLAHLLLHDDLRRRAQRVVEPHLQLLRPRHHRRDRHHRRPHEGRRRSSSHHPPLRPGELASATLRPAASKRPPFLSLLTSIARVSSIDRCRWFFFLLAPVTASCAVC

SEQ ID NO: 57666 - protein, 323 aa, Zea mays
  Clone ID: UC-ZMFLMO17333C08_FLI.pep
WQVTAVAAAMKRYGLQLRTKPPSSSSSRAPPPPARPLAAFADDDDDDVEAEILRQAAKKRSLQKVEEQQKKAMEEDPSVYAYDELYDEMKEKEARPKMQDKVVRESKYIAQLKEKAELRKREQDIIYERKLQKERSKEDHLFGDKDKFVTSAYRKKLEEQQKWLEEERVRQLREEKEDVTKKKDLSDFYFGLVKNVAFGAQTHDNTKSGHPLKADNKPEDTNTSSLDAEASEPSPKRRRESSIESERTKSMDMEEPSASRMRDSTAAASTEKNAADVSSNAKEIPQNIQPAKVTDDHYKRSDGALAAARARALARKKAKDQQL

SEQ ID NO: 57667 - protein, 371 aa, Zea mays
  Clone ID: 700454611_FLI.pep
AIQEDGAESKAGMTDLLMLTDKSQLQALAMLLRNNEELMMSQAIKSETERIEYLKTVSDCYTRTMKLLDDSMAARTTYERSGGTRSLVARDMDDYVVYGLNACLQNVRNCCVRLDAIDKLRAHYDALADAVADPAANVEGLAAEASEYKAAMWQYCYNQRSASARAHSRAYSQALKLEGIDFAELVRRHQLRLGYGSKGEEFEDLDDTQKLEVYNSIIVESGRAGLPVRMFSSGRSAGGPKIAATTWAEAVSVFIMAAGNLAWDVFTTEHEVEAILKGSLNLLAGLGGFAVEAVVGAAVTKAVANVGAGVFACSLAGFVVGAIAGLIFVGVSGLLINLIIGSPRKVPDMSKLMFHTAVMPDGMALAYAVSH

SEQ ID NO: 57668 - protein, 186 aa, Zea mays
  Clone ID: UC-ZMFLMO17313D04_FLI.pep
RRGLMDVVVVAAASRPPAGCRYGDDRSAAARGSLPLRVEVDRGNWEAKIVVGGKAAGVEVVPAAAGRGRARRLPAALLEQHEDEPVDADVRLRALVHHQLPSERSISCSRNVGDDPMDVLSQVWITRPWHIWVSHDQREEGPHVVALNLHARFAQNRRRKELMAVEHLLVGAVGNRHLHRGVEVVD

SEQ ID NO: 57669 - protein, 209 aa, Zea mays
  Clone ID: UC-ZMFLMO17263H01_FLI.pep
VSPDSDHSKDDAGLPLTPKNVDPAGSEGFTTGRSYNIRIDDQVLLRFSPKNSDSTYYFGDMIGGALTFFHGTGKRRCLEVSIALETSETINPRALHPSRRGSPTITKLHSEHHEVVADLHQTSFLFSIPIDGPMSFCTSKVTVQWSLRFEFFTTPEGTDPARYEHPLLVDKREKGEWVLPVTVYTPPLRRRATHERNGRSVSPGNIFNS

SEQ ID NO: 57670 - protein, 156 aa, Zea mays
  Clone ID: UC-ZMFLMO17344D04_FLI.pep
FGSAPPILHPVPALASIWKHLLDVDLEHVLALLLLHLRHDHLEHAVLHLRLDLVHPVNLWRELDATAVSRRRGGLVLAILLLALALDHQAVLLRPHLDVLLPQAWHVHPQVQRLLVLLRVPATAHRTTWRRHRQVVHKVQQAANAVRRTKRITENI

SEQ ID NO: 57671 - protein, 168 aa, Zea mays
  Clone ID: UC-ZMFLB73239A09_FLI.pep
SDVAASALVGAANVFGTMVASSLMDKQGRKSLLITSFSGMGASMLLLALSFTWKALAPYSGTLAVVGTVLYVLSFALGAGPVPALLLPEIFASRIRAKAVALSLGMHWVSNFFIGLYFLSVVSKFGISNVYLGFASVCALAVLYIAGNVVETKGRSLEEIERELSVAE

SEQ ID NO: 57672 - protein, 116 aa, Zea mays
  Clone ID: UC-ZMFLMO17069A01_FLI.pep
TRERTWLATSPGLSSTTSSGWQGTRPSSASSTWTSTRSNATRRRRPTGSGTCFRSIEISRAEPEHGRYHFVQLRLVFGMAQWFKSGSVPGYQNGNKGQLPRSIVMLCVCGYVLSGV

SEQ ID NO: 57673 - protein, 150 aa, Zea mays
  Clone ID: UC-ZMFLMO17083H11_FLI.pep
RYTRGHQTTQIPRYSSSLNEPWLTDHRGGGAPGGECSPSGCCSLLGCGHPPAACRRRSDAAGLGGCPLCPGSSPSRCRWCRSSQPPGLWSCQSRSSQRSAYHLASGAPGGGCSPSGCCSRRGYGHPPAACQQRSGAAGPVECPPCPGSWL

SEQ ID NO: 57674 - protein, 99 aa, Zea mays
  Clone ID: UC-ZMFLMO17085E04_FLI.pep
RGVSARNRPCLWMLPRCLPMISIKNCGALQISPACFYVPDLLRHVATRFANAFHFCFSHEYKHKDALSQLFLSGDWSKSKLASIEAKMKICEILLSIRF

SEQ ID NO: 57675 - protein, 258 aa, Zea mays
  Clone ID: UC-ZMFLMO17082H08_FLI.pep
SPSAGDASTMARYDRAITVFSPDGHLFQVEYALEAVRKGNAAVGVRGTDTVVLGVEKKSTPKLQDSRSVRKIACLDTHIALACAGLKADARVLINRARVECQSHRLTVEDPVTVEYITRYIAGLQQKYTQSGGVRPFGLSTLIVGFDPYTDKPALYQTDPSGTFSAWKANATGRNSNSMREFLEKNYKETSGKETIKLAIRALLEVVESGGKNIEVAVMTKKDGLRELEESEIDEYVAEIEAEKAAAEAAKKGASKNA

SEQ ID NO: 57676 - protein, 173 aa, Zea mays
  Clone ID: UC-ZMFLB73167G07_FLI.pep
SVMEHKEAGCQQPEGPILCINNCGFFGSAATMNMCSKCHKEMITKQEQAQLAASSIDSIVNGGDGGKGPVIAASVNVAVPQVEQKTIVVQPMLVAETSEAAAVIPKAKEGPDRCAACRKRVGLTGFSCRCGNMYCSVHRYSDKHDCQFDYRTAARDAIAKANPVVRAEKLDKI

SEQ ID NO: 57677 - protein, 162 aa, Zea mays
  Clone ID: UC-ZMFLMO17141E07_FLI.pep
FIYKLLFLQADNPTRHPTFEVSSRVIDTQQSIDHSQSQVKVNAHDSCPRPAAYSSSSPMMNLPLPGLMAAMKKKRTLKMTSGSISLMGTPVSMLSCASAPFPVMISPMMEKATPSCAIRPTNSSFDLVNPNSGPPSLRPRAPRKPLPGWMTALSRPVTSSST

SEQ ID NO: 57678 - protein, 272 aa, Zea mays
  Clone ID: UC-ZMFLB73118G09_FLI.pep
VGTALSTMYSKCGNLEDSMVVFRRMPDRDVISWNSIISVFSQHGRGSDALDMFEEMKLEGTAPDHITFINLLSACSHMGLVDRGWFYFRAMTKDYNLIPTLDHYACMVDILSRAGQLKEAKDFIDSITIDHGTCLWRIVLGACRSLRDFDVGAYAGEQLMELGTEDSSAYILLSNIYAAQRKWNDVERVRHLMRLRGVSKDLGCSWVELYNRVHVFVVGEQQHPEAENINVELIRLAKHMKDEECFLFDDEKDELGDSHEGEQMELISTTYY

SEQ ID NO: 57679 - protein, 138 aa, Zea mays subsp. mexicana
  Clone ID: UC-ZMROTEOSINTE119F05_FLI.pep
AYNKINRHKARKQELPVHVPSPEHCLIQFPISTKYHPIYCSPRLLLAPLLALCGEPEPEREQRVVVLVAVVHRQLVHRLEPRPRQRPRESVVPEEHVGDALAFASRQPGRHERVHSAKERLYHHGAAADEHGRAGHGA

SEQ ID NO: 57680 - protein, 272 aa, Zea mays
  Clone ID: UC-ZMFLB73272E12_FLI.pep
VIETVIIPCARGRTTICVSSQVGCAMNCQFCFTGRMGLRKHLSTAEIVEQAVFARRLFSDELGSINNVVFMGMGEPFHNIDNVIKASAIMVDEQGLHFSPRKVTVSTSGLVPQLKRFLQESNCSLAVSLNATTDEVRNWIMPINRKYNLNLLLGTLREELNLRQKQIVLFEYVMLSGVNDSMDDAKRLIELVQGIPCKINLISFNPHGGSQFKPTPDDKIIEFRNVLIQGGLTVFVRLSRGDDQMAACGQLGEPGGYQLPLLRVPEKFQVAL

SEQ ID NO: 57681 - protein, 268 aa, Zea mays
  Clone ID: UC-ZMFLMO17017E05_FLI.pep
AVISSADLKSESFTDPWKLCTVTQVEELKILIRMFPIWATTIIFSAVYAQNSSMFIEQGMVLDKRIGSFNIPPASLSTFDVISVIMWVPLYDRILVPLARKFTGREKGFSELQRMGIGLVLSILAMVSAALVELKRLEIARSEGLIHEKAAVPMSILWQIPQYFLVGAAEVFTCIGQVEFFYDQAPDAMRSLCSALALITVSLGNYISSIILTLVSYITTQGGDPGWIPDNLNEGHLDRFFWLIAGISFVNLIVYMGCAVRYRYKKAS

SEQ ID NO: 57682 - protein, 233 aa, Zea mays
  Clone ID: UC-ZMFLB73367E05_FLI.pep
NEPPLCSESDGSRFPWYKPLDSCLFPAVPSSGEGNSWAVSWPERLNIKHSATSNNSSIQFPQEKIDSDTSYWKDLVSEIYLNEFAVNWSSVRNVMDMNAGFGGFAASIINRPLWVMNVVPVDQPDTLHIIFNRGLIGVYHDWCESFNTYPRTYDLIHMSYLLGPLTKRCHIIEVAAEIDRILRPGRWFVLQDTIDMIRKMDPVLRSLHYKTTIVKHQFLLATKGFWRPGSIGS

SEQ ID NO: 57683 - protein, 544 aa, Zea mays
  Clone ID: UC-ZMFLMO17105F02_FLI.pep
AGLTAPGTPYGGWEGPGIQLRGHFVGHYLSATAKMWASTHNDTLNAKMSSVVDALYDCQKKMGTGYLSAFPSDFFDCLEAIKSVWAPYYTIHKIMQGLLDQYTVAGNSMALDMVIKMANYFSDRVKNVIQNYSIERHWESLNEETGGMNDVLYQLYTITHDMKHLTLAHLFDKPCFLGLLAVQADSISGFHSNTHIPVVIGAQMRYEVTGDPLYKQIASFFMDTINSSHSYATGGTSAGEFWTDPKRLAGTLSTENEESCTTYNMLKVSRNLFRWTKEIAYADYYERALINGVLSIQRGTDPGVMIYMLPQAPGHSKAVSYHGWGTKYDSFWCCYGTGIESFSKLGDSIYFEEKGDPPALNIIQYIPSTYNWKAAGLTVTQQIKTLSSSDQYLQISFSISANTRGQTANINFRIPSWTFADGAGATLNDKDLGSISPGSFLSITKQWNSDDHLALHFPIRLRTEAIKDDRLEYASLQAILFGPFVLAGLSTGDWDAKAGNGSAISDWITAVPPAHNSQLVTFTQVSNGKAFVLSSANGTLTMQE

SEQ ID NO: 57684 - protein, 172 aa, Zea mays
  Clone ID: UC-ZMFLMO17005B08_FLI.pep
RAVRVGEGRAAGVPEAAADARADGAGGAAHHQVGQGQGPGVPARVARLRGLQQRAARVHRRRPHRRGRLQGPAAPRPGPGRRHPRVQAPQGDERLLLAPRARRGASVTHTHPPKHPFRSRVYVLVSLSPRPRIVWPYLTWTTTTTGGRRWGCGRHVLQPPIRLLRRRVADVA

SEQ ID NO: 57685 - protein, 632 aa, Zea mays
  Clone ID: UC-ZMFLMO17021D09_FLI.pep
YWPPPLATRPQDPPLPRQQAGTIPPFREKGSQPVPSQPAMAIRAGRSPLLHLLALAFLILAFLILAASPCLQARVDHHKQISHWTGQPNFDLQNVSSGRKDGPHLLGRSKEITHMKLRRVAVRKKMEVVQQDDEALVKLENAGIERSKAVDSAVLGKYSIWRRENENEKADSRVRLMRDQMIMARIYSVLAKSRDKLDLYQELLARLKESQRSLGEATADAELPKSASDRTKAMGQVLSKARDLLYDCKEITQRLRAMLQSADEQVRSLKKQSTFLSQLAAKTIPNGIHCLSMRLTIDYYLLSPEKRKFPNSENLENPDLYHYALFSDNVLAASVVVNSTIMNAKEPEKHVFHLVTDKLNFGAMNMWFLLNPPGDATIHVENVDDFKWLNSSYCPVLKQLESAAMKEYYFKADRPKTLSAGSSNLKYRNPKYLSMLNHLRFYLPQVYPKLNKILFLDDDIVVQRDLTGLWEVDLNGNVNGAVETCGESFHRFDKYLNFSNPNIAQNFDPNACGWAYGMNMFDLEEWKKKDITGIYHKWQNMNENRLLWKLGTLPPGLLTFYKLTHPLDKSWHVLGLGYNPTIERSEIDNAAVIHYNGNMKPWLEIAMIKYRPYWTKYINYQHSYIHGCKISQ

SEQ ID NO: 57686 - protein, 386 aa, Zea mays
  Clone ID: UC-ZMFLMO17017F03_FLI.pep
QMEQTIVRAKSCTVDCRSVDRKLRQILYMTEDEAHFHMQQSAFLYNLGAQTLPKSHHCLSMRLTLEYFKSSSLDSDDSPGRFSSPEYRHFVILSRNVLAASVAINSTVSSCKEPGYFAFHILTDAQNFYAMKHWFARNSYKNAAIRVINYEAIILEKLPKYTIRQLFLPEEFRVLIRSIKRPTENTRMKYLSLFSHSHFVIPEIFKYLNKVVVLDDDVVVQRDLSFLWNIDMGDKVNGAVELCGLKLGEMKNVLGKTAYDPKSCAWMSGVNLINLDKWREHNVTENYLRLMKKFEVKDELSLRAAAFPLSLLSFQHLIYPLDEKLTLAGLGYDYGIDEEVARRSASLHYNGNMKPWLELGIPEYKKYWKRFLVRGDRFMDECNVNP

SEQ ID NO: 57687 - protein, 48 aa, Zea mays
  Clone ID: UC-ZMFLMO17312B01_FLI.pep
SEEVPQGFSFLVQAYAVQEKELENCRQEDHWLHVKVHSANPLSMSDLA

SEQ ID NO: 57688 - protein, 314 aa, Zea mays
  Clone ID: 700072185_FLI.pep
LRAVFINSSLDLARANGFDGLDLSWIFPATQADMQNLGALLAEWRARITEESVAKSLPPQPLLLTATLYFSNHLFGTPDGNLDYPVDAIASSLDWANVLTFGFRGDSGVTAADAPLYDTSSHFSASYGVVSWLDAGLPPCRLVMGIPLFGRSWFLRNKAKNGLGAPAAAAGTKQRRSNQTGIIAYAETEEYLSSQGTVVTYDDQSVAEYFSNGDLWVSFDGARVVQRKLEFAARSQLLGYFLWTVGFDDSNSTISRKASESWHQYAQGGFGIMHAGGSNQYVAFNSSSVSLGSCYSRSLSCLLSSVLLLVILFR

SEQ ID NO: 57689 - protein, 342 aa, Zea mays
  Clone ID: 700156909_FLI.pep
ITKVSCVYLYLHLIRIIYVVYTCAMHLVNTASIAASRPALDGAAVSGPVVGEPIPDHDATIVGRLLHLGQQIVVEVFEVDLNGGRRVVRHAALGRGEPHVKLALGVPRRPLAPLVHDAGHVAVLVRALVGVAVEADVDALEQPRPQRPRHGVVGRERAPRRRRQPYVLRRGVVVHAVEVVETARELVVVVARCAVVVDVEVDAVDRRVTEGAGHVAVAAAEERVPQVVRDGLRGRGGRDGVVVSPAADGEEDRDALGLAVLDVGADAVQRVAGEVKGVAAVAEDAVEGDDDGVVEPGVAGLTQCALLLVPAPEDGELACSLGHGRVGEAGQEEHGGQHEDTP

SEQ ID NO: 57690 - protein, 257 aa, Zea mays
  Clone ID: JC-ZMSHLIB3587P031A05_FLI.pep
RCNVGCISLYVNGHNEVEERHNHDWMLRRTNFSGGYVCVKFEIRIRKSKDYLLSSNGQISHGSKPNNSEMGLSFNMCKKIVQMMNGNIWSVSDSKSVGETIMLVLQFQLQPLTAVSSAASSDLSRSSAIPNFNGLRVLLADSDDTNRAVTHRLLEKLGCRVLSVASGVQCTSSFAAEPSFQLVVLDLALQRTDGLEVARAIRKFSSNSWLPLIVALAARIDDKVRDGCQRSGISGLIQKPATLAALGDELYRVLQNS

SEQ ID NO: 57691 - protein, 523 aa, Zea mays
  Clone ID: UC-ZMFLB73266G07_FLI.pep
LACCLGSWGATCRIMGRGRGHLLLPAAAACLWALSCALLLHASPHGAGAGAGGLLRVGLSRRGGGLDQRALAAAKAARQQEASRLGASGGGDVPLVDYLNTQYYGVVGIGTPPQNFTVIFDTGSSNLWVPSSRCYFSIACYLHHRYKSAKSSTYKADGETCKITYGSGSIAGFFSDDDVLVGDLTVKNQKFIETTRESSITFIIGKFDGILGLGYPEISVGKAPPIWQSMQEQELLAEDVFSFWLNRSPDAAAAGGELVFGGVDPAHFSGNHTYVPVSRKGYWQFDMGDLLIDGHSTGFCAKGCAAIVDSGTSLLAGPTAIIAQVNEAIGADGIISTECKEVVSQYGEMILDMLIAQTDPQRVCSQVGLCVFDGARSVSEGIESVVGKENLGSDVMCSACQMAVVWIENQLRENKTKELILQYANQLCERLPSPNGESTVSCQEISKMPSLAFTIANKTFTLTPQQYIVKLEQGGQTVCISGFMAYDVPPPRGPLWILGDVFMGAYHTVFDFGNDRIGFAESA

SEQ ID NO: 57692 - protein, 425 aa, Zea mays
  Clone ID: UC-ZMFLB73318A12_FLI.pep
AAQLEENDGGSQVNVAGDDETPMRIVKNYKRPEERIPAERDPTKFVVSPITGELIPISEMEEHMRISLIDPKYKEQKERMLAKIKETTLAPDDEISRNIVGLARTRPDIFGTTEEEVSNAVKAEIEKKKDEQPKQVIWDGHSGSIGRTATHALSQIQGGEEQFDASNVDGRPVPGPAPLVRPGMPLPRPPQPLPLVNVPRFIAPPAPYSVPPPGSHMPGVPQMMPHMHLHPQQIPGQPPMVRMPGQMVHMPTSIPPPPGQTQFMPGPPPHTFAMPPSSHMPHMINPIGIPQPPAPPLPPQPPAEEQPPPPDEPEPKRQRTDDGSLIPAEQFLAQHQGPASISVSVPNLDEGNLRGQVLQIPVQSLSDTVGSLKEQIAGELQLPANKQKLSVRTSFLKDNLTLAYYNVGPGVVINLTLRERGGRKK

SEQ ID NO: 57693 - protein, 191 aa, Zea mays
  Clone ID: UC-ZMFLB73191A04_FLI.pep
VPEIFVGGLLGSMLIFLFSAWACSAVGKTAQEVVNEVRRQFIERPGIMDYKEKPDYGRCVAIVASASLREMIKPGALAIISPMAVGVVFRILGHSTGQPLLGAKVVASMLMFATVAGILMALFLNTAGGAWDNAKKYIETGALGGKGSESHKAAVTGDTVGDPFKDTAGPSLHVLIKMLATITLVMAPIFL

SEQ ID NO: 57694 - protein, 157 aa, Zea mays
  Clone ID: UC-ZMFLMO17026H05_FLI.pep
GLVAEMSTPARKRLMRDFKRLQQDPPAGISGAPYDNNIMLWNAVIFGPDDTPWDGGTFKLTLQFTEDYPNKPPTVRFVSRMFHPNIYADGSICLDILQNQWSPIYDVAAILTSIQSLLCDPNPNSPANSEAARMFSENKREYNRKVREVVEQSWTAD

SEQ ID NO: 57695 - protein, 411 aa, Zea mays
  Clone ID: UC-ZMFLMO17313A07_FLI.pep
EIHMGDLGGASSVKAEDGEVWTFSVRSFELPLPERTINVNYDGFAEDVRVGDELLVDGGMARFEVIEKIGPDVKCRCTDPGLLLPRANLTFWRDGSIVRERNAMLPTISSKDWLDIDFGIAEGVDFIAVSFVKSAEVIRHLKSYIAARSRGSDMAVIAKIESIDSLKNLEEIIRASDGAMVARGDMGAQVPLEQVPSIQQKIVQLCRQLNKPVIVASQLLESMIEYPTPTRAEVADVSEAVRQRADALMLSGESAMGRYPDKALSVLRSVSLRIEKWWREEKRHEALELRSVSSSFSDKISEEICNSAAKMANGLGVDAVFVFTKTGHMASLLSRCRPDCPVFAFTTSTSVRRRLNLQWGLIPFRLAFSDDMESNLNRTFSLLKARGMIQSGDLVIALSDMLQSIQVMNVP

SEQ ID NO: 57696 - protein, 572 aa, Zea mays
  Clone ID: UC-ZMFLB73197E03_FLI.pep
ARRFSDASVQSDIKLWPFKVIPGPGEKPMIVVQHKGEEKQFAAEEISSMVLIKMREIAEAYLGSTIKNAVVTVPAYFNDSQRQATKDAGVIAGLNVLRIINEPTAAAIAYGLDKKATSVGEKNVLIFDLGGGTFDVSLLTIEEGIFEVKATAGDTHLGGEDFDNRMVNHFVQEFKRKNKKDITGNPRALRRLRTSCERAKRTLSSTAQTTIEIDSLYEGIDFYSTITRARFEELNMDLFRKCMEPVEKCLRDAKMDKSSVHDVVLVGGSTRIPRVQQLLQDFFNGKELCKNINPDEAVAYGAAVQAAILSGEGNEKVQDLLLLDVTPLSLGLETAGGVMTVLIPRNTTIPTKKEQVFSTYSDNQPGVLIQVYEGERTRTRDNNLLGKFELSGIPPAPRGVPQITVCFDIDANGILNVSAEDKTTGQKNKITITNDKGRLSKEEIEKMVQDAEKYKSEDEEHKKKVESKNSLENYAYNMRNTIKDEKIASKLAADDKKKIEDAIDAAISWLDANQLAEADEFDDKMKELESLCNPIIAKMYQGAGADMGGSGGMDEDAPAGSGGPGPKIEEVD

SEQ ID NO: 57697 - protein, 334 aa, Zea mays
  Clone ID: UC-ZMFLB73224D03_FLI.pep
MILGSTLIQNELVQLYLSEVLDWYKILKEEGNWTEKTYSPTRKKLISTLESNSGYNTDALLKRLPQDALFEERAILYGKINQHLRALSLYVHKLQMPERAVAYCDRVYEEREQQPSKSNIYFNLLQIHLNPRKAEKEFEQKIIPVASQYSGIQKASATKPKGGRVGKKVVEIEGADDIRFSPSGTDSGRSDGDGDDVNDRGPIMLNEALELLSQRWDRINGAQALRLLPRDTKLQDLVSFLEPLLRNSSEHRRNYLVIKNLILRANLQVKEDLYNRCQAVVKIDGDSTCSLCHKRVANSAFAIYPNGQALVHFVCFKESQQIKAVRGANSVKRR

SEQ ID NO: 57698 - protein, 178 aa, Zea mays
  Clone ID: UC-ZMFLB73224A10_FLI.pep
KLFEHNYRLYLGSRVVAPCFCCRSPCSMQKSGVRSGPTGAETTDTGTRNKMREETPGPKTSTPVRSPPPAHNNHLFINTWPAMRAHPSWQRPPLGCHIFFSLFCCRRTQTFTCCSLPRLFQAAYLIDLLIIIEIDPIIISAETSSIEVKQDCRPRDPAASSHRRLRSAPNRTTTTTTT

SEQ ID NO: 57699 - protein, 276 aa, Zea mays
  Clone ID: UC-ZMFLB73295A07_FLI.pep
LDNDTAFFGVFDGHGGKVVAKFCAKYLHREVLRSEAYAAGDLGAAVHRAYFRMDEMMRGQRGWRELQALGDKINQFSGIIEGLIWSPKASDSNDRHDDWAFEEGPHSDFTGPNCGSTACVALIRNKQLVVANAGDSRCVISRNGQAYNLSRDHKPELEAERERIRSAGGFVLMGRVNGNLNLSRAIGDMKFKQNKFLPPDKQILTANPDINIVELCDDDEFIVLACDGIWDCMSSQQLVDFIREHIDTEEASRQYARECSIDAWLRRPWAARDAIT

SEQ ID NO: 57700 - protein, 174 aa, Zea mays
  Clone ID: UC-ZMFLMO17023G12_FLI.pep
NITSTQLPQEWNTISNEEEQVNTTRMDEEGIIQQQPQEEDSRLEQDEDPMIERTEQRSTATRRSTASTINQDKEAKRMKKDSLEGLVGRYLDLKSKQVEDEITQMAKGKESAQGNDFSIMRCISVLRSMNVTADEKIKAAEVFDIPNNRETFISFSVDEPETALLWLRRKIDKL

SEQ ID NO: 57701 - protein, 240 aa, Zea mays
  Clone ID: UC-ZMFLMO17020H08_FLI.pep
VSPSRRQADRRRPDDPGGPDRGGGGARVRAVRGGVGGREHLGRAREPGRDLRRLRGRQHHPVPGAPVLGGAAAGVHRGVLPAPLLDGRAGHGHLRADGRVGVGGAGAGDRDDLRAGVHGVRHGGGPEEGQPGHHRPHRHRLHRGGQHPGGRRLRRRVHEPRRVLRPRPRQLGVGLPVGVLGRPPHRRRPRRRHLRAALHLPHPRAAPLHRLLKAEADRPRGAQRSAASIQLSLPGPLAAV

SEQ ID NO: 57702 - protein, 110 aa, Zea mays
  Clone ID: 700047339_FLI.pep
CPPIRPEHRSCAGDRNALGWSVPAAYHIRIHLICGSQSSCIKLEIDVWIVETRRFFFVFNTAILEKLQLFSLSPNYGKPILPRFSPIAWAAPYVLLLMALHDFFRVSRAK

SEQ ID NO: 57703 - protein, 108 aa, Zea mays
  Clone ID: UC-ZMFLB73279H10_FLI.pep
LHPSCGLHPYRHFVHCMHIMLWERSCYGPCHDMFQLCSSSTFGTKFCHPPNISGCSPINTSISQEVKELSSKNITLFHSAIRMGEFRGSMKQSPYPSRLQNSSITTAC

SEQ ID NO: 57704 - protein, 232 aa, Zea mays
  Clone ID: UC-ZMFLMO17033B08_FLI.pep
DKPVTVFGIRNPEEIPWGEAGAEYVVESTGVFTDKDKAAAHLKGGAKKVVISAPSKDAPMFVVGVNEDKYTSDVNIVSNASCTTNCLAPLAKVIHDNFGIVEGLMTTVHAITATQKTVDGPSAKDWRGGRAASFNIIPSSTGAAKAVGKVLPDLNGKLTGMSFRVPTVDVSVVDLTVRIEKGPPMRISRKLLRLLPRVHSRVSWVMWRRIWFLPTSLVTAGRASSTPRPGSL

SEQ ID NO: 57705 - protein, 924 aa, Zea mays
  Clone ID: UC-ZMFLMO17292B12_FLI.pep
KERKGASKRQRASSLYPRSPHTGRRRSSPPRMRCAPPPAAAAWWPAHVREGPSATRPGYCGSESEFAPRARAIAAGRSGSPNMWLFWRTRNRFSLEELRYLTDQLQKVHVVNEANKEFVIEALRSIAELMIYGDQHDALFFEYFMEKQIMGEFARVLRISKLSRVSLQLLQTMSIMIQNLRNEHSIYYIFSNEHINFLVTYPFDFRIDEMLSYYISFLRAISGKLNKNTISLLVKTKNDEVTSFPLYVEALKFAFHEDSMIRVAIRTLTLNVYHVGDESVNRFVSRTPLSDYFSDMVQHFQKQCIDLDKLVARSSRKGNSSVPISSIEDAIVQIEDTLYYFSDVMSSGIPDLERFITENILRVLVFRFLLPSLQRQSTDLDLSVTTSMYLLCCILHIFKNKDMASTVAAALFHQPDGPDDRKQRTPNGYTSEHDSCKSENHCTTASGIEQSSEEPNSLSSVSWKHLPNNSSRSDCCQGNTPREHLLSYITEGDDSQALGSLCLFATLLQTKELDESMLDALGILPQRKQHKKLLLQALVGEDLAETQLFSSSSSLTDDSICSDFDIYVRKLQDKYGLQCHHPRQMTSKAHRYQVLDALVDLFCRSKVSADVRLVGGWLFRQLLPHGEEEFTAFHLRRLKDSHKDCSSKLSEESGGCWCDMLLPIVKEAWRNCKKAIEASSPPKGSKSIIVPMDLCSFEGDSSVAIAEALYEMVKGFVLQHQVILFCLGETFTELPPIYPLVDLPINTRASAADFGGSVPKPGLEVNLVDAVPCRIAFERGKERHFCFLAIAHGTSGWILLLEELPLKRERGIVRVMAPLAGSDPRIDTKHGKWLHLRIRPSSVPFLDTEKHKAKTKKYLVDGRWTLAFRDEQSCKVAESMVIEEMKLQRGAVAEQLKPLVEFDMPEDGMQHPQTSHETPSDDGS

SEQ ID NO: 57706 - protein, 612 aa, Zea mays
  Clone ID: LIB3066-048-B7_FLI.pep
IHHQRRRRLLAFHQFHPIATRSSITRIVATDRPASSAVLVVLQDRGDRIQPATMSAAGATAVCTRDGGLLPLRPHCARSSSSFAAAAAAIVIYLTAPGLAVLPMRVMASDSIASVKLRVQTSRGVRARKQKLVFGGRELARDDGRIRDYGVADGNVVHLVIRVPDVRLITVETVQGGKFRFRVEPGRTVGYVKQQIAKDHPAAARPGEQRLVLEGEDLDDRHLIHDVCRADGAVIHLLVRRSVVARDAGSGRPSPPPRRDDVRIEPVGGDHKAAVRGMVDAALAGMESGNAPIMSSEGTGGAYFMRDATGQRHVAVFKPADEEPMAANNPRGLPVSSTGEGLKKGTRVGEGALREVAAYILDHPPRSGTADDGFAGVPPTALVRCTHGAFRQGGAGAGARAPVPKLGSMQAFVSNCGSCEDMGPSAFPVQEVHKICVLDIRLANADRHAGNILVRKHDGGGGGGMSLVPIDHGYCLPESFEDCTFEWLYWPQCREPFSDETVEYVRSLDAEEDVAMLRLHGWEVSRECARTLRVATMLLKKGVERGLTAFHIGSIMCRETLTKESAIEEIVREAAERGGGCETVFLQAVSEIMDRRLDDISKDMLASRYAHG

SEQ ID NO: 57707 - protein, 79 aa, Zea mays
  Clone ID: LIB3158-016-A7_FLI.pep
EGCCSPLGQAWCQADQAHQVSGRLHQRADRGSLQACPLPVLGSQHTACSSLGPLCAMKFATLACQLSFACICIIIYAVA

SEQ ID NO: 57708 - protein, 159 aa, Zea mays
  Clone ID: UC-ZMFLMO17043A09_FLI.pep
KDQTNNLVSSLKIIDHIVRDGSDGLDGSPLNHEARLGAQRLPLGADDLAPLLCIRLQLVILHLPQAELFCAAGRLHMLHADMDTLPDDATIHLLVYLDADGALGDVPDATGAAVVKLVRHPLVDGAVHLDVDVVADLVGAEVGGERDVALLAEGAREQV

SEQ ID NO: 57709 - protein, 235 aa, Zea mays
  Clone ID: UC-ZMFLMO17058G06_FLI.pep
EKYIMWMHIDDANYTKASVGVAVSSSPTGPFTYLYSFRPHGCESRDMTVFKDDDGMAYLFYSSRDNTELHVSPLTEDYLQITAAMKRILIRRHREAPAVFKHQGTYYMITSGCSGWAPNRALAHAAESIMGPWETLGNPCVGGNRFYRLTTFLSQSTFVLPLPGLSGAFIFMADRWSPSNLRDSRYVWLPLFVGGLADEPLDYSFGFPLWSRVSIYWHKKWRLPEDWKIANTANT

SEQ ID NO: 57710 - protein, 346 aa, Zea mays
  Clone ID: UC-ZMFLMO17060D11_FLI.pep
VSQSLSSQGSNSGSVFGSKRSIKGMYSPMHKSSLDREIPGSTKFSLPQIQKATKNFSPNFKIGQGGSGTVYKGQLADGTLVAVKRAKKNVYDKHMGREFWNEIETLQRIEHLNLVRFHGYLEFGGEQLIIVEYVPNGNLREHLDCINGRILEFSLRLEIAIDVAHAITYLHTYSDHPVIHRDIKSSNILLMNNCRAKVADFGFAKLAPTDSSHISTQVKGTAGYLDPEYLRTYQLNEKSDVYSFGVLLVELVTGRRPIEPKKAIIERVTTKWAMEKFVEGNAIQTLDPNLEATDAINLAVEKLYELALQCLAPTKRNRPSMKRCAEILWSIRKDYRELVVPTSAMN

SEQ ID NO: 57711 - protein, 168 aa, Zea mays
  Clone ID: UC-ZMFLMO17059D01_FLI.pep
YASFSPYFSAIFFGQDFFVNSRGNKLFTCRWTPRKSECKALIFICHGYGAECSISMGDTAARLVHHGYVVHGIDHEGHGKSSGSKGYLSSFGDVVRDCSDHFKSVCEKQENRLKKRFLYGFSMGGTVVLQLHRKDPLYWDGAVLLAPMCKGYCISTANSSVEGAQDEV

SEQ ID NO: 57712 - protein, 268 aa, Zea mays
  Clone ID: UC-ZMFLMO17051D09_FLI.pep
KALAAYYFGSEEAMIRLDMSEFMERHTVSKLIGSPPGYVGYTEGGQLTEAVRRRPYTVVLFDEIEKAHPDVFNMMLQILEDGRLTDSKGRTVDFKNTLLIMTSNVGSSVIEKGGRKIGFDLDYDEKDTSYNRIKSLTEELKQYFRPEFLNRLDEMIVFRQLTKLEVKEIADIMLKEVFDRLKAKEINLQVTEKFRDRVVDEGYNPSYGARPLRRAIMRLLEDSLAEKMLAGEVKEGDSAIVDVDSDGKVIVLNGGSGVAEPLEPALST

SEQ ID NO: 57713 - protein, 272 aa, Zea mays
  Clone ID: UC-ZMFLMO17072C10_FLI.pep
DKLNYAPMRMWFLSNPPGKATIEVQNIEEFTWLNDSYSPVLKHLGSQSMIDYYFGTNRANSDSNLKYRNPKYLSILNHLRFYLPEIYPKLDKMVFLDDDIVVKKDLAGLWSINMKGKVNGAVETCGESFHRYDRYLNFSNPIITKSFDPHACVWAFGMNVFDLAEWRRQNITEIYHSWQKLNEDRSLWKLGTLPPGLVTFWNKTFPLSRSWHVLGLGYNPHVNSRDIEHAAVIHYNGNMKPWLEIGLPKFRSYWSKYLDYDQSFLRECNINP

SEQ ID NO: 57714 - protein, 499 aa, Zea mays
  Clone ID: UC-ZMFLMO17076C09_FLI.pep
LAYSKYQPCFLNRQLITLLSTLGVSDNVFELKQKEALRQLNRMVTEPQAAREAVELMPMGEVTNVVKELLSCGYQPDHEPYLSMLLQTFRASKLLELKTKSRIFITQGRAMMGCLDETCTLKYGQVFVQASYSADDHRKVVVTGKVVVAKNPCLHPGDIRVLQAVDVPALHHLFDCVVFPQQGPRPHPNECSGSDLDGDIYFVSWDPHLIPSRLVDPMDYTPASAETLDHDVTIEEIQEYFTNYIVNESLGIIANAHVVFADQERMKAESPPCVQLAKLFSIAVDFPKTGVPALIPHELHVKEYPDFMEKLDKVTYESKGVIGKLYREIKKHTPHIKHFTREVARRSYDTDLIVDGYEDYITEAIEFKEEYDFRLGNLMDHYGIKSEAEIISGCILKMAKNFTKSSDADAIRMAVRSLRKEARSWFNEMSTGEDGQDAMEAKASAWYHVTYHQQYWGSYNEGYDRPHLISFPWCVYDKLVAIKQGRNLLTQMDRNLRFR

SEQ ID NO: 57715 - protein, 204 aa, Zea mays
  Clone ID: UC-ZMFLMO17068B04_FLI.pep
TLVLIFFVRTYSGHKLCPYVRRIYRYFTRKKESVSCRVVSARARALPSARFSSQQIIHILCACGMPSPLHSWSRRPGHQLHAGQVAAELLEHHQQVAAGVEPGARDVVVPLGDVAAAGLALGLAVRPRVAAAAAAAGGGLVRPVPPDVAAVHPRLALAHAAHVQGHRRVAGRRAEVGLAIDHSPQACLVSDNGILVVGGNVVEH

SEQ ID NO: 57716 - protein, 382 aa, Zea mays
  Clone ID: UC-ZMFLMO17068B10_FLI.pep
GGPGCSSVGVGAFSENGPFRPSGNALTRNEYSWNKEANMLYLESPAGVGFSYSTDPAFYEGVGDSMTARDNLKFLQGWFARFPQYKGRDLYITGESYAGHYVPQLAQRMVEFNKKEKLFNLKGIALGNPVLEFSTDFNSRAEFFWSHGLISDSTYNIFTTVCNYSRYVSEYYRGSLSTACDRVMSQVARETSRFVDKYDVTLDVCISSVLMQSQVLVPQQGSRELDVCVEDETMRYLNRKDVQQAMHARLDGVQRWTVCSSVLEYKQLDLQIPTVNTVGALVKAGIPALVYSGDQDSVIPLTGSRTLVGRLAARLRLNATAPYRAWFQGKQVGGWTQVFGGGALSFATVRGASHEAPFSQPERSLGLFRAFLAGQQLPESFQ

SEQ ID NO: 57717 - protein, 244 aa, Zea mays
  Clone ID: UC-ZMROB73051C01_FLI.pep
TGSGVYYYYMSGRYEGDWVDGKYDGFGVETWARGSRYRGQYRHGLRHGYGVYRFYTGDVYAGEWSNGQSHGYGVHTCEDGSRYVGEFKRGVKHGLGHYHFRNGDTYAGEYFADRMHGFGIYSFANGHRYEGAWHEGRRQGLGMYSFRNGETQAGHWQNGVLDTLCTQNFIPGSPIAVNHSKVLNAVQEARRAAEKAYDIPRVDDRVNRAVAAANKAANAARVAAVKAAQKRNPNNGDDLPLSVV

SEQ ID NO: 57718 - protein, 235 aa, Zea mays
  Clone ID: UC-ZMROB73060C08_FLI.pep
VDRILDKTGMKGTGKWTVQQAAELAVAAPTIAASLDGRYLSGLKDERVAAAGVLEEEGMPAGLLETVNVDKKVLVDRVRQALYASKICSYAQGMNLLRAKSVEKGWNLNLAELARIWKGGCIIRARFLDRIKSAYDRNPELANLIVDREFAREMVQRQNAWRWVVARAVEAGISTPGMTASLSYFDTYRSSRLPANLIQAQRDLFGAHTYERIDCPGSFHTEWTKLARRSNGAAI

SEQ ID NO: 57719 - protein, 224 aa, Zea mays
  Clone ID: UC-ZMROMO17017F03_FLI.pep
SVTALEGEGPDDDHVVDGGKSSTDEGANPEDPVVVPCVGPVVDDGGAEAARGVDAGAGDGDGRQVHEEDGEAYGERREDGHVGVAGAALGVGGGEDGVDEHEGADDLRPEPVALGVPGVDGVGAAAGAHVEALLEALDDAGAADGAQALHDHVEERARERQLPRQEEAEGDGRVDVAAGDARRAVHQREDHAAEGPRDALDAHGGALAGRLAHAHHSQDADVQE

SEQ ID NO: 57720 - protein, 368 aa, Zea mays subsp. mexicana
  Clone ID: UC-ZMROTEOSINTE036A06_FLI.pep
EQKAAELIRIIISLVAMCHSLGVMHRDLKPENFLLWDKEDDLSIKAIDFGLSVFFKPGQVFTELVGSPYYVAPEVLHKRYGPEADVWSAGVILYVLLSGVPPFWAETQQGIFDAVLKGHIDFDSDPWPKISESAKNLIRKMLCPCPSERLKAHEVLRHPWICENGVATDQALDPGVLSRLKQFSAMNKLKKLALRVIAERLSEEEIAGLRQMFKAVDVQNRGVITFGELRQGLERYGSELENREISDIMEVADNDNNVTINYEEFIAATVPLNKIEREEHLMAAFTYFDKDGSGYITVDKLQRACGEHDMDDTFLEEIILEVDQNNDGQIDYAEFVAMMQGSKVGLGWQQMETTLNVTLRDAPQVHCH

SEQ ID NO: 57721 - protein, 345 aa, Zea mays subsp. mexicana
  Clone ID: UC-ZMROTEOSINTE043F06_FLI.pep
FKMSGENLIMSSVNGVSSIRPEIALNGLANGLKSNGINGHHEHTNGHTNGVDHKQANGHKHATVDPRNYDDIIRLAEVIRDMVDLKESPTIGVICGSGLGDLADLLVDKQVVPYTKIPGFPQTSVVGHKGNLVFGYLSGKYVMCLQGRFHPYEHDMDLVLCTMPVRIMHHLGVKTMIVSNAAGGINHKFNYGDLMIIKDHVFMPGLVGFSPLVGLNDSRFGARFVSVHDAYDKQLRKMALRIAVEEDIRAHEGIYVMSGGPQYESPAEVKLYKVLGADALGMSTCHEVTVARQCGIRVFGFSLITNIGNDDADTSVEVSHEEVLETAKEASVRACRFVSRIVDHL

SEQ ID NO: 57722 - protein, 188 aa, Zea mays subsp. mexicana
  Clone ID: UC-ZMROTEOSINTE102C01_FLI.pep
VFVHSGLQISEALKLQMEVQKRLHEQLEVQRQLQLRIEAQGKYLQKIIEEQQRLTGVKSETPAGGASVTVSSDQFPDSERTEPSTPAPASESPTQVGASNRDTGDRTEATKSTCHGDSLSRNEPLTPDSNCQNGSPVASPNHERAAKRQRGSGTEFLDSEAEFSLPRHIFESSSGSEFQQYSMSYSGQ

SEQ ID NO: 57723 - protein, 390 aa, Zea mays
  Clone ID: UC-ZMFLMO17187B06_FLI.pep
STPSLHLHRTGAYLTRARTTLCRQRNQTALALGSRLSTSLRSLDAGNADGLLQLQLRQFLPRRGSVLLPARCGAALPGAAHRPHCLARGAGAALRAADAGLVPGLHGRRGRGRRGESAVRGCQRARAGDRRAGRGRRAARAEHGNGGGRGRAGAPAAAAGGRPRRRRRREQPRVPAHDAGAAAAREAEPELRRPARAGGGPVQGRQELHRAGRRRVHPRAEGRAGPAAAPERGAQGPHPGPRRRAAVRQGAVRGGRAGVRHRLHDRGAQAPQGHGRQGQGHPLQPVRAQAVDGDECGDHDGGRRGGKGRGGGSAAGSGKEAAAAAWSWERRPWFSRPVIARAKRVLTRDPPPQQEAKKKHEPRASFLDSFFLRTGCAKRASASLALLICF

SEQ ID NO: 57724 - protein, 518 aa, Zea mays
  Clone ID: UC-ZMROB73054B09_FLI.pep
CGSGSKARSTGRYSSSGDPATRRGLRPSAATRTGRQNPRRPSSDPQRRRLFRRFHRPEPGEKDRQTDRKMSASVGRTRVGRYELGRTLGEGTFAKVKFARNVETGENVAIKILDKEKVLKHKMIAQIKREISTMKLIRHPNVIRMYEVMASKTKIYIVMELVTGGELFDKIASRGRLKEDDARKYFQQLINAVDYCHSRGVYHRDLKPENLLLDASGTLKVSDFGLSALSQQVREDGLLHTTCGTPNYVAPEVINNKGYDGAKADLWSCGVILFVLMAGYLPFEDSNLMSLYKKIFKADFSCPSWFSTSAKKLIKKILDPNANNRITIAELINNEWFKKGYQPPRFETADVNLDDVNSIFDESGEPAQLVVERREERPSVMNAFELISTSQGLNLGTLFEKQTGSVKRETRFASRLPANEILSKIEAAAGPMGFNVQKRNYKLKLQGENPGRKGQLAIATEVFEVTPSLYMVELRKSNGDTLEFHKFYHNISNGLKDVMWKPESGIVEGDEARQRRSP

SEQ ID NO: 57725 - protein, 408 aa, Glycine max
  Clone ID: UC-GMFLMINSOY031D07_FLI.pep
YTVCRQGSVALDKALGVEGEDKKAPKQSVIIVSEFIGCSPSLSGAIRVNPWNIDDVAEAMNSAVTMSEAEKHLRHEKHYKYISSHDVAYWARSFDQDLDRACREHYSKRYWGVGLGLGFRIVALDPTFRKLSVDHIASAYRDTHSRLILLDYDGTMMPQATINKTPSREVIAVLNYLCSDPENMVFIVSGRDKDCLGKWFSPCEKLGLSAEHGYFTRWSKDSPWETCGLATDFEWKMIAEPVMSLYTEATDGSFIEHKESAMVWHHQEADPYFGSCQAKELLDHLESVLANEPVVVIRGQHIVEVKPQGVSKGKVVEDLISIMRSKGKSPDFLLCIGDDRSDEDMFESIARSASNPALPTIPKVFACTVGQKPSMAEYYLDDTSEVMKLLEGLATASAPSASIASQEL

SEQ ID NO: 57726 - protein, 893 aa, Zea mays
  Clone ID: UC-ZMFLMO17262E06_FLI.pep
TRPKPKLPPRPPPPPTAATPDPRLPVPDYQEGIPAARMSGGGAGGKGAAAPVPAGSRKLVQGLKEIVNRPEAEIYAALRECGMDPDEAVSRLLSQDTFQEVKSKRDKKKEIKEVPETRYRSANSSTNRSLRSGADRGGRSNSVHSSSTDNMTSRPPVSGSCTASVNSNQMQTIASSSANKHMVTDGLAVSLQSSSGFQHGGWSGTPGQLSMVDIVKMGRPQGKASSKPVVTADRGYAGQYPSLPSTNQNLKQSGSMVSPAELDKGLQPAHNLVQVKNHGHFTADSKLPYGTDWSPQDDPTSENQSSQPETSGDPSLYESSFQSSTLVTDVVNSHENSHLELDENSTFAMRSTLASERHLEPSDSIPEYNDGILNNSSSYQPHNYSYTEQDVEDSSADVSAAAENFQSLSLHNDELAAKKTAEDNPAVIIPDHLQVTNTECVSLSFGSFGSGAFSGLLPQKTTDSNVEFLVREDSATVDPIDARNQDYYESGAVTSPAEENLEAMLGTNMENVDAPSVSQANELSQDVLDPSILKYDVPSVSSHAYSNMNTPQPSKIEDPQGNNQAHTLSHLSNMMQANPLSTSSLLASNQNHPSLHGIEFDLLYLEAKYNTGSTTNPRPAISMQEALKAGVFSNARSTQSLPSTSIPTGHPLPQQLAHHPYSQPTLAPITHFPNIVGYPPYLPQNYAAYLSSGTFQQAYPSNGAFHQSAATLLGSGMKYSAPEYKNNLSATGLQQQHQPQPQPPSSVISGYGGFGSSSNIQGNFTLNQSTGTGSTLVFDDALGRQYKDTSQHIALQQPDNSGMWLHGSGSRAATLPPNHFYGYQGQSQLGGFGQAQQQQPSQFGGHGYPTFYQSQGGLTQEHHPQNLAEGSLNGFQVAPSQPSHPSWQHQHTY

SEQ ID NO: 57727 - protein, 494 aa, Zea mays
  Clone ID: UC-ZMFLB73318G12_FLI.pep
LFNTLINFTCLLFHYPVSERSGKSVVELPPELCIVVMSPMSAITLRSFTFIPSIMYRIQCMLLSMNLKMQLGPSMQQFDIPALKILEALTTKNCQEEFSQESLETLGDSFLKYITTQHFFVKYKHQHEGMLTKMKKNVISNAALCQLACSNNLVGYIRSEAFNPKTWIVPGVGYDICDRSLRKLKSKRIADSVEALIGAYLSTAGEQAAYIFLKSLGMDIEFHKMPIERVITIKAEEFINVKSLELLLDYSFNDPSLLMEALTHGSYQIAGTTPCYQRLEFLGDAVLDHIFTDYFYHQYPECTPELLTDLRSASVNNSCYAHAAVKAGLHKHVLHSSSALHKRMADYLDKFEQSFSGPSHGWEAGISLPKVLGDVVESIAGAIYIDAKHDKGVVWRSMKRILEPLVTPDTLQNDPVKELQEFCDSKGYTLEYTVTRDNGVSSVVAEVRTEGTTYKATRTGFSKLDAKKLAASSVLRDLKAADTKQYSANGISCT

SEQ ID NO: 57728 - protein, 349 aa, Zea mays
  Clone ID: UC-ZMFLMO17197D01_FLI.pep
RISRMTLVPSLMEIILPTLAEKLSDGCNPLKILIFSGEVLSVSLWKRVYEFLPEATIINLYGTTEVSGDCAFFDCKKLPTILEQEELNSVPIGFPISNCEVSLVTNDGLSDEGEISVSGACLFTGYLADPMTSNCPEGSEVLAYYRTGDFARRLKTGELIFLGRKDRIVKIYGHRFSLEEVESTLRDHPDVSDAAVTFQSNGSLDFKAYLVLRSNNKFLKCTQGYSGLHSSRDIIAPLRNWLIMKFPLAMVPRLFIPMKSLPLTLSGKIDYVKLSSLVCAFEPCEIHPESSPADPHMQVIKKAFSDALLVHEVSEYDDFFSLGGNSITAAHVAHKLEIDMRLLYIYTFP

SEQ ID NO: 57729 - protein, 386 aa, Zea mays
  Clone ID: UC-ZMFLB73344A03_FLI.pep
LSFLIGHPSSSMERLLAGLLLGFLLLIASVGSHATRAPDQYWKSALPDTPMPSSLSQLLNTPAGKGGVGGGSSGKKPGGTTVGVGKGGVGVNVNPTKPGGAGTTVGVGKGGVGVGVNPGYGKPGGTTVGVGKGRVGVHVNPGKKPVHVPVGPFQYEYAASETQLHDDPSVALFFREEDLQPGKKTTVQFANTAMAGAKFLPRSDAEAIPFSSEKVPEILGRFSVDPDSVEAAEMAQTLHDCEAPAARGERKACATSLESMVDFATASLGTSHVRAASTVVGREGSPRQEYTVTGVKRAGGGRLVACHAEPYAYAVFACHLTQQTRAYSVSMLGRDGTAVDAVAVCHADTSGWNPKHVAFQVLRVKPGTVPICHFLPQDHVVWTRGG

SEQ ID NO: 57730 - protein, 730 aa, Zea mays
  Clone ID: UC-ZMFLMO17154E05_FLI.pep
GLRRSPHLTSSTPSLDRVRVPPARARAMASFTCSQVGAAAAGGTSPFLGYRRRSGPGGAIPSSSLFVGRRLAAVRMRAPSRGVRGGSALRVTCEKVVGIDLGTTNSAVAAMEGGKPTVVTNAEGARTTPSVVAYTKTGERLVGQIAKRQAVVNPENTFFSVKRFIGRKMSEVDDEAKQVSYGVVKDENGNVKLDCPAIGKQFAAEEISAQVLRKLVDDASKFLNEKITKAVVTVPAYFNDSQRTATKDAGRIAGLEVLRIINEPTAASLAYGFEKKNNETILVFDLGGGTFDVSVLEVGDGVFEVLSTSGDTHLGGDDFDKRIVDWLASNFKKDEGIDLLKDKQALQRLTEASEKAKMELSTLTQANISLPFITATADGPKHIEATLSRAKFEELCSDLIDRLKTPVNNALRDAKLSVSDLDEVILVGGSTRIPAVQELVRKLTDKDPNVTVNPDEVVSLGAAVQGGVLAGDVKDVVLLDVTPLSLGLETLGGVMTKIIPRNTTLPTSKSEVFSTAADGQTSVEINVLQGEREFVRDNKSVGSFRLDGIPPAPRGVPQIEVKFDIDANGILSVAAIDKGTGKKQDITITGASTLPKDEVERMVEEADKFAKEDKEKRDAIDTKNQADSVVYQTEKQLKELGDKVPAPVKEKVDVKLQELKEAISGGSTQSMKDAMSALNQEVMQIGQAMYNQSGASAAGPTPGAEAGPTPGTGPAQNDGDVIDADFTDSN

SEQ ID NO: 57731 - protein, 234 aa, Glycine max
  Clone ID: 700677375_FLI.pep
KKFHFHFKILPDFQNYRLSFSSSAMVKVPSSIIMMPELTNTSATGLKGWKWLKQEEDEGKMGSIVSSKVKQLSTLSCNLDDDFFSIDFTWFAHVKELYIAENNFTILPECIKECQFLRLLDVCDCKHLREIRGIPPNLKHFFAINCKSLTSSSISMFLNQELHEAGNTVFCLPGDRIPEWFNQQSRGDLQFLSGFAISSLTRFFVFLLHLCKTKFFVPWCSSMAMNVPLIVTIT

SEQ ID NO: 57732 - protein, 528 aa, Zea mays
  Clone ID: LIB189-026-F12_FLI.pep
EGRERKKEKEDQLEYLEERRLKDLVKKHSEFISYPISLWTEKTTEKEISDDEDEEEKKDAEEGKVEDVDEEKEEKEKKKKKIKEVSHEWSLINKQKPIWMRKPEEITKEEYAAFYKSLTNDWEEHLAVKHFSVEGQLEFKAVLFVPKRAPFDLFDTRKKQNNIKLYVRRVFIMDNCEELIPEWLSFVKGIVDSEDLPLNISRETLQQNKILKVIRKNLVKKCVELFFEIAENKEDYNKFYESFSKNLKLGIHEDSQNRSKIAELLRYHSTKSGDELTSLKDYVTRMKEGQNDIYYITGESKKAVENSPFLEKLKKRGYEVLYMVDAIDEYAVGQLKEFEGKKLVSATKEGLKLDETEDEKKRKEELKEKFEGLCKIIKEVLGDKVEKVVVSDRVVDSPCCLVTGEYGWTANMERIMKAQALRDSSMSGYMSSKKTMEINPENPIMDELRKRAEADRNDKSVKDLVMLLFETALLTSGFSLDDPNTFGTRIHRMLKLGLSIDEDESAEAEAEMPPLEDDAGESKMEEVD

SEQ ID NO: 57733 - protein, 411 aa, Zea mays
  Clone ID: LIB3062-047-D6_FLI.pep
LSMAETVMQAPLRISIGPELSTEAQKIEERTLKQLTLRPITPPASKSSALSSLKIKGTRLGDHPTGPSKTSQLLKIQSANTSSRAPVKADVSKLSQPGSFQVLSREQNGTAHTAKDCPVKPVSPPTPLASLETQKKTVASQKLKFGTNESLLPLQGPSRDRKSNARDKVRFFEMLRTKSSNGSSTAFEPGSQPSPSSLVDVKQDSSLNLGNDFHVFCSEIKCTEHRRCFCEEANSSDGSQRHLSDTEEHIASLKLSVMGGMPQQPLVERREANSSSEPADTGDEGFQSFLSDSAEVSLSSTLADSDDGWNRSQSGNEEASSLSEDTESDDDFHPADISPEDKRFMMLLGWKEDEIVQVTPLDFDEIADTVKGCEELKKKLQSMQFNEEVKSILLHIELDEKQQQQHKSTGD

SEQ ID NO: 57734 - protein, 1000 aa, Zea mays
  Clone ID: LIB3066-031-E1_FLI.pep
LNQTRAATDRSGDPAPRGNPPPRPGPPRSRWRQRQRRRWGAMALNMKTLTQALAKASAVIEKTVSTTVQEVTGPRPLQDYELLDQAGSGGPGLAWRIYTARPRDGAPSAPYPVVSVWVLDKRALAEARARAGLSKAAEDAFLDLVRADAARLVRLRHPGVLHVVQALDETKAAMAMATEPVFASVANALGCLDNVGKVPKELKGMEMGLLEIKHGLLQVAETLDFLHNNAHLAHRAISPETVFITSNGSWKLGGFGFALSVDQATGGLTSSQLFHYSDYDVEDTALPLQPSLNYTAPELVRSGDSKVGSACDMFSFGCLAYHLVARRPLLDCHNNVKMYMNALTYLTSEAFSNIPSDLVSDLQRMISMDAVSRPSAVAFTGSSFFRDDTRLRALRFLDHLLERDNMQKTEFLKALSDMWKDFDSRVLRYKVLPPLCAELRNMVMQPMILPMVLTIAESQDKGDFELATLPALVPVFTSASGETLLLLVKHADLIINKATQEHLISHILPMLVRAYDDNDPRLQEEVLRRTVSLSRQLDTKLVKQAVLPRVHGLALKTTVAAVRVNALRCLGDLVPSLDKEGILGILETVRRCTAVDHTAPTLMCTLGVANAIYKQCGVEFAAEYVIPLIFPLLTAHQLNVQQFAKYMLFVKDITSKIEEKRGVTVTDNGNTEVKASPSLANGIHSEPMPGQIPAAKSSPAWDEDWGPTKKTGVPSLSVDSSAQTKQPSVHPFDFSTQTKQSTPLPFDLSTQVKQPSLVSHATAATIPPAQPQPVQSLVPSSGPQSSGSCAPVDIEWPPRRSSSSDFSASLSISKENESGRLSSDGLDDIDPFADWPPKPSNVTSITATEHRPSINQNISGFSSGNIGFGGSGNSIGQAKSNQMSWSNTSNLMGMNSTGSYLNQGSAALGFGNPIGGLSTGLSNPSSSSTGLSMMQPKSDFGSLSMSANNAANGPPRLAPPPSTSVGRGRGRNQGQSALSRASRPPHSNSSSGQQPILDLL

SEQ ID NO: 57735 - protein, 117 aa, Zea mays
  Clone ID: LIB3088-025-D5_FLI.pep
PTLIPFWTEVICPNDLPMVFANPFASIHLSRFLCLIFYIFIIPPLVMGTVHLHVVFASMYSTWLKFLLNSMPVGETSRSKALPNRLSILPSYPCCGEAFKVKQEKTNSSSSGSPFKF

SEQ ID NO: 57736 - protein, 326 aa, Zea mays
  Clone ID: LIB3115-031-A12_FLI.pep
TDMASFRTSWHCLLAACLFLLASAAHGQQLSSSFYAATCPTLELIVRTTMLTALLAERRMGASLVRLFFHDCFVQGCDGSILLDDVGSFVGEKGAGPNVNSLRGFDVIDQIKANVELICPGVVSCADIVALAARDGTFLLGGPSWAVPLGRRDSTTASLALANSDLPSPVSGLAALLAAFGNKGLGPGDLTALSGAHTIGFSQCQNFRAHIYNDTDIDPAFASLRQRTCPAAPGTGDSSLAPLDVQTQLVFDNAYYRNLLAKRGLLRSDQALFNGGSQDALVRQYSANPALFASDFANAMIKMGNISPLTGTAGQIRANCRVVNSS

SEQ ID NO: 57737 - protein, 178 aa, Zea mays
  Clone ID: LIB3115-029-E11_FLI.pep
GHSNQQVVQRPGFSALFLSHASRKAKRPPPWLPRRRRHPTTWRACGSASSRRRCMGRGRRWPWPPPTGSARTTTRGCRASSSRGRGEATTGAAATTRRCEEPRRPGRTGGRGTSRGAAAPCPTPRSTSSSTGSRPAERAPCSPAAAAAAAAIDRRVLYCTGGITARLHAMVSVNKCCI

SEQ ID NO: 57738 - protein, 358 aa, Zea mays
  Clone ID: LIB3079-037-F8_FLI.pep
AGIPQVPLAEIVRAPAGVDTGGGRGVHVPVRGPARPPLRCKLFPIGVGFPQPAHGHAQDRRRLLPRPPPPRLRHRRALPLLRPLEGSEAVRGAGAGDGGGVLPGLRGLTGGRLLHGVPADRVPAVRAAAGGGHGEGRRGVSLVAVLRHPHRQPRQAVVPLHHPRLGGLPLRGTHLQQQPVAGRRVPALRALLLLRLARRAALDAVPARRGRPPDAFLRRHGPQDPAAAAVPADAAAVVPAVAVDAVRVPEGRAADQPRGARARVLPPVPPLLPPPLRRDFLPRHDAPAARRPDTHRREVQAQAGAADAASTRWAPPASAAAAPPLPTAAEDLSLVSQSVLHGDPRIFSIQHKGDAILC

SEQ ID NO: 57739 - protein, 230 aa, Zea mays
  Clone ID: LIB3079-052-E12_FLI.pep
HNKNIHSILPKTTVWTNSYWDEFVSLPAIVPRGPVALLGLGAGTSAHLMLKFWPWLQLIGWEIDPMIIELSRDYFGMSDLEKATESGGSLLVRIGDALSPSATVEGGFAGIVVDLFCDGKVIPQLQEAKTWLQIAKRLMPDGRIMVNCGGSDTEESLSSPWVQNPTVKALCSAFPGQVSWKRLSEKESVNYVALTGPLPDLDGWSASVPSELSTNRAGPKPMLERRRPGA

SEQ ID NO: 57740 - protein, 212 aa, Zea mays
  Clone ID: LIB3116-002-F10_FLI.pep
KDKEKGKEKEKEGSQLHKEKDKEKKDKEKEKEKDKEKEDHKDKKDKDHKEKKEKNKEKEGSQLHKELKAGVADMVHTLSSSAPSSGGGHERAGSAAAGTTIITLAGENKGTSMKVDSSAVAYGTADAAGSKERRGHKLDGSVIVSGKEQAGAGKGLTAFVNSNVQVINNSLLLQSSCHGGDLGVHLKLSTKAKKKDGKEAGGNSGSAAAPKK

SEQ ID NO: 57741 - protein, 226 aa, Zea mays
  Clone ID: LIB3088-043-G4_FLI.pep
IMSLFGIGLLECGGSPPSVGDILNFFSAVFFGIHMLRTEQISRSTDKKKFLALLGFEVLVVAFSSVLWFMFKDGYVDTSGSSFESWTFGMLWDTTVSFPWIPALYTGVLSTVLCMWAEMVAMGDVSATETAVVYGLEPVWGAAFAWFLLGERWDDAAWTGAALVLCGSLTVQLFGSAPEKSKKVKKRSSNALETPVKRRDYLSLSPIPVDSGKIIGRQLERKNKAV

SEQ ID NO: 57742 - protein, 107 aa, Zea mays
  Clone ID: LIB3079-049-G3_FLI.pep
SHQLHHKSLINYITKVSSIVIIRHISSSSTNKRQYLIHSHNKSLKYQNAITWKLTVADHHRVTVLSDGRYLQPGRTQLEHSCCPHSRSDTHGDNTKSAVSAPALHFI

SEQ ID NO: 57743 - protein, 110 aa, Zea mays
  Clone ID: LIB3116-014-G9_FLI.pep
DLSTVSDSDSRVGTAERTLRHGPVHLRPQPRRQPGRRDGAVQRLQRPRQSHAPPRGRSPRDRSEGAGKGSGGASAGSGPEEGGGGRASEGAEARRHGLPATGLGRARGGP

SEQ ID NO: 57744 - protein, 185 aa, Glycine max; identical to SEQ ID NO: 54639
  Clone ID: 700659535_FLI.pep

SEQ ID NO: 57745 - protein, 165 aa, Glycine max
  Clone ID: JC-GMFL02220061E07_FLI.pep
VSRLPVLSDKLCGKTTAARIQLLGCYMLYEVVGFTQISGMQILYKTCGGTNAAGRGFEERRDTAFSVMENGVVTGHGFYATSYQSLYVMGQCEGDVGDSDCGECVKSAVQRAQVECGSSISGQVYLHKCFISYSYYPNGVPGRHSSSASSSSNSYSSSSSSSGNN

SEQ ID NO: 57746 - protein, 503 aa, Glycine max
  Clone ID: JC-GMFL02220090D06_FLI.pep
QNIRQAVLEYRKVFNQQHVEPRVRRVALYRGAEYLERYFRLIAFAAYLGSEAFDGFCGQAEYKMAFKNWMHERPEVQAMKWSIRLRPGRFFTVPEELRAPQESQHGDAVMEAFVKARSGSVLGKGYILKTYFFPGQRTSSHIQIHGAPHVYKVDEFPVYSMATPTISGAKEILSYLGAKPKANVSSAQKVILTDLREEAVVYIKGTPFVLRELNKPVDTLKHVGITGPAVEHMEARLKEDILAEIRQSGGLMLFHREEYDPSTNKSSVVGYWENILADDVKTPAEVYSTLKDEGYDIIYSRIPLTRERDALASDIDAIQYCKDDSAESYLFVSHTGFGGVAYAMAIICIRLGAEASFASKVPQPLFGPHQCAATEENLASRASNEAALKMGDYRDILSLTRVLIRGPQSKADADIVIERCAGAGHLRDDILYYHKEFEKFTDGDDEERAYLMDMGVKALRRYFFLITFRSYLYCTSPANMKFSAWMDARPELGHLCNNLRIDK

SEQ ID NO: 57747 - protein, 343 aa, Glycine max
  Clone ID: JC-GMFL02220101B09_FLI.pep
GVLRCFGGGERQISHCCKRYFGDDSKVLIGDSPPPQPVAATVAATTAAATTTTTTTITSTTQANSVMSSCLQTHNLDLPENNPPQVIEEPQAATATAISGSCGSSSSCSTSNGGATCNSNSSSSVFASLFASSTASVTLQSQTPAFSDLIRAMGPPEHPADQISGPSSEAISLCLSTTSASPIFATGGRQYASSSPHPAMSATALLQKAAQMGAAATNASLLRGLGIVSSSPLDSTSSGQQNVLQWGHQQQLEPESGSVAAAGLGLGLPCEDGGSGLKELMMGTSSMFGPKHTTLDFLGLGMAAGGTAGGGLSALITSIGGGLDVTAAFGNGDFSGKDIGSSS

SEQ ID NO: 57748 - protein, 462 aa, Glycine max; identical to SEQ ID NO: 43875
  Clone ID: JC-GMLE01810022A09_FLI.pep

SEQ ID NO: 57749 - protein, 179 aa, Glycine max
  Clone ID: JC-GMLE01810055H09_FLI.pep
TVYNCGVLILYSFLFQRPVEGNATMKQDLRSFKLILEYIKVLPTGQETDFVLVSCSGLGIEPSRREQVLKAKRAGEDSLRRSGLGYTIVRPGPLQEEPGGQRALIFDQGNRISQGISCADVADICVKALHDTTARNKSFDVCYEYIAEDGRELYELVAHLPDKANNYLTPALSVLEKNT

SEQ ID NO: 57750 - protein, 202 aa, Glycine max
  Clone ID: JC-GMLE01810066H12_FLI.pep
ASKSVKSLMDSFFVECCNCRLPGDYGFDPLGLGKDPAFLKWYREAELIHGRWAMAAVVGIFIGQAWSGVPWFEAGADPNAIAPFSFGSLLGTQLLLMGWVESKRWVDFFNPDSQSVEWATPWSKTAENFGNSTGEQGYPGGKFFDPLGFAGAIKDGVYIPDADKLERLKLAEIKHARIAMLAMLIFYFEAGQGKTPLGALGL

SEQ ID NO: 57751 - protein, 463 aa, Glycine max
  Clone ID: JC-GMST02400008E01_FLI.pep
GNQLSSDCSDVPIINALEKGVRVIELDIWPNESKDNVDVLHGRTLTSPVALIKCLRSIKQHAFVASEYPVVITLEDHLTPDLQAKVAEMITQTFGDILFAPTSESLKEFPSPESLKGRIIISTKPPKEYLEAKEVQEKEEESQQEKPADDEEAWGKEVPSLRGGTISDYKNIEDDDVLDDEEDIDEAEKSRQDAADEYRRLIAIHAGKPKGGLTECLKVDPDKVRRLSLSELQLEKAAETHGKEIVRFTQRNILRVYPKGTRITSTNYNPLIGWVHGAQMVAFNMQGYGRSLWLMQGMFKANGGCGYVKKPDLLLKVGPNNEVFDPRSHLPVKTTLKVTIYMGEGWFLDFKHTHFDKFSPPDFYARVGIAGVPNDTVMKKTEKVEDNWSPSWNQVFKFPLAVPELALLRVEVHEYDMSEKDDFGGQTCLPVWELRSGIRAVPLYSRKGDKYANVKLLMHFEFI

SEQ ID NO: 57752 - protein, 426 aa, Glycine max
  Clone ID: JC-GMST02400060G08_FLI.pep
YNSTDTMKNIIAPVQSAMPSPTFLWRFKVTLFLIWGFTCCKIGWDSVMRMDANLRDLFLYEVFLYYNPLLLVTMMVWLWGVNLWVFLQSTVSYAKVFDLDQNHLTHKEIWKCSTWMTIIVPTSMTAYLYLYSHGEVSLAASQPVLLYILVAVILIFPFDIFYLSSRYFFLRTLFRIAFPFQPITFPDFFLADILTSMAKVFSDLERSVCRMVNRQVATIAWLEADSVCGSHSVAIPIALVLPYIWRLFQCLRQYRDTKEKNCLFNALKYSTAVPVIFLSALKYHVLHEKWTTLYRPLWLLSSVINSLYSFYWDITRDWDLSGFSRIFKFNKSNPISNLLYGRQWVYFWVIGSNFVLRCSWTYKLSAHLRHNYLTVFTITLLEMFRRFQWVFFRVENEWNKITRSGVQLTEIPREEEKLLGSNIHDV

SEQ ID NO: 57753 - protein, 772 aa, Glycine max
  Clone ID: JC-GMST02400062B08_FLI.pep
CYHFEVKREFLKGALKRFSQFFISPLVKMEAMEREVLAVDSEFNQVLQSDACRLQQLQCHTSAHNHPLNRFFWGNKKSLVDAMEKGINLREQILKLYKDYYHGGLMKLVIIGGESLDVLESWVVELFGAIKKGQANPVFTVEGPIWESGKVYRLEAVKDVHILDLSWTLPCLHQEYLKKPEDYLAHLLGHEGRGSLLSFLKSRGWATSLSAGVGEEGIYRSSIAYVFVMSIHLTDSGIEKIFDIIGFVYQYLKLLREDTPPEWIFKELQNIGNMDFRFAEEQPPDDYAAELAENLHFYPPEHVIYGDYVFKTWDEQLLKQVLGFFVPENMRVDVVSKSFLKSEDFQYEPWFGSRYVEEDIAQSFRELWRNPPEIDASLHLPSQNEFIPSDFSIRASDTCVDDFANSTSPRCLIDEALIKFWYKPDSTFKVPRANTYFRITMKGGYADVKSCVLSELFIHLLKDELNEITYQASIAKLETSVTYVGDMLELKVYGFNEKLPVLLSKFFSVSKSFMPTDDRFKVIKEDMKRALKNANMKPLSHSTYLRLQVLCESFYDADEKLHYLNDLFLDDLKAFIPGLLSQIYMEGLCHGNLSKEEAIGIAKIFKMNFPVNPLPIELRHAERVICLPSSANLVRDVNVKNKSEKNSVVELYFQIEQDFGLGSIKLKALIDLFDEIVEEPFFNQLRTKEQLGYVVECSPRVTYRISGFCFCVQSSEYHPVYLQSRIENFLNGLEELLDGLDGDSFENYKSGLMAKLLEKDPSLTYESNRLWN

SEQ ID NO: 57754 - protein, 881 aa, Glycine max
  Clone ID: UC-GMFLMINSOY007H05_FLI.pep
FEVRRVCCVEVSKMLIGSLLNRRPKIKGTVVLMTKNVFDVNDFMATTRGGPAAVAGGIFGAAQDIVGGIVDGATAIFSRNIAIQLISATKSENALGHGKVGKLTYLEKHLPSLPNLGDRQDAFDVYFEWDESFGIPGAFYIKNYMQSEFFLVSFKLEDVPNHGTILFACNSWVYNAKLYKKDRIFFANKAYLPNDTPTPLVKYRKEELENLRGDGRGERKELDRIYDYDVYNDLGNPDENDDLARPILGGSSKHPYPRRGRTGRKPTKKDPRCERPTSDTYIPRDENFGHLKSSDFLTYAIKSLTQNVLPQFNTAFGFNNEFDSFEDVRCLFDGGVYLPTDVLSKISPIPVLKEIFRTDGEQALKFPPPHVIKVRESEWMTDEEFGREMLAGVNPGMIQRLQEFPPKSKLDPTEFGDQTSTITKEHLEINLGGLTVEQALKGNKLFILDHHDAFIPFMNLINGLPTAKSYATRTILFLQDDGTLKPLAIELSLPHPRGHEFGADSRVVLPPAAVNSAEGTIWLIAKAYVAVNDTGYHQLISHWLNTHATIEPFVIATNRHLSVLHPIHKLLLPHYRDTMNINALARQSLINADGVIERSFLPGKYSLEMSSAVYKSWVFTDQALPADLIKRGMAIEDPCAPHGLRLVIEDYPYAVDGLEIWDAIQTWVKNYVSLYYPTDDAIKKDSELQAWWKEAVETGHGDLKDKPWWPKLNTPQDLVHICSIIIWIASALHAAVNFGQYPYGGLILNRPTLTRRFLPEPGSKEYEELSTNYQKAYLRTITRKIEALVDLSVIEILSRHASDEIYLGKRDSDDWTDDQKAIQAFEKFGTKLKEIEAKINSRNKDSSLRNRNGPVQMPYTVLLPTSEEGLTFRGIPNSISI

SEQ ID NO: 57755 - protein, 860 aa, Glycine max
  Clone ID: UC-GMFLMINSOY016G08_FLI.pep
KMTGGMFGRKGQKIKGTVVLMPKNVLDFNAITSVGKGSAKDTATDFLGKGLDALGHAVDALTAFAGHSISLQLISATQTDGSGKGKVGNEAYLEKHLPTLPTLGARQEAFDINFEWDASFGIPGAFYIKNFMTDEFFLVSVKLEDIPNHGTINFVCNSWVYNFKSYKKNRIFFVNDTYLPSATPGPLVKYRQEELEVLRGDGTGKRRDFDRIYDYDIYNDLGNPDGGDPRPIIGGSSNYPYPRRVRTGREKTRKDPNSEKPGEIYVPRDENFGHLKSSDFLTYGIKSLSQNVIPLFKSIIFDLRVTSSEFDSFDEVRGLFEGGIKLPTNILSQISPLPVLKEIFRTDGENTLQFPPPHVIRVSKSGWMTDDEFAREMIAGVNPNVIRRLQEFPPKSTLDPATYGDQTSTITKQQLEINLGGVTVEEAISAHRLFILDYHDAFFPYLTKINSLPIAKAYATRTILFLKDDGSLKPLAIELSKPATVSKVVLPATEGVESTIWLLAKAHVIVNDSGYHQLISHWLNTHAVMEPFAIATNRHLSVLHPIYKLLYPHYKDTININGLARQSLINAGGIIEQTFLPGKYSIEMSSVVYKNWVFTDQALPADLVKRGLAVEDPSAPHGLRLVIEDYPYAVDGLEIWDAIKTWVHEYVSVYYPTNAAIQQDTELQAWWKEVVEKGHGDLKDKPWWPKLQTVEDLIQSCSIIIWTASALHAAVNFGQYPYGGYIVNRPTLARRFIPEEGTKEYDEMVKDPQKAYLRTITPKFETLIDISVIEILSRHASDEVYLGQRDNPNWTTDSKALEAFKKFGNKLAEIEGKITQRNNDPSLKSRHGPVQLPYTLLHRSSEEGMSFKGIPNSISI

SEQ ID NO: 57756 - protein, 1120 aa, Glycine max
  Clone ID: UC-GMFLMINSOY023E12_FLI.pep
NDSEVINMIAHSSEFENIAVREEEQNELEMLARTSCPLEIKGGPSNKHGKISILIQLYISRGSIDSFSLVSDASYISASLARITRALFEICLRRGWCEMSLFMLEYCKAVDRQVWPHQHPLRQFDKDLSAEILRKLEERGADLDRLYEMEEKDIGALIRYAPGGRLVKQHLGYFPSLQLSATVSPITRTVLKVDLVITPVFIWKDRFHGTAQRWWILVEDSENDHIYHSELFTLTKRMARGEPYKLSFTVPIFEPHPPQYYIHAISDSWLHAEAFYTITFHNLPLPEARTAHTELLDLKPLPMSSLGNSTYEALYKFSHFNPIQTQTFHVLYHTDNNVLLGAPTGSGKTISAELAMLRLFNTQPDMKVIYIAPLKAIVRERMSDWQKRLVSQLGKKMVEMTGDYTPDLTALLSANIIISTPEKWDGISRNWHSRSYVTKVGLMILDEIHLLGADRGPILEVIVSRMRYISSQTERAVRFVGLSTALANAGDLADWLGVEEIGLFNFKPSVRPVPLEVHIQGYPGKYYCPRMNSMNKPAYAAICTHSPAKPVLIFVSSRRQTRLTALDLIQFAASDEQSRQFLNLPEETLQMVLSQVSDLNLRHTLQFGIGLHHAGLNDKDRSLVEELFANNKIQILVCTSTLAWGVNLPAHLVIIKGTEYYDGKAKRYVDFPITDILQMMGRAGRPQFDQHGKAVILVHEPKKSFYKKFLYEPFPVESSLREQLHDHINAEIISGTICHKQDAVHYLTWTYLFRRLMVNPAYYGLEDAESEFLNTYLSSLVQTTFEDLEDSGCIKMDEDKVEPMMLGTIASQYYLSYMTVSMFGSNIGPDTSLEVFLHILSAASEFDELPVRHNEEKYNEALSEKVKYPVDKNRLDDPHIKALLLFQAHFSQLELPISDYVTDLKSVLDQSIRVIQAMIDICANSGWLSSSITCMHLLQMVMQGLWFDKESSLWMLPCMNTDLISSLSRRGISSVQELLDIPKAALQTVTANFPASRLYQDLQHFPHVKMKLKVQRKDTDGDRSRILSVRLEKTNSRRHSSRAFVPRFPKIKEEQWWLVLGNTSTSELYALKRVSVSDHLVTSMKLPLTPANLQGVKLILVSDCYIGFEQEHSIEELDVC

SEQ ID NO: 57757 - protein, 448 aa, Glycine max
  Clone ID: UC-GMFLMINSOY025D04_FLI.pep
LIRLGMEGLGGLGHLFVTMFVSGFGGVIVLPAITDVTMAALCPGQDQCSLAIYLSGFQQAMAGVGSVVMTPLIGNLSDRYGRKALLTLPLTVSVIPQVILAYSRDTQFFYAYYVVKTLAAMAGEGSFHCLALAYVADKVPDGKRTSAFGILAGVGSASFVGGTLAARFLSTALTFQVASVLSMVALVYMRIFLKDSVPGGALRQPLLKEVEEPCDEDDSSPRATGTFKKLPSLGDLICLLRCSPTFSQAAMVSFFNSLADGGLMAVLLYYLKARFQFNKNQFADLLMITGIGATLAQLFFMPILVPVIGEEKLLSTGLLISCINVFVYSIAWTAWVPYALAGCSVFAVFVRPSLCSIASKQVGPTEQGMVQGCLSAISSFANIIAPLIFSPLTALFLSEEAPFYFPGFSLMCLGLALMVAFFQSLIIRAVPPIAGGKISSNRCTDTLV

SEQ ID NO: 57758 - protein, 891 aa, Glycine max
  Clone ID: UC-GMFLMINSOY034B02_FLI.pep
NTNMLTWWGKSSSKETKKKANKESFFDTLHRKLRISSKGKVSIRSGGSRRHCNDTISEKGDHSPCGSRSPSPSKVARCQSFIDRPHAQPLPLPGLHPSSVGRVDSEISISSKSRLEKVSKPLSFLTLPTPGCIRCRPNPADLDGDMVTASVFSDCSADSDEPADSHNRSPLAIDCETGTRTAAGSPSSLMLKDQPPAVSQLNSTGVKKPGNILSNHMSSTSPKRRPLRNHVPNLQVPPHGAFYSAPDSSLSSPSRSPLRAFGTDQVLNSAFLAGKPYPEINFVGSGHCSSPGSGHNSGHNSMGGDMSGPLLWQPSRGSPEYSPVPSPRMTSPGPSSRIQSGAVTPIHPKAGGTPTESQTHRLPLPPLSVSNSSLFSHSNSAATSPSMPRSPARADNPNSGSRWKKGKLLGSGSFGHVYLGFNSERGEMCAVKEVTLFSDDPKSMESAKQFMQEIHLLSRLQHPNIVQYYGSETVDNKLYIYLEYVSGGSIHKLLREYGQFGELVIRSYTQQILSGLAYLHAKNTLHRDIKGANILVDPTGRVKLADFGMAKHITGQSCPLSFKGTPYWMAPEVIKNSNGCNLAVDIWSLGCTVLEMATTKPPWFQYEGVAAMFKIGNSKELPTIPDHLSNEGKDFVRKCLQRNPHDRPSASELLDHPFVKNAAPLERPIPAPEALDPVSGITQGAKALAIGQGRNLSSLDSDRLSVHSSRFLKTNPHESEIHIPRNISCPVSPIGSPLLRSRSPQHRNGKMSPSPISSPRTASGASTPLAGGSGAIPFGNHSKQSIYFQEGFGSIPKSSNGVYMNGHSHHDSNVDIFRGMQMGSHISPELVSSENDVLVKQFARHPHAEPYDFQSVLADRVGRQLLGEHVKINPSIDLSPNSSLLSRPNGL

SEQ ID NO: 57759 - protein, 220 aa, Glycine max
  Clone ID: UC-GMFLMINSOY041A01_FLI.pep
TTIVGDPNHHIYILSIKEKCLENSKMPLPKIVTPIHFLGFLVILPLYFFAPFFCCPCHVSRCMWSFKHMSLPDWRISTLHLISLNNRNSPLSLNLLHVTLSSSIFSTLLSIPQSSFSPSFSFSIFSSFSFIFYLSISESFPSHLLSPFLFLFLPCMHLCHKKMDLWVSERLDGTKRRKKKHEKRGFVIRFFPLLHYSSFIVWFCFLFLLPFGFSPLSEGC

SEQ ID NO: 57760 - protein, 577 aa, Glycine max
  Clone ID: UC-GMFLMINSOY044G01_FLI.pep
FNFRSYMILCFTKVLTAIISLSHGDFLSCWCSSNLLKMEEDASLEYDIFAAVGWILDYTSLDVRNATNLEFNLIPNSMPKASYAHHRTSLFVKFFANLHCFVPNICEEQERNLFVLKVMECLQMDLSNLLPGFSFASDAPKAAIASKNLHSLLSHAESLIPNFLNVEDVQLLRVFFGELQSLFTSTGFGENQVQDSKFEESLYWDKLSKFNRNEHYQKAQSAGGCPSSLTGKEHADLNKKGGNFKEGMSENSAFPDMDQHNTRAEDTNQGKGLNRLNQVDDKGIAGKTASGGAREMDKDAQNVETSGSDSSSAKGKNVVDNMDNGELSKSNERLKRTAVEENPEDEKIELSQRRKRKRTIMNDKQVMLIERALKDEPDMQRNAASLQSWADKLSGHGSEVTSSQLKNWLNNRKARLARTARDVKAAAGDDNPVPDKQRGPVPGSYDSPGSPGDVSHVARIASGDNKSEPSLALARFVDIGSPEFGHCNAGQYVVLVGVRQDEIGRGKVFQVHGKWYGKSLDELSAHVVDISELKADKGMRLPYPSEATGNTFAEAETKLGVMRVLWGSNRVFALPPE

SEQ ID NO: 57761 - protein, 647 aa, Glycine max
  Clone ID: UC-GMFLMINSOY046F06_FLI.pep
EVFGSCVPNISWTLTSGEEISAHAVFSNAFILLLKLWRFNRPPLEYGIGDVPTVGSQLTPEYLLLVRNSHLMSAGNIHKDRNRRRLSEIASLSSPNSVFVDSFPKLKVWYRQHQACIASTLSGLVHGTPFHQIVEGLLNMMFTKINRGSQTTITSGSSSSSGPANEDTSIGPKLPAWDILEAIPFVVDAALTACAHGRLSPRELATGLKDLADFLPASLATIISYFSAEVTRGVWKPVFMNGTDWPSPGANLLNVEGQIRKILAATGVDVPSLASGDSCPAILPLPLAAFTSLTITYKVDKTSERFLNLAGQTLESLAAGCPWPCMPIVASLWTLKAKRWSDFLIFSASRTVFLHNSDAVVQLIKSCFTATLGMNSSPISSSGGVGALLGQGFKYHLCGGLCPVAPGILYLRAYRSIRDIVFLTEEIVSILMHSVREIVCSGLPRERLEKLKATKDGIKYGQASLAASMTRVKLAAALGASLVWISGGLMLVQLLIKETLPSWFISVHRLDQEEKSGGMVAMLGGYALAYFAVLCGAFAWGVDSSSAASKRRPKVLGTHMEFLASALDGKISLGCDSATWRAYVSGFVSLMVGCTPNWVLEVDVHVLKRLSNGLRQLNEEELALALLGVGGVGTMGAAAELIIDTEI

SEQ ID NO: 57762 - protein, 70 aa, Glycine max
  Clone ID: UC-GMFLMINSOY049C10_FLI.pep
DNIVFVYEASLHYRPHYTVCLIFFLLFSSPYNRQRHKYKGHTTKYSSKILTRSIYTASRVSKSACQTPWP

SEQ ID NO: 57763 - protein, 507 aa, Glycine max
  Clone ID: UC-GMFLMINSOY049H04_FLI.pep
ISLSIVINSHIHRSVKNHPNPMAASRRLRDLQSQPANKICVDCSQKNPQWASVSYGVFMCLECSGKHRGLGVHISFVRSVTMDSWSEIQIKKMEAGGNDKLNAFLTQYGIPKETDIVAKYNSNAAAVYRDRIQALADGRPWRDPPVVKEAVRSSASKGKPPLSAGNNNNGGWDNWDPDDGFGSARGGADLRRNQSTGDVRGFGGGGNVSRSKSTQDMYTRAELEASAANKEDFFARKRAENESRPEGLPPSQGGKYVGFGSGPAPNQTGVNQQNDYLSVVSQGFGKLSLAAANVVQAGTKEFSAKVKEGGYDYKVNETVNVVSQKTSEIGQRTWGIMKGVMALASQKVEEFARDNPNWMSDNWQRNESDRNGFYQEFNRENNGRNSSTREGQHSSGGQTNTFHSSSWDDWGHNDSRKEETAKGSAPQSSGGKFDNNYNSSSWDDWDQEDTRKKEPAKGSAAHSSDGWAGWDNAKDDGFDDIYGSASNNKGGAHNDKSGAAWTGGGFL

SEQ ID NO: 57764 - protein, 385 aa, Glycine max
  Clone ID: UC-GMFLMINSOY055A09_FLI.pep
AVPTVVTYNTIMYGLCKWGRVSDARKLLDVMVNKNLMPDLVSYNTLIYGYTRLGNIGEAFLLFAELRYRSLAPSVVTYNTLIDGLCRLGDLDVAMRLKDEMIKHGPDPDVFTFTTFVRGFCKMGNLPMAKELFDEMLNRGLQPDRFAYITRIVGELKLGDPSKAFGMQEEMLARGFPPDLITYNVFIDGLHKLGNLKEASELVKKMLYDGLVPDHVTYTSIIHAHLMAGHLRKARALFLEMLSKGIFPSVVTYTVLIHSYAVRGRLKLAILHFFEMHEKGVHPNVITYNALINGLCKVRKMDQAYNFFAEMQAKGISPNKYTYTILINENCNLGHWQEALRLYKDMLDREIQPDSCTHRSLLKHLNKDYKLHVVRHLENVIAAGE

SEQ ID NO: 57765 - protein, 449 aa, Glycine max
  Clone ID: UC-GMFLMINSOY058E07_FLI.pep
IVNYMSRNGALRQQLYKEIEVASVDSFQGREKDYIILSCVRSNEHQGIGFLNDPRRLNVALTRARYGIVILGNPKVLSKQPLWNSLLTHYKEHECLVEGPLNNLKQSMVQFQKPKKIYNERRLFYGGGPGIASNDNFGNVGSGAGTSSDRRSSRGRGSYIPPGPPNGTHKPGVHPAGYPPVPRVPLPHFHGGPQSQPYAIPSRGAVHGPVGAVPHVPSPGSRGFGAGRGNSGAPPIGNHLPHQQGTQQPIGSTFNFPALENPNSQPSVGGPLSQPGFANNMHVQGAGQSFRDQFSMPGMSQDFLGDDFKSQGSHVPYNVTDFSTQASQSGYAVDYATQGAQGGFPGNFLNQNSQAGYSRFGSGNDFMSQDYMGHGSQGLFTQVGFSDPLQDDATQSHFSVANANPLQSQMNSLYSQPFAHYNTQPLNMQATQQQPQAQNSQNQKIHYNV

SEQ ID NO: 57766 - protein, 666 aa, Glycine max
  Clone ID: UC-GMFLMINSOY069E04_FLI.pep
RDGMIVQSGKYDELLDSGMDFKALVVAHETSMALVEQGQGVVMPGENLNKPMKSPEARNSGESNSLDRPVSSKKSSKLIKEEERETGKVSLHIYKLYCTEAFGWWGITVVLIFSLLWQASMMASDYWLAYETSEERAKMFNPSLFISIYAIITAVSIILVVIRSYIFTLLGLKTAQIFFTQILRSILRAPMSFFDTTPSGRILSRASTDQTNVDVLLPLFTGIVIAMYITVLSILIITCQNSWPTSFLIIPLIWLNIWYRGYYLATSRELTRLDSITKAPVIHHFSESIAGVMTIRSFRKQKNFCEENLKRVNDNLRMDFHNYSSNVWLGVRLELLGSFVFCISAMFMIILPSSIIKPENVGLSLSYGLSLNASLFWAVFMSCFIENKMVSVERIKQFTNIPSEPAWNIKDRMPPSNWPSQGNVDIKDLQVRYRLNTPLVLKGITLSISGGEKVGVVGRTGSGKSTLIQVFFRLVEPSRGKIIIDGIDISALGLHDLRSRFGIIPQEPVLFEGTIRSNIDPIGQYTDEEIWKSLERCQLKEVVATKPEKLDSLVVDNGENWSVGQRQLLCLGRVMLKRSRLLFMDEATASVDSQTDGVVQKIIREDFAACTIISIAHRIPTVMDCDRVLVVDAGRAKEFDKPSNLLQRQSLFGALVQEYANRSTEL

SEQ ID NO: 57767 - protein, 302 aa, Glycine max
  Clone ID: UC-GMFLMINSOY077G08_FLI.pep
YRRLALIIIAAVMLVLTFLGFLFSIFGIQLLVYILVIAGWVLVTGTLILCGLFLVLHNATADSCIAVNEWIQYPTAHTAMDDILPCVDNATAQETLSRSKEVTSELVNLVNQVITNVSNLNFAPNFTPLYYNQSGPLMPLLCNPFHPDMTDRQCDAGEVTLSNATQVYGNFVCQVSPSEICMTQGRLTPTFYNQISAGINVGNALYDYAPSLIELQDCTFVRETLSDISRDHCPGLQRYSRWIYIGLVMVSFAVMFSLIFWIVYGRERRHRLYRKESKDFTPTHAPAPAPGQALALAQIPEG

SEQ ID NO: 57768 - protein, 509 aa, Glycine max
  Clone ID: UC-GMFLMINSOY081B05_FLI.pep
LEFKQWVFQEKRSVRPTFSAERIFGGTLLAMCSNDFICFYDWAECRLIYRIDVNVKNLYWADSGDLVTIASDTSFYILKYNRDVVVSHLDSGRPVDDEGVEDAFELLHEMNERVRTGIWVGDCFIYNNTSWRLNYCVGGEVTTMFHLDRPMYLLGYLANQSRVYLIDKEFNVMGYTLLLSLIEYKTLVMRGDLERANDILPSIPKEHHNSVAHFLESRGMIEDALEVATDPEYRFDLSIQLGKLDVAKSIAIELQSEPKWKQLGELTMSTGKLEMAEECLKYAMDLSGLLLLYSSLGDAEGISKLAILAKEQGKNNVAFLCLFMLGKLEDCLQLLVESNRIPEAALMARSYLPSKVSEIVAIWRKDLNKVNPKAAESLADPEEYPNLFEDWQVALAVESKAVETRNVYPPAEQYVNHADKSQITLVEAFRNMQIEEGEEHLENGDSTHELTEQSGEEHYTEDQEEQNGEEGSQEEAVVVDADSTDGAVLVNGNEADEEWGTNNEGAPSA

SEQ ID NO: 57769 - protein, 469 aa, Glycine max
  Clone ID: UC-GMFLMINSOY081D01_FLI.pep
KVYYARNIKTGEGVAIKVIDKEKILKGGLVAHIKREISILRRVRHPNIVQLFEVMATKSKIYFVMEYVRGGELFNKVAKGRLKEEVARKYFQQLISAVGFCHARGVYHRDLKPENLLLDENGNLKVSDFGLSAVSDQIRQDGLFHTFCGTPAYVAPEVLARKGYDGAKVDLWSCGVVLFVLMAGYLPFHDQNVMAMYKKIYRGEFRCPRWFSPDLSRLLTRLLDTKPETRIAIPEIMENKWFKKGFKQIKFYVEDDRLCNVVDDDGLMDNDDDTASIVSVASFSDYSVSESDSEIETRRRINAPLPRPPSLNAFDIISFSPGFNLSGLFEEKEDETRFVTAAPVNRIISKLEEIAQLVRFSVRKKDCRVSLEGTREGVRGPLTIAAEIFELTPSLVVVEVKKKGGDRAEYERFCNDELKPGLQNLMVEESATSSELSTPIQPSLLRGLSEPVPDISSDIETPLCIPSDD

SEQ ID NO: 57770 - protein, 281 aa, Glycine max
  Clone ID: UC-GMFLMINSOY115E02_FLI.pep
RMAIKAIELLKGSGNHEEIFEVLAAVAASLGDVIDDVNTLQVTPLKGAMTNEVFEVNWPTKSDGHQRRVLVRLYGEGVEVFFNRVDEIQTFECMSKHGQGPRLLGRFTTGRVEEFIHAKTLSAADLRDPEISALIASKMREFHNLHMPGAKKAQLWQRMRKWLSHAKSLCSPKETKNFGLDNLDAEINMLVELLSQGNQQIGFCHNDLQYGNIMMDEDTRAITLIDYEYASYNPIGYDLANHFCEMVANYHSDEPHVLDYSKYPGLEERQRFVYNYLSSEG

SEQ ID NO: 57771 - protein, 382 aa, Glycine max
  Clone ID: UC-GMFLMINSOY035A10_FLI.pep
LIARKPLFDCHNNVKMYMNTLTYLSSDAFSSIPSELVPDLQRMLSPNESSRPTAMDFTGSPFFRHDTRLRALRFLDHMLERDNMQKSEFLKALSDMWKDFDSRVLRYKVLPPLCAELRNVVIQPMILPMVLTIAESQDKNDFEQSTLPALVPVLSSAAGETLLLLVKHAELIINKTSQEHLVSHVLPMIVRAYDDTDARLQEEVLKKSVSLVKQLDAQLVKQVVLPRVHGLALKTTVATVRVNALLCLGDMVNQLDKHAVLDILQTIQRCTAVDRSPPTLMCTLGVANSIFKQYGVEFVAEHVLPLLIPLLTAQQLNVQQFAKYMLFVKDMLHKIEEKRGVAVTDSGTPEIKLSPVVNGLQSEATRTSSSSVPASTKKQLLG

SEQ ID NO: 57772 - protein, 730 aa, Glycine max
  Clone ID: UC-GMFLMINSOY043C11_FLI.pep
AAAVKDAPISVSRVTWSPDGSFVGIAFTKHLIHLYAYTGPNELTQRIEVDAHVGGVNDLSFAHPNKQMCIVTCGDDKLIKVWDLNGRKLFSFEGHEAPVYSICPHHKENIQFIFSTAIDGKIKAWLYDNMGSRVDYDAPGHWCTTMLYSADGTRLFSCGTSKDGESFLVEWNESEGAIKRTYNGFRKKSTGVVQFDTTQNRFLAAGEDGQVKFWDMDNINLLISSDADGGLQSLPRLRFNKEGNILAVTTVDNGFKILANASGLRSLRTIETPAFEALRSPIESTPIKVSGSSTVNVSPVNCKVERSSPVRPSPILNGVDPMGRSAEKPRTVEDVIDRAKPWQLSEILDPVQCRSVTMPESTDSSSKVVRLLYTNSAVGILALGSNGIQKLWKWARSEQNPTGKATANVVPLHWQPNNGLLMTNDISGVNLEEAVPCIALSKNDSYVMSACGGKVSLFNMMTFKVMTTFMPPPPASTFLAFHPQDNNIIAIGMEDSTIHIYNVRVDEVKSKLKGHQKRITGLAFSTNLNILVSSGADAHLCVWSIDTWEKRKSIPIQLPAGKSPVGDTRVQFHSDQLRLLVVHETQLAIYDASKMERIRQWVPQDVLSAPISYAAYSCNSQLIYATFCDANIGVFDADSLRLRCRIAPSICLSPAALSGSQGVYPLVVAAHPLEPNQFAVGLTDGSVKVIEPNESEGKWGTSPPMDNGILNGRAGSSSTTSNHTADQAQR

SEQ ID NO: 57773 - protein, 564 aa, Glycine max
  Clone ID: UC-GMFLMINSOY093D12_FLI.pep
YKLVCLMGNTCRGSLKGKYIQGFSQPEDHSKRSTTHSDPSSTKQQDDNDNNNNNNNNNNNNNNNNNNLPFNAKREAIMRRGLDNQAYYVLGHKTPNIRDLYTLGRKLGQGQFGTTYLCTENSTSIEYACKSISKRKLISKEDVEDVRREIQIMHHLAGHKNIVTIKGAYEDPLYVHIVMELCSGGELFDRIIQRGHYTERKAAELTKIIVGVVEACHSLGVMHRDLKPENFLLVNKDDDFSLKAIDFGLSVFFKPGQVFTDVVGSPYYVAPEVLLKHYGPEADVWTAGVILYILLSGVPPFWAETQQGIFDAVLKGHIDFDSDPWPLISDSGKDLIRKMLCSQPSERLTAHQVLCHPWICENGVAPDRSLDPAVLSRLKQFSAMNKLKKMALRVIAESLSEEEIAGLREMFQAMDTDNSGAITFDELKAGLRRYGSTLKDIEIRDLMEAADVDKSGTIDYGEFIAATFHLNKLEREEHLIAAFQYFDKDGSGYITVDELQQACAEHNMTDAFLEDIIREVDQDNDGRIDYGEFAAMMQKGNAGIGRRTMRNSLNLSMRDAPSAQ

SEQ ID NO: 57774 - protein, 547 aa, Glycine max
  Clone ID: UC-GMFLMINSOY100E04_FLI.pep
NPRFQRSTAISKNKTMASLSGICSSSPTLKKFPNQSPSLTDPLRKDHVSFPARLADRTLSLAPLRAVAREVSDGALAAAVKKGLEKDPRALWRRYVGWLYQHKELGIYLDVSRVGFSDEFVKEMEPRFQAAFRAMEELEKGAIANPDESRMVGHYWLRDPKRAPNSFLKTQIENTLDAVCKFANDVVSGKIKPPSSPEGRFTQILSVGIGGSALGPQFVAEALAPDNPPLKIRFVDNTDPAGIDHQIAQLGPELASTLVIVISKSGGTPETRNGLLEVQKAFREAGLDFPKQGVAITQENSLLDNTARIEGWLARFPMFDWVGGRTSEMSAVGLLPAALQGIDIREMLAGASLMDEANRSTVLRNNPAALLALCWYWATDGVGSKDMVILPYKDSLLLFSRYLQQLVMESLGKEFDLDGNRVNQGISVYGNKGSTDQHAYIQQLREGVHNFFVTFIEVLRDRPPGHDWELEPGVTCGDYLFGMLQGTRSALYANNRESITVTVQEVTPRTVGALIALYERAVGIYASLVNINAYHQPGVEAGKKSSR

SEQ ID NO: 57775 - protein, 414 aa, Glycine max
  Clone ID: UC-GMFLMINSOY104B04_FLI.pep
VDKNNGQKQKQSSSQDPSPLFIQIIDKKKAQNLLILLRALNVTMEEVCDALYEGHELPPEFLQTLLKMAPTSDEELKLRLFSGDLSQLGPADRFLKAMVDIPFAFKRMEFLLFMGSLKEELATIMESFAILEVACKELRNSRLFLKLLEAVLKTGNRMNDGTFRGGAQAFKLDTLLKLSDVKGTDGKTTLLHFVVLEIIRSEGIKAIRKAKESQSSSSIKSDGLPDSTQETEDYYHEIGLQVVSRLSSELENVKKAAVIDADSLTGTTAKLGYGLIKTRDLVTKTMKNVEEDRGFFETVKSFVQNAEADVTKLLEEEKKIMTLVKSTGDYFHGNAGKDDGIRLFIVVRDFLIMVDKVCKEVRDTRKKLAKTLKQETPRGASSSETRPPPDFRQRLFPAIAERRMDDISSDDESP

SEQ ID NO: 57776 - protein, 572 aa, Glycine max
  Clone ID: UC-GMFLMINSOY104E04_FLI.pep
INSALLSTNPSFPDTNHSRGQSLDLGTENTATSSARNSDIDHALSRVSSCKSFISDTESWMYDQNSSKEVQLETTLPSPNRQAKFNLELEKLRIELRHAQGLHAVAQSEKIEASRKLNELSKRRSEETMKTKEIIAKEEKAKDLARLERDKYQDASREAAYLKECAEREAAERKETELKAILAAKETKKLEGALSGSTPQYRKFAWDEIVLATSSFSEDLKIGMGAYGIVYKCNLYHTNVAVKVLTLNPNENRKRKQFQQELEILSRIRHPNLLLLLGACPDHGCLVYEYMENGNLEDRLLRKNNTSPIPWFERFRIAWEVASALAFLHSSKPEPIIHRDLKPANILLDRNLVSKIGDIGLSTVLHSDNLSTMYKDTAPVGTLSYIDPEYQRTGLISPKSDVYAFGMVILQLLTAKPAIALAHKVETAIDGGNLTDILDTEAGAWPYQETLELALLGLSCAELRRRDRPDLQDHVLPTLERLKQVFDRAQHSASIVTIKSKPPNHFICPILQDVMDDPCVAADGYTYDRKAIEKWLEENHKSPMTNMALPHKHLIPNYTLLSAILEWKSRES

SEQ ID NO: 57777 - protein, 227 aa, Glycine max
  Clone ID: UC-GMFLMINSOY111H09_FLI.pep
ILFAMALDQLSNPNAVDGAGNGATPCSAVDGGIEDGRPAARLPRWTRQEILVLIQGKSDAESRFRPGRGSGSAFGSSEPKWALVSSYCKKHGVNREPVQCRKRWSNLAGDYKKIKEWESQVRDETESFWLMRNDLRRERKLPGYFDREVYNILDSPSSTAAAAAAAAAAETPVPVATVEEEVHLYDSNRRVGSEDGLFSDSEKDEVLLLATTKDVPAPVPISEKLCC

SEQ ID NO: 57778 - protein, 761 aa, Glycine max
  Clone ID: UC-GMFLMINSOY114B10_FLI.pep
HMHMASLGDIGLAAAINILSAFAFLLAFAILRIQPINDRVYFPKWYLKGLRSSPLQAGIFVSKFVNLDFKSYIRFLSWMPAALQMPEPELIDHAGLDSAVYLRIYLLGLKIFVPIAVLAFSVMVPVNWTNSTLERSNLTYSQIDKLSISNIPTGSNRFWTHLVMAYAFTFWTCYILKREYQIVATMRLHFLASERRRPDQFTVLVRNVPPDPDESVSELVEHFFLVNHPDHYLTQQVVYNAKKLSSLVSKKKKRQNWLDYYELKYSRNQSTRPSKKTGFLGLCGNRVDAIDFYTDEIKRLSEEIELEKHKVMKNSKYTMPAAFVSFRTRWGAAVCAQTQQSRNPTVWLTEWAPEPRDVYWDNMAIPYVSLTIRKLIIAVAFFFLTFFFMIPIAFVQSLANIEGIEKAAPFLKSFIEMQFIKSFIQGFLPGIALKIFLIFLPAILMIMSKFEGFISTSALERRAATRYYIFQFINVFLGSIITGTAFQQLDKFIHQSANEIPKTIGVSIPMKATFFITYIMVDGWAGCAGEILRLKPLIFYHLKNFFLVKTEKDREEAMDPGTFGFNTGEPQIQLYFLLGLVYAVVTPFLLPYIIVFFGLAYVVYRHQIINVYNQEYESAAAFWPDVHGRIIFALVISQLLLMGLLSTKEAANSTPLLITLPILTISFHLYCKGRYEPAFVKHPLQEAMMKDTLERAREPNFNLKEFLQNAYIHPVFKGDDDSDSDVMSENWEEQEPVLVQTKRQSRKNTPLPSKHSGSLSS

SEQ ID NO: 57779 - protein, 596 aa, Zea mays
  Clone ID: LIB3137-015-E1_FLI.pep
VQEKHSRSRKEGAALAETAPAQRKSYSFRLFSCQGDISRNVISHPKAAKKEPVVSVEKELDSSELAPAVVPLLERAVSVVSSSDSLSQCEDAVHEVARACSAWDPSLVNLLSCASFIQGLLEVTLTSKDDAVLESAMSIMGKLVLGNEVIRQLVLNADPQLEVFLRLLRSSELFLKAAVVLYMMKPKAKQMLSLDWVPLVLHVLECGDEVQSLFSVRCAPKIAAFYFLDQLLMGFDVDRNVENAKQMIALGGLDLLIGRLGAGDARESRHCIALLTTCVQADGSCRHYLADSLKKEPLVQLLAGNQRKASAASLNLMSELVCLNRTSKIVEFIKELKNSGCLNTMHVLLVYLQQAPLVQHPLAATMLLQLDLLGDPSQYSVYREEAIEAIVAALEHSSQSRKVQEQCARALLILAGRFSSSGEPVAEAWLLKRAGLDDSLSESFRRSEVFKDKSVRAEEEKLVEERQKSLALMLLKSGGRRFLTALSSCISDGTPSLSRSCLVSVAWMSSSLSPLRGCNDFQPLACSVLASKLLDSLSYDRVLEERVLASLSLLNVVRHPECMEKVFPLKKETIESLQDLAEVTWTAKELLFACCR

SEQ ID NO: 57780 - protein, 677 aa, Glycine max
  Clone ID: UC-GMRONOIR024H05_FLI.pep
PSRKERKGDMIMARSFSRGSLLPLAIVSLVCLFVISIAKEEATKLGTVIGIDLGTTYSCVGVYKNGHVEIIANDQGNRITPSWVAFTDSERLIGEAAKNLAAVNPERTIFDVKRLIGRKFEDKEVQRDMKLVPYKIVNKDGKPYIQVKIKDGETKVFSPEEISAMILTKMKETAEAFLGKKINDAVVTVPAYFNDAQRQATKDAGVIAGLNVARIINEPTAAAIAYGLDKKGGEKNILVFDLGGGTFDVSILTIDNGVFEVLATNGDTHLGGEDFDQRIMEYFIKLIKKKHGKDISKDSRALGKLRREAERAKRALSSQHQVRVEIESLFDGVDFSEPLTRARFEELNNDLFRKTMGPVKKAMEDAGLQKSQIDEIVLVGGSTRIPKVQQLLKDYFDGKEPNKGVNPDEAVAYGAAVQGSILSGEGGEETKDILLLDVAPLTLGIETVGGVMTKLIPRNTVIPTKKSQVFTTYQDQQTTVSIQVFEGERSLTKDCRLLGKFELSGIPPAPRGTPQIEVTFEVDANGILNVKAEDKGTGKSEKITITNEKGRLSQEEIERMVREAEEFAEEDKKVKERIDARNSLETYVYNMKNQIGDKDKLADKLESDEKEKIETAVKEALEWLDDNQSVEKEEYEEKLKEVEAVCNPIISAVYQRSGGAPGGGASGEEDGDSHDEL

SEQ ID NO: 57781 - protein, 823 aa, Glycine max
  Clone ID: UC-GMROPIC026F05_FLI.pep
LWRNGFSFQIYKNMEETREDAGPAEQGPSNVSWWPSDFVEKFGSVSLGSQDEILSNKESPRHFDKDVLSSQKASQTLWRIGVLSEPIPNGFYSVIPETRLKELFDSIPTLDELHALGGEGFKADIILVDSEKDKKLSMLKKLIMALVRGLNSNPAAIIKKIAGLVSDFYKRPNVESPAKAALDESSHMFENRGVQMLGQIKHGSCRPRAILFKVLADTVGLESRLMVGLPNDGAIECQDSYKHMSVIVVLNSVEMLVDLMRFPGQLLPRSTKAVFMTHISAGESDSAENDSCDSPLEPNSPLFGVSESAEKEENLQFHRRFEASSNVSGLSLRNVMLRSNSSLSLSHSEPNIATAFGRRSRRKVIAEQRTASSSPEHPSFRARGRSMLSGDRTTFRDFADDQATSRSSYRSDNTSSSEARRIRRRSISITPEIGDDIVRAVRAMNETLKQNRLLRERGDDNSFPNSPNNSSSDANLQKNVSNFHLDGHDERSALYSFQRDQGASQKAMSLPSSPHDYGGQASERSGSSRYGVNDEMESTWNKVLESPMFNNKPLLPYEKWNIDFSELTVGTRVGIGFFGEVFRGIWNGTDVAIKVFLEQDLTAENMEDFCNEISILSRLRHPNVILFLGACTKPPRLSMVTEYMELGSLYYLIHLNGQKKKLNWRRRLRMLRDICKGLMCIHRMKVVHRDLKSANCLVNKHWTVKICDFGLSRIMTESPMRDSSSAGTPEWMAPELIRNEPFTEKCDIFSLGVIMWELCTLNRPWEGVPPERVVYSVANEGSRLEIPEGPLGRLISECWAECHERPSCEEILSRLVDIEYSLC

SEQ ID NO: 57782 - protein, 889 aa, Glycine max
  Clone ID: UC-GMROPIC030B11_FLI.pep
FMHSISVPKLQQKREEFYGYSNNSFSGWGSSYHSQVDSSRLSDFSGSFNESMHSQSLQIVPVQNKGSLRVLLLHGNLDIWIHEAKNLPNMDMFHKTLGDMFGKLPGSVGNKIEGTMNKKITSDPYVSISVSNAVIGRTYVISNSENPVWLQHFYVPVAYHAAEVHFLVKDNDIVGSQLIGIVAIPVEQIYSGAVVEGTFPILNNNGKPCKQGAVLTLSIQYIPMEKLCIYHQGVGAGPEYIGVPGTYFPLRRGGTVTLYQDAHVPDGSLPNVLLDSGMYYVNGKCWQDIFDSISQARRLIYITGWSVWHKVRLVRDAAGYASDYTLGDLVKSKSQEGVRVLLLIWDDPTSRSIFGYKTDGVMATHDEETRRFFKHSSVQVLLCPRSGKRHSWIKQKEVGTIYTHHQKTVIVDADAGNNRRKIIAFVGGLDLCDGRYDTPHHPLFRTLNTIHKDDYHNPTFTGNIGGCPREPWHDLHSKIDGPAAYDVLTNFEERWLKASKPHGIKKLKISYDDALLRLERIPDVIGINDAPSVGEDNPEVWHVQIFRSIDSNSVKGFPKDPKDATSKNLVCGKNVLIDMSIHTAYVKAIRAAQHYIYIENQYFIGSSYNWSQHKDLGANNLIPMEIALKIAEKIKANERFAVYVVIPMWPEGVPTGAATQRILFWQNKTMQMMYETIYKALVEAGLEAAFSPQDYLNFFCLGNREAMNLYDNAGVTGAPPPANSPQAASRNSQRFMIYVHSKGMIVDDEYVILGSANINQRSMEGTRDSEIAMGAYQPHHTWARKQSYPHGQIHGYRMSLWAEHTGTIEECFLQPESLECVRRVKAMGEMNWKQFSAKEATEMKGHLLKYPVEVDRNGKVRPLQDCEEFPDVGGKIVGSFLAMKENLTI

SEQ ID NO: 57783 - protein, 117 aa, Glycine max
  Clone ID: UC-GMROPIC054G10_FLI.pep
LFQALDTFNTAIVSPIYYVMFTTLTILASVIMFKDWDGQSGGTIVSEICGFIIVLSGTIMLHATKDFERSSSFRGSDPLSPTLSARLFTGNGDSLLKQDEENGSPESNMRSRRQELY

SEQ ID NO: 57784 - protein, 875 aa, Glycine max
  Clone ID: UC-GMROPIC058B12_FLI.pep
LSFTVPIFEPHPPQYYIHAISDSWLHAEAFYTITFHNLPLPEARTAHTELLDLKPLPMSSLGNSTYEALYKFSHFNPIQTQTFHVLYHTDNNVLLGAPTGSGKTISAELAMLRLFNTQPDMKVIYIAPLKAIVRERMSDWQKRLVSQLGKKMVEMTGDYTPDLTALLSANIIISTPEKWDGISRNWHSRSYVTKVGLMILDEIHLLGADRGPILEVIVSRMRYISSQTERAVRFVGLSTALANAGDLADWLGVEEIGLFNFKPSVRPVPLEVHIQGYPGKYYCPRMNSMNKPAYAAICTHSPAKPVLIFVSSRRQTRLTALDLIQFAASDEQSRQFLNLPEETLQMVLSQVSDLNLRHTLQFGIGLHHAGLNDKDRSLVEELFANNKIQILVCTSTLAWGVNLPAHLVIIKGTEYYDGKAKRYVDFPITDILQMMGRAGRPQFDQHGKAVILVHEPKKSFYKKFLYEPFPVESSLREQLHDHINAEIISGTICHKQDAVHYLTWTYLFRRLMVNPAYYGLEDAESEFLNTYLSSLVQTTFEDLEDSGCIKMDEDKVEPMMLGTIASQYYLSYMTVSMFGSNIGPDTSLEVFLHILSAASEFDELPVRHNEEKYNEALSEKVKYPVDKNRLDDPHIKALLLFQAHFSQLELPISDYVTDLKSVLDQSIRVIQAMIDICANSGWLSSSITCMHLLQMVMQGLWFDKESSLWMLPCMNTDLISSLSRRGISSVQELLDIPKAALQTVTANFPASRLYQDLQHFPHVKMKLKVQRKDTDGDRSRILSVRLEKTNSRRHSSRAFVPRFPKIKEEQWWLVLGNTSTSELYALKRVSVSDHLVTSMKLPLTPANLQGVKLILVSDCYIGFEQEHSIEELDVC

SEQ ID NO: 57785 - protein, 264 aa, Glycine max; identical to SEQ ID NO: 55105
  Clone ID: UC-GMROPIC063F04_FLI.pep

SEQ ID NO: 57786 - protein, 793 aa, Glycine max
  Clone ID: UC-GMROPIC064A05_FLI.pep
QFSGSVPSRVWSLSALRSLDLSDNLLEGEIPKGIEAMKNLRSVSVARNRLTGNVPYGFGSCLLLRSIDLGDNSFSGSIPGDFKELTLCGYISLRGNAFSGGVPQWIGEMRGLETLDLSNNGFTGQVPSSIGNLQSLKMLNFSGNGLTGSLPESMANCTKLLVLDVSRNSMSGWLPLWVFKSDLDKVLVSENVQSGSKKSPLFAMAELAVQSLQVLDLSHNAFSGEITSAVGGLSSLQVLNLANNSLGGPIPPAVGELKTCSSLDLSYNKLNGSIPWEIGGAVSLKELVLEKNFLNGKIPTSIENCSLLTTLILSQNKLSGPIPAAVAKLTNLQTVDVSFNNLTGALPKQLANLANLLTFNLSHNNLQGELPAGGFFNTITPSSVSGNPSLCGAAVNKSCPAVLPKPIVLNPNTSTDTGPSSLPPNLGHKRIILSISALIAIGAAAVIVIGVISITVLNLRVRSSTSRDAAALTFSAGDEFSHSPTTDANSGKLVMFSGEPDFSSGAHALLNKDCELGRGGFGAVYQTVLRDGHSVAIKKLTVSSLVKSQEDFEREVKKLGKIRHQNLVELEGYYWTPSLQLLIYEYLSGGSLYKHLHEGSGGNFLSWNERFNVILGTAKALAHLHHSNIIHYNIKSTNVLLDSYGEPKVGDFGLARLLPMLDRYVLSSKIQSALGYMAPEFACKTVKITEKCDVYGFGVLVLEIVTGKRPVEYMEDDVVVLCDMVRGALEEGRVEECIDERLQGKFPAEEAIPVMKLGLICTSQVPSNRPDMGEVVNILELIRCPSEGQEELA

SEQ ID NO: 57787 - protein, 111 aa, Glycine max
  Clone ID: UC-GMROPIC064C11_FLI.pep
LFRGKSELEQLDKIFRTLGTPDEKIWPGLSKLPGAKANFVKQLFNTLRKKFPAASFIGLPVLSELGFDLLQQLLTYDPEKRITAEDALLHDWFHEAPLPKSDFKPIFPSWQ

SEQ ID NO: 57788 - protein, 349 aa, Glycine max
  Clone ID: UC-GMROPIC066F10_FLI.pep
SIPSIFLFLKTQKHHNMGEKKEAAKNEADKKPESGAKQNDEPVPVVLKLDMHCEGCVKKINRAVRHFEGVEDVKADLSSNKLTVIGKLDPAEVRDKLAEKTRKKVELVSPQPKKDSAGDKPPEKKTEEKKTEEKKSEDKKAEEKAPKESTVVLKIRLHCDGCVQKIRKIILKGVESVNIEGGKDLVSVKGTMDVKEIVPYLNDKLKRNVEVVPPKKEGGDNKKENKEGGGGDSKKEGGKKQEGEDGAAKVEVNKMEHYGYGYGYPPPPMYWYGHGGYAPGESSSYEAEVQPGYNSYSNQGYDGNYGNYHYQGYNNNYMMAQPPPPFYLNPHHPPPQMFSDENPNACSVM

SEQ ID NO: 57789 - protein, 923 aa, Glycine max
  Clone ID: UC-GMROPIC090C06_FLI.pep
VLIPLLTSFAVCQLEEFVSIDCGGTSNYTDTSTGLAWISDSRIMQHGISVEVESPNRSMVQYQKRRDFPIESKKYCYTLSTEERRRYLVRATFQYGSLDSGDTYPQFQLYLDATKWATVSIYDASRIYVKEMIIRAPSNSIDVCMCCATTGSPFISTLELRPLNLSMYATDFEDNFFLEVAARINFGAPTEDAVRYPDDPYDRIWDSDLIKRQNYLVGVAPGTERISTTRNIDIETREYPPVKVMQTAVVGTKGVLSYRLNLEDFPANARAYAYFAEIEDLGQNESRKFKLKQPYIADYSNAVVNIAENANGSYTLYEPSYMNVTLEFVLSFSFVMTPDSTRGPLLNALEISKYVQIASKTDKQDTTVVNAFRLLSAQSSQTNEGDPCVPTPWEWVNCSTTTPPRITKIILSRRNVKGEIPSELSNMEALTELWLDGNLLTGQLPDMSKLINLKIVHLENNKLTGRLPSDMGSLPSLQALFIQNNSFSGEIPAGLISKKIIFNYDGNAELHRGKKKHFKMVLGISIGVLVILLILFLVSLVLLLNTRRKASKKKREEKGISGRTNSKPGYSFLRGGNLMDENTTCYITLSELKEATDNFSKKIGKGSFGSVYYGKMRDGKEIAVKSMNESSCHGNQQFVNEVALLSRIHHRNLVPLIGYCEEECQHILVYEYMHNGTLRDHIHESFKKQKLDWLARLRIAEDAAKGLEYLHTGCNPSIIHRDIKTGNILLDINMRAKVSDFGLSRLAEEDLTHISSIARGTVGYLDPEYYASQQLTEKSDVYSFGVVLLELIAGKKPVSSEDYSDEMNIVHWARSLTHKGDAMSIIDPSLEGNAKTESIWRVVEIAMQCVEQHGASRPRMQEIILAIQDAIKIEKGTENKLKSSSSFSGSSSSKPHSSRKTLLTSFLEIESPDVSNGCLPSAR

SEQ ID NO: 57790 - protein, 419 aa, Glycine max
  Clone ID: UC-GMROPIC097H11_FLI.pep
KFIMVATAATSSFFPVTSPSPDSGGAGSKLGGGPANLGGLKSKSASSGGLKAKAQAPSKINGTTVVTSKESFKHDDDLPSPPPRTFINQLPDWSMLLAAITTIFLAAEKQWMMLDWKPRRPDMLIDPFGIGKIVQDGLVFRENFSIRSYEIGADRTASIETVMNHLQETALNHVKSAGLLGDGFGSTPEMCKKNLIWVVTRMQVVVERYPTWGDIVQVDTWVSGSGKNGMRRDWLLRDCKTGEILTRASSVWVMMNKLTRRLSKIPEEVRQEIGSYFVDSDPILEEDNRKLTKLDDNTADYIRTGLSPRWSDLDINQHVNNVKYIGWILESAPQPILESHELSSMTLEYRRECGRDSVLDSLTAVSGADMGNLAHSGHVECKHLLRLENGAEIVRGRTEWRPKPVNNFGVVNQVPAEST

SEQ ID NO: 57791 - protein, 928 aa, Glycine max
  Clone ID: UC-GMROPIC107B02_FLI.pep
PRRHHPHPSHSLLTDKAALLEFRKTIISDPHSSLANWDEAVHVCNFTGVVCDKFHNRVTRLILYDKGLVGLLSPVLSNLTGLHYLEIVRSHLFGIIPPEFSNLRRLHSITLEGNNLHGSIPESFSMLSKLYFFIIKENNISGSLPPSLFSNCTLLDVVDFSSNSLTGQIPEEIGNCKSLWSISLYDNQFTGQLPLSLTNLTLQNLDVEYNYLFGELPTKFVSSWPNLLYLHLSYNNMISHDNNTNLDPFFTALRNNSNLEELELAGMGLGGRFTYTVAGQLTSLRTLLLQENQIFGSIPRSLANLSRLFILNLTSNLLNGTISSDIFFSLPKLEQLSLSHNLFKTPIPEAIGKCLDLGLLDLSYNQFSGRIPDSLGNLVGLNSLFLNNNLLSGTIPPTLGRCTNLYRLDLSHNRLTGSIPLELAGLHEIRIFINVSHNHLEGPLPIELSKLAKVQEIDLSSNYLTGSIFPQMAGCIAVSMINFSNNFLQGELPQSLGDLKNLESFDVSRNQLSGLIPATLGNPQLCGTIAGISLCSQRRKWFHTRSLLIIFILVIFISTLLSIICCVIGCKRLKVIISSQRTEASKNATRPELISNFPRITYKELSDATGGFDNQRLVGSGSYGHVYRGVLTDGTPIAVKVLHLQSGNSTKSFNRECQVLKRIRHRNLIRIITACSLPDFKALVLPYMANGSLESRLYPSCGSSDLSIVQRVNICSDVAEGMAYLHHHSPVRVIHCDLKPSNILLNDDMTALVSDFGVARLIMSVGGGAIDNMGNSSANLFCGSIGYIAPEYGFGSNTSTKGDVYSFGILVLEMVTRRRPTDDMFVGGLSLHQWVKIHFHGRVEKVIDSALVTASIDQSREVRKMWEAAIVELIELGLLCTQESPSTRPTMLDAADDLNRLKRYLNGDTTGTFASSLGISSSTVGGDW

SEQ ID NO: 57792 - protein, 628 aa, Glycine max
  Clone ID: UC-GMROPIC107B05_FLI.pep
IEFALAKMAASGVHSSKQMRRLESRKSHSWWWDSHISPKNSKWLSENLEEMDRSVKRMLKLIEEDADSFAKKAEMYYQKRPELVALVEEFYRVYRALAERYDHVTGELRKNIPSDLQSQGSGISDAGSEPSSTWPSPTPKRGGRLKSSTRAAGFEYFLGSSGNGTDVYQKDGDESSTLTDSEEESDDSSVNNYSGFSRNGSDLGINRRIMELETELREVKEKLWMQEEEHADGSTRGSRNENTEDLYTKINAYEQELMTVNEKLRLSEEEITKQKIELQKYRLFNTENLEAGFESSLTKKHINEGGEAHKMIEVEGSIDGVDKELFDQNGEIETLARELRITKENLKASEMQITSLKFEANKSSERIQQLHDQLELARKDISTWKTKFNSEKRESTKLHERLARLRTSLSDRDHEIRDLKTEVSDAEQKIFPEKAQLKSEMSKVLEERTHLEEQIREWESRGRCFEDDIRRIQSEKMEMEEALKGEIQLLKAGIEQRENNIKELNTSIDTLKLEKDNLHVEVGSLKEEVNSRDGRIEHLNSHLNELHVEHVQLIAGMEEAHKHVEELKSKAKQLEEEVERQRTVILEGAEEKREAIRQLCFSLEHYRDGYNMLRQHVMGHRRVPVLAA

SEQ ID NO: 57793 - protein, 558 aa, Glycine max
  Clone ID: UC-GMROPIC109C08_FLI.pep
RLGSGYLLCFFAMEDSDSVATLIDSTTSKIQQLQKAFAELESYRAVTLNLKWKELEEHFHGLEKSLKRRFDELEDQEKEFENKTRKAREILEKREAAVFAKEQDSLQRLQEKRDAASFAIVNAREKQRKISSRELATFSNGGKGGMPGVEEKPVDTLSTAAEGNVEDVKLPDNGNVELVSYPELVKLCKEMDAAGLHKFISDNRKNLAAVRDEIPNALRAAPNAACLVLDSLEGFYCTEVSNQDVKKDANLLGLRRTCIMLMECLCDFLSSSGFVSNVISEDIKDRAKAVAEEWKPRLDALDMDASNGNSLEAHAFLQLLASFGIASGFDEEELSRLIPMVSRRRQTADLCRFLGLSEKMPGVIEVLVNSGRQIDAVNLAFAFDLTEQFCPVSLLKSYLKDARKASSPVRSAHSSPTAQIEVNERELVALKAVIKCIEEHKLDEQYPLDPLQKRLVQLEKAKADKKRETEATKPQPKRPRANGVGYGPRVTNILSDKTCYARVADRYPQYVYDRPPYMYPAPTENHCPPLMTTATYNISPSHGNYFGNGYQYQASYLH

SEQ ID NO: 57794 - protein, 857 aa, Glycine max
  Clone ID: 701108350_FLI.pep
EVAKMFPFGHKGQKIKGTMVVMQKNVLDINSITSVDGIVGTGLDFLGSALDTVTFLASSISIQLISATKADGGKGKVGKATNLRGKITLPTIGAKEEAYDAQFDWDSDFGIPGAFYIKNFLQNEFYLKSLILEDIPNHGTIHFICNSWVYNSKHYKTDRIFFANNTYLPSETPAPLVKYREEELKNVRGDGTGERKEWDRIYDYDVYNDLGDPDKGEKYARPVLGGSALPYPRRGRTGRGKTRKDPNSEKPSDFVYLPRDEAFGHLKSSDFLAYGIKSVAQDVLPVLTDAFDGNLLSLEFDNFAEVRKLYEGGVTLPTNFLSKITPIPIIKELFRTDGEQFLKYPPPKVMQVDKSAWMTDEEFARETIAGLNPNVIKIIEEFPLSSKLDTQAYGDHTCIITKEHLEPNLGGLTVEQAIQNKKLFILDHHDYLIPYLRKINANTTKTYATRTIFFLKNDGTLTPLAIELSKPHPQGEAYGPVSEVYVPSSEGVEAYIWLLAKAYVVVNDACYHQIISHWLNTHAVVEPFVIATNRHLSVVHPIYKLLFPHYRDTMNINSLARKSLVNADGIIEKTFLWGRYSLEMSAVIYKDWVFTDQALPNDLVKRGVAVKDPSAPHGVRLLIEDYPYASDGLEIWDAIKSWVEEYVSFYYKSDEELQKDPELQAWWKELVEVGHGDLKDKPWWQKMQTREELVEASATLIWIASALHAAVNFGQYPYGGLILNRPTISRRFMPEKGSPEYDALAKNPEKEFLKTITGKKETLIDLTIIEILSRHASDEFYLGQRDGGDYWTSDAGPLEAFKRFGKNLEEIEKKLIEKNNNETLRNRYGPAKMPYTLLYPSSEEGLTFRGIPNSISI

SEQ ID NO: 57795 - protein, 388 aa, Glycine max
  Clone ID: 701128804_FLI.pep
LTLGIMILLAMVIVAFYRSSQSKRLRKGSSRTGQGPPKLVILHMDMAIHTLDDIMRSTENLNEKYIIGYGASSTVYKCVLKNSRPIAIKRLYNQQAHNLREFETELETVGSIRHRNLVTLHGYALTPYGNLLFYDYMANGSLWDLLHGPLKVKLDWETRLRIAVGAAEGLAYLHHDCNPRIVHRDIKSSNILLDETFEAHLSDFGTAKCISTTRTHASTYVLGTIGYIDPEYARTSRLNEKSDVYSFGIVLLELLTGKKAVDNESNLHQLILSKADSNTVMETVDPEVSITCIDLAHVKKTFQLALLCTKKNPSERPTMHEVARVLVSLLPSPLSKILAPPAKKFDYAHFVIEKGQQRKVEEQKPQQDNILPNAQWFVRFGDVISKST

SEQ ID NO: 57796 - protein, 804 aa, Glycine max
  Clone ID: 701105070_FLI.pep
QLHKVKANHIMKNQLMFLSMFLSFLILPTASQKHACGSAKTSNFPFCDTSLSYEDRAKDLVSRLTLQEKTQQLVNPSAGISRLGVPAYEWWSEALHGVSNLGPGTRFDKKVPGATSFPAVILSAASFNASLWQKMGQVVSTEARAMYNVDLAGLTFWSPNVNVFRDPRWGRGQETPGEDPLVVSRYAVMYVRGLQEVEDEASAKADRLKVSSCCKHYTAYDLDNWKGIDRFHFDAKVTKQDLEDSYQPPFKSCVVEGHVSSVMCSYNRVNGIPTCADPDLLKGIIRGQWGLDGYIVSDCDSVEVYYNAIHYTATPEDAVALALKAGLNMNCGDFLKKYTANAVNLKKVDVATVDQALVYNYIVLMRLGFFDDPKSLPFANLGPSDVCTKDNQQLALDAAKQGIVLLENNNGALPLSQTNIKKLAVIGPNANATTVMISNYAGIPCRYTSPLQGLQKYISSVNYAPGCSNVKCDNQSLIAAAVKAAASADAVVLVVGLDQSIEAEGLDRENLTLPGFQEKFVKDVAGATKGKVILVIMAAGPIDISSTKSVSNIGGILWVGYPGQAGGDAIAQVIFGDYNPGGRSPFTWYPQSYVDQVPMTDMNMRANKSRNFPGRTYRFYNGNSLYEFGHGLSYSTFSMYVASAPSSIMIENTSISEPHNMLSSNNSGTQVESLSDGQAIDISTINCQDLTFLLVIGVKNNGPLNGSHVVLVFWEPATSEFVIGAPIKQLIGFERVQVVVGVTEFVTVKIDICQLISNVDSDGKRKLVIGQHTILVGSSSETQVRHHIDVKLSGSMNGKEFMSE

SEQ ID NO: 57797 - protein, 538 aa, Glycine max
  Clone ID: 701121104_FLI.pep
IIEISDTRRRDPEGRMPSFSPAQEALLLIHERILESDAAFGVAEEDEEYGGRGGGRDRIATRLVVSRMHVGCLLGKGGKIIEQMRMETKTQIRILPRDHNLPRCVSMSEEIVQVVGDVNAVKNALVIISSRLRESQHRDRSHFHGRVHSPERFFSPDDDYVPHVTSGSRRSSVDGASFGSRGSNTNSRNNNHPSLNYAMEPGAAPVVDDSQGFYGEELVFRILCPIEKVDRIIGESEGIVEFLQNEVGVDVKVTDPVGGSDEQIIIITSEEGPDDELFPAQEALLHVQTRIVDLVLDKDNTITTRLVVPSSEIECLDGKDVSLSEIRRLTGANIQILPRDELPLCVAKTDELVQIVGEIKAARDAVVEVTSRLRSYLYRDFFQRDTVPLPAPLPGAAASSSNNIVPVTETPTTYQNLQTVAAALPSKETGGSSTETGKQKESDRRDDLLSGLNRIAVPLVTRSTLEVVLPEYAVPKLVAKSKSKLAQISELSGANVTLVEDRPDVTQKIIQISGTPEQAERAQSLLQGFILSTQEDGP

SEQ ID NO: 57798 - protein, 712 aa, Glycine max
  Clone ID: 701132824_FLI.pep
RKVALSSLTVFVYIGEIRVLKRSLMDGDGATTIAEAQYATAKTSVWWDIENCHVPKGSDPHAIAQNISSALVRMNYCGPVSISSYGDTTRIPASVQHALSSTGISLNHVPAGVKDARDEKILVDMLFWALDNPAPANYLLISGDRDFSNALHQLRMRRYNILLAQPQKASAPLVAAAKSVWLWTSLLAGGPPLSNGESQQLGNGSLSHVSSSDSLQIPVTSATQIQQQVDSYSEVHVGNSKFTNGGRGFDSRYQGKTNWRNLSQSNGPRAMNPLPVVLQDNRNRNNANSSQPGNFNLNVPSSATNHGHGNTDQLWSNNSNLQGNHQIPYSQPLRPNNFPLQPPFAPSNSYTPNSHTFPTSVVPPRTGGPNFTSGPHTNVPDIGSLSISGYPNSVHNPPIVPQRSGELKQNPNSNAPLLLRSIDDKNGHMVQNSGTQQLHQGYQHGPEYQPMPLAAMGNNNPSGNGMWGSPGCPKPSEYVQGLIGVVLLALNSLKNAKMMPTEANITDCIRYGDPKHRNTDVKKALESAIEQNMVVKQNLGALPLYVGKNDKLWKCVNPLGGTPKQHSKETWDQIGKFLTTPAGRSALMGTQCKYEAGIVIKSMCFKDLVLGDVLQILNMLITHKKWVTHHPSGWQPLNITLPEINPTSGVVAGGQISPSGVVLETISPDGVVSKIIAAWGSFLRAWKTQTGVSEQPARCNGDMTVQSLSRQS

SEQ ID NO: 57799 - protein, 134 aa, Glycine max
  Clone ID: 701109104_FLI.pep
CVLNRHKWLITHREDSLVLPTLKGKLNGIALRVPTPNVSVVDLVVQVSKKTFAEEVNAAFRESADNELKGILSVCDEPLVSVDFRCTDVSSTVDSSLTMVMGDDMVKVIAWYDNEWGYSQRVVDLADIVANKWK

SEQ ID NO: 57800 - protein, 361 aa, Glycine max; identical to SEQ ID NO: 44088
  Clone ID: 701119418_FLI.pep

SEQ ID NO: 57801 - protein, 406 aa, Glycine max
  Clone ID: 701127504_FLI.pep
SQHQHSVTSISSTTDNNFGNPLAMTAVVVVPLGLLFFASGLIVNLIQAICYVVVRPVSKNLYRRMNRVVAELLWLELVWIIDWWAGVKVQVFTDPETFRSMGKEHALVISNHRSDIDWLVGWVLAQRSGCLGSTLAVMKKSSKFLPVIGWSMWFSEYLFLERSWAKDERTLKSGLQQLRDFPLPFWLALFVEGTRFTQAKLLAAQEYAASAGLPVPRNVLIPRTKGFVSAVNHMRSFVPAIYDVTVAIPKSSPAPTMLRLFRGKSSVVHVHIKRHAMKDLPEEDEAVAQWCRDMFVAKDTLLDKHIAEDTFSDQELQDTGRPIKSLVVVISWACVVVMGVVKFLQWSSLLSSWKGVAFSAFGLGVVTLLMHILIMFSQSERSTPTKVAPAKSKNSEQLEARDNKQD

SEQ ID NO: 57802 - protein, 351 aa, Glycine max
  Clone ID: 701130161_FLI.pep
YFLLQPHFCSAIIMGKVKIGINGFGRIGRLVARVALQRDDVELVAVNDPFITTDYMTYMFKYDSVHGHWKHHDVTVKDEKTLLFGDKPVTIFGHRNPEEIPWGSTGADIIVESTGVFTDKDKAAAHLKGGAKKVIISAPSKDAPMFVVGVNEHEYKPELDIISNASCTTNCLAPLAKVINDRFGIVEGLMTTVHSITATQKTVDGPSAKDWRGGRAASFNIIPSSTGAAKAVGKVLPALNGKLTGMAFRVPTVDVSVVDLTVRLEKEASYDEIKNAIKEESEGKLKGILGYTEDDVVSTDFIGDSRSSIFDAKAGIALNKNFVKLVSWYDNEWGYSSRVIDLLVFVAKKSL

SEQ ID NO: 57803 - protein, 586 aa, Glycine max
  Clone ID: JC-GMLE01810064E03_FLI.pep
VFETLSSKLRNLELLDISFNYLTNDILPTLGGFTSLKELYLVGIHLDSDLHFQENDGFTWPTGLQALDLVGNRLNNKFLPSLNGLESLKHLYLGFNQLEGSLNIGGLSGLTSLEILDLSYNNISDFVVHQGLKSLRRLDALYLDGNMIDGSKLRKSLRAFSSVRMLSMRENEFKGTIVVGDFLDLSNLEDLTMDLSNNMENEFLKSIEKLTSLKVLSLYDCNINGTLPPADWSKLKKLELLDLSGNKFEGPLPSSFVNMTSLLELEISDNHFIGNFGSNIASLTSLEYFGFTENQFEVPVSFTPFANLSKIKFIYGEGNKILLDSQNSLPTWIPKFQLQVLSVSSTTKTKSLPLPNFLLYQNNLTILDFSSWKLERDFPNWLLENNTKMMEVLFRNCSLTGTFQLPMRPLPNIRQIDVSDNIIVGQIPINNISSIYPNLQSLNLSRNNIQGSIPYELGQMNSLYSLDLSDNQLSGEMPEDIFGVGHQLNFLKLSNNKLEGPILNIPNGLETLLLNHNRFTGRLPSNIFNASIISLDVSNNHLVGKIPSLIKNLSGLNELCLSNNHFEGSIPLELGELEYLTSLDLS

SEQ ID NO: 57804 - protein, 366 aa, Glycine max; identical to SEQ ID NO: 37097
  Clone ID: 701207361_FLI.pep

SEQ ID NO: 57805 - protein, 425 aa, Glycine max
  Clone ID: 701211587_FLI.pep
KMASLSMIQIRTGNCASGFGLNCAGKVKVGPSRVGFKVFASETQATEPDLSVTVNGLRMPNPFVIGSGPPGTNYTVMKRAFDEGWGAVIAKTVSLDAAKVINVTPRYARLRAGANGSAKGEIIGWENIELISDRPLETMLKEFKQLKEEYPDRILIASIMEEYNKAAWEELIDRVEQTGVDAFEINFSCPHGMPERKMGAAVGQDCALLEEVCGWINAKATIPVWAKMTPNITDISQPARIALSSGCEGVSAINTIMSVMGINLNTLRPEPCVEGYSTPGGYSARAVHPIALGKVMSIAKMMKSEFDSENYTLSAIGGVETGGDAAEFILLGANTVQVCTGVMMHGYGLVKKLCLELQDFMKKHNFTSIEDFRGVSLEYFTTHTDLVRRQKEAVQKRKAIKKGLQSDKDWTGDGFVQETESMVSN

SEQ ID NO: 57806 - protein, 446 aa, Glycine max
  Clone ID: 701214418_FLI.pep
SFPAMDSWLKAAEGLFEVVDRRAKAVASDLSEEQGDSKSPASNGQGSQGKRTKSKPKAQKALSDSPTIISDTTHEKSGSPSAPVDIATSIDKVDPEIDVSASTSTNQPKEPQPSDATSPLLGSSLSKILGDDVGKHDTDDAEALVNDADIGVATIAGNGDPVQESASDICEMDPPPAPKGIEGSSDEPTSTGQIIKSRDLDASKNVDIEKSDSVASDTAPKNDPILKDSDVKVESVVDEKSQEDHKADISPEKVQDQLDEAQGLLKTTKSTGQSKEARLARVCAGLSSRLQEYKSENAQLEELLTSERELSKSYEASIKQLQKDLSESKREVTRVESNMVEALAAKNAEIEALLSSMDAVKRQAALSEGNLASLQASMESMMRNRELSETRMMQALREELASAERRAEEERVAHNATKMAAMEREVELEHRAVESSTALARIQVIE

SEQ ID NO: 57807 - protein, 253 aa, Glycine max; identical to SEQ ID NO: 54650
  Clone ID: 701143402_FLI.pep

SEQ ID NO: 57808 - protein, 366 aa, Glycine max; identical to SEQ ID NO: 37097
  Clone ID: 701212136_FLI.pep

SEQ ID NO: 57809 - protein, 815 aa, Glycine max
  Clone ID: UC-GMFLMINSOY086A06_FLI.pep
GKTLNSLTLSSEYYFGFFRDKMPAKDDGSDKEKCLDLFLKIGLDERTAKNTVANNKVTANLTSVIDEAGATDGCSRTVGNFLYTVATKYPANALPHRPTLLQYIVSLKVKTTAQLDAALSFLATTGSENLDLDRFEEACGVGVEVSEEDIKQAVSEVVEENKATILELRYRTNVGELLGHVRKRLPWGDAKVAKQLVDAKLYELLGDRTAADDEKPSRKKKEKPAKVEDKAAPVSTPEKSPEEDVNPFLIFPNPEENFKVHTEVPFSDGSILRCCNTRDLLDKHLKATGGKVLTRFPPEPNGYLHIGHAKAMFIDFGLAKDRDGGCYLRYDDTNPEAEKKEYIDHIEEIVQWMGWKPFKITYTSDYFQELYELAVELIKKGHAYVDHQTPDEIKEYREKKLNSPWRDRPISESLKLFEDMKNGSIEEGKATLRMKQDMQSDNYNMYDLIAYRIKFTPHPHAGDKWCIYPSYDYAHCIVDSLENITHSLCTLEFETRRASYYWLLHALGIYQPYVWEYSRLNVSNTVMSKRKLNRLVTEKWVDGWDDPRLMTLAGLRRRGMTPTAINAFVRGIGITRSDGTLISVERLEYHVREELNKTAPRAMVVLHPLKVVITNLEANSAIEVDAKKWPDAQADDASAFYKIPFSNVVYIEHSDFRMQDSKDYYGLAPGKSVILRYAFPIKCTEVILADDNETILEIRAEYDPSKKTKPKGVLHWVAQPSPGVDPLKVEVRLFERLFLSENPAELDNWLGDLNPNSKVIIPDAYGVSSIQNAKVGDNFQFERLGYFVVDRDSTSEKLVFNRTVTLKGSYSKGGK

SEQ ID NO: 57810 - protein, 233 aa, Glycine max
  Clone ID: UC-GMROPIC070D05_FLI.pep
LAATTESRKDPGEYWKMIMKDQEMPEGLQGLVSFQSENNPKTQEQLGKGSKNHCEESLVTKSLLTCVFVTRDSSQVNSDFEPIPSVTKYDDLEFKSSIIKNDDFESRPSVTKYDDFELKSSVTKNNDFEPRPSVTKYDDFELRSSVTENDDFEPRPNISKYDDFELRSSVTENDDFESRPSVTKYDDLELKSSITKNDDFEPRPNISKYDDFASRSNTKYDSEPKASATKYSD

SEQ ID NO: 57811 - protein, 655 aa, Glycine max
  Clone ID: 701124086_FLI.pep
RPRTITRVGCKASLSVKMQDSGKWIVSGFVREHNHELVPPDQVHCLRSHRQISGAAKTLIDTLQAAGMGPRRIMSALIKEYGGISKVGFTEVDCRNYMRNNRLRSLEGDIQLVLDYLRQMHAENPNFFYAVQGDEDQSITNVFWADPKARMNYTFFGDTVTFDTTYRSNRYRLPFAPFTGVNHHGQPVLFGCAFLINESEASFVWLFKTWLMAMSGRPPVSITTDHDSVIRSAIIQVFPETRHRFCKWHIFKKCQEKLSHIFLQYPNFEAEFHKCVNLTESTEEFESCWSTLVDKYDLRDHEWLQAIYSSCRQWVPVYLRDTFFAEMSITQRSDSMNSYFDGYINASTNLSQFFKLYEKALESRNEKEVRADYDTMNTLPVLRTPSPMEKQASELYTRKIFMRFQEELVGTLTLMASKADDDGEVITYHVAKYGEDHKGYCVKFNVLEMKATCSCQMFEFSGLLCRHVLAVFRVTNVLTLPSHYILKRWTRNAKSNVILEEHACDVYTYYLESHIVRYNTLRHEAFKFVDEGARSAETYDVAMDALQEAAKRVSQGMQNEGKIPINNGKVRSHVLNDESHANYTSGCQEESLSQHMSKDDLDKNIRKLMNELECANRKCEIYRSNLLSVLKAVEDHKLELSVKVENIKISMKDGI

SEQ ID NO: 57812 - protein, 193 aa, Zea mays
  Clone ID: 700041786_FLI.pep
FLKRVMDRLPGARIAFIGDGPFRAELEQMFSGMPVVFTGTLQGEELSQAYASGDVFVMPSESETLGFVVLEAMSSGVPVVGARAGGIPDIIPEDQEGRTSFLYTPGDVDDCVGKIKRLLSSEELREAMGRAARKEMEKFDWRAATRKIRNEQYSAAIWFWRKKRAQVLRPLQWVLRLLRRTMPGAADAAAKQS

SEQ ID NO: 57813 - protein, 755 aa, Zea mays
  Clone ID: 700332652_FLI.pep
PPLPWEEWQVANDSWLDERNAADGGVEATDATVAAVPTADPAPEVVLRLLRFQKEWLAWALAQEASVTRGGILADEMGMGKTIQAISLVLTARRLRPPDHHSAASSSNSSVGRTKPQVGCTLVVCPVVAVIQWTEEIERHTASGSVRVLIYHGAKRVTQSFDFNSYDFVITTYSTIEADYRKHIMPPKTRCQYCNKLFYPNKMKVHLMYHCGPNAKRTEAQAKQQSKRKWDSSKEKVKEKRRVHKKGDEVNKDFQELADELGRQLRGQSPLHSVRWERVILDEAHFIKDRRCNTARAVFALESECKWALSGTPLQNRVGELYSLIRFLQIFPYSYYFCKDCSCEILDTSMKKQCDCGHSSVRHFCWWNKYISTPIQYGSTSFEGKRAMTLLKEKVLKGIVLRRTKKGRAADLALPPKIVTLRRDSFDKNEMEFYEALYTQSVTQFDAYVDAGTLMNNYAHIFDLLTRLRQAVDHPYLVAYSKTAGHPEGMKNEGNESMESQCGICHNLAEDVVVTSCDHAFCKTCLIDYSAALGNVSCPSCSIPLTVDLTAQNSVGKVTRSVKGRKCSGILSRLPSLVDFKTSTKIDALREEIRNMIEHDGSAKGIVFSQFTSFLDLIQFSLERSGIKCVQLNGAMNITEKGRAIDTFTHDADCRVFLMSLKAGGVALNLTVASHVFLMDPWWNPAVENQAQDRIHRIGQFKPIKSTRFVIKDTVEERILQLQQKKQLVFEGTVGDSPDAMSKLTEADLKFLFQI

SEQ ID NO: 57814 - protein, 268 aa, Zea mays
  Clone ID: 700439012_FLI.pep
LATKLTEVSVSDKLEGFRATKENFKGLSFPTISSVGPNAAVIHYKPEASTCSEMDADKIYLCDSGAQYLDGTTDITRTVHFGKPSAHEKSCYTAVLKGHIALDIAVFPNGTTGHALDILSRAPLWREGLDYRHGTGHGIGSYLNVHEGPHLISFRPSARNVPLQASMTVTDEPGYYEDGAFGIRLENVLICKDANAKFNFGDKGYLAFEHITWAPYQTKLIDTELLTPVEIDWVNTYHSDCRKILEPHLNEQEKQWLMKATEPVAARG

SEQ ID NO: 57815 - protein, 1070 aa, Glycine max
  Clone ID: UC-GMFLMINSOY055B02_FLI.pep
EDSGAEPLHDTDENFGMHPISYACEDKSSLKSMYSPVLGYLDKVKEKLRNPEDYQEFLKCLNIYSKEIIARHELQSLVGNLLGKHADLMEGFDEFLVQCEKNEGFLAGLLKKRHGPKPVKVEDRDRDRDRDDGMKERDRECRERDKSNAIANKDVLVPKTSLYAGKDKYAAKPISELDLSNCEQCTPSYCLLPKNYPIPPASQRTELGAEVLNDHWVSVTSGSEDYSFKHMRKNQYEESLFRCEDDRFELDMLLESVNVATKRVEELLEKVNANIIKGDSPIRIEEHLTALNLRCIERLYGDHGLDVMDVLKKNASLALPVILTRLKQKQDEWARCRSDFNKVWAEIYAKNYHKSLDHRSFYFKQQDTKSLSTKVLLAEIKEISEKKRKEDDVLLAIAAGNRQPIIPHLEFVYPDSEIHEDLYQLIKYSCGEMCTTEQLDKAMKIWTTFLEPMLGVPSRPQGPVDTEDVVKANKNNSAKTGTGIDDGDSSPATNPKNLNTNRNGDENFPSEQSNSCKQWQTSGDNKVKEDNHLDLERSAHKNETLGSSTQHGKVHINASTTDEVSRANKQDHSIERLVNANVSLTLGMELISRRTNVDNASGLTATPSRPGNISGEGGLGLPSLEGADSTRPVTSTNGAINEDTKVHRYHEEVGHFKSEREEGELSPNGGDFEEDNCEVYGHAGLEAVHKGKDGTICRQYQNRHGEEVRGEAGGENDADDEGEESPHRSMEDSENASENGDVSGTESADGEECSREHEENGDHEHDNKAESEGEAEGMTDANDVEGDGASLPYSERFLVTVKPLAKHVPPVLHDKQRTVRVFYGNDSFYVLFRLHQTLYERIQSAKVNSSSAEKKWRASNDTGSSDQYGRFMDALYNLLDGSSDSTKFEDECRAIIGTQSYVLFTLDKLIYKLVKQLQVVATEEMDNKLLQLYTYENSRKPGRFVDLVYHENARVLLHDENIYRIECSPAPTQLSSIQLMDYGYDKPEMTAVSMDPNFSAYLHNDFLSVVPDKKEKSGIYLKRNKRKYAISDEYSSQTLDGLQIINGLECKIACSSSKVSYVLDTEDFLH

SEQ ID NO: 57816 - protein, 163 aa, Glycine max
  Clone ID: UC-GMFLMINSOY115G10_FLI.pep
IVNVVWLVFLCAVEETEMGSKTKTFTFEEVAKHNHRKDCWIIVKGKVYDVTPFLDDHPGGDEVLVTATEKDATTDFEDIGHSDSATQMMEKYFVGEVDTNTLPAQVTSNNSVRQPTQAPPAYNNQSSGFVVKMLQYIVPLLILAFAFGLQYYGKKNKSTESEN

SEQ ID NO: 57817 - protein, 752 aa, Glycine max
  Clone ID: UC-GMROPIC073H01_FLI.pep
SSNDVLFNTAPNPSNPETFLIFKDQYLQLSSSLPSQRASLFGLGEHTKSSFKLRPNQTLTLWNADIGSDNLDVNLYGSHPFYLDVRSPSADGTVKAGTTHGVLLLNSNGMDIVYGGDRITYKVIGGVFDLYFFSGSSPELVLEQYTELIGRPAPMPYWSFGFHQCRWGYKNVSDLEGVVDNYAKAGIPLEVMWTDIDYMDAYKDFTLDPINFPLDKMISFVDALHKNGQKYVLILDPGISVNKTDATYVRGLKADVYIKRNEVNYLGEVWPGPVYYPDFLNPRSQAFWGGEIKLFRDLLSFDGLWLDMNELSNFITSPPNPSSNLDNPPYKINNGEVQQSINYRTVPATSLHFGNITEYNAHNLYGLLESKVTNKALVDITGKRPFILSRSTFVSSGKYASHWTGDNAATWNDLAYSIPSILNSGIFGIPMVGADICGFGGNTTEELCRRWIQLGAFYPFARDHSEKNSIRQELYIWDSVASSARKVLGLRYSLLPYFYTLMYEAHTKGTPIARPLFFSFPEDVTTYKINSQFLVGKGVLVSPVLQSGATTVNAYFPKGSWFDLFNVSNSVNAESGKYVTLDAPSDHINVHVGEGNILALQGEAMTTDAARKTAFQLVVVISSSRDSYGQVYLDDGEALDIAGENDQWTLVSFYGTLHNSSVIVTSKVTNGIFALDQRWIIDNIIFLGIPKYQRFNGMDLAGNELNIVKGTDSMRTAVVKSESDSSSQFLNVQVSKLSLLIGEEFKLEIEIK

SEQ ID NO: 57818 - protein, 400 aa, Glycine max
  Clone ID: UC-GMFLMINSOY059E06_FLI.pep
TVGSFIFFLLVLSWAYLYAFPSSQSLIQSHEIPINSSDSLVQSYEIPSNSSDSLVQSYDVILKPNVSMDTCNVFEGSWVRDDSYPLYDASHCPFVERGFNCLANGRKDRDYTKWRWKPKNCEIPRFDARGILEQLRGKRVVFVGDSLSRTQWESMICLLMTGVEDKKSIYEIKGNKITKQIRFLGVRFSTFDVRIDFYRSVFLVRPGSVPRHAPQRVKTTLRLDKIDDISHEWIDSDVLIFNSGHWWTRTKLFDVGWYFQVDNSLKLGMTINSGFNTALLTWASWVESTINTNRTRVFFRTFESSHWSGQNHNSCKVTKRPWKRTNRKERNPISNMINKVVKSMSAPVTVMHVTPMTAYRSDGHVGTWSDQPSVPDCSHWCLPGVPDMWNEILLSYLLPK

SEQ ID NO: 57819 - protein, 221 aa, Glycine max
  Clone ID: JC-GMFL02220103G07_FLI.pep
AQESPIPTLSLSLSTCQRKRLKRRKGKARDQPKHTQRNMSSPSKRREMDLMKLMMSDYKVEMINDGMQEFYVQFHGPNDSPYHGGVWKVRVELPDAYPYKSPSIGFINKIYHPNVDEMSGSVCLDVINQTWSPMFDLVNVFEVFLPQLLLYPNPSDPLNGEAAALMMRDRPSYEQRVKEYCEKYAKPEDIGEATEEKSSDEEMSEDEYDSSDEQVVGKADP

SEQ ID NO: 57820 - protein, 274 aa, Zea mays
  Clone ID: 700583520_FLI.pep
GSIFEGLLPNDINVYATTASNAEESSWGTYCPGEFPSPPPEYDTCLGDLYSVAWMEDSDFHNLRTESLKQQYNLVKDRTAVQDTFSYGSHVMQYGSLELNVKHLFSYIGTNPANDDNTFIEDNSLPSFSKAVNQRDADLVYFWQKYRKLADSSHEKNEARRELLEVMAHRSHVDSSVELIGSLLFGSEDGPRVLKAVRAAGEPLVDDWSCLKSTVRTFEAQCGSLAQYGMKHMRSFANICNAGILPEAVSKVAAQACTSIPSNPWSSIHKGFSA

SEQ ID NO: 57821 - protein, 606 aa, Zea mays
  Clone ID: UC-ZMFLB73137H09_FLI.pep
LRFTKHSNAYMLVYIRESDKDNIICDLDDEDISEHLKVRLRKEHEEKEYKKKEKAEAHMFTALKVARDFDIKEQIGRHMHFDLVDFDRVNSFRAPKNMSINEVKEELSKEFGIPVECQRFWVWAKRQNCTYRPSRPLTSQEETSTIGVLKDATVAKLPNSEVRLFLEVHFRQENQPIAPWNTKEDILLFFKLYDPEKEDLRYVGNFFVKASGKPSDIVERLNQIAGFLSDEDIELYEEIKFEPVVMCVPIESNASFRSSQIDNGDIICYQKHCLPDSMDRYRYPTVPSFFEYIHNRQIVHFRLLEKPKEEGFSLELSKCSTYDDVVEKVAKQLRMDDPSKIRLTQHNPSSQQPKPHFIKYRSLNYLSDMLHNHNQMCDILYYDILDIPLPELESMRSLKVAFQNAANHEMSFHIMRLPKSNSLLDLIEDLKSKVEISCNDAEFRFFGVYLHKICKVYQPGDKIDSVNDHGPLYIEEVPEDEKNAGPHDRLVHVYHFEYNHHIQYFGEPFFFLIRDGEALSDMKVRIQKRLQVPDEQFLKWKFAHVTFSKPEYLQDSDIVMNRFHRPVYGGWEQHLGLEHTATTPKRSYLGNNQNRHSFEKPVRIYN

SEQ ID NO: 57822 - protein, 438 aa, Zea mays
  Clone ID: UC-ZMFLB73149E05_FLI.pep
DAGLPLAQVEQEPQQPSHSEEDSREEMGNCGTREENAVVAAHAQVQQLHLLQNPAKNAIGDRKHNRTSSDISDPSTPRKAEDAKNISIYNDVIVFTLFELETITKSFRADYVLGEGGFGTVYKGYIDENVRVGLKSLPVAVKVLNKDGHQGHREWLTEVNCLGQLRHPNLVKLIGYCCEDDHRLLVYEFMFRGSLENHLFRKTATPLPWGTRMSIALGAAKGLACLHNAQRPVIYRDFKTSNILLDSDYTAKLSDFGLAKAGPEGDQTHVSTRVMGTYGYAAPEYVMTGHLTARSDVYSFGVVLLELLTGRKSIDKSRPSREQSLVDWALPKLNDKRRLLQIIDPRLEGQYSARAAHKACSLAFYCLSQNPKARPLMSDVVETLEPLQGSGGGDGRGQPSGLPDYRGRRRITGNSVHFRAIPNPKCSPAVPATACRVR

SEQ ID NO: 57823 - protein, 255 aa, Zea mays
  Clone ID: UC-ZMFLB73132A06_FLI.pep
GLALVPLWDDRQGTITGMLTASDFVLILRKLQRNIQVIGNEEPISAWKEAKLQFYGGPDGAAMQRRPLIHVKDSDNLVDVALTIIRNEISSVPIFKCMADSSGVPFLNLATLQGILKFLCSKLQEEAEGCSLLHNQLLSIPIGTWSPHTGRSSSRQLRTLLLSSPLNTCLDILLQDRVSSIPIVDDNGSLRDVYSLSDIMALAKNDVYARIELEQVTVQNVIHFLLLFNFSRHCCFGIFFFAYTHITEKQQFLCF

SEQ ID NO: 57824 - protein, 430 aa, Zea mays; identical to SEQ ID NO: 54323
  Clone ID: UC-ZMFLB73128E08_FLI.pep

SEQ ID NO: 57825 - protein, 479 aa, Zea mays
  Clone ID: UC-ZMFLB73131F01_FLI.pep
FERPDFPQFFSGATPLVGSLPYAQCYGGHQFGVWAGQLGDGRAIALGEVVNSRGERWELQLKGCGKTPYSRFADGLAVLRSSIREFLCSEAMHGLGIPTTRALCLVETGKSVVRDMFYDGNAKEEPGAIVCRVAPSFLRFGSYQIHASRGKEDIEIVRRLADYTIHHHFPHLENMKKSEGLSFETAIGDSPTIDLTSNKYAAWAVEVAERTAYLIARWQGVGFTHGVLNTDNMSVLGLTIDYGPFGFLDAFDPSYTPNTTDLPGERYCFANQPDVGLWNIAQFTGPLSSAELISQDEANYVMERYGTKFMDEYQSIMTKKLGLTKYNKQLISKLLSNMAVDKVDYTNFFRLLSNVNADPGIPENELLVPLKAALLDIGKERKEAWISWVQTYIEELVESGVPDEERKAAMNSVNPKYILRNYLCQSAIDVAEQGDYEEVRRVLRVMHNPYDEQPGMEKYARLPPAWAYRPGVCMLSCSS

SEQ ID NO: 57826 - protein, 346 aa, Zea mays
  Clone ID: UC-ZMFLB73137C08_FLI.pep
EDDGAREQLLQSYNEEISKMQQLARRHSQKIIDENQKLRSDLEAKMNDLDVRSKQLDEIAAKSDYDRRSLEQEKQKNAIKSSHLKLATLEQQKADENVLKLVEEQKREKHAALKKILMLEQQLDAKQKLELEIQQLKGKLKVMEHMPGDEDSASKNKINELSEALQEKIDELDGMESLNQTLVIKESKSNIELQEARKELENGLLDLSGGQTHIGIKRMGELDLKAFSKACQKERTENAEVTAAFLCSKWEAEIKNPDWHPFRVVTIDGKEMAIIEDDAKLRALKEEHGEEIYAMVTKALLETNEYKSKGSYPVGELWNFKENRKVTLKEAVQFVLRQWRTNRRKR

SEQ ID NO: 57827 - protein, 415 aa, Zea mays
  Clone ID: UC-ZMFLB73150G11_FLI.pep
SDPQTDLTHPFLHLRPLPAMAPAPAAASAGRKSHVTVLLLYVVCGLILLLLLASYSPRLQPHAHGRSLHRRLKLHPKSSLPSDASSGGNGGQQKTQHQNHHAASFDPTIAELERRLDDKEWEREHYSLLHGGEPDDHMKEWEEFLKEEEDFINDDDRFNIADRIRALFPKIDVAPQDGFVSLDELTAWNLQQARADQHHRSAREMELYNKNGDEIVSFEAFNALRQESHGEGNMLGFEWWKEDHFNASDANADGFLDKTEFNDFLNPSDSDNPKIINLLCKQEIRQRDKDGDGKLNFEEYFTGLHDHIHGYDDENADISQIGNITVAKDRFFKLDKDNDGFISEHELEPVLDKLYLSERYYSRQQAIHAISEADKDHDGRLTLEEMVENPYAFYGSVYLSSSDNDDEDYFHDEFR

SEQ ID NO: 57828 - protein, 584 aa, Zea mays
  Clone ID: UC-ZMFLB73149C12_FLI.pep
SRADPHFIKSCSTMDTGCLSSMNITGASQTRSFAGQLPPQRCFASSHYTSFAVKKLVSRNKGRRSHRRHPALQVVCKDFPRPPLESTINYLEAGQLSSFFRNSERPSKPLQVVVAGAGLAGLSTAKYLADAGHKPILLEARDVLGGKVAAWKDEDGDWYETGLHIFFGAYPNIQNLFGELRIEDRLQWKEHSMIFAMPNKPGEFSRFDFPETLPAPINGIWAILRNNEMLTWPEKVKFAIGLLPAMVGGQPYVEAQDGLTVSEWMKKQGVPDRVNDEVFIAMSKALNFINPDELSMQCILIALNRFLQEKHGSKMAFLDGNPPERLCMPIVDHIRSRGGEVRLNSRIKKIELNPDGTVKHFALSDGTQITGDAYVCATPVDIFKLLVPQEWSEITYFKKLEKLVGVPVINVHIWFDRKLNNTYDHLLFSRSSLLSVYADMSVTCKEYYDPNRSMLELVFAPADEWIGRSDTEIIDATMEELAKLFPDEIAADQSKAKILKYHIVKTPRSVYKTVPNCEPCRPLQRSPIEGFYLAGDYTKQKYLASMEGAVLSGKLCAQSIVQDYSRLTLRSQKSLQSGEVPVPS

SEQ ID NO: 57829 - protein, 109 aa, Zea mays
  Clone ID: UC-ZMFLB73193B04_FLI.pep
CPILPSLSTNKRMNLIEQKNLKLSFGAALAQLASLDSTKEATLPLRLFVAVCTGESNYTIGCNSNQIHCSALSFCEEATTSSQENPKAGAGAELGQAGPSISQSQLQKL

SEQ ID NO: 57830 - protein, 531 aa, Zea mays
  Clone ID: UC-ZMFLB73207E09_FLI.pep
KADNNRYSTGEDRTLSESSPVISEPVLVNIHKNVAINGKAADASDRARQQDPQSQSVVESRSSAPAAQLGEDQAAAKAQAAFRGYLARRSFRALKGIVRLQALIRGYLVRRQAVSTLRATWLIVKFQALVRGRNVRLSGSRMQLNVKFGQSNFGGVRSSDAWKEKLSSNAYVRKLLSSPIVLEPLHFQYDKRDPNSTYNWFERWTIGCIWKPAFQPKRVADGKPLVKKASYAMETQSAKLKRNIRKGSAAIAGSFHTSGESDKVKRNPKNFSSFPADSVPDSQLSELEKVKRNLRKVTDSMAEASKISSSRVDSSKVCNSTAEVPKESNPVAEISKIRSLLNGISDHQDIQCENTRESSFPLGTQEDSDNDHLLRYSNMDSLDLVPGLKSDQEIQLDSVSIGENVDDPTVVAPAVEEMSPQNIDTEDNVLCKKEEARSKEEHLSNGSLRTSKRKSSFPNKSEYVENGTHATPVQPRQPSYMAATESAKAKLRAQNSPSLDSDSAAEKNGFTRRHSLPSSTKSRALKAEWKR

SEQ ID NO: 57831 - protein, 698 aa, Zea mays
  Clone ID: UC-ZMFLB73183B10_FLI.pep
ARQLHVPNCWAPDCGELREMHGLASFPEAHSRIHKGLRYSVTAGDEVEDMFALLSEVKRRIPSISAVSSGAIASDYQRLRVESVCSRLGLVSLAYLWKQDQTLLLEEMIRRGIVAIIVKVAALGLKPSSHLGKELAELKCHLLQMNENYGINVCGEGGEYETLTLDCPLFRNARIILDDSEVILHSADSIASVGILHPRAFHLEQKPDSSDRIGDGSAVQESSSCVYEVDEVTTHDDVGEKQALSPAVDAYTNVDLCISKTGNNLRSMSCWIQDPSRASEGLKADLIAVLSRIENQLKEEGLGWVNVLYVHLYISSMKEFGLANEVYVSFITEKKCYLGVPSRSTIELPLVQAGLGKAYVEVLVSNEVVKRVLHVQSISCWAPSCIGPYSQATLYEDILYMAGQLGLDPPTMKLCLGGPRAELELALQNSEAVANAFSCSIYISAIHFLVYCSAQLTSSEKEEIEQTLKSSYITRLDRSKGGSYPTVLYVFASDLPKGARVEVKPILYVPSTDDWVAAEETETGVPLPAPSKTWTDCTAPYSALRDSCCQVHTTGGRICSAVVSITDDIASKICSAAGQLHHGEENLKIMARFCAFQIAKTLADNRFSWDSVTMLRLYYSVDLAVAADAVSGAFSEALAELAQDNPSMRTDVPFYNVVPVAGAGRSACANDIMACELLASNVSSAKSIPAEPFAVTPA

SEQ ID NO: 57832 - protein, 876 aa, Zea mays
  Clone ID: UC-ZMFLB73203H01_FLI.pep
PLVSLPAVGSRVVYFPQGHSEQVAASTNKEIESQIPNYPNLPPQLICQLHNVTMHADAETDEVYAQMTLQPLNPQELKDPYLPAELGSANKQPTNYFCKTLTASDTSTHGGFSVPRRAAEKVFPPLDFTQQPPCQELMAKDLHGNEWKFRHIFRGQPKRHLLTTGWSVFVSAKRLVAGDSVLFIWNDNNQLLLGIRRANRPQTVMPSSVLSSDSMHIGLLAAAAHAASTNSRFTIFYNPRASPSEFVIPLVKYVKAVYHTRISVGMRFRMLFETEESSVRRYMGTITGICDLDSVRWPNSHWRSVKVGWDESTAGERQPRVSLWEIEPLTTFPMYPSPFPLRLKRPWPTGLPSLHGGKDDDLANSLMWLRDTANPGFQSLNFGGLGMSPWMQPRLDATLLGLQPDMYQAMATAAFQDATKQASPTMLQFQQPQNIAGGASPLLSSQILQQAHHQFQQQPYLQNISESTIQAQGQSEFLKQQIQRSQSFNEQKPQMQHQQESQQQQQPQCLPVPQHQQMQQQNMTNYQSISNALSPFSQLSPVSQSSPMALQTILPFSQAQSFTDTNVGSLSPSNGNTMQNTLRPFSSEAVSHLSMPRPTAIPVADPWSSKRVAVESLLPSRPQVSSQMEQLDPAPASIPHSSALAPLPGRGCLVDQDVNSDPQNHLLFGVSIDSQSLLMQGGIPGLQNGNDSAAIPYSTSNFLSPSQNDFPLDHTLNSSGCLDDSGYVPPCSDNSDKVNRPPATFVKVYKSGTYGRSLDITRFSSYHELRRELGRLFGLEGQLEDPLRSGWQLVFVDREEDVLLVGDDPWQEFVSTVSCIKILSPQEVQQMGKQGLELLSSAPARRLGSSCDDYVSRQESRSLSTGIASVGSVELG

SEQ ID NO: 57833 - protein, 202 aa, Zea mays
  Clone ID: UC-ZMFLB73204C02_FLI.pep
PPCEVHSASFLLIISGSLLKNLSGSLHQKTFFYLILFICTLVTILTVSFVNPKICKGLDFMHERGIAHLDVKPDNIYVRNGIYKLGDFGCATLVNRSLAIEDGDSRYMPPEMLNDKYEHLDKVDIFSLGAAVYELIRGTPLPESGSHFTSIREGKIALLPGCPMQFQSLIKSMMDPDPVRRPSAKEILRHPSFDKLHKASSK

SEQ ID NO: 57834 - protein, 326 aa, Zea mays
  Clone ID: UC-ZMFLB73191D05_FLI.pep
SYPTSRRVLLSPRSSRAPPGDRAMEAGGVGLALQTRAAAFGSGQRRGGLQSPIGRLRVAEPAGAAVAVRVRGSKPVVPLRAKKSSGGHENLHNSVDEALLLKRKSEEVLFYLNGRCIYLVGMMGSGKSTVGKIMSEVLGYSFFDSDKLVEQAVGMPSVAQIFKVHSEAFFRDNESSVLRDLSSMRRLVVATGGGAVIRPVNWKYMKKGLSVWLDVPLDALARRIAKVGTASRPLLDQPSGDPYTMAFSKLSMLAEQRGDAYANADVRVSLEEIASKQGHGDVSKLMPTDIAIESLHKIESFVIEHAADNPASDSQAESQIQRIQTL

SEQ ID NO: 57835 - protein, 542 aa, Zea mays
  Clone ID: UC-ZMFLB73194A08_FLI.pep
GRPWREMTRIFVQRGTAGSSSSSGRSGSQSAQQPAAAAREELPLQPQPQLPELLAIDDVTEHLNEGNENNSSRIKFLRTDDTISESSSYAEERAAREKPPKDDSNVINPTSLVEEPIVLHTPDQIEHGNSVPSGTNSSQMVGAASHPPPPPAPPPKSLLGNSGLWRMGPGSSNSVRIGSPRRPVAWPPVAARTSASGSRPSSPRSLVDGEGYNSADEQGPCYASSYDDSERERMFEHDLRRVKGLEIRKTAEDGNCLFRAVADQVYGDAEAYDMARQMCVDYMERERDHFSQFITESFTLYCKRKRRDKVYGNNVEIQAFAEMYNRPIHIYSYSTEPINIFQGSYNTDTPPIRLSYHHGNHYNSVVDPRRQTIGAGLGFSSFRGTNVDRDQVKAAIKAQQDQQIDNALMAEGRFYSDLELTEREIERMVMEASRSEYLAKEKKLNIRESSTSGAEPSSSAAISGSSRSVAGADRSSEDYFVLPDTVLTRSMQLLLAMGFGYNQVMEAYSIFGEDVDSMVCYLVETGGASAGGSNRRKGKAAE

SEQ ID NO: 57836 - protein, 549 aa, Zea mays
  Clone ID: UC-ZMFLB73196H08_FLI.pep
GFDAFGVLASASCPRACCPPTRLSQIPSKFLRVFRRSYFGRGTAPRSGRNPHSVWWVGLPCPFLALFPSHKGGSWMGCLPCFGSAGEGAAKEGGARKDGTSDLRVTRVESDKSKPQGGLDSKKDAVILREGNNQHIAAHTFTFRELAAATKNFRQDCLLGEGGFGRVYKGRLENGQVVAVKQLDRNGLQGNREFLVEVLMLSLLHHDNLVNLIGYCADGDQRLLVYEFMPLGSLEDHLHDIPPDKEPLDWNTRMKIAAGAAKGLEYLHDKASPPVIYRDFKSSNILLGEGFHPKLSDFGLAKLGPVGDKTHVSTRVMGTYGYCAPEYAMTGQLTAKSDVYSFGVVFLELITGRKAIDNTKPHGEQNLVAWARPLFKDRRKFPKMADPSLQGCFPMRGLYQALAVAAMCLQEQAATRPFIGDVVTALSYLASHTYDPNAPAQHNRSNSSTPRVSRGGGSNDQRRLRSSNHHSPDLRREVTTASRYDDEVSRANSGTGSGRRSGLDDADMSGSQLGSPAHTGRKRGSPRTSESQHAIAEAKTYGENSRGRK

SEQ ID NO: 57837 - protein, 586 aa, Zea mays
  Clone ID: UC-ZMFLB73221D04_FLI.pep
RPLLALSQQQYQKPRPPHPPATMPSGDDSDPLLAPADGIRFAALDYRDHPADRGATGGWRSALFIIAVEISERFTFYGVSSNLINYLTGPLGEGTAAAAAAINTWNGVAQLLPLLGGALADKWLGRYRTIVVASLLYVIGAGMLAFSTLLSSGSGHQCTTAGGQTCAPSTIKVTFFYVSLYIVAVAQGGHKPCVQAFGADQFDQSDPKETVSRSSFFNWWYFGMCAGTAVTLLFLNYVQDNIGWGLGFGIPCAVMAAALAVFLLGTRRYRYYVTAGERGLFARAGEAFVEWRSRRKALQHGDRPVAEGAPGFSAGVDEEEQAAVSHDAGLVKETKDILRLFPIWATCLLYAVAFSQSSTFFTKQAATLDRRVGRHLQVPPAALQSFISITIVVFIPLYDRVLVPVARRYSGNPSGITMLQRIGTGMFLSLLSMVIAALVEKHRLRVAVDAGLVDKPMVPLPMSLWWMVPQYVLFGAADVYTMVGLQEFFYDQVPDKLRSLGLALYLSIFGVGSFISSTLVSIIDSVTTARGGSWFSNNLNRGHVDYFYWLLAALSALELLAYVFFAVTYKYKNKATVHATVVGQSL

SEQ ID NO: 57838 - protein, 854 aa, Zea mays
  Clone ID: UC-ZMFLB73224A05_FLI.pep
HTHTPLSPRPRRDPSRLDPDGPVPPPSHAHGAAAAAAADMTLASLARALGRSARSSRPRQGFQLGGLRQPPAPPLPPPVHGGEGGAAGFVRSYLTAASSAALGKPSAGKTVDWRYVLASPHFRRLFSDGSKKNYENYYPKGKKEVPKGDGTNKSESKQESNTDEGWNFQDNAMKHMQNFLAPLLILGLMLSSMSSSSADQKEISFQEFKNKLLEPGLVDRIVVSNKSVAKVYIRSSPHPKSQGQDSDIHITTTDAPGKPAPSRCKYYFNIGSVDLFEEKLEEAQEALGIDPHDFVPVTYVAEVNWFQEVMRFAPTALIVGLLYFTGKRMQSGFNIGGGAGKGRGGIFNIGKATVMKMDKNSKNKVFFKDVAGCDEAKQEIMEFVHFLKNPKKYEDLGAKIPKGALLVGPPGTGKTLLAKATAGESGVPFLSISGSDFMEMFVGVGPSRVRNLFQEARQCAPSIVFIDEIDAIGRARGRGGFSGSNDERESTLNQLLVEMDGFGTTSGVVVLAGTNRPDILDKALLRPGRFDRQIAIDKPDIKGRDQIFRIYLKKLKLDNKPSFYSQRLAALTPGFAGADIANVCNEAALIAARSEETQITMQHFESAIDRIIGGLEKKNRVISKLERRTVAYHESGHAVAGWFLEHAEPLLKVTIVPRGTAALGFAQYVPNENLLMTKEQLFDMTCMTLGGRAAEEVLIGKISTGAQNDLEKVTKMTYAQVAVYGFSEKVGLLSFPQKDGGFEMSKPYSNQTASIIDDEVREWVGKAYKKTVELITEHKEQVAQIAELLLEKEVLHQDDLTRVLGERPFKALEPTNYDLFKKGFEDGGDNSQAPAENAELPDDSSPPVGDVVPT

SEQ ID NO: 57839 - protein, 821 aa, Zea mays
  Clone ID: UC-ZMFLB73225B12_FLI.pep
QRGGRDEGAMAQILLHGTLHATIFEAESLSNPHRATGGAPKFIRKLVEGIEDTVGVGKGATKIYATVDLEKARVGRTRMISNEPVNPRWYESFHIYCAHMAADVIFTVKIDNSIGASLIGRAYLPVQDLLGGEEIDKWLEICDENREPVGDSKIHVKLQYFDVGKDRNWARGVRSTKYPGVPYTFFSQRQGCKVTLYQDAHVPDNFVPRIQLADGKNYEPHRCWEDIFDAISKAQHLIYITGWSVYTEITLVRDTNRPKPGGDVTLGELLKRKASEGVRVLMLVWDDRTSVGLLKKDGLMATHDEETANYFHGTDVNCVLCPRNPDDSGSFVQDLQISTMFTHHQKIVVVDHEMPNQGSQQRRIVSFIGGIDLCDGRYDTQYHSLFRTLDTVHHDDFHQPNFEGGSIKKGGPREPWHDIHSRLEGPIAWDVLYNFEQRWRKQGGKDLLVRLRDLPDIIIPPSPVMFPEDRETWNVQLFRSIDGGAAFGFPETPEEAARAGLVSGKDQIIDRSIQDAYVNAIRRAKNFIYIENQYFLGSSYGWKPEGIKPEEIGALHLIPKELSLKIVSKIEAGERFTVYVVVPMWPEGVPESASVQAILDWQRRTMEMMYTDIAQALEANGIEANPKDYLTFFCLGNREVKQEGEYEPEEHPEPDTDYIRAQEARRFMIYVHTKMMIVDDEYIIIGSANINQRSMDGARDSEIAMGAYQPYHLATRQPARGQIHGFRMSLWYEHLGMLEDVFQRPESVECVQKVNEVAEKYWDLYSSDDLEQDLPGHLLSYPIGVTADGSVTELPGMENFPDTRARVLGNKSDYLPPILTT

SEQ ID NO: 57840 - protein, 807 aa, Zea mays
  Clone ID: UC-ZMFLB73215F06_FLI.pep
LNHRAMAAKLTRLHSLRERLGATFSSHPNELIALFSRYVHQGKGMLQRHQLLAEFDALFDSDKEKYAPFEDILRAAQEAIVLPPWVALAIRPRPGVWDYIRVNVSELAVEELSVSEYLAFKEQLVDGQSNSNFVLELDFEPFNASFPRPSMSKSIGNGVQFLNRHLSSKLFQDKESLYPLLNFLKAHNYKGTTMMLNDRIQSLRGLQSSLRKAEEYLLSVPQDTPYSEFNHRFQELGLEKGWGDTAKRVLDTLHLLLDLLEAPDPANLEKFLGTIPMMFNVVILSPHGYFAQSNVLGYPDTGGQVVYILDQVRALENEMLLRIKQQGLDITPKILIVTRLLPDAAGTTCGQRLEKVIGTEHTDIIRVPFRNENGILRKWISRFDVWPYLETYTEDVSSEIMKEMQAKPDLIIGNYSDGNLVATLLAHKLGVTQCTIAHALEKTKYPNSDIYLDKFDSQYHFSCQFTADLIAMNHTDFIITSTFQEIAGSKDTVGQYESHIAFTLPGLYRVVHGIDVFDPKFNIVSPGADMSVYYPYTETDKRLTAFHPEIEELIYSDVENSEHKFVLKDKKKPIIFSMARLDRVKNMTGLVEMYGKNARLRELANLVIVAGDHGKESKDREEQAEFKKMYSLIDEYKLKGHIRWISAQMNRVRNGELYRYICDTKGAFVQPAFYEAFGLTVIESMTCGLPTIATCHGGPAEIIVDGVSGLHIDPYHSDKAADILVNFFDKCKADPSYWDKISQGGLQRIYEKYTWKLYSERLMTLTGVYGFWKYVSNLERRETRRYIEMFYALKYRSLASQVPLSFD

SEQ ID NO: 57841 - protein, 307 aa, Zea mays
  Clone ID: UC-ZMFLB73230A05_FLI.pep
GLSGGGAPPGLRLPLAAVAVKPKRRSSRVAQAPPQPEAGIPGTQTIYVKTFGCSHNQSDSEYMSGQLSAFGYAITEDPEGADLWLINTCTVKNPSQSAMTTLISKCKNANKPLVVAGCVPQGSQGLKELEGISIIGVQQIDRVVEVVEETLKGHEVRLLSRKTLPSLDLPKVRKNKFIEILPINVGCLGACTYCKTKHARGHLGSYTIDSLVDRVKTVVSEGVREIWLSSEDTGAYGRDIGTNLPNLLNAIVAELPVDQSTMLRIGMTNPPFILEHLKEIAAVLCHPCVYSFLHVPVQSGSDSVLKV

SEQ ID NO: 57842 - protein, 187 aa, Zea mays
  Clone ID: UC-ZMFLB73242B09_FLI.pep
ETHLKMMRSQLWMHHLKLWMEKSVNQNLSQVSQHLMNGLISAIILLRGCIIDIELGLITKDMNQLESSSVTRGRGKNKRIWTYYEDEELIKALYEISLDPKWKSEGGFKNGYCSVLENELKARLPGCGLSAIPHIESRVRHFRTKYGSIEVMLAKSGFNQMTMLFALPETLRREFILNMIADEAQRK

SEQ ID NO: 57843 - protein, 211 aa, Zea mays
  Clone ID: UC-ZMFLB73257G09_FLI.pep
AIEKAGYTGKVVIGMDVAASEFYSDKDQTYDLNFKEENNDGSQKISGDSLKNVYKSFVSEYPIVSIEDPFDQDDWVHYAKMTEEIGEQVQIVGDDLLVTNPTRVAKAIKEKSCNALLLKVNQIGSVTESIEAVKMSKRAGWGVMTSHRSGETEDTFIADLAVGLSTGQIKTGAPCRSERLAKYNQLLRIEEELGAIAVYAGAKFRAPVEPY

SEQ ID NO: 57844 - protein, 542 aa, Zea mays
  Clone ID: UC-ZMFLB73245G04_FLI.pep
YSGEKKGNMAESKVASLDARTTKIRNVPIAVTPEGFWCCPSQAVLQKTAKSQNPQAKTKPKGGASPLAPKAAPPIQRAPTISSERRTHSTPTRAKTNSEEQRCLPPAEDAAANNNATNPPKAVNERPQKQHKVSVGFGQLETSDLKVVLYGKDGVAVKMSVHKNTLAGNSTFFADKLSGQSPASSIEVTDCEDVEIYVETVGLMYCSDVKQRLIKQTVPRVLRVLKVAELLGFPACVMSCLDYLEAVPWVGEEEENVVSSVRNLQSESYGVSPVLKRVAPSDRTTPPNDTFSHIIELVLRSSEDRGRREMKSLVQKLLKESSTGCMSGSSDLCSAVLYRSCRNCLDSLLILFQQATDSDFAEQALNTKEPVFRQVALEADNLLWLAEILADRNAADEFAVIWASQRELAGLHSRLPVKSRHLVSCVTARLFVGIGKGEMLPSKDTRRLLLDVWLQPLMDDYNWLQHGCRSFDRKVVEEGVGRTILTLPLEDQQTILLSWLGSFLKVGDSCPNLQKAFEVWWRRTFVRPYAEQQGNRSQSGRS

SEQ ID NO: 57845 - protein, 128 aa, Zea mays
  Clone ID: UC-ZMFLB73239D02_FLI.pep
YLIVFIYLGLQVSGDATLQVDHFTFSPSIADNMRTASLVISHAGSGSIFETLRLGKPLIVVVNEDLMDNHQSELAEELAERKHLFCARPQTLGETIRAMDLETLVPYEPGDAKPVVALINRFLGFPVA

SEQ ID NO: 57846 - protein, 777 aa, Zea mays
  Clone ID: UC-ZMFLB73232A07_FLI.pep
AHSSGSSSPPAPVHHLPPPATARPQPTTPQRSNGGQRRHRGERPAELGRGGGGAGREPPGRGEAHGGAGPAARGQDRGFHPPRRPGGRRRLRQGRVRRRRRARRGGPPPRQGQQRVDPRLHRPRRRHLRRHHRLRRHLPPPHQGRARAPGRAAQASQRRNLRHRQRRAHAAVGGHPRGDAGAHQHPPPGLLRHPLRDPRGHHEAAQHRCQPLPAAPGHHHRVGRPGPALLHRRPHHGPPQRAGRHRRREEGGRRRGVQDRRHRGRLLQAQPQGGPRHRQRHVRGLRARGHRDVRRQRPGRPVGGPVRRLLRGHERQARVHGPPDPQAEAPPGVHRGRGHHGAHPGWQLLHEAGQEVERAGPAAEAQAGQVRAPHVAAVAGPPDRGHPRRHQVHRARGQLRERQPGHRRPPRQGAARRQLPGHPHRRVHGQRPPRHRQHRQAHVRAVLRARQRVLQQRAHLQPGRQPQPQPGLRLQGHRDRHGLLLLRAPVPGQPHHQPRAERGAAQPGRELPGPRLGQEDRRGDRHPEAHVVHLHRGAVPGRGPAPPRGEHQGVGEEHRDPGGQEGADHEPLGRALQRPLQREGADQRHRPRGRVHVRGGRGQRQPAADAEAARRAGGPRPQQRRRGAGALRVLQDHQVRGGAPRGAAPGGGGRPRGGRRGHRPRGEPDRGQPVVPAVPLRARGARLRVPDRREAKVPRRGVQQGVRRHQPGQARGPHARVPQGVGRQAAAHQRQVKNAKEKRREGRKYVEKKIKPVHVYVQIACRRSFFVVDFWLY

SEQ ID NO: 57847 - protein, 801 aa, Zea mays
  Clone ID: UC-ZMFLB73253D02_FLI.pep
LPSSSRRRLLASASASASASAPRCASPEERRESERGDPSDPIHRHNLRPLDLLRPRATPGQGWRIESVISDIQGCSLQLCQLVNSLLPSLTARACMCIEKLQDINHEHVFDLVKEVAMELAATSAVSSVNLLKLSSLLSLSTNMELYTEAVSLENLKTRALRCESREELDLAEQMIPLVNYMHDHLLKEKQQLSINGVPIPADFCCPLSLELMSDPVIVASGQTYERVYIKLWLDEGFTICPKTLQRLGHSNLIPNYTVKALIANWCESHDIRLPDPMKSLKLNFPSAASFLEDLSAADGSPLHPIVVSRANIPGSPEVDVYLRNLNGASPPHSLVNQNSHAHANRHGHEVSTSQTSEKTNGSVPDVSRLSLASSEARESSLEGRRGGSIGQISEHSTEEAFQSSNLDRDLQDNLANSSLNGSLPNSGQLDGECDNGVTRVPSDRTNYSSDASGEVTNGGGAPVASSVPQREHLIPPRLGMGTKQFIRRQPSDRGFPRIISSSTMDARSDLSAIENQVRKLIDDLKSDSIDVQRSAASDLRLLSKHNMENRIAIANCGAVNLLVGRLHSPDAKTQEHAVTALLNLSINDNNKIAIANADAVDPLIHVLETGNPEAKENSAATLFSLSVIEENKVKIGRSGAIKPLVDLLGNGTPRGKRDAATALFNLSILHENKARIVQADAVNHLVELMDPAAGMVDKAVAVLANLATIPEGRNAIGQARGIPALVEVVELGSARGKENAAAALLQLCTNSNRFCSIVLQEGAVPPLVALSQSGTPRAREKAQALLSYFRSQRHGNSARR

SEQ ID NO: 57848 - protein, 211 aa, Zea mays
  Clone ID: UC-ZMFLB73253G07_FLI.pep
KEKQKEHGLARSDSHTGIAKLPIHPVLNCFDRRYSSGRGRPVGGYDRLVDLLINSRQAKCVLRSTLSGLYSTLDGRISGGQGGLESPRIPVPRSPVAVPERVHPKSLLLAFVPGAFVAVAIGEAVDAKPVDLVPKVLARIPITVSEMVAPDAVLDAALELPDVGAPVGAGLRADAVALAAGPLARVAVAAVEAVDAVAVAEALAVLAAVPA

SEQ ID NO: 57849 - protein, 374 aa, Zea mays
  Clone ID: UC-ZMFLB73234C03_FLI.pep
NTVSGLNKINTSLLLQAAGWPCMNHDRCNASGSFTTRMHLAFHSKQLAAAAAAAGMLMHHVLVELEAGEHVVVDGVGEVVEQVLERADAGDEPLDEVTEDGEHGEPAVLDLLELELIHLLLGLAEAERVEEGPAGVGRVAGAGEELLEAEEVLLAHGARVVPVLEAAVLGEAHERHVEDEERVGVGPVVVGARGRDDARLEPRQRGLRGDDAHLAEDLRGDGAHRAQHGVAAVDHLAIGQPLGLDEAPGALRVREAQRVEAIVAGQRAIEVGEGLLGREPQLPVGTLLGWRAGAGPDDEGRLPRRRPRDGRLHGAAQQLPAGEESLGRHRSGTGASSNLSFRQRTCLRSRSCRWLAALSAVWEERGAEEEARKP

SEQ ID NO: 57850 - protein, 463 aa, Zea mays
  Clone ID: UC-ZMFLB73272H12_FLI.pep
WSKPTKSYDVTKSMFQVSVINVEDATILYQEQFECRLPGGIASLQFEIYSHNGYDKDILIIAMEDSSIFVIEEETGKLLNPNPVQTDKPSKAILLQMLELSPIDTPAVSDNQDTVSKESLLLLCTENAIRLFSLGHAIQGTKKIINKKKLSSCCCFASLIHSSSNDIGLILVFSNGKLEIRSLPDLSLLKDAFLRGFVYSRNLNSSSSITCSSDGEAILINGEETYFFSTLCQDEIYRHVDSISTVYRKENSTREDSSFVVKSPKEKKKGLFGMIMKDNKGSKSKESDAIGSEQCIATTSEELASIFSSTNFAPPSEGRNSSLRDDENAELDIDDIDIDDNPQKPKGPHFPGLSKDKISKGLQTLKGKLKPKTEEKISSGNKKTEDETSVSQVDQIKMKYGYANTTNDDSTSVTKMIGNKLQENMKKLEGINLRAADMASGAQSFSTMAKELLRTTKNEKGTS

SEQ ID NO: 57851 - protein, 559 aa, Zea mays
  Clone ID: UC-ZMFLB73290C07_FLI.pep
LRQSLDHDIGPAIAHFLNCFMGKVLGASTEGSLSDMQSKTLKGHENSQTQKSTKGHKLSNAAASRKSLSAYSHLTSDGIWFSIKEFAKSKYQFEVPDDARLSAKRVAVLRNLCQKVGITIAARKYDLDASTPFEASDILNLQPVVKHSVPTCTEAKNLMEAGKVRMAEGTLNEAYALFSEAFSLLQQITGPMHKDAANCCRYLAMVLYHAGDTAGAVVQQHRELIINERCLGLDHPDTAHSYGNMALFYHGLNQTELALRHMSRTLLLLSLASGPDHPDVAATLINVAMMYQDASNMNTALRYLQEALMKNERLLGPVHVQTAVCYHALAIAFSCMSLYKLSIQHEKKTYDILVKQLGENDSRTEDSKNWLNTFKLREEQVNAQKQKGQEANASDNAVKFLKANPAVLQAMKAAAIQSGGVSANVNRSLNAAVVGEGVPRLRGVDERAARATAEARKKAAARGLNVRNGPVANHASDELAQILKLINAVSGSSTPGSAKTEVSASEGQATNGCIQNGTDTEPKAADTNGLSASVKSTVNAPFGLGTTLESKKQKSKQKS

SEQ ID NO: 57852 - protein, 274 aa, Zea mays
  Clone ID: UC-ZMFLB73276D09_FLI.pep
DADKRSCRKRLDGHNRRRRKPQPDTMASASFIASQQGTRFSPFAHPRLEASWPPGVMKTEESPYHITHQIPLGSSSSSRQQHFVALGAATPAYAKEGRRFPFLQEGEISFATGVVLEPPAAAPACQPLLRTGAPSESSGAGGSKMFSDQGLARVLDSDCALSLLSAPANSSGIDVSRMVRPTEHVPMAQQPVVPGLQFGSASWFPRPQASTGGSFVPSCPAAVEGEQQLNAVLGPNDSEVSMNYGGMFHVGGGSGGGEGSSDGGTSSSMPFSWQ

SEQ ID NO: 57853 - protein, 492 aa, Zea mays
  Clone ID: UC-ZMFLB73278E02_FLI.pep
GSPLATRRPGRKKLFLEPFCLASPSLLSRRHCRRCLRATTIMAAATSRGPASVAICALAVLHAMAALCDSATAAAATCAGLAPAKHRPEVISIADFGGVGDGRTLNTWAFRKAVYRIQHQRRRGGTTLHVPAGTWLAGSFNLTSHMTLFLARGAVLKATQDTRGWPLVEPLPSYGRGRELPGPRYASFIHGDGLRDVVITGDRGVIDGQGEVWWNMWRRRTLEHTRPNLVEFMHSTGIHISNIVLKNSPFWNIHPVYCDNVVVTNMMILAPRDSPNTDGVDPDSSSNVCIEDSYISTGDDLVAIKSGWDEYGIAYGRPSAGVTVRRVRGSSPFSGIAIGSEASGGVRDVLVEDCAIFDSGYGIHIKTNVGRGGYIRNVTVDGVRLTGVRSGVRIAGDVGDHPDAHFSQLAVPTVDAVRISNVWGVNVQQPGSLEGIRASPFTRICLSNVKLFGWRSDAAWKCRDVRGAALGVQPSPCAELATSFASARSSCS

SEQ ID NO: 57854 - protein, 684 aa, Zea mays
  Clone ID: UC-ZMFLB73285G01_FLI.pep
ADEDFDFGAPEGHGIFEALGELLIDSGCVSDQEHCLQVCSKLCEKFGKHGLVKPKQAMRSLVTPLRMNAGMDDDVAPKKPQPEVFDGPLLSSRDKAKIERRKRKEERQREVQYQMHVAEMETLRAGMPPVYVNHSNDGGPAVRDIHMENFSVTVGGRDLIQEATITLAFGRHYGLVGRNGTGKTSFLRAMALHAIDGIPKNCQILHVEQEVVGDDTTALQCVLNADVERVQLLQEEARLVQQQKDLEIEAEFGQSSDKGKDGFDKDSISKRLEEIYKRLELIDADAAEARAASILAGLSFTPEMQRKRTKQFSGGWRMRIALARALFIEPDLLLLDEPTNHLDLHAVLWLETYLLKWPKTFIVVSHAREFLNTVVTDILHLHGRKLHAYKGDYDTFERTREEHLKNQQKAFETNEKARQHMQTFIDKFRYNAKRASLVQSRIKALERMEHVDAVVSDPDYKFEFPTPDDRPGPPIISFSDASFGYPGGPTLFKNLNFGIDLDSRIAMVGPNGIGKSTILKLISGDLQPTSGTVFRSPKVRMAVFNQHHVDGLDLTVNPLLYMMKCYPGVPEQKLRAHLGSFGVSGSLALQSMYTLSGGQKSRVAFAKITFKKPHIILLDEPSNHLDLDAVEALIQGLLIFQGGVLMVSHDEHLITGSVDELWVVSEGRVTPFSGTFKDYKKMLK

SEQ ID NO: 57855 - protein, 246 aa, Zea mays
  Clone ID: UC-ZMFLB73274C10_FLI.pep
MSCVPADMPCFILFLLASARKSMLQWPTRFKIIQGVARGIMYLHHDSRLTVIHRDLKASNILLDKEMNPKISDFGMARIFSGDQLQANTNRVVGTYGYMSPEYAMKGAFSVKSDTYSFGVLILEIVSGLKISSPYLIMDFSNLITFAWNMWKDGKPEDFLDSSVTESCSLDEVSRCIHIGLLCAQDNPSCRPLMSTVVSMLENKATPLPTPKQPKDFALRDYNPGNEGVHRELSVNDTSLTMVEGR

SEQ ID NO: 57856 - protein, 559 aa, Zea mays
  Clone ID: UC-ZMFLB73267E04_FLI.pep
SAMAAPPTEDCGWLLYLSLAAKCGDPSRLLGLAAVFVGACVVTSLLHWACPGGPAWGRYWWTRRGGLGIVRAAIPGPRGLPVVGSMGLMTGLAHRKLAAAAAAAGGQGSSRRRRLMALSLGETRAVVTGDPDVARELLGSAAFADRPVKESAYGLLFHRAIGFAPHGAYWRALRRVASAHLFSPRQVAASSAQRAVIARQMVDAVTTAAPAPAPAVVVARRFLKRASLHNVMWSVFGRRYDLLLLAADGEELKALVDEGYDLLGQLNWSDHLPWLARFDLQRTRARCSALVPRVNRFVGNIIDEHRARLGLGDTGGVTDFTDVLLSLQGVDKLSDADMVAVLWEMIFRGTDTVAVLMEWVLARLVLHQDVQSKVQEELDRVVGPPGQAASVTESDTASLVYLQAVIKEVLRLHPPGPLLSWARLATSDARVGGYHVPAGTTAMVNMWAITHDPSVWAEPTEFRPERFVGASAGAGAGAGAEDVPMIMGSDLRLAPFGSGRRSCPGKSLALATVGFWVATLLHEFKWLPPCRGVDLSEVLRLSCEMAAPLEARVVPRHAV

SEQ ID NO: 57857 - protein, 452 aa, Zea mays
  Clone ID: UC-ZMFLB73278F07_FLI.pep
QTLTNQATKPSPMAAPVSQPPVSARASTRFLPRGIGALPESAPTSLRLSVGRRRRAASLEVKASGNVFGNYFQVATYGESHGGGVGCVISGCPPRIPLTEADMQVELDRRRPGQSRITTPRKETDTCKILSGTHDGMTTGTPIHVFVPNTDQRGGDYSEMSKAYRPSHADATYDFKYGVRAVQGGGRSSARETIGRVAAGALAKKILKLKSGVEILAFVSKVHQVVLPEDAVDYETVTLEHIESNIVRCPDLEYAEKMIAAIDTVRVRGDSIGGVVTCIARNVPRGLGSPVFDKLEAELAKAMLSLPASKGFEIGSGFAGTDFTGSEHNDEFYMDEAGNVRTRTNRSGGVQGGISNGEIIYFKVAFKPTATIGKKQNTVSREHEDVELLARGRHDPCVVPRAVPMVESMAALVLMDQLMAHIAQCEMFPLNLALQEPIGSASSASELSPNLS

SEQ ID NO: 57858 - protein, 555 aa, Zea mays
  Clone ID: UC-ZMFLB73298G08_FLI.pep
VRSAHTHNQISPKSTRRHLRFKMQIFVKTLTGKTITLEVESSDTIDNVKAKIQDKEGIPPDQQRLIFAGKQLEDGRTLADYNIQKESTLHLVLRLRGGMQIFVKTLTGKTITLEVESSDTIDNVKAKIQDKEGIPPDQQRLIFAGKQLEDGRTLADYNIQKESTLHLVLRLRGGMQIFVKTLTGKTITLEVESSDTIDNVKAKIQDKEGIPPDQQRLIFAGKQLEDGRTLADYNIQKESTLHLVLRLRGGMQIFVKTLTGKTITLEVESSDTIDNVKAKIQDKEGIPPDQQRLIFAGKQLEDGRTLADYNIQKESTLHLVLRLRGGMQIFVKTLTGKTITLEVESSDTIDNVKAKIQDKEGIPPDQQRLIFAGKQLEDGRTLADYNIQKESTLHLVLRLRGGMQIFVKTLTGKTITLEVESSDTIDNVKAKIQDKEGIPPDQQRLIFAGKQLEDGRTLADYNIQKESTLHLVLRLRGGMQIFVKTLTGKTITLEVESSDTIDNVKAKIQDKEGIPPDQQRLIFAGKQLEDGRTLADYNIQKESTLHLVLRLRGGQ

SEQ ID NO: 57859 - protein, 524 aa, Zea mays
  Clone ID: UC-ZMFLMO17025F01_FLI.pep
HTWPRCCSIHCEPCSGGSYILCASNSKHSVKFYSSNAMCSAYSVGGDDANLPSTPVTTGVQIITYSRLLIQGKASPQPFCLPKPEDVATICYTSGTTGTPKGAVLSHGNLIANVAGSSLNIKFYPSDVYISYLPLAHIYERVNQIAALHCGVAIGFYQGDNLKLMDDLAALRPTIFASVPRLYNRIYTAITNAVKESGGLKEKLFHTAYNAKRQAILKGKNPSPVWDKLVFNKIKARLGGRVRLMSSGASPLSADVMEFLRICFGGEVLEGYGMTETSCIISAMDIGDRSIGHVGSPTASCEVKLVDVPEMNYTSDDQPYPRGEICVRGPIIFQGYYKDEVQTKEVIDEDGWLHTGDIGLWLPGGRLKIIDRKKNIFKLAQGEYIAPEKIENVYAKCKFIAQCFIYGDSFNSSLVGIVAVEPEVMKAWAASEGIQCEDLRQLCADPRARAAVLADMDSVGKEAQLRGFEFAKAVRLVAEPFTVDNGLLTPTFKVKRQQAKTYFAKEISDMYAELREAEAPRSKL

SEQ ID NO: 57860 - protein, 110 aa, Zea mays
  Clone ID: UC-ZMFLMO17025D07_FLI.pep
SSLVLFSQIDHGVVNLINEEDSRITVLLDCHGISPFRFPMQMMRSFITVVQENYPNRLGVLFVIRLPPVVRVIAQTFLQIAISHGIRGDEDDIASKSAPPASIDGARSSR

SEQ ID NO: 57861 - protein, 128 aa, Zea mays
  Clone ID: UC-ZMFLMO17022C12_FLI.pep
KPRTNTTSTRRSRWRRSSTTRRSLTTVGSTSESNPTWPMHLCVRQAPAQPPLGRGPERLHHAVHRQTGGPHDRRQCRRLSDCSRHRNRRRRHHAVQLIIHLKPNLPRKSLLTGQEFLYAWMTTIVAVV

SEQ ID NO: 57862 - protein, 408 aa, Zea mays
  Clone ID: UC-ZMFLMO17036C07_FLI.pep
GESSSLSSSSRLLRKAKYGEDVIVGVIDSGIWPESPSFDDSGYGPVPKRWKGVCQTGQAFNASNCNRKVIGARWYGADVSEEDLKAEYRSARDANGHGTHTASTIAGSPVRGASHAGGGLAAGIARGGAPRARLAIYKVCHDVGGGTSCGDASILAALDAAIGDGVDVLSLSLGGGSDEVYRTLHVVAAGITVVFSAGNDGPVPQSVTNALPWLVTVAATTVDRTFPTVVTLGDGETKLVGQSLYYRNRSAAASTSNDDFAWRHLMAFTGCDDAEKLRSENITGKIMVCRAPEFKSNYPPTAQFSWASRAAIAGGAKGVIFEQYSTDVLDGQASCQGHLPCVVVDKETIYTILNSDSNVARISPAATMVGPQVASPRIATFSSRGPSAEFPSVLKVMYACVFDDLSSS

SEQ ID NO: 57863 - protein, 321 aa, Zea mays
  Clone ID: UC-ZMFLMO17045E10_FLI.pep
FNDIFVVTSTSTLNVVTSVRTSDGDTDDFPINIGLHQGSALSPYLFALVIDEVTRDIQGDIPWCMLFADDVVLIEESRSGVSQKLELWRQTLEAKGFRLSRSKTEYMKCDFSAMGYEDGDVSLDGQVVPKKDTFRYLGSMLQKDGDIDEDVSHRIKAGWLKWRQAAGVLCDPRVPHKLKGKFYRTAIRPAMWYGAECWPTKRRHVQQLCVAEMRMLRWICGHTRRDRVRNDDIRERVGVAPIEEKLMQHRLRWFGHIQRRPEEAPVHIGIIRRPENVKRGRGRPTLTWTEAVKRDLKEWNIDKELAVDRKGWKCAIHVPEP

SEQ ID NO: 57864 - protein, 344 aa, Zea mays; identical to SEQ ID NO: 52656
  Clone ID: UC-ZMFLMO17045H05_FLI.pep

SEQ ID NO: 57865 - protein, 521 aa, Zea mays
  Clone ID: UC-ZMFLMO17055B12_FLI.pep
RNDGRDGAMGGWERDNVLLASFICLCCLRKKRRRAPPPPQHYGYPPPPPPYKEDPYGGTYQSWQQNAPPAPPPEHVVKMHPSPPPAYANRPPQPPAPPPPAMLNSSGGSGSNYSGGEILPPPSPGAVLGFSKSTFTYEELLRATDGFSDANLLGQGGFGYVHRGLLPNGKEIAVKQLKLGSGQGEREFQAEVEIISRVHHKHLVSLVGYCISGGKRLLVYEFVPNNTLEFHLHAKGRPTMEWPARLKISLGAAKGLAYLHEDCHPKIIHRDIKASNILLDFQFEAKVADFGLAKFTTDNNTHVSTRVMGTFGYLAPEYASSGKLTEKSDVFSFGVMLLELITGRRPVDTTQTYMDDSLVDWARPLLMRALEDGEYDALVDPRLGKDFNPNEMARMIACAAACVRHSARRRPRMSQVVRALEGNVSLEDLNEGVRPGHSRFFGSYSSSDYDSGQYNEDMKKFKKMAFNNNYTSSQYSAPTSEYGQIPSASSSEGHQTQEMESGAMKKGGYSGGYSSGYSGAS

SEQ ID NO: 57866 - protein, 490 aa, Zea mays
  Clone ID: UC-ZMFLMO17040B10_FLI.pep
VEALDVLIEKLKPKINFCKVVAVSGSGQQHGSVYWKKGSHAVLSSLDASKSLLSQLKDAFSTMNSPLWMDSSTTKQCREIENAVGGALELAKLTGSRAYERFTGPQIRKIYQTAPDVYEDTERISLVSSFMASILVGSYASIDETDGAGMNLMDIKQRTWSKSALEATAPGLEAKLGNLAPAYSAAGRIAPYFVERFQFDKNCLVIQWSGDNPNSLAGLTLNTPGDLAISLGTSDTVFGITTEAKPSLEGHVFPNPVEPNGYMVMLCYKNGSLTREDVRNRCADKSWDVFNSYLEKTPPLNGGKLGFYYKDHEILPPLPVGFHRYTVENLNDVSSDALLEREVEEFDPPSEVRAIIEGQMLSMRGHAERFGMPNPPKRIIATGGASSNESILKSVAQIFGCPVFTVQRPDSASLGAALRAAHGWLCNAQGSFVPISCLYQGNLEKTSLGSKLAVPAGDKEQDRELLQKYTILMRKRMEIERRLVEKIGRS

SEQ ID NO: 57867 - protein, 397 aa, Zea mays
  Clone ID: UC-ZMFLMO17044D05_FLI.pep
ASYWCGALYRSESRSTGLRPALALPESGAPPTLLSLIQRCWDPDPEKRPSFEDIIDELNIVQKHIVSNASVPSSPVSKSQNGTIEVHHYQEALNWFNQGELFVKGSSRSDLKNLWSDCFDQSSEYHPTLSWGSFATCGRRETMEDTHFVLPHVSEENDVFAFGIFDGHRGSAAAEFSVRAVPGFLKQFGQGASPTDALSEAFVRTDIAFREELILHRKSKRIIQKDWHPGCTAITALIVRNKLFVANAGDCRAILSRKGKPFLLTKDHVASCPNERERVTKAGTEVKWQIDTWRVGSAALQVTRSIGDDDLKPAVTAQPEVIETALSADDEFLVMASDGLWDVVSNQDVLSIIKDTVKEPGMCSKRLATEAAERGSKDNITVIVVFLRPVSTAERIY

SEQ ID NO: 57868 - protein, 352 aa, Zea mays
  Clone ID: UC-ZMFLMO17046B08_FLI.pep
IEPRPHILAHMATMAGRLVARTSSSSAKRQRFSSAVLLLALFQSSWCYDDAAATTTVDYGYNNEHEADRVAFLPGQPRSPPVSQFAGYVTVNERNGRALFYWFFEAQTSPAHKPLLLWLNGGPGCSSVGYGAASELGPLRVNRHGAGLEFNNFAWNKEANLLFLESPAGVGFSYTNTSSDLTKLDDAFVAEDAYSFLVNWLKRFPQYRSHEFYISGESYAGHYVPQLAELVYDRNKGNTNTHINLKGFMVGNPLTDDYYDSKGLAEYAWSHSVVSDEVYERIKKVCDFRVSNWTDDCDTAMIAVFSQYQEIDIYNIYAPRCNLPPSSAALALAVDKAVVANRQAKDQDVLRI

SEQ ID NO: 57869 - protein, 281 aa, Zea mays
  Clone ID: UC-ZMFLMO17044E08_FLI.pep
RRKGLEQGEGSAMSFADLEAGALRAPLGRKARGGPNDARALVFQITTAVASYRRLLNSLGTPKDTITLRDNLHKTSQNILQLAKDAKDKLQKAAEADKSTDTSADKRIADMKLAKDFAATMEEFRKLQSLAIQRETAYKPVVPQNTQSNYSTDERSSESGNMPEQRALLAESMRQEVLQLDNEIVYNEAIIEEREQAIQDIQQQIGEVHEVFKDLATLVHSQGIIIEEIDMNIENSAAVTKEAKTEVAKAAKTQKSNSSLICLLMVIFGVVLLVVIIVLAA

SEQ ID NO: 57870 - protein, 152 aa, Zea mays
  Clone ID: UC-ZMFLMO17041E10_FLI.pep
ASSLDLSGFFEEEDVSQRKIRFTSAQPPEDLFAEIERSATDMGFHVHRGHSKLRLTRNCDRSKNQKNPMSSSSSSFLVCTEVFELSPSLYVVELNKSHGDPALYRQLCQRICGDLGVLEMDQIFGTRPPVADDLAGLALALERRSATPLVAL

SEQ ID NO: 57871 - protein, 745 aa, Zea mays
  Clone ID: UC-ZMFLMO17048B07_FLI.pep
AAVAQANITRTNHIMFTMGTDFKYQYAESWFRNMDKLIHYVNKDGRINALYSTPSIYTDAKYAANEQWPLKTNDFFPYADNPNAYWTGYFTSRPALKRYVRTMSGYYLAARQLEFFKGRYSSGLSTDSLGDALALAQHHDAVTGTEKQHVANDYAKRLSIGYTQAQELVSTSLACLTESGSKSRCASPVTKFSQCLLLNVTYCPPSEMDLTKGKSLVVLVYNSLGWKQEDVIRIPVFSDSIVVHDSEGREIESQLLPIATASLNIREKHVKAYLGTTPGAKPKFWLAFPVSVPPLGFNTYFVSNLKKSAHISSKSTQYSPQGSESSNLQVGQGNLKLQYNEAGKLSLYSDSKTMVQANFEQKYKYYIGQDGNGSDPQASGAYIFRPNGTVPISTDGQVSLTVLRGPILDEVHQQINSWIYQITRVYKEKDFLETEFIVGPIPVDDGNGKEVATEIVTNMVTNKTFYTDSSGRDFIKRIRDYRSEWKIEVHQPIAGNYYPVNLGIYVEDGSKELSVLVDRSIGGSSIKDGQIELMLHRRLLHDDGKGVAEALNETVCLDKQCEGLIIQGKYYVKIDQQGEGARWRRTFGQKIYSPLLLAFTEQDGGNWANSHVSKFSAMDSTYSLPDNVAMLTLQELEDGSVLLRFAHLYEAGEDKDLSSLASIDLKRVFPEKKIGKVIETSLSANQERAAMEKKRLKWKAQGSAADEKVVRGGPVDPSKLVVELGPMEIRTFIVSFDHISDKQQL

SEQ ID NO: 57872 - protein, 106 aa, Zea mays
  Clone ID: UC-ZMFLMO17057A12_FLI.pep
LSQVILTAASFNPHLWYRIGQASTDAKRIIDEERANARLEIGSAKASVQKIQSALKEQEKFSHRTGKQDVDELKEEVQEARQWTLRTRSKFCVINWLKNLQILFAF

SEQ ID NO: 57873 - protein, 519 aa, Zea mays
  Clone ID: UC-ZMFLMO17051C08_FLI.pep
LSTMLFTPIAELDLKSTNAAIRVRIIRKWEFRGATNDGPLRHVNLILADEQGTAIHAEIQAPLVADKGSLIQIDKVYELKRFRVTPSRNYYKPVDNSMMIQFTLYTQAKLVQDPPPTFPRYAYKLTSFENIGNNVDNKTYLIDVLGILTEIGSLHHVGYNNSNIIRDIFLKDINNTSTKVTLWGHQASSFSVDNNCDENDNKPVVVLFVGCLAKRFKGEAYLSATAACTWYFNPDIPEAQVYYSKLLNTKLQMIRPQATEQEFQASQTLNIEDRTIEQLLQLDPDMFPEQGFKCTVTISRLVQDGRWWFPSCIKCNKSSSQTSTGYQCTTCNGTETEFRYKLSFIATDGTSEAEFFCFDTIAKRIVGKSCQTLFSTSDVSRGPPPDLAAIVSLKFTFAVTINMSAFSVTNRVFSILSVLTNHGRQASIPYATQNLSQQQMLTQDNTLDVKTTQESPATSFAKLSTSTKQENVPRRRLTYSEMLQDTNVDEQVSAELNKDSLASPPKKIKSAQLGSTSTI

SEQ ID NO: 57874 - protein, 119 aa, Zea mays
  Clone ID: UC-ZMFLMO17062F07_FLI.pep
LINHFHKPMPKVNPCFLLGNPEQTPLARGARIGVAHRRREGTWRLPVRPLEAVLHGPCAAVYDKLRRSRRLDVVQTGCTALSIVKHGDLMVVANVDDSRVVLGIATYDDTITPSSSSST

SEQ ID NO: 57875 - protein, 533 aa, Zea mays
  Clone ID: UC-ZMFLMO17051F08_FLI.pep
HTQLESRQVSGGGRDGHGMQWVQLRGGGGGDGVGGVPGGGAGAGGAGAGGGALSALLRAGMGHGHRRQHHRQGQRPRRAARRPPHRYVTLRCAEGEDGSRGHVCDGCRWEVLSAPVAKPWPNKPPKCTDCAPLFMKAYLMRGAGAVIHSHGIETCIATMLIPGAKEFRVTHMEMIKGIKGHGYHDELVIPIIENTPYEYELTDSLSEAIAAYPKATAVLVRNHGIYVWGESWINAKTQAECYHYLLDACIKLYQLGIDWTTPEHGSINNPRRPHSILSPEICNGCHAADSSKCVVLDIEGTTTPISFVTDVMFPYARDNVRKHLTSTFDFEETKEDIKLLRIQIEDDLRNGVAGAVPVPPDEGGKEEVINSLVANVESMIKADRKITSLKQLQGHIWRIGFQKKELQGVVFEDVPVALKNWHASGIKVYIYSSGSREAQRLLFGNTTYGDLRKFLCGYFDTTTGNKRETRSYFEISQSLGVDSPSQILFITDVFQEAIAAKNAGFEVIISIRPGNAPLPDNHGFRTIKSFSEI

SEQ ID NO: 57876 - protein, 573 aa, Zea mays
  Clone ID: UC-ZMFLMO17066D07_FLI.pep
GRGRWYAAGVSDKETLKGEYMSPRDAEGHGTHTSSTAAGNVVGNVSFHGLAAGAARGGAPRARLAIYKACWGAHPVSGSCGDADVMKAMDDAVHDGVDVLSVSIGGPSETPGTLHVVASGVTVVYAAGNDGPVSQMVENSSPWLFTVAATTVDRMFPTAITLGNNQIVHGQSLYVGTQGREDHFHEVVPMVNSGCDPEYVNSSDVKGKIVFCITEDSLNPSATVTAVGQLVLENGGKGFIFTGYNRDNIVRWEPVTSKMIPFILIDLEVAYHILQYCISTDGTPRAKISLAQTTFGTGVPAPKVAVFSSRGPSAVYPGVLKPDIAAPGVNILAAAPQIPYYKEQLGGVLYHFESGTSMATPHVSGIVALLKSLHPDWSPAALKSALMTTALTTDNNGIPIQADGNPVKIADAFDYGAGFVNPTKADDPGLIYDIQPSDYLRFFDCTGGLGTNDSCTTPRASVVDLNLPSIAIPSLKAPQTVTRTVTNVGRQTNAVYRAVLQPPPGVEMSVEPSVLVFDAKRKAQSFKVAFMATRRFQGDYTFGSLAWHDGGSHWVRIPIAVRIVIQDLYSTVS

SEQ ID NO: 57877 - protein, 147 aa, Zea mays
  Clone ID: UC-ZMFLMO17074C05_FLI.pep
LIIGQYLTSTWVDLNQKESEVNIVTAKYKGYLLCTQYSLKGQSFSVTSILLKRLFYLYSDKYYGVETYCDQSRRGVKDTKESSKTHPPASTSHGRFGPTFDQSKLFTSMLPTYVEFPSKAKVNINGFSPSAWPLCIFNKIWGRRPPI

SEQ ID NO: 57878 - protein, 779 aa, Zea mays
  Clone ID: UC-ZMFLMO17075D03_FLI.pep
ARGVEKSRAQRERREREKRERKKDPRPPPTRCAGAARTDGQTDLPPKRCRIQCGGPGAGTEWATDRALAMPHPTDPEAGPEQKAPAVPYLAAAAPAPVKKKRNLPGTPDPDAEVIALSPGTLLATNRFVCEVCGKGFQRDQNLQLHRRGHNLPWRLRQRGPGAPPPRRRVYVCPEPACVHHSPARALGDLTGIKKHFCRKHGEKRWACPRCAKRYAVQADLKAHAKTCGTREHRCDCGTLFTRRDSFVTHRAFCGALGEETGRVLAPPAPPSPRPPDLEADENVADLEADENVDKDNDKEGEEENEDSAVAEVEEPQRVEVVPEEPQRIPSPPPLPKEPPCRPSPPPLPQEQLSPPPSPNEPPCCHPSPPPLPKEPQRLPFPPEQHAVVVALVPNVDEPEVVAVPSVTAELEDETDQDEDACFLEADQYKDSELEVSNLLDKDTPMLPCFLASPSEAIGTDGSGTTTCGAGGSVSNSIAPSTTTNTFAGLFASATTSTTSHSTSLRDLIGVDPTFLCLAIGAPSLFPQTGASNSGTFALLPPAPHMSATALLQKATEAGATQSSSSFLKEFGLASSSSSSSSQPSSKQNHHQQREMEPSLQQWHPSSTQQTEMERRHRNHHQQREMESSSQQWHRHHRNDRQMGPESYRSNQQMQMESSSHQWLQHRSSEQMVGRRHHLERGESRGMLLSGGLGLGLAYESGKSGLPDLMTGPSPSPSPLLGPKPATLDFLGLGIGGTMVGSTGLPALVAGGELDMGSSAQVPAPWDDAQRKANGRTIL

SEQ ID NO: 57879 - protein, 550 aa, Zea mays
  Clone ID: UC-ZMFLMO17065C09_FLI.pep
DPKAKSEVQDKESSMISYTKAELGCNFGVIADRWSPESVESGAFTGDAVARLMMTAPAGFHKNAPEMYSLLDSMDVDVKPPPLVSSDSTGEMPLHGDKIHRSTSLPRGPKGVGFFAVDRDDDDDKSSGCTHPSTATNKDFTSNCKAEYNRVRKLLTSKHRKVAPARIHKSDLSYSDVERKPSFRYKKMHTRQRTQRSTFKRRKLFDRHLALASEFGTANGKGNTKVAGRNSNAVSLEANKGTNSMPFQKSCGSNDCYVKLRIKSFNVPELLVEIPDSATVGSLKKTVLEAVTAILGGGLRVGVLHHGKKVRDDSKTLIQAGIGQDDMLDNLGFSLEPNCTQNPQVQAPEDVNFLENIDTTEPLARITPADSSSKLGEVDVSQELALTPLAMNYQGSDHDSVHSPGAVSSRDKDSRALFLVPAADPNAGAVVPANKTKRSPEQGHRRIRRPFSVAEVEALVLAVEKLGTGRWRDVKLRAFDNAKHRTYVDLKDKWKTLVHTASISPQQRRGEPVPQELLDRVLAAQAYWSQQQAKLQPKTPSLAEARLLTQ

SEQ ID NO: 57880 - protein, 523 aa, Zea mays
  Clone ID: UC-ZMFLMO17084F11_FLI.pep
WLRGHRKEPLTMGLCSSSTAARAASDPGAAAAGDAAAAKKGRGIVACGKRTDFGYDKDFEVRYSLGKLLGHGQFGYTFAAVDRASTERVAVKRIDKNKMVLPVAVEDVKREVKILKALQGHENVVHFYNAFEDDNYVYIVMELCEGGELLDRILAKKDSRYSEKDAAVVVRQMLKVAAECHLHGLVHRDMKPENFLFKSKKEDSPLKATDFGLSDFIKPGRQFRDIVGSAYYVAPEVLKRRSGPESDVWSIGVITYILLCGRRPFWDKTEDGIFKEVLKKKPDFRRKPWSNITSSAKDFVQKLLVKDPRARLTAAQALSHDWVREGGKASEIPLDISVLHNMRQFVKYSRFKQFALRALASTLNSEEMSDLRDQFNAIDVDKNGTISLEELKQALAKDVPWRLKGPRVLEIIEAIDSNTDGLVDFEEFVAATLHVHQLVEHDTEKWKSLSQAAFDKFDVDRDGYITPDELRMHTGMKGSIDPLLEEADIDKDGKISLDEFRRLLKTASMSARNVQTPRGVRKS

SEQ ID NO: 57881 - protein, 522 aa, Zea mays
  Clone ID: UC-ZMFLMO17073A05_FLI.pep
TALAFACSWSFCAFSSLFLSISPYSSPSTAKPAAGMDPNGLKTGGLLLPTIERRCTSPPSVIVIGGGISGVAAARALSNSSFKVTVLESRDRIGGRIHTDNSFGCPIDMGASWLHGVCNENPLAPLISYLGLRLYRTSDDNSVLYDHDLESYALFDKDGNQVPKETVDKVGETFERILEETVKVRDEQEHDMPLLQAISIVFERHPHLKLEGLDDQVLQWCVCRLEAWFAADADEISLKNWDQERVLTGGHGLMVNGYYPVIEALAQGLDIRLNQRVTEITRQHNGVKVTTEDGTSYLADACIISVPLGVLKANVIKFEPELPQWKSSAIADLGVGTENKIAMHFDRVFWPNVEVLGMVGPTPKACGYFLNLHKATGNPVLVYMAAGRFAQEVEKLSDKEAVGLVVSHLKKMLPDATEPTQYLVSRWGSDPNSLGSYSCDLVAKPADVCARFAAPVENLHFAGEAASAEHSGSVHGAYSSGIAAAEECRKRLLALKGIPDLVQVAAWEEMAGAVAPLQICRT

SEQ ID NO: 57882 - protein, 281 aa, Zea mays
  Clone ID: UC-ZMFLMO17089F06_FLI.pep
KLSSPAVASKEQQQATAAIKPSASTGGSPNSVSNSRVLLLSDPELRRPQHQARPPSRVTEMALPNQGTVDYPSFKLVIVGDGGTGKTTFVKRHLTGEFEKKYEPTIGVEVHPLDFTTNCGKIRFYCWDTAGQEKFGGLRDGYYIHGQCAIIMFDVTSRLTYKNVPTWHRDLCRVCENIPIVLCGNKVDVKNRQVKAKQVTFHRKKNLQYYEISAKSNYNFEKPFLYLARKLAGDPNLHFVEAVALKPPEVTIDMAMQQQHEAELAAAAAQPLPDDDDDLIE

SEQ ID NO: 57883 - protein, 800 aa, Zea mays
  Clone ID: UC-ZMFLMO17085G05_FLI.pep
RASEILRKHSRLPTQPGSRHEAHLELILADHHEVRALIDHLPAILRRPAEVLAGAHLELHVRRLRRPQVQALEPDQLAGRPAAAVRRVGPAHEHQHRVLPVHGPVVLHPHHRRELEPVARLRPDRLHVVARHAARRCLHRLKAGDVARGRRLRGEAVGVLGVAEAVAEVEHCRAAVEPVRPAGVARGRVGAHPHVRHRHSREILGIPCHGQPSTRVVLSEEDLCDGNAAGLAGVASPQDGPNLGVGLRKAHIHGPTAEQHQDHRLLRRVRDALDEGLLLSRERQVQPVNLLPLLVLVQPHEQDDGVRRARRLDRLGDRRDVAGGRVAAGDEARVLHVALQHLERRHRHARRAEVVAAQPDGVVRVEPDHGEGRDVGLGQRERAGAAVVLEQDDAVLRRFQGEVLVLLRAHLIGPDVAVQVAPGVAVEEPQPHPDGEQVVQRPVDVLLRDLPLLQRRGTVVLHVAAAVHVHSSFEHICNCIFCRLGVALRIMDDGHSVAVRGDIPVKPPVLPRRRGEQVVVGARRHAIDAVVGAHDAAGMAVLHAALERRVVRVRQILRRHLGVEHVSGDALPVLEVVGGEVLAAGGGLEARGVDGAGEAVALHAADEDGGVLAGHRRVLAGGLLPAAPPRVPEHVDVGRPEGEPLRLPVVVHRPRLDADHLADAVPEVRVEGRGGEDDLREAGGGAERAVEVDAAALVGDPVQRLGPPLVRRHAEPRDGRGLVPELRDLLRHRHPRDEVVDAPVDGQPRVAERDVGRRSGAAGVGRLRRNHDGAAMQLQQDHQRGGGVDEGEARAAFHGF

SEQ ID NO: 57884 - protein, 306 aa, Zea mays
  Clone ID: UC-ZMFLMO17068F01_FLI.pep
PIAPAAPRAQIFSGLLAPLSRRSRRLTSPGGVMATSGAGDHGQGQGQGHGRFASSLTARYSDWVLETLDELPGSFLLTDPALPGHPIVYASRGLAALTGYAPRDVLGRNARLFQGAATDRATVAGVREAVRAHRPHQAAILNYRRDGAPHWVLLHLAPLFHARDGTLLHFLAVQVPIAPAAVARGATCHTTGHLLAACRDEASRVAEDFPCATHAGKVFVDMDKRGLEAEEPRVASDSEKDMAISTANSIVSALNSYSKLTGLVVSRKRCDSIGIPALSSSLKLSLGLTPACLTCQLFMLVMLLHH

SEQ ID NO: 57885 - protein, 561 aa, Zea mays
  Clone ID: UC-ZMFLMO17085H06_FLI.pep
SVDHGSGSSGLKSPLASRPSSFPGIGVPSEALVRWHMRLEYFAYETLQDLRIGKLFEIIVDYPESSPAIEDLKLCLEYTGQHSKLVDSFISSLRYRLLTAGASTNDILHQYVSTIKALRTIDPTGVFLEAVGEPIRDYLRGRKDTIKCIVTMLTDGSGGSGSGTGNAGDNLLEELNRDAENQENADYDDHANIDEKQAWLNSESWEPDPVEADPLKGNRNRRKVDILGLMVSIIGSKDQLVNEYRVMLAEKLLNKSDFEIDSDIRTLELLKIHFGESSMQKCEIMLNDLIDSKRTNSNIKTSLLKSSQTVPGQEEAEVSHDVLDATIISSNFWPPIQIEDLVVPASVDQLLSDYAKRFHQIKTPRKLLWKKNLGTVKLELQFDGRSVQFTVAPVHAAIIMRFQEKSSWTSKALATEIGIPMDSLNRRISFWTSKGVLTESAGPDADDRTFTVVDSMSDVNKDSIVNERMAEYQMTEEEGESSVASVEEQLKKEMTVYEKYIVGMLTNFGSMSLDRIHNTLKMFCIAEPSYDKSLQQLQSFLSGLVADEKLETRDGLYLLKR

SEQ ID NO: 57886 - protein, 428 aa, Zea mays
  Clone ID: UC-ZMFLMO17113A10_FLI.pep
ETLTSAFSMSAATTAPTPAVATPMAPPPSYPASSTISASVAASVEEEDDLYGRLKSLQRHMEFVEIQEEYVKDEQKNLKRELLRAQEEVKRIQSVPLVIGQFMEMVDGNNGIVGSTTGSNYYVRILSTINRELLKPSASVALHRHSNALVDVLPPEADSSISLLGSSEKPNVTYNDIGGCDIQKQEIREAVELPLTHHELYKQIGIDPPRGVLLYGPPGTGKTMLAKAVAHHTTAAFIRVVGSEFVQKYLGEGPRMVRDVFRLAKENAPAIIFIDEVDAIATARFDAQTGADREVQRILMELLNQMDGFDQTVNVKVIMATNRADTLDPALLRPGRLDRKIEFPLPDRRQKRLVFQVCTAKMNLSDEVDLEDYVSRPDKISAADIAAICQEAGMHAVRKNRYVILPKDFEKGYRTNVKKPETDFDFYK

SEQ ID NO: 57887 - protein, 287 aa, Zea mays
  Clone ID: UC-ZMFLMO17100B03_FLI.pep
TADREVERPLRSSATRARARLPPWCAAPTRPRCARAATSRSTPPTSSPASTSASRSRRSPPASRAATSARRKRRSSSAWRTGRSSAGTATSPSTSRARSPGTTSATSPPASASASPPLRQRAVTPATPTTTPTTTPRPRPPSPPRRSRCPRRRSSCHTAGPSTSSCSSPTASPATSCTRSPRSGSRSWSGSPTSTSSTGRRRKPAGGWPRYRSFSEPRPRTARRTTGRPKPLPLPAPGCARARRPGPRSPTTRTTSSSLISAKIKERARVLFLLLLCVQPVSCVVHL

SEQ ID NO: 57888 - protein, 1154 aa, Zea mays
  Clone ID: UC-ZMFLMO17109F11_FLI.pep
LISLTLTPAGQPRPHPARGSHHLRDDKHPLPNRSLARAQNPSDRRRARPNRGHRGEIRSRRTMESPAKEEAGGELAMEIESSVTAEDWRRALSRVVPSVVVLRTTAPRAFDTEVAGASYATGFVVDKSRGIILTNRHVVKPGPVVAEAMFVNREEIPVYPLYRDPVHDFGFFRYDPGAIKFLKYDEIPLAPEAASVGLEIRVVGNDSGEKVSILAGTLARLDREAPYYKKDGYNDFNTFYMQAASGTKGGSSGSPVVDCQGRAVALNAGSKSSSASAFFLPLERVVRALDLIRDSWDAFGTKTESVYIPRGTLQATFQHKGFEETRRLGLRNETEQMVRVVSPEGETGMLVVDSVVPEGPAHKHLEPGDVLVRINEEVVTQFLRLETLLDDSVGKEIDLQIERGGVPLTVNLQVEDLHSITPNHFLEVSGAVIHPLSYQQARNFRFKCGLVYVAEAGYMLSRASVPRHAIIKKLAGEDIAHLDDLIAVLSKLSRGTRVPLEYVKYTDRHRNKSVLVTIDQHEWYASPQLYTRNDATGLWTGKPAIPPESPFLALAHHASHVDTNSNAVSSLSESSPMDLKCQYDSENLADGCIKMQTDDEIVVDGSHSNEDSVIEKKRRRVVEEIAADGTLPSYGDLEDVKGGSLRHPSNADGSELARTISSNASLAEQVIEPALVMFEVHVPPVCMLDGVHSQHFFGTGVIIYHSEHLGLVAVDRNTVAVSISDIMLSFAAYPIEIPGEVVFLHPVHNFVLVAYDPSALGAGASVVRAAKLLSEPALRRGDSVYLVGLSRSLQATSRKSIITNPCTAVNIGSADCPRYRAINMEVIELDTDFGSTFSGILTDEQGRVQALWASFSTQLKYGCSSSEDHQFVRGIPIYAISQVLEKIITGTEGPFRLINGIKRAMPFVRLLEVELYPTLLSKARSYGLSDNWVQALAKKDPVRRQVLRVKGCLAGSKAENLLEQGDMILAINKEPITCFLDIEKTCQELDQSIGSDGVLNMTIFRQGKEIDLVVGTDVRDGNGTTRMVNWCGCIIQDPHSAVRALGFLPEEGHGVYVARWCHGSPVHRYGLYALQWIIEINGQPTTDLETFIKVVKGLEDGEFVRVRTVHLNGKPRVLTLKQDLHYWPTWELSFEPETATWRRKIIKALQSARA

SEQ ID NO: 57889 - protein, 313 aa, Zea mays
  Clone ID: UC-ZMFLMO17115F03_FLI.pep
VKPKASTASGPSLDGSTKALGWQLLGSSLEGSAKASGWKPPALSIEGIANASGSQALYPTQGSTKSSGCQRSSSSPDGNRKAPGWQQSSTSPVGSGKAHGWQRSGSFTQGGTKAAGWQPSGSSTDRSAKVDGWQRTSSSPEGNRKASGWHSSGRESSKITYGASENRKSFSSHQATTPTGRHSLARRQGSSDKGAAGWEETLGNTWEASKRQQRNSDKNAGCGEALGSNRTWHPSSGNPSRSSQGNHQHDRHSHGSDSRRGSSNYPRRSDHRHDHGSGGSSRPSSRGQPQRGVCKYYENGHCWKGSKCQYLHR

SEQ ID NO: 57890 - protein, 393 aa, Zea mays
  Clone ID: UC-ZMFLMO17100C07_FLI.pep
PFFRCMLHNFAADFEMYGVLDALASGPIDARLSDNSTMVGVGMSMEGIEQNPIVYDLMSEMAFHHRQVDLQVWVETYPTRRYGKPVKGLQDAWWILYRTLYNCTDGKNDKNRDVIVAFPDVEPFVIATPGLHVNTRQMYSTVSSKNYIRKDVSSDAYEHPHLWYDTNAVIHALELFLQHGDEVSDSNTFRYDLVDLTRQVLAKYANDVFLKIIESYKSNNMNQVTILCQHFLGLVNDLDTLLSSHEGFLLGPWLESAKGLARNSEQEIQYEWNARTQITMWFDNTETKASLLRDYANKYWSGLLQDYYGPRAAIYFKHLLLSMENNAPFALKEWRREWISLTNNWQSDRKVFSTTATGDPLNISQSLYRKYLSNADLLGLVEGTGSPWKSANL

SEQ ID NO: 57891 - protein, 454 aa, Zea mays
  Clone ID: UC-ZMFLMO17092C05_FLI.pep
GDLVELEALDLSSNTLSGSVPHSLDKLSKLTSFNVSMNFLTGAIPSSGSLVNFNETSFVGNLGLCGKQINLVCKDALQSPSNGLQSPSPDDMINKRNGKNSTRLVISAVATVGALLLVALMCFWGCFLYKNFGKKDMRGFRVELCGGSSVVMFHGDLPYSSKDILKKLETIDEENIIGAGGFGTVYKLAMDDGNVFALKRIVKTNEGLDRFFDRELEILGSVKHRYLVNLRGYCNSPSSKLLIYDYLQGGSLDEVLHEKSEQLDWDARINIILGAAKGLSYLHHDCSPRIIHRDIKSSNILLDGSFEARVSDFGLAKLLEDEESHITTIVAGTFGYLAPEYMQFGRATEKTDVYSFGVLVLEILSGKRPTDASFIEKGLNIVGWLNFLASENREREIVDLNCEGVQTETLDALLSLAKQCVSSSPEERPTMHRVVQMLESDVITPCPSDFYDSE

SEQ ID NO: 57892 - protein, 658 aa, Zea mays
  Clone ID: UC-ZMFLMO17117E05_FLI.pep
QCFLFLEEEMAKGEGPAIGIDLGTTYSCVGVWQHDRVEIIANDQGNRTTPSYVAFTDTERLIGDAAKNQVAMNPTNTVFDAKRLIGRRFSDPSVQSDMKLWPFKVVAGPGDKPMIVVSYKGEDKQFSAEEISSMVLTKMKEIAEAYLGSTIKNAVVTVPAYFNDSQRQATKDAGVISGLNVMRIINEPTAAAIAYGLDKKATSSGEKNVLIFDLGGGTFDVSLLTIEEGIFEVKATAGDTHLGGEDFDNRMVNHFVQEFKRKHKKDVSGNPRALRRLRTACERAKRTLSSTAQTTIEIDSLYEGIDFYTTITRARFEELNMDLFRKCMEPVEKCLRDAKMDKSTVHDVVLVGGSTRIPKVQQLLQDFFNGKELCKSINPDEAVAYGAAVQAAILSGEGNEKVQDLLLLDVTPLSLGLETAGGVMTVLIPRNTTIPTKKEQVFSTYSDNQPGVLIQVYEGERARTKDNNLLGKFELSGIPPAPRGVPQITVCFDIDANGILNVSAEDKTTGQKNKITITNDKGRLSKEEIEKMVQEAEKYKAEDEEHKKKVDAKNSLENYAYNMRNTIKDDKIASKLGADDKKRIENAVDGAIIWLDSNQLAEVDEFEDKMKELEGICNPIIAKMYQGAGADMGAAAGMDEDAPAAGGSAAGPKIEEVD

SEQ ID NO: 57893 - protein, 493 aa, Zea mays
  Clone ID: UC-ZMFLMO17123G05_FLI.pep
LNQQQLMDQLPKSICKSICEHLFVPVVKDVYLFRGVSREMLLSLVTKMKPEYIPPKEDVIVQNEAPDDVYVVVSGEVEVILFDGIYEQVQATLGARDIFGEVSALSDRAQAFTFRTRTLSQLLRLKQATLKEAMQSRPEDSVVVIKNFLKHQVEMHGMKVEDLLGDNTGEHDDDANVLTVAAMGNSGLLEDLLRAGKDADVGDAKGRTALHIAASKGYEDCVLVLLKHACNVNIRDAQGNTAMWNAIAAGHHKTFNLLYQFGRASNPRAGGDVMCLAARRGHLGALQELLKLGLDVDSEDHDGATALRVAMAEGHADAARFLILNGASVDKASLDDDDGSGSGSGSGAARLAMSPTELRELLQKRELGHSITIHDSPAVVPNGGSSGHSRPGRLQSTSSDSQRWPRVSVYKGHPFLRNRTSEAGKLINLPGTMEEFKVIVGEKLKVDAEKALIVSDEGAEIDSIDVIRDNDKLFMVTEEDLRRLASMDWLSCE

SEQ ID NO: 57894 - protein, 285 aa, Zea mays
  Clone ID: UC-ZMFLMO17103E02_FLI.pep
RGALPSSGRPSAQPSLLYLPSARFISLARASLHARLLPCRAPLPCSLLFFSHAHRLLHLRISLRPAEFSTPCSTARPTTAQVRPAEVLHLPAKLRARAFSLRPAAPLLPSLLAVELPLPALSSSHLSVARRRRVPAHLPPRDARPPEQLPGARPDLFPPCAPLSGCSLRRISFSGAHRLLGSPPHLAAHRAPCAPWPPCLLPGRRLASGSPTMPGVLPALLAAPMSSSPARWSPSPLPAFPLVVASLCAAEAWWVLVAGMVVRRGIWACRCGLPIDAPPVLTGPS

SEQ ID NO: 57895 - protein, 318 aa, Zea mays
  Clone ID: UC-ZMFLMO17004E07_FLI.pep
ERGHTLVDEIRILMVHGLLHLLGFDHEVSKVAEEEMEKEEEHILNTLEWRGKGLIKSAYDIATDSLTEADSNIEKVILQEKHQHKLSHIICDIDGTIMDHEGGLHEKSIGSLREAIAKGVNVIMVTGKSRASTIRTFKLLDFYEKGDFISETSPGVFLQGSLIYGRDGKKVHRAELDLDVCKEALLYSLKHRIPLVAYCEEQCLTLFEHPFVELLHTVHNENKVKVMHSIEDLLEYSSIQKLLLFDSTKEDSSVLRQHFSELSRGKAHVIKMHSNTIDIVPLNASKSGGLRILLDHLGITKDCDLDSIGDYTRWLSNK

SEQ ID NO: 57896 - protein, 251 aa, Zea mays
  Clone ID: UC-ZMFLMO17018D04_FLI.pep
FLCSCSTQLLLIILIVKLSKCEYRFLDPLMFGHYPPSMQKLVGDRLPQFSARASMLVSGSLDFVGINHYTTLYVRNDRMRIRKLVMNDASTDAAVIPTAYRHGKKIGETAASGWLHIVPWGMFKLMKHIKEKYGNPPVIITENGMDDANNRFSKLEDDLQDDKRIQYHKDYMSNLLDAIRKEGCNVHGYFVWSLLDNWEWNSGYTVRFGLYYIDYNNNLTRIPKASVEWFRQVLAQKTAGLEYSGSTVASS

SEQ ID NO: 57897 - protein, 368 aa, Zea mays
  Clone ID: UC-ZMFLMO17001B01_FLI.pep
PLSSSEVEIWAVVSRTLAASAVMGRSALAVRLASLLAFGLVLVSVEASLGDVDPRYRTCVRECQATGIIGENVISHCQFKENYTSVGVSWYNQEQIYIQWKELNCRTDCRYFCMMQREGERQSLGLSPVKYHGKWPFLRVSVFQEPLSTALSAVNLLMHFTGWLSFFLLVNYKLPLRPQTKRTYYEYTSLWHIYAILSMNAWFWSSIFHTRDIELTEKLDYSSAVALLGYSLILSLLRAFNVKDEASRVMFAAPILAFVTTHILYLNFYELDYGWNMKVCVVMAAVQLLTWAVWAGVSRHPSRLKLWTVVFGGALVMLLELYDFPPYMGFADAHSLWHASTIPLTYLWWSFIKDDAKFRTSTLSKKAK

SEQ ID NO: 57898 - protein, 225 aa, Zea mays
  Clone ID: UC-ZMFLMO17001D11_FLI.pep
ITRPMFQSMLSHRGDSGCQGAFYTYDAFIEAASKFPGFGTTGDEQTRRRELAAFFGQTSHETTGGWATAPGGPFAWGYCRVKEQNPTDPPYYGRGPIQLTHEYNYRLAGQALNLNLVGNPDLVASDPVVAFKTAIWFWMTPQSPKPSCHAVMTGAWTPSATDRAAGRLPGYGLTSNIINGGLECGKGQSTDGAKDRVGYYKRYCDMLRVGYGDNVPCKDQKPYGG

SEQ ID NO: 57899 - protein, 502 aa, Zea mays
  Clone ID: UC-ZMFLMO17005C01_FLI.pep
LGPDSMASASGADALLNGVEIFKLSKDSDLSYVLGHIDTGNQMDSSKGGKIKGLWEELGIGSASFVAVTSVVLFSWCYIRKKRKAVNKEAPPGWHPLVLHEAMKSTTDARAASKSSSARNASPIGHRMGRRFGIAEIRAATKNFDESLVIGTGGFGKVYKGEIDEGATVAIKRANTLCGQGLKEFETEIEMLSKLRHRHLVAMIGYCEEQKEMILVYEYMAKGTLRSHLYGSSLPPLTWKQRIDACIGAARGLHYLHTGADRGIIHRDVKTTNILLDDSFVAKIADFGLSRTGPTLDQTHVSTAVRGSFGYLDPEYFRRQQLTQKSDVYSFGVVLFEVACARPVIDPTLPKDQINLAEWAMRWQRQRSLEAILDPRLDGDFSPESLKKFGEIAEKCLADDGRSRPSMGEVLWHLEYVLQLHEAYRRNVVESESFGSGELGFADISSSFFSLPHVIREGEEEHHHRSKKPSSIREELDTHYQPPPPSQQKKDTEVSRVSLTTV

SEQ ID NO: 57900 - protein, 446 aa, Zea mays
  Clone ID: UC-ZMFLMO17008E12_FLI.pep
APTPTQSSPPPLSLQFCTLQLPAMARAPSSWTPSLAMVLLVVAAAAVAVSSEAARVPAAVGNWTGEELRGAAARRGGRRSRRRAFENGLGRTPQMGWNSWNHFGCGINENLIKQTADALVNTGLAKLGYEYVNIDDCWAESDRDYQGSFVANRQTFPSGIKALADYVHAKGLKLGIYSDAGTRTCSQKMPGSLDHEEQDVKTFSSWGIDYLKYDNCNDAGRSVMERYTKMSNAMKTYGKGIFFSLCEWGRQNPATWAGGMGNSWRTTDDIADNWGSMTSRADQNDRWASYAGPGGWNDPDMLEVGNGGMSEAEYRSHFSIWALAKAPLLIGCDVRAMSQQTMGILSNSEVIAVNQDSQGAQGKKVQSSNGLEVWAGPLSNNRKAVVLWNRQGYQATITAQWSSIGLASSTAVTARDLWAHSSFSAQGQLSASVPPHDCKMYVLTPN

SEQ ID NO: 57901 - protein, 181 aa, Zea mays
  Clone ID: UC-ZMFLB73395G11_FLI.pep
SFVISEIIPEMEICDFDFEPCGYSMNAIHGSAFSTIHVTPEDGFSYASYEVMGLDATALSYGDLVKRVLRCFGPSEFSVAVTIFGGRGHAGTWGKALGAEVYDCNNMVEQELPGGGLLVYQSFCAAEDAVATSPKSVFHCFDGENVESAPPPMKKDYKLANLLCWEEEADAMEEKAGVLDE

SEQ ID NO: 57902 - protein, 207 aa, Zea mays
  Clone ID: UC-ZMFLMO17005D09_FLI.pep
NTKYADGDSLKMSHDNFTQQSHSNETACLANAQDHSTDTVVVDGRFTRAWVDTDTICIDGVKDPLAIERWQAQAMEADKEFYSRIRIPDEDDSSSQKHTCRSSASQGADSKPASERQSRGVEHIKQGLVNFIASLLMPLYRGKKIDREGYKTIMRKSVNKIIDTCSEGEKSMTTLEFLDDKRKIKIESFVGKMVDKHLHVVSKSAKP

SEQ ID NO: 57903 - protein, 443 aa, Zea mays
  Clone ID: UC-ZMFLMO17008F02_FLI.pep
VGSETRRVPSPHPTGTNKLPSHPNPASTGSRRTRIRPTTPRRRRSKKMAALDTFLFTSESVNEGHPDKLCDQVSDAVLDACLAEDPDSKVACETCTKTNMVMVFGEITTKANVDYEKIVRETCRNIGFVSNDVGLDADHCKVLVNIEQQSPDIAQGVHGHFTKRPEEIGAGDQGHMFGYATDETPELMPLSHVLATKLGARLTEVRKNGTCPWLRPDGKTQVTVEYRNEGGAMVPIRVHTVLISTQHDETVTNDEIAADLKEHVIKPVIPEQYLDEKTIFHLNPSGRFVIGGPHGDAGLTGRKIIIDTYGGWGAHGGGAFSGKDPTKVDRSGAYVARQAAKSIVASGLARRAIVQVSYAIGVPEPLSVFVDTYGTGAIPDKEILKIVKENFDFRPGMIIINLDLKKGGNGRYLKTAAYGHFGRDDPDFTWEVVKPLKSEKPSA

SEQ ID NO: 57904 - protein, 253 aa, Zea mays
  Clone ID: UC-ZMFLMO17014A11_FLI.pep
ALLQDIAIVTGAEYQSKDLGLLVEDTTVEQLGIARKVTISSSSTTIIADAASKDDIQARIAQLKRELSQTDSTYDSEKLAERIAKLSGGVAVVKVGASTEAELEDRKLRIEDAKNATFAAIEEGIVPGGGAAYVHLSTFVPAIKETLDDPEERLGADIIQKALVAPAALIAHNAGVEGEVIVDKIRESEWEFGYNAMADKHENLVEAGVIDPAKVTRCALQNAASVAGMVLTTQAIVVEKPKKAPAAAAAAAP

SEQ ID NO: 57905 - protein, 292 aa, Zea mays
  Clone ID: UC-ZMFLMO17008G03_FLI.pep
SDPVFSFWFNRHADEGEGGEIVFGGMDSSHYKGDHTFVPVTRKGYWQFNMGDVLVDGKSTGFCAGGCAAIADSGTSLLAGPTAIITEINEKIGAAGVVSQECKTVVSQYGQQILDLLLAETQPAKICSQVGLCTFDGTHGVSAGIRSVVDDEAGKSNGGLKSDPMCNACEMAVVWMQNQLAQNKTQELILNYINQLCERLPSPMGESAVDCGSLASMPDIAFTIGGNKFKLKPEQYILKVGEGQAAQCISGFTAMDIPPPRGPLWILGDVFMGVYHTVFDYGKLRVGFAESA

SEQ ID NO: 57906 - protein, 338 aa, Zea mays
  Clone ID: UC-ZMFLMO17010G02_FLI.pep
MAMPSGWRGILGFHYGIVQAPLGPDISGPELVAAVANAGAIGLLRLPDWPAPDHVRELIRKTRSLTSKPFGAAIVLAFPHEENLRVVLEEKLDVLQVYWGDFPNHRVQEAHRAGVKVLHQVGSLEEAAKAKEAGVDGIIVQGREAGGHVIGQEGLFPLLPRVVDLVSDSSIPVIAAGGIVDGRGYVAALALGAQGVCLGTRFVATEESFAHPIYKQKLIEMSHTDYTNIFGRARWPDAPQRVLETPFYDEWKNNFPDQETEEDQPIIGHSIIHGVHKDIRRFAGTVPNATATGDIDIMAMYSGQGVGLITEIIPAAQVVKSLVAEAKEVIREKLSGYQ

SEQ ID NO: 57907 - protein, 141 aa, Zea mays
  Clone ID: UC-ZMFLMO17014D12_FLI.pep
AFLFFQQIVSRIKKECPNVPLVLYINGNGGLLERMKNTGVDVIGLDWTVDMTDGRRRLGNGISVQGNVDPAFLFSPLPVLTDEIHRVVKAAGPKGHILNLGHGVLQKTPEEAVAHFFDVTRRLRYDTLFQGSVAEELHHVA

SEQ ID NO: 57908 - protein, 291 aa, Zea mays; identical to SEQ ID NO: 45247
  Clone ID: UC-ZMFLMO17003D08_FLI.pep

SEQ ID NO: 57909 - protein, 182 aa, Zea mays
  Clone ID: UC-ZMFLMO17015B12_FLI.pep
SATTWRPASPTSGSPSSSAPAPPPSACPPSLDPTATSPLSTRTRCGWTRRATCTATAWSCWSSSRGGAPWGGTSGKGWTSCSGPSGPRPAAGRPCRGSRTGGSAPRPKTRWRTSSSSPCSASRSRRPPATSCSPTCWPDEAQTDERHLFCHATVNYTPKKHTHDDSSSCRTEVTACSAADWS

SEQ ID NO: 57910 - protein, 456 aa, Zea mays
  Clone ID: UC-ZMFLMO17018H12_FLI.pep
LAGQEGTLWWHAHSSWLRATVHGALIIRPRAGVPYPFNAGDTPAREITIILGEWWNMNPIDVVRTATRTGAAPNISDALTVNGQPGDLYKCSSNGTTTFSVTSGETNLLRFINAALNTELFVSLAGHTMTVVGADASYTKPYATPVILVAPGQTTDVLVTFDQPPSRYYLAARAYASAQGVPFDNTTTTAIFDYGTGASNSSSPAMPTLPAYNDTATATAFTTSLRGLRAADLPARVDESLFFTVGVGLFNCSSGQTCGGPNNTRFAASINNVSFVLPSTTSILQAHYAYAAGGATPAGVFTADFPANPPVRFDYTAPNVSRALWQPVPGTRVYSLKYGAAVQLVLQGTNVFAAENHPIHLHGYDFYILAEGFGNFDAAADTASFNMDDPPMRNTVGVPVNGWAVIRFVADNPGVWLMHCHLDVHITWGLAMAFLVEDGVGELQSLEAPPSDLPIC

SEQ ID NO: 57911 - protein, 333 aa, Zea mays
  Clone ID: UC-ZMFLMO17003H12_FLI.pep
GGTTKVAIKRGNPLSEQGVHEFQTEIEMLSKLRHRHLVSLIGYCEEKNEMILVYDYMAHGTLREHLYKTQKPPLTWRQRLDICIGAARGLHYLHTGAKHTIIHRDVKTTNILLDEKWVAKVSDFGLSKTGPSMDHTHVSTVVKGSFGYLDPEYFRRQQLTEKSDVYSFGVVLFEVLCARPALNPTLPKEEVSLAEWALHCQKKGVLDQIVDPYLKGKIAPQCFKKFAETAEKCVSDQSIDRPSMGDVLWNLEFALQMQESAEESGSLGCGMSDEGTPLVMVGKKDPNDPSIESSTTTTTTTSLSMGDQSVASMDSDGLTPSAVFSQIMNPKGR

SEQ ID NO: 57912 - protein, 206 aa, Zea mays
  Clone ID: UC-ZMFLMO17009D12_FLI.pep
VQEEFTESLGFIIQKTEDGCISKYSITKYEDPSDTFCVTYNASNKMANCSCKYFEFSGILCRHILGVYIIVDPRTLPTEYFMKRWTRKARDDDALLEDNNNNTHDEDASQSTTSRYNTLCADAIRCAEKGAGSEAVYKAAKDILQKAYEEIIAYERNTGQGSQRDVININEDVTIDDAMNDKSMPDSGRKVTNLLGQFVNSTWSPV

SEQ ID NO: 57913 - protein, 164 aa, Zea mays
  Clone ID: UC-ZMFLMO17017H06_FLI.pep
DCYVKNPDCEQLWAYIRQNNLQDPDDKRKIICNDELRVVFETDTTDMFKMNKLLAKHITPLDPKDQLHEVKRMKAPTVAPQPPPINQPSVVISDALAKFIGTDGTFPQDDALKYLWDYIKANQLEDVINGSILCDSKLQELFGCESIPMSGLSEMLGHHFIKKT

SEQ ID NO: 57914 - protein, 227 aa, Zea mays
  Clone ID: UC-ZMFLB73416A10_FLI.pep
KLTPLPQRHACIQSLHGDAPGWCATMRLYASSVRKSSSSGAVHCRLKILPASAYRPFRNLSGPTSASTLAISSSTTRASSSGVARTSTPPASSAAPWRSHCQFWTRLISAVAASSIRLYSGTEPEPASHAARYCTPTRTLSRRPSTVRAPRGGWMRSSSFTLAPSCPAASPIWFGLPPRWPSKTSRIAGMSPGCAAHVPSWPARTSLSLSLRTSSSAASFAAASSLI

SEQ ID NO: 57915 - protein, 646 aa, Glycine max
  Clone ID: 701108931_FLI.pep
TTTATTTTTLQCVVLFLSALFFGIKEVKSMDSDYGIPRELSDLQKIRSLYQPELPPCLQGTTVRVEFGDATTTADPTDALTISRAFPNTYGHPLAHFLRATAKVPDAQIITEFPPIRVGIVFCGRQSPGGHNVIWGLHNALKIHNPNSVLLGFLGGSEGLFAQKTLEITEDILSTYKNQGGYDLLGRTKDQIRTTEQVNAALAACNNLKLDGLVIIGGVTSNTDAAQLAETFAVAKCPTKVVGVPVTLNGDLKNQFVETNVGFDTICKVNSQLISNVCTDALSAEKYYYFIRLMGRKASHVALECTLQSHPNMVILGEEVAASKLTLSEIAKQITDAVQARAEQDKYHGVILLPEGLIESIPEVYALLKEIHGLLRQGVAVDKISSQLTPWASALFEFLPPFIRRQLLLYPESDDSAQLSQIETEKLLAYLVEVEINKRLKEGTYKGKKFNAICHFFGYQARGSLPSKFDCDYAYVLGHICYHILAAGLNGYMATVTNLKNPVNKWRCGAAPIASMMTVKRWSPNPGATSIGKPAIHPATVDLRGKAYELLRQKAQSFLMDDIYRNPGPLQFDGPGAGAKVITLSVEDQDYMGRIKKLQEYLEQVRTIVKPGCPQEVLKAALSVMASVTEVLAAMSTSSTNTLSAM

SEQ ID NO: 57916 - protein, 216 aa, Zea mays
  Clone ID: UC-ZMFLB73020B06_FLI.pep
SFCFVCCHLASGGREGDEAHRNANATEILSRTTFPRGHALNLPLPQNILDHDRVILLGDLNYRISLPEAKTRLLVERQDWKTLLENDQLRAEVCRGGAFQGWSEGPIGFSPTYKYHPNSDAYYGCATAARGRNKRRAPAWCDRVLWRGAGLAQTRYDRCESRLSDHRPVRAVFAVEVDAPGDLNSLRSFFMSERFDRDQMLLRKDDVNSARFGDTL

SEQ ID NO: 57917 - protein, 388 aa, Zea mays
  Clone ID: UC-ZMFLB73011H07_FLI.pep
WYPANLEDSSLHGLQAYRVFISIALILGDGLYNFIKVLIRTIAGFISMVQQNSKSMLPVSDNGSSMSSMEAVSFDDERRIENFLKDQIPKSVAYGGYVAVAAISIGTLPQIFPQLKWYYILVAYVVAPVLAFCNAYGSGLTDWSLASTYGKLAIFVFGAWAGLSHGGVLVGLAACGVMMSIVSTASDLMQDFKTGYLTLASPRSMFISQVIGTGMGCVIGPCIFWLFYKAFGDIGESGTEYPAPYAIVYRNMAILGVDGFGSLPKNCLTLCYIFFAAAITINLVRDLTPYKVSRFIPLPMAMAIPFYIGSYFAIDMFLGSAILFVWERLNKAKADAFGPAVASGLICGDGIWTLPQSILALAKVQPPICMKFLSRSTNAKVDSFLGLS

SEQ ID NO: 57918 - protein, 352 aa, Zea mays
  Clone ID: UC-ZMFLB73001D02_FLI.pep
LLCEPCKLSFGQGLTKEQKNAYFDEYDYRVKLLQKKQWKDEIRRLKEMKKRGKTDLDDYGYANITGEDDQDPPPENVSVPLPDMVLPPSFDCDNPTYRYRFLEPTSTVLARPVLDAHGWDHDCGYDGVSVEETLAILSRFPANVAVQVTKDKKEFSIHLDSSIAAKHGENTSSLAGFDIQTVGRQLAYILRGETKIKNIKKNKTTGGFSVTFLGDIVATGLKIEDQLSLGKRLSLVASTGAMRAQGDTAYGANLEARLKDKDYPIAQSLSTLGLSLMKWRRDLALGANLQSQFSIGRGSKMAVRLGLNNKLSGQITVRTSTSEQVQIALLGLVPVAASIYRSFRPSEPSFAY

SEQ ID NO: 57919 - protein, 552 aa, Zea mays
  Clone ID: UC-ZMFLB73016C08_FLI.pep
AHTHNQISPKSTRRHLRFKMQIFVKTLTGKTITLEVESSDTIDNVKAKIQDKEGIPPDQQRLIFAGKQLEDGRTLADYNIQKESTLHLVLRLRGGMQIFVKTLTGKTITLEVESSDTIDNVKAKIQDKEGIPPDQQRLIFAGKQLEDGRTLADYNIQKESTLHLVLRLRGGMQIFVKTLTGKTITLEVESSDTIDNVKAKIQDKEGIPPDQQRLIFAGKQLEDGRTLADYNIQKESTLHLVLRLRGGMQIFVKTLTGKTITLEVESSDTIDNVKAKIQDKEGIPPDQQRLIFAGKQLEDGRTLADYNIQKESTLHLVLRLRGGMQIFVKTLTGKTITLEVESSDTIDNVKAKIQDKEGIPPDQQRLIFAGKQLEDGRTLADYNIQKESTLHLVLRLRGGMQIFVKTLTGKTITLEVESSDTIDNVKAKIQDKEGIPPDQQRLIFAGKQLEDGRTLADYNIQKESTLHLVLRLRGGMQIFVKTLTGKTITLEVESSDTIDNVKAKIQDKEGIPPDQQRLIFAGKQLEDGRTLADYNIQKESTLHLVLRLRGGQ

SEQ ID NO: 57920 - protein, 376 aa, Zea mays
  Clone ID: UC-ZMFLB73006A07_FLI.pep
TSEPPILPPLNEIYEGNIAGDVTEAALFDEQHLDEVCAANIERFRLQNKGRRNETSTCRLLGTFFQKFAHINALTDNVISTYSGQIERIQNNPSWMRKSYHLFVEDPVERPDNAARAVSMKGLDLIAIAFNDACHKFKSLEHIDRNELLALLCTPVVRLKLGVRVRENSYPKSPRNNVHSRIRGQMWRDRGQAPSARGFTGTRSVHENPLANTTAHETAVQYHNHVQPTTVRQTAIRNQVTNTAVHQTAPYQNHTARQVYPTWSQTAEPYQNHNQQVYATGFQTGPYQSHNQVHAYRAGLPPGGIYEIHNQQVYNAGFQTDGPHQNQQRRKGYPSNHQNNRLSATAARYEPVRGQFNNGSTWDSRSQAPGSAALRR

SEQ ID NO: 57921 - protein, 840 aa, Zea mays
  Clone ID: UC-ZMFLB73059H03_FLI.pep
KLRVLRTDNGGEFTAAEFASYCADEGVQRHYSAPYSPQQNGVVERRNQTVVGMARALLKQRGMPAVFWGEAVVTAVYILNRSPTKALNGMTPYEAWHGRKPAVSHLRVFGCLAFTKELGHISKLDDRSTPGVFIGYAEGSKAYRILDPRTQRVRTARDVVFDEGRGWAWDKAVDDGTTPTYDFTIEYVHFEGAGGVGNSSPSRSTPAPKSPPTPAPHSPAPATTSSSPPRTPATTPATASSSPPRTPAPTVPSPGTSSPTPARVEHDPVELVTPLSRDEERVDACYDGEPLQYRRVEGLLIDPSVPGPASRILAGELHLACDDGEPRSFAEAEKHAAWRAAMQSEMDAVETNRTWELADLPHGHRAITLKWVFKLKRDEAGTIVKHKARLVARGFLQQEGIDFDDAFAPVARMESVRLLALAALKGWHVHHMDVKSVFLNGDLKEEVYVHQPPGFAIPGKEGKVLRLRKALYGLRQAPRAWNAKLDSTLKRMGFMPSPHEAAIYRRGNGENALLVGVYVDDLVITGAKDAEVAAFKEEMKATFQMSDLGHLSFYLGIEVHQGDSGITLRQTAYVRRIVELAGLTDCNPALTPMEERLKLSRDSTTEEVDATQYRRLVGSLRYLVHTRPDLAYSVGYVSRFLQRPTTEHEQAVKRIIRYVAGTLDHGLYYPRCPGEAHLVGYSDSDHAGDIDTSKSTSGILFFLGKCLISWQSVKQQVVAMSSCEAEYIVASTASTQALWLARLLGDLLGRDTGAVELRVDSQSALALAKNLVFHERSKHIRLRYHFIRDCLAEGSIKARYINTKDQLADLLTKPLGKIKFVELCSRSGMAQLSHKTTPKT

SEQ ID NO: 57922 - protein, 352 aa, Zea mays
  Clone ID: UC-ZMFLB73064H01_FLI.pep
VSFVGMHMDVVPANGSEWDFDPFSLTFDSEDKDKLRGRGTTDCLGHVALVAQLMRRLGEVKPPLKHSVIAVFIANEENSSVTGIGVDGLVKDGLLDKLKTGPLFWIDTADKQPCIGTGGMIPWHLKATGKLFHSGLAHKAINAMEMNMEALKVIQKRFYTDFPPHEKEKVYKFATPSTMKPTKWSYPGGGLNQIPGECTISGDVRLTPFYSTSHVMEKLKEYVEDINERFETVLDTRGPVSKYILPDENLQGRLEITFDGDVMNGVACNLESRGYHALCKATKEIVGHVEPYSITGSLPLIRELQDEGFDVQTAGYGLLKTYHAKNEYCLFSDMAQGFQVFLSIISQLEEEV

SEQ ID NO: 57923 - protein, 373 aa, Zea mays
  Clone ID: UC-ZMFLB73079C10_FLI.pep
CQLPGVTAPIPGVGVLPNLYNLAAGQPQAMTQQATRHARRVYVGGLPPTANEQTVAIFFNGVMAAIGGNTAGPGDAVLNVYINHDKKFAFVEMRSVEEASNAMVLDGIMFEGAPVKIRRPTDYNPSLAAALGPSQPNPNLNLSAVGLTPGSAGGLEGPDRIFVGGLQYYFTEAQVRELLESFGPLRGFDLVKDRETGNSKGYAFCVYQDLNVTDIACAALNGIKMGDKTLTVRRANQGASQPRPEQESILLQAQQQVQMQKFVYQVGGALPTKVVCLTQVVTEDELRDDEEYDDIVEDMREEGHKYGNLVKVAIPRPDPSGAPVAGVGKVFLEYADVEGSTKAKTGMHGRKFGGNQVVAVFYPEDKFAAEQYD

SEQ ID NO: 57924 - protein, 429 aa, Zea mays
  Clone ID: UC-ZMFLB73074G10_FLI.pep
HFGCRVMAQGINFPDFIGAVGGHDGGVDFGGNFCDMAFYQKLGEGTNMSVDSLNSMQTSMHGGSIAMSVDNNSSVGSNSDSRTGMLGHPGLKGPAIVGSYSVGHSIFRPGRVSHALSEDALAHALMDNKFPTETLKDYEEWTIDLGKLHLGMPFAQGAFGKLYRGTYNGMDVAIKLLERPEADPEKAQLLEQQFVQEVMMLATLRHPNIVKFIGACRKPLVWCIVTEYAKGGSLKNFLSKRQNRSVPLKLAVKQALDVARGMAYVHGLGFIHRDLKSDNLLISGDKSIKIADFGVARIEVKTEGMTPETGTYRWMAPEMIQHRPYNQKVDVYSFAIVLWELVTGNVPFANMSAVQAAFAVVNKGVRPAIPHDCLPALAEIMTMCWDTNPEVRPPFAEIVRMLEQVEVEVLTTVRKARFRCCIAQPMTLD

SEQ ID NO: 57925 - protein, 326 aa, Zea mays
  Clone ID: UC-ZMFLB73092D08_FLI.pep
QRAPTPTPTQRSQSPLRSLCTLQLPVPAMARAPSSWTPSLAMVLLVVAAAAVVASSEAARVPAAVGNWTGEELRGAAARRGGRRSRRRAFENGLGRTPQMGWNSWNHFGCGINENLIKQTADALVNTGLAKLGYEYVNIDDCWAESDRDYQGSFVANRQTFPSGIKALADYVHAKGLKLGIYSDAGTRTCSQKMPGSLDHEEQDVKTFSSWGIDYLKYDNCNDAGRSVMERYTKMSNAMKTYGKGIFFSLCEWGRQNPATWAGGMGNSWRTTDDIADNWGSMTSRADQNDRWASYAGPGGWNGKSAPAQEDSEFVPKRSWEFTISY

SEQ ID NO: 57926 - protein, 758 aa, Zea mays
  Clone ID: UC-ZMFLB73084F05_FLI.pep
GTAYGKGVTEVERAMAMRKGDSLDDDIENGDYKDKKNHNSPNVKGFNFKDPRIMDGNWIHEPNKDMIRDFFRLLAICHTCIAEIDENEKVSYEAESPDEAAFVIAARELGFEFYKRSLATIIIREQDPSWNVVEKRYRKYELLNILEFSSSRRRMSVIVKEPEGRILLLSKGADSVMFKRLAPNGRKYEEETRRHINEYSDSGLRTLVLAYRVLDEKEYKEFNEKLNTAKASVSADRDVKIEQAADSIEQDLILLGATAVEDKLQQGVPECIDKLAQAGIKIWVLTGDKMETAINIGFACSLLRQDMTQIIVTLEQPDIIALEKDGDKYKIFKASKKKVMSQIEDGIKQIPPSTKISTASFALIIDGKSIPYALEDDVKFKFLDLAINCASVICCRSSPKQKALVTRFVKQVTHKVTLAIGDGANDVGMLQEADIGVGISGAEGMQAVMASDVAVAQFRFLERLLLVHGHWCYRRISVMICYFFYKNVTFGVTLFLYEAFASFSGKPAYNDWFLSLYNVFFTSLPVIALGVFDQDVSARLCIQYPQLYQEGVQNILFSWCRILGWMLNGVMNAVLIFFFCITTFEDQVFRRDGQVAGLDALGVAMYTCIVWVVNCQMALSVNYFTIIQHIFIWGSIAVWYLFLIVYGSMNPRFSTTAYMVFIEQLAPALSFWLVTLFVVLATLVPYFTYAAIQIRFFPMFHNKIQWKRYLGKAEDPEVARQLSSRHRTSSQQRMVGISARRDGKAMQITRETEIEVQE

SEQ ID NO: 57927 - protein, 438 aa, Zea mays
  Clone ID: UC-ZMFLB73097G09_FLI.pep
AAPRRHAYASMMYMGTPRDYEFYVATRVMMLSLRRLSPNADRVVIASLDVPPLWVQALKNDGVKVVSVKNLKNPYEKQENFNRRFKLTLNKLYAWSLVSYERVVMLDSDNIFLQNTDELFQCGQFCAVFINPCIFHTGLFVLQPSMDVFKNMLHELAVGRENPDGADQGFLASYFPDLLDQPMFHPPANGTKLWGTYRLPLGYQMDASYYYLKLRWSIPCGPNSVITFPSAPWFKPWYWWSWPVLPLGLSWHEQRRENLGYSSEIPLVLIQAVLYIGVIAVTRLARPSLSKMCYNRRMEKNTMFLLSLLRIVAAWSILAAYTIPFFIIPRTVHPLLGWPLYLLGSFSLSSIVINIFFLHPITVLTTWFGFIGALVVMAFPWYLNGVVRALAVFAYAFCCAPLIWASLVKTMSSLQVLIERDAFRLGEPNQNAEFTKLY

SEQ ID NO: 57928 - protein, 136 aa, Zea mays
  Clone ID: UC-ZMFLB73151A08_FLI.pep
ALALSCLVLSCTPNCNPCSHAQRGVQCSCPRHSSSMYHHCPGQKISHQILSDSCTVMLNSLYRHDVKELHPPRGTVIPFLFVPCANIGFTPFLAASTPARTRRPRACSPRTARWSTSAASNSPPRSPPRPVRHSSS

SEQ ID NO: 57929 - protein, 75 aa, Zea mays
  Clone ID: UC-ZMFLMO17128H03_FLI.pep
YVCTCLVIRLDPDANSQIAQVRVPMVLGTTQQKRKRKGIPDEELDTWRSLAAALTCCTRFAGTRAWTEKGEKAGV

SEQ ID NO: 57930 - protein, 170 aa, Zea mays
  Clone ID: UC-ZMFLMO17159D05_FLI.pep
RPPSAAVATPPSLSPSPPSRGQPVPPPHQSVALPRPPPETAARGSEGTGTGIRVGGVPGPACDCDAAETRKGRHRPYGGWCGWGNLWGVGGGGSGTRLPGGAAAPSQRRRASRRRAAEQEIRTPVPRQLADSVNHQVWRGRGANKSGLGGGVPKGSRATGGDWVPPIEGD

SEQ ID NO: 57931 - protein, 321 aa, Zea mays
  Clone ID: UC-ZMFLMO17127B10_FLI.pep
QDYDDLVDLYPEEQPQRVEVNTYAPSARPNHKRSKNFSDVEDELLVSAWLNISLDPIIGYNQTRSSYWTRIYDYFHANKTFSSTRSQNSIMHRWTSIQEGVNRFTGCLAQVERRRQSGATMQDKLTQACALYKSEDKQHKAFPYMHCWNKLRTQRKWEMKLEELAVGKSSNKKQKMNSNETSPPHLPSATETSEPTTPNETVTTRPPGKKKAKAAAFQAEKKGYTETLNKLFEKKKETDEFKEMKKDERFRLALAVEQERAANEKLNMQLRSKELELRQQEVEQHKKREEERIMTLDLSVMPADQKQYYMRLRSKILSENA

SEQ ID NO: 57932 - protein, 324 aa, Zea mays
  Clone ID: UC-ZMFLMO17138D08_FLI.pep
GADFFFESNSPAIQENRVATVQCLSGTGSLRVGGEFLARHYHERTIYIPQPTWGNHPKVFTLSGLNVRSYRYYDPATCSLHFEGLMEDLGSAPSGSIVLLHACAHNPTGVDPTIEQWEQIRQLMRSKSLLPFFDSAYQGFASGSLDKDAQSVRMFVADGGELLMAQSYAKNMGLYGERVGALSIVCRSADVAVRVESQLKLVIRPMYSNPPLHGASIVATILRDSEMFNEWTLELKAMADRIINMRQQLFNALKSRGTPGDWSHIIKQIGMFTFTGLNSEQVAFMRQEYHIYMTSDGRISMAGLSMRTVPHLADAIHAAVTQLK

SEQ ID NO: 57933 - protein, 502 aa, Zea mays
  Clone ID: UC-ZMFLMO17198F02_FLI.pep
SVVAVQTGPQKPSPSSSQAAAAEDEADALQKLLKREYKYGFVSDFESFSIPKGLSEATVRRISELKAEPAWMLDFRLAAYRRFLTMVEPTWSDNEYAPVDLQSICYYSAPKTKPKLNSLDEVDPELLKTFDRLGIPLTEQKRLSNVAVDAVIDSTSIATTHREALMAKGVIFCSISEAIREYPDLIRRYLGSVVPPGDNYYAALNSAVFSDGSFCFVPKDTVCPMEISTYFRINDKETGQFERTLIVADERSTVSYLEGCTAPAYDSNQLHAAVVELVCEEGAEIKYSTVQNWYSGDEEGKGGIYNFVTKRGRCKGHGSKISWTQVETGSAITWKYPSVELIGDDSVGEFYSVALTKDCQQADTGTKMIHKGKNSRSRIISKGISAGKSRNCYRGLVLMNPSAENAYNSSQCDSLLIGDNAAANTYPTIQVGCTSGRVEHEASTSKIGEDQLFYFQQRGVDHEKAVAAMIGGFCRSVFEHLPYEFAQEVDALMNLKLEGSVG

SEQ ID NO: 57934 - protein, 351 aa, Zea mays
  Clone ID: UC-ZMFLMO17214B11_FLI.pep
GSTALAGGGGGGAADGDGAARAAAGGLLRQLVPSGGDHRAAGGEQGGGGQPGPRRRPAPPPLPRLFRWGQSLGRKLAAAAHTSKGWQERLTDRLFLHYLQGCDASVLIDSTKGNTAEKDAGPNLSLRGFEVVDRIKARVEQACFGVVSFADILAFAARDSVALAGGNAYQVPAGRRDGSVSRASDTNGNLPPPTANVAQLTQIFGTKGLTQKEMVILSGAHTIGSSHCSSFSGRLSGSATTAGGQDPTMDPAYVAQLARQCPQGGDPLVPMDYVSPNAFDEGFYKGVMSNRGLLSSDQALLSDKNTAVQVVTYANDPATFQADFAAAMVKMGSVGVLTGTSGKVRANCRVA

SEQ ID NO: 57935 - protein, 766 aa, Zea mays
  Clone ID: UC-ZMFLMO17211H10_FLI.pep
GAPDCLSGLTFVISGTLDSLEREEATDLIKRYGGRVTGSISKKTSYLLADEDIGGVKSNKAKDLGVPFLTEDGLFDLIRKSKPAKAPVDKHQNNNSSEKLQKSQTKSSPAKVEKRAEASAVGKSIASNSNAASASADKQKPKIVDRGSMQWTEKYRPKVPNDIVGNQSMVKQLHDWLKSWDALFLHSGQKGKGKKQADSAAKKAVLLSGPPGIGKTTTAKVVSQMLGLQAIEVNASDSRGKADSKIEKGVGGSTSNSIKELINNATLNYSDNRLKHPKAVLVMDEVDGMSAGDRGGVADLIASIKISKIPIICICNDRYSQKLKSLVNYCLMLNFRKPTKQQMGKRLMEIAKKEGIQAQENAMEELAERVHGDIRMALNHLQYMSLSQSVVKYDDIKERLNSSSKDEDISPFTAVDKLFGFNGGRLRMDERMDFGMSDPDLVPLIIQENYINYRPNTIGKDESGVKRMNALARAAESIADGDLVNVQIRRYRQWQLSQAACFASSIVPAALMHGNREILEAGERNFNRFGGWLGKYSTTNKNRRLLEDVHSHILASQQANLDRDALRLDYLTLILRELTDPLKKMSKDEAVQKVVEFMDTYSLSQEDFDTIVEVSKFKGHPSPMDGIQPAVKSALTKAYKQGSSSRVVRAADLINIPGMKKPLKKRVAAILEPVEESLPEENGLASAEDDEDGSSDADNNDELVPADSTPKLDLQSDKKKGIQVQLDLKSNGDGPRGKKAPAARSRATGSGGKAAAGGGSAGKRKR

SEQ ID NO: 57936 - protein, 433 aa, Zea mays
  Clone ID: UC-ZMFLMO17262E08_FLI.pep
HNSATGELQREGGAFGRCMMAEGPNFAGMIGGHDNGGDFCDMAYYRKLGEGSNMSVDNLNSMQTSTHGGSIAMSVDNSSVGSCDSHTRMLNHPGLKGPVVGNYSVGGHSIFRHGRVSHALSDDALAQALMDPRYPTETLKDYEEWTIDLAKLHMGMPFAQGAFGKLYRGTYNGEDVAIKLLERPEADPERAGLMEQQFVQEVMMLATLRHQNIVKFIGACRKPVVWCIVTEYAKGGSVRQFLAKRQNRSVPLKLAVKQALDVARGMAYVHGLGFIHRDLKSDNLLISGDKSIKIADFGVARIEVKTEGMTPETGTYRWMAPEMIQHRPYDQKVDVYSFGIVLWELITGMLPFANMTAVQAAFAVVNKGVRPAIPQDCLPTLAEIMTRCWDPNPDVRPPFTEVVRMLEHAEMEILSTVRKARFRCCMSQPMTTD

SEQ ID NO: 57937 - protein, 517 aa, Zea mays
  Clone ID: UC-ZMFLMO17262G05_FLI.pep
PSGGCIVSLLSVRLACYVSDHPQWLQDVQQSYLDDAESQSMIAKLAINAKAVPNFVFQYGLLRYKGRIWIGQDPSLQSRIVSALHCAAVGGHSGVPVIYCRVKSLFAWKRLKSFVQTFVTECQTCLQAKPDRAAYPGKLQPLSVPVVAWDIISMDFVEGLPRSGNADCILVIVDKFTKYGHFIPLSHPYTALSVAQCFLNEVYRLHGFPSAIISDRDPVFTSQFWQHLFCLSATELKLSSSYHPQTDGQTKRVNQCLETFLRCFVSACPTKWKAWIPTAEYWYNTSPHSALGRSPFEVLYGRKPRSLGLSLDIAIPATLSEWIQERTAMQALVRQHLIRAQDRMKKQADKNRSERSFVVGDWVYLKLQPYVQSSVLPRAHQKLGFKYFGPYQVLARVGAVAYRLQLSDSSRIHPVIHVSQLKFAAGFKGEASTALPVSLPEFRVPEQILQTRGVTKGNRLVQQVLVAWSGLPHDLATWEDKEALRQCFPRAPAWGQADFQGIGSVTTTGMQGDEQNV

SEQ ID NO: 57938 - protein, 628 aa, Zea mays
  Clone ID: UC-ZMFLMO17259G01_FLI.pep
PSTSGFSAPAPLSNIPGSENEFKQDQRPFVQGSDFIHGGPANDWIKSFRPPGVPELGGIEAHFPDFEQIYNNAGTTFQPPLDGPPQRVLSGVLHSFLTSGPAGVPFQPLPVPAALGLSESDKQCIRDRSCIMARHIFSDQPEEYIQAQVNTLLHSLDIDNRMRGPMHGQYPELQEYWNQSQSSMGPALMHNTADKWITEFGKQNNNPENWAKSFEQQYGPNGWASEFEQHQSQMAMGQMGGVNMANLAAMEQSRMLAQTLASNNDPKFQLSQGADKWVSEFSSQHNQGALNESWVDEFSKLNVTDEWAEEFSGGGFGESSADPWVDEFQEHLSSFKQSSGASRGVYVYSENNPYVGHPNPMQEGQELFRKGLLSEAVLALEAEVLKNPDNAEGWRLLGITHAENDDDQQAIAAMMRALEANPTNLEVLLALGVSHTNELEQGEALRYLYRWLQNHPKYGGLVPPQSTDSPYGPDVVRLFNDAAQMSPEDADVHVVLGVLYNLSREYDKAITSFKTAVQLKPQDYSLWNKLGATQANSIQSADAILAYQQALDLKPNYVRAWANMGISYANQGLYEDSIRYYVRAVTMNPKADNAWQYLRISLGNASRADMIAACDARNLDALQKEFPL

SEQ ID NO: 57939 - protein, 383 aa, Zea mays
  Clone ID: UC-ZMFLMO17268G10_FLI.pep
GGMQIFVKTLTGKTITLEVESSDTIDNVKAKIQDKEGIPPDQQRLIFAGKQLEDGRTLADYNIQKESTLHLVLRLRGGMQIFVKTLTGKTITLEVESSDTIDNVKAKIQDKEGIPPDQQRLIFAGKQLEDGRTLADYNIQKESTLHLVLRLRGGMQIFVKTLTGKTITLEVESSDTIDNVKAKIQDKEGIPPDQQRLIFAGKQLEDGRTLADYNIQKESTLHLVLRLRGGMQIFVKTLTGKTITLEVESSDTIDNVKAKIQDKEGIPPDQQRLIFAGKQLEDGRTLADYNIQKESTLHLVLRLRGGMQIFVKTLTGKTITLEVESSDTIDNVKAKIQDKEGIPPDQQRLIFAGKQLEDGRTLADYNIQKESTLHLVLRLRGGQ

SEQ ID NO: 57940 - protein, 496 aa, Zea mays; identical to SEQ ID NO: 51318
  Clone ID: UC-ZMFLMO17277H04_FLI.pep

SEQ ID NO: 57941 - protein, 655 aa, Zea mays
  Clone ID: UC-ZMFLMO17266E12_FLI.pep
RRLNLHGNRLSGVIPAALSNASSLHSLYLYGNRLTGGLPVALCDLPHLQNLDVSGNALSGELPLDLRGCRSLQRLVLARNAFTGELPAGVWPEMPNLQQLDLSSNAFNGSIPPDLGELPRLAGTLNLSHNHFSGVVPPELGRLAATVTLDLRFNNLSGAIPQTGSLASQGPTAFLNNPGLCGYPLQVPCRAVPPPTESPTPPATTTPLPSTASSDQHQPIRTGLIALISVADAAGVALVGVILVYMYWKVKDRKGRRDGGGDDSSKSGLCRCMLWRHGGSDSSDASSGDGDGEGKYSGGEGELVAMDRGFRVELDELLRSSAYVLGKGGKGIVYKVVVANGTTPVAVRRLGGGGGGADRCKEFAAEARAVGRVRHPNVVRLRAYYWSADEKLVVTDFVGNGNLTTALRGRPGQTVLSWSARLKIAKGAARGLAYLHESSPRRFVHGEVKPSNILLDADFTAHVADFGLARLLAVAGCAPDGPPSTGGAGLLGGAIPYVKPPATGTGPDRFGAGGGYRAPEARAPGAKPTQKWDVFSFGVVLLELLTGRGPAADHASPSTSASFSAPVSGSTATDRSGSGEHGGGAVPEVVRWVRRGFEEDVRPLAEMVDPALLRGPALPKKEVVAAFHVALQCTESDPELRPRMKAVADSLEKIG

SEQ ID NO: 57942 - protein, 364 aa, Zea mays
  Clone ID: UC-ZMFLMO17266F06_FLI.pep
GHLNAYTSREQTTYYAKVLDKDVPRAMEVLADILQNSNLDQARIEREREVILREMEEVEGQSEEVIFDHLHATAFQYTSLGRPILGSADNVKSITKEDLENYIATHYTASRMVITAAGNVKHEDIVEQAKKLFSKLSTDPTTTNMLVSKQPASFTGSEVRIIDDDMPLAQFAVAFNGASWVDPDSVALMVMQTMLGSWNKSAGGGKHMGSELVQRAAINDIAESVMGFNTNYKDTGLFGVYAVAKADCLDDLAFAIMHEMSKLSYRVTEEDVIRARNQLKSSIQLHLDGSTAVVEDIGRQLLTYGRRIPTPELFARIDAVDASTVKRVANRFIFDQDVAIAAMGPIQGLPDYNWFRRRTYMLRY

SEQ ID NO: 57943 - protein, 478 aa, Zea mays
  Clone ID: UC-ZMFLMO17267B11_FLI.pep
GSIGGKGAILEVPMGGCLSQEEHRLQSRPAEAAGADGLRKSKSDSKAVASVLAPPKDVVDLQVEGYGNVNIFTYDELRAATKNFRPDQILGEGGFGVVYKGVIDENVRAGFPSRQVAVKELNPEGFQGDKEWLAEVNYLGQLSHPNLVELIGYCCEGSHRLLVYEYMACGSLEKHLFRRVCLNMPWSTRMKIALGAARGLEYLHGAERSIIYRDFKTSNILLDADYNAKLSDFGLARTGPSGDQTHVSTRVMGTYGYAAPEYVMTGHLTARSDVYGFGVVLLEMIIGRRAVDKSRPSREHNLVDWARPLLVHNRKLFRIIDPRMEGQYSTKAATEVASLAYRCLSQNPKGRPTMSQVVETFEAVQNMPECQDILLQNSITGAVTLYEVPKEPADRVELEKAKQEPAVKSAAMPPMNGKPVPQSRRTRPGNGRSKSEPSLECKMYIPSPDSDGHQLGLEAVASPDGSIRDPPDEDLYKI

SEQ ID NO: 57944 - protein, 434 aa, Zea mays
  Clone ID: UC-ZMFLMO17288G02_FLI.pep
LLYEFAFLSLQSFNSSDSIFCGVFDGHGPYGHFVAKKVRDSLPVKLRTQWQTSANGGSSPHQNGSINSEETGSIVDDEWGDGDDTEKLPEMFLPLKQSYLKAFKLMDKELKLHPTVDCFCSGSTAVTLVKQGLDLVIGNLGDSRAIMGRRDASNNLTALQLTVDLKPNLPREAARIQQCKGRVFALQDEPEVARVWLPNNDSPGLAMARAFGDFCLKDYGLISVPEISYRRLTEKDEFIILATDGVWDVLSNKEAVDIVASAPSRATAARALVDCAVRSWRLKFPTSKSDDCAVVCLFLGHEKSADSVQGSEPNVETAEPTVEVSSSTQDSSAGVDEDIADAGMHVSSAVHISEATLQHSTTLREVDEIVPVDEPTASKEPGRCGSARSLADCISTNEEEEWSALEGVTRVNSLLNLPRLLSGDKRSTSWRKRR

SEQ ID NO: 57945 - protein, 144 aa, Zea mays
  Clone ID: UC-ZMFLMO17265F11_FLI.pep
SLMFSSICTMYIWSVTLLTWLDLIHIFLSCVLEINVVMDLSKKMRLKLGATSEPVKPLEKPSAGFVKDELVKPSEKPSAGPVNDEPVKPSEKPSVGPVKNEPTEPAPAGENNQAPTVGQTTVSPNDAGVGAPVVKHDNSEAQKS

SEQ ID NO: 57946 - protein, 656 aa, Zea mays
  Clone ID: UC-ZMFLMO17278F06_FLI.pep
AHLNAKKICHILYPGDESLEGKVLRLKQQYTLCSASLQDIIARFESRAGESLNWEDFPSKVAVQMNDTHPTLCIPELMRILMDVKGLSWSEAWSITERTVAYTNHTVLPEALEKWSLDIMQKLLPRHVEIIETIDEELINNIVSKYGTTDTELLKKKLKEMRILDNVDLPASISQLFVKPKDKKESPAKSKQKLLVKSLETIVEVEEKTELEEEAEVLSEIEEEKLESEEVEAEEESSEDELDPFVKSDPKLPRVVRMANLCVVGGHSVNGVAEIHSEIVKQDVFNSFYEMWPTKFQNKTNGVTPRRWIRFCNPALSALISKWIGSDDWVLNTDKLAELKKFADNEDLHSEWRAAKKANKMKVVSLIREKTGYIVSPDAMFDVQVKRIHEYKRQLLNILGIVYRYKKMKEMSTEERAKSFVPRVCIFGGKAFATYIQAKRIVKFITDVAATVNHDSDIGDLLKVVFVPDYNVSVAEALIPASELSQHISTAGMEASGTSNMKFAMNGCILIGTLDGANVEIREEVGEENFFLFGAEAHEIAGLRKERAEGKFVPDPRFEEVKEFVRSGVFGTYSYDELMGSLEGNEGYGRADYFLVGKDFPSYIECQEKVDEAYRDQKLWTRMSILNTAGSSKFSSDRTIHEYAKDIWDISPAILP

SEQ ID NO: 57947 - protein, 550 aa, Zea mays
  Clone ID: UC-ZMFLMO17278H11_FLI.pep
FPNNQSTRQQLTLGSLELAVGVREVGERADERRVDVGGRLRVLVVVALVGEPVLHVGSPDDGTDEQVGIGPTRVQRGEPLRATDPSRVRRHGRQRRSAVVDAARVLGAVAHHVGHPHRVAPQQVVHLPARDGAQPLRRDRHAAAAHRLLGERQVLGVGEQEERARRHVLHVAVAKPEQQPAPGVLRLVRGRAGHHGANEAVGVALVLVERAQALHQERLGDEHPRARVLVVPPERVVRLVRAQHLPVRLDVAQVRGALGGAVEPRRAPQQLVLVPGVGAVVRAHVRRQPGAVGAAVLVRELEHPLGPGDKAAGVGRVGLAEDEGGGGESRGSLGGDVGSRGATVHLVHRPGGVHVLRPLPARVVLGRVTDLDVDGVRVRRGLEQVVGAPADGVPGVLQLRLHEAAKLHHAPRQHRHAERHREPELDVVTSVVVPAHQVHLGGVTVGESRVPAPGHALRRRQLARPLALEEEDGLDERVPVVVCGGAMVPPGGNGVAWKAEGRREQDEDDEDAAETSHGRPMDHLLARLLDSGHWNVAAHCHWPLAPVSAL

SEQ ID NO: 57948 - protein, 175 aa, Zea mays
  Clone ID: UC-ZMFLMO17266C01_FLI.pep
ASLKRPNRVLGRFMRAWDVLPIMGLSWAFRFFCVCVGRTPPSSLLYGSAGRRPPLSSTAQPAAALLPPILQHLRRVSPQPRRQSRPPAVEAQQTCATAGRLPHSRSALKTSSQPAILCGSTLPAPKTSTSSQPSSTSTALHLIIWIVSFPANLDFMIFNHRGRALPSDSDLKLKT

SEQ ID NO: 57949 - protein, 344 aa, Zea mays
  Clone ID: UC-ZMFLMO17273A07_FLI.pep
ESLMLASQLRSEIAYRDSDISSFVILEAMTTLRCCEDFSMERLELLGDSVLKYAVSAHLFMTFLNKHEGQLSSRRQETICNATLYRLGIERRIQGYIRDAAFDPRRWLAPGQLSRRPCPCECPVNSEVVTEDIHRIDDKSIIIGKACDKGHRWICSKTISDCVEALIGAYYVEGGLKAAFAVLKWFQIETEIEEELIMEALSSASVRNYLPKVDVVELLEAKLGYTFQMKGLLIEALTHSSQQESGATYCYQRLEFLGDAVLDILITRHLFLSHKDTDEGELTDLRSASVNNENFAQVAVKHNLHQFLQHSSGFLQDQITEYVNSLESSSMDRASLLSSGPCFR

SEQ ID NO: 57950 - protein, 1046 aa, Zea mays
  Clone ID: UC-ZMFLMO17293F04_FLI.pep
QQQSITVPASRRPPLHPPLSTLHSPSAPALMGPVRLALLLSVAAVLAAAGAVYIPYNTSAGVVPGKLNVHVVPHTHDDVGWLKTVDQYYVGSNNSIQGACVQNVLDSLIPALLKDENRKFIYVEQAFFQRWWRNQNDMIKDTVKGLISSGRLELINGGMCMHDEAAVHYIDMIDQTTLGHKYIKEEFGQIPRIGWQIDPFGHSAVQAYLLGAEVGFDAFYFFRIDYQDRDTRKGTKELEVVWRGSKTLGSSADIFAGIFPKNYEPPPGDFYFEVDDNSPVVQDDPLLFDYNVEERVNDFVAAAVAQANITRTNHIMFTMGTDFKYQYAESWFRNMDKLIHYVNKDGRINALYSTPSIYTDAKYAANEQWPLKTNDFFPYADNPNAYWTGYFTSRPALKRYVRTMSGYYLAARQLEFFKGRYSSGLSTDSLGDALALAQHHDAVTGTEKQHVANDYAKRLSIGYTQAQELVSTSLACLTESGSKSRCASPVTKFSQCLLLNVTYCPPSEMDLTKGKSLVVLVYNSLGWKQEDVIRIPVFSDSIVVHDSEGREIESQLLPIATASLNIREKHVKAYLGTTPGAKPKFWLAFPVSVPPLGFNTYFVSNLKKSAHISSKSTQYSPQGSESSNLQVGQGNLKLQYNEAGKLSLYSDSKTMVQANFEQKYKYYIGQDGNGSDPQASGAYIFRPNGTVPISTDGQVSLTVLRGPILDEVHQQINSWIYQITRVYKEKDFLETEFIVGPIPVDDGNGKEVATEIVTNMVTNKTFYTDSSGRDFIKRIRDYRSEWKIEVHQPIAGNYYPVNLGIYVEDGSKELSVLVDRSIGGSSIKDGQIELMLHRRLLHDDGKGVAEALNETVCLDKQCEGLIIQGKYYVKIDQQGEGARWRRTFGQKIYSPLLLAFTEQDGGNWANSHVSKFSAMDSTYSLPDNVAMLTLQELEDGSVLLRFAHLYEAGEDKDLSSLASIDLKRVFPEKKIGKVIETSLSANQERAAMEKKRLKWKAQGSAADEKVVRGGPVDPSKLVVELGPMEIRTFIVSFDHISDKQQL

SEQ ID NO: 57951 - protein, 637 aa, Zea mays
  Clone ID: UC-ZMFLMO17295D09_FLI.pep
QPCSLSQRGPSYGYRGRVMLAFEDNGSSKIGVRFDKQIPDGNDLGGLCEEDHGFFCSAELLRPDFSAGEEVERLAMTELIEVISEENKSGPLIVLLKDVEKSFTGVTESLSSLRSKLESLPPGVLIIGSHTQMDSRKEKAHPGGFLFTKFASSSQTLFDLFPDSFGSRLHERSKESPKTMKHLNKLFPNKILIQLPQDEALLTDWKQQLDRDVETLKAKSNIGSIRMFLSRNGIECNDLEELFIKDQSLSNENVDKIVGYAVSYHLNQNKIETSKDAKLVLTTESLKHGLNMLQSMQNDNKSSKKSLKDVVTENEFEKRLLADVIPPNDIGVTFDDIGALENVKDTLKELVMLPLQRPELFCKGQLTKPCKGILLFGPPGTGKTMLAKAVATEAGANFINISMSSITSKWFGEGEKYVKAVFSLASKIAPSVIFIDEVDSMLGRRENPGEHEAMRKMKNEFMVNWDGLRTKDKERVLVLGATNRPFDLDEAVIRRFPRRLMVNLPDASNREKILKVILAKEELGSDVDMDSLANMTDGYSGSDLKNLCVTAAHYPIREILEKEKKEKNLAKTEGKPEPALYGSEDIRPLSIDDFKSAHEQVCASVSSDSANMNELLQWNDLYGEGGSRKKKALSYFM

SEQ ID NO: 57952 - protein, 293 aa, Zea mays; identical to SEQ ID NO: 48478
  Clone ID: UC-ZMFLMO17315A11_FLI.pep

SEQ ID NO: 57953 - protein, 381 aa, Zea mays
  Clone ID: UC-ZMFLMO17294E11_FLI.pep
LIFGPDVRSLVLTVCLIVVPVIFFAATVCPQLGHEFHSQIGGWVASVAVIFTAYILIVLLITSGRDPGIVPRNTHPPEPEDIDESSNLPDCPGGQQGSTGLPPTRDVLVNGVSVKVKYCHTCMLYRPPRCSHCSICNNCVERFDHHCPWVGQCIGKRNYRFFFMFVSSTTVLCIYVFAFCWVNLRRIMDTHQCKIGRALLKSPISGLLILYTFIAVWFVGGLTSFHLYLISTNQTTYENFRYRYDRRTNPYNLGVGQNFIDVLFSRIPSSKHDFRAKVKADSSTFASSLSMGRVLSPPKTSVDLEMGMKRQAVAAEDLEDLHSQIGSAMGLERCGTEPPHFVGRKGCSEMSPDIEVFAEEFGMEGGHSERKKIERRTNDDS

SEQ ID NO: 57954 - protein, 333 aa, Zea mays
  Clone ID: UC-ZMFLMO17297D01_FLI.pep
VFSAFGFVHKIATFEKAAGFQALIQYTDAPTALEAKNSLDGRSIPKYLLPEHIGACHMRITFSAHKDLNIKFQSHRSRDYTNPYLPVNQTAIEGIVQPTVGPDGKVKEPESNVLLASIENMQYAVTVDVLHTVFSAFGAVQKIAMFEKNGGMQALIQYPDITTAAVAKQALEGHCIYDGGYCKLHLSYSRHTDLNVKAHDERSRDYTLSDPNVQLQAAAQTPVLRSPGVAWQNTASVPAAPFYASTATSTPIGVGQVAAWNPNMQAGSFASASTAYPNQPLMANSMPHYPAIGSSSGAPPVAFQASQQMTQYSMPPGAPPHAPPAGQSIYYPK

SEQ ID NO: 57955 - protein, 197 aa, Zea mays
  Clone ID: UC-ZMFLMO17297E09_FLI.pep
KSLVSISADLMHDFKTGHLTLTSPRSMIIAQAIGTAMGCVIGPLTFLLFYKAFDIGNPDGYWKAPYALIYRNMAILGVQGFSALPLHCLQLCYGFFGFAVAANLMRDLLPPKYGKWVPLPMAMGVPFLVGASFAIDMCVGSLMVFIWHIIDRSKASLMVPAVASGLICGDGLWIFPESLLALAKISPPLCMAFRSSH

SEQ ID NO: 57956 - protein, 411 aa, Zea mays
  Clone ID: UC-ZMFLMO17297F06_FLI.pep
VPLCLITYSACACELCCAVLRNGEIQSTEQDAVQAPGLRGGPAPGGGSGGRGPLRPGARLPGAPHLQQAGRRAVAGPLLRGVAPLQRAGPARGRRLPAHRPRHPRRRRRRGGAAPARRALAPPQVRAARRAQALRALRCQVRVAAKARAAAAAAAPLARPGAQELQQHPQPPDGAPGLRRGHRRRRRAQVEGRLRQHAAELRHPRRHQGGPRGTAARPLLRLRSPRGRRRRRQHPGVPVHQRRPQAARRLDHQLPHRRGHQALPPPRDRQGAPHPGAGGADGRRRAGHAQHGARPAQGVQRQAARRRARRRRQPHAGARLQHEAALRAAAGALGRHQDPRRHARGHQARRRRRREGPRRARRRRLRRAPEGGRGRARQAPRIPARDERLLVCAPLCSIAMGIVNWPMGNGN

SEQ ID NO: 57957 - protein, 344 aa, Zea mays
  Clone ID: UC-ZMFLMO17302A10_FLI.pep
VCVGTFCCAADGLPPREHGMACLGNVELDLSAMPTLEQAHAVIRHYGPTLFFHPKEVYLPSSVSWFFKNGAALYRRGGDTAGEEIDGEGSNLPGGGCNDGEFWIDVPSGERGRAVCRGSIDSAELYAHVKPAMGGTCTDVAMWVFCPFNGPARLKLGPISLPLGKTGRHVGDWEHFTFRVSNLTGELMGVYYSQHSGGHWVDASALEYIDGNRPVVYSSRNGHASYAYPGVYLQGSAALGVGIRNDAARSSLFVDSSARYRIVAAGYLGEGAVVEPQWLQFMREWGPTVVYKWRKRMEWVIGRLPPWLRCRAESMLNKMPNELSREEGPTGPKEKNNWEGDERW

SEQ ID NO: 57958 - protein, 779 aa, Zea mays
  Clone ID: UC-ZMFLMO17309C11_FLI.pep
EFLTLFLSLLEQSLSHSKVPGARTIVQNLFCGSVSHVTRCSSCGKESAASSKMEDFYELELNIKGLNNLEESLNEYFSEEALDGENQYFCESCQKRVDATRCIKLRSLPPVVNFQLKRYVFLPKTTTKKKISSTFSFPGQLDLGKRLSEPSSSCTYALSAILIHKGTGANSGHYVAHIKDESNGQWWEFDDETVSKLGLHPFGEKPGKASNKDDQKSQNTSTEGSVTNNNNNGHHEAAPSSTMGEMFSSTDAYMLMYKCITKDVNPTESNKIVEINNDLLPHHLLDEINELNASYTKLCVEYQSKKDSHLAYITERRQEVKSVLTEAPAGPGDDSYFWISTDWLRQWADNITPPSSIDNGAIQCEHGKVPASKVTSMKRLSSVAWQKLHSKYGGGPILNSDDFCMECLKDGAKSAVSADVYRERRASLKTLAEAALAGNCPDGPSYFISKTWLTHWLRRKNADIPSDGDNGPTSALRCCHGDFLPEHAPGAKRVSVPEILWLFLYQTVHEKKADDTVTFPSDSHPCETCSRELSDVASVEVNLRAVKFKQRQNHEKLISGKSFALHPGQKYYLVPSSWLSEWRAYITATGKNISSLPEPQTLEAVARSLICEKHSRLLQRPLDLVLKRGSIIQKASNTDGLTIIPEYDWKLFSEEWSATPGKGISAEIAFSKSSQDKLHGSSEAVPITDGNLGQSLDDTNDDLGAREPYIRTDPENVLAKGRAVHWWKNSTIKMKISTFTLSMEKKHQSLLKKHLKLLLYQIVGHRSVPGEQALETQSV

SEQ ID NO: 57959 - protein, 122 aa, Zea mays
  Clone ID: UC-ZMFLMO17380F01_FLI.pep
QLVATKDNHQWHLSKRPSLHSMGRHALAKSAALLREVKNKQRTTNLVKRLEPTEVKSPETSLWVPHPMTGIYYPKGFEWVMEDVPTSAASFQQSYWFRTGEAEPASSTTSKNDSASFDHPFA

SEQ ID NO: 57960 - protein, 241 aa, Zea mays
  Clone ID: UC-ZMFLMO17339B08_FLI.pep
VDIDVFLDAKRVIDSLQNNEVSPALAWCAENKSRLKKSKSKLEFLLRLQEFVEFVKVKNFIQAIAYARKHLAPWGSVHMKELQRVTATLVFRSNTNCTPYKILFEQDRWDYLVDIFKQDFCKLYGMTLEPLLNIYLQAGLTALKTPFCSEGSCPKEDPLSLEGFRKLAEPLPFSKQHHSKLVCYITKELMDTENPPQVLPNGYVYSEKALQEMSKKNDGKITCPRTGDVYDVSECVRAFIS

SEQ ID NO: 57961 - protein, 377 aa, Zea mays
  Clone ID: UC-ZMFLMO17342C10_FLI.pep
PKSTTGAEAWVWHLAKAYANVNDYCWHQLISHWLNTHAVMEPFVIATNRQLSVTHPVHKLLLPHYRDTMNINSNARQMLVNAGGIFETTVFPRQYAFEMSSVIYKDWNFTEQALPDDLIKRGMAVADPSSPYKVRLLVEDYPYASDGLAIWHAIEQWVTEYLAVYYPNDGVLRADVELQAWWKEAREVGHADLKDAPWWPKMQTVAELVKACTTIIWIASALHAAVNFGQYPYAGYLPNRPSVSRKPMPAPGSDEYAELERKPEKVFVRTITSQFQALVGISLLEILSSHSSDEVYLGQRDTKEWTSDAKAQEAFKRFGARLTEIEKRVVTMNADPRLKNRNGPAEFPYTLLYPNTSDTKGDAAGITAKGIPNSISI

SEQ ID NO: 57962 - protein, 591 aa, Zea mays
  Clone ID: UC-ZMFLMO17329E02_FLI.pep
KNRQVFAAMASKAMPQILPETPGIPGTKQCSKSAPPFELPQTNNSCASALTVLPGTTTDLSKSSHKPELNEQKPDHRLKEPVDAASVKFPVEPSKKAVAEHGSTNGGSTSFQTCGGTSQAQAKVSASAKAADPPEIGDRGNSGRCRPSTSSDISDESPCSSMSNSTKPHKANDSRWEAIQTVRTRDGVLGLSHFRLLKRLGCGDIGSVYLSELNGTKSYFAMKVMDKASLASRKKLLRAQTEKEILQCLDHPFLPTLYTHFETDKFSCLVMEFCPGGDLHALRQRQPGKHFPEQAVKFYIAEVLLALEYLHMLGIIYRDLKPENVLVREDGHIMLSDFDLSLRCAVSPTLIRSSNPDAEALRKNSHGYCAQPACVEPSCVVQPSCAAPTTCFGPRLFSSKSKKERKPRPEAATPVNPWPELIAEPSDARSMSFVGTHEYLAPEIIKGEGHGSAVDWWTFGVFLYELLFGKTPFKGSSNRATLFNVIGQQLRFPEYPAVSFSARDLIRGLLVKEPQQRLAYKRGATEIKQHPFFEGVNWALIRCASPPEVPKPVEIERPSNHPSSPSGAAADDASVGAPQKGVDGYLEFGFF

SEQ ID NO: 57963 - protein, 144 aa, Zea mays
  Clone ID: UC-ZMFLMO17340E04_FLI.pep
LVLSFVQEISKFRYELCPRYMKERKFWRVYFLLVNSYIAPFEKKSLEELKVKAEEEKRDSQKQASQASTTFEPKDTKAPIKTSSTNPEHDLDVFLLGDLGSDDEGPVVDDDGLDEDFDKIDVTTGLESDDDDKKIATGKAEDAK

SEQ ID NO: 57964 - protein, 285 aa, Zea mays
  Clone ID: UC-ZMFLMO17425G12_FLI.pep
YPLPSCGTPRDFRLCAWLFQSRVVVPAFQGMGRRGLLKAALLLCFLAACSGRELTIKQNPSTTIYNSTLAKILVEYASAIYTADLTQLFTWTCARCGDLIEGFEMIEIIVDVENCLQAYFGFASDINAVVVVFRGTQENSIQNWIEDLLWKQLDLDYPGMPEAMVHRGFYSAYHNTTLRDGVVSGIQRTRKAYGDIPIMITGHSMGGAMASFCALDLVVNYGLDGVNLMTFGQPRIGNAAFASYFKTYLPQAIRVTHAHDIVPHLPPYFSFFPQKTYHHFPREEP

SEQ ID NO: 57965 - protein, 358 aa, Zea mays
  Clone ID: UC-ZMFLMO17322H02_FLI.pep
RFLQSHSKPPLPEPSRNSPPPPLLAPMAKEPMRVLVTGAAGQIGYALVPMIARGVMLGADQPVILHMLDIPPAAEALNGVKMELVDAAFPLLKGVVATTDVVEACTGVNVAVMVGGFPRKEGMERKDVMSKNVSIYKTQASALEAHAAPNCKVLVVANPANTNALILKEFAPSIPDRNVTCLTRLDHNRALGQISERLSVQVSDVKNVIIWGNHSSTQYPDVNHATVKTSTGEKPVRELVADDEWLNGEFITTVQQRGAAIIKARKFSSALSAASSACDHIRDWVLGTPEGTFVSMGVYSDGSYGVPSGLIYSFPVTCSGGEWKIVQGLPIDELSRKKMDATAQELSEEKSLAYSCLE

SEQ ID NO: 57966 - protein, 445 aa, Zea mays
  Clone ID: 700094361_FLI.pep
GVYNVSVSLEFHGVPAYLGDAGSSSAAGSAEPGGQATLKLPASYFQPADLILPISEGMGSSNGFWFRIQNSSDPRSKLVRIPSNTYRAVLEVFVSPHSNDEFWYSNPPDLYIRENNLTTGRGNAAYREVVVSVDRHFAGSFVPFPVIYTGGINPLFWQPVAALGAFDLPTYDVELTPFLGILVDGKPHEIVLSVVDGIAEWLVDANLHLWLDPASTNVSAALSRYRTPRLSIKRRYSTRRPLDGKFKIRAKRKSQFSGWVKSSFGNFTTNVETELEVTSLVDFTSQGRNKTVRLQVEQDTEVVVRSSETRKAVGKVETEAKYPLWLEMVTEDGENDTYVMRANLTHSLSVETDAEAEGLFDGETRVVDEQAAAGWMLVRGHDVLDGSAATTQTYRYSNEAGRYERAIDTLDGAVLSDNVTESYWASGDGLAWLAAGPAGGGAMEL

SEQ ID NO: 57967 - protein, 411 aa, Zea mays
  Clone ID: 700161929_FLI.pep
KLRATTACSTQRPSISLLPRLSSQRRPPPPFSYYSKHDEARRGDRPGGRRGGAAFLVPAAEDGGGRRVVQEAGGAGGPRPRRRGVLARLHEGLVAQAQAHGARARRRRRGARRLDGAAPVGIGPLRRAGGGGQGEAGRGVPGLRRHAVPDRGGPRPRRHDGRDEGRGARRGGALPDSDRQRAVPGQGVQLRAASGALLRGEPRDGHPGAHRRRQPPPRQRQGGGGGGALPAGERVPAGDAGGVRGAGGQGGARHPGRQGGGQQVLPVGPLPLRGGGVLGRALRAGPRRAEGPPGPAPHPGPQGAGGPPHDPLGQGQGAGVPAPRPRLRRRRRPRRRLPHLRRRRPHRRGRLQGAARARARRRDPRVQVPQGHQRVLHATRPRRGQGVPAQARRRQRRQLMIRPAIRFPFPP

SEQ ID NO: 57968 - protein, 627 aa, Zea mays
  Clone ID: 700264271_FLI.pep
ALLNCDLIGFHTFDYARHFLSCCSRMLGIEYQSKRGYIELDYFGRTVGIKIMPVGVHMGQLESGLRLPDKEWRLSELQRQFQGKTVLLGVDDMDIFKGINLKLLAFENMLRTHPKWQGRAVLVQIANPARGRGKDLEAIQAEIEESCQRINGDFGQSGYSPVVFIGRDVSSVEKIAYYTIAECVVVTAVRDGMNLTPYEYVVCRQGAPGSQSVSEVSGPKKSMLVVSEFIGCSPSLSGAIRVNPWNIEATAEAMNEAISMPEQEKQLRHEKHYRYVRSHDVAYWSKSFIIDLERVCKDHFKRTCWGIGLGFGFRVVALDPHFTKLNMDSIINAYELSESRAILLDYDGTLVPQTSLNKEPSPQVLSIINTLCSDSRNIVFLVSGRDKDTLGKWFSSCPRLGIAAEHGYFLRWSREEEWQTCTQALDFGWMQMAKPVMNLYTEATDGSYIEAKESALVWHHQDADLGFGSSQAKEMLDHLESVLANEPVSVKSGQFIVEVKPQGISKGIVAERILASVKERGKQADFLLCIGDDRSDEDMFENIADIIGRNLVAPRTALFACTVGQKPSKAKFYLDDTFEVVTMLSALADATGPELETDSADESVAYISSLDIGDEQSESSDKPVEGS

SEQ ID NO: 57969 - protein, 417 aa, Zea mays
  Clone ID: UC-ZMFLMO17158F08_FLI.pep
PGGDKLQILDESTKKTSSKDICGESPITTTENVGRESKKVSSTKNFLEHTLSCWSALERDLYLKGIEIFGKNSCLIARNLLSGMKTCMEVANYMYNNGAAMAKRPLLNKSISGDFAETEQDYMEQDMVARTRIYRRRGRNRKLKYTWKSAGHPTVRKRIGDGKQWYTQYNPCVCQQMCGKDCPCVENGTCCEKYCGCSKSCKNKFRGCHCAKSQCRSRQCPCFAASRECDPDVCRNCWVSCGDGSLGEPPARGDGYQCGNMKLLLKQQQRILLGRSDVAGWGAFIKNPVNKNDYLGEYTGELISHKEADKRGKIYDRANSSFLFDLNDQYVLDAYRKGDKLKFANHSSNPNCYAKVMLVAGDHRVGIYAKEHIEASEELFYDYRYGPDQAPAWARRPEGSKKDEASVSHHRAHKVAR

SEQ ID NO: 57970 - protein, 572 aa, Zea mays
  Clone ID: UC-ZMFLB73140E06_FLI.pep
LPTFLRKRFNRIKLGFFLHSPFPSSEIYKTLPVREELLRALLNSDLIGFHTFDYARHFLSCCGRMLGLSYESKRGHICLEYYGRTVSIKILPVGVHMEQLKTVLGLPETEAKVSELMEMYSGKGRVVMLGVDDMDIFKGISLKLLAMEELLRQHPEWRGKLVLVQVANPARGRGKDVAEVQTETYAMVRRINEAYGEPGYEPVVLIDEPLQFYERVAYYVIAEVCLVTAVRDGMNLIPYEYIVSRQGNEKLDRMLRQGKPEEKKSMLVVSEFIGCSPSLSGAIRVNPWNIEAVADAMETALVLPENEKRLRHDKHFRYVSTHDVGYWANSFLLDLERTCKYHSQKRCWGIGFGLRFRVVSLDLTFRKLSLENILMAYRRAKTRAILLDYDGTLMPQAINKSPSTESVRILNSLCRDKDNVVYLCSGYDRRTLHEWFPCENLGIAAEHGYFLRCKRDAEWKTCVAATDCSWKQIAEPVMCLYRETTDGSTIEDRETVLVWNYEDADPDFGSCQAKELVDHLESVLANEPVSVKTTPHSVEVKPQVKPRSSISPSSLHWANRPDDELIVRFCRA

SEQ ID NO: 57971 - protein, 283 aa, Zea mays
  Clone ID: UC-ZMFLB73239F05_FLI.pep
FSRLLFFCSRGDRMERILRCFNLGPTGSEDDDISFTLTVETFSFEELSAATDNFSSTLRIGSGGQATVYEGHIPHIGQVAVKRLRTNDFPSKQRAFLMEVYVLNSTNHPHIVKLLGCCSEGTERLLVYEYVKGGTLRHRLKELNWYTRMRIARDTATVLEKLHLQSDPPIIHRDFKSDNILLSTNLSPKVSDFGIAKIAPAGDELTAATSETLGTYGYASPGIFRPLNATVMTDIYSFGVVLLEIITGKPAIDHSKEGDEHYLVHWRQVFFGADYVIKEQVLE

SEQ ID NO: 57972 - protein, 338 aa, Glycine max
  Clone ID: UC-GMFLMINSOY026A05_FLI.pep
LTSYLIFFVPSFHPRERAFALHCSLSLTKRRRRRHRAPFWFSFLFRRLLPQIAFRMGNANGREDGSIPPAAADPSAAARGTHAPPVSLPPVRAFSSDSMANSPPHSPRRSRSPILFGPQVPLAPLQRGNGPPFLNQMWQNESHGIVNHPSEQGIPVMITWNYGGNNVAVEGSWDNWTSRKALQRAGKDHSFLIVLPPGIYHYRFIADGEERFIPELPNVADEMGHVCNLLDVNDYVPENPDGVSEFEAPPSPESSYGQAFPAEEDFAKEPMAVPSQLHLTVLGMENSDIGSSSKPQHVVLNHVFIEKNLASKSVVALGLTHRFQSKYVTVVLYKPLKR

SEQ ID NO: 57973 - protein, 285 aa, Zea mays
  Clone ID: UC-ZMROB73028D07_FLI.pep
DDKEAVVDDLEAFREAKDYYTKVGKAWKRGYLLYGPPGTGKSTMIAAMANLLDYDVYDLELTAVNNNTDLRKLFIETTGKSIIVVEDIDCSVDLTGKRKDKKQADKKSEREADDKPKLPMEPEKDEGSKITLSGMLNFIDGLWSACGGERIIIFTTNHKDKLEPALIRRGRMDRHIEMSYCRFPAFKVLAKNYLDVEEHELFDQIGQLLEETDMSPADVAENLMSMSKKKKRDANACLESLVKALKQAKEEAAKAKVEAEAKKKVEAAAEAAKSKEEDEAKEGSG

SEQ ID NO: 57974 - protein, 205 aa, Zea mays
  Clone ID: UC-ZMROMO17029E07_FLI.pep
ALDRLIQFHSTKYDLREHRKKKSSTGFQFSLCCWGRCNTSRCWESNHHFECIVNSPLSTSKGTNHDDTKRKSSSEETPETKLLNSISHCSSLGIVQERHKVVSRVRNNSTEDTGNVTTSKANTQLGSLAALRLRNRHSMLVDKLNDGLKGSKLHHGIRNLTTPERNNSLVEPKNTLRSDKFGEPITQSTSKSRLCLHTYLHSFKT

SEQ ID NO: 57975 - protein, 330 aa, Zea mays subsp. mexicana
  Clone ID: UC-ZMROTEOSINTE009A08_FLI.pep
RAKRRHEDPDEDPEAEAELVVKQAGEFVLECSEIGDDRPLTGCSFSRDASMLATSSWSGIVKVWSMPQITKVATLKGHTERATDVVFSPADDCLATASADRTAKLWKPDGSLLMSFDGHLDRLARLAFHPSGKYLGTASFDKTWRLWDINTGKELLLQEGHSRSVYGVSFHPDGSLAASCGLDAYARVWDLRSGRLFFTLKGHVKPVLGVSFSPNGYLVATGSEDNFCRIWDLRKRQMLYSIPAHKSIISHVKFEPQEGFYLATSSYDTKAALWSARDYKPIKSLVGHESKVTSLDISGDGQKIVTVSLDRTIKIWSCRSSTQDNEMELD

SEQ ID NO: 57976 - protein, 141 aa, Zea mays subsp. mexicana
  Clone ID: UC-ZMROTEOSINTE004F09_FLI.pep
IPHALLDGICNWWEDFLLVGGCMMMHADDFRQDRYGVVSGLRDGCYSDDMTLAAIAVARTVSLESPSHGFQAASPYLRWEDLPQFIPSPNPTHRGLRHWDSTRCSYLHLLSLCFHTLLPVILASRGTANLHWKATQLICGQ

SEQ ID NO: 57977 - protein, 283 aa, Zea mays subsp. mexicana
  Clone ID: UC-ZMROTEOSINTE010B10_FLI.pep
KPGKHVFHIVTDSLNYAAMKMWFLANPFGKAAIQVQNIEEFTWLNSSYSPVLKQLETRFMIDYYFRTGHARHDENPKFRNPKYLSILNHLRFYLPEIFPRLNKVLFLDDDTVVQRDLSALWLVDLKGKVNGAVETCRQDFHRFDKYLNFSNPLIAKNFDPHACGWAYGMNMFDLSEWRKQNITEVYHTWQKLNENRLLWKLGTLPAGLVTFWNHTFPLDRSWHQLGLGYNPNVNVKDIRRAAVIHYNGNLKPWLEIGLPKYRKYWSAHVNYDQVFLRECNINP

SEQ ID NO: 57978 - protein, 199 aa, Zea mays subsp. mexicana
  Clone ID: UC-ZMROTEOSINTE013C03_FLI.pep
STKENATANCCVFFFIIIQSIVQYRSVLRATHTPSASFSCEAACSQTQSIFPVREAAALARHGREVTDRCVGILYSGFIRWSGGIRRHGSSAQSSWSHTSVALLYGPWVLFTNSSSPVSTRFSSLMPHRALKSSSGISHPNTWMFSLILPSLVDLGMTLVPLWSAHLRSTCPGVLSSFLATFSTSGSCARFFSDEPSGE

SEQ ID NO: 57979 - protein, 193 aa, Zea mays subsp. mexicana
  Clone ID: UC-ZMROTEOSINTE013D11_FLI.pep
PFFFQINFIWRCSGKGLRTFVLFTEKTIIHRDVKSSNILLTDSYRAKVSDFGFARSGPSDTEKTHISTKVKGTAGYLDPEYLRTYQLTPKSDVFSFGILLVEILSARRPVELKRTPEERITIRWTFKKFNEGNTREILDPLLEDHVDDEVLEKLLSLAFQCAAPTRDDRPTMKEVGEQLWEIRKEYGKSVRKV

SEQ ID NO: 57980 - protein, 413 aa, Zea mays subsp. mexicana
  Clone ID: UC-ZMROTEOSINTE038A02_FLI.pep
DATTDDGEPRSPSTAPPPPPRIKNPTARIRLISQQQQKNKGMAKDGGPDWNGLLKWSLAHGDSTNPPRALSEEDRKWFMDAMQANTVDVVKRMKEITQVMKTPEDVLQSQGVTPENIEDMLDELQEHVESIDMANDLHSIGGLDPLLSYLKNSNAGIRAKAAEVVSTIVQNNPKSQQLVMESNGLEPLLTNFKSDPSTNARTKALGAISSLIRHNQPGVSAFRLGNGYAGLKDALGSDDARLQRKALNLIQYLLHNYKADRSVATELGLPKLMMHLVSSDDSLVREAALGGLLELARDKTSGNALPDQEKLKDMLKSRIEGISAMDTDDLHAAREERQLVDSLWKECYNEPSSLREKGLVVLPGEDAPQQPPPDVAGKMFEPPLRAWAAARPAQEDDSDSGSGKKDPPLLLKF

SEQ ID NO: 57981 - protein, 381 aa, Zea mays subsp. mexicana
  Clone ID: UC-ZMROTEOSINTE028B01_FLI.pep
AIRAFKLVERGVFQEEGIVQLLQSPCSDELAGYKIPGTRRIQDNLSDLRAQVAANQRGIALIKELINQYGLITVQSYMNHVQKNAEVAVREMLKTVASRVAKENGSCVVEDEDYMDDGSVIHLKLTLDAVKGEATIDFEGTSPEVYGNWNAPEAVTTAAVIYCLRCLVDVDIPLNQGCLAPVKILIPKGSFLSPSDKAAVVGGNVLTSQRVTDVILMAFQACACSQGCMNNLTFGDDTFGYYETIGGGCGAGPTWDGTSGVQCHMTNTRMTDPEIFEQRYPVLLHTFSIRENSGGSGLHRGGDGLVREIEFRRPIVVSVLSERRVHAPRGLKGGRDGARGANYLVREDGRKIYLGGKNTVTVSAGDILQIFTPGGGGFGCP

SEQ ID NO: 57982 - protein, 140 aa, Zea mays subsp. mexicana
  Clone ID: UC-ZMROTEOSINTE024D01_FLI.pep
GTGSRPCRASTARAPCAAPPSRSTPSPRSTPCPVLAAPPTGPPGTKPSSRSSHCAACNPFAGAPACPCPWSLSCFQPRDFASKPEAPSVCRLVLLEILFFYFILFHFSCLVFSLSWHCTNNFSSACSLWTWVVQHVMNTN

SEQ ID NO: 57983 - protein, 372 aa, Zea mays subsp. mexicana
  Clone ID: UC-ZMROTEOSINTE024D06_FLI.pep
KEHVINLERTESEIFAVAPPPPPPPPSTPPPPSPPPRLPSPPPAEKVTVNPIVRPVKRVNTPPRTGPSTSATSFSVASLQQYTNSFQEQNLIRESRLGKVYLAELPEGKLLEVMKIDNANGRIPVDDFLELVACISDIRHPNILELVGYCAEYEQRLLVYNHFSRKTLLDVLHEGEDIDNPLSWNARLQIALHAAKALEYLHDTCEPPLVHQNFDPANVLLDNRCSVRVAECGLAELMASGSVTQLSGRMRALLNYVAPEIHESEPFTQRSDVYSFGVVMLELLTGRKPYDSSRPRAEQHLVRWADSQLHDMKSLSEMVDPSIRGECSVILLSCFADIISRCIQPGPEFRPAMSQIVQDLARIVGASSEVSE

SEQ ID NO: 57984 - protein, 162 aa, Zea mays subsp. mexicana
  Clone ID: UC-ZMROTEOSINTE045B08_FLI.pep
GSTNPSVNINDNSLNLVSRPPPYDTDPRYARVQREGLVSRREKSINLAQEESLALRRNASSSGIEHLAAQKKRNSTENEGEYKVHRSESTKSLSAKAYSSYAVVASEDEDVCPTCLEEYTPDNPKIITKCCHHFHLGCIYEWMERSDTCPICGKEMEFCESP

SEQ ID NO: 57985 - protein, 233 aa, Zea mays subsp. mexicana
  Clone ID: UC-ZMROTEOSINTE094G06_FLI.pep
SPLSLRPVALNLLSEREKDELVQLVDTMVSYSVTYRNTKFVPQEKANLSVVPHEVSSLSLYPPINDVINFEGYQSEHIGLSLAMKQVLVHEVEKQKIIKDSAGKLLNQSNDGNMKSEALSTIRKKTVANSIRPALHSSKDSSKCNSSTLEMQSNSASIVNDNDSISAKKHSSRAANFFDRFRKERPVDAKTHSDVGLQRATLQRDSRPLIFKYNEGFTNAVKRPVRVRDLLLS

SEQ ID NO: 57986 - protein, 278 aa, Zea mays subsp. mexicana
  Clone ID: UC-ZMROTEOSINTE090A08_FLI.pep
DFGSKALVGEGSYGRVYYAVLENEQHVAVKKLDTSADPEPDNEFLAHVSVVSRLKHENFVDMLGYCIQGDQRLLAYEFATMGSLHDILHGRKGVAGAQPGPALDWMQRVKIAVDAAKGLEYLHEKVQPSIVHRDIRSSNVLLFEDYKAKIADFNLSSQSPDMAARLHSTRVLGTFGYHAPEYAMTGQLTQKSDVYSFGVVLLELLTGRKPVDHTMPRGQQSLVTWATPRLGEDKVKQCVDPRLNGEYPPKGVAKVHPVLSLYVLFICETKIHIFQIAY

SEQ ID NO: 57987 - protein, 212 aa, Zea mays subsp. mexicana
  Clone ID: UC-ZMROTEOSINTE090G05_FLI.pep
AVGIDVVSDCKGVVHSWLSMKLSSEEANSAFRVLSGCKVNKVCPLEFDEPSSVVKACGKASSSTLSCCAALHSYIGTRQKQIFVTNLQAINCATMFGSMLQKAGVVDDIYGLCDIDLKDFSLQDFGQQGCLLRSLPTDIVFDNTTGISFTCDLSDNIAAPWPSSSSVQSLSLCAPEMSLPALPVSPKSESSGPSRTGIGVLLLLVFLTTITI

SEQ ID NO: 57988 - protein, 435 aa, Zea mays subsp. mexicana
  Clone ID: UC-ZMROTEOSINTE086C09_FLI.pep
IRMCPKRRQTMLFSATMTEEIDELVKLSLNKPVRLEADPSLKRPATLTEEVVRIRRARESNQEAVLLALCLKTFKRSVIIFSGTKQSAHRLKIIFGLSGMKAAELHGNLTQAQRLEALELFKKKEVDFLIATDVAARGIDIVGVQTVINFACPRDVKTYLHRVGRTARAGREGYAVTFVTDDDRCLLKAIAKKAGSQLKSRIVAEKPVAECARLIEQLEGQISIIIREERVEREARKAEMEIAKAENMIAHKDEIYSRPKRTWFATEREKKLLAAAAKESLDHGKSTSGVISAKKAEDLRLKEKRRREHEKNLPRKKRRRLEAQREILEDEDDEKTKENDRGKQPMKGQSLVDAAYRKAKSLKAASKRAPGARKGKKEKNERQHSEKAPNRHEEMRDLFQNDMSEWKQGRSKKNNKFASKKSRNSFKSKARYKRK

SEQ ID NO: 57989 - protein, 656 aa, Zea mays
  Clone ID: UC-ZMFLMO17038G08_FLI.pep
GKVANDVETEQIVFEEEAGSWKGRMSAVVQMRGSIPLFWSQEASRLSPKPDIFVQRYDPTYEATKLHFDDLARRYGHPIIILNLIKTVEKRPREMMLRREYCRAVEYLNQNVPEEKKLRFIHWDFHKFAKSKSANVLGVLGKVAGEALDLTGFYYSGKPKVQKKRLIQLSRTSTARDGSLDIRASSGDLSRLRDGSLDIRASSGDLSRLSSNAEALSSTGFQDMRNQANKQEFLGDTPCYQTGVLRTNCIDCLDRTNVAQYAYGLAALGRQLHAMGLTDVLKIHPDSSIASALMEMYQSMGDALAHQYGGSAAHNTVFPERQGKWKATTQSREFLKSIKRYYSNAYTDGEKQDAINLFLGYFQPQEGKPALWELDTDYYLHVTTAGDDLMSDSYHLSSAPGNNVFVGSGAALNPGTILSPVPACKEDFSRKKLTSFDKLIERTCSSIRNVRLHCDADLKPSGGVGTSGMAPDAAEIQLKSPNWLFGQRKHTETISTARVAPVENVNEGNRDESNVSLCGELIWLSSSVESCEEDIFRRYLAFTTADVENGWYGGTLLYDRDENSGAYRHYSELCQGAVMDPFEHDPEKERHYAEALSVDLGDARVEAEMQAALDDYQVIGSDLSIIPSCGALAEDPSQLTRWIIGDERLLVGAAAQ

SEQ ID NO: 57990 - protein, 391 aa, Zea mays
  Clone ID: UC-ZMFLMO17001E11_FLI.pep
LHLVLRLRGGMQIFVKTLTGKTITLEVESSDTIDNVKAKIQDKEGIPPDQQRLIFAGKQLEDGRTLADYNIQKESTLHLVLRLRGGMQIFVKTLTGKTITLEVESSDTIDNVKAKIQDKEGIPPDQQRLIFAGKQLEDGRTLADYNIQKESTLHLVLRLRGGMQIFVKTLTGKTITLEVESSDTIDNVKAKIQDKEGIPPDQQRLIFAGKQLEDGRTLADYNIQKESTLHLVLRLRGGMQIFVKTLTGKTITLEVESSDTIDNVKAKIQDKEGIPPDQQRLIFAGKQLEDGRTLADYNIQKESTLHLVLRLRGGMQIFVKTLTGKTITLEVESSDTIDNVKAKIQDKEGIPPDQQRLIFAGKQLEDGRTLADYNIQKESTLHLVLRLRGGQ

SEQ ID NO: 57991 - protein, 109 aa, Zea mays
  Clone ID: UC-ZMFLB73346E12_FLI.pep
PTQLEALSRVPVLSYFSNSLYVSGMVAALTNESATSKSVYFAHCTSEMIFITHLLTEQPEKLAGPLLADTYVTLLKGRNAWYGQMLAKGELSPDMGDSIKGKGMIQVME

SEQ ID NO: 57992 - protein, 434 aa, Zea mays
  Clone ID: UC-ZMFLMO17223F11_FLI.pep
RMCAQVFSAFGFVHKIATFEKASGYQALIQFSDAETATSAKAALDGRCIPSYLLPELDVACTLRITYSAHSVLNVKYQSHRSRDFTNPYLPFLDSAKDGSGPDGKKQEAESNILLASIENMQYVVTIDVLHEVFSAFGFVQKIAIFEKNGFQALIQYPDIQTAYAAKEALEGHSIYEGGYCKLHLTFSRHTELNVKVNNERGRDYTKGNATPSSDQPSILGPQPIPSVGAAIPPAQGSVPSAATNSVMPPGDPSVALPSNPSSEPLLQAPVVSSGGPPHYPNQAILQGPLGVAARFPGYGALQFAQGSAQAQMVQPSGQGSQQMSGHVNYQLPPGSAQFLQYLSNGSHPLPNAPGPQTMPYPALSGQQLPPGLQMMQAQGFGGLPFSQGPGQPMPQFPMYGTQQFPPGMEPQMMRFSEQGGQQFTFAPRGPNSR

SEQ ID NO: 57993 - protein, 398 aa, Zea mays
  Clone ID: UC-ZMFLB73045G04_FLI.pep
NITIKLGYANAKIYKCEDDRCPRPMCYKAYGSGKEDSPLCDVPGFENTRMKLLRHVSFVDCPGHDILMATMLNGAAIMDGALLLIAANESCPQPQTSEHLAAVEIMRLQHIIILQNKIDLIQESAAMNQHEAIQKFIQGTIAEGAPVVPISAQLKYNIDVICEYLVKKIPIPERNFTSPPNMIVIRSFDVNKPGSEVDEIRGGVAGGSILRGVLRVNQKIEVRPGIVMKDETGNIKCTPIYSRIVSLYAEQNELQFAVPGGLIGVGTTMDPTLTRADRLVGQVLGEVGSLPDVYVELEINFFLLRRLLGVRTKGTEKAGKVSKLTKGEILMLNIGSMSTGARVLAVKNDLAKLQLTAPVCTSRGEKVALSRRVEKHWRLIGWGQIQAGTTLEVPACPV

SEQ ID NO: 57994 - protein, 46 aa, Zea mays
  Clone ID: UC-ZMFLMO17300C09_FLI.pep
LCSPWRCLSTLPAYLQASRLAEPNSNEVCCFSFFLFFLQLCVLELN

SEQ ID NO: 57995 - protein, 462 aa, Zea mays
  Clone ID: UC-ZMFLB73145B12_FLI.pep
SSRTRPPPFYALLPRSDGPFAGDEHTPQQELSGVEQREARDPMAAAEGQWVLMATGRTPTNIAVIKYWGKRDEALILPINDSISVTLDPDHLSATTTVAVSPSFPSDRMWLNGKEISLLGGRFQSCLREIRKRARDFEDKEKGVKIKKEDWDKLHVHIASYNNFPTAAGLASSAAGLACFVFTLGKLMNVKEDYGELSSIARQGSGSACRSIYGGFVKWCMGEKDDGSDSIAVQLADETHWNDLVIIIAVVSSKQKETSSTSGMRDSVETSPLLQYRAQTVVPGRVLKMEEAIKNRDFESFAKLTCADSNQFHAVCLDTSPPIFYMNDTSHRIISLVEKWNHSEGTPQVAYTFDAGPNAVLIAQNRKTAAHFLQKLLYYFPPQDNDLSSYLVGDKSILGDAGLHSMKDVEALPAPPDTKIPDQKFKGDVSYFICSRLGAGPKVVVDEGQALIDSVTGLPKGV

SEQ ID NO: 57996 - protein, 350 aa, Zea mays
  Clone ID: UC-ZMFLB73147A02_FLI.pep
PEDWQSQTGHGQLSGRFSIVEGEPFTVTLWAGVEGFHMTVNGRHETSFAYRERSEPWLVAEVMFSGDLELLSFLANELPVSEDIDMENVAVLKAPPLPKKQTFLLVGVFSTGNNFKRRMALRRTWMQYEAVRSGDVVVRFFTGLHKNEQVNMELWREAQLYGDIQLMPFVDYYTLITLKTISICIFGTKIVPAKYIMKTDDDAFVRIDEVISSLKKSNSNGLLYGLISFQSSPHRDKGSKWFISRKEWPFDMYPPWAHGPGYVISRDIAKFVVQGHQELTLQLFKLEDVAMGIWIQQYKNSGQQVNIVTDDRFYNEGCEADYVLAHYQTPRLMMCLWEKLKTEYHAICCE

SEQ ID NO: 57997 - protein, 416 aa, Zea mays
  Clone ID: UC-ZMFLMO17023A12_FLI.pep
LLSSDQKISETTSRGCLPSGSETMAVLQAAAPPPVSVIGFEGFEKRLEISFSEAPVLADPSGRGLRALSRAQIDSVLDLARCTIVSELSNDDFDSYVLSESSLFVYPYKIVIKTCGTTKLLLAIPRILELAEELLLPLAAVKYSRGTFIFPEAQPSPHKNFADEVAFLNRFFGGLKSGGNAYVIGDSAKPGQKWHVYYAAEHPEEPVVTLEMCMTGLDKKKASVFFKTTADGYSLCAKEMTKLSGISDIIPEMEICDFDFEPCGYSMNAVHGPALSTIHVTPEDGFSYASYEVMGFNPGSFSYGDLVKRVLRCFGPTEFSVTVTIFGDRDNAKTWGTKLDAEAYACSNMVEQVLPFGGLLIYQSFTVTAETTHGSPRSVLHDFAGDIVKNRSESDAPWEADAVDESEERDVKKMKC

SEQ ID NO: 57998 - protein, 517 aa, Glycine max
  Clone ID: 701108968_FLI.pep
LSSLFLSFFYHLSTMVLSKTASESDVSVHSTFASRYVRTSLPRFKMAEESIPKEAAYQIINDELMLDGNPRLNLASFVTTWMEPECDKLIMAAINKNYVDMDEYPVTTELQNRCVNMIAHLFNAPLEETEAAVGVGTVGSSEAIMLAGLAFKRKWQNRRKQEGKPYDKPNIVTGANVQVCWEKFARYFEVELKEVKLRDDYYVMDPEKAVELVDENTICVAAILGSTLNGEFEDVKRLNDLLIEKNKITGWDTPIHVDAASGGFIAPFIYPELEWDFRLQLVKSINVSGHKYGLVYAGIGWVIWRSKQDLPEELIFHINYLGADQPTFTLNFSKGSSQVIAQYYQLIRLGFEGYRNVMENCRDNMLVLKEGLEKTGRFSIVSKDNGVPLVAFTLKDHTHFDEFQISDFLRRFGWIVPAYTMPPDAQHVTVLRVVIREDFSRTLAERLVSDVEKVLHELDSLPARVISSTTVTLSAEENGKVVVAKKNPMETQREITAIWKKFVLERKKNNDKMNGVC

SEQ ID NO: 57999 - protein, 261 aa, Glycine max; identical to SEQ ID NO: 54670
  Clone ID: 701121732_FLI.pep

SEQ ID NO: 58000 - protein, 222 aa, Glycine max
  Clone ID: UC-GMFLMINSOY005B11_FLI.pep
ILSEEQKRRDQECGQTKSLVQDLERKDLQRLIDKVQVPVAAVVIMACNRADYLERTINSVLKYQRPISSRYPLFVSQDGSNPNVKSKALSYDQLSYMQHLDFEPVQTERPGELTAYYKIARHYKWALDQLFYKHNFSRVIILEDDMEIAPDFFDYFEAAATLLDKDKSIMAVSSWNDNGQKQFVHDPYELYRSDFFPGLGWMLARSTWDELSPKWPKAGMTG

SEQ ID NO: 58001 - protein, 713 aa, Zea mays
  Clone ID: UC-ZMFLB73195H08_FLI.pep
NRLIGKIPEVIGLMQALAVLDLSENELVGPIPPILGNLSYTGKLYLHGNKLTGHIPPELGNMSKLSYLQLNDNELVGTIPAELGKLTELFELNLANNNLEGHIPANISSCSALNKFNVYGNRLNGSIPAGFQKLESLTYLNLSSNSFKGQIPSELGHIVNLDTLDLSYNEFSGPVPPTIGDLEHLLELNLSKNHLTGSVPAEFGNLRSVQVIDMSSNNLSGYLPEELGQLQNLDSLILNNNSLAGEIPAQLANCFSLVSLNLSYNNFSGHVPSSKNFSKFPMESFMGNLMLHVYCQDSSCGHSHGTKVSISRTAVACMILGFVILLCIVLLAIYKTNQPQLPEKASDKPVQGPPKLVVLQMDMAVHTYEDIMRLTENLSEKYIIGYGASSTVYRCDLKSGKAIAVKRLYSQYNHSLREFETELETIGSIRHRNLVSLHGFSLSPHGNLLFYDYMENGSLWDLLHGPSKKVKLDWDTRLRIAVGAAQGLAYLHHDCNPRIVHRDVKSSNILLDGSFEAHLSDFGIAKCVPAAKSHASTYVLGTIGYIDPEYARTSRLNEKSDVYSFGVVLLELLTGRKAVDNESNLHQLILSKADDDTVMEAVDPEVSVTCTDMNLVRKAFQLALLCTKRHPADRPTMHEVARVLLSLLPPAAKPPASKAAAASAAAGDYTRFLATAADLRRGGVADDDTGDNSSSDEQWFVRFGEVISKHTLS

SEQ ID NO: 58002 - protein, 118 aa, Zea mays
  Clone ID: UC-ZMFLB73260D01_FLI.pep
YLVNGSNLMPVSREQKQLGKSNSLRFLNNLLMTCSAVTWCGHFSGICTGVIISLQTINMPSKYTDGNLSGHRNLKLIHINALKLPRIQQQQPSLFSPKQELAIPRLLYRIIHSSCLHR

SEQ ID NO: 58003 - protein, 307 aa, Zea mays
  Clone ID: UC-ZMFLB73219B01_FLI.pep
HILLGDDYEKLAAIEAYDASRTREVQDKNVAPNVSSTDATTDPSSVRVPPAAHIRRHAGRLLTILSLLPNSKKEIISDAVWCKWLEDCASGRIPCNDIKLKSYCRLTLLNILCSESPNTRKASDEYPDSESEYKRNCPQFGDALFLLNPELPLEVHVDNSGFGILRVSRDNCKEDGGIGGSGSETVNSVDDAEAASKSVPLMDVVFVHGLRGGPFNSWRIADDKSSTTKAGLVESIDEDAGKEGTCWPREWLAADFPQARFFTVKYKTNLTQWTGASLPLQEVSSMLLRKLVAAGIGSRPVIFVTHR

SEQ ID NO: 58004 - protein, 879 aa, Zea mays
  Clone ID: UC-ZMFLB73216C07_FLI.pep
RGRSHKCVKTTQSRALANPVRAAVFLFAHLLGAGRLAMRRWWPAALLGCAVAVSVLVAAVECAVTYDKKAVLIDGQRRILFSGSIHYPRSTPDMWEGLIQKAKDGGLDVIQTYVFWNGHEPTPGNYYFEERYDLVRFIKTVQKAGLFVHLRIGPYICGEWNFGGFPVWLKYVPGISFRTDNEPFKTAMQGFTEKIVGMMKSENLFASQGGPIILSQIENEYGPEGREFGAAGQAYINWAAKMAVGLGTGVPWVMCKEEDAPDPVINACNGFYCDAFSPNKPYKPTMWTEAWSGWFTEFGGTIRQRPVEDLAFAVARFVQKGGSFINYYMYHGGTNFGRTAGGPFITTSYDYDAPIDEYGLVREPKHSHLKELHRAVKLCEQALVSVDPAITTLGTMQEARVFQSPSGCAAFLANYNSNSYAKVVFNNEQYSLPPWSISILPDCKNVVFNSATVGVQTSQMQMWGDGASSMTWERYDEEVDSLAAAPLLTTTGLLEQLNVTRDSSDYLWYITSVDISSSENFLQGGGKPLSLSVQSAGHALHVFVNGQLQGSAYGTREDRRIKYNGNASLRAGTNKIALLSVACGLPNVGVHYETWNTGVGGPVVLHGLDEGSRDLTWQTWSYQVGLKGEQMNLNSIEGSSSVEWMQGSLIAQNQQPLAWYRAYFETPSGDEPLALDMGSMGKGQIWINGQSIGRYWTAYADGDCKECSYTGTFRAPKCQSGCGQPTQRWYHVPKSWLQPTRNLLVVFEELGGDSSKIALVKRSVSSVCADVSEDHPNIKNWQIESYGEREYHRAKVHLRCARGQSISAIKFASFGTPTGTCGDFQQGDCHSANSHTVLEKKCIGLQRCVVAISPESFGGDPCPSVTKRVAVQAVCSPVA

SEQ ID NO: 58005 - protein, 645 aa, Zea mays; identical to SEQ ID NO: 55223
  Clone ID: UC-ZMFLB73246G03_FLI.pep

SEQ ID NO: 58006 - protein, 174 aa, Zea mays
  Clone ID: UC-ZMFLB73303F11_FLI.pep
TYVHTDHLLLMLWPLLKIVKYCIERWHLCQMEVLDCRKVPWPSSSIRKAYNVNGCGWPQQEAAYECKINLLTGKTHQIRAQLAAIGAPIIGDSAYMTAAMAAMVNPSINPFGRERLSYNSEEEKEAAVEAWIASHGKEPKSVIGLQASEISWDHEGKHHSYKAGVPWWWQDPDS

SEQ ID NO: 58007 - protein, 221 aa, Zea mays
  Clone ID: UC-ZMFLMO17033C03_FLI.pep
RQVFLPCLRSHSRPHLGCSQLVLDGLGGGCLLGCRWRLGGGGGGGACGLLALLDEVDDVVRRPAAVVGCHLPARGHEVQGRVALDVKLTGNVIGSRVHLSNHDFLVALESGGCLVQDGRQLLAVSAPGGIEFNKDIFARFEDEVVDVVSDNHLNRLIVDLRNRLRLPERRQFAVKVLLQPSDDLVSLNVNLQELLGVTILDEDKGCLVLFQAKVLEGTLAG

SEQ ID NO: 58008 - protein, 542 aa, Zea mays
  Clone ID: 700087470_FLI.pep
LTWKGKTSRDSRRQIEFAMGMAAPRAPLPLPQLLLLLVAALLAAAPLPRAAGADEFDVRRHLSTVTRYDVARESSSVISMPSIPDGCRVIHLNLVARHGTRAPTKKRIKELDRLAVRLEALLKEANQVLDSDSLKKIPSWIKGWESRWKGRTKGGELISEGEEELYNLATRMRERFQDLFDDEYHPDVYSIRATQVPRASASAVAFGLGLLSGKGKLGQGKNRAFSVLSESRASDICLRFFDSCETYKAYRKRKEPDVDKQKEPILEHVTAALVNRYHLKFTTCDVSSLWFLCKQEASLLNTTNQACGLFNEAEVRFLEWTDDLEGFVLKGYGESINYRMGLPLLKDVVQSMEEAIIAREENRADGTFEKARLRFAHAETVVPFSCLLGLFLEGPEIEKIQREEALDLPPLPPQGRNWKGSVVAPFAGNNMLVLYQCPSKISDGSTISGGRNNSYLVQVLHNEVPVSMPGCGNKDFCPFEEFKEKIVKPHLKHDYNMICKVKSPAASEEPASYAYRVSSFFLGLLSQKGYRGVGAEGVKTEL

SEQ ID NO: 58009 - protein, 267 aa, Zea mays
  Clone ID: LIB3079-013-B9_FLI.pep
AEKSKLQRNEWFGVLLRIRNNAIIVLAIICLQLPFELAYAHLYEITETEAMKYLLTAVYLVAIQYYTRIGGKVSVNLIKYENNQGEESSSASLVYKVFGLYFMQSYIGLFYHASLYRDILALRQVLIQRLIVSQVLENLIENSIPYLKYSYKKYIAVHKKKHEKESPVGRSVRLSTRVEKEYLKPSYTASIGAELEDGLFDDFLELALQFGMIMMFACAFPLIFCFAALNNVTEIRADALKLLVMLKRPEPRAAATIGAWLNIFQVY

SEQ ID NO: 58010 - protein, 146 aa, Zea mays
  Clone ID: UC-ZMFLMO17112H02_FLI.pep
QPKGVLAAVGHVEEPVLVLVLLVDGRHQGSCWWEGVLHEDEDRLLGAELDALPHHVHKLSHCEVGGDKVLFLVDVWDVTPLGLLNNDRNSIGVLLPDAVSLSLPPFEGVLQLERAPRHRSCSSWSLDRWRNREQLRDGWMEGWSGG

SEQ ID NO: 58011 - protein, 115 aa, Zea mays
  Clone ID: UC-ZMFLMO17099D04_FLI.pep
SMMLEEIWMMLEMCFGVVHLSRIKVHTPLFWFPKLIGTTRNYRVMSNFPTCLAMQSLVYGAKVEAAIAIGFNDFITYALRGIWFYQKDNMEIKKANGNGTLIPEQIFEKTRRSSR

SEQ ID NO: 58012 - protein, 282 aa, Zea mays
  Clone ID: UC-ZMROMO17023F08_FLI.pep
GHSEDEGPQHYPRIPKRASLLSVPLGKPPYFDGKYYCMWSDKMRHHLTSLHESIWDIVEFGAQAPQVGDKDYDSDEATQIRHFNSQATSILLASLCREEYNKVQGLKNAKESWDVLKTAHEGDEVTKITKRETIEGELDRFVLNKGEEPQAMYNRLRTIVNQVRNLRSTKWDDHKMVKVILRSLVFRNPTQVQLIRGDPRYKQMSLEEVIGKFVSFELMIKDSKHIVNLKQGATSTPEVQPVAFKAIEEKKEESTPSRLLIDASKLDNEEMALIIKSFRQIL

SEQ ID NO: 58013 - protein, 215 aa, Zea mays
  Clone ID: LIB3115-013-F9_FLI.pep
LHTTHIYNIRLFGRIICILFSMERTLAPVLYVSSWKEPWPHASYTLHSSVSGLSLQKSSRGSPLPAAAAPGHLAATRCARSTTRWLYPHSLSYQATTLTMSSPMTMLSDASMVQDTSEHLKSTDTSGTSQTSRMPCSGPAAALRNAAFTSSAVMPVFTVLITRSTTDTFGVGTRSAMPFSFPFSCGSTSATALAAPVLVGTMFSAAARARRRSRW

SEQ ID NO: 58014 - protein, 270 aa, Glycine max
  Clone ID: 700676594_FLI.pep
LGENAIMAKSNFVWNGTLFVSEKQRNMVSWDWRKKGVITQVKYQGGCGSGWAFSATGAIEAAHAIATGDLVSLSEQELVDCVEESEGCYNGWHYQSFEWVLEHGGIATDDDYPYRAKEGRCKANKIQDKVTIDGYETLIMSDESTESETEQAFLSAILEQPISVSIDAKDFHLYTGGIYDGENCTSPYGINHFVLLVGYGSADGVDYWIAKNSWGEDWGEDGYIWIQRNTGNLLGVCGMNYFASYPTKEESETLVSARVKGHRRVDHSPL

SEQ ID NO: 58015 - protein, 117 aa, Glycine max
  Clone ID: JC-GMST02400039B01_FLI.pep
STVQVVLQDTGVIAPESHPVHLHGFNFFVVGSGVGNYDPKTDQNNFNLADPVERNTIGVPTGGWVAFRFRADNPGVWFLHCHFEVHTTWGLKMAFLVDNGKGPNESLLPPPKDLPKC

SEQ ID NO: 58016 - protein, 70 aa, Zea mays
  Clone ID: 700445114_FLI.pep
ECQWRGWHKSNFGSSEEPDRRPDRKMGFLLQEQRLRRGKIDDDTFDNTCSVVFIVIESPLADVQLDWFYV

SEQ ID NO: 58017 - protein, 74 aa, Zea mays
  Clone ID: 700027674_FLI.pep
KGNVARLINHSCTPNCYARIMSVGHDESRIVLIAKKKVCAGDELTYDYLFDPDEADERKVPCLCQTANCRKFMN

SEQ ID NO: 58018 - protein, 85 aa, Zea mays
  Clone ID: 700142685_FLI.pep
MRNVLKSTCTCSYSFDDLLRSRRVKKNQLHSLTAGALCHYIIYKTRGRSFPSPGRHGCTYYIRDWLVVCAGIFVCIIFGLYGSKL

SEQ ID NO: 58019 - protein, 644 aa, Zea mays
  Clone ID: 700088507_FLI.pep
ENSTGDSTNLGRSKCAFETLASPTKTIKNMLTVPSSPLSPATGGSVKIVQMTPVTSAMTTAKWLREVISSLPDKPSSKLQQFLSSCDRDLTNAVTERVSIVLEAIFPTKSSANRGVSLGLNCANAFDIPWAEARKVEASKLYYRVLEAICRAELQNSNVNNLTPLLSNERFHRCLIACSADLVLATHKTVIMMFPAVLESTGLTAFDLSKIIENFVRHEETLPRELKRHLNSLEEQLLESMAWEKGSSLYNSLIVARPSVASEINRLGLLAEPMPSLDDLVSRQNVRIEGLPATPSKKRAAGPDDNSDPRSPKRSCNEFRNTVVERNLQTPPPKQSHMVSTSLKAKCHPLQSTFASPTVCNPVGGNEKCADVTIHIFFSKILKLAAIRIRNLCERVQCVEQTERVYNVFKQILEQQTTLFFNRHIDQLILCCLYGVAKVCQLELTFREILNNYKREAQCKPEVFSSIYIGSTNRNGVLVSRHVGIITFYNEVFVPAAKPFLVSLISSGTHPEDKKNASGQIPGSPKPSPFPNLPDMSPKKVSASHNVYVSPLRQTKLDLLLSPSSRSFYACIGEGTHAYQSPSKDLAAINSRLNYNGRKVNSRLNFDMVSDSVVAGSLGQINGGSTSDPAAAFSPLSKKRETDT

SEQ ID NO: 58020 - protein, 156 aa, Zea mays
  Clone ID: 700100255_FLI.pep
LIPHCNKTDKASILDETIEYLKSLQMQVQIMWMTSGMVPMVFPGAHQYMPPMALGMNSGCIPAAQGLSQMRRLPYMNHPMPNHIPLNSSPAMNPMNPLNTVNQFQNGHLREVPRPGPHVYGHQIAQAEEHNRILEVAASTVIPTSKAGQPPTFDGV

SEQ ID NO: 58021 - protein, 161 aa, Triticum aestivum
  Clone ID: UC-TSRO9316075C11_FLI.pep
VESSRQQGPKGDANSNSMAAASEVSVDWRGRPCRPQRHGGMKAAVFVLGIQAFEIMAIAAVGNNLITYVFNEMHFPLSKSANIVTNFIGTMFLLSLLGGFLSDSYLGSFWTMLIFGFVELSVSHRKTSKKKDHFFCFSTKTIKGTGKNSGRERLVRATLKF

SEQ ID NO: 58022 - protein, 152 aa, Zea mays
  Clone ID: UC-ZMFLMO17251D04_FLI.pep
SFVIVGKGWDVFISSTNPLSGWHLFMVNDLISPQSQQMERQLTTVWQSLTPTSCPRFYNFHLHTRCSDGQMTPEGLIEQAIHQELQGLAITDHHCVAGYYRAQRWLTEHCHYPSLRPQLWTGIEITANLDGTEVHILGYDFDPTHPVLDPYL

SEQ ID NO: 58023 - protein, 481 aa, Zea mays
  Clone ID: UC-ZMFLMO170114E06_FLI.pep
RGTFGHVYAGFNSDKGEMCAMKEVTLFSDDPKSKESAKQLCQEISLLSRLQHPNIVRYYGSETVDDKLYIYLEYVSGGSIHKLLQEYGQFGEQAIRSYTKQILLGLAFLHAKNTVHRDIKGANILVDPNGRVKLADFGMAKHINGQQCPFSFKGSPYWMAPEVIKNASGCNLAVDIWSLGCTVLEMATSKPPWSQYEGIAAMFKIGNSKELPPIPDHLSEEGKDFIRQCLQRDPSSRPTAVDLLQHPFVGNAPPLEKSSASHPLEQLTTISCRTNWKVVEHARNMSSLGLEGRYQSILQRRAAKFSLPNSDIRIQSNISCPVSPCGSPLLRSRSPQHQNGRMSPSPISSPRTTSGASTPLTGGSGAVPLNHLRQPAYRNEGFTVTSRGFDDHIPSRLVDPVHGRFIRVQQLSAGRQERVVSEADILSSQFGKMRHANVWDPHDRPLPSERSSQQCFGDHAKLKPSLDLRSGPLHPGRNHGH

SEQ ID NO: 58024 - protein, 118 aa, Zea mays
  Clone ID: UC-ZMFLMO17051A04_FLI.pep
TPRNLGINRSSTSLLEGPLVLPADLLFLLRGEVILDVEGLANLFWCLALDHVSNSQDEVEKRGLVDLDEVRIPVLEVLTGGGGAVGGGGTHVVGTGLRGGGGGGGGMYVLVAVLDYLG

SEQ ID NO: 58025 - protein, 156 aa, Glycine max
  Clone ID: UC-GMROPIC088G05_FLI.pep
RSFCPTPILFFALYLSQFLSFLLSSSLCHGQRFFPVSVLHFNSHATRTSRHGSPRFRRRHRRHAPPPSRRRKQLRQHRRWRRQQQHAEVLHGRRPGAEDFADGGARDEPLLHRLRHRAPRVRQTLPLQIWWRRLIFWRCSSDPYPIALFSVFNSVI

SEQ ID NO: 58026 - protein, 461 aa, Oryza sativa
  Clone ID: UC-OSROCYP011B02_FLI.pep
LAKMRISMALAAAALLLLLSLAAADMSIVSYGERSEEEARRLYAEWKAEHGKSYNAVGEEERRYAAFRDNLRYIDEHNAAADAGVHSFRLGLNRFADLTNEEYRDTYLGLRNKPRRERKVSDRYLAADNEALPESVDWRTKGAVAEIKDQGGCGSCWAFSAIAAVEGINQIVTGDLISLSEQELVDCDTSYNEGCNGGLMDYAFDFIINNGGIDTEDDYPYKGKDERCDVNRKNAKVVTIDSYEDVTPNSETSLQKAVANQPVSVAIEAGGRAFQLYSSGIFTGKCGTALDHGVAAVGYGTENGKDYWIVRNSWGKSWGESGYVRMERNIKASSGKCGIAVEPSYPLKKGENPPNPGPTPPSPTPPPTVCDNYYTCPDSTTCCCIYEYGKYCYAWGCCPLEGATCCDDHYSCCPHEYPICNVQQGTCLMAKDSPLAVKALKRTLAKPNLSFLFGNGKKSSA

SEQ ID NO: 58027 - protein, 127 aa, Oryza sativa
  Clone ID: UC-OSFLCYP120A12_FLI.pep
DTRWALGICTGIDRLELLELLEVHPWFLPDLSFIELLGIPFLHLNCEIVQSASDNLLLHTHKLLELQQRIGLLVVLGDGEAGEVDEVEVVLVPHRLDAAKHRPSVARHLLLPFSPCAMRLGLSGRRG

SEQ ID NO: 58028 - protein, 122 aa, Oryza sativa
  Clone ID: UC-OSFLCYP032A09_FLI.pep
ATRFALENQAVNEATFRCPDELGWKPQRVPIVPSDGAISRTRETTLPVNELTKSLRKTGYDVMPSDDAGRFVCNYVYYHSLRFAEQHGIKSLFVHVPLFLTIDEEVQMHFVASLLEALAVLN

SEQ ID NO: 58029 - protein, 168 aa, Oryza sativa
  Clone ID: UC-OSROCYP028C02_FLI.pep
PPPATRVLRPSHGDSHRSTPPPTTISSAPPLRATPNCRPHSSPHHPTSPPDDSPKRRSPRFHRRPPLLARLRPSRRSTPPPMTISSVPPLRVSSNCHPIPSLTIQPRRPTIPLSATRSHPSHHHLLPTSPAIRPHPSPRHVLPTSSAIRTSPPARRRSTAAGSTNHRN

SEQ ID NO: 58030 - protein, 336 aa, Oryza sativa
  Clone ID: UC-OSFLCYP020C06_FLI.pep
PSRSFTSAAAAAMAEGGGGGGGSAASAALKDQGNEQFKAGNYLKAAALYTQAIKLDPDNPTLYSNRAAAFLHLVKLNKALADADMTIKLKPQWEKGHFRKGCVLESMEHYEEAISSFQIALQHNPQNTEVSRKIKRLTQLAREKKRALDVENMRSNVDVAKNLDSLKTELAGKYGDAELGQSIFTFVVNVIESAIKVWHDTGKVDARVNFLLDDQKTDTEKHAPVVNIDKAFDSPHTHSSCFTFLRQYSEESFSKAACIVAPKSAISYPQVWKGQGSRKWKLDQSDGFFVQFESPILRKIWFVPSTTEKGRVLCRSPELLDISIHEVLPRIFKETA

SEQ ID NO: 58031 - protein, 218 aa, Zea mays subsp. mexicana
  Clone ID: UC-ZMROTEOSINTE034H11_FLI.pep
NPDTLKKLNEAEKAKKELEQQEYYDPKLADEEREKGNEFFKEQKYPEAIKHYTEALKRNPKDPRVYSNRAACYTKLGAMPEGLKDAEKCLELDPTFTKGYTRKGAIQFFMKEYDKAVETYQAGLKHDPNNQELLDGVKRCVEQINKANRGEISQDELQERQNKAMQDPEIQNILTDPIMRQVLIDFQENPSAAQEHLKNPGVMQKIQKLVSAGIVQMR

SEQ ID NO: 58032 - protein, 439 aa, Zea mays subsp. mexicana
  Clone ID: UC-ZMFLTEOSINTE011A01_FLI.pep
VAADPTTRGYLDQPDFVQMLREVQRNPGRLNSYLSDQRMVQVLTLMLNIKFQNQSSGAPDPAAAQSNPPPPKQQPEAKAREPEPDPEPEPMEVTEEDKEQKERKASAQKEKEAGNAAYKRKDFDTAIQHYTEAMELDDEDISYITNRAAVYLEMGKYDECIKDCDKAVERGRELHADFKMISRALTRKGTALAKLAKSSQDYDAAIEIFQKALTEHRNPDTLKKLNDAERAKKELEQQEYYDPRIADEEREKGNEFFKQQKYPEAVKHYTEALRRNPKDPRVYSNRAACYTKLGALPEGLKDADKCIELDPTFSKGYTRKGAIQFFMKEYDKALETYQAGLKHDPKNQELLDGVRRCVEQINKASRGELSGEELKERQNKAMQDPEIQNILTDPIMQQLAMQVLTDLQENPRAAQAHLKNPGVMQKIQKLVSAGIVQMK

SEQ ID NO: 58033 - protein, 157 aa, Zea mays
  Clone ID: UC-ZMFLB73307F05_FLI.pep
RRRRTTVTVAPLYYHACWRSGLVGVLGDGAGGGRPGHAAEAAEARGAAAEEGHAAAARNAAAGEAAERRGRAAAEAVEGREGLRLHHRVVLLLRRRGLDVPRLGGRHGQGQGQQSCRHHHLGRPRHRVLALGRSALFLLACLRARPSCFSTTIKRLT

SEQ ID NO: 58034 - protein, 141 aa, Glycine max
  Clone ID: 700830794_FLI.pep
YVFVTTFFQSSSTRTASLFFPLPVLLLLVVHATTTPSWRRFPSLSINGKSLASSPSSSVAMRMQEQRFKEAKKAVVTPLMNHMATPSNFPQAEEEPWVEETLLESTEFGDRRLKKPLVELEEVVTAMKVAMLEIKDTPRTK

SEQ ID NO: 58035 - protein, 205 aa, Glycine max
  Clone ID: 701102051_FLI.pep
DNSIFLSHSAKMAKKVYPQDPTSSPCMSHGPETYTLWMKSLILHSNGCTVYDSNGVIVYRVDNYDTKGRRHVNLLDLRGRVLCTIHKKLLAFGRWDVYRGSDNSNFKTQEKPWFQVKRCYKMVTRKITCQITVECQKYCIKKIGGKTTFQIVNIDGDTVADAKQKHSSSGVVLGNDVLTLDVEGGIDHSLIMALVIVFGLICGRM

SEQ ID NO: 58036 - protein, 202 aa, Glycine max
  Clone ID: 701151863_FLI.pep
REDDRRGREREMEEKTEKVKSEAVQIIEAFEVLPKLVVFDLDYTLWPFYCECRSKREIPSLYPHAKGILLALKEKGIDIAIASRSPTADIATAFLNKLNLTPMFVSQEIYSSWTHKTDHFQRIHSRTGVPFNSMLFFDDENRNIQAVSKMGVTSILVGDGVNLGSLREGLTQFSRNWDASQKNKQKWLSKYSNKSDTSNPTA

SEQ ID NO: 58037 - protein, 295 aa, Glycine max
  Clone ID: 701063369_FLI.pep
RFLFFFKMAMTTTTESDLDYELRYLSLAVTDTFTAFQNLLPDAMTSFSACGLIDPLCSQNLTPKHSTITATIDSQSSICATSNVGSPVSANKPEGRENHTKGATSGSSEPSDEDDEAGACEQSTNPADMKRLRRKVSNRDSARRSRRRKQAQLSDLELQVEKLKVENATLYKQFTDASQHFREADTNNRVLKSDVEALRAKVKLAEDMVTRSSFTTLNNQLLQTQHHQMSTPQQLNTTNLRRMAHVSPTITVHGNDVSYNNGGQNSALGNLDMSFNDINEVMNDAMSCGTIWPLD

SEQ ID NO: 58038 - protein, 154 aa, Glycine max
  Clone ID: 701064242_FLI.pep
DYRSEPELGEEPPVLPGFEPLLEALLGLLESSDLLILRVENVGVNRVLQVHVKRVARGHEVLVVDELHERLHARLLRRLLRRVLLDHLRRVLLYPRHQTVAVGALASSFVEGSNDHGFLAGVASLKDNDGLVWFQKLHHFCVCDLSSVFAVSHS

SEQ ID NO: 58039 - protein, 270 aa, Glycine max
  Clone ID: 701130201_FLI.pep
PKKNLVEQQQQQQQRERNMEGVPHPIPRTVEEVFTDFKGRRAGLIKALTTDVEKFYQQCDPEKENLCLYGFPNETWEVNLPVEEVPPELPEPALGINFARDGMQEKDWLSLVAVHSDSWLLAVAFYFGARFGFGKNERKRLFQMINDLPTIFELVTGSARQSKDQPAAHNNGSKCKSSGKSRQSESQAKGMKMSAPPKEEDESGEEEEEDDEQGATCGACGDNYGTDEFWICCDMCERWFHGKCVKITPAKAEHIKQYKCPSCSNKRVRV

SEQ ID NO: 58040 - protein, 69 aa, Glycine max
  Clone ID: 700655373_FLI.pep
AFIKRLLAVSDPSQMKTSVTETSAAELAKLLYWLMVVGYSIRNIEVRYDMERVFGAPPKLAELPPGENV

SEQ ID NO: 58041 - protein, 107 aa, Glycine max
  Clone ID: 700656682_FLI.pep
LIYQPSHESMGRALLIITNYYKHAVVKGSWGGSSVSGHGVTWRSEAHHLPLSSSGSSISPQKSSPPLPSQSEVMLLLFSGESAEAAWTIIMWAALAAAAWMSRAVQE

SEQ ID NO: 58042 - protein, 98 aa, Glycine max
  Clone ID: 700980250_FLI.pep
VFYSNHWHPKTIHLHTRKHYSHADQSNKWLRIEDKNLKTEVSHTEYNQSFLLLFFIFHSPVSFLKTTKTIKECESGGDRVREHKSPAAAPNSQHDHLT

SEQ ID NO: 58043 - protein, 78 aa, Glycine max
  Clone ID: 700795559_FLI.pep
NLRWWAYEIKSRCLLISILFVKFGLSIVPREASVNVDREGCSEVNSGDSKSGGECLESIIPNLTCYSHSHPTPLPLGF

SEQ ID NO: 58044 - protein, 46 aa, Glycine max
  Clone ID: 701013763_FLI.pep
KNHNINNHSLYLFSKNTFIFYSQFYVSRQLELYASLFDVGHHLSFS

SEQ ID NO: 58045 - protein, 93 aa, Glycine max
  Clone ID: 700839172_FLI.pep
LLASMAKSKEDITYATSQARLSEDEAVRVAYEHGSPLEGGKIADSQPVDLFSSAHNMPKSGQTTMDSNTSDQSQMQRDTQEGGSKEFTTGAPG

SEQ ID NO: 58046 - protein, 218 aa, Glycine max
  Clone ID: 700944149_FLI.pep
KPSKHNLTRISVAERERQMATSEEVVAAAPEAAALEAGLKHKLERKWTFWCDNQSKPKQGAAWGTSLRKVYTFDTVEEFWCLYDQVFKPSKLQINADFHLFKTGIEPKWEDPECANGGKWSVTSNSGRKANLDNMWLETMMALIGEQFEDAEDICGVVASVRQWQDKLSLWTKTAANEAAQMSIGRKWKEIIDVNDKITYNFHDDSRTKGASKGRYTV

SEQ ID NO: 58047 - protein, 160 aa, Glycine max
  Clone ID: 700946086_FLI.pep
GSEANMAYSQLQKVEANVHIKASADQFHNVLCNRTHHIANIFPGKVQSVEIHKGEWGTEGSVISWNYLHEGKVCVAKEMVEGIDMKNNKMTFKVIEGDLLGHYKSFKFLLQVTPKEKGSVVNWVLEYEKQNDNTPDPYTLLELTVEMSKEIGAYLSQDHN

SEQ ID NO: 58048 - protein, 100 aa, Glycine max
  Clone ID: 700967675_FLI.pep
QHNIHKINRNTKRLATLFHLDSNFQDIQNNMNEISSGVVGGFGISSDRHVVSGGFGNVVGGGFRKSIVVGVTCRVGLVDGSTCLGKEGFESELYSEPREC

SEQ ID NO: 58049 - protein, 167 aa, Glycine max
  Clone ID: 701043841_FLI.pep
VPDMSIEFDSESIPTPTAQAQAQERSNSRCALLFSSYNCFGGQRRRSSWWERVRSHSHSAPASAGDRWWSRGLRALKKLREWSEIVAGPKWKTFIRRFNRNRPNKRIPTYQYDPFSYALNFDEGPNGDFNHHHDDAALRNFSTRYAAANNVKSLSPKARDCDDAVLV

SEQ ID NO: 58050 - protein, 274 aa, Glycine max
  Clone ID: 701206255_FLI.pep
LLEAHSGAGRVQARFGFGKKKAAAPKKVSRGSGSSSDRPLWYPGAKAPEYLDGSLVGDYGFDPFGLGKPAEYLQFELDSLDQNLAKNVAGDIIGTRTELADVKSTPFQPYSEVFGLQRFRECELIHGRWAMLATLGALTVEWLTGVTWQDAGKVELVEGSSYLGQPLPFSITTLIWIEVLVIGYIEFQRNAELDPEKRLYPGGSYFDPLGLASDPEKKATLQLAEIKHARLAMVGFLGFAVQAAATGKGPLNNWATHLSDPLHTTIIDTFSSSS

SEQ ID NO: 58051 - protein, 335 aa, Glycine max
  Clone ID: 701212102_FLI.pep
NKWHLQETQGSAIPKMKLTTILIFFIFALPFTFANLRVGFYTATCPRAETIVGEVVQRRFSQDKSIVAALLRMHFHDCFVRGCDASILIDPTSTRTSEKIAGPNQTVRGFEIIDEAKAILEQACPLTVSCADIIALATRDAVALAGGIRYSIPTGRKDGLLADPSLVILPAPSLSVQGALQFFTARGLTLEDMVTLLGGHTVGFAHCSVFQERLSSVQGRVDPTMDPELDAKLVQICESNRPSLSDPRVFLDQNSSFLFDNQFYNQMRLRRGVLHLDQQLAFDSLSRDIVEDFAANDGTFQERFANAMIKLGSIGVLDGNEGDVRRNCRAFNIPL

SEQ ID NO: 58052 - protein, 298 aa, Glycine max
  Clone ID: 701212767_FLI.pep
CIGMEDQGQQQQQQHQVEAKSPRQGTERSEAVRSRWTPKPEQILILESIFNSGMVNPPKDETVRIRKLLEKFGAVGDANVFYWFQNRRSRSRRRQRQMMQQQATATATATVTTFDHPQPQTQTLVNVGGAIPHDHHTLGNLVVATESSATSTMGFGCSSQSSYGFLGSSSSSSSCGGGVIGGQQQGMDGFFSSVSSHQMGFPDHHHTSPASSALYPPLDPNLTYQAGYGGPNISGFITVFINGIATELPKGPIDLKTVFGEDVMLVHSSGVPIPTNEFGFLMHNLQHGDSYFLVSKPT

SEQ ID NO: 58053 - protein, 121 aa, Zea mays; identical to SEQ ID NO: 48209
  Clone ID: 700105163_FLI.pep

SEQ ID NO: 58054 - protein, 129 aa, Zea mays
  Clone ID: 700106476_FLI.pep
AVRTSPSSLPRAGRSLLQSHVVAAVSLLRQLHLLLAELLLQLRQRKKRRWKRRKKAMMIWASASSTRLHSHHSIVLGSETRGKPESCLDFKLVLCWKVLERLLLVFIFGNSAVDCYAGWDLLVNQSFSV

SEQ ID NO: 58055 - protein, 400 aa, Zea mays
  Clone ID: 700235358_FLI.pep
LESKHIDLDKGCTYSHATLSNCASNAFGDDLYGFREFTVLDMQSATCKFSESFRMWSQGRGCVYKGEIMNRTVMIYKLHCHSIESVRQFQQEVYILSNVRHPHLVTLVGACPEALCLVYEYLPNGSLHDRLFSRRSSRHLPWRIRARIVAEISDALLFLHSCKPQTIVHGNLKLENILLDTECHCKIADFGISRLFTGDVKDYPSGGSEPPEGSFPYADPEYMRSKVLTPKSDVYCFGTVILQLLTGRQEPARRLAGEVRCAMACGKLSSILDPAAGHWPMEVAGRLAELGLRCSEDRSRDRPDLTAETVRELEQLHLTREEEQAPSSFLCPIMQEIMHDPQVCAADGVTYEGRAIRERMELETGQGTAPLNNLKLEHLSLTPNHALRFAIQDWLRRSRR

SEQ ID NO: 58056 - protein, 123 aa, Zea mays
  Clone ID: 700237224_FLI.pep
DDKVPERVLYEILIQISGQDKPSLNGNIPVTPRLNSVPQPKPHQPMRSSDTPLPQHAAVNGRNAGYGIPPNHSYDTHTQALSSGLPNRGLSNGTYEYSRRVFGSVLNDVSRRATREPIPYPSY

SEQ ID NO: 58057 - protein, 96 aa, Zea mays
  Clone ID: 700098248_FLI.pep
TVTKTTITELLLSYSSVIDNKVKHNRRPKCWVNKHRSTTTQQYSPTLSMKLTRSSTSVLDLLLGPQLVAVTTLLLAAVDSPRVQSCIAFAADHLVL

SEQ ID NO: 58058 - protein, 199 aa, Zea mays
  Clone ID: 700096767_FLI.pep
QRNPSSNSAASTISSSTLCPPRKPCPCSSRRRRRRRRRHHIRSAQPPEKRREPAPATMGRVRTKTVKKTSRQVIEKYYSRMTLDFHTNKKVLEEVSILPSKRLRNKVAGFTTHLMRRIQRGPVRGISLKLQEEERERRMDFVPEKSALEVEEIRVDKETMEMLAALGMADLPGVERQAEVSSVPAYGRPQYGGPRRDRV

SEQ ID NO: 58059 - protein, 372 aa, Glycine max
  Clone ID: 700562557_FLI.pep
LELREEMGEIEREEMSSTRWEKEEEEEEEEAQMDIWKYIFGFVELAVIKCAIELGIAEAIEKHGSPMTLSEISSSLGCDTSHLKRIMRFLVQRKIFKGDGCSRGYSQSALSRRLMRNGEHSMASFLLLESSPVMLAPWHSLSARVMANGNPSFAKAHGEDVWRYAAANLDHSNLINEAMACDAKLVMPIIIQSCSEAFHGLKSLVDVGGGNGTAMRILAKACPSIRPINFDLPHVIALCDGDGDGVQHVSGDMFLSVPKADAAFLMWVLHDWSDEECIQILKKCREAISNSKENGRVIIVEAVIEGEGEGEGGKHDGLKDVGLMLDMVMMAHTNFGKERTLKEWEYVIKMAGFSSYTVKPIHAVQSVIMAFY

SEQ ID NO: 58060 - protein, 347 aa, Glycine max
  Clone ID: 700680051_FLI.pep
LFNSILTHKVPSSPNMAAIFSSSLFASSPLPKPLSSSYSRIHTAPQLFRARSSLLQDNEKKVIVHDSFPSKTSPLHTADKSTGGNSINTSAFEKRIIKVEQSVNIFLTDSVIKILDTLYHDRHYARFFVLETIARVPYFAFMSVLHMYESFGWWRRADYLKVHFAESWNEMHHLLIMEELGGNAWWFDRFLAQHIAIFYYIMTVLMYAVSPRMAYHFSECVESHAFETYDKFIKVQGDELKKMPAPEVAVNYYTGDDLYLFDEFQTSRVPNSRRPKIENLYDVFVNIRDDEAEHCKTMKACQTHGNLRSPHSYAEDDDSSVCALEADCEGIVDCIKKSVASNPAKVK

SEQ ID NO: 58061 - protein, 297 aa, Glycine max
  Clone ID: 700684311_FLI.pep
VVLLKMGEKDDDFGLSLSLSLGRVNQQQQHPPPLNHMHQPQQLQPVPMNHNKTLFGDLSQLPADRSSEMIRGIDVNSAAECDGVSSPNSAVSSVSGGDGKQSERDDDNNAAAVAGERTSCSRGSDDDDGGGSDASRKKLRLTKEQSMVLEETFKEHSTLNPKRKQALAEELNLKPRQVEVWFQNRRARTKLKQTEVDCEYLKRCYENLTEENRRLHKEVQELRALKLSPQMYMHMNPPTTLTICPSCERTHSFASSSTATIHSAVAATSSNRKLFGTNIRLPVSFNTRPFEGPIPRP

SEQ ID NO: 58062 - protein, 278 aa, Glycine max
  Clone ID: 700686490_FLI.pep
SPDLTLTLTLFCSVQRREENMAVMAVHQFAQCITCHAWSPDQSMVALCPNNNEVHIYRLVEDKWEKLYVLQKHDQVISGIDWSARSNRIVTASHDRNSYVWNLEGSEWVPTLVILRLNRAALCVQWSPKENKFAVGSGAKTVCICYYEQENNWWVSKLIRKRHDSSVTSVSWHPDNILLATTSTDGKCRVFSTFIKGVDARDSKKGTSPDSKFGEQIVQLDLSSSWTFGVKWSPSGNTLAYVGHNSMIYFVDDVGPSPLAQNVVFRDLPLRDVGIICF

SEQ ID NO: 58063 - protein, 263 aa, Glycine max
  Clone ID: 700758505_FLI.pep
TAAFPSHMAPQAPTGQLSQGTNFPHHGGSTAHTAPHLSSYSPTHQASQFNSQSFIGQQGNAAPYSSPITNQSFASNASQSNSLVSQPSKDKFETKSTVWADTLSRGLVNLNISGPKTNPLADIGVDFEAINRKEKRMEKPTTTAVTSTVTMGKAMGSGSGMGRSGAGSLRPPQNPMMGSGMGNGPGVGMGMGGYGGGMNASMGMGMGGMGGMGMGQGYQMQPPTGLPPGSNMPGNYNNSMMGSGSYGQQPYGSYGQQPYGGYR

SEQ ID NO: 58064 - protein, 105 aa, Glycine max
  Clone ID: 700962928_FLI.pep
NREARITYWYDYEKRVKIKVPYTNIIRHTFYNAYTTLFILLRIKLHLTKINDEKATTFKINFIQNQIFKHPPKHTLNLQQSNVMKRKSMVKRISYYDIRIEESPL

SEQ ID NO: 58065 - protein, 197 aa, Glycine max
  Clone ID: 700964235_FLI.pep
MMLQASFLRLISFFFLIALPLGRSSTTLNVPKDIINQTCQKCANQSIILSYNLCSTSLPAVPVSHSANLEGLALVAMELALENVTSTLAIIEKLLDSTSLDNSALGCLADCLELYSDAAWTILNSVGVFLSGNYDVTRIWMSSVMEAASTCQQGFTERGEASPLTQENYNLFQLCGIALCIIHLATPGVPYSQLFHR

SEQ ID NO: 58066 - protein, 355 aa, Glycine max
  Clone ID: 700964974_FLI.pep
YSHTIRTMFSSSTSFFLCLLLFSVTFCHVLGDKVFTGTYGVNYGRIADNLPSPESVVTLLKAAKIRNIRIYDADRQVLNAFKGSGISISVCVPNELLKEISVGEDRAMNWIKQNVEPYLPGTKIRGISIGNEILGGGDMELWEALVPASKNVYSALARLNLAHQIQVSTPHSEAVFANSYPPSACTFREDILPVMKPLLQFFSQIGTPFYINAYPFLAYKNDPQHIDINYALFKKNPGIYDAKTKLHYDNMFLAQVDAAYAALDKLGFDKMEVIVSETGWASKGDDNEAGATVKNARTYNKNLRKLLLKKKGTPYRPKMVVRAYIFALFNENLKPGPTSEKTLDCSSQMEAFHMI

SEQ ID NO: 58067 - protein, 312 aa, Glycine max
  Clone ID: 700850117_FLI.pep
GEASCDMKLVLEKLDHAMPMDMVIVGDERGSFDFVHKSGNDSRIICSKKGNIEAVALVFAQDRDRSLGTIRFHVALSNGVSTVGPRYKAASVKSNSADCSTWLTARREGQQENLDGQSILLDINNLLDNHIESPDLYIGVIKHRKLSTGAEKPMPRTCIAYHGVVGGDEEYLYVDGIGIKTGDIFQFYYSDPNTALASLTKVHDALKSIHLEKNSKSSKGDGDNATNVFGGIVFACYGRGESFFGRHNVDSSPFLENFPGVPVSGIFCGGEMVRPCTTVIGQCEGASPISCCLHVYSTVYLAMSYTPPSVED

SEQ ID NO: 58068 - protein, 188 aa, Glycine max
  Clone ID: 700853714_FLI.pep
GIRASNFDAMSSINPSRATAPSAFATRRPWEEFFALHSFTRPYTLGETTLRVKRNLGHFRVNYAMVVLLFVFLSLLWFPISLVVFLAVFAAWFFLYFFRDGPIVVLRRELDDRLVLAALSAVTVAGLVLTGVWLNVVVALLFAAAAVALHAALRNTEDLYVDELEVSDGGLVSVVGGSPTKRTGYARI

SEQ ID NO: 58069 - protein, 155 aa, Glycine max
  Clone ID: 701070051_FLI.pep
IKRERENMVSRVHKRTAMYRNLHLLRSIRYSHSVSDYIQGLKQKLEELNQLTVATARKIVDYDPMPKLEVETQEEGFVIKVLSESSCQGLLVFILEAFEELGLDVLQARVSCAHSFSLEALGNKENNEDTRPLDAQLVEQVVSQAIQNWREVSQI

SEQ ID NO: 58070 - protein, 501 aa, Glycine max
  Clone ID: 701204367_FLI.pep
HIPFLELLQMAETPKKKKKGHVVMVPFMAQGHIIPFLALARQIQQSTSFTITIANTPFNIQYLRSALSSSTSPNHQIRLAELPFNSTLHDLPPNIDNTEKLPLTQLMKLCHASLTLEPPLRSLISQITEEEGHPPLCTISDVFLGWVNNVAKSLCIRNLSFTTCGAYGTLAYVSIWFNLPHRKTDSDEFCVPGFPQNYKFHRTQLHKFLLAADGTDDWSRFIVPQIALSMKSDGWICNTVQEIEPLGLQLLRNYLQLPVWPVGPLLPPASLMDSKHRAGKESGIALDACMQWLDSKDESSVLYISFGSQNTITASQMMALAEGLEESGRSFIWIIRPPFGFDINGEFIAEWLPKGFEERMRDTKRGLLVHKWGPQLEILSHSSTGAFLSHCGWNSVLESLSYGVPMIGWPLAAEQTFNLKMLVEEMGVAVELTQTVETVISGKQVKKVIEIVMEQEGKGKAMKEKATEIAARMREAITEEGKEKGSSVRAMDDLVRTILSP

SEQ ID NO: 58071 - protein, 201 aa, Glycine max
  Clone ID: 701136167_FLI.pep
GIRMGKNQAYKAMQRARLGGASAGPDEVEDGMVDGSFHSPEWHAARLASLNTSHTITWEEYKMKQKEEELRKGELEADADRMMREYRAQLDAERARKLSQGRNHSNSKSKHVKDKRDKISKKHSSRKRKHSRRSSASSSSSSSSDSSSSDEEERGSRRSKSRSKRSKKEKKSKSRSKDAGSASEDEGPVRLSRFFGNVKSE

SEQ ID NO: 58072 - protein, 415 aa, Glycine max
  Clone ID: 701141457_FLI.pep
TLHSFSFTMANALHNAAISRVMFGDQYSISRCVVPSLSTLPLRAMHKGKHVELNRTVMVVKAKTNSDFDDSDVDISLSHRVNAVKLSKTLSICDHATALLQAGVPVIRLFFGESDFDTPGAIAEAGMNAIREGYTRYTPNAGTLELRQAICHKLKEENGITYSPDQIVVSNGAKQSIVQAVLAVCSPGDEVIIPAPFYVSYPEMARLAHATPVILPSHISRSVYSKKLLEEIAQIVAKHPRLLVLSDENYEHIIYAPATHTSFASLPGMWDRTLIVNGLSKTFAMTGWRLGYIAGPKHFVAACEKIQSQFTSGASSISQKAGVAALGLGYAGGEAVSTMVKAFRERRDFLVESFREMDGVKICEPQGGFYVFLDFSSYYGREAEGFGVIENSDSLCRYLLDKGLVALVPGECIWR

SEQ ID NO: 58073 - protein, 91 aa, Glycine max
  Clone ID: 700788771_FLI.pep
HSTMATIPVNPKPFLNNLTGKPVIVKLKWGMEYKGYLVSVDSYMNLQLANTEEYIEGQFTGNLGEILIRCNNVLYLRGVPEDEEIEDVAED

SEQ ID NO: 58074 - protein, 156 aa, Glycine max
  Clone ID: LIB3050-003-F3_FLI.pep
EKTTEGGKETKENAMVDVDFGTSGSPKRHNHNGFIVTISAILALLKKRKAAVKASKEDELKKSSRPEKLLSNISSKALFGHKKNNKKQLRSVEETQQAQGWGNGGVWQKEILMGGKCEPLNFSGVIYYDGNGKQLSQIPLRSPRASPLPGYLTRRQ

SEQ ID NO: 58075 - protein, 107 aa, Glycine max
  Clone ID: 700658366_FLI.pep
SRNPLRRKSAGGGGHRARTGSLDPSLDLMPSWAGRICRATLPAFWSHLPCVLVVLGRVLASVWLSLFCWACLRRLRRPCGLGACRTKAISSQVALPGALSPCPGPWL

SEQ ID NO: 58076 - protein, 161 aa, Glycine max
  Clone ID: 700659875_FLI.pep
ETERKKTMAEDPISSFCNALAAFCGHLHSSSDALKQSIDRRPIPLDSASSTFLQCLNRRVSTASADLDMLDSMSFGTVSFEELLGHCNELYKKNHSDLLQLQDRLQSYGYSAVPDIEEADEDEDIQRQDPEDKLDSPSSFYGSLSVADSSFKSFEEDALYP

SEQ ID NO: 58077 - protein, 448 aa, Glycine max
  Clone ID: 700663762_FLI.pep
RAGKHLLHASCNSRTQEKMTNENTTGIEIDYEYEDCSNSKRPKMTSKVWEEMQRIQTTEGSKVLCRHCGKLLQDNCGTSHLKRHLIICPKRPKPLDIITQDSMPTVCFRGPSSVKDSGLNTVLMVRPLKVEPESQIPCFSQTPNIRVPTAIASIENSPSPVQELHPKTSSALLLPSIESPKNQGELTLDDVEMKAFYASLDAQTSDMSPSQDTAVITELSNSTPCEETKKALTTLKDLLCKDFSDLLHTGQSGSIKSSIEYLSKLSADDGVSAEMRLLILEVSREFTRWSCDYNDASRKIESASTNISKADKLEGNLEANKNEFKEVMSLENELSNQLSCLEKRKKELEEQINAIKANISVFQSAKVTSTKRKREVFEEAKILKVQRDELREQVPHLRNELEVAKKNQAHIRAEWSKLGEKFNKSLNEMNCEHLHGKSIEDCPQENSI

SEQ ID NO: 58078 - protein, 475 aa, Glycine max
  Clone ID: 700985202_FLI.pep
RKEPMDHSVSVSSNKPLHVVMFPWLAMGHVYPCFEVSKILAQKGHYVTLVSTPKIIDRLPKLPQTLSPFVKLTKLLLSPHIDKNHLPQDADSTMDIPSNKLYYLKLAYDALQEPVFEVLKTSNPDWVFYDFAASWIPQLAKTLKIHSAYFSPCPAWTICFFDTPKQQLGDAAAANRSNPEDYYGPPKWVPFPTKIGLRPYEVRKLLEDIKVNETGASPVFDLNTANSGCDMFVIRSSRDLEQEWLDYLAEFYHKPVVPVGLLPPLRGSDEEDNSPDWLQIKAWLDTQKGSSVVYIAFGSEVKLSQENLNELALGIELSGLSFFWVLRKGSVEFLREGFEDRTKDRGVVWKTWAPQPKILAHASVGGCLTHCGSGSMIENLIFGHVLVMLPFLLDQALYSRVMEEKKVGIEIPRNEQDGSFTRSSVAKALRLAMVEEEGSAYRNNAKELGKKFSNKELDDQYIEDFIASLHNHKHT

SEQ ID NO: 58079 - protein, 211 aa, Glycine max
  Clone ID: 700873255_FLI.pep
RECRGKTCGSVRREMNKTEKWIEGDESGAEMLSRVSSVRPFLFPPPLHRVPLRVGNVLELVGPSPSAKTHILIHAAITSVLPKRHGGLDHLVLFLDLDSRFDVTRFSQLLIHRITLHGTDSYDKTLYDLCMARFLYVRCYDSFEFLHTLRTLHCRLEKEKEVHGVGVHLLMIDSIGAFHWMDRASMFLSQRENRKKKTFPSDCVRSCSSEY

SEQ ID NO: 58080 - protein, 597 aa, Glycine max
  Clone ID: 701001844_FLI.pep
TNNVPISGFKFPPATHSDSNMRTRLSSTRVIFVASLCFLASFELLQAKTIDPYKVLGVDKNASQREIQKAFHKLSLQYHPDKNKAKGAQEKFSQINNAYELLSDEEKRKNYDLYGDEKGNPGFHGGHPGGQDGYTYFTGGGPGQSHFNFKPGGDWQGMGGQGGSKSFSFSFGSSGNSNPFGFGLDDLFGSFFGGGGGGSQFGGFGSSAKSGSKSSAKSLRAVNSQIYKKEIQNAGMTWLLLSYIPSSKGIQYFESTTEEVASSLQGALKVGSINCEKEVSFCKELGIYPRRAPRLFVFSYKENEKGSLVEYSGDLDAKNLKAFCQEHLPRFSKRTDLNHLDQFSTTGKLPRVLLLSTKKDTPVIWRVLSGLYHKRITFSDAELHDVADPRVKTLEVDALPAIVGWLPNGEKRILKTGISVKDLKSAVLDLSNILDSFEKVSKKESSGQAKKAQTDSDEGRIPLLSKSNFEALCGEKTPVCIIGAFRSSKAREKLESILSLVSQKSLSRRPSQGSSSSRDSIFYVLLDAAKQKSFLKAFDKTDYKSSNNLLIAYKPRRGKYSVFMGEMTIEEAEKFISSVLSGDVPFRETSRKPVLEY

SEQ ID NO: 58081 - protein, 155 aa, Glycine max
  Clone ID: 700844448_FLI.pep
HHTATHRNIPFLRFESLDGMATSNGFVDGTSPESALIFLGSGCSSMVPNVMCLLQPSDPPCPVCVQSLSIPPERNPNYRSSFLFFHFFSLSRNFLKISICRCNTSLLIDYCGDANAGDRKYILIDVGKTFRETVLRWFVAHRIPRVDSVSSLFLI

SEQ ID NO: 58082 - protein, 90 aa, Glycine max
  Clone ID: 700898266_FLI.pep
IKIFLIETSNRIRQGQQITTKPHIPSSNKKEVSQTQKKKKKKTMLQCLELFSAVILTFLFQTKRKKKRKEKRKTENDRHKMQQQEAGADS

SEQ ID NO: 58083 - protein, 166 aa, Glycine max
  Clone ID: 700899163_FLI.pep
QKQSALRKVAFFLWLFFSQFSTMEKQKTVMGLILLLLLFASDVSAWTGEIHGRVVCDVCGDSSLGPEDHVLEGAEVAVLCITKSGEVLNYQAFTDAKGIYTVAETMPESDRWDACLARPISSFHEQCTQLGEGSIGVKFSYNHPSGHSHTVRTFVYRPTSVPTYCI

SEQ ID NO: 58084 - protein, 64 aa, Glycine max
  Clone ID: 701098779_FLI.pep
MAGPRIAHATLKGPSVVKEIIIGITLGLAAGGVWKMHHWNEQRKTRTFYDLLEKGEITVVAEEQ

SEQ ID NO: 58085 - protein, 166 aa, Glycine max
  Clone ID: 701098814_FLI.pep
KSISLSKILQVTLMSIMETMLNITRIIMLPQTLIHQVFPPLRHLRRILLLPYPMIIVYWMTSPRVTSLRDYLQWTTTRISHTPTYLPLKTLMWDLRLIQITAVPLIQITAVPLMICDAELSSGHPFPYESQVLLMSVFYTSAVSTLFLFYFQRACNSWLCCLHSKY

SEQ ID NO: 58086 - protein, 353 aa, Glycine max
  Clone ID: 701099574_FLI.pep
QILNAIESKMADSVSVDMEAISPPPEEHVVRTRHGCVSVAVYGDQDKPALITYPDLALNYVSCFQGLLFCPEACSLLLHNFCIYHISPPGHELGAAAIDPDDPILSADDLVDQIAEVLNYFGHSTVMCMGVTAGAYILTLFAMKYRHRVLGLILVSPLCKAPSWTEWLYNKVMSNLLYFYGMCGVVKEILLKRYFSKEVRGSDYLPESDIVQACQRSLDERQSLNVWRFLEAINGRYDISEGLRKLECRSLIFVGDMSCFHGEALHMTSKLDRRLSALVEVQACGSMVTEEQPHAMLIPMEYFLMGYGLYRPSKLSVSPRSPLSPSCISPELYSPESMGLKLKPIKTRISEEI

SEQ ID NO: 58087 - protein, 291 aa, Glycine max
  Clone ID: 701104101_FLI.pep
IHHSYMACSRIHFNLNLPFPSDAAPIPYTCHSPSRLSLSPLFTFTTPKIAYSSAPRRTCGAVCCQMTMEEKPLSENQMLVYVPPHPLIKHWVSVLRNEQTPCPIFRNAMAELGRLLMYEASRDWLPTVSGEIQSPMGVASVELIDPREPVAVIPILRAGLALAEHASSILPAIKTYHLGISRDEETLQPTIYLNKLPEKFPEGSKVFVVDPMLATGGTIVAAVSLLKERGVGNKQIKVISAVSAPPALQKLSEQFPGLHVYTGIIDPEVNEKGFIIPGLGDAGDRSFGTDT

SEQ ID NO: 58088 - protein, 346 aa, Glycine max
  Clone ID: 701106226_FLI.pep
LWRLCTFRFHHGTCSKVDYTRPSEDMPLMLVQLTRFCGGEGLAIGVAFSHPLVDGTAAIFFINRWAKLVRGEELDPNEVPFLDRTLLKFPEPSEPCVDLPEWKPVRFMPDNIAEQNKISAILLKLSSSQVEKLKKKANEQPSKEGVRPYSRFEAISSHIWRCASKAHHAHASDENHQPTVVTFSVDIRNRLNPPLPQNYFGNALAKTLTPKCSVGDILLNPLSYGAQKIRDAVYAVTYEYIRSHISYVLGQEQLDNIRAFFSGQGDLINEPYSGNPHNILITSWMSLPVYDADFGWGKPVHFGLAKVFREVRAHIIISPDGDGVLISMNFLTALMDLFKKFFYEDI

SEQ ID NO: 58089 - protein, 259 aa, Zea mays
  Clone ID: 700203232_FLI.pep
LICPYATRRRKRAAGDDLSSAVDMDVDADAQRATDKLKAVSEALGHEIRVFSSENFASQTSKLPSADHEEDDDFYELQPADYYNLISNRMGEHFKMLKTRKMREAELAAQRAKRTKTVMRVRFPDGYILEADFIPSERIHSLVDLLLKVLARPDLPFYLYTVPPKKRILDTSQDFYTAGFVPGANVHFSYDLPEDDLKAGPFLREEILSLDGLSLLLKPASQPDDSRMNSSSLQSDASQSVPVPTTTNKKPGRPKWLKR

SEQ ID NO: 58090 - protein, 206 aa, Zea mays
  Clone ID: 700044540_FLI.pep
GRQQSALNTGMDTIVSLSPQMLRQRQGHQSTASSSSSAWAITTARIGRHLSTASSCSSPRLLIKQRATAASAPAPAPAQKEKEVVFVAGATGRVGSRAVRELMKLGFRVRAAVRNAQRATSLVQKEKEQQLLELVECDLEKEPQEGIVSAIGNASLVVCSIGASEKEILDVTGPYRIDYMATSKLVQAATAAKQLVLGSSVLEKTS

SEQ ID NO: 58091 - protein, 163 aa, Zea mays
  Clone ID: 700550015_FLI.pep
IDFYHVLNCIKLTDIMFFYWQSNERELLSVGQTTMTGGQLEKYVNEGDNGDKILRAFITCFTCDEKFNQGNITTVIPPHEVSEEGELSKVDAAQLVEEIKAVLKGTNVARVRKDTESTKDPKVKVFRNMRRTFVSRDFFSWNNDYTQHSDKCVFADIFSFLQE

SEQ ID NO: 58092 - protein, 61 aa, Zea mays
  Clone ID: 700552257_FLI.pep
AFRNQFIASTVVKQGRAICSNHQRFTHSGQPATQTIPEELKKTNHPGMPYGLAHDWTQALL

SEQ ID NO: 58093 - protein, 332 aa, Zea mays
  Clone ID: 700404836_FLI.pep
QHQTPPVKSSRHIFSHRRAISPLKKAMSMAAAAAPAAASSTLLRASNFSIVRPVPSGVACCIRAVSGRRASVVRAAATGDRAAPAGALPAALLFDCDGVLVDTEKDGHRISFNETFAERELGVSWDVELYGELLRIGGGKERMTAYFNQTGWPAKSPKTDDKRKEFIASLHKRKTELFMALIEKKLLPLRPGVQRLIDEALRKAVKVAVCSTSNEKAVSAIVSYLLGPDRADKITIFAGDVVPHKKPDPAIYILAATTLGVDPQSCVVIEDSTIGLAAAKAAGMKCIVTKSGYTAEEDFETADAVFDCIGDPPEVRFDLDFCAKLLKKQYVS

SEQ ID NO: 58094 - protein, 206 aa, Zea mays
  Clone ID: 700440071_FLI.pep
RLLPRGVQPQLRFSASSPWLPAPSSSPWCRAGAPLEPPRCTQLLPPHSPADFSARPAQLFLPPCARISSAPWRTRPSPQLESLPLLASSCACRSSPGRGARPSAISTPELVLQLAPWRSASPPCPSAIGSPSSFNLAVGLVSVQAAIAPCRLSIFDPRLDVIMPCNACLVLDKTPELGPSSFRASARKPKNRVKTKLAARYSLSAR

SEQ ID NO: 58095 - protein, 171 aa, Zea mays
  Clone ID: 700616768_FLI.pep
LQATAMAASAAAPALLRRLFCSSIPASSSVLRATFCSSAGFGSSSPSSIFGDATEVANVPPLTTPNLFVSGLSRLTTDEKLQGAFAPFGRLLEAKVVTDRVSGRSKGFGFVRYATIEEAERARQEMNAKFLDGWVIFVDPAKPRQPKPAPQQDTGSSHAGFTTNKTVGWCG

SEQ ID NO: 58096 - protein, 131 aa, Zea mays
  Clone ID: 700620719_FLI.pep
VEIDALCSEIHSSVSADEPTTCITEAFFTLRTCIKYCLCGTTEYIVVLYGRSRSMLVRSDYGLGPDIISGGFFVSATLARMMPQFETGPQKWVVLGPTGLFRNALNAADMASRRRGRRLGKVRSRGVVGVE

SEQ ID NO: 58097 - protein, 178 aa, Zea mays
  Clone ID: 701165755_FLI.pep
LPPIALRAASPAFISSSSSCPSWLQSSVRPSSSICAALTRHRLPVRLHPRRRSHPVQAVCSSSSPRYHDFSMVATFSSPACCSLASAPCELLLTRPVCSSGLDGCQRRFFDLALTLNRCSTLCHVCYNIIVRYTHSRQFSLSFLGYYLVSSCASCTSCVRIKHQDFEEKKAPVHRPVK

SEQ ID NO: 58098 - protein, 144 aa, Zea mays
  Clone ID: 701174332_FLI.pep
RTYEMATSFYSNSKQQTSVAPIAEEADAHRLRTREQFARGAARSRRMDEIPAGPPVSGASERALPAQERSKQEAAGQEHHIPVFSNPDLGQQEQEEQPSSWPTPAAPPARAPMDDHSKTQAVKDRLKDKTAKVAAKAVRVLFGN

SEQ ID NO: 58099 - protein, 92 aa, Glycine max
  Clone ID: LIB3106-061-G2_FLI.pep
GGGLGGGYGGGAGGDSGLGGGYGGGAGSGGVGGLGGGSGLGGGIGGGIYKGIGIGGGIYKGIGFGGVGGGVGAIGGVGGVIGGFKHVEANKP

SEQ ID NO: 58100 - protein, 130 aa, Zea mays
  Clone ID: LIB84-016-D4_FLI.pep
TEIDQTNVKSSWEDYETHHENSECCLSRAAHLISVGKLLLLLVPHGVLVGADDGGEEERGGDPVLGDLVVDLGGDVLPQPRHYLLLEGRQRVHDRLHPHRRLPHVPPASPVVFLLGTGCSDHLTHAARRS

SEQ ID NO: 58101 - protein, 346 aa, Zea mays
  Clone ID: LIB84-017-A8_FLI.pep
SMPSTSTNPDDHLALVIVVVVVVYACVLATGVAIVVTSVHRLVDDTHTTCGCCGSVGELQPEPAALARGLQELLPGDHHLQQHEPAVLPERPEAHVRLAAAPDGRYRRRERLWLPLLLHRLLGVAAVRRVRALERGGGGLGLGLGLGVAVLEHVVSVHGALGAEPLGAEQQRRGGALLGAEARAPLHRGHGGRWLGPQQRVQRRVVLALLGLGRDVEPRQRAGRRERRRRGRRRRRQEGASVGLLLLLEMELAEDLREGRRVNGRLAAGVVHVAVPRRERLQQRRVLRQRLLEQPPQPAVRRGHRRSHHLLISGQHAPGLQVCNCKRKDVQNSFEVCDCQELDSDV

SEQ ID NO: 58102 - protein, 225 aa, Zea mays
  Clone ID: LIB84-017-H10_FLI.pep
EISEWSNAMLEKNVEELRESKERCFEKSLDCVRKLKTSFAKVGAYSSKEKFIRGDPEGIIDWIGEEAEAFEDILSDHGDICAFAGAWGVAAILEKAGCDHVKAVAQTETAFSTDDTKDPSAEATLVGGKFYSDVWVNGGREMTNKIIKKNEKETHDAQEEAKRAEEAAERARRIAELSLLPEPYDPQADPVMKEALDVMSVTNTIVDEVIDRLLNEATEKILKED

SEQ ID NO: 58103 - protein, 76 aa, Zea mays
  Clone ID: LIB84-027-F8_FLI.pep
EVDFYLKWHFTSWFEGGVMMHPNQSKKKLTVPSYIPIHPCAEELHVSTMLVTAEMAYLCTQRGGSEAELYYIYASL

SEQ ID NO: 58104 - protein, 96 aa, Zea mays
  Clone ID: LIB84-029-A2_FLI.pep
AKIQDKEGIPPDQQRLIFAGKQLEDGRTLADYNIQKESTLHLVLRLRGGIIEPSLQALARKYNQDKMICRKCYARLHPRAVNCRKKKCGHSNQICI

SEQ ID NO: 58105 - protein, 262 aa, Zea mays
  Clone ID: LIB83-004-D7_FLI.pep
PPAKGTEMKTVSLGASRPSTVNFRMPTRDNLVPIRVDVEVDGQRYRDAFTWNPRDPDSEIISFAKRTAKDLKLPANFVPQMLQSIQGQLAEFRSYEGQEMQIKEKIVPLKIDLRVNNTVIRDQFLWDIGNLDSDPEEFARTLCDDLNITDPEVGPAIAVSIREQLYEIASQSVSVMREKQMSKKGRRAPEFSSNSKAVNNAVDLFKYFGSKGSVIRKRKEWYLYEPVVDVVANDEDGKEEANNSSRPKKRADEEKAASLQSL

SEQ ID NO: 58106 - protein, 90 aa, Zea mays
  Clone ID: LIB83-008-A11_FLI.pep
FVLLRPHRHRLGGPAISLTGGNMTTSRRLADRKTAKFQKNITRRGSVPETTVKKGNDYPVGPLVLGFFIFVVIGSSLFQIIRTATSGGVA

SEQ ID NO: 58107 - protein, 78 aa, Zea mays
  Clone ID: LIB83-009-C8_FLI.pep
RTRRCHSPRVKSMSSPCPGAHRRASVIWANTPSQWSPSACHCSASHAEVGYPGSLDEGSEDQHDITRCLMNCVDRIRH

SEQ ID NO: 58108 - protein, 251 aa, Zea mays
  Clone ID: LIB83-011-D9_FLI.pep
LLFVSSVRRIVDESTKKAAAVDPVEPEKVLKAAGEVGAYVDCVLTTHHHWDHAGGNEKMRLQVPGIKVFGGSLDNVKGCTDQVENGMKLSLGKDIEILCLHTPCHTKGHISYYVTSKEGEDPAVFTGDTLFIAGCGKFFEGSAEQMYQSLIVTLGSLPKSTRVYCGHEYTVKNLKFMLTLEPENEKTKQKLEWAEKQREANQPTVPSTIGDEFEINTFMRVDLPEIQAKFSVNSPVEAMREVRKTKDNWRG

SEQ ID NO: 58109 - protein, 128 aa, Zea mays
  Clone ID: LIB83-012-A9_FLI.pep
GLARGAGPHYRGVRKRPWGRYAAEIRDPAKKSRVWLGTFDTPEDAARAYDAAAREYRGAKAKTNFSFPSCLPLAAADVGGACRSGNSSSTTTTVDSFGGDVQATLIFRVKLRTCGLNGSKLTLYGLYS

SEQ ID NO: 58110 - protein, 176 aa, Zea mays
  Clone ID: LIB83-012-F7_FLI.pep
AQARLAFQKLHLSATGLSIHRLRSNGEDERGCEQEAARRLELPVVPVRELLQARRVPALRRGQAGRGAHGLRGAGRRLGREARRLVLLPLRREQLRLPRQLLQVRRRQERVHGRRRAGLGVHRRRPGRNDARGLDLPKTGLQRAELRQPNRVLPVQYAQIILRLMGRGGRPGNYVH

SEQ ID NO: 58111 - protein, 438 aa, Zea mays
  Clone ID: LIB83-015-G9_FLI.pep
IYKTRKRKFDLQTAVRAAALIRIKPHRRAAVAHEEKETPSSHSRADVLAVREPRRRHGRAAAFLHLAQLVRYVTVEEPRRGVLGVADVVAADARLGQRHADAGHQVPDVEGQQRHGGRVVPVRRERPGPRQRHAQRAARHARQEAHGAGDVRVHQRRHPRQRLELAPRAPRRLHEPAPVRRDVDEGPAVAEAEDGVHDVEAAVRAGEHELVLALQQVEPARQDAERLDGGHEERAQAGAAEVVRQRAVEAELHARLHAAQVVERDHPARRQVRHVPHHLGGPRQADHQPQDGEPGEAEVHSSDHRHAPHGDPREARRHHQVRGAIQTVELIHRLHRALEHPRREAHTPRHPARVQPGADGEHHHRHAQPHSGQHREAHEQRAHGQGHTEAGPEDDAHHSARPRAHGLLPREGQHDAERHRALHGQQPVPQQAALSLRV

SEQ ID NO: 58112 - protein, 267 aa, Zea mays
  Clone ID: LIB83-015-H10_FLI.pep
SERERERERERERETGGGRMALLQSQSLPGIGCCSSSIVLARARVQQCLAAASHSQAPLLQANGGRAGLPSSSSILKAGNAISFSRRRRRDLRVVAEAATAGTAKVTPASSGGVSLSDVLWPSAGAFLAMAVLGKMDQMVAFKGVSLTIAPLGAVCCVLFSAPDSPAAKKYNMFVAQIACAAFGVLALSLFGPGWLARGAALSACIAFMTITGTSHPPAASLPLLFIDGPKFHSLQLWYALFPGAAGCIVLCLIQEVVVYLKKNFKF

SEQ ID NO: 58113 - protein, 46 aa, Zea mays
  Clone ID: LIB4073-003-F1_FLI.pep
PFNFETLPAFVRSDHEIAEASLVIPCLLLDMCLLVGATIYQLCYAV

SEQ ID NO: 58114 - protein, 295 aa, Zea mays
  Clone ID: LIB4073-015-B8_FLI.pep
GGFLKSTQSNHSLGRCGSRSLGSGRELRPPLGKALAPAFPLLLEPLCQQLLVLCGLSLLLCNPLLLLCDPGTLPLEDLWGHQALDLGGLAHLFATLGCECPAVCVDILAYIIILGKVEELPDLGCSLGPPHPGLLSVSQTWKVILTLLDNDQVNDRQVLADNATPDRLPPTLTIAPAIPTEARSAPVKQKANTSRSQHSLLHWETLLVTPTHDLKDIALEFLTKCITTDLLGDPFVKKDTQLLIVIDLELLLAPGGRVRDVELHGRERRAPLAPSGELQPGGVAAAAAAAARGAR

SEQ ID NO: 58115 - protein, 200 aa, Zea mays
  Clone ID: CC-ZMLE189061E08_FLI.pep
WTDHGALRLYTPISVRATAAPISFAPPRRGASASTAVPPHRRIPTRGWRCASAAVPGPVPSEEPASASYAVVVSDKPDTPADDKAEEVSAAPSGSAEAPMAELVPSEASPSPDDGGLDEILSKLNIEVSPTLILTGFGAFIALWILSSVVAAVDSVPLLPKLLELIGTAYTIWFIARYLLFKESRDDLFAKFEDLKQRII

SEQ ID NO: 58116 - protein, 183 aa, Zea mays subsp. mexicana; identical to SEQ ID NO: 44872
  Clone ID: UC-ZMROTEOSINTE013A10_FLI.pep

SEQ ID NO: 58117 - protein, 92 aa, Zea mays subsp. mexicana
  Clone ID: UC-ZMROTEOSINTE067G08_FLI.pep
SIMKGGKKEVAGAVVAILLVLQLMAAPPTAMAARSPRGAVPDGSLATTPKVTMLSATLCYTGETCKYIGCLTPACSCNYSDRLCYIIFTPVA

SEQ ID NO: 58118 - protein, 77 aa, Zea mays
  Clone ID: CC-ZMLE189044A09_FLI.pep
STLLLVVRGGKRRTVSATLAMASLPESGRRPRCELFLFLYEASQVKHASQECFLLTHSSYAFLARCSSPLAAQTCRT

SEQ ID NO: 58119 - protein, 136 aa, Zea mays
  Clone ID: CC-ZMLE189070A07_FLI.pep
PEDPSPAAGGGEGGGMMDDEERVGHAEIPTSFGPELRACLRCRLVKTYDQFRENGCENCPFLEMDREHDNVVNCTTPNFTGIISLMDPSRSWAARWLRIGRFIPGCYTLAVSEELPEEYQGICQDNNVQYVPPKRV

SEQ ID NO: 58120 - protein, 129 aa, Zea mays subsp. mexicana
  Clone ID: UC-ZMROTEOSINTE070F03_FLI.pep
APTPVLGEPMDLMTALQLVMKKSGAHDGLVKGLREAAKAIEKHAAQLCVLAEDCDQPDYVKLVKALCAEHNVHLVTVPSAKTLGEWAGLCKIDSEGKARKVVGCSCVVVKDYGEESEGLNIVQEYVKSH

SEQ ID NO: 58121 - protein, 46 aa, Zea mays subsp. mexicana
  Clone ID: UC-ZMROTEOSINTE003G06_FLI.pep
CFGLLMLGPYNCQLLSYNCCKHTIIVTMIWSFFCRQTFIASRLCSS

SEQ ID NO: 58122 - protein, 71 aa, Zea mays subsp. mexicana
  Clone ID: UC-ZMROTEOSINTE120G05_FLI.pep
KCGMQTSLTRSSSSQTSPSIMPCHAMLVQGPFSCVLSFNRRPFVLLLYCYCGTLLLLLLVYPIGNNQMWYG

SEQ ID NO: 58123 - protein, 147 aa, Zea mays
  Clone ID: UC-ZMFLMO17139F07_FLI.pep
PASNQEPGRCGDAGDEAKKKEAALASSRLLDPAFKPSKLSQDRLDKFKELHKKRLQITEKPKYKRKLKGTAGRSTKVTSDYKFTNTDASADSSPRDVHHTSSITGIQGPNCLLPRSPLSHKQTPKQKVKMKLLRWPKLLWTKLYLNC

SEQ ID NO: 58124 - protein, 40 aa, Zea mays
  Clone ID: UC-ZMFLB73044A04_FLI.pep
ANYIYVLLNKCMVSLKRIRFWEQGSIYNREKYPPLKSTPL

SEQ ID NO: 58125 - protein, 211 aa, Zea mays
  Clone ID: UC-ZMFLMO17334A08_FLI.pep
TIHPLRYIEQRSCVVYLQKVVVQIAGARPHRTQGKRATTRSEQVLEGGELELAGGGERDGEVADDGEVDGEPDLELVVDVPVPADVPDEGDEEVVGHLGGDLQRGGAAGGDPAGVRHGAGRHLLAGAPERVGHLADGEAVVVGVGHVHAAVQRDALPAQALERHAVQRRLGLGDVRDLLHNEPLRLVHQALLLVMLSLAPRRVLARHGSSL

SEQ ID NO: 58126 - protein, 143 aa, Zea mays
  Clone ID: UC-ZMFLMO17079D10_FLI.pep
CIAMDAKTTVTAARTVRAWEKGGKETTTRRGRVSASSFLRCGCGLPSALRNRRPPPLAQRQRICLPSCSLTGSSLRQPSSQPAWRPPASDSPAKPSCCGFYLVQIITPFPPIIFPLLEGPGRPPEPISSVHLSTGIHPTATGG

SEQ ID NO: 58127 - protein, 137 aa, Zea mays
  Clone ID: UC-ZMFLB73012H09_FLI.pep
MAADSGARRQPSFTKVDQLRPGTHGHNLILKVVDSKMVVQRGREGGPQGRQMRIAECLVGDETGIIVFTARNDQVDVIRPGTTVELRNAKIDMFKGSMRLAVDKWGIVKAAESSAEWTVKEDNNLSLIEFELVTVTE

SEQ ID NO: 58128 - protein, 166 aa, Zea mays
  Clone ID: UC-ZMROB73071D11_FLI.pep
LAIIEHACVLDNHKDQQTWPLHCPSISPDLAVVAPGLVAVEPVVDGGGVGLRPVEEVGAHALGGQVAPRVEDAAPHVAGAARRRRRRRRRRRHRRRRGRRHRLRPLVAAAVRVFVDDERAGGGGLAELLEARLRARPGHHVVPQLVQHLLIRSPLSTSQNHQDERI

SEQ ID NO: 58129 - protein, 55 aa, Zea mays
  Clone ID: UC-ZMROB73077E08_FLI.pep
LWRKSGTNSGVASCCCDHGTSVSRILRPCVCDATFLRSLTCTHLPTLHFPRITRR

SEQ ID NO: 58130 - protein, 141 aa, Zea mays subsp. mexicana
  Clone ID: UC-ZMFLTEOSINTE51B06_FLI.pep
TCLLGEECARLFKSNTMKVECLSGSPPMGISCVSKVPWTSPYHTLWRFMELLKTARPSVLKFAQILVPTLIPRFLMSCASWRVAGSSTCSCRDNHRMEDLQPTEACLKLICFAFKFKIWLHVRSLHGGPSVPCYSSVLDFY

SEQ ID NO: 58131 - protein, 206 aa, Zea mays subsp. mexicana
  Clone ID: UC-ZMFLTEOSINTE40B06_FLI.pep
QSGRHSAHQCSLTFPLPFLSYPCAVVPSNREPSHVVLRRPARGVVDRGGVHAVAAAVPGDPGAADGDAAAGRLVVLHVRRLHRGGVAAAELGAAGRAHRARPPHPLDLLRRLLRGLPGLLPEGEPLEGPLRAGPRRGQLALGRRLARPPPPRARQLPLHHPRHVGAVNGRMWVLLLFGSTDVRLCYLLLLDGSMIPCTYLLGGCCC

SEQ ID NO: 58132 - protein, 33 aa, Zea mays subsp. mexicana
  Clone ID: UC-ZMFLTEOSINTE109B07_FLI.pep
IQFPSFLTYVIHCVMELRNNKRICGKRWLQLNK

SEQ ID NO: 58133 - protein, 300 aa, Zea mays
  Clone ID: JC-ZMSHLIB3569P050F08_FLI.pep
KTLTGKTITLEVESSDTIDNVKAKIQDKEGIPPDQQRLIFAGKQLEDGRTLADYNIQKESTLHLVLRLRGGMQIFVKTLTGKTITLEVESSDTIDNVKAKIQDKEGIPPDQQRLIFAGKQLEDGRTLADYNIQKESTLHLVLRLRGGMQIFVKTLTGKTITLEVESSDTIDNVKAKIQDKEGIPPDQQRLIFAGKQLEDGRTLADYNIQKESTLHLVLRLRGGMQIFVKTLTGKTITLEVESSDTIDNVKAKIQDKEGIPPDQQRLIFAGKQLEDGRTLADYNIQKESTLHLVLRLRGGY

SEQ ID NO: 58134 - protein, 367 aa, Zea mays subsp. mexicana
  Clone ID: UC-ZMFLTEOSINTE088H11_FLI.pep
MAPIKEQKHTTSAEQQVMLDAELQLWNHTFGYVKSMALKAALDLGIPEAIHQHGGTATLPQIVTRVKLHPSKKPCLRRLMRVLTLTGVFGAQEAHDDDGGCDDELVYTLTPASRLLVGSPGQNVGPFLTVMLGPIFVSSFLDLRGWFQHETPDPSPFKMTHGRDIWELAAHDAAFGRLFDAGMVADSSFIMDVVVRECGGVFEGISSLVDVAGGLGGATQTIAKAFPNLECSVLDLPNVVASAPADTAVKYVPGDMFESVPSADAVFLKWIMHDWGDADCVKILKNCKKAIPAQGGKVIILDIVVGAGSSCDRKNVETQCLFDLFIMFINGAERDERQWKKIIFEAGFTSYKIIPVLGIRSIIEVCL

SEQ ID NO: 58135 - protein, 91 aa, Zea mays
  Clone ID: JC-ZMSHLIB3587P008D08_FLI.pep
AHRKAGVARRQGGSFSFILERRAAARLGWPYCSGCLVSVRLRHGVAKLERQATGSSNFFPTKRYAGDKYAFAVGIIGEGDSFSCTYTRQRC

SEQ ID NO: 58136 - protein, 332 aa, Zea mays subsp. mexicana
  Clone ID: UC-ZMFLTEOSINTE070C06_FLI.pep
RLPNSWNHQPPHFQSAFDDTQEVIPVVSSLNLQYQHPVNVSSVPPAANRFTGHGASSSRAGSLENRILGSQEAPRRNVVPANYSDLVPPSVVDPRRLLPEPSNWSSDVRGTAISGSIPPVSRANNSATVNPPAGFSHQNLTRRHPRNLSEEIGRLSGALRGHQPPRLRPGFLLERQGDGVWGVPLSTRGREGRRLMEIRNALEMIHRGENVRLESIFYGGVDIHDRHRDMRLDIDNMSYEELLALEERIGNVGTGLSEEAVIRLLKQRKFSSWTLKASLDPEPCCICQEEYADGDDLGRLDCGHDFHAGCIKQWLVVKNVCPICKSTALKKT

SEQ ID NO: 58137 - protein, 192 aa, Zea mays subsp. mexicana
  Clone ID: UC-ZMFLTEOSINTE115H11_FLI.pep
LGFVRTLVECKESRIGKQPIEVPPNVTLTLEEQFVKAKGPLGELSLSFPGDVKIVKEESGNLRVYKTAETKRANQMHGLFRTLTDNIIVGVSKGFDKKLQLVGVGYRAAVEGNDLVMNLGFSHPVRMAIPEGLAVKVEENTRITVSGYDKSAIGQFAATIKKWRPPEPYKGKGIRYMDEVVRRKEGKAGKKK

SEQ ID NO: 58138 - protein, 333 aa, Zea mays subsp. mexicana
  Clone ID: UC-ZMFLTEOSINTE47A09_FLI.pep
LASIVSLLSEAKRSFKLVSAALEDDGQGRRDRERRWRRRVRCQGLHGPSPGAADRRGGAGVLVAVPRRDRRVHRHAAVPVHHGGHRDRVQAPDGRVGVGRRRGVRRRGGAGHRLGLRRHDLRPRLLHRRHLGGPHQPRRHLRPLPGAQGLPGARAALHRGAVPRRHLRRRPRQGVPERLLRQVRRRRQLARLRLLPRHRPRRRDHRHLRARLHRLLRHRPQAQRPRLPRPGSGSPPHRLRRVHGAPGHHPRHRHRHQPGQEPGRRRHLQQGQALGRPLDLLGGPPRGRCHRGLLPPVHPPGWRHQGPRLLQEQRVMSGAWLWSNGGRPTGGGP

SEQ ID NO: 58139 - protein, 102 aa, Zea mays subsp. mexicana
  Clone ID: UC-ZMFLTEOSINTE120A05_FLI.pep
PETVSFYIHVGHIPNEHNLAKDEHLDPINVKIAELKEALESVTAEQKYLKAREARHRHTNESTRKRVMFYTMAEYLAFMAASALQVLYIRRLFSKNVGYNRV

SEQ ID NO: 58140 - protein, 97 aa, Zea mays
  Clone ID: LIB3059-047-F10_FLI.pep
DTTDELGCLMQHLDDADFVGHIKSIIVGSQLHVSLLLPIRPDQGVDLLCLDVIHLLDGSLDLLLVCLEVNNEDQSVVIFNLLHRPTTLKKARDPKYP

SEQ ID NO: 58141 - protein, 249 aa, Zea mays
  Clone ID: JC-ZMSHLIB3587P031G09_FLI.pep
KRGVTDIIYKPWIDETSFHTLHHTKFERTAVPDDPDDEDLHIFRMMPLAERHRSIRSGCGRLDHHAHACVIAEALRGGGLGGLGLLREAVEQCRQRLAHPVVAAEAVRVRRGDPLPAVGVLLRPLLQLLRHLQREDVALAGAPGAVAAHRAALAPEHPHPERTSVDGAPDAGLLQRLAARRLVHVLVVLPPALGEDEVVPVGRGHHEQLRLAVRVHAVRHAPGHQAVLAVVALPQPALPRHQDRSLLLS

SEQ ID NO: 58142 - protein, 287 aa, Zea mays
  Clone ID: UC-ZMFLB73201C02_FLI.pep
SLHNIANMQIILELTRCRGRNSRGGLHKCAPCTAMPNNKIVAANMEEKGAGGKAAVPHDELPRFTIFLIPNRREPPLDLVELVCLHHRISLGNGVPGSSPVVELAVVLVGVAVECAVQVPTPAVESRKSNPLPAGAAPVRPYLPPFGDRRHPLAGSGNISGLLHVHCLQLNLGNSYYRVAASNNRLHDGVAAVHDAVDRGGSQLGLILLRYHLLVALGAHVHGRRAAEEATVIDAEDGSLGGLAPSLLVLHGFLNSDETALFAIPLRRSPRGRRGGEGRGIAGNSVG

SEQ ID NO: 58143 - protein, 192 aa, Zea mays
  Clone ID: UC-ZMFLB73126A07_FLI.pep
KMKLYPCPRDMMAFSACNRPLPNLRAELTSSRGHPFPRVVHALADLPPWNVFHDPRLLLKTLLPLFDKSFILFCLEHRQYSTASSNFLFFERPADLVPLADLVHAICESTEGGEEDGGGAGPRGGDPAGEAHGRETARRRPVLHHRHLLDAGHPRLVPHQGLRHLRSRIRTPVRTLGGTRAPRGDQTSRGCR

SEQ ID NO: 58144 - protein, 181 aa, Zea mays
  Clone ID: UC-ZMFLB73204B11_FLI.pep
FRYVNKKFSNQYKATIGADFLTKEVQFEDRLFTLQIWDTAGQERFQSLGVAFYRGADCCVLVYDVNSMKSFDNLNNWREEFLIQASPSDPDNFPFVLLGNKVDVDGGNSRVVSEKKAKAWCASKGNIPYFETSAKDGTNVEDAFQCIVKNALKNEPEEELYVPDTVDVVGGNRAQRSSGCC

SEQ ID NO: 58145 - protein, 123 aa, Zea mays
  Clone ID: UC-ZMFLB73224A08_FLI.pep
SEYMFIQFYCSVTKEFTVQVCVTTVHSAIPQMIFLLPQRLFGGQRPAGRKRHRSKSNTDEHVDDEEGLLITLLLGRRRRRRRRTPPMDPIQRTHCCAPAAAAACATLGDAWRLTSLVKEVPST

SEQ ID NO: 58146 - protein, 109 aa, Zea mays
  Clone ID: UC-ZMFLB73192F04_FLI.pep
NLLLDISLLLPQPVQGAVCVALSTDKPRESKRCEVTIIQAIRIQVANVDLDRGMVLGSDDPVCGRALPGDIEVHSLTLLVLHGGSWGNYRKSNLQETEQNGGGVRSRRR

SEQ ID NO: 58147 - protein, 454 aa, Oryza sativa
  Clone ID: UC-OSROM202008A09_FLI.pep
PTAGLLLSPAPPKNCSTKMRHQQQDRRHQIEYEFFGPYGPAVLLLALPCVVLGLVYACNSEGCLQLSQLFQLPLSQWSLALLPGFPSNQPLYSHEAMAAVVAWFVLVLLLHVLLPGAEAQGVLLPTGRRLAYKLNAFKVFAVTYGTAALLSFGLGVLDLTWLASHFLPLTSAAIIFSSLLAVAVYAASFAPGRLLAHGGTSGVVPYDFWMGRELNPRLWGVDIKEFCELYPGMIGWGLLNLSFAYQQWVTLGRLTNSMLLVNAFELWYIVDGLVNERSILTTMDITTDGFGFMLAFGDLAWVPFTFCTQARYLADHPQQELSGLGLVGVIGVQLLGYRLFRGANGQKDAFRRDPGHPSVAHLQSMPTVRGTRLLISGYWGMARHINYLGDWLMGLAWCLPCGFGSVVPYFYSAYFASLLVHRERRDEAACRLKYGADWDKYCSLVPWRIVPYVY

SEQ ID NO: 58148 - protein, 91 aa, Oryza sativa
  Clone ID: UC-OSFLCYP006D11_FLI.pep
NAFLVSQPQDDNSTSSKPEQQATGPGQVATCDYWYGSEASLAVDVAQHPWWQPNANMLWLPCCYILYPFASCCRVVTDISCWKGFPHHEGG

SEQ ID NO: 58149 - protein, 310 aa, Triticum aestivum
  Clone ID: UC-TSFL189005H09_FLI.pep
ATDSSSSEDESAPPPLAPMPTTKEERRRERKKRRRVMEAGRRDDSGPPQPQATGARTPSVRYRGVRQRRWGKFASEIRDPIQGRRLWLGTFDTAEEAAAAYDAAKIRISGSRRPADGATGFPFSFPPPEPAKPTVLRLPMPQPAKPTILRLPMPQPAKQITSPPPPPPPPEPAKPAISPPPLPAKPFALPLKLRLKLSFNAQVKDKGWNWCSAGDVKEEEDGDCDGEAKVGDLSIAGEVKVEGGGCAGEVKVEGGGCADGSKEAGSSSEVKAVKPMWAMITGKRKKRSGCGTRVGALHASSVCVEEVGGT

SEQ ID NO: 58150 - protein, 172 aa, Oryza sativa nipponbare
  Clone ID: JC-OSROLIB3475060H01_FLI.pep
VREQQKGVVQDADPQHRRGEPPGGVPPGCTQGGVGRVHLHPHLRLRRPGLRHGLQQADRRRSDDPRRADRGGGGPRLRPVRGGVRRRQHLRRPREPGRDLRRLRRRQHHPVPRPPLLDRPAPGLHRGVLPPPTGTGGTERWGPHGQVIYLSNRATIIIIRSLSSLVLCGTTI

SEQ ID NO: 58151 - protein, 130 aa, Zea mays
  Clone ID: UC-ZMFLB73277A08_FLI.pep
GDYYRYLAEFKTGAERKDAAENTMVAYKAAQDIALAELAPTHPIRLGLALNFSVFYYEILNSPDRACSLAKQAFDEAISELDTLSEESYKDSTLIMQLLRDNLTLWTSDISEDPAEEIREAPKRDSSEGQ

SEQ ID NO: 58152 - protein, 167 aa, Zea mays subsp. mexicana
  Clone ID: UC-ZMFLTEOSINTE46C07_FLI.pep
NVSLKVAYYIAEALQYCNTEGRPLYHDLNSYRALFDEEEHYLLPVACKNVIGIRCASWRIVSSIEYREEGCVNMDCATLIEDYHNKIEVELNKICVGILKLFSHLPPSLIVSKSKVFYLKMKGDYYSSLRSLKLDLGEKMQPRIPWWHAKLLRYCFGVGSPILLGFG

SEQ ID NO: 58153 - protein, 347 aa, Oryza sativa
  Clone ID: UC-OSROM202001E02_FLI.pep
AMASKLGMVVLLISGLFAARCAAVVTTGEPVVAGLSWGFYDTSCPSVEGIVRWHVTEALRRDIGIAAGLVRIFFHDCFPQGCDASVLLTGSQSELGEIPNQTLRPSALKLIEDIRAAVHSACGAKVSCADITTLATRDAIVASGGPYFDVPLGRRDGLAPASSDKVGLLPAPFFDVPTLIQAFKDRNLDKTDLVALSGAHTIGLGHCGSFNDRFDGSKPIMDPVLVKKLQAKCAKDVPVNSVTQELDVRTPNAFDNKYYFDLIAKQGIFKSDQGLIEDAQTNRTAVRFALNQAAFFDQFARSMVKMSQMDVLTGNAGEIRNNCAAPNRRSSDLLNAADDDQGFAADA

SEQ ID NO: 58154 - protein, 263 aa, Oryza sativa
  Clone ID: UC-OSFLM202043D04_FLI.pep
LIRIGKKKKQGSMGSKSYPTVSDEYLAAVGKAKRKLRGLIAEKNCAPLMLRLAWHSAGTFDVSSRTGGPFGTMKNPGEQSHAANAGLDIAVRLLDPIKDQLPILSYADFYQLAGVVAVEVTGGPEVPFHPGRQDKPEPPPEGRLPDATQGSDHLRQVFSAQMGLSDKDIVALSGGHTLGRCHKERSGFEGAWTSNPLIFDNSYFTELVSGEKEGLLQLPSDKALMADPAFRPLVEKYAADEDAFFADYAEAHLKLSELGFAEE

SEQ ID NO: 58155 - protein, 395 aa, Zea mays
  Clone ID: JC-ZMSHLIB3587P012G09_FLI.pep
LTSRHHSRQYTAAGTGRVGVRRCCCRVRGDTTTHSQDSRAAGATELCVRGENRRRQQRREGARGRARRSSMGAGIRVLAALLAALAAATAGVTAQLRQDYYAAVCPDLESIVRAAVSKKVQAQPVAVGATIRLFFHDCFVEGCDASVILVSTGNNTAEKDHPSNLSLAGDGFDTVIQAKAAVDAVPACANQVSCADILALATRDVIELAGGPSYAVELGRLDGLVSMSTNVDGKLPPPSFNLDQLTSIFALNNLSQADMIALSAAHTVGFAHCSTFSDRIQPQSVDPTMNATYAEDLQAACPAGVDPNIALQLDPVTPQAFDNQYFANLVDGRGLFASDQVLFSDARSQPTVVAWAQNATAFEQAFVDAITRLGRVGVKTDPSLGDVRRDCAFLN

SEQ ID NO: 58156 - protein, 146 aa, Zea mays subsp. mexicana
  Clone ID: UC-ZMFLTEOSINTE107D01_FLI.pep
PGGYSARAVHPIALAKVMQIARMMKEEFADGQSLSAIGGVETGNDAAEFILLGADTVQVCTGVMIHGYPLVKKLCAELQDFMRQHNFSSIEEFRGASLPYFTTHTDLVHRQQEAVRQRKAIKKGLQSDKEWTGDGFVKETESMVSN

SEQ ID NO: 58157 - protein, 396 aa, Oryza sativa nipponbare
  Clone ID: JC-OSROLIB3475049G05_FLI.pep
SGGGVFRRRSGEAPAAPHPAHRVPDRLLRRVLGWHHVVVHPAACEQAVADGHTAARRAPLRHRLLHGCPGEQRQRCGGGELPALAAARSVPVQGGVWRGDTQRRRRADAPRQAVRRGEPVRELPAAAHRRAAAPGCGEAARVGLDRRGVRGADRGGAARRHRGARRLPGRVGAAHGGRVQEPLAVPGHPLRRRLPRLAGVPRPLPPRRPAAAPRRCAAAAAVHVERGRGGRRRDGAGAPAPLLDGVRARRALPLGRLRRPHRGGRRPRLPLGVGGHQPRLGRAPPRRRHVRPRLLHRRRRPRRPASRDAVRQGEGPHRPAARPALGPLPEAAAPPRRPVTPRRRKARRRRRGHALGDVTSAPDTCSSQKLPTTTLFSKLHSYTRINSRIWFFYFVL

SEQ ID NO: 58158 - protein, 188 aa, Zea mays subsp. mexicana
  Clone ID: UC-ZMROTEOSINTE098D01_FLI.pep
KTQETSTQDSDQLLYRRRHRKPSTSNRPYWIGCSTRDLNSLHLRLLLLRLGHGDREHAVLEASLDLIHLGVLRQAEAPDELAAAALDAVPLVVLVLLLPAALAADDQHVAVLDLDLDLFLLDAGEVGLEHVRLGRLLPVDAGAGEGGSLGVGGGRRRDDGAEHGVEGVPEVHGEGVEHVAAPHERHCR

SEQ ID NO: 58159 - protein, 224 aa, Zea mays
  Clone ID: JC-ZMXLIB3526088DF03_FLI.pep
PKPQSHRRDRERGFPSMAPGVASVLVPQEPVLLKDILASPSPCGNTAVSARHLFGNGVAPPRSSDDGIKDAAADRHGDRDLSIPKIFTGDVLDLLDDAARLDLMLALTGDGGAASMAGFSARGWWVSKEDGDAVQLKVPMPGLGKEHVKMRVEKDALVIKGEAGKDLEGDDDKGPARYSYRIGLSSQAFKMDQIKADMKNGVLRVTVPKIKDEERKDVFEIKIE

SEQ ID NO: 58160 - protein, 324 aa, Zea mays
  Clone ID: UC-ZMFLB73219F07_FLI.pep
TTWGAWAAARASSPSTWPATCSRPAALAWPWWSARRPSPSRGTPGSGAPCSSRTPSSGPAARRCCCPTGAATSTAPSTSWSTWCARTRARTTAPSAPCTRRRTSSGSRACPSAATCWRWAATRSRPTSPRWGPWCCPSPSSCSSSRACCSATCSRPRPPRRRRRPPQGTPRPPRPTSRTSSARSSTSACTRPAATCWSTCRATWACATPTWRPPAPRCTASATPQAAASGTSWRTWRPRAASAAATASGSSPSGRASSATARCGAPSAACAAPRAAPGWTASTSTRRAWTPSTYLQCNGCYLSIARFAIYQCSAALHRCMMDRI

SEQ ID NO: 58161 - protein, 250 aa, Zea mays
  Clone ID: UC-ZMFLB73219F09_FLI.pep
QILSCPLPPPPRGWVVSCPHLVFVLLLPIPVPAIRPPNYGGNGSATPQPRGAHGHAAPRPQVAAAAAPAPARLPCLSVPPASAASAARGLGRARDEGGGGQDGRRDNREVRARVRPLEGVQLQGGRGRRGEEVADGPGQGTPGQVRRRVPGHLHLALHRLLHSMLPPRQRRRRRAGPAREGRDRDRGNRREGRDLRVGLRRAQGRVADQVPADGGTDAGGGQLDWQDQEGRRLMRRHSSTLLTESCSLCK

SEQ ID NO: 58162 - protein, 139 aa, Zea mays
  Clone ID: UC-ZMFLB73219G09_FLI.pep
RGEQRRDRGCASATCCSTTTKVLLQGGKEHLPAPWGTDHQHPGGTPWGGSKGAEREETPWGLDELIRAEVEKRGREQEDGLGHQEGLQVVVSMAEGRGELSDGVEKGLEQRMGELDWGARGSGAKADARKGDAAALATG

SEQ ID NO: 58163 - protein, 399 aa, Zea mays
  Clone ID: 700580525_FLI.pep
VVFMYDDIAHSPENPRPGVIINHPQGGDVYAGVPKDYTGREVNVDNFFAVLLGNKTALRGGSGKVVDSGPNDHIFVFYSDHGGPGVLGMPTYPYLYGDDLVDVLKKKHAAGTYKSLVFYLEACESGSIFEGLLPNDINVYATTASNAEESSWGTYCPGEFPSPPPEYDTCLGDLYSVAWMEDSDFHNLRTESLKQQYNLVKDRTAVQDTFSYGSHVMQYGSLELNVKHLFSYIGTNPANDDNTFIEDNSLPSFSKAVNQRDADLVYFWQKYRKLADSSHEKNEARRELLEVMAHRSHVDSSVELIGSLLFGSEDGPRVLKAVRAAGEPLVDDWSCLKSTVRTFEAQCGSLAQYGMKHMRSFANICNAGILPEAVSKVAAQACTSIPSNPWSSIHKGFSA

SEQ ID NO: 58164 - protein, 234 aa, Glycine max
  Clone ID: 700902412_FLI.pep
KGGGRSEKRVRAVLLNKRKRTVVIGFSLDLNRLHLAFFSSVRFSHRSRAKYKFVSTQPRVPASMADGPASPGGGSHESGDHSPRSNVREQDRYLPIANISRIMKKALPANGKIAKDAKETVQECVSEFISFITSEASDKCQREKRKTINGDDLLWAMATLGFEDYMDPLKIYLTRYREMEGDTKGSAKGGDSSAKRDVQPSPNAQLAHQGSFSQNVTYPNSQGRHMMVPMQGPE

SEQ ID NO: 58165 - protein, 61 aa, Zea mays
  Clone ID: UC-ZMFLMO17319H06_FLI.pep
LKTNMSYRIRGALGGHFPLCPLSSPLHMALGLRRCILRHNHCVPFDNVVGQDRSRGGSLHI

SEQ ID NO: 58166 - protein, 301 aa, Zea mays
  Clone ID: UC-ZMFLMO17329C05_FLI.pep
SVAQGANAGQGVTGFDSVRESLKRSPLRTPHPPSTPFLTLSQSNIFSPELQRKFKAVDARKDGKESNVALSRLYSYEELGKKLGELRPAVGAKDGKEWFSLKELQGRIAKLAELEKQENQFSGSLWEIKNCIGNLNHKPENGAPRVNIHALLNLRGQPTPDYMSQPPQEELLEKYFHPDHMSSEEKMKLELQRVRDEFKMSENDCGSARVQIAQLTLKIKHLSAVLHKKDKHSRKGLQEMVQKRKKYMKYLRRTDWDSYCFVLSKLGLRDVPEYKAPDYKSKATTKAKSKKSKSKRRKIKA

SEQ ID NO: 58167 - protein, 164 aa, Zea mays
  Clone ID: UC-ZMFLMO17330C02_FLI.pep
QLHVHSNSCSQKLFVDLSKQMVNDLENSGRSFSGPSHGWEAGISLPEDLADLFEAIAGAIYVDSGNDKEVVWSAIRRLLEPLATPETMEPDPVSELKELCEHKHYPKPSYSPTRDSVAGVTRVVAQVTAAGTVYSGTGTGRNQDVAEVLAAKALLKKIKAAARG

SEQ ID NO: 58168 - protein, 306 aa, Zea mays
  Clone ID: UC-ZMFLMO17332H10_FLI.pep
GDARNPRPRGSSAEAQQGSGGGRRREPLRRGAVSARLPVPDHIRRPPYVGTAAVPEVCPDRQVHDGESIMRMLDACELAARVLHHAGAMVKPSVTTDEIDRAVHQMIVDAGAYPSPLGYGGFPKSVCTSVNECTCHGIPDSRELQDGDIINIDVTVYLNGYHGDTSRTYLCGEVDDATKQLVKVTEECMMRGISACRHGASFKEIGQRISEHAEKYGYGIDPFVGHGVGRMFHSEPIIWHTYDYEPGFMVAGQTFTIEPTLSMGSTQCVVWDDGWTAVAADGSLSAQFEHTVLVTTDGAEILTGFP

SEQ ID NO: 58169 - protein, 83 aa, Zea mays
  Clone ID: UC-ZMFLMO17340B06_FLI.pep
TIYMTIGHCRHSSLTVPCHHYLHELLLQALPKTPSPVWYLEAIEFGRRSITALAPTYVRMAPSKFQHLSMSNGNPCIEEVLLQ

SEQ ID NO: 58170 - protein, 254 aa, Zea mays
  Clone ID: UC-ZMFLMO17341D03_FLI.pep
EYTVANTTYSTKPTSIKGLKRGSGRESGGVLDAGGRQPHVALDELRDGEVAGLGGAGHDVEAGPLDPRGDGGAGAGVGVLPVVERVEREVPVPREPALGAHHVADVRLHEHHPGVGLPGPAEVRLRGRGRGPVAVAGLGLLLLQEEVGVGGDVAELEGEARGHVGVEAALRGDGVLLAGQRAACEERAVLEHGGGVAEDEVDGARDAAVAVELAQRVRVQRVLVPLEGAAVEDGEVRVAPQRHGLVLRRPRRVL

SEQ ID NO: 58171 - protein, 200 aa, Zea mays
  Clone ID: UC-ZMFLMO17342D02_FLI.pep
LSFPKAMRWWEKGLHPNMREVESAQDLADSLLSAGDKLVVVDFFSPGCGGCRALHPKIAQFAEKNPGVQFLQVNYETHKSMCYSLRVHVLPFFRFYRGAEGRVSSFSCTNATINKFKDALAKHGAERCSLGPARGLDESELMALAENRDLHFTYDKPGGLVPLAEAIAKEAAAPGGPWLPLPASLLGQGSADNSLLPSGR

SEQ ID NO: 58172 - protein, 337 aa, Zea mays
  Clone ID: UC-ZMFLMO17344G10_FLI.pep
EISPQTTPRQRPAMCPTKPDRPGQAAAGSGEKSWREEAVAACSLRLVDLDRGTNGWASPPGDLFHLRARGYFSSGGGKRGKAPSAADWLLRPAGVDWLRSHARLDHVLARDDNRVAAAFRRARLRKDPSAHFLLAVNLQVPGRPDAYSAVFYFAAEAPIPPDSLLGRFIHGDDAYRNARFKIANRIVKGPWIVRATVGNYAACLLGRALTCRYHKGDDYLEIDVDIGSSAIASAILHLALGAVTSSTIDMGFLVESQSEEELPERLFGAVRIAQMEMSAAKYVELPPDEAMPETAGRAGAGFRVSSAKVVNHSRQQDHAGGKVGRSMSCPERESGGK

SEQ ID NO: 58173 - protein, 468 aa, Zea mays
  Clone ID: UC-ZMROB73017E03_FLI.pep
PKTPSAPPSRAPSVQTATSVTDDVDDPAPAVADHHHSQAAAEAPAPATPPQHKVCVGFGRPETSDLTVVLYGKEGVAVSMSVHRDVLAQSSAFFARRLAADGQPCVEIHDCEDAEIYVETVGLMYCDDGANKHRLLKQSVPRVLRVMKAADALGFPACVRSCLDYLEAVPWAGEEEERRVVSSVRRLQCTDGAGVSPLLRRVASSDSGCLRPPADTFAHITEMVLASTDERGRRETKALVLSLLKDSTRGHVGGGADGSPPTPGISSSETLYGSCRGCLDRLRRLLAEASSEPAYSAAVARRIALEADNLVWLVEMLVASQRACDGFVALWSGQAELAASHAGAPAASRHAVSRVTARLFVGVGRGEMLPPRDARLRLLQVWLQPLIDDYAWLQRAGGSRPAAFDRRLVEDGIGQTILTLPLEDQRSLLLAWFGRFLKLGDDCPNLQRAFEVWWRRTFVRLILTRVIF

SEQ ID NO: 58174 - protein, 93 aa, Glycine max
  Clone ID: 700553723_FLI.pep
FFLAKSMADLQEKLDALKGLVGVLNNMDEGETHNNNATSSPNNSHSPAPMPGRNRSVGKYNNSGTQKIKGLSNQTGFTEGNANGAINFGNLHA

SEQ ID NO: 58175 - protein, 375 aa, Zea mays
  Clone ID: UC-ZMFLB73044F12_FLI.pep
GTMDSVRTGPYGQIFRPDNFVFGQSGAGNNWAKGHYTEGAELIDSVLDVVRKEAENCDCLQGFQVCHSLGGGTGSGMGTLLISKIREEYPDRMMLTFSVFPSPKVSDTVVEPYNATLSVHQLVENADECMVLDNEALYDICFRTLKLTTPSFGDLNHLISATMSGVTCCLRFPGQLNSDLRKLAVNLIPFPRLHFFMVGFAPLTSRGSQQYRALTVPELTQQMWDAKNMMCAADPRHGRYLTASAMFRGKMSTKEVDEQMINVQNKNSSYFVEWIPNNVKSSVCDIPPRGLSMASTFIGNSTSIQEMFRRVSEQFTAMFRRKAFLHWYTGEGMDEMEFTEAESNMNDLVSEYQQYQDATADEEAEYEDEEAIQDE

SEQ ID NO: 58176 - protein, 330 aa, Glycine max
  Clone ID: 700758287_FLI.pep
LKCFLSADPQALSTVCAELSEACKKHGFFLVVNHGVDSKLIAQAHKLIDDFFCMQLSQKQKAQRKIGEHCGYANSFIGRFSSKLPWKETLSFHYSADKSRKTVEDYFLNVMGEDFKQFGSVFQEYCEAMSKLSLGIMELLGMSLGVGRECFRDFFEGNESVMRLNYYPPCQKPELALGTGPHCDPTSLTILHQDQVEGLQVFVDGRWYSVAPKEDAFVVNIGDTFMALSNGMFKSCLHRAVVNNKIVRKSLAFFLCPNRDKVVTPPKDLISYENSRTYPDFTWPSLLEFTQKHYRSDTKTLDAFSRWLLEKNNPNRGAPTNVPWPTKSIN

SEQ ID NO: 58177 - protein, 105 aa, Zea mays
  Clone ID: UC-ZMFLMO17270H02_FLI.pep
MMIDNKYGQFLRSFNLLVCLVCSVTQKWADQTAYSLAGLQCLLTMTTGRAQKTPLLGILYPCPRRNDAIWSLMSILGGKQLRGCSLAALQQLPDLLNTLLPQYPP

SEQ ID NO: 58178 - protein, 402 aa, Zea mays
  Clone ID: UC-ZMFLB73125H12_FLI.pep
NTSFLVFILPKGGKSSFLGPDLSVSPLVPAMGNSSSSNRRPPGPSEPAEELSSYEAACRSDPELRTFDTTLQRRTSRAISTLAVGVEVRSMSLDSLREVTGCLLDMNQEVVRVILDCKKDIWKSPELFDLVEDYFESSLQTLDFCTALDKCLKRARDSQLLLHVALQRFDDEEDIDAAAAAPSARYARTLHELRQFKTAGDPFTDEFFAAFQAVYRQQLAMLEKLQQRKHRLDKKVKTIKAWRRVSSIIFATTFAAVLICSVVAAAIAAPPVAAALAAAAAVPLGSMGKWIDSLLKGYQDALRGQKEVVSTMQVGTFIAIKDLDSIRVLINRVELEISSMVDCVEFAERDEEAVKFGVEEIKKKLENFMKSVEDLGEQADRCSRDIRRARTVVLQRIIRHPN

SEQ ID NO: 58179 - protein, 138 aa, Zea mays
  Clone ID: UC-ZMFLB73257F04_FLI.pep
KPKPHASKRSLASPGSDSVGRSSTDNFSKESRHPKRESSSKAAKSDHVEQEPRTSNSNSNLLPSYMQFTESARAKASSSPKMSPDVQDSNPRKRHSLPMTDGKHDSSPRMQRSSSHAQQNVKSNGPAPHSASDRKWHI

SEQ ID NO: 58180 - protein, 87 aa, Zea mays
  Clone ID: UC-ZMFLMO17319A03_FLI.pep
EFKKQATRQASVCKQDQCYFDNPKAEIVLAMLIFISMNSATIQIQWLMARPVSTPAISPAVLCWIIAHTAASSSFNTHTWIHQGHRR

SEQ ID NO: 58181 - protein, 341 aa, Zea mays
  Clone ID: UC-ZMFLMO17314D09_FLI.pep
VVKIHGRSCAHVRRLVPSGGGGDVHVREPVHGHGVAGRPVQRRQPKAGAHGVRAPAGRGARGASAGGLVRPNVGAHGLLAGWRHGAARLCHGRLRLRLSRVRGRGRCAAGHAGRVHARRQWRAGLLRRQPRGRLQPPRAGGDLRRRRIHRASLVRRGRVRGGPERDVPRRAPSRGRRRVPERVRRVRAARVLLQRRLRVPGGVPADGLLAGVQDCVPALLQLRIRRSHLHIHLRRRPGLHRDILPRRHPKVRPLNSLALLFSHHCLIYWSLSSYTCNFSLSLERGRERETMKQDLALRFCQVCLDLWMGSWLVNVGLICRSSFLPCLPASLHYTTQPSVVL

SEQ ID NO: 58182 - protein, 158 aa, Zea mays
  Clone ID: UC-ZMFLB73095D02_FLI.pep
WCHHVTASKDFIPFMYCLMFSTSKLHLKLVLVPVICWALEHVARFLRRHFTSSSLYRTYLEQPCTWVETNTNAVQFLRSNAEILTGFLLILSLFSRQRNLMQTFMYWQLLKLMYHSPFTAAYHRAIWLKIGRTINPYIHRYTPFLHDPINAGMRWWFR

SEQ ID NO: 58183 - protein, 83 aa, Zea mays
  Clone ID: UC-ZMFLB73099B04_FLI.pep
TLHRQGGNLLIDMFRHCDNHLGEKQVNNPFFHKTPSGSARQPLQLTNDVTKMMQKHQLETPQFHQTRFSVLLNVPRSTEKCVT

SEQ ID NO: 58184 - protein, 150 aa, Zea mays
  Clone ID: UC-ZMFLMO17310C10_FLI.pep
DSRAKADQLGESILFWFCHTKGPYYFEDLVDMMYDKISESFNAYFEDNSIEEVAEQFLIIHEECLQNNYSSVEKLRNSHVPGNAVSQSRQIVGDDDDDSDSSDDGDDTSMADEEAGPEEMAVDRPRPPKPTPDADGWTVVPPRRGGRSKK

SEQ ID NO: 58185 - protein, 339 aa, Glycine max
  Clone ID: 700890673_FLI.pep
EGGFGCVYKGQQSDGTMIAVKQLSSKSKQGNREFVNEMGLISGLQHPNLVKLYGCCVEGNQLILIYEYMENNCLSRILFGRDPNKTKLDWPTRKKICLGIAKALAYLHEESRIKIIHRDVKASNVLLDKDFNAKVSDFGLAKLIEDEKTHISTRVAGTIGYMAPEYAMRGYLTDKADVYSFGVVALETVSGKSNTNFRPNEDFVYLLDWAYVLQERGSLLELVDPNLGSEYLTEEAMVVLNVALLCTNASPTLRPTMSQVVSMLEGWTDIQDLLSDPGYSAISSSSKHKSIRSHFWQTPSGTHSISIPSIYTDSSGSHVETEKNYHPVTVNSDGSDKSN

SEQ ID NO: 58186 - protein, 530 aa, Zea mays
  Clone ID: UC-ZMROB73024G06_FLI.pep
RLYRGRGGAETEPHTDTPHLRYARAGRVMDLALLEKALLGLFAAAVLAIAVAKLTGRRYRLPPGPRGAPVVGNWLQVGDDLNHRNLMALARRFGDIFLLRMGVRNLVVVSTPELAKEVLHTQGVEFGSRTRNVVFDIFTGEGQDMVFTVYGEHWRKMRRIMTVPFFTGKVVARNRAGWEEEARLVVEDVARDPAAAAAGVVLRRRLQRMMYNDMFRIMFDRRFDSDDDPLFNKLKALNAERSRLSQSFDYNYGDFIPVLRPFLRGYLNRCHDLKTRRMKVFEDSFVQERKKVMAETGEIRCAMDHILEAERKGEINHDNVLYIVENINVAAIETTLWSIEWGIAELVNHPAIQSKLREELGSVLGGAGVPVTEPDLERLPYLQAVVKETLRLRMAIPLLVPHMNLNDGKLAGYDIPAESKILVNAWFLANDPKRWVRPDEFRPERFLEEDKSVEAHGNDFRFVPFGVGRRSCPGIILALPIIGITLASLVQNFQLLPPPGLDKIDTTEKPGQFSNQIAKHATIVCKPLKA

SEQ ID NO: 58187 - protein, 41 aa, Zea mays
  Clone ID: 700201132_FLI.pep
IHSLINYITKVSSIVIISGRSTPQATRSVAQGLIHVTLYKS

SEQ ID NO: 58188 - protein, 410 aa, Zea mays
  Clone ID: 700203861_FLI.pep
RSVPIIFCSILYFLPPPGASIHSPVGLMSAAPCADDRATDTSRLESRGGPAPPAATTMRIMARTLRGDRVALDVDGANTVAQLKSMIMAREGVAAGDQRLFFAGRHLDDDGMPVAHYGVRHGSVVFVSLRLRADDASQSQQEQEMRNVQTQPVRTVSQLLMIDQQPMMRFEDGDGHGHEEAVVKATTTRPPVSRRSLRKILSRLHVDVWTAQHDAKFLDLLQRRTRGCGVGVGDLTADDWSAIRAELNAATGSAFPVEDLQRRLGELRREFDAVSRIKDHPRFTYDARRHVVVAKETEWKRYVLVRADSCCPLITRAARITNSPGYGLLLLVTILISAAVSGEPGCGGVRGEKHALRSPPGDLLRQRRRDARARRAHTPRVTGQEMPEQAAAQLWAPVQAVRTVTLILVC

SEQ ID NO: 58189 - protein, 136 aa, Zea mays
  Clone ID: LIB84-001-H7_FLI.pep
STPSNFDCDYAYALGRISLHMIAVGLTGYMTTVANLKDPVDKWRCAAAPLIAMMIVMRHLHGPGAIPIGRPSIHPSPIDLKGKAYELLREKASSFLLDDFYRTPGGIQFEGPGSDAKPITLTIENQDYMGDIEILK

SEQ ID NO: 58190 - protein, 153 aa, Zea mays
  Clone ID: LIB84-003-F6_FLI.pep
LIWNRSSWTDLFAAVSCLFPPSRPTLGSRLPSCVVLRREGRRRRPQEQLLELPLQVLQALPLAVVGGRACLAHGLENVSEDLPGAVIVAFAVVGPDVIQDPLVGVRQDWPGQLKTTSPNKCKLQNILGRRLRVRTYMTILLKRATQPTSKSNA

SEQ ID NO: 58191 - protein, 162 aa, Zea mays
  Clone ID: LIB84-004-C2_FLI.pep
LGLSGPHRSVPPVPVVVAVAAAAVCTTVSPTAAVASTTTAVASTATAVAASITAPATVSATAASTAAAGLGLVNGDVAAVELLAVHALDGAAHRVLRGEGDEAEAAGPLRLPIQDDLRLEDLAVGAEGVVEGVVVGGPGEAANEATVLNVRRRHLFPLAHEP

SEQ ID NO: 58192 - protein, 216 aa, Zea mays
  Clone ID: LIB84-008-G9_FLI.pep
KKEFSTSPLSLSRSWLVSGWECAGLAARVSASPSPAGHGRSGTPSGARPESASRGARSERMKSSLRKLRGFALQRQEQRVDRDRGRGHAAAAATAADELLAAAQDMADMRSCYDNLLSVAAAIANSAYEFSEALQEMGTCLLKRVTPNKDGINDKVLLLLGKSQFELRKLLDSYRVHVLNTITTPSLSLLNELQTVEEMKHQCDEKKELYEFMVNA

SEQ ID NO: 58193 - protein, 298 aa, Zea mays
  Clone ID: LIB84-010-C4_FLI.pep
RDDFSSRAEVGFRRPWPSPDSAAARTAGLQPAGGSDGQHRRRRRGVRAGERLGPRHRRGRRQRQRVPFQGRQEQQWHRHPPALRHLRLPGLRHAGLRLPRRLQWLQCPSSGLVPWEPVEAERPVRRRQLRAVAGGAGPGPGVRRHRRVHEVAGGRVQGRGGVQEAGRDRVLLRRRAPRGDAGARRRELLQRGGLLLRVPDGRVPGRPRRGARPVRVRRRRPAVPRGDGAGAGGARERRPGGGVRRQGPRVRAPAAVGGGGRRRRGRVQRDAGVAARPPARLIGRSDAVHGFGCFVHTY

SEQ ID NO: 58194 - protein, 116 aa, Zea mays
  Clone ID: LIB3066-032-H12_FLI.pep
DRHHLEAAASAPLRPTLERDCPDDHLVVDGSQRSADEGADPEDPVVSPGMVLVVNHGGAKAPRGVDAGAGDRDGGQVDEEHGKPDWKRGEDRHMGVPGVPLGVGGGEDGVDEDEGA

SEQ ID NO: 58195 - protein, 41 aa, Zea mays
  Clone ID: LIB3068-009-D7_FLI.pep
RSLLMTQHQASVLPLSRDLPRVAPAIVLCVSVLKYCVVYNT

SEQ ID NO: 58196 - protein, 238 aa, Zea mays
  Clone ID: LIB3075-041-F5_FLI.pep
IKLRAIHDKLRPPLRSPPSYSDPKERTQGESTMTEGGRPNRPDQRDLGELSAVSDLDHLGGGAVAGAHLLDGLDDVHALDDLAEDDVLAVEPRGRDGADEELGAVGVGPGVGHGEHTGGGVLAHELLVGELLAVDGLAAGAVAAGEVAALAHELGDDAVEGGALVVERLPGLAHALLARAQRAEVLRGLGHLVGVQLHHDPARRGAADGHVEEDARVRHRDRELGFGDIFPSLYECDP

SEQ ID NO: 58197 - protein, 199 aa, Zea mays
  Clone ID: LIB3180-008-A11_FLI.pep
KMQLLTLRTPSCEQKEPNRSKDSTSRDTEERPNNVDDNNGRSSPLAPDAARELDVLGHDGDALGVDGAEVGVLEEPHEVGLGGLLQRGDSGGLEAEVGLEILRDLTDEALEGQLADEQLRALLVLANLPERDGAGAEAVRLLHATGCRRRLARRLGGQLLAGRLAARRLARRLLRAGHRRFGAWREDGRAEPAVDLGKS

SEQ ID NO: 58198 - protein, 68 aa, Zea mays
  Clone ID: LIB3179-021-G4_FLI.pep
STTSTTPSPTTPGSTPPSSHQGLKLATGPRRARTLCCTLLVSVVICTMNECKYSCALPEGTNWTSFAL

SEQ ID NO: 58199 - protein, 150 aa, Zea mays
  Clone ID: LIB3332-005-C5_FLI.pep
DDVCRQCSCSSSSSFPAAARAWWVSVSSSRRPVRGAIIMAAVETVVLKVAMSCEGCAGAVRRVLSKMEGVETFDIDLKEQKVTVKGNVKPEDVFQTVSKSGKRTSYWEGEATAPDAAAASGAEAAPGTAAEAPPAAAPAAPEITPAKADA

SEQ ID NO: 58200 - protein, 64 aa, Zea mays
  Clone ID: LIB3595-049-D11_FLI.pep
RVRRNPVGVGDLLHGEDALHAGSRRIATLLRRSLRGARCRRFRGFDLKFGRNFSGRTWFGGREE

SEQ ID NO: 58201 - protein, 208 aa, Zea mays
  Clone ID: LIB36-015-D12_FLI.pep
ENFDPVQIAQAYEKNGAACLSVLTDEKYFQGSFYNLEAIRNAGVQCPLLCKEFIIDAWQLYYARSKGADAVLLIAAVLPDRDIKYMLKICKILGMAALVEVHDEREMDRVLGIDGVQLIGINNRNLETFEVDITNTKKLLEGERGQVIAQKDVIVVGESALFTPDDISFVQNAGVKAVLVGESLIKQEDPGKAIAGLFGKDISHAGAT

SEQ ID NO: 58202 - protein, 85 aa, Zea mays
  Clone ID: LIB36-019-G12_FLI.pep
RRKRKAWWSSPRAHSSGLLANYFLRRSSFPSQKNKARVPSVDFDVHFPADGVQPTVVAGEHVVFRLVMFYYCFDTRCISVYRVRL

SEQ ID NO: 58203 - protein, 227 aa, Zea mays
  Clone ID: LIB3607-004-G3_FLI.pep
PKQGVDLSAAAMSKLQSESVKDAISQIVGDAKEKNRKFTETVELQIGLKNYDPQKDKRFSGSVKLPHIPRPKMKVCMLGDAQHVEEAEKMGLDYMDVEALKKMNKNKKLVKRLAKKYHAFLASEAIIKQIPRLLGPGLNKAGKFPTLVTHQESLESKVNETKATVKFQLKKVLCMGVAVGNLAMEEKQIQQNIQMSVNFLVSLLKKNWQNVRCLYVKSTMGKPYRVF

SEQ ID NO: 58204 - protein, 243 aa, Zea mays
  Clone ID: LIB3689-213-H10_FLI.pep
FDFSRRRCSSHIPREDACSSPIDTMAVFSDLHTADGLKSLEAHLAGKTYVSGDSITKDDIKVFAAVPSKPGAEFPNAARWYETVSAAVASRFPGKAVGVNLPAGSAPAAAAPADEAEDDDDLDLFGDETEEDKKAADERAAAAKASSKKKESGKSSVLMDVKPWDDETDMKKLEEAVRSVQMEGLTWGASKLVPVGYGIKKMTIMLTIVDDLVSIDTLIEDHLTQEPINEYVQSCDIVAFNKI

SEQ ID NO: 58205 - protein, 93 aa, Zea mays
  Clone ID: LIB83-005-E7_FLI.pep
PVPRAFPHLLSRLSPASLGFRSRRAYPPPPAMSKQGGKAKPLKAPKADKKEYDETDLAYLQKKKDEEKALKELKAKAQKGAIGGSGLKKSGKK

SEQ ID NO: 58206 - protein, 132 aa, Zea mays
  Clone ID: LIB83-001-B5_FLI.pep
LIRGGRTLARHHAPNGRPPHHHAGLVPARPRLAAQASHLLPGGPLVLPLPSHRQFQKQEAATSLSPHRRCRCRRGRGRRGATRWKCERGRRGGSGGNGLSYPIARIRATYPAQSLSCLYNRKLRSSNLKWLC

SEQ ID NO: 58207 - protein, 161 aa, Zea mays
  Clone ID: LIB83-001-D4_FLI.pep
NRKLPREGRVVRDAAAKTKGGLFLFSPLLLWSLQQRHCSARLLRCACACDRLVEEGEECLFLGGAGAEGAREKEVKRAASHSHGAVRVPSGAGGRRRRRRCEEGVPGGAAGAAVPVLHLPALRGHAHLLAQVQEDLTSPRPLACNIILSCSEPRYPPSCTF

SEQ ID NO: 58208 - protein, 69 aa, Zea mays
  Clone ID: LIB83-008-D3_FLI.pep
LRRWFQVGLPIHQVGPLPGRLLSPAIFLPCYLFWLVFRHVNDDHHIMTVSWRGMKRKKQCLTLGNMLNL

SEQ ID NO: 58209 - protein, 175 aa, Zea mays
  Clone ID: LIB83-013-B4_FLI.pep
SGLVVLWTTFLPSSTTPSPQPTTALRNPPATASPRNRAEPRRHQIVWPRRSSRVWKNQGRDRQKRRTSSRQAVVAKSSASAAGVSTMITRSKLVEQLRDYQIRSQHKRDVIGAISWGLLCCFLIISSYMTLYFRHFWLSAIIISLGILLPAGLYILRQRKLAKKRERRLLLPLSV

SEQ ID NO: 58210 - protein, 83 aa, Zea mays
  Clone ID: LIB84-029-E3_FLI.pep
LLLAALVHLLALCIYIAAAELGAWIVRGETWMAFGVGAACFARAIWSCRKWKLCCTLRNLMKPLYNSTVPLSIPCVYLRTISE

SEQ ID NO: 58211 - protein, 208 aa, Zea mays
  Clone ID: LIB3356-023-H2_FLI.pep
AGRVAASLALAANLHGEVGVQQFLDHLLHVLLLQGPTAAAPLRGRRRRRRRGRGGCCCCRRRRRRLSLPLRGLHGRQVEPVQLVDERRGEERRRRAVGVGGEVGARAGPAHDPRRLVVGARRVLRRLEGAQPYPRLQERVADLGDPGAPVALPHAAVPLLRPGHRRLRSSSTVAAVQLPGRPAMEPRTRARARARWRGAGAAQRQGSV

SEQ ID NO: 58212 - protein, 111 aa, Triticum aestivum
  Clone ID: LIB103-025-B8_FLI.pep
GLHTQQFSGKTGLYSVAKPSMDGPYGSGEIQSAHSLSQLRRKLGKIGAFGLPPFVAAGASHALEPPVPGRVLRATCDWKKRVRLSFSTCDHLPACRRCRFHGFKLIQFILE

SEQ ID NO: 58213 - protein, 188 aa, Sorghum bicolor
  Clone ID: LIB3476-053-E3_FLI.pep
DIFQEVYEAGWKSKFEAAGIWYEHRLIDDMVAYALKSEGGYVWACKNYDGDVQSDFLAQGFGSLGLMTSVLVCPDGKTIEAEAAHGTVTRHFRVHQKGGETSTNSIASIFAWTRGLAHRAKLDDNARLLDFALKLEAACVGTVESGKMTKDLALLVHGSASVTRSHYLNTEEFIDAVATELRSRLGAN

SEQ ID NO: 58214 - protein, 161 aa, Zea mays
  Clone ID: LIB3060-005-C4_FLI.pep
KICDGILKLLESHLVPSSTAPESKVFYLKMKGDYYRYLAEFKTGAERKDAAENTMVAYKAAQDIALAELAPTHPIRLGLALNFSVFYYEILNSPDRACSLAKQAFDEAISELDTLSEESYKDSTLIMQLLRDNLTLWTSDISEDPAEEIREAPKHDSSEGQ

SEQ ID NO: 58215 - protein, 130 aa, Zea mays
  Clone ID: LIB3062-057-B12_FLI.pep
MVSPTSCLLHWTILCQYEMLNDEIARKGKSNRGRKAKNAPRRSKITSIVCPECQGTGIHVNGDELEKPSISLSEMFRFKMKAIEAHKAWLKRPEVLENCSTGLHFPSEHVENSEEKVMPLKSLPFYAADG

SEQ ID NO: 58216 - protein, 145 aa, Zea mays; identical to SEQ ID NO: 53346
  Clone ID: LIB3227-010-E12_FLI.pep

SEQ ID NO: 58217 - protein, 123 aa, Zea mays
  Clone ID: LIB3227-018-F4_FLI.pep
SVTGRKMTDKIYYWHTGYVGHLKERRLKDQMEKDPTEVIRKAVLRMLPRNKLRDDRDRKLRIFSGIEHPFHDRPLEAFVMPPRQVREMRPRARRAMLRAQKKEHSNRAKEEEDAKNATAQVTA

SEQ ID NO: 58218 - protein, 65 aa, Zea mays
  Clone ID: LIB3228-008-F2_FLI.pep
SSSNGKRNINRGALFHKDHNVKCNFKHSSVQEVNKTCALERCRPTNYYASSVNFSQRKKRPISPV

SEQ ID NO: 58219 - protein, 129 aa, Zea mays
  Clone ID: LIB3245-170-A6_FLI.pep
DYYRYLAEFKTGAERKDAAENTMVAYKAAQDIALAELAPTHPIRLGLALNFSVFYYEILNSPDRACSLAKQAFDEAISELDTLSEESYKDSTLIMQLLRDNLTLWTSDISEDPAEEIREAPKRDSSEGQ

SEQ ID NO: 58220 - protein, 81 aa, Zea mays
  Clone ID: LIB3597-043-F3_FLI.pep
SVVRQMLTRTNWNHDQGILPSVHAETISSFFLCIICHVKSRHLPLKSLWSSQTSTSTERLMDASCLYYCYINVHLLNFISY

SEQ ID NO: 58221 - protein, 67 aa, Zea mays
  Clone ID: LIB3632-045-H1_FLI.pep
HILTCRVLKSSFVVAEASTLKSGSTGGSVSPRCFPERKWVNIGMLLNEPVFACVLLNIEHCQRMQSE

SEQ ID NO: 58222 - protein, 109 aa, Zea mays
  Clone ID: LIB3637-233-H2_FLI.pep
SVCLIKNSGNGNGRQLQRTRTGAVTKRTTRGVLEDKLSEIKNGTVLVNSPTSADTHQVGRSDPSYWPSGADSLGAAAASLISSPASSLVSEVHRVKLSRRSCMIRVLSL

SEQ ID NO: 58223 - protein, 198 aa, Zea mays
  Clone ID: LIB3957-024-A10_FLI.pep
GRASWRIVSSIEHKEETRGAAGHAAAARGYRARVEAELSGICAGILRLLDERLVPAAAAVDARVFYLKMKGDYHRYLAEFKTGAERKDAADSTLAAYQAAQDIAVKELPPTHPIRLGLALNFSVFYYEILSSPDRACSLAKQAFDEAISELDSLGEESYKDSTLIMQLLRDNLTLWTSDMQEDGGDEMRDANKPDEEQ

SEQ ID NO: 58224 - protein, 215 aa, Zea mays; identical to SEQ ID NO: 51863
  Clone ID: LIB3960-019-F10_FLI.pep

SEQ ID NO: 58225 - protein, 166 aa, Zea mays
  Clone ID: LIB3060-106-C2_FLI.pep
TELARICDGILALLDSHLVPSAGGAESKVFYLKMKGDYHRYLAEFKSGAERKDAAESTMNAYKAAQDIALADLAPTHPIRLGLALNFSVFYYEILNSPDRACNLAKQAFDEAISELDSLGEESYKDSTLIMQLLRDNLTLWTSDTNEDGGDEIKDAAAPKESAEGQ

SEQ ID NO: 58226 - protein, 270 aa, Zea mays
  Clone ID: LIB3912-044-G1_FLI.pep
RSPSPTGYHQHAPPPPLISSPRCFPARPRIGAAAPRSSPPKSTPPSSGSTQSRRGSTCCRHRLRAVVRIERHPPQAFRAGAVREVRRLRRGHKLGGVELRGERAGGGCLALVVWWEGEENLDSEKYEELIEFMEKVAKTVDSEEHYVLSIAYKIVMEPNVLHGASYPPLSRGKKAVSTWTVSLSLRTTITRLKLNSARSVMESSSSLIPTVSASLTAAESKVFYLKMKGDYYGYLAEFETGSRRKDAARIPWILLWRNWPPPILLGFGWC

SEQ ID NO: 58227 - protein, 347 aa, Oryza sativa nipponbare; identical to SEQ ID NO: 58153
  Clone ID: LIB3431-025-E6_FLI.pep

SEQ ID NO: 58228 - protein, 351 aa, Zea mays
  Clone ID: LIB3912-020-B6_FLI.pep
EGRPELAARPRARARARTAMARAGGGGPVRGAALVVVLLGIVVGAARAQLRQNYYGSSCPSAESTVRSVISQRLQQSFAVGPGTLRLFFHDCFVRGCDASVMLMAPNGDDESHSGADATLSPDAVDAINKAKAAVEALPGCAGKVSCADILAMAARDVVSLLGGPSYGVELGRLDGKTFNRAIVKHVLPGPGFNLDQLNALFAQNGLTQTDMIALSGAHTIGVTHCDKFVRRIYTFKQRLAWNPPMNLDFLRSLRRVCPLSYSPTAFAMLDVTTPRVFDNAYFNNLRYNKGLLASDQVLFTDRRSRPTVNLFAANATAFYEAFVAAMAKLGRIGLKTGADGEIRRVCTAVN

SEQ ID NO: 58229 - protein, 333 aa, Zea mays
  Clone ID: LIB3592-035-C3_FLI.pep
AAMAVEKTLPGASAGRTVLVTGGAGYIGSHAVLQLLLAGFRAVVIDNLNNSSELAVRRVAALAGDHSRNLSFHKIDLRDKGALEMVFASTRFEAVIHFAGLKAVGESVQKPLLYYDNNVIGTINLLEVMSVHGCKKLVFSSSAAVYGSPKNSPCTENFPLTPNNPYGKTKLVVEDICRDIYRSDPEWKIILLRYFNPVGAHPSGYLGEDPRGIPNNLMPYVQQVAVGRRPALTVLGNDYATRDGTGVRDYIHVVDLADGHIAALQKLFENSSIGCEAYNLGTGRGTSVLEIVKAFEKASGKKIPLIFGERRPGDAEILFSETTKAERELNWKA

SEQ ID NO: 58230 - protein, 494 aa, Zea mays
  Clone ID: LIB3060-106-B1_FLI.pep
SRRREAPRWRGEGAQQSCLASLQIPKALARGAMAERLAASLLPAASPSPSARRATVAAAAAASFPSPCSARAGLRLRSRPPLFSQKAAGRGCGLRVVRCMAASDAAQLKAAREDIKELLKSTYCHPIMVRLGWHDSGTYDKDIKDWPQRGGANGSLRFDAELSHGANAGLINALKLIQPIKDKYPGITYADLFQLASATAIEEAGGPKLPMKYGRVDVTAAEQCPPEGRLPDAGPRDPAEHLREVFYRMGLDDKEIVALSGAHTLGRARPDRSGWGKLETKYTKDGPGEPGGQSWTVEWLKFDNSYFKEMKLFFLNEIQDMKFLSQLPWKEQKEQDLLVLPTDAALFEDPSFKVYAEKYADDQEAFFKDYGEAHAKLSDLGAKFDPPEGFSLDDDTSSSPSDEKTEEPTLVAVGAAVATATADDNNGAAPQPEPFVAAKYSYGKRELSDAMKQKIRAEYEGFGGSPDKPMQSNYFLNIMILIAGLAFLTSLLGN

SEQ ID NO: 58231 - protein, 471 aa, Zea mays
  Clone ID: LIB3060-062-E11_FLI.pep
GAQQSCLASLQIPKALARGAMAERLAASLLPAASPSPSARRATVAAAAAASFPSPCSARAGLRLRSRPPLFSQKAAGRGCGLRVVRCMAASDAAQLKAAREDIKELLKSTYCHPIMVRLGWHDSGTYDKDIKDWPQRGGANGSLRFDAELSHGANAGLINALKLIQPIKDKYPGITYADLFQLASATAIEEAGGPKLPMKYGRVDVTAAEQCPPEGRLPDAGPRDPAEHLREVFYRMGLDDKEIVALSGAHTLGRARPDRSGWGKLETKYTKDGPGEPGGQSWTVEWLKFDNSYFKDMKFLSQLPWKEQKEQDLLVLPTDAALFEDPSFKVYAEKYADDQEAFFKDYGEAHAKLSDLGAKFDPPEGFSLDDDTSSSPSDEKTEEPTLVAVGAAVATATADDNNGAAPQPEPFVAAKYSYGKRELSDAMKQKIRAEYEGFGGSPDKPMQSNYFLNIMILIAGLAFLTSLLGN

SEQ ID NO: 58232 - protein, 410 aa, Zea mays
  Clone ID: LIB3357-027-C11_FLI.pep
PHTARHQLRSARQPHQPPSLAAVHGRWDWESGSETLLLPSARRHYYSLSRLESSRGDRALRAWGEPEKAAEERREGARGRARRSSMGAGIRVLAALLAALAAATAGVTAQLRQDYYAAVCPDLESIVRAAVSKKVQAQPVAVGATIRLFFHDCFVEGCDASVILVSTGNNTAEKDHPSNLSLAGDGFDTVIQAKAAVDAVPACANQVSCADILALATRDVIELAGGPSYAVELGRLDGLVSMSTNVDGKLPPPSFNLDQLTSIFALNNLSQADMIALSAAHTVGFAHCSTFSDRIQPQSVDPTMNATYAEDLQAACPAGVDPNIALQLDPVTPQAFDNQYFANLVDGRGLFASDQVLFSDARSQPTVVAWAQNATAFEQAFVDAITRLGRVGVKTDPSLGDVRRDCAFLN

SEQ ID NO: 58233 - protein, 308 aa, Zea mays
  Clone ID: LIB3069-029-C5_FLI.pep
QIYYEKDNTTICLFTLTPDAKDHMQQNVSLQDRVYLSISKPQFGELEVGLFVVIKESLLIRSIFLDKRAENRVTQQGFVTWELKKALLITTQKFLEVRVVKDQRVCSPGPLETRPLFVAPSQGVATREGNNVLIAQAHLLAKNLPQVVRTLSGIRKAALRWGLRLVLPTGVEGNLRPTGDLHGHNSRELVEIGVREDWELLLDGLEQPHRDVQPRVSAVSQFRLMLHRAEWTAGPRRHVERPRGVPREAEHERGAALLGDEGSELAPGLVHSLAVLGAHGRVVLRHGCDLRAERALDRRMRRDAAEGA

SEQ ID NO: 58234 - protein, 314 aa, Zea mays
  Clone ID: LIB3357-022-F4_FLI.pep
GLNIDKFITRKTTLTPDAKDHMIPYRQQNVSLQDRVYLSISKPQFGELEVGLFVVIKESLLIRSIFLDKRAENRVAQQGFVTWELKKALLITTQKFLEVRVVKDQRVCSPGPLETRPLFVAPSQGVATREGNNVLIAQAHLLAKNLPQVVRTLSGIRKAALRWGLRLVLPTGVEGNLRPTGDLHGHNSRELVEIGVREDWELLLDGLEQPHRDVQPRVSAVSQFRLMLHRAEWTAGPRRHVERPRGVPREAEHERGAALLGDEGSELAPGLLHSLAVLGAHGRVVLRHGCDLRAERALDRRMRRDAAEGGSQDL

SEQ ID NO: 58235 - protein, 299 aa, Zea mays
  Clone ID: LIB3067-006-A11_FLI.pep
GRGEGQVRVVVVAASSAAEAPRPSSYCGRPSAASHRIAFYDSKLSLLAAMAKNYPTVSAEYSEAVEKARRKLRALIAEKSCAPLMLRLAWHSAGTFDVSSRTGGPFGTMKCPAELAHGANAGLDIAVRLLEPIKEEFPTLSYADFYQLAGVVAVEVTGGPEIPFHPGREDKPQPPPEGRLPDATKGSDHLRQVFGKQMGLSDQDIVALSGGHTLGRCHKERSGFEGAWTTNPLVFDNSYFKELLSGDKEGLLQLPSDKALLSDPVFRPLVEKYAADEKAFFDDYKEAHLKLSELGYADA

SEQ ID NO: 58236 - protein, 287 aa, Zea mays
  Clone ID: LIB3608-034-B9_FLI.pep
IARVHTGSSLCPAPGYGHLSISIPQFGELEVGLFVVIKECLLICSIFLHKRAEDKVAQQGFVTWELKKTLLVATQKFLEVRVVKDQRVRSPGPLKTRPLFVAPSQGVATREGNNVLITQTHLLAKDLPQVVRTLGGIRKTALRWRLRLVLPAGVEGDLRPTGDLDGHNSGKLVEIGIGEGGELLLDGLEQPHRDVQPRVGAVSQFRRALHSTEGTAGPRRHVERPRGVPREAEHEGRAALLGDEGAELAPGLLDGLAVLGAHGWVILRHGCEQRELRIVECDAVRRG

SEQ ID NO: 58237 - protein, 333 aa, Zea mays
  Clone ID: LIB3608-012-C12_FLI.pep
FQLDTAPEIKNLGKRKMGSDSTIDKVPRTDKFITKKTLDNLMVHPESHESIQAAVCVPLQDMDHLSISIPQFGELEVGLFVVIKECLLICSIFLHKRAEDRVAQQGFVTWELKKALLVATQKFLEVRVVKDQRVRSPGPLKTRPLFVAPSQGVATREGNNVLITQTHLLAKDLPQVVRTLGGIRKTALRWRLRLVLPAGVEGDLRPTGDLDGHNSGKLVEIGIGEGGELLLDGLEQPHRDVQPRVGAVSQFRRALHSTEGTAGPRRHVERPRGVPREAEHEGRAALLGDEGAELAPGLLDGLAVLGAHGWVILRHGCEQRELRIVECDAVRRG

SEQ ID NO: 58238 - protein, 326 aa, Zea mays
  Clone ID: LIB3596-019-D9_FLI.pep
PLNPSSPSGAGADMAVHYLLRRGVSGGSLLHPIHGLFLASKELGRRPFGSAAAGDAAAELRGAREDVRQLLKATSCHPILVRLGWHDAGTYDKNISEWPKCGGANGSLRFEVELKHGANAGLVNALKLIQPIKDKFSGVTYADLFQLASATAIEEAGGPKIPMIYGRVDVIAPEQCPPEGRLPAAGPPSPAEHLREVFYRMGLNDKEIVALSGAHTLGRARPERSGWGKSETKYTKDGPGAPGGQSWTSQWLKFDNSYFKAIEERRDEDLLVLPTDAVLFEDSSFKIYATKYAKDQDAFFEDYAEAHAKLSNLGAKFDPPKGISLE

SEQ ID NO: 58239 - protein, 330 aa, Zea mays
  Clone ID: LIB3279-228-F11_FLI.pep
RSATPLNPSSPSGAGADMAVHYLLRRGVAGGSLLHPIRGLFVASKELGRRPLGSAAAGDAAAELRGAREDVRQLLKATSCHPILVRLGWHDAGTYDKNITEWPKCGGANGSLRFEVELKHGANAGLVNALKLIQPIKDKFSGVTYADLFQLASATAIEEAGGPKIPMIYGRVDVIAPEQCPPEGRLPAAGPPSPAEHLREVFYRMGLNDKEIVALSGAHTLGRARPERSGWGKSETKYTKDGPGAPGGQSWTSQWLKFDNSYFKAIEERRDEDLLILPTDAVLFEDSSFKIYATKYAKDQDAFFEDYAEAHAKLSNLGAKFDPPKGISLE

SEQ ID NO: 58240 - protein, 319 aa, Zea mays
  Clone ID: LIB3245-391-D10_FLI.pep
LFTNYMQSQASRMARSSGSRPVALVLLALCAAALSSATVTVNEPIANGLSWSFYDVSCPSVEGIVRWHVAEALRRDIGIAAGLIRIFFHDCFPQGCDASVLLSGSNSEQIEVPNQTLRPEALKLIDDIRAAVHAVCGPTVSCADITTLATRDAVVASGGPFFEVPLGRRDGLAPASSDLVGTLPAPFFDVPTLIESFKNRSLDKADLVALSGAHTVGRGHCVSFSDRLPPNADDGTMDPAFRQRLTAKCASDPSGNVVTQVLDVRTPNAFDNKYYFDLIAKQGSSSRTRASSTTRTPSARPPASRSTRPPSSTSSPGPW

SEQ ID NO: 58241 - protein, 365 aa, Zea mays
  Clone ID: LIB3608-046-G12_FLI.pep
YMQSQASRMARSSGSRPVALVLLALCAAALSSATVTVNEPIANGLSWSFYDVSCPSVEGIVRWHVAEALRRDIGIAAGLIRIFFHDCFPQGCDASVLLSGSNSEQIEVPNQTLRPEALKLIDDIRAAVHAVCGPTVSCADITTLATRDAVVASGGPFFEVPLGRRDGLAPASSDLVGTLPAPFFDVPTLIESFKNRSLDKADLVALSGAHTVGRGHCVSFSDRLPPNADDGTMDPAFRQRLTAKCASDPSGNVVTQVLDVRTPNAFDNKYYFDLIAKQGLFKSDQGLINHPDTKRAATRFALNQAAFFDQFARSMVKMSQMDILTGSAGEIRRNCSVRNTALGDVSSSAHQLETTAGDEGLAADA

SEQ ID NO: 58242 - protein, 343 aa, Zea mays
  Clone ID: LIB3354-072-C8_FLI.pep
ADKLGPGRGTRTMRSRRWHSVVAVALAAAAWWWCAAAQAQAQAQLSQSYYASTCPDVETLVRGAVTQKLQETFNAAPGTLRLFFHDCFVRGCDASVLLSGPDDEHSAGADTTLSPDALDLVTRAKAAVDADPRCANRVSCADILALAARDVVSQTGGPYYQVELGRLDGKVGTRAAVKHSLPGAGFDLDQLNKLFAANGLTQTDMIALSGGHTIGVTHCDKFVRRLYPFKGAAAGPPMNLYFLRQMRRTCPLNYGPSAFAMLDAVTPRAFDNGYYRTLQQMKGLLASDQVLFADRRSRATVNRFAANQTAFFDAFANAMAKLGRVGVKTAADGEVRRVCTRVN

SEQ ID NO: 58243 - protein, 343 aa, Zea mays; identical to SEQ ID NO: 58242
  Clone ID: LIB3356-056-H8_FLI.pep

SEQ ID NO: 58244 - protein, 155 aa, Zea mays
  Clone ID: LIB3061-074-G12_FLI.pep
QRQLRSKIQRQGGLSRRFSKVVSYYGLTTPPYKLDALEPYMSKRTVELHWGKHHQDYVDGLNNQLATSPLYGYTLEDLIKEAYNNGNPLPEYNNAAQPIISLDLWEHAYYLDYKDDKLTYVTNFMDHLVSWHTVTLRMMRAESFVNLGEPNIPEA

SEQ ID NO: 58245 - protein, 149 aa, Zea mays
  Clone ID: LIB3587-277-C12_FLI.pep
RINTLCTNVKQSGGQYHVLLIIADGKLQDAMAALPRSPNSARLPLSLRDARWIGESMAAWWSTASFLKMVWSYTNLWGEISASASFCEVDLDSAAQKNGGFSSPPLPPPQAMAGVKLQQRQLRPMSHAGWSISKIFESCFLLWSHDSAI

SEQ ID NO: 58246 - protein, 132 aa, Zea mays
  Clone ID: LIB3592-049-H4_FLI.pep
LSFSHCVTPQLPVKARQLQQHRHTQHKTLTDFMHVLLGALTIHPSVPRPGLEDEEGREDADRAGERQRQRRHRRGQSHILKHAFPGGQLHGHRSDEAQHRPAAQPHVQPATALGSLLAPHAQQPHPPARGAC

SEQ ID NO: 58247 - protein, 212 aa, Zea mays
  Clone ID: LIB3597-044-D9_FLI.pep
SSQHRRRRPLAPVPAVARAPPAPPGRLALGDGLRPPPFTAATCSVTPRSSALKFGGPVRASQRSPTMGYAEIAIRPSGSGKKIQRQGGLSRRFSNVSYYGLTTPPYKLDALEPYMSKRTVELHWGKHHQDYMDGLNNQLATSPLYGYTLEDLIKEAYNNDNPLPEYNNTAQDDKLTYVTNFMDHLVSWHTVTLRMMRAESFVNLGEPNILEA

SEQ ID NO: 58248 - protein, 167 aa, Zea mays
  Clone ID: LIB3354-069-D4_FLI.pep
RRRRPFAPVPAVARAPPAPPGRLALGDGLRPPPFTATTCSVTPRSSALKFGGPVRASQRSPTMGYAEIAIRPSGSGKKIQRQGGLSRRFSNVSYYGLTTPPYKLDALEPYMSKRTVELHWGKHHQDYMDGLNNQLATSPLYGYTLEDLIKKAYNNDNPLPEYNNTAQ

SEQ ID NO: 58249 - protein, 218 aa, Sorghum bicolor
  Clone ID: LIB3476-037-G12_FLI.pep
KQGSPTMSTITSCTLLSLGSAAWPAVYSAGRPSPVAVASLSSQRRPRPLSVCCATSQKGDHNPKTDLHPFNIPAFVLVHPVPPREERWQLEEDAEKVNLWFEVPGQSQYDLAVEIDEDVLVIKKKVHVVGGDVGQRSPGGGGGVNDYAPQSRKGGAAPEASKEAAQQGGEVIYARMLLPAGYSREGVEAELKSGVLRVTVAKIKERARRKIDVGILVK

SEQ ID NO: 58250 - protein, 234 aa, Zea mays
  Clone ID: LIB3587-232-E3_FLI.pep
RTVTKQSDDDATIKSVAPAVDFDMALARLCLNRAIAGRAQALARPALAAAPATDPKLHSLLSTSAADSAASGEANRRDVAVSERSAPNRRWAWRDLRDFTPFSLVDGLGSALSQVAETLGRPLERLAPSRLLSGKVREDEARYRLRFEVPGLGKGDVRVAVEDGVLVIEGEKREHGEEGDGGEWWSTSGYHASLLLPDDARAEGITAEVKDGVLYVTVPRTGERKRNVTEVKVQ

SEQ ID NO: 58251 - protein, 232 aa, Zea mays
  Clone ID: LIB3355-055-C7_FLI.pep
VTKQSDDDATIKSVAPAVDFDMALARLCLNRAIAGRAQALARPALAAAPATDPKLHSLLSTSAADSAASGEANRRDVAVSERSAPNRRWAWRDLRDFTPFSLVDGLGSALSQVAETLGRPLERLAPSRLLSGKVREDEARYRLRFEVPGLGKGDVRVAVEDGVLVIEGEKREHGEEGDGGEWWSTSGYHASLLLPDDARAEGITAEVKDGVLYVTVPRTGERKRNVTEVKVQ

SEQ ID NO: 58252 - protein, 245 aa, Zea mays
  Clone ID: LIB143-014-A7_FLI.pep
PRNTEQHTYTPDIPKQSNHSTTHTSRVAETQDPTPRRERDATIHLASMSSSAGDLDALNLGLLDLGLGHGDREHAVLQRGPHLLRLGVLRQAEAPHELAAAALHAVPLVALVLLLPAALPADEQHVAVLHLHLDLLLLHAGEVGLEHVRLGRLLPVDAGAGEGGGLGGRRRRQRRRHDGAEHAVEGVEEVHREWVEHAAAPHQRHFSLIASRSVRASLRTVEVELCPVDWRISVRVACCDGDSSS

SEQ ID NO: 58253 - protein, 270 aa, Zea mays
  Clone ID: LIB3355-059-H9_FLI.pep
FVFIYSLAEHNTLSRGAHRTAQCTDDDHETLNSTRTHQTYQSRATTVPHTRVASLKPKTRRRDANATRPFTSRPCLLQPEIWMLLTSGFLTSALGTVTVSTPFSSAALTSSVLAFSGRRKRRTNWPLLRSTRCHLSPLSSFSLLRCPLMSSTLPSSTSTLTSSFFTPGRSALNTCASGVSFQSMRALAKAAVSEAAAADDDDGTMERNMLSKGSKRSMENGSNTLLRLTSDISASLLAARCVRVRTAEVELCPVDWRISVRVACCDGDSS

SEQ ID NO: 58254 - protein, 187 aa, Zea mays
  Clone ID: LIB3068-034-G4_FLI.pep
AMSTISTSLGLLIRPPRSSAGTPSFGSLKPVVVTLPCAPAEKKRPRSICYSVDAKANDHAFNISPVALVHPNMPPTSTPRWEIKEDGKEVRLTFFNLSEGATTGDFQVAVEDDVLIIKSTKPKPPAAEEQRQKEAPVDSVSFHVRLLVPKGYDKENVRAQLQLRALVVTIPKVNPSFTKEVDIDDGK

SEQ ID NO: 58255 - protein, 227 aa, Zea mays
  Clone ID: LIB3279-204-G11_FLI.pep
DPKPKPQSHRRDRERGFPSMAPGVASVLVPQEPVLLKDILASPSPCGNTAVSARHLFGNGVAPPRSSDDGIKDAAADRHGDRDLSIPKIFTGDVLDLLDDAARLDLMLALTGDGGAASMAGFSARGWWVSKEDGDAVQLKVPMPGLGKEHVKMRVEKDALVIKGEAGKDLEGDDDKGPARYSYRIGLSSQAFKMDQIKADMKNGVLRVTVPKIKDEERKDVFEIKIE

SEQ ID NO: 58256 - protein, 206 aa, Zea mays
  Clone ID: LIB143-040-G1_FLI.pep
TAKNRDTQVTEATAHNPNLPRHSKPEVTTVGPTNNVADSPWKRIRPLLPRPLGPLRGLLPLRLRRRPQPRSLVAAHQLGDRGICRRADRLEGDPRSARVQGGRAGAEEGGGQGGGRGRQRPADQRRAQQGARGEERQVAPGGAQQRQVPSQVQTAGQRQGRPDQGVHGERRAHRHRAQGGGQEGRRQERPDHRLGRKHACAVEFET

SEQ ID NO: 58257 - protein, 186 aa, Zea mays
  Clone ID: LIB143-067-G11_FLI.pep
IARVHTGSSLCPAPGYGHLSISIPQFGELEVGLFVVIKECLLICSIFLHKRAEDRVAQQGFVTWELKKTLLVATQKFLEVRVVKDQRVRSPGPLKTRPLFVAPSQGVATREGNNVLITQTHLLAKDLPQVVRTLGGIRKTALRWRLRLVLPAGVEGDLRPTGDLDGHNSGKLVEIGIGEGGELLLD

SEQ ID NO: 58258 - protein, 190 aa, Zea mays
  Clone ID: LIB3062-003-G7_FLI.pep
RRHPRNLSEEIGRLSGALRGHQPPRLRSGFLLERQGDGVWGVPLSTRGREGRRLMEIRNALEMIQRGENVRLESIFYGGLDIHDRHRDMRLDIDNMSYEELLALEERIGNVSTGLSEEAVIKLLKQRKFSSWRLKASLDPEPCCICQEEYVDGDDLGRLDCGHDFHAGCIKQWLVVKNVCPICKNTALKA

SEQ ID NO: 58259 - protein, 317 aa, Zea mays
  Clone ID: LIB3732-015-D12_FLI.pep
DVTIQCFIKRDKSTQTYYLYLCLSTAVLVESGKFLLCAKRTSRPTCTEYTIFMNSENLSRSSKMYIGKLRSNLLGTKFAIYDTQPPCNAAEPGKTSRRFYSRKVSPKVSSSTYNIAQVSYELNVLGTRGPRRMNCVMHSIPTSCLEAGGTVPSQLDSILARSTDESFGSISFSKSSVVDRSMRFSSSRFSDISMSSSRRIGDTASGDNDECKERPLILRNKAPRWHEQLQCWCLNFRGRVTVASVKNFQLVAATQPAAGAPTPSQATPVPPPEHEKVILQFGKVAKDMFTMDYRYPLSAFQAFAICLSSFDTKLACE

SEQ ID NO: 58260 - protein, 106 aa, Oryza sativa nipponbare
  Clone ID: LIB3433-025-H10_FLI.pep
GAGDVAGGGLCKSSMLAHLMTDVMEDNSSWTALSIDHIRISAFNFGIVSEDNDEGKEFLLSLDTVVPDDILERIFTFLPIVSMIRSTAVCKRWHDIIYSSRFLWTH

SEQ ID NO: 58261 - protein, 182 aa, Zea mays
  Clone ID: LIB3078-034-G11_FLI.pep
RPFLLRSFAAAMVKYSQEPGNPTKSAKAMGRDLRVHFKNTRETAFALRKLPLTKAKRYLEDVIAHKQAIPFRRYCGGVGRTAQAKSRHSNGQGRWPVKSARFILDLLKNAESNADVKGLDVDNLYVSHIQVNQAQKQRRRTYRAHGRINPYMSSPCHIELILSEKEEPVKKEADNIVAARKQ

SEQ ID NO: 58262 - protein, 118 aa, Zea mays
  Clone ID: LIB3595-052-C10_FLI.pep
AGTTASLPLPGLRLPRDGRHGGDDGRRSELSRAVVEQRCVVRHEDGRLAGVAFRRDGRRRVPEQREEDPQGARPDSQQACREDDDRAAPERLASRRPAGGGGGGGNRSYHCRCSSSCT

SEQ ID NO: 58263 - protein, 53 aa, Zea mays
  Clone ID: LIB3689-246-H8_FLI.pep
KKERRVPWYIINWDFSPLTSESECINGTKLIHPSFCRNRLKQLGSIYAFTFNK

SEQ ID NO: 58264 - protein, 79 aa, Zea mays
  Clone ID: LIB3637-247-B7_FLI.pep
LIHSSSVCFYDSLAFRRCISSTPRAASNTGSSTPALREELSPKCLIHPSSPQLCSSIRGVLMYFPMKHPNEAKLFNCFT

SEQ ID NO: 58265 - protein, 85 aa, Zea mays
  Clone ID: LIB3632-040-A10_FLI.pep
NSWSKLASTKTGRRDASVASQKPNRSSHFFSNCFNTSSACRSILGRAQSCCMISRLSFSAPKLIVGLNPNPPPICIIFCASSVAF

SEQ ID NO: 58266 - protein, 81 aa, Zea mays
  Clone ID: LIB3608-004-A3_FLI.pep
TTCPAEFQGFPRAAASGAGRAGDGGWVGLDWIGSVPPVDQSVNQRWARAAAASPARSASRRPPRLLRRPPRRRCRARRPRR

SEQ ID NO: 58267 - protein, 146 aa, Zea mays
  Clone ID: LIB3600-004-E2_FLI.pep
PLQHRLIGSTHHSHPKLKLHNSFKHSNGAHLQTKVTLEQTSLTPQKKHSLWLDTLNLLDSQTWRERLLELVGLVGVVDAEGVEVPGAAHLELDGVLGPLDPHRPCVLPPRSQQEVLDLVDLLRHGGSPGGRHCDANPKIRDESPRR

SEQ ID NO: 58268 - protein, 117 aa, Zea mays
  Clone ID: LIB3600-011-D6_FLI.pep
EHPGMSTPARKRLMRDFKRLMQDPPAGISGAPQDNNIMLWNAVIFGPDDTPWDGDILQNQWSPIYDVAAILTSIQSLLCDPNPNSPANSEAARMFSENKREYNRKVREVVEQSWTAD

SEQ ID NO: 58269 - protein, 187 aa, Zea mays
  Clone ID: LIB3600-021-D10_FLI.pep
QRDATTTTASDDGEMFLRRILTGGGGLAALRAARAVKETTGIVGLEVAPNAREVLIGLYTRTLKEIEAVPKDEGYRKAVESFTNHRLQICQEEDDWKRIEDRIGCGQVEELIEEAEDELKLIAKMIEWDPWGVPDDYECEVIEDDTPIPKHVPQHRPVALPEEFFKTLDAVKSDPALQGDAPPQVKA

SEQ ID NO: 58270 - protein, 132 aa, Zea mays
  Clone ID: LIB3600-022-G2_FLI.pep
NTCTTLYWTREQANRVTDDRIGPSAACAYTRLVIPGDGRGVLVGVGVGVALLVVLRRVLGRPHRLPGLLLGAGLGLAGLVASLVLVGSHGRVSQATQARSAPLALETDRSAQITRSRRKKYAWLLTVTMVLG

SEQ ID NO: 58271 - protein, 114 aa, Zea mays
  Clone ID: LIB3600-023-H11_FLI.pep
NLLLDISLLLLPQPVQGAVCIAMSTDKPRESKCCEVTIIQAIRIQVANVDLDRGMVLGSDDPVCGRALPGNIEVHSLTLLVLHGDSWGNYRKSNLQETDQTGGGVRSRRRLGVG

SEQ ID NO: 58272 - protein, 163 aa, Zea mays
  Clone ID: LIB3600-029-A1_FLI.pep
RSFRFLACSRYSHRYRPGPRAREMADQETPVAVEAPTPVLGEPMDLMTALQLVMKKSGAHDGLVKGLREAAKAIEKHAAQLCVLAEDCDQPDYVKLVKALCSEHNVHLVTVPSAKTLGEWSGLCKIDSEGKARKVVGCSCVVVKDYGEESEGLNIVQEYVKSH

SEQ ID NO: 58273 - protein, 137 aa, Zea mays
  Clone ID: LIB3600-030-H11_FLI.pep
APPQPRPDPSPTFVPLAGPPTRQAAGAARLPPSPHAVPLAQPALPRTPRAASPAGAALLPPRLPAAAAPLMVTRWSQKSPGLKILWIWTLGTAAIVVGGIVRMRVNDVQKILREEEEAAATATATSPPSERVLKDEE

SEQ ID NO: 58274 - protein, 177 aa, Zea mays
  Clone ID: LIB3600-037-D6_FLI.pep
LGLSGPHRSVPPVPVVVAVAAAAVCTTVSPTAAVASTTTAVASTATAVAASITAPATVSATAASTAAAGLGLVNGDVAAVELLAVHALDGAAHRVLRGEGDEAEAAGPLRLPIQDDLRLEDLAVGAEGVVEGVVVGGPGEAANEATVLNVRRRHLFPLAHEPEPEHEPVGEEKPTHL

SEQ ID NO: 58275 - protein, 233 aa, Zea mays; identical to SEQ ID NO: 47999
  Clone ID: LIB3600-038-A10_FLI.pep

SEQ ID NO: 58276 - protein, 95 aa, Zea mays
  Clone ID: LIB3600-039-A2_FLI.pep
RSSSSVSVGVLDKKGRFLVSVFMDESCGPPPAGLLASVLEAFDDIGLTVLEARATCAGSFRLEAVGEEVVDGGLIIDAHAVEQAVVQAIKNCPAN

SEQ ID NO: 58277 - protein, 107 aa, Zea mays
  Clone ID: LIB3600-040-C8_FLI.pep
SKWIDEVRTERGGDVIIVLVGNKTDLVDKRQVSTEEGESKAKELNVMFIETSAKAGFNIKPLFRKIAAALPGMETLSAKQEDMVDVNLKSTSSQSNSQQQEGSGCAC

SEQ ID NO: 58278 - protein, 175 aa, Zea mays
  Clone ID: LIB3600-043-A10_FLI.pep
AHLHAPPPPLDAHRAAMAEQTEKAFLKQPKVFLSSKKSGKGKKPGKGGNRFWKSIGLGFKTPREAIEGTYIDKKCPFTGTVSIRGRIIAGTCHSAKMNRTIIVRRNYLHFVKKYQRYEKRHSNIPAHISPCFRVKEGDHVIIGQCRPLSKTVRFNVVKVIPAGSAAAGKKAFTAA

SEQ ID NO: 58279 - protein, 83 aa, Zea mays
  Clone ID: LIB3600-048-H4_FLI.pep
SIHAPRVFAPPPPPPPQPQQCRRTRPSGSRRSWRRRCARTAPSPTGSACALTIPSGTTPSAGTGAAPSSASERRDWPAAASEG

SEQ ID NO: 58280 - protein, 125 aa, Zea mays
  Clone ID: LIB3600-049-B3_FLI.pep
CSFYPSFIHETTRCVCLHPHNPYQSQLIDSTPPKTAELKHNHADETETGGGPSPHSAETLRTPGRQSRCPPSDQLSWAAGSDGCSASRRRPRSSQCPAACSAPRRSAPPAGCGAARYGSSCCPEQ

SEQ ID NO: 58281 - protein, 159 aa, Zea mays
  Clone ID: LIB3600-051-D9_FLI.pep
GTERGDAAAPLLRRREMATVPGDLIWQVVRKNNSFLVKQFGNGNAKVQFTKEPNNLYNIHSFKHSGLANKKTVTIQPAAKDSAVVLSTTKTKKQNAPAKLSHKSVMRKEFRKMAKAVKNQVSDNYYRPDLTKPALARLSSVYRSLQVAKSGVKKKNRQS

SEQ ID NO: 58282 - protein, 251 aa, Zea mays
  Clone ID: LIB3600-051-F1_FLI.pep
YAFPLKTLHSPLLRRAANFPSRQLRLPTEQEAENYTVEDLVALNPYNPDILNDLEKFVNEQVASQTYNLDANLSLLRLYQFEPGRMSIHIVAHILIKALMAMPAPDFSLCLFLIPEHVQMEEQFKALIVLSHYLETARFRQFWDDAANNRHILEAVPGFEQAIQSYAIHVLSLTYQKVPRHILAEAINIEGLALDKFLEYHAANSGWVIEKGGQSQVIVLPRNEFNHPQLKKNTADTVPFEHLTRIFPVLS

SEQ ID NO: 58283 - protein, 126 aa, Zea mays
  Clone ID: LIB3600-051-F11_FLI.pep
LLPFPPSPSCFRRASERATARERERGRVRVGIQVSNSLSRGDRKVVTHRSTASSSPPMADWGPVVIATVLFVLLTPGLLFQLPAHGRIVGFGTMHTSGLAILVHAVLYFALITIFLIAIGVHIYAG

SEQ ID NO: 58284 - protein, 49 aa, Zea mays
  Clone ID: LIB3600-055-H4_FLI.pep
VRNTLLILLYNNQHEARACKMFQARDKIHHSSYARNKRAQHQLREGCGT

SEQ ID NO: 58285 - protein, 297 aa, Zea mays; identical to SEQ ID NO: 39275
  Clone ID: LIB3600-056-G4_FLI.pep

SEQ ID NO: 58286 - protein, 131 aa, Zea mays; identical to SEQ ID NO: 46551
  Clone ID: LIB3600-058-A10_FLI.pep

SEQ ID NO: 58287 - protein, 115 aa, Zea mays
  Clone ID: LIB3604-002-D11_FLI.pep
NPMLKWKHAVIPKKKSECDLLREMGPTQVKRIIQITTRHKTKTKGRTNKSRLGGDKNLSRFPHVAACPDHFIHKQQLGCNDGSRIDDLALHRVVVEDAFHLGINRIPRVMVQPHN

SEQ ID NO: 58288 - protein, 132 aa, Zea mays
  Clone ID: LIB3606-019-B6_FLI.pep
IKLGQIGEIFLDFHYKSDRGPHVYWLSKGTLDVRPDHILNLIHYEDAASLVISIMKKRLRSCIFVGCDNEPLSRLEIMDRVNRSRKFDTQFHGFTGTDGPLGKRMDNSKTRAKLGWQPKYPSFTEFLGLSNL

SEQ ID NO: 58289 - protein, 64 aa, Zea mays
  Clone ID: LIB3606-025-F9_FLI.pep
IFCLPFLMKCLYCLYCFGDSKIFGSLFPILYVCSLNFYLFPIQQKCFNVIILPHLHEHVQESFL

SEQ ID NO: 58290 - protein, 181 aa, Zea mays
  Clone ID: LIB3606-028-H3_FLI.pep
SSSLSTCTSLARPSLAAAMGRGKFKGKPTGRRNFSTPEEIAAGTSGRPRTFKKKEEEEEEEEEREESEEEESEDESDDKPKHKGTEGIIQIENPNLVKVKNIKAKEVDLGKTTELSRREREELEKQKAHERYMKLQEQGKTEQARKDLERLALIRQQRADAAKKRDEEKAAKEQRKSEARK

SEQ ID NO: 58291 - protein, 213 aa, Zea mays
  Clone ID: LIB3606-037-D3_FLI.pep
QAHLYMTLVFSIVNMYTHEQPWPGLYRWHKQQRTARTYVLLRRHFFLGLDRRRACALRPVPPEPPRKTAQKAQPDTLGEGGSMSGATSLVRNTCWLLRRADSACFCLLSLPFLLRLSPPPPARRSMPTLLECRSSGCSASSAAPAFASASASASASVRKRSSQTRPDEPDRLNVVADLCNPAMGDGWVPPIHLPLSARRTSFVCDCGGENKGQ

SEQ ID NO: 58292 - protein, 94 aa, Zea mays
  Clone ID: LIB3606-037-E11_FLI.pep
YCETVVLSEHDMLAHLTCLSLLQCVVVEQLLNEVNMGHEHSPAAVAEQFQSIQSIPFRVVGLEEVEVEVPLVPNHLAAGEAAHRYDHLRRRRRC

SEQ ID NO: 58293 - protein, 30 aa, Zea mays
  Clone ID: LIB3606-051-E11_FLI.pep
HGKKKKQLQLRQLLISLLQAMPNKINSLTD

SEQ ID NO: 58294 - protein, 231 aa, Zea mays; identical to SEQ ID NO: 43391
  Clone ID: LIB3606-053-B1_FLI.pep

SEQ ID NO: 58295 - protein, 123 aa, Zea mays
  Clone ID: LIB3606-058-F4_FLI.pep
SRLGARRSGAAETERRADFYTSARFGPAWGLLLGVVAPSAASSSSCRALQRKLVDGQRTNGVSIRGTILFVFGLQYVLQYHISRVYPKSSPIDLISGVIDSRYNIFCTVGCYPENVFGVGCFP

SEQ ID NO: 58296 - protein, 151 aa, Zea mays; identical to SEQ ID NO: 53147
  Clone ID: LIB3607-015-C6_FLI.pep

SEQ ID NO: 58297 - protein, 166 aa, Zea mays
  Clone ID: LIB3592-012-A8_FLI.pep
QRRRRDLADDLVEGAGVLEPEHDADAEDVADGAAGQRVGEGEPGGVTRLQAGVARLQLQPRRRLAVRRRRQPEPPREQHQRRRRHHDQVGGGADVVAADALRRRPLPAHPHGRQRCHRGPGRGVAPEAVEPGHGGGELGCHVWRLRRRRRTSHLCAAVPSSASAEW

SEQ ID NO: 58298 - protein, 68 aa, Zea mays
  Clone ID: LIB3592-070-C8_FLI.pep
RHHTYTKVRYAFTMIVGTSTEGTEIIGACIFGMYRHLSRDAISPPNSSDRVLQLPTFYHYHMEVMEHG

SEQ ID NO: 58299 - protein, 197 aa, Zea mays
  Clone ID: LIB3592-093-G2_FLI.pep
LVEVNHQNGEAARCACSAFRDRRCGAWRGGVRESLRRQGGAKDGAMHLGCRRPAVHADQQLLLRCAHHRAEPQLPVRRHAVRHRQGCRDQAGGRHYHPQALQHGRPPRRLQVRRLHAALADEDVINETVRVNLHERMPLCHATMLCCVVGIIIESARINMYVHDGLLLVSLDFACVLYVKYVPFLSYKKNLQCLLLS

SEQ ID NO: 58300 - protein, 178 aa, Zea mays
  Clone ID: LIB3594-041-F3_FLI.pep
CRPVRSRSCFSPVLRFWPFCPRLPGGNETTSRFGRCFASWNWTPADPLLNPSSSTWSLTLHAFVNRQATPLVAGLSVAAAALSGRYMIRAWQAFRTQAAMPRVRRFYPGGFQGEMNRREAALILGVRERATVDKIKEAHRRVMVANHPDAGGSHYVASKINEAKDMLMGKGKSGSSIF

SEQ ID NO: 58301 - protein, 94 aa, Zea mays
  Clone ID: LIB3594-057-E8_FLI.pep
WVWFSQNDQENSRNRSRRGSRVNQGCQQESGVRACCPQLCEDDPQGKTPVGDDRASRRAYPVLRSGLRRRQSICALKPEGDILSSINPRMPEYR

SEQ ID NO: 58302 - protein, 133 aa, Zea mays
  Clone ID: LIB3595-023-H4_FLI.pep
ICYYITQQCLKQPFSLHCGRGSRRQTTRFYTQHDGYRATTAILIWRAATENRRIRVGNRSLASGSRLDLALLEFPPSAQRLRPMRFVGFSSKIDARSPGSAPNSPGYAVRLSSKQLAMEDSREGEEKANETLF

SEQ ID NO: 58303 - protein, 37 aa, Zea mays
  Clone ID: LIB3595-026-D9_FLI.pep
QKIEIFSLMMFVLILRVCSVFFLELLYYLGNCSSLHG

SEQ ID NO: 58304 - protein, 44 aa, Zea mays
  Clone ID: LIB3595-039-G7_FLI.pep
TSDKHCTEILKNKRIRNFRSKFKPYHLAYLVGLGNPDTYTRYAR

SEQ ID NO: 58305 - protein, 135 aa, Zea mays
  Clone ID: LIB3595-049-H8_FLI.pep
VIVVYWYYIFPLQRTSIQLVKNKWSTIFQFTSIPTYTYSATRRRLWSIPAATCKTSTPSRVSTRHGAASSMELPRPSLPFLPDPQVQTSPFDVRATEWTRPAEADTSLSLLRESTSAGMSSWLDRPSWELQFHPH

SEQ ID NO: 58306 - protein, 68 aa, Zea mays
  Clone ID: LIB3595-050-A1_FLI.pep
TLFTSNLIIRNTSPPPKTNSAGVYFAFLEQGLIPYSKLAPALDRIISRAKKKYYRENGDKIITFPSFP

SEQ ID NO: 58307 - protein, 84 aa, Zea mays
  Clone ID: LIB3595-054-E10_FLI.pep
LTVRFTWYYILKQDTVLDIMVALDEARPFYSFLSGCLQLGNSLLARRVVELAVRTEPAHARPHVEGTSLSVLSPWQASKCRRLL

SEQ ID NO: 58308 - protein, 79 aa, Zea mays
  Clone ID: LIB3595-054-E2_FLI.pep
TFFTNGLMFRMKNFQQLDSNIFFFCPFQDSVHITSQKQALNSFVPHFFVWQHRYPSSCIHSLSIISRMNRSQYLTYPIL

SEQ ID NO: 58309 - protein, 114 aa, Zea mays
  Clone ID: LIB3595-056-E1_FLI.pep
KCYGCGLPSLTFISVVVNIGSAPVLYSSDASITQAWLGRRKHKELLPPSKRIKGRMTNWRCVCDTLPSSVDDECRYVGDCAKAVKCVNERCLRSSDNCDCSVAKPICYLYDKVI

SEQ ID NO: 58310 - protein, 76 aa, Zea mays
  Clone ID: LIB3596-031-A11_FLI.pep
DQLRRHADMTTSRRLADRKSAKFQKNITKRGSVPETTVKKSNDYPVGPIVLGFFIFVVIGSSLFQIIRTATSGGLA

SEQ ID NO: 58311 - protein, 94 aa, Zea mays; identical to SEQ ID NO: 45310
  Clone ID: LIB3596-037-E4_FLI.pep

SEQ ID NO: 58312 - protein, 133 aa, Zea mays
  Clone ID: LIB3596-050-G9_FLI.pep
GYKAIKRAQNCTPRKKKLKHARSLCEGVGNTLTSDVEVRLQDDEEEHEQQEVDDGVDEHGREAGLHVHEVDGAVPAGHLQHAARAQEREQRRGDDRRRPVPHRGGCAGTAPPAVLCAQRASSSQAQEREKRTS

SEQ ID NO: 58313 - protein, 91 aa, Zea mays
  Clone ID: LIB3596-051-B10_FLI.pep
IQSVTRAIDLLRFIKVHLGNFAVLFMHWTGESLRFSCPCFYFGRCKTSVALVETSVVLEFCRHCVVRLLLILIVFFVDHIYNIISLQFFLS

SEQ ID NO: 58314 - protein, 87 aa, Zea mays
  Clone ID: LIB3596-051-B5_FLI.pep
ARPSGLYKDEREKRTADSSPPGVRSECVKTRWWRMATHLLEGVRRQLQACAGVGPQAVLLLAEVVPARCSSFTPMRLRAAKCHQTPF

SEQ ID NO: 58315 - protein, 167 aa, Zea mays
  Clone ID: LIB3357-025-A5_FLI.pep
QKLRLLLPPPPRRRLGPLPTDAAGELDVLGHDGDALGVNGAEVGVLEEPDKVGLGRLLQRGDGGALEAKVGLEILGDLTHQALERQLADQQLRALLVLADLPERDGAGAETVGLLHSAGSRGRLASRLRGQLLPRRLAASGLPRRLLRAGHRDSRKASALLCTRICC

SEQ ID NO: 58316 - protein, 215 aa, Zea mays
  Clone ID: LIB3357-028-C4_FLI.pep
LDSISIVTVPSDNSCYRRRPDTAAPNYSKTREHTREACKRRPRSLGRGELGDGLGALGDGVLGELPGEDEAHGGLDLTGGDGGLLVVPRELGGLGGELLEDVVDEGVHDGHGLRGDADVRVHLLQHLEDVDLVGLHALLALLPAPLSLAALLAGGLACWDTLLRLGLLPGRRLLGSGLLLRRLLRRGLLLGLGRHRCGATWSSGLEAGWIGRKCE

SEQ ID NO: 58317 - protein, 192 aa, Zea mays
  Clone ID: LIB3357-028-G2_FLI.pep
HSRTTTTNSSAIKRQPPRSLNAVTAGTTVLRAAVGGGVGDLSLALNAGQVGHAEGSEHLHGLLVDADLFDLERGLLRHEVHAALALLLLQLERDAADWAALDAAHQVGTEASHLVAEALRGQNRDLLEHLLVGVEVEGHAGVVLLDHLPGGLLHGLGADATHGGCGGGALGQVAVAAAAAGVGLEEREWSYL

SEQ ID NO: 58318 - protein, 112 aa, Zea mays
  Clone ID: LIB3357-041-A9_FLI.pep
PPKTGPRPQSGLRGGGCRSGLGRRGSSQRRFGGGEGGGGLLLVLVVAIGVDGLGADYSGADEVEEAEERAGGLAGGGHGVGEIAGVGIGGLTDWAAFTGSVSLGSPALGCRL

SEQ ID NO: 58319 - protein, 178 aa, Zea mays; identical to SEQ ID NO: 41250
  Clone ID: LIB3357-048-H4_FLI.pep

SEQ ID NO: 58320 - protein, 143 aa, Zea mays
  Clone ID: LIB3357-059-H11_FLI.pep
SSGTVTSIFATQPQLANCKNNRTAATTTRRDRPSLAAEAVEGAALALECVDDVHGCDGLAARVLGVGDGVADHVLQEDLEDAAGLLVDEPGDALHAAPARQPPDRRLRDPLDVVAEHLPVALRSALAQALPALAAPRHLRRGD

SEQ ID NO: 58321 - protein, 222 aa, Zea mays
  Clone ID: LIB3357-062-G8_FLI.pep
QRTTCSRTHTHTSTFVPSAAYASPHTGNKVLLNIRSLRTVSLCLLRGLGGLLGRLCLLAPATGRLLRRLLGQQNRVDIGEHTAVSDGHAAQQLPKLLVVPDRQKHVARNNASLLVVPGSITGELQNLSGEVFEDSGEVDGGAGADTLRVAALLQVAPDAADGELETGLHGPRHRLLPWPADLAPGRSLLPLTPCSGAGGVHGRISASIGLSGTRRKCSGVGT

SEQ ID NO: 58322 - protein, 176 aa, Zea mays
  Clone ID: LIB3356-007-E4_FLI.pep
DNLIPCWIHQGSLPPPRPLVPLVLIGPGTGCAPFRAFVEERAAQAAAEPTAPVLFFFGCRNQENDFLYKDFWLTHAQDEGVLSSKRGGGFFVAFSRDQPQKVYVQHKIKEQSSRLWNLLLSDAVIYIAGSSTKMPADVTAALEEVICKEGGVKQADASKWLRDLERAGRLNIETWS

SEQ ID NO: 58323 - protein, 285 aa, Zea mays
  Clone ID: LIB3356-002-D9_FLI.pep
RVNCPFYFKIGACRHGDRCSRLHNRPTISPTLVLANMYQRPDMITPGVDAQGQPIDPEKMQEHFEDFYEDIYEELGKFGEIENLNVCDNLADHMIGNVYVQFREEEQAAAAYNALQGRFYSGRPIIVEYSPVTDFREATCRQFEENSCNRGGYCNFMHVKQIGRDLRRKLYGRSASRRYHGRSRSRSPPPQRRGHRDRDDYRGGGGGGRGRGSRYDRYDDGAGRGGRHDRYDDGAGRGGRHDRYDDGGRRRHGSPPRRARSPVRESSEERRAKIEQWNREREGKQ

SEQ ID NO: 58324 - protein, 189 aa, Zea mays
  Clone ID: LIB3356-002-H10_FLI.pep
ASPPRLLLLPLPTASRHALSPTQTPPLPPLLPSRACKFHLASARSPSRATASVFGDDEDEMARACRAAAAARPCAFSPATTRSRPPPPARTASSLGLGVPNPPPRPPNACPRPLPTLIYLSLPLPLPFLLLPVAALLLLPQEYSPSIVARACDFVPHADLFPVFAAVFCWIGFVWIASEIGSTLLRLNC

SEQ ID NO: 58325 - protein, 138 aa, Zea mays
  Clone ID: LIB3356-004-E4_FLI.pep
THNRPRPSHQSIRRGGGLAAEAVERAALALERVDDIHGGDGLAAGVLGVGDGVADDVLEEDLEHAAGLLVDEPRNALDAAPPGQPTDRRLRDALDVVAQHLAVALGAALAQPLAALAAPRHRRNRELRGRRRRIVPLC

SEQ ID NO: 58326 - protein, 143 aa, Zea mays
  Clone ID: LIB3356-008-H12_FLI.pep
RIQKELKDLQKDPPTSCSAGPVGEDMFHWQATIMGPSDSPYSGGVFLVTIHFPPDYPFKPPKVAFRTKVFHPNINSNGSICLDILKDQWSPALTISKVLLSICSLLTDPNPDDPLVPEIAHMYKTDRHKYENTARTWTQRYAM

SEQ ID NO: 58327 - protein, 46 aa, Zea mays
  Clone ID: LIB3356-010-A5_FLI.pep
KGMHPGLMMRHYQSSLDLVFSRCHPCSFFNSSKKDYSSQQSYRFRL

SEQ ID NO: 58328 - protein, 192 aa, Zea mays
  Clone ID: LIB3356-013-F7_FLI.pep
VHGDAVRAVAVDLVGDQHVQVAREPLLAVVAAVGEGDVRELPRDALPDGPEHLVEPAVAAVERVVAVVPIRVVGVVPDGEPPAGDAVRHAPHQRAEVGRVVHVRSDVLVAKNDVVDVPVLIGEPDGEDGGAPVGDDHGELAPTQLVEPQGLLPSLPRLHAATPERHQDDGQAQDEQDSSLGSSHRCLPSANT

SEQ ID NO: 58329 - protein, 114 aa, Zea mays
  Clone ID: LIB3357-003-B3_FLI.pep
FSFQDGICWPKARGACYSTGAGAILRDVQARSVPSSHRKSPVIRCGVRDCHHSRRQPCLMLARSNNAPPIVDGLQAILLARIGRNVDGLDMNLYQQALLIRRQHEAKLLSSRRA

SEQ ID NO: 58330 - protein, 208 aa, Zea mays
  Clone ID: LIB3357-008-E7_FLI.pep
SSTAEKEKEKPKAKESQSGKQKEEPAAAECGDVVAADRGAPVGRGGARRARAVRAQVARVHGGAGPPRRAPPAAQARRGGLQPVDGVRVAAAGRRPDPHLRVHRQAGVVRQGGDGVRGAGADARPRRGEEQGAPHLGHHLRDRPQPLRHQDRVPHPRGARPRLPCHRLPARARGGRGGPQGGGRGRRRCQVICSSFRRRRPCVGCSIR

SEQ ID NO: 58331 - protein, 232 aa, Zea mays
  Clone ID: LIB3357-010-C7_FLI.pep
GFRCSSFFPGILETAARRGEDWTMAASSALRLILGSSSASRRQILSEMGYKFTLLSADIDEKAIRKENPEELVVALAHAKADAILEKMQNNGMMKEILDSQDTTLMITADQVVLHDGVIREKPSTPEEARKFIKGYSESHAATIGSVLVTNVKTGARREGWDKAEVYFHKIPDEVVESLIEEGDVFYVAGGLLVEHPLTSPLVEAIVGTIDSVMGLPKALTEKLIKESLSET

SEQ ID NO: 58332 - protein, 196 aa, Zea mays
  Clone ID: LIB3357-017-H2_FLI.pep
FRTRAVAFHSERATHPRKARHEMNPPSSSDITTTNSSATAQALSPLMRRASWMSLGMMVTLLAWMAQRLVSSKSPTRYASAASCSAATADDWNRRSVLKSCAISRTRRWKGSLRMSSSVLFWYLRISRSATVPGRKRCGFFTPPVAGADLRAALVASCFRGALPPVDLRAVCFVRAIRTGAERSEQSTDLDRAAAA

SEQ ID NO: 58333 - protein, 174 aa, Zea mays
  Clone ID: LIB3357-018-E11_FLI.pep
SPLRRKEHPSVSLAFPPVGWHRTVWQPGHTTTVWEWLNTVVMLKQPWHLTSMKKELGDWTSRFFLCFSFSSSAGGLSKSMSFCSTILETLAPWAFLVCYGRRETEGAKASKWRRFPFCAASPPLRLLPLGKKLGREFRPPAASWGFGKMRAAGFCAGQAAAAARLSSCFWFPSL

SEQ ID NO: 58334 - protein, 261 aa, Zea mays
  Clone ID: LIB3357-019-F3_FLI.pep
LQASNNEQSVQARDLRIAEDEHLHELGPALVAEQALLPVRPPRVRQAKPRASAAEVADAGAGVGSSEHAHHGGERRADEQAVGAELWPAAGVVEQRRAAPAHLGQHHGRRRDLRRFRPVEEERVQRVVVVVRASVPLRAEPAETEATVGVANDDAGALEVAPPVEVRSTEAVHGGLVAAPELTVSEVCFCHERHGERWLDVVVGELQLRRRRLGFSRAFAPVKEAARGDEGWPARRLHGPAARHERHHESAQAWMRSRSMR

SEQ ID NO: 58335 - protein, 206 aa, Zea mays
  Clone ID: LIB3357-023-H6_FLI.pep
RSSYRSRAAPTEKPATSNYNTRRTSTQEKPTKGERASLGGGELGDGLGALRDGVLGELAGEHEAHGGLDLAGGDGGLLVVARELGGLAGQLLEDVVDEGVHDGHGLGGDADVRVHLLQHLEDVDLVRLHALLALLLATLALAALLAGGLASGDPLLRLGLLPGGRLLGRGLLLHRLLRRGLLLGLGRHRSLVGRGIGNRLQGKCEE

SEQ ID NO: 58336 - protein, 219 aa, Zea mays
  Clone ID: LIB3357-028-B10_FLI.pep
TSMAGKAAADTGSNDRVVEVEGSSSSSSMADVYKGELTPLQRHVAFFDRNKDGVIYPSETYQGFRAIGCGVALSAAAAVFVNGGLGPKTVLENEKPAPFKFPIYVKNIHRGKHGSDSGVYDSNGRFVPEKFEEIFKKYAQTRPDALTGKELQEMMKANREPKDLKGWLGGFTEWKVLYSLCKDKDGFLHKDTVRAVYDGSLFERLEQERNSKKESSKKK

SEQ ID NO: 58337 - protein, 167 aa, Zea mays; identical to SEQ ID NO: 58315
  Clone ID: LIB3357-041-E2_FLI.pep

SEQ ID NO: 58338 - protein, 153 aa, Zea mays; identical to SEQ ID NO: 44881
  Clone ID: LIB3357-042-G6_FLI.pep

SEQ ID NO: 58339 - protein, 200 aa, Zea mays
  Clone ID: LIB3357-045-G7_FLI.pep
FRTRAVAFHSERATHPRKARHEMNPPSSSDITTTNSSATAQALSPLMRRASWMSLGMMVTLLAWMAQRLVSSKSPTRYASAASCSAATADDWNRRSVLKSCAISRTRRWKGSLRMSSSVLFWYLRISRSATVPGRKRCGFFTPPVAGADLRAALVASCFRGALPPVDLRAVCFVRAIRTGAERSEQSTDLDRAAAARADW

SEQ ID NO: 58340 - protein, 150 aa, Zea mays
  Clone ID: LIB3357-049-E9_FLI.pep
VRAAGSSSSSRRASASPPGRRLRRRTAPPRWTGARTSSSGGSTSSCARRGAPRPPPTATATAWAGPAPTPRARRGPSPPASRRAAAAALLASRVAHCARPRAVSGGCVSVSTKLHEPPSRSLSRVPGPASCAPNSKQLKSCALIVSHNLA

SEQ ID NO: 58341 - protein, 231 aa, Zea mays; identical to SEQ ID NO: 48147
  Clone ID: LIB3357-056-G11_FLI.pep

SEQ ID NO: 58342 - protein, 168 aa, Zea mays
  Clone ID: LIB3357-059-A1_FLI.pep
QKRRLLLPPPPGRRLGPLPTDTAGELDVLGHDGDALGVNGAEVGVLEEPDEVGLGRLLQRGDGGALEAEVGLEVLGDLTHQALERQLADQQLRALLVLADLPERDGAGAETVGLLHSAGRRGRLARRLGGQLLPWRLAASGLPRRLLRAGHRDSTKGASALLRTRICC

SEQ ID NO: 58343 - protein, 194 aa, Zea mays
  Clone ID: LIB3357-061-G6_FLI.pep
PPELGERRTTMGLLSQRVERSEMEPGDHIYTWRAGYTYSHHGIYVGGSKVVHFTRKREAGGAGLDSAIAVSSLLLSRGSDECPSFPDCGFQLPDSGVVLTCVDCFLGGGALHRFEYGVPAAAFLAKVRGGTSTTARADPGDAAVRRAMHLLRHGFGDYDVFENNCEDFALYCKTGLLLLPAAAAGGGVGRSGQA

SEQ ID NO: 58344 - protein, 178 aa, Zea mays; identical to SEQ ID NO: 41250
  Clone ID: LIB3357-063-A4_FLI.pep

SEQ ID NO: 58345 - protein, 282 aa, Zea mays
  Clone ID: LIB3357-065-E5_FLI.pep
IAAALAGLVARRRRRRRGRGGAAIVRGMSYGGSSSLAPGAKRPFEYGRTHVVRPKGTHKATIVWLHGLGDNGTSWSQLLETLPLPNIKWICPTAPSRPVSLFGGFPCTAWFDVADLSEDAPDDTEGMDASAAHVANLLSTEPADIKLGVGGFSMGAATALYSATCFAHGKYGNGNPYPVNLSLAVGLSGWLPCARTLKNRIEASPEAAQRASTIPLLLCHGKADDVVLYKHGQRSTDALKANGFSNVLFKSYNSLGHYTVPEEMDEVCKWLTANLGLGTSSS

SEQ ID NO: 58346 - protein, 202 aa, Zea mays
  Clone ID: LIB3587-195-E2_FLI.pep
DSREPLSGREGKERRSGGEMGAAESVPETSIHEFTVKDCNGKEVSLETYKGKVLLVVNVASKCGFTETNYTQLTELYQKYRDKDFEILAFPCNQFLRQEPGTDQQIQDFACTRFKAEYPVFQKVRVNGPDAAPVYKFLKASKPGLFGSSRIKWNFTKFLVGKDGKVIERYGTSTAPMAIEVSFPLCLCLSLPLSRRLPTFSF

SEQ ID NO: 58347 - protein, 252 aa, Zea mays
  Clone ID: LIB3587-206-B3_FLI.pep
HVSSAALAKQTQPATANPSSDSSPARGSPPQLFVPGGPRPPPEMSYAYLFKYIIIGDTGVGKSCLLLQFTDKRFQPVHDLTIGVEFGARMINIDNKPIKLQIWDTAGQESFRSITRSYYRGAAGALLVYDITRRETFNHLASWLEDARQHANANMTIMLVGNKCDLSHRRAVSYEEGEQFAKEHGLIFMEASAKTAQNVEEAFVKTAGAIYKKIQDGVFDVSNESYGIKVGYVVPGQSGGAGSSSQGGGCCS

SEQ ID NO: 58348 - protein, 209 aa, Zea mays
  Clone ID: LIB3587-207-A2_FLI.pep
VSIHCPSGFGTAMEEQFILRVPPSVAERIERLMNESAASSSNPDEASLDLSFSEDGRNGTFMIGNESFPASLLDLPAVVESYKTYDDSVLIKTADVGQMIMVREENDPAPEGVEYKHGLTPPMRDARRRRFRREPDLNAELVNQVEKHLISIMHGVSVNQNASATGGEEGGDRKKPPVARAAKQPGVQEPAANGEEADPERSDSDDSDN

SEQ ID NO: 58349 - protein, 130 aa, Zea mays
  Clone ID: LIB3587-215-A4_FLI.pep
WMRSRFKSFLRTLGAGADTLIDPCLPSVPTNTGVRQAVRRRVAVRGGRQLRVLLHPQQRHLHLLLHGAPLLPPLQGRRRRSRRRCRRLLINQVFVHHTVHFVLLASIYLYMPFVMSRSSDPVRPAARVVV

SEQ ID NO: 58350 - protein, 165 aa, Zea mays
  Clone ID: LIB3587-215-H12_FLI.pep
SLLTFLLPDPDLPSQPPRNPFTARKMAEQEAPVVVEAPTPVLGEPMDLMTALQLVMKKSSAHDGLVKGLREAAKAIEKHAAQLCVLAEDCDQPDYVKLVKALCAEHNVHLVTVPAAKTLGEWAGLCKIDSEGKARKVVGCSCVVVKDYGEESEGLNIVQEYVKSH

SEQ ID NO: 58351 - protein, 181 aa, Zea mays
  Clone ID: LIB3587-217-A1_FLI.pep
YSTGSSSGTSSLPLGSGRGRGAVGGRRRGRGGRAWAGRCWPAASGRGRGRGRGGRRRCRGWRGRAPSCSACASRGSWRSPWSSPAARRSWCPSPRTPAPSSRRRCWRPRHRGPAAARTHARTSARSDEELVRRKDERKHGSRSQQGPVAEPSKERVVQGGQRSLARLTSLRLSMGDGLMDG

SEQ ID NO: 58352 - protein, 129 aa, Zea mays
  Clone ID: LIB3587-220-A6_FLI.pep
DARRTYRRMVFLRFEPNNQTYLSLINGYVSTEKYFSVLILWTEVRRRGIEFNHELIDAFLYALVKGGFFDMAMQVIEKAQEFKIFIDKWRYKQAFMETHKKLKVAKLRKRNFRKMEALVAFRNWAGINT

SEQ ID NO: 58353 - protein, 229 aa, Zea mays
  Clone ID: LIB3587-221-H1_FLI.pep
SIISNLCVCPFPAFLSNGEMYSDQISTGRKRSIHDRLDGDLPAGTGAGGRVRHTVSKRQRQIDEKWKHDLYREDDEPASNPKDLRLKLQRRSFQQDFTSTRSSGVRDLREKLSGIMNPQPSNADPPKPKPKPVSEVVNISRRQIADEMHARQNKKPPKQTSSKKTSQPKAESPLDSFLSSLGLEKYSITFQAEEVDMAALRHMTDSDLKALGIPMGPRKKIILALESRA

SEQ ID NO: 58354 - protein, 287 aa, Zea mays; identical to SEQ ID NO: 58142
  Clone ID: LIB3587-270-H9_FLI.pep

SEQ ID NO: 58355 - protein, 115 aa, Zea mays
  Clone ID: LIB3587-276-E1_FLI.pep
VLTCGTRPGARRSRAPAGTETRTRHVVVPVVRIRNTHGRRSLLVFVGNVVTYDEPGEGAAVRAEELGARGGGLVGRHAELGLEELVDVAPQGRADARVARVQGVVEVCAGGPRAK

SEQ ID NO: 58356 - protein, 200 aa, Zea mays
  Clone ID: LIB3587-277-B2_FLI.pep
RQFMTLVSGIEQNLKTTSALVSLPAERAALSEPCLSSCGLAEDSLAARAHNNSLGVAENSGYAEAPLALNIHEEGVGRLDESLFLVLELLEFCRRVEQINVVLENHLASGCGLKESTPSHNRPWPGCQHTNRHRVSYMKPKNGIYVFHSSVFYHFLGPTATFLSWLEDKNYCTLQLITMLLKNLSRSQQHSNMCIMSTSM

SEQ ID NO: 58357 - protein, 258 aa, Zea mays
  Clone ID: LIB3591-008-F4_FLI.pep
WPIFVAAPALHLSLHPLLALGTPALRAAALRLGLSSDGVNGFPSRLRSSAHRPVTLLNSLMAASAGESQGVERLLSYAEDLVAVLCVSTDCDDNAQVGAGVQRLLSACRSESDDLEMQLKEYQEKIHSCKEKIDKAKAETITDDELNALQSKMEEKLQEEKQLRQELRVLHDELDDLESQRLSIKERKDAVKKKKKDTQKAERTLSMCLSVTNIIPNLEDQDKVSGYIVDQNRKKIEKFEFENTTPPVEICDELWKKI

SEQ ID NO: 58358 - protein, 180 aa, Zea mays; identical to SEQ ID NO: 52264
  Clone ID: LIB3591-012-C7_FLI.pep

SEQ ID NO: 58359 - protein, 123 aa, Zea mays
  Clone ID: LIB3591-066-B11_FLI.pep
PNEIQNQHQSTSKRPIEHLENQPFLHLFHQAEDDSMQQVQHCAQFPPIHQCTSTPHLSDNPQHQQQAYLSQHISCLQVGQGHLGGRMHIIPTSPAKFCDECGSPYLRATSKFCSECGTKRLGM

SEQ ID NO: 58360 - protein, 203 aa, Zea mays
  Clone ID: LIB3591-066-H1_FLI.pep
SLHNIANMQIILELTRCRGRNSRGGLHKCAPCTAMPNNKIVAANMEEKGAGGKAAVPHDELPRFTIFLIPNRREPPLDLVELVCLHHRISLGNGVPGSSPVVELAVVLVGVAVECAVQVPTPAVESRKSNPLPAGAAPVRPYLPPFGAHVHGRRAAEEATVIDAEDGSLGGLAPSLLVLHGFLNSDETALFAIPLRRGGEGRG

SEQ ID NO: 58361 - protein, 247 aa, Zea mays
  Clone ID: LIB3591-071-H3_FLI.pep
SGRWDFLSNRPDRDPSCPTNRGSKMSFLFGKRKTPAELLRENKRMLDRSIREIERERQGLQAQEKKLITEIKKTAKEGQMGAVKVMAKDLIRTRHQITKFYQLKSQLQGVSLRVQTLKSTQAMGDAMKGVTKAMAQMNRQLNLPGLQRIMQEFERQNERMEMVSEVMGDAIDDALEGDEEEEETEELVNQVLDEIGIDINQELVGAPSAAVAQPASAGRVAQAESAGNADTGIDADLQARLDNLRRM

SEQ ID NO: 58362 - protein, 128 aa, Zea mays
  Clone ID: LIB3591-073-F7_FLI.pep
TRHPSWMPDGECVTAVGSTAPPARHISRSWYHPSRLLPPGACCLPWCIAPIALHPARKVVYVATRPRADPVASFPPSTDCGAVASASKVTLSTGCALPRWEVSDDRAALEAAAAAGEVVVAATAVPVT

SEQ ID NO: 58363 - protein, 135 aa, Zea mays
  Clone ID: LIB3591-074-A5_FLI.pep
KQKKMYRRRLRIKARRRQLMNGKTYYGRSGIGNPSIHPSMTESSLIVLGRVGEEGVDGGHDLGLLPADELPEAVHSVPLALVVVVQDAGRPLLLGHPHLGVARDVAHKLVRADAQGHGHRHEQRVHLGTDPPLGP

SEQ ID NO: 58364 - protein, 204 aa, Zea mays
  Clone ID: LIB3591-078-A3_FLI.pep
GDPAAEGGEAAVEEAAAAKKPKLEEETKEVEEASEEKAEETAEGKTEEANEKTVEAERKPVKLGPKEFSSSVEMFDYFFGLLHYWTPQIEFNKYEQMVLEDLLKKGHAEPAKKIGAGVEAFEIRNHPVWQSRCFFIRRIDGSSDDFSFRKCVDNILPLPEDMKVGNGKKSGGHHKGGGGGGGGRGGGRGRGGWRGGRGRGRRGG

SEQ ID NO: 58365 - protein, 180 aa, Zea mays; identical to SEQ ID NO: 52264
  Clone ID: LIB3591-086-A3_FLI.pep

SEQ ID NO: 58366 - protein, 126 aa, Zea mays
  Clone ID: LIB3591-089-A10_FLI.pep
NALFLLVSVRTSRSHLPEDAHHLLSLLLCPLVSSKLSLGKLQSALVLANLQKLGDTLLIRSKASNLSDQAPDHGHPLRCFPLAVGRAQRQLALGDDMALVDAHEEARLRLRRSGPPGSSGRRRSAC

SEQ ID NO: 58367 - protein, 129 aa, Zea mays
  Clone ID: LIB3591-091-B12_FLI.pep
TEVRWRWLWRWRWVRRLRRRWRRRWWWVWRRRRAGRHVQEGQLRLQLLARPRASSAYNVRTQCSLYNSIRIWVCKVQTDQLYVFIVAFVSASSSHACLCMMPCRLVVSWFSSDAYFLVVVANVRNKTMR

SEQ ID NO: 58368 - protein, 215 aa, Zea mays
  Clone ID: LIB3591-095-E8_FLI.pep
GRRQREGASPEQAGRFPRRLPRPHRRADDTGGRRRRRVAGHRARAVERLQPRGLRDALLPLHRRHGRSPGPQEDPGPWPSREESGRKDAEAALLGHPVASGMNVSRRLLPRSGRTGVWSRHEAREVGRNPPEDRSCVPGGCGSRDGDERRRQGSSGPAARFFRPLLPCIQNVSLPVVRKKGSGFSFPVSQRFLPFHLDNALHLSICIKGSSRAAF

SEQ ID NO: 58369 - protein, 85 aa, Zea mays
  Clone ID: LIB3591-098-D6_FLI.pep
TNYPRCPPSRRRRKSPSSPARQMAGGRVAHATLKGPSVVKEIFIGLTLGLIAGGMWKMHHWNEQRKTRSFYDMLDKGQISVVVEE

SEQ ID NO: 58370 - protein, 165 aa, Zea mays
  Clone ID: LIB3591-103-F3_FLI.pep
CRRWERRRRRRHRHRHRLGKETEETTAMVVRIRLARFGCRNRPFYRVMAADSRSPRDGKHLEVLGYYNPLPGKDGGKRMGLKFDRVKYWLSVGAQPSDPVQSILFRAGLLPPPPLLAMARKGGPRDRRPIHPMTGRPLDLEGVAIIDNSNAPEGDTEVPTDEVAQ

SEQ ID NO: 58371 - protein, 75 aa, Zea mays
  Clone ID: LIB3591-106-H3_FLI.pep
HRSGKIVVELNGRLNKCGVISPRFDIGVKDIEGWTARLLPSRQFGYIVLTTSAGIMDHEEARRKSVGGKVLGFFY

SEQ ID NO: 58372 - protein, 248 aa, Zea mays
  Clone ID: LIB3591-111-H9_FLI.pep
DYNIQKESTLHLVLRLRGGMQIFVKTLTGKTITLEVESSDTIDNVKAKIQDKEGIPPDQQRLIFAGKQLEDGRTLADYNIQKESTLHLVLRLRGGMQIFVKTLTGKTITLEVESSDTIDNVKAKIQDKEGIPPDQQRLIFAGKQLEDGRTLADYNIQKESTLHLVLRLRGGMQIFVKTLTGKTITLEVESSDTIDNVKAKIQDKEGIPPDQQRLIFAGKQLEDGRTLADYNIQKESTLHLVLRLRGGQ

SEQ ID NO: 58373 - protein, 165 aa, Zea mays
  Clone ID: LIB3591-113-D12_FLI.pep
RQEISRQFGMTGRRSSLVYGTAIAICVSILLGSLAMTAQAGRSSHQLLSKARSSSTTRALYIASNTSSGYHTEVQCFDEAADGGDERRKTAELLTLIFCTAKCYCHSDNADDICYCCQKPPTQVCYETIKDCQAHCPVCNPKCPAASGTAGGSQQLHAAAKNATL

SEQ ID NO: 58374 - protein, 267 aa, Zea mays
  Clone ID: LIB3591-114-D8_FLI.pep
LPFPFHSPIVPPLRLSSSSARRSHLHRPPIPPRASGRIRGAGSAAAGGGRPAMAHRMDNEYDYLFKIVLIGDSGVGKSNILSRFTRNEFCLESKSTIGVEFATRTLQVEGKTIKAQIWDTAGQERYRAITSAYYRGAVGALLVYDITKKQTFENIQRWLRELRDHADSNIVIMMVGNKSDLNHLRSVAEEDGQALAEKEGLSFLETSALEALNVEKAFQTVLSDIHQIISKKALAAQEAAGSGPPGQGTTINIADPSANTKRGCCSS

SEQ ID NO: 58375 - protein, 137 aa, Zea mays
  Clone ID: LIB3591-114-E6_FLI.pep
PQANEIAKRSYGHRPTFQEAKRNENDDDDGRESARASVAALAGGQRRHGRGRRVSVRPPSGAAALPAVERGGGVRRRRRGGGPGGGDRRRRRVRLRRVPHPPTLRERPPPRMLDGSPTSSTEGTRGTTSSEVQGGIT

SEQ ID NO: 58376 - protein, 91 aa, Zea mays
  Clone ID: LIB3591-115-D9_FLI.pep
PAASTPFSIRKTGSFFLLASDMAGGNLFGRALSYVVNEFFVQGLANNRAVQRFAVKTNKTLESLSSKAKEMREELSEQFKDARGQKDHFKQ

SEQ ID NO: 58377 - protein, 285 aa, Zea mays
  Clone ID: LIB3591-119-H6_FLI.pep
RQAGRRGGQEDRRPSRAGARDGNGTGPQNLRSFLPARPCPSTRRSCRPRPTSALSSSRGIGYATGCAMVLWVFGYGSLIWNPGFDFDDKILGFIKGYKRTFNLACIDHRGTPEHPARTCTLETDDEAICWGIAYCVKGGPEKELKAIQYLERRECEYDQKISIDFYKEGDPLKPAVTGVLVFVSTPDPIGNKYYLGPAPLQDMARQIATANGPTGYNRDYLFSMEKALASISHEDDSIIELANEVRKVLNRTKETKITGANASLKSHAPLVHLSALPEGTVVDSR

SEQ ID NO: 58378 - protein, 212 aa, Zea mays
  Clone ID: LIB3591-120-C10_FLI.pep
PMAGGHPAPLRPVVVAMKGHPGSGKSTAARAIATALCCPLLDKDDVRDCMLPLEGLAAAGMLNDLSYAVLWRMAERQVRLGLSVVIDSPLSRRSHLDMLTRLAGVLVVVVECRPGDNEEWRRRLESRGSAVANGGGGDGWHKPKTWAELERLLEGYQGCTDYEIGDVPRIVVDTTDPTVDAQVAAEKVVVFIRSHLACSQPSCGRQDSPVCH

SEQ ID NO: 58379 - protein, 245 aa, Zea mays
  Clone ID: LIB3591-120-D2_FLI.pep
TMSETGHTVQVTNLSSRVSESDLYEFFSFSGPIEHVELIRSGEYGATAYVTFKERFALETAVLLSGATIVDQPVCITYWGQPEETFNFWDRPTWEVEEEIEYTSYQSCQYNTTPQEALTVAQDIVKTMLAKGYVLSKDALAKARAFDESRGLTAAAAAKAAELSKRIGLTDRVSAGVGAMRSVDETYRVTETTKTVATATGRTAAKVVNGIVTSSYFSAGAMMLSDALTRAAKAAADLAAHGRQS

SEQ ID NO: 58380 - protein, 129 aa, Zea mays
  Clone ID: LIB3591-120-D8_FLI.pep
HHRKVCNSSCSDTALEVAQELLPSRRGVVVQRQAVVVVVVGDGGGGGLGRLSLGTLLLLLLEEVLVAAEAGPGELALVLPAHLPDLGEVHGVVRHGAVLNVPLAERRHGHPPDRGALLPLLAVLHGNDE

SEQ ID NO: 58381 - protein, 123 aa, Zea mays
  Clone ID: LIB3732-037-B4_FLI.pep
SFTMWLSDILHIQAHKVNLKTHALMHTCVCVEARLASLYSIRKTSHSHAHSHWLTEAIWNAVHSTNNVGNPRLLVLPIASPSYVSSKEVARQGNLLARLEWWKTSVGTGSTAEGITQPTTATS

SEQ ID NO: 58382 - protein, 165 aa, Zea mays
  Clone ID: UC-ZMFLMO17009D06_FLI.pep
VTTIHSYQYKKPNPYLVLVVTVPSIYRGWIDVMQVDPQPLLRRLINRRIICFAPAQFRRWSRSGAAIRSIGSAGGLSLQFPTALLNCASWDRPEFKRAQHPPAGGMQFKKAVEDGKEGHVSSAHHQRTHGIIQPARPRLDRPGVAWGGAGRGRMDFREERWVDMS

SEQ ID NO: 58383 - protein, 90 aa, Zea mays
  Clone ID: UC-ZMFLMO17075C03_FLI.pep
RKLKPTSGVSQWHSCFRTTDRKKDFKHLSEAHCLFLGRCSEKVWLESASSMSGGVLLASEDGAGLVSPDSFSSSIWGWLFNAWLWEWICS

SEQ ID NO: 58384 - protein, 160 aa, Zea mays
  Clone ID: UC-ZMROB73052E09_FLI.pep
GRLRHARRPPRRPRLQRLAHARLPPAADLQPPRARPELRRQGPLRRGHGRALGRAHRRPVPLLVLRLRPPRSALRHHRLLRRVPERPVPREPQLQRRPYRRAGRRDAGQARQPVLQERAGAQSPLPRRTPHSSRRRRRRSWWMTTPTSPGGGRTASRWPW

SEQ ID NO: 58385 - protein, 485 aa, Zea mays
  Clone ID: 700349349_FLI.pep
MMSLKSDIYSLGVIMLELVTGSKEEPDITNVLRRWSHRWKKSGQRTPSFQRHQVSKCIGLAKRCKEVEPTRRPSICDILAALGKMEDMNCSDQQVDEEVTYLEDMLGIEPLDLHFLVEPTKQISCSVHLTNATNDCFAFIVQTTNPKQYCIQPDRGVVPPRSECSVAIVLSQEPTHNKRCSMEDELSVQSTRVDEGVTAADVSEALFTGKEDRTVDHVSLMVGFDMSPSPPEEQTEDFTFAPLASLYDEEPQLSAAKVSVWTSNQLGRSGRFSKKKLVSILKSWRARLKVSSHKKLETPKHDCEIPEAVEHEEVAAPRCPKGPLPQRDLSPLGEACSRMNMTAIHEILVNRHYRDDDLDPNVPSLEEWTQQSRDMLDDRKRGDFTFRDKDFRAAIDWYTKCMDVGPKKASPTVLVRRSCCHLMCGNLDAALRDAMQAQRQYPDCPTSLYMQAVALSKLGMHSQAMGMLIEASEMEANQKKTRKAA

SEQ ID NO: 58386 - protein, 418 aa, Glycine max
  Clone ID: 700681984_FLI.pep
VCSDINKPNGQYVLPNDRMAVMTFVSSLPIRKIGGIGKVTEHILKGVFGINTCEQMLEKSSYICAFFSQSTADFFCSVGLGLGQTDSPQVRFRKSISSERTFSATKDEVLLHKKLEELAEMLSADMQKEGLSGRTLTLKLKTASFEVRTRAVTLQKYISSSEDILKHAKKLLQAELPISVRLIGLRVSQFNGDKCSAKSDPTQKTITNFITSGDVNRNCSSFPDVADHDFVSNAETDMSIDSRQTGQLDWRDPFDGNYLSDVDYQSCTVQKSDGVEEVQTSSNDATSSHYSGLTEVLGSTSYLGQVEGINVKNGSNLLEDERLDSCCQEKTMLWLNDYKCSLCGIELPPSFVEERLEHSDFHLAEKLQKEESSIHQKSVPSQSKGQKDGVTRQSKSKKQKLSQKEGSYTPIDYFFVKK

SEQ ID NO: 58387 - protein, 334 aa, Zea mays
  Clone ID: UC-ZMFLMO17238G12_FLI.pep
VNLDDKKYENESMHPKNTSDPEQIVRAIYDVEEATSHALQIILEHKMIKPDTRDSLISFLQILVAHHPSKRCRRGSAELLIDFDDHWHTNLSLSLEDSTTLLKGAGEKVCGNGVPRGYWIFCRGSKKETRGFSCGLWVLLHSLTVRIGDGESQTTFTSICDFIHNFFICEECRTHFYEMCSSVSVPFKSARDLALWLWTAHNKVNERLMKEEKELDNADPSFPKIIWPPKQLCPLCYRSSSRTADGAMQVEWNEDEVFNFLVNYYGKMLVSSYRETSMQSFQVGSISDDSSASSAATVPIGAALGIALASCTFGALACFWRTQQKNRKQRKNWN

SEQ ID NO: 58388 - protein, 610 aa, Zea mays
  Clone ID: UC-ZMFLB73009H06_FLI.pep
LGEATVNLADYADALKPSAVTLPLKGSPGTLLHVTIQRVVGGAGGYGDDASESGDASPVAKTPQRRTTLQNQLSRFEDEDGEKARAATDAMSPVQDGLLITKPPGMRFPSRRNVPMSVDPVGHLHNGSSFDAVSVSGSDASSGRYTPKISATMHNSYLQDSSNALSPFANNGTVRNPLTSSGDWSGSSAPDASTDGSTSNSGEAGLRGEDDDVEKLRSEIATLTRKLDVSDMELQTLRKQIVKESRRGQDLSKEMSSLREERDALRREYEGLRGAKKMIHDSNGSGKRLSDGYDPWSQVEELKQDLNHEKNLNADLRLQLQKMQESNSELLLAVKDLDEMLEQKNRDISILQEDTQEDPQEAEYEHALSNVHNSGRKIALSETSSYQEKEDELMLDALAKKRDDISTSELEKKILELSNEIELYKKDREDIEMQMEQLALDYEILKQENHDISSRLEQTQLREQLRMQYECSAHLAIISDLEANVESLDNELQTQAKKFEADIAEIMSAKVEQEQRAIKAEDSLRKIRWNNATTAERLQEEFKVLSSQVSSAFSANEQQLVQARKEVAELQLQKSQLEELLQKAQGDLGSVQDQHRVKVQQLITLVDFKS

SEQ ID NO: 58389 - protein, 736 aa, Zea mays
  Clone ID: LIB3066-046-E6_FLI.pep
YPWTTKDGSQFRARHFLKVGTTYQKWFSCRLWTVPSFFQLSGEQVPILACLSASKQDVQVISPFRIAAVMSKNGTSMQNFTNKSSPVSANGHDNGAAGESGYEDVEPNGEASPSGHDILETQSLLQMEDHKQQIEHVLRRFRESNFFVRIAESVEPLWSKKSVTSTTIADERSDNQGNSKRSRSNVYNTISDKGVFDGNTSGGVARDVVKCYSLQNGDIAVVLQVNVSVNKLEDPVLEVLQFEKSISNNCMPGNLVDGHCDSNDDPCQELLSWLLPLDRTLPPRSLAPPTLNPSVSHKQSYSASGSQIFNFRSYSMPSASSVQTPNNIRPPPISESQEFMPEKPAKTPDIINDGQLSFRGVPLEPERYSVRCGLEGVYLPGKRWRRKVEIIQPIEVHSFAAKCTVENLLCVTVKNIAPTHAKDIVVFIDAITIVFEEASKGGAPLSLPIASIEVGHGHSLPNLALRRGEEHSFILKPATMSSRERKTNSHAPLALSLPTMTGATLNTHTPKAGEPYADLSDQYAVLVSYRCNYTESKLFFKQATSWRPSAASDLMISVSSELSLRNPSLGARVPQLPVQILTLEATNMTSENLTLTVLAPEASGSSSVLSLNSSPTTPNGSFDGVNESSKRSGLGKDGIGFRRLNSVLATPKEGDNGGNRMSNASGCTHLWLQSAVPLGCVPARSSTTVKLELLPLSDGIITLDTLQITAREKGLAYIPEHSLEIHATSGMSSGRS

SEQ ID NO: 58390 - protein, 611 aa, Zea mays
  Clone ID: LIB3079-030-A8_FLI.pep
NPHHAVAERREERSARSMSGSGDRRGGGPPGSHSGWETMGKKSKKPGQAGGRQWAPWSSTNVTPNTARPAWGGSGSSHPSGTSWAQAPDHGAATRGNPRPPSQTSRPVLAPPLANGWQWQSRPRPSGSEVKKDDAPPSGSVPEVENVDGNNTSDDDDDDDDDLSDDISDDYDSDASEKSFETRKTNKWFKEFFEVLNTLSLEQINEQTRQWHCPACKNGPGAIDWYKGLQPLVSHARTKGSTRVKLHRELAALLEEELSRRGTSVLPAGEQFGKWKGLQESTDREIVWPPMVIVMNTFLEKDEDDKWKGMGNQELLDYFGEYEASKARHAYGPSGHRGMSVLIFESSAVGYMEAERLHKHFVNQGTDRNSWHLRKVRFVPGGKRQLYGFLANKEDMEAFNKHCHGKSRLKYEMRSYNEMVVIQMKQMSEDNQQLNYLKNKMVKTEQRSKAVEESLGVVTQKLRETIEENIFVRSKAKEKHMEYEEEMKSQEEIFHGLIEDIHKATEDKEKQFEKLLQEERSKARRFDVDSGTMKDRQLRKEYVQKFIDCQVKDVAEFEVERDELIKVHEDKKLKLKKEYMDLELELEKEFDAALTGLMEKHKPDTFEASSS

SEQ ID NO: 58391 - protein, 107 aa, Zea mays
  Clone ID: LIB3088-014-B3_FLI.pep
LWPPAQRQWHVLRDAILRWIWVRLTGRPPKHVCRGLRSLPVLWKPAASELMWRCSLLSFLPRIGGRKPSFWSCKIVATMRYYRRPYKWARETRRVCDDNATCRLVLL

SEQ ID NO: 58392 - protein, 83 aa, Zea mays
  Clone ID: LIB3079-031-F6_FLI.pep
IIHIVLYYCTRLVHTYGRYTRWYIRRARYVNTAIILVITRLTRTSQRSPLYSVHTNNDYGHTVAAAAALTRTRTPPACLHFIM

SEQ ID NO: 58393 - protein, 114 aa, Zea mays
  Clone ID: LIB3116-034-B7_FLI.pep
GYLCIINFFLQTINKMHTAIQIRYLDIREDLSDKISGYSISDEYQTYCIRIRYPNKISVFVSVIRKKSGYPKIPSEPVFTIFESGSERIFSEPYYIPYQIKIYKEDCIAVQQIA

SEQ ID NO: 58394 - protein, 112 aa, Zea mays
  Clone ID: LIB3150-007-H6_FLI.pep
NRRNDGGENYNRRNDGGKNFSRRNDSGTENFNRRNDGGGENFSRRNDGVGENFNVRNDGVGENFNRRNNFRNQNDFPGRGRGSPTPGNSYYQNGNGRFSRVNNGAKQAPVAA

SEQ ID NO: 58395 - protein, 363 aa, Zea mays
  Clone ID: LIB3150-066-G4_FLI.pep
GLRDAIAAGITSRDGFPANADDIFITDGASPGVHMMMQLLIRNEKDGILCPIPQYPLYSASIALHGGALVPYYLDEKTGWGLEISDLKKQLEDARSKGIDVRALVVINPGNPTGQVLAEDNQYDIVKFCKNEGLVLLADEVYQENIYVDNKKFNSFKKIARSMGYGEDDLPLVSFQSVSKGYYGECGKRGGYMEITGFSAPVREQIYKVASVNLCSNITGQILASLVMNPPKVGDESYASYKAEKDGILQSLARRAKALEDAFNTLEGFSCNKAEGAMYLFPQIHLPHKAIEAAKAAKKAPDAFYALRLLESTGIVVVPGSGFGQVPGTWHVRCTILPQEDKIPAVITRFKAFHEAFMAEYRD

SEQ ID NO: 58396 - protein, 173 aa, Zea mays
  Clone ID: LIB3088-020-F12_FLI.pep
ERERDTYVRAPACTLLQMHTQTRTASNAGGLPAWLGLASTLLAVGRRGEAALGRKLHGALGVDVVDAHPRRVLVAAQALEVRPRQRVAARLRRRGRRVRRLGRRGLARHELLVAHVAHRRRAHHQDGHRHEQGGSCCPLRRARGRRRLAAGGRHVVVSRRTTRLPSRLYSMFA

SEQ ID NO: 58397 - protein, 94 aa, Zea mays
  Clone ID: 700049260_FLI.pep
HYAQVNLFSSQTFITVRCFTYTCFGHLFQDLPCSSVEVLVDSEGDKHRCGSCNNSKSGICVSSLPGLKPDGHWASLCIPLLAASTTLLVRALGV

SEQ ID NO: 58398 - protein, 367 aa, Zea mays
  Clone ID: 700049378_FLI.pep
RRRQGGAGARGGGGADARGAQRPRRRRGHGGPHAPPARLLRRRPVPDGGPGRPVRAPLLRRARLQVAHPQRGRRVHGRPRAHEPGQGPHGELVLSQGRGAGRRHPVQQGVRDDGVRVPRDGPALQPRVQRGHEEPLGDHHQEAAGLLHGLRGRVDAGGRGRRRGRHAARHHVPPPAHLRGQLRPAARHLRGAAVPRRAPRGRGHVRVRARRRRHPHEVDPPRLERRALRHAAQELLRRAAGKWQGHRRRVRAAGQHGGHPQGAGRVPRRHDHARAQPRRQGAVRARVPRARQGRRLLRVQGHLHLRQRLGHRVHQVNTATTVAAMRCMAATCMLACLVLVSYVAVVVFFWLRCYLAALALAYACTFA

SEQ ID NO: 58399 - protein, 153 aa, Zea mays
  Clone ID: 700045575_FLI.pep
RTRTSPRRGQKEVLHRARLSPQGHRHRRRGNGCQRPACRRCHGPGGAAGRRRRRARLRAQPVHRQGRRHHHIQEQRRLPAQRRLRRRRGAERRRRHQDLAGGVPQRARRDLLRHPHRAGNLRLLLRAASRSRNGRQDHRQLIKLAIDRYPFMY

SEQ ID NO: 58400 - protein, 524 aa, Zea mays
  Clone ID: 700074264_FLI.pep
QQRKSVEETGSSFYSPLTYLKDAQGFAEKLFSRLQKCNERFEVRMMMLKVIARTIGLHHLVLLNFYPYLQRYVQPHQRDVTTLLAAAVQACHDMVPPDAVEPLFKQIVNQFVHDRSRPEAIAVGLNVVREICMRIPLMMNEDLLQDLVLYKKSHEKAVSIAARSLITLFREICPSLLVKKDRGRPVDPKARPKAFGEVTVASNVPGAELLDENISSEGESSDDESDGFDSDDEMDLTPAPPGTEENMEGSSVANKHDADGDTKEEDDASDDEDGTDQDDSNSDSDELDDDSDVDVGTDISDEDEGDDGELKESINGSEDEALDQNEDSEEEDKSKGSGSKAQKRKLNDYIGQLSSADASLRVLKRLATAKKAEVPSDETGKILSDEDFKRIKELKAKKEAKLALAQHGLIKGVDTRSVTFKMPSSDQLSRKRVDPLELEAHVRRKMSKEERLALVKAGREDRGPYMARAAVKQKKTGGLSNKQKQHKKRMPLAATRAKAARSRQEKKQQRKRSGNQFRGRKAWK

SEQ ID NO: 58401 - protein, 163 aa, Zea mays; identical to SEQ ID NO: 50472
  Clone ID: 700076088_FLI.pep

SEQ ID NO: 58402 - protein, 782 aa, Zea mays
  Clone ID: 700071667_FLI.pep
PIIAAAPSPPLPSSGKMASHIVGYPRMGPKRELKFALESFWDGKSTAEDLEKVATDLRASIWKQMADAGIKYIPSNTFSYYDQVLDTTAMLGAVPERYSWTGGEIGFDTYFSMARGNATVPAMEMTKWFDTNYHFIVPELGPNTKFSYASHKAVNEYKEAKALGVDTVPVLVGPVSYLLLSKPAKGVEKGFPLLSLLSSILPVYKEVIAELKAAGASWIQFDEPTLVLDLDSDKLAAFSAAYAELESVLSGLNVLVETYFADVPAESYKTLTSLSSVTAYGFDLVRGTQTLGLVTSAGFPAGKYLFAGVVDGRNIWADDLATSLSTLQSLEAVVGKDKLVVSTSCSLMHTAVDLVNETKLDSEIKSWLAFAAQKVVEVDALAKALAGQKDEAYFAANAAAQASRKSSPRVTNEEVQKAAAALKGSDHRRATNVSARLDAQQKKLNLPILPTTTIGSFPQTVELRRVRREYKAKKISEEEYVTAIKEEINKVVKLQEELDIDVLVHGEPERNDMVEYFGEQLSGFAFTANGWVQSYGSRCVKPPIIYGDVSRPNPMTVFWSKTAQSMTSRPMKGMLTGPVTILNWSFVRNDQPRFETCYQIALAIKKEVEDLEAGGIQVIQIDEAALREGLPLRKAEHAFYLDWAVHSFRITNCEIQDTTQIHTHMCYSNFNDIIHSIIDMDADVITIENSRSDEKLLSVFREGVKYGAGIGPGVYDIHSPRIPSAEEIADRIDKMLAVLDTNILWVNPDCGLKTRKYTEVKPALTNMVSAAKLIRTQLASAK

SEQ ID NO: 58403 - protein, 648 aa, Zea mays
  Clone ID: 700094445_FLI.pep
ATLTMKGVEDDEDDLKTLNMELKRDWSRGTNAFELAFRRNKEISAFLDQRERTKVPADTSVSAPEAESYQEEAAPEDEGSSEELSSVSEVATDVSPPVSDASSQVGIQDSTSVANAAEDQTVGSESSPTISVELSSNGTPDSSIVSSVSETADKPTEPEESSAVEEVLVTASSEAGKEPAADTEAVPALTEKTGAEVAAAAGVAQASTTTATISPTLVKQLREATGAGMMDCKKALAETGGDIDKAQEFLRKKGLAAADKRAGRATAEGRVGSYIHDSRIGVLIEVNCETDFVSRGDIFKELVDDLAMQIAACPQVQYISIDDVPEEVVKKETELEMQREDLLSKPEQIRAKIVEGRVKKRLGEFALFEQPFIKNDKVTISEWLKQTIATTGENMKVRRFARYNLGEGLEKKSQDFAAEVAAQTAAKPPPAPPKDDKPAETTESAEKKPAVAVSASLVKQLRDETGAGMMDCKKALAESDGDLQKAQEFLRKKGLSSADKKSSRLAAEGLIGSYIHDSRIGCMIEVNSETDFVARNDKFRELVNDLAMQVVACPQVDYVSVDDIPESVVGKEKEIEMQREDLQSKPESIREKIVEGRIAKRLGVMALLEQPYIKDDSKTVKDLVKETVASLGENIKVRRFVRYTLGEN

SEQ ID NO: 58404 - protein, 262 aa, Zea mays
  Clone ID: 700084190_FLI.pep
VLLEPGTPQGAKIISQMRSYILWMEKRKCRKIEKSSSRPPSSVKSIVAQKVSLKNGSFVVAPCPHDGRCPLENSDKYCHFVQRLERTSSQRAFKRSKGVPLRGFEDEKFCYVALRRGKRPEEAWPLDDLNFETLKERNAKRKPEDLVIDYDDQFPSEEDEEVHVDGGDSLVPYASDEHELSLFHDSEEAEAEQTVRADLGGGWGRIIYSPMRRGRQVQMDVCRSTKRDASEGTFERVVVTRSKNPTLHFQARKSLWGDLWPF

SEQ ID NO: 58405 - protein, 633 aa, Zea mays
  Clone ID: 700089501_FLI.pep
WFQNRRCRDKQRKESSRLQAVNRKLTAMNKLLMEENERLQKQVSQLVHENAHMRQQLQNTSLANDTSCESNVTTPPNPIRDASNPSGLLAIAEETFTEFLSKATGTAIDWVQMPGMKPGPDSVGIVAISHGCRGVAARACGLVNLEPTKGIEILKDRPSWFRDCRSLEVFTRFPAGNGGTIELIYMQMYAPTTLVPARDFWTLRYTTTMEDGSLVVCERSLSGSGGGPNAASTQQFVRAEMLPSGYLVRPCEGGGSIVHIVDHLDLEAWSVPEVLRPLYESSRVVAQKMTTVALRHLRQIAQETSGEVVYALGRQPAVLRTFSQRLSRGFNDAISGFNDDGWSVMGGDGIEDVVIACNSTKKIRNTSNAGITFGAPGGIICAKASMLLQSVPPAVLVRFLREHRSEWADYNIDAYLASSLKTSACSLPGLRPMRFSEGQMIMPLAHTVENEEILEVVRLEGQPLTHDEALLSRDIHLLQLCTGIDEKSVGSSFQLVFAPIDEHFPDDAPLISSGFRVIPLDVKTDGVSSGRTLDLASSLDVGSAAPQASGDASPDDCNLRSVLTIAFQFPYEMHLQDSVAAMARQYVRSVISAVQRVSMAISPSQSGLNAGHRMLSGFPEAATLARWVCQSYQ

SEQ ID NO: 58406 - protein, 515 aa, Zea mays
  Clone ID: 700089683_FLI.pep
SHVEKLNSGPVTKDYGTTGYVHGTDKVAPNPQDLLHIKSSEAFITQRSMGNGESGVYQNDNLHKSSVLHTGLIDTDPSVNLHDNGGLSVSSSQNPVVDCVSRREDPLRDWGNIACSEGIIGCDHTTTDNEHIKLAHRLHDNVQMNVPVIVEDVTDNVPSGIPSSRPVVPQVVMAAEEHQEVILSSQKDDDSRTNRPELANEDHDGVADGSISDAVVAELEASMYGLQIIKNGDLEELRELGSGTFGTVYYGKWRGTDVAIKRIKKSCFAGRSSEQEKLTNDFWREAKILSKLHHPNVVAFYGVVPDGTGGTLATVTEFMVNGSLRNVLLRKDRMLDRRRKLTIAMEAAFGMEYLHSKSIVHFDLKCDNLLVNLRDPQRPICKVGDFGLSRIKRNTLVSGGVRGTLPWMAPELLNGSSSKVSEKVDVFSFGIVLWEILTGEEPYANMHCGAIIGGIVNNTLRPPIPEKCDPDWQKLMEQCWSANPDARPSFTEVTDRLRAMPPVIQARGGQAPATR

SEQ ID NO: 58407 - protein, 147 aa, Zea mays
  Clone ID: 700051709_FLI.pep
STEQEYSHTGPKQPQVTFLMKAKGKRKLLSRQPKTPACLVLCRRGPVQIQFEAHLVCRHRGRRRGVINHRRRVGVALRNRGHSHGRWSDLEHPVSGCRGSRLLVEKVLLWRRAGDRIALERKPHAGGDCVHGGRPMEEVEIESRRKR

SEQ ID NO: 58408 - protein, 180 aa, Zea mays
  Clone ID: 700073148_FLI.pep
CSGAHQASDKQLMEVEACYNYGFLPADRGRHQPPPPPHATLPHAAEDAGELWEYFPCPFCYIEVEVPFICNHLQEEHCFDTRNAVCPICANNLGKDMAAHFRLQHTHLLKRRKPYRPSSCPAAATSPATYQVNSYYEEAEPQQHYSRPYKDPAPDPLLSQFICSVDAVPGDDNAQKDDKR

SEQ ID NO: 58409 - protein, 600 aa, Zea mays
  Clone ID: 700076647_FLI.pep
KTSAMTSTAVGGEPAAGHGYWRWSKADFFPEPSFQSWRAYGGALLSTGPRLRDRVTSRSSEAVEAGTLLAQSENPLRRCLSWVDLAFLGFGSVVGSGVFVLTGQEARFDAGPAIPLAYAAAGFSALLSSFCYAELAGEIPSAGGSFSYLRVELGDLAAFIAAGNILLEAVVGAAGLGRSWTSYLAALIGRDSDALRIHVPALADGFNLLDPIAVVVLCATSALAVSGARLTSTVNSVASAVGIAIIAFVLAAGFSHFEPANLAPSFFPFGAAGVFRAAAVVYWSYTGFDMVATMAEETKNPGRDVPLGLISSMSAITLVYCAMSLALVGMQRYSDIDANAAYSVAFAAAGMKWARYVVALGALKGMTSGLLVGALGQARYTTQIARTHMIPPYFALVHPRTGTPIYATIAVTLGAACVALFSSLDVLASVSSISTLFIFALVAVALLVRRYYVAGTTSPAQARTFVGFLALIVLSSIGLSVYYNSGYAARWPGYVAFGALWAAGTAGLALFAEQQRAPRVYGAPLMPWLPAMSVATNLFLMGSLGSLAYMRFGICTAAMLVYYVLFSVHATYDMVHSQGQTTSAADAATDGVEQRKIMPV

SEQ ID NO: 58410 - protein, 268 aa, Zea mays
  Clone ID: 700093880_FLI.pep
AAEAGRGGVHGGGVQLRRDGVVQDGGGAPGPGPVAGGVGVRGGHDRLPQRGDAGGDRREVVGRAAAAGVRQGAQGAALRRYLPEALVPRPPPQGLPRGDVHQPQGERRAAGRFGGQQQRRHRARPAPENTPVVGRERQHLQHRARQDNERAARREDDAAEHKQGRPPGAPGEALRLQPAPQGVPGVRHGYRNHQQGVTRAAGRSWPPTFATSSVCFEITRENGRHFHHPICLLYCCCLRKIFCHVPKVQESTFNPYKYVLIVLKAGIQ

SEQ ID NO: 58411 - protein, 77 aa, Zea mays
  Clone ID: 700093981_FLI.pep
PKDRQSSSSCSTFTLCSFKSSSSSSSSASSSSGSPSGSFSSSGPSTSRDFLPAFRISFTSSTPSSEIKFPLMFSCTN

SEQ ID NO: 58412 - protein, 250 aa, Zea mays
  Clone ID: 700086081_FLI.pep
LIAKGCKKVVVVNRSVERVDAIREEMKGIEIVYRPLSEMYEAAAEADVLFTSTASETPLFTKEHAEALPTISDAMDGARLFVDISVPRNVSACVSEIGSARVYNVDDLKEVVEANKEDRLRKAMEAQTIIAEELKRFEAWRDSLETVPTIKKLRSYADRIRASELEKCLQKIGDDALTKKTRRAIEELSTGIVNKLLHGPLQHLRCDGGNSRTLDETLENMHALNRMFGLDTEKAIVEQKIKAKVEKIQN

SEQ ID NO: 58413 - protein, 510 aa, Zea mays
  Clone ID: 700086255_FLI.pep
VSCKHPPASANCQPPPITSQQRGAEKMASPSYRLAAAITAPSTGEFLVVRQPRPPSPPEEEEDYRRFVDSDLYDLPSAPLGPLEGAPRSEVAIGGADSVASRLDLSRLDVSAALDQIFHQFGLPVGMSGEWRLLKYVEEAEFGPDAGVNTVYIVGSLELRLDDLPESCKWMSKECALRLLSEAKPGNDRIGQYAYIGLLNSELSSNCTASPALPFQEYPPVITLVPMKSRTLAPFRTTNLVVVRSTNGAGGSTCSDFFASGEALLIDPGCSSQVHAELADLIDSLPKRLLVLVTHHHQDHIEGLSVVQRCNPDAVLLTHQSTMDRIGKGTWQIDYTSVTGGEKICIGDQELQVVFAPGHTDGHMGLLHVNTNTLVVGDHCVGHGSATLDSRNGGNMKDYFETTYKFLELSPHVLIPMHGRINLWPNYMLCGYLRNRRAREASILQSIENGAQTLFDIVSKTYSDVDRKLWIPASFNVRLHVDHLSSLHKLPKDFSLEMFSRSCDDFISRV

SEQ ID NO: 58414 - protein, 339 aa, Zea mays
  Clone ID: 700088259_FLI.pep
EFLFTFSSFKCFAVTILVMFLKACLYSRRSWGYLCRLSDLSRFKWHYSLGRVGAADVHLGTKNCDFQMERYAFKRRTDGIYIINLGKTWEKLQLAARVIVAIENPQDIIVQSARPYGQRAVLKFAQYTGAHAIAGRHTPGTFTNQLQTSFSEPRLLILTDPRTDHQPIKESALGNIPTIAFCDTDSPMRYVDIGIPANNKGRNSIGCLFWLLARMVLQMRGTILPGHKWEVMVDLFFYRDPEEAKEQEEEAAVAPEFAAITDYQGADQWGGDQWTSDVTAPPVAPTGADWGAAPAPVPTGDGWDQAGAPAPVVDGTVPPVVAPTGWDQAAPPPTAQGWE

SEQ ID NO: 58415 - protein, 84 aa, Zea mays
  Clone ID: LIB3116-009-B10_FLI.pep
HLRQPVEVKRCIVIALCNSSPSTGLWDSPRNDSLSVKFTRFGEVVRIYRPNVSIGFQLLVNSRVETNIQVLHSIINIEVHICFL

SEQ ID NO: 58416 - protein, 408 aa, Zea mays
  Clone ID: LIB3079-026-A12_FLI.pep
EDNDKLTIQGEQQSSTRKFTSHHTGRTESFLLFSYLQHSLQEEPDSWLMIPSPINQEPKGRRAVARTEQRVIPSWPSLSVSDDGAGVGILLAEDGGEPVGVGGDAVDALAHRRRVVAPVLPGEVLVPPRRRLPPRQRRRRVPDQVSLRLPLRGRGRRAVMMRLLTRRRRRFLALAAVAWPLPLRVLLLLPFLLLRRGRLGAEPDAARLPLLALASLWVWALWWLRLGAGGLWRRVFRLRGCLGLLGLGLGFGCTVVLLGLVPGRRLGSLWLWWCALLLRLWRRRRWGHVDGVVAGEGHRARHRPHVVGLRGLTAQGVIKVQLQPPFPPSLAPAVAFSERSRHDLGQGRIATHGAAASLPRRTVVVVVVPFACVFRCGIHARSSSSRRRRNGEGGPALIVCLIGEGTPS

SEQ ID NO: 58417 - protein, 65 aa, Zea mays
  Clone ID: 700211478_FLI.pep
CNTLQPSYLEPHGDKNDKMLHLFFSCASRIVRCSIALSLLRALISVIFSSNAAFSFPFSPSLPAM

SEQ ID NO: 58418 - protein, 278 aa, Zea mays
  Clone ID: 700168184_FLI.pep
SFIPFGFRFSPVGSRLPEGEEDMDLASVNEELAEIDGQIGDILRVLQNGFQKLEKIKDANRRSRQLEELTDKMRDCKRLIKDFERVSKAEAEHTDPATAKMLHDRKQSMIKELNSYVALKKQQASENKRIDLFDGPSAEDGFGEENVLLASNMTNQQLMDQGNQLMDETDQAIARSKQTVQETVNVGTETAAALKAQTEQMSRVVNELDSIHFSIKKASQLVKEIGRQVATDRCIMAMLFLIVAGVIAIIIVKIVNPHNKDIRDIPGLAPPVSRRLLR

SEQ ID NO: 58419 - protein, 327 aa, Zea mays
  Clone ID: 700170623_FLI.pep
NDEGSRSPKSNHLTLLPERVALYGDKVWRSALISVIRNYTSERSSPTCIVADDSVFLALIVSFLLPSSKVLAMFPCLRDIGLNYLQAVADANNLSMDRIKVIGKKASSLTTNDLNHEKVNMLVGEPFYHGSEGMLPWQNLRFWNERTLLDPLLSEDAFIMPCKGILRFCAMSLPDLWRSRRSLKDVEGFDHSVVNDTLGACGDLPGEQQGPCLPYYVWQCGYTKKLSEVYSLMDLNFSEPIHSCFGETKVEFAHDGTCHGFAVWIDWVLDKENSIVISTGPESRYWKQGVQLLSTPVQVNPANSVMHVEANFDAVIGELTFKSTTLS

SEQ ID NO: 58420 - protein, 349 aa, Zea mays
  Clone ID: 700170732_FLI.pep
ASSRSRALGEERSMASRGSMTCSLQLAVLVSAAIALGFGVRAGEAQLSSEYYGQTCPVVHRVARRVLKKAHEADVRIYASLTRLHFHDCFVQGCDGSILLDNSSSIVSEKFATPNNNSARGYPVVDAVKAALEEACPGVVSCADILAIAAKISVELSGGPRWRVPLGRRDGTTANITAANNLPSPFDNLTTLQQKFGAVGLDDTDLVALSGAHTFGRVQCQFVTARLYNFSGTNRPDPTLDRGYRAFLSLRCPRAGNASALNDLDPTTPDTFDNNYYTNIEARRGTLQSDQELLSTPGAPTAPIVGRFAASQKEFFRSFARSMVNMGNIQVLTGSQGEIRKNCRMVNGS

SEQ ID NO: 58421 - protein, 266 aa, Zea mays
  Clone ID: 700193015_FLI.pep
RKSRITQVVKIPKVNRQIMDSIREDEIDLDMENVDKSSIKKKKRKLELNKAILDDDRFKEMFENKDFEIDEESKEYLALHPQAATKEPRLIEEHFDSVSEDDQQSDGNISDTLAESDSDDVMHNSKRIRLYEVKDEHHAEAFLNSVSLSNEDAVPLEDRIAALERKQNSKALDAVKYGPGGSREISFFSKSRRRHKEESSSDDEPKGVKKRAVQPLGLKQGKAEFYMFGGNRGRGRGGGGRGGGGRGRGGGGRGRGGGRGRGRGRG

SEQ ID NO: 58422 - protein, 301 aa, Zea mays
  Clone ID: 700211003_FLI.pep
LTTAAGRQLKDDRDDERMIYDLGRRIIITSDDAAADGDAVGDGELADLDAGILRKPDVEFPDGGGEPAVEVAERRVGGKRHSTRPQRVVIHDGTPDAHQAEQLLVVPDVVRLVGVDEREVEGAVVGRVGEELVQLLQRGALPEVHLARHPGALDEGPADVVVLAAHVECDDLAVGGQRQRRGQQRVAREHAHLQGAARAAQLDQHPQQRRLVRGRLHEPPLVLVGHQPQLTHALRLVRQHRRVQHVLVEGLALEQRLVAAVDAAVDLRDGGVVAAGSHGRSVRLGAGAVQGGGASCGSRRC

SEQ ID NO: 58423 - protein, 333 aa, Zea mays
  Clone ID: 700211006_FLI.pep
HAVAGPASGLPASARHVTSSAEGHRGSVARAAKPRPAAAPPRGLPSRRYRQCRAHPCCHDVDPRPCHHGHGCCGHHGKPECSSCRGYCCRPRALEPSAPRKPTAAKEPKRRLPPRNHCRPVLKGAPFIVCSSCFKLVQVPADFAVSTKTVRKMRCGSCSTILSYSYRDPARKKAYQDSVNRCSTDGSELHGGTGDQRSDPFAPFIDGFGLSSYSTEDERRLPVSRNTSFDTLDGTKGVGRLHRLMGYGSASELLRHSPDLYESFSERTTPDVRQHDTKGKGVCIDDDDYDYDLDDTDDEDIGALKRSARKGSGWTLPWIPGKRQGDSGAIRIK

SEQ ID NO: 58424 - protein, 91 aa, Zea mays
  Clone ID: 700217040_FLI.pep
TRRETFDLAASRIIAPRSSKMQIYNIHPRPPLYILGLQKEPSSSSFNLLLLRLIIKDPKLKRDKRTMPKTKKHSSVLRSTMDSFKLRLAVD

SEQ ID NO: 58425 - protein, 209 aa, Zea mays
  Clone ID: 700076454_FLI.pep
AGWRAVVRGGAGEAGRAGVHVHQRRRQAAAAVLQPGPADEHFRPQQPVAGRHDCFICGAHGGVRSLQHVLGPDPAAVGGPDDERDVRGGPAGGVPGGGGPQHRAAAGPRDAAGLRQPVLRQPGGRPGAVRLRPGALLRRAVAAHRGGVGAERHRLRAGLRRRHHQARPRRRQDRPVAGGRPPRLRLPQLKKDGHGDLVYYISHKCSYTI

SEQ ID NO: 58426 - protein, 291 aa, Zea mays
  Clone ID: 700071720_FLI.pep
APHHHLRPQMSRHHHHAATIAAAVLFLLTAPPCAADPNDERCLTHLHQSLSDSSGRLNWTKAAISAPCDGFFSHLQGVTCNNGRVYKLALPDLSLGGTVPPELSNCTNLQSLDLSANALSGAIPTELSALLNLAVLNLSANALSGAIPRELASCAYLNVIDLHGNQLSGPIPEELGLLVRLSTFDVSYNRLSGPIPVLLANRSGAGTAAVGTARFNASSFVGNKGLYGYPLPPMRTRGLSVLAIVGIGLGSGLLSLVLSFSAVCLWLRATDRRTPTTPGEEGKISQPMPNY

SEQ ID NO: 58427 - protein, 174 aa, Zea mays
  Clone ID: 700235692_FLI.pep
HTSSNMFDLSANYYRSPVPDPKSKGVIYGLTLDTSEKHLALLYLATIQGIAYGTRHIVEHCNAHGHKIDTLLACGGLAKNSLYIQEHADITGCPIILPRESESVLLGAAVLGAVAGKKFPGVRDAMKALNAAGKVVNPSSDPKVKKYHDAKYQIFRSLYEQQLSHRATMAQALQ

SEQ ID NO: 58428 - protein, 519 aa, Zea mays
  Clone ID: 700242927_FLI.pep
EILRRRQYALLLSYFQYCSSILDSDVPPSVLRFLLLEEQDGDDEDITLQKVLKEHNELAHANFSIIRKEAQAIVDLVTKDAFHGSEAGKALSFYVLDALISIDHEKYFLNQLQSRGILRSCLSDVANYLSKDSSLASESSQRFCTVDAQFSLLLRLSHHYGKHGSQILLSMGALQNLSACNLMGGQKKVNPRAISKIVKERTGEIDKRSLITPVLRIVTSFTSLVDSADFLEVKNKIVREIVDFAKQHQSVFNSILRENMTGTNLLTLEQLSMAVSILSKVWAYEENEECSYIQDLFSLMHSLFSVDFGILNFMQSPNMIENQKSELIAFGLCFSLVSYLYVLATRKNMRFQVSYGRNSDQQHPTLQMVSDLLNSATLALERVGEEKYMLLNKIRDLNELSRKEVDEIIKVCMKQDCISPNDNIRKRRYIAMIDLCCMAGNRDQLITLLLQITECAVTILLIHFQDDASAKGLSSFSDELLPVLERLEHLKEDKVGRSLKLFHRSITTLKEMTIRTITI

SEQ ID NO: 58429 - protein, 489 aa, Glycine max; identical to SEQ ID NO: 43983
  Clone ID: 700734555_FLI.pep

SEQ ID NO: 58430 - protein, 607 aa, Glycine max
  Clone ID: 700835937_FLI.pep
EEKRMGNNMATYNKYKSFLFFIRKFKVTEPVSPQDLEEAFSKFTGGGSHMSADELHRFLVEHQGEEDYTLLNSEKVVEKVLKERKRCQESVKVDQNREHEITLDELFRFLLHDDSNGPLKAEVHHDMGAPLSHYFIYTGHNSYLTGNQLSSDCSEEPIIKALKRGVRVIELDLWPTYNKHDIKVDHGWTLTNPASVIKCLESIKEYGFVASQYPVIITIEDHLTTDLRAKFAEMATQIFGEMLFYPGTDCSCLTEFPSPESLKNRVIISTKPPKERFKSNRIKDNPMLNESDSSEEETWGNESPDSNKNEVETEDTNGSDRDEGNVSACECDHKPYQECSPDYKHIITIHNTKLKGCMKDKLKTDGEVRRLSWSEKTLEKASESHGTDILRFTQKNILRVYPSAMRVKSSNFKPHIGWMYGAQMVACNMQGLGKSLWLMQGMFRANGGCGYVKKPQFLMQKHQCDNEFDPTRIQSVKKKTLKVKVYMGHGWSSDFSPTHFDKCSPPDFYTKVRIVGMPADVAKKKTKVMMDDWFPVWDEEFEFSLTVPELALLLIQVKDKDPGKDDFAGQTCLPVSELKHGFRSVPLYNKKGEKFKSVKLLMRFQFE

SEQ ID NO: 58431 - protein, 273 aa, Glycine max; identical to SEQ ID NO: 44461
  Clone ID: 700893735_FLI.pep

SEQ ID NO: 58432 - protein, 575 aa, Glycine max
  Clone ID: 700942124_FLI.pep
ELSESIRYASGDPIESWLNSLLCLDASNTIPNISRLPPPSECDLYYVNRDTLFSYHRDSELFLQRMMALYVASHYKNSPNDLQLMADAPAHHLFVLLGPVDESKNQLPDILCVIQVSLEGQISRKSAIQSLTDGHQPFGDQIPWKFCEQFRDTVFPSLSGARIVRIATHPSAMRLGYGSQAVELLIRYYEGQLIPISEIDVEDKVQAPRVRVTEAAKQVSLLEENIKPRTDLPHLLVHLRERQPEKLHYIGVSFGLTLDLFRFWRKHKFAPFYIGQIPNAVTGEHTCMILKPLNNDEIEADGSNQLGFFSPFYQDFRQRFAKLLASTFRVMEYKLALSIIDPKINFKNQDPTEATSDKCLQSVKDYLSPHDMKRLEAYVDNLADFHLILDLVPTLTHLYFQEKLPVTLSYAQASVLLCIGLQNQNISYIEGQTNLERQTILSLFIKVMKKFYKYLDGLASKEIESTLPRLKEIVMEPHSVSLDEDLNNAAKQVEDDMKSKAEATFTPELLQQFAIEGESGFETVLQNNGGKIPIGGLISVKSSKVKHEKEKGSHKSDKKRSKDNHNHKSSKRKRS

SEQ ID NO: 58433 - protein, 838 aa, Glycine max
  Clone ID: JC-GMFL02220115B11_FLI.pep
NLILKNNQLIGPIPSTLSQIPDLKILDLAQNNLSGEIPRLIYWNEVLQYLGLRGNNLVGSLSPDMCQLTGLWYFDVRNNSLTGSIPENIGNCTAFQVLDLSYNQLTGEIPFNIGFLQVATLSLQGNKLSGHIPPVIGLMQALAVLDLSCNLLSGSIPPILGNLTYTEKLYLHGNKLTGFIPPELGNMSKLHYLELNDNHLSGHIPPELGKLTDLFDLNVANNNLEGPIPSNLSSCKNLNSLNVHGNKLNGSIPPSLQSLESMTSLNLSSNNLQGAIPIELSRIGNLDTLDISNNNLVGSIPSSLGDLEHLLKLNLSRNNLTGIIPAEFGNLRSVMEIDLSNNQLSGLIPDELSQLQNMISLRLENNKLTGDVASLSNCISLSLLNVSYNKLFGVIPTSNNFTRFPPDSFIGNPGLCGNWLNLPCHGARPSERVTLSKAAILGITLGALVILLMVLLAACRPHSPSPFPDGSFDKPVNFSPPKLVILHMNMALHVYEDIMRMTENLSEKYIIGYGASSTVYKCVLKNCKPVAIKRIYSHYPQCIKEFETELETVGSIKHRNLVSLQGYSLSPYGHLLFYDYMENGSLWDLLHGPTKKKKLDWELRLKIALGAAQGLAYLHHDCCPRIIHRDVKSSNILLDADFEPHLTDFGIAKSLCPSKSHTSTYIMGTIGYIDPEYARTSRLTEKSDVYSYGIVLLELLTGRKAVDNESNLHHLILSKAATNAVMETVDPDITATCKDLGAVKKVYQLALLCTKRQPADRPTMHEVTRVLGSLVLSNTPPKQLAALPPASNPSAKVPCYVDEYANLKTPHLVNCPSMSTSDAQLFLKFGEVISQNSE

SEQ ID NO: 58434 - protein, 323 aa, Glycine max
  Clone ID: JC-GMLE01810048H03_FLI.pep
GNLSGKDDYMEIDGQGSRSETSGYHSDTDLEDDCRETSEPPVPPQRVVNMLQGCRSVDEFERLNKIDEGTYGVVFRAKDKKTGEIVALKKVKMEKEKEGFPLTSLREINILLSFHHPCIVDVKEVVVGSNLDSIFMVMEYMEHDLKGLMEGMKQPFSQSEVKCLMLQLLEGVKYLHDNWVLHRDLKTSNLLLNNRGELKICDFGLARQYGSPLKPYTHLVVTLWYRAPELLLGTKQYSTAIDMWSLGCIMAELLSKEPLFNGKTEFEQLDKIFRILGTPNETIWPGFSELPRVKVNFVKNKLPTLGGSGWLSGLSWLLLHNFF

SEQ ID NO: 58435 - protein, 253 aa, Glycine max
  Clone ID: JC-GMLE01810051A06_FLI.pep
LGHVIDKLSVSFGLEILKVVPGYVSTEVDARLSFDTAATIARAHRIIDLYEKAGIKKDRVLIKIASTWEGIQACKHLQKEGISCNMTLLFGFAQAVGCAEAGATLISPFVGRILDWHKAKTGKSSYESHEDPGVVSVTKIYQYYKKYDYKTIVMGASFRNTGEITELAGCDRLTISPGLLEELAKSTSKLDKKLDPETAAKAYTGEKVSYDEKGFRLSMNEDAMATEKLAEGIRGFSADIVKLEQILKAKLSA

SEQ ID NO: 58436 - protein, 564 aa, Glycine max
  Clone ID: UC-GMFLMINSOY012G09_FLI.pep
KMSKVLQAKLEATPTWAVAVVCFVMLAISILIEHILEELGKWLKKKHKKALHEALEKVKGELMLLGFISLLLVMFQDHISNICIPKSVASTWHPCDPGDERKKPDGYYDKCADKGKDQVAFMSEYSIHQLHIFVFVLAIFHILQCIMTLTLGRTKMSIWRKWEDETKSLGHQFHHDPERFRFARDTTFGRRHLSSWSRSPGSLWIVSFFRQFYGSLNKVDYMALRHGFLVAHLTPANEAKFDFQNYIKRTLDEDFAAVVGITPTIWFFAVLILLTNTHGWYSYFWIPFIPVIIILLVGTKLQMIITEMALKIQDRGEVVKGAPLVEPGDELFWFNRPRLILFLIHLVLFQNAFQLAFFAWSTYDNGFKINSCFHKTTADIVIRLTMGVLTQVLCSYVTLPLYALVTQMGSTMKVTIFNENVAVALKNWHHTAKKHIKHNKDSTSNTPFSSRPGTPTHGMSPVHLLHKHPRHSDSPVVSPRAYNYENEQWGVEGIHSPSHHARDHDPDHEKTMQMQMQMQQQRPAPTAELPPSGLNPIRTQHEINIALSEFSFGRGHHTGSNTNN

SEQ ID NO: 58437 - protein, 131 aa, Glycine max
  Clone ID: UC-GMFLMINSOY028G09_FLI.pep
LVVVFNIICFLISLKTTPDVSKSPSTPKPTVSSPTKTNNSATWCVPKGGVADAQLQANLDYACGQGIDCTAIQQGGACFEPNTLVNHAAYAMNLLYQTAGRNPLTCDFSQTAMLSTNNPSYKSCLYAGGNA

SEQ ID NO: 58438 - protein, 1658 aa, Glycine max
  Clone ID: UC-GMFLMINSOY081F03_FLI.pep
PSDMFYGKIIPALKEKGIKRVISRRDWPHEVKCKVLLDLMKEVPRHLLYQELWCASEGYKAFSSKMKRYSGSVAAMSMVGHVLGLGDRHLDNILIDFCNGDIVHIDYNVCFDKGQRLKIPEIVPFRLTQMIEAALGLTGIEGSFKSNCETVIGVLRKNKDILLMLLEVFVWDPLVEWTRGDFHDEAAIGGEERKGMELAVSLSLFASRVQEIRVPLQEHHDQLLTSLPAVESALESFADILNHYELASTLYCRADQERSGLILRETSAKSILAEATSNSEKIRASFEIQAREFAQAKAMVAEKAQEAMAWAEQHGRILDALRCNLIPEINVSFKLNNMEAALSLTSAVTVAGVPLTVVPEPTQAQCHDIDREVSQFVAELGDGLTSATTSLQAYSLALQRILPLNYLSTSAVHNWAQVLQLSINALSSEILSLARRQASELIAKFHVDSIDSIKCSHDDLCFRVEKYAVEIEKLEKECAEIESSIGSESESKTKDRCLSAFMKFMQSIGLLRKEDVMSSVQSRPLGELEEEREKALSILNIAVSSLYNDVKHRIQNIYNDMSGGRNQYNMLQNDSGTIFAEFEEQVEKCNLVTEFVNDLCQFIGKDTPSVDINKVRSKFSSESNWVSIFKAILISCKGLVSQMTEVVLPNVIRAAVSLNSEVMDAFGLISQVRGSIETALEQLVEVEMERASLIELEQNYFVKVGLITEQQLALEEAAVKGRDHLSWEEAEELASQEEACRAQLDQLHQTWNQRDVRTSSLIKREADIKNALVSVNCQFQSLVGSEEERELHILRSKALLAALFKPFLELESMDIMLSAADGSVALPSSKFHTLADLINSGNSISEYVWKVGDLLDNHSFFIWKIGVIDYFLDACIHDVASSVEQNLGFDQSLNFMKKRLEIQLQKHIGHYLKERIAPSLLTCLDKENEHLKQLTESSKELALDQVKKDGAAKKVLLMLEEYCNAHETARAAKSAASLMKKQVNELKEALRKTALEVVQMEWMHDVSLNPSYNRRIRFEKYLDTDDSLYTIILNLSRSKLMDNIQSAVSKITTSMDCLQSCERNSLIAEGQLERAMAWACGGPNSSSSGNTSTKNSGIPPEFHEHIKTRRQILWESREKASDIVKLCVSVLEFEASRDGFLLIPGQPYPFRSSVDGKTWQQVYLNALTRLDVTFHSYTRTEQEWKLAQCTVEAASNGLYTATNELCIASLKAKSASGDLQSTVLSMRDCAYEASVALSAFARVSRIHTALTSESGSMLEEVLAITEDIHDVYNLGKEAAAIHLSLMEGLSKANAILFPLESVLTKDVAAMADAIARESEIKKEISHIHGQAIYQSYCLRIREACHTFKPLAPSLTSAVKGLYSLLARLARTANVHAGNLHKALEGIGDSQEVKSEDIALSRSDGGGGDAVEFDDKEGESLSRSEDDKTDDFIGFSRLSLEDKGWVSPPDSIYCSSSGSDISLAEVSLPDSLNDSAGNKDLLSQGSGSRIPTGYMHTTLLSQTDVEQISPFELSESSPVETDLNRAGSVKSINEATEHAEAISLSGDKSVAIPGNSQIPSNENLDKFDGEDELLSAKEVKNAAEHHEAPDPYINANTRVGRGKNAYALSVLRRVEVKIDGRDISENREIGTAEQVDYLLKQATSVDNLCNMYEGWTPWI

SEQ ID NO: 58439 - protein, 331 aa, Glycine max
  Clone ID: 700734434_FLI.pep
IRLWLKAMSMMAAYLRVPTSTPITPQSPTATRTKCRNLKTSCSVNAAKIPMPPLNPKDPFLSKLASIAASSPDTLLNTPKNSDTPPFLDIFDSPKLMATPAQVERSVSYNEHRPRRPPPDLPSLLLHGRIVYIGMPLVPAVTELVVAELMYLQYMDPKEPIFIYINSTGTTRDDGETVGMETEGFAIYDAMMQLKNEIHTVAVGSAIGQACLLLSAGTPGKRFMMPHAKAMIQQPRIPSSGLMPASDVLIRAKEVIINRDNLVKLLAKHTGNSEETVANVMKRPYYMDATRAKEFGVIDRILWRGQEKVMADVASPDDWDKGAGIKIVDGF

SEQ ID NO: 58440 - protein, 634 aa, Glycine max
  Clone ID: UC-GMFLMINSOY030C07_FLI.pep
SNSGAVKGREFPLPRCPCPSSNSNAPSLDLWSQIVAAETPRPERIDVVYRRRHPRNPQNHANSKPPDSAIPRPPRQSLADPNKRVSWNRSLSTRGRTSIAVGAFMVYQPQLKKDKRKGKPALPKGKVVQPPNVDKERIYFQEVDAYELLEESPSPKKSTWTIGNMTQQEPIPAVCSRLEKWLHSRRLNPFCGPSSTLSKILDTPSTRLETIRDIDFGASDLKTLERTDRSNSLLHTIKTEEKETSIENGSHLQTNEKMLFAQSGEGCEDIEAGVKKLSLVSTSSSIDDDHINPFSVLLSICGQSAPSVLQDIFSSGSETIVKVGEGTYGEAFKINNYVCKIVPFDGEFRVNGEVQKRSEELLEEVLLCKTLNQLRGKDGDSDNLCSAFIDCIEFRVCQGPYDASLIQAWEDWDLEHGSENDHPKEFPDKQCYVVFVQEHGGKDLESFALLNFDEARALLVQVTAGLAVAESAFEFEHRDLHWGNILVGRSDSETLQFTLDGKTMLVKTHGLIISIIDFTLSRINTGDSILYLDLSSDPDLFKGPKGDKQSETYRRMKEVTEDWWEGSCPKTNVLWLIYLVDILLMKKSFERTTKHERDLRSLKKRLDKYDSAKEAILDPFFTDLFVESDPNLTI

SEQ ID NO: 58441 - protein, 355 aa, Glycine max
  Clone ID: 700763862_FLI.pep
LTAIRPPILFLIFSFSHGVIAPTMAVDLMTTGYTRNDNISSFTTKAEENAVQEAASGLESVEKLIRLLSQTQAQAQAHHQFNNNNSSSNEIAIAMDCKAVADVAVSKFQKVISLLGRTRTGHARFRRAPLPNQHQHTQPPSEPPVLHATPLHQIPPPSLHQIPKTEKHLNDSSSKTLHFSYPSAVTSFVSSLTGDAADNKQPSPAATTTTSHFQITSLSHVSSAGKPPLSSSSFKRKCSSENLGSGKCGSSSSRCHCSKKRKMRLKRVVRVPAISLKMADIPPDDYSWRKYGQKPIKGSPHPRGYYKCSSVRGCPARKHVERALDDPAMLVVTYEGEHNHTVSAADATNLILESS

SEQ ID NO: 58442 - protein, 307 aa, Zea mays
  Clone ID: LIB3150-001-D6_FLI.pep
SFLVSSSRPVSNMAANLKWAPVLALLVVVAAMVGTTSAGNIAVYWGQNGNEGSLADACNSGLYAYVNIAFLTTFGNGQTPVLNLAGHCDPGSGSCTGQSSDIQTCQSLGIKVLLSIGGASGSYGLSSTDDANSVADYLWDNFLGGSGSSRPLGAAVLDGIDFDIENGQSAHYDDLANALKGKGSVLLTAAPQCPYPDASLGPALQTGQFDNVWIQFYNNPGCAYANGDDTNLVNAWNTWTSSITAGSFYLGVPASPQAAGSGYIDPGTLTGTVIPAIRGIGNYGGIMVWDRFNDVQNNYSSQVKGSV

SEQ ID NO: 58443 - protein, 220 aa, Glycine max
  Clone ID: 701056017_FLI.pep
SVSFFFITTLIHSIMGGLWKKKLTDQSLKLFDFLPQAIQEQLMLERDPHGNVQVAKIETEKMLIQMVETELEKRKQEGKYKGEFKGQSHFFGYEGRCGLPTNFDATYCYALGYGAGALLHSGKTGLISSVGNLCAPVKEWTVGGTALTSMMDVERRHGKFKPVIKKAMVELEGAPFKKFASLRGEWALKNCYISPGPIQFSGPGSEVINHTLLLELEAQA

SEQ ID NO: 58444 - protein, 213 aa, Zea mays
  Clone ID: 700221812_FLI.pep
LHSDSRNGNTVAKNYSSVNEHTNSSSLVSSVAEVDDIQSSVGKNGDSSFFTGFLKKGLKDLSLFNQSVDSAKVYINGHPISERALRKSEKKVGPVGPGSYWYDYRAGFWGVFGQECRGIIPPFIKEFNYPMPKNCAGGSTGVFVNGRELHQKDFDLLVGRGLPRIPGKSYSVEISGSVIDDTTGTKLRGLGKLAPTIEKMKRGFGMHVPEETK

SEQ ID NO: 58445 - protein, 523 aa, Glycine max
  Clone ID: UC-GMFLMINSOY070C11_FLI.pep
SSVRKREISKMADVRGRDTWTEELPSLIEDSGVLYGGDPTTTTTTTTTTSFEVYAPHSESGESFKEQALGFVMAWCEILMELGRGFRDILRQNLMNEDSYVVRKFGGPCSKVSKRLRFLNDFLPEDRDPVHAWSVVFFVFILALAAISVDPSREAVAPAVKVRQHPPCASRVLLPDGRYMAYHEQGVPADTARFSLVAPHSFLSSRLAGLPGVKASLLEEYGIRLVTYDLPGFGESDPHPNRNLNSSAMDVLHLVNAVNVTDKFWLLCHSSGCIHAWASLRYIPEKIAGAAMLAPMINPYDTDMTKEETKRTWEKWLQRRKMMYSLARRFPKLLTFFYRKSFLPEKHDEIDKLLSFSLGKKDKLMIEEPEFEEFWQRDVEESVRQGNIRPFIEEAVLQVSNWGFDLKELHVQKKCQTRGILLWLKSMYSQADCELAGFLGLTHIWQGLDDRVVPPSVMEYIERVLPEAVIHKLPNEGHFSYFYFCDQCHRQIFATLFGTPQGPVERQEETATVLEEEVSQVPV

SEQ ID NO: 58446 - protein, 626 aa, Glycine max
  Clone ID: 701060593_FLI.pep
SWNNYSCVGVYKNGHVEIIANDQGNRITPSWVAFTDSERLIGEAAKNQAAVNPERTIFDVKRLIGRKFEDKEVQKDMKLVPYKIVNKDGKPYIQVKIKDGETKVFSPEEISAMVLIKMKETAEAFLGKKINDAVVTVPAYFNDAQRQATKDAGVIAGLNVARIINEPTAAAIAYGLDKKGGEKNILVFDLGGGTFDVSILTIDNGVFEVLATNGDTHLGGEDFDQRIMEYFIKLIKKKHGKDISKDNRALGKLRREAERAKRALSSQHQVRVEIESLFDGVDFSEPLTRARFEELNNDLFRKTMGPVKKAMEDAGLQKSQIDEIVLVGGSTRIPKVQQLLKDYFDGKEPNKGVNPDEAVAYGAAVQGSILSGEGGEETKDILLLDVAPLTLGIETVGGVMTKLIPRNTVIPTKKSQVFTTYQDQQTTVSIQVFEGERSLTKDCRLLGKFDLSGIPPAPRGTPQIEVTFEVDANGILNVKAEDKGTGKSEKITITNEKGRLSQEEIDRMVREAEEFAEEDKKVKERIDARNSLETYVYNMKNQVSDKDKLADKLESDEKEKIETAVKEALEWLDDNQSVEKEDYEEKLKEVEAVCNPIISAVYQRSGGAPGGAGGEGEDEDDSHDEL

SEQ ID NO: 58447 - protein, 522 aa, Zea mays
  Clone ID: UC-ZMFLMO17240B04_FLI.pep
KDPDSPTPASHKVQPRCYRNAEKCLTLPESATCAVAATATASTSRTGRFIGLVAGFSGKVRSGQLCRRRNIEERKEVGGNGGCDGGGREERAAGAVRAGAGAGARQLRAGARGAGPAHGPQRRGQGGGQGQAGARGHGGADQAGDRRHEDGVPPQHRGAARGDGHPLQDLPRARARPRRGALLPHRARGAGPGGRGALLLPAARRRGRLLPRPRVFHRDLKLENLLLDEVGNLKVADFGLSALAGHARSDGLLHTACGTPSYVAPEVLGGKGYDGAKADLWSCGVILYVLLVGSLPFHEDNLMVMYRKMQRGEFLCPPWVSADARKLIGELLDPDPSTRITVARLVETPWYRKPLPVLPPLNLKEPTPDARRATSDKEEPEVLNAFHLISFSEGFDLSPLFDQGRGGGVGRSSAGGIRFVTREAASSVVSRLESLVTGRGANMRVTKSGSRGVRLEAVSRGRSGARLAVAAEIFSVAPSVLLVDVKKDGGDTMEYRSFCSEELRPALKDIVWASSQDTPGAA

SEQ ID NO: 58448 - protein, 764 aa, Zea mays
  Clone ID: UC-ZMFLB73041E04_FLI.pep
IDLTFHIYHFSPFYIGRDLSYNRFTGPIPFNIGFLQVATLSLQGNKFTGPIPSVIGLMQALAVLDLSYNQLSGPIPSILGNLTYTEKLYMQGNRLTGSIPPELGNMSTLHYLELNDNQLTGSIPPELGRLTGLFDLNLANNHLEGPIPDNLSSCVNLNSFNAYGNKLNGTIPRSLRKLESMTYLNLSSNFISGSIPIELSRINNLDTLDLSCNMMTGPIPSSIGNLEHLLRLNLSKNDLVGFIPAEFGNLRSVMEIDLSYNHLGGLIPQELGMLQNLMLLKLENNNITGDVSSLMNCFSLNILNVSYNNLAGAVPTDNNFTRFSHDSFLGNPGLCGYWLGSSCRSTGHRDKPPISKAAIIGVAVGGLVILLMILVAVCRPHHPPAFKDATVSKPVSNGPPKLVILHMNMALHVFDDIMRMTENLSEKYIIGYGASSTVYKCVLKNCKPVAIKKLYAHYPQSLKEFETELETVGSIKHRNLVSLQGYSLSPVGNLLFYDYMESGSLWDVLHEGSSKKNKLDWVTRLRIALGAAQGLAYLHHDCSPRIIHRDVKSKNILLDKDYEAHLTDFGIAKSLCVSKTHTSTYVMGTIGYIDPEYARTSRLNEKSDVYSYGIVLLELLTGKKPVDNECNLHHLILSKTASNEVMETVDPDVGDTCKDLGEVKKLFQLALLCTKRQPSDRPTMHEVVRVLDCLVNPEPPPQPQQQQQKAHAHHQLPPQPSPPAYVDEYVSLRGTGALSCANSSSTSDAELFLKFGEAISQNMV

SEQ ID NO: 58449 - protein, 508 aa, Zea mays
  Clone ID: UC-ZMROB73011E07_FLI.pep
RSPTLVRPARPPPARALGAPFRFSSPGMASARGPCGISVRSDFSSACLIHKAGAPSNSVSGVMAVQVHRHRNKVRNGQAIRCAMATGKEQGAISTASSGDQTKGGLRGKLNKVVLAYSGGLDTSVIVPWLRENYGCEVVCFTADVGQGAIELEGLEKKAKASGACQLVVKDLKEEFVSEYIYPCLRAGAVYERKYLLGTSMARPVIAKAMVDVAKEVGADAVAHGCTGKGNDQVRFELTFYALNPELKVVAPWREWDITGREDAIEYAKKHNVPVPVSKKSIYSRDRNLWHLSHEGDILEDPANEPKEDMYMMSIAPENAPSKPEYLEIGIIAGVPVSINGRDLSPASLLAELNEIGGKHGIGRIDMVENRLVGMKSRGVYETPGGTIMAAAVRELESLTLDRETMQWKDIIALKYAELVYAGRWFDPLRQSFDAFMEKVTATTTGSVTLKLYKGSVNVASRKSPYSLYREDISSFENGEIYNQADAEGFIRLYGLPTRVRAMLEKGI

SEQ ID NO: 58450 - protein, 639 aa, Zea mays
  Clone ID: UC-ZMROB73056B04_FLI.pep
ESMYPLLNFLRAHNYKGMTMMLNDRIRSLSALQGALRKAEEHLSTLQADTPYSEFHHRFQELGLEKGWGDCAKRAQETIHLLLDLLEAPDPSTLEKFLGTIPMVFNVVILSPHGYFAQANVLGYPDTGGQVVYILDQVRAMENEMLLRIKQCGLDITPKILIVTRLLPDATGTTCGQRLEKVLGTEHCHILRVPFRTENGIVRKWISRFEVWPYLETYTDDVAHEIAGELQANPDLIIGNYSDGNLVACLLAHKMGVTHCTIAHALEKTKYPNSDLYWKKFEDHYHFSCQFTTDLIAMNHADFIITSTFQEIAGNKDTVGQYESHMAFTMPGLYRVVHGIDVFDPKFNIVSPGADLSIYFPYTESHKRLTSLHPEIEELLYSQTENTEHKFVLNDRNKPIIFSMARLDRVKNLTGLVELYGRNKRLQELVNLVVVCGDHGNPSKDKEEQAEFKKMFDLIEQYNLNGHIRWISAQMNRVRNGELYRYICDTKGAFVQPAFYEAFGLTVVEAMTCGLPTFATAYGGPAEIIVHGVSGYHIDPYQGDKASALLVDFFDKCQADPSHWSKISQGGLQRIEEKYTWKLYSERLMTLTGVYGFWKYVSNLERRETRRYLEMLYALKYRTMASTVPLAVEGEPSSK

SEQ ID NO: 58451 - protein, 516 aa, Zea mays subsp. mexicana
  Clone ID: UC-ZMROTEOSINTE037H06_FLI.pep
ISAVACILLYLEYKHIARLRLYHISRATSNPSHFTILVRGIPKSSTESFSRTVESFFTKYHASSYLSHQVVYKVGKVQKIVSGAKKVYRKFRHFKGATVDRRCRPIRFQCCFCGASSNSFQLLPSDYEQESEKSDVNESSSSLPDEECGAAFVFFKTRYAALVVAKILQTSNPMRWVTTLAPEPDDIYWSNLWLPYKQLWIRHIVTLMCSIVFMVVFLIPVTFIQGLTQLEQLQQRLPFLRGILKKKYMTQLITGYLPSVILQIFLYTVPPTMMFFSTLEGPISHSERKKSACCKVLYFTIWNVFFVNVLSGSAISQLNALSSPKDIPMQLAKAVPVQATFFTTYVLTSGWASLSSELMQLFGLTWNFLRRYLLRIKEDSDFLYSFPYHTEMPKVLLFGLLGFTCSVLAPLILPFLLLYFFLGYVVYRNQFLNVYCTKYDTGGQYWPIAHNTTIFSLILTQIICLGVFGLKESPVAAGFTVPLIIFTLLFNQYCRKRHLPLFKTFPAQVGAISLNL

SEQ ID NO: 58452 - protein, 511 aa, Zea mays
  Clone ID: UC-ZMFLMO17166E12_FLI.pep
GQVVYILDQVRAMENEMLLRIKQCGLDITPKILIVTRLLPDATGTTCGQRLEKVLGTEHCHILRVPFRTENGIVRKWISRFEVWPYLETYTDDVAHEIAGELQANPDLIIGNYSDGNLVACLLAHKMGVTHCTIAHALEKTKYPNSDLYWKKFEDHYHFSCQFTTDLIAMNHADFIITSTFQEIAGNKDTVGQYESHMAFTMPGLYRVVHGIDVFDPKFNIVSPGADLSIYFPYTESHKRLTSLHPEIEELLYSQTENTEHKFVLNDRNKPIIFSMARLDRVKNLTGLVELYGRNKRLQELVNLVVVCGDHGNPSKDKEEQAEFKKMFDLIEQYNLNGHIRWISAQMNRVRNGELYRYICDTKGAFVQPAFYEAFGLTVVEAMTCGLPTFATAYGGPAEIIVHGVSGYHIDPYQGDKASALLVDFFDKCQAEPSHWSKISQGGLQRIEEKYTWKLYSERLMTLTGVYGFWKYVSNLERRETRRYLEMLYALKYRTMASTVPLAVEGEPSSK

SEQ ID NO: 58453 - protein, 256 aa, Glycine max
  Clone ID: 700735371_FLI.pep
YQNYSSCGCGCCCHCCSLYIPCLHLCIPCSSFPCIPCSCLPCIPCSCLPCILCLALNILPNLLGLLPHFLRLLPHVLRRLGEVMLRGGGEVLRGWLGLPDVVQDPGEGRQRREPEGPRRQEPGHGQADGDRGWNQHRAEEDEERRGNCQSGEGSCQGQSRQEEQDATDREAGEDGEDLGSRWTSLGMVNGGRFDAGFITRRFETGSGGDDASFVAVCCCVDLDTVWWYLCGHHLHCKTLNFTFNHDHTIPPHQYHT

SEQ ID NO: 58454 - protein, 620 aa, Glycine max
  Clone ID: UC-GMFLMINSOY089F02_FLI.pep
ARVRETLERETERGMEEQIKSEFKRSGFGLEDEQEILSKCVTYCINYSLTPSDLVSSWEVYYLNRQLNEPIVQNTEIDGFLLHLQNEKKETVIKEKEEAGLHIYSIGDVEMILNNDDDTKDNTPGTPINHHQDPLSPALDTTSLMYENVLSSGKPSKSKLITPFSKRTDKFVVKFSINTVPKVEKAENDEDDVLTRVPLHERCSLSIHRSGPKPGCRFLYDRTEDRLNAIENRLRKYTRAFVASGLYEEPTDPTTASQRSIFAVGMICCDGEGRLNEKSVMLQSSIEHSGGECVRLDLQRLSHYSIFPGQIVGIGGHNPSGHCFVATKLVDSIPTYIANEDSNPAKKQAVDKENQPTDLLCKERELSMIIAAGPFTTTDNLLFEPLIALLTHAKLRPPQLLVLLGPFVDSEHPDIKKGTVDRSFDEIFEEILKKLEEYVDSATRVVLVPSIRDANHDFVFPQPALDMKSQIVSLSNPGIFEANKVKVGCCTVDILKQISGEEISRTAADGKPIDRLSRLANHILNQQSFYPLYPPAEGVPLDFSLAPEALQLSSIPDILILPSDIKYFVKVLSSENEGINHTKCIAVNPGRLAKGEGGGTFVELDYCGGSDQINASVVGI

SEQ ID NO: 58455 - protein, 85 aa, Glycine max
  Clone ID: 700976843_FLI.pep
FNFINLSPSLVVIFFGIEIHHQSFRLEVIFSEVSTEMSSTWLCKAHEIKLKKNTHHFCACPCHSPPHRRLTLAFTAGGKSYVNHF

SEQ ID NO: 58456 - protein, 289 aa, Glycine max
  Clone ID: 701057687_FLI.pep
AICTAVSFLATVPLGELFFFHMILIRKGITTYEYVVAMRTLSEPPGPSVDGGEQQSLPSSPTSSAVTAMSGRSSVGMSIQYKGAWCTPPRIFMDHPDEIIPHLEPGRLPSTVDPDAVQPPDKGRKMNQRPVRISAWKLAKLDSNEATKAAAKARASSSVLRPISSRPHAYDVDHVSSSNVSGRSSPISNQGFHIKNDTVGTSRLSPSKSSYPPSQASKDDIDASCQHSMSNFSSPRVSNLTPSPMQRPGLNRDHFNPMYQQPSGNQSPSSAKGSEGNINPVHDNVPRVP

SEQ ID NO: 58457 - protein, 625 aa, Glycine max
  Clone ID: 701056606_FLI.pep
DVIVSPNQMFCAGFFQVGENAFSFAIWFNDPHTHNNNHTVVWMANRETPVNGRLSKLSLLNSGNMVLVGAGQITTWSSNTASDAPVKLHLQDDGNLVLLDLHGTILWQSFDTPTDTLLPGQLLTRYTQLVSSRSQTNHSPGFYKMLFDDDNVLRLIYDGPDVSSTYWPPPWLLSWQAGRFNYNSSRVAVLNSIGNFTSSDNYDFSTDDHGTVMPRRLKLDSDGNARVYSRNEALKKWYVSWQFIFDACTSHGICGANSTCSYDPKRGRRCSCLPGYRVKNHSDWSYGCEPMFDLTCSRNESIFLEIQGVELYGYDHNFVQNSTYINCVNLCLQDCNCKGFQYRYDGNQIFSCFTKSQLLNGRRSPSFNGAIYLRLPITNNFSKEESVSADDHVCSVKLRKDYVRKPENRLVRFFLWLATAVGALEVIFFFLIWGFLIWNLKTSSADQQGYHLAAVGFRKYSYLELKKATKGFSQEIGRGAGGIVYKGILSDQRHVAIKRLYDAKQGEGEFLAEVSIIGRLNHMNLIEMWGYCAEGKHRLLVYEYMENGSLAQNLSSNTLDWSKRYSIALGTARVLAYLHEECLEWILHCDIKPQNILLDASYQPKVADFGLSKLLNRNNLNNSSF

SEQ ID NO: 58458 - protein, 131 aa, Glycine max
  Clone ID: 701000510_FLI.pep
QIVRESTGILESLRRRARIMTDGFNSCRNVVCNFTEGAMYSFPQIRLPPRALEAAKQAGKVPDVYYCLKLLEATGISTVPGSGFGQKKGVFHLRTTILPAEEDMPDIMDSFKKFNDEFMEQYEDDRGYSRL

SEQ ID NO: 58459 - protein, 654 aa, Zea mays
  Clone ID: UC-ZMFLB73106D12_FLI.pep
ADVFRKQGQEWYCTSGLPSDISVVVGEQSFHLHKFPLLSKSGLLEKRIREKIDNRDDSCAIDLSDIPGGAKAFELAAKFCYGVKFEMTASNVVHLRCAADYLEMTEEISEGNLIAETESFLTQTVLKSWKDSVKALQTCDNVLDVAERLQIVKRCVDSIATRSCSDPDLFGWPVAHYGGPMQSPGGSLLWNGISTGARPRNSSPDWWYDDVSCLSLPLYKKLISAMEYRGISQGVIVGSLNHYAKRRLPGLNRRKSIGDASNCLSMTSLTSIPSEDDQKYLLEEIDRLLPFQRGVTSCKLLFGLLRTAIFLKASPSCVSNLERRIGMQLDKASLEDLLIPNVSDSVETLYDVECVQRIVDHFLSMDQETGGASPGIGEDGQMLASPSLMPITMVAKLIDGYLAEVAPDMNLKLPKFRSLAAAIPDYARPIDDGLYRAIDIYLKAHPYLPESDKEELCRVMDCQKLSLEACTHAAQNERLPLRVILQVLFFEQLQLRSSIAECLMISEPLDGGGGFSRQLGGLPVSGEHLRGAGWPLAARENQTLREGMDSMKQRVSELEKECFAMKEDIERLGRSRSAGKSRFPFALAAKPHVCGTKDKEAAPESSKSETSKSKAAAATRSDDKLAVVKGGAAAAGDGGPQLKHRKHKTSLSAC

SEQ ID NO: 58460 - protein, 431 aa, Glycine max
  Clone ID: 700904465_FLI.pep
QQHSLFSLLAFRSSLTLIHSFPPFMDPVSVWGNTPLATVDPEIHDLIEKEKRRQCRGIELIASENFTSFAVIEALGSALTNKYSEGMPGNRYYGGNEYIDQIENLCRSRALQAFHLDAQSWGVNVQPYSGSPANFAAYTAVLNPHDRIMGLDLPSGGHLTHGYYTSGGKKISATSIYFESLPYKVNSTTGYIDYDRLEEKALDFRPKLIICGGSAYPRDWDYKRFREVADKCGALLLCDMAHTSGLVAAQEVNSPFEYCDIVTTTTHKSLRGPRAGMIFYRKGPKPPKKGQPENAVYDFEDKINFAVFPSLQGGPHNHQIGALAVALKQAASPGFKAYAKQVKANAVALGKYLMGKGYSLVTGGTENHLVLWDLRPLGLTGNKVEKLCDLCNITVNKNAVFGDSSALAPGGVRIGNDLTSLLYATIQILLY

SEQ ID NO: 58461 - protein, 803 aa, Glycine max
  Clone ID: 701211360_FLI.pep
DMATPILYNVPSLGHHPRSHLLFPSLPQMSSTFSPLLNLIAVFLLLFLVRHTCEARDPFACDPKNGATENMPFCKASLAIPERVKDLVGRLTLQEKVRLLVNNAAAVPRLGMKGYEWWSEALHGVSNVGPGVKFNAQFPGATSFPQVITTAASFNASLWEAIGQVVSDEARAMYNGGTAGLTYWSPNVNIFRDPRWGRGQETPGEDPVLAGTYAASYVRGLQGTDGNRLKVAACCKHFTAYDLDNWNGMDRFHFNAQVSKQDIEETFDVPFRMCVSEGKVASVMCSYNQVNGVPTCADPNLLKKTVRGLWQLDGYIVSDCDSVGVFYDNQHYTPTPEEAAADAIKAGLDLDCGPFLAVHTQNAVEKGLLSEADVNGALVNTLTVQMRLGMFDGEPSAHAYGKLGPKDVCKPAHQELALEAARQGIVLLKNTGPVLPLSPQRHHTVAVIGPNSKATVTMIGNYAGVACGYTNPLQGIGRYAKTIHQLGCENVACKNDKLFGSAINAARQADATVLVMGLDQSIEAETVDRTGLLLPGRQQDLVSKVAAASKGPTILVIMSGGSVDITFAKNNPRIVGILWAGYPGQAGGAAIADILFGTTNPGGKLPVTWYPQEYLTKLPMTNMAMRGSKSAGYPGRTYRFYNGPVVYPFGHGLTYTHFVHTLASAPTVVSVPLNGHRRANVTNISNRAIRVTHARCDKLSISLEVDIKNVGSRDGTHTLLVFSAPPAGFGHWALEKQLVAFEKIHVPAKGLQRVGVNIHVCKLLSVVDKSGIRRIPLGEHSFNIGDVKHSVSLQAAALGIIKS

SEQ ID NO: 58462 - protein, 256 aa, Zea mays
  Clone ID: 700172074_FLI.pep
RHSRRQKQPMPLLAVCPRRVPPLSLARRHRRSLYRARSLALKCEVSSPPLLLTRRMSAAGSLLVAVVPVPAPSPQLPVASASELETETAEGESGASEGLALERYTDQEQGFTLLKPASWPKVEKAGATALFQQEGKGSNNIGVVVNPVRLNSLAEFGTPQFVADRLLQAEKKKESTKSAEVISVGERSGHGGLTVYEIEYMLDSTRGGMKRIFSCAFVASRKLYLLNIAYSDTQEKPLDRETRTVLEKVLHSFDSV

SEQ ID NO: 58463 - protein, 156 aa, Zea mays
  Clone ID: 701182736_FLI.pep
LAHIHLLQQLVRIHTNKSELCRRVEYVPARHPIPLHSKPPTYMSRSNQPAQTRIILVYHHHTYIIFLFYTYVIFLFLDIYNLHAIIAMHVSAATLFCILFQQAVPTAFQDPVCLRAWETNHARPTISGKLNHQPQPQQCLHCLVDRHLNLQTNKKN

SEQ ID NO: 58464 - protein, 537 aa, Zea mays
  Clone ID: 700240214_FLI.pep
LTRPSSCEMEEDAGHDLLRASVLALFVSDCFGGCDRSASLGRTRRAIVSLRKEQPFVCTCSAGNLGDNNEAKQTNILSGHFDFAGLCNRSIHLIKERRNSGIVPIGSLQLGVCRHRAVLMKYLCDRADPPIPCELVRGHLDYTPHAWNIVPVKKRNGWVRMIVDACYPTNIKEETDPEYFCRYIPLSRLQIVLDDEGYTPRCSFPSVSSCKEIEVTPSSSVYHCKIGAVDAAAKIRYLDTRRVSNDEVKLFEYKLLGEVRMLGALRKHRSIVDIYGHQLSSKWVQVDGDKEYRILQSIILMEYVNGGSLKGYLTKLLKEGKKCVPIDLSVYIAREVACALLEMHKKLVIHRDIKSENVLIDLDPKRNAGAPIVKLSDFDRSVPLYSLSHTCCISQLGTHPPDVCVGTPCWMAPEVVKAMHEKHHYGLEIDIWSFGCFLLEMLTLQMPYQGLSDTEIYDLILRKKQRPRLTQELEAFWTMDEPATRLKLGITSDAHADKLRHLIDLFYQCTRGHASRRPKAVQIYNSLCSLPTCYDMR

SEQ ID NO: 58465 - protein, 460 aa, Zea mays
  Clone ID: 700050187_FLI.pep
YQLHKSLSKMALQNIGASNRDDAFYRYKMPRMITKIEGRGNGIKTNVVNMVDIAKALARPASYTTKYFGCELGAQSKFDEKTGISLVNGAHDTAKLAGLLEVFIKKYVQCYGCGNPETEILISKTQMISLKCAACGFVSDVDMRDKLTTFILKNPPEQKKGGKDKKAMRRAEKERLKEGEAADEEQKKLKKDAKKKGSKDSTAKGLKKKATTATGSDEDHSSSPTRSHDGDKAAADDDDDDVQWQTDTSIEAAKQRMQEQLSAATAEMVMLSTEETEKKMKQATHKDGSTNGSAKEIPNDKPAVTKPSPYEELIGDIKASLGSAPTPTQLKAVLASSTLPPQDVMNALLEALFGGVGKGFTKEVVKNKKYLAVAVPDEGAQTLLVQAIEAFGGKCNPEALKEVPVVLKALYDGDILDEETIVDWYNDAVAAGKDSQVVKNAKPFVEWLQSAESDEEGDDE

SEQ ID NO: 58466 - protein, 947 aa, Zea mays
  Clone ID: 700383178_FLI.pep
SERLDVVSLAVRVGAWVLARRDAGVLVLATRLEEGGKRRWRSGTRCDGCARRSGGPTPSSGRPSAPPTPCIWCGRTVTVATLHALSDLSLLNLCLCPATLGALFLQLTPSAGLLTTIWRRRFMSSDKGKQKQQPQPLTRPRIWIVGRAAFSGNHQWIVHGTANGHGLSSEVAAEVNNQFRVGIKTIAIIPVLPRGVLQLGSTGLVMENTNFVMFAKKLCSQLNNRSSMAASASVKNTSSQHGQSRPDTATVSTSTPPNALLSASLLKVAQQNGHPVREHSVYAERDLRFIQQASICESQFGSNLQSGVMNSCLTSPSFASVKKQSLLMNSIGQLQFSNNVHSSADLAREIILKSLGRQDSSICENTNMNMHRGRYVVSLGRQDSSVCENTNMNMHRGRYVVSNDINGSRNFDFLPIGAKESRANLSIPASSQILDHMPGTLQQKQSLVPFRVTQSSEFSKKVENPESGSFQIPSVTTSDSGGQVSNSFNMVQENRLSMSNNVRQVQKIDRFSDPSANVSTQRMKNRDECEPGMPIERASSFLVEPGADNDLFDMFGSEFHQSSHNVGADLVTWSGTESQNSDRDVPESSICFNSSPLFSSLDNELHYSGILSLTDTDQLLDAVISNVNPSGKQCPDNSASCKTALMDVPSTSHLCSIDLKRCESPSVPSLLIKHELAQFAKQPCLVDKSEDGCLSQNNGMHKSQIRLWIESGQNMKCESASASNSKGLDVPSKANRKRSRPGESPKPRPKDRQLIQDRIKELRELVPNGAKCSIDGLLEKTVKHMLFLQSVTKNADKLKDSTESKILGSENGPLWKDYFEGGATWAFDVGSQSMTCPIIVEDLDRPRQMLVEMLCEDRGIFLEIADFIKGLGLTILRGVMETRKSKIWARFTVEANRDVTRMEIFLSLVRLLEPNCDGSGAADNTNNMNMHLGLVHQPVIPATGLIQ

SEQ ID NO: 58467 - protein, 496 aa, Zea mays
  Clone ID: 700576064_FLI.pep
HWRRAMEEEYAALLANHTWDLVPCPPGTNVVTGKWLFRHKLTSDGSLDRYKARWVLRGFTQRPGVDYDETFSPVVKFATVRAVLSLALSRDWAIHQLDVKNAFLHGTLTETVYFSQPTGFVDADRPDLVCRLNRSLYGLKQAPRAWYSRFASYLASIGFVEAKSDTSLFIYRRGDDTVYLLLYVDDIVLTASTADLLHRTIVALQREFAMKDLGPLHHFLGITAERRPQGLFLHQRQYAIDILERAGMSDCKPCSTPVDTQAKLSEDDGPPVADATSYRSLTGALQYLTFSRPDIAYAVQQVCLHMHTPREPHLTALKRILRYLRGSLDYGLLLRPSPTSELVVYTDADWAGCPDTRRSTSGYAVFLGANLVSWAAKRQPVVSRSSAEAEYRAVANGVAEASWLRQLLHELHSPLQRATLVYCDNVSAVYLSTNPVQHQRTKHVEIDLHFVRERVAAGDVRVLSVPTTLQFADIFTKGLPSSVFLDFRSSLNICTG

SEQ ID NO: 58468 - protein, 404 aa, Zea mays
  Clone ID: LIB3076-014-F10_FLI.pep
DRLLNYVNEELAESDVYMSYLPLAHIFDRVVEELFIFHGASIGFWQGDVKLLVEDIGVLKPTIMCAVPRVLDRIFSGLQAKISSGGFLKSTMFNLAYKFKQFRMMRGAKHNEAASICDKVVFSKVKEGLGGNVRVILSGAAPLATHVEEYLRVVTCAHVVQGYGLTETCAGSFVSLPNQMSMIGTVGPPVPNIDVRLESVPEMDYDALASKPRGEICIRGETLFSGYYKREDLTKEVLIDGWFHTGDIGEWQPDGSMKIIDRKKNIFKLSQGEYVAVENLENVYGLVSAIDSIWIYGNSFESFLVAVVNPNKEVLESWAAANGISGDFESLCNNPRTKEYILGELSRIGKEKRLKGFEFVKDVHLEPVPFDMDRDLITPTYKKKRPQLLKYYQGVIDNMYKSAK

SEQ ID NO: 58469 - protein, 672 aa, Zea mays
  Clone ID: LIB3180-020-B11_FLI.pep
RSSANYTSPRPVPRGAVAMAEPAILDPSPFDLRHYPAHLFDPDIPLAAADFPLGEFAGDDGCDGLDFDVPVDFSIDDFLLRSPDRGHDGDDSGEGSAAGSGPTASSLASPATSGTNSAVANVGNRKVKHEDSDEGRSGATPNWSLKRKQVSPGEATSDGAKCRRSGDGDVSPSASASRAATEDSDERGVGGEEEDKRRTARLMRNRESAQLSRQRKKRYVEELEEKVKSMHSVINDLSCKISFIAAENATLRQQLGGVGVSGPPPGVYPPPPPGIHFPWVSGYAMRPHGSHVPLVPIPRLKPQHAAAAVKVSKKPDVKKSVESKSKTKTKTKTKKVASISLLGLLFVAFVFGAFVPGFNHSLGLRGRSDNVMFGNFGQSDARVFSVTNHGKGPKGSFNSSDMISTDHDMMTGHDDGAGQKHRAANNSSEILPALLYVPRNGKHVMINGNLIIHSVMASEKAVAHKGSNSQSVKDHKETSVAIARYLSPPGKDMNSKEMFPPDAPLPQWFREGMEGPVLNSGMCSEVFQFDISPASAKSGGIIPASAKSASSVNATQKILKPSPAYRGKLKNRRIMYNEAIPLTGKTANNTKPQAFNSTAESSKVPDTDSKPASSVIVSVLADPREAGNGDGDPRVSPKPLSRIFVVVLLDGVRYVTYSCTLPFKSASPHLVN

SEQ ID NO: 58470 - protein, 297 aa, Zea mays
  Clone ID: LIB3180-036-F5_FLI.pep
PSPRPRRRCRAGRPSRADAPSRVLLRDGRQECWIQGADIHWVHEREFQDEATTGGYILEDKMRQQSVSDKLNLEPDISHWIVRSYLLHYGYQDTLNAFDTANATDRPTSRQNGHAEPHEMYGLSHRKLLRQLIMSGDIDSTFKRLREWYPQVIKDEQSVICFLLRSQRFIEYIRAEQLEVAVKYGRANLASFFTHKAFEGLLKDSVALLAYEKPTESCLGYLMDSSQREFVADAVNAAVLSTNPTVKDPESCLYSCLERLLKQLTVCSFERRAFNNYQGDAFLLHKEVQNYERSRRS

SEQ ID NO: 58471 - protein, 774 aa, Zea mays
  Clone ID: LIB3060-096-F8_FLI.pep
ILSRASAFLLLVLAMAHEREPLLQQRQTGVGNACGAKDSSSAPAPSAAALPSLARTVLKFLMWAVFLTWAAGIFLYPTKPVQAVFRKWVGLTRDSMFGIAGGIFLTFSAPILIIALLAYVYISFFPSEHVVEKRKLRSLSFRLWTFPVLVDGPFGVVSAVEFIGIVLFIVFVVYSMTYYAVEAVSLVSKFDIPSMTESELILDVIGLRLGAVGLFCMLFLFLPVARGSVLLRLIDIPFEHATRYHVWLGHLTMALFTLHGLFYVISWSMQGRLREELRQWKEIGVANLPGVISLAAGLLMWVTSLHPVRKRFFELFFYTHQLYVVFVVFLAFHVGDFIFSICAGAVFLFMLDRFLRFWQSRAKVDIISAACRPCGTVELVFSKPASLHYNALSFIFIQVRELSFLQWHPFSVSSSPMDGRYHMSVLIKVLGTWTEKLRSIITDVQEKNGGDSELQCGRMTACVEGPYGHESPYHLMYENLVLVAGGIGISPFLAILSDIIHRIEEGKQCMPKNVLVLWSVKKSKELSLLSAVDAQTISSSVSDRLQLDIQAFVTQEPHPPLEDGIVGDDQKVPGMFVKNGTAMSGLVGTGDNFWAAMYFLASTLGFLLAYALVQVYYVKPHNVVAWWYLGLLFMLCMVAGVALPGGLVVLLWHLSEKQRLEDDKWDASQSPRAEQTGPLAAAGGGDDDAAPSVSLAALRTTRYGCRPNFEAEFAAFAERAGDAADVGVLVCGPQGLQTSVARECRARNLRRGGLGAAKSRSGAVFHFNSHSFDL

SEQ ID NO: 58472 - protein, 696 aa, Zea mays
  Clone ID: LIB3732-002-F1_FLI.pep
HKHVQTCMGYLKEFVEAVWGLLMAQTASPSRVQLAVTAIRFLTTVAESVHHALFGSPEAMKQICDSVVVPNLRLRDEDEELFEGNWVEYVRRDSEGSDADTLRRAACRLLRGLAANYQEQVAALVSAQVQQMLVAYAANRSNNWKEKDAAIYLVIALMQKPGATGGGTPVVDMESFFTSVIVPELQAPDWQSEPMLKATVLRFLKEFKDQIPKATALALLQSVMRFLMHESNVVHSYAATFIENLLIIKDAVPVPGVTTVIRSPRYVAADINPFAPQIIQNLSTALGFPDSQENPYLMKCLMRVLGIANIAGQIVHEITAQLVGILMEVCNNPKNPDFNHYLFEALAAVIGRTGEQDPTLLPAFETSLFPVLQRILVEDISEFWPYAFQIFAQLVNLSRPPLSQNYMQLFGVLLSNATWDRPPCVPALVRLLRAFLRKILNELNQEGRLPNILAISRSLLSRSSTEDSAFYMLNTLVENVGFDILNPYISEIWSALFTRLQTRQTVKFVNSLVVFMSLVLVKYGSSVLVNSVDAIQPNLFTQILQRFWIPNLNLIKGALEVKLTAVASIKLLCESAVLLDAAAAQLWGKLLDSIVTLLSRMNQDGSQQEHNDGTDAVDTQKTSSYSVSFVRLQYAGKSEDDLLKEVNDPKQFVVTSLATISAQFPGRFGPVIEQHVDLANKSVLLQLCAAYNANIV

SEQ ID NO: 58473 - protein, 665 aa, Zea mays
  Clone ID: LIB3632-055-G12_FLI.pep
GDQRGREMLQVEEALAAVLSAAAGHAEPHAVPLQGALGLVLAEDVCAPDPLPPFRASIKDGYAVVASDGPGEYPVVTESRAGDDALGVVVVPGTVAYVTTGGPVPDGADAVVQVEDTEQLPGGADGSKRVRILARASQGQDIRSVGCDIEKDSIVLKSGEHIGPAEIGLLATVGVTTVKVYPRPTIAVFSTGDELVQPATATLSRGQIRDSNRAMLLACAVQQKCKVVDLGIAEDTEESLKEHMDAALRSNADIIITSGGVSMGDRDLVKPCLAKMGKIHFEKIQMKPGKPLTFAEITTQDTPKPSKTVLAFGLPGNPVSCIVCFNLFVVPAIRLLSGWSNPHLQRVHVRISHPLRADPHRTEFHRAAIRWVLDDGSGRPGFVAESTGHQASSRLLSMKSANALLEIPSTGQILAAGTSIQAIIISDIITSSDKLPTPSNPYPSCGPSAKSISADVSQIASPQDAEVKVAILTVSDTVSSGAGPDRSGPRAVSVVNSSSEKLGGATVVATAVVPDEVDKIKGILVQWSDIDHVDLILTLGGTGFTPRDVTPEATKMVIQKEAPGLTFVMLQESLKITPFAMLSRATAGIRGSTLIINMPGNPNAVAECLEALLPALKHALKQIKGDKREKHPRHTPHAAAVPVDQWERSFRAASSGNGGGCSCDP

SEQ ID NO: 58474 - protein, 652 aa, Zea mays
  Clone ID: 700097775_FLI.pep
GPAWLPEADPAPAMEEKAVTNGAAAADVAAPDNKDNTKEEVSKSKEPVANKDAEEQNKGSENGAEGHSGGDVNMAEAEITEEGGGGDAGAAKQVDSGDVKTDADTKEDANARTEEGEDAKMTEADVGSTEVKDKEEKEDEVENTNEQDESKEQEKGASAEQEENEGKETDADENQEEEEAEEKGSADKKDEAEAEGDKKTEENKETPKNKKARSARDRSQGKDKEQDGSKSKEAKSLLNTPSPYGTNRPQRERKIVERLVEVIDKEPNKNFVVEKGQGTPLKDIPSVAHRISRKKPSDLKFLHSILFGRKGKAVDFKGHILQFSGFVWHESDEKQRAKAKEKLDKCVKDTLLDLCWTLGIPTPKANIRKEDIVSKLLDFIAEPHSAAESWGSDDQGSNSKKRKRGGESASKTPDGTPSRSRKKFVDDGTSSKRQNKALQYDTEEDESMKSDSEENIDEDSDEAADKQEVDYGSGKEKAGKKLSEVKESSGKKKSNTGSGHKSGPPNKIIKNLVKKVSSKIHEEKESPNGSAKVFSRKKKPTAEKEIKEKKSSGKKVTKGKGESAEAVLPSKDDLRKTITEILKKVDFNTATFSDILKKLDNHYKMDLTPKKEAIKVMIQDELTKLSEEDEEGEGDEDAGKKQQQPQAQEIEA

SEQ ID NO: 58475 - protein, 510 aa, Zea mays
  Clone ID: LIB3180-023-E8_FLI.pep
LMAMENTAPCGDFGKIVADLESENLVANVSAVNQASALIAGGKIPEPQLLCRLIAGLASNLEKPDHDSAIKRCVSFTLKAIRVAVIKNRMNMDSSARGEALHAIWCCFMDQGLRRIQRDSNMVRLWTVQDQLSAVKIICTFFRLSPVNISDTRCVTAFASLMLSPYSTVVCACADALLSLPPVVPGFSFAIARAYCHMLATVSPQSPLEVSSMVAMLGRLKQVSTTMVHHPGFSDLAVDVLAALSNCNLAVRKNLLNLMVRLLTPRNISAVLLLLDNELNRAANIHIEYHKMLEEAIRECHAAFPGCIVEFTLDPKYSVFIDSILYIIDIMNPDQSLRGPLLKGLLRALRHVKSPLVCAAAVWAISMFSGSLEEVSDAIVALSCFFKDLLDRRKIEKLILGGEAENQYKLSTDYYGVTAGDATQGKHQQPWLMEMEELLFVRIGLTRQAGGSYAIPSSSKSSASSSNAYLPEPLGNTDNLIFLVHSGDALLADFVEIMLSNLKKKVKELE

SEQ ID NO: 58476 - protein, 367 aa, Zea mays
  Clone ID: LIB3060-074-G5_FLI.pep
ASKYCFMGGFDATSNVLAGNLFGIPLRGTHSHAFVSSYMSLDEIPNKALRNKDGSRVCEDFVSLVQEWLQKFQAADSLGGVFGDTNKSELAAFASYALAFPSNFLALVDTYDVIRSGIPNFCAVALALHDLGYKASGIRLDSGDLAYLSIEARKVFRAVEKEFNLPGFAKMVITASNDLNEETIDALNKQGHEVDAFGIGTYLVTCYSQAALGCVFKLVEINNRPRIKLSEDVAKVSIPCKKRCFRLYGKEGYPLVDIMIRESEPSPKAGERILCRHPFIESKRAYVVPQHVEELLQYYWPGTSDKPRAELPSLEKIRSRCMQQLEKLRPDHIRRLNPTPYKVSVSAKLYDFIHCLWLNEAPVGELQ

SEQ ID NO: 58477 - protein, 262 aa, Oryza sativa
  Clone ID: LIB4371-008-H6_FLI.pep
SPPLELDYIGLSPPPPPPSSSSAAAARADDVDLKGTELRLGLPGSESPDRRPAAIAAAAATATTLELLPAKGAKRVFPDEAALTPPTAAAGKGKAAREGEEVGAEEEDKKVAAPPQPAAKAQVVGWPPIRSYRKNTMATNQIKSNKEDVDAKQGQGFLYVKVSMDGAPYLRKVDLKTYKNYKDMSLGLEKMFIGFSTGKEGAENQKDGEYVLTYEDKDGDWMLVGDVPWEMFTDSCRRLRIMKGSDAIGLAPRAGEKSKNRN

SEQ ID NO: 58478 - protein, 210 aa, Zea mays
  Clone ID: LIB3689-252-C5_FLI.pep
TTAMFLFFQIYSAQPNCVDNQLIRSGKVKQTERRSSLPGDVADEHPVAILVLVRGHVLRPVHRVHQLPLVVGELPDGEVGEELVLERAEELVVAAVRLEVHLPQVGRAVDGHLHEIGCPAGLAGVGERVLAVRPHRRPPHHPRLGRRRSVGGRGERGGTAGVGAREAEGEGERGVLVAEPGGRGRLGGAPLRIHRHGWRRRAGLRDRRLP

SEQ ID NO: 58479 - protein, 286 aa, Oryza sativa nipponbare
  Clone ID: LIB3432-029-H9_FLI.pep
LVVTTSLVLHMYRSNQACALLINHSQNTAWFAGHVEAGEEAVHHVVGAALQQYELIASLAGRHRRRRRASGGSVRRRRRRRAVSTGHAVVVVVVVEQEAERRLRWRRQRRLVGREVGPCLVAVDAARLGVVGARGLDGGVEGAEPDAGALDGVADLRRPPPPRPLPDAAVRVAPPHPSPPPRPLHHRRRRRHLCGRLHRPCTRREHGNAAVVVVVVASDELPEGGLPVVVAAATTLLLLLHLRCGVPLRRLRRRRRRLVAIVVRDQCSSTHRDILMMFLSDLIQVV

SEQ ID NO: 58480 - protein, 257 aa, Oryza sativa nipponbare
  Clone ID: LIB3431-060-F7_FLI.pep
LVVTTSLVLHMYRSNQACALLINHSQNTAWFAGHVEAGEEAVHHVVGAALQQYELIASLAGRHRRRRRASGGSVRRRRRRRAVSTGHAVVVVVVVEQEAERRLRWRRQRRLVGREVGPCLVAVDAARLGVVGARGLDGGVEGAEPDAGALDGVADLRRPPPPRPLPDAAVRVAPPHPSPPPRPLHHRRRRRHLCGRLHRPCTRREHGNAAVVVVVVASDELPEGGLPVVVAVVVRDQCSSTHRDILMMFLSDLIQVV

SEQ ID NO: 58481 - protein, 225 aa, Zea mays
  Clone ID: LIB3180-012-D2_FLI.pep
ATGGLGGLGSPDLSSLLGGLAGSPRTGASGGLGGLGSPDLGNMLGGSSDVSLFSQMLQNPAMMQMMQSIMSDPQTMNQLLSFNPNARNLMESNPQMREIFQNPEFLRQLTSPETLQQLLLFQQSLLGQLGQHQPNQGRDNSGSATGTPGNPSLDTLMSMLSGLGSGGGIGVPNTSNVPPEELYATQLTQLQEMGFIDTAENIQALLATAGNVHAAVERLLGNLGQ

SEQ ID NO: 58482 - protein, 347 aa, Gossypium hirsutum
  Clone ID: LIB3165-057-D1_FLI.pep
EEMENSTQESHLRSDNSVTYESAYTVYAMALSSTPSSTNINHQRIALGSFLEDYTNRVDIISFDPETLSFKTHPKLAFDHPYPPTKLMFQPNRKSASSSSSCSDLLASTGDFLRLWEVRESSIEPVTVLNNSKTSEFCAPLTSFDWNDVEPKRIGTSSIDTTCTIWDIEKCVVETQLIAHDKEVYDIAWGEARVFASVSADGSVRIFDLRDKEHSTIIYESPQPDTPLLRLAWNKQDLKYMATIQMDSNKVVILDIRSPTTPVAELERHHASVNAIAWAPQSCKHICSAGDDTQALIWELPTVAGPNGIDPLCVYSAGYEINQLQWSAAQPDWIAIAFSNKLQLLKV

SEQ ID NO: 58483 - protein, 330 aa, Gossypium hirsutum
  Clone ID: LIB3493-005-G12_FLI.pep
KTGVYTYIGQWPIYSVAWSVRNDKRSRLAIGSFLEDYSNKVELVQFNLYTSDFTTDNRLVFDHPYAPTNLMFFPSDDTSNPDMIATSGDYLRLWEIHDDHIELKSLLNGNKSSEFNSAITSFDWADFDTRRVATSSVDTTCTIWDIEREAVDTQLVAHDKEVFDISWGGFNVFASVSGDGSVRVFDLRDKERSTIIYENPIPETPLLRVEWNKADPRFMATVGMDSNKIVIVDIRFPTTPLMELCRHKGSVNAISWAPLMGKQLCSAGDDSRALIWEVVGSNYRAENGVAVMEPEMWYGSAAEINHARWSPIELDWIAIVFLNKLQLLKV

SEQ ID NO: 58484 - protein, 338 aa, Gossypium hirsutum
  Clone ID: LIB3197-026-B10_FLI.pep
SMQIPTERKTGVYTYIGQWPIYSVAWSVRNDKRSRLAIGSFLEDYSNKVELVQFNLYTSDFTTDNRLVFDHPYAPTNLMFFPSEDTSNPDMIATSGDYLRLWEIHDDHIELKSLLNGNKSSEFSSAITSFDWADFDTRRVATSSVDTTCTIWDIEREAVDTQLVAHDKEVFDISWGGFNVFASVSGDGSVRVFDLRDKERSTIIYENPIPETPLLRVEWNKADPRFMATVGMDSNKIVIVDIRFPTTPLMELCRHKGSVNAISWAPLMGKQLCSAGDDSRALIWEVVGSNYRAENGVAVMEPEMWYGSAAEINHARWSPIELDWIAIVFLNKLQLLKV

SEQ ID NO: 58485 - protein, 351 aa, Gossypium hirsutum
  Clone ID: LIB3145-011-C10_FLI.pep
ALPRGKNPMENSTQESHLRSDNAVTYESPYPLYAMALSSTPAVTHLNYQRIALGSFIEDYTNRVHIISFDPESLTLITHPSLSFDHPYPPTKLMFQPHRKSPFSSSSDLLASSGDYLRLWEVGHSSIELISVLDNSKTSEFSAPLTSFDWNDVEPNRIGTSSIDTTCTIWDIEKGVVETQLIAHDKEVYDIAWGEGRVFGSVSADGSVRIFDLRDKEHSTIIYESPQPDTPLLRLAWNKQDLRYMATTLMDSNKVVILDIRSPTTPVAELDRHGASVNAIAWAPQSCKHICSAGDDTHALIWELPTVAGPNGIDPLSMYSASSEINQLQWSAAQPDWIAIAFSNKMQLLKV

SEQ ID NO: 58486 - protein, 351 aa, Gossypium hirsutum; identical to SEQ ID NO: 58485
  Clone ID: LIB3145-037-G9_FLI.pep

SEQ ID NO: 58487 - protein, 351 aa, Gossypium hirsutum; identical to SEQ ID NO: 58485
  Clone ID: LIB3145-037-A6_FLI.pep

SEQ ID NO: 58488 - protein, 347 aa, Gossypium hirsutum
  Clone ID: LIB3493-030-A4_FLI.pep
EEMENSTQESHLRSDNSVTYESAYTVYAMALSSTPSSTNINHQRIALGSFLEDYTNRVDIISFDPETLSFKTHPKLAFDHPYPPTKLMFQPNRKSASSSSSCSDLLASTGDFLRLWEVRESSIEPVTVLNNSKTSEFCAPLTSFDWNDVEPKRIGTSSIDTTCTIWDIEKCVVETQLIAHDKEVYDIAWGEARVFASVSADGSVRIFDLRDKEHSTIIYESPQPDTPLLRLAWNKQDLKYMATIQMDSNKVVILDIRSPTTPVAELERHHASVNAIAWAPQSCKHICSAGDDTQALIWELPTVAGSNGIDPLCVYSAGYEINQLQWSAAQPDWIAIAFSNKLQLLKV

SEQ ID NO: 58489 - protein, 342 aa, Zea mays
  Clone ID: LIB143-055-A8_FLI.pep
APPHLSTRILHSMDPPKPPSSVASSSGPETPNPHAFTCELPHSIYALAFSPVAPVLASGSFLEDLHNRVSLLSFDPVRPSAASFRALPALSFDHPYPPTKLQFNPRAAAPSLLASSADTLRIWHTPLDDLSDTAPAPELRSVLDNRKASSEFCAPLTSFDWNEVEPRRIGTASIDTTCTVWDIDRGVVETQLIAHDKAVHDIAWGEAGVFASVSADGSVRVFDLRDKEHSTIVYESPRPDTPLLRLAWNRSDLRYMAALLMDSSAVVVLDIRAPGVPVAELHRHRACANAVAWAPQATRHLCSAGDDGQALIWELPETAAAVPAEGIDPVLVYDAGAEINQL

SEQ ID NO: 58490 - protein, 331 aa, Zea mays
  Clone ID: LIB3597-022-B10_FLI.pep
LPDPPADPPTAAMPAFKAPAPGFAVRFSPFHENRLLAATSQHFGLVGNGHLIVLDLAGGGPGAAPAPVFSFPTSDALFDCAWSESHDSLCAAASGDGSVRLFDAALPPAQNPVRLLREHAREVHGLDWNPVRRDAFISASWDDTLKLWSPDRPASVRTFRGHEYCVYAAAWSARHPDVFASASGDRTARVWDVRDPAPTLILPAHDHEVLSLDWDKYDPSILATASVDKSIRVWDVRAPRAPIAQLAGHSYAVKRVRFSPHRQGMLMSCSYDMTVCMWDYRAEDALLARYNHHTEFVAGIDMSVLVDGLLASTGWDEMVYIWPFGTDPRAM

SEQ ID NO: 58491 - protein, 334 aa, Zea mays
  Clone ID: LIB3279-190-G4_FLI.pep
ASPLPDPPAHPPTAAMPAFKAPAPGFAVRFSPFHENRLLAATSQHFGLVGNGHLIVLDLAGGGPGAAPTPVFSFPTSDALFDCAWSESHDSLCAAASGDGSVRLFDAALPPAQNPVRLLREHAREVHGLDWNPVRRDAFISASWDDTLKLWSPDRPASVRTFRGHEYCVYAAAWSARHPDVFASASGDRTARVWDVRDPAPTLILPAHDHEVLSLDWDKYDPSILATASVDKSIRVWDVRAPRAPIAQLAGHGYAVKRVRFSPHRQGMLMSCSYDMTVCMWDYRAEDALLARYNHHTEFVAGIDMSVLVDGLLASTGWDEMVYIWPFGTDPRAM

SEQ ID NO: 58492 - protein, 334 aa, Zea mays
  Clone ID: LIB3354-025-E10_FLI.pep
ASPLPDPPADPPTAAMPAFKAPAPGFAVRFSPFHENRLLAATSQHFGLVGNGHLIVLDLAGGGPGAAPAPVFSFPTSDALFDCAWSESHDSLCAAASGDGSVRLFDAALPPAQNPVRLLREHAREVHGLDWNPVRRDAFISASWDDTLKLWSPDRPASVRTFRGHEYCVYAAAWSARHPDVFASASGDRTARVWDVRDPAPTLILPAHDHEVLSLDWDKYDPSILATASVDKSIRVWDVRAPRAPIAQLAGHSYAVKRVRFSPHRQGMLMSCSYDMTVCMWDYRAEDALLARYNHHTEFVAGIDMSVLVDGLLASPGWDEMVYIWPFGTDPRAM

SEQ ID NO: 58493 - protein, 375 aa, Zea mays
  Clone ID: LIB3587-225-H12_FLI.pep
VEHTCILSFLASSIHSTPLHSATPPTSRLPDPAMEKMLHSAPAHGRLPECFIFPADKLPQAKATSATVSLPIVDLSLGRDEVRRAILEAGKEIGFFQVVNHGVSLEAMQDMETVCQEFFRLPAEDKAGLYSEDTGRATRIYSSTMFDTGAEKYWRDCLRLACSFPAVGDSAAAWPDKPRRLREVVERFTVQTRGLGMEILRLLCEGLGLRPDYLEGDISGGDVVLHVNHYPPCPDPNATLGLPPHCDRNLLTLLLPSMVPGLEVAYRGDWIRVEPVPGAFVVNFGCQLEVVTNGILKSIEHRVMTNLGVARTTVATFIMPTTDCLIGPAAEFLSDDNPPCYRTLTFADFKRIYSVVKLGSSLNLTTNLKNVQKEL

SEQ ID NO: 58494 - protein, 251 aa, Oryza sativa
  Clone ID: UC-OSROM202014H11_FLI.pep
PPKEKHAHTSSASLPLFPLHFPSKQENRGFSLARTDRSDVRRCNHLRLHPGAPPVVRLRLLARRRRLRPPHPRSRETAAREEGAEEPVPRDQAAAVGEVGGGDPRPGEGGARLARHLPDRRGRRAGLRPRRAPHQGRQGEGQLPQRLRRRPRAGRGGGEGRPSRRAHAGRAPAAQDGGGVRGRRRLLLRRGQGAVRGAARVRELHELPRHPLHGGRRRLRRRRRGSRGARRALDLRRLRAAVASALVKMSQ

SEQ ID NO: 58495 - protein, 253 aa, Oryza sativa
  Clone ID: UC-OSROM202006D09_FLI.pep
QRPPKEKHAHTSSASLPLFPLHFPSKQENRGFSLARTDRSDVRRCNHLRLHPGAPPVVRLRLLARRRRLRPPHPRSRETAAREEGAEEPVPRDQAAAVGEVGGGDPRPGEGGARLARHLPDRRGRRAGLRPRRAPHQGRQGEGQLPQRLRRRPRAGRGGGEGRPSRRAHAGRAPAAQDGGGVRGRRRLLLRRGQGAVRGAARVRELHELPRHPLHGGRRRLRRRRRGSRGARRALDLRRLRAAVASALVKMSQ

SEQ ID NO: 58496 - protein, 252 aa, Oryza sativa
  Clone ID: UC-OSROCYP028E06_FLI.pep
GPPKEKHAHTSSASLPLFPLHFPSKQENRGFSLARTDRSDVRRCNHLRLHPGAPPVVRLRLLARRRRLRPPHPRSRETAAREEGAEEPVPRDQAAAVGEVGGGDPRPGEGGARLARHLPDRRGRRAGLRPRRAPHQGRQGEGQLPQRLRRRPRAGRGGGEGRPSRRAHAGRAPAAQDGGGVRGRRRLLLRRGQGAVRGAARVRELHELPRHPLHGGRRRLRRRRRGSRGARRALDLRRLRAAVASALVKMSQ

SEQ ID NO: 58497 - protein, 286 aa, Oryza sativa; identical to SEQ ID NO: 58479
  Clone ID: UC-OSROM202032A04_FLI.pep

SEQ ID NO: 58498 - protein, 301 aa, Oryza sativa
  Clone ID: UC-OSFLM202047F04_FLI.pep
LSLSPPPCRREEAAMEAAAIHAPTTTTSSDSGSCVTNGTREKREISKHKQLKRKRSTSPAPPPGCGGGQGQEAAVETDADAGAAGEEESSSCGGAGAGEGERKRGDAGRHPSYRGVRRRSWGKWVSEIREPRKKSRIWLGTFPTAEMAARAHDVAALAIKGRAAHLNFPSLAHTLPRPASTSPSDIQAAAALAAAAAATDQCESSSSAVAAATATDAEAAESTSSAAASPCAATSSVEENALFDLPDLLLDLSDGLWCSPVWTTAPADQYDAGDDGDDAAAPLLWAEQCWMDAPAAPVQPD

SEQ ID NO: 58499 - protein, 286 aa, Oryza sativa
  Clone ID: UC-OSROM202024G05_FLI.pep
SSPSFPPIGIQTRRIPVHVLPLPMSPPLELDYIGLSPPPPPPSSSSAAAARADDVDLKGTELRLGLPGSESPDRRPAAIAAAAATATTLELLPAKGAKRVFPDEAALTPPTAAAGKGKAAREGEEVGAEEEDKKVAAPPQPAAKAQVVGWPPIRSYRKNTMATNQIKSNKEDVDAKQGQGFLYVKVSMDGAPYLRKVDLKTYKNYKDMSLGLEKMFIGFSTGKEGAENQKDGEYVLTYEDKDGDWMLVGDVPWEMFTDSCRRLRIMKGSDAIGLAPRAGEKSKNRN

SEQ ID NO: 58500 - protein, 150 aa, Oryza sativa
  Clone ID: UC-OSROM202028E07_FLI.pep
SLPINASMQSLRRCGPICGRAAEDDGELLEPHATIAVAAAGHAYHGADLLVGRRHPGPAEVRLEVVEPHLAVPVAVHHPEHVLHRGPAPRPRGGAPQQALELVVLHEPVVVHVGCGDHGGDVLVVEPLAGGRAAGVERLEVLPADATVAV

SEQ ID NO: 58501 - protein, 286 aa, Oryza sativa
  Clone ID: UC-OSROCYP014H01_FLI.pep
LLSRCGSLDTTHTHTHSPTLSPVHVLLLPMSPPLELDYIGLSPPVPAAADAAADNDLKGTELRLGLPGSHSPDRSPPAATLDLLPAAKGAKRGFSDEARPLPASAAAAAAAGKGKKAAAGEEDEDAEEEDKKVAAAPQAPAAKAQVVGWPPIRSYRKNTMATNQLKSSKEDAEAKQGQGFLYVKVSMDGAPYLRKVDLKTYKNYKDLSTALEKMFIGFTTGKDGLSESRKDGEYVLTYEDKDGDWMLVGDVPWEMFANSCRRLRIMKGSDAIGLAPRAVDKSKNRN

SEQ ID NO: 58502 - protein, 285 aa, Oryza sativa
  Clone ID: UC-OSROM202016H01_FLI.pep
LSRCGSLDTTHTHTHSPTLSPVHVLLLPMSPPLELDYIGLSPPVPAAADAAADNDLKGTELRLGLPGSHSPDRSPPAATLDLLPAAKGAKRGFSDEARPLPASAAAAAAAGKGKKAAAGEEDEDAEEEDKKVAAAPQAPAAKAQVVGWPPIRSYRKNTMATNQLKSSKEDAEAKQGQGFLYVKVSMDGAPYLRKVDLKTYKNYKDLSTALEKMFIGFTTGKDGLSESRKDGEYVLTYEDKDGDWMLVGDVPWEMFANSCRRLRIMKGSDAIGLAPRAVDKSKNRN

SEQ ID NO: 58503 - protein, 264 aa, Oryza sativa nipponbare
  Clone ID: JC-OSROLIB3475P018D06_FLI.pep
HDYIGLSAAAASPTPSSSSCSSSPNPGGEARGPRLTLRLGLPGSESPEREVVAAGLTLGPLPPTTTKAASKRAFPDSSPRHGASSGSVAAAAACQDKAAPAAAPPAAKAQVVGWPPVRNYRKNTLAASASKGKGEDKGTAEGGPLYVKVSMDGAPYLRKVDLKMYSSYEDLSMALEKMFSCFITGQSGLRKSSNRDRLTNGSKADALQDQEYVLTYEDKDADWMLVGDLPWDLFTTICRKLKIMRGSDAAGIAPRSIEQSGQSR

SEQ ID NO: 58504 - protein, 147 aa, Zea mays
  Clone ID: JC-ZMSHLIB3569P056D05_FLI.pep
KVSRIYDLKGSLRSRYNPDTSGNNKVLLDLNLLETLHTKPIFLGSKAKRRLERAVWNDTSFLASVDVMDYSLLVGIDEERKELVMGIIDYLRQYTWDKQLETWVKATGFLGGSKDVLPTIISPDQYKKRFRKAMSKYFLALPDQWSP

SEQ ID NO: 58505 - protein, 178 aa, Zea mays subsp. mexicana
  Clone ID: UC-ZMFLTEOSINTE21A12_FLI.pep
AAAFRSSSSYARAKPTNPLPPVLRPTHPGAMTLGSSGAGSSVVVPRNFRLLEELERGEKGIGDGTVSYGMDDADDIYMRSWTGTIIGPHNTVHEGRIYQLKLFCDKDYPEKPPSVRFHSRINMTCVNHETGMVDPRKFGLLANWQRDYTMENILTQLKKEMAASQNRKLVQPPEGTFF

SEQ ID NO: 58506 - protein, 187 aa, Zea mays
  Clone ID: 700443369_FLI.pep
SDAAGSGEEASKKVRKPYTITKSRESWTEQEHDKFLEALQLFDRDWKKIEAFVGSKTVIQIRSHAQKYLLKVQKNGTSEHVPPPRPKRKAAHPYPQKASKNDSSSIHRNSGMNVPVSSWAHSSIPQAVASSMVKEDLGAGTPGSNNFCSSSTEGLPRTWQPGETNDPINQIPSLRRLYLMIFLIIIL

SEQ ID NO: 58507 - protein, 248 aa, Zea mays
  Clone ID: JC-ZMSHLIB3569P024E10_FLI.pep
YYYSIQNSCGGRSQRRHARAGAGAGPPCSPATAYSGLRQHEVHGVPRLDAATLIGVLQPQERLEPGHAVAQRLLPAARHDDGRRRRRGRALLGRRGLAAPLGRSRRRRARAAAAAHGGREVELGLGPADLARRHVVGARRVLRGGVGAEPHAGALPRVADLRRPPAPRAAPDPAVRRLAPRRRRRQRQRQLRMVLATGEDGGGHGVVCCRAPGAGGDEVGDDGSAAHCRNNETYESVGRSRSDGERAS

SEQ ID NO: 58508 - protein, 364 aa, Oryza sativa
  Clone ID: UC-OSFLM202104G09_FLI.pep
PTMCGGAILSDLIPPPRRVTAGDLWLEKTKKQQQQKKKNKGARRLPLRQEEEDDFEADFEEFEVDSGEWEVESDADEAKPLAAPRSGFAKGGLKNTTVAGADGPAARSAKRKRKNQFRGIRQRPWGKWAAEIRDPRKGVRVWLGTFNSPEEAARAYDAEARRIRGKKAKVNFPDGAPVASQRSHAEPSSMNMPAFSIEEKPAVMSAGNKTMYNTNAYAYPAVEYTLQEPFVQIQNVSFVPAMNAIEDTFVNLSSDQGSNSFGCSDFSQENDIKTPDITSMLAPTMTGVDDSAFLQNNASDAMVPPVMGNASIDLADLEPYMKFLIDGGSDESIDTLLSSDGSQDVASSMDLWSFDDMPVSAEFY

SEQ ID NO: 58509 - protein, 364 aa, Oryza sativa nipponbare; identical to SEQ ID NO: 58508
  Clone ID: JC-OSROLIB3475056D05_FLI.pep

SEQ ID NO: 58510 - protein, 365 aa, Zea mays subsp. mexicana
  Clone ID: UC-ZMFLTEOSINTE114G01_FLI.pep
TMCGGAILANLREPAPRRLTERDIWQQKKKLKRGGGGGRRSFAAEDDEDFEADFEVFEADSSDSDLELREGTDDDVVEIKPFTAKRTFSSDGLSTMTSDVARSAKRKRKNLYRGIRQRPWGKWAAEIRDPQKGVRVWLGTFNSPEEAARAYDAEARRIRGKKAKVNFPDAPAVGQKRRSSGSASAKASKSSFGQKPIVKVAMNNLANTNASFFQSVSYPSNSFVQHGNIPFVPAMNSTGSVEDPIMNLHSDQGSNSFGCSDLGWENDTKTPDITSIAPISTIAEGDESAFVDSNSNNSFVLPALENSAVDLTDGLTDLESYMRFVLDGGPSDSVDSLLNLDGSQDVGSDMDLWSFDDMPIVGDFF

SEQ ID NO: 58511 - protein, 287 aa, Zea mays
  Clone ID: LIB3632-012-G1_FLI.pep
ISFGLLRSQHGCDAGLQEHHGELPGERDGSEARSGEDGEVQHRVQGQRRAAGGLLPQGQQPAQRVRDLRLPAPLRVDRAGLHDAPRRAARDRAPRGHPRGFQPHPRRAPGARHREGAARAGRASRPCPQRRPSRARRGRVQREGDGEEAPGDLALEEGRPRQEEDQRRLLSSRADAFLAVLAWGEICLSTVCSFYPDEDCYVSRLSFRGRNCSGSVYVASVLRAQQFSDFPPLLHVSCKSMQIMLRVERRLIVSDWVLVLVLIFELHYTLCDILLILLDKVILSAPV

SEQ ID NO: 58512 - protein, 486 aa, Zea mays
  Clone ID: LIB3608-048-G4_FLI.pep
MAGSSAEQLLSRIAAGDGHGENSSYFDGWKAYDMNPFDLRHNRDGVIQMGLAENQLSLDLIEQWSVDHPEASICTAQGAPQFRRIANFQDYHGLPEFREAMAKFMGQVRGGKVTFDPDRVVMCGGATGAQDTLAFCLADPGDAYLVPTPYYPAFDRDCCWRSGVKLLPIECHSSNNFTLTREALVSAYDGARRQGVRVRGILITNPSNPLGTTMDRGTLAMLAAFATERRVHLICDEIYAGSVFAKPGFVSIAEVIERGDAPGCNRDLVHIAYSLSKDFGLPGFRVGIVYSYNDDVVACARKMSSFGLVSSQTQHFLAMMLADAEFMARFLAESARRLAARHDRFVAGLREVGIACLPGNAGLFSWMDLRGMLRERTHDAELELWRVIVHRVKLNVSPGTSFHCNEPGWFRVCYANMDDDTMEVALDRIRRFVRQHQHSKAKAERWAATRPLRLSLPRRGATTASHLAISSPLALLSPQSPMVHAS

SEQ ID NO: 58513 - protein, 569 aa, Zea mays
  Clone ID: LIB3354-105-B12_FLI.pep
QLTRCIATACTNYGKTRSILDYLDIAVLTQISTEEGPLTMVVLCVAVEASLADAVGLLGEHKLLPRLRDRPLRLQLRLFPEQRRRRGRGREPGRERVQLVHHLLDVENEALGEGAAELLPDDDAEHRDVLRVGGHGVCRHDPAEAAQHVRDLELVVPAAVLEGEGHQRDAFVLGHDVEAARLLQALLEHHGVLVAVLHDVPVPLEAVADELVVLRDDLAGALGEVERERGLVGAEVVDVEDEFLRQVLLAAPDAPADAGVDEAVLVAADVDALDQRQAEVPLQVRVQEGRDEAAARRVHVDGRLPPGLPVLGLEQVVEQLHVLELAVERGAQDRGDADGVLVHHLHRLLGVHHVVAVAQLHLPELHLEVPRELLPANLDVGAGDNVGLVERLALGPALVLPPALEGQPGKHDGLRRAHRADAHRRLGLAQRRVEEMRDHVHAPVLELGGDGVLVHVDVVLVDGGHDELVALGLHPGGDEGRQVEARVPVEHELVVDDLVRRLLGDGVLRHAVPWERRADVARRERGVHGHVTLGDGLGEHHGCDRSSRAICQTVVGFRLGEEDDLQLQG

SEQ ID NO: 58514 - protein, 105 aa, Zea mays
  Clone ID: 700048691_FLI.pep
VPPIIYVERAFMVNLCLTNQTDKTVGPFEVFLAPSMSGEDRAVLVNGPQKLILPLVEAFESIKFDLSMVTTQLGVQKISGITMYAVQEKKYYEPLPDIEIFVDAE

SEQ ID NO: 58515 - protein, 494 aa, Zea mays
  Clone ID: 700052368_FLI.pep
SPLSCADSSFSSCHSPAAAAAGKIKSRQKAPKDQSSVKMACPRAPAVEGSGVSGVLYAVEPKDACSPLRAKAIQGSVSPFALIIRGGCQFDDKIRNAQNAGFKAAVVYNNEDNDILVSMAGSSLGVQIYAVFISKASGEELKKYSGQTDAELWIIPTYENSAWPIMAISFVSLLAMSAILVACFFARRHQIRRDRARLPRAQESHGMSSQLVKAIPSLIFTKVQEDNCTSATCAICLEDYSVGEKIRVLPCRHKFHAACVDLWLTSWRTFCPVCKRDASAGTSDPPVSESTPLLSSSATRLPESTVLASLRSTAAASPPRTISRHPLLRSISRNYSVSGSSILRTPDSRFDANSSICTSGSNLDLANVPSPWSGTWHRASAHSLCRGYLSPPIGIRNTSAHVSRSANGSPSRYVGSSRMSHGSSGQQHPHLRHCTLSGPSLFTMVPQSPQQNQLQHGGYSETNLSAAASAQSFRQLYLQHCPDSDTSSQSLPGC

SEQ ID NO: 58516 - protein, 145 aa, Zea mays
  Clone ID: UC-ZMFLB73124H07_FLI.pep
EILPAHEEDDVNVVKAGDATGERHDPTPQRRTTAARGNNEETRTKRHKKGDNLEGIMGRYIDMRMKQAEEEATHLAKEREEKEVSQAADFSIKKCISILGTMEVTKEEKAKAYNAFKDLDNRQIFLSAYDDDAESALIWLRNEMA

SEQ ID NO: 58517 - protein, 149 aa, Zea mays
  Clone ID: UC-ZMFLB73135A12_FLI.pep
EKTWGPIVEIHYVGGTYRGRCQEGVPEGKGRLTFSDGSFYDGLWRYGKRSGLGTLFHSNGDVYHGTWRDDLIHGKGWYYFHSGDRWFANFWKGKANGEGRFYANDGSIFFGHFRNGWRHGESLLVDANGSRWIEVWADGVLINRTKMEK

SEQ ID NO: 58518 - protein, 414 aa, Zea mays
  Clone ID: UC-ZMFLB73141C12_FLI.pep
NPSLPPHSRSPDQSSKVQSLASHLPSDQPASRSQRSAMATAYYERPRGGAVEEADDFDEFDPTPYGGGYDLAVTFGRPLPPSEETCYPCSAPSTSYDAPHYAASEPSPYGHHAKPKPNYGFRPQQEQQPSYGSGYGSRPEPAAEEGGGYGSGFGSGYGRKKQEEESYGSGYGRKPQAEESYGSGGYGSGYGGQTRPEESYGSAGYGSANPQAETYGSGYGRKPQVEESYGSEYGSGFGRKPQIEESYGSGYGRTPQVEESYGSGYGRKPQVEESYGSGYGSRPQGGEEYGSGGGGYGRKAQEETYGSSGYGYGRKNEEQSYGGSGYGYEKKASEEDEGAFGSGGYRKPKPYDEETQGSYGYGEEQPKYQSGGYERPSYGGGEGYYGRKKDDDDSDDEKKRRHSKHHHHGHHYDD

SEQ ID NO: 58519 - protein, 335 aa, Zea mays
  Clone ID: UC-ZMFLMO17258F11_FLI.pep
HWLLGSFCLVLHARTTTMAIAAVPASLPFGLLPPRLFRGRAVRWPRPIRASASSNASDVAGGERKFGALVSSVGDLRALVASVPPAVASMQKNIGPNFVAGFCVSMAFVAAAARQISLRSREHVSKGSVADLVRRGQLKSGQRGIAKLRTYDDPFNNPLVKIDEGTSTAQMFGKEYRLAPVRLTKEQQEMHQNRRSRAYQWKRPTVFLREGDSLPPDVDLDTVRWIPANHPFAAASSEVDEETAKQNVYQKDGIPSRVKAEHEALRARLEASNDVARLPSDPRSIQRNERPMRLSGEPSEHLQSSKFENQDRQLATESGKHSSDGCLQSNEPEGQ

SEQ ID NO: 58520 - protein, 180 aa, Zea mays
  Clone ID: UC-ZMFLMO17126H05_FLI.pep
RPRSESDQAAASCQRVVKMLIVSGTHAARKVLPHCNDSLLTLFTCDGNDEEQKSQTTIYKIWWAGFVARWRTMASADLMLLLFVPLSSGNERFLAPDTDPPSPSVAMKYDSLATACTAPIPAALAKLSATRFRSGWPRSSIQSFVSKLPRTSSANARACVSTPLFISPLRCSSAPSTLVS

SEQ ID NO: 58521 - protein, 572 aa, Zea mays
  Clone ID: UC-ZMFLMO17128A01_FLI.pep
VRVRLHRQNPEEEHPPPWRFSVTVPARRRRHADRARRCRGLLTDAAAGVRPASGLPRGAPGVQPRPHTRFLPHLPHRHVPRPGRGLPRRGSCRAGRHARFPLSLLPFRWPRRRQRRHRRARDRVRQHRRGARGGARWGEARGRRLRGRRPLAGPHRGAVPAGPRAVAAAGAVRVRRVRAVVGDQPPARGRPRSDGAAQRVGGAAPHRRPLVGASPRAGLALPAAGPAAVQRVAGRRVHAVRAGGPPELAPDGHARAPQLRGVRRGRGPAPRRGQHPRAPRHAARGAVGARVEAARCGRGRARRALPHGVARGRQAAPGRRQVRRGHRAALPRQRVDVRVAGGGRGGRVVVPAGRRGGHGGRGHRGGVPVGAVRGAGGLDGGAQGGVPGGRQVDGGGGHGHGEPRAGGLYVRAVPRGGGLWVRPAAVGVSVGAPGAAGFRGHDGVTEPAGGRVVAHHRQDVAATCRRRGRGPGRRAQAGHHRAARVRRARSGRRDAACYQSHVSHRVVCRARGEPVGLSPQTQGGTGGQNSAPVGLRMTWRHGADGSFMCAHRSGTVLYMFYRHDPRKYFGHS

SEQ ID NO: 58522 - protein, 583 aa, Zea mays
  Clone ID: UC-ZMFLMO17128F05_FLI.pep
SVLKTKPSPRILTEAAPWRQQERSATNICREAEGRPRIASVYADIERRVGGFDFLECNNKDFRALRILGALNARDAKNKNDSSGRPMATHRTGYDLTTSGSFQAPIVVMKPAGTTEKHGVSLASVAPIAGLRSLRKLPARYSSFTGTNETSTNENIHLRMSRAQLKSEETVSSANSPRPTSSSSPRNVLKNAEPERRSRPPVSPKSPSKKSNEVVSPKGRTRSKPSQVKSHRDEVLQSTGNRISLAKQVDVSIIDCPKLPGGNSTFVPPSNAAATASHKAPSILDSDQNIHSLDNIPSPVSVLDTSFYHKRISDSFKDGETHSSEECWNPNSLPDTPQSKASSEANQIKPENLEVLIQKLEQLQSMNEEDASIKEVMASVTANKDHQYIYEILLASGLLHKEHSITALPAQLQPSNYPINPELFLILEQTKPDLVFAFQTVSGTKKSCKPYTGKLHRRLVFDLVNETIAQKMIICRSGSQPVKFLQSRKLSGWQLFKDLCTEVDRQIKCTGEEENGNMILDEDTVNGTKDWMSFDTMLHGMVWEIERSIFKGLIDEVIGGETIEKMQFGQRKLQRQLSFSSIN

SEQ ID NO: 58523 - protein, 367 aa, Zea mays
  Clone ID: UC-ZMFLMO17133C04_FLI.pep
ASGISGTSVRLTAGAGLPVHMKGELNTAFIGLGDDGGYGGGWVPLAALKKVLRGILKYLGVLWLFAQLPELLKEILGSILKDNEGALLNLDQEQPALRFYVGGYVFAVSVHRVQLLLQVLSVKRFHHQQQQQQAQSNAQEELAAVEINEICDYFSRRVASEPYDASRVASFITLLTLPILVLREFLKLITWKKGLSPVHGDIATAQRARIELCLENHSGSASSDNTENSSLAKSNIHHDRAHSSVEFALTFVLDHALIPHMNVAGGAAWLPYCVSVKLRYSFGDNNHIAFLAMNGSHGGRACWLQFEEWERCKQKVSRAVETVNGSGVAGEVGQGRLRMVAEMIQKQLQLCLQQLRDDPLSAGSTAS

SEQ ID NO: 58524 - protein, 128 aa, Zea mays
  Clone ID: UC-ZMFLMO17176B07_FLI.pep
ASFEEFYCCTLLSKFLKPNGQTRQHWTWGKVVFLSQQCPSWMQAPAPLLPRCQHPRRPLRPPCPGSPDGAYPGAGWLPQVAAECSEVDPREPRWCSPWLLLATQALGSGWPSAPPGGPSPPAQWIGLP

SEQ ID NO: 58525 - protein, 163 aa, Zea mays
  Clone ID: UC-ZMFLMO17131E10_FLI.pep
VTVTPARPASERPPQPPASPPPSRATASQPSSSTLASSTSISCSASRTVSTSPPPPSSRETSHSTRRSSATMRSTTSTSSASKPRSMLPLSFGSKTLTWVTDAVQVAAIHATQKYFVSASGDNLWCFEFYDISTRSCLTQITSVRAKVAHPLARLINNGNMKL

SEQ ID NO: 58526 - protein, 454 aa, Zea mays; identical to SEQ ID NO: 48078
  Clone ID: UC-ZMFLMO17168H12_FLI.pep

SEQ ID NO: 58527 - protein, 240 aa, Zea mays
  Clone ID: UC-ZMFLB73080D01_FLI.pep
LLEDLQGRSGSYVETASLSHQHTRAKHWKPKFLSSEKKTIAILGDRSIDSEDPLEHVIDGTSSEEEDATQNHLSLVNKDENQQTMADLFQEVFNPTNMDGAMKSMRSTGAGNYGRMQQIMQMEKDWHVEFLRQYSREHSYSGDLKGTTVQILSRSLEGKLTVCSCMFQEKGNDATISNASADGTMDESRTRRTIIFSPKICNNVDLLVGNIIHIFPPWKEVKIQEEHVIICTYFSHHHRT

SEQ ID NO: 58528 - protein, 340 aa, Zea mays
  Clone ID: UC-ZMFLB73071B08_FLI.pep
LAPGFTLPYFQFSSEGDPNPESPPAKTSSRARAHTHTLLALCQRLGLWRRRKHLGDAFGGDGGEVLGPRVAVLRGGCDRPVVLVGPVRGGGHDDLRDVREHRQAVQRAPGGDGQVLRRGLVPHVEVLGHGLHAAVHVPRHRLRHRERRTGCAPHARPLRLGRQLARHLRHAPNHRVDMRRRRLQRAREVLVHLVHRVVHLAVDEGEDVERQAAEAVVDGANDALDGRLDGVNAGAERAGVVLGEAVEPSEAHRGLGSRHLDEVQVPQLRGPPRLLLLHHNLPLLRLLVLGVGLLLRHRANQTRDSLGYSGTVEPGRQTGLREEEKETEQARRYGFFRLLA

SEQ ID NO: 58529 - protein, 574 aa, Zea mays
  Clone ID: UC-ZMFLMO17293H01_FLI.pep
RCGLHERSSSTPRTRISRSDPQARLSLRRQFLAGVLPASPFIPSSELMDGQVETFVGDEEGGSPQVPYDGEQPTLYDSVAKQYSEELGDQYNEQPRAQYDEGSGNPYNDYEEQANLYSEETGNRYNEDPADSYQEEQENAFSGGINQQDNLQVNNVDDNKWPGWPGESVFRILVPAQKVGAIIGRKGEFIKKMCEETKARIKILDGPPGVPERAVMISAKDEPDAPLSPAMDGLLRVHKRITDSSDGESSQPQRSAGNIGPTRLLVPSSQAGSLIGKQGATIKSIQDSSKSIVRIVENVPPVALNDDRVVEIQGEPLGVQEAVELISSHLRKFLVDRSVLPLFEAHMKMHGMPREQPVPPPQHWGPPQTWIRPPNIPPGGPGFGGNPQFMHPRPQDSYYPSPDVPHMEKQPHYGISAYGREAPPSGASATGNQPPSHAGSQVAHDMHIPLAYADAVIGAAGASISYIRRHSGATVTIQESRGAPGEMTVEITGTAAQVQTAQQLIQNFMAEAAPPPPGPAPASNPPAPPVDPSYGSYPPPYGAAPSYGSSAAAGPPQYNGGNYGGPTYPPSYGY

SEQ ID NO: 58530 - protein, 332 aa, Zea mays
  Clone ID: UC-ZMFLB73013H12_FLI.pep
RHARHEHDRSGDWSHRRRAGRGRIPPLRLLSFDSLLPASNPSHHPFLPMASDAPAEQPATQQKPTRVSLSYEEISKLFSLPIAEAASILGVCTSVLKRICRTHGIVRWPYRKLVSGKAGDDTKGPDSDKANELLEVSKIAKQKAPSASGPSVVSSSTSQGAAKSQQGNSKAGQFSVSPPTGKHNASLSLTHSQAKAIPCYMDDFKYGFPSSGLSCETMKWWGTSSDTDYVPTKDGSHEPHESTTHEPSKGMTDDDELDWGADEAEAEADGTVTAEASAQLCSLRRKAVDDGRKLLNGHNRRGQEFSRLNKRQKTALAQVFGASLPECCITRV

SEQ ID NO: 58531 - protein, 353 aa, Zea mays
  Clone ID: UC-ZMFLMO17137G11_FLI.pep
IEPGSRPETSDYPQSSERPLTATSSFSSASPFSESSQLASSSKQPAPYLPRNHMGRRSFMSKPVYPLVFRNPVSESEACRMLEVGNAGRATPSDDSQASPLWRRSLASPDLKFHNAPNELGKMETSPEPNTSSRREGFRWSNASSYDFGYDGDAIDISDHISIESQRSPTSSARFLKCGLCERFLHQKSPWTSNRIVRNADMPVAAVLPCRHVFHADCLEESTAKTEVHEPPCPLCARATDDEGHVSFSEPLHVALRSARRNLSLGTGAGGNSGISDPPRTDRGLKRNNSAVMPRRSGGALFRNRFKKQFPFKARIGKELFGGRVLNKVGLSLSSGQHDDHRQQAPKHDRPMK

SEQ ID NO: 58532 - protein, 313 aa, Zea mays
  Clone ID: UC-ZMFLMO17300C05_FLI.pep
HVPFCPAESMLSEELIQKVMSGEEIKLEDLSDCEIKRFRQALASGELSKMIEPWTPWWKKPSARSISLGLDGSQLIRQVNAEDTAVPYPDPNTDQEASINEIPEGPESPLPSLKQLTRTEPSPLLAVHLVDILYSYCFTLRLYNGDWHSDPLGACTVALSMSKVMGQDAKPETVPEALAACIEETCSPAYRHTGGFRFAIGLVDDIIAILSLGQNALICALCDFHRLIEVGKSMLKVEKVGKTERAQNSPKLRSAARKLFFMTCWVHEQPDEAWPSLAHIVQVQKASMEELETGNWKADRKSKPQSAVLIEEL

SEQ ID NO: 58533 - protein, 179 aa, Zea mays
  Clone ID: UC-ZMFLMO17309H08_FLI.pep
LKSQTKRFSSSGSLPPPPPPPLVVVTDSSEVMDGVPGRRRRRSPGAGHDPGLSHSPRSHDGSGGTGGAAPRFVLVGAPRFAVENVEHPTARLAVAARANVLSRPPSNSGSGPMAPPRSTVSTADWHSCQLPAPSSPTAPLTGLIVRPAASYINDWNTAASRERVSTSAIKSGTTRACAR

SEQ ID NO: 58534 - protein, 591 aa, Zea mays
  Clone ID: UC-ZMFLMO17168H09_FLI.pep
KMNCSSCCAAATPSSPALLARPRGGLAASCSTTTANQKVLFLGSKQFPRITYSRASSRLSRREVIAFAGQQPWDIGRFVKTLYFFNGPPNLLKIVESIISSFTGPASSEAPKKMETSDVVLVTGATGGVGRRVVDVLQKKGVPVRVLARNVDKARSMLGPDVPLIIGDVTKEDTLDPKLFKGIKKVVNAVSVIVGPKEGDTPDRQKYKQGIKFFEPEIKGPSPEMVEYIGMQNLINAIKSSVGLSEGKLLFGFKGNLSGEIVWGALDDVVMGGVSESTFQILPTGSESSGPTGLFKGTVSTSNNGGFTSIRTKNFTVPEDLSAYDGVELRVNGDGRRYKLIIRTSYEWDTVGYTASFNTTKGGWQSVKVPFSSLKPVFRARTVTDAPPFDASNITSLQLMFSKFEYDGILNPTFTEGPFELPFSSIRAYINEPITPRFVHVSSAGVTRPERPGLDLSKQPPAVRLNKELGSILTFKLKGEDLIRESGIPYTIVRPCALTEEPAGADLMFDQGDNITGKISREEVARICVAALASPDAVGKTFEVKSTVPFSEPYVIDPANPPPEKDYEVYFKELKEGITGKEALEATPAQV

SEQ ID NO: 58535 - protein, 86 aa, Zea mays
  Clone ID: UC-ZMFLMO17184C01_FLI.pep
SVVGMTCSSHHPSCILKLCRDLMVRPYRYIFSIVRCPRRGTMRLHILRGMKAEVILAFADICTHEVYMNCDITMLLLWFLPARCGD

SEQ ID NO: 58536 - protein, 86 aa, Zea mays
  Clone ID: UC-ZMFLMO17179F05_FLI.pep
ALMGLPCALYAQFPLLSSAATTVRAARSLTPAACRVPVPRARVAYTVHRPQVAYTSVARASCRLSSTMDACYLLDLYLFASFSYIM

SEQ ID NO: 58537 - protein, 308 aa, Zea mays
  Clone ID: UC-ZMFLMO17175G10_FLI.pep
CAATQPASSSPPPTATSSKTTSAPPRRAPRQPPPPRILPVTPLRLQSLARRPPIPCSNSSTRSPAPRHPSPNASASASPPRRLRPRTRDHPIHPMEVEIKLRLPDAAAHRRLSAFLAPRLRRTHAQRNLFFDDAARTLGAATAALRVRLYDGPDDRGPSRAVLALKRRPRIEAGVSRVEEIEEPLEPALAVACADDPARLGGLDSPIIRLVAAEYGVGGDAAPFLCLGGFGNTRAVYEYELEDGGGGLVLELDETRFDFGTRYELECETAEPDRVKEVLERLLTVAGVPYEYCRNSKFACFMTGKLLP

SEQ ID NO: 58538 - protein, 902 aa, Zea mays
  Clone ID: UC-ZMROB73002C11_FLI.pep
LSALSEKLYVIKGGCGAASSVKMVNQLLAGVHIASAAEAMSFAARLNLRTRRVFEIMQHARGYSWMFGNRVPHMLDNDYTPYSAVDIFVKDLGIVSCESSNSRIPVHVSSIAHQLFISGSASGWGRYDDAAVVKVYETLTGVKVEGKAPMLSKEDVLQSLPSEWPEDPIDNLVPIASHSSKKFLVVLDDDPTGTQTVHDIEVLTEWPVEALVEQFLKLPTCFFILTNSRSMTADKAMLLVQTICKNLKAAAEKVPGVSYTIVLRGDSTLRGHFPEEADAAVSVLGEMDAWIICPFFLQGGRYTINDIHYVADSDRLIPAGETEFAKDAVFGYKSSNLRQWVEEKTKGRVLENQVSTISITLLRKQGPTAVCEHLCSLEKGSVCIVNAASDRDMAVFASGMIQAELKGKRFLCRTAASFVSARIGIKPKPPICPNDLGLKRALTGGLIIVGSYVPKTTKQVDELRSQFGQSLRVIEVSVEMVSMKSMEDRDQEIRRIVELGNAYIQSRKDTLILTSRQLITGKTPEESLEINYKVSSALVEIVRRIDSKPHYIIAKGGITSSDIATKALEAKRAKVMGQALAGVPLWQLGPESRFPGVPYIVFPGNVGDNSALAKVVKSWASPSRSSTKEILLNAEKGGYAVGAFNVYNLEGIEAVVAAAEAEKSPAILQIHPSALKQGGVPLVACCIAAAEQSSVPISVHYDHGISKSDLLQALEAGFDSVMVDGSHLTLGDNILYTKSISSLAHAKGLLVEAELGRLSGSEDGMTVEEYEARFTDVAQAEEFIDETSIDALAVCIGNVHGKYPPSGPNLKFDLLKDLRALTLKKGVSLVLHGASGLSHELVKECIDLGVRKFNVNTEVRNSYLASLRKPEKDLIQVMASAKEAMKAVVAEKLRLFGSCGKA

SEQ ID NO: 58539 - protein, 944 aa, Zea mays
  Clone ID: UC-ZMROB73002H02_FLI.pep
RPAKMAMAMARFLSWLFTCFAALAVLEATVPARSWRAPSPTPRHEARRFEQKTDRFWEYQEQSNTWVQVRAPFDLMSCINGTCTKVGSIGRLAREPGRHGLPPVQSQEEEEEDTRRVQGDGAEEDPVLPVRRRISLTRMSESSVWVTGQSGSIYERFWNGVVWVIAPHELPASAGYATATFIVNTTILALSEAGTLYQLQLNEHAQPIWTEMAFNSSQQSANLGLKTQSQAMRIRNGIVSNDGRKLFLSIMNGSLLEVTEIQPLRWNYHGRPPGADVSYISDAGNLRPGTLFTVSSTGDLYEFDKETKPSWKKHIWSEELAKNISLKSSAGFALHGLSGSNSVSLFLISKDGLLVERRLHRRKWKWDKHGAPTGQRLSSIAEVQKDELNDATSMFLTTTTGKVYEYQFPKYTGGAQSNKIRGQWINHMSPEHAKVARNVPGVHVQVGRMVFPLDDGRLGELHFPGMGGTDFGPSAQSTIRRKLSNKYEWSILDAPETEGWNAEYCTEEHGPTNCISGAKNIAADTESNDLSNNPPSRRRKVEEKQHYLNVNRYQQSDETESYNFLSRTIDLNFHMRVMHADRSLFLIADNGLTFEYLNSNGVWLWLRHEHVTAMKGTLGSYNGSLYLVDVHGNLHIRERNGDELLWINCTAMKKGRQVASGSPWDGIPGLLRRVTTDDALFFVNKRGRLLQFTVALRKFKWKDCHSPPDTKIAFIVDQEVFRRNIIFVVGRNGRLYQYNRITELWHRHYQSPHLFLSCSPGTAMRPSPLSLAGSLFMVSEHGGLVEYHFSPQDGWEWVEHGTPHRGVTLVGAPGPCFDGSQLFVVGSDGHVYRRHMEGRTWRWTSHGHPPSEPAAVDEQSCATPDTGAGAHYADGFRGSCDGKVAAVRPVPFSEDAVVFELRDGRLAELRRPPSADGCGGWEWARIIGTPASACMTSYWTAVAT

SEQ ID NO: 58540 - protein, 521 aa, Zea mays; identical to SEQ ID NO: 57865
  Clone ID: UC-ZMFLMO17055B11_FLI.pep

SEQ ID NO: 58541 - protein, 361 aa, Zea mays
  Clone ID: UC-ZMFLMO17211C06_FLI.pep
VPTLRRLILMWALYWKRFWRRHRNGKCYGLQELLQEITEQRMKSSAGNVHDEDKNDESGIVLVSCKDERTCLQLQECILKGPCQVMREEWEKYLIGKAELHGLNKDKRKSEQPKGVGVLDGEVQMGSSESVCPVSISKLETNALLAAASELRNISNEADVKSGSNSSCSKAGGAKGKPKKTISKRQGSNRKNKSKEGNDNSQGTGLDSEGQSGKADVQAEIVASKMSAYDASMSASTSNVKFNHSSAFGNLANAKPLPPVQFHALDSDHQVLDVWKPSVIIVYHPDITFVREIEVYKAENSSRKLKVYFLFYEDSTEVQKYESSIRRENEAFESLIRQKSLMMIPVDQVVFHSVTKVLISV

SEQ ID NO: 58542 - protein, 423 aa, Zea mays
  Clone ID: UC-ZMFLB73219E12_FLI.pep
SSCSRLPMARPAAKARVPKHLVALAVVAILGLVLVADYLWASSSASSSAVWSSRLNLHTGPAGSTPPVAKKIKEDKKSVGSTGINATFADLPAPELKWEEMAEAPVARLDGAAIQIKNLLYVFAGYGTINHVHSHVDIYNFSDNTWGGRFDMPEDMAHSHLGMVTDGRFIYVVTGQYGPQCRGPTTRNFVLDTETKEWRGMPPLPVPRYAPATQLWRGRLHVMGGSKEDRHEPALEHWSLAVKDGKALEKEWRSEKPIPRGGPHRACVVANDKLLVIGGQEGDFMAKPGSPIFKCVRRSEVVYSNVYMLDDGTTWKELPPMPKPDSHIEFAWVNVNNSLVIAGGTTDKHPITKKMVLVGEVFRFNLGTLEWSVIGRLPFRIKTTLVGYWDGWLYFTSGQRDKGPKDPSPKKVVGCMWRTKLHL

SEQ ID NO: 58543 - protein, 403 aa, Zea mays
  Clone ID: UC-ZMFLB73224A03_FLI.pep
QGFHVAAHGCATCVGNSGDLDGSVSAAITENDIVAAAVLSANRNFEGRVNPLTRANYLASPPLVVAYALAGTVDIGFEEEPIGVGKGGKEIFLRDIWPSNQEIDEVVESSVQTHLFKKVYDSIMERNPRWNQLPVPKEALYPWDDRSTYIRKPTYLEGMSMTPPGPPTVTEAYCLLNLGDSITTDHISYSGKIPEGTPAAKYLLEYGVEPKNFSSYGGRRGNNEVVMRGAFANMRIVNKLLNGEAGPWTIHVPTGEKLYVYDAAMKYKSEGHDMVIIAGSEYGSGSSRDSAAKGPMLLGVKSVIAKSFERIHRSNLVGMGIIPLCFQAGEDADSLGLTGRERYTIHLPTSTAEISPGQDVTVTTHDGRSFTCTLRLDTQLEVTYFNHGGILPYMVRNLAAQMK

SEQ ID NO: 58544 - protein, 340 aa, Zea mays
  Clone ID: UC-ZMFLB73232F05_FLI.pep
HNSTASSSQQTPVGMAVALLLLLVTPVGLLAALALLTRPRAARVPLKGRHVFITGGSSGIGLAMATAAAREGARVSILARNLARLEDARAAIQRDSGRDDVGVHAADVRDAGAVARALQEAGPVDVLVCNHGVFVPQELEGQDVDEIKWMVDINLMGSFHLIKAALPAMKARTRETRLPGSIAIMSSQAGQVGIYGYTAYSASKFALRGLGEALQHEVIADNIHVSLIFPPDTETPGLEEEHKRRPELTNIIAGSSGGMKADDVAKKALDGIKSAKFIVPCNFEGAMLAVATAGLSPQSSPLMAFLEVVGAGLMRFAAICFQWNWFSTIESYYAKKKKSE

SEQ ID NO: 58545 - protein, 359 aa, Zea mays
  Clone ID: UC-ZMFLB73413C07_FLI.pep
MCPGGYSHAPDELAYGVDMRHVRWGGILQRIALAYLVVAVLEMVTKDGAKVHQDQPPGSSGRFSRVFRMYLSQWIVACCILVVYLSLAYGVYVPDWEFRVRNADSPDYGKVLTVRCGTRGALDPPCNAVGYIDRRVLGINHMYQKPAWRRHRACTDDSPHEGPFREDAPAWCVAPFEPEGILSSLSAVLSTVVGVHYGHVLVHMKSHTDRLRQWVTMGVALLVLGIILHFSHAIPLNKQLYTFSYICVTAGAAGVVFSELYFLVDVVSLRYAFAPLRWVGMNAMLVYVMAAEGVFEGFLNGWYYESTNNTLVYWVRKHVFVKVWHSTRVGILLYVLFAQILFWALVSGVLHRARLYWKL

SEQ ID NO: 58546 - protein, 360 aa, Zea mays
  Clone ID: UC-ZMFLMO17101F08_FLI.pep
NEYSDLFYGIPWSQGTLGFLVSAEIKLIPIKEYMKLTYTPVKGGLKEIAQAYADSFAPRDGDPAKVPDFVEGMVYTESEGVMMTGVYASKEEAKKKGNKINCVGWWFKPWFYQHAQTALKRGEFVEYIPTREYYHRHTRCLYWEGKLILPFGDQFWFRFLLGWLMPPKVSLLKATQGEAIRNYYHDNHVIQDMLVPLYKVGDALEFVHREMEVYPLWLCPHRLYKLPVKTMVYPEPGFEHQHRQGDTSYAQMFTDVGVYYAPGAVLRGEEFNGAEAVHRLEQWLIENHSYQPQYAVSELNEKDFWRMFDASHYEHCRQKYGAVGTFMSVYYKSKKGRKTEKEVQEAEAAILEPAYADEEA

SEQ ID NO: 58547 - protein, 461 aa, Zea mays
  Clone ID: UC-ZMFLB73066H03_FLI.pep
RRLWGEYRLLLLVPAPIPMVASSQLCERRRLELLVVPEDALAVLGLDVDALPGLAPGRLGNRGRVEVVVVPEDGPDRLGGLHGVVVRHGGEEVVRDVRVRDVVEHAVEDAVVAVHGGQRAAQPVPLARVVVGERRVGVLQVGDEHQPRVHDQQRHGVHAHHPPDPERRRQLVQPERHGHDAGVRDEDLGALPVVVDGAVGVEVAGEARVRPPRRVGRQVQRPPEGELHHDVHHPADRVVVHVRGVPRQRLLLLGHEHLVALQGPRVGVVAPVAVLPREVGHHERRVQHQADHVVQERVVREGVVAALVRDDPHAGAHAPLRDPVQRPGGVAERAWERRYDGQREVEERRGDHQVVDHVREGLEHRALEAVWRDGLLDLTQSERRLLHRRPLHRGATGSSGELLLLLPLLLGHPAAGTHLAPETEEVVTAASGQSRSGGHRASPLSPLFSCPGEKNERWCLQ

SEQ ID NO: 58548 - protein, 190 aa, Zea mays
  Clone ID: UC-ZMFLMO17122C07_FLI.pep
SGAAARRVRRLGRSLHGALREAKVRGGDLRRREALRAVHGRRREAPRRADHPDPGDRRVGELHYGPALLRAQEAGPAAHLGRRRDVRHGPDPARRLRLRLPRRGPWRQGRGWWVHAQVRAEPCRAGGGGGGGDQQPGVKKNQEQIETELKLRACLFQCVVAYHVRGGSYLSAGTQCLAKYLATWESQEIV

SEQ ID NO: 58549 - protein, 248 aa, Zea mays
  Clone ID: UC-ZMFLB73063E12_FLI.pep
RPSRPRFAPSCPRPLPPLSSSLLPPSSVILVASAARSALPTAFARPRPTTLAAPLPVLDNFPSGPVLAGIGACSLRHGGGESEGGRRAKRLSQLGRSPPTKIPRDIIDEEMEMESSPAAPRHHNRCLPCCALGSTSRATPLIDKHVVRPHRLPDRQACHGSRHLQPPRFFGQQARDHASHYSVVVVPGASCLRVSLTSDYVRRDLPCPGSKQNQGIRSASHGCCHVGDLIVHKNLRFDTKSLTKGRSR

SEQ ID NO: 58550 - protein, 138 aa, Zea mays
  Clone ID: UC-ZMFLB73240E08_FLI.pep
RLKPSDSLVAPTPPVFATGSPFDPVEYFGNLHVPGQANNAYIFPGFGLGVVMSGAIRVHDDMLLAASEALAQQVTEENFEKGLIYPPFSNIRKISAHIAASVAAKAYELGLASRRPRPKDLVKYAESCMYSPIYRNYR

SEQ ID NO: 58551 - protein, 229 aa, Zea mays
  Clone ID: UC-ZMFLB73245G01_FLI.pep
LRQNPSGAISGRQLGEAAHRLVINSLNAQGRGQHSGTSMPYRTIMNGLHHLDVASPVSNQGMRPQVGQSAGPPGWYVPRGSVSNGQPPAYASSGSGHYQYESSGHSQYEQGNHGRQQSHPYARDGFHDTRGRVPPAYGYQQSNMYPSGPGLYGQPPSAYPGVHGGGYQPPPYGGGQQWQQQSYSSYAVRGPYGGRPPPTRADSGSQQPQNRYGALDRSNNRRPSSGYRR

SEQ ID NO: 58552 - protein, 422 aa, Zea mays
  Clone ID: UC-ZMFLB73265D04_FLI.pep
LASVVSSGEVMNRGEFQTSLVQQMIWSGGGGGNTTAAGSSNIMSSGFKQSCHEDQQEASRNLQLLPSLSSPSSLLFSNAQQFPHTTSSGQQLAHTNAGGAAAGSLPSLDDDGGSGQDSHMPESWSQMLLGEFAGERYAATACLLSKGVEDWGDHAAAAASACMVGGGGGVEEEGSAAMPLYSLYGGGSHSHSHLAAAGDHEMPPAPAAAAAGANKSQLSQMLLASSPRSCVTTSLGSNMLDFSNNGVPPAPDQLKSHHHHQSDNSSEVRKERLGDRITALHQIVSPFGKTDTASVLQETIGYIRFLLGQIEALSYPYMGHGNGTSIQNGPTTGERNHAGLLPDQYPGQLLNHNNNTGARQPAAVGQPDEQQQQQGGANNNDETKKDLRSRGLCLVPVSCTSHFGGDNAADYWAPAPLGGILR

SEQ ID NO: 58553 - protein, 284 aa, Zea mays
  Clone ID: UC-ZMFLB73245G12_FLI.pep
FQYLLRCLKLWARKRGLHCHLLGFFAGIHLAILAAYVCRRHPNASINTLLSLFFDIFVHWPWPLPVSLLDPPVPCRGPDGCSLMPIMLPCIPPEFCSSSTTESTFSKIKEELWRGYALSKDTRSTDFNWSWLFAPFPYGARYKCFLRIVLSAPMGEELRDWVGWVKSRFRNLLLKLESLGVYCDPDPSEQVDHTITDPNVVFFWGLIYRRNIQICISSLKEDFMKSVCNNIYGKEKCAHSDITMSIVGPPQLPKSVFDLSVYSEKLPQHMMGHQLMKQNYNAVS

SEQ ID NO: 58554 - protein, 260 aa, Glycine max
  Clone ID: 700763765_FLI.pep
GKFKATDSPLPTVPGYDVAGVVVKVGSQVKDFKVGDEVYGDVNEKALEGPKQFGSLAEYTAVEEKLLAPKPKNLDFAQAASLPLAIETAYEGLERTGFSPGKSILVLNGSGGVGSLVIQLAKQVYGASRVAATSSTRNLDLLKSLGADLAIDYTKENFEDLPEKFDVVYDAIGQCDRAVKAVKEDGSVVALTGAVTPPGFRFVVTSNGEVLRKLNPYLESGKVKPIVDPKGPFPFDKLAEAFSYLETNRATGKVVIHPIP

SEQ ID NO: 58555 - protein, 133 aa, Zea mays
  Clone ID: UC-ZMFLMO17030D07_FLI.pep
IVRHFDVHCVHLNSTLVLQHLSELIHLSNPSRIVHMHMLSPSEQTSACIALKSSTSQSRPGASPTQHNMGNIISLYCANPSACIALNNSNAHSCASALSHAYSCIMAFLVTTLCCNSKTSPGVAAKDQVNTTK

SEQ ID NO: 58556 - protein, 246 aa, Zea mays
  Clone ID: UC-ZMFLMO17031E02_FLI.pep
QHILSPLRHDRIVRLLGTCADDGERMLLTQYMPNGSLHDHLHGHHLSSSSASPVTASWRTRVQVLLGTARAVEHLHCHAVPLIIHGNVASSNVLLDAAWAPRLAGFGASVWRAAGVDSQPVEVAGAASCGGYADPEYCGTGRIRPASDVYGLGVLMLEVLTGQPPVVSVWDAAKQGVVAVTLASFALPSIQAGRLGDVLDRRPAPQQLQPLQLVANMAARCLHMQGGSRPAISDVVANLEQALRLI

SEQ ID NO: 58557 - protein, 150 aa, Zea mays
  Clone ID: UC-ZMFLMO17040G02_FLI.pep
PSLAPLSLSAPPPASARRVVTDAAPASAPFSPSSAPRLTPPLCSKTPPPPPSSRRPWRLLSPLWVSVGGVPHHAEAPRSGTATRQIRAPPHMPQDDSPCTPPLSVTTLNRPTSPSAAASSLLPSSPCAPNHPSLFLCWIFGVLPELFPGV

SEQ ID NO: 58558 - protein, 635 aa, Zea mays
  Clone ID: UC-ZMFLMO17116G09_FLI.pep
NKGRWSSLTSPTMLRRCMRDLRSPRSLARVSRPISVESPTFLKSRSNSTKASPKSSQNAAPGPQGQPSQSGSNVSKIVLGTLVVGAAAMGAHQLGYIDLQFRDKKFPFSLKKEDVVKVYEDLKIPSEQKVDQTQNVSGQNAEIVQENNNEAHTPKGVLNDGMGALEVPINEDQLVPAEEKKSQTLAHETHPVPDEHGSDTKMPSEDSLAVEIETVPIDANESSEVPHEQQTDRIDSTIPPTQSTPTTVSTYDHPTDPDAPKDLSGAGAVEQKSLAETYFLQDEPDVSKDATIKEKRSDEVIREKTSKDGKIVLDIIEAIHAAEKKQADVDAYMYSEERRKLKEKYEKELKDTRARELMYAEEAAILDKELKKEKLKNAAALKELQEKAEQKLQDELQRKDEETSQQIEKAQEIAKAELAAAVAKEKASQIEQIAEANLNIDALCMAFYARSEETRQSHSVHKLALGTLALEHALSSGSPIRSEVELLRKSVEGIDKDSLLELALSSLPEDVLDYGSDTMMGLKQKFNSLKETIRHFSLLPAGGGGILAHTVARVASSIKIKGDNSGDGIESLINKVERLIVDGDLITAADALEQGLHGTEAEEIATEWVKQARKRAIAEQTLALLQACASSTTFS

SEQ ID NO: 58559 - protein, 685 aa, Zea mays
  Clone ID: UC-ZMFLMO17122A04_FLI.pep
AEEPRVPNQLASHNVTNGQCSILGPPSATSSMVAPVLRTDSTTQLLSTRNNTVDSNNLGSVHLQGNSELKKPRLAKVPGSMMLSNAERSAGGILGSGAHREVIQNSDPSHRDAKIKDQTGFRQGASSSNRTIRCQRCNEYGHSTHFCEVEKLRLSSGKPLSERNLKDASAKRNKTSEVSTLASSEKTPSREPEHVVKCAINQNLINGPNDGIPAPSSHVKKHSLSPRANVSIPGSGVDCSKPKFKNNDPSLSGTAGIFVHNGRIMPNDHRDEPAQGFSAGDEPTSSTVPELGWIWQGGFELQRTGSSPELCDGFQAHLSCSASQLVLDAVKKFPSKVQLEEVPRKNSWPTQFQKNGPTYDNIGLFFFARDVQSYENHYSKLVENMLKNDLVLRGSVGTVELLIFPSNILSKNFQRWNMLYFLWGLFRVSKKDSSNLPSYLSTSRVEQNFNDDLQAMDWMPSTHSFSQNRSDLAELDPGLLKSTNFEPSLEASREVCLDGENSLNQLVRRRALDNHLDSDAKACSTISNGAMGSSAMSMQRKHQKPDYPEHQDKTRDTFGGNVSERDFDVNTVPVTCSVSLTHLQEEPGKLSTAIDLMDIDHGVSAGALDRSHASGGAGKRSFETAEVADEVPEHKKTKLDNNACTNDGNSDKLMPGSSSSDGKRVFPLDLNAVGDEDIVNIPAFR

SEQ ID NO: 58560 - protein, 546 aa, Zea mays subsp. mexicana
  Clone ID: UC-ZMROTEOSINTE008C02_FLI.pep
ILEHGADINAVDHTGQTALHWSAVRGHIQVAELLLKEGAKVDATDLYGYQATHVAAQYGQTAFIYHIVAKWNADPDIPDNDGRSPLHWAAYKGFADSIRLLLFLDAYRGRQDKEGCTPLHWAAIRGNLEACTVLVQVGKKDDLMVKDKTGLTPAQLAADKNHRQVAFFLDNARRVHGKGCGANTRFGKLSKLGLAPLLWCTIIGMLITYTHSVISGQYAMTTTAPFGIFAWSGVFLATAGLVMFYKCSRKDPGYININARGSQNQRDDEPLLKMELENPALLSGNWSQLCITCKIVRPVRSKHCSTCDRCVEQFDHHCPWVSNCIGKKNKWEFFMFLTLEVFAMIITGSAAIIRIVRDPNSPSSFGAWIHYSAFQHPGVVSFLALDCFLFFGVAVLTVVQASQIARNITTNEMANSMRYAYLRGPGGRFRNPYDHGIRKNCSDFLLNGYNEDTERLEQTLPTDEEMGMIQMTSAVSQQNGDNHLHHGNGTDHSCAVSQANSKPHSQVGSSQCCDHSKRTDRTPLGLGLGLGRNSASRQYVRSLIPL

SEQ ID NO: 58561 - protein, 715 aa, Zea mays subsp. mexicana
  Clone ID: UC-ZMROTEOSINTE018H01_FLI.pep
KKQEKSRQRRILKTKEDLAAAEKELEDLQPYELPKAEMAQLTDQIARISVEIKNLKAERNAMESQLAREEESLRRCSDRLKEMESKNSKLLQALRSAGADKIIEAYHWVQANKKNLRQEVYGPVLLEVNVQDKLHATYLEDHVPNYLWKSFITLDASDRDYIAREMKQYGIPVLNYLVREGTRRRPLNITPEMEQLGIYSRLDQVFQAPDTVKDVLISQAGLDDSYIGTDETHRRADEVSKLGIYDFWTPDNHYRWSKSRYSGYMSAFVDAIHPSRLFKSNLDVSGIEDLRLQKEDHVTNIEGMREAIKTLHRKQRQLEDEEANIHRQKEEIINAMRYHKKTREEIQRRVDIKKRILKDISREDDVESSTRKLVNQVAKINDERFHAMIKLKDLLTEAVALKWSHTEKNMTLIELDTKIWEMEKGVKKLEKDANQAARNYEDCRRITQEHRRRLSIAKQNAESIAMITKDLEKEFCAMPTTLEELETAIQDTESEANSMLFLNQNVLQEYQNRQHEIESISNKLKDDKGEHEICCSEIETVKGKWLPTLRILVSKINDTFSRNFQEMAVAGEVSLDEHGIDFDHYGILIKVKFRQTSQLQVLSSHHQSGGERSVSTILYLVSLQDLTNCPFRVVDEINQGMDPINERKMFQQLVRAASQINTPQCFLLTPKLLPDLEYSDACSILNIMNGPWIEEPAKAWSSGDCWRTVVSAAGH

SEQ ID NO: 58562 - protein, 747 aa, Zea mays
  Clone ID: UC-ZMFLMO17130F05_FLI.pep
KFSKYGSFADNDIGSDGYGETNGFLHQNLGKDCSSDITWSGSFWTCSKQLRHYQAFCRNGTTISTHTFVLVLSEEQNRYLAYLEDMYEDKKGQKKIKVRWFHQNQEIACAIPPPPHPCEVFITPFTQVISVECVDDIATVLTRDHYEKCSHAMSIMTGIRFCSRQYSKNKFKYFDLRTLRGYFSQAVVRSMKFPAESEKDSEYCTPGKAKFPKQLERLYSKCLGTKICRSPQADSIPSYQILSNEQPPGKHLSIKFIVPQNQLKSTYNTGDRLEILSQDSGIIGCWFRCTVLKSCTNHNRLKVQYDDLQNADDSGRLEEMVPASALALPDKLGLRRQDRLRIRPRPQENSFVDGAALLPGTAVDVWQFSGWWEGVVVSLDNIVADSLQVYFPGENFFRVCQLRNIRISKDWVKNRWVDIETKSDVLSQIPSDSIQAKQTDNHALSVGVTGSSSSAMPEQELAATQANSNGDAAVPKQELTVTQANSNGDQPVPKQELAATQANSNGDKPVPDQELAAIQANSSGDKPVPKQELAATRANSNGDKPVPDQELAAIQANSSGDKPASEQELAATQANSNGDKPVPEQELPATQANSDGDKPVPEQELPATQANSDGDKPVPEQELPATQANSSGDKPVPKIELAATLANSNGDKSVTEFTAAQATSNGNNKQIEASKQSEVSMTDEASALVEDDKRTILGKRPRDVSMTDEGSALVEDDKRTIIGKHPRDEGNAEQRCNGEVGVVVSKT

SEQ ID NO: 58563 - protein, 157 aa, Zea mays
  Clone ID: UC-ZMFLMO17046G12_FLI.pep
RRRGPLSHTPSCPSAPLPDPVIRCRDPMPHPPSTPSSPSAPLPDLVIRCEAAINALLPLRSAPLPGSRRAFIAALMVHGCTHIRHRLSARKLLPAPTCVHRCVPPPTSSAPNLYPSSAPLFHPRTHARDPHVPHPSRAPDAAPPFHPPHAAPCWPPP

SEQ ID NO: 58564 - protein, 158 aa, Zea mays
  Clone ID: UC-ZMFLMO17057A11_FLI.pep
LQKRQAQANTRSRSEMFNPCKEDSASGFRIEPPQPTPVTESSEDPQRAYPTRIFHSGPLVNQSQPSKAGGGKNGEPQVPGVANHPVVLLTRSGPRADGSGQTMVAQAEAFAHGRRLSESINEHFSNSGKYDQVFPKKDDRNIRADGAIVSNVLPFSGS

SEQ ID NO: 58565 - protein, 725 aa, Zea mays
  Clone ID: UC-ZMFLMO17307A04_FLI.pep
LFGPRPSPPLHTASPPPISPASTMNGGGGRRRYSSEQLLFDVPSNAGAGRWAQQSGGVRRGDGEIFVSVEPATPARLRGGDAAAGDSPGQRQQLSPGLLDLHAFDTELIPDFQVPGMYDGAQKFGYGGGLDESDMRFTANKLMSKSAVFPDGNYLKAFTEKEKAAPVAKIKVVVRKRPLNKKEVSKKEEDIIDIEQRSNSLTVHETKLKVDLTEYVEKHEFVFDAVLDEDVSNDEVYRQTVEPVVPSIFNRTKATCFAYGQTGSGKTYTMRPLPLKASQDILRLMHHAYRNQGFQLHVSFFEIYGGKLFDLLNDRSKLCMREDAKQKVCIVGLQEYRVSDVETIKELIEKGSATRSTGTTGANEESSRSHAILQLAIKRRVDGNDSKPPRPVGKLSFIDLAGSERGADTTDNDKQTRIEGAEINKSLLALKECIRALDNDQTHIPFRGSKLTEVLRDSFIGDSRTVMISCISPSSGSCEHTLNTLRYADRVKSLSKGSNAKKDVSLAVPLRESSPSPLPSVVPSFSASEVMNDITERNNFGWPKQQYVKEQPAPTFVERMPKVKDAVEFATSDGAYLKGQRSQGCMAPNIAEIPDTMYQQRRQPARKAKDTALRNNMRNSVAYPTRSVEPDEDDHLNNLLQEEECLVSAHREQVEATLDILKEEMNILGEADQPGFQLDDYNITRLSSILSQKAAGIVDLQARLEQFQRLLDENNVLLYAQSPRL

SEQ ID NO: 58566 - protein, 595 aa, Zea mays
  Clone ID: UC-ZMFLMO17309E07_FLI.pep
SSLKMKTVTSCLKLHPADVDKDAPFPSKSPRINRAAPVPSKLPSADKATPVLPKSSLSVNKAALVRPKSPAVDKATPVCPESPAVDKVTPVCPRSQAVDKATPVRSQSPAVDKATHVCPQSPSVDKATPSIDKATPVRPKSPAIDKVTPIPPKSPPVDKASPAPPKSLSGAKDVPVPSRSLQIDRFIPAPPRLSQVDKAALPSSEQPHISPATNSEAQGATTSRKVTASSVLEVAAASRPSSAPVLPTPRSTAPVASHIQTSTLLSRSMSEAAGRRSVNDPSFSAPSYTPQTYRNAIIGKTGLATTSANLAYQSYSLGQDTAPSQPLSAYASSTAVMMPPAGRSDQSSARHGFKSGSGKLEAHDSWQQWKGDNNVDMHLWRDHTTYQQMTRGQAYDQSRRDDTYQQTCSRGTEKFSRHAGLQARQFQTETPASHVWHQQQGQVAEEFPHLDIINDLLEEDQINGSIPESFHQDYNVFGLPFSPRGNVSDMGMASVRSPARFNSTKYEYDGGFSGAYDINAVNGLRERQFPSLDSYSNGLSDVSASKPWLNGSPSPSVMSLGVNTNGYHPQVADYPSLGNGVNGVSLWRRHANGRW

SEQ ID NO: 58567 - protein, 409 aa, Zea mays subsp. mexicana
  Clone ID: UC-ZMROTEOSINTE117G04_FLI.pep
LDVPIDLSKVLFVCTANVVEMIPNPLLDRMEIIAIAGYITDEKMHIARDYLEKNTRQACGIKPEQVEVTDTALLALIENYCREAGVRNLQKQIEKIYRKIALQLVRQGVSNEPDHESVSASVTEESGNGDNTTTKDEILKDPAVEDASVANNVTNPASEEANEENLTNEAAKEDTASKGNKGTDRAADKAIEKVVVDSSNLGDFVGKPVFQAELIYEHTPVGVVMGLAWTAMGGSTLYIETKKVEEREGKGALVLTGQLGDVMKESAQIAHTVGRAVLLEKEPDNHFFANSKVHLHVPAGSTPKDGPSAGCTMITSMLSLAMGKPVKKDLAMTGEVTLTGRILPIGGVKEKTIAARRSAIKTLIFPAANKRDFDELASNVKEGLEVHFVDTYSEIYDLAFQSDAGTETS

SEQ ID NO: 58568 - protein, 142 aa, Zea mays subsp. mexicana
  Clone ID: UC-ZMROTEOSINTE117C02_FLI.pep
SSVNTIYFVAQAFVVFMTHVTCKPHPRHFYAGAVEDLLSITDHVINLISHFLFSCIINVYRTCSNAKNAKQSIIKKTETLLHMNTDEADDTGAQQTPGRPADRLRSLRPRLRLRLRDGLLQLLQGRLVPDEAHEPEVEAVAR

SEQ ID NO: 58569 - protein, 86 aa, Zea mays
  Clone ID: UC-ZMFLMO17127H04_FLI.pep
SRGSLRPIPSSRQYVMNQCMIHGKELRWHRGSLFTGHLFLACLKLMRRPKIWCFILPDESLQEPGGAYWSSRSLRASDVCCVMRVH

SEQ ID NO: 58570 - protein, 590 aa, Zea mays
  Clone ID: UC-ZMFLMO17233F10_FLI.pep
ALRDAATRALASAGLFRGLHGGASSEHGREPAGPLTLYRKLVSQGKLTHDSYQENVASELDNLLSRLQRYEMEMEDYHDKLYFWENSREKERRRLLVEEAEDKQRGGVWIDERRGFLDKLVARRRRGSIEPGVGKWVSYLNREKKLDTLVGHRPVAPVAPKGLYLYGNVGSGKTMLMDMFYGATEGVIKHRRRFHFHEAMLEIHDHMHDVWKRRDDDKSIHSSAFSWISSLPFDTKIKEWLIGEEKYKQQTQEKHILLAVADKFLVDRQANKTGASILCFDEIQTIDVFAVVALSGILSRLLSTGTVLVATSNKAPEDLNQDGMQRDIFLELLSKLDENCNEILVGTEKDYRRLIPTEGSTEVHYFWPATSDARSMYEAMWHDITDQSGGNIVSVTIPVMFGRSIEIPQSCNGVARFDFEYLCGRPVGAADYIALARNYHTIFISEIPAMSMKIRDKARRFITLIDELYNHHCRLICLAASSIDDLFQGTEEGPLFDLESFQFETESEGTKLRRDVLAEGNAGSGPSTTGLVAILSGQEEMFAFRRAISRLIEMQTPLYLERVQAVHPSFRRPGLASNNRPAVPQPAPVV

SEQ ID NO: 58571 - protein, 397 aa, Zea mays
  Clone ID: UC-ZMFLMO17233H12_FLI.pep
EQVRSATKQALNLSAPALRIRKLEAREEARLARSPLLDGNGVTMAHERGAAASTHPAAPTSEEDALFIDLLHEAPLSGHREPRSIVGGTLYCILLVGFAAVAISAPWIFLFAPDMISPLLCSSNAILLVLTGIFQQYWVHQVRKVRLQGYYDFSQKLKRIARLPFATIACGTALMLLIMVWQPLLQILSVSLLLRIAIVVEVTCAGCFMGLYLWHIHRYNSLNGQPDILRSLYSALQPSNTLEDRRYHDARLSDQQMALLQYQRENIHYLSEEVLRLQECLSKYQRTAGTTPQVDLAHLLATRDQELRALTAEMNQVHSELQHARGLIDEKDSELQRIRLSNNQYVEENDRLRAILGEWSARAAKLERALEAERVSNVELRKNIAKFRGHLYKEQEA

SEQ ID NO: 58572 - protein, 120 aa, Zea mays
  Clone ID: UC-ZMFLMO17308F08_FLI.pep
LPLPWQLPSSISLPSHGRAQILSLPVRIPPDLRSSLVCLPPCALSQRPCALRGAQLSSSGAQLARAACAPVSRSARGVPSRRSSPCSARRAELSSTSLLLSFLARRVELADDALAGQPLL

SEQ ID NO: 58573 - protein, 198 aa, Zea mays
  Clone ID: UC-ZMFLMO17294D11_FLI.pep
DTFLALPPFWRRPSPPPHRSSLLTETHLKMMRSQLWMHHLKLWMEKSVNQNLSRVSQHLMNGLISAIILLRGCIIDIELGLITKDMNQSESSSVARGRGKNKRIWTYYEDEELIKALYEISLDPKWKSEGGFKNGYCSVLENELKARLLGCGLSAIPHIESRVRHFRTKYGAIEVMLAKSGFNWDDNRKMVQCEKQQY

SEQ ID NO: 58574 - protein, 267 aa, Zea mays
  Clone ID: UC-ZMFLMO17299H10_FLI.pep
SQCFSSEIMVERHTNRHRGFGFVTFEDRRAVDSAIKEMHGQEIDGRTISVNKAEPKMNTDDTRYAGGGGRGEYRGGRGDGPPPGNCFECGRPGHWVRDCPSAAGGRSGRFPSKFSGGSGVGRGDRFSGSDRFGDRYMDDRYDGGRYGYRDQADARDRYAGGRDRYANDRYPSGGDHFGGDRYGGGPDCYVPSGYGRERERSYERDGVRGGGGGGGGYDRSGPRGGGGYDRDGPRGGGGSARYDGGNYRERPGPYDRPSRGGRFDDRY

SEQ ID NO: 58575 - protein, 579 aa, Zea mays
  Clone ID: UC-ZMFLMO17051E11_FLI.pep
AGSFACGVDDGARAVLAAGAVGHITRLLAHPDEKVVDACARALRMIYQSRLAPKFDVNSGENVDFVLSLLDSENENVTELAAAIVSHSCESGAEQLSLCSAGVPQKLVSLFGCSMNLRDACLGSIIAVIQNNQDVASRFASTDHGKGFRSVVGLIHDRSPRTRLLACLCLIALGHASPDHFQDNQIKTKLIMVLLELIEEPGHVGDEAPLALTTLIKDSFELQRQALTTNAVEKLSNHLLANPLGTRRAVTILLALSELCSKLEESRSQLMSVEVSTLLLEALKHDWADIRVAACSCLKNISRSPKILSGGRLSCDTVIGPLVQLLNDSSTSVQVAALGAICNIAVNLTPRKSVLLHSGVVSQLVHLSKSMDPMLRLKSVCALRNIMFLLSPKDKDFIVKELTLSTLSSLICDSEHFVQEQTLALVHNLVDGYVVSANYVIGEDGMVMDAIARQLNNASAPGVCIQGMYVLANIAAGNEWNKEAVMNVLLPHRADRIKPSFAVNFLKSKDRQLRVATLWCVLNLMYPKCEASSGRAVRLQSAGVILQVKRMINDPCLDCKLRVRMVLDHCLDNADDCFM

SEQ ID NO: 58576 - protein, 721 aa, Zea mays
  Clone ID: UC-ZMFLMO17301A04_FLI.pep
PYSAVYNTDSSAEASRREALLVKHVKEKLREQGFVEESIRTDSYLNLRYEGTDTAIMVRQPEQGSGNDYADEFEKLFQQEYGFKLLNRKILICDVRVQGVGTTNILQPRELTQISTKPVQESSCRIYFSSGWQDTPLYKLENLGYGHLLEGPAVIMNGNSTVIIEKDCKAIITKYGNIKIDINAAPSTVSISEKVADVVQLSIFNHRFMGIAEQMGRTLQRTSISTNIKERLDFSCALFGPDGGLVANAPHVPVHLGAMSSTVCWQLNFWGENLNEGDVLVTNHPCSGGSHLPDITVVTPVFDHGKLVFFVASRGHHAEIGGITPGSMPPFSKCIWEEGAAIRAFKLVERGVFQEKGIIQLLQSPCSDELAGYKIPGTRRIQDNLSDLRAQVAANQRGIALIKELINQYGLITVQSYMNHVQKNAEVAVREMLKTVASRVAKENGSCVVEDEDYMDDGSVIHLKLTLDAIKGEATIDFEGTSPEVYGNWNAPEAVTTAAVIYCLRCLVDVDIPLNQGCLAPVKILIPKGSFLSPSDKAAVVGGNVLTSQRVTDVILMAFQACACSQGCMNNLTFGDDTFGYYETIGGGCGAGPTWDGTSGVQCHMTNTRMTDPEIFEQRYPALLHTFSIRENSGGSGLHRGGDGLVREIEFRRPIVVSVLSERRVHAPRGLKGGRDGDRGANYLVREDGRKIYLGGKNTVTVSAGDILQIFTPGGGGFGCP

SEQ ID NO: 58577 - protein, 341 aa, Zea mays
  Clone ID: UC-ZMFLB73257H05_FLI.pep
YYRDNGFMPYARSVLVIHNIAHQGRGPIDDFRYLDLPGHYMDQFKLYDPFGGDHLNIFAAGIRAADRLLTVSHGYAWELKTPDGGWGLHSIINENDWKFQGIVNGIDTADWNPRHDVHLQSDGYTNYSLETVQTGKAQCKEALQKELGLPVRGDVPVIAFIGRLDHQKGVDLIAEAMPWIAGQDVQLIMLGTGRQDLEDTLRRLESQHYDRVRGWVGFSVRLAHRMTAGADILLMPSRFEPCGLNQLYAMMYGTVPVVHAVGGLRDTVQHYNPYEEVGVGWTFEKAEANRMIDALGHCLNTYRNYWSSWEGIQRRGMMQDLSWDNAAKLYEEVLLAAKYQW

SEQ ID NO: 58578 - protein, 491 aa, Zea mays
  Clone ID: UC-ZMFLMO17048G12_FLI.pep
GSKDKKVSTSINDNNASRASEENTPASGSGEASEALPVETKPRPVLKQLCEQMDTKGLLKFLSENCRKLASFRDELSVALKCATDPARFVLNSLEGFFPPDQTNSPGSKHNALEVQRKSCILLMEAIAPALGMKEPGGDDPWSSEIKEQAKEIAEEWKSKLAEIDLDASNGYSLEAQAFLQLLTTFNVDSVLDEDELCKIVVAVSRRKQTAVSCRSLGLNEKVPGIIEELVKRHRQIDAVHFIQAFGLSETFPPAPLLKTYVEEQKDTIENNGDATAISLTDDPKSRELIALRAVIKCIEEHKLQKECSLGPLQKRVSELKPKGEKRSSSDAGRTYAKKPRGPGISFPRRPAGSVGSAARRPPFPGYTWQRAPAPMPSRGPAPVPSRAPLPAPLPDRYGAADRYHYTPPAPAYDSGAFSSYSEPFSAPKPFQYTPGSVAASYNSSPYKVAYGGPGAPVRSTYPGYAGASGPAASSSYANYMGSVYRPPQQP

SEQ ID NO: 58579 - protein, 336 aa, Zea mays
  Clone ID: UC-ZMFLMO17051G01_FLI.pep
PTDHPLLSSLPLPLPLRRTTTTTTLPLLASQKRRGTKRREREARGPPASLACAPDSSLRRWLQRRRPGGEMSSRSGSTGGGSTGGGSSAGGGGAVPLAVLLRREVASERTASERPELHWGLFSQAKKGEDFTFLKPECERVPDVPSSSFSAFGLFDGHNGNGAAIYTKENLLNNILSAVPADLNREDWLAALPRALVAAFVKTDKDFQTKARSSGTTVTFVIIDGLVITVASVGDSRCVLQAEGSIYHLSSDHRFDASKEEVDRVTECGGDVGRLNVVGGAEIGPLRCWPGGLCLSRSIGDQDVGEFIVPVPLVKQVKVSLFNSSHQLRRTALILL

SEQ ID NO: 58580 - protein, 736 aa, Zea mays
  Clone ID: UC-ZMFLB73029F02_FLI.pep
TQRRPRTHSPDSAGTQRSGQTKAAAAGRQRQRRNSQVTSASGSKNPHPTSRLSGPTVMSSSVPPPPPQQELESPSAGGDKVLAAAQHIVKSLATSKNAADDMIRILSGFDNRLSSITNDHLFPSPDLTAASASEISAAAASFDAADQLIQLWDATPDALVFEAPEDDIAQYLAAVDVAIDHLARGGPGGARAGVAVQLAMVRLEEELRHLMVRHAVPIDPTGLFFSLRRLSLESMDDLDACPDFDAATPHSLDATPAGPETARGASLGSNPFEDQVFDPVRPEAVEDLRAIAHRMARAGYARELADAYCGIRRDLLDEYLSVLGVERLSIDDVQRIEWKLLNDKMKKWVHGVKTVVRVLLAGERRLCDQVLDASDELMDACFLESTKGCIMQILSFGGAVAVCPRSPEKVPRILDMYEALAEVIPEMKDLCIGSSGDGVISDVQAILDRLGDAVRGNLFEFGKMLQQETSRRAMAAGEIHPMTRYVMNYLRLLVVYSETLDALLADDSSDHDTFRSSDDQDQEHLERMTPFGRRLLKLISYLEANLEEKSKLYDDAALECIFAMNNLLYIVQKVKDSELGKVLGDHWIKRRSGKIRQYSKSYLRVSWTKPLSYFKEDGHGSGSGSGSGSGSGSGHSSSRMSIKERFKNFNMAFEEIYRNQTLWKVPDPQLREELKISISENVIPAYRAFLGRYGNQVDGGRNPGKYIKYTPEDLESQLSDLFEGSPVSANHSRRRA

SEQ ID NO: 58581 - protein, 717 aa, Zea mays
  Clone ID: UC-ZMFLB73099H11_FLI.pep
NPQTLILWPLTMADADDAPPTPPPEVVAPEEHPAVAESAVAAQQEGAATAQVDNKRKLEEAGADAEANGTGEDAKRPRVDGEPDAATGIEQQNDGSSVNVSVNVEEPAAAEEDKVAPTDGAATDGDNDTAAPATDSQAGSDDKPLEAAAEAPQPESDAAAVAQEISRMIEVPNSRVGVLIGKAGETIRNLQMSSGAKIQITKDADADSNALTRPVELVGTLGSVDKAELLIKSVIAEAEAGGSPALIARGFGSGQPGSEQFEMTVPDNKVGLIIGKGGDAIKGMQTKSGARIQLIPQHPPEGVTLTERIVRVTGNKKQIELAKDLIKQAMNQTFSRHTNQSGGYGPQGYRPQGQGAASQWGPRSQNHGYGYPPRGMPPPQNYNTPYGSYPPQQGPPRGGMGWDQRQGPPPHPSYQGGASDYYKQGSQPYDSQPPSYPPGPGNYNSYGQSQGPNYGQPQYPQHAPQQNYSHGYGDPRYNAPPPNQQYYGQPPMGPQQGYPQQPDPYARPPYSGPGQWPPRGAPAADGSYQAPAASYGPPSQHPSAYGQTYSAATGSDGYAQQGYPQQGGQAPAPYGQSAPAAPGYPQQQGGYAQYPQTQPAYGEQAAQTNASYGYQGAPADPNYGSAYPQPGYGPPGQATGQAGYASSAASQPAYGQAGYTQPPTNPPGYEQSAAPATTQSGYAAPPANPQQPAAAKGVSPQPGGGAAAYGAGGQWTA

SEQ ID NO: 58582 - protein, 191 aa, Zea mays
  Clone ID: 700201960_FLI.pep
PQDRLLRGPGPRHLRRARAPRGRRHARAQPGQLLRRLPDLHLQHHGAATMGRVRTKTVKKTSRQVIEKYYSRMTLDFHTNKKVLEEVSILPSKRLRNKVAGFSTHLMRRIQRGPVRGISLKLQEEERERRMDFVPEKSALEVEEIRVDKETMEMLAALGMADLPGVERQAEVSNAPAYGRPQYGGPRRDRV

SEQ ID NO: 58583 - protein, 187 aa, Zea mays
  Clone ID: 700202950_FLI.pep
KMKLYPCPRDMMAFSACNRPLPNLRAELTSSRGHPFPRVVHALADLPPWNVFHDPRLLLKTLLPLFDKSFILFCLEHRQYSTASSNFLFFERPADLVPLADLVHAICESTEGGEEDGGGAGPRGGDPAGEAHGRETARRRPVLHHRHLLDAGHPRLVPHQGLRHLRSRIRTPVRTLGGTRAPRGDQT

SEQ ID NO: 58584 - protein, 581 aa, Zea mays
  Clone ID: 700203022_FLI.pep
LSSALLLCSPRQTVNPSLRGTPVAAMGASRKLQGEIDRVLKKVQEGVDVFDSIWNKVYDTENANQKEKFEADLKKEIKKLQRYRDQIKTWIQSSEIKDKKALMDARKQIEREMERFKVCEKETKTKAFSKEGLGQQPKTDPKEKAKAETRDWLNNVVSDLENQIDNFEAEIEGLSIKKGKQRPPRLVHLETSITRHKAHIKKLESILRLLDNDELSPEQVNDVKDFLDDYVERNQEDFDEFSDVEDLYSTLPMEKVEALEDMVSLAPSSLVKGVAPVSTTAVLSTKSSVATSPTQPTVSTASSQSTSQDQTEETASQESNPESTPQTPPPKGGNPGPSVPAVPIVVSTGSAAVSVPAETISSPVRLTVPATAAAVLSSAIPRSAPENTLAVTSIPANLSTTLKDDESMSVPPRRPSPAITEIGIGRGITRGTTSQALGTAPITIGPVSGNVSVSALPAINDLSKINILNTDEKINSGGLSQQLVMPLGSKVQPQQVPRTNDAIGSDSANTNENPILGGRVFSPPVVSGVQWRPQAAAAFQNQSETVCISSVNLFYYIVQLPGVLVRCLPGEPKVLCLTQPL

SEQ ID NO: 58585 - protein, 220 aa, Zea mays
  Clone ID: 700073878_FLI.pep
TSLQNLAWFPALHVTAPHHHLQLVVVVVDAAVGIATGGAARPLVHGRHDGVAHGLHLLELLLVVLLLGGLVVVQPLERLLEGLLHLLLLLRLQLVRELVLVAHRVLHVVHVRLQLVAGVDPLLHLLVLLRELLRLPHHAVDLLLAQPPLLVRDRDLLRLARALVLRLHVQDTVGVHLEGHLDLGCAPAQFNSFIRQHWIQSAIQQKDEQQQRTSELTECH

SEQ ID NO: 58586 - protein, 205 aa, Zea mays
  Clone ID: 700073967_FLI.pep
YNSQTFQNIQNIQDIRHHHRANFKTEQKKQQHSVQLVFHQYQKSRTFRTAHCGHLIGTKSEAAESSRGPETRGSLGLGVGSGELLLLEALERLLVRPRLDCKVGLRVEADAEDDDGEEGGHVAGQLPILPLARFPRRRRRPVEEVPLGALLVTWGRPPPGPLAAAAANARCPAQPCPQHTINRRRHRPHRCASRSERGEEFVDLG

SEQ ID NO: 58587 - protein, 532 aa, Zea mays
  Clone ID: 700076168_FLI.pep
STTQIDFDLKAMAIAALELLYVLGSLVALRLAWQVLEWGWLSPRRLGRALRAEGLRGTAYRFPAGDAKDEERLLAAARAKPMPSLSHAISARVGPLVHNAIHEHGKISVVWIGPTPKVILSDPKLVREVLSKSSKFGDFQKPKLPSHFIKLIAQGLTVHEGEKWAIHRKIIRSAFLVEKLKEMLPAFTACTGELMGRWEESMGCDGAREIDVWPEMQDLTGDAISRAAFGSSLIEGRRIFRIQAEQIKIANEMTNLYIPGYTYLPTKPNRRIKANAREVEALLRGIITKRETAMKNGHADDSDLLGKLMQSNVEEAHGGGGSSKPMMTMEDIIGELKLFYFAGMETTSALLAWTLIVLSMHPEWQDRAREEVLEVFGKNEPNINGTNSLKVVTMVLYEVLRLYPPIIDLERQTWKEMELGGVRYPPGVTLLLPILAIHHDPDLWGEDVDQFRPERFADGISKASRDTPAFFPFGWGPRICVGQNFALLEAKVALAMLLQRFSFGLSPSYTHAPFSVSTVQPEHGAQIVVKKI

SEQ ID NO: 58588 - protein, 429 aa, Zea mays
  Clone ID: 700076345_FLI.pep
AHTKQPVHQGHHSPPPRTNGNSSQLLTSRHNTKTHVGGNLKLQSSMAQQQTNPEEVVLGQEVGAARVATLNRPRQLNGISDRVVYLLAQFLEKWEKDENAKFVIFKGAGRAFSAGGDLKMFYEGKSNDSCLEVVYRMYWLCYHIHTYKKTMVALVNGLVMGGGAAMVAPLKFAVVTEKTIFATPEASVGLHTDCSFSYIHSRLPGYLGEYLALTGARLNAKEMISAGLATHFVSSEKLEELEKRLLDLDTGAESAVRAVIEEFSTDVQTDEDSILNKLSTINKCFSAETVEDIIKAFESEASIDGNQWIAPVLKGLRRSSPTALKITLRSIREGRKQSLPECLTKEFRLTMNILRSVVNGDVYEGIRALSIDKDNAPKWNPTTLEEVKYEDIDRLFQPFSPELELQVPSDDSNRWSGKYENTVYGRASQ

SEQ ID NO: 58589 - protein, 200 aa, Zea mays
  Clone ID: 700150262_FLI.pep
GRVGVRVGKKPEETAVLKVLRDGKEQELGVTLRPLQPLVPVHQFDKLPSYYIFAGFVFIPLTQPYLHEFGEDWYNASPRRLCERALRELPKKTGEQLVILSQVLMDDINVGYERLAELQVKKVNGVEVENLKHLCSLVEGCTEENLRFDLDDERVIVLKYQNARLATSRVLKRHRIPSAISSDLVEDQVTDGEVETSCTS

SEQ ID NO: 58590 - protein, 321 aa, Zea mays
  Clone ID: 700152622_FLI.pep
GSTDCTVKIWDPSLRGSELRATLKGHTRAIRTISSDRGKIVSGADDQSVIVWDKQTFKLLEELKGHEAPVSSVRMLSGERVLIASHDGTVKMWDVRTDTCVVTVGRCQSAVLCMEYDDSTGILAAAGRDITAHVWDIRSSKQMFKLQGHTKWIRSMRMTGETIITGSDDWTARVWSLNRGTCDAVLACHAGPVLCVEYSPSDKGIITGSADGLIRFWENEGGIKCVKNLTLHTASVLSISASDHWLAIGAADNSMSLFHRPQERFGGFSNAGSKVAGWQLYRTPQKTAAVVRCIASDLDRKRICSGGRNGLLRLWDATTSI

SEQ ID NO: 58591 - protein, 284 aa, Zea mays
  Clone ID: 700155317_FLI.pep
HRAATRGANKLATVISRPSSGGGERESMADHKEEPVPESVMDKITEKFHGGDSSSSSSDSDDEKKGSSLASAAEAMKAKIYRLFGRERPVHSVLGGGKPADLILWRNRKISGGVLAGATAIWLLFEVMEYHLLTLVCHCLILSLAILFLWSNASTFINKSPPNIPEVKIPEDVAVNVALSLRYEINRGFATLREIGHGRDLKKFLIVIAGLWLLSVLGSCCNFLTLFYIVFVALYTVPVLYEKYEDKVDAFGEKAMTELKKYYAIFDEKCLSKIPKGPLKDKKH

SEQ ID NO: 58592 - protein, 334 aa, Zea mays
  Clone ID: 700093725_FLI.pep
IKIGINGFGRIGRLVARVALQSEDVELVAVNDPFITTDYMTYMFKYDTVHGHWKHSDITLKDSKTLLFGDKPVTVFGIRNPEEIPWGEAGAEYVVESTGVFTDKDKAAAHLKGGAKKVVISAPSKDAPMFVVGVNEDKYTSDVNIVSNASCTTNCLAPLAKVIHDNFGIVEGLMTTVHAITATQKTVDGPSAKDWRGGRAASFNIIPSSTGAAKAVGKVLPDLNGKLTGMSFRVPTVDVSVVDLTVRIEKGASYEDIKKAIKAASEGPLKGIMGYVEEDLVSTDFLGDSRSSIFDAKAGIALNDHFVKLVSWYDNEWGYSNRVVDLIRHMFKTQ

SEQ ID NO: 58593 - protein, 429 aa, Zea mays
  Clone ID: 700094388_FLI.pep
EEEEDWRRKKTIDRSIHPSIELMAATTPYKPKRILITGAAGFIASHVAIRIVNRYPEYKVVVLDKLDYCSNLKNLLPVMGSGGNNFKFVKGDIASADLVSFILATEGIDTVMHFAAQTHVDNSFGNSLEFTKNNIYGTHVLLESCRTAAQIRRFIHVSTDEVYGETDGDAVVGNHEASQLLPTNPYAATKAGAEMLVMAYGRSYGLPVITTRGNNVYGPNQFPEKLIPKFMLLAMRGQRLPIHGDGSNVRSYLYCDDVAEAFEVVLHRGEVGHVYNIGTKKERTVMDVARDISGLFGLRPEEAIQFVDNRPFNDQRYFLDDEKLKGLGWRERTRWEDGLRKTMEWYVANPDYWGDVSGALLPHPKAGGVSVSVTTDHGARGSSEMLDDRFISIPSSPGAATVAGDDDDGAPAAMPYSNGGATNGTTTVH

SEQ ID NO: 58594 - protein, 369 aa, Zea mays
  Clone ID: 700098003_FLI.pep
QPRPVCLLLLSPLPLPAPPGSTSPLGSRHWKDSMSVSASSPAAAAGDEKQEAAPVRRCKGVNDLDKVVLREVRGSSAEVYLYGGHVTSWKDEHGDELLFVSNKAIFKPPKAIRGGIPICFPQFSNFGNLEPHGFARNRTWSVDDDPPPFPVPTSNSAYIDLILKPTEDDLKIWPHSFEYRLRVALSPGGDLMLTSRIRNTNADGKPFSFTFAYHTYFKISDISEVRVEGLETLDYLDNLQDRARSTEQGDAIVFESELDRIYLGTPSKIAIIDHEKKRTFVVRKGGLPDAVVWNPWDKKAKAMSDFGDDEYKRMVCVEAAAIEKTVTLKPGEEWTGKLELSAVPSSYYSGQLDPDRVIQDSTVPEDSIS

SEQ ID NO: 58595 - protein, 258 aa, Zea mays
  Clone ID: 700099348_FLI.pep
TLESLELSVPDPLDLDILGRLGPEVGVGRLHALEDADDLAGLRVALGDAQRDVAGGGGGVLDVLLLELLLVTSAPGGERDGVVVAGGAAAALGVEEGGAAVAGHEEGPAEALGLAGGDELLDGEEERHALAPRELHGDGGVVDAVLLLELERAVGADLERALDLVQRVREAGHELGLLELGRGVLGDALRLDGEGRRLQAQLLHLVLAGLERERLHAAVDGRALVRRARALHLHVRFALDLVVGQPLGRALRARALHA

SEQ ID NO: 58596 - protein, 628 aa, Zea mays
  Clone ID: 700238529_FLI.pep
PERGPPEGAPGQSAGTGVVPSRGQGRHEGQRGADARGLVRHPGRRVLPERHPCGVNVLEAHDVYPMAENRVPDVLVKVRLGHQLLRTRQVRSPTRNFMWNEELMFVAAEPFEDDLVVSVQDCVAQNKDEVIGEAVIPLARLPRRADHKPVPPQWVDLRRPGLIDDVDQLLKKEDKFYAKVSLRVCLEGGYHVLDESTQYCSDLRPTMKQLWKPPIGMLEVGILSANGLNPTKPRNDRGSCDAYCVAKYGSKWVRTRTIVDSLSPRFNEQYTWEVFDHGTVLTIGLFDNCHISGDNGSSAGHMDKPIGKVRIRLSTLETGRVYTHSYPLLVLGPSGVKKMGELHLAIRFTAASLINVLFTYSRPLLPKMHYAQPLSIVQQEMLRHQAVQLVAQRLGRMEPPVRKEVVEFMSDARSHLWSMRRSKANFFRLMQVFSGVIAAGKWFGDVCQWKNPVTTVLVHVLFVMLVFYPDLILPTVFLYMFLIGLWNYRFRPRFPPHMNTRISYADVANPDELDEEFDTFPTSKSPDLIRMRYDRLRHVAGRIQTVVGDIATQGERLQSLLSWRDPRATAMFLIFCLITAIILYVTPFQAIALCLGFFSMRHPRFRHKVPSAPANFFRRLPAKTDSLL

SEQ ID NO: 58597 - protein, 275 aa, Zea mays
  Clone ID: 700241512_FLI.pep
RLAPVTRPVRPGSLARRSDRAPHGVIDRRRIQDADELQRVPRASQGVQRQLRHPAVLAVDPQPRRAGQRHRLPRQVLRPRRPHQPHHRRPRTRPTRYVYHQCTYIYICTYLKDPYTHFSRILLPCVCSKPPCCDLMISVYNFIYVQQYSGLCCTRLADACSTRCTARSACSGPGTGSFARRPSSRSSAAYPSRSRRPPPRLSRLSGRATSATSPGGRQAAAPWMPASTEWPTARGGSSSDPAPSTDPQTPAASSSSSPSRRRLRPCWSTSDRRSH

SEQ ID NO: 58598 - protein, 167 aa, Zea mays; identical to SEQ ID NO: 43414
  Clone ID: 700081875_FLI.pep

SEQ ID NO: 58599 - protein, 98 aa, Zea mays
  Clone ID: 700084793_FLI.pep
CTHWKDQLILSLENGASYRKLESLAWFSSNSDRTAKLLQLLFSFPPLLWSVQHRSHPIMKLMTTCHGEFRILVWWGEFVDNGLLASVWAIDVGCSHSG

SEQ ID NO: 58600 - protein, 167 aa, Zea mays
  Clone ID: 700196943_FLI.pep
MKLIFNQPRGKWPDELIKVVWSHNTTISRSTGFTPFKLLFGDEAITPEKAKAGSIRTMASAEDEADCSVAKDAIEGIRLQGVENINKYQAKTIKWRDRKVRLKNIKPGHLVLRRVANPDTVGKLQLKWEGPFLVVSSSRPGSYRLKDMNGNDIPRSWNADELRRYYV

SEQ ID NO: 58601 - protein, 278 aa, Zea mays
  Clone ID: 700207426_FLI.pep
GAAMASDVPMTPELEQIDGEIHDIFRALQNGFQKMDKIKDSNRQAKQLEDLTVKMKECKRLIKEFDRILKDEESNNPPEINKQLNDRKQFMIKELNSYVTLRKTYQSSLGNNNKRVELFDMGAGSSEPAAEDNIQMASAMTNQQLIDTGRNQMDQTDQAIERSKMVVAQTVETGAQTAATLTQQTEQMKRIGNELDTVHFSLKKASQLVKEIGRQVATDKCIMAFLFLIVLGVIAIIVVKIVHPNNKNIRDIPGLAPPAQNYQIHNRRLLWAEASIGM

SEQ ID NO: 58602 - protein, 444 aa, Zea mays
  Clone ID: 700209337_FLI.pep
PGMELVYMERRNGSYDDGAVPEFSGRGAGGDQDQDPPAAASEVQSDSRQTPDEKKSKGCQSCRDPFCSCSGGTPHSELFPPHPAKMMILEFLIASLRHPTRTHNVSDLDDLIADGVSQGSVVNLGPSEKKVLESLHAMVNAKTRPKSPSPFMAGSKLRKIRSKSHVITQSEILKLISPETWEASSFPGASPMIGGGTAEDGVHGNKPPPPCCSSVSSNQHVLSRCPSSLSACLLQCIWKDGLPHFELSLDDHPIAVYAASPVRVLEKDRAFDYVYMIHSGEQGRKDWMGHSSNVSRLVGKVKVSSSLVLNPDKSGLLETEFVLYGSPDDYLRQMRSPYSVPKGKGLVRRVTEIMRAGNVSASPRHPWKLGKSSSHQFDDLAGVLEGEMISAGGSDLVSLKADDLPSNQELAAIVVREQRRRRRKEPVSGGWGLKFLEKAGLNRP

SEQ ID NO: 58603 - protein, 467 aa, Zea mays
  Clone ID: 700213155_FLI.pep
SPCSLVILLQMQIFVKTLTGKTITLEVESSDTIDNVKAKIQDKEGIPPDQQRLIFAGKQLEDGRTLADYNIQKESTLHLVLRLRGGMQIFVKTLTGKTITLEVESSDTIDNVKAKIQDKEGIPPDQQRLIFAGKQLEDGRTLADYNIQKESTLHLVLRLRGGMQIFVKTLTGKTITLEVESSDTIDNVKAKIQDKEGIPPDQQRLIFAGKQLEDGRTLADYNIQKESTLHLVLRLRGGMQIFVKTLTGKTITLEVESSDTIDNVKAKIQDKEGIPPDQQRLIFAGKQLEDGRTLADYNIQKESTLHLVLRLRGGMQIFVKTLTGKTITLEVESSDTIDNVKAKIQDKEGIPPDQQRLIFAGKQLEDGRTLADYNIQKESTLHLVLRLRGGMQIFVKTLTGKTITLEVESSDTIDNVKAKIQDKEGIPPDQQRLIFAGKQLEDGRTLADYNIQKESTLHLVLRLRGGQ

SEQ ID NO: 58604 - protein, 524 aa, Zea mays
  Clone ID: 700216779_FLI.pep
GVPARNRVPEQAAAALIEKRGREQSAAGQEVRDDSEGRGTRDASGAESGVGGVGFSGGNRYATPELQDDTEKGMKRQNESADAARKERRGEAAEQPRYDHDRRQELAPKSSAQPAAAQLAREDEAATAGEKAPSPSRHEVQEEHLRPLRKKILKTVDELKGDLSELFSKSPELNAPRARPPRLPRQEGYVSHAVAGPASGLPASARHVTSSAEGHRGSVARAAKPRPAAAPPRGLPSRRYRQCRAHPCCHDVDPRPCHHGHGCCGHHGKPECSSCRGYCCRPRALEPSAPRKPTAAKEPKRRLPPRNHCRPVLKGAPFIVCSSCFKLVQVPADFAVSTKTVRKMRCGSCSTILSYSYRDPARKKAYQDSVNRCSTDGSELHGGTGDQRSDPFAPFIDGFGLSSYSTEDERRLPVSRNTSFDTLDGTKGVGRLHRLMGYGSASELLRHSPDLYESFSERTTPDVRQHDTKGKGVCIDDDDYDYDLDDTDDEDIGALKRSARKGSGWTLPWIPGKRQGDSGAIRIK

SEQ ID NO: 58605 - protein, 1119 aa, Zea mays
  Clone ID: 700217152_FLI.pep
ASPASARARGRFGAGTREGKPRNAVSRRGSGVCELVEGSDWCAMDGGDATNSGKHVAGQVCQICGDGVGTAADGDLFTACDVCGFPVCRPCYEYERKDGTQACPQCKTKYKRHKGSPPVHGEENEDVDADDVSDYNYQASGNQDQKQKIAERMLTWRTNSRGSDIGLAKYDSGEIGHGKYDSGEIPRGYIPSLTHSQISGEIPGASPDHMMSPVGNIGGRGHQFPYVNHSPNPSREFSGSLGNVAWKERVDGWKMKDKGAIPMTNGTSIAPSEGRGVADIDASTDYDMEDALLNDETRQPLSRKVPIPSSRINPYRMVIVLRLAVLCIFLRYRITHPVNNAYPLWLLSVICEIWFALSWILDQFPKWSPINRETYLDRLALRYDREGEPSQLAPVDIFVSTVDPMKEPPLVTANTVLSILAVDYPVDKVSCYVSDDGAAMLTFDALSETSEFARKWVPFCKKYNIEPRAPEWYFAQKIDYLKDKVQTSFVKERRAMKREYEEFKVRINGLVAKAQKVPEEGWIMQDGTPWPGNNTRDHPGMIQVFLGHSGGLDVEGNELPRLVYVSREKRPGFQHHKKAGAMNALVRVSAVLTNGQYMLNLDCDHYINNSKALREAMCFLMDPNLGRNVCYVQFPQRFDGIDRNDRYANRNTVFFDINLRGLDGIQGPVYVGTGCVFNRTALYGYEPPVKKKKPGFFSSLCGGRKKTSKSKKSSEKKESHRHADSSVPVFNLEDIEEGIEGSQFDDEKSLIMSQMSLEKRFGQSSVFVASTLMEYGGVPQSATPESLLKEAIHVISCGYEDKTDWGTEIGWIYGSVTEDILTGFKMHARGWRSIYCMPKRPAFKGSAPINLSDRLNQVLRWALGSIEILFSRHCPIWYGYGGRLKFLERFAYINTTIYPLTSIPLLLYCILPAVCLFTGKFIIPKISNLESVWFISLFISIFATGILEMRWSGVGIDEWWRNEQFWVIGGISAHLFAVFQGLLKVLAGIDTSFTVTSKATDEEGDFAELYMFKWTTLLIPPTTILIINLVGVVAGISYAINSGYQSWGPLFGKLFFAFWVIVHLYPFLKGLMGKQNRTPTIVVVWAILLASIFSLMWVRIDPFTTRVTGPDIAKCGINC

SEQ ID NO: 58606 - protein, 378 aa, Zea mays
  Clone ID: 700217659_FLI.pep
TEEDHLTRMDAKKPYMLAITTVAIYTGMYVVSKAAFNQGMNSFVFVFYRQAAASLLLLPIALVLERKNVRSMSSGLILKLFLLALIWNTLGMNLCNASVTLTSATVASATGNSTPVITFCLALLLRMEVVKLRSVSGIAKVTGVALCLAGALVIALYTGPSLSPVNRHHRASGGAHGFKAPTRGGTWVTGTFLMLLSNVTWSLWTVLQGALLKEYPNKLLVTTSQCLFSTAQSFVVAAVAERDFSKWALKLDVSLIAVAYTGFLVTGVSYYLQAWCVQIKGPVFLAVWNPLCFVLTIFCSSFFLGENVHLGSIVGGILLVCGLYSVLWGKTLEVHQTVESGDNTVGEVQNGQEEKNHQQKVLEKGRQEEASMTAPGVV

SEQ ID NO: 58607 - protein, 970 aa, Zea mays
  Clone ID: 700264360_FLI.pep
GADMAALGAKMERLSSIDAQLRMLVPGKVSEDDKLIEYDALLLDRFLDILQDLHGDDLKEMVQECYEVAAEYETKHDLQKLDELGKMITSLDPGDSIVIAKSFSHMLNLANLAEEVQIAYRRRIKLKKGDFADENSAITESDIEETLKRLVVDLKKSPAEVFDALKSQTVDLVLTAHPTQSVRRSLLQKHSRIRNCLVQLYSKDITPDDKQELDEALQREIQAAFRTDEIRRTQPTPQDEMRAGMSYFHETIWKGVPKFLRRVDTALKNIGINERVPYNAPLIQFSSWMGGDRDGNPRVTPEVTRDVCLLARMMASNLYCSQIEDLMFELSMWRCSDELRMRADVLHLSTKKDAKHYIEFWKKVPPNEPYRVILSDVRDKLYNTRERSRELLSSGHSDIPEEATLTNVEQLLEPLELCYRSLCACGDSVIADGTLLDFLRQVSTFGLSLVRLDIRQESDRHTDVLDAITTYLGIGSYREWTEERRQEWLLSELNGKRPLFGSDLPKTEEISDVLDTFHVIAELPSDNFGAYIISMATAPSDVLAVELLQRECHVKTPLRVVPLFEKLADLEAAPAALARLFSIDWYRQRINGKQEVMIGYSDSGKDAGRLSAAWQLYKAQEELIKVAKDFGVKLTMFHGRGGTVGRGGGPTHLAILSQPPDTIHGSLRVTVQGEVIEQSFGEEHLCFRTLQRFTAATLEHGMHPPNAPKPEWRALLDEMAVVATEEYRSIVFKEPRFVEYFRLATPETEYGRMNIGSRPSKRKPSGGIDSLRAIPWIFAWTQTRFHLPVWLGFGAAFKNVLQKDIRNLHMLQEMYNEWPFFRVTIDLVEMVFAKGNPGIAALYDKLLVSEELHPLGEKLRANYEETQKLLLQVAGHRDLLEGDLYLKQRLRLRDAYITTLNVCQAYTLKRIRDPDYHVALRPHLSKEIMDSTKAAAELVKLNPGSEYAPGLEDTLILTMKGIAAGLQNTG

SEQ ID NO: 58608 - protein, 454 aa, Zea mays
  Clone ID: 700264640_FLI.pep
FSISPPTMGKEKSHINIVVIGHVDSGKSTTTGHLIYKLGGIDKRVIERFEKEAAEMNKRSFKYAWVLDKLKAERERGITIDIALWKFETTKYYCTVIDAPGHRDFIKNMITGTSQADCAVLIIDSTTGGFEAGISKDGQTREHALLAFTLGVKQMICCCNKMDATTPKYSKARYEEIVKEVSSYLKKVGYNPDKIAFVPISGFEGDNMIERSTNLDWYKGPTLLEALDQITEPKRPSDKPLRLPLQDVYKIGGIGTVPVGRVETGVIKPGMVVTFGPTGLTTEVKSVEMHHEALQEALPGDNVGFNVKNVAVKDLKRGFVASNSKDDPAKEAASFTSQVIIMNHPGQIGNGYAPVLDCHTSHIAVKFAELITKIDRRSGKELEKEPKFLKNGDAGMVKMIPTKPMVVETFSAYPPLGRFAVRDMRQTVAVGVIKSVEKKDPTGAKVTKAAAKKK

SEQ ID NO: 58609 - protein, 494 aa, Zea mays
  Clone ID: 700332854_FLI.pep
RCCSSSRMSKEDVLKTLMLRVNIHCDGCEKKVKKTLHKIDGVYQSSIDAEQGKVTVSGLLDPDTIIRKLNKAGKPAQLWGSKPGITQNAYHGGGKAHSKDAGGGKSHSKDSGGGKGHSKDAGGGKAQKGGAGGGGHKGPGGGGGGGGGVGNPKMVMPQPTPQQLQQLQQQLQMKGLKLPPHLLGGNMPAFPAAAPMKDPKSVKFALPEDNFDDYGSEFDDDFDDGFDDDEDDYDDDGLDDDVYGDPKMMMKPMAVPPPAGGGDKKGGGGKKGGGGGNEIPVQIKGNNHGGAGGQPHNAKGGAPGGGAHLGQGKKGGGSAAAVGVGGPMGGMLPQQGMMRPPNILGGAGAGFPSTAQMGGGPMGMPVGHPHMGIMQQGGGGGGGGMPGLGFHPGLGGGGMHSGADMLQAAAASGNPVAQQQYMALMQQQQQQMMMMQQQQQQHGNGGLGYPAAMGYGYGRPPMHYPMGYPVLPPHSHAEPYNIFSDENANSCSLM

SEQ ID NO: 58610 - protein, 455 aa, Zea mays; identical to SEQ ID NO: 40951
  Clone ID: 700335644_FLI.pep

SEQ ID NO: 58611 - protein, 360 aa, Zea mays; identical to SEQ ID NO: 53639
  Clone ID: 700336003_FLI.pep

SEQ ID NO: 58612 - protein, 486 aa, Zea mays
  Clone ID: 700377885_FLI.pep
RRDRRLRTRLPPRLKPFPLLPIPSVGRRSIPYDDTMRECISIHIGQAGIQVGNACWELYCLEHGIQADGQMPGDKTIGGGDDAFNTFFSETGAGKHVPRAVFVDLEPTVIDEVRTGTYRQLFHPEQLISGKEDAANNFARGHYTIGKEIVDLCLDRIRKLADNCTGLQGFLVFNAVGGGTGSGLGSLLLERLSVDYGKKSKLGFTVYPSPQVSTSVVEPYNSVLSTHSLLEHTDVAILLDNEAIYDICRRSLDIERPTYTNLNRLVSQVISSLTASLRFDGALNVDVNEFQTNLVPYPRIHFMLSSYAPVISAEKAYHEQLSVAEITNSAFEPSSMMAKCDPRHGKYMACCLMYRGDVVPKDVNAAVATIKTKRTIQFVDWCPTGFKCGINYQPPSVVPGGDLAKVQRAVCMISNSTSVVEVFSRIDHKFDLMYAKRAFVHWYVGEGMEEGEFSEAREDLAALEKDYEEVGAEFDEGEDGDEGDEY

SEQ ID NO: 58613 - protein, 64 aa, Zea mays
  Clone ID: 700341421_FLI.pep
CYAMTYVQGQEGSSSSRVETLKVRRGGGDLFIGGDSSVSVTKLVYRQVVLRCSLQLQCNMVCAS

SEQ ID NO: 58614 - protein, 340 aa, Zea mays
  Clone ID: 700281922_FLI.pep
RTAPAGESLGEGSIWSTDGFDNPWFVIGVSYSGALSAWFRLKFPHLTCGSLASSGVVLAVYNYTDFDKQVGESAGPECKAVLQEITELVDEQLRLESHSVKALFGAQTLKNDGDFLFFLADAAATTFQYGNPDALCPPLIKAKKNRKNLVEAYAQFVKDYYIKKMETPPSSYDREYLKETTPHDSSSRLWWFQVCSEVAYFQVAPKNDSVRSARINTRYHLDLCRHVFGEGVYPDVFMTNLYYGGTRIAASKIVFTNGSQDPWRHASKQKSSKDMPSYIMKCRNCGHGTDLRGCPQWPFRIEGDASNCSSLAVVNTARERIAKHIDLWLSQCSKPSVGAW

SEQ ID NO: 58615 - protein, 439 aa, Zea mays
  Clone ID: 700342576_FLI.pep
VATIDITVLMNRRKRLPTDRQKTLFMLMKKQQQKEKETGREAGDNGSSRLASLGPKELEAFPVHDGRARLVVLSLGNPHLLEGAERCQDGSSNPDTVLPFWRSNHLDLHAARSQGGDFLAHPVSNAREHSGTTGEDDVAIQILPNIHVALHDGVVGGLVDTSSFHPNEGWLEEDLRAAEALSTNGDDLSVRQLVALLNRRAGLGSLHLLVVVQGNVGELLLHVPDNFPLSSGGEGVAAFSQDLHEVVGEVAASQVETKDGVGEGVSLVDGDSVADTISRVEHDTCGTTTGIQRQDGLDGDVHSGGVEGLEHDLGHLLTVSLWVQGRLSEEDGVFLGSHTELVVEGVMPDLLHVVPVADDSVLDGVLEGQDTPLGLRLVADVGILLPHPHHHTGVARAPNDAGEDGPRSVVAGEPSLDHASSVVADEGLDILSVSHFLPE

SEQ ID NO: 58616 - protein, 183 aa, Zea mays
  Clone ID: 700345243_FLI.pep
FLGVLRLRCHKVRVRHRLVRLCEGGRGEEKMQIFVKTLTGKTITLEVESSDTVDNVKAKIQDKEGIPPDQQRLIFAGKQLEDGRTLADYNIQKESTLHLVLRLRGGTMIKVKTLTGKEIEIDIEPTDSIDRIKERVEEKEGIPPVQQRLIYAGKQLADDKTAKDYNIEGGSVLHLVLALRGGY

SEQ ID NO: 58617 - protein, 955 aa, Zea mays
  Clone ID: 700345526_FLI.pep
SQPSVNDSKALVPLGNGLSSNSTFGADPFSATPRPEQGSPFPPNVPNNLLSSTPPASAAGHHHPPKPMQAGPVQSISSLSPHTSQLPHNQPPPRQQQFNATPSAPGPVSSNIPTGQIPSSPSQPQAPWPKITQVDVRKYMIVFIKVDRDRDGKITGEEARNLFLSWRLPRDVLRKVWDLSDQDKDGMLSFKEFCIAVYLMERHREHRPLPDTVTDAIWAEGTALPSTGQFAENPSAPAPQASAGYTSRTMQGPHHGMLPSSMKPPSRRPLPLDADDTIKPEQQKPKVPVLEEHLVGQLSKEEQDTLDAKFNEASVADKKVQELEKEILDSREKTEFYRTKMQELILYKSRCDNRFNEVSESMSADKREVQSLSAKYDERCKKVGDVASKLTMDEATFREIQEKKLEIYNAIVKLQKGDDSDEKFQERANKIQSDLEELVKSLNEQCKRYGLRAKPTTLVELPFGWQPGIQETAYAWDEEWDNFGDEGFSIIKELTVEVEPPVVAKSQPTEDVKASSNGASTEKEDNKGDKSAAAVEQVVKPETAPSNIKPESAKSPPVSPVKNKEDGPDEHDKKQSGTNDVSPRESISNRGAMDSPTHGDKTHDGHSWGMDNDSLWNFDHKEGENGDSDLFFGPQGLPPIRTGGSSSGNSVVKEQKPFFDSVPGTPVEKSVFDSIPGTPFQKSVFDSIPGTPVQKSVFDYSVPSTPMQNSVFDYSVPSTPMQKSLFDSVPGTPVQRSVFDSVPSTPMQRSVFDSVPSTPTQKPFFDSFPSTPMQRSLFDSGPSRAESPTASSMYGKEQKGFFDSSVPSTPMYNSSFTPRYSEAGDDSFDTMSQYSSFGMHESNSFGQRDSLSRFDSFSSNADNGGNDTFARFDSFRSTSDQGGGNSFMRYDSMNSSSDHDGIGTFARFDSMKSSNYNSRGYSFDDEDPFGTGPFKSTETTSHSPTKHGTDTWSAF

SEQ ID NO: 58618 - protein, 595 aa, Zea mays
  Clone ID: 700612170_FLI.pep
PGPYLWKSYKEIYDEVLQAGSALQKLGVQPGSRVGIYGANCPQWIVAMQACNGYSLVCVPLYDTLGAGAVDYIIDHAEIDVVFIQDKKIKEILSPNCKSAKRLKALVAFTSATTEQNKEADQIGIKMYAWDDFLKVGKDNPRQPCPPQASDICTVMYTSGTSGQPKGVMLTHESHAMYVKGVDLFMDQFDDKMTTDDVFLSFLPLAHILDRMIEEYFFHKGASIGYYHGDLNALRDDIVELKPTLLVGVPRVYERIYEGILKAIAELRPLRRVIFNALYNRKLASMKAGYSHKTASPFADMLAFRKVKARLGGRLRLLISGGAPLSNEIEEFMRVTTCAYFIQGYGLTETLGPSTVCYIDDMALVGSAGVPATYTEIRLEEVPEMGYNPLGVPSRGEICIRGKSLFAGYYKSPELTNEAIVDGWFHTGDIGEMTPDGILKVIDRKKNIFKLSQGEYVAVEYLEKVYGFPPLVEDIWVYGDSFRSSLVAVVNPHQENTMKWAESNGYKGSFDEICKLEGLKEYILKELAAVAQKNKLRGFEYIKGVVLDPVPFDIERDLVTATMKKKRKNMLNYYQSEIDTIYKKLEAQKSAARAK

SEQ ID NO: 58619 - protein, 397 aa, Zea mays
  Clone ID: 700349181_FLI.pep
RAARAALIFPAPTRRTTRALAMSKKVGRAKKAAGGGELSRFLESHLQTISDTFQMMAESAPGALERTEWSEVVKLGDQVSRQATVAGMLWSGDLPDVETLKENIVAYFNILQGFLLVCHGSMVGAGPTLHKSIFGSAKDVVDSSFSLFKHAVSAYESRSPDRNTTIPQVTGTVWEACAALKKVPASNCIAIGRAMTRIGVCLKDVLREMNELPIGDSGVSTAEKSSNGVVDTTSCSDRDERSDLDLDDDDDDDDDEFTEEEVAVAKLVINVVSDSLVVVKEAIRFITGLLRSSGNKDKDEDKVEPMEKLLSHCKEIADQVNDLGASVYPPQDSSEMELAIKRLYNGINGMRKEIGNLGGAPESTFAALEGFEKCLGSLRARLADDVVNEMEGLNISH

SEQ ID NO: 58620 - protein, 456 aa, Zea mays
  Clone ID: 700349228_FLI.pep
RDSGSMKVSRKLYFMSLHIWCTLNMMQTFLPLISRCFLDIPITFGCLSCYICVYLILILLFNFWQLNEEAASMDWTKSTGHMLSGRKIFDSYEEEFVLEPEITVAGHRLGGESSSLASARALSGAAAYQRFLNASANVDHASGTKIEYSSDDVPRGFVHETVKVEPDPDYAMHVDSAAGLSFAGQHTIGYSDPNPDDVGKQSFDRCLEPDPDDSSNANNLNQELRFDVRHLSEPDPDDGSNEVLEHGNTMEMDSELTNHITVVKYELDPADSSNANQELIIDGKHGEEPDPDDTCQDVLKSGNGTEMITEQSGNSMVLKAEPDPDDHVGDSNINELQRVEEPVRALCSRLQKSIKMLRLQATPVEAESAIQTLFKIIKNVIEHPNDIKYKRLRKSNPHFQRSLANYKAAMEVLELIGFCEDVISDEVGRAETYLVLKRNDPGLLWLAKSSLEVSLA

SEQ ID NO: 58621 - protein, 622 aa, Zea mays
  Clone ID: 700349616_FLI.pep
TLMTQVKPAPGGRMLTVLRVHLPSEIPIVGCEITPYVLLRRPDGGVFTDDVSETAPVDGYFMRYKWYRIQSDRRAAICSVHPTEQATLQCIGCLKSKIPVAKSYHCSSKCFSDAWQHHKVLHDRAISALNENGTEDDELFGRFGSGSSSSGVISAALSGSTSNLSLSSGVNNGPTPVYPTGTEKSSGETWFEVGWSRTYTATTDDIGHVLRFECIVVDVETRGTVRAPTSVMTSRVIPAPTPTPRRLIPVNAADAMVHFDLDSRTSSFGTFTVLSYNILADTYATSDTYSYCPTWALTWAYRRQNLLREIIGYHADIICLQEVQSNHFEDFFSPELDKHGYQPLYKKRTTEVYSGTPQAIDGCATFFRRDRFSHVKKYEVEFNKAAQSLTDAIIPAAQKKLALNRLVKDNIALIAVLEAKFSNHGTENPSKRQLLCVANTHINIHNDLKDVKLWQIHTLLKGLEKIAVSADIPMLVCGDFNSTPGSTSHGLLARGKVDHLHPDLAIDPLGILRPLSKLTHQLPLVSAYSSFVSMAGVGYDLDHQRRRMDPGTNEPLFTNCTRDFTGTLDYIFYTADSLTVESLLELLDEDSLRKDTALPSPEWSSDHIALLAEFRCKLRVRR

SEQ ID NO: 58622 - protein, 183 aa, Zea mays
  Clone ID: 700349960_FLI.pep
MLDRLADKANRGKQLRLLVVDIGEAALAAVVAVEVVGHEDARAALCVGALLAEAGHLASGVVHLIELQHGELHLLVLVLDLLGLGVRLLLTLLGATAEAEHQVEGGLLLNVVVGEGATVLELLAGEDEPLLVRGDALLVLDLGLHIVNGVGGLHLQSDGLPRQSLHKDLHLGGDGGPPAAAAR

SEQ ID NO: 58623 - protein, 164 aa, Zea mays
  Clone ID: 700350335_FLI.pep
LNTISIRFQFIHPTPPACTYRRKKEEPSPYVLASTNNGPAQSRARRRCAHPGRGGGPRPGGGCQGEERRGCGRPVLGDRPPRQGDERAGVGGPASAGCAREHGPLLQRRRALPRRLRRVRRPGTNKLMIHSFMARPTNANKSISRYEKKTERERERGLAFPAGR

SEQ ID NO: 58624 - protein, 743 aa, Zea mays
  Clone ID: 700350607_FLI.pep
PPSRTPAFSASHSLDASAAAAAGMKNPDFTADKALAKDFLSNFVGPHGDPKYLNILQDVANRKIRAVQIELDDLFHHKDVDEEFLQRVTENTRRYVGIFAEAMDEIMPEPTEAYTVDEDRDILMTQRVDEGVDGGADGTDPLQRMPPDIKRFFEVYIKTFSKATPLTIRQVKASNIGQLVKISGIVTRCSDVKPLMQVAVYTCEECGFEIYQEVTARVFMPLIECPSQRCKLNKAKGNLILQLRASKFLKFQEVKLQELAEHVPKGHIPRSLTVHLRGELTRKVAPGDVVEMSGIFLPMPYYGFRAMRAGLVADTYLEAMSVTHFKKKYEEYDLKGDEQEQIDRLAEDGDIYSKLARSLAPEIFGHEDVKKALLLLLVGAPHRKLADGMKIRGDLHICMMGDPGVAKSQLLKHIINVAPRGVYTTGRGSSGVGLTAAVQKDPVTNEFVLEGGALVLADMGICAIDEFDKMEESDRTAIHEVMEQQTVSIAKAGITTSLNARTAILAAANPAWGRYDMRRTPAENINLPPALLSRFDLLWLILDRADMETDLEMARHIVHVHQNLESPALGFTPLEPSVLRAYISAARRVIPSVPRELEEYIATAYSSIRQEEAKSNAPTSYTTIRTLLSILRISIALARLRFSETVAQSDVDEALRLMQMSKYSLYSDDRQRSGLDAISDIYSILRDEAARTSSMDVRYAHALNLISRKGYSEAQLKECLEEYASLNVWQIHPSTFDIHFIDA

SEQ ID NO: 58625 - protein, 551 aa, Zea mays
  Clone ID: 700466554_FLI.pep
HTHNQISPKSTRRHLRFKMQIFVKTLTGKTITLEVESSDTIDNVKAKIQDKEGIPPDQQRLIFAGKQLEDGRTLADYNIQKESTLHLVLRLRGGMQIFVKTLTGKTITLEVESSDTIDNVKAKIQDKEGIPPDQQRLIFAGKQLEDGRTLADYNIQKESTLHLVLRLRGGMQIFVKTLTGKTITLEVESSDTIDNVKAKIQDKEGIPPDQQRLIFAGKQLEDGRTLADYNIQKESTLHLVLRLRGGMQIFVKTLTGKTITLEVESSDTIDNVKAKIQDKEGIPPDQQRLIFAGKQLEDGRTLADYNIQKESTLHLVLRLRGGMQIFVKTLTGKTITLEVESSDTIDNVKAKIQDKEGIPPDQQRLIFAGKQLEDGRTLADYNIQKESTLHLVLRLRGGMQIFVKTLTGKTITLEVESSDTIDNVKAKIQDKEGIPPDQQRLIFAGKQLEDGRTLADYNIQKESTLHLVLRLRGGMQIFVKTLTGKTITLEVESSDTIDNVKAKIQDKEGIPPDQQRLIFAGKQLEDGRTLADYNIQKESTLHLVLRLRGGQ

SEQ ID NO: 58626 - protein, 407 aa, Zea mays
  Clone ID: 700467020_FLI.pep
KVFYSNVNCRYLGLHGLCNLGQLILQSAIGVLVLVLCFVERKEFSMQIVSKLGSSFSVVPFVIVVASCTILAMVASLPVAQLLFFHILLIKKGISTYDYIIALREQEQDDLSGQQSPQMSRVSSYTGLSSASSFGPLRRGSWCTPPRLFLEDQFDVIPSEAASSHNSATKRKEDQGKRKKGSGAVKISPWALARLNAEEVSRVAAEARNKSKVLVPIRKDDYSRGHETDSSYGGTSSGRIDLGPDSKRRTNRRGRQPSDLFLKPVAKISTDAIDSASSDMSNLAPLQLEARSAFHPSRAASSVNVGGSSPDSSLDSPDLHLYRVSAVSSSGAEDLQLTALTAPGSTSHQGIQLSRSTSDGYEASGGEDSDRIPSQIVHRSSNWASIILNSDQSASSSGILVPKNRLS

SEQ ID NO: 58627 - protein, 653 aa, Zea mays; identical to SEQ ID NO: 56213
  Clone ID: 700472952_FLI.pep

SEQ ID NO: 58628 - protein, 150 aa, Zea mays
  Clone ID: 700478067_FLI.pep
LFGEGERRLCMSCLVVRRIVSNFVLLEGSCVGEKFKKAYEGRIEQLGDKSFWPKVEMANEVGAPLGRRGVGRQRKNRIKGCLEGGRGKKACANETVKQWKAKEAATLLKNGFLATTDLHKNLEHRISTKLYKTLVHHMNSHRLRSHFQGY

SEQ ID NO: 58629 - protein, 505 aa, Zea mays
  Clone ID: 700404847_FLI.pep
MASARKVRNANKRYAKINEDWQDKDTPSVPKSKVRKKKLSDMLGSQWSKDELERFYGAYRKYGKDWRKVAGTIRDRTSDMVKALYNMNKAYLSLPEGTATAAGLIAMMTDHYNILDGSNSDRESSDSPKASRRLQKRGRAKLQSVSKTSDTHFTDLLQPQPASSSYGCLSLWKKKRSGDLFVGNRPRAVGKRTPRVPVASMYHRDDRGAPNRQAKPDANDGDDEGAHVAALALAEVHQRGGSPQISHTPRRSGDHMFLSPAKSSGRKNADSEMGSSKLHGFQLDADYPEGSLGSREAETGDYTKGTSYLIANKGSPSSKPQKKVKRPQKRRKKAVRRTDDQFEDDREACSGTEEGCSMKKAKEEPELETLGTKTAWPSSTSNKRSRQLFFDDESLALDALHTLADLSVNILQPSSVVESESSAQIKDEKRDNDSDGKPGIPAAAVSVYEQKDNSKSTSKKLKRQPEMASTDMVTRKKGKLAKDTHPDGSTTSEVKQQACTCGVKT

SEQ ID NO: 58630 - protein, 95 aa, Zea mays
  Clone ID: 700443939_FLI.pep
QTRRVHFGFARSVIIGLCKHERGIQAYSGFINRQSVRTRWWPMVMHLLEGARRQPQACVGVGPQAVLLLVEAVPAQCSNSTLMRLPAAKCHQTLF

SEQ ID NO: 58631 - protein, 332 aa, Zea mays
  Clone ID: 700447550_FLI.pep
GQKTSSGLAVLDIYTVQHLFLLGKKAQQFIMKSSDGNQIKLQPMWRKVAYGGRQSGYDDNYTDESFLEEMVMNANVVKRDLLKVMIDSVSISQYLCIVALVVSTWTLTLNLDIDESTLLKLDVGLLLVGFWVLLLTTCPFSLKLLTKYVLNISFFISGLYVLAPIYHTLTRSISSDSIWALAVSLLLVHLFLHDYSGSTIRPPGALNNPKLTSNISLNASIVASVLVASRLPSRLHVFAIMLFSLQVFLFAPLITFCVKKYHFRLHLLFSFTLMAVALSVTYQLHRMFFTVLLALLVFVSIVCPYWLIRIQEYKFEINGPWDEAKLCFDITE

SEQ ID NO: 58632 - protein, 651 aa, Zea mays
  Clone ID: 700448428_FLI.pep
SKDPAGKDLRGARAAMAANGEDFRGPLLLGARDDGAAWWGRDGADPPRGRRSSSRPWTALAIAAALLALAGVVFLLSSSSYGGRPGASRAAAAARRSPQEVESAVGAAAADDARCSEVAAAALRAGGHAVDAAVAAALCLGVVHPMSSGMGGGAFVVVRDAASGQAVAFDAREAAPAAATPDMYAADPAAKYRGALAAGVPGELAGLHAAWSRYGRLPWRDLVAPAIRLARDGYEVVPYLARALQECEGDVLADPGLRAVFAPGGRRVLAAGKTCRNPALAAALERVAEEGAAALYGGAVGEALVRDVRAAGGVMTMDDLRGYRVDVGAALRADAMGFTFLGMPPPSSGTLGMALILNILQGYSSLEFLKELLGIHRVIESIKHMLAIRMDLGDPDFVDVTGDVAEMLSTTFADKVRQRIVDNTTFPPGYYFPKWSQLDDHGTSHLCVVDGDRNAVAMTTTVNAYFGAKVLSPSTGIVLNDEMDDFSVPAKRTPDRLPPAPANFIAPGKRPLSSMTPLIILKDGELAGVLGGSGGTNIIATVVQVFVNHFIVGMDPLAAVQHPRVYHKLIPNVVTYENQTVGDGEVIALGGAARAFLEERGHRLRSTDSGAVCQFIVHELAEPPAAPGHGVFRGRLTAVSDPRKGGSPAGL

SEQ ID NO: 58633 - protein, 321 aa, Zea mays
  Clone ID: 700454616_FLI.pep
VIADIVINHRTAEHQDGRGIYCIFEGGTPDSRLDWGPHMICSDDRAYSDGTGNPDTGADFGGAPDIDHLNPRVQQELTGWLNWLKTDVGFDAWRLDFAKGYSADVAKVYIDGTQPCFAVAEIWTSLAYGGDGKPFYDQNAHRQELVSWLDRVGGKASPATTFDFTTKGILNVAVDGELWRLRGADGKAPGLIGWWPAKAVTFVDNHDTGSTQHMWPFPADKVMQGYAYILTHPGNPSIFYDHFFDWGLKNEIAHLVSIRDRHGIQADSELRIIEADADLYLAEIDGKVIVKIGSRYDCGHLIPEGFQVVAHGDGYAVWEKN

SEQ ID NO: 58634 - protein, 241 aa, Zea mays; identical to SEQ ID NO: 57103
  Clone ID: 700576485_FLI.pep

SEQ ID NO: 58635 - protein, 150 aa, Zea mays
  Clone ID: 700613051_FLI.pep
ARSCAPPRSPRSCGNMGLTFTKLFSRLFSKKEMRILMVGLDAAGKTTILYKLKLGEIVTTIPTIGFNVETVEYKNISFTVWDVGGQDKIRPLWRHYFQNTQGLIFVVDSNDRDRVVEAKDELHRMLNEVYQLCSCFFVIYLLHVNMCCHF

SEQ ID NO: 58636 - protein, 183 aa, Zea mays
  Clone ID: 700613245_FLI.pep
KRTNSIRLQIALLHPSAATGAGREIRLRALAADAAGELDVFGHDGDALGVDGAEVGVLEQADEVGLGGFLEGQDGVALEPQIRLEVLSDLTDQALEGQLPDQQLRALLVLADLAQSHRPGPVPVGLLHAAGRRRRLPRRLGGELLARGLASGGLAGGLLRTSHLLLSLAARFLPCLDGTNLRA

SEQ ID NO: 58637 - protein, 188 aa, Zea mays
  Clone ID: 700614483_FLI.pep
NHAEMGLTFTKLFRRLFAKKEMRILMVGLDAAGKTTILYKLKLGEIVTTIPTIGFNVETVEYKNISFTVWDVGGQDKIRPLWRHYFQNTQGLIFVVDSNDRERVVEARDELHRMLNEDELRDAVLLVFANKQDLPNAMNAAEITDKLGLHSLRQRHWYIQSTCATSGEGLYEGLDWLSNNIANKARSI

SEQ ID NO: 58638 - protein, 713 aa, Zea mays
  Clone ID: 700615106_FLI.pep
RGYTATTTINRAATGPASHCSRHTRPDTNRLVHLLDLGARATASSRSVLVHAAGASHVGTRALVHLGDDGVAKALQLLHLVIELVRLGELVGVQPADGRVDGVLDLLLVVGSQLGRDLLVLDRVAHVVGVVLQRVLGLHLLLVLLVLRLVLLRVLHHLLDLLLGQTALVVGDCDLVLLPRRLVLGRHVQDAVGVDVEADRDLGDTTRSRWDAGELELPKQVVVAGPGPLTLVHLDQHTRLVVRVGGEHLLLLGGDGGVPRDKDGHHSSGSLQTQRERSDVKQKQVLHLLVALTTEDSGLDGSTIGNGLIRIDVLAQLLAVEEVLEQLLHPGDPSGATNKDNIMDAALVHLGIPQALLNRLHALPEQVHVELLKPGTGDGGVEVNALVQRVNLNGGLGSGRQSSLGPLTRGPQPPESPRVASDILLVLSLELLDKVVNHPVVKVLTTKMGVASCGLDFKDTFLNCKEGDIEGTTSKVKDEDILLTDTGCLLVKTIGNSSSGWLIDDTQHIEASNHPSILCGLPLRVVEIGRDRDNSILDRAAKVSFSDLTHLDENHRGDLFGCKLFLLPLVLNNYHWLLTGPWNDLEGPQLNITLDRGITKPPANETLGIKDGVDGVHGDLVLGRISDEALGVGEGDVRGCGAVTLVVGDDLDTVVLPDADARVRRAEIDADCRPITLACHLFSLSAEVAEDGMELAVAVNGRGVAAEGEVTED

SEQ ID NO: 58639 - protein, 472 aa, Zea mays
  Clone ID: 700620227_FLI.pep
AGAPSPYPQISGEQKPHHSTDARRAMGKEKTHINIVVIGHVDSGKSTTTGHLIYKLGGIDKRVIERFEKEAAEMNKRSFKYAWVLDKLKAERERGITIDIALWKFETTKYYCTVIDAPGHRDFIKNMITGTSQADCAVLIIDSTTGGFEAGISKDGQTREHALLAFTLGVKQMICCCNKMDATTPKYSKARYDEIVKEVSSYLKKVGYNPDKIHFVPISGFEGDNMIERSTNLDWYKGPTLLEALDLINEPKRPSDKPLRLPLQDVYKIGGIGTVPVGRVETGVIKPGMVVTFGPTGLTTEVKSVEMHHEALQEALPGDNVGFNVKNVAVKDLKRGYVASNSKDDPAKEAASFTSQVIIMNHPGQIGNGYAPVLDCHTSHIAVKFAELVTKIDRRSGKELEKEPKFLKNGDAGMVKMVPTKPMVVETFSQYPPLGRFAVRDMRQTVAVGVIKSVEKKDPTGAKVTKAAAKKK

SEQ ID NO: 58640 - protein, 280 aa, Zea mays
  Clone ID: 700622652_FLI.pep
QRSLPSETPSTSAAAGAAATMAVGKNKRISKGKKGGKKKTVDPFSKKDWYDIKAPSVFSVRNIGKTLVSRTQGTRIASEGLKHRVFEVCLADLQGDEDQAYRKIRLRAEDVQGRNVLTNFWGMDFTTDKLRSLVKKWQTLIEAHVDVKTTDNYMLRLFCIGFTKRRPNQVKRTCYAQASQIRQIRRKMVEIMINQASTCDLKELVSKFIPEVIGKEIEKSTSSIFPLQNVFIRKVKILKAPKFDLGKLMEVHGDYKEDVGVKLERPVEGDEAGQEVAAAE

SEQ ID NO: 58641 - protein, 493 aa, Zea mays
  Clone ID: 700623761_FLI.pep
QTHPPKSQAHRTLLTNPPAGERKKKNRVEATFAAMAGDPPTAAEKETLVSSFIEITAGQTLETATQFLQMTSWHLEEALQLFYIDGEAAHTAAHSVDPSPAAAAPSALAAAAGVEEAMRFAPPPAAALGDAMSHGFGVREDDDVRAPLPVKRETLYGEGIVSVMRPNASAAFRNFEQEARQSAVWDSEQNVASSSGDNLASLYRPPFPLMFNGSFDKAKLEASSLDKWLLINLQSTEEFSSHMLNRDTWGNEAVAQLIRSNFIFWQVYYDTSEGRKVCTYYHLVSMPAILLIDPVTGQKVHAWNGMVHPDRLLEDLLPYLDKGPKGHHAAQPQKRPRKVDQEASTGKQGKIAVEDEDEELARAIAASLEVVIEASDASDDDMAEAEPEEENEPSLNIKPDYPPLPEEPKGSRELLCRVAIRLPNNQRIQRNFLHTDPIKLLWSFCAPQVEDGEKRAFHFVQAIPGASQKLQFGSDLTFRKAGLANSMINLLWG

SEQ ID NO: 58642 - protein, 385 aa, Zea mays
  Clone ID: 700803036_FLI.pep
VDSRLSSSSMYVTRPTNPSLITALQNPNSPSSEAAATAILIRTRSSPAAAPSGPSVDMGTVTAADPHPSFLADKDAKVFVAGHRGLVGSAIVRRLLSLGFTSVVVRTHAELDLTRQADVEAFFAAERPRYVVLAAAKVGGIHANSTFPADFIAANLQIQTNVVDAALRCGSVRKLLFLGSSCIYPKFAPQPITEGALLSGPLEPTNEWYAVAKIAGIKMCQAYRIQHGLDAVSAMPTNLYGPHDNFHPENSHVLPALIRRFHEAKATNAPEVVVWGSGSPLREFLHVDDLADAVIFLMDHYSGMEHVNVGSGSEVTIKELAELVKEVVGFQGNLVWDSSKPDGTPRKLMDSSKIQGMGWKPKIALKEGLVETYKWYVENVISNKK

SEQ ID NO: 58643 - protein, 250 aa, Zea mays
  Clone ID: 700804334_FLI.pep
HNGLKTTVIWIALGRPSETARWEPLNETHRGTLICRVATAATVVADHESTSHAVTTRMANLVAGPADHVTEATTEGNANTTEGSANTMEGRRPTPLAQCIRLGALTGQVASNIAQVANRIIGAVTGNMATLPAIVAGLLIGAFLTKMPWLVAVAAKDHFSWRHWWSSAVSCNMSGLATVTAYPFIWAAVSHVARLFAVPAGTFGRTFSCNVPRKPAGMTDSHARTLSSKMPRTLTIVAQIIPKPAQWKGK

SEQ ID NO: 58644 - protein, 455 aa, Zea mays; identical to SEQ ID NO: 40951
  Clone ID: 700805206_FLI.pep

SEQ ID NO: 58645 - protein, 179 aa, Zea mays
  Clone ID: 700397576_FLI.pep
TMLSVGLTPNIVTYNSLIYGLCKSGELSRAVSLFKKLWTKGISPNAITYNTLIDKHCKDGYITEAFKLKQRMIEEGIHPTVFTYSILINGLCTQGYMEEAIKLLDQMIENNVDPNYVTYWTLIQGYVRCGNMIEISKIYDKMHIHGLLPTNVSGDVKQSCPAIHNPNRETCQMKMHSQC

SEQ ID NO: 58646 - protein, 555 aa, Zea mays
  Clone ID: LIB3245-277-G2_FLI.pep
VRSAHTRNQISPKSSRRHLRFKMQIFVKTLTGKTITLEVESSDTIDNVKAKIQDKEGIPPDQQRLIFAGKQLEDGRTLADYNIQKESTLHLVLRLRGGMQIFVKTLTGKTITLEVESSDTIDNVKAKIQDKEGIPPDQQRLIFAGKQLEDGRTLADYNIQKESTLHLVLRLRGGMQIFVKTLTGKTITLEVESSDTIDNVKAKIQDKEGIPPDQQRLIFAGKQLEDGRTLADYNIQKESTLHLVLRLRGGMQIFVKTLTGKTITLEVESSDTIDNVKAKIQDKEGIPPDQQRLIFAGKQLEDGRTLADYNIQKESTLHLVLRLRGGMQIFVKTLTGKTITLEVESSDTIDNVKAKIQDKEGIPPDQQRLIFAGKQLEDGRTLADYNIQKESTLHLVLRLRGGMQIFVKTLTGKTITLEVESSDTIDNVKAKIQDKEGIPPDQQRLIFAGKQLEDGRTLADYNIQKESTLHLVLRLRGGMQIFVKTLTGKTITLEVESSDTIDNVKAKIQDKEGIPPDQQRLIFAGKQLEDGRTLADYNIQKESTLHLVLRLRGGQ

SEQ ID NO: 58647 - protein, 294 aa, Zea mays
  Clone ID: LIB3245-206-B1_FLI.pep
IMAPTLELRQQALDRLLPYQRSDFEGIFRAMDGLPVTIRLLDPPLHEFLPEGNIEDIVSELCAETGANQEDALARIEKLSEVNPMLGFRGCRLGISYPELTEMQARAIFEAAIAMTNQGVQVFPEIMVPLVGTPQELGHQVTLIRQVAEKVFANVGKTIGYKVGTMIEIPRAALVADEIAEQAEFFSFGTNDLTQMTFGYSRDDVGKFIPVYLAQGILQHDPFEVLDQRGVGELVKFATERGRKARPNLKVGICGEHGGEPSSVAFFAKAGLDYVSCSPFRVPIARLAAAQVLV

SEQ ID NO: 58648 - protein, 41 aa, Zea mays
  Clone ID: 701176493_FLI.pep
MYLCFAYWSCNRSNYMIKFVYASVCQSCVAVSVDRYVRLVS

SEQ ID NO: 58649 - protein, 388 aa, Zea mays
  Clone ID: 701180001_FLI.pep
QFKMANKLYTYPENFRAYKALLAAQYSGVQLDVDRTFKYGVTNKTEEFQSKFPLGKLPLLETADGQRLFESNAIAFYLANEQLRGSTPAEQAQVIQWTAFADNELLPPVATLVFTASKVITRPAEETAASEKQLATLLAFVNTSLNGRSYLVGEQVTLADLAVVGILIALYQQVQTPEQRATYANLNKWFNNLVAQPQFTAALGDLKLKQAAAAAAVPAGGDEFPTEPKKKDPFAAFPAGTFVMDAFKREYSNKSEDESIAWFWQNFDKENYSIWFCEYLYPEELKMVFMSCNLIGVMMQRLDTMRKHAFGSMCLFGEDNASTISGVWIWRGHELAFTLSPDWQVDYESYKWTKLDPDNAEHRKTVDEYLRWDGEFGGKKFNQGKIFK

SEQ ID NO: 58650 - protein, 381 aa, Zea mays
  Clone ID: LIB143-057-E9_FLI.pep
QITLPIAMDEQQAEEGESARVKRTPEEGSSPLSALADDVLLQILGRLEADPRDWARASCASPRLAALLRAACLPPRLSRALPAELLPAPSPDGAPAAWAALHKLSVCCPGLLRAGVLLEPTDDFGLDLDIGPDVPIYARTDASSAEGFEATATSRHSGTIVAAGSAPRAGESANVAAWSLYDDLYLDAAYDCSSELQIPPAAAAVEPAPPAPVAAIRDVEEATTTNAVSCGVARRGVVAGSRLHPRRWLGTVGAHLASGSWTLSREQGNKLLASRFRGDRLYLCDWPGCVHKEERRKYMVFRGVFHNFARSQVRRALRDTRRPTVAIECAFCGCKETWDLYSAFCLRSFYGYHDDGEPVVRAYVCENGHVAGAWTDRPLYS

SEQ ID NO: 58651 - protein, 231 aa, Zea mays
  Clone ID: LIB143-059-A8_FLI.pep
LGGGRRLAGSLDGEHDLVGAQRRERERRVVPRQHERDLDGVPVLLQGGLKSLRLLPHRPVRGHPAEPRHAELPLRHLADHHPLVRRPRRLLHPGVLGRQQELHCHLARRLLVVRNHRRGHRDGLGGDDGSRHGDLLGLGVLRLSEDPDVVGEDGEPAIRVSSHLLGIVGQLRGDAGRVLADLVAGAGVEDLVLGRLHRDLPQHHPQHHRHGGLSAEDGGELWRSGSLDVSV

SEQ ID NO: 58652 - protein, 183 aa, Zea mays; identical to SEQ ID NO: 47792
  Clone ID: 700621540_FLI.pep

SEQ ID NO: 58653 - protein, 238 aa, Zea mays
  Clone ID: 700622209_FLI.pep
VPRSSSGTSPATSTHQIENYNEPYLNALNEYDDGRDLTSYDFEADCFSSPYDDANKKKLAYRHRAIGEKYAKGLEKVLDGHMVKVCNDQYSLTDKYTDGWLSSAHKLLEEALGKSASAPSANSSSINCIVTSGSLIPSLAKCLLYHLDDVVSSENVYSSWEVGKLQCFKWIKERFDGPNVRFCAIGDGHEECSAAQVMKWPFIKIEFRPEAHHRFPGLDLPTVQTYMDVIYESSSKDG

SEQ ID NO: 58654 - protein, 515 aa, Zea mays
  Clone ID: 700622869_FLI.pep
SATDHPSRPHLITPRSLSLSDLFLVLASSSPIVAGSLPILLPPPLPVVPGPARGRCLDCPRPVMDRAELTTEQVLKRDIPWEHYMSTKLISGTCLQLLRRYDHKPESQRAPLLEEDGPAYIRVFLNILRSISKEETVEYVLALIDEMLATNPKRAALFYDQSLSGEDIYEPFLRLLWKGNWFVQEKSCKILTVIISARPKLQNGTLPNGDASNSKSKLTSTHDVLRGLVDWLCSQLRNPTHPSCSIPTSIHCLSTLLREPYVRTLFVQADGIKLLIPLISPASTQQSIQLLYETCLCIWLLSFYDAAVDYLSTTRVMPRLVEVVKGSTKEKVVRVVVLSFRNLLAKGAFAAQMIDLGLPQMVQNLKAQAWTDEDLLDALNQLEVGLKENLKKLSSFDKYKQQVLLGHLDWSPMHKDPSFWRENINNFEENDFQILRVLMTIIDTSSDTTALAVACYDLSQFLQYHPSGRIVVADLKAKDRVMKLMNHENTEVRKNALICVQRLFLGAKYASFLQA

SEQ ID NO: 58655 - protein, 117 aa, Zea mays
  Clone ID: 700623125_FLI.pep
AMEVVKDTALGLALVVLLAAAVDMVAVVAAAKVGLAMALALALARDMDQVKDTDKVVLMEEAMEAVVAVEVVVVKVVVALAMGLDPAPVMEVATTTDITRLFFRARNMLYKYVTRHE

SEQ ID NO: 58656 - protein, 439 aa, Zea mays
  Clone ID: 700623362_FLI.pep
MNILERIRGGGDRAAATERPPRPECWVEISESVSRLCSFDAAGSGSRSISVKVIQDSRPIHDKLVDSFLNKFFPSGYPYSVNEGYLTYTKFRVLQHFSSAMLHVLSTQSLLFAAGLRPTPAQATAVSWILKDGMQHAGKLICSSMGARMDSEPKSWRILADVLYDLGTALEVVSPLCPQLFLEVAGLGNFAKGMAVVAARATRLPIYSSFAKEGNLSDLFAKGEAISTLFNVMGIGAGIGLASTVCSTTQGKLIAGPLLSAVHIYGVIQEMRATPVNTLNPQRTAMIVADFIKSGKVSSPAELRYKEDLLFPNRVIEEAGSVKIGQPLRKVFSPRLVEQLRATFPGEKFLLSQKSNRTYMVLERSASGEDALRGWLVAAFASEMERSGAGSRDDAVLSEAYEKMERVFPTFVSEVRSRGWYTDQFLDGNCSRVSFAKFR

SEQ ID NO: 58657 - protein, 71 aa, Zea mays
  Clone ID: 700624089_FLI.pep
LCWLFGRKKMEGENNIIPIFPKNTGLDLDVNVCIVTGVPYLLTVLHITCLVLIRTDYVSSARLLYIYIVVI

SEQ ID NO: 58658 - protein, 475 aa, Zea mays
  Clone ID: 700624603_FLI.pep
RLQHPSSPHHRAADTPLAFAPETRACRAAAMDEEYDVIVLGTGLKECILSGLLSVDGLKVLHMDRNDYYGGDSTSLNLNQLWKRFRGEDKPPAHLGASRDYNVDMVPKFMMANGTLVRTLIHTDVTKYLSFKAVDGSYVFSKRKIHKVPATDMEALKSPLMGLFEKRRARNFFVYVQNYNEADPVTHQGLDLTRITTRELILKHGLSDDTVDFIGHALALHRDDRYLNEPALDTVKRMKLYAESLARFQGGSPYIYPLYGLGELPQAFARLSAVYGGTYMLNKPECKVEFDIEGKVCGVTSEGETAKCKKVVCDPSYLPSKVRKIGKVARAIAIMSHPIPNTNESHSIQIILPQKQLGRKSDMYVFCCSYTHNVAPKGKFIAFVSAEAETDNPQSELKPGIDLLGQVDELFFDMYDRYKPVNEPSLDNCFVSMSYDATTHFETTVTDVLSMYTAITGKTVDLSVDLSAASAAEEY

SEQ ID NO: 58659 - protein, 323 aa, Zea mays; identical to SEQ ID NO: 47067
  Clone ID: 700461145_FLI.pep

SEQ ID NO: 58660 - protein, 303 aa, Zea mays
  Clone ID: 700612470_FLI.pep
AGEASPDWYIDRLIGGGGRGGGRQMAACRGFFECLLRLLNFILTVAGLAMVGYGIYLLVEWMKISEDGSSGGLTAEVLVSGRPLLGAVALGDSFLDMLPKAWFIYLFIGVGATVFLVSLFGCIGAGTRNTCCLCFYAFLVILLILAEAGAAAFIFFDHSWKDVIPVDKTHNFDVMYGFLKKNWEIARWVALGVVVFEAVLFLLALVVRAMNKPAEYDSDDEIIAIGRSPTMRQPLIHAQNVPATGVPVPTLDQRSSRNDAWSQRMREKYGLDTSQFTYNPSDPSRYQQNGAPQAEERSRCTIM

SEQ ID NO: 58661 - protein, 174 aa, Zea mays
  Clone ID: 700612536_FLI.pep
EVLFPDLETVWKTSSGLTLPLTVTFCSLRSMSKVSTPSILESTLLTAPAQPSHDIATLRTTVSTAAMMMAPLTGLRLEETLTQARAAAGKEEEEQEHCRQTSLRTLGLHRLHGSGDSINRREARWRSKKAEAGDPERWTRTKQAQSMDRGERERERARSKGPAVASCCCPRCLA

SEQ ID NO: 58662 - protein, 187 aa, Zea mays
  Clone ID: 700612744_FLI.pep
HDHNYDIAARPPRAQNSNTNVNERLLLLGVTSFGLLDTTDLLGPVLPLLHLLAGLLNLSSKTIPDEAVFRLELLGSLEVVVDEAETSGLSSSEVGAELEDKDGVGVLHLVRLGKPLLQLRLGDVGAAGVDHLKHELLAGQEAVGHELAGAEGDRRGGLGVRHGSTDRADAGGDVEVEVVAARQERGL

SEQ ID NO: 58663 - protein, 156 aa, Zea mays
  Clone ID: 700613146_FLI.pep
IVAVFSLTIVVAAPLLDAQSVLPHTLYPAPLLELKRWYAAEFGDYLVAQSPGFFRGLVCLELAFQWPLAVATLYGILTRRRWAATTSLMAGVGTLTSMSAILGEMLGSGKSTPKLLQMYVPYAVFAVIAILRGLCSCSGRTTAGSSLGPSARKKRV

SEQ ID NO: 58664 - protein, 455 aa, Zea mays; identical to SEQ ID NO: 40951
  Clone ID: 700613490_FLI.pep

SEQ ID NO: 58665 - protein, 318 aa, Zea mays
  Clone ID: 700613962_FLI.pep
FQLDTAPEIKNLGKRKMGSDSTIDKVPRTDKFITEKTLDNLVVHPESKCKRSHESIQAAVCIPLQDMGHLSISIPQFGELEVGLFVVIKECLLICSIFLHKRAEDRVAQQGFVTWELKKALLVATQKFLEVRVVKDQRVRSPGPLKTRPLFVAPSQGVATREGNNVLITQTHLLAKDLPQVVRTLGGIRKTALRWRLRLVLPAGVEGDLRPTGDLDGHNSGKLVEVGIGEGGELLLDGLEQPHRDVQPRVGAVSQFRRALHGTEGTAGPRRHVERPRGVPREAEHEGCAALLGDEGAELAPGLLDGLAVLGAHGWVVL

SEQ ID NO: 58666 - protein, 394 aa, Zea mays; identical to SEQ ID NO: 56351
  Clone ID: 700613975_FLI.pep

SEQ ID NO: 58667 - protein, 179 aa, Zea mays
  Clone ID: 700614970_FLI.pep
IASQKSNKFYPHDMMFHHKFMTSRQGTVLSGVCSQLQILRISPPPACPRSESVHKCAQNVILSEEEVLFISRKLDFRSTILGQKNSVAFLQSNWDQIACLVALTRANSHHFSSIQLLGCFREEDAAGGLLGLHQLLHQHPVQRREQPLRHRRPPLVSLLLAQQDKEEKSSTLPQFHSRL

SEQ ID NO: 58668 - protein, 505 aa, Zea mays
  Clone ID: 700615191_FLI.pep
ILLLLDSWQEAFGGPGSKYPQYHWAYLEVKTTGVVFPKRPMDAPPIFTPPATHNSETYGSPRYSAGSLSDRMSSDVETLSLGDLNKIRNVTDLLNDMVYALNPSDRMAINDEIITDLVTQCRSNQQKLLQFVSSSGNEQLLKQGLETNDLLQSVLSKYDAVASGAPLAVEASVREAIEAPAVKSYAPPEHNDNVNEEEDEFAQLAQRKNKSVVSSSDDASSSTLGDLALVPIDQAVSESPSSVASNALVLLDPAPSTSTESKELDMIDLLSLTLCSPTPETSTDSSAQDQNGPQQPAVTHNQKGLQEPTVTNGQQYPSSVPQYPSNYQPHTANQAYAPQTSNYVAPWAQTGAYPPQPPAYASGYAYPAPPWVAPTHPVDSNPFLSVNYQDPRPAATSVAQTATYAPPPASYPPSISYAQFATPQSIQHSNSVASPSNGQIANQAQMNVNQQPKDSSAASSRPYYIPDNLFSDLIDAKSFGGGNKMGGPTTMGSSNGGQPMIGGKK

SEQ ID NO: 58669 - protein, 142 aa, Zea mays
  Clone ID: 700615246_FLI.pep
WLRALATDAAGELDVLGHDGDALSVDGAEVGVLEETDEVGLGGLLERQHGVALEPEVCLEVLRDLAHQALEGQLADQQLRALLVLADLAQRHGSGPVPVGLLHAAGRRRRLPRRLGGELLAGGLASRGLAGGLLRTSHPPLL

SEQ ID NO: 58670 - protein, 168 aa, Zea mays
  Clone ID: 700615518_FLI.pep
KLGGEHDGAAGGLDLLLGDLGDELGLDDDGLGRQHPLPEHLEVAELRDVDLRGLVAAGFRRLFGGHHRPEALDVDRGAVELVAELVEVAHADLTEVAGMVLVEEDAVVVHATGVTATSGMLPVLADAAVPGGHVAALLAVLLEARRHRRRRRTCAAPGSGVVEAGGRE

SEQ ID NO: 58671 - protein, 417 aa, Zea mays
  Clone ID: 700615993_FLI.pep
AMAMSASSSSRALLRRIGGALLRRSFSSSSAAAAAGYHVAGGPSYMRGAVFWEPGRPLTLEEFRMPRPKAGELLIKTKACGVCHSDLHVLKGELPFSTPCVVGHEITGEVVDHGTHTPAEIINRFPVGSHVVGAFIMPCGNCFYCVKGQEDLCESFFAYNRAKGTLYDGETRLFLRGNGKPVYMYSMGGLAEYCVVPANALAVLPDSLPYTESAILGCAVFTAYGALRHAAEMRPGDSVAVIGVGGVGSSCLQIAKAFGASQVIAVDVLDEKLQNATTLGATHTVNAAKADAVERIKEITDGRGVDVAIEALGKALTFSQCAKSVRDGGKAVMIGLAATNVMGEVDITRLVRRQVKIIGSYGARARQDLPQIVKLAESGAFNLQNTISRKCKFEEANGAYEDLNQGKIVGRAVVEIM

SEQ ID NO: 58672 - protein, 149 aa, Zea mays; identical to SEQ ID NO: 48128
  Clone ID: 700616222_FLI.pep

SEQ ID NO: 58673 - protein, 178 aa, Zea mays
  Clone ID: 700616247_FLI.pep
GTTAMSRNDTKGVFGSLPQTPRRATRHAPQLWRPNWPPHLRRGVALDVSLQTGLKFFQRFPPPPPNLGPLEPFWTAPFVCVFWDLLTSAFFAFFSSLVFLMRSLISRRAASLAASRTSGFSALFFWITSKEAPTIDLEYGFLVARRLFFTASAWISFLCCFLYIAVQVSFAGFRRLWK

SEQ ID NO: 58674 - protein, 542 aa, Zea mays
  Clone ID: 700616266_FLI.pep
QPQQPPSSSHSRSRCARYLASHSIRKEGRKGKMFIESFRVESPHVRYGPMEIESEYRYDTTELVHEGKDGASRWVVRPKSVKYNFRTRTAVPKLGVMLVGWGGNNGSTLTAGVIANREGISWATKDKVQQANYYGSLTQASTIRVGSYNGEEIYAPFKSLLPIVNPDDIVFGGWDISNMNLADSMTRAKVLDIDLQKQLRPYMESMVPLPGIYDPDFIAANQGSRANSVIKGTKKEQVEQIIKDIREFKEKNKVDKIVVLWTANTERYSNVCAGLNDTMENLLASVDKNEAEVSPSTLYAIACVMEGVPFINGSPQNTFVPGLIDLAIKNNCLIGGDDFKSGQTKMKSVLVDFLVGAGIKPTSIVSYNHLGNNDGMNLSAPQTFRSKEISKSNVVDDMVSSNAILYEPGEHPDHVVVIKYVPYVGDSKRAMDEYTSEIFMGGKNTIVLHNTCEDSLLAAPIILDLVLLAELSTRIQLKAEGEDKFHSFHPVATILSYLTKAPLVPPGTPVVNALAKQRAMLENIMRACVGLAPENNMILEYK

SEQ ID NO: 58675 - protein, 457 aa, Zea mays; identical to SEQ ID NO: 39026
  Clone ID: 700616410_FLI.pep

SEQ ID NO: 58676 - protein, 447 aa, Zea mays
  Clone ID: 700617015_FLI.pep
DEVSRLLRGIRDYRVAVLEANPRSFVVPSHTDAHCICYVAEGEGVVTTIENGERRSYTIKQGHVFVAPAGAVTYLANTDGRKKLVIAKILHTISVPGEFQFFFGPGGRNPESFLSSFSKSIQRAAYKTSSDRLERLFGRHGQDKGIIVRATEEQTRELRRHASEGGHGPHWPLPPFGESRGPYSLLDQRPSIANQHGQLYEADARSFHDLAEHDVSVSFANITAGSMSAPLFNTRSFKIAYVPNGKGYAEIVCPHRQSQGGESERERDKGRRSEEEEEESSEEQEEAGQGYHTIRARLSPGTAFVVPAGHPFVAVASRDSNLQIVCFEVHADRNEKVFLAGADNVLQKLDRVAKALSFASKAEEVDEVLGSRREKGFLPGPKESGGHEEREQEEEEEREERHGGRGERERHGREEREKEEEEREGRHGRGRREEVAETLMRMVTARM

SEQ ID NO: 58677 - protein, 214 aa, Zea mays
  Clone ID: 700617093_FLI.pep
APQTKPAPAGARQDDIHHRLAAASDKRQGAKADKNLRFLLQKVLKQSDVGSLGRIVLPKKEAEVHLPELKTRDGISIPMEDIGTSRVWNMRYRFWPNNKSRMYLLENTGEFVRSNELQEGDFIVIYSDVKSGKYLIRGVKVRPPPAQEQGSGSSGGGKHRPLCPAGPGRAAAAGAPEDAVVDGVSGACKGRSPEGVRRVRQQGAGAMSQMAVSI

SEQ ID NO: 58678 - protein, 166 aa, Zea mays
  Clone ID: 700617241_FLI.pep
RLVTRALFATHDHVSGLGGRRGRSRRSAGGGGGVLPDGVPELVLVDGSKALERLAVPDEAEGRHHMDAVDLRDFQQFVDVDLEEDRGRVLAGAVRVHRGHHLAPTAPGGHEVDDHQLALLLGLGHAGVELVLGVARDHRTLLGRHYSDPLFSFNFLGVGSEASDAD

SEQ ID NO: 58679 - protein, 315 aa, Zea mays; identical to SEQ ID NO: 54515
  Clone ID: 700577207_FLI.pep

SEQ ID NO: 58680 - protein, 183 aa, Zea mays
  Clone ID: 700578660_FLI.pep
FQPPVTNKPLMVMAKSEGPSAAVGSEGPSAAAGLRPRQRGAFLLGEPTWEDTGSGRWRCAETGHELPEREKEAYARSRACRLALIDHAVAHKKPPLNAFKPHPEHKSKLVCKITGDMVHKSEDHIWKHIKGKKFLNKLEKLEDQMTSGEMADGESVKSNEEVAKKRWMVQMIVISGCLLSRVK

SEQ ID NO: 58681 - protein, 335 aa, Zea mays
  Clone ID: 700582146_FLI.pep
LLSLASGWQSSLEASRLVSPLLPQLCRCVPPLAVALQRSPASLELLARPSPQSSDMEFEDRCHKVQEPKFDCLLFDLDDTLYPLSAGIAGHVKKNIEDYMVEKLGIDETKIENLGNLLYKNYGTTMAGLRAIGYSFDYDEYHAFVHGRLPYDNIKPDPILKHILKNLRIRKLIFTNGDMVHAVRALKRLGLEDCFEGIICFETLNPPCPPQGDQEPEIFDIADHFARSGTADELPKTPVLCKPNVDAMEEALRIANVNPHKAIFFDDSVRNIQAGKQIGLHTVLVGKSQRVKGADHALESIHNIREALPELWEEAEKAEDVLYPERVAMETSVTA

SEQ ID NO: 58682 - protein, 230 aa, Zea mays
  Clone ID: 700570493_FLI.pep
SIRWRRTLSIRRSMECVVQGIIENQHVDALEVLLQGLSGVPKERFRVHELCLKSGPNLGVVPSEVRLLCDLAQPTPSWTIRHVGGAMRGAGAEQISVLVRTVVESKASKNVLHYFYTLGYKLDHELLKSGFAFRFHRGAQITVTVTSANKMSRLHATDEATSVTPAIQLVEITAPAAADNYNDVVSAVTAFCEYLAPLLHLSKPGHSTGIVPTAAAAAASLMSSGGGKTL

SEQ ID NO: 58683 - protein, 488 aa, Zea mays; identical to SEQ ID NO: 46968
  Clone ID: 700571256_FLI.pep

SEQ ID NO: 58684 - protein, 329 aa, Zea mays
  Clone ID: 700571337_FLI.pep
PKGAVVFNGTNEDDFLYCLPDNKELSVCREMARSMGFPKLEAGLCAMTKEDLADSLAYNSLKGLILSNALRAQKSAEDESYEIAFNNLRSEVIKLRNEALEKDKILLTLVDKVKKDEVASKIQAEAQKREIKDLQKQLARAKEERVFEETKRELSDQLVNHLELSVQELRASQRKCYVKSIECVKKIKSSFASVGAFSSEESFSRGNPEGPLEWISHEAEAFEEILSSRGDICAFSGARGVATVLEKKGCDHIKLLAQSEATLSAEDIKDPSTEASQVGGKFFTDVWDNGGREMAGEIIQRSEKGIHDAREVAKAAEKSAEPEGQLGIN

SEQ ID NO: 58685 - protein, 284 aa, Zea mays
  Clone ID: 700571352_FLI.pep
SPPSGAWWSRETVAVVTGANRGIGHALAARLAEHGLTVVLTARDGERGEAAAAPLLARGLAVVFRRLDVSDAASVAEFAAWLRDAVGGLDILVNNAAVSFNEIDTNSVEHAETVLRTNFYGAKMLTEALLPLFRQSSATSRILNISSQLGLLNKVGDPSLKALLLDEERLTEAGIEAMVSRFLAQVKDGTWGEQGWPKVWTDYSVSKLALNAYSRLLARRLEARGVSVNCFCPGFTRTDMTRGWGKRTAGEAADVGARLALLPPTELPTGTFFKWRTPQLYSKL

SEQ ID NO: 58686 - protein, 103 aa, Zea mays
  Clone ID: 700571607_FLI.pep
TTVAAMRWHGCHMLCLLGPRIVRRRRRLLLVIALLPRCSRVCMYFCLIFFLHIMHSGWPRLPPIHGGRYVLSSSCMSWILNSSSASNCLCHVRVITIKVILTI

SEQ ID NO: 58687 - protein, 466 aa, Zea mays
  Clone ID: 700571676_FLI.pep
LHLVKTPFHSALGRLAERHGPVFSLRMGCRRAVVVSSPECARACFTEHDMSFANRPRFESMRLVSFDGAMLSVSSYGPYWRTLRRVAAVQLLSAHRVACMSPVICAEVRAMVRRMARLAAGGAARVQLRRRLFELSLGVLMETIARTKTSRSEACAADTDVSPEASELTRISEEIMPYLGTANLWDYLPFLRWFDVFGVRNKLMAAVRWRDAFLRRLIDAERRRMDGDGDGEKKSMIAVLLSLQKSEPELYTDTMIMALCGDLFGAGTETTSVTTEWAMSLLLSHPEALKKAQAEIDAVVGNSRRLITADDVPRLGYLHCVINETLRMYPAAPLLLPHESAADCKVGGYDVPRGTLLIVNAYAIHRDPAVWEDPGSFLPERFEDGKAEGRLLMPFGMGRRKCPGETLALRTVGLVLATLLQCFDWDTVDGAEVDMTESGGLTMPRAVPLEAMCKPRAAMCDVLREL

SEQ ID NO: 58688 - protein, 88 aa, Zea mays
  Clone ID: 700572303_FLI.pep
VIVEKAERSDIPDIDKKKYLVPADLTVGQFVYVVRKRIKLSAEKAIFIFVKNTLPPTAALMSSIYEENKDEDGFLYMTYSGENTFGLL

SEQ ID NO: 58689 - protein, 388 aa, Zea mays; identical to SEQ ID NO: 46994
  Clone ID: 700572470_FLI.pep

SEQ ID NO: 58690 - protein, 186 aa, Zea mays
  Clone ID: 700572489_FLI.pep
HDHNYDIAARPPRAQNSNTNVNERLLLLGVTSFGLLDTADLLGPVLPLFHLLAGLLNLSSKTIPDEAVFRLELLGSLEVVVDEAETSGLSSSEVGAELEDKDGVWVLHLVRLGKPLLQLRLGDVGAAGVDHLKHELLAGQEAVGHELAGAEGDRRGGLGVRHCSTDRAAAGGDVKWRSWLRDRNEG

SEQ ID NO: 58691 - protein, 88 aa, Zea mays
  Clone ID: 700572675_FLI.pep
AVGPQVLDFSKRVARDAVQTSRNESNNPRASSGPVLPIETWSRPGVVAGANNMLKPGQNLNDHSKLLYSTNFLLIVLSIQLYYSGKQE

SEQ ID NO: 58692 - protein, 220 aa, Zea mays
  Clone ID: 700572689_FLI.pep
VPHARRPLHQGRRLQLRRGCSRDRLRPQELRLYPAPGRRGRQPPGIRTYSLLVSSYSSSLASFSLPCFNNNAYVGPYVQMQAWRLYKKGRSLELLDHAVKSSAVPEQVELCVRIGLLCVQADPRLRPDMKRVVIILSKKQSTLEEPTRPGVPGSRYRRRPHGLRGTHYSAGSSSGTSLPSTSATSDASASASASVSNAMTTSSTHTMRSQGLPSHREEHE

SEQ ID NO: 58693 - protein, 218 aa, Zea mays
  Clone ID: 700572706_FLI.pep
MEHNVIVMVRNHRPITHLVQRRYHTIPPSLAGPRIHASLFSVQFGRWSKSRVTTGKDELARAHTHTTGPLPAARPPAPTKTPWRCVRWGWRGGTWPPRSRAPLRLRPPCCTCRPSARRWARRSPRRAGTPAGRSASARRRRPGVPPRARTARRGPWPRAPRGRTRPAPPAPSSRAPHGLRPSRPTAAPRPPARAPPPARPEPPRRHAPTPPSARPGGA

SEQ ID NO: 58694 - protein, 442 aa, Zea mays
  Clone ID: 700573894_FLI.pep
PHERFQEMCKMLRVLNAVRDPEIGMPLTIHQYKLLTTSVLIGRLINANQHLLALRISEYLNLNPEVVIMHWACEKITASTTLPDTVLLDGLLDKLRLCKGISYAAVAAHADNSGRRRLAAMLVDHESQSSKQIPLLLSIDEQDKALSKAIESGDTDLVYLVLFHIWQKVAVEKKAPLDFFGVINARPVARDLFMAYARHSKHEELKDFFLSTGRLQDAAFLLLKESWELEKNPMASKGSPLHGPQVRLIEQAHRLFAETKEHVFESKASEEHAKLLRSQHELEVSTKQPIFVGSSVSDTIKTCIAMGNERAALRVKSEFKVPDKRWYWLKTCALATVGNWDGLEKFSREKRPPGGYKPFVEACIDAGQKNEAVKYIPKLTDPRERSEAYARMGMAKEAQDAASQAKDSDELFGRLKITLAQSSAAASIFDTLRDRLSFQGAY

SEQ ID NO: 58695 - protein, 233 aa, Zea mays
  Clone ID: 700574177_FLI.pep
VTITPPERPLEIRSRAAASCSRLFPSARARAGARLLPAAAMSAVNITNVAVLDNPTAFINPFQFEISYECLVPLDDDLEWKLIYVGSAEDENYDQQLESVLVGPVNVGTYRFVLQADPPDPSKIREEDIIGVTVLLLTCSYMGQEFMRVGYYVNNDYGDEQLREEPPAKVLIDRVQRNILADKPRVTKFPINFHPEPSTGTGRQQQQQEPQTASPEKHAGSGEGNGSKPEADQ

SEQ ID NO: 58696 - protein, 187 aa, Zea mays
  Clone ID: 700574804_FLI.pep
IRPEIMAPSDKIMEHRKEKIRKFMQLQQKEDDELFFVIVPAILQCLNDEKRPVHTSEYTGAKKMKEILEGHESWCKSEFRMEPEIFKATCNYLRREGLLRDTRRVTIEEQLGMFLFMISHNASNERLKKTFQHSGETVHRHIKAIFNIIPTLTHKFLKLPSSNQTHPKIATDPRFWPFFKEALLQVI

SEQ ID NO: 58697 - protein, 302 aa, Zea mays
  Clone ID: 700575557_FLI.pep
FHILHEQGIPVAPLWDSFRGQFVGLLSPLDFILILRELETHGSNLTEDQLETHTISAWKEAKRQTCGRNDGQWRAHQHLVHATPYESLRDIAVKLLLNDISTVPVIYSSSSDGSFPQLLHLASLSGILKCIFRYFKNSTGNLPILNQPVCSIPLGSWVPKIGDPNSRPLAMLRPNASLSSALNMLVQAGVSSIPIVDENDSLLDTYSRSDITALAKDKVYTHVRLDEMTIHQALQLGQDANTPFGFFNGQRCQMCLRSDPLLKVMERLANPGVRRVFIVEAGSKRVEGIISLSDIFKFLLSL

SEQ ID NO: 58698 - protein, 305 aa, Zea mays
  Clone ID: 700454623_FLI.pep
RFRSSAPRAAAATRRQVMASAAVLRNAGSRRLFSYPTLRAAAISGPAVLPDAPVAVSVAAQPPPLAWTLWAMSMATFTRTKPHVNVGTLGHVDHGKTSLTAAITKGISTTRNLLADDAMVPISSPLTPPLGDSEETDKKGAVVKRLKVQAIKKDIKQSPKKVNLVAKLVRGMRVEDALLQLQVTVKRAAKTVYQVIHSARANASHNHGLDPDKLIVEEAFVGKGLFLKRVSYHARGRSGIMVRPRCRLTVVVREATAEEEAKIAKLRVSNYKKLTRKEQQLMPHRLIEVSPRWIRKRKAEAGATA

SEQ ID NO: 58699 - protein, 302 aa, Zea mays
  Clone ID: 700455129_FLI.pep
GTPDSRLDWGPDMICSDDTQYSNGRGHRDTGADFAAAPDIDHLNPRVQQELSDWLNWLKSDLGFDGWRLDFAKGYSAAVAKVYVDSTAPTFVVAEIWSSLHYDGNGEPSSNQDADRQELVNWAQAVGGPAAAFDFTTKGVLQAAVQGELWRMKDGNGKAPGMIGWLPEKAVTFVDNHDTGSTQNSWPFPSDKVMQGYAYILTHPGTPCIFYDHVFDWNLKQEISALSAVRSRNGIHPGSELNILAADGDLYVAKIDDKVIVKIGSRYDVGNLIPSDFHAVAHGNNYCVWEKHGLRVPAGRHH

SEQ ID NO: 58700 - protein, 216 aa, Zea mays
  Clone ID: 700455147_FLI.pep
SRSPPPVAFVPSISGCVAGEPDTANRIRRQGEREKMGLTFTKLFSRLFAKKEMRILMVGLDAAGKTTILYKLKLGEIVTTIPTIGFNVETVEYKNISFTVWDVGGQDKIRPLWRHYFQNTQGLIFVVDSNDRDRVVEARDELHRMLNEDELRDAVLLVFANKQDLPNAMNAAEITDKLGLHSLRQRHWYIQSTCATTGEGLYEGLDWLSSNIATKS

SEQ ID NO: 58701 - protein, 172 aa, Zea mays; identical to SEQ ID NO: 41503
  Clone ID: 700455731_FLI.pep

SEQ ID NO: 58702 - protein, 442 aa, Zea mays
  Clone ID: 700456028_FLI.pep
RHFKMGEVHEADKNIEIWRVKKLIKALDAARGNGTSMISLIMPPRDQISRVTKMLGDEYGTASNIKSRVNRQSVLAAITSAQQRLKLYSRVPPNGLVLYTGTIVTDDGKEKKVTFDFEPFRPINASLYLCDNKFHTEALNELLTSDDKFGFIIIDGNGTLYGTLSGNSREVLYKFSVDLPKKHGRGGQSAVRFARLRMERRHNYLRKVAELATQYFINPGTNQPNIVGLILAGSADFKSELGKSEMFDPRLQAKVVKMIDVSYGGDSGFNQAIEMSAEVLSDVKFVQEKKLIGKYFEEISQDTGKYVLGIQDTITALEMGAVEILIVWENLDVRRYELKNSATGETVVKYLNPAQEADQSNFTDEATSGDLEVIDNTQLLEWFAENYHQFGCTLEFVTNKSQEGSQFCRGFGGIGGILRYPADVSAYQDGDLSDGEYDEDLE

SEQ ID NO: 58703 - protein, 208 aa, Zea mays
  Clone ID: 700456059_FLI.pep
NYAAAYCTGLLLARRVLKTRGLDKEYEGNVEATGEDFSVEPADERRPFRALLDVGLIRTTTGNRVFGALKGALDGGLDIPHSEKRFAGFKKDDKQLDADIHRKYIYGGHVADYMRNLAEEEPEKYQSHFSEYIKKGIEADDMEALYKKVHAAIRADPSVVKSTKQPPKEHKRYNPKKLTYEQRKASLIERLNQLNSSGGADDDDEDDE

SEQ ID NO: 58704 - protein, 289 aa, Zea mays
  Clone ID: 700456490_FLI.pep
PGRGKEGMSFQDLEAGHVRGAPPGGGRRSGRAGGAGAGAGASQAVASGVFQINTAVATFQRLVNTLGTPKDTPDLRDRIHKTRQHITQLVKDTSDKLKQASEADHRVEVSATKKIADAKLAKDFQAVLKEFQKAQRLAAEREAAYAPFISQAGLPQSYNSSEVNNGADRLAEQRTQLLESRRQELVFLDNEIVFNEAIIEERDQGIQEIQHQITEVNEIFKDLAVLVHDQGAMIDDIDSHIENAVVATSQAKGQLSKAAKTQKSNSSLICLLLVIFGVVLLIVIIVLAA

SEQ ID NO: 58705 - protein, 120 aa, Zea mays
  Clone ID: 700456535_FLI.pep
LCCFGQNLSQTRMGGRRMMSSESDPSLNVEHRSMRRAPLSSAGNLPPMGRPISSSQQASDRRGGSSASNTRKDEYNWRYDTTDDISEEVLRASTALESVQLDRKSRNLPTSWRHSGDGAE

SEQ ID NO: 58706 - protein, 393 aa, Zea mays
  Clone ID: 700456789_FLI.pep
GFRWSLRRRRAPSSVEMADGEDIQPLVCDNGTGMVKAGFAGDDAPRAVFPSIVGRPRHTGVMVGMGQKDAYVGDEAQSKRGILTLKYPIEHGIVSNWDDMEKIWHHTFYNELRVAPEEHPVLLTEAPLNPKANREKMTQIMFETFNVPAMYVAIQAVLSLYASGRTTGIVLDSGDGVSHTVPIYEGYALPHAILRLDLAGRDLTDSLMKILTERGYSFTTSAEREIVRDIKEKLAYIALDYEQELETAKNSSSVEKSYELPDGQVITIGAERFRCPEVLFQPSMIGMEAAGIHETTYNSIMKCDVDIRKDLYGNIVLSGGSTMFPGIADRMSKEITSLAPSSMKIKVVAPPERKYSVWIGGSILASLSTFQQMWISKEEYDESGPAIVHRKCF

SEQ ID NO: 58707 - protein, 324 aa, Zea mays
  Clone ID: 700456801_FLI.pep
SLGAAGYTTATAPPRPRRCTLPFRAAASPAALDRRRRPHNVAGDFFVDHRCIDCQTCRWMAPEVFKRVDGKAAVAAQPSSEEERTKALQALLSCPTSSIHTEKPPKDILKVQNMFPLPIDDKLLPGVYLCGYNSEDSYGATSYLVIHPQGNILIDSPRYTPKLANNIEKLGGARYMFLTHIDDVADHRKWAEQLKCERIIHSGDVEEATADVEWKLEGNGPWNLGTDFELIHTPGHTPGSVCLYFKPLKVLFTGDHVAKSEESDDLNLFLMYSKQSVSLQLESIRKLLELEFEWLLPGHGYRIKYKDVRAKNVAMESLLANYTS

SEQ ID NO: 58708 - protein, 241 aa, Zea mays; identical to SEQ ID NO: 41450
  Clone ID: 700456836_FLI.pep

SEQ ID NO: 58709 - protein, 365 aa, Zea mays
  Clone ID: 700457553_FLI.pep
VIMRRWLCCSHFDTPYVENENGFMSSPDRTSGNGNGLNANSDPAKPPSIEIPALSFDELREKTDDFGSKALVGEGSYGRVYYAVLENEQHVAVKKLDTSADPEPDNEFLAQVSAVSRLKHEHFVDMLGYCIQGDQRLLAYEFATMGSLHDILHGRKGVAGAQPGPALDWMQRVKIAVDAAKGLEYLHEKVQPSIVHRDIRSSNILLFEDYKAKIADFNLSSQSPDMAARLHSTRVLGTFGYHAPEYAMTGQLTQKSDVYSFGVVLLELLTGRKPVDHTMPRGQQSLVTWATPRLGEDKVKQCVDPRLNGEYPPKGVAKLAAVAALCVQYESEFRPSMSIVVKALSPLLVNAPYQPAAAPDVSSDA

SEQ ID NO: 58710 - protein, 475 aa, Zea mays
  Clone ID: 700458467_FLI.pep
RGYTATTTINRAATGPASHCSRHTRPDTNRLVHLLDLGARATASSRSVLVHAAGASHVGTRALVHLGDDGVAKALQLLHLVIELVRLGELVGVQPADGRVDGVLDLLLVVGSQLGRDLLVLDRVAHVVGVVLQRVLGLHLLLVLLVLRLVLLRVLHHLLDLLLGQTALVVGDCDLVLLPRRLVLGRHVQDAVGVDVEADRDLGDTTRSRWDAGELELPKQVVVAGPGPLTLVHLDQHTRLVVRVGGEHLLLLGGDGGVPRDKDGHHSSGSLQTQRERSDVKQKQVLHLLVALTTEDSGLDGSTIGNGLIRIDVLAQLLAVEEVLEQLLHPGDPSGATNKDNIMDAALVHLGIPQALLNRLHALPEQVHVELLKPGTGDGGVEVNALVQRVNLNGGLGSGRQSSLGPLTRGPQPPESPRVASDILLVLSLELLDKVVNHPVVKVLTTKMGVASCGLDFKDTFLNCKEGDIEGTTSK

SEQ ID NO: 58711 - protein, 487 aa, Zea mays
  Clone ID: 700458583_FLI.pep
DHLYILLNNILRLHMHGSNCPFTLPYLLEEKPLILSMQSRVHCTENQIGISSTLLCSSHLFGAGFLPDGVVVAVGGNLKTRRDEMADVVPGPDLYDDLAVNLRHIGVAVVLKDGELARRRDAIALAHRHQGGDFVLKPPVEEVVVENARVAGVREDVGVALHDLVGGERPHGLRGAGVVVVDKGDGLGRPPADDSRRLPLRVDEPPQLAFDGGVEDALGGEVEDGGRRSRPAHPVHPVHQRLPVRVLVVLGLVVPVVRHAVPYLGDGEGRGRGVDVDLGDLGGVALGEVEAPGVEAQVGRLEPEQPVGELPLDAVVEVVDVGRRGEVGAGVEVGRAVRVYGVVAADHVGAPVQAAVGRAALEDAVDAAGVLVVGAPVVDDDVRHHLHALAVERGDQGLELRCRPVLGRVQVVQTARHVTLGGDGVRRRREPDVRDAGGGDVVDLPHQEVIPSAALLPRLPVERLEQDLAGRQSQEKEQAQAAEVPVP

SEQ ID NO: 58712 - protein, 219 aa, Zea mays
  Clone ID: 700458815_FLI.pep
GHTELCNASMEAIVASIQLGVPLDAHVERLCECSGEWEAERDAATSESHAMAEVCVSGVALGQRPDVHHFPLVVLAEHGDQVVRAQDGVVVDKRNPPRPRPSADEPHDLSGDACDPEPRRVARGVGVPEPRGVRGHPDRREGAHPGGARPRRAGRARVEPDVAAHSGGWRVHHKWTYSRRRGQRCADPATPKTMWPSERGEAAPGPGAAAPAFDSAECS

SEQ ID NO: 58713 - protein, 722 aa, Zea mays
  Clone ID: 700449031_FLI.pep
AAMAMAMETADPARAFVKDVKRIIIKVGTAVVTGMNGRLAMGRLGSLCEQVKQLNFQGYEVILVTSGAVGVGRQRLQYRKLIHSSFADLQNPQMNFDGKACAAVGQSVLMAIYDTLFSQLDVTSSQLLVTDRDFKDPSFGDQLRETVFSLLDLKVVPLFNENDAISTRRQPYEDSSGIFWDNDSLAALLAAELNADLLIMLSDVEGLYSGPPSDPQSKIIHTYVNEKHGKLISFGEKSSVGRGGMQAKVTAAANAASKGVPVVIASGFATDSIITVLKGEKIGTLFHNEANLWACSKEATAREMAVAARDCSRRLQKLSSEERKQILLDIADALEANEDAIMSENDADVEAAQVAGYEKSLVARMTLKPGKITNLARSIRKTADMEDPISHTLKRTEVAKDLVFEKAYCPLGVLLIIFESRPDALVQIASLAIRSGNGLLLKGGKEVMRSNAILHKVITGVIPDTVGKKLIGLVTSKEEIADLLALDDVIDLVIPRGSKSLVSQIKATTKIPVLGHADGICHVYIDKSADMDMAKRIVLDAKIDYPAACNAMETLLVHKDLNKSEGLDDLLVELEKEGVVIYGGPVAHDKLKVPKVDSFRHEYSSMACTVEFVDDVQSAIDHINRYGSAHTDCIITTDRSAAEAFLQQVDSAAVFHNASTRFCDGTRFGLGAEVGISTERIHARGPVGVDGLLTTRCILRGSGQVVNGDKGVVYTHKDLPLQ

SEQ ID NO: 58714 - protein, 442 aa, Zea mays
  Clone ID: 700449720_FLI.pep
DSSALLALAVALACCSVAVVAYDPLDPNGNITIKWDVISWTPDGYVAMVTMSNYQMYRHIMAPGWTLGWSWAKKEVIWSIVGAQATEQGDCSKFKGGIPHCCKRTPAVVDLLPGVPYNQQIANCCKAGVVSAYGQDPAGSVSAFQVSVGLAGTTNKTVKLPRNFTLMGPGLGYTCGPAAVVPSTVYWTPDHRRRTQALMTWTVTCTYSQQLASRYPSCCVSFSSFYNSTIVPCARCACGCGGHGGHAGPGGCIEGDSKRALSAGVNTPRKDGQALLQCTPHMCPIRVHWHVKLNYKDYWRAKIAITNYNYRMNYTQWTLVAQHPNLDNVTEVFSFQYKPLQPYGSINDTGMFYGLKFYNDFLMEAGPFGNVQSEVLMRKDARTFTFSMGWAFPRKIYFNGDECKMPPPDSYPYLPNAAPVVASQLVLSAAASAFLLLLLLVA

SEQ ID NO: 58715 - protein, 455 aa, Zea mays
  Clone ID: 700450225_FLI.pep
DETRRSPLPSTGTCFTPSHPTDSTHPPARCLRRISSDSDPPDHDHPASPPRSSSRSEKMAGLDTFLFTSESVNEGHPDKLCDQVSDAVLDACLAEDPDSKVACETCTKTNMVMVFGEITTKANVDYEKIVRETCRNIGFVSNDVGLDADHCKVLVNIEQQSPDIAQGVHGHFTKRPEEIGAGDQGHMFGYATDETPELMPLSHVLATKLGARLTEVRKNGTCPWLRPDGKTQVTVEYRNEGGAMVPIRVHTVLISTQHDETVTNDEIAADLKEHVIKPVIPEQYLDEKTIFHLNPSGRFVIGGPHGDAGLTGRKIIIDTYGGWGAHGGGAFSGKDPTKVDRSGAYVARQAAKSIVAAGLARRAIVQVSYAIGVPEPLSVFVDTYGTGAIPDKEILKIVKENFDFRPGMIIINLDLKKGGNGRYLKTAAYGHFGRDDPDFTWEVVKPLKAEKPSSA

SEQ ID NO: 58716 - protein, 396 aa, Zea mays
  Clone ID: 700450831_FLI.pep
RSGSDFTSLNVSDMSAESIRRTQYPSFTDRPSNLRVFSFAELKSATLNFSRSLMVGEGGFGCVYRGVIKTSDEPNERIEIAVKQLNRKGLQGQKEWLTEMNVLGIVDHPNLVKLIGYCADDDERGVQRLLVYEYMPNGSVDDHLSSRSTSTLSWPMRLKVALDSARGLKYLHEEMEFQVIFRDLKTSNILLDENWNAKLSDFGLARHGPAEGLTHVSTAVVGTLGYAAPEYMQTGRLTAKSDIWSYGVLLYELITGRRPIDRNRPKSEQKLLDWVKPYISDVKRFPIIVDPRLEGHYNLKSMTKLSSVANRCLVRMPKSRPKMSEVYDMVQKIVDCVGTGPPQPPLLHYHGSASEPGPGDKRARKGSVKRRRLWELRFGCRHIVWRGWKPAIVKDL

SEQ ID NO: 58717 - protein, 255 aa, Zea mays
  Clone ID: 700450925_FLI.pep
DASHANIGEAFSGVAGGTPFSVESGVRLLPLRTVVAMPAGISRAPSGSSSGGLGIIYPFLTRVRQRANTNGNDERNGQSPNESARSSTHLNQQSIPQSSQTHEAGNLRSPVDVNVGDGSETSPGQQNGLVTLSQIMDFFGSMLPGENVRGNTSSQQPPMASTEQGEGRNLATPEVSGASEEALRFAGMVRQIMPFISQVETQNQSAPPDSSSTPAQAASGSADRARDVPNDSTSSRQHNRDQIDEPNSKRQRTSD

SEQ ID NO: 58718 - protein, 326 aa, Zea mays
  Clone ID: 700451063_FLI.pep
SSCMCIVCSKFDSASNTCSWVGCDVCLHWCHTDCGLRHSLIRKGQSASRAYGTTEMQFHCSACGYPSEMFGFVKEVFRTCAQQWRIDMLVRELQYVERIFSASEDVRGKRVRDFVKQMLIKSENKAYHAEVVRCVIAFFSDDGANLGSDPSVPLKGIPCSISEAVDGIPSSSRKAWIPFTLEGLPVLDKTTLPTTSTGSPSVPRKSGEAEFQTIDNKPATDELDSLIRLKQAEAYMYQERANDARNEVDNLRHIVMVKNARIEEDYGTHIADLDINELQERRKRRIEELQVIERTHHEFLSMKTRMVASIGELLSKMEALKQNRST

SEQ ID NO: 58719 - protein, 187 aa, Zea mays
  Clone ID: 700451702_FLI.pep
KDRANEIFKKIEDLKSIRGRNQDAILAACLYIACRQEDRPRTVKEICSVANGATKKEIGRAKEFIVKQLEVEMGQSMEMGTIHAGDFLRRFCSTLGMTNQAVNAAKEAVQRSEELDIRRSPISIAAAVIYMITQLSEDKKPLKDISLATGVAEGTIRNSYKDLYPYASRLIPNTYAKEEDLKNLCTP

SEQ ID NO: 58720 - protein, 179 aa, Zea mays
  Clone ID: 700452047_FLI.pep
STSPSTAPPTAPTTTRSAASRSSTTSPPTTTPSCRPRSPPSRPSTSRRASCTPTSTPPSTTWSRTPAATGSARCSRRAAARGAASTTTRTARGAACRARPRAPARRRTSAGTASTSPRPPTSRSPTAGSTGPTAAPPSSTAKLSEGRAINFLLLPCYLYLCLRCREKSVPAAACMCCLL

SEQ ID NO: 58721 - protein, 766 aa, Zea mays
  Clone ID: 700452843_FLI.pep
KMASHIVGYPRMGPKRELKFALESFWDGKSSAEDLEKVATDLRSSIWKQMSEAGIKYIPSNTFSYYDQVLDTTAMLGAVPERYSWTGGEIGLSTYFSMARGNATVPAMEMTKWFDTNYHFIVPELGPSTKFTYASHKAVSEYKEAKALGIDTVPVLVGPVSYLLLSEPAKGVEKSFSLLSLLGSILPIYKEVVAELKAAGASWIQLDEPTLVKDLDAHELAAFSSAYAELESSFSGLNVLIETYFADIPAESYKTLTSLSGVTAYGFDLIRGAKTLDLIRSSFPSGKYLFAGVVDGRNIWADDLAASLSTLHSLEAVAGKDKLVVSTSCSLMHTAVDLVNETKLDDEIKSWLAFAAQKVVEVNALAKALAGQKDEVYFAANAAAQASRRSSPRVTNEEVQKAAAALRGSDHRRSTTVSARLDAQQKKLNLPVLPTTTIGSFPQTVELRRVRREYKAKKITEDEYISAIKEEISKVVKIQEELDIDVLVHGEPERNDMVEYFGEQLSGFAFTANGWVQSYGSRCVKPPIIYGDVSRPNPMTVFWSKMAQSMTPRPMKGMLTGPVTILNWSFVRNDQPRFETCYQIALAIKKEVEDLEAAGIQVIQIDEAALREGLPLRKSEHAFYLDWAVHSFRITNCGVQDTTQIHTHMCYSNFNDIIHSIIDMDADVITIENSRSDEKLLSVFREGVKYGAGIGPGVYDIHSPRIPSTEEIADRVEKMLAVLDTNILWVNPDCGLKTRKYTEVKPALTNMVSATKLIRTQLASAK

SEQ ID NO: 58722 - protein, 440 aa, Zea mays
  Clone ID: 700452949_FLI.pep
ACSFYLSSRLEVPSGRKPAATVGMALVLHSGAGNKNAFKALIAAEYSGVKVELTKDFEMGVSNKTPEFLKMNPLGKVPVLETPDGPVFESNAIARYVARLKDDNPLFGSSRIEQAHVEQWMDFAATEVDPGVGWYLYPRLGYIPYAHTTEETAIASLKRSLGALNTHLALNTYLVGHSVTLADIVLTCNLYHGIARILTKSFTSDFPHVERYFWTMVNQPNFKKVIGEVKQAESVPPVLKKGVPPKESKAKDVKKETPKEAPKPKVVEVPAEEEAPKPKPKNPLDLLPPSKMVLDDWKRLYSNTKTNFREVAIKGFWDMYDPEGYSLWFCDYKYNDENTVSFVTLNKVGGFLQRMDLCRKYAFGKMLVVGSEPPFKLKGLWLFRGQEVPKFVMDEVYDMELYEWTKVDISDEAQKERVNAMIEDQEPFEGEALLDAKCFK

SEQ ID NO: 58723 - protein, 128 aa, Zea mays
  Clone ID: 700452959_FLI.pep
RSSRSPTDPAAGRPPSPRRCLSFLFSIIKMSRGGSAGGGQSSLGYLFGSGEPPKPAVAPAASAPPVEKPSAAKTDAAKQVAAGVTSQTNNYHRADGQNTGNFLTDRPSTKVHAAPGGGSSLGYLFGGN

SEQ ID NO: 58724 - protein, 382 aa, Zea mays
  Clone ID: 700443450_FLI.pep
KLKTFGERERGRSRGNRATKTHTTMEREDACRVALLDAAGGEGGKKQQQLAARVWEESRKLWDIVAPAIFSRVVTYSMNVITQAFAGHLGDLELAAISIANTVVVGFNFGLMLGMASALETLCGQAFGAKKFHMMGVYMQRSWIVLFMCAVLLLPMYFFAEDVLLLTGQPPELAAMAGKVCVWFIPLHFSFAFLFPLQRFLQCQMRNSANAAAAAAALCVHLLASWLLVSRLRFGLAGIALTLNFSWWATGAMLFAYVACGGCPDTWHGFSLEAFAGMWEFVKLSSASGVMLCLENWYYRILVLLTGNLKDAAIAVDALSICMSINGWQMMIPLAFFAGTGTQTGNSCGMHLLLSMVHQMLAVTCISWRAFMIIRWLIIALL

SEQ ID NO: 58725 - protein, 496 aa, Zea mays
  Clone ID: 700443454_FLI.pep
YRLSTWGNKLASLFSPYLEITISEYGAERFRRSDFFLAAEAYLSDACSRRARKLRADLGKDSKNLQVSVDDNDEVTDDFSGATIWWYASKQLARSQVISFYPGEDERRFYRVVFHRRHRDLVVDEYLPHVLEEGRAVTVRNRQRRLFTNNPSGSWNSYRGKSVWSHVPFEHPATFDTLAMDPDDKEDILDELRAFRDAKAYYTKVGKPWKRGYLLYGPPGTGKSTMIAAMANFLDYDVYDLELTAVKNNTELRKLFIETTGKSIIVIEDIDCSVDLTGKRKDDKKRASAEADDKPKTPTDPDKDEGSKVTLSGLLNFIDGLWSACGGERIIIFTTNHKDKLDPALIRRGRMDRHIEMSYCRFRTFKVLAKNYLDVEEPHELFGQIEKLLEETDMSPADVAENLMPMSKKKKRRDANACLESLVEALKQAKEDAAAAAAAKALADARAAKEEAEEAKEKEAKEKDEATNSKGAADPAGKDTKMSNGDVTVNKEGGDE

SEQ ID NO: 58726 - protein, 288 aa, Zea mays
  Clone ID: 700443858_FLI.pep
HGQRSCVGRMDLQLHVFYRALGLSFVGGLSTAIGALFVVLNPAPNLKVLGLLQGFAAGLMLSISFLDLAHNALNSIGFLKGNLWFFAGVLFFGFIIKFIPEPDFSPPADPSEKEADDGVSGKDMMRKHRRQVLFSGIITAVGISLHNLPEGMAVFLGSVKGLHVGLNLAVAIALHNIPEGVAVALPIYFATKSKKKAFYTAAFSGLAEPLGVVAVALLFPSSLNPDILEGLLGSVGGVMAFLTLHEMLPLAFDYCGQKQAVKAVFVGMACMSASLYFLEVSLPKEISL

SEQ ID NO: 58727 - protein, 74 aa, Zea mays
  Clone ID: 700444764_FLI.pep
GGARPLPGIELAYMVGWLLVAGLEGARALGFGSLSWLARLCRMLLLAFISSLQLVAWYAVSVCVLLWFKFNHCP

SEQ ID NO: 58728 - protein, 340 aa, Zea mays
  Clone ID: 700444833_FLI.pep
ANSGFADSNPIRPVTDRAASALESTVFAALGRTRDALRFARFAVRYGKSYESAAEVHKRFRIFSESLQLVRSTNRKGLSYRLGINRFADMSWEEFRATRLGAAQNCSATLTGNHRMRAAAVALPETKDWREDGIVSPVKNQGHCGSCWTFSTTGALEAAYTQATGKPISLSEQQLVDCGFAFNNFGCNGGLPSQAFEYIKYNGGLDTEESYPYQGVNGICKFKNENVGVKVLDSVNITLGAEDELKDAVGLVRPVSVAFEVITGFRLYKSGVYTSDHCGTTPMDVNHAVLAVGYGVEDGVPYWLIKNSWGADWGDEGYFKMEMGKNMCGVATCASYPIVA

SEQ ID NO: 58729 - protein, 284 aa, Zea mays
  Clone ID: 700445103_FLI.pep
LDYDGTLVPQTSLNKEPSPQVLSIINTLCSDSRNIVFLVSGRDKDTLGKWFSSCPRLGIAAEHGYFLRWSREEEWQTCTQALDFGWMQMAKPVMNLYTEATDGSYIEAKESALVWHHQDADLGFGSSQAKEMLDHLESVLANEPVSVKSGQFIVEVKPQGISKGIVAERILASVKERGKQADFLLCIGDDRSDEDMFENIADIIGRNLVAPRTALFACTVGQKPSKAKFYLDDTFEVVTMLSALADATGPELETDSADESVAYISSLDIGDEQSESSDKPVEGS

SEQ ID NO: 58730 - protein, 127 aa, Zea mays
  Clone ID: 700446484_FLI.pep
SHESNNRAKQPMSKHHELAMQVRFHRQQQRIWKKAGAACICEGYHGELLAVADLDHIAVWVAEEELLHHRLAVSHPRRHELQLHVTQPRLHEPHVRALKGNVVALGVDRRRSCSCRSVGRRIRAALQ

SEQ ID NO: 58731 - protein, 363 aa, Zea mays; identical to SEQ ID NO: 42242
  Clone ID: 700447174_FLI.pep

SEQ ID NO: 58732 - protein, 333 aa, Zea mays; identical to SEQ ID NO: 42556
  Clone ID: 700447274_FLI.pep

SEQ ID NO: 58733 - protein, 753 aa, Zea mays
  Clone ID: 700447446_FLI.pep
RLIRRRRLSPFLSPNAQMPPRALPTTSTPASRRVVYVILAALATAPFLLLLLYSGASRSALCPTSYRAPRRLPYPSVLWSKVPPLPALSTSPHPDLRGSRWIVFTASPHAPRHRPLRAVPGWQVLAVADEATPADWSHPGAVLLTLTDQGRLGFSSVAFLPARGPARKAAAYLFAVQRGARVIYDADARNAVLGGNLTRHFDVDLDQRHGGAVLLQYSHANPNRTIVNPFVHFGQPSIWPRGLPLEKAGELDAEEFYTEIFSGGQFMQQGMCNGLPDVDSVFYFTRKSLEMEAFDFQFDADAPKVALPQGMMTPVNSVNTLFHSPAFWGLALPVSVSPMASDVIRGYWAQRILWEIGGYLVVYPPTVHRIDNVRGHPFDEEKDLHVNVGKLIKFLMEWRSSKLTLFERILDLSYAMTEEGFWSEKDLHFMTAWLQDLVAIGYRQPRLMSLEIDRPRATIGHGDKKGFGPKKLPSVHLGVEEIGEVSTDIGNLIKWRKHFGDIVLIVHCTELVDRTALEWRLLYGRIFRAVVVLSEQSNSDLAVEFSNLTQAYKYLPKVFDRFGGAQGFLFLQDRMVFNYWNLLNADKAKLWITNQVKESWSDVPLHGNNIEWFVNQGDMIKKAVSNFPSQYQDNYRRSVGENNLIRCSSEIFYVPQRYTRDFSDLVKVIGSLDIHHSFAVPMLFLAIDSPSNFESKALTKLVYRADLPSDTTLSTIYTTEAHAVYPVKVQNEMDFVKLIRAMALGDPFLMELV

SEQ ID NO: 58734 - protein, 299 aa, Zea mays
  Clone ID: 700404834_FLI.pep
HRRVTHSRRRRARVPERPRGSSAPSQRRLVRAKMLGFSTGQLLVVLGACSVMMKPSDMVKIARTAGRMTGRAVGRLIVARRQLDEILGQSAATQVHKELKDAMTQLDSIRYEVQNLSRLSPGQFMLKQHNAGMAEAGKSDSSDGPTTNQEEFRQEIRSIIRDEFEKYCRTQPIQNSVSTTEHRKLHVADEPTALKSKDMKMANSGLTNLHNQAMTYARLSEAPGLKMDSSLSGNYKDQSKEMDGLLTVLPISAESAGLLPSRPDKPTGSDLVLEAVLEAEVAENAKLFVSQPHDQLPKE

SEQ ID NO: 58735 - protein, 519 aa, Zea mays
  Clone ID: 700404871_FLI.pep
ETSPPFPSKPTGSGGFDRIESDRIGSMEISLEASWVGVQRHGQDLADRLAQGFSGLLLHAQPPQLPPWSPAALLPPKLVIPFDLDLPVVPFVAGMRRGVGTVDLPAVAVSSLVEIGGRLGQAGSELGAAVQHLARQVPVPVPFRKWEAAQPPTVVTGDVALAVGTVGSANVALERAVDIGSLEVAAAAAAAATGSATAGSVGAVGAMDDDRLDDEEDGFDCEIGTLENIKKAKGTVNVSATYNTRHHDFESSVVARGDLWRLESSRGNLTSGNDSSPLFLVQLGPLLFVRDSTLLLPVHLSKQHLLWYGYDRKNGMHSLCPAIWSKHRKWMLMSMMCLNPVACSFMDVQFPNGQMTYVAGEGITASGFIPLFGGLLQAHAKCPGDTRVSFSFKNKQGTRFSPTFQWPDNSVSFGVAQAVAWKRSGLMVRPSIQISVCPTFGGTDPGICTEFVHSLKEEVSVMCGFSCSRHPSAFTALSLGRSKWNGQVGSSGLVITLETPLDNMARPSLSVQLNGGFEF

SEQ ID NO: 58736 - protein, 418 aa, Zea mays; identical to SEQ ID NO: 41386
  Clone ID: 700438230_FLI.pep

SEQ ID NO: 58737 - protein, 342 aa, Zea mays
  Clone ID: 700438461_FLI.pep
RRSRVATSAARRPRALQRARCSATAASGEAGELSHATLLWRAAKLPIYSVALIPLTVGSASAYYHAGLFFTKRYFVLLTAAVLVITWLNLSNDVYDSDTGADRDKKESVVSITGSRAMTQNAANFSLFLGFAGLLWAFAEAKDIRFILLVISAIFCGYVYQCPPFRLSYQGLGEPLCFAAFGPLATTAFYFSNSSLNTSSGGAALLPLTKTVIASSVLVGLTTTLILFCSHFHQIDGDLAVGKMSPLVRIGTKAGSRIVSIGIVMLYILLATFGTCGSLPPSCIVLCALTLPMGKTVVDYVLKHHEDNAKIFMAKYYCVRLHALFGMALASGLVLARNGILA

SEQ ID NO: 58738 - protein, 452 aa, Zea mays; identical to SEQ ID NO: 54539
  Clone ID: 700438684_FLI.pep

SEQ ID NO: 58739 - protein, 389 aa, Zea mays
  Clone ID: 700438940_FLI.pep
EMNGGGEDGKQQPHLVLAHKLFLLSHSDVDDLAKVDLRADVFAAVKSDDMAALYESLAADGVLETDAALLAEMRARIDEEIRKLDEKIADAEENLGESEVREAHLAKSLYFIRVGEKEKALEQLKVTEGKTVAVGQKMDLVFYTLQIGLFYMDFDLISKSIDKAKNLFEEGGDWERKNRLKVYEGLYCMATRNFKKAASLFLDSISTFTTYELFTYDTFIFYTVLTSVISLDRVSLKQKVVDAPEILAVIGKVPHLSEFLNSLYNCQYKSFFIAFSGLTEPIKLERYLQPHFRYYMREVRTVVYSQFLESYKSVTMEAMAAAFGVTVDFIDQELSRFIAAGKLHCKIDKVAGVLETNRPDARNAFYQATIKQGDFLLNRIQKLSRVIDL

SEQ ID NO: 58740 - protein, 420 aa, Zea mays
  Clone ID: 700439374_FLI.pep
CQYHSASEFLCHKKITLGYLMAKPGILGRSAQRSNEGMRIIFSAVIGVMLGYLFGISFPTVNITKLHFPSSIISYIEDRNSGITTQTLLNHAWTSAATHKKNNSASNSDEIPKIYVPTNPKGAERLPPGIVVSETDLYLRRLWGEPSEDLTTKPRYLVTFTVGYSQKANIDAAVKKFSDNFTIMLFHYDGRTTEWDEFEWSKRAVHVSVTKQTKWWYAKRFLHPDIVARYDYIFIWDEDLGVEHFNAEAYIKLVRKHGLEISQPGLEPDKGLTWQMTKRRGDQEVHKVTEERPGWCSDPHLPPCAAFVEIMATVFSRDAWRCVWHMIQNDLVHGWGLDFALRKCVEPAHEKIGVVDSQWIVHQVIPSLGNQGKAENGKAPWEGVRARCRKEWGMFQTRLTDAEKAYYLEHGITPPKSTVA

SEQ ID NO: 58741 - protein, 163 aa, Zea mays
  Clone ID: 700440887_FLI.pep
RRQGWGRGRRRWQQPRRHGRPLPADDRGGPGQLAAPGQLRQVPQGGGGGRSKGAGVLRARHPRQSRRRRGAVALRGPRLGDQPRRWPRRGLLQPRRPGRTRRLLRPGLLRRVPVGRRGGRGRELRALATSFAVPGGSSASFHHSGLLDDRELDLDLTTACERS

SEQ ID NO: 58742 - protein, 430 aa, Zea mays
  Clone ID: 700441491_FLI.pep
AATAARRRLVIGVGFWVQGFRLFPWLGVNFFLKDGMGVAASSLQILQASANLPMVAKPLIGLLSDAVPIRGHRRLPYVAIGALLQAISWLAIALWQDISLQVLTIFLLLSNFGASICEVANDAIVAESGKKAASSSGSGQLQSFAWMFGSSAGALGNLLGGIALSYFSPKVMFLFFAILLLLQFFTTVAIPEGSLKLPKVATSTNLSALTSIRKQVKELSCALSMPEMFWSIIWFTASYAAIPFLLGTMFFYQTEVLRLDSSVIGLSKVFGQVALLAWSMSYNKYFKTMSARKLLSVLQFVTALVMLSDVLFVQGVYRKVGIPDSIYTIVFSGLLEGLMFFKVLPFSVHVAKLCPAGCEGSVMAFVMSALALATIVSGYLGVALAAFMGVSGDDFSALPACLLIEAACTMLPLCCSSLIKERREKEKKQE

SEQ ID NO: 58743 - protein, 222 aa, Zea mays
  Clone ID: 700441514_FLI.pep
SIVRFRVSLPYKLFLPPPPQPSPRAAVLSHLLRRCLPDHPMASEKKQSNPMREMKVQKLVLNISVGESGDRLTRAAKVLEQLSGQSPVFSKARYTVRSFGIRRNEKIACYVTVRGEKAMQLLESGLKVKEYELLRRNFSDTGCFGFGIQEHIDLGIKYDPSTGIYGMDFYVVLERAGYRVARRRRCKSRVGIQHRVTKEDAMKWFQVKYEGVILNKAQANTS

SEQ ID NO: 58744 - protein, 526 aa, Zea mays
  Clone ID: 700441960_FLI.pep
EAEQGMDSKSVGIVGAGVSGLAACKHALDKGFRPVVFEADGSVGGVWAHTLESTRLQAPTTAFRFSDLAWPPESAREAYPGHRRVMEYIRSYARAFDLLKHIRFHSQVLGVEYLGATEEEVMGWDQWSGDGTAFGAVKGGGWRLTVQDLKVGSTEVFVVDFLILCIGRHSGTPNIPEFPANGPELFKGKILHSLDYSYMDDGDAAEFVRGKRVTVIGSGKSAFDIAAEVAKVNGAAQPCTIVYRTRHWLVHKSSVWGVDLSYFYLNRISQLLVHKPGEGFLRCMLAAALSPLRWAISKAIETYYKWSVPLRKHGMVPDYSFSFAMSSCLIAMLPEGFYDRVDEGSIVLRKSKAVGFSSDGVVLRDRNESVRSDIVILATGFRGDQKLRDIFTANWCREIVAGSPDTAAPLYRECIHPRIPQLAIVGYSESLTNIYASERMSNWVAQFLAGGFQLPSVRCMEESVAEWAEYKNRYNGRYFRRSCVSTANIWLNDLLCRDMGCNPRRKKGFLAEWFQPYGPADYAGLC

SEQ ID NO: 58745 - protein, 319 aa, Zea mays
  Clone ID: 700442675_FLI.pep
TMASSAFLNALVLRSPSPSLSSSSNRRSTGAFAFPNPPRFPCLRSARRLVLARAAAAPAPGDGPEDEWGPEPEGGSAVTGAAVAEAPEAREVAELKAQLKDALYGTERGLRASSESRAKVLELITQLETRNPTPAPTEALTLLNGKWILAYTSFSQLFPLLGFGNLPQLVKVEEISQTIDSENFTVQNCIKFSGPLATTSVATNAKFEIRSPKRVQIKFDEGIVGTPQLTDSIVLPEKFELFGQNIDLSPLKGIFSSIENAASSVAKTISEQPPLKIPIRTNNAESWLLTTYLDEELRISRGDGSSIFVLFKEGSTLLY

SEQ ID NO: 58746 - protein, 125 aa, Zea mays
  Clone ID: 700443278_FLI.pep
CTCCSGDPSEAARGHRTAGVARFALPAIRPARTVLYCTYTPIYYDVHMYESTTCCCTILILVRCCSLAFLLASCTSHSAFFCSNDRLLVASGHGRSSVWVCPLHCKAPPLVFLGTPCMPKLADVY

SEQ ID NO: 58747 - protein, 259 aa, Zea mays; identical to SEQ ID NO: 53293
  Clone ID: 700321690_FLI.pep

SEQ ID NO: 58748 - protein, 583 aa, Zea mays
  Clone ID: 700464621_FLI.pep
SLFLRSCEILRPSRESGGGDYPPHHQPPGIRANHRSSLAAGEHSRARAPPAAAAEPSSLPAPAMGNSLGCSASGERLVSAARDGDAIEARMLLELSPALARYSTFGGLNTPLHFAAAKGHLDIVTMLLEKGADVNARNYCGQTALMHACRHGHWEVVQMLLLFRCNVTRADYLSGRTALHFAAHDGFVRCIRLLVADFVPSVALEDIASSVVDGGDCQTNSGSSPNSSSGQKFNESARVRYINKPADGGVTALHMAALNGHLDCMQLLIDLGANVSAVSFPYGTTANLIGAGSTPLHYAAGGGKQECCELLISKGASRLTLNCNGWLPVDVARIFGRRSLEPLLSPNSHSNVPVFQPSSYLALPLMSILNIAREFGLQHTTPSIDDNDLCSVCLERSCSVAAEGCSHEFCIKCALYLCSTSNIRVEFTGPPGSIPCPLCRNGIMSFTKLPSTPTEGLKSGSALTFCNPCILNTRSMDSPATFSKAEIRRNRVAAVSSELVCPITCSPFPSSALPTCRCSDDDPCGDTDVQDGPEFQSPRPSHSASMELDKRGEGDLDRASCSGMFWSRRSCHREQQCDAEINA

SEQ ID NO: 58749 - protein, 433 aa, Zea mays
  Clone ID: 700464738_FLI.pep
ISLALQALQIRYGIPNKSNLYRQFLTSKVTQVNYLGFRLYRALPFLYELRCVLDWSCTTTSLTMYDWLKLEDIYASLFLVKCDTLLNRANHRQGEKQTKTTKFCSGICLFFVLICVIWAPMLIYSSGNPTNIANPIVDVSVKIDIKALGGRLNLFKTTACEKIPWKYLKAYDDVDPLDYLGAYNVDDIQLICCQPDASTMWLIPPPVQNRFIQSLEEREMLFGKMELILNWDFLRARPKGKELVRYESPIEHCPSVDDVKRVLNGTANSFSIIDAYPRYFRVTGSGEVRRLEAAIDSVSGELLLNNGTPWWSFYDTNPSDLAGCQGLNGPMAIVVSEETPQGIIGETLSKFSIWSLYITFVLAVARFIRLQCSDLRMRIPYENLPSCDRLLDICEGIYAARAEGELEVEEVLYWTLVNIYRSPHMLLEYTKPD

SEQ ID NO: 58750 - protein, 350 aa, Zea mays
  Clone ID: 700208885_FLI.pep
HELISAPLQPRPVEAMGSGDWFKTIISKKKSKRGKSKHAKLSGQVTNGGNQTNQKLDGPSSSSEDHEDNAALEEWAATRIQNAFRKYKARKTLRCLKGVKRLRVVGQANPVKKQTAATLSYIQSWNKLQSEIRNRRAFMVTEGRNRKKKQENQMKLEAKLHNLQIEWNGGSDTMDEILARIQQREEAAVKRERAMAYAFNHQWRARSATSLGNFSYEVGKGGWGWSWMDRWIAARPWEPRSMVHPENPKKAQAKKENTTNPSALKLQGSITLSNNINDRKTLKKKPLPSASPADQKKPSPSPSSDQKKPVPKEQRAKAAGTPPKPKAKDMKGSQEKKPQPQQKVPPPVSA

SEQ ID NO: 58751 - protein, 368 aa, Zea mays
  Clone ID: 700209150_FLI.pep
EREGFRVTHLGGGRPRAHVPLREGGGVPADPRRRLPRHQAHAPVPQAAAARRGAHLRGREPHPLRLQGDPPPHLPQVREAGQPVPDWHGRAGAGVHRAVAADGGAELRRAQRRDGLQPRLPAAHPAQAERQRQRRRVQRQGRHRRQQRRRVQRQARCGRVTAGGEPDQGERAEGGGDAEAVRAEEEGPGEAAGHLRAAPGGGHVPGRRQLHHRRPVAPALRGPPRLRPALPPHVRVPQERQQVVARRLRPRHLEVRQDPAAPAVHVHRRQRQERPAGPAAAPAVVHRRPRREDPTAGPERAALLAVAVPSRRRINYLRRRHRRHPSTWFLVLFVSFSYVIRVLLLLKLRSRVQGPTSPFRRLLILFVV

SEQ ID NO: 58752 - protein, 286 aa, Zea mays
  Clone ID: 700209678_FLI.pep
RINFHSGGKMSGPPKRLHEENSHSTPAKRPLDDNSLYSSPSGKAIQSSSSDFHGSFEHDGRFAKIQRVEARDDKRPPLFHRMHGSSNFVDHTVLSDSRLEPKHNKDTRDNKADDRDTKADALDVYSDPSIEFQFNKIDSDVKIDNRADGNEIRADRRGHHDYKGDTKFDKDNHPIVASSLGWKDNKEHRGKRYFEQPSDNADWRFPRPGLQGTDETLKGLTSMEDRNSRDAHDSAVDNKAESKGEDKFRDKDRKKKDEKHRDFGSREGERNDRRTGIQLGGSGVER

SEQ ID NO: 58753 - protein, 271 aa, Zea mays
  Clone ID: 700210555_FLI.pep
PRGEDGPARGRRGRRGRGGGGAGGHGRRHVGGRRAREDSAGRRARQGIPRSGGRPGTVGAGDDGGEARRPREPRVPAQQARRRPRARPVRPHGAAPGRDQGTRRRDRAARRAGMHGRRVRGRGRAQAAPPRRRGRPRGGRGAAARHGRRRQRPDQARRHAAPDGGGHGVRGHRSAPVRERCGGGRRVGVVRRVVVFIVHIVRLICCRLSVGRDCWTDTKACLFPLLLLLCVSREMPTAAVAGFKVRRSEPVRNCTVLYSGLFCFVGRVAHC

SEQ ID NO: 58754 - protein, 269 aa, Zea mays
  Clone ID: 700210770_FLI.pep
PSTLHPPAAPRAPPSRAASGSGEMSRFGRSGPPPPIRDTYSLLVLNITFRTTADDLFPLFDKYGEIVDIYIPRDRRTGDSRGFAFVRYKYEDEAQKAVERLDGRLVDGREIMVQFAKYGPNAERINKGRIVEPVPRPGGRSRSHSPRRRYRDDYRDDHDRDYRRRSRSRSRDRYTRDRYRDRDYRHRSPSRSYSPDDYKKRGRDSLSPERRSPRRSRSPDDYKRRGRDSASPASKSPSRSPPRKMSPSPERSPVRRNNDRSPRSRSPST

SEQ ID NO: 58755 - protein, 967 aa, Zea mays
  Clone ID: 700210863_FLI.pep
GERRSVRGASPMAEKEGNLEAVLKEAVDLENIPLEEVFENLRCSREGLSTEQAQQRLEIFGPNKLEEKEESKFLKFLGFMWNPLSWVMEAAAIMAIALANGGGKPPDWQDFVGIITLLVINSTISFIEENNAGNAAAALMARLAPKAKVLRDGRWTEEDAAILVPGDIVSIKLGDIIPADARLLEGDPLKIDQSALTGESLPVTKGPGDGVYSGSTVKQGEIEAVVIATGVHTFFGKAAHLVDSTNQVGHFQKVLTAIGNFCICSIAVGMFVEIIVMYPIQHRAYRPGIDNLLVLLIGGIPIAMPTVLSVTMAIGSHRLSQQGAITKRMTAIEEMAGMDVLCSDKTGTLTLNKLTVDKNLVEVFERGTTQDQVILMAARASRTENQDAIDTAIVGMLADPKEARAGIQEVHFLPFNPTDKRTALTYIDGDGKMYRVSKGAPEQILHLAHNKSDIERRVHAMIDKFAERGLRSLAVAYQEVPEGRKESPGGPWHFVGLMPLFDPPRHDSAETIRRALNLGVNVKMITGDQLAIGKETGRRLGMGTNMYPSSALLGQNKDESIAALPVDDLIEKADGFAGVFPEHKYEIVKRLQARKHICGMTGDGVNDAPALKKADIGIAVADATDAARSASDIVLTEPGLSVIISAVLTSRAIFQRMKNYTIYAVSITIRIVLGFMLLALIWKFDFPPFMVLIIAILNDGTIMTISKDRVKPSPLPDSWKLAEIFTTGVVLGGYQAMMTVIFFWAAYKTNFFPKIFHVESLEKTAQDDFQKLASAVYLQVSTISQALIFVTRSRSWSFVERPGFLLVFAFLVAQLIATLIAVYADWAFTSIKGIGWGWAGIVWLYNIIFYFPLDIIKFLIRYALSGKAWDLVIEQRIAFTRKKDFGREERELKWAHAQRTLHGLQAPDAKMFPEKAGYNELNQMAEEAKRRAEIARLRELHTLKGHVESVVKLKGLDIETIQQSYTV

SEQ ID NO: 58756 - protein, 156 aa, Zea mays
  Clone ID: 700211611_FLI.pep
LPRAAEIREAEGGMTIRFVLFVNKQGQTRLAQYYEHLSLDERRALEGEIVRKCLARTDQQCSFVEHRNYKVVYRRYASLFFLVGVDSDENELAILEFIHLLVETMDRHFGNVCELDIMFHLEKVHFMLEEMVMNGCIVETSKQNILAPIQLMEKTS

SEQ ID NO: 58757 - protein, 447 aa, Zea mays
  Clone ID: 700213309_FLI.pep
LAAMPSFPPPGAVTICEINRDLVAADALSDDRAKDAYGDVLGMVFAPIPFQPEALLLASREPAAPAADQVEPADTVPTAGLAATISDFFRRMVFPPLDPNLLEEFDMQKVSWNPYKHCLAFVSGKNQVTVQDFEDSDAKEPCILTNDHQTDVKAVEWRPNSGKMIAVACKGGICLWSASYPGNVPFMKSGVTSSFSAFPRGSGGQWILVDVLRGSSAELISALCWKPDGRYLASASCNSSSFTIWDVSQGLGTPIRRGLSNISLVRWSPSGDYLLVAKFDGTFHFWETNTWTSEPWSSSNGYVSGANWDPEGRVALLSFSNSTTLGSIHFSSKPPSLDAHLLPVELPEISSLIVSRGIEKLAWDASGERLALSFRDGNEMYRGLIAIYDVRRSPLVSLSLVGFIRGPGEGAKPLAFAFHSKFKQGPLLSVCWSSGWCCTYPLILRPR

SEQ ID NO: 58758 - protein, 242 aa, Zea mays; identical to SEQ ID NO: 46973
  Clone ID: 700214122_FLI.pep

SEQ ID NO: 58759 - protein, 185 aa, Zea mays
  Clone ID: 700214339_FLI.pep
QLNSFIVVLQPPAKSLCASGDRGVSDELEALQLLEVLPRLLPHLGLVQLLFAAAGLLHLDGEVVQGPGHDLVPHLHQPLEFQHRVGLAVVLGDREARELDGLEVVLAAHRRVPDAAHHPHGPLVVYLSHRSLLWSGDGERRCAGRGEKERSVSHLHLLAVEVGLPEQRYYVQCCKLGTTLSVPDY

SEQ ID NO: 58760 - protein, 338 aa, Zea mays
  Clone ID: 700214441_FLI.pep
VAISFISLLAMSAVLATCFFVRRHRIRRDHPRIPEAREFHGMSSQLVKAMPSLIFTKVQEDNCTSSMCAICLEDYSVGEKLRVLPCRHKFHAACVDLWLTSWRTFCPVCKRDATSGVSELPATEATPLLSSAVRLPSQPSSFRSSVAASPPRPISRHPSSHSVSRAYSVSSTPHSPNPFRSHTNLPGVIHASRSTTDLANMSSPHPRISHLSSSTHSLVGSHLSPPISIRYPLPHSRHESPSPHVSSPYISNSGYGSSSYYYLGGSSQHGSYLRRCGESGPSLSTMVPRSSQQQFQSEANVAAGASSAQSSRQSYLRRCGDSDASLSDMASAQSLPGC

SEQ ID NO: 58761 - protein, 168 aa, Zea mays
  Clone ID: 700214445_FLI.pep
TASTCITLITTPVHHRHTHLLLVLITGTSMTLPGLSLPAAALVSAVWAGSVASRGRGAVQATGGGFSTSSSGRNHTFWSSTVPPAAAAFAAAASAATPSWLVSTAAGPNTPVLGWGLQYLSGLPAPPITSSGTNAGRTCSSGFLSYDEACTALLRYGTKHAMQCNEGR

SEQ ID NO: 58762 - protein, 120 aa, Zea mays; identical to SEQ ID NO: 57259
  Clone ID: 700215981_FLI.pep

SEQ ID NO: 58763 - protein, 149 aa, Zea mays
  Clone ID: 700216043_FLI.pep
HFTCNQFSFLSLNNMDTTLQSAFESSQPSATSKDLTFNNYLFLAGEHVLQGVLDLMYGPSRRAPGHVDPVFTHQLCALVLVDVEAAELLVLPSPGDGEGARCKLAERSANHGCRDLGGDAPPIQKLCLEQGRAEFFSGSIKERASSARA

SEQ ID NO: 58764 - protein, 238 aa, Zea mays
  Clone ID: 700216126_FLI.pep
AARTDKEQAEEELCQGTMGISRDSMHKRRATGGKQKAWRKKRKYELGRQPANTKLSSNKTVRRVRVRGGNVKWRALRLDTGNYSWGSEAVTRKTRILDVVYNASNNELVRTQTLVKSAIVQVDAAPFKQWYLTHYGVDIGRKKKTPAAKKDNAEGQEVEAAAEETKKSNHVTRKLEKRKEGRTLDPHIEEQFGSGRLLACISSRPGQCGRADGYILEGKELEFYMKKLQRKKGKSAVA

SEQ ID NO: 58765 - protein, 188 aa, Zea mays
  Clone ID: 700216820_FLI.pep
AISSSPISILPSSAPSPACARHAGDLGGARARPLSDGVSRFPSCLSPVPSPLVLCEPAGDSAKLFQHRYPSMAARRNVRYSPLPSEDGDDSNFIKEDVDLRYTYTPKSYRRIPWKSIALALFLLLLGTSLLFLSYFIFTGHMEGDSSQAYGLLFLGFLSFLPGFYETRVAYYSWRGAPGYTFASIPDY

SEQ ID NO: 58766 - protein, 382 aa, Zea mays
  Clone ID: 700216965_FLI.pep
LRTWEVGTMALIMQESSSHDLLQAHDELLHHSLCFAKSLALAVALDLRIPDAIHHGAGGATLLQILAETALHPSKLRALRRLMRVLTVTGIFSVEQPPAGGGDNSTVHTSDDEAVVVYRLTAASRFLVSDEVSTATLAPFVSLALQPIAACPHALGISAWFRQEQHEPSPYGLAFRQTPTIWEHADDVNALLNKGMAADSRFLMPIVLRECGETFRGIDSLVDVGGGHGGAAAAIAAAFPHLKCSVLDLPHVVAGAPSDGNVHFVAGNMFESIPPATAVFLKKTLHDWGDDECVKILKNCKQAISPRDAGGKVIILDVVVGYKQSNIKHQETQVMFDLYMMAVNGVERDEQEWKKIFIEAGFKDYKILPVIGDVSVIIEVYP

SEQ ID NO: 58767 - protein, 147 aa, Zea mays
  Clone ID: 700162863_FLI.pep
DAIQHPEKRHILCQRSGSKSEAGCCWINPIASYYIITIECTHLDKKKDKINRGLIFHPQAIRTTPGWSALLVFLDELGVLEVLLGEVGRHLGDDEAGDGEPREEGPVALPLPAEEDRPRVERLHPLGLRLRLLAISFLPPPASLLVR

SEQ ID NO: 58768 - protein, 233 aa, Zea mays
  Clone ID: 700163741_FLI.pep
LVSNDLIAVSTWLIQTPLICVCQQIFHTPADREKIKSCLSELGEISASFKKILHSALEHLVASVAPRIRPILDTVATVSYGLDDAEYGENEVNDPWVQKLILAVNTNVAWLQPVMTSNNYDSFVHLIIDFIVKRLEVIMMQKRFSQLGGLQLDKEVRSLINHFSEMSQRPVRDKFSRLSQMSTILNFERVSEILDFWGDNAGHLTWLLTPAEVRRVLGLRTDFRPEAIAALRL

SEQ ID NO: 58769 - protein, 379 aa, Zea mays
  Clone ID: 700163882_FLI.pep
IQYRLTLAAHPPAMKASIKFRDDDRPLLRAKVPIGVLGLPFLSGLAAGGDAKDLRFDLSTAFSSGPALRLSYRPNEPLQPFALSVRTGLGPLGSPARAPFALAAEFNLTSSNPPAFSLLFKPRIGDFAVASSVRSPPTPPPTSTPPPLAIKMVDLTTNGDDHDCEAHGNGFSFNGNVLGANVAAVTGTDGGGGGVGALLSGMRLTTRSMLPLWSKASLRFQWGLRVPPEIKATLADNGYGRKAGSLAISKLPLLVMNKITIEHTPKVPSQSETDKKRKKDTPPAAKDEELSFMKRQLDKLNVENTMLRRAVEDLRAEIGAGKGDDRKLPTAVPPQQHSLVSKPDRHFHINAKELVDSGTKPASNEASEELKKVLEGRRK

SEQ ID NO: 58770 - protein, 372 aa, Zea mays
  Clone ID: 700164210_FLI.pep
GKTITLEVESSDTIDNVKAKIQDKEGIPPDQQRLIFAGKQLDDGRTLADYNIQKESTLHLVLRLRGGMQIFVKTLTGKTITLEVESSDTIDNVKAKIQDKEGIPPDQQRLIFAGKQLEDGRTLADYNIQKESTLHLVLRLRGGMQIFVKTLTGKTITLEVESSDTIDNVKAKIQDKEGIPPDQQRLIFAGKQLEDGRTLADYNIQKESTLHLVLRLRGGMQIFVKTLTGKTITLEVESSDTIDNVKAKIQDKEGIPPDQQRLIFAGKQLEDGRTLADYNIQKESTLHLVLRLRGGMQIFVKTLTGKTITLEVESSDTIDNVKAKIQDKEGIPPDQQRLIFAGKQLEDGRTLADYNIQKESTLHLVLRLRGGQ

SEQ ID NO: 58771 - protein, 411 aa, Zea mays
  Clone ID: 700165274_FLI.pep
SRPRKEAMDMAIDTPSPAPPTPPAPSAAAGRQTRAAEAVRLEHQLVRVPLESLRATVRSNHRLAEKEIAAVLSSASAAPAESSAAAVDHLTSLVSRLHGLKRKMEEGARAEELQVQRCRARLDRLATASTGDDAEWEDMRLKRILVDYMLRMSYYNSATKLAETSGIQDLVDIDVFLDAKRVIDSLQNNEVSPALAWCAENKSRLKKSKSKLEFLLRLQEFVEFVKVKNFIQAIAYARKHLAPWGSVHMKELQRVTATLVFRSNTNCTPYKILFEQDRWDYLVDIFKQDFCKLYGMTLEPLLNIYLQAGLTALKTPFCSEGSCPKEDPLSLEGFRKLAEPLPFSKQHHSKLVCYITKELMDTENPPQVLPNGYVYSEKALQEMSKKNDGKITCPRTGDVYDVSECVRAFIS

SEQ ID NO: 58772 - protein, 306 aa, Zea mays
  Clone ID: 700165595_FLI.pep
HSISNGSPVSKADVSEQSITPQTPTHPSVAEEKLDSSTEAPASKVGDAEASETSQSAGHPSTVEENQHHQVSKHSDPSDEAEPNQLRESVRDLPDGSASSSPTKIHQSGDTETGESIHTGKEDTSDRNILQSQPAESALASSDDITEAEDNIAQEYDAPKELSGPQESSDMVDKGTHLEVKLHDSNINTEKSEEESNKMESGESSVVVQEDNAMEQPQDLTLKSLTAEHDSNSQNESVINSTDIPVGLGEGPPNDFTKEEKILESVRGTDSQTLDSVVSVDELEKLRRELKMMEAALQGAARQSQV

SEQ ID NO: 58773 - protein, 229 aa, Zea mays
  Clone ID: 700166651_FLI.pep
ESSATRRRRDRPTRSYRSRMSYAYLFKYIIIGDTGVGKSCLLLQFTDKRFQPVHDLTIGVEFGARMITIENKPIKLQIWDTAGQESFRSITRSYYRGAAGALLVYDITRRETFNHLASWLEDARQHANANMTVMLIGNKCDLSHRRAVSYEEGEQFAKEHGLVFMEASAKTAQNVEEAFIKTAGTIYKKIQDGIFDVSNESNGIKVGYAVPNSSGGGAGSSSQAGGCCS

SEQ ID NO: 58774 - protein, 120 aa, Zea mays
  Clone ID: 700166814_FLI.pep
ISKYILSDVHIWEVSILSSVPVYINPCSYCSNCLHLVSVETVEESLAGTDTEENGGGGCLKLFTNWPLMSAITLYCIFSLQDVAYAETFSLWAVSDRSFGGLSFTTTDVGNVLAMSGMSK

SEQ ID NO: 58775 - protein, 230 aa, Zea mays
  Clone ID: 700167340_FLI.pep
IPAASSRTPDCSPRQAQIWDHKQTAPERPKSGSDGNSPIRFHPMGWRWHDDDGDSGRGLGGVPDLAGGGGDGAQCATRRVVQSRCHTEEVEPGRFVRKCEKTEQLLRDCVGRPSELVESKTENTEEDVTEEMKSGSLSLGFPRNEPFAFPGLRSDMEALEKDFFGSLGNVLDEAERMANSFVRSFGFPPAHDSGSSPFRRQPAERHIEEDTAKNKTESDYSEFRSKISDV

SEQ ID NO: 58776 - protein, 103 aa, Zea mays
  Clone ID: 700167763_FLI.pep
TERGLSAAEQSAARVDGDAAPPGRRAEEHEDEGDDGGDQQPKEVDPGLLLRLLAAAHLAHRATTYLSSRAPLPADTTDEERRGRWMAGWLETVSVCASLTRNF

SEQ ID NO: 58777 - protein, 163 aa, Zea mays
  Clone ID: 700168203_FLI.pep
LIWPSPSTSASRIISSTSSSVSFSPRFVMTWRSSAAEMKPFWSLSNTRKASLSSSSESVSFILRAIRFRNSGKSMVPLPSASTSLIMSWSSASVGFCPSERMTVPSSLVVMQPSPSLSKRLKASLNSAIWSSVSWSAMGVVVGRDQIDRSWKRQGGSRTRKNG

SEQ ID NO: 58778 - protein, 395 aa, Zea mays
  Clone ID: 700168591_FLI.pep
GFGWSLRRRRAPTSSSVEMADGEDIQPLVCDNGTGMVKAGFAGDDAPRAVFPSIVGRPRHTGVMVGMGQKDAYVGDEAQSKRGILTLKYPIEHGIVSNWDDMEKIWHHTFYNELRVAPEEHPVLLTEAPLNPKANREKMTQIMFETFNVPAMYVAIQAVLSLYASGRTTGIVLDSGDGVSHTVPIYEGYALPHAILRLDLAGRDLTDSLMKILTERGYSFTTSAEREIVRDIKEKLAYIALDYEQELETAKNSSSVEKSYELPDGQVITIGAERFRCPEVLFQPSMIGMEAAGIHETTYNSIMKCDVDIRKDLYGNIVLSGGSTMFPGIADRMSKEITSLAPSSMKIKVVAPPERKYSVWIGGSILASLSTFQQMWISKEEYDESGPAIVHRKCF

SEQ ID NO: 58779 - protein, 120 aa, Zea mays
  Clone ID: 700169956_FLI.pep
PEQVERCTIPFAAAKMVNVPKTKKTYCKNKECKKHTLHKVTQYKKGKDSLSAQGKRRYDRKQSGYGGQTKPVFHKKAKTTKKIVLKLQCQSCKHYSQHAIKRCKHFEIGGDKKGKGTSLF

SEQ ID NO: 58780 - protein, 162 aa, Zea mays
  Clone ID: 700170810_FLI.pep
NTADDMLSAASHSSDLGLDSILPHGEVLLTLLFPLGLQRELVLGQTAADGTGLLRAEVEGEQVLLLVRLPQRRLLLLRDHCEHARDRGAHHLDLGELVGCAAGDLGYAEEGELRLQLLELRLQVRLALPPELVHLDTGHSDGDNCCGGAASAVAGWTGLRSG

SEQ ID NO: 58781 - protein, 166 aa, Zea mays; identical to SEQ ID NO: 45035
  Clone ID: 700171064_FLI.pep

SEQ ID NO: 58782 - protein, 175 aa, Zea mays
  Clone ID: 700171065_FLI.pep
ADPLIGNKAKNTHNDLKNRDGAGSRSTVRLLEPGAGTTSAELLRLAAPGVSDEEGAIVAGKDVLDLLLGGLVDVLLVVGDEPLGDGLADGVDLRRLPAAADADPHVDVLEPGPPRQQDGLEGLEAEHLRSDQLNRDAVHLDQAAPRLRVRDATAVFFRPKHWAVPGVGRLSTVMV

SEQ ID NO: 58783 - protein, 284 aa, Zea mays
  Clone ID: 700171203_FLI.pep
YNMAPAISKPLLTDLVAQIGKVPSSHIRPVGDRPDLANVDNESGAGIPLIDLKKLNGPERRKVVEAIGKACESDGFFMVTNHGIPAAVVEGMLRVAREFFHLPESERLKCYSDDPNKAIRLSTSFNVRTEKVSNWRDFLRLHCYPLQSFVDQWPSNPPSFRQVVGTYATEARALALRLLEAISESLGLERSHMVAAMGRHAQHMAVNYYPPCPQPELTYGLPGHKDPNAITLLLQDGVSGLQVQRGSRWVAVNPVPNALVINIGDQMQVTRMHFQSQLRFLLSS

SEQ ID NO: 58784 - protein, 148 aa, Zea mays
  Clone ID: 700172327_FLI.pep
SPFFTYYYFRLMVNLPDASNREKILKVILAKEELGSDVDLDSLANMTDGYSGSDLKNLCVTAAHYPIREILEKEKKEKSLAKTEGRPEPALYGSEHIRPLSIDDFKSAHEQVCASVSSDSANMNELLQWNDLYGEGGSRKRKALSYFM

SEQ ID NO: 58785 - protein, 337 aa, Zea mays
  Clone ID: 700172434_FLI.pep
PAGEEPFGIWTRPREMKLAGLKSVDGAHEESIWAAAWAPAADHRPTAVLLTGALDETVRAWLPDDLAALGSPTRGHALGVVSLAAHPAGSLAAAVSLDSFIRVFDVDTGASVATLEAPPSEIWGVQFHPKGNALAAAGGGSGSVKLWDTEKWKAITSLAVPRPEGARPDKTGSGKFVLSVAWSPDGRLLACGSMDGTIAVYDAVRMKFLHHLEGHHMPVRSMVFSPVDPHVLFTACDDCHVHIYDAREKGLVGAMSGHASWVLSIDASPDGLAVATGSSDRTVRLWDLNMRTSVQTMSNHSDQVWAVAFRPPGGAGVRAGRLASASDDKSVSLYDYS

SEQ ID NO: 58786 - protein, 382 aa, Zea mays
  Clone ID: 700172593_FLI.pep
KIKARRRHMALSKEQKLTIPDQQHTTSSEQQVALDAELQLWNHTFGYVKSMALKAALDLGIPDAIHQHGGSATIPQIVTRITLHPSKTPCLRRLMRVLTLTGVFGTQEPHDDGGGCDDELVYTLTPASRLLVGPSGQNVSPLLNVMLCPILVSSFLDLRGWFQHEMPDPSPFKVTHGRDIWELAAHDAGFRRLFDAGMVADSGFIMNVVVRECGAVFQGISSLVDVGGGFGGATQAIAKAFPHLECSVLDLPNVVAGAPADTAVKYVAGDMFESVSSADAVFLKWIIHDWGDADCVKILKNCKKAIPAQGGKVIILDIVVGAGSSCDRKNVETQCLFDLYIMTINGVQRDEREWKKIIFEAGFTSYKIIPVLGTRSIIEVCP

SEQ ID NO: 58787 - protein, 154 aa, Zea mays
  Clone ID: 700172735_FLI.pep
ILAFQQSIYKTLLLTEWSGNWYHPPPQPSACSLRFSSRVSRMKVIAAYLLAVLGGNTSPTADDVKSILESVGAEADEEKLEFLLTELKDKDITEVIAAGRERLSSVPSGGGAIDMGAPAAVAGGGAAPAEEAKKEEKVEEKEESDEDMGFSLFD

SEQ ID NO: 58788 - protein, 78 aa, Zea mays
  Clone ID: 700172763_FLI.pep
PSIIKSQFIGSYIMYLQSIHWLLHHVPTYIHPERKKHESLKYTLHPDINKIIIKSGTPRTALHVITQNHLVRTLLTNN

SEQ ID NO: 58789 - protein, 96 aa, Zea mays; identical to SEQ ID NO: 41063
  Clone ID: 700142480_FLI.pep

SEQ ID NO: 58790 - protein, 183 aa, Zea mays
  Clone ID: 700142574_FLI.pep
SIISHGNQRASAASSSPVANQQDKTTGVDVLAGWIGIRIRIRIRTKKACRRHVTHHCQMPNHPPIIATNLLFFLSSRCCLVLVPMQHALPAPALVLVAVGVGGRRQLRVEAVVQVLLLLPLPGVGALAVVVVRERGSPEDGERERLRVHPGVDEAHARRPRRRPPPAVRHRRAHRRRPHGSDG

SEQ ID NO: 58791 - protein, 454 aa, Zea mays
  Clone ID: 700156515_FLI.pep
SHSQCREGKRNRSRNRERERAMGNRHLCCLCLLLLLGLASGQVLFQAFNWESWKQSGGWYNLLMGKVDDIASAGVTHVWLPPPSHSVSTQGYMPGRLYDLDASKYGTAAELKSLIAAFHGKGVQVVADIVINHRCADYKDARGIYCIFEGGTPDGRLDWGPHMICRDDTIYSDGTANLDTGADFAAAPDIDHLNDRVQRELTDWLLWLKSSDLGFDAWRLDFAKGYSPEVAKVYVDATAPTFAVAEVWNSMAYDGDNKPEYDQDPHRQALVDWVDRVGGAASPATVFDFTTKGILNAAVEGELWRLIDPQGKAPGVIGWWPAKAVTFVDNHDTGSTQAMWPFPSDKVMQGYAYILTHPGNPCIFYDHFFDWGFKDEIAALVAVRKRNGITPTSELTILEHDGDSYVAEIDGKVIVKIGSRYDVGHLIPAGFEVAAHGNDYAVWEKAGAEQVTRA

SEQ ID NO: 58792 - protein, 253 aa, Zea mays
  Clone ID: 700156629_FLI.pep
PLIVITNHCQRPLLGGVTVIAPQLPRYHSQILRRPLYTGDRRRTMGWATRFLAAVCFFAAGVLFVPEAIGSPSGAGAVTAAKLAHVLSFATSWGAALWATFIGGIIMFKNLPRHMFGNLQSKMFPAYFTLISACAAISVAAFAYLHPWKTASTVQRYQLGFLLSALGCNLSNLLVFTPMTIEMMKKRHKIERDLSIGEEVGWSKNQQVAKSNPTLAAMNKKFGMIHGLSSLANIMSFGSLAMHSWYLASKLEL

SEQ ID NO: 58793 - protein, 193 aa, Zea mays
  Clone ID: 700156660_FLI.pep
ANRIRRQGEREEMGLTFTKLFSRLFAKKEMRILMVGLDAAGKTTILYKLKLGEIVTTIPTIGFNVETVEYKNISFTVWDVGGQDKIRPLWRHYFQNTQGLIFVVDSNDRDRVVEARDELHRMLNEDELRDAVLLVFANKQDLPNAMNAAEITDKLGLHSLRQRHWYIQSTCATTGEGLYEGLDWLSSNIATKS

SEQ ID NO: 58794 - protein, 266 aa, Zea mays
  Clone ID: 700156788_FLI.pep
LFLPHETRANSGEPVRCGGGGRGRRRREKEHQEEAAEMDPDSVKSTLSNLAFGNVIAAAARDLQKEMVAKDKAQAAPASHDEVDLDELLDDPELEKLHAERIAALKKEVEKREVLKRQGHGEYREITEGDFLGEVTGSEKVICHFYHREFYRCKIMDKHLKALAPVYVGTKFVKLDAENAPFFVAKLAIKTLPCVILFKKGIAVDRLVGFQDLRSKDDFPTRALENILKTKGIIDEKKKDDDDDDEESEAKNRRVRSSTAQDSDSD

SEQ ID NO: 58795 - protein, 149 aa, Zea mays
  Clone ID: 700156980_FLI.pep
LFRRREMATVPGDLIWQVVRKNNSFLVKQFGNGNAKVQFTKEPNNLYNIHSFKHSGLANKKTVTIQPAAKDSAVVLSTTKTKKQNAPAKLSHKSVMRKEFRKMAKAVKNQVSDNYYRPDLTKPALARLSSVYRSLQVAKSGVKKKNRQS

SEQ ID NO: 58796 - protein, 190 aa, Zea mays
  Clone ID: 700157172_FLI.pep
KQKEEPAAAAGDVVAADRGAPVGRGGARRARAVRAQVARVHGGAGPPRRAPPAAQPGRGGLQPVDGVRVAAAGRRPDPHLRLHRQAGVVRQGGDGVRGARADARPRRGEEQGAPHLGHHLRDRPQPLRHQDRVPHPRGARPRLPCHRLPARARGGGGGPQGGGRGRRRRRRQLICSSFRRRRPCVGCSIR

SEQ ID NO: 58797 - protein, 162 aa, Zea mays
  Clone ID: 700157464_FLI.pep
GTERGDAEAPHLRRREMATVPGDLIWQIVRKNNSFLVKQFGNGNAKVQFTKEPNNLYNLHSYKYSGLANKKTVTIQPAAGKDSAVVLSTTKTKKQNTPAKLSHKSVMRKEFRKMAKAVKNQVGDNYYRPDLTKSALGRLSSVYRSLQVAKSGVKKKNRQPTH

SEQ ID NO: 58798 - protein, 66 aa, Zea mays
  Clone ID: 700157734_FLI.pep
NDQDETTALYPFSFLFLFVLWFYPFSFVFFFLFFVSVFFDVTEGEKQGSGFDSVCGVIKREMVAAR

SEQ ID NO: 58799 - protein, 140 aa, Zea mays
  Clone ID: 700157878_FLI.pep
QASTCKMLEYQNAIGGRLKLKGKALDVKDGGVKKKKKKYQREESSQIAHDELHKGGRSESPIDPNNERIESDKTGDEGNPHPDYGHLTPAERRYMEQKQKIDMQKMAKVANKSHRDRIQDFNQYLANLSEHYDIPKVGPG

SEQ ID NO: 58800 - protein, 121 aa, Zea mays; identical to SEQ ID NO: 41507
  Clone ID: 700159157_FLI.pep

SEQ ID NO: 58801 - protein, 308 aa, Zea mays
  Clone ID: 700160684_FLI.pep
CIHSLSSFIFPCSSLRPDLANPEEDGVRDGLHLLGIAAPRRRELLDGGRIEQLDAVILGSLVGGPGRDIHEVVIEVHPAVRGELERARVVLPFDRVEREVGAPVLVVDHPAVGRPVSLGPVVQAPEHGVDGGVDAWLGVAPGGEHAVAGAQHGAGLRVEAREVEPVEGLRDGDEVDGGRRGHGGVDPLQGQVRWGVHVAGVAEARRVGELLRARVRAHHVLVQLRQRRCGLAVAGADIPGHVAARGLGGDEVEELRRVDRPRRHVLLCLLEEQVRHRLRALSHCFNSFLRTIWRQQKLLDYSSSEARC

SEQ ID NO: 58802 - protein, 290 aa, Zea mays
  Clone ID: 700161528_FLI.pep
PFGRRAVLVELQQRGAGHGDGEAGEEGLEGGDPRPVRLGRSRGVYGHPVCAGAGRGHGGTVQPGRLAHRARRHHGVLGQLAAVGPAGGVARGGGGGGEQRQGHGAPAAAPAPGPPRRLRARVGGAPEQRQGRGVLHRHGQAGALRHGGGALRGEPGRRVRRRRLRHELQGGGGGEEQQAVRAACHAACHVHGGRRHVRRARRGRRPQRQGVPPVPQETEQEGRLAVARPPRARHLGTQNRKAPPTSTHGRPWIHLTRPVNSLNFKSWTESFATIKTLLFDWPQQLVHVWK

SEQ ID NO: 58803 - protein, 323 aa, Zea mays
  Clone ID: 700082354_FLI.pep
AKRSFKLVSAALEDDGQGRRDRERRWRRRVRCQGLHGPSPGAADRRGGAGVLVAVPRRDRRVHRHAAVPVHHGGHRDRVQAPDGRVGVGRRRGVRRRGRAGHRLGLRRHDLRPRLLHRRHLGGPHQPRRHLRPLPGAQGLPGARAALHRGAVPRRHLRRRPRQGVPERLLRQVRRRRQLARLRLLPRHRPRRRDHRHLRARLHRLLRHRPQAQRPRLPRPGSGSPPHRLRRVHGAPGHHPRHRHRHQPCQEPGRRRHLQQGQALGRPLDLLGGPSRGRCHRGLLPPVHPPGWRHQGPRLLQEQRVMSGAWLWSNGGRPTGGGP

SEQ ID NO: 58804 - protein, 291 aa, Zea mays
  Clone ID: 700082558_FLI.pep
QSSPRSQLGFPLPIHSRRGAADEDSAATMLELRLVQGSLLKKVLEAIRELVTDANFDCSGTGFSLQAMDSSHVALVALLLRAEGFEHYRCDRNLSMGMNLNNMAKMLRCAGNEDIITIKADDGSDTVTFMFESPKQDKIADFEMKLMDIDSEHLGIPDSEYQAIVRMPSAEFMRICKDLSSIGDTVVISVTKEGVKFSTSGEIGSANIVCRQNQTIDKPEEATIIEMQEPVSLTFALRYMNSFTKASSLSEQVTISLSSELPVVVEYKIAEMGYIRFYLAPKIDDDEEMKP

SEQ ID NO: 58805 - protein, 452 aa, Zea mays; identical to SEQ ID NO: 52903
  Clone ID: 700082852_FLI.pep

SEQ ID NO: 58806 - protein, 452 aa, Zea mays; identical to SEQ ID NO: 44998
  Clone ID: 700083111_FLI.pep

SEQ ID NO: 58807 - protein, 274 aa, Zea mays; identical to SEQ ID NO: 38967
  Clone ID: 700083150_FLI.pep

SEQ ID NO: 58808 - protein, 512 aa, Zea mays
  Clone ID: 700084487_FLI.pep
LAEIRDAVFSFIRKMEPKKVMDTMLVSRVKILYIRSLLAKSPELQSIKVSPVERFLEKSNTGRSRSSSRGSSPGRSPVHHHGYGSRTALVDEHVHGFKVNIKQEKKSKFSSIVLKLRGIEEETWRQHVTGGKLREITEEAKAFSIGNKALAALFVHTPAGELQRQIRAWLAENFEFLSVTGADAAGGAAGQLELLSTAIMDGWMAGLGTAQPPTTDALGQLLSEYTKRVYTSQLQHLKDIAGTLATEEADDPAHVSKLRSALESVDHKRRKIMQQMRTDTALLTKEEGGSPIRNPPTAAEDARLASLISLDNILKQVKEVIRQSSTGPMRKSKRKALLESLDDLLTQMPSLLDIDHPCAQKQIMEARKVVESLQEDPDDPAPHSNALGEGEVSQWNVLQFNTGTTAPFIIKCGANSSGELVIKADLRVQEPKGGEVIRVVPRPTVLADLSFEEIKGVFEQLPEAVSLLALARTADGTRARYSRLYRTLASKVTALKETVAEMERGGVFKDVR

SEQ ID NO: 58809 - protein, 255 aa, Zea mays
  Clone ID: 700084780_FLI.pep
ADPAEENVVSPPPTPAAPAVGASDPPLQPAADSASTEKVSAPAPEVRSRGFRLLGEDTSVHKSLGGGKTADVLLWKDKKTSAVVIGGATVIWVLFEVLDYHLLTLISHVLIGVLATLFLWSKATTFIKKSPPDIPVVQVSEDLVVNVSRALRNDINRALHLFREIAMGHDLKKFLGVIVGLWVLSGVGSSCDFLTLTYIAVLMLHTVPILYDKYQDKVDHFAGRAHTEALKQYKVLDAKVLSKIPRGAVKSKKQN

SEQ ID NO: 58810 - protein, 596 aa, Zea mays
  Clone ID: 700084860_FLI.pep
SSMGSFLWKQPSYLFILIILHLVAHEARTLSSDGEALLAFKKAVTNSDGVFLNWHEQDADPCNWKGVRCDSHSKRVINLILAYHRLVGPIPPEIGRLNQLQTLSLQGNSLYGSLPPELGNCTKLQQLYLQGNYLSGYIPSEFGELVELVALDLSSNTLSGSVPHSLDKLSKLTSFNVSMNFLTGAIPSSGSLVNFNETSFVGNLGLCGKQINSVCKDALQSPSNGLQSPSPDDMINKRNGKNSTRLVISAVATVGALLLVALMCFWGCFLYKNFGKKDMRGFRVELCGGSSVVMFHGDLPYSSKDILKKLETMDEENIIGAGGFGTVYKLAMDDGNVFALKRIVKTNEGLDRFFDRELEILGSVKHRYLVNLRGYCNSPSSKLLIYDYLQGGSLDEVLHEKSEQLDWDARINIILGAAKGLSYLHHDCSPRIIHRDIKSSNILLDGSFEARVSDFGLAKLLEDEESHITTIVAGTFGYLAPEYMQFGRATEKTDVYSFGVLVLEILSGKRPTDASFIEKGLNIVGWLNFLAGENREREIVDLNCEGVHTETLDALLSLAKQCVSSLPEERPTMHRVVQMLESDVITPCPSDFYDSE

SEQ ID NO: 58811 - protein, 278 aa, Zea mays
  Clone ID: 700084906_FLI.pep
MSHASPQVVYNNSEKKRSCCWDGCIYAGTPLPAATTGWVVVKPGRCGWLVQRRQAAVRAMSAAAAAASSVTKFIKCVTVGDGAVGKTCMLICYTCNKFPTDYIPTVFDNFSANVSVGGSIVNLGLWDTAGQEDYSRLRPLSYRGADVFILSFSLVSRASYENVLKKWMPELRRFSPTVPVVLVGTKLDLREDRSYLADHSAASIISAEQGEELRKQIGAVAYIECSSKTQRNVKAVFDTAIKVVLQPPRRREVTTKKMKTSSNQSLRRYLCGSGCFTS

SEQ ID NO: 58812 - protein, 480 aa, Zea mays
  Clone ID: 700085821_FLI.pep
GRDWREAPAQGKRNRGARRGRKGRRRRANKMREIISIHIGQAGIQVGNACWELYCLEHGIEHDGTMPSDSSVGVAHDAFNTFFSETGSGKHVPRAIFVDLEPTVIDEVRTGSYRQLFHPEQLISGKEDAANNFARGHYTVGKEIVDLCLDRVRKLADNCTGLQGFLVFNAVGGGTGSGLGSLLLERLSVDYGKKSKLGFTIYPSPQVSTAVVEPYNSVLSTHSLLEHTDVAVLLDNEAIYDICRRSLDIERPTYTNLNRLISQIISSLTTSLRFDGAINVDVTEFQTNLVPYPRIHFMLSSYAPVISAEKAYHEQLSVPEITNAVFEPSSMMAKCDPRHGKYMACCLMYRGDVVPKDVNAAVATIKTKRTVQFVDWCPTGFKCGINYQPPSVVPGGDLAKVQRAVCMISNNTAVAEVFSRIDHKFDLMYAKRAFVHWYVGEGMEEGEFSEAREDLAALEKDYEEVGAEGADDEGDEGDDY

SEQ ID NO: 58813 - protein, 274 aa, Zea mays
  Clone ID: 700085996_FLI.pep
LNLCSSFATNFASVLMEEDYVFLLFPLSLKPNISLLLCWIKNQVDTLLDSVKWDSKGLAVAIAQNVDTGAILMQGFANKEALAKTISTRKATFFSRSRSSLWTKGETSMNFINVHDIFLDCDHDSIIYLGKPDGPTCHTGAETCYYTSVYDALQSSKPNEGRQVMTTLYSLEDTISRRHEEKVTDGGGKPSWTKKLLLDNQLLCSKIREEAGELIQTLLENEDQSRAASEMADLLYHAMVLLRVKDVKMEQVLEVLRKRFSQSGIEEKASRNKS

SEQ ID NO: 58814 - protein, 284 aa, Zea mays
  Clone ID: 700086040_FLI.pep
ASQRERERERERERERRGAGGWLCCRARACQALAAAAAASSWHERGCSSVWQRRRTHRRPSCRPMAAGRASPPPPRSLRLAMRSASAGGEGETCASSRRRPRRGRPRSRRPRLAASASATCSGLLPVSLKKRWCFCRSIPGHGGTGENGPDGGVQGSILDDCAPWSSLLRAFQRSRLACGQEIQYVRRADCLRGLWRISPLVVWAWLVSERRRSFSLHSIHDHHGYLASSSCELAPLVYRWPQVSQFAALVRAFPWSCRLHRPLLDSRGGGLPEEELQVLTQAA

SEQ ID NO: 58815 - protein, 153 aa, Zea mays
  Clone ID: 700086121_FLI.pep
TMVKAVAVLGSSDGVKGTIFFTQEGDGPTAVTGSVSGLKPGLHGFHVHALGDTTNGCISTGPHYNPASKEHGAPEDENRHAGDLGNVTAGADGVANINVTDSQIPLTGPNSIIGRAVVVHADPDDLGKGGHELSKSTGNAGGRVACGIIGLQG

SEQ ID NO: 58816 - protein, 677 aa, Zea mays
  Clone ID: 700086232_FLI.pep
LGYINGPPYPGPIPPMYYYMPTVPMDSMRSPSHYIQNQPAPNPVLSPEAAELRSNILTQVEYYFSDANLERDDFLKSLMDEHGWVPVSKLADFNRLKKMTADIHLILDALTSSSLLEVQDDKIRRRYDWSKWVSLSGTSVASPSSASVNSSVGEKNIGGFSNKDAYSEDQKTHCQSKDIRCNTDIGMGEKVIDEQVQDSHGCSLNNDFSVISIDEKTKNLSAHPSRKYGSSFRFGEVQKTRSKIVPNAQSERGFSIGFPSAFSSFGGGGDQSTFLLDEELELEHVDHSRDDLHSHKRGDDEDEDFFVDDQDVSRLMIVTQDTRLEKDDKNRTSIPQAFSTEEASRISDALYCYEKLHGRCTDNQRSSQADPADADSKPTSGSKGSHIRTGTKVTEEAGQPIPRRRQNKGNRKAHSSRKQRFFAGNFVNNPDQYGGVSESPPGNSVGYFYGSTPENHSYKSSKLSSSPHGIPTGSSPVGSVPKSSPQSQHLTFHLLEKNKLQPQRYNKFKHHCLMERKKLGTGQSEQMNSLYRFWSYYLRDNFNEDIYKDFKKLALEDAAASYRYGLECLFRFYSYGLEKKFQPNVYEDFEKLTFEFYRNGDLYGLEKYWAFHHYRNPDSGPVDKLPELERLLREEFQTLEDFKAKEKARATTEKGTGISSSSVVVAASHSKAETKQV

SEQ ID NO: 58817 - protein, 703 aa, Zea mays
  Clone ID: 700086365_FLI.pep
GSVYNSGKAVSSHSIHNKKIKCPIKCSCPYPGIASLRFDLTAIMSTQGMTNSNSDRHLKDHLHSENPKEMLQPGTLDSPSRVHEMDSPSRESLEGCLLRFSLCFLHLWDVDCELDKLLVDEMQVCKPEGCHIATGVVGDKGSFTLMFPGKEATLELWKSSAEFCAMRSLSIISLAQLMIKLSRSCTNSSSALAAFYTRHFAEKVPDIKPPSLQLLVSFWQHPSEHVRMAARSLFHCAAPRSIPQPLRVNKNKVVNAPLSSSDNMNVLICAVQTASVSNHGELKEDDENVDKDDIDTANMILWLESFENQEWLSWIGGTSQDAVASNIIVAAALVVWYPSVVKAKLSSLVVSQLIKLVMSMNDRYSSTAAELLAEGMENTWKACLGAEITHFMSDILFQIECLSTAPSSNAINKTAVAITMREALVGTLLPSLAMADVTGFFGVIESQIWATSSDSPVHVASIKTIIRVVRGAPKSLVPYLDKAINYILHTMDPSNLIMRKACIISSMMALREMARVFPMVALNESMTKLAVGDAIGEIYDGTIRVYDIESVTKIRILDASGPPGLPSLLAGSSNRTTTILISVLSFSPDGEGLVAFSENGLMIRWWSLGSAWWERLSRSLTPIQCTKLIYVPPWEGFSPNSARLSIISSILDDKPGRSEKELGEADNLKLLLHNLDLSYRLHWIGGKTIKLTRHGQDLGTFQL

SEQ ID NO: 58818 - protein, 306 aa, Zea mays
  Clone ID: 700086438_FLI.pep
MTEKLRHEEKENAQLNQSLQLMQLKYASRENVFRTLNEKVKDAEQACRNYQQRIRELESELGNEKRVSRDSARSSRPPLVPTRQKQPHGRNAPPSGPSRWRLKAPTIHNKENIPVTMSKSNPGDDTNKAVGRARRVSLTPVIRQIPIQPKRRSSIAILPSVREHLSVLNEKRAASRLSQVNMPRRSVATFGLNLGPGTPLAGHGGPVDATPDGAKFRRFDLGSSSSKFTSPPPNVTPQRKMGMAPAGGPPNAAKLCFSIQKRVTPAHVRAKPGMGIFDPALRENMVVGRTGNALRVLNGKRRQSVV

SEQ ID NO: 58819 - protein, 240 aa, Zea mays
  Clone ID: 700086563_FLI.pep
VETPRKQFPAMATAAHQVAATFLSYLSPSTHHLAPSSVSLGTASVLPVSLRVAGTGGPRLAYRLRGRRVGAAVAQLPTTHPEVVSGEKKIRWSSRAVRSFAMAELEARKMRYPTTGTEGLLMGILVEGTSGAAKLLRANGITLLKVREEAANVLGKSEMFYFSPMHPPLTEAAQRALDWAVNEKLKSGEDGEVNANHLLLGIWSDDESAGHKILYSLGFDDVKASLLAKTADEEAAMSPR

SEQ ID NO: 58820 - protein, 128 aa, Zea mays
  Clone ID: 700087703_FLI.pep
RRRAPTSRACTGRWTTSRSGCRGSWRPWTTTAPRPRSSGASSGDSRLQLAMPLAAPVVRRRARPSSAACHLASCRSQRRCTEEGEDDDVRPSLLVRSFICYGDDLNCVPLFLICSPPSGACLFPCWIG

SEQ ID NO: 58821 - protein, 147 aa, Zea mays
  Clone ID: 700088013_FLI.pep
DSMPKIKTSRVKYPEGWELIEPTIRELDAKMREAENDPHDGKRKCEALWPIFRISHQRSRYIYDLYYRRKEISRELYEFCLDQSYADRNLIAKWKKPGYERLCCLRCIQTRDHNFATTCVCRVPKHLREEQVIECVHCGCRGCASGD

SEQ ID NO: 58822 - protein, 244 aa, Zea mays; identical to SEQ ID NO: 44982
  Clone ID: 700088167_FLI.pep

SEQ ID NO: 58823 - protein, 320 aa, Zea mays
  Clone ID: 700088295_FLI.pep
RDELRHLDSWVKENKLDQLQFARQKLTYCYLSAAATVFSSELSDARISWAKNGVLTTVVDDFFDVGGSKEELENLIALVEKWHAHHAVEFYSEQVKIVFSAIYTTVNHLGAMASAAQGRDLTNHLVEIWLDLLRSMMVEAEWQRCQYVPTVEEYMTNAVVSFALGPIVLPALYFVGQELLEHAVKDEEYDKLFRLVSTCGRLLNDYQSLEREGNQGKLNSVSLLVLHSGGSMSIEAAKKAMQKSIDVSRRDLLRLVLRKESAVPRPCKELFWKMCKILPLFYSQNDGFSSPKEMVSAVNAVINEPLKVQNSTTFLSSSSR

SEQ ID NO: 58824 - protein, 267 aa, Zea mays
  Clone ID: 700089527_FLI.pep
RAGALRTAPTHRNSTSPNSKSPRPSSSKQSRAGEAGCWRGMPPKSDSVEGIVLGFVNEQNRPLNSQNAADALQKFNLKKTAVQKALDALADSGQISFKEYGKQKIYIARQDQFDIPNGEELEEMKKTNAKLQEELADQKKAISEVESEVRGLQSNLTLTEITSKKSELQSEVQEMEEKLNKLRSGVTLVKPEDKKIIENSFAEKVSQWKRRKRMFKELWDNITEHSPKDQKEFKEELGIEYDEDVDVNVQSYSDMLASLNKRRKISR

SEQ ID NO: 58825 - protein, 192 aa, Zea mays
  Clone ID: 700089787_FLI.pep
IGSKTLIRLPPIALASLSYSRRRRCCKRQLAVVRIVHSNAAMGRMHSRGKGISSSALPYKRTPPTWLKTAASDVEEMITKAAKKGQMPSQIGVLLRDQHGIPLVKSVTGSKILRILKAHGLAPEIPEDLYFLIKKAVAIRKHLERNRKDKDSKFRLILVESRIHRLARYYKRTKKLPPTWKYESTTASTLVA

SEQ ID NO: 58826 - protein, 517 aa, Zea mays
  Clone ID: 700219903_FLI.pep
LTKINRQVPAGNLITDWSSQHRACHPLSSSSVVGDVARNLEPLGVERARHVDPLVGVSPEVVPLGLHQVGRQPVPAVGVEVGQASGHSRGADAVVDGEAHHPAPRRLPVHDLLRELGVYEQAGEARVPVVGLLDAVQEDGADDAPALPDPGQLAEVEPPAFLRALGLDDVHALRVAADLGRVQGLPHVLHQLRLVHRRAGGVVVTLEDLGGLHPLVLQPAQEPRVQGRLDRRSGHRQLGGLLHRPLPCPFHPGLVKDLVHQVAIAMLVLDAKDVGRDLDQEAQELALVPLGEHLVQLTVGELTDRLENVVCLGNQLHIAILDSVVNHLDKVARSTFANVRDTRATVRDLSSHLEDNVFDVLVSLERASGHQGRAVAGTLLSSRDTHAKIQEAALLHGLLPPLRVLVPLVPPIDDAVALLQVSCERRDGLVNWRAGLNEHDHHPWLLNGLHKGRGVMEAVDGKVSFCLGTLHGLVHLGGCPVVHRDGEPFLCNVEGKVLPHDRKASKTDSCERHLLLH

SEQ ID NO: 58827 - protein, 449 aa, Zea mays
  Clone ID: 700220078_FLI.pep
AEKGRPTHSLSLSLQSPPAALIVIAMGSTAGDVAAVVDEEACMYAMQLASSSILPMTLKNAIELGLLEVLQKEAGGGKAALAPEEVVARMPAAPGDPAAAARHGGPHAPPARLLRRRPVPDGGPGRPVRAPLLRRARLQVAHPQRGRRVHGRPRAHEPGQGPHGELVLSQGRGAGRRHPVQQGVRDDGVRVPRHGLALQPRVQRGHEEPLGDHHQEAAGLLHGLRGRVDAGGRGRRRGRHAARHHVPPPAHLRGQLRPAARHLRGAAVPRRAPRGRGHVRVRARRRRHPHEVDPPRLERRALRHAAQELLRRAAGKWQGHRRRVRAAGQHGGHPQGAGRLPRRHDHARAQPRRQGAVRARVPRARKGRRLLRVQGHLHLRQRLGHRVHQVNHRRRDEMAWLPHALLAWSSYRTSPSSSSSGYCAATSLLSRMHVLLLNFLSSYHALWLA

SEQ ID NO: 58828 - protein, 128 aa, Zea mays
  Clone ID: 700220180_FLI.pep
DQAQDPSKGPDFGTRFESSWCRDISLLVDMINQHQTVHLSYALNLLVVKPQTYIIKRGKTSQFIKLQFSTFPKKQIVLQLFWILVQNTQSFVTSSSHQIWVEKTPGCGGRLVRFGLRLHSLLNSIPSL

SEQ ID NO: 58829 - protein, 291 aa, Zea mays
  Clone ID: 700220436_FLI.pep
RQGKTPKRPNPRKPRRTLQTLTLALPTRRGAMAMDAERRQAELIAQFSAQAAALSFAPQLAALVLEATSHPALFAFSELLTLPALSKLTGTQYASSLDLLRLFAYGTLNDYKSNSGFLPALLPDQVRKLKQLSVLTLAESTKILPYDQLMQELDVSNVRELEDFLINECMYSGIVRGKLDQLRRCFEVQFAAGRDLTPDQLKNMIETLSDWLGTSDRLLHQIQEKIKWADTMSEVNKKHQKEFEDRVEEAKKSIKADIDLRGHDEFLSESGGIMDFEEDRVRPKRRRQPPA

SEQ ID NO: 58830 - protein, 443 aa, Zea mays
  Clone ID: 700220451_FLI.pep
REQQRKRAMDPCPFVRVLVGNLALRMPVAPPAAGAGAGVHPSTSPCYCKIRLGKMPVQSVPAPLVVSDGGEQTPASGALAAAFHLSKADLEWFNGKPSLFSSRGEASLKVSVYAGRKGSACGVSSGRLLGKATIALDLKGAEAKPAVLHSGWISIGKRSGKGSTAATELSLTVRAEPDPRFVFEFDGEPECSPQVLQVRGSMKQPMFTCKFGCRSNSDLRRPGMQPERDAASAKERKGWSVTVHDLKGSAVAMASMVTPFVPSPGTDRVSRSNPSAWLILRPAGDGAWEPWARLECWRERGGAGASDSLGYHFALLVPGADHAVALADSSIPSSNGGKFVIDLTAAQPLSRGGTPGCSPRGSGDLSNWPLGNYRGFVMSAAVQGEGRCSKPTVEVGVAHIGCAEDAAAFVALAAAVDLSMDACRLFSHRLRKELSHLQADLLR

SEQ ID NO: 58831 - protein, 118 aa, Zea mays
  Clone ID: 700220462_FLI.pep
HSLQDLSILELYILVCMHRLESKEQTSYNFTSIMKEYRSIQDAYKTSDKYASTVCFRAFEHLLDRELISFGDNRWRNQALEYRPVKLLISSRELAESLKLNTTCPAVLQKLFDRERYM

SEQ ID NO: 58832 - protein, 683 aa, Zea mays
  Clone ID: 700220655_FLI.pep
EGRYLFSVPFSPSERSTSNKLLRFQHLPSGGRVRIAAAPADETMASARDEHLDGIRALMAAHSPPLHGLVVPSEDAHQSEYVSEQDKRREFISGFTGSAGLALITMKEALLWTDGRYFLQATQQLSDRWKLMRMGEDPPVEAWIADNLADEAVIGINPWCISVDSAQRYENSFSKRHQTLFQLSSDLVDEVWKDRPLVEPRPVIVHPVEFAGRSVPEKMKELREKLVHEKATAIIITALDEVAWLYNIRGSDVDYSPVVHSYAIVTLHSAFFYVDKRKVTVEVQKYMSGNGIEIREYETVQSDASLLASGKLQSSVHVEKYMDEVESSKIWIDSGSCCLALYSKLIPHQVLTLQSPIALPKAVKNPTELDGLRKAHIRDGAAVVQYLAWLDNQMQENYGASGYFSEIKGSHKNEHLATKLTEVSVSDKLEGFRATKENFKGLSFPTISSVGPNAAVIHYKPEASTCSEMDADKIYLCDSGAQYLDGTTDITRTVHFGKPSAHEKSCYTAVLKGHIALDIAVFPNGTTGHALDILSRAPLWREGLDYRHGTGHGIGSYLNVHEGPHLISFRPSARNVPLQASMTVTDEPGYYEDGAFGIRLENVLICKDANAKFNFGDKGYLAFEHITWAPYQTKLIDTELLTPVEIDWVNTYHSDCRKILEPHLNEQEKQWLMKATEPVAARG

SEQ ID NO: 58833 - protein, 458 aa, Zea mays
  Clone ID: 700220657_FLI.pep
RRNGKNEADENWEGMAMGLEDGEYGAFMEKFKMLPSQSQHQQQLPLHGLTFAIKDIFDISGRVTGFGNPDWARTHAPAGATSPVVLAALAAGAISIGKTVMDEMAYSINGENAHYGTPTNPCAPDRVPGGSSSGSAVAVAAKLVDFALGTDTGGSVRVPAAYCGIFGLRPSHGLVSTENVIPMSQMFDTVGWFARDLSTLSCVSNVLLPLAADNTIKQPTHVTIPKDCFEILGSLSDQTYQILNASVAKRFGNDAVDNRNLGEFVSANVPTVGKFISDFSRSEAPSVPGLSVISYVMRCLQRSEFKANHGEWVKTVKPNLGPGIRERVHEAIASEDGPMEDFHVLKTEFKSALSALIKDDGILAIPTVPGSPPKLRMEAVALENFRARAFSLLSIAGLSGFCQLSIPLGVRHGVPVSVSLVACHGADRFLLSVAQELYGTLKQETKKAWSWSSSDSSL

SEQ ID NO: 58834 - protein, 438 aa, Zea mays
  Clone ID: 700221107_FLI.pep
SHPTDSTHPPARCLRRISSDSDPPDHDHPAPPPRSSSRSEKMAGLDTFLFTSESVNEGHPDKLCDQVSDAVLDACLAEDPDSKVACETCTKTNMVMVFGEITTKANVDYEKIVRETCRNIGFVSNDVGLDADHCKVLVNIEQQSPDIAQGVHGHFTKRPEEIGAGDQGHMFGYATDETPELMPLSHVLATKLGARLTEVRKNGTCPWLRPDGKTQVTVEYRNEGGAMVPIRVHTVLISTQHDETVTNDEIAADLKEHVIKPVIPEQYLDEKTIFHLNPSGRFVIGGPHGDAGLTGRKIIIDTYGGWGAHGGGAFSGKDPTKVDRSGAYVARQAAKSIVAAGLARRAIVQVSYAIGVPEPLSVFVDTYGTGAIPDKEILKIVKENFDFRPGMIIINLDLKKGGNGRYLKTAAYGHFGRDDPDFTWEVVKPLKAEKPSSA

SEQ ID NO: 58835 - protein, 354 aa, Zea mays
  Clone ID: 700221865_FLI.pep
LCIYCTLSLPPSVQFSIYFRFLCPFVIVWEMYFFYIHGFVCFASCQITIQEFSDHRDADEARYQLDGRDVDGSRIVVEFAKGVPRGSGGSREYMGRGPPPGTGRCFNCGVDGHWARDCKAGDWKNKCYRCGERGHIERNCQNSPRSLRRERSYSRSPSPRRGRGRSRSYSRSRSRSRSYSRSRSLSRSPRGGRRDRDDRRSRSPSYSRSPMRSASPPVKEKERSPAPDGSRSPRSRSPQDQVMSPPPKDNGEGNGSDRGGSPRGRENSRSCSRSRSPSGSNRSPAANGRSRSPGGERSPSPGGERSPSPRGERSPSPRADRSPSPNGNGNNDAAADVDADAAARSGSPTGSKSP

SEQ ID NO: 58836 - protein, 198 aa, Zea mays; identical to SEQ ID NO: 46962
  Clone ID: 700221914_FLI.pep

SEQ ID NO: 58837 - protein, 604 aa, Zea mays
  Clone ID: 700221995_FLI.pep
LLAAAVADLRCLPAMEDFCAVCADTLEWVAYGSCGHRDVCSTCIVRLRFVMGDNKCCICKTVCPFVFVTKAMGKYTRVITDFSVLPAGVNEGKAGDFWYHEDTKAYFDDADHYRMIRTMCQLSCNVCDNAEDQVAQAKRKSKFRSIEQLKGHLYCVHRLHMCNLCLEGRKVFICEQKLYLKSQLAQHMKTGDSEVDGSEVERNGFAGHPMCEFCRSSFYGDSELYMHMSREHYSCHICKRQNPGRVEYFANYEDIELHFREDHFLCEDEACLEKKFVVFLSKAQLKKHNAMEHGGRMSRSQRNAALETPSSFIYRRNEQEQRRGRGRNAFHDGSDCHISSSANAFHDRSDCHISSSANAFHDKSDCHIPSTAQKDRAAADGHAGRLDNVSESFQSLSIGSSSREAEVGEGSRTGRVLEQLSFRPLSDPDIPDNSVETSFPSLSEQQSSLNQSARDAPRLGDESLFPPLTGSSNKMKQPVFTPKRPRTFPAAEDIHAAKMRYALGMNEDMYSAFKEIAGEYRRGTIDAFEYLSYVEQFGLSHLVPEMVRLLPDSRKQRELADAHYTNTRLKNLQENGNNRKGGFFLSKKKSLQENGGGTSEWRWN

SEQ ID NO: 58838 - protein, 626 aa, Zea mays
  Clone ID: 700222157_FLI.pep
HFAPHSGSATTHSQKVSSWISTVPADSSARSLSPSWRRLGDRCRCRCRCRCPCAPVSVGPFARSPAGSSSSTSSAWLLCEVQGCHMDSAQDFQPRTFSIKLWPPSESTRIMLVDRMTNNLSTESIFSRKYRLLGKQEAHENAKTIEELCFALADEHFREEPDGDGSSAVQLYAKETSKMMLEVLKKGPRTTAELEAPVADTPLVSADTVLDISGGKRAFIEADEAKELLSPLTKPGNSYKRICFSNRSFGIGAANVAGPILESVKNQLTEVDISDFVAGRSEDEALDVMRIFSKALDGSVLRYLNISDNALGEKGVRAFSELLKSQESLEELYVMNDGISEEAAKALSELIPATEKLKVLHFHNNMTGDEGAMYIAEMVKRSPNVESFRCSATRIGSDGGVALSEALGTCTRLKKLDLRDNLFGVDAGLALSETLPKLPDLVELYLSDLNLENKGTIAIAKALKQSALQLEVLEIAGNEINAKAAPDLAECLAVMQSLKKLTLAENELKDNGAVIIAKSLEDGHSDLKELDVSTNMLQRVGARCFTRAVANKPDFVQLNINGNFISDEGVDEVKEILKAGKKSLDVLGPLDENEPDGEPDDEDAEDDEDELDLKLQSVKVEQDEDD

SEQ ID NO: 58839 - protein, 460 aa, Zea mays
  Clone ID: 700223017_FLI.pep
LAAAAMRIEEVQSTSKKQRIATHTHIKGLGLDANGMSMPLAAGFVGQAAAREAAGLAVDMIRQKKMAGRALLLAGPPATGKTALALGIAQELGSKVPFCPMVGSEVYSSEVKKTEVLMENFRRAIGLRIKENKEVYEGEVIELSPEEAESTTGGYAKSISHVIIGLKTVKGTKQLKLDPSIYDALIKEKVAVGDVIYIEANSGAVKRVGRCDSFATEYDLEAEEYVPIPKGEVHKKKEIVQDVTLHDLDAANAQPQGGQDILSLMGQMMKPRKTEITEKLRQEINKVVNRYIDEGIAELVPGVLFIDEVHMLDIECFSYLNRALESPLSPIVILATNRGICNVRGTDMTSPHGIPVDLLDRLVIIRTETYGPTEMIQILAIRAQVEEIDIDEESLAYLGEIGQQTSLRHAIQLLSPASVVAKTNGREKMCKADLEEVSGLYLDAKSSARLLQEQQERYIT

SEQ ID NO: 58840 - protein, 490 aa, Zea mays
  Clone ID: 700223238_FLI.pep
GESEPQERRAMAAMMMATSESKSPARVLRRLAGAAVAAVLLRRTFSASKCKTEARMATALMKLLRNRREAQVRQMRRDIAALLRDKQEDTARIRVEHVIREQNFMAANEIIELFCELIVTRLPIIAKQKECPADLKEGICSLIFAAPRCSELPELGRIRDIFEKKYGKDFVSAAVDLRPDAAVNNLLIEKLSIKKPSGQIKLKVLKDIAKEHQIDWDTTESEQELLKPPEELIKGPSTFVEASNMPVKTILTPYTVQPDPVNFSYRCSDGKYDDRGTMQFKDAASAARAAAESAERAASAAKAAADFANNNNHPFDEDEDCKASTHEFTHPRKRQSMSNSSRSSMKEDANAFDEQKPHEGKTYSTRRFSGKNHVEYDKDGYPADLDSTKTRRRNCRAARKVHSEIKFDDSEGLCSDSEGENDVEIQSVERPLPPKSELFSENRHSEDEEPDQDFPELPKTNLHSRVHPNMPLDYETLTARFEALKSGKLP

SEQ ID NO: 58841 - protein, 156 aa, Zea mays
  Clone ID: 701181370_FLI.pep
ASRETRSSPVLLGLGGTPASLLRDPLPVLVEELLVLLLQLLPHCGGDHGLDVGALRQRLHALLHAHPERHAPLYQVLHRVDIRGGIRVVSGSGSHGSFWVFFWLRIRQCPVDLSLSLLVYFLPEQFLYSYRLWRLASAARNLTPCVVLCLCGDKAC

SEQ ID NO: 58842 - protein, 305 aa, Zea mays
  Clone ID: 701182008_FLI.pep
AAMSSSTPGRDDDAPDLVCQIDCVHGMVDALSSVRWKRHQDAVMELSEHGIVLSVEESGCLQAKVFLKRELFVEYDYAGDGRQRFGLSLGLFVDCLNIFSSPGHASAVEIRYPGPDMQLLLKSVGSADACLYAEIRTRIPDTVSWDYHFEHAGNSPVSFTVKSAVLKETIDDLEWPGSSIQIRMQPDPPTVILKGEGHGDLQTEFPYYANTDLLIVFQCEHEVSHRYKYKFLRATTSNIPSSAVKENRRTKVSIGRGGMLKVQHLVSLARPGMPYFRSIGGGNEQTSRIAHIEFFVKPEEDDNGA

SEQ ID NO: 58843 - protein, 227 aa, Zea mays
  Clone ID: 701182047_FLI.pep
PCKMSAVAKRVSKKRKFVADGVFYAELNKFLVNELSADGYAGVEVRTTPQKTDIIIRATHTQRVLGEKGRRIRELTQAVSKRYGFKDGAIEILAERVMFRGLCAFAQAESLRIKLIFGLAVRRACYSILRFVMESGAKGCEVIVSGKVRGQRAKAMKFCDGYMKKSGYATTEYVNRAVRNVLLKTGILGLKVAIMLPHDPLGKKGPKKPLPDVIEVLQPKKDNVVSK

SEQ ID NO: 58844 - protein, 141 aa, Zea mays
  Clone ID: 701185742_FLI.pep
YIVSEFSSIREGVSGTPGLLRILYWDSGTGWDVLSPVPFYGSQLLGASVRQTADLTRKSGRRGNEKTEGRQARSGNAKGPTKNIYTVKPTRTYVYGVRGFPPRLLPYYIPLYYKDRHLCAWRSSLLTLRNNQAIEAQPRIH

SEQ ID NO: 58845 - protein, 368 aa, Zea mays
  Clone ID: 700930139_FLI.pep
LWKMGILEKISDIEAEISRTQKNKATEHHLGLLKAKLAKFRAQLLEPSKTPGQKGDGFEVSKSGDGRIALIGFPSVGKSTILTELTDTESAQAAYEFTTLTCIPGVIQYNGAKIQLLDMPGIIEGAAQGKGRGKQVVAAARTADLILMMLDATKGETQKRLLENELHSVGLRLNKQPPNISLKVKSGGGLSFNSTIPLTHMDEKLVRGILHEYKIHNAQVLFREDATVDDFIDVIEARNRSYLPCLYVYNKIDQITIEEVDSLARLPHSVVISCNLHLNLDYLLEKIWEYLSLVRVYTKRRGEQPMFEGALIMRKGALVLDICRAIHRDWEHQFKYALVWGRSAKHSPQRVGLNHELLDEDVIQLVKK

SEQ ID NO: 58846 - protein, 331 aa, Zea mays
  Clone ID: 701170938_FLI.pep
PRSRAVVQPVSHQAAMERPCPRPEPAAIDITWVSCRGVRSSLPFHTPCLYASVSVTPSSSAKNAHGHRRPHRVKTPTDRAGGENPEWDAPLRLYLPEPEASPTAAGLELEPEAGKNRGDGVLLVRFELKAEVAVLGDVLAASAVVPVPDLVADGRTRRVSYQLAGPDGRQPNGVISFSYAFHQRNADADDHHHHQSGGDAKLLVAPPCSTSTVFSPVAQPPPTTAAPRLYPAIEWPLTEEIPIYHTPLLPVPAGAAAVTLASSRYYPPPPSSAAQVQMEPVAVYPPPLPETSSCNVYPSVLPASAMYPPVDLAPVSCYPPASTWNDRCLYG

SEQ ID NO: 58847 - protein, 309 aa, Zea mays
  Clone ID: 701172802_FLI.pep
LLFISHRCSKAMAIIKPTASTLVSPLRTSHHISHCARSASALPLCDRLQPRRYATVNESNEKKWSDAKASSGDTIPEWPKSPRPTPYQVLGVSKSAKTYDKRHFYDLVKLYHPDTHDSQGNSSAASPSSSHISQLPHATRLERYHMIVAANELLSNSSKRRMYDAYGLGWSHGDGVTTLRDIDRNWRHQQGTAANNATWEDWEHWRDAQAGKAGEPVFMSHGAFATIVVMFCLVGAIAQTNRAENSHTVYAGWVADQNNNVGRRLQRNEVIVAGLNKDERVNHFLRERENVNYQFVPAKFESTDPSRPS

SEQ ID NO: 58848 - protein, 130 aa, Zea mays
  Clone ID: 701175393_FLI.pep
NFTDISIRPTSHQSKKDVVELLHLLCVLSLICLEFQALAVISDLEHELPLAVPILHHVAGGVGVGAEELHGPLHELVPGIHVHHRCGGKGERAAWPDLGGATLRDEEAAAGQIRFALLLVLAAACWTCVP

SEQ ID NO: 58849 - protein, 364 aa, Zea mays
  Clone ID: 701177961_FLI.pep
IQGTMPTELEELVGFIAHPNPQIRAVATENLVPYSLSDPAIFKTEELKPVKHLKFLVRDHEKIAENALNILINLTEDPVVLESVATDEKFLEMVFSHIVYPEEPNADLLAMLLANLSKYDGSKAFLQRKQEAPSQLGSDDNVLNQLMDLFVKGQDGAYNKKADYDYLAYVFADLAKHTEIRQYFLTSQPYDGVIPLTKLKVFTEHKSDIRRKGVANTIKNAAFEIPAHPSFLSESDINILPYILLPITGNEEYDVDETMEMLPDLQLLPPDKKRDSDTANIQAHVETLTLLTATLEGRELMRKINVYPIIRETHMRVNDEGVQEACDRLVQVLMRDEATEDAPEEVEERVKEIEEDEDEELVEV

SEQ ID NO: 58850 - protein, 345 aa, Zea mays
  Clone ID: 701178181_FLI.pep
DSKMEYTRLGKSGLKISKVVLGGMSYGSSEWRKWVLDEEDSLPLIKHAFDSGINTWDVADTYSDGASERIVGKALKQYNIPRNRVVILTKCFFAVAEPGDDKDIKGKDTAQWVNRVGLSRKHIFDAVDASVERLGTYIDVLQIHRLDKDTPREEIMKALNDVVESGKVRYIGASSMAAWEFQTLQNIADKHGWHKFISMQNYYNLIYREEEREMIPYCNDTGVGLIPWSPIARGALARPFDARSTVRETSDPFLTSLIRSKETETDKTIIGRVQEVAEKKGVSMAKVAIAWALQKGTSPIVGLSSKERIDDAVEAVKWQSGGGLTEEDCKYLEEGYAPKAVAVVM

SEQ ID NO: 58851 - protein, 399 aa, Zea mays
  Clone ID: 701179255_FLI.pep
VLHTVEPQAHNGASSGQDRVASRACGADAALGVLGPGPPPCVDVVLVHVGEEPPYRHEHGHDLYTGHPVPEQRHRKHWHQRQRQRARHVREQRRHPHDQPHQAHGRCLPRHRRAHQRQHVPRPPVFERRHLPRDRPPVPRREQPRHGHRRRHQVGVHLHPQHPPRRPHPDHLLEGELEEGQNEREHRRGGQHEYEPQWVLAARHVAGGLVGGGSDAEDRGGEGEHDHGVGDQRREPLRVDEARGDGVEAQLRRGHEREGGHRQVLQRVRVHEVVEADHDPDARVDGNHLERRRPALLRRARRRQEERDDQKRRAARLRQRGHPLAVAAGVEVQAAEEGGHSRPTENHQHVHQHRHPPSEAASRGPPRGDLGSITGVDGFLVRNASDLELNFLSMRHAAC

SEQ ID NO: 58852 - protein, 182 aa, Zea mays
  Clone ID: 701160992_FLI.pep
HLKYVASTENSFRDTWNSKLRRSSFHCLGGSLDQKTLCRLSQEVGELLERGLGILGLGPELRSEEAVGLHQTIKGCLDEVTECLGGATGRGKDIFNAGELEDLLGHAGSDNPGPPGRRHHAHGDGPALAGDLAGHSVRLADLVSPVAPPDGHDRELGQDDGATDGGGDLLGALDAEPDVAVP

SEQ ID NO: 58853 - protein, 181 aa, Zea mays
  Clone ID: 701164834_FLI.pep
SRVRSTRILRYMDNLSSDIGELNYAEGGGARNGMGTPGIEGIGGSVSLGTAGIGGKAPTLGTTTAGIGGGSVTVTFGTAGTAGIGGTAGIGGTPSAGTVDVGTAGIGGRVAAGLVGTTGGFGMAGMAGMAVGAAVGAVVVSARCRAAWHVVLPSSMIMRAIITSAVARKRDETAEAMATTS

SEQ ID NO: 58854 - protein, 321 aa, Zea mays
  Clone ID: 701164854_FLI.pep
YLPVFGVSSAAALRRRRARSNAPVSVPGFELRVDYEVMARLCCFGAGCSDFTGQGSIASGKGKGCQGQVKICYGYNLVRGMTNHPMEDYHFAELVDVKGNELGLFAIYDGHLGDTVPMYLQKNLFTNILNEEEFCTHTDRAIIKAYEKTDQAILSHTPDLGQGGSTAVTAILVNGRKLWVANVGDSRAVLLKGGEPIQMSIDHDPNVERSVIENRGGFVSNMPGDVPRVCGQLAVSRAFGDRNLKSLLRSEPDIKVEDIDHTAELLVLASDGLWKVMNNQEVVDLAKRYKDPYAAAKQLTVEAQKRDSKDDISCIVVRFKV

SEQ ID NO: 58855 - protein, 431 aa, Zea mays
  Clone ID: 701165026_FLI.pep
ECCVLSAVRDGLNRIPYIYTVCRQESTALGDDAPKRSAIVLSEFVGCSPSLSGAIRVNPWSVESVAEAMNAALRMPEAEQRLRHEKHYKYVSTHDVAYWARSFDSDLQRACKDHFSRRHWGIGFGMSFKVVALGPNFRRLSVEHIVPSYRRTENRLILLDYDGTVMPENSIDRTPSSEVISVLNRLCEDPKNRVFIVSGRGKDELSRWFAPCEKLGIAAEHGYFTRWSRDAPWEASALAADLDWKNTAEPVMRLYTEATDGSYIEHKESGMVWHHDEADPDFGSCQAKELLDHLENVLANEPVVVKRGQHIVEVNPQGISKGVVVDSLLSSMVRTGKPPDFVLCIGDDRSDEDMFESIVCPASSSGGVRLPASSEVFACTVGKKPSMAKYYLDDTVDVVKMLDGLASAPSPPRRPGPAAAVQLRVSFEGSL

SEQ ID NO: 58856 - protein, 56 aa, Zea mays
  Clone ID: 701165625_FLI.pep
IASRVYIISKSKSSPFYKYIVGIESTTSFFLPETGNGEGLEDGLLAKLLPRHPFPY

SEQ ID NO: 58857 - protein, 186 aa, Zea mays
  Clone ID: 701166404_FLI.pep
FLFLPPVESLASAPWVPLLHSNSQDYSGDRRRARRDRVGASTTTARSPTSNSAEANDDIDVLAHRFYSTKMMAWRPRVRASSSLGMAEHLSGGPRPPQRSRSRNKRQGIQEADVEAKQDRQGRAGTRRAHVARGWRMIRQGGEVSGRARSSSWLENNVPTSTTREVSKGRGHRCPSTRDRGTLHGG

SEQ ID NO: 58858 - protein, 92 aa, Zea mays
  Clone ID: 700421779_FLI.pep
NKVYHLTDTKYESSVCICETLTTLVDADDLEFFTNHGRISKLPGRTRRSSCQCRTVRRASSAACSRRWPRRCRQRWARTPGTPATRPPRTGS

SEQ ID NO: 58859 - protein, 342 aa, Zea mays
  Clone ID: 700422155_FLI.pep
RILLYGQENTSTVQMQLEGKKTGEVVDKQEKPRCLISLDLLCLVELNRACLKPTSLACLQSVRHVCSEDLVPHDKEGLREVVLVPVELMVDVMVSAVVAEEYMEDVSRKPQTTVVIDGLDGRKREEENPNPWGHARDEERERAADGVQDEPLQGVVVKSSKGVGDDKSVVLRVDVLVQESVDMHVSVHEVLPCVHDKHCNEELQCHYQSWRLLPHSPIIITKNREEKKGDSDLKRLLNKDAPDDRPPGNDVPGLLPLGVEPVVVHPQPVQDDVEPRVEPVHRNRHEGAQQLVGDRKRHRHFGEPCDRHQERRRRRNLLAGLLLLAVSRKGKGATLAGLPLLR

SEQ ID NO: 58860 - protein, 257 aa, Zea mays
  Clone ID: 700423184_FLI.pep
WSRQGLAARWGLDVSKYKVCYDCCGNVNFAFRGVCNRCGAARPAGAGGTGGGGGGRGRGRGNSDARGSSRAGAGAATGGGPPGLFGPNDWPCPMCGNINWAKRTKCNICNTSKPGTNEGGVRGGRGGGYKELDEEELEEVKKRRKEAEEDDGEIYDEFGNLKKKFRSKALHTGSAQTLPGSGRAGWEVEHRGSSEREGRERSRDRGRDDYDEKETRSIDRGDHGRDQRRSQDREREKGRERRDHEYERSRERDRRHR

SEQ ID NO: 58861 - protein, 370 aa, Zea mays
  Clone ID: 700428112_FLI.pep
QSSAAVSSLEGKRDGRFSRETRRGQTRHSPPQEDARPSGLAGMSRHCRGSLRPALERDGPDDHLVVDGSQGGADEGADPEDPMVAPGMIPVVDDGGAKAPSRVDAGAGDGDGGKVDQEHREPNWQWGKDGDMGVPGVPLGIGGREDGVHQDEGANNLSAKAIPLGVPGGDNIGATAVAHVKPLLEALHHSSSTDGTQALHDNVEDGPSQGQLPGQEQPEGHSWVDVSSGDAGGAVDEREDHPSEGPGDALDADGGALGGGLGDAHDGEDGDVEEEEGGDELGDARAVEGPGLELPGLEQRRRRGLLVVLVVVPGPGALRRRADGLPLRELVGAQAHVLLLPLHLCSPAPRYCPWLPALSPACAVGLSVVS

SEQ ID NO: 58862 - protein, 71 aa, Zea mays
  Clone ID: 700429312_FLI.pep
VEGRETNGGRDNGTVMNAIAYCRRWTSLLNRNAGQYIRGLEYVVEWRLDVQMLKCRDWYNYTLFINCYTYT

SEQ ID NO: 58863 - protein, 300 aa, Zea mays
  Clone ID: 700430905_FLI.pep
RLGTSAAVLSPVIFGSGADRLIGSVSQPYTSYMTTPGSCPATTAATHPPMCAASAAGGSQKMVRPRLVLFGDSITEQSFRPGGWGAALADTYSRKADVVVRGYGGYNTRWALFLVHHIFPLDGLAPPLATTIFFGANDAALLGRTGERQHVPVSEYKNNLKMIVNHLKDCSNSMVIVLITPPPIDEEGRERFARSLYGQNARKLPERTNEMAGVYAGYCVELAREMCIPCVNIWSKMQEAEGWQKLYLSDGLHLTQEGNAVVHKEVVEALRNAGFKAEQMPYDFPHHSKIDGSCPEKAFQ

SEQ ID NO: 58864 - protein, 104 aa, Zea mays
  Clone ID: 700431848_FLI.pep
LKRNCLLNPPAIQGAPARSPGMYGTQAATKDSATMGSGNGRGDGVNRSPGTPSVSSSSLSDLWLPVLPFQPFLFLLLKHRSCEQGVHPFRDPILRLKQRSLPGL

SEQ ID NO: 58865 - protein, 178 aa, Zea mays
  Clone ID: 700432516_FLI.pep
RYATLALFLLYEMVMLLVITIRVVVFQAMPACKKFRLAALENEDLEIMFNGVSCTNAYAMAPGAKEGLPANDSDDVEEVSPSVEDKQARKRGVDHKSPIKKSKKNFRDMQFKRFVDSFVEKASSSKSSATSSPNDHVRQEITEMMESVISAGIVEGSDDISMPLNFSSRRSIEMCFSH

SEQ ID NO: 58866 - protein, 271 aa, Zea mays
  Clone ID: 700801246_FLI.pep
PSRSRIPGRPEPTCCAPASLEWSSSTAAVEMAANLEDVPSLDLMHELLRRMKCSSKPDKRLILIGPPGSGKGTQSPIIKDEYCLCHLATGDMLRAAVAAKTPLGIKAKEAMNKGELVSDDLVVGIIDEAMKKPSCQKGFILDGFPRTVTQAQKLDEMLAKQGANVDKVLNFAIDDAVLEERITGRWIHSASGRTYHSKFAPPKSPGVDDVTGEPLIQRRDDTAEVLKSRLEAFHRQTEPVIDYYSKKGLVVNLPAEKPPKEVTAEVQKALS

SEQ ID NO: 58867 - protein, 429 aa, Zea mays
  Clone ID: 700802690_FLI.pep
LSLPLIPRAAGGKQEIDLSAAMAAAAAAAEQGVDAARKEEEEEQVVNPWEVSAGKGGIDYDKLVDQFGCQRIDDALVDRIARLTARPPHCFLRRGLFFAHRDLNEILDLYENGQKFYLYTGRGPSSEALHLGHLIPFMFTKYLQEAFKVPLVIQLTDDEKYLWKNLTIQESKRLARENAKDIIACGFDIERTFIFSDFSFVGGAFYENMMQVARCVTMNKAIGIFGFNLEDHIGKVSFPPVQAVPSFPSSFPHLFAGKDQLRCLIPCAIDQDPYFRMTRDVAPRIGYQKPSLIESRFFPALQGENTKMSASDANSAIYVTDSAKEIKTKVNKYAFSGGQDSIELHRKLGANLDVDVPIKYLNFFLEDDDELAHIKKEYKEGRMLTGEVKQRLIAVLSEIVARHQRARAQVTEEMVDAFMAVRPLPNMFG

SEQ ID NO: 58868 - protein, 482 aa, Zea mays
  Clone ID: 700803832_FLI.pep
HSLVGGFHPSPSAVSQQDSAALSPTPILRYSFVPSDRRYPLQPRLRRRPALPRHARVDGSSSGLGILPPAAAAIRSVRPGFRGYTGLSCQVLDLIISVLLIRMGVYLSTPKTDKLSENGENDRLKFGLSSMQGWRATMEDAHSALLDLDSETAFFGVFDGHGGRVVAKFCAKYLHGQVLKSEAYSTGDLGAAVHRAFFRMDEMMQGQRGWRELSALGDKINKFSGMIEGLIWSPRGSDSNNQQDDWASEEGPHSDFAGPTCGSTACVALIRNTQLVVANAGDSRCVISRGGKAYNLSRDHKPELAAERERIMKAGGFIHMGRVNGSLNLSRAIGDVELKQNKFLPPEKQIVTANPDINVVELCDDDDFVVVACDGIWDCMSSQQLVDFIHERINTESSLSAVCERVLDRCLAPSTIAGDGCDNMTMIIVQIKKPVDRNKKAEAAGQSASNADEAKSRVAEELSMAGTHKGATICFHKAGEKK

SEQ ID NO: 58869 - protein, 401 aa, Zea mays
  Clone ID: 700803940_FLI.pep
MPPPPTAVSSCWRGTRRHRAKNLHPHPAAVSVKQPGSGVRFQQFSSLASAAAPALRVLRYQPASTLYESPSSTPPRQLQAMAMEKAASFLSSLLGGGGGEPAATVKSIFIYPIKSCRGLAVSQAPITSTGFRWDRQWVVVNAKGRAYTQRVEPKLALVQVELPPEAFAENWQPTPDDHLVIRAPGMDTLKIPLITEHATIDDVSVWEWSGSAYDEGAEASEWFSTYFGKPSRLVRFKEASETRPTDPDYAQGYKIMFTDCFPFLIASQGSLDALNEILKEPVPMNRFRPNILVDGCHPYSEDLWKTIKINNLTFLGVKLCNRCKVPTINQEDGVPGTEPTETLQTFRSDQVLRPSHKNKRQVYFGQNLVCKESLSGEGKVIRVGDPVYVVQAFASSNEAPA

SEQ ID NO: 58870 - protein, 214 aa, Zea mays
  Clone ID: 700804277_FLI.pep
FSTVPLITCYQIQVAAEGSKQREMKLRVVCRKLYDYVRYDLKEIAFPSSLPDPPHIKKRPKLTWHERWCILKEATRLYGASWVRNIGPELRPDDYKKAAEDVEEQSSNGSHPSSGSDRKGKASSEPTVLEDLAVAARGGAETLKPALRRIYMARASTYTDAMKNFVETYQEGLKDQLQEKAHGGEGGGGGGRHHHHQEQKEHGNEDEASKPPPP

SEQ ID NO: 58871 - protein, 279 aa, Zea mays
  Clone ID: 700804376_FLI.pep
LRICFVPPAPREASRRGRPAGAMPEEESTSIPLSQAAEAVDPEDPAKSPPRPSSPTTSTRKACCAVLQSWVSRKFMTGCVVLFPVAVTFFITWWFIQFVDGFFSPLYAKLGINIFGLGFLTSLVFIFLVGIFVSSWVGSTIFWVGEWFIKKMPFVRHIYSASKQVSTAISPDQNTTAFKEVAIIRHPRIGEYAFGFITSTVVLQTDKGDEELCSVYVPTNHLYIGDIFLVNSEEVIRPNLSIREGIEIIVSGGMTMPQVIASLEPMPRKSQNIRLNRMT

SEQ ID NO: 58872 - protein, 239 aa, Zea mays
  Clone ID: 700805614_FLI.pep
KKNQCITFIFLGTINQPDTELIETVMCHFREKFENLPEKVNGIEEQLLQEFSLDDSFPLGAPLFMEMPHSCSMYAEKDEECFDEDTVPSELDDDDIIFEHSGSQSDRKTSGSMASSDVLTVNQLIESVHETARQVANVPVPANPVPYDQMKSQCEALVMEKQQKMSVLLSLKHSRTDSHGSAGVDGLETNESSLLSEPELQSTRKGRMRRCDSASSESDCSFRLPPASPYDKFLKAAGR

SEQ ID NO: 58873 - protein, 71 aa, Zea mays
  Clone ID: 700618759_FLI.pep
SVSILPVSCVTLWSYLILYRQPWKGILVFFKVYPIRCKWFIVRCLPVLFLIKSGYFLSLVIFHILNYLHVK

SEQ ID NO: 58874 - protein, 64 aa, Zea mays
  Clone ID: 700619481_FLI.pep
GLKGKLVHITLQYTLYHLNPLQSKITQTCPERDSDLQSRISTKVSKFHRVVGSRIKCVENTLAT

SEQ ID NO: 58875 - protein, 91 aa, Zea mays
  Clone ID: 700620311_FLI.pep
NEWEAALSSRVRSLHSLLLCENETVKPELNGDQSISFFGWPLPQNWYVFVPFPEVVHLPDLVNSVVYNPLARKGTGERRRRVGVRETGRAS

SEQ ID NO: 58876 - protein, 135 aa, Zea mays; identical to SEQ ID NO: 36896
  Clone ID: 700620810_FLI.pep

SEQ ID NO: 58877 - protein, 117 aa, Zea mays
  Clone ID: 700465286_FLI.pep
SRTEKWIMHPGSETDASCTQQPITGDLRDNSHDLQYKFMSFVQPASPSALLDILCLSSSSAYTSDAPGQEAGAVRCGCSAGLDDSVHKIQLLARAVTDFLDTQCEIRYEDPSTHKYI

SEQ ID NO: 58878 - protein, 78 aa, Zea mays
  Clone ID: 700466251_FLI.pep
LVLFRNKNKNSSKFLCSNQAGAASFSSAKLHQFNISILQTAYPLAFNNAIACLALLEVLSMSIHQSRYCMENTAEEIR

SEQ ID NO: 58879 - protein, 173 aa, Zea mays
  Clone ID: 700466753_FLI.pep
LRHCRHLPAPTPHLRFAMNPSSSSTSSSGGYHSRAAAFASPQPRGGGGGGGRDGSDRIDALGRLLTRVLRHMAAELRIDMRTDGYVRVRDLLKLNLQTFAKAPLKSHTVDEIREAVRQDNKQRFSLLEEDGELLIRANQGHTVTTVTSESLLKPILSPDEVSEKTLTRFCNLG

SEQ ID NO: 58880 - protein, 309 aa, Zea mays
  Clone ID: 700467990_FLI.pep
PASAAMSSVHFFPASSQTPVPACLLKTSPKSPLPCPRTLATTSLQSVGGNCNAWHRPHLRLQRRVRTPAAPSDAPPVGPDGGSGGGGAGGGSGGEDEEEEGEKKKGLLPEWMNLTTEDAKTVLAAVAISLAFRTFVAEPRFIPSLSMFPTFDVGDRIVAEKVTYYFRKPCVNDIIIFKSPPVLQEVGYTDNDVFIKRVVAREGDVVEVHEGKLVVNGEGRNEEFILEPPSYDMNPVQVPENSVFVMGDNRNNSYDSHVWGPLPAKNILGRSIFRYWPPGRIGGTTKGCFSPELSPGAKPESLTDVKSTK

SEQ ID NO: 58881 - protein, 555 aa, Zea mays; identical to SEQ ID NO: 57858
  Clone ID: 700468454_FLI.pep

SEQ ID NO: 58882 - protein, 496 aa, Zea mays
  Clone ID: 700469953_FLI.pep
AYFDLHKNEDWLKDKYHPTNLLSVIERRNERCKVIAKDFFLDLQNGTLDLGPGITAGAASKLGGSDGNSEDDMDNDKRRKHGKDSSKATDSLSGAPKAHPVSSESRRVQADIEQTLALVRKLDAEKGIDGNVLSSGDHDKSDVDKSHIGSMGPIVIIRGLTTVKGLEGVELLDTILTYLWRIHGVDYYGTSESHEAKGLRHVRVDSKTSSTSDVSSADWEKKLDTFWQERLNGQDQLVILTAKDKIDAAAAEVLEPLVRKIRDEKYGWKYGCGAKGCTKLFHAPEFVHKHLKLKHPDLVLESTSKVREDLYFQNYMNDPNAPGGTPVMQQSAPDRGRRRPSMDSRLKFDRGSNRDHDKADRDGVRYGRGDHSPSRDGPDDQMFDGFRGRPSNAPFVAEFPAPPILMPVPGAGPLGPFVPAPPEIAMHMLREQGPPPPFEPNGAPHGNAGMLGPMMGGPAPIIAMPPNFRHDPRRLRSYNDLDAPDEEVTVLDYRSL

SEQ ID NO: 58883 - protein, 297 aa, Zea mays; identical to SEQ ID NO: 46699
  Clone ID: 700470027_FLI.pep

SEQ ID NO: 58884 - protein, 327 aa, Zea mays
  Clone ID: 700470594_FLI.pep
IDRDMDGLWHLGDELRGQPKVVEDRQWSLMTSKLAEITRSRGERMNDLDYARMNAAPDAKQWGKAASYQHHEEGRMDHHVGLSLKMNDLKMNEAAAAAVMKLPFRGVPYNVNPMYPKGSNANANVNAFKMNVGVNKYSSSANGKDSGGKSSGGGSNNNSGGGGNGNGTANGSSAVDKRFKTLPTSEMLPKNEVLGGYIFVCNNDTMQEDLKRQLFGLPARYRDSVRAITPGLPLFLYNYTTHQLHGVFEAASFGGSNIDPTAWEDKKCKGESRFPAQVRIRVRKLCKPLEEDSFRPVLHHYDGPKFRLELSIAETLSLLDLCEKEDI

SEQ ID NO: 58885 - protein, 278 aa, Zea mays
  Clone ID: 700471347_FLI.pep
LPGARPHPAAAMDDGDLDFSNPDTYLCPALGTDPPSSCSMDSYFDEILKDTEHLACTHTHTCNPPVHDLSHTHTCVHVHTKIVAASPGDAESPSENNSNGNAASKKRPSGNRAAVRKYREKKKAHTASLEEEVVHLRALNQQLMKKLQSHAALEAEAARLRCLLVDIRGRIEGEIGAFPYQRPPAVKNVDLLSSVDQESLLGSAAAQVANSCDFRCNHQMYCNPGMQGAISGQVLGQGACDVASMQCIGSTKSGSTKLPVCGGLDTLPAVCLPNVEKK

SEQ ID NO: 58886 - protein, 473 aa, Zea mays
  Clone ID: 700471395_FLI.pep
GSAVGPHFSGLRLDSRRLSLSPSSSPSRSASGNGTLVAAPGLAFPKAEDGTRKPFVIGVCGGTASGKTTVCDAIIQQLHDHRVALVNQDSFYHGLTEEQSEHVQDYNFDHPDAFDTDRLLECMGKLTSGQSVNIPIYDFKNHRRCSEKFRKVNESDVILEGILVFHDQRVRDLMDMKIFVDADADTRLARRVRRDTVERGRDVTSVLEQYVRFVKPAFDAFVLPSKKYADVIIPRGGDNLVAIDLIVQHINTKLGQHNLCKAYPNVFVVHTTFQIRGMHTLIRDKNITTPDFVFYSDRLIRLVVEHGLGHLPFTEKQVVTPTGSLYMGVDFCKKLCGVSIIRSGESMENALRACCKGIKIGKILFHRIGDNGQQLIYHKLPVDIAERHVLLLDPVLGTGNSANQAIELLMSKGVPEDRIIFLTLVSAPEGIHCVCKRFPHLKIVTSEIDSGLNDEYRVIPGLGEYGDRYFGTD

SEQ ID NO: 58887 - protein, 553 aa, Zea mays
  Clone ID: 700472522_FLI.pep
SAHTHNQISPKSTRRHLRFKMQIFVKTLTGKTITLEVESSDTIDNVKAKIQDKEGIPPDQQRLIFAGKQLEDGRTLADYNIQKESTLHLVLRLRGGMQIFVKTLTGKTITLEVESSDTIDNVKAKIQDKEGIPPDQQRLIFAGKQLEDGRTLADYNIQKESTLHLVLRLRGGMQIFVKTLTGKTITLEVESSDTIDNVKAKIQDKEGIPPDQQRLIFAGKQLEDGRTLADYNIQKESTLHLVLRLRGGMQIFVKTLTGKTITLEVESSDTIDNVKAKIQDKEGIPPDQQRLIFAGKQLEDGRTLADYNIQKESTLHLVLRLRGGMQIFVKTLTGKTITLEVESSDTIDNVKAKIQDKEGIPPDQQRLIFAGKQLEDGRTLADYNIQKESTLHLVLRLRGGMQIFVKTLTGKTITLEVESSDTIDNVKAKIQDKEGIPPDQQRLIFAGKQLEDGRTLADYNIQKESTLHLVLRLRGGMQIFVKTLTGKTITLEVESSDTIDNVKAKIQDKEGIPPDQQRLIFAGKQLEDGRTLADYNIQKESTLHLVLRLRGGQ

SEQ ID NO: 58888 - protein, 653 aa, Zea mays; identical to SEQ ID NO: 56213
  Clone ID: 700472543_FLI.pep

SEQ ID NO: 58889 - protein, 136 aa, Zea mays
  Clone ID: 700472656_FLI.pep
RHGLARLPLPRGRGSRSRDEEEHNRRFCVNDAAPAGSASSCSDLTSGGFFPEGANGGTRSAAFPPSACQRDSPTPPRRVEIAQAFASSNSTTQPTRRSNGEHGAQAGGYRADFPDGFVFGVATSAYQARRSWNSKS

SEQ ID NO: 58890 - protein, 225 aa, Zea mays
  Clone ID: 700472953_FLI.pep
ARSSSSPEDQACAPEMSYAYLFKYIIIGDTGVGKSCLLLQFTDKRFQPVHDLTIGVEFGARMITIDNKPIKLQIWDTAGQESFRSITRSYYRGAAGALLVYDITRRETFNHLASWLEDARQHANANMTIMLVGNKCDLSHRRAVSYEEGEQFAKEHGLIFMEASAKTAQNVEEAFVKTAGAIYKKIQDGVFDVSNESYGIKVGYAIPGQSGGAGSSSSQGGGCCS

SEQ ID NO: 58891 - protein, 513 aa, Zea mays
  Clone ID: 700473306_FLI.pep
VRVKMDGSSKGSGHSEALRNYNLGRTLGIGTFGKVKIAEHKLTGHRVAIKIINCRQMRNMEMEEKAKREFKILKLFIHPHIIRLYEVIYTPTDIYVVMEYCKYGELFDYIVEKGRLQEDEARRIFQQIISGVEYCHRNMVVHRDLKPENLLLDSKYNVKLADFGLSNVMHDGHFLKTSCGSPNYAAPEVISGKLYAGPEVDVWSCGVILYALLCGTLPFDDENIPNLFKKIKGGIYTLPSHLSALARDLIPRMLVVEPMKRITIREIREHQWFQIRLPRYLAVPPPDTTQQAKMIDEDTLRDVVNMGFNKNHVCESLCSRLQNEATVAYYLLLDNRFRATSGYLGADYQESMDRNLNQLASSESSSSGTRNYVPGSSDPHSSGLRPYYPVERKWALGLQSRAHPREIMVEVLKALQELNVRWKKNGHYNVKCRWCPGFPEVNDTLDASNSFLGDSTIMDNDDANGRLPTVIKFEFQLYKTKDDKYLLDMQRVTGPQLLFLDFCAAFLTKLRVL

SEQ ID NO: 58892 - protein, 268 aa, Zea mays
  Clone ID: 700475015_FLI.pep
YQLLCPPESWTSTLLGTKLQHMLNIPGNSRCHHCSANLADHQDNNSSSWSMKIPMHGVEEEGGAVGVEGVGLEVAMVDMETIKVAITKVVGITTIKVDMVAMMIKVGMVVDMATTKADMETIKKMVDITEVEEVVCEEEAIGVTVEAMKVAGVVAMKEAGSAAAMKVAGVVVVLVEGDMVAEEGVEWVAADERTKCMQTSGVSFNACLINISGKIRAFYVGSSSVTCEVCCFFPWARGLVVSIMHMQVLSCKSSFNFPAAEVVFHFFP

SEQ ID NO: 58893 - protein, 592 aa, Zea mays
  Clone ID: 700475469_FLI.pep
GLLPSLLAMRRHGWQLPYHPLQVVAIAVFLALGFAFYVFFVPFVGGDRLQYLLMGLYTPLITCVILLYIWCAGTDPGDPGIFLNSKRPPEKQGSSTHEYPEGVSFSNCCRVVHNSENISNNFEVKDSSSYLTFTRVLCLIYFPFSCLCKRWFHSDDQSSEQNTSEEGMFFCSLCKAEVLQHSKHCRVCNKCVDGFDHHCRWLNNCIGKRNYKGFFILLASAVLLLIMKWLVGALVLILFFMKRGEFSGQITSKLGSSFSVVAFVIVVVTCTLLAMVATIPLSQLLCFHILLIKKGISTYDYIVALREQEQQEHSEHQSPQISIISSITGLSTSSSFGPLHRGSWCTPPRLLVEDQDVFHPDMPQNSTGKKARKDEGSKRKPPGAVKISTWSLARLNAEDVTKAAVEAKKRSKVLQPITRRGNILKPDKRTDKSRVFLPVPEQSPDPMARTSASGTDGNLSDMMMETPASLAPLQHEARSDYQPSAVTSIMNLNLTSSPESSLESPDLHPFRISMSGADELRSFMSLAASESTAQKTIALSRSTSGGYEASGGDDSDQIPSRIVHRSSNWTNVILNSGRQATMSDLNLPRLHL

SEQ ID NO: 58894 - protein, 351 aa, Zea mays
  Clone ID: 700475623_FLI.pep
KMARIPSLKSLNAFPHAEEHLLKKTYSGAVVTILGLLIMITLFVHELQFYLTTYTVHQMSVDLKRGETLPIHVNMSFPSLPCEVLSVDAIDMSGKHEVDLHTNIWKLRLDKHGHIIGTEYLSDLVEKEHGAHHDHDHEQEHHDEQKKHEQTFNEEAQKMIKSVKQALGNGEGCRVYGTLDVQRVAGNFHISVHGLNIFVAEKIFEGSSHVNVSHVIHELSFGPKYPGIDNPLDDTSRILHDTSGTFKYYIKVVPTEYKYLSKKILPTNQYSVTEYFLPIRPTERAWPAVYFLYDLSPITVTIKEERRNFLHFITRLCAVLGGTFAMTGMLDRWMYRLVESVTNSKTRSVLR

SEQ ID NO: 58895 - protein, 529 aa, Zea mays
  Clone ID: 700475981_FLI.pep
EPVGSAQSSTAAAFCSVRKMFLESFRVESPRVKYGDGEIQSEYRYDTTEVVPPGNGGGAGWVVRPKSVTYNFKTSTNVPKLGVMLVGWGGNNGTTLTAGVIANREGISWETKEKVHKANYFGSLTQASTIRVGSHNGEEVYAPFKSLVPMVDPNSIVFGGWDISKLNMADAMARAKVLDFHLQKQLRPYMESMLPLPGIFNPDFVAANQGARADNVIKGTKKEQVEQIKKDIKEFKEKNKVDKVVVLWTANTERYSNVVAGLNDTMDKLLASLDKNEAEISPSTLYAIACVLEGVPFVNGSPQNTFVPGLMELAIKKNSVIGGDDFKSGQTKMKSVLVDFLVGAGIKPTSIASYNHLGNNDGMNLSAPQVFRSKEISKSSVVDDMVASNPILYKPGEHPDHVIVIKYIPYVGDSKRAMDEYTSEIFMGGKNTIALHNTCEDSLLAAPIILDLVLLAELSTRIQLKAEGQDKFHSFHPVATILSYLSKAPLVPPGTPVVNALAKQRAMLENILRACIGLAPENNMMLEHK

SEQ ID NO: 58896 - protein, 322 aa, Zea mays
  Clone ID: 700476464_FLI.pep
PHSLVSAMSLSSICCAKFHLLRNSIGDTCSVRWLKYHSRLIYETFLSSRIHQSRPPSTTVLARSTRKGSKQSFSNGRHLHSKSVESSIEVFKQSELEQLKSLHCYNVEEEFSEVKTEWPATILVFDIETTGFSRRDDRIIEFAVRDLMGGKNSTFQTLINPEKDVKNTYVHGINNSMLCRPDVPRFGEIIPILLQYVWSRQMDGKPVLWVAHNGRSFDVPFLMFEFRRCKVEMPGDWLFVDTLPIAKQLVDSNGSKLSSVSLKFLRERYKIPLTGSAHRAMQDVTTLSYVLQKLTFELKLTVPQLLEKSFRASDLPANRPAK

SEQ ID NO: 58897 - protein, 687 aa, Zea mays
  Clone ID: 700476617_FLI.pep
QKQALQKRKSQIASVVEDAVEAADLRDYSSRTRDSLSCWNPDSIGFNLIENVLCHICQKERSGAILVFMTGWDDINALKEQLQANPLLGNPSAVLLLACHGSMASSEQKLIFDKPEPGVRKIVLATNLAETSITINDVVFVVDCGKAKETSYDALNNTPCLLPTWISKASARQRRGRAGRVQPGECYHLYPRCVYDAFADYQLPELLRTPLQSLCLQIKSLRLGSISEFLSRALQSPESLSVQNAIEYLKVIGAFDQNEELTVLGKHLSMLPVEPKLGKMLIFGAIFNCLDPILTIVSGLSVRDPFLTPFDKKDLAESAKLQFSCRDYSDHLALVRAYDGWREAERDRAGYDYCWKNFLSVQTLKAIDSLRRQFLFLLKDTGLVDENMTMCNKWSRDENLVRAVICAGLYPGVSSVLNKEKSISLKTMEDGQVMLYSSSVNGKETKIPFPWLVFNEKVKVNSVFLRDSTAISDSILLLFGGCIKQGGLDGHLKMLGGYLEFFMNRDLASTYVSLKRELENLIHCKLQNPRMDIQTSEELLSAIRLLVTEDPCSGRFVYGRQEPRSKKAKTMLSPSSLSEAGGNGGDNAKNQLQTYLTRAGHSNPTYKTKQIKSYLFRSTVEFNGMQFVGQPCANKKLAEKDAASEALNWLTGDGGAITDSRGAQDADPMSLLMQPPRRRRHSHRRRN

SEQ ID NO: 58898 - protein, 469 aa, Zea mays
  Clone ID: 700476759_FLI.pep
RRLPSAPPFRPLSLASSISPPTMGKEKSHINIVVIGHVDSGKSTTTGHLIYKLGGIDKRVIERFEKEAAEMNKRSFKYAWVLDKLKAERERGITIDIALWKFETTKYYCTVIDAPGHRDFIKNMITGTSQADCAVLIIDSTTGGFEAGISKDGQTREHALLAFTLGVKQMICCCNKMDATTPKYSKARYEEIVKEVSSYLKKVGYNPDKIAFVPISGFEGDNMIERSTNLDWYKGPTLLEALDQITEPKRPSDKPLRLPLQDVYKIGGIGTVPVGRVETGVIKPGMVVTFGPTGLTTEVKSVEMHHEALQEALPGDNVGFNVKNVAVKDLKRGFVASNSKDDPAKEAASFTSQVIIMNHPGQIGNGYAPVLDCHTSHIAVKFAELITKIDRRSGKELEKEPKFLKNGDAGMVKMIPTKPMVVETFSAYPPLGRFAVRDMRQTVAVGVIKSVEKKDPTGAKVTKAAAKKK

SEQ ID NO: 58899 - protein, 462 aa, Zea mays
  Clone ID: 700477436_FLI.pep
SSPPPLPFHLLPPGDSSSSLPRRSIGPPIDRARGRRFQSGVVSIRSGSLPVWVGAMAAMDASADKNAVFRKLRAKSDNKMCFDCNAKNPTWASVTYGVFLCIDCSAAHRSLGVHVSFVRSTNLDSWTPEQLKMMVYGGNNRAQAFFKQHGWTDGGKIEAKYTSRAADLYRQLLAKDVAKSSTEDGNNSWPSSPVAASQAPNQAAAFPDLKLTEVSKENVSEKKDSEIVRSPRAPTHSFKKPIGAKKPGNKTGGLGARKLTSKPNESLYEQKPEEPAPVLPSSVIESTTTRSKSHTSRFDYVENAPALKNGNSSEGNHMSGHVAPPMSSNFFAEFGMDSGYQKKSTSSSSKVQIEESREARQKFSKAKSISSSQFFGDQASFEKDAQVSLQKFSGSSAISSADLFGHPANNSSVDLSASDLINRISFQATQDLSSLKNMAGETGKKLTSMASNIITDLQDRIL

SEQ ID NO: 58900 - protein, 516 aa, Zea mays
  Clone ID: 700477731_FLI.pep
YFYVKLLCRSPSSTLLVQLAFTCLVYPALILAYMGQAAYLSKHHDFYSSSQVGFYIAVPDKIRWPVLILAILASVVGSQAIISGTFSIINQSLSLSCFPRVKVVHTSEKIHGQIYIPEINWLLMILCIAVTVGFRDTKHMGNASGLAVITVMLVTTFLTSLVIVLCWHRPPLLALAFLLFFGSIEALYFSASLIKFLEGAWLPILLALILMAVMLIWHYTTIKKYEFDLHNKVTLEWLLALGDRLGMVRVPGIGLVYTDLTSGVPANFSRFVTNLPAFHQVLVFVCVKSVPVPYVFPAERYLIGRVGPPGHRSYRCIVRYGYRDVHQDVDSFETELVETLATFITLDASYRCSEASERELELDPGEQERRLTVIASNPLRRRASYDLQDSVQHSAASTVEVRATAADSLSPRDAEISSAAGPKQVRFFIDSHVVSPEAAENKQVADELEALAAAREAGTAFILGHSHVQCKPGSSVLKRLAVDVGYNFLRRNCRGPDVALRVPPASLLEVGMVYVL

SEQ ID NO: 58901 - protein, 622 aa, Zea mays
  Clone ID: 700477758_FLI.pep
KSSLPCSFSLSSRRRNFIRQQNRPVEEIEKKNPNHTARNIKQTERKRRIAARTKWPAQEMASMQSWRKAYGAIKDTTTVSLANLNSDFKDLDVAIVKATNHVECPPKERHLRKVVAATSIARPRADVAYCIHALARRLAKTRNWIVALKALVVIHRLLREGDPTFREELLNFTQRGRILQLSNFKDDSSPIAWDCSAWVRTYGLFLEERLECFRVLKYDVEAERLSKQGQGPEKGHSRTRELDSQDLLEQLPALQQLLYRLVGCRPEGAANNNYLVQYALALVLKESFKIYCAINDGIINLVDKFFEMPRHEAHKALEIYRRAGQQAGNLSDFYENCRGLELARNFQFPTLREPPQTFLATMEEYVKEAPRMVPVREPLELPERLLLTYKPEESEDIPEPASVEEENAPVEEPVLVPPVTEVVSPPKTEVADTGDLLGLDDPNPAVSAIEESNALALAIVPTDGASTTGNTAFQDKGFDPTGWELALVTAPSNTTSSASVGQLGGGFDKLILDSLYDDGAYRQRQQQQVYGSAVPNPFMTNDPFVMSNQVAPPPSVQMAAMSQQHQQIPTMMQPNPFGPPMQPQVGMGPATNNPFLDAGFGAFPVANNSHQQHNPFGSAQLL

SEQ ID NO: 58902 - protein, 493 aa, Zea mays
  Clone ID: 700353018_FLI.pep
ASQPHPLTPPPLTQCSTPRTKQLTPMASYDKAFESYKKALTTAASVAASMMLVRSVVNELVPPELRDLVFSGFGYLRSRTSSDHTIIVEKKNDGFANNYVYCAVKTYLATRMNTDIQQRLRVSSMDEDDKMMVSMDEGDEMLDVYQGTEFKWCLVCKDNSNDSLNSSQNESHFFELTFNKKHKDKALRSYLPFILATAKAIKAQERTLMIHMTEYGNWSPIELHHPSTFDTLAMDKKLKQSIIDDLDRFMKRKDYYRKIGKAWKRGYLLYGPPGTGKSSLIAAMANHLRFDIYDLELTAVTSNSDLRRLLVNMDNRSILVIEDIDCTIELKQRQEAEGHDESDSTEQNKGEGKVTLSGLLNFVDGLWSTSGEERIIVFTTNYKERLDPALLRPGRMDMHIHMGYCTPESFQILANNYHSIEYHDTYPEIEKLIKEVTVTPAEVAEVLMRNDDTDVVLHDLVDFLKSKIKDANEIKTEHKEADNQLDEKKNDKK

SEQ ID NO: 58903 - protein, 524 aa, Zea mays
  Clone ID: 700353062_FLI.pep
ELRSQHRDDDTSLTSILLYSSSQIPLSEPRRLPQIRGSSAAMISSSKLKSVDFYRKIPRDLTEASLSGAGLSIVAALAMVFLFGMELSSYLAVNTTTSVIVDRSSDGEFLRIDFNMSFPALSCEFASVDVSDVLGTNRLNITKTVRKYSIDRNLVPTGSEFHPGPIPILNKHGDDVEEDHVDGAFSLSSRNFDSFSHQYPVLVVNFYAPWCYWSNRLKPSWEKTAKIMRERYDPEMDGRILLGKVDCTEEVELCRRNHIQGYPSIRVFRKGSDIKENQGHHDHESYYGERDTESLVAAMETYVANIPKEAHALEDKSNKTVDPAKRPAPMASGCRIEGFVRVKRVPGSVVISARSGSHSFDPSQINVSHYVTQFSFGKRLSPRMLHEFIRLTPYLRGYHDRLAGQSYTVKHGEVNANVTIEHYLQVVKTELVTQRSSKELKVLEEYEYTAHSSLVHSFYVPVVKFHFEPSPMQVLVTEVPKSFSHFITNVCAIIGGVFTVAGILDSIFHNTLRMVKKIELGKNI

SEQ ID NO: 58904 - protein, 322 aa, Zea mays; identical to SEQ ID NO: 52139
  Clone ID: 700355840_FLI.pep

SEQ ID NO: 58905 - protein, 433 aa, Zea mays
  Clone ID: 700356484_FLI.pep
HCHSSHWHPSDTGRDFSDCRQPGTHQQHPPPAGSERGPTRITQIGTPEEEQRRPASPEQRGRGEASQRRRSSSFGFPDPTPPVSLGECNPASVELKAAQVEMSTLKKSDKKAALDFAAWSFNVTTSVGLIMVNKALMATYGFSFATTLTGLHFVTTTLMTILFRWLGLSQPSHLPLADLVKFVIFSNLSIVGMNVSLMWNSVGFYQIAKLCMIPASCLLEVVFDHVHYSRDTKLSIMVVLIGVAVCTVTDVSVNARGLIAAVIAVWSTALQQYYVHFLQRKYSLNSFNLLGHTAPAQAGSLLLVGPFADYLLTGKRVDQFSLSSLALFFLALSCFIAIGVNLSQFICIGRFSAVSFQVLGHMKTVLVLSLGFLFFGKEGLNLQVVLGMVLAVLGMIWYGNASAKPGGKERRSILPVRSASLKGSSEEKAGAEK

SEQ ID NO: 58906 - protein, 567 aa, Zea mays
  Clone ID: 700382382_FLI.pep
LPLSAAAAPDARVVFGSRRGSSGRRGRRLGAKMQIRLSPSMRSITISTSHGLLDLMRLKVAARHFSYRTVFHTVLILAFLLPFVFILTAIMTLEGFNKCSSLDCLGRRLGPRLLGRGNDGSMRLVRDLYVMLDKVNSEEAPLDLKVPETFDEFIWDMKNNDYDLRSFAFKLKATMESMDKELRSSRLSEQLNKHYAAIAIPKGLYCLSLRLTDEYSSNALARKQLPPPELVPCLSDNSYFHFVLASDNILAASVVVRSTIRSSLKPERIVFHVITDKKTYPAMHSWFALNSLSPAIVEVKGVHQFDWLTQENVPVLESIETQRAARDRYHGSRRPITSANDSPRVFAAKLQAGSPTYTNVLNHIRIYMPELFPSLNKVVFLDDDVVVQHDLSPLWDIDLSGKVNGAVETCRGGDSWVMSKRFRNYLNFSHPLIAKNFDPSECAWAYGMNIFDLNAWRKTTIKDKYHHWVKENLKSNFTLWRLGTLPPGLIAFKGHVHPIDPSWHLLGLGYQEKTDISSVEQAAVIHYNGQSKPWLEIGFKHLQPFWTKYVNYSNEFLRNCHIMEPQL

SEQ ID NO: 58907 - protein, 153 aa, Zea mays
  Clone ID: 700382415_FLI.pep
QQPHHARLFTVAGAIALGRAEGVFTTVGHVKEAILVLVLFVDCRHQRGSWWQGVLHKDKDGLLWAQLDSLPHHIDKLADSEISRDKVLLLINLGDISFASFLNNHRNSVGILIPDPGRFGLPFLEVVLHFERCPGHRQPAQVNDKDEIDPRIA

SEQ ID NO: 58908 - protein, 217 aa, Zea mays
  Clone ID: 700382462_FLI.pep
HKLTTELHSSYWINLFADESGSFPEVKADYIASTSWQRALQIPDDAVTFDDKDPLVARVVSQKETSQTRTVWSPGSEFSLCNCSWSMQGNLCKHVLKVNMVCGARKDFQPSLSFQSFQHVLLDLWQKPLDDSFSLDLSVARVMQMQEKIKHVAELATSSGIAQVAGKLPMQWTKKRGRRVGVKPTSALLLPRSKGSLQKDLTPKNSRKRKRLSRFKG

SEQ ID NO: 58909 - protein, 337 aa, Zea mays
  Clone ID: 700282258_FLI.pep
ASLIIISTNFFLLMIAGQLPGVTAPIPGVGVLPNLYNLAAGQPQAMTQQATRHARRVYVGGLPPTANEQTVAIFFNGVMAAIGGNTAGPGDAVLNVYINHDKKFAFVEMRSVEEASNAMVLDGIMFEGAPVKIRRPTDYNPSLAAALGPSQPNPNLNLSAVGLTPGSAGGLEGPDRIFVGGLQYYFTEAQVRELLESFGPLRGFDLVKDRETGNSKGYAFCVYQDLNVTDIACAALNGIKMGDKTLTVRRANQGASQPRPEQESILLQAQQQVQMQKFVYQVGGALPTKVVCLTQVVTEDELRDDEEYDDIVEDMREEGHKYGKPHETHRLLLPSLF

SEQ ID NO: 58910 - protein, 297 aa, Zea mays
  Clone ID: 700282336_FLI.pep
HPELGPGHHLRHGRGAADREGPAGPPRRRSQGGGHAGVRGGGIRHHALQGPHHLRSRRRRRPRAGVNQQGGGRRQELDAGLRVPDRALPVVVRLAGAAGSRAEEVPGTAVRHLLHLLLRRHPVPHHRRLHGEGRRRMEVPLRIRALHHPICRVHRVRGGVRGADLVHRPRGPGVRGGIPAGADAGGGHHGVAHHGREVLPGRHHRRRAHHRRPVPRALGQERGEGALRQGRRHPRLRQRRPRGAPSGRRRWHPERQQGGSVGRHAASLAAVLHLHRQCLIGRPMNPSSSSIDHGAWR

SEQ ID NO: 58911 - protein, 410 aa, Zea mays
  Clone ID: 700347471_FLI.pep
HLPRRSTPQHPLPPPLTSPALPATTTASMRQPTSAGGDAGFLRADQIDLKSLDEQLERHLGHPAERVVGPVSGTGSRRGETAKLGPEELTPLQRCREDWEIDPTKLIIKGVIARGTFGTVHRGVYDGQDVAVKLLDWGEDGHRSEQEIGALRAAFAQEVAVWHKLEHPNVTKFIGAIMGARDLNIQTEHGQLGMPSNICCVVVEYLAGGALKNFLIKNRRRKLAFKVVVQIALDLARGLCYLHSKKIVHRDVKTENMLLDKTRTVKIADFGVARVEASNPSDMTGETGTLGYMAPEVLNGHAYNRKCDVYSFGICLWEIYCCDMPYPDLSFSEVTSAVVRQNLRPEIPRCCPSSLANVMKRCWDANPDKRPEMAEVVSMLEAIDTSKGGGMIPKDQTQGCLSCFRQYRGP

SEQ ID NO: 58912 - protein, 478 aa, Zea mays
  Clone ID: 700347818_FLI.pep
QIRSIPLSPSLPHRTSRRARGGGVEMESDQGKLFIGGISWETTEEKLSEHFSAYGEVTQAAVMRDKITGRPRGFGFVVFADPAAVDRALQDPHTLDGRTVDVKRALSREEQQASKAANPSGGRNSGGGGGGGGGSDASGARTKKIFVGGLPSTLTEDGFRQYFETFGIVTDVVVMYDQNTQRPRGFGFITFDSEDAVDRVLQKTFHDLGGKLVEVKRALPREANPGGSGGGRSGGGGGYQSNNGHNTSSGSYDGRSDGGRYGQTQQGSGGGGYPGYGAGGYGAGAAGYGYGANPAVGYGNYGAGGYGGVPAAYGGHYGNPGAAGSGYQGGHPGSNRGPWGSQAPSAYGTGGYGGSAGYSAWNNSSGGGNALNSQAPGGPAGYGSQGYGYGGYGGDPSYASHGGYGAYGARIDSAGNPATGGSSGYNAGYGSGGANSGYSSAWSDPSQGGGFGGSVNGGAEGQSTYGTGYGSVQPRVAQ

SEQ ID NO: 58913 - protein, 573 aa, Zea mays
  Clone ID: 700348224_FLI.pep
LKHVFSSHLSFLVAMALPFMHIPRHLQAHLLRKNPLTYHRSFKKDISSPNSVLEPHSEELHKIHLGLSSGVEDATKWEHINIKSIEPDGAYVIASQLNLVEEQQGGSYVASLELELQQARDRVSKLEAERLSAKKQLNHLFKKLAEEKAAWRNREHKKVQAILEDMKADLEHEKKNRRQLETINFKLVDELKEVKMAAKQLLQEYDNEQKTRELTDEVCNKLVREIEEHKSEIEALKQDSVKLRGDLDEDRKLLQMAEVWREERVQMKLVDAKLILEAKHEQLSKLQEEVEAFISTFSSSKGDSTIVEAAHNIVQAIGSARDQEVEFTYEPPRASEDILAIFEELRPSEEMEKKETEPCLKQEIQEASPTADIFLENRARLFPDGSHSDESDKEDGSSWETMSHEEMQGSSHSPYESEHSVNKIFDRISWTSGNDSEGEQANKLCDDLSSVYLTDMEQSKKKESAISKLWKSSPLKNCEFRTKDVADMINGRLSSASLPNGVYSTAKGLNLDMGDSTPSTTQWSSPDSMNSQLNRGFRGCMEMVQRQSLKAKLLEARMESQKIQLRHVLNQKT

SEQ ID NO: 58914 - protein, 596 aa, Zea mays
  Clone ID: 700348302_FLI.pep
PTAFFSCLVLLATMAAAAEVDPSPNPPPTTASGLSKTKTREADRRRRRRSKAKKNKSVTEADAQDADGGASSSDAKENADPNPEPQVEVEIEYVPEKAELDDPLLDDFKAIFEKFTFKDAAAAAAEDDKKDEGAADATKKGSLDDDDDDEDDEQEANKKKDGGLSNKKKKLERRMKIADLKQICNRPDVVEVWDATAADPKLLVYLKAYRNTVPVPRHWSQKRKFLQGKRGIEKQPFQLPDFIAATGIEKIRQAYIEKEDSKKLKQKQRERMQPKMGKMDIDYQVLHDAFFKYQTKPKLSSHGDLYYEGKEFEVKLREMKPGMLSRELKDALGMPDGAPPPWLINMQRYGPPPSYPQLKIPGLNAPIPPGASFGYRPGEWGKPPVDEHGRPLYGDVFGVLQQDEPNYDDEPVDRSKHWGDLEEEEEEEEEEEEEEEPMEDEEMEDGIQSVDTISSTPTGVETPDVIDLRKLQRKETDKQAERPLYQVLEQKEERIAPGTLYGSSHTYVLGTQDKSSAPKRVDLLKNQKSDKVDVTIQPEELEAMDDVLAAKYEEAREEEKLRNQKEDFSDMVAENAHKRKRKQEKEGKSKKKEFKF

SEQ ID NO: 58915 - protein, 518 aa, Zea mays
  Clone ID: 700348381_FLI.pep
DYRGETHLSPPRFAPLQPPPPPSPASTMGDYGHGGGQMRGNPDSRPRGQGQRPNVQQLKLMGQIHPTGLTPNLLKLFEPRPPLEYKPPLEKRKLPAYTGMAQFVSHFAEPEDPEYAPPVPKCETRAEKKARIRNNKLEQGAAKVAEELQKYDPQSDPNATGDPYKTLFVARLNYETSEQRIKREFEGYGPIKRVRLVTEKDTSKPRGYAFIEYVHTRDMKNAYKQADGRKVDNRRVLVDVERGRTVPNWRPRRLGGGLGSSRMGGTDTDKKDSTREQQQGGRPRSEEPRRDDRRADRDREKSRERVRERDREERTRERSHDRTRDRDLRDEKHHHRDRERTRDRERGKDRERDHGRDRERDRRDRDKDRGRDYDRERDRGRSHDRHRERGRDRGERDYERTSHERDRGHMHERDADYGNGGTKHDKNLSSYGQDYGYGQYEQHKGHDAYGYSQDVRGHETEHSKRHEHEYYRVDSYGKMEANYQMPPNNAEPEGPEEGEAYEEGDYQYHRSGEHMKEA

SEQ ID NO: 58916 - protein, 495 aa, Zea mays
  Clone ID: 700348928_FLI.pep
EFVGFQASEMVSSQPSSLTAILAQGPNHCPVNILLPMGPPDVVSSDNVEYDFSDVFGSTPVQTPTNLCGFGPESPAPTVESNEEFYSDPVVIINRSHSLVGPTSLVSRSLRLSKLSLGKNEGSSELVKCLSEEKEGDQGQLSDEDLGNAMTEDGGIGLDDLEILKLVGQGAFGKVFQVRKKNTSEIYAMKVMRKDRILEKNHSEYMKAEREILTKVDHPFIVQLRYSFQTKYRLYLVLDFINGGHLFFQLYKQGLFREELARIYTAEIVSAVAHLHANGIMHRDLKPENILLDADGHAMLTDFGLAKEFCENTRSNSMCGTLEYMAPEIVLGRGHDKAADWWSVGILLFEMLTGKPPFVGNREKVQQKIIKDKLKLPSFLSSEAHSLLRGLLHKEPNKRLGSCPGGSNEIKNHKWFKPINWRKLEARQIQPSFRPNVAGLTCIANFDECWTKTPVLDSPVSTPAGGGHSNFAGFTYVRPAPILEEVNASGSRLKD

SEQ ID NO: 58917 - protein, 520 aa, Zea mays
  Clone ID: 700349015_FLI.pep
LSHSIKKAKGIDTRSNTEPILLGILSAVGTTYTNIMANLADSFLADLDELSDNEGYPEEDNAEAAGRDDDEDDDMPDLESLNYDDLDSVSKLQKTQRYNDIMQKVENALQKGTDFSNQGSILEEDPEYQLIVDCNALSVDIENEIIIIHNFIRDKYRLKFPELESLVHHPIDYARVVKKIGNEMDLTLVDLEGLLPSAIIMVVSVTASTTSGKPLSEDNLEKTTEACDRALTLDASKKKVLDFVESRMGYIAPNLSAIVGSAVASKLMGTAGGLGALAKMPACNVQLLGAKRKNLAGFSTATSQFRVGYLEQTEVFQSTPPPLRTRACRLIAAKSTLAARIDSIRGDPTGKAGRNLLEEIRKKIEKWQEPPPAKLPKPLPVPDSEPKKKRGGRRLRKMKERYAQTDMMKLANRMQFGIPEESSLGDGLGEGYGMLGQAGSGKLRVSAGQSKLAAKVAKKFKEKSYGSSGATSGLTSSLAFTPVQGIELSNPQVQGNLLGGGTQSTYFSETGTFSKIRRTQ

SEQ ID NO: 58918 - protein, 478 aa, Zea mays
  Clone ID: 700349043_FLI.pep
SSRRIRQGAAMNEKASVSKELNAKHKKILEGLLRHPENRECADCKSKGPRWASVNLGIFICMTCSGIHRSLGVHISKVRSATLDTWLPEQVAFIQSMGNEKANSYWEAELPPNYDRVGIENFIRAKYEDKRWVPRNGTSKSSSSVRDEKSQESPASANRSGHGHRSSFEQNRASPALPSKVAHAASRISSQASPQPPKVETPVPKVVLPPQSQKSPAKVDATPPKVEKPSVTPPPKVDYATDLFNMLSMDGTTEKESASSSNDDNGWDGFQSAQPVPSSEKKDSAKPAESKTQSTSGMEDLFKDSPAVPLSSAPAVSQVNAKNDIMSLFEKSNMVSPFAAHQQQLALMSQQQALLMAALKAGNAPQMMIPGTANQLNANGTLPFQNWTNLYQNPGSTPAAAQNGATKVANNNQDFSSGTFGFGTPGVYNISPAVPANGATTAGAINNGTASTASSTLPSQSGKDYDFSSLTQGFFTKR

SEQ ID NO: 58919 - protein, 170 aa, Zea mays; identical to SEQ ID NO: 42581
  Clone ID: 700349095_FLI.pep

SEQ ID NO: 58920 - protein, 593 aa, Zea mays
  Clone ID: 700349096_FLI.pep
RLERSRPGVPVPVAKPAADEMDYLRTVVPSQLLAERGSNLVVINPGSGNVRMGFASQDVPFNIPHCIARHINPQEGEEPRFSVRDQMLNCHATSSQNAERESAYDIIAALMKIPFLDDEEMPSPNQPLPPKMGRVDGFSSQQNRDDNKFTWTDVSERIIKPSTPFDRSVYKDAEEDTLPSTSDDDNGQDFKENKYKEMIFGEDALKIPPSESYCLSRPIRRGHFNVSHNYSVHQVLEDLRTIWNWILTEKLHINPRDRGLYSAILVLGETFDNREIKEMLSIVLHDLGFSTAVVHQEALSAAFGNGLSTTCVVNIGAQVTQVVCVEDISRCLLWVQRRHGTWPNFQTDPMSNPIDMLMLNKIKESYSQIKTGSIDAAVLVHSYDNERSGGHQKTRLSAINVPPMGLLYPRVLVPEEYPPPPRSWFQDYDDMLEDTWQTSDGLYPSGNGGFGMWDSYPMFPTRLKKFDNIGLVEAIISSVLSTGRVDLQKKLFGSIQLVGGAASTAGLAQVLEQRVRTKISANQSIEKVEVLQSRTYPLFVPWKGGVILGVLDIGKDAWIHREDWIKNGVHIGSGRKYKDSYFLQAQVMCYYNV

SEQ ID NO: 58921 - protein, 189 aa, Zea mays
  Clone ID: 700349476_FLI.pep
LCVYLLGSSSLNFFYLGAGGGNKMNRKPGDWDCRACQHLNFSRRDACQRCSEPRGVGDRSGGGGDLGGRGGSSFGGGFGAGSDVRPGDWYCSCGAHNFASRSNCFRCSAYKEEAAGAFDSDMSRSRGYAGFGSGAAARTNRPGWKSGDWICTRSGCNEHNFASRMECFRCNAPRDSGSAATTTYENYLH

SEQ ID NO: 58922 - protein, 570 aa, Zea mays
  Clone ID: 700349556_FLI.pep
PVSPSSARTSASPRSAARSARRAAPSSRLKCPFDAIEIINLPKDLEKDTTHRYGPNTFKLHRLPVPRPGQVLGLVGTNGIGKSTALKVLAGKLKPNLGRFKNPPDWQEILTYFRGSELQNYFTRILEDNLKAIIKPQYVDHIPKAVQGNVGQVLEQKDERDMKSELCVDLELNQVIDRNVGDLSGGELQRFAIAVVAVQNAEIYMFDEPSSYLDVKQRLKAAQVVRSLLRPNSYVIVVEHDLSVLDYLSDFICCLYGKPGAYGVVTLPFSVREGINIFLAGFVPTENLRFRDESLTFKIAETQENAEEIETYQRYKYPTMSKTQGNFKLTVVEGEFTDSQIVVMLGENGTGKTTFIRMLAGLLKPDTVEGTDIEIPEFNVSYKPQKISPKFQNTVRHLLHQKIRDSYMHPQFVSDVMKPLQIEQLMDQEVVNLSGGELQRVAICLCLGKPADIYLIDEPSAYLDSEQRIVASKVIKRFILHAKKTAFIVEHDFIMATYLADKVIVYEGRPSIDCTANAPQSLVSGMNKFLSHLDITFRRDPTNYRPRINKLESTKDREQKSAGSYYYLDD

SEQ ID NO: 58923 - protein, 343 aa, Zea mays
  Clone ID: 700349862_FLI.pep
SLPDSASGKIKIGINGFGRIGRLVARVALQSEDVELVAVNDPFITTDYMTYMFKYDTVHGHWKHSDITLKDSKTLLFGDKPVTVFGIRNPEEIPWGEAGAEYVVESTGVFTDKDKAAAHLKGGAKKVVISAPSKDAPMFVVGVNEDKYTSDVNIVSNASCTTNCLAPLAKVIHDNFGIVEGLMTTVHAITATQKTVDGPSAKDWRGGRAASFNIIPSSTGAAKAVGKVLPDLNGKLTGMSFRVPTVDVSVVDLTVRIEKGASYEDIKKAIKAASEGPLKGIMGYVEEDLVSTDFLGDSRSSIFDAKAGIALNDHFVKLVSWYDNEWGYSNRVVDLIRHMFKTQ

SEQ ID NO: 58924 - protein, 764 aa, Zea mays
  Clone ID: 700350643_FLI.pep
ACKAIWYLAHAVDIMSIGAHHFSFPLANSWRQIHSMQEQSSKADSNSTNLINIFVKSFLASRPIQVAVYHCLHNGLESAIHACLQLISRACLQNVTFCAIMCRPWNSPSDVDVVEYGGDGTIVSDMFSLLSLCGSYLNKESRQNSNQKCKLSNPHALVVHCCLALATIAACLKSEGGSSASLVLTSSQKKQRSRLSVLAHLSSVDDTVKSCLQPHCASAMLALSSLVSLENGGQTRSSLCETALALFPRMATLHTLLKLWLSDGSEALCRYNAGLLNLFGLRDGSIGLLETRLKWGGPLAIEQACSVGIPQLLIRLLTDGFIKEVSDGKDGSTSRSGLSPLGVVWTLSALSQCLPGGVFREILYRREQLKLLTDLLSDTHLKALAAWTGLGGGKRGVRELINSVVDILAFPFVAVQSSPNMPSASASINSGFLLNVASPGGRIGTENKEMLKTIEQNMPQYIQVLLEVGIPGCMLRCLDYVDMEDLGRPLAIVAKMAGYRPLALQLHKEGLLDPSRVAALLEGPIAKETLLDFLMIISDLARMSKDFYVPIDKAGLVVLLKNFLSNGDPDIRAKACSAIGNMCRHSSYFYGPLAANKVIQLVVDRCSDPDKRTRKFACFAVGNAAYHNDMLYEELRRSIPQLTTLLLGPEEDKTKGNAAGALSNLVRNSDMLCEDIVSQGAIQALLKMVGSYSTVALSPSRRDALTESPLRIVLFALRKMCDHAICRNFLRSSELLPVIVHLRQSPDPTISEYASAIATRVSQA

SEQ ID NO: 58925 - protein, 638 aa, Zea mays
  Clone ID: 700350719_FLI.pep
GSVLGGNAMEWDSESDGAGSVGVDEQEEEQEQEEEEEERGGEGGGGDAGGMFTLAIEGMLRASGPCGLVVTDALEPDCPIIYANRGFEEATGYRAEEFLGRNCRFLQCRGPFARRRHPLVNAAVVSEIQRCINNSIEFRGDLLNFRKDGSPLMNRLHLTPIYGDDETITHYMGIQFFTDANVDLGPLPCPMTKEPVRSTRFAPDNSFRPISAGPEHSNFCREYSSLFQLTDEVLCQSILSRLTPRDIASVSSVCRCLYHLTRNEDLWRMVCQNAWGSETTRALETVPAARRLGWGRLARELTTLEAVAWRKLTVGGAVEPSRCNFSACAVGNRVVLFGGEGVNMQPMNDTFVLDLNASNPEWRHINVSAAPPGRWGHTLSCLNGSWLVVFGGCGRQGLLNDVFMLDLDAKQPTWREIPGVAPPVPRSWHSSCTLDGTKLVVSGGCADSGVLLSDTYLLDVTMDRPVWREVPASWKPPSRLGHSMSVYDGRKILMFGGLAKSGPLRLRSSDVYTMDLSEEEPCWRCLTGSGMPGAGNPAGAGPPPRLDHVGVSLPGGRILIFGGSVAGLHSASQLYLLDPTEEKPTWRILSVPGHPPRFAWGHSTCVVGGTKAIVLGGQTGEEWMLTEIHELSLANNSV

SEQ ID NO: 58926 - protein, 187 aa, Zea mays
  Clone ID: 700350740_FLI.pep
KKNSPSTRPPVPRVLNRNRRPREQCEAPTAMARTKHQAVRKTAEKPKKKLQFERSGGASTSATQERAAGTGGRAASGGDSVKKTKPRHRWRPGTVALREIRKYQKSTEPLIPFAPFVRVVRELTNFVTNGKVERYTAEALLALQEAAEFHLIELFEMANLCAIHAKRVTIMQKDIQLARRIGGRRWA

SEQ ID NO: 58927 - protein, 231 aa, Zea mays; identical to SEQ ID NO: 43391
  Clone ID: 700350831_FLI.pep

SEQ ID NO: 58928 - protein, 381 aa, Zea mays
  Clone ID: 700350851_FLI.pep
GDTSVQYNTSMYVCMCPRGHTYAPDRTLSVSLQTHDDEPDTQQYHTIHTLQAACRPNASSSDVAVAGALGRHGGAVAVAIGAVVVDGVAAPDVGQAAVLRGVEVPELRLVPPARALGGAEARLRGGLAAVDVEAAVGGDEGRVGPVRLLAPAAGRPVVGVPQAGVELHRLAERVPHAQVGARVLEHPDRHVVHEERDHVEVPEDGVGVVLLGGVEPEVDPLLAVALAAGEHVGLQDVGLSRPVAQELEVDLVVLRVLRRQVEGRDGARGVAADELHVHAEVAEEVGAPRLEARAGGLVQVQLHLPPAVDVVDVVLRPRRHVVLLERHVHGLPRRRRRRPLRQQRHRHGGNLQPPRRRHLRLHWIASASAGPRVVWCGVAPL

SEQ ID NO: 58929 - protein, 112 aa, Zea mays
  Clone ID: 700351051_FLI.pep
RLHVTNRQGRLEWKEPIQPNEEAKSPISAPPPFCVVLRPPSFRVVLSPPPFVVAASSSRTDPHRPHCHQRCRHVSEQPLPASPLRADRPVHRVQDLGDHEGGQGARWHPLRL

SEQ ID NO: 58930 - protein, 235 aa, Zea mays
  Clone ID: 700351208_FLI.pep
EIEDKGGEEMSRGGSHGELGQRIDYVFKVVLIGDSAVGKSQLLARFARNQFNLDSKATIGVEFQTRTLNIDARNVKAQIWDTAGQERYRAVTSAYYRGAVGAMLVYDITKRQSFDHVARWLEELRGHADKNIVIMLMGNKSDLGTLRAVPIEDAKEFAERENLFFMETSALEAINVENAFMTVLTEIYRTVSKKNLVANEEPDSSGNSSLLKGTKIVVPGQEPPSTLKATCCMSS

SEQ ID NO: 58931 - protein, 563 aa, Zea mays
  Clone ID: 700351224_FLI.pep
LNRVSLAMASSWTLPDHPKLPKGKPVAVVVLDGWGEANPDQYNCIHVAQTPVMDSLKNGAPEKWRLVKAHGTAVGLPSDDDMGNSEVGHNALGAGRIFAQGAKLVDQALASGKIYDGDGFNYIKESFENGTLHLIGLLSDGGVHSRLDQLQLLLKGVSERGAKKIRVHILTDGRDVLDGSSVGFVETLENDLLELRGKGIDAQIASGGGRMYVTMDRYENDWDVVKRGWDAQVLGEAPYKFKSALEAVKTLRAQPKANDQYLPPFVIVDDSGKAVGPVLDGDAVVTINFRADRMVMLAKALEYADFNNFDRVRVPKIRYAGMLQYDGELKLPSRYLVSPPEIDRTSGEYLVKNGIRTFACSETVKFGHVTFFWNGNRSGYFDETKEEYVEVPSDSGITFNVAPKMKALQIAEKARDALLSGKFDQVRVNLPNGDMVGHTGDIEATVVACKAADEAVKIILDAVEQVGGIYLVTADHGNAEDMVKRNKSGKPLLDKNGGIQILTSHTLQPVPVAIGGPGLHPGVKFRNDIQIPGLANVAATVMNLHGFEAPADYEQTLIEVADN

SEQ ID NO: 58932 - protein, 414 aa, Zea mays
  Clone ID: 700351965_FLI.pep
ARADRPPGCRAAPGRRAVGGPVRPGGPRARGRGARAGGGVRGARVLPGDGPRRAGQTRARRGGRGGRVLRAATGREGGGGPHARVRKQAHRRQRRPRLGRVPPARWHTRRRRVLLGIIALRRRPVAVRAGRAVTGPSGRVHGGGAADGVRGAGADGGGAGHRRGRAAAGAAGGARGQRLHAAGEPLPAAAGAQPQPHGVRRAHRPADHLGAPRQRHLRPGDRAAGRRLGLRPARRGRLLRQRRRHPAGVDEREVQEREAQGGGEQREVPGVHGLLRRPAARREAGPAAAAPGRRRPEPVPGLHLERVQDQRVQDQARGRPPVPLREEVARGYVICMTGGRIDYHVCFSVYVSCIATALATGARTCILVAMLVLYVHVYARIYMVAPHRVSCIHCYLSMSTNHACMVLLLAFTIT

SEQ ID NO: 58933 - protein, 483 aa, Zea mays
  Clone ID: 700352146_FLI.pep
SYSPISATQSFPQFPPFSHFSPPPPLPPFNNTMRECISIHIGQAGIQVGNACWELYCLEHGIQADGQMPGDKTIGGGDDAFNTFFSETGAGKHVPRAVFVDLEPTVIDEVRTGTYRQLFHPEQLISGKEDAANNFARGHYTIGKEIVDLCLDRIRKLADNCTGLQGFLVFNAVGGGTGSGLGSLLLERLSVDYGKKSKLGFTVYPSPQVSTSVVEPYNSVLSTHSLLEHTDVAVLLDNEAIYDICRRSLDIERPTYTNLNRLVSQVISSLTASLRFDGALNVDVNEFQTNLVPYPRIHFMLSSYAPVISAEKAYHEQLSVAEITNSAFEPSSMMAKCDPRHGKYMACCLMYRGDVVPKDVNAAVATIKTKRTIQFVDWCPTGFKCGINYQPPSVVPGGDLAKVQRAVCMISNSTSVVEVFSRIDHKFDLMYAKRAFVHWYVGEGMEEGEFSEAREDLAALEKDYEEVGAEFDEGEDGDEGDEY

SEQ ID NO: 58934 - protein, 532 aa, Zea mays
  Clone ID: 700352308_FLI.pep
GDLVGSNVWSVCLHHLVAALHFLAIKRRGPCAGRGDWRGRESSHPQVLSFCEIEIRLGTDRQRKVNCGKEDRKMGIGDGSSNGNQQPVHKEIRDETTPLLPVKVEEDEGFHEFNGASFSGAVFNLSTTIVGAGIMALPASIKMLGIIPGILLIILVALLTEASIDMLVRCSHQGKITSYGWLMGEVFGQWGRIALQASVIINNVGVLIVYMIIIGDVLSGTTSGDVHHRGILEGWFGAHLWNSRAIVLLATALLVFAPLVSFKRLDSLRYTSALSVALAVVFVVITAGIAIIKLFNGTVAMPKLFPELDGLNSIWNLFTAVPVLVTAYICHYNVHSIDNELEDRTQIKPIVRTSLFLCSSVYIATSFFAYLLFGEGTLDDVLANFDANLGIPFSSVFDDIVRVSYAAHVMLVFPIVFFALRLNLDGLLFPTSRHISRDNKRFAIITVSLLAVIYLAAILIPSIWDAFQFTGATAAVLIGFIFPAMVILRDSYGIASKRDKILAVTMIVLAVLSNSVALYSDAMNIFRKKEVA

SEQ ID NO: 58935 - protein, 399 aa, Zea mays
  Clone ID: 700352535_FLI.pep
VVDAMGRGRNRKPRNFATFRLCPRPGAADASERVFVRVDDNPYSVPGFADDDGLSSSTAVRGDGGEPDPSSSTSTDEGGSPLPEHVRREIMELGLPDDGYDYLAHLRELRPSLSSTGGGGSSAVFLPSRRLARSGLPVDVKAYDFTSTPLGSGEVAVVAASRAEEAIDLDVTRLLDGSDSTAVESGDEDLEEDFVILANEPDEKQESEEENVAGSKEKALQLPGDQFVSLAFEEYADSGVGCCVQDAKHELSQEVTDKLKPPHSETFDADKRCRAPTPQYVAHRILESNEQIDASSNAISEHVQYAETYEVSEEEQAILAPESSKGSAVMYSTATVSGSYLDVKLKFPKHSPGETSMKKSIIRKGIEKLPAGYSPQRNTPTGETKQGPYKGTRQEGTES

SEQ ID NO: 58936 - protein, 118 aa, Zea mays
  Clone ID: 700380913_FLI.pep
VLIIFVDFADVKDIKCVINYDFPTTLEDYIHRIGRTGRAGASGTAFTFFTHANAKFSRNLVKILREAGQVVNPALESMSRSSNSTGGGNFRSRGRGGFGNRGHMSGSNTFPLGGRRPY

SEQ ID NO: 58937 - protein, 554 aa, Zea mays
  Clone ID: 700380945_FLI.pep
PSNLAQVSLFRALHEKEEEGGKSRGPSRMRFFLIVFFASFAYYALPGYLLPILTFFSWACWAWPHSITAQQVGSGYHGLGVGAFTLDWAGISAYHGSPLVAPWASIANTAVGFVMFIYVIVPLCYWQFNTFDARRFPIFSNQLFTASGQKYDTTKVLTKDFDLNVAAYDNYGKLYLSPLFAISIGSGFLRFTATIVHVLLFHGSDMWKQSKSAMNAVKLDVHAKLMQRYRQVPQWWFLMLLLGSVVVSLLMSFVWKEEMQLPWWGMLFAFALAFVVTLPIGVIQATTNQQPGYDIIAQFMIGYALPGKPIANLLFKIYGRISTVHALSFLADLKLGHYMKIPPRCMYTAQLVGTVVAGVVNLAVAWWMLDNIENICDVEALHPDSPWTCPKYRVTFDASVIWGLIGPGRLFGQHGLYRNLVWLFLVGAVLPVPVWLLSRAFPEKKWIALINVPVISYGFAGMPPATPTNIATWLVTGTIFNYFVFRYRKGWWQKYNYVLSAALDAGTAFMGVLIFFALQNAHHELKWWGTEVDHCPLASCPTAPGIAVKGCPVF

SEQ ID NO: 58938 - protein, 431 aa, Zea mays
  Clone ID: 700381069_FLI.pep
CPFDIRTKLDIGRSKLLMAHTSCDGVHHVISVAHGETASTSTSHQDMCSDSDEPHQEDRLSTSTQTLSSESSPSISPTAYSTRNLSFPRRDSIYGHGRSPWNSGLWISFEIVMYIAQVVAAIVILIFSRHEHPHAPLFAWIIGYTLGCIASLPLIYWRYVHRNRHLDQEPQQPPTTYPTLTPSQSSEGRNHRTSGIVLHLGCISISCPRLSVLAYHFKTGVDCFFAVWFVVGNVWIFGGRSISSDAQDAPNMYRLCLAFLALSCVGYAIPFIMCAAICCCFPCLISVLRLQEDLGQNRGATQELIDALPTYKFKPKRVKNWGIDHASSSEHLDEGGILGPGTKKERVVSAEDAVCCICLTKYGDDDELRELPCTHFFHVQCVDKWLKINAVCPLCKTEIGGVVRSFFGLPFGRRRVDRIAARGVASSRFSV

SEQ ID NO: 58939 - protein, 413 aa, Zea mays
  Clone ID: 700381565_FLI.pep
QPGTHQQHPPPAGSERGPTRITQIGTPEEEQRRPASPEQRGRGEASQRRRSSSFGFPDPTPPVSLGECNPASVELKAAQVEMSTLKKSDKKAALDFAAWSFNVTTSVGLIMVNKALMATYGFSFATTLTGLHFVTTTLMTILFRWLGLSQPSHLPLADLVKFVIFSNLSIVGMNVSLMWNSVGFYQIAKLCMIPASCLLEVVFDHVHYSRDTKLSIMVVLIGVAVCTVTDVSVNARGLIAAVIAVWSTALQQYYVHFLQRKYSLNSFNLLGHTAPAQAGSLLLVGPFADYLLTGKRVDQFSLSSLALFFLALSCFIAIGVNLSQFICIGRFSAVSFQVLGHMKTVLVLSLGFLFFGKEGLNLQVVLGMVLAVLGMIWYGNASAKPGGKERRSILPVRSASLKGSSEEKAGAEK

SEQ ID NO: 58940 - protein, 569 aa, Zea mays
  Clone ID: 700381636_FLI.pep
AFEYGTKFSRSLGWGSDDGSEESIFGTGDADDVKPKSFLVCDDRHSELIPCLDRNLIYQMRLKLDLNLMEHYERHCPPPERRFNCLIPPPHGYKVPIKWPKSRDVVWKANIPHTHLAKEKSDQNWMVEAGEKIKFPGGGTHFHHGADKYISNIANMLNFKDNNINNEGMLRTVLDVGCGVASFGGYLLSSNVIAMSLAPNDVHQNQIQFALERGIPAYLGVLGTKRLPYPSRSFELAHCSRCRIDWLQRDGILLLELDRLLRPGGYFAYSSPEAYAQDEEDLRIWKEMSALVERMCWKIAEKRNQTVIWVKPLNNDCYKRRAHGTTPPLCKSGDDPDSVWGVPMEACITPYPEQMHRDGGSGLAPWPARLTTPPPRLADLYVTADTFEKDTEMWQQRVEKYWSLLGPKVKPDTIRNIMDMKANFGSFAAALKEKDVWVMNVVPHDGPNTLKIIYDRGLIGSNHDWCEAFSTYPRTYDLLHAWAVFSDLDKRGCSAEDLLLEMDRILRPTGFAIVRDKGTVIEFIKKYLHALHWEAVAAADAEPSSESEENEMILVIRKKLWLPEAGSHT

SEQ ID NO: 58941 - protein, 455 aa, Zea mays; identical to SEQ ID NO: 40951
  Clone ID: 700548656_FLI.pep

SEQ ID NO: 58942 - protein, 285 aa, Zea mays
  Clone ID: 700549595_FLI.pep
ARPWDRNSLPDKTPTTTHHPAQGQAAQATTPYLFPLFCSFIHESRLLPFLAFSTSSPRRDLSHTRKGEMGGRVDHEYSYLFKMVLIGDSGVGKSNILSRFTRNHFSLDSKSTIGVEFATKSLQMDGKTIKAQIWDTAGQERYRAITSAYYRGAVGALLVYDITKRQSFDNVHRWLRELRDHADSSIVIMMVGNKSDLIHLRAISEDEGKALAEKEGLFFLETSAMEAINVEQAFQTIMTEVYGIVNRKALAAKEAAAATASLPSQGKIISIDSTAGNTKRACCST

SEQ ID NO: 58943 - protein, 353 aa, Zea mays
  Clone ID: 700550074_FLI.pep
FGNGIVASDNDFLSASSNLMDNAVQSIPIPQLPLNKRPSSDRGPSLVLTKEISSGVTITKQENKVEVHKRPARSRRKPEERGKSKISSSASGFSPSKLENSSSNLQAPMQHVQTPQYALFQDSKKIGKVQHANQFMFPEYGYPAYPFPTIPLVSNIQADGYQTKSAGTSCRTSEDSPKQSSSIEMSQDIPSRPLSMTPQEKIEKLRRRQQMQALIAIQRQQQQFGQQGSGSDPMVSQAYSLRNKNLDSLGSSIVIDENTNEIFSPEMIPTYHGPVHKSSAISDDPFIEEKIYYQLQDALDKLDTKTRLCIRDSLLRLAHSATERQIDGDRSSTNKTNKDEDEASEDAFTRRTR

SEQ ID NO: 58944 - protein, 603 aa, Zea mays; identical to SEQ ID NO: 45440
  Clone ID: 700550221_FLI.pep

SEQ ID NO: 58945 - protein, 455 aa, Zea mays; identical to SEQ ID NO: 40951
  Clone ID: 700550325_FLI.pep

SEQ ID NO: 58946 - protein, 414 aa, Zea mays
  Clone ID: 700552355_FLI.pep
GRELCSENRIDLFSSEAIRPCREQNPTARIRLISQQQQKNKGMAKDGGPDWNGLLKWSLAHGDSTNPPRALSEEDRKWFMDAMQANTVDVVKRMKEITQVMKTPEDVLQSQGVTPENIEDMLDELQEHVESIDMANDLHSIGGLDPLLSYLKNSNAGIRAKAAEVVSTIVQNNPKSQQLVMESNGLEPLLTNFKSDPSTNARTKALGAISSLIRHNQPGVSAFRLGNGYAGLKDALGSDDARLQRKALNLIQYLLHNYKADRSVATELGLPKLMMHLVSSDDSLVREAALGGLLELARDKTSGNALPDQEKLKDMLKSRIEGISAMDTDDLHAAREERQLVDSLWKECYNEPSSLREKGLVVLPGEDAPQQPPPDVAGKMFEPPLRAWAAARPAQEDDSDSGSGKKDPPLLLKF

SEQ ID NO: 58947 - protein, 441 aa, Zea mays
  Clone ID: 700611587_FLI.pep
AVCSFDLCSRSEVPGDREAASIVGMALVLHSGAGNKNAFKALIAAEYSGIKVELTKDFEMGVSNKTPEFLKMNPLGKVPVLETPDGPVFESNAIARYVARLKDDNPLFGSSRIEQAHVEQWMDFAATEVDPGVAWYLYPRLGYLPYVSTTEETAISSLKRSLGALNTHLASNTYLVGHAVTLADIVMTCNLYHGIARILTKTFTSDFPHVERYFWTMVNQPNFKKVIGEVKQAESAPPIPKKAAPSKEPKAKDVKKEAPKEAPKPKVVEAPAEEEAPKPKPKNPLDLLPPSKMVLDDWKRLYSNTKTNFREVAIKGFWDMYDPEGYSLWFCDYKYNDENTVSFVTLNKVGGFLQRMDLCRKYAFGKMLVIGSEPPFKLKGLWLFRGQDVPKFVMDEVYDMELYEWTKVDISDEAQKERVNAMIEDQEPFEGEALLDAKCFK

SEQ ID NO: 58948 - protein, 145 aa, Zea mays; identical to SEQ ID NO: 43008
  Clone ID: 700612180_FLI.pep

SEQ ID NO: 58949 - protein, 141 aa, Zea mays
  Clone ID: 700342210_FLI.pep
TNKQKLLNLTLIEKRFSWHSKFIIANNQVRIPFWRKWYQSLQHFISLKSNIIKCLDPRLIREYNRWSNSCSILLFLGVNLLTKESCHLQQNIQLPSMNVVMARSSAFFVPPYILCRLNHMNYKNILTCKFTSFCKKFKVPV

SEQ ID NO: 58950 - protein, 552 aa, Zea mays
  Clone ID: 700342274_FLI.pep
CSASSEAWFRFYGGSVRSGVRRRRRLLCSSIGRGAMENPAPPTNPASATPSPSRQLPDFQQSVRLKYVKLGYHYLITHGMYLLLTPLMVLVAVYLSTLSPRDVADLWAHLRLNLISVLACSTLLVFLGTAYFLTRPRPVYLVDFACYKPGPERRCTRDTFMRCSRLTGCFTDASLEFQRKILERSGLGEDTYLPPAVTRVPPNPSMDEARAEAREVMFGAVDELLAKTGVKPKDIGILVVNCSLFNPTPSLSAMVVNHYKLRGNVVSYNLGGMGCSAGLLSVDLAKDLLQTHPGSYALVISTENITLNWYSGNDRSKLVSNCLFRMGGAAVLLSNRRSDRRRAKYELVHTVRTHKGADDRCFGCVTQEEDGEGVVGVSLSRDLMAVAGDALKTNITTLGPLVLPLSEQLLFMATLVAKKLLKMKKVKPYIPDFKLAFEHFCIHAGGRAVLDELESNLALTDWHMEPSRMTLHRFGNTSSSSLWYELAYSEAKGRIRRRHRVWQIAFGSGFKCNSAVWRALRSVNPAEETNPWMDEIDRFPVDVPKVSKVSSD

SEQ ID NO: 58951 - protein, 275 aa, Zea mays
  Clone ID: 700342482_FLI.pep
KNQHTLACGKNFPARNRKHPHQSLRLFVFGCAAAAAAEEVEEMLSGDIPPSQTIYLNNLNEKVKKEELKRSLYALCSQYGRILDVVALKTQKLRGQAWVAFSEITAATNAFRGLQDFDFYGKKMRVQYAKTKSDCIAKEDGTYAPKEKRKKQEEKAAEKKRRTEEAQQAGLNAAAAQSNGTGYQASRLGKASQEPPAPPNNILFIQNLPDQTTSMMLQILFQQYPGFREVRMIEAKPGIAFVEFEDDGQSMVAMQALQGFKITPENPMAISYAKK

SEQ ID NO: 58952 - protein, 240 aa, Zea mays
  Clone ID: 700342564_FLI.pep
QTRTCLFFFLLNLKTYRYDRDTQTRTLAAVQHVTIARAAAPGYGRWARTTHTHTYQSFLSSSLLALIGCARTVHAAGCSPVEASREVREHVLSSDRDRDCDVLAVDRAVRGAVAAAVGHRRLTAGVVGGGGVVGGDEAAGGVVGGLPLLHPLDGRGRAAGDARAPRHRLPRRVLREEPLEYHPVVVGLLVDGRVVGEHLGGVVHHLIRHLLFSEGFETIDPVVANAVTELFFLPVENMLG

SEQ ID NO: 58953 - protein, 168 aa, Zea mays
  Clone ID: 700342579_FLI.pep
PTYSKDLESYKETTIVGSEASQTNVWSLSYLAWLGYVRLRGVDVDADGDDKDGEEAEEDDGVDEDGDGAGAHVAELHDPRPRGQLEQQARREHHEEDHRHDDGAPVRARPRRDAGARVHASGSGPRSSFLSTPALLNAAEACCLRCTTYAHLGCSSSSTGRKLPGISS

SEQ ID NO: 58954 - protein, 230 aa, Zea mays
  Clone ID: 700342632_FLI.pep
SFLQCPRRQGKPCCKKGNSAARSVNGSEMAQTVFTPSLEAMKHVKAENGVILTKPFLDVCKQILPVLDKFGGAMAIVKSDIGGNITRLENKYTSEPSKYEHLYSMVQEEVQNKTAKGSSSCTNGLLWLTRAMDFLVELFRNLLEHPDWTMGQSCTDSYTKTLKKFHGWLASSSFTVAMKLAPNREKFMEVISGTGDINADIEKFCTTFSPFLKENHNFLASVGLDDLKAS

SEQ ID NO: 58955 - protein, 108 aa, Zea mays
  Clone ID: 700343105_FLI.pep
TVHGVLLMMNGDCTLTFTFEQTEGDQAASPLATKLVLPITSGLSSEQANKKQKKEAQRRVQHVGVQGPFIKYKWSHVPITFSQEDLQLKDYPHNDAMVISCVSKGFFV

SEQ ID NO: 58956 - protein, 450 aa, Zea mays
  Clone ID: 700345203_FLI.pep
LKALEEEMQSFVTSKGKVAGGLQEHVRKLKESFNSRIAELHGFANELKHKSMLSFENLNSQVTTHTSSLEDCMKDLLVDADELLIALQNGLSQHEVNFATFIEQQHEGLSRNLEGTKFVSATTMNFFRTIDSHALGLLKILEESKMEHQKQLFQLQKKFEAVVADEEKYLMEKVAGLFAESNARKKNMVQDDICSLNRTVSESSNNLQTETTKLHDFTSSMKEQWEGYMKKTEEAFQQNVSSIEQKRGFLAGNFQQCKEKVESCSEQWITAQNLVLALGRRNAEAIGLVISDGNEVSNQLGARISSAVAAGFEDNDISSKSLLSCIDDSLKLDHGIRENVKSIVMTSRAQLHDLEHGHYEMTKAITGNADRSLGEDYKVDEATCSTPRRREINIPDSQSIIELVTPLEDIVKSFWDSRTPTKPALNAKGKQQLVGSTTPETQRAPLSAIN

SEQ ID NO: 58957 - protein, 329 aa, Zea mays
  Clone ID: 700345208_FLI.pep
ARLLSTGSRPRGSVAVCPHPESDASSIDLERSRRGAIARVLIAARGRGMVGVLSNRVDRDDLKAGDHIYTWRAAYIYAHHGIYAGDGMVIHFTRAAGHEIGTGTFLDWFLYSSSPAATEGPPCQKCGHLVKSDGVITSCLDCFLDGGSLYLFDYAVSPAFFLAKARGGTCTLAASDPSDVVIHRARYLLDNGFGMYSLFKNNCEDFAIYCKTGLLVETAFSVGRSGQLASLTAAFSAVASSPLRFLTTSAGGLAIVTSGMYCFGRYVSDIGVRRDVVKVPVERLVEQNVTWIPQCVATETDIAAGAPQQQLEVPCAVAEEASVIQPAAP

SEQ ID NO: 58958 - protein, 336 aa, Zea mays
  Clone ID: 700345322_FLI.pep
AAVQVLLHLCRGFNFTVNTLTLREVITEGVSKQGAKTHLPSLMGFAGWVSMLLFLLVAGAVANDQIFTTSGVPFGRSSREPSYRVEFHPVDSPFHPENGQESVPMASHDGKRYKCFLPVEETKTMKSMLPQNATNVIIESERRIKPKEPDELLEVLKDQCFYRHEGWWSYEFCYHGKIRQVHVDDDKVIQEFVLGEFDDDATAAYHENITSELVDDDHHVKDISQRYHVHLYTNGTVCDLTDIPRETEVRFVCSEPTVLISSVKEISSCRYVVTIQSPMLCKNPLFQEEKRTLSIHCNELPARAESSAEDDSLPKEAQISIIPDQDELHDFPAYAT

SEQ ID NO: 58959 - protein, 394 aa, Zea mays
  Clone ID: 700345874_FLI.pep
GFGWSLRRRRAPTSSVEMADGEDIQPLVCDNGTGMVKAGFAGDDAPRAVFPSIVGRPRHTGVMVGMGQKDAYVGDEAQSKRGILTLKYPIEHGIVSNWDDMEKIWHHTFYNELRVAPEEHPVLLTEAPLNPKANREKMTQIMFETFNVPAMYVAIQAVLSLYASGRTTGIVLDSGDGVSHTVPIYEGYALPHAILRLDLAGRDLTDSLMKILTERGYSFTTSAEREIVRDIKEKLAYIALDYEQELETAKNSSSVEKSYELPDGQVITIGAERFRCPEVLFQPSMIGMEAAGIHETTYNSIMKCDVDIRKDLYGNIVLSGGSTMFPGIADRMSKEITSLAPSSMKIKVVAPPERKYSVWIGGSILASLSTFQQMWISKEEYDESGPAIVHRKCF

SEQ ID NO: 58960 - protein, 169 aa, Zea mays; identical to SEQ ID NO: 50724
  Clone ID: 700346262_FLI.pep

SEQ ID NO: 58961 - protein, 455 aa, Zea mays; identical to SEQ ID NO: 40951
  Clone ID: 700380756_FLI.pep

SEQ ID NO: 58962 - protein, 66 aa, Zea mays
  Clone ID: 700337505_FLI.pep
MLALVLSRTLRTASSSRSHGHVFLPIYSSSIQQSICSNYLSLANKPMTKLCSSASTERRNIWDWDT

SEQ ID NO: 58963 - protein, 67 aa, Zea mays
  Clone ID: 700341281_FLI.pep
CACLVRCSVHRRVNRGACVCVCCCSVYVVQLHSRLIICLSTGHSLVVPVIYYQQFFSIFKIMEKVDF

SEQ ID NO: 58964 - protein, 44 aa, Zea mays
  Clone ID: 700341710_FLI.pep
NRLVNYTTKCNKLELNVGFVEDQSNVDVDILEDTSDILAPHMCH

SEQ ID NO: 58965 - protein, 80 aa, Zea mays
  Clone ID: 700379146_FLI.pep
LSSQWYIHDDTYKLRHLYLLQGTTTAETVHNNGRKEMTTHATHSAKGNNFTTWLKFVSVVRSTIRHSSQVVLLTTDTNFS

SEQ ID NO: 58966 - protein, 523 aa, Zea mays
  Clone ID: 700331891_FLI.pep
GSKALFIGWSSFCCYPAPMATLVRHDSRQYSWWWVSHISPKNSKWLQENLSDMDTKVKAMIKLINEDADSFARRAEMYYKKRPELMKFVEEFYRAYRALAERYDQATGALRQAHRTISEAFPNQMPSMSDESPSSFSQEMEPHTPDMSTFTRAAFDSDDLQKDGVGMSPQRFTSKRNGTHPEETSALSSRKGLKLFNDLSSSSENAPRAGFDGKVRKGLTFESPEVKGKDGISNEMANLQQEVARLLSESQNLKQQMLSESERANKAENEMQMLKATVLQLSADKDTSLTQYNHSSERISTLESELLKAQADLKKLTDEMAADVQKLINAETLNIAILSEAEGLDQKMKMQQQELEQKLKELESFRSSFQEEHEKRMQAESALLSQGKELAQSHEEVQRLTIEIKMANEKLNELKQTKEDLHDTVCELKRDVERLTEQNQSSEVLIRELGDEINTLKDSKNELQSEIKSLKSTISQLNTEKNAAALQHQQSVEQVSVIESQLSKLQSELDETEQKVQLLTQDL

SEQ ID NO: 58967 - protein, 519 aa, Zea mays
  Clone ID: 700332031_FLI.pep
KIKREGSHRSPIACLPSHPPRRSPAPGTMSSYSGDRSSSSLRPTNTSFDSYKFDFGINSSRSSGSRPLRDQRPGAATNPPTRPTTGATWMHQPASAKPSWTHQPSPAAASAPTMAGPGSGPTSMVGDIFGRSWSSAAPSSGLGIPQANNPGLFSDLLGSALGSSRSQSNAPLRSAAAPQASRPAGEKPNVNASSSPFSMGGMAGALPKTTGAPMGSGGYGVGGRPMKPVGMAATQPMGQQRDPFGSIDPFAAKPGSMNAVKQANSVKPDQGFGAFQGVNSSVAAGFGSFQSTDAGSGGFQSAGTTTPSNFTPPPAPASMPTPVAAAVNSSMDPLDNLFASTTSAPTAAAASNGDSGGDMFGEMDGWVDVEAEFAGGDSGGTTTELDGLPPPPSGLTISAAKAKGMDSYKGGQYADAIKWLSWAVVLIEKSGKDADIVEVLSSRASSYKEVGEYKKAITDCSKVLDQDKDNVSVLVQRALLYESTEKYRLGAEDLRLVLKIDPTNRLARSTIHRLNKLAD

SEQ ID NO: 58968 - protein, 340 aa, Zea mays; identical to SEQ ID NO: 58528
  Clone ID: 700332440_FLI.pep

SEQ ID NO: 58969 - protein, 426 aa, Zea mays; identical to SEQ ID NO: 55173
  Clone ID: 700332483_FLI.pep

SEQ ID NO: 58970 - protein, 197 aa, Zea mays
  Clone ID: 700224028_FLI.pep
LILGSSSVARKHILEEMGLEFQVMTADIDEKSIRRENPDDLVMVLAEAKADAIMSRLNIDDYQKEGSQPTLLITSDIVVVHEGIIREKPTTKEEARQFLKGYSGGHVSTVGSVVVTNLTTGKRLGSLDKAEVYFHDIPDEVIKSLIDEGVVFRVAGGLLLEHPLTLPFVEAVVGSSDSVMGLSKEVANKLIHDALST

SEQ ID NO: 58971 - protein, 354 aa, Zea mays
  Clone ID: 700102748_FLI.pep
QRPQRMRQISSLLQGLARSLSVGRDRKGNGAGDGKTAVPVPAVLRTSGTLWGDGSDTFAAVCSRRGEKGINQDCSIVWEGFGCQEGTIFCGIFDGHGPWGHYVAKAVRDSLPPSLLCHWQEALALASLIDDGEKKLGDCQFDLWKRSYVAACAAVDDELRRSRRLDAVQSGCTALSIIKQGDLMIVANVGDSRAVLGTTSGDGAIAAVQLTVDLKPNLPQEKERIRRCNGQVYCLADEPGVHRVWQPSRESPGLAMSRAFGDYCVKDCGVISTPEVTQKRISSSDQFIILATDGVWDVLSNDEAVHIVAGTPDRAKAAKRLVECAVRAWRRKRRDIAVDDCSAICLFFHPPPPS

SEQ ID NO: 58972 - protein, 115 aa, Zea mays
  Clone ID: 700103742_FLI.pep
NLLLDISLLLLPQPVQGAVCIALSTDKPRESKCCEVTIIQAIRIQVANVDLDRGMVLGSDDPVCGRALPGNIEVHSLTLLVLHGDSWGNYRKSNLQETDQTGGGVRSRRRLGVGP

SEQ ID NO: 58973 - protein, 434 aa, Zea mays
  Clone ID: 700104836_FLI.pep
RTRYKAYIAHVFWGYLSCRPRAFGSAASAPALQLLDELVEVAPRRTTGRHGSLECAPELLHLLPELEAVFPAHDRFNPRPHLVGAHRAAVSDGHAGTPLPRDEAAVGELVREQREAQHGHARPHALEDGVPAAVREEGADGGVGEHLHLAAPLDHQAAPRRGLGEPLGQRVRVVGAHDVRAHHPQEPGAAGQHAARDLAQLLLGHVRVAAEGDVEHGPDRLRVQPPGAVGLRPHGRGHGAAREARREDGPHGVEGPVGAQRRDGRRLQLLHGVAEHVVGAAGLVERLEDDAVDDGAGVHLLQVRHELAGLDGRHARDVGDRVLARLVASKVSVLGEQVDVVVEVEDERRLGPERHIRDAEAPGQSGGPHEEGVVHGLRANEGDGEAPRREPQRQVHHGDDVALQRVRHHHRVRLATMPPRLYYAGGPLRHFLVV

SEQ ID NO: 58974 - protein, 158 aa, Zea mays
  Clone ID: 700106710_FLI.pep
LLWLTTRKAQRVTHITTMRTSLQNELLRLLRCLEEVKHPLEVHSTQSEKTVALPGGTPPCTESRNLLHAGIWMPARFASEHYEHAHNLARTVRCANCTQRRLCYLYSEAFLCFVKKASLTFILHYQINGKLIENKMFSSSCLVANALYFWQAVKELNQ

SEQ ID NO: 58975 - protein, 628 aa, Zea mays
  Clone ID: 700235156_FLI.pep
LPFSSPPPMDPPPTRDRGEELEPETRAFPDADDPETSRSERDEGIPPPPPPLRQQLMGACRADERLRPLLTLNVSCGAADDRLIAHLAQHFEVSEVGMLARCLCVPLVSLRVGKVQREGALLCPTHIRGKLNLVLLPSSSMRLTFVCDDGYPEQLALLSNGFEFSEVMIEEISADNSGRSFLIRISESKVFYYWCAEKSKEHGMELLAKMKNLLDGRPTLSDLTGISNSRLDAFATHLHAYLLASSIGDVTSLGSLNDFLSTSRSHDQYLQLQSDFSKTSRFRASAASAIKPSSVYQASLSPRSGTFKDGVPRASCARVVGRDKLKRRVEWLGPLTAPLDTNPLTINPDSASEKCDADCSKNDVSSVPLDLPLSFPLLPSIYSLGTRPVPEVSLEKQFKPYYCWCPPCPSSLQYTVTHLHLPATPVDPLPLPPLSSLLASEQPPSSTVSVKLDTTDLPSLNLPSILHSPLIPLHGPQVPTFTPLMSDPIVHVPVIDVCSAGQAYLVSCGPSITSAVPLLPSLKPLLPEAESLVERSARETLMRLIASTPPASNPLPGSISRANNNVKKHVDVRPNEKASGTSCVSAAVFGSGIAHAEDEVPSGADSQEPFAEYDGTSNECDVHHWQKF

SEQ ID NO: 58976 - protein, 153 aa, Zea mays; identical to SEQ ID NO: 44873
  Clone ID: 700236060_FLI.pep

SEQ ID NO: 58977 - protein, 243 aa, Zea mays
  Clone ID: 700236134_FLI.pep
PATEYLIDGQVSPGVELRRPEVGQAVEHAQRRELRLLLRRQRHRRHGRCVAGAAAAAAAAAGAGSATVRGLRTSVSTSLPRGDGDEGAGRVHPARQRAEDGGGREAGELLHHGPKVGHVGRDHGGRGAARRRRRRRVPRRRRRRVLLGALAAPRRHGGRCPERLVAWVMCGELERAGSCSCAGTGLQVARRVERGGTGSSTRCRRVVLLLEGVHRRGQDSLRFCLFAFRRSCQEKRLGTARNG

SEQ ID NO: 58978 - protein, 451 aa, Zea mays
  Clone ID: 700236608_FLI.pep
QATPHSQSPPQLVPCSARLIQRLNPQAMGFDKEASSSSSRLDAAPLLPQHGGGAGGHLSSQPKTFANVFIAVVGSGVLGLPYTFSRTGWAAGTLLLLAVAALTFHCMMLLVAARRRIADAHPKIASFGDLGHAIYGAPGRHAVDAMLVLSQASFCVGYLIFISNTMAHLYPIAIGAQSPASPLLTAKALFIWAMLPFQLGLNSIRTLTLLAPLSIFADVVDLGAMGVVLGQDASVWLADRPPVFAFAGPAQLLYGLGVAVYAFEGIGMVLPLEAEAADKRRFGATLALSMAFIAVMYGLFGAMGYLAFGAATRDIITTNLGTGWLSVLVQLGLCINLFFTMPVMMNPVYEVAERLLCGKRYAWWLRWILVVLVGLLAMLVPNFADFLSLVGSSVCVVLGFVLPAVFHLKVFGTEIGWAGLVADVAVIVIGIALAVSGTWTSLVQIFSSSDL

SEQ ID NO: 58979 - protein, 163 aa, Zea mays
  Clone ID: 700237701_FLI.pep
SGDGMGNLVSQCVGNGAGARPLVIGATDGSRTMVEENTAVAELMIDAPGHVVARATDVARERRLRAMAADEVLRAGVVYLLVPAGRAGARLGGREVEAIGRLVSGKKGSRKSRPGGGRRVFPDVSAEEDAAERKEVVCAVKRAHDHGFGPRQWRPALDTIYEA

SEQ ID NO: 58980 - protein, 176 aa, Zea mays
  Clone ID: 700237811_FLI.pep
ANLARGGMQLPPRACTTDRSLIASAFSIAQGRSRRWWLSSAVDARVSVGDAEHGVADILVDAAPVPGVAPGGAARQGVAEPRGVGREHAEEDGEGLRQVARERQAEVERRREVEHLHEAPRRHEREQGEPHRSSRVEAEEKPAAAAHNRSRTGARLGTARWRLAVCRRLLPPAAAS

SEQ ID NO: 58981 - protein, 514 aa, Zea mays
  Clone ID: 700237862_FLI.pep
DARGATASSRSPAPQCTSAVDAALAFEQRTAPAPAQETPTCLRLLRAATWTPATSRRPAGPAPRLLPMSGALAGPAPRPLRMAGALLTPPRLAMPSPPTPCRRGIVFLTKWRWSRRGGANRLRPLRRSMAAAQQEMPVETETPPLNRWMIQTRGRNARSNRPMLRERGTQVKLQRSRSTASTRTVISNLRRNHQLLNLHGDKKKRKMQGKRRRAHLVALSSKNNIWGPCGRRFSRRWMSSKATSPNFSASPQSSTRHARAHLVFPSKKATCPARRRRPRSSLPERVTPPLLPTATWQRSSCAEAPSSRCSSSTWLAVPALPPVQSAPVLPWRGAEVVPSRARLLPPPRQAGVQQLPRVLLQAQSAAAGRQGPQAALGAPEPLPAGAQGRAVHRLLQLLQAGAGARRLRRLVQDGAQAPVRLLLHRPLLLLQGPGQEEGLPGLRRPVQHSRLRAARRQRRRRAGPVRAVHRRLRAQQLLDGGRAAAARLEEHVVRHPRRDQRRGTPAPADGVRVG

SEQ ID NO: 58982 - protein, 437 aa, Zea mays; identical to SEQ ID NO: 48183
  Clone ID: 700238628_FLI.pep

SEQ ID NO: 58983 - protein, 209 aa, Zea mays
  Clone ID: 700239991_FLI.pep
SATNERWKNLNKQYKGIAKFKDGPLLHEEEKAIMYEDIRNTGDDHWAPSSGTTPQILEGETTENTDDKDGDYEANDEKDEDFEECEEVSPTTAKGKCHVSVGRKDKGKKPRSLGGHWVQDQLSKLVTASEKSTASVESLARKEDNGCSIRDVMALVKECGAVPGTKEHFIASQVFIKRAEREMFMTLDTPEERFNWLTMKHDWVTWMSH

SEQ ID NO: 58984 - protein, 427 aa, Zea mays
  Clone ID: 700240288_FLI.pep
IYQSTDPDPSLPSDAAVVVADLISNPTDQQLLARDGNRSWIAMALQYVEAQRQARPDLADWYASLADLYQQKLWHQLTLKLDQFLQLQAAQTGDTIIQLYNNFITDFETKINLLKLAHFAVIASRQYPDKDAAITFLEGVITKLRDTRESRINEPILYVKMQIAAINLEKGNQKECKNSLEDGKTTLDSMTDVDPTVHASFYWISSQYHKSCQEFAEFYKNALLYLAYTTVESLSESFKLDLAFDLSLAALLGDNIYNFGELLAHPIINSLIGTKVEWVYHMLQAFNTGNLAFYQELCRVHNAALTAQPALVQDERKLLEKINILCLMEIIFSRPSEDRTIPLSVIAEQTKLSISDVEYLLMKSLSVHLIEGIIDEVDSTVHVSWVQPRVLGIPQVKALRDRLDAWVGKVHTTLLSVEAETPDLVAA

SEQ ID NO: 58985 - protein, 511 aa, Zea mays
  Clone ID: 700240523_FLI.pep
SPRLRRPPVKVKRRCPATTEFPSPEIMEKLPSQQQVVLLASPGAGHLIPMVELAQRLAADHGFAVTLVTIPGMSNPATEAVVLSSLPSYVLTAVLPAVPLDDLPSDIGFGALVFEFVRRSLPNLRALMEDASRGSVTALVCDFFGTSALPLAAELGVQGYVFLPNSFAMISIMRHLAGLHGDAAAPGEYRDLPDLLPLPAGGLVLHHADLPEGFQDRKDPVYAYHVEEARRYGRANGFLVNSFEELEVVMVETFKRDAEDGAFPPVYPVGPFVRSSSSEEADESGCLEWLDRQPENSVVYLSFGTGGSLSVEQTAELAAGLEMSGHRFLWVVRMPSLDGNPCAYGSMPGDKDDPLAWLPEGFLERTSGRGLAVVAWAPQVRVLSHSATACFVSHCGWNSTLESVAAGVPMVAWPLYAEQKMNAAILTEVTGVALRPAARGNGHGLVTREEIAASVKELMEGEKGSAVRGRTRELREASKRAWSSEGSSRRALGEVAGKLKAALVNGNGSAP

SEQ ID NO: 58986 - protein, 260 aa, Zea mays
  Clone ID: 700240526_FLI.pep
SQHEIRLQVSMVSRLKHENVVELLGYCADGTLRVLAYEFATMGSLHDMLHGRKGVKGAQPGPVLSWSQRVKIAVGAAKGLEYLHEKAQPHIIHRDIKSSNVLLFDDDVAKIADFDLSNQAPDMAARLHSTRVLGTFGYHAPEYAMTGQLSSKSDVYSFGVVLLELLTGRKPVDHTLPRGQQSLVTWATPRLSEDKVRQCVDSRLGGDYPPKAVAKFAAVAALCVQYEADFRPNMSIVVKALQPLLNAHARATNPGEHAGS

SEQ ID NO: 58987 - protein, 434 aa, Zea mays
  Clone ID: 700240685_FLI.pep
QQSQRKVVLMSTVTLPTLSRCLVELEGLHHLPGEVGVVTAEVAVGGGLDEPVAALLQVEVDADHPGPEVEVLLHDLEDLLVGDRAGAVRVDEHGQGLRHADGVRHLHEAAAGEAAGHDALGGLPGHVGAAAVHLGGVLAGEGATAVGSPAAVRVDDDLAAGEAGVTVGPADDEAPGRVEVEDGLLVEVLLRDHGLDDVLLEVGGDLVVGDGLVVLGGDEHGVHADGHHGAALVHVLHRHLGLAVGPQPGAGAVLAHLGEARAQLGGQHVAQRHQLGGLVGGVPEHVALVARADLLGPLREVPVHALRDVGGLLLDVHQHLAAVGVEAHVVGGEPDLAAGVAHDLLVVHGRLGRDLAEHHHHVGLGAGLAGHLAVGVLREACVKHGVRHLVAQLVGVPLVHGLRGEKEALGRHCLLLALPTSCAAALYSGPARGR

SEQ ID NO: 58988 - protein, 449 aa, Zea mays
  Clone ID: 700240804_FLI.pep
SLPHPDERVEYEFWTNSNDECGPKCDMQMDFVRSFRGTAQILEKKGYTQFTPHYITWYCPEAFVDSKQCKSQCINHGRYCAPDPDQDFSQGYDGRNVVVQNLHQICVFKIANETGKPWLWWDYVHDFALRCPMKDKKYNNDCAHDVIKSLGLDIENINKCVGDPEADVENEILKAEQDAQIGHGKRGDVTILPTLVINNKQYRGKLDKVAVLKAICSGFEETTEPAICLSEEIQTNECLENNGGCWLDKANNVTACKDTFRGRVCECPIVRGVKFVGDGYTHCEASGVGRCEISNGGCWQETKDGKTISACSNEISEGCKCPMGFKGDGEKSCEDIDECQEKLYCQCKGCSCKNTWGSYECSCGDDNMLYMREHDTCISKEGTATTVGWSFLWVIFFGLVFAGVGAYAVYKYRLRSYMDSEIRAIMAQYMPLDNQEGANQHQVVHANDI

SEQ ID NO: 58989 - protein, 253 aa, Zea mays
  Clone ID: 700240875_FLI.pep
DHPSHDVARGQRFVKEVYETLRASPQWNETALIITYDEHGGFYDHVPTPVVGVPQPDGIVGPDPYYFKFERLGVRVPTFLISPWIDKGTVIHKPNGPQDTSQYEHSSIPATVKKLFNLHSNFLTKRDAWAGTFENYFKIRRTPRTDCPEKLPEVTKSLRPFGPKEDSSLSEFQVELIQLASQLNGDHVLNTYPDIGRTMTVGEANRYAEDAVARFLEAGRIALRAGANESALVTMRPALTSRASMSSGLSSEL

SEQ ID NO: 58990 - protein, 341 aa, Zea mays
  Clone ID: 700241010_FLI.pep
LLSRTKSGRPSKIRGYFLSMSRSPHLPPRCPPLGPQITRRDDGMFTQSCRFPSGDTFIGEPPCWLDDLLEDSGKAPKLPPLRRACSDSDAILDALSTFQSPIYPIEECDLNSGGEAEDLLGGVEGDESGSVVEASCFYGPNSPRQKSRLTTLESSMVNAVLENVPGNPLQYLTIDACSDVNGNVANVTADACDAFGHPDQDKSFKRRSGQRSRVRKLQYIAELERTVESLQNIGADLAVRMSSLFHLHNALSMENKQLRIHISSLQQAKLIKDGQTQALKNEAERLKQMSARHRRSRSVTSCYDLSSFGADATAVNWQMPDMARLSLNGSSSVSPRSGYGI

SEQ ID NO: 58991 - protein, 235 aa, Zea mays
  Clone ID: 700241184_FLI.pep
GRAVPFLLSSASPVPSTSASHRRRPHAELGIFLRLRAPFSTNCHGRFQHASFSSPVSRDCRGRRSKLEEADGFAMGSEGSSGPVVVPRNFRLLEELERGEKGIGDGTVSYGMDDADDIYMRSWTGTIIGPPNTVHEGRIYQLKLFCDTDYPDKPPTVRFQTRINMTCVNQETGLVEPSLFPMLGKWEREHTMEDILASLKREMSTPQNRRLYQPHEGNEDQRVEQKGLSLRCVVM

SEQ ID NO: 58992 - protein, 198 aa, Zea mays
  Clone ID: 700241261_FLI.pep
ASPPPTSSTASPVRSSDPSRADSVHRLPLLFSSPHHYLLTHQSTNPCVCAGFLESLWRDIDMGRLDQDPSCETNLVIVSHGLTSRVFLMKWFKWTVAQFERLNNFDNCEFRVMQLGPGGEYSLLVHHTQEELQQWGMSPEMIADQQWRASANRRCWAEECSSFIDTFFEEPYGSSETSSSDEDEAEDKEEETKLLEQL

SEQ ID NO: 58993 - protein, 463 aa, Zea mays
  Clone ID: 700241904_FLI.pep
LCLECVAGFFFLDPCPALPYEHLGEADEFILVGASLAVGLVLARLDVHLARRLLQQPPADVDEAVEVLRGGHVDGRRLSRELVVLDPEVLPLRVQRLEEHGGVDVDEVGAGLAEAVDDRRGVLAAEPPQEAPLAGLHGVELLLGLGGACAQRQHHEPAVVRRLDREEVRVAQQDLLAHVRHRQQRRVVRCDASVDEVEGTGLAVLVRGLELVPWEVGRRGGRADAHVRQQGVLGNIGDGIVFGEDGGLQELDVEGGDDDVLQRLADPGLAEEVPDEGVEVLAVVLGPRQLLEQAQRTAAAAAGREDPGAVVEVEAVDVLGGEERAAVLVLAREHGGDQPAGAGPGDHVEVVGEPRVRPLVVLLQLLLEEGEDGARDDPAHATAVDAEHGDDAPVRRRRGRRRRGRADEAERPARRHRVQGQAGAAVGAVVRGSVDGRHSTSKTQRLRTRRERERWSRFRPAGS

SEQ ID NO: 58994 - protein, 323 aa, Zea mays
  Clone ID: 700242632_FLI.pep
AKRSFKLVSAALEDDGQGRRDRERRWRRRVRCQGLHGPSPGAADRRGGAGVLVAVPRRDRRVHRHAAVPVHHGGHRDRVQAPDGRVGVGRRRGVRRRGRAGHRLGLRRHDLRPRLLHRRHLGGPHQPRRHLRPLPGAQGLPGARAALHRGAVPRRHLRRRPRQGVPERLLRQVRRRRQLARLRLLPRHRPRRRDHRHLRARLHRLLRHRPQAQRPRLPRPGSGSPPHRLRRVHGAPGHHPRHRHRHQPGQEPGRRRHLQQGQALGRPLDLLGGPPRGRCHRGLLPPVHPPGWRHQGPRLLQEQRVMSGAWLWSNGGRPTGGGP

SEQ ID NO: 58995 - protein, 243 aa, Zea mays
  Clone ID: 700243474_FLI.pep
AAMTPEEAEFMQLLEAELDKFNSFFVEKEEEYIIRQKELQDRVARAAGRESKEELMRVRKEIVDFHGEMVLLENYSALNYTGLVKILKKYDKRTGALIRLPFIQKVLQQPFFTTDLLYKLVKQCEAMLEQLLPVSEASVSSEDGKGDSNDEEKLAKPSSSLVNGGGMPELDEIEYMESMYMKSTVAALRSLKEIRGKSSTVSMFSLPPLQGNNAQDSYQIRAEQLDEEPERWSKVTVIEQAAK

SEQ ID NO: 58996 - protein, 165 aa, Zea mays
  Clone ID: 700243529_FLI.pep
QSPVFWHSELQPPSGTIQHSAPHGALHCKPNLMHHYTAQDRIHGDTSSLQSRSRSRNTTQQRQFRRTPKGPGRVPPPYMAYLWVQVLAVFSYLFRSVLYMCAISGTRGSSGFGSVSREQMDSSTLEMVSAGLHWSFRMSRQMLPLLLMFGWNTLVRNATFGGLKG

SEQ ID NO: 58997 - protein, 84 aa, Zea mays
  Clone ID: 700244042_FLI.pep
QIPVCSYFPLTSILLPWRCDAASAALSPPHIAVCGPLRASLVLLQQRFITHTKRSAHKRGSRCRFERQFVTQRGDWVREQMRTV

SEQ ID NO: 58998 - protein, 396 aa, Zea mays
  Clone ID: 700244181_FLI.pep
PRPGLRLAMSCTVAIPSSPVFSPSRRPLSCKAASASPEPTVPASTAAPAPAAAAGSPLRPFALRALLREEVSPSPPPQPTSAAAVALVPSGAALKRRRPTPLVVPASGAAAAAAAAAAVAAVEADPRNEVEEEGEEFAAYCRRGKGRRRVEMEDRHVAKVALGGDPQVALFGVFDGHGGKNAAEFAAENMPKFMAEELTKVNGGEIEGAVKRGYLKTDEEFLKRDESGGACCVTAVLQKGGLVVSNAGDCRAVLSRAGKAEALTSDHRASREDEKERIENLGGFVVNYRGTWRVQGSLAVSRGIGDGHLKQWVVADPDTTTLLVDQQCEFLILASDGLWDKIDNQEAVDLARPLCINNDKTSRMAACRMLTETSISRGSTDDISVVIVQLQKFSSS

SEQ ID NO: 58999 - protein, 370 aa, Zea mays
  Clone ID: 700244370_FLI.pep
PKVNEDFYKRTLSGGIVTLVAAVVMLLLFISETRSYFYSSTETKLVVDTSRGERLRVNFDITFPSIPCTLLSVDTTDISGEQHHDIRHDIEKRRLNSHGNVIEARKEGIGGAKVERPLQKHGGRLDKGEQYCGTCYGAEESDEQCCNSCEEVREAYKKKGWALTNPDLIDQCAREDFIDRVKTQQDEGCNVLGFLDVSKVAGNFHFAPGKGFYESNIDVPELSLLEGGFNISHKINKLSFGTEFPGVVNPLDGAQWTQPASDGTYQYFIKVVPTIYTDIRGRGIHSNQFSVTEHFRDGNVRPKSQPGVFFFYDFSPIKVIFTEENRSLLHYLTNLCAIVGGVFTVSGIIDSFIYHGQKALKKKMELGKYR

SEQ ID NO: 59000 - protein, 306 aa, Zea mays
  Clone ID: 700097731_FLI.pep
LIQEHVPVDGRGGAMAGLRGPSERVEDGSVERVAQVGGPVVERPLAGGGGLHGEAEEGDHGEARVLDLRQLQPLLLLRVGRQAERVEVGAAGVQPLLRVELGVALELDVADHEHLDPDERRDGERQRLAQVGGPVHQLHLAGVLPGDAGEPLDGEGAEGGEHGPAAVDELALAEPLEAEHLAVGLQRGGLDFGGLEPGADDAAGLILGQVLVQRVQLELQVLHGLPETERVEPVVADQRAVQVVGRHGAGEPQRPVRGGRCLRHLLRSRLRLAAQPEPEPGHDAPVLWRRVRQAGAQECARRGGHR

SEQ ID NO: 59001 - protein, 643 aa, Zea mays
  Clone ID: 700097822_FLI.pep
FELSMWRCNDELRVRAEELHSSSGSKVTKYYIEFWKQIPPNEPYRVILGHVRDKLYNTRERARHLLASGVSEISAESSFTSIEEFLEPLELCYKSLCDCGDKAIADGSLLDLLRQVFTFGLSLVKLDIRQESERHTDVIDAITTHLGIGSYREWSEDKRQEWLLSELRGKRPLLPPDLPQTDEIADVIGAFHVLAELPPDSFGPYIISMATAPSDVLAVELLQRECGVRQPLPVVPLFERLADLQSAPASVERLFSVDWYMDRIKGKQQVMVGYSDSGKDAGRLSAAWQLYRAQEEMAQVAKRYGVKLTLFHGRGGTVGRGGGPTHLAILSQPPDTINGSIRVTVQGEVIEFCFGEEHLCFQTLQRFTAATLEHGMHPPVSPKPEWRKLMDEMAVVATEEYRSVVVKEPRFVEYFRSATPETEYGRMNIGSRPAKRRPGGGITTLRAIPWIFSWTQTRFHLPVWLGVGAAFKFAIDKDVRNFQVLKEMYNEWPFFRVTLDLLEMVFAKGDPGIAGLYDELLVAEELKPFGKQLRDKYVETQQLLLQIAGHKDILEGDPFLKQGLVLRNPYITTLNVFQAYTLKRIRDPNFKVTPQPPLSKEFADENKPAGLVKLNPASEYPPGLEDTLILTMKGIAAGMQNTG

SEQ ID NO: 59002 - protein, 153 aa, Zea mays
  Clone ID: 700098959_FLI.pep
TTEPMADQLTDDQIAEFKEAFSLFDKDGDGCITTKELGTVMRSLGQNPTEAELQDMINEVDADGNGTIDFPEFLNLMARKMKDTDSEEELKEAFRVFDKDQNGFISAAELRHVMTNLGEKLTDEEVDEMIREADVDGDGQINYEEFVKVMMAK

SEQ ID NO: 59003 - protein, 384 aa, Zea mays
  Clone ID: 700100861_FLI.pep
RGPRTVALFIIATAGRWTTAPHHLQLPETIDEHLPASAMAAATVSVPRIKLGSQGLEVSAQGLGCMGMSAFYGPPKPEPDMIKLIHHAVAAGVTLLDTSDMYGPHTNEILLGKALQGGVKEKVELATKFAVSFADGKREIRGDPAYVRAACEASLKRLGIDCIDLYYQHRIDKKVPIEVTIGELKKLVEEGKVKYIGLSEASASTIRRAHAVHPITAVQLEWSLWSRDAEEDIIPTCRELGIGIVAYSPLGRGFFCSGAKLVDSLSEQDFRKHMPRLQPENIVKNAKIFEHVNAMAAKKGCTPSQLALAWVHHQGNDVCPIPGTTKIENFNQNVGALSVKLTPDEMAELESCAAAGEILGDRYPQMANTWKDSETPPLSSWKSE

SEQ ID NO: 59004 - protein, 300 aa, Zea mays
  Clone ID: 700100990_FLI.pep
AETDAQAHARQTSGSPRKRSRREIMATATALSLSGGGGGTPLLRGHAALASGRCCAFPRSRWRPPRLSASRADDSSPAPFEMTVEGALKLLGVAEGASFDEILRAKNSVLASCKDDQDAVAQVEAAYDMLLMQSLSQRRAGKVANNSIRYADVKPVKSAGAGAVPQWMQATMKNAPITFETPSSSSLGIQSCVYGALMVFTYASGSSTSLPSAYTSPDVPGFILATGFGASLYFLAKKNMNLGKAALITVGGLAAGATVGSAVENFLQVDIVPFLGIHSPAVVVSEFILFSQLLVSLFVR

SEQ ID NO: 59005 - protein, 515 aa, Zea mays
  Clone ID: 700101960_FLI.pep
ARTGTETETEPAMSTTTLQLVPWPPEPARAAVLLVAAVVCLWVLLSRRRAAGGSKDKERAARLPPGSFGWPLVGETLDFVSCAYSSRPEAFVDKRRLLHGSAVFRSHLFGSATVVTSDAEVSRFVLHSDARAFVPWYPRSLTELMGESSILLINGSLQRRVHGLVGAFFKSPQLKAQVTADMQRRLAPALAAWKVRCASAPPLRIQDHAKTIVFEILVRGLIGLEAGPEMQQLKHQFQEFIVGLMSLPIKLPGTRLYRSLQAKKRMATLIQGIIQEKRRRRRAALEDGGEGEGEAGPPRDVIDVLISGGDELTDELISDNMIDLMIPAEDSVPVLITLAVKYLSECPLALQQLEEENMQLKRRKTDVGETLQWTDYMSLSFTQHVITETLRMGNIINGIMRKAVRDVEVKGHLIPKGWCVFVYFRSVHLDDKRYDEPYRFNPWRWKEKDTSTMGFTPFGGGQRLCPGLDLARLEASIFLHHLVTSFRWVAEEDHIVNFPTVRLKRGMPVRLTSKD

SEQ ID NO: 59006 - protein, 293 aa, Zea mays
  Clone ID: 700093121_FLI.pep
SSAFSSATPISQQVASNNRPRTTNGSMATLSSCSRLSSGTGAAAIHRQPARAGAVLVVTCRRSSSATVRAAAAATAAAPAAVELQNKGVSLPTWAEFELGRAPVYWKTSSGLPPSPGEGLTLFYNPAATKMAPNEVFGVAFNGGFNQPIMCGGEPRQMTLQERGKADPPIYTIRIRVPQHAVSLIFSFTNGAEWDGPYTLKFRVPKPWQNKPLSFFNEGLADELNREGACDLAIYPDENIAITSCAMDGYLEEGGDRCKLDIVSGCTDPSSDMFDPLATVDDGSCPLESDSEE

SEQ ID NO: 59007 - protein, 573 aa, Zea mays
  Clone ID: 700093782_FLI.pep
GCRSPSSLVDLVGVMRRSRSCLSCVPMGTAALPIENHFVAPAALPSVPASDSEDGGFGKGSIDLGGLEVRQVTTFAKVWSTTQGGQDGLGATFFKPSPVPAGFSVLGHYAQPNNRPLFGHVLVGRDTSGAGGALLAAPVDYALVWSSPDGAGHFWLPTAPEGYKAVGVVVTAAADKPSPDEVRCVRADFTDACETEESVWSSDKDGFSASTLRPAVRGIEARGVHAGTFLAQSSATPAAAAGVSTTLACLKNNSASYTSSMPDLAQLNSLLAAYAPHVYLHPNEPYFPSSVAWFFENGALMYQKGSSQTPTPVPADGSNLPQGGGNDGGYWLDLPADGNQREKVKRGDLAGAKVYVQAKPMLGGTVADLAVWIFYPFNGPARAKVGLIPSIPLGEIGEHVGDWEHVTLRVSNFSGELLRMYFSQHSAGTWVDASRLEYLDGGDGGGSRPVAYASLHGHAFYPNAGTVLQGNSGLGIGIRNDCARGSRLDTGAGRCEVVSAEYLGVKEPAWLGFEREWGPRDEYDIGREINRAARLLPRSVRERLAKLVEKVLVGEGPTGPKMHGNWRNDEREA

SEQ ID NO: 59008 - protein, 87 aa, Zea mays
  Clone ID: 700093996_FLI.pep
YAPLGPHHEGSVTAFVLEEFILNCWELSSRETYAKGLRVMSQNQLLPPSGTAIDRTSPTLPRLMQVQKVSSAAWPLFGIIVPSNVMT

SEQ ID NO: 59009 - protein, 563 aa, Zea mays
  Clone ID: 700094013_FLI.pep
SQSMHLGVLATAWHAINTKSMFTVYYKPRTSPSEFIIPYDQYMESVKNNYSIGMRFRMRFEGEEAPEQRFTGTIVGCENLDPLWPDSSWRYLKVRWDEPSTIPRPDRVSPWKIEPASSPPVNPLVHSSRAKRPRQNVPPPSLESSVLTKEGATKVEIDSAQTQHQNSVLQGQEQMTLRNNLTESADSDSTVQKPMMWSPSLNGKAHTHFQQRPAMDNWMPLGRRENDFKDTRSAFKDARTASQSFGDTQGFFVQAYDDNHHRLSFKNQGSTHRFADPYFYMPQQSSVTVESSTRTQTANNDLCFWGDQNAMYGNPSDQQQGFNFGQNPSSWLNQPFPQVEQPRVVRPHATVAPFDLEKTREGSGFKIFGFQVDTTSPSPVQLSSPLPAIQEHVLQTRPSAPVNELQPVQIECLPEGSVSTAGTATENIQQAPQSSKDIQSKSQGASTRSCTKVHKQGVALGRSVDLSKFTDYGELQAELDKMFDFEGELVSGSQNWQIVYTDDEGDMMLVGDDPWEEFCSIVRKIYIYTKEEVQKMNSKSAAPRKEESPAAGGGGGCAAATNE

SEQ ID NO: 59010 - protein, 496 aa, Zea mays
  Clone ID: 700094086_FLI.pep
QMVTCIEDLQEIVNRRKHEALTVQTFGTRIEKLHREKYLQLCDSVDMDKVDSASTIMDEEDDVVRSLRASPVHPVKDRTSIDDFEIMKPISRGAFGRVFLAKKRTTGDLFAIKVLRKADMIRKNAVESILAERDILITVRNPFVVRFFYSFTSRENLYLVMEYLNGGDLYSLLRNLGCLDEDVARVYLAEVVLALEYLHSMHIVHRDLKPDNLLIAHDGHIKLTDFGLSKVGLINSTDLSGPAVSGASLYGDDEPQMNELEQMDHRARRQNRSAVGTPDYLAPEILLGTGHGCSADWWSVGVILFELIVGIPPFNAEHPEAIFENIMNRKIPWPHVPEEMSFDAQDLIDRLLTEDPHQRLGANGASEVKQHPFFKDISWDTLARQKAAFVPSSDSAFDTSYFTSRYSWNQSDENIYEAYELEDSSDNGSLSGSSSCVSNQDDMGEDSTGLNEFESSANVNYSFSNFSFKNLSQLASINYDLLTKGLKDDPPPRTEM

SEQ ID NO: 59011 - protein, 416 aa, Zea mays
  Clone ID: 700094238_FLI.pep
CQDDMPMVRRAAASNLGKFAATVEQSHLKTEIMSMFDDLTQDDQDSVRLLAVEGCAALGKLLEPQDCAAHILPVIVNFSQDKSWRVRYMVANQLYELCEAVGTEPTRGDLVSAYVRLLCDNEAEVRIAAAGKVTKFCKILNPQIAIEHILPCIKELSSDSSQHVRSALASVIMGMAPVLGKDATLEQLLPIFLSLLKDEFPDVRLNIISKLDQVNQVIGIDLLSQSLLPAIVELSEDRHWRVRLAIIEYIPLLASQLGVGFFDDKLGALCMQWLEDKVFSIRDAGANNLKRLTEEFGPEWAMQHIIPQVLEKINNPHYLYRMTTLQAISLLAPVMGPDITCQQLLPVVIASSKDRVPNMKFNVAKVLQSLVPILDQSVVEKTVKPCLVELSEDPDVDVRYYAHQALRACDQMVISS

SEQ ID NO: 59012 - protein, 368 aa, Zea mays
  Clone ID: 700094281_FLI.pep
LDRSIVGQPMGSNDPSTPSKASKASEQVLETVDQPPATTSSGTVSVYPEWPSFQAYQAIPPHGFFPPTVAANPQAHPYMWGAQPMVPPYGTPPPPYVMYPPGAVYAHPSTPPTMHPFSHYPMPTNGHAETPGTAPSAPEMNGKSEPGRTSAPSANGITSHSESGSESESEGSDANYENDSHSKDNDGKEDGNSQNSISYSASQGVLNQTMAMLPIQPGAMVGGVSSSTANLNIGVHYWEAPGSAAVSATHGKAPAGSARGDQWDERELKKQKRKQSNRESARRSRLRKQAECEELGQRAETLRSENSSLRAELERIRKEYEQLLSQNASLKEKLGGSSDPIPDMNEQNDGNGSDKKQSDSDAQPGSES

SEQ ID NO: 59013 - protein, 889 aa, Zea mays
  Clone ID: 700094544_FLI.pep
SVMHVTVTCKAASIGNIEREMRVAMVGSGLSGLVAAHELARSGGVRVTVYEKEDHLGGAKTVAVDGGAEEGRVLVDLGPVVFNPVTSPNLMEWFERLGVEMCTSDMSFSASMRLNKSSESFEWGSRSGMSGVLAQKSNLLSPRFWLVVHEIFKFKNHALKYLEDHRSGPNRNETLGQFILSHRYSQLFQDAYLIPMCACIWPSPSHEILGFPALFVLSFFRDNQLLEILSGSKWLTVKGGSGSYVNKIREELESNGCQIKIGCEVNSISKSNDGYQILEVDGSVETYDRIIIGINAHDALKVLGAEATNEELKNLGAFHFIRSIAYLHSDESLMPRNSSAWSARNFLGTTSSGVCVTSWLNILENIESAGPLLVTLNPPRVPNHVLLKCHISHPIPSIAAAKANLQLNSIQGKRGIWFCGSYQGYGYHEDSVKAGKAAALGLLGRKCDLLSNPKPMVSSWTEAGARLLVARSLDQYITIGNFCILEEGGTTFSFGKACEKCHVKSAIRVHDPQFYWKAATEGDLGFASAYINGQISFVDHRKGLVNLVRIILANRGEFKRLSSTASGNTRKAWWSPLLGITGVSFAKYFLRHALRKNSVSKARKNISEHYDLSNDFFALYLDPSMTYSSGIFKVAEESLETAQLRKLDSLINKAKVEPGHHVLDIGCGWGTLAIRLVKQTGCKYTGITLSEEQLKYAKRKVKESGLEDRITLLLCDYRQLPAGDKFDRIISCEMIEHVGHEYMDDFFGCCEYHLAEHGLLVLQSIALPEELYDKMRMRPEFLKTYIFPGGCLPSLGRIVSAMSNASRLNIQHLENIGDHYYTTLMNWRDNFVANREKASALGFDDKFIRTWEYYLSYAAALFKSRTAIDYQIVFARPGDSKLPSYVAIA

SEQ ID NO: 59014 - protein, 275 aa, Zea mays
  Clone ID: 700094561_FLI.pep
TLGLAVVGGAAAMSHFGRTGPPDIRDTFSLLVLNISFRTTADDLFPLFERCGKVVDVFIPRDRRTGDSRGFAFVRYKYADEAQKAIDRLDGRNVDGRNIMVQFAKYGPNAVPIHKGRVKEGVEKSRDRSRSRSPRPRHRDRDDRRRSRSRSRSRSRERHVHDRDRDYRRRSRSRSRSMSSSPDHKSHRRARDDVKRKSRSKSRSKSRSRSRSRSYHILHLPGAVLALPRAHCHRGAPLLKSMPMEKIHLCHAVYLHHRSVQAPAAQAAIARNKAC

SEQ ID NO: 59015 - protein, 623 aa, Zea mays
  Clone ID: 700094592_FLI.pep
INVMYKLVSGSPSGVVAAECKQAQASWVVLDKDLKHEEKRCVEELQCNIVVMKRSQPKVLRLNLVGSPDKESKATCAVPPVLDCSSGKTATDVKEARSSIRGPAVTPNSSPDLDTPFRSTEAGTSSVSSSDPGASPFSASEINGSLKKEVLATKDKIQHSDVNISDSDSETLSPPANFSFQPWMSDILQGSASSRSLGKVPRKTRTATADVLLEKISKLDLLNEISAMRSRSDLNFRGDVRDAVSLARNAPPGPPPLCSICQHKAPVFGKPPRWFSYAELELATGGFSQANFLAEGGFGSVHQGVLPDGQAIAVKQHKLASSQGDVEFCSEVEVLSCAQHRNVVMLIGFCVEDRRRLLVYEYICNRSLDSHLYGRNRETLEWTARHKIAVGAARGLRYLHEECRVGCIIHRDMRPNNILVTHDFEPLVGDFGLARWQPDGDMGVETRVIGTFGYLAPEYAQSGQITEKADVYSFGVVLVELVTGRKAVDINRPKGQQLLTEWARPFLEEYAIDELIDPRLGARYSENEVHCMLHAANLCIRRDPHSRPRMSHVLRILEGDMVVESGSVNGSSDSGSRSWRLLSEQQHYCQEYRVARLNKNREGQARGNAPTADRDKQSISNRY

SEQ ID NO: 59016 - protein, 234 aa, Zea mays; identical to SEQ ID NO: 42501
  Clone ID: 700094665_FLI.pep

SEQ ID NO: 59017 - protein, 262 aa, Zea mays
  Clone ID: 700094967_FLI.pep
TSLLASRLPTLHPPAAPQAPSSGDMSRFGRSGPPPPIRDTYSLLVLNITFRTTADDLFPLFDKYGEIVDIYIPRDRRTGDSRGFAFVRYKYEDEAQKAVDRLDGRLVDGREIMVQFAKYGPNAERINKGRIMEPVPRPRGRSRSRSPRRRYRDDYRDDYQDRDYRKRSRSQSRDGYARDRYRDRDYRHRSLSRSLSPARRSPSHSRSRSYTPDDYKRRGKDSASPASRSPSRSPPRKTPPSPKRSPVRHNDDRSPRSRSPST

SEQ ID NO: 59018 - protein, 514 aa, Zea mays
  Clone ID: 700094976_FLI.pep
HTLSWPLKTMVLLELLIVGSTLVLSLYVRFWRSRNGPLRPVDWPIVGVLPALISMLHNLHHEVTVILAASGCNFKAQGPVGSGMRFFFTADPANVRHIFTSNHANYPKGEELAEIFDIVSGSILTVDGEACRQQRGMFQTVLSNQRVLELMFRCCRHKVVHDLLPFLARMESSGTPFDMQDLMTRLIFDLTATPIFGVDPGCLSTMMPSMHVSAAMDTVMEVGLLRHTVPTSCWKVMRQLNIGPERKLAVAHTLLHEFITEMMVKSKARCSDPAGEIAAMDIISGDPAYSSDAAMLRKILINYMIAGRDTVGTTLPWVFYNLAKDPRVVSGIREELAHIASLKASGTKNMVFFEPEETKDLVYLQAALFETLRLYPPGPFERKMVLADDVLPSGHRLCSGETILISIYSMGRMEALWGKDCDEYRPERWFTEDGAKLRYVPSHKFMAFNSGPRMCLGKDIAITQMKTIVAAVVWNFHLEMLEGQSIHPKLSCILQMKNGLKMKVKKRQEKRDLQ

SEQ ID NO: 59019 - protein, 291 aa, Zea mays; identical to SEQ ID NO: 45247
  Clone ID: 700095494_FLI.pep

SEQ ID NO: 59020 - protein, 415 aa, Zea mays
  Clone ID: 700095552_FLI.pep
APEETPCDRSQSQRNRTEARPPAASEMDGGAGEEGKQERHLVLAHKLFLLSHPSVDDLSKVALRAEVLDTVKSDDMATLFESLVAGGVLEGDAALLAEMRGRFDEEIRKLDEKIADAEENLGESEVREAHLAKSLYFIRVGEKEKALEQLKVTEGKTVAVGQKMDLVFHTLQIGFFYMDFDLISKSIDKAKNLFEEGGDWERKNRLKVYEGLYCMATRNFKKAASLFLDSISTFTTYEIFPYDTFIFYTVLTSVITLDRVSLKQKVVDAPEILAVIGKVPHLSEFLNSLYNCQYKSFFVAFSGLTEQIKLDRYLQPHFRYYMREVRTVVYSQFLESYKSVTMEAMATAFGVTVDFIDQELSRFIAAGKLHCKIDKVAGVLETNRPDERNAFYQATIKQGDFLLNRIQKLSRVIDL

SEQ ID NO: 59021 - protein, 266 aa, Zea mays
  Clone ID: 700095579_FLI.pep
REDLVMSSRSPPPKDRRMRTERTSYRGAPYRRDSRHGPSRFRNDLCNNCKRPGHFARECPSVAVCHTCGLPGHIAAECSSKGTCWNCKEPGHMANSCPNEGICRNCGKSGHIARDCTAPPVPPGEVILCSNCYKPGHFREECTNEKACNNCRQSGHIARNCTNDPVCNLCNVAGHLARQCPKSDTLGERGGPPPFHGVGAPFRGVGVPFRGGLSDVICRACNQIGHASRDCMAGAFMICHNCGGRGHTAYECPSVSLIERFPPRRF

SEQ ID NO: 59022 - protein, 51 aa, Zea mays
  Clone ID: 700096410_FLI.pep
SVYCAHVEVATLGYANLLRTKSFFCLGLKGFVFFLKWLFLRYFLLVQIACK

SEQ ID NO: 59023 - protein, 683 aa, Zea mays
  Clone ID: 700096523_FLI.pep
ELTSWVIYSDEEKKFNIDIIFGLIRSELLNIGEYNVHLAKLIDGGRNKVATEFAMSLVQALFAHDPVGFTEFQNVLDALSKHTKRPGSPESLQQLIEIARNNVSTTTGFVAVKDEKVKLPKDKKVLATRANKEENTANEIILVDPNQVAVLFSEWCQMCNHVSASDAAYTRFVTQLQQDGLLKGDDISERFFRILTELAVTHSLVSEQIVAPGGSSQQSPQQPHISYFSIDSYAKLVVMVLKYSVEITPNKASILSKILSVTVRSIQKDAEEKKASFNPRPYFRLFINWLYDLTTTDGHHDSSNFQVLTAFANAFHMLQPLRVPAWSFAWLELVSHRSFMPKLLMCNSQKGWPFFQRLLVALLKFMEPYLRNAELPEAMDLLYKGTMRVLLVLLHDFPEFLCDYHFSFCDVIPSSCIQMRNVILSAFPRNMRLPDPSTPNLKIDLLAEISIAPRIMSDVDGALKSKQLKTEVDEYLKRPEGSSFLSDLNQKLLLPQNEASVAGTRYNVPLINSLVFYVGIQAVQQLQLNKANPSASVQQINHISPMDIFQIGTATDIFRSLITSLDTEGRYLLLNAIANQLRYPNSHTHYYSFITLYLFSEATQEITQEQITRVLLERLIVNRPHPWGLLITFIELIKNPRYNFWSRSFTHCAPEIEKLFESVARSCGAKVVDEGISVQDGSH

SEQ ID NO: 59024 - protein, 436 aa, Zea mays
  Clone ID: 700096534_FLI.pep
QQSQRKVVLMSTVTLPTLSRCLVELEGLHHLPGEVGVVTAEVAVGGGLDEPVAALLQVEVDADHPGPEVEVLLHDLEDLLVGDRAGAVRVDEHGQGLRHADGVRHLHEAAAGEAAGHDALGGLPGHVGAAAVHLGGVLAGEGATAVGSPAAVRVDDDLAAGEAGVTVGPADDEAPGRVEVEDGLLVEVLLRDHGLDDVLLEVGGDLVVGDGLVVLGGDEHGVHADGHHGAALVHVLHRHLGLAVGPQPGAGAVLAHLGEARAQLGGQHVAQRHQLGGLVGGVPEHVALVARADLLGPLREVPVHALRDVGGLLLDVHQHLAAVGVEAHVVGGEPDLAAGVAHDLLVVHGRLGRDLAEHHHHVGLGAGLAGHLAVGVLREACVKHGVRHLVAQLVGVPLVHGLRGEKEALGRHCLLLALPTSCAAALYSGPARGRRG

SEQ ID NO: 59025 - protein, 254 aa, Zea mays
  Clone ID: 700096763_FLI.pep
AHRIMAIGSVAAAGGNKLFRKTSGSHAFVADFPAADDDDDIVFGTEADGGGGCSPDADASRCVKRARPHERNKILKYRLFASTWNVGGVAPPDGLDLSDWLDGGDDGPYDMYVLGFQEVVPLRARNVLGADKKRVGMRWVELIRAALNRSHSQRSRGGGSGDGGGGGKQKVHPVRDGCGGELGREYRCVVSKQMVGILLTVWVRSDLRRFVRRPSVSCVGCGVMGCLGNKVSIYSPVLGYSRIWWPPRHLAKLS

SEQ ID NO: 59026 - protein, 545 aa, Zea mays
  Clone ID: 700096950_FLI.pep
GRPWREMTRIFVQRGTAGSSSSSGRSDTQPVQPAAAAREEELPLQPQPQLPELLAIDDTTDNLNEGSENISNKPLRTDDTISESSSSAEERAAREKPLKDDSNVINPTFLVEEPVGIQIPDQIEHENSVLSVTGSSQMAGAASHPPPLPAPPPKPLLGNNGLRRMGPGSSNSVRIGSSRRPVAWPLVAARTSASGSRPSSPRSLVDGEGYNSADEQGPCYALSYDDSERERMFDHDLRRVKGLEIRKMAEDGNCLFRAVANQVYGDAEAYDMARQMCVDYMERERDHFSQFITEIESFTLYCKRKRRDKVYGNNVEIQAFAEMYNRPIHIYSYSTEPINIFQGSYNTDVPPIRLSYHHGNHYNSVVDPRRQTVGAGLGFSSLRGTNNVDRDQVKAAIKAQQDQQIENALLAEGRFYSDLELTEREIERMVMESSRSEYLAKEKKLNIRESSTSRAEPSSSAAISGSSRSVAGADRGKEDYFVLPDTALTRSMQLLLAMGFSYIQVMEAYSIFGEDVDSMVCYLLETGGTGASAGGSNRRKGKAAE

SEQ ID NO: 59027 - protein, 492 aa, Zea mays
  Clone ID: 700096960_FLI.pep
ESSHPQVLSFCEIEIRLGTDRQRKVNCGKEDRKMGIGDGSSNGNQQPVHKEIRDETTPLLPVKVEEDEGFHEFNGASFSGAVFNLSTTIVGAGIMALPASIKMLGIIPGILLIILVALLTEASIDMLVRCSHQGKITSYGWLMGEVFGQWGRIALQASVIINNVGVLIVYMIIIGDVLSGTTSGDVHHRGILEGWFGAHLWNSRAIVLLATALLVFAPLVSFKRLDSLRYTSALSVALAVVFVVITAGIAIIKLFNGTVAMPKLFPELDGLNSIWNLFTAVPVLVTAYICHYNVHSIDNELEDRTQIKPIVRTSLFLCSSVYIATSFFAYLLFGEGTLDDVLANFDANLGIPFSSVFDDIVRVSYAAHVMLVFPIVFFALRLNLDGLLFPTSRHISRDNKRFAIITVSLLAVIYLAAILIPSIWDAFQFTGATAAVLIGFIFPAMVILRDSYGIASKRDKILAVTMIVLAVLSNSVALYSDAMNIFRKKEVA

SEQ ID NO: 59028 - protein, 326 aa, Zea mays
  Clone ID: 700071604_FLI.pep
RMDLGDFLTLVASAEASSEHPLAKAILDYAFHFHFFGNLPSGKDSIKRRKEEILSQWLLEVVDFAALPGKGIQCWINGKKILVGNRALITENGVNIPEEAERFLVDMELNAKTGILVAYDGDFIGLVGITDPLKREAAVVIQGLKKMGVHPVMVTGDNWRTARAVAKEVGIDDVRAEVMPAGKADVIHSLQKDGSVVAMVGDGINDSPALAAADVGMAIGAGTDIAIEAADYVLVRNNLEDVITAIDLSRKTFIRIRWNYFFAMAYNVIAIPVAAGALFPFTGVQMPPWLAGACMAFSSVSVVSSSLLLRRYRKPRLTTVLQITVE

SEQ ID NO: 59029 - protein, 510 aa, Zea mays
  Clone ID: 700071919_FLI.pep
PTFLTSPPTRRRRPTAGMPPAIPSLVHPSRVRILHPGGSHIHGPVVYWMLRDQRLADNWALLHAAELAAASTPAAPLAIAFTLFPRPFLLGAHLRQLGFLLRGLRRLAADAHARGLPFFLLEGGPAELPSLVRRLGASALVADFSPLRPVREALDAVVQELLRDAANMAVHQVDAHNVVPVWTASGKLEYSAKTFRSKVNKVINEYLVEYPEVPQWAPWCMEQPKSVDWDALINSIFSEAENVPEINWCEPGESSAMEVLLGSKDGFLTKRIKNYDTGRNDPTKPHALSCLSPYLHFGHISAQRCALEAKKRRHLSPKSVDTFLEELIIRRELADNFCYYQPQYDSLAGAWEWARKTLTDHTGDKREHIYTREQLENAKTSDPLWNASQLEMVHHGKMHGFMRMYWAKKILEWTSQPEEALSIAIYLNDKYHIDGRDPNGYVGCMWSICGLHDQGWKERPVFGKIRYMNYAGCKRKFDVDAYISYVKRLVPRAKKRKTEEGESTVKESNV

SEQ ID NO: 59030 - protein, 134 aa, Zea mays
  Clone ID: 700072523_FLI.pep
YRSTLVRSCFLLSVAALRQVPNSPFSGPSPATSTRQRIMDWLGQKRAEMLMQVLLVASAVVAFLVGYVRADFQLMLLVYAGGVVLTALVTVPNWPFYNRNPLKWLDAAEAERHPRPQVSAAPAAGGKKRSGKNK

SEQ ID NO: 59031 - protein, 393 aa, Zea mays
  Clone ID: 700073136_FLI.pep
RRVEPVRAATSMGALPLDALYDILLRLPAKELCRLRSVCRPWRSLLSDPAFAAAHAARYPEPLIIVGYNYNDSPPPPESDERDWTKPRRYQCVISVMDLTGHVVKNLRVDGHIASMSLSLACVKRTGDGSCRLVNPATGAVHHVPEEDPPYGYSDRLCPFGQVASTREFKVLRKVSYSLNGNPRVLYEICTVAGTGRSNAQWRMVQDHPHRIDIDWRDKASVVIDGVVYFLSKNYASSSSSAGSEEQDWIASFDLDAERWRPNIRGPQSLTVVNNGNDNGLAVDEELSLTNLNGSLVIVHLQSPPCMNLWYLLDSEKGLWVRQYSIQVEEWDCSLSSFTPLIVLDDGRIVIHVEGSEMLEIYDPKTNKLSSVADTGLSSAVSVYTGTLLSLEW

SEQ ID NO: 59032 - protein, 209 aa, Zea mays
  Clone ID: 700073146_FLI.pep
LLLRTISCLWKHTNNYREQTSTESAVRKAEDVVSSMLAKGFVLSKDALNLARSFDERHNILSNATATVASLDRQYGLSEKISLGRAIVGSKVKEVDERYQVSELTKSALAAAEQKASVAGSAILSNQYVSAGASWLTSAFDMVTKAAGDMTSMAKDKVERAEEERKAIMWEERSGLVSEYAKIHLDEPSSWEPAVLPLESVDEQKLQAV

SEQ ID NO: 59033 - protein, 830 aa, Zea mays
  Clone ID: 700073203_FLI.pep
WLFLLLCCDSRSMADGAIVVAICQYGGEFTSGPSGNLIYRGGEAHAVDVTHDSSLESFKDELSKVFHVDVTDMSLKYFLPNNMKTLITISCDRDLQRMVGFTANAAHVDVFLISRQENRSTITHSGATSGSVASGDKRKRPTPKNKVIRSSKPATSAACNALQAITDNVRQPISVITENEDNRVFQLEFGNDITFTTTAGGASFTSDILDQQKLVLVDNIPKEAVSLFDDAFNPYVSSEIMHEPPQEPNNPIVLWDDIIKGVGQEFDNVKDFRAQLCKYAIGKGFVYRFIKNETTRVTVKCGAEGGCTWRLHASESSRNKKFIIKRLTDEHTCGGGSGEGQRRATRQWLTTIIKEKLHDNPKFKPKELVKELFEEYGVTLTYSQVWRGKEVAEKELYHAVRETRDQLPWYCQRLEETNPGSISVLSPVLDMKTRRFFVALHACLHGFINGCRPLLFLDKVPLKATNEYKLLVAAAVDADDGVFPLAFNVVEDENYDSWGWFLMHLKIALQTHNYPCNGMTFLSNGQMGLDAAVSHVFEDGEHAFCLHHIIEEFKGELRKGPWSQQIREGMVEDFTRAAQACSIEDFNASIESIRNISSEAADWIIASKPEHWSDAIFRGFRYDHFSLNIVDAFDNWIPAKKESSIVLMVDSLRIKIKEVIESRLEACKVWQGPLTPTMEYKVQDEMLKAGKMTVLCSSDTVFEVRGNAVFVVNIGNWECTCRRWQLSGLPCMHAIAVFNRLGRCFYDYCPKFFRIESYHLTYSGIIFPIPDLDSVDFSAGANLLPLPPKRRTSDKPRRKRSNPNKISTLTRLCSRCKQTGHNKATCEVQF

SEQ ID NO: 59034 - protein, 443 aa, Zea mays
  Clone ID: 700074407_FLI.pep
RDFILREFRTKKESMSDLLPEDVLVNIIGRLAPRYLAISRCVCKTWCTTIDAHNLLRMDLLPHSVSGLFINFNELSMSEFLSRPSKGPAISGKFDYLPSAGQVIDHCNGLILLHECVVNPATRQWALLPPRPSPNMPEHFCHGMYLVFDPTLSSHYEVFLIPQVSYNSNLDPAIEELEWPPSPCIVQVLSSRTKLWEERLFVREGEAAGNVADIRLDFQAVQENAVYWRGVLYVNYQSKFIMRISLSNDKYQVIKPPVDFEWFEFENESRLSKNLYLGKSEKGVYCALRYPSTVSFSIYILDESDGKTEWIMKPHYYLGSQGIDGPGPWTLQDINYNWDTQYEDSMEEKFEWDSDSDNVVENRSNGGYPCLPRIELLGFHPYKDVVFLSDTLRRGLAYHLDSSKIQDLGNLHPTYYGTEQGIQPFLLTAFPYTPWRGWFPEDT

SEQ ID NO: 59035 - protein, 500 aa, Zea mays
  Clone ID: 700074723_FLI.pep
NRWMRLTHEVKSGKSGKLECLSVKATISKHLVICCHAESPASMEDFPLWKFENQVETLPTKDTTLAFSGQKLIQVDEPDAQVDLVLNSAGPALVGELFTLPVIIESKGHAVHSGELKINLIDARGGGLLLSPREAEDSESHHVELLGVSTVSEDKESKEEADSIRKIQYSFGVVSVPTLSVGDSWSCKLEIKWHRAKSVMLYVSLGYSLGSSEEEALHRLNVHRSLQIEGQIPLLVSHQFLRSFRREPLLLSGIRSLGSDDKKCSLAMNESNMLIVTARNCTEVPLCLHSMTIQPDGDSEQLCSVQQISGISNRHAIVAPREEYKGIFSVNPRAISTNFRLGEICLNWSRDSSLGEDQDRLIIMKVQLPEVNIEEPPLVVGMECPPYAILGIPFTIYVKIHNSTSLLQEIKYSLVDSQNFVFSGAHNHAAFILPKSEHTVSHKFVPLGSGSQQLPRITVTSVRYSAALTPSASAATVFVYPSEPKFNLETSHSTSDEVVS

SEQ ID NO: 59036 - protein, 955 aa, Zea mays
  Clone ID: 700075455_FLI.pep
PTSLPSHPRVDFKSASELRSGSPPSPPVASSSRDPPSGRPLTMEAMEELSELAESMRQAASLLADDDPSDDAAPRRPTTFLNAVALGNVGAGKSAVLNSLIGHPVLPTGENGATRAPIVVDLQREPGLSSKSIVLQIDSKSQQVSASALRHSLQDRLSRGASGGSGRGRVDEIYLKLRTSTAPSLKLIDLPGIDQRAVDDSMINEYAGHNDAILLIVIPAMQAADVASSRALRLAKDIDADGTRTVGVISKVDQANGDAKTIACVQALLSNKGPKNLPDIEWVALIGQSVAIASAQSVGSENSLETAWRAEAESLKNILTGSPQNKLGRIALVDTIAKQIRKRMKVRVPNLLSGLQGKSQMVQDELARLGESMVQSAEGTRAVALELCREFEDKFLAHITSGEGSGWKIVASFEGKFPDRIKQLPLDRHFDLNNVKRIVLEADGYQPYLISPEKGLRSLIKIVLEMAKEPSRLCVEEVHRVLLDIVNASANATPGLGRYPPFKREVVAIASNALETFKNDAKKMVVALVDMERAFVPPQHFIRLVQRRMERQRREDELRNRSSKKTQEAEQPTSKRASSPQTDAEQGGGSLKSMKDKSGQQDKDTKEGSNLQVAGPAGEITAGYLLKKSAKTNGWSKRWFVLNEKSGKLGYTKKQEERHFRGVITLEECNLEEVEEEEPSKSSKDSKKANGSEKISSLVFKITNRVAYKTVLKAHSAVVLKAESMADKVEWVNKIKAVIQSKGGSFKGPSTEGSSMRQSNSDGALDTMARRPADPEEELRWMSQEVRGYVEAVLNSLAANVPKAIVLCQVEKAKEDMLNQLYSSISGQSNAKIEELLQEDHNAKRRREKYQKQSSLLSKLTRQLSIHDNRASVSSYSNDTTEAESPRTPTRSGEDWRSAFDSASNGPVAGSTNSQSRSKSADGRSRRYENGDVSSGANSGSRRTPNRLPPAPPKY

SEQ ID NO: 59037 - protein, 157 aa, Zea mays
  Clone ID: 700075694_FLI.pep
DVEADIIPTCRELGIGIVAYSPLGRGFLSSGPTMVDKLSDQDFRKELPRFQPENLEKNAVIFERVNAMAARKGCTPSQLALAWVHHQGADVCPIPGTTKVENFNSNVAALSVELTPQDMAELESYASAGVQGDRYHDFLNTWKDSETPPLSSWKADE

SEQ ID NO: 59038 - protein, 535 aa, Zea mays
  Clone ID: 700075953_FLI.pep
TNFLAESTVLAMDVALSTIVFVIAIFIPALLTLVQRSRSRHAGHNQPPPPEPRAIPLVGHLHQLLRKKPLHRTLAHLAERHGDVLGLRFGSSRVAVVSSASVAQQCLVALDTSFGNRPRLPSARILSYEWSTMGHSNCGPYWRQARRTTSTEFSSVERVQHFADVHEQAARAMARSLCRLALASGRGRALVDVKPRLFEMLMNGLLDMLFKGTASRSGSSDEKDEAVEVSEEARCFMAMAEETMELTLTVWDFLPPLARWLDVDAVGRRLQRLQANRTEFLQRLIEEHKEMEKGGQVTRRTLVGVMLELQDKDPEAYTDQLIRSMCVSALEAGTLSTGYTIEWVMSLLLNNPHIMKKARDEIDACVGEPKRLLDATDLPKLPYLRCIILETLRLYPVVPLLVPRESSTNCTVNGFNIAKGTMLLVNTFAIHRDPRTWDDPETFLPERFEDGSNQAGKTTMDLSFGMGRRRCPAENLGMQLAGIALGTMIQCFNWERVGTELVDMAEGSGLTMAKKVPLEAFCQPRASMVDLLANI

SEQ ID NO: 59039 - protein, 502 aa, Zea mays
  Clone ID: 700075986_FLI.pep
VLPQNRGMEDEENIEGELLLVESQLHDIQGQIKTLLDRQEELYERQAQLKALLEASKLTRNTTINTSSVAPEDWSGSFPWDLEADDTRFNIFGISSYRSNQREIINAVMSGRDVLVIMAAGGGKSLCYQLPAVLRDGIALVVSPLLSLIQDQVMGLSALGIPAYMLTSTTNKEVEKFIYKTLDKGEGELKILYVTPEKISKSKRFMSKLEKCHHAGRLSLIAIDEAHCCSQWGHDFRPDYKNLGILKIQFPSVPMIALTATATSKVQMDLMEMLHIPRCIKFVSTVNRPNLFYKVSEKSPVGKVVIDEITKFISESYPNNESGIIYCFSRKECEQVAKELRERGISADYYHADMDIVNREKIHMRWSKGKSQVIVGTVAFGMGINKPDVRFVIHHSLSKSMETYYQESGRAGRDGLPSECILYYRPGDVPRQSSMVFYENCGLQNLYDIVRYCQSKRSCRHGAFFRHFGEVPQDCNGMCDNCASTIEQKDIDVTCMIYFASV

SEQ ID NO: 59040 - protein, 402 aa, Zea mays
  Clone ID: 700076238_FLI.pep
AKKNVYKYMFQYMQLTITRFNLSSSKMYKNGSQAPHYVVYHTIPIPTIIITITTDSCPLLVTSLDSVVMKHSWRPSFSCCSVSRRLRDHEGVRRLRGSPVLDVDAGTVILLHLRVMQPLQDGWNTSMVLHAALVPHLQVDLVPRSERRPGVERLRCRRRQLHPCPEVVHRRRHPGAEDLGHVSQHAPVVRVLLLLVPVPEVLVRRLVGAHEVDVEDGEAADEPRDDEGVNDEHERQRLAGDGPQQRPAVARPLRGDVEPGQHEDVEAQERGRRDEEEEEAVVAQADALADPGAVVVELPDAVVADGAVRRPRRPVQQARVAVLDPDDMAAGDDHVPVARQPEVRVIRGAHRHPLGRRRDDVVVIGDDGVVDPTALLLLRRARVPRHDPGVPARCQEQERQIR

SEQ ID NO: 59041 - protein, 542 aa, Zea mays; identical to SEQ ID NO: 45418
  Clone ID: 700076402_FLI.pep

SEQ ID NO: 59042 - protein, 552 aa, Zea mays
  Clone ID: 700076440_FLI.pep
ISRMARRAASSLVSRCLLARAPAGAPPAAPSALRRTVPADGMHRLLPGVLQRFSTAAAVEEPITPSVHVNYTKLLINGNFVDSASGKTFPTLDPRTGEVIAHVAEGDAEDINRAVAAARKAFDEGPWPKMTAYERSRILLRFADLIEKHNDELAALETWDNGKPYEQAAQIEVPMVARLMRYYAGWADKIHGLIVPADGPHHVQILHEPIGVAGQIIPWNFPLLMFAWKVGPALACGNTLVLKTAEQTPLSALYISKLLHEAGLPEGVVNVVSGFGPTAGAALASHMDVDKIAFTGSTDTGKIILELAAKSNLKTVTLELGGKSPFIIMDDADVDHAVELAHFALFFNQGQCCCAGSRTFVHERVYDEFVEKAKARALKRVVGDPFRKGVEQGPQIDDEQFNKILRYIRYGVDGGATLVTGGDRLGDKGFYIQPTIFSDVQDGMKIAQEEIFGPVQSILKFKDLNEVIKRANASQYGLAAGVFTNSLDTANTLTRALRAGTVWVNCFDVFDAAIPFGGYKMSGIGREKGVDSLKNYLQVKAVVTPIKNAAWL

SEQ ID NO: 59043 - protein, 471 aa, Zea mays
  Clone ID: 700076461_FLI.pep
AMGRKYYCHAVAALAVVFAAAVVVAADRRLSLVVGAAVAPEEVSLLRKVANLMWNGDGNSYQHVWPPMEFGWQIVLGSLIGFFGAAFGSVGGVGGGGIFVPMLTLIIGFDPKSSTAISKCMIMGASVSTVYYNLKLKHPTLDMPVIDYDLAVLMQPMLMLGISIGVIFNVIFPDWLVTVLLIILFLGTSTKAFLKGIETWKKETVIQREAAKLLEQTAGEEAEYAALPTGPDVAPNKKALTSDEAPSLIKNIHWKKVGLLSFVWVAFLVLQVTKNYTATCSPWYWVLNLLQVPVSVGVTLYEGFGLMSGKRVLSSKGSGQTTMKFHQVVVYGLFGIAAGLVGGLLGLGGGFIMGPLFLELGIPPQVSSATATFAMMFSSSMSVVEYYLLNRFPVPYAVYFIVVAFVAAIIGQHVVRKLINWLGRASLIIFILAFMIFVSAVSLGGVGVSNMVHKIERHEYMGFEDLCKYDA

SEQ ID NO: 59044 - protein, 381 aa, Zea mays
  Clone ID: 700076533_FLI.pep
FLLSLPGPGGLSSPRLSPPGAMDAGDDEPPVLLDRAARASRGKRITKLLEDEVEQDEAFWNQEALKDEENDDNYVEEPDAGDEFDSDFGEDESETDDEPEKEVRERLPIKKRLMFPGKTLRKTSVKKKKATPKPEDGTKADKSADKPSSSTQADIPDELEAEKAIRKSTRTSVIVRQAEREAIRAEKEATAKPIKRKKEGEEKRMTQEEMLLEAAETEIMNMRNLERVLAREEEVKKKAVVHKDTYEGPTVRFFSRDGESRLEFINGASFGSELCTTSSPYPEKPVCVVTGLPAKYRDPKTGLPYATMEAFKIIRESFLKEEADRKRPNMSNMGELFESITGGHLMPKKRRVEIRSPNMLGGSRHGGRTWRIPAFDMVDED

SEQ ID NO: 59045 - protein, 338 aa, Zea mays
  Clone ID: 700076553_FLI.pep
SPPSFAVAVAVAVAPAWPPPLDRRWTRFPDPEATMNYIIGAFKPPCDIFVTFADERTRKQVQIKKDNGKTVMVPTFQTLETIAGEVSIAPVPGKRLEHTGVKIELLGQIELYFDRGNFYDFTSIVRELDVPGEIYERKTYPFEFSTVEMPYESYNGTNVRLRYILKVTIGRNYVGSIVESRDFCVRNYSLVPTINNSIKMEVGIEDCLHIEFEYSKSKYHLKDIIIGKIYFLLVRIKIKNMELEIRRRESTGSGPNTYVETETLAKFELMDGAPVRGESIPVRLFLTPYELTPTHRNINNKFSVKYYLNLVIVDEEDRRYFKQHEITMYRLLETPQSS

SEQ ID NO: 59046 - protein, 562 aa, Zea mays
  Clone ID: 700076790_FLI.pep
ADMGKSPGKWIKSVLLGKKSTKSGPTKSNESKADNNRYSTGEDRTLSESSPVISEPVLVNIHKNVAINGKAADASDRARQQDPQSQSVVESRSSAPAAQLGEDQAAAKAQAAFRGYLARRSFRALKGIVRLQALIRGYLVRRQAVSTLRATWLIVKFQALVRGRNVRLSGSRMQLNVKFGQSNFGGVRSSDAWKEKLSSNAYVRKLLSSPIVLEPLHFQYDKRDPNSTYNWFERWTIGCIWKPAFQPKRVADGKPLVKKASYAMETQSAKLKRNIRKGSAAIAGSFHTSGESDKVKRNPKNFSSFPADSVPDSQLSELEKVKRNLRKVTDSMAEASKISSSRVDSSKVCNSTAEVPKESNPVAEISKIRSLLNGISDHQDIQCENTRESSFPLGTQEDSDNDHLLRYSNMDSLDLVPGLKSDQEIQLDSVSIGENVDDPTVVAPAVEEMSPQNIDTEDNVLCKKEEARSKEEHLSNGSLRTSKRKSSFPNKSEYVENGTHATPVQPRQPSYMAATESAKAKLRAQNSPSLDSDSAAEKNGFTRRHSLPSSTKSRALKAEWKR

SEQ ID NO: 59047 - protein, 1105 aa, Zea mays
  Clone ID: 700077335_FLI.pep
RRPPNFHRSGGVVGRSICLGSIILYYLVEESLSTQAAMLEKIGLPPKPSMRGATWVVDASHCQGCSVQFSLFTRKHHCQRCGGLFCSSCTQQRMVLRGQGDSPVRICDPCKKLEEEARHELRYGHKNRATRATTKSASKPEDEILSEILGGGERIQSLDSLLPGRTTSSASTSRRTSSNLSTDAKGDESLSAEAHNYELNNTASIFTPEELRQHAVEEKKRYKTLKSEGKPEEALRAFKHGKELEKQAAALELELRRTRRMATKATNISSAVGTSMTAGSDEVETKRSSTGKKIKKEKNDLASELRDLGWSDADLRDETKAAPMSLEGELTQILREVAPKPLEGKRTGGIDKSQVNALKRQALLLKREGRLAEAKEELKKAKILEKQLEEQEILGEAENSDDDLAAIIRNMDDDKNDDIFIDDSKFPAFNFEQIMVASNDLATDGHFDVTDDDMNDPDMAAALKSFGWSEEDDKQLENLEPVSSNQEGLKEQVLSLKREAVANRRSGNVVEAMSLLKKAKLLEKDLKTEEPDSKVPSLERQKTTHAEDATYAGTNVRPIPTPKSKLAIQRELLALKKKALALRREGKVDESEEELRKGSVLEKQLEELENSSKPPVAKETRSFPSNPPYKVEPPNINLADEVYEPEVTDKDMQDPALLSVLKNMGWEDAGSDSVETTDKASFSAHVVHHKSSKTKGQLQKELLGIKRKALALRRGGKNTEAEEELEKAKVLEQQLAEMEESNNLSASQGVTTAGGDEILLVHASESGTPVVTLCGSPSKPQIETTNPNQGDVGEESRAGRSPALSQPAFTDPLGSEKGSHSPSVVHDRNEHQKTQGDDTLKDEILLHKRKAVAFKREGKMAEAREELKLAKQLEKHLEGAQQDTMDGVGDSITPAVEQNSLVQQPASSSNHTDDITSPPPAQASKRTQPQKAMSSRDRLKIQRESLAHKRNALKLRREGKTAEADAEFELAKELESQLEESDNQSSSSGGKSSEPNDTSVENLLDPQIMSALRSIGWSDMDLSMQSSSAQPLKPVQSSSSQPPQKVEAKSSVAATSKPQSERSQLEEQIKAEKLKALNLKREGKQAEALEALRSAKRLEKKLNSA

SEQ ID NO: 59048 - protein, 730 aa, Zea mays
  Clone ID: 700077379_FLI.pep
FLTLMPMAPDHPFDGFVAAARGAVAHLHLPVIHIPVSNSSPHPNSKQHKGLEVDCLLHLHVLVTNFLHKPLKSFARCFRPKRRTDTHSPPLHQEPSNGATPQKQLEFLLCIAFDAFAHNLHALDDACKHKGEEFAAATRQLEQFVVLRKVIDGKRADFDGFLSNLGFAKVGAPPPPASIVGGASPVPAPAPVSNQEDGAVIGNGEGVDSASGTQQQAQKLPARLLNIPLSNVERLRSTLSAVSLTELIELVPLLVSRSSTSADAHPDKKKLFSVQDFFRYAEIEGKRFFEELDRDGDGQVTLEDLEIATRKRRLPRRYARELFRRTRSNFFSKSIGWKQFLSLMEQKEATILRAYTTLCLSKSGTLHKSQILTSLKGAGLPANEDNAAAMLRYLNADSEGSISYGHFRNFMLLLPSERLEDDPRNIWFEAATVVAVPPPIEISAGSVLKSALAGGLASALSTSLLHPIDSMKTRVQASTLSFPELISKLPQIGLRGLYRGSIPAILGQFSSHGLRTGIFEASKLVLINVAPTLPEIQVQSIASFCSTVLGTAVRIPCEVLKQRLQAGIFNNVGEAIVGTMRQDGPKGFFRGTGATLCREVPFYVAGMCLYAEAKKAAQHVLRRDLEAWEIVAVGALSGGLAAIVTTPFDVMKTRMMTAPPGTPVSMQMIIFSILRNEGPLGLFKGAIPRFFWIAPLGAMNFAGYELAKKAMIKDENSSSESTKENLPRKQ

SEQ ID NO: 59049 - protein, 452 aa, Zea mays
  Clone ID: 700077454_FLI.pep
NDFDYSKRPAMARSPCDLRLLLLAAAAAFIYIQVRLFATQSHYADRLAEAERSENQCTSQLKSLIDQVSMQQEKIVALEEIKVRQDEERAHLRILIKDLEKRSVQKLLDKNVVPVAAVVIMACNRPDYLERTVESILKYQTSVASKFPLFISQDGANGAVKNKALEYKQITYMQHVDLEPVQTERPGELTAYYKIAKHYKWALDNLFIKHNFARVIILEDDMEIAPDFFDYFEAAAKLLDNDKTIMAVSSWNDNGQKQFVNDPKALYRSDFFPGLGWMLTKSTWIELSPKWPKAYWDDWVRLKEVHGHRQFIRPEICRTYNFGKHGSSLGQFFEQYLEPIKLNDVQIDWNSEDLSYLREDKFSTKFGKEVASATPLRGSDAVLKAHNMAEDVRIQYDDQEGFEQIARQFGIFEEWKDGIPRTAYKGVVVFRYNSSQRRIFLVSPDSLRQLGV

SEQ ID NO: 59050 - protein, 503 aa, Zea mays
  Clone ID: 700150674_FLI.pep
LGTRALDAAAQHAPPTERRRRQGNPQGAEAARAGMGAPVHGALALFLLLLVGAGAAPEETAPQEPTLPATGSGATGAAAVGVNSNSVLVALLDSHYTELAELVEKALLLQTLEDAVGKHNVTIFAPRNEALERDLDPEFKRFLLEPRNLRSLQALLLYHVLPSRLPSDSWPAASHPTLSGEEVELAPAAGAGMRVGHAAVTRPDAVLRPDGVIHGIERLLVPRSVQEDFNRRRSLAAISAVLPTGAPEVDPRTHRLKKPAPPVAPGAPPVLPVWDAMAPGPSIAPAPAPGPGSGKHHFDGHSQVKDFIQTLLLYGGYNELADILVNLTSLATEMGRLVSEGYVLTVLAPNDEAMARLTTDQLSEPGSPENILYYHMIPEYQTEESMYNAVRRFGKVRYDTLRLPHKVVAREADGSVKFGQGEGSAYLFDPDIYTDGRISVQGIDAVLFAPDDTKATQTADPNRKPPAIVTHKKKIKLRRGKLLEATCQMAGLFGQRSRFASCQ

SEQ ID NO: 59051 - protein, 417 aa, Zea mays
  Clone ID: 700150739_FLI.pep
PRRASESSEPPARPPPSPPPVPKANSFQVAMADQANQPTVLHKLGGQFHLRSIISEGVRARNICPSVSSYERRFATRNYMTQSLWGPSMSVSGGINVPVMQTPLCANAPAEKGGKNFMIDFMMGGVSAAVSKTAAAPIERVKLLIQNQDEMIKSGRLSEPYKGIVDCFKRTIKDEGFSSLWRGNTANVIRYFPTQALNFAFKDYFKRLFNFKKDRDGYWKWFAGNLASGGAAGASSLFFVYSLDYARTRLANDAKAAKGGGERQFNGLVDVYRKTLKSDGIAGLYRGFNISCVGIIVYRGLYFGLYDSIKPVVLTGNLQDNFFASFALGWLITNGAGLASYPIDTVRRRMMMTSGEAVKYKSSLDAFQQILKKEGPKSLFKGAGANILRAIAGAGVLSGYDQLQILFFGKKYGSGGA

SEQ ID NO: 59052 - protein, 378 aa, Zea mays
  Clone ID: 700150847_FLI.pep
VRAGEVEVEEEQRNPFQECLMAGGKEAHGWAARDVSGHLSPYHFSRRVQRDDDVTIKVLFCGLCHTDLHVIKNEFGNAKYPVVPGHEIVGVVTDVGSGVTSFKPGDTVGVGYFVDSCRSCDSCSKGYESYCPQLVETSNGVSLDDDDGGATTKGGFSDALVVHQRYVVRVPASLPPAGAAPLLCAGVTVFSPMVQYGLNAPGKHLGVVGLGGLGHLAVRFGKAFGMKVTVISTSLGKRDEALGRLGADAFLVSRDPEQMRAAAGTLDGVIDTVSADHPVVPLLDLLKPMGQMVVVGLPTKPLQVPAFSLVAGGKRVAGSAGGGVGECQAMLDFAGEHGITADVEVVGMDYVNTAIQRLERNDVRYRFVVDVAGSKIGG

SEQ ID NO: 59053 - protein, 324 aa, Zea mays
  Clone ID: 700150876_FLI.pep
WYRSWRDACKVLENGQSGAMVPASNSSDRSDRSDKPMDQKVLRRLAQNREAARKSRLRKKAYVQQLESSKLKLASLEQELQKARQQGIFISSSGDQTHTMSGNGAMTFDLEYSRWQEEQNKQINELRTAVNAHASDSDLRLIVDGIMAHYDEIFRLKGIAAKADVFHILSGMWKTSAERCFLWLGGFRSSELLKLLVNQLEPLTEQQLMGLSNLQQSSQQAEDALSQGMEALQQSLAETLAGSLGPSGSSGNVANYMGQMAMAMGKLGTLENFLRQADNLRQQTLHQMQRILTIRQAARALLAIHDYFSRLRALSSLWLARPRE

SEQ ID NO: 59054 - protein, 410 aa, Zea mays
  Clone ID: 700150972_FLI.pep
FAWHFARCGRPGPVLPLVGSKQARLASVRGSVMGSQRQRHRAVTGLPAAGARMLALLCASSWVLVLATAQNYSAIFNFGDSITDTGNLCTSGRPSQITFTQPPYGETYFGTPTCRCSDGRVVVDFLSTQFGLPFLPPSKSSSADFRQGANMAITGATAMDAPFFRSLGLSDKIWNNGPISFQLQWFQQIATSVCGQSCKSYLGNSLFVFGEFGGNDYNAMIFGGYSIEQARKYVPKIVNTISRGIDKLIGMGATDIVVPGVLPIGCFPIYLTIYQSSNGSDYDSLGCLNSFNDLSTYHNALLQKRVDVIQSRHRKTARIMYADFYSAVYDMVRNPQSYGFSSVFETCCGSGGGKYNYQNSARCGMAGAAACSSPASHLSWDGIHLTEAAYKHITDAWLRGPYCRPPILHN

SEQ ID NO: 59055 - protein, 515 aa, Zea mays
  Clone ID: 700151128_FLI.pep
QQLSRGRRPPPPPSRGAMTIARRLLRSNASAQAISLLKHVTGTASLQGHAHSPLDASVRHFSSAPSAQSDTTEENGFKGHGMLAPFTAGWQSNDLHPLIIERSEGSYVYDINGNKYLDSLAGLWCTALGGSEPRLVKAATEQLNNLPFYHSFWNRTTKPSLDLAQEILSMFTAREMGKVFFTNSGSEANDSQVKLVWYYNNALGRPDKKKFIARSKAYHGSTLISASLTGLPALHQKFDLPAPFVLHTDCPHYWRYHLPGETEEEFATRLATNLENLILKEGPETIAAFIAEPVMGAGGVIPPPKTYFDKVITAFGRLGTMFGCDYYNIKPDLVSLAKALSNAYVPIGATLVSPEISEVIHSQSNKLGSFAHGFTYSGHPVACAVAIEALKLYRERDIPGHVKQIAPKFQDGIRALADSPIIGEIRGLGMIMGTEFTNNKSPADLFPAEWGVGAIFGEECQKRGMLVRVAGDAIMMSPTLIMTPGEVDELVSIYGEALRATEERVSDLKMKSEKN

SEQ ID NO: 59056 - protein, 416 aa, Zea mays
  Clone ID: 700151424_FLI.pep
RRASESSEPPARPPPSPPPVPKANSFQVAMADQANQPTVLHKLGGQFHLRSIISEGVRARNICPSVSSYERRFATRNYMTQSLWGPSMSVSGGINVPVMQTPLCANAPAEKGGKNFMIDFMMGGVSAAVSKTAAAPIERVKLLIQNQDEMIKSGRLSEPYKGIVDCFKRTIKDEGFSSLWRGNTANVIRYFPTQALNFAFKDYFKRLFNFKKDRDGYWKWFAGNLASGGAAGASSLFFVYSLDYARTRLANDAKAAKGGGERQFNGLVDVYRKTLKSDGIAGLYRGFNISCVGIIVYRGLYFGLYDSIKPVVLTGNLQDNFFASFALGWLITNGAGLASYPIDTVRRRMMMTSGEAVKYKSSLDAFQQILKKEGPKSLFKGAGANILRAIAGAGVLSGYDQLQILFFGKKYGSGGA

SEQ ID NO: 59057 - protein, 197 aa, Zea mays
  Clone ID: 700152013_FLI.pep
IICNMQVYYRFNNISLLREPLMLITGFFLLFVACIVYMRTDMSISKSSPSYLAKLQWDEVQATVQKIQGIFEQCLAVHDKLEASLRDLSRTGDIQSCKAARKAADTQFKELSKDLKPLLATLQSSPQSYQILPKVEDLIVKEREMQEKLMTRHSTVVDSFEKKLRGQDVENRIALQQQKIAALRQEVESLLEYISEI

SEQ ID NO: 59058 - protein, 423 aa, Zea mays
  Clone ID: 700152054_FLI.pep
LLALVAAEGGEEGPRGRRLLVLLDDLAVRSSHSAFFGSLQARGFDLDFRLADDPKLSLHRYGQYLYDGLVLFAPSTPRFGGSVDQNAVLEFIDAGHDMILAADSSASDLIRGIATECGVDFDEDPEAMVIDHMNYAVTDVEGDHTLIAGDDLIHSDVILGSEKIEAPVLFRGIGHMANPSNSLVLKVLSASPSAYSANPKTKLASPPSLTGSAISLVSVMQARNNARVLLSGSLDLFSNRFLKSGVQKADSKTRYERAGNEQFVAEISKWVFHERGHLKAVNVRHHKVGETNEPGMYRINDDLEYSVEIYEWSGTSWKPYVADDVQLQFFMMSPYVLKTMSTDNKGLYSTTFKVPDVYGVFQFKVEYQRLGYTGLSFTKQIPVRPYRHNEYERFITSAYPYYTASFSTMGAFFVFSFVYLYHK

SEQ ID NO: 59059 - protein, 501 aa, Zea mays
  Clone ID: 700152584_FLI.pep
GRIAGNHLHHFMKFCFKTIYLQCNISKLYLQCKISNQSTYRARFQGLRQDIIADLVDQCRSYKQRVVQLVNSTSNEELLNQGLSLNDDMQRVLAKHDAIDAGLAVRVEKPKSLQSQIGSSSTRKPDTMEETIQRPSASTTATSQSPFGILALPAPPSSSSKAPAIPASSIDLLSGDDYVKPEPANSLALVPVTEYSAADKNVLAFADMFEQNTANNSNHNLPYSFLSSTSNSTISTSQTYHAPVRPVLPQHSAAYPNGARSNAIVPYDQQAQSNSTGSRNGQTAYGGNHQKQALNYGTGDQNGDIPPAPWGTKRSTNPFDDDQLGGMAVQPKGMQPQPVQPSQHGNKFMSAPPMPRGQPGRMQLQQVPGAQLGALQPTQATLNMQYRGMHPSMQMNHGMGMYSQPTFGGYYGMNQTQLYGVHMSGYGYGQQSGGYYIPNAAYAYTSANELAQRMNDLSVQNGDPNGAAANKQSRPEDALFGDLLSIAKMKQNKPAAGKVGG

SEQ ID NO: 59060 - protein, 710 aa, Zea mays
  Clone ID: 700152760_FLI.pep
SARPPNVGRQSAAAAMGFDGLVVVSDPYLQRRFTQAELRALQAQYAALRDASPNGRLRMRDLPAAISGVRGAAKSRDAEKENSAPEPGPCHGLTDEEWASVLKAVARADEKPHQDASFELFLRVYAEMQLRLKAVSVCSGRAGGIVRSSSSSAVAFLTAATTTLLHTISESEKASYVGHINAYLADDPSLKSALPIDPATDHIFHITKDGVLLCKLINLAVPGTIDERAINTKRVLNLWEKNENHTLCLNSAKAIGCTVVNIGTQDLAEGRPHLVLGLISQIIKIQLLANVNLKSTPQLVELVEDSKEMEELMSLSPEKILLRWMNFQLKKAGFQKRVTNFSSDIKDSEAYACLLNVLAPECSAKPSAMSVKDLLHRARLILEHADRMGCKRYLTPKDIVDGLPNLNLAFVAHIFQKRNGLSKQMKQVSFVDGLSDDAQVSREERSFRLWINSLGISTYINNVFEDLRNGWVLLEVIDKIAPGSVNWKMANRPPIKLPFRKVENCNQVLKIGKELKFSLVNIAGNDIVQGNKKLILAFLWQLMRYNILQLLKNLRFHSNGKEITDNDILAWANKKVKDSGKHHSYMQSFKDKSLSSGTFFLDLLSAVEPRVVNWSLVTKGEKDEEKQMNASYIISVARKLGCSIFLLPEDILEVNQKMMLTLTASIMYWYLKRPTSQSLDSENGSSCETTSITTSDDSASESSIDDNTTR

SEQ ID NO: 59061 - protein, 349 aa, Zea mays
  Clone ID: 700153712_FLI.pep
LDSPVPVAGASRGSVGAGVEAAESKTPGAAAPAAASSSVVDPVEYNAMLKQKLEKDLAAVALWRASGAAPPDHSPAGSSLPSVDVPHAGPLKPIGGTGSLVQNKLVGAPGGGSSSHVVQNADIPVKQTTSSSSREQSDDDDMEGDAETTGNGNPVQHRLQRRKQSNRESARRSRSRKAAHLNELEAQVAQLRGENSSLLRRLADVNQKFNEAAVDNRVLKADVETLRAKVKMAEDSVKRVTGMNTLFPAVSDMSSLSMPFNGSPSDSASDAAVPIQDDLNSYFAIPSEIGGSDGYMPDIASSAQEDDDFVNGAQVAGKMGSTDSLQRVVSLEHLQKRMCGGPASSGSTS

SEQ ID NO: 59062 - protein, 157 aa, Zea mays
  Clone ID: 700154212_FLI.pep
PPSTVPVPVPFRRASSPEMANARSGVAVNDECMLKFGELQSKRLHRFLTFKMDDKFKEIVVDQVGDRATSYEDFTNSLPENDCRYAIYDFDFVTAEDVQKSRIFYILWSPSSAKVKSKMLYASSNQKFKSGLNGIQVELQATDASEISLDEIKDRAR

SEQ ID NO: 59063 - protein, 325 aa, Zea mays
  Clone ID: 700154638_FLI.pep
SLEASRLVSPLLPQLCRCVPALAVALQRSPASLELLARPSPQSPDMEFEDRCHKVQEPKFDCLLFDLDDTLYPLSAGIAGHVKKNIEDYMVEKLGIDETKIENLGNLLYKNYGTTMAGLRAIGYSFDYDEYHAFVHGRLPYDNIKPDPILKHILKNLRIRKLIFTNGDMVHAVRALKRLGLEDCFEGIICFETLNPPCPPQGDQEPEIFDIADHFARSGTADELPKTPVLCKPNVDAMEEALRIANVNPHKAIFFDDSVRNIQAGKQIGLHTVLVGKSQRVKGADHALESIHNIREALPELWEEAEKAEDVLYPERVAMETSVTA

SEQ ID NO: 59064 - protein, 740 aa, Zea mays
  Clone ID: 700154866_FLI.pep
FQGVRPFHPGRVTTLIWIPLAAASGAGGIGPWPAEMSGFVGVVVSDPSLQGQFTQVELRSLKAKFVSLKRDSGHVTTKNLPVMMKKLRGLNEVVSVEEIAAFLSESYPDSDQEIEFESFLREYLNLQARVSAKEGGAGGGRGGKSSFLKSSTTTLLHNLNQAEKSSYVAHINTYLREDPFLKKYLPMDPSGNQLFDLIRDGVLLCKLINVAVPGTIDERAINKKRVLNPWERNENHTLCLNSAKAIGCTVVNIGTQDLVEGRPHLVLGLISQIIKIQLLADLNLKKTPQLVELFDDSKDIDEVLSLSPEKMLLRWMNHHLKKAGYKKTVNNFSSDVKDGEAYAYLLKALAPEHSPETTLDTKDPNERAKLVLEQAAKLDCKRYLTPKDITEGSANLNLAFVAQIFQHRNGLTSDTKQVTLTQTATPDDVLVSREERAFRMWINSLGVESYVNNVFEDVRNGWVLLEVLDKVSPGSVNWKLATKPPIKLPFRKLENCNQVVKIGKQLKFSLVNLAGNDIVQGNKKLIVALLWQLMRFNILQLLNKLRFHSQGGSQGKEISDADILDWANSKVKASGRTSRMESFKDKSLSNGLFFLELLSTVQPRVVNWKVVTKGETDEDKKLNATYIISVARKIGCSVFLLPEDIVEVNQKMILTLTASIMYWSLQNQHQSQSEMPEQSEPSSMASDAASDIASEDGASTTAPSELDEVNSLSDSVSNLTTDDATSNAPSTENGNGVAGS

SEQ ID NO: 59065 - protein, 438 aa, Zea mays; identical to SEQ ID NO: 47061
  Clone ID: 700154972_FLI.pep

SEQ ID NO: 59066 - protein, 458 aa, Zea mays
  Clone ID: 700155449_FLI.pep
SIGFALAKTSTINQQARHGHAIRRDETSSRPGCHDELKPMIAGINTTAHVDKVGRRRHGRGGSAARARARARARALDEPCCAVARRHVVHAMALLHVVVIVVLGRRRCSGHGPGWLRGRRHDRRQLGEQRLQAAHRRHDVHGRSGGGGAWPGGHRAGAVGVVELQRRPGAGGRRWHQARRPRRGDVRRGPHAPTGREHARRRRVREQHPRDALEVPELAAEHHHVAQVLRYLFHGAELHDALPDSDQGDGLDAALELRLPRPRMRVCRVAPGGDEAARLVLLGLLEHPLVAVVCRHFPYQTFAVVVDVMGHLEEQLRLQALRLLVLVLHRILHSCLTVPGICNRRSCRCPLLAARGRGGRAAGRREVAEPVLPCQDPVPPVPSGPVVRGAREIPFGGRVVPGQDAPEDGVDPLRGVAGAEAPQRVLQQVRHRHRAQLLLHRSRLAVARPAAGQGDRAC

SEQ ID NO: 59067 - protein, 554 aa, Zea mays
  Clone ID: 700155450_FLI.pep
PVASSAPNLSAPVLGHHVRPHRTALLSREQEASSSGVEDMGDARSEVPLAVLQDRQDSTATPWLPADAGSGTGQQEGSTNKKQLQQTMKSSKYTTLRIEARRTGRRYPSNGRMQHGVQGPARRQWRGRGDGAGRAPQGVHSPARFPHLLRGLRRAVRHRGQRGRSGAAPRHRRLPCPPRHLEHPGGADYRGAGHHVPGERRVRHVGRLGARPLLGIPARVGEVAQWRHRQCPVPRPLPGLPQVRRACPGRRPAEGVRGARTHGGPDAAQLQGAHRRRLGRHMPRGVLHPSFLRHGAHLAAQAAAGQVAGGRPPQRRLEPVPQHAVLEPQLLGLHQHAVRRGGQPRQDAAQGALLRGHLRGGGVPVPSPGRDRRGAAGQGPVERRLLLGPREAPRRGLAHVVGAGGGGAVKHGHVRGGDEQRLVPAAGHGGAGHAAGLLRAAVAARDAAGGHPLLGVGRPSALLAELRGDRGRRELPLLLRHAARVHCLRAAARAPARRAAAVPCPARDRRVRGDAGAAHGADRRGTGAVDAQGGAGEPRRSGHRARAAAGPEVC

SEQ ID NO: 59068 - protein, 726 aa, Zea mays
  Clone ID: 700155786_FLI.pep
SLHLRLSTFHKSPNRHIKSNPPTTDHAFAMEFPKRGRAFLQGSLRRSPKATIPGAATGADENASSKHLVPVGAASPKRKKVLGERNDSGVGGMEGAASAPVQQPKLALSPPTPASRGAGPYDPKTNYTTPRPAFLRYDPERRREILLRVSRAAEVMDDDCSSTTSGTAASEEDGGSSLASDAAAGSLISSPPRSDSEAELDDSEEEEEVVPARRGRWARRLLLLLVCVSCSFCYMYCAKPSGFPTYSEDALDLDRGIGGMYDAYDHELDSLRLLGPVHMMGPEDVLEEITNQLVHEDSKSVDHLYGNRAPRNLVAVAMVGLADICLNVSSGEFTCQIGGEKGENVPDLKEDSEMDKLDTELTISFQNDKQSSEVDCLGGNAPLDSIGSTSTHTDNLEGSLESFHLEEWDDYSNQSELQLVSMERAIKSASYKLKDRTGLESEELDLWQYENTAEAAKTICSTVKFLWSAMEPHLLQVLACLSFAGLVAALYRYYQRSRECCNCIITYDSLAEQPLLVQHQVAQLSVTSVRDAQLPVHSSEQPIQLAIPNQGTAGSLEVPMELTLPKLDPLVSLEDPAQESLPMTDPLVTVKIPVIGRGIHDQKLKRGDSENIKASNGMFLNHSDVDSSKPPVVELLGEFVLASSSRERSTKKLYQNAGDATDKKLLKPLKKDEDVEKMQMHSSIIQSPSVGRAKKEQEKSINREKTDATPTPLRRSSRLRNKVTSP

SEQ ID NO: 59069 - protein, 541 aa, Zea mays
  Clone ID: 700156333_FLI.pep
LTKINRQVPAGNLITDWSSQHRACHPLSSSSVVGDVARNLEPLGVERARHVDPLVGVSPEVVPLGLHQVGRQPVPAVGVEVGQASGHSRGADAVVDGEAHHPAPRRLPVHDLLRELGVYEQAGEARVPVVGLLDAVQEDGADDAPALPDPGQLAEVEPPAFLRALGLDDVHALRVAADLGRVQGLPHVLHQLRLVHRRAGGVVVTLEDLGGLHPLVLQPAQEPRVQGRLDRRSGHRQLGGLLHRPLPCPFHPGLVKDLVHQVAIAMLVLDAKDVGRDLDQEAQELALVPLGEHLVQLTVGELTDRLENVVCLGNQLHIAILDSVVNHLDKVARSTFANVRDTRATVRDLSSHLEDNVFDVLVSLERASGHQGRAVAGTLLSSRDTHAKIQEAALLHGLLPPLRVLVPLVPPIDDAVALLQVSCERRDGLVNWRAGLDEHDHHPWLLNGLHKGRGVMEAVDGKVSFCLGTLHGLVHLGGCPVVHRDGEPFLCNVEGKVLPHDRKASKTDSCERHLLLHYGAGALPSADSDAELNWRCHHRPA

SEQ ID NO: 59070 - protein, 120 aa, Zea mays
  Clone ID: 700041759_FLI.pep
LVAKVYLQLLPDLFGLSSFCKLWLGVLSRMEKYVKVKVRGKRSDRLQEVVPDLLKNILLVMKSKGILAKRSTIGGDSLWELTWLHANNISTSLLPDVFPSQEYEQQSSTGSPRGPSPVEA

SEQ ID NO: 59071 - protein, 452 aa, Zea mays
  Clone ID: 700042149_FLI.pep
SSLLPGLPRAVGSSRSAAARLLLLPPLRLRRGRRAASACAVRAGLHGLDSVGGPHLQAALERAEAALYTLADAAVAAADAAAGAGDDAGQAAAAVQKNGGWFGFISEALEVVLKVLKDGLSAVHVPYSYGFAIILLTIIVKAATLPLTKKQVESTMAMQNLQPQLKAIQQRYAGNQERIQLETARLYRQAGVNPLAGCFPTLATIPVWIGLYQALSNVANEGLLTEGFFWIPSLGGPTTIAARQSGAGISWLFPFVDGHPPLGWYDTICYLVLPVLLVASQYVSMEIMKPPQSDDPSQKNTLLVLKFLPFMIGYFSLSVPSGLSIYWFTNNVLSTAQQVWLRKMGGAKPVVSEGDRRIITAGRAKRSNAQPAGERFRQLKEEESMRKVNKALAAGDSNASSSTYDMEDEESDDETTEEGGPVEEASSTGSDKKPPSYSGKKGKRSKRKRMVQ

SEQ ID NO: 59072 - protein, 267 aa, Zea mays
  Clone ID: 700042481_FLI.pep
KKLRHLLADRFADEKQTEFRYFIGVEAPKGLLNLEELQTLETVQASKDLPEQLKKLMQLRSLWIDNVSGADCDNLFATLSTMPLLSSLLISARDVNETLCLQALAPEFPKLHRLIVRGRWAAETLEYPIFCNHGKHLKYLALSWCQLGEDPLGVLAPHVPNLTYLSMNRVSSASTLVLSAGCFPHLKTLVLKKMPNVEQLEIGHGALPCIQGLYIMSLAQLDKVPQGIESLLSLKKLWLLYLHAEFRTQWLTNGMHQKMQHVPEIRV

SEQ ID NO: 59073 - protein, 247 aa, Zea mays
  Clone ID: 700042914_FLI.pep
ITIRRWPKTKKKGETFYSSFPEPPVRCWGPVPFAKREAYVARTRARRSPARTLRLRVGRNARPSSTVRRRPPACAAPAPAVALHDVLQHLLQVLQRVRLLVFHAIHHHQHLLHEVGEILVVVVEGVEEPGVVHGLLPLVRQNGVCLLDPLEPLIGLAGRAGVAGPPVRVPLHREPPVSGAYVGGGGVLADAEERVVAARRCAAAAAGGIAGSPAVHGVGSAAASGNRGPATTRRGSSATKASNWKGD

SEQ ID NO: 59074 - protein, 505 aa, Zea mays
  Clone ID: 700042933_FLI.pep
PPPLLSMAAAPAGAQNRCVFVGNIPYDATEEQLVQICEEVGPVVSFRLVIDKETGKPKGYGFCEYKDEETALSARRNLQGYEINGRQLRVDFAESGRNTDRNREKGRGGPGMASNVDSQKRLAGTSVVGETNFHQPVGLPPAIHAASVMAGVLGGAQTANVQNGLPVQYGLGNDPLTHYLARMSRHQLHEVMAELKFLTTQNKEHSKTLLQGIPQLPKALFQAQIMLGMVTPQMMQMAKSQQPLGSLAQSSSHLNEPYPQPEPDAMVPVVSRPSSLPTNVLPNPVILQEQTAAIHSFPQHQHASQPQVKMFPHGQPSGITAQSPMLHQPLGGSSSVPIQSLVTSVGLTSQVQPPFVPEHPGPPVMPTSVQQLPLTHPHLALVAAAPETLPNEIRVADQASHLTEFTHPSKLRKLEDGTSVPGMVNSSHAIYTAPLQAVGPSGPSGSYSAGAGSLQQPGNEGQITPDVESALLQQVLQLTPEQLSSLPPEQQQQVIELQKMLSAGK

SEQ ID NO: 59075 - protein, 99 aa, Zea mays
  Clone ID: 700043331_FLI.pep
FEILQRRLELYPRTTASGFIKSWFSFRTSSRPLEVHTDRRQALAQGEVEGGSASTTCAIANQIVSNVPAVLSQNFCSTEYLLLFRSCHCSMVVLGWLPQ

SEQ ID NO: 59076 - protein, 354 aa, Zea mays
  Clone ID: 700043623_FLI.pep
FVHKGMIKQGSVEVGKEVDASVDAKLRQGAKAHHTATHLLQSALKSVVGSETSQAGSLVAFDHLRFDFNFHRPLSEEELTTIEALINQWIGNAAHVETKVMALQDAKNAGAIAMFGEKYGEQVRVVAVPGISLELCGGTHVSNTAEIRGFKIISEQGIASGIRRIEAVAGDAFVDYVCARDNYMRRLCLSLKVKAEDVNSRVETILEELRATRNEASSLRSKIAVLKAASLASRATTVEPQNVRIVVENMGDVDADGLKSAAEHLIDTLKDPAAVILGSSPGDGKVSLVAAFSPAIVEMGLQAGKFVSGIAKLCGGGGGGKPNFAQAGGRKPENLPDALEKARAEIVAGVSSSS

SEQ ID NO: 59077 - protein, 319 aa, Zea mays
  Clone ID: 700043679_FLI.pep
CKYVTRKTIRIRNNDLHHLYRATTSLLNMYVRRQRRAGSRAEHRARVHGSAPKRRDGGSSVPALPPAAVGVVSAVVPEGAAADGVDDDDEDEEDDADDGDALPVPLERGHHAGLARLAVVAERRGVVAPGLAVRVRRVGGHRRPVRAADVGVAAAGGGLAAARLDGGEAGTHELGDGLVLVLQALADLGVLEAAPDPVPVPGVLDALLQPVGVVPEAVLLVSAAGDGLAGAPVGDDEGEDGEAEEDEDEDEHGEEVGPEQPGDAAAGADEARQGDGEEEGPQRDDGRREVALALGAVGAVAQPDARAQDRDGEQEGDEV

SEQ ID NO: 59078 - protein, 136 aa, Zea mays
  Clone ID: 700044936_FLI.pep
RSSQSTQRRDGVVRRGNGPVASGPGSQEEARRRRHVRGGHERLQRPQGAQQGDHARGAQDRRLLLRQGRGVAQPRGQEAARRGVRRPDERRRRDLQDRRHHERPRARRRRRRLRAAPGGGRRRGGRVGRSRLLHKP

SEQ ID NO: 59079 - protein, 126 aa, Zea mays
  Clone ID: 700045104_FLI.pep
GRWPRPASAATAAASSSTSSRRSSRRSTRSHAPAPTTTTTMVTTAATASWCARPGSKRTSTPAPARSTSAGRASSPGLTEPPGGRHPRPFVLACVPYVCLWLTGCAGSSYLAIVRARTQLLYELRQ

SEQ ID NO: 59080 - protein, 418 aa, Zea mays
  Clone ID: 700046025_FLI.pep
PTAISTGSFLHTSSTAASKTLVPNPNLVPLRLVRHFPAMAATAADEFVKGRVFPNGVAVITLDRPKALNAMNLEMDVRYKALLDEWETNPSVKCILVESSSSRAFSAGMDIKGVAVEIQKDKKTPLVQKVFTVEYSLICKIHEYAKPYICLMDGVTMGFGIGLSGHGRYRIITERTLLAMPENGIGLFPDVGFAYIGAKAPGGGAVGVYLGITGKRISSPADAMFIGLGTHYVPSANLGSLKESLLSANFTNDPHRDVESVLTGYKKEPESEPQLKKLLPYIISSFSPDKSVAESVEELKKCSRSGDAAVAEWANEALAGIEKGAPFSLCLTQKHFSQVASAYGTSEHYLSKLAGVMKLEYRIALRSSIRNDFVEGVRAVLVDKDQNPKWNPATLEEVNMAEVESVFEPLGAEAELSV

SEQ ID NO: 59081 - protein, 408 aa, Zea mays
  Clone ID: 700047845_FLI.pep
QNWRLEWKLLGISSRKSLADAAVLALEKNLTEQNYLLAKCKLLNLPCIIDALNDLFGYEINEYVLSTSQMWFQYMTCTPLRRDKYKEILSRLQINRPSFGSQRWYLIFHSLEAALQFNNELPDPQQIDSRYYPAKPSFAQLKAAENFCDLVRAIYHAVKVVSRTCNGALNSQFHAVWNLKMALLRSSTKEDIDQVFNIEQMKLKFDQLWRKWYLWLSLAVVLDPRYKFRFLLVCFKEAFGSHAKRYIFEVRGKLYELFLQYSCHVDQQNSDSFDQRTNDLQLDTHDSTPVHAASQNFIEQAAHEELGEVIRYLEAELIPQNANFDILKWWKENASTYPALARLACDILAIPGSAVSAESAFDETDERVGLFNLKLSPELVEALVCTQDWIKSSEIISDEVDGNINMPA

SEQ ID NO: 59082 - protein, 243 aa, Zea mays
  Clone ID: 700047909_FLI.pep
DEGQGVEVPEADGVDHRGGSQGQVHGGAASRPAPSRRASSSSASSATRSCSSPPSTTRSTPSWGSSRKQQTTAPASSSATAATKTAAAAAAGIRPSCSTSPPATASPRSWAPTRRSRRRRRRRRRTATTTSPTRCSPTRTTSWSTRRARSSTSCATPGRGRPATATPPSSASRTRSTTSPTSSSAASTASSSCRSSTPSSASARCSRGAPPDAHGHRIVHASSFTSIVHPCCQVPTNELTSNT

SEQ ID NO: 59083 - protein, 396 aa, Zea mays
  Clone ID: 700047967_FLI.pep
QLNWSELRLASRAGRGRNIMAEREVVEGGTTTGGGLWRRYAPHVQMVLAQLCYTLMYFITEAAFNQGLNPYVYITYRHLLVAVLIWPFAYYLEKGLRPKMTLMLFVEIFVLSLLGVSLTLNMYFTSLKYTSPTFVTSVVNTIASMTFVIAIILRMEIVDVKSLRGVAKVAGTVVSFAGVTTMTLYKGAAITSLWKSPVQIAGSGSGGGGVAHDSWVKGSVLAVASCVCWSIWYIMQASSLKRYPAQLSLTAWMCTVGGIQSTVFTLFMQHEPEEWRIGFGVKFWSIVYSGLACNGFTVFVQLWCTEKKGPVFVTMFNPLSTIMVAILAYFIFGENLYVGSIVGGGVVILGLYMLLWGKEKDQERGTGKEREQLETDCEKQAKKVSDCVYEAPKTTK

SEQ ID NO: 59084 - protein, 510 aa, Zea mays
  Clone ID: 700047972_FLI.pep
NRHYGNFCGLFHPLLLRKCHPTLQALKSCQWRMSRLELGLGYLNFSHSCKTGTADYHSLLQVISILKKLRAKILCLKYGCLCFFGLIEMSFIFYDYAYVFQAILGNTRASEIIKLAPFLAPFTSRVKIFTSQLTCSRQSTSHSALTRQRFKIRRSRLLEDAFDQLSLLSEEDLKGPIRVSFINEHGEEEVGIDGGGIFKDFMENITRAAFDVQYGLFKETADHLLYPNPGSGLVHELHLQYFHFLGSLLGKAMYEGILVDLPFATFFLSKLKQKYNFLNDLPSLDPELYRHLLFLKHYNGDISELELYFVIVNNEYGEQCEEELLPGGRHMRVTNDNVITFIHLVANHRLNYQIRAQSTHFLRGFQQLIPKDWIDMFNEHEIQVLISGSLESLDIDDLRSNTNYSAGYHPDHELIEMFWEVLKSLSSDNQKKFLKFVTGCSRGPLLGFQYLEPKFCIQRAGVPGLEEHADRLPTSATCMNLLKLPPYKSKEQMQTKLLYAINSEAGFDLS

SEQ ID NO: 59085 - protein, 458 aa, Zea mays
  Clone ID: 700048432_FLI.pep
SAIQLNSLNIELGNYKEQIGKTSKECERFRTKVSELEETCSTQQEQIRTFQKQLAVATEKLKLADVTAIEAMTGYEEQKEKIKYLEERLAQAESQIVEGDELRKKLHNTILELKGNIRVFCRVRPLLRFEGDSNGPEGASISFPTSVESTGRSIDLINQGQKLSFSYDKVFDHGASQEDVFVEISQLVQSALDGYKVCIFAYGQTGSGKTYTMMGKPGNDQKGIIPRSLEQIFKTSRFLESQGWNYSMQASMLEIYNETIRDLLAPGRSNSFESSKQCTIKHDPHGNIVSDLTIIDVFGIADVTSLLEKASQSRSVGKTQMNEQSSRSHFVFTLKISGSNENTGQNVQGVLNLIDLAGSERLAKSGSTGDRLKETQSINKSLSALSDVIFAIAKGDDHVPFRNSKLTYLLQPCLGGDSKALMFVNISPEASSVGETICSLRFASRVNACEIGIPRRHT

SEQ ID NO: 59086 - protein, 199 aa, Zea mays
  Clone ID: 700048446_FLI.pep
SNGSASNVIRRKLVIIGDGACGKTSLLSVFTLGYFPTHYIPTVFENYVTDCRVDGKSVQLALWDTAGQEDYERLRPLAYSKAHVILIGFSVDTPDSLDNVKHKWIEEATRLCEGVPIILVGLKKDLRDDPVAIEEMRKKSQRFVTAHDGEGVAREIGAKRYLECSSLSGEGVDDVFEAATRAALLTFEKGETTGCCVVL

SEQ ID NO: 59087 - protein, 502 aa, Zea mays
  Clone ID: 700048507_FLI.pep
APRSLLAARRRRRRPTDRPGPGGGGGKGSTDTMEADSGKLFVGGISWETDEDRLREYFGRFGDVTEAVIMRDRNTGRARGFGFVVFADSGIAERVTMEKHMIDGRMVEAKKAVPRDDQSIASKNNSSIGSPGPGRTRKIFVGGLASNVTEVEFRRYFEQFGVITDVVVMYDHNTQRPRGFGFITYDSEDAVDKALHKNFHELNGKMVEVKRAVPKEQSPGPIARSPAGGQNYAMSRVHNFLNGFNQGYNPNPLGGYGMRVDARYGLLAGARNGFSSFGPGYGMGMSVEGGMRGYFGASSGFVNSSNGRQIGSYFNGSSNRLGSPIGYVGLNDDSGSILSSMSRNVWGNGNLNYIGNHTNMNSFPQPGSGGGISGDEISWGSLTSAHGMSNISSLGSGNLGRGTGDNNFGLPSGNYVRSNSTGTIGEPFSASANAYESNNPGAYGSSSIYGDSTWRFNSSEVDMPPFGHDLGNDDPDIKSEISASYMGNYTVNNNQTSRGITS

SEQ ID NO: 59088 - protein, 368 aa, Zea mays
  Clone ID: 700048693_FLI.pep
NIASPAVEMAPRRLLVLAVVALAATAAAANSGFADSNPIRPVTDRAASALESTVFAALGRTRDALRFARFAVRYGKSYESAAEVHKRFRIFSESLQLVRSTNRKGLSYRLGINRFADMSWEEFRATRLGAAQNCSATLTGNHRMRAAAVALPETKDWREDGIVSPVKNQGHCGSCWTFSTTGALEAAYTQATGKPISLSEQQLVDCGFAFNNFGCNGGLPSQAFEYIKYNGGLDTEESYPYQGVNGICKFKNENVGVKVLDSVNITLGAEDELKDAVGLVRPVSVAFEVITGFRLYKSGVYTSDHCGTTPMDVNHAVLAVGYGVEDGVPYWLIKNSWGADWGDEGYFKMEMGKNMCGVATCASYPIVA

SEQ ID NO: 59089 - protein, 302 aa, Zea mays
  Clone ID: 700049013_FLI.pep
QAAGWSLEADDAKNAHLLALPGAAERLALCKADLLDYGALRAAVAGCHGVFHAASPVTDDPEEMVEPAVRGTRYVIDAAAEAGTVRRVVLTSSIGAVAMDPRREPDAVVDESCWSDLDFCKKTKNWYCYGKAVAERAAWEAAAARGVDLVVVVPVLVQGPALQPSVNASLMHVLKYLNGSAKTYANAVQAYVHVRDAADAHVRVFEAPRAAGRYICADAVLHREDVVRTLRKSFPGYPVPERCSDEVNPRKQPYKISNQRLRELGLEFTPAAQALYDTVVCFQEKGILPLPVPAPTPASPDA

SEQ ID NO: 59090 - protein, 219 aa, Zea mays
  Clone ID: 700050816_FLI.pep
HYPPHTKMAVGKNKKLGKKKKGGSRKVADAFAKKEWYDIKAPSAFPIRQVGKTVVTKTQGTKNAKDSLLGRVFESSLGDLKPNGEDDAFRKFKLRVEDIQGSNCLTNFYGMDLTTDKLRSLVRKWHTLIEAHADVKTTDGYTLRVFAIGFTKRRPNQIKKTCYAQTAQIRQIRKKMVDIITRETTSVDLNEFVTKINFLKSLDAKLKKLLKEFILYKTF

SEQ ID NO: 59091 - protein, 92 aa, Zea mays
  Clone ID: 700050961_FLI.pep
LADLGDFGDVVGVVDEDPDALVVEISGDEGAVGQNDHLDVRAVGQNFLLGHLGRQPLHLRPRLLAAATAHSRRSRPAIAKSIRIRCKQREGG

SEQ ID NO: 59092 - protein, 206 aa, Zea mays
  Clone ID: 700050964_FLI.pep
NLCLYGLPNETWEINLPAEEVPPELPEPALGINFARDGMDEKDWLSLVAVHSDSWLMSVAFYFGARFGFDKESRKRLFTMINNLPSIYEVVTGTAKKEPKEKTPKSNIKTNKSGSKPSRHAEPNSRVPKMPPPKDEESEEEEGEPQEDQESALCGACGLGYDDFWICCDLCETWFHGKCVKITPAKADHIKQYKCPSCTGSKRAKV

SEQ ID NO: 59093 - protein, 182 aa, Zea mays
  Clone ID: 700051679_FLI.pep
PWCCSQSSARPCPQPWRLAATAPAFHGGIFCFLVADALPKLSTAVNCALALILPNLFFAGGRLQPLPWHLVLFPWRARPSNHLHHSSPCLRSPDNDSLFCVAPLTRSMECRSELYPICNACAPSSKSPQPCWSATTRPRSAIPSLVVDLALRRCPALRIACSTKASLVNDMRDSSDPARYAR

SEQ ID NO: 59094 - protein, 229 aa, Zea mays
  Clone ID: LIB84-021-B4_FLI.pep
LHARALSLDREEERLLALFRSDDDGGTYIYIDPWFYNTLTVICIYASCSGFGWFLLSSPPSSSWWMTTSRRRRRRHDQNRNAVGANAGRDDAPSRCRYCLPPCARGSARARSQDAAFLTLTASVLLLYSSQMSPSEGRHCCGAPAAAPSSWAALLALLLRRLLAAAAWSTGGGASSMGPARQPKGTSDRSLISFLRTSPSVLGPGPPPSGPLSLLPLFFVLYLSIWARL

SEQ ID NO: 59095 - protein, 400 aa, Zea mays
  Clone ID: LIB83-001-B4_FLI.pep
IDFFPNDEDETDGIVEVALGELEMMEQYGAFMSTFGMYYDATFFNKRSRREPQVTGYDWVVRTLNDPRECFNMFRMSKHIFESLHDVLASTYGLRSTCQMSSIEALAMFLWIIGAPQSIRQVANRFERSKETISRKFEEVLHCVYKMSAHIIKPKDPEFSIVHPRVQAPQFSPHFDKCIGAIDGTHVRVVVPSSKVLQHIGRHGYTTQNVLAICDFDMRFTFVVAGWPGSVHDMRVFNDALRKYGDKFPHPPPGKFYLVDSGYPNRDGYLAPYKGTKYHVPEFRQGPRPSGKKELFNFCHSSLRNVIERSFGVLKMKWRILLHLPSYPMVKQTKIILACMTLHNFIRESAMADVDFEMCDNDENYISIQSNNLFEEDGDEEQGMNAFRDNIANALFIMRG

SEQ ID NO: 59096 - protein, 133 aa, Zea mays; identical to SEQ ID NO: 48117
  Clone ID: LIB83-001-C4_FLI.pep

SEQ ID NO: 59097 - protein, 295 aa, Zea mays
  Clone ID: LIB83-002-B9_FLI.pep
ANKEQVGSTATVLHSIIFRAGRSISRVPMLWLCTHNFQASRVTTSTIVVTTVVEGGAQRGQAARQVVHQPQAAATGRGTRAPGLALAGAAALVYRRHQAAGVQLRGARHAAVPPRAQGPAARAAPRRLLLLLLAIAVVRRRRDSDQPRLVAVVRVRGAPRRPGHPRAQRVHGDPARDAGVARALHGLAAHLAPAAAAAAVGSRGLAPPQPVQRVHGGPERPRGAARARLVDGKAAARVGAPVPRAGASDQAPAAGEVVAAGNGEQPVRPVVGEVGYGFLTPAHACNWQLRLRVTA

SEQ ID NO: 59098 - protein, 374 aa, Zea mays
  Clone ID: LIB83-007-A12_FLI.pep
PPSHQISPLHLHLLLVRPVPPSNRLAPCPLLKTLALPQPSSMAADFRTPDRLLPAATEEPTTPQGHPPNPVLSTPTVPDATHDGLRFWQYMLAGSVAGVVEHTAMFPVDTLKTHMQASTPPCRPTLSLRAALRNAVAGEGGALALYRGLPAMAFGAGPAHAVYFSVYEFAKSSLTDRLGPNNPAAHAASGVVATVASDAVLTPMDTVKQRLQLTSSPYTGVGHCIRTVLRDEGPSAFFVSYRTTVVMNAPYTAVHFATYEAAKRMLGDMAAEEESLAVHATAGAAAGALAAAVTTPLDVVKTQLQCQGVCGCERFSSSSIGDVFRTIIKRDGYSGLMRGWKPRMLFHAPAAAICWSTYEASKSFFQRFNEERRK

SEQ ID NO: 59099 - protein, 230 aa, Zea mays
  Clone ID: LIB83-007-E2_FLI.pep
FAMAGASLLSPSCTLLRLIPSASHICCSSHFKRFDRVRRFAPAAMATSSGPKEAPANNPGLQTEVDPATKGYFLQQTMLRVKDPKVSLDFYSRVMGMSLLKRLDFEEMKFSLYFLGYEDVTLAPDDHIKRTEWTFRQKATLELTHNWGTENDPEFKGYHNGNSDPRGFGHIGVTVDDVHKACERFERLGVEFVKKPDDGKIKGIAFIKDPDGYWIEIFDQTIGTVTSSAS

SEQ ID NO: 59100 - protein, 66 aa, Zea mays
  Clone ID: LIB83-009-E12_FLI.pep
KHNDNAREYNTEFFITVHNGIHKLKVSNTSFIHILLTISLDKMVEQLFWLVAKASAAVLPSYLMRW

SEQ ID NO: 59101 - protein, 430 aa, Zea mays
  Clone ID: LIB83-011-A8_FLI.pep
RGRRRTQPNPQSSGCSQLVPSTLPRGSLLRSLLDMALQAATSFLPSALSARKEGSVKDSASFLGVRLAADGLKLDTTALGLRTVRVSRSADIRAQTAAVSSPSVTPASPSGKKTLRKGTAVITGASSGLGLATAKALAETGKWHVIMACRDFLKASRAAKAAGMDKDSFTVVHLDLASLDSVRQFVRNVRQLEMPIDVVVCNAAVYQPTAKEPSYTADGFEMSVGVNHLGHFLLARELLSDLQSSDYPSKRLIIVGSITGNTNTLAGNVPPKANLGDLRGLAGGLNGVGSSVMIDGGEFDGAKAYKDSKVCNMLTMQEFHRRYHEETGVTFASLYPGCIATTGLFREHIPLFRLLFPPFQKYITKGYVSEEEAGKRLAQVVSDPSLTKSGVYWSWNKNSASFENQLSEEASDADKAKKLWEISEKLVGLA

SEQ ID NO: 59102 - protein, 140 aa, Zea mays
  Clone ID: LIB4148-023-A6_FLI.pep
GYKAIKRAQNCIPRKKKLKHARSLCEGVGNTLTSDVEVRLQDDEEEHEQQEVDDGVDEHGREAGLHVHEVDGAVPAGHLQHAARAQEREQRRGDDRRRPVPHRLPAVLNGQAAAKHRRGSSEPVEGKGRQSLGQVHGCLR

SEQ ID NO: 59103 - protein, 188 aa, Zea mays
  Clone ID: LIB4148-023-C10_FLI.pep
AYTTLLLLALCATPCTSSIVTPPQGWRRPPFPSHGRGGSRARTAASCRSRGGAAGTSSRTGRRGWPRRQRRRVRRPPPVARTVACTAAFSSSRCGAGISSGTGRCSRRRRRRRPPVAYARSAARTTASPADRCGAGISSGTAGRCRPRRRRSHGCRRAPVAGARKPGRTAACFPGRGGPRTASRKGSG

SEQ ID NO: 59104 - protein, 54 aa, Zea mays
  Clone ID: LIB4074-012-D3_FLI.pep
LSIVCSFINPRDGETNKPVGHAIRRTRSTLTHPSVRWKRGFMSCIHIWLLLHYF

SEQ ID NO: 59105 - protein, 75 aa, Zea mays
  Clone ID: LIB4074-013-H4_FLI.pep
KLTYFGTEYTTIRKGKHKQYNYSKVHLQRPGFRSQFRRVLPSLNSTKMPSRVSSSRFTRILTGSVMNLLVISKIS

SEQ ID NO: 59106 - protein, 153 aa, Zea mays; identical to SEQ ID NO: 48136
  Clone ID: LIB4074-013-H7_FLI.pep

SEQ ID NO: 59107 - protein, 215 aa, Zea mays
  Clone ID: LIB4074-017-G10_FLI.pep
VSCSLSLSRMPSPRLLGDAKEKNRKFTETVELQIGLKNYDPQKDKRFSGSVKLPHIPRPKMKVCMLGDAQHVEEAEKMGLDYMDVEALKKMNKNKKLVKRLAKKYHAFLASEAIIKQIPRLLGPGLNKAGKFPTLVTHQESLESKVNETKATVKFQLKKVLCMGVAVGNLAMEEKQIQQNIQMSVNFLVSLLKKNWQNVRCLYVKSTMGKPYRVF

SEQ ID NO: 59108 - protein, 140 aa, Zea mays
  Clone ID: LIB4074-019-C1_FLI.pep
NHSHRLHSNQHTFPFGGSKEGRRRWVAAWRCTKTGGSKSGTPAGRTSSSTSAGPAAASPSSASSASLSPSSSTRASSANSICRTRMQVGHTGSSCKRRPGLQNTSIPRPGLRGGEFLFSLYRYCFSLNLMKQFGMLNYCA

SEQ ID NO: 59109 - protein, 155 aa, Zea mays
  Clone ID: LIB4074-021-B12_FLI.pep
QIYMRTMDLKCYVNARENITPTIMADSNCLVPFILFCLEHRQYSTASSNFLFFERPADLVPLTDLVHAICESTEGGEEDGGGAGPRGGDPAGEAHGRETARRRPVLHHRHLLDAGHPRLVPHQGLRHLRSRIRTPVRTLGGTRAPRGDQTSRGCR

SEQ ID NO: 59110 - protein, 283 aa, Zea mays
  Clone ID: LIB4073-002-F2_FLI.pep
TGTAAPSPRTAAPSSRPAPRAAALSPCPSPVPSPAVAAPSKVGIQALVGSASIASGSAVIGRGAIASGAAGMVKKSGPSLPAGAGVRRKTGWLSRWVSSCSDDAKTVFAAVTVPLLYKSSLAEPRSIPSRSMFPTFDVGDRILAEKVSYIFREPEILDIVIFRAPPVLQALGYNSGDVFIKRVVAKGGDIVEVRDGNLLVNGVVQEEDFVLEPADYKMDPLTVPKGYVFVLGDNRNNSFDSHNWGPLPVKNILGRSVLRYWPPSRITDTIYEHDMMQYTGAAS

SEQ ID NO: 59111 - protein, 418 aa, Zea mays
  Clone ID: LIB4073-005-C9_FLI.pep
REISSNRMNALAATSRNFKQAAKLLGLDSKLEKSLLIPFREIKVECTIPKDDGTLASYVGFRVQHDNARGPMKGGIRYHHEVDPDEVNALAQLMTWKTAVANIPYGGAKGGIGCSPGDLSISELERLTRVFTQKIHDLIGIHTDVPAPDMGTNSQTMAWILDEYSKFHGYSPAVVTGKPVDLGGSLGRDAATGRGVLFATEALLAEHGKGISGQRFVIQGFGNVGSWAAQLINEAGGKVIAISDVTGAVKNVNGLDIAQLVKHSAENRGIKGFNGGDAIDPNSLLTEECDVLIPAALGGVINKDNANDIKAKYIIEAANHPSDPEADEILSKKGVIILPDILANSGGVTVSYFEWVQNIQGFMWDEEKVNAELRTYMTRAFGDVKEMCRSHNCDLRMGAFTLGVNRVARATVLRGWEA

SEQ ID NO: 59112 - protein, 162 aa, Zea mays
  Clone ID: LIB4073-011-A7_FLI.pep
SRRGSPEITEKMVKGVAVLAGPDVKGTIFFSQEGDGPTTVTGSISGLKPGLHGFHVHALGDTTNGCMSTGPHFNPAGKEHGAPEDENRHAGDLGNVTAGEDGVVNVNITDSQIPLTGPHSIIGRAVVVHADPDDLGKGGHELSKSTGNAGGRVACGIIGLQG

SEQ ID NO: 59113 - protein, 288 aa, Zea mays
  Clone ID: LIB4073-011-H5_FLI.pep
YGKVYRAREKATGRIVALKKTRLPEDDEGVPPTAMREVSLLRMLSQDPHVVRLLDLKQGVNKEGQTILYLVFEYMDTDLKKFIRGHRNNREKIPEATVKILMYQLCKGVAFVHGRGVLHRDLKPHNLLMDRKTMALKIADLGLSRAITVPIKKYTHEILTLWYRAPEILLGATHYSTPVDIWSVGCIFAELVTNQPLFPGDSELQQLLHIFKLLGTPNEEVWPGVDKLPNWHVYPQWKPTKLSTLVPGLDADGYDLLEKMLVFEPGKRIPAKKALEHPYFNDVRKEMH

SEQ ID NO: 59114 - protein, 333 aa, Zea mays
  Clone ID: LIB4073-014-A10_FLI.pep
LQYICPVSVSASHDGIHTYFAYIHTSHDRRIMQRSLISAKIRNDEVVLVVLRHLHPWLLALARYSVRLVEPGVARWLRRGEQLGDLRRSGFSGRMGVEQVDVREPLQLLEPKRRVFLVAGFVVGQLQEVLDSPTGRWQERRRRHLLRQRVLDRRRCLGGPGSWRADDGRGLGAALGRRRRREALSAGAGAADGAEADADAGGEVALVVAGERAGDVDGLVAVAAEERPVLDAEDEGRLLLADVAAREAAGAGGGGVAEREREPLVLAGELVGGVDLDVAARAQRRLVGAAHHRGCRGLARVALDPHAAPAPLLLLGLRRHTLSPHPTQLSGLT

SEQ ID NO: 59115 - protein, 180 aa, Zea mays
  Clone ID: LIB4073-014-A2_FLI.pep
AAASLSLLGDTNSLSTPASSLSVLATDTEAPVVTQTTVVPDLLEPLKVVPELHVEGVGDDLREPAVLVVLLPVEEPVRHLELPGVGHDRHQPLQLFRSQLAGPLVHVDVGLLADDVGEAAPHTLDGGHGEHDLLLPIHVSVQQTQDMLEVLTGDQRHGGRGGGSVARGEAATARGAGAGG

SEQ ID NO: 59116 - protein, 87 aa, Zea mays
  Clone ID: LIB4071-018-B10_FLI.pep
SQPSSSATACPTSCQHHQAIRIQVANVDLDRGMILGSDDHVRGRALPRDVEVHRITLLVLHDDGWGLPQQQLDHSKVSTEDRRQIRL

SEQ ID NO: 59117 - protein, 486 aa, Zea mays
  Clone ID: LIB4071-023-D1_FLI.pep
RGAETGVFVLAYLRDSKLLPFPTAAAAAPPHSVDTMRECISIHIGQAGIQVGNACWELYCLEHGIQADGQMPGDKTIGGGDDAFNTFFSETGAGKHVPRAVFVDLEPTVIDEVRTGTYRQLFHPEQLISGKEDAANNFARGHYTIGKEIVDLCLDRIRKLADNCTGLQGFLVFNAVGGGTGSGLGSLLLERLSVDYGKKSKLGFTVYPSPQVSTSVVEPYNSVLSTHSLLEHTDVAILLDNEAIYDICRRSLDIERPTYTNLNRLVSQVISSLTASLRFDGALNVDVNEFQTNLVPYPRIHFMLSSYAPVISAEKAYHEQLSVAEITNSAFEPSSMMAKCDPRHGKYMACCLMYRGDVVPKDVNAAVATIKTKRTIQFVDWCPTGFKCGINYQPPSVVPGGDLAKVQRAVCMISNSTSVVEVFSRIDHKFDLMYAKRAFVHWYVGEGMEEGEFSEAREDLAALEKDYEEVGAEFDEGEEGDDGDEY

SEQ ID NO: 59118 - protein, 68 aa, Zea mays
  Clone ID: LIB3993-011-H6_FLI.pep
VGVNPRYVMWGLLSLLIVSWGGLNGSKKKCDFFGSARSYVIPLHEAAHCSPAALVWWTSVGNGELAVS

SEQ ID NO: 59119 - protein, 48 aa, Zea mays
  Clone ID: LIB3992-001-G9_FLI.pep
MGHFQIKENNKSTACSPLLFSTHRRHHIHLRKPNPSLFPQLRARSRTG

SEQ ID NO: 59120 - protein, 257 aa, Zea mays
  Clone ID: LIB3969-001-C6_FLI.pep
LETSDISNKTLTSAIHLQRWESGLCHLHVVIQLVLLIPVFLVTIVILVLVKSLALSELLCWLIHLLVICLGFLSGNIVLTTALAILGLSLELRGLFNVRLLLLVCHGLPPLPSFLCNGSDTLVVRMGGLELLPEVVHEEEEGGGRALALGVLVTTSLGGGLLAVRTGDLDGLLDDLRLERHPDLLVEAAAVHVDEDDGDVLVAGLASGEGAPVPGALEDGCLDALPAARGIAGGLASRHGWMDAQLAWGLGGLGGDE

SEQ ID NO: 59121 - protein, 238 aa, Zea mays
  Clone ID: LIB3969-001-H2_FLI.pep
GTEHCFKWLLGFMDMSQEQEQDFGVLLKQGAEGRVFASTFVGRKCVIKERFSKKYRHPLLDSKLTLKRLNAEARCMTKARRLGVPTPVLYAVDPVLHTLTFEHVDGLSVKDILLRFGSDGVNEERLNDIATQIGNAIGKLHDGGLVHGDLTTSNMIIKNSNNQLVLIDFGLSFTSTIPEDKAVDLYVLERALISMHSSCGDVMEKILAAYRKASKQWCSTQNKLAQVRQRGRKRTMVG

SEQ ID NO: 59122 - protein, 308 aa, Zea mays
  Clone ID: LIB3969-002-B5_FLI.pep
LESSSSNMVGGAGGEVIGGGGCSGEVVVVVVGRAEIDTRAPFRSVKEAVALFGERVLAGELSAGRRGPLSSVTEPTRSSIAQNRMAATRPKHHAMSPATGAVTTAALRAVPPVVVTAGQLEEAKQKLEKEREEKQKMAGCIQTLQEELSHAMEELKRLKARDDEEAAGTKVIDLEIDEGLYFTEAAEKQMAPPPQGAAGGAGELQKKRYVTFADPPTVATTAAAACRAPPLPDVVMEVHRAPTHQLHQPHPHYYREPRFQRQMSAGHEAAKAMADEGRKKKKPLIPLVGALFMRRKKSSKSCHDDVAF

SEQ ID NO: 59123 - protein, 382 aa, Zea mays
  Clone ID: LIB3969-002-C12_FLI.pep
NPNFPAAAFLSLDPQLAPFLQVRTHRPAYALPPNDLRAAMANSAAPGGMRSFLQAVSTVTEEAPTPLRVVQMEGLAVLKIIKHCEEFAPALVTGQLLGLDVGSVLEVTNCFPFPIREADDEADADGANYQLEMMRCLREVNVDNNTIGWYQSCLLGSFQTVELIETFMNYQESIRRCVCIVYDPSRSSQGVLALKALKLTDSSMDLYRNNGLTGEKLREKKLSWVDIFEEIPIKVSNSALVSAFMKELEPESPVTQCDLDRLKLSTAPFMERNLEFLIGCMDDLSSEQNKFQYYNRNLSRQQSQQQAWLQKRRQENMARKAAGEEPLPEEDPSNPIFKPIPEPSRLEGYLVTNQICSYCNHINGVAGQNFDRLYLMKALHED

SEQ ID NO: 59124 - protein, 302 aa, Zea mays
  Clone ID: LIB3969-002-E1_FLI.pep
FQLDTAPEIKNLGKRKMGSDSTIDKVPRTDKFITKKTLDNLMVHPESHESIQAAVCVPLQDMDHLSISIPQFGELEVGLFVVIKECLLICSIFLHKRAEDRVAQQGFVTWELKKALLVATQKFLEVRVVKDQRVRSPGPLKTRPLFVAPSQGVATREGNNVLITQTHLLAKDLPQVVRTLGGIRKTALRWRLRLVLPAGVEGDLRPTGDLDGHNSGKLVEIGIGEGGELLLDGLEQPHRDVQPRVGAVSQFRRALHSTEGTAGPRRHVERPRGVPREAEHEGRAALLGDEGAELAPGLLDGL

SEQ ID NO: 59125 - protein, 167 aa, Zea mays
  Clone ID: LIB3969-003-D10_FLI.pep
QRRRRDLADDLVEGAGVLEPEHDADAEDVADGAAGQRVGEGEPGGVTRLQAGVARLQLQPRRRLAVRGRRQPEPPREQHQRRRRHHDQVGGGADVVAADALRRRPLPAHPHGRQRCHRGPGRGVAPEAVEPGHGGGELGCHVWRLRRRRRTSHLCAAVPSSASAEWC

SEQ ID NO: 59126 - protein, 237 aa, Zea mays
  Clone ID: LIB3969-003-E4_FLI.pep
GTEGIRRGWGASRGREKSSRPPREGATAAQEPDRKSCGSGGGKMGQALRRLFDSFFSTREMRVVMLGLDAAGKTTILYRLHMGEVLSTVPTVGFNVEKVQYKNVAFTVWDVGGQEKLRSLWKMYLSNSDALIYVVDSLDRERIRDARQEFQTIIKDPLMANSIILVFANKQDLRGTMSTDEVSEGLGLHDLRNRIWHIQGTCALRGEGLYDGLDWLASTLKQLQESGHATSVAGPSI

SEQ ID NO: 59127 - protein, 288 aa, Zea mays; identical to SEQ ID NO: 47549
  Clone ID: LIB3969-004-F1_FLI.pep

SEQ ID NO: 59128 - protein, 518 aa, Zea mays
  Clone ID: LIB3969-004-H7_FLI.pep
HNPHDAGALAPGVRVLGDGVGRGEPHRGADMGEFCPSPQGDSALAAPPLTLSSPSPATAVRPSYGSCDRRYVKLVFDNLHGSISVDPLALQFVDTEEFQRLRDLKQLGLTYLVYPGAVHTRFEHSLGVYSLAGKAINNLKTYQGEELGIDHVDMQTVKLAGLLHDIGHGPFSHLFEHEFLPRVDPGSSWSHEDMSVLLLDSIVDKHAIDIENGYLKMVKEMITASAKPTSTESANEKHFLYDIVANGRNGIDVDKFDYVGRDCRACGLGCNFQYWRLLEGMRVMGDEICYPAKDYLSIHKLFSTRADLHRTVYTHAKVKAAELMLVDALIEANDYLGISLHAHDPEEFWKLDDTIIKTIETAPNNELKKAKEIIQRIRRRELYKFCNQYSVPKDKLGHFKSITAQDIVCSQKSSEVLLKEEDVAVSNVKIDLTRGKDNPLESIKFFKDFGCDEKFPITDDRVSHLLPAYNEDRIVRVYAKKPELVDVVSEAFENLQMRMYGEKTQVHETPKRKRIRSN

SEQ ID NO: 59129 - protein, 469 aa, Zea mays
  Clone ID: LIB3969-005-B2_FLI.pep
RPCRAVRPVLLGPSIHSREASSRGDRRIESRLPRSRVMEVVASAPGKVLIAGGYLVLERPNAGLVLSTTARFYAVVRPLRDSLPADSWTWAWTDVKVTSPQLSRVATYKLSLNKTTLQLTSSRESTNPFVEQAIQFSVAAAKATIIDKERKDVVDKLLLQDWSTWSPSYSGGQSSGDNASERELDLVHAIAQSAHCLAQGKIGSGFDVSAAVYGSQRYVRFSPEILSSAQAIGGTVLPDVVSDVLTQRWDHENKQFSLPPLMTLLLGEPGTGGSSTPSMVGSVKRWLKSDPEKSRDTWSKLAIANSTLENQLRILKGLSENHHEAYESMVRSCSRLTYGKWAEVATNQHQELIIRSLLAARNACLEIRLHMREMGIAAGVPIEPDSQTRLLDATMNMEGVLLAGVPGAGGFDAVFSVVLGDASNAVAHAWSSAGVLPLLVREDCRGVSLEDADPRTREVSAAVWSIQIN

SEQ ID NO: 59130 - protein, 283 aa, Zea mays
  Clone ID: LIB3969-005-D8_FLI.pep
KKQKSGSHLARTDARDRPPSGPHHSPARAVRSPPAPALTLAALRKSKANAFSSSSSPPRSRRALAVTMAASLLVLAVAFLVGAGHGGIDGGAAAHVEVEGSEVTYGSVIKLLHEKTKHRLHSHDVPYGSGSGQQSVTGFPEGDDSNSYWIIKPTPDSSSKQGDSIETGGIIKLQHMKTRRWLHSHLHASPLSGNLEVSCFGGDELSDTGDYWRLEIEGSGKVWKRDQKVRLRHVDTGGYLHSHSKKYNRLGGGQQEVCGVREKRAENIWLAAEGVYLPVNGSK

SEQ ID NO: 59131 - protein, 485 aa, Zea mays
  Clone ID: LIB3969-005-H7_FLI.pep
KILRTMKLRLRSMQARGGSAAVETHRVDLPPTATLADVKTLLASKLSAAQPVPAESVRLSLNRSEELVSPDPAATLPSLGLASGDLVFFTLSPLTALAPPAQALPRNPSPSSGAAASIAEAADRGKGSKQSGTGDFSSSSLAQAVVVSPSFPVASGTRDVVMEEEAVDATKGWSSFVLRDLKREMDNVGAAEGTAAGRLVAALHAALLDAGFLTAKLTGSHLSLPQGWPSGALKPLTIKYTIPELSSMVSVTEEGKVVVLNYSLMANFVMVYGYVPGAQSEVCRLCLELPGLEPLLYLDGDQLNGVHEKGVHDLWRVLKDEICLPLMISLCQLNGLRLPPCLMALPADLKTKVLGFLPGVDLAKVECTCKEMMNLASDDSIWKKLVSKFENYGEGSRLAGKNAKAIFVEAWQANKRRQKRPNPTFWNYGWGNSPYSRPLRLPLIGGDSDRLPFIGNHGSVGRHFGNQRRNISPNCILDGHRHNFL

SEQ ID NO: 59132 - protein, 403 aa, Zea mays
  Clone ID: LIB3969-007-D7_FLI.pep
REREREREREGEGEGGNHSSWPFRAPHGRPPSVLPAHPPRRRPAVRLPSTSLLLSCKVPVPYEGSESESEKMMGGFLSRVLLLAFGYAYPAYECYKTVELNKPEIAQLIFWCQYWILVALLTVLERFGDFTISWLPFYSEAKLMFFVYLWYPKTKGTTYVYGTFFKPYISQHENEIDRNLLELRARATDTVVLYFQKAASAGQSTFFDVLKYVAAQSPSQKSRQRLHRESQQPPQQQQPQVQVQQAQPQKQAAPVMRRASSIAARQAAMAQQSQETKPISSSPKIKRQTSARSGSVASTKPPVAASALKPGGSPKKGEVKPAADPVQTPTTGADSPKPEPSAPSLPGAEGVDKMAIDEASGDALEGAEELDPALEEETPMEETIRVTRAKLRRRTATEDPAGN

SEQ ID NO: 59133 - protein, 334 aa, Zea mays
  Clone ID: LIB3969-008-A8_FLI.pep
HSRGSFETATNPSFQDRQHLEAAASAPLRPTLERDRPDDHLVVDGSQRSADEGADPEDPVVSPRMVLVVNYGGAKAPRGVDVGAGDRDGGQVDEEHGKPDWKRGEDRHMGVPGVPLGVGGGEDGVDEDEGADDLGAEAVALGVAGRDDVGAAAVAHVQPLLEPLDDARAADGAQALHDDVKHRPGEGQLPRQEQPEGHRRVDVPAGDAGGAVDEGEDRAAEGPGDALDADGGALGGGLGDAHDGEDGDVEEEEGGDELGDAGAVEGPGLELPGLEERRRRGLLVVLVVRALRRRADGLALRELVGAQADVLLLPLHACAVTFLQQTSLARARRS

SEQ ID NO: 59134 - protein, 162 aa, Zea mays
  Clone ID: LIB3969-008-B7_FLI.pep
GSPHPCPDPMANSNLPRRIIKETQRLLSEPAPGISASPSEENMRYFNVMILGPAQSPYEGGVFKLELFLPEEYPMAAPKVRFLTKIYHPNIDKLGRICLDILKDKWSPALQIRTVLLSIQALLSAPNPDDPLSDNIAKHWKANEVEAVETAKEWTRLYASGA

SEQ ID NO: 59135 - protein, 269 aa, Zea mays
  Clone ID: LIB3969-008-C5_FLI.pep
AAGSRIPIRSRHRRRLQGSVPVMEPSSTSSSPAVERRLSPEVRRVRKRELKEALEQVQRAVEMLRDADADLGISLSEETTAAPPEGEDREADVGANGDGAETSSVASDSDYEMAQMCDLLKSKVGSLEFLQKLNGIQKSVGQNGAVEPDISWDIITSVDLWEDGGSDDGYVLVKQEDVVDGMTSFMAACLVSIKKTKDLPPDQLQKALRKTFSAEKKKGKIRKAWDGTKVIYNVASWGATAVGVYNNPALLTVATTAFQTSCRVISKFL

SEQ ID NO: 59136 - protein, 360 aa, Zea mays
  Clone ID: LIB3969-009-B1_FLI.pep
TRIPNTMAGGKIQKKRHGAAGGARLQGGIPFEKSEGQHILRNPALVDSIVAKAGLKPTDTVLEIGPGTGNLTKRLLEAGVKAVVAVELDPRMVLELNRRFQGHPLSSRLKVIQGDVLKCDLPYFDICVANIPYQISSPLTFKLLSHRPIFRCAVIMFQREFAMRLVAQPGDSLYCRLSVNVQLLSRVSHLLKVGRNNFRPPPKVDSSVVRIEPRKPLPPVSFKEWDGLVRICFNRKNKTLGSLFKQKRVLELLEKNYKTMQSLQTVQDAEMGEEKMSADDVALLANMVEDMSMETGYDKEDDEMEMDDADMAGDGAASFKEKIMGILQQGDFAEKRGSKLSQVDFLYLLSLFNKAGIHFS

SEQ ID NO: 59137 - protein, 119 aa, Zea mays
  Clone ID: LIB3969-010-E6_FLI.pep
SFYHHWKTIIGVEVNCKRANQSHHATRAEATNHEPCCCGMDCCVDCNVFGEVIRCDVPGGMNISEVDLWKEEIGRLRLKERRKVALWDRRKVVPALHLGTGGKVKRMMHFLCVIGGHGG

SEQ ID NO: 59138 - protein, 411 aa, Zea mays; identical to SEQ ID NO: 38883
  Clone ID: LIB3969-011-E1_FLI.pep

SEQ ID NO: 59139 - protein, 235 aa, Zea mays
  Clone ID: LIB3969-012-A12_FLI.pep
QREREPQRANASLPLPPGPRSGHPGSSRPSPMAVKVYVVFYSTYGHVAKLAEEMKKGAASVEGVEVKVWQVPEILSEEVLGKMGAPPKTDAPVITPQELAEADGVLFGFPTRFGMMAAQMKAFFDATGGLWREQSLAGKPAGLFFSTGSQGGGQETTPLTAVTQLTHHGMVFVPVGYTFGAKIFDMESVHGGSPYGAGTFAGDGSRWPTELELEHAFHQGKYFAGIAKRLKGGSA

SEQ ID NO: 59140 - protein, 228 aa, Zea mays
  Clone ID: LIB3969-012-F3_FLI.pep
IKKLKEKKQKLDMSCTQSRSGRIGLAVHRRSLLEVDFVHLHLAVNQLVDVHHHTEPVDVHQHKAWVHVVSDAAVGARGRARVDHHASLVLICLELVRVPGHQDVHVQLPLEHRQGVQLAPWNNLMAMAQPKLKLTNCKCLSLWVSSILIMFTSGNMEIRAKAFQVVMDFLDAEIASADDVLDLAGHEHGLEFGGEVGRPVRDVQIPQRKHKHHPPRLSPSSPSPPPSS

SEQ ID NO: 59141 - protein, 383 aa, Zea mays
  Clone ID: LIB3960-002-H5_FLI.pep
GETDAPVMVKIQELLRGAKDVMSLAQGVVYWQPPESAMDKIEKIIREPIVSKYGSDDGLPELREALLEKLSRENKLTKSSVMVTAGANQAFVNLVLTLCDAGDSVVMFAPYYFNAYMSFQMTGVTDILVGGCDPKTLHPDVDWLEKVLKENEPIPKLVTVVNPGNPSGAFIPRPMLERISDLCKNAGAWLVVDNTYEYFMYDGMEHYCLEDAHIVNLFSFSKAYGMMGWRVGYIAFPNEADGFHDQLLKVQDNIPICASIIGQRLALYSLEAGPEWIKERVKDLVKNRALLVEALSPLGEDNVKGGEGAIYLWAKLPDSCSDDFEAVRWLANKHGVAVIPGSASGGPGYIRVSFGGLKEEDTRLAAERLRRGLQELVTDGMVQ

SEQ ID NO: 59142 - protein, 665 aa, Zea mays
  Clone ID: LIB3960-004-B7_FLI.pep
KIVSNAAAAWAEISSGPLFFEISGVLSHFLFHHRYIVLTVMDNGFMDIPHPPLMNDPFVLVGCSAPSSTVENMGQSTLCMDGLNPAIVNCSHVNGNTQIMNDITARDDGSRLVLGLGPTPNFYSAVSTGSKQAQRLSGQSSTFTDSGMLRLGLHTDGEGAIQCLQAPNGALHSLGIVDEASTSTTVRSMGGYMPSLLFAPRSNPTANETQLEIPDSLNLTHSTSNSQHIQRHLQFSPEPSAMTESSFGVSSDVVTATTTSERSHSRHPKKCRFKGCSKGARGASGLCIAHGGGQRCHKPGCHKGAESSSAYCKAHGGGRRCEELGCTKSAEGKTDYCIAHGGGRRCEHPGCPKAARGKSGRCIKHGGGKRCLVKGCIRSAEGKAGLCISHGGGRRCQYPDCGKGAQGSTLYCKGHGGGKRCVFDGCSKGAEGSTPLCKAHGGGKRCMFEGGGVCAKSVHGATEYCVAHGGGKRCSVPGCTKSARGRTDCCVKHGGGKRCKVENCGKSAQGSTDFCKAHGGGKRCTWGTGCEKFSRGKSGFCAAHGTLMARQREQEAAKNVGSMIGPGLFSGIVVSSATAASSMTNEHSSSGVSTASDCDGTVRSQSMIPPQVLVPRSMMPSWSTEPVDGGREGGHVVPEGRVHGGGLLSLIGGSFRNADLEKLQS

SEQ ID NO: 59143 - protein, 652 aa, Zea mays
  Clone ID: LIB3960-005-E3_FLI.pep
VSPRWFSEVKNTAMVTGRVKAAMGFQRSPKSQVPEAASPSRAPTSGSVSTAGSAPSKASALARSFGAYFPRSSAQVRPAARAPPQVAELLRAIEQLQERESRLRVELLEQKILKETVAIVPFLEAELAAKKAELQRCRDTAERLEAENGRLCAELDAAALEVTSRKQRIVELEKEMAELRTRQDAAADADDCSSSASAPSERLESSSAAPKPNRASLAQLDPPAPPAPGPAPLKSKSYFSASSSHPSPASSSPPPSPSSSTSTSSSPAHSRSSSDTAAAPRPRVVELSKLPPIPPPPPPCPPPPPPSRSKRSSPPNSASVDGSAAAAPPPPPPPPPPPPPPARRQFGAAPAPPAGASSGQGDVRRVPEVVEFYHSLMRRESKRDGSGTASEAANGGGGGAAATRDMIGEIENRSAHLLAIKSDVERQGDFIRFLIKEVEGAAFVDIEDVVSFVKWLDDELSRLVDERAVLKHFEWPENKADALREAAFGYCDLKKLEREAASFRDDARQPCAAALKKMQALFEKLEHGVYNLARVRDAATGRYTRFQIPWEWMKQDTGIVSQIKLQSVKLAMKHLKRVSSELEVIKGGPEEEEQELMLQGVRFAFRVHQFAGGFDVDTMRAFQELKEKASMCRVQRQKQHRHLRQHRLVARA

SEQ ID NO: 59144 - protein, 708 aa, Zea mays
  Clone ID: LIB3960-011-F10_FLI.pep
ASPRPLLRPAASGGSTRARSAAASVAPPSIRWRVEYVSGARVLKMKERSSLCESAADGNWGLKYKRKRSKLTVSPSNENEATSPTSDSRMSHGSTKKKLKHDNNISPSAKKIRGHDGYFFECVECDLGGNLLCCDSCPRVYHLECLNPPLKRAPPGKWQCPRCRPKKVSLKLLGNADVDTSKREKSTRTYASTASDSPPSHTKVSFKTRNSTQDKTGLNEQGKESSGGTMNGGETSTKNNEVEKKKTLILHLKKRSTKELSENTKPSKSEFVELSEEKIVKHGSVLKLKKHPHRMDLSPSKSKTRRQSSQRESKRSGTKKIKYSMSDDDSVSSSEPSTSLDNSESPPKRKHSDGKAPSSSTKKGKKKVKFVEKKHSEEQGVVGDKMMTTQEDQQVDRILGCRLQMSQINPPSHASLEQFESANLQVDGMVLPHASAGIPNRPHDGTESSRNGTIEDICADESANHSGHNLEMRKDTDSKSHEKESHKREQVKKILSVCSGDETNIMRDDQVVRENVSASKKGEDETSDLPAEKDDTILPVTRACTMIRTNQDHTDESKQHGKIEQITNKDYNDAGYEFLIKWVGKSNIHNSWVSESEVKILAKRKLENYKAKYGMSLINICKEQWCQPQRVIGLRASVDEVEEVLIKWCGLPYDECTWERSDEPTLMKYSHLVTQFKNFECQALDKDVVKDYANARNRHELNVLVDQP

SEQ ID NO: 59145 - protein, 112 aa, Zea mays; identical to SEQ ID NO: 42211
  Clone ID: LIB3960-013-A2_FLI.pep

SEQ ID NO: 59146 - protein, 391 aa, Zea mays
  Clone ID: LIB3960-019-C12_FLI.pep
RRRWGGDREREDALLLEAHDGVVQRLRRRGELQAQLPQPLVGDLVRLLPRVHLVRAPLRDGVAREGLAEGADDVLAVEHGVGADVAAGGAGRLEDADVRVGGVADVHVRLHRVGVRLGGPVQVLEHVHQAGVHRRLQRRALHQHRHHHHQVHPARRRRLPRRPLRRSLAVAVPVLGLLAEVEVAPARLVDDGVRLAAGVHGHRADRRRQDDAADRAGLGRRVDDVPRPPHRRLHHLLRVVGDRRRGVEDAVAAGDGRPQRAVVEQVGLAQRQPLRRAGERQQVRVLRVVRVAHGAADGVAPLEQELDDPRPDVAAGAGHAHRLPAPRRRRVVADGHVVFVFVFVAAAAAAAARGYRVAVITYHQQAQAEARKKLDPTTKRGPAALPVSSCP

SEQ ID NO: 59147 - protein, 205 aa, Zea mays
  Clone ID: LIB3960-019-D5_FLI.pep
LRSTRGPVHRTAMAMTVETEKRRYHVSDLVLFILKIAGRHAKLRLPVVLNKFLQTITLTPEEFFSQWKALTVHSLKVQEVVKGVKPMPLSEMANLFMSLHLAVAPGLDNNPNNLVACTTFFSEATRAMLCLIRVETDPQDRTQLRLTVASGDQYLTFELKEFIKEHLVDIPRTQVAPPRAAVQPQLPTTAPATYNDPGTMLAGLL

SEQ ID NO: 59148 - protein, 253 aa, Zea mays
  Clone ID: LIB3960-020-F8_FLI.pep
LQALELPSMSDSNVKWIDGLQFTSLYWPPPLDAEQKQAQILAYVEYFGQFTADTDQFPEDIAQLIQSSYPSKENRLVDEVLATFVLHHPEHGHAVAHPILSRIIDGTLCYDRHGPPFSSFISLFSHNSEQEYSEQWALACGEILRVLTHYNRPIFKVERQHTEAECSSTSDQATSSDSTDKRSNNSPGNESDWKPLRPLTPWITDILLAAPLGIRSDYFRWCGGVMGKYAAGGELKPPTTACSRGSGKHPQLF

SEQ ID NO: 59149 - protein, 338 aa, Zea mays
  Clone ID: LIB3960-022-D10_FLI.pep
LFVSSVERKVNRGETNEDLRSRCCSSSGAVRSTVVCFPRRRQRPQGHHRRRRHVRDLGGEDAVGGRGPGSADPGGDGARGRADAQAQLRRHQRGDRGQLGGGPRRRPAQPHLAPRQLHAQAQELLLRLRQRRRQRLQGERRWAVRRGVRAEENGPCLRGGRAGRQPYQEDAPQWPRRHLCLSHATAVQPPAERADDACGHGAGLLHIRLRVRRAAARDEPAEHAADAHQRRLRRGQLLRGGPAGVRVHHTLHRQLLPLHRRQRQAQGPQDPAQQGGAADHLQQTRGGREDGGRVVVPCRLRGRLHQLGRPADRSHTVQATAARQFTCISLLCYTCLIN

SEQ ID NO: 59150 - protein, 456 aa, Zea mays
  Clone ID: LIB3959-001-D7_FLI.pep
TLLAAESGPTEEVGLRGFWQPYRNIFTLVDELGISPFTGWNKAAYYSTEGLAVEFPIFHNQPRLPAPFGVFAYPEFPNLPLSDRLTSIPIIAAVIDFDNTDTAWRKYDAMTAKELFKMYGCSQRLYKEIFELVTQAALFAPGEQCSAAATLGMLYYYVLSHQENSDFLLCRGEVEEKIFSPWLQSLELKGLKFVENKVPTSLTTDVDSGCISSIVCGDDVYEADAFVLAMGLSSLQSIVKNSPFLRSDREFRNLLHLSTVDVISVKLWFDKKITIPKVANVCSGFDDSSGWAFFDLTSVYDDYCEESITIVEYNASHLVLLSDDDIVYEASSHLIKCIQDFEGANVIRYSIRRSPNSVINFLPGSYKYTLRGSTSFPNLFIAGDWIVNRHGSFSKEKAYVTGLEAGNRVVDYFDIGDFAKIIAVEGDEPHIETLRSLNRRANELKSQIPFSEFFLQ

SEQ ID NO: 59151 - protein, 109 aa, Zea mays
  Clone ID: LIB3959-002-G5_FLI.pep
PRNWLQCLDHYNTVSPDNHHSNICFVISIDLHSVVHHQIHELVEPTKCADNNTVCIHLNLKLLVHVLLEIRRLPRAAHGDGYLASNAREERICELRTPYTRDETLTQQT

SEQ ID NO: 59152 - protein, 259 aa, Zea mays
  Clone ID: LIB3959-005-B3_FLI.pep
FAELMARVYVGNLDPRVTAREIEDEFRMFGVLRSVWVARKPPGFAFIDFDDRRDAQDAIRELDGKNGWRVELSTKVGGGRGRDRNGSDMKCYECGEAGHFARECRLRIGSGGLGSGRRRSRSPRYRSRSRSRSRSPRYRRSPSYSRSPRDRSPRRRSYSRSPLGSPARSLSRSPPLPPPPPRNNSRSPPGAREVSRSPPPPPPRNNSRSPPAARDVSRSPPAARDVSRSPPPPPDARRSYSGSPGQQPQRDESPYANDA

SEQ ID NO: 59153 - protein, 160 aa, Zea mays
  Clone ID: LIB3959-008-B9_FLI.pep
DVVVTREQGKNARLISALEKHNVHPLELPLIKHVEGPDTDRLSDVLRNDKFDWIIVTSPEAAAMFLQGWKTAGSPKVRVAVVGEGTARVFHEVSESDDQSLELAFSPSKALGKVLASELPRSNENSCKVLYPASAKAGHEIGFMILDYLQCRGCAIRTRI

SEQ ID NO: 59154 - protein, 334 aa, Zea mays
  Clone ID: LIB3959-008-C12_FLI.pep
RSPQPPAHPQSSSATPSNAPAHAPAAMLLRPRPSFFRAVVPPPLTRACAPSRRTLSASAEAGTASPKDAASAPVPAATRKNPRKAGSPPMGIVKTALFLPPGVERDALVPADMVIPGSNIVVGPYAGDARVKGAEFVKSSARARDCPNDDRPEFAVLGRSNVGKSSLINALTRRKEAALTSKKPGKTQTINHFLVNKSWYLVDLPGYGFAAASQSARMDWSSFTKGYFLNRDTLVGVLLLIDASIPPQKIDLDCANWLGRNNIGLTFVFTKCDKVKKGKGGRPDENIKEFHETISGLYPDPPPWIMTSSVTGLGRDGLLLHMSQLRNYWDNEAV

SEQ ID NO: 59155 - protein, 517 aa, Zea mays
  Clone ID: LIB3959-009-A12_FLI.pep
QIKVEDMDAYAPKDLLVVTTGSQGEPRAALNLASYGGSHALKLSKEDVLLYSAKVIPGNETRVMKMMNRLTDLGPKIIMGKDSGLHTSGHAYREELEEVLRIVKPQHFLPVHGELLFLKEHESLGRSTGIRHTTVIKNGEMLGVSHLRNRRVLSNGFVSLGKEDLQLMYSDGDKAFGTSTDLCIDERLRIASDGIIFVSMEIFRPQKEHGLAQSGLKGKFKITTRCLWLDNGRLLDALYKAAHAALSSCPVNCPLSHMERMVAEILRKMVRKYSGKRPDVIAVAMENTTASFSEHLDAKSSGNFGPSSATSHLSRSPAMSLEGSYKTHPDNPEVDAEETLPEAARTTPDDATTSSNGEAFFSSDLHQPKTLEHFWESFKSPTTVKIARIVNGGKKQNLGKIGIMGKDSSIQSAPAPAKSSKKNKWKPEEIKSLIQMRGEMNERFQSVKGRMVLWEEISDNMLKQGISRTPAQCKSLWTSLVQKYEESKKDAESMKTWPYFSAMDRILSQQGEMATKG

SEQ ID NO: 59156 - protein, 301 aa, Zea mays
  Clone ID: LIB3959-015-C9_FLI.pep
SRPHRSREIPQTKKEHGIEMELDGKYSKDQSLKCECLLFDLDDTLYPFNSGIAADIKKNIQDYMVHKLGVDEAISLDLCVLLYKQYGTTMAGLRAVGYQFDYDDYHSFVHGRLSYDKIKPDPVLRNILLSLPIRKLVFTNGDRTHASRALKRLGIEDCFEGVVCFETLNPTSPPPPVPAQELEIFDLMKHLAHPQPAVQLPKSPILCKPSREAMLQALKVASINPQTTILFDDSFRNIEAAKQIGMCTVLVGTSERKKGADHALESLHNMKEALPELWEEAEKDEDVRNSSKAGIETSVIA

SEQ ID NO: 59157 - protein, 220 aa, Zea mays
  Clone ID: LIB3959-017-A3_FLI.pep
MGSEGPSVVTVHVTGFKKFHGVAENPTEKIVTNLKSFLEKRGLPKNLVLGSCTVLETAGEGALATLYKVLESAVADRGTGSSAQGQVIWIHFGVNSGAIRFALENQAVNEATFRCPDELGWKPQRVPIVPSDGSISRTRETTLPVNELTKSLRKIGYDVVPSGDAGRFVCNYVYYHSLRFAEQHGIKSLFVHVPLFLTIDEEVQMHFVASLLEVIAFSSN

SEQ ID NO: 59158 - protein, 193 aa, Zea mays
  Clone ID: LIB3958-015-A8_FLI.pep
KRQCVERIVEQNSMKMVIVLVVCLALSAASASAMQMPCPCAGLQGLYGAGAGLTTMMGAGGLYPYAEYLRQPQCSPLAAAPYYAGCEQTSAMYQPLRQQCCQQQMRMMDVQSVAQQLQMMMQLERAAAASSSLYEPALMQQQQQLLAAQGLNPMAMMMAQNMPAMGGLYQYQYQLPSYRTNPCGVSAAIPPYY

SEQ ID NO: 59159 - protein, 264 aa, Zea mays
  Clone ID: LIB3958-016-C5_FLI.pep
FARVVFLAFRTATVRMPPIRLIRHFKNMIRLEQQDMINRFESKSDHLVRLGCLQVYLTLCAALASSAVGAYLHVVWNIGGTLTMLGCVGSIAWLFSVPVYEERKRYGLLMAAALLEGASVGPLVKLAVEFDPSILVTAFVGTAIAFACFSGAAMVARRREYLYLGGLLSSGLSILLWLQLAASIFGHSATSFMFEVYFGLLIFLGYVVYDTQEIIERAHRGDMDHVKHALTLFTDFVAVLVRALVIMLKNAADKSEDKKRKKRS

SEQ ID NO: 59160 - protein, 653 aa, Zea mays; identical to SEQ ID NO: 56213
  Clone ID: LIB3912-003-H10_FLI.pep

SEQ ID NO: 59161 - protein, 289 aa, Zea mays
  Clone ID: LIB3912-004-B5_FLI.pep
SSVSGQETSGVPAACSGFSDSVRMGQRHWPVLVPPGPPPGFAVHGQGHHQPRSRHHLRHCRRHRVGDCFFLSSFLFWAAQIVTPTPARHPSGSQAREGGHQEPEERGQDRRHRHLPRGSSIHGVLQGPGAPRRGSSLDHQRQQRLGQGRHLPRGKRHLRLHLVHLAGARLQVVPGPCVSGDLDVPPGHLAVRRHGAVPGAQQLPGDLEAELALGVPLHPVRRRVCLWRQLLPPVVVHSGERAPLQRHLYAAERRHHGDTVHALPERTAPCWKRPRCGYDHRGAVRRAMG

SEQ ID NO: 59162 - protein, 160 aa, Zea mays
  Clone ID: LIB3912-008-G5_FLI.pep
ESLGAVLDVHSTLALKLPLSTAHGAKGCGCLRIDPLQYAVKMISMVADTPNEWAIITRELTVRTAAIKSHPAYATCLILCIPRPRSHCMPLKNLDLHSATLLVAASTSRFSQSATDARLLCCSCCARSFGWGGVRRRGLRFACAGAALAPWGPGLGWHGA

SEQ ID NO: 59163 - protein, 397 aa, Zea mays
  Clone ID: LIB3912-010-E2_FLI.pep
SIPGPLRRRRRVEMADTDSAETEKEKMVADDGGKPAELSKSARKKLQKQERQAERKAARKAAEKERRRADIERRRREWEDALAAAPSDEARAEMVAARRETRRERVGRRAEERGARADRLRRAAEGAGQKVVLDLEFADLMRPNEIHSLTQQIMYCYAVNGRSANPAHLWLTGCSGEMATHLQRIPGYDKWIIERAARPYIEAFEDRKENLVYLTADAETVLDDLDMSKIYIIGGLVDRNRWKGITLKKSAEQGIQSAKLPIGNYLKMSSSQVLTVNQVFEIMLKFVETRDWKTAFFHVIPQRKRGEAETRDDVEKGGLDDNDGAAEGAADGDHSEEDLNKGFGEEEDDDGDEELEEEEADVSNKRQCVRVENGEAGDATVAEVEPNNGGGGGGGDR

SEQ ID NO: 59164 - protein, 352 aa, Zea mays
  Clone ID: LIB3912-017-A11_FLI.pep
LGWLEWCRGWMAIVGEFLFQRIAASHLANPLELPPLDGVSIVVTGATSGIGLEIARQLALAGAHVVMAVRRPKVAQELIQKWQNENSETGRPLNAEVMELDLLSLDSVVKFADAWNARMAPLHVLINNAGIFAIGEPQHFSKDGHEEHMQVNHLAPALLAMLLIPSLLRGSPSRIVNVNSIMHSVGFVDAEDFNLRKHKYRSWLAYSNSKLAQVKFSSMLHKRIPAEAGISIICASPGIVDTNVTRDLPKIVVAAYRFLPYFIFDGQEGSRSALFAACDPQVPEYCEMLKSEDWPVCACINYDCNPMNASEEAHSLETSQLVWEKTLEMIGLPPDALDKLIAGETVPCRYGQ

SEQ ID NO: 59165 - protein, 507 aa, Zea mays
  Clone ID: LIB3912-017-F10_FLI.pep
AGETESERGETGRERDERRGLLVRRRRPRRLAAAADASAAGVELALSWLAGARELFRVRVLAVEGNEEKTAMGISAKWIKSLVGIKKHEKGRNAECSDARSSAVQLLRKREHSVDTESVPAAEELRVQAEPLAGDTNTETISNSASSPSTSLQASQTELGTKEHQAAVVIQSAFRAFLARRALRALKGLVRLQALVRGHAVRKQAAETLQCMQALVRAQARVRARRVRVSLESQGTQKKPPEENVHEDHVRDIEEDWCGSIGSVEEMKAKTLKRQEAAAKRERAMAYALTHQWQASSRKQKAASLQGQGLAGDENQWGRNWLERWMAARPWENRLLDSNARDSVTAGDDDDKPAEEGKAKAPDLSKPKGKAPVLASQSNGSRQEKAADHEKSHSDVSGCGSSSGRSADVQPTVSLESSKVEVKVKAPQEVADEASSGPSNPASRSASNPKERPARTDAPARKRLSLPNNATAASRGVGKRPTNSSRSRTNVASRPKNGRGASSPGLE

SEQ ID NO: 59166 - protein, 530 aa, Zea mays
  Clone ID: LIB3912-019-H8_FLI.pep
VGHWLTASCNLQPGGRGPLDQRHIRGEESSEDPNDADGEAVTAEQRLLGSPAPGPGCWHLNSSMRSKKIFGLSISLVLINLASILERADENLLPAVYKEVSAAFDAGPTDLGYLTFLMNFLKSIASPLAGVLALHYDRPAVLAIGTAFWALSTGAVGVSQYFGQVAFWRAINGVGLAIVIPALQSFIADSYKDGTRGAGFGLLSLIGSVGGIGGSVLATIVAGGDYYGFPGWRLAFISVAFVSFLIGLLVYLYTVDPRKLSPSHFGGGEDNERLHLVSNGILPPHSIWKDSWIAARSVMKVRTFQIIVLQGIVGSLPWAAVVFFTMWFELIGFDNSSSAALNSFFAIGCASGSFLGGVIADVLSRYYPDSARVMCAQFSAFMGIPFSWILLTVIPQSVDYWSAYAVTLFLMGITISWCATCANNPMFAEVVPPKHRTMIYAFDRAFEGSFGSLAAPAVGLVTEKIYGYNAKAVDLSHGSVDGAYALSRGLLTMMIVPFALCLMFYTPLYTVFKRDRENARLASIKEQELT

SEQ ID NO: 59167 - protein, 268 aa, Zea mays
  Clone ID: LIB3912-020-D3_FLI.pep
GKMTGVEAAAISSVASGILKIVANKLAPLVTRKYSSIVGVEKDLQELQVLVEDINYWLESAGYQALDDDASVSWFKQLKDVAYAVDDVVDEYQLKAERNDASGDGGFVSRYMCKKPESFIFQCKAAKKIKAIKKRFAAIVKQRADINIIARVWMRVEAAATACRPMPGVLFLLQLRPPEDPSAVGGDRARVWMWVEAAATHARGVAEPHIPPVTDCVRVLSSCSAARVPAEASHPYLSWPEQPSPVNAAVRIPPGACHRCMLRTPPAA

SEQ ID NO: 59168 - protein, 215 aa, Zea mays
  Clone ID: LIB3912-021-H11_FLI.pep
RRRERTPSLSSRTARSYPVSPFSGLGESEMASSASRFIKCVTVGDGAVGKTCMLICYTSNKFPTDYIPTVFDNFSANVVVDGTTVNLGLWDTAGQEDYNRLRPLSYRGADVFVLAFSLVSRASYENIMKKWIPELQHYARGVPVVLVGTKFDLREDKHYLMDHPGLVPVTTAQGEELRRQIGAMYYIECSSKTQQNVKAVFDAAIKVVIQPPTKL

SEQ ID NO: 59169 - protein, 792 aa, Zea mays
  Clone ID: LIB3912-022-D1_FLI.pep
PAPELPLVDEMFEAVRSRGAGVHVVPTFAGWFSWKEIHPVEKQTLPSFFNGKSEKRTPEVYLAVRNSIMMKFHANPQLHLESKDLAELSIGETDARQEILEFLDHWGLINFHPFPPDGHEESKPEETQDNSNDEKASLIEQLFKFESVQSYMTPLPMKEDVRAPPPLPSLIPESVLIQDVVAAAEPSVEYHCNSCSVDCSRKRYHCRTQADFDLCCDCYNEGKFDPGMAKTDFILMDSAGVSGASGTSWTDEETLLLLEGLEIFGGKWAEIAEHVATKTKAQCMLHFLQMQIEDRFHDGKDINQNIPVSTDQATTEKAIAETSEKMEVEDKVEGRGTVDEKASEKTEGNCEETKTENASVVVNKDTQNSDGRDSGASPSTEEPKQSSDEQPVVKENSADVDTSGEKLSNVAIDILKSAFEATGHSPEYEGSFADAGNPVMALAAYLAGLVEDDNTTTSFRSSLKSVSDVSPALQLSSRHCFILEDPPDELKDICASVSKKNRDGDQKQDEDMIQNSIDTEKKEINEKEGKSLSVEKKNNSSMSQNDHQESGIKSVSSDDCSLVEPKTNNAKESGDSTAIGDKSATETTKGNTEQVNDLPSVEVEAPDDSSSKGKDELNKTKDAVATPATVQEQKHSQTLGNGDREEPNNIESVVVGEEKGSVVTANRPDSIARLKRAAATAVSAAAVKARFLGDQEEYQIRRLTALVIEKLFQKIEVKMSLFSEIEQVVFRTREYTEKTRKKLLKERNAIIAARMGALPSRPNQTGVAGNRLPPGYGNPPVRPPNAMPRPTS

SEQ ID NO: 59170 - protein, 202 aa, Zea mays
  Clone ID: LIB3912-024-E4_FLI.pep
PRSLRRLPDPAAMARNPGCTVFIGNLDDKVPERVLYEILIQVGRVVDLHIPRDKETSRPKGYAFAEYETEEIAQYAVKLFSGLVRLHNKTLRFAISGQDKPSLNGNIPVTPRLNSVPQPKPHQPMRSSDTPLPQHAAVNGRNAGYGIPPNHSYDTHTQALSSGLPNRGLSNGTYEYSRRVFGSVLNDVSRRATREPIPYPSY

SEQ ID NO: 59171 - protein, 533 aa, Zea mays
  Clone ID: LIB3912-024-F11_FLI.pep
LPPLLLRRRGGGLPPNSPTMEADIAFRYEIPRTAQFLRDGAYTRVALQFPDEMLKDAAAVARALRRELASGGADSGVRVFVMADTAYNSCCVDEVGASHIDAQCVVHYGHACMSPTSNLPAFFVFGKAPLDVHACAGTLLECSRKSNKRILVLYGLEYAYALDDLRQTFMESCKSNSGNHEVQYAEVLCSVMSPSSSTTEENKIPQSSGPSCNGDISRNSESATFLNNRNGMECSSSTQKYSLAGMTWNISVEEKMEDYFIFWIGQDSSAFANIVLTFNKCEIVRYDAIENQLTADVSHLMKILRRRYYLVEKAKDANIIGILVGTLGVAGYLHIIEQMKDLIKAAGKKSYTLVMGRPNSAKLANFPECEVFIYVSCAQTALLDSKDFLAPVITPFEAVLAFGRGREWTGEYLLDFKDLITSEKQEAASTTGEARFSFIKGVYVEDNCPQENEEQSETSLALAEVTEKALSIQNQHNDAVLYQGRAMSSIDYLKARSYRGLTGEYEGPVPDSVLVGRMGRAAGYSDEKTESAQ

SEQ ID NO: 59172 - protein, 331 aa, Zea mays
  Clone ID: 700332871_FLI.pep
VGMGQKDAYVGDEAQSKRGILTLKYPIEHGIVSNWDDMEKIWHHTFYNELRVAPEEHPVLLTEAPLNPKANREKMTQIMFETFNVPAMYVAIQAVLSLYASGRTTGIVLDSGDGVSHTVPIYEGYALPHAILRLDLAGRDLTDSLMKILTERGYSFTTTAEREIVRDIKEKLAYVALDYDQELENAKSSSSVEKSYELPDGQVITIGAERFRCPEVLFQPSFIGMEAPGIHETTYNSIMKCDVDIRKDLYGNIVLSGGTTMFPGIADRMSKEITALAPSSMKIKVVAPPERKYSVWIGGSILASLSTFQQMWISKAEYDESGPAIVHRKCF

SEQ ID NO: 59173 - protein, 671 aa, Zea mays
  Clone ID: 700332963_FLI.pep
DPEEPPHPRRARSGPARSPHAPDPPGLATTGRPLPAPPRAMDDVSRYAHSPAHLAVLRRDHAALRRLVAALPRLPRAGEVATEEESIAGEAVADAVSAVVDRRDVPRRETPLHLAVRLRDPVAADVLMSAGADWSLQNADGWSALQEAVCTREEAIATIIARHYQPLAWAKWCRRLPRILASISRIRDFYMEITFHFESSVIPFISRIAPSDTYRIWKRGAALRADMTLAGFDGFRIQRSDQTFLFLGDGARPEDAGGKELHPGSLIVLAHKDKEITDALEGAGVQPTESEVAHEVALMSKTNMYRPGIDVTQAELVPHLNWRRQERAEAVGQWKAKVYDMLNVLVTVKSRRVPGAMTDEELFAMDGEEKNGRGAELDAELDEVLTAEERKQLDSALRMGNNEEESEQRCDEGDTGAGHMDEHAAAKDKKGWFGWGGKKGAKGDDKPSKMGSKDETSDPGKQKEKGSGKKKKGGSPAESLKHESEYKKGLRPVLWLTPDFPLKTDELIPLLDVLANKVKAVRRLRELLTTKLPTGTFPVKIAIPIVPTIRVIVTFTKFEELQPLDEFATPPSSPTQFQDAKTKESEGSGSWYSWVKGGRGTQSSDSGDSRSWKDEVDPFHIPSDYTWVDATEKKRRMKAKKAKSRRGPARKQSSKNTAEGAHRPMMDGFEE

SEQ ID NO: 59174 - protein, 208 aa, Zea mays
  Clone ID: 700333020_FLI.pep
ANRCQSKPYGRRQHQAPRPNPTRTPPPPQPQPRPHQQAELAAMPPKLDPSQVVEVFVRVTGGEVGAASSLAPKIGPLGLSPKKIGEDIAKETAKDWKGLRVTVKLTVQNRQAKVSVVPSAAALVIKALKEPERDRKKVKNIKHSGNISLDDVIEIAKTMRNRSMAKELAGTVKEILGTCVSVGCTVDGKDPKDLQQEIDDGEVEIPSA

SEQ ID NO: 59175 - protein, 485 aa, Zea mays; identical to SEQ ID NO: 46975
  Clone ID: 700333146_FLI.pep

SEQ ID NO: 59176 - protein, 206 aa, Zea mays
  Clone ID: 700333880_FLI.pep
VTANCNTSSRLDLSFSWAYIFLHKYALIFFQLARSLDRSIARRAPVDKFIYLYTSWGLSKAGGRTAARRRGARRRRRWGARRRWCATASASATTRRPWAGTPWTGAASSWRRARTARRRRSRAPPAGATAASTGARWSSPPPTATATAPPPPPAPEVNSSTVNRLAGGWPRRLSELLLLAGGWVHAWGGTDDHGAAGHSSNGVIGA

SEQ ID NO: 59177 - protein, 319 aa, Zea mays
  Clone ID: 700334109_FLI.pep
AMSLRPSERVEVRRNRYKVAVDAEEGRRRREDNMVEIRKSRREESLLKRRREGLQAQVPAPPSGVEKKLESLPAMVSGVYSDDNNLQLEATTQFRKLLSIERSPPIEEVIKSGVVPRFVQLLTREDLPQLQFEAAWALTNIASGTSENTKVVIDHGAVPIFVKLLGSGSDDVREQAVWALGNVAGDSPKCRDLVLANGALMPLLAQLNEHAKLSMLRNATWTLSNFCRGKPQPSFDQTKPALPALARLIHSNDEEVLTDACWALSYLSDGTNDKIQAVIEAGVCPRLVELLLYVKMLCNNSMMITWIVFVICTSSLSFI

SEQ ID NO: 59178 - protein, 209 aa, Zea mays
  Clone ID: 700334461_FLI.pep
ISAVKRKSRRMVHLLVQFVVLCLDNSKVYPFLPNFPGPGGLTPLHLAASIENAEDIVDALTDDPQQVGLTCWQSALDEDGQSPETYAKLRNHNSYNELVAQKLVDMKNSQVTITVNGDEIHMDQLGNVDDRKKSGVQALQIRSCSQCAILESGVLRQPMRSRGLLARPYIHSMLAIAAVCVCVCVFMRALLRINSGKSFKWERLDYGTI

SEQ ID NO: 59179 - protein, 935 aa, Zea mays
  Clone ID: 700334747_FLI.pep
FGFGLPELRRFLPPPPPLLPQPPPLLILSLSHPHRPPLLRPRESSMAASALWQPQEQGLREICAHLEAHISPNSDQARIWQQLQQYSQFPDFNNYLLFILARGEGKSIEVRQAAGLLLKNNLRTTYISMQSSSQHYVKSELLPCIGATNRAIRSTVGTVISVLFQIVRVAGWIELFQALHKCLESNDLDHMEGAMDAIYKICEDVPEELDVDVPGLSERPINVFMPRILQFFQSPHASLRKLSLGIINQYIVVMPSALYMSMDQYIQGLFNLAKDSSADVRKLVCSAWVQLIEVRPSILEPHLKNVTELILQANKDSDDEVALEACEFWSAYCDVSMPPEGLQEFLPHLIPTLLSNMVYADGDESLDDAEEDESFPDRDQDLKPRFHDSRLHGSETGDDDDDADAVNVWNLRKCSAAGLDVLSNVFGDSILPTLMPLIEQNLARTDDDSWKERETAVLCLGAIAEGCISGLYPHLPQIVAFLIPLLDDKFPLIRSITCWTLSRYSKFIVQSLDHPNGRGQFDKILMGVLRRILDTNKRVQEAACSAFAILEEEASEELVPHLEVILQHLMCAYRKYQRRNLRILYDALGTLADAVGAELNQAKYLDIFMPPLITKWQQLSNYDKDLFPLLECFTSIAQALGPGFAQFAEPVFQRCINLIHSQQLSKIDPTAAGAVYDREFIVCSLDLLSGLAEGLGAGIESLVAQSNLRDLLLQCCMDEAADVRQSALALLGDLSRVCPIHLHPRLQEFLTVAAKQLNPQSVKDAVSVANNACWAIGELAIKIGKEIAPVVITVVSCLVPILKSPEGSNKSLVENSAITLGRLSWVCPDIVAPHMEHFMQAWCKALCMIRDDFEKEDSFHGLCAMVAANPTGGAGSLAYICQACASWTEIKSEGLHNEVCQILNGYKQLLGNGGWEQCMATLQPDVVQKLARYGV

SEQ ID NO: 59180 - protein, 311 aa, Zea mays; identical to SEQ ID NO: 45262
  Clone ID: 700335366_FLI.pep

SEQ ID NO: 59181 - protein, 324 aa, Zea mays
  Clone ID: 700335615_FLI.pep
ALRSLSKPNETPGEPSSPCRLPYWGPDMESKQWGKTPQEVVGAGGGRQVDLDEEDDLEEFRLPMGHRPTENLDTEGLQQASVYTQLTASNVGFRLLQKMGWKTGKGLGKNEQGILEPIRADMRDAKLGVGKQEEDDFFTSEENVQRKKLNIELEETEEHIKKREVIAEREHKIRSEVKEIQKVFFCNLCNKQYKLAHEFESHLSSYDHNHRKRFKEMREMQSSSGSRDDRQKREQQREEKELAKIAQLADAHRKQQKDKQEKSETEDAAPKNMAASSNQDQRQTLKFGFSKMAPSKVLVGSASKKPKVATKVSSVFGNESDEDS

SEQ ID NO: 59182 - protein, 87 aa, Zea mays
  Clone ID: 700336092_FLI.pep
RSRHEAARVQHRRSPPPCRHCPAPCGPKTVDLMPCPPSPMPSPSPQAGSLSRLAWLYVVGRLWRDVQTGRSCPASSRRAPATSRRCS

SEQ ID NO: 59183 - protein, 344 aa, Zea mays
  Clone ID: 700336191_FLI.pep
LLYSPVAMGKIKIGINGFGRIGRLVARVALQSEDVELVAVNDPFITTDYMTYMFKYDTVHGHWKHSDITLKDSKTLLFGDKPVTVFGIRNPEEIPWGEAGAEYVVESTGVFTDKDKAAAHLKGGAKKVVISAPSKDAPMFVVGVNEDKYTSDVNIVSNASCTTNCLAPLAKVIHDNFGIVEGLMTTVHAITATQKTVDGPSAKDWRGGRAASFNIIPSSTGAAKAVGKVLPDLNGKLTGMSFRVPTVDVSVVDLTVRIEKGASYEDIKKAIKAASEGPLKGIMGYAEEDLVSTDFLGDSRSSIFDAKAGIALNDHFVKLVSWYDNEWGYSNRVVDLIRHMFKTQ

SEQ ID NO: 59184 - protein, 421 aa, Zea mays
  Clone ID: 700336216_FLI.pep
SRRPGHQLHAGQVAAELLEQHQQVAAGVEPGARDVVVPLGDVAAAGLALGLAVRPRVAAAAAAAGGGCLVRPVPPDVAAVHPRLALAHAAHVQGHRRVAGRRAEVGLVPCQGLLPCRAAPLDGRAPGDGLHAQRLAVEADLVGPLLVAEVPLPLVEAGQRDRTEHSDVPRLVVGALVREADCCAEDGDLVAPLPHLHVAAVCQLGAVVAAIHGAVGLAVDEHLQGVAGRVDGQLRPLSGLQELLVRVDVHVGGVPQVVRLVPRHAELLHQPVLGEGAAVQRVGGLAVRLPREAARGAHPRRRRRLAHRRRVEHGGLAVGQHADGPGREVVAPPVEHHPRRGAGVVVGQERRAGAAARLEHVRLLVVPKGLDRRVAGDQRRLGLLDGLVQVPQVPPFRLPQQTVFVDRRVVVVAGGDERPAG

SEQ ID NO: 59185 - protein, 914 aa, Zea mays
  Clone ID: 700377208_FLI.pep
LLPPHVERAMAANSTATKHAFKRILTSLIKPGGGEYGKFFSLPALNDPRIDKLPYSIRVLLESAIRHCDNFQVTESDVEKIIDWENTSPKLAEIPFKPARCILMDNTGVPAVVDLAAMRDMMPKLGCDPYKINPLIPVDAVIDHAVRVDVAGTYDALDRNEELEFQRNKERFAFLKWASNAFHNMQVFPPGSGTVHQVNLEYLARVVFNEDGILYFDSVVGTDSHTTMINSLGVAGWGVGGIEAVVAMLGQPMGMVLPGVVGFKLSGKLQDGVTTTDIVLTMTQMLRKHGAIGKFVEFYGVGVGELSLPARATIANMSPEYGATMGLFPVDQVALDYLKLTGRSDETVSMIEAYLRANKMFVDKHEPETERVFSSYLELDLSEVEPCVSGPKRPHDRVPLKEMKSDWHACLDNEVGFKGYAVPKEQQGKVVKFDFHVRPAEIKHGSVVLAAICSSTNTSNPSVMIGAGLVAKKACELGLEVKPWVKTSLTPGSVVATEYLKHSGLQDYLNQQGFHVAAHGCATCVGNSGDLDGSVSAAITENDIVAAAVLSANRNFEGRVNPLTRANYLASPPLVVAYALAGTVDIGFEEEPIGVGKGGKEIFLRDIWPSNQEIDEVVESSVQTHLFKKVYDSIMERNPRWNQLPVPKEALYPWDDRSTYIRKPTYLEGMSMTPPGPPTVTEAYCLLNLGDSITTDHISYSGKIPEGTPAAKYLLEYGVEPKNFSSYGGRRGNNEVVMRGAFANMRIVNKLLNGEAGPWTIHVPTGEKLYVYDAAMKYKSEGHDMVIIAGSEYGSGSSRDSAAKGPMLLGVKSVIAKSFERIHRSNLVGMGIIPLCFQAGEDADSLGLTGRERYTIHLPTSTAEISPGQDVTVTTHDGRSFTCTLRLDTQLEVTYFNHGGILPYMVRNLAAQMK

SEQ ID NO: 59186 - protein, 594 aa, Zea mays
  Clone ID: 700377412_FLI.pep
KMGTSSGANFHQQPPPTQGMLPPRHGPRPSGLQTSLSLASSEQVGSPDMQEPGSNSEPGHDSATESASSKDTWPAEPNQSNGGVAASDVVSKAAEKEVANGVSKPQVIHGPSSRVSGMLLREVARERVDLVAEKMKMMSDEHLEEVKNELRSILEGTGGSHHIEEFLYLQKLVQDRHDLTPSMLSVAHHVQLEILVAIKTGIQAFLHPSVTIPHNRLVEVFLYKRCRNIACQSALPAEECRCNVCASRNGFCNLCMCVICNKFDFEVNTCRWIGCDFCSHWTHTDCAIHNGQIGMGQSVKSSIGHAEMLFRCRACQRTSELLGWVKDVFQQCAPGWDRDALLRELEFVCKIFRLSEDAKGRVLFRKCLDLIERLRNTPADSINPRMILQALQELEMDSPKISENEDVGHLITPQEACNRIAEVVQEAVRKMELVAEEKMRLYKKARLAVEACDRELEEKVREAQELKAERQRKKQQVEELESIVRLKQAEAEMFQLKANEARQEAERLQSIALTKSKTAEQDYASMYLKRRLEEAEAEKQFLFEKIKLQENQRPTVGVGSSSGAGGDSTPTMMLSKIQDLLKNVRSMPAKSEGH

SEQ ID NO: 59187 - protein, 533 aa, Zea mays
  Clone ID: 700377609_FLI.pep
YAFLRRAAAMSSPSSYSRTGYPRPRRGYSGRPSPPPPPPPPDAASEIVSRDYHLSAVHAANESLRRGGGGDIRWPPPPYRQGPHPHQPHYGYGYGYGYGYGQTWQPGPSYGFVPYNYGHPQQQPPGPQYGYGAPNPYVHGHLQPQPHVRGAASPGFRPGAPQLTPRLADYLRRWRFAKQRPPHQAGRFIILSYNILADYLAQEHRFLYEKISPFILDWNWRKDKLLFEFGLWSPDILCLQEVDKFTDLEQEMASQGYNGTWKIRTGDAADGCAIFWRTTRFQLRYEEDIEFTKLGLRDNVAQLCVLESVGLQYVQTDSVSLSTSSNHPQQAKQVIICNIHVLYNPKRGDIKLGQVRTLLDKANALSKMWNDAPVIVCGDFNSTPKSPLYNFMLGQKLNLSGLARNTISGQQIGGSSQGLYTGPNISGWTPEEIKAATGKDECTFMKHSLKLRSVYTDVEDFEGTKDASKEPLVTSYNRKFMGTVDYIWASEGLHTVKVLDTFPIEILKKTTGFPTKKWGSDHIALACELAFTK

SEQ ID NO: 59188 - protein, 129 aa, Zea mays; identical to SEQ ID NO: 52235
  Clone ID: 700377745_FLI.pep

SEQ ID NO: 59189 - protein, 485 aa, Zea mays; identical to SEQ ID NO: 46975
  Clone ID: 700377763_FLI.pep

SEQ ID NO: 59190 - protein, 292 aa, Zea mays
  Clone ID: 700377772_FLI.pep
YIQNPGSASVPFQRQHSTAEQERTSTTQPSSTPPTRCARARPSRPLDPWRGCYRRPRQRPSWPPSWWRACRAPGRRLPRRRRTTRRRTGTTPLAAAMGGSSTPTPTPRPGTTPTGPPARPSTSVTTSFSRRTTTRRWCRPPTPRHSGSATPATTWRRRRPSTAAAAAGAAASSRTAPSRWRSPPRAPTTSSPRPTGARSASRGCGSRSRSSTAGACRRRSCTSRRRPRAASSRRRRRARRSRAPAGSSPATAPGTTAALAGAARAGRRRRPAPGYWGWWLLLLRLWPFWFFE

SEQ ID NO: 59191 - protein, 325 aa, Zea mays; identical to SEQ ID NO: 42174
  Clone ID: 700378381_FLI.pep

SEQ ID NO: 59192 - protein, 363 aa, Zea mays
  Clone ID: 700257028_FLI.pep
SVDTAGVEDLMDAVEEVKPCWTKPSPKNQPSNGFVTFSLTMGPEYHISQITDAVVIARYLGATLVLPDIRGNELGNKRKFQDIYNVDKFVRSLDGVVEVIEDIPDEVSAKKPAVIRVPNRVTESFITGTIQPIFQKNKYLRLAVIFSSVSLRPKETNNKDMDATACLAMFGGLELKHEYSEVARKMLDRLQELSKKSDGKVLAIDLRTDLLEKKSCKTTRGARRKGCYSPDEVLAFLRSVGFSANTTIYLTETSWYKGLDVLKEEFPNTWYKGDIMPAENKAEFLKSSNADLARALDLEICSQSDVFVPAVAGLFYGHVTGKRIASGRTQIVVPSQSSTSTHASDFISTYISNKNHLAYACYC

SEQ ID NO: 59193 - protein, 198 aa, Zea mays
  Clone ID: 700257826_FLI.pep
AFRSLALAQLAELPLRGAPAPRARPCARSAPAQLPASMATARAVLLSLCSPRPLRSLGVSRPGHGHRYRRAHPEFPGLTDFLCSLVPGQLPAPVSPASASYAQSSSVAARTNPCSPACSGFNHEASPASPRRDLPSPAESLAQAASSLCSTSAPSVYSLPQSSCVCEFFGGRALAVLHFAHRSASAPARCALYRFAQL

SEQ ID NO: 59194 - protein, 179 aa, Zea mays; identical to SEQ ID NO: 38879
  Clone ID: 700258314_FLI.pep

SEQ ID NO: 59195 - protein, 262 aa, Zea mays
  Clone ID: 700258334_FLI.pep
FAPSLPEEEGLLDQGSSKEAAMSGGGSVSFLEIQPSELAFPFEIMRQSSCSMQLTNKTDHYVAFKVKTTNPKQYCVRPNIGVVLPGSTCNVTVTMQAQKASPPDMQCKDKFLVQSVVAENGVTAQDINAAMFNKEPGKVVDEFKLRVVYVPTTMPNPIPEESELGSSTPSFSQENGIDHSMTPLSVSRSSAETAKEKPSEATSVISKLTEEKMSAVQQNQKLRQELELLRKESSKTGGGFSITFLFVVGLLGIVVGYILKRT

SEQ ID NO: 59196 - protein, 327 aa, Zea mays
  Clone ID: 700258927_FLI.pep
LPPRWLATAAAAGVGIWAAPRGEEEAARSPSAMAGSSDPDKLMSKADKLTKLSFTRWNADWKSATSLYEQAAIAYRFRKDNEKAKDAFEKASKGQEMISSPWDAAKHMESAAALAKELGRWNEVSDFYHRASELYRECGRPQPASDALAKGASALEEKSPEEAIKMYDEACSVLEEDGKEQMAFDLYRAAAALYIKMEKYSDAAALFLRLGSAADKCNAINSQCKAYLSAIIIYLYTHDFQQAQKCYNDCSEVQAFLNSDQNRCATKLLSAYEEGDAEEIKRMAQSSAFNHLDHVVIRLARKLPTDDLQAIKKADDGEESLDEDDLT

SEQ ID NO: 59197 - protein, 609 aa, Zea mays
  Clone ID: 700259821_FLI.pep
SDCADAAPQQATAAARHGCGARRGGVQDPGTGQLLPLAALAAAPRRRPPQARGHPLLSHRQAPPAGRRRPRRVLPPPHASQCRPRRCRCRRLALRILPPQLLLDRLAAATAASGSAHRVARLADQYLDFVSLEDNLFSLAHPRSYVALNDPKAADADIEALVDAIALGLFCAAATLGTVPVIRCPRGGPAEMVAAALDARLRHHLLAKPNLFTEASASASVASFQRPVLCLFDRNLDLSVGIQHDWSYRPLVHDVLGLKLNKLKMPADKSGPAKAYDLDDSDAFWVANSWSPFPRVAEEIESQLAKYKQDVDEVNQRTGGNKDGIEFDGTDLIGNTQHLMNAVNSLPELTERKKMIDKHTNIATALLGHIKERSLDGYCDCGNDMLTKGTVDRSTLLGLLRGKGTKADKLRLAVTYLLCFETPELEQVEAALRESEVDMSAFQYVKRIKSLNTQFSASSSSSATRSNIVDWAEKLYGQSISAVTAGVKNLLSSGRQLALTRTVEALMEGKPNPEVDNYLLFDPRAPRSGSGGQFKGPFREAIVFMIGGGNYIEYRSLMELAECSQPPSSKHVIYGATEIVNGVEFIEQLAELGQKAGLGLGGGNNPPLQ

SEQ ID NO: 59198 - protein, 186 aa, Zea mays; identical to SEQ ID NO: 51801
  Clone ID: 700260334_FLI.pep

SEQ ID NO: 59199 - protein, 216 aa, Zea mays
  Clone ID: 700260679_FLI.pep
SSCNAVCGRQQHHGRLRKFGGIYYKVFLCALKTGRCAVWASSWASMGFLSLVGNSFGCSASGERLVSAARDGDLQEARALLEYNPRLARYSTFGGRNSPLHYAAAQGHHEIVSLLLESGVEINLRNYRGQTALMQACQYGHWEVVQTLILFNANVHRTDYLNGGTALHFAALHGHARCLRLVLADYVPSVPNFCTLVNHKSSEEDSAADFDHEYAG

SEQ ID NO: 59200 - protein, 403 aa, Zea mays
  Clone ID: 700260760_FLI.pep
AAMAVEKTLPGASAGRTVLVTGGAGYIGSHAVLQLLLAGFRAVVIDNLSFHKIDLRDKGALEMVFASTRFEAVIHFAGLKAVGESVQKPLLYYDNNVIGTINLLEVMSVHGCKKLVFSSSAAVYGSPKNSPCTENFPLTPNNPYGKTKLVVEDICRDIYRSDPEWKIILLRYFNPVGAHPSGYLGEDPRGIPNNLMPYVQQVAVGRRPALTVLGNDYATRDGTGVRDYIHVVDLADGHIAALQKLFENSSIGCEAYNLGTGRGTSVLEIVKAFEKASGKKIPLIFGERRPGDAEILFSETTKAERELNWKAKYGIEEMCRDQWNWASKNPYGYGSPDSIKQNGHQTNGSADSSKQNGHRTNGSTDSPKRNGHHAYGSADSPKRNGHCVFGSSDLKPNGNGHLR

SEQ ID NO: 59201 - protein, 396 aa, Zea mays
  Clone ID: 700261552_FLI.pep
QLQRCQSFNEQKPPMHPQQQQQEPQKQQCVQTPQDQQMQEQKHLHNFHSLPDALSAFSQLSPATHSPPSALQTVPAFSHQQNFPDTNISSLSPSTGPSMHGMLGRLPSEAASSLPCVAMNAPVSVSDPWSSKRVAVESVNPCRPHVSPHIEHLDMATCNMPQSSALAPLPGRECLVDEDGCSDPQNHLLFGVHIDSHSLLMQGGIPALQNDNSSGTIPYSTSNFLSPSDNDFPLNQPLRSAGCLDESDYLPCAENAEQANQQFATFVKVYKSGTVGRLLDITRFSSYDELRSEVGRLFGLEGQLEDPLRSGWQLVFVDREDDVLLVGDDPWQEFVNSVSCIKILSPEEVQRMGKPGIQLLSSAPSRRLGNGCDSYASMQEPRGLDAGMAPVGSVEF

SEQ ID NO: 59202 - protein, 281 aa, Zea mays
  Clone ID: 700261906_FLI.pep
KLPSPSLPLSLSLRRPKLRTQSNRHLTEMGRKFFVGGNWKCNGTTDQVEKIVKTLNEGQVPPSDVVEVVVSPPYVFLPVVKSQLRQEFHVAAQNCWVKKGGAFTGEVSAEMLVNLGVPWVILGHSERRALLGESNEFVGDKVAYALSQGLKVIACVGETLEQREAGSTMDVVAAQTKAIAEKIKDWSNVVVAYEPVWAIGTGKVATPAQAQEVHASLRDWLKTNASPEVAESTRIIYGGSVTAANCKELAAQPDVDGFLVGGASLKPEFIDIINAATVKSA

SEQ ID NO: 59203 - protein, 341 aa, Zea mays
  Clone ID: 700262001_FLI.pep
LAPGFTLPYFQFSSEGDPNPESPPAKTSSRARAHTHTLLALCQRLGLWRRRKHLGDAFGGDGGEVLGPRVAVLRGGCDRPVVLVGPVRGGGHDDLRDVREHRQAVQRAPGGDGQVLRRGLVPHVEVLGHGLHAAVHVPRHRLRHRERRTGCAPHARPLRLGRQLARHLRHAPNHRVDMRRRRLQRAREVLVHLVHRVVHLAVDEGEDVERQAAEAVVDGANDALDGRLDGVNAGAERAGVVLGEAVEPSEAHRGLGSRHLDEVQVPQLRGPPRLLLLHHNLPLLRLLVLGVGLLLRHRANQTRDSLGYSGTVEPGRQTGLREEEKETEQARRYGFFRLLAS

SEQ ID NO: 59204 - protein, 305 aa, Zea mays
  Clone ID: 700262958_FLI.pep
TELHAQRFYCYIHCGHGVVRAFLQAYVVFLVSPKKKTARATVLLSTLIRAQASDRTLPLFHMGYKGHDDLWPRALLVEPGRCSHRVRHAARRGRHVQLVPYLGGHHPLGVLPRRPLVRRQLLPRVREDVPELDLVLVARGAGVLVGRRLRRRGQASGDGGVGPRGAQLRDLDGRRVALLDRPVTDHRAHSLQRAADRDGVLLQRARRVRHRHRRRAHHLPHHLPADGLGDDAAARELGLGDGGARVGDGARGLSPAYVARSRVDRRGGLQDGGGPALLRPAEHGLLRGLQPRGVPGSHGLVGQLA

SEQ ID NO: 59205 - protein, 123 aa, Zea mays
  Clone ID: 700263035_FLI.pep
SFVAAIQTSAPAPFERVHPANASVVPRNNQTKRIPPRAGALGTPPRSPTRRRSEEQPKAQAGTNTNGTVGAGGVLSPAHNPIQNKTAHGEGEETGRRVGWFTLASPPATAEEPSQRGGGLGQW

SEQ ID NO: 59206 - protein, 878 aa, Zea mays
  Clone ID: 700263095_FLI.pep
AAAAMAQPLVVKKDDDLDEEEYYSPFLGIEKGAVLQEARVFHDPQLDARRCCQVITKLLYLLNQGDTFTKVEATEVFFATTKLFQSKDAGLRRMVYLMIKELSPSADEVIIVTSSLMKDMNSKTDMYRANAIRVLCRIIDSTLLTQIERYLKQAIVDKNPVVASAALVSGIYLLQTSPEVVKRWSNEVQEAVQSRAALVQFHALALLHQIRQNDRLAVSKLVTSLTRGSVRSPLAQCLLIRYTSQVIRESGVYQGGDRPFFDFLESCLRNKAEMVILEAARAITELNGVTSRELTPAITVLQLFLSSSKPVLRFAAVRTLNKVASTHPLAVTNCNIDMESLISDQNRSVATLAITTLLKTGNESSVDRLMKQMTNFMSDIADEFKIVVVEAIRSLCLKFPLKYRSLMNFLSNILREEGGFEYKKAIVDSIIILIRDIPDAKESGLFHLCEFIEDCEFTYLSTQILHFLGNEGPKTSDPSKYIRYIYNRVILENATVRASAVSTLAKFGALVDSLKPRIFVLLRRCLFDGDDEVRDRATLYLKLLGGEATVGETEKDVNEFLFGSLDVPLVNLETSLRNYETKSQPLAEKKSTGKKSAGPASAVSGSVSTVDASYEKLLSSIPEFADFGKLFKSSAPVELTEAETEYSVNVVKHIFDRHVVLQYNCTNTIPEQLLEQVIVLVDASEADEFLEVASKPLESLPYDSPGQTFVAFENPEGVIATGKFSNILKFFVKEVDPSTGEAEDDGVEDEYQLEDLEIVSADYMLKVGVSNFRNAWENMDPETERVDEYGLGVRESLAEAVSAVISILGMQPCEGTDVVPSNSRSHTCLLSGVFIGNVKVLVRLSFGISAPKEVAMKLAVRSDDPEISDRIHEIVANG

SEQ ID NO: 59207 - protein, 233 aa, Zea mays
  Clone ID: 700263495_FLI.pep
HLPHPHSLTLTLAHATARASSTMDRTRHRSSVSSERFLGSFARSAAAGEQSASTAFELDEDDLFSAGSGSPEPPQPLRRPLILSSVRPANPSPVPRLRRPPEGILDALPERRRSPPQSSSSTSSSPASPAAAPPRMIPAVPRPAPAPAPYVPQSLPVNVPAARLRKPPVVMVMGEAEDEYEEMLPPHEMLARARARESPMTTFSMLEGAGRTLKGRDLRQVRNAVWRKTGFLD

SEQ ID NO: 59208 - protein, 289 aa, Zea mays
  Clone ID: 700264466_FLI.pep
ASRRTEAGSGAEVSLSCVGLSPPPPPLGAMKLTVKTLKGTHFEIRVQPNDTIMAVKKNIEEIQGKDSYPWGQQLLIFNGKVLKDESTLEENKVNEDGFLVVMLSKGKTSGSTGTSSSQHSNTPATRQAPPLEAPQQAPQPPVAPITTSQPEGLPAQAPNTHDNAASNLLSGRNVDTIINQLMEMGGGSWDKDKVQRALRAAYNNPERAVEYLYSGIPVTAEIAVPIGGQGANTTDRAPTGEAGLSGIPNTAPLDLFPQQGASNAGSGAGGGPLDFLRNNPQVLIFIFAI

SEQ ID NO: 59209 - protein, 226 aa, Zea mays
  Clone ID: 700264481_FLI.pep
TYNKKSVLHLKVPWTEHFYPINCFRSEYDTIGTSIKAAAVYLGTALVKLVCLATLLKVPENDSFDPYQELMKVFIGFIDVAGLYFALTQLTHRNISQNHKFQAVGLGWAFADSVLHRLAPLWIGARGLEFTWEYIFQGLEANANLVMTLSLAALGSLMWLRKNKPRTLVPIIYACALLLATMPSITSYLRRSLEWQTPKVVGFELFSSLVMAFISWQLFSACQRPM

SEQ ID NO: 59210 - protein, 507 aa, Zea mays
  Clone ID: 700264501_FLI.pep
LPLSPPAPFFIARSHTFWKERERGRGRDWREAPAQGKRNRGARRGRKGRRRRRRANKMREIISIHIGQAGIQVGNACWELYCLEHGIEHDGTMPSDSSVGVAHDAFNTFFSETGSGKHVPRAIFVDLEPTVIDEVRTGSYRQLFHPEQLISGKEDAANNFARGHYTVGKEIVDLCLDRVRKLADNCTGLQGFLVFNAVGGGTGSGLGSLLLERLSVDYGKKSKLGFTIYPSPQVSTAVVEPYNSVLSTHSLLEHTDVAVLLDNEAIYDICRRSLDIERPTYTNLNRLISQIISSLTTSLRFDGAINVDVTEFQTNLVPYPRIHFMLSSYAPVISAEKAYHEQLSVPEITNAVFEPSSMMAKCDPRHGKYMACCLMYRGDVVPKDVNAAVATIKTKRTVQFVDWCPTGFKCGINYQPPSVVPGGDLAKVQRAVCMISNNTAVAEVFSRIDHKFDLMYAKRAFVHWYVGEGMEEGEFSEAREDLAALEKDYEEVGAEGADDEGDEGDDY

SEQ ID NO: 59211 - protein, 305 aa, Zea mays
  Clone ID: 700264725_FLI.pep
TELHAQRFYCYIHCGHGVVRAFLQAYVVFLVSQKKKPARATVLLSTLIRAQASDRTLPLFHMGYKGHDDLWPRALLVEPGRCSHRVRHAARRGRHVQLVPYLGGHHPLGVLPRRPLVRRQLLPRVREDVPELDLVLVARGAGVLVGRRLRRRGQASGDGGVGPRGAQLRDLDGRRVALLDRPVPDHRAHSLQRAADRDGVLLQRARRVRHRHRRRGHHLPHHLPADGLGDDAAARELGLGDGGAGVGDGARRLGPAYVARSRVDRRGGLQDGGGPALLRPAEHGLLRGLQPRGVPGSHGLVGQLA

SEQ ID NO: 59212 - protein, 225 aa, Zea mays
  Clone ID: 700264764_FLI.pep
MLGIFSQNEHILIIHATTKRREDFTAYADVCFREFGDRVSHWTTLDEVNVAAIGSYDNGQIAPGRCSDPFGTKKCTVGNSSVEPYIAAHNMLLAHASATRLYREKYQAVQKGVVGINIYTMWSYPLTNSTADLEATQRFLDFYSGWILEPLVFGDYPSVMKKNVGSRLPSFSKVQSEAIRGTLDFIGINHYYSFYVNDRPLEKGIRDFSLDIAADYRACPNIYSR

SEQ ID NO: 59213 - protein, 359 aa, Zea mays
  Clone ID: 700264985_FLI.pep
PNNPLLPSPSVLLPHLHVSTKQGNKGEVDLHLREKAAGVVMMESQPLQAPTATAPAPGSAEPAGAPPAVTPGKEFTRTCKGLVVVLIGGYVLLQLLPSSLNYLAIIPSKTIPYVWTVFTAGYIEQVLPGAIGSSLGLLFCGKDIEPAWGRKEFLKFIILINSICGILAFCFAIGLYYVTGKESFLVTPLSGFHGCLAGFLVALKQLLPNLELPMCFFWKIKAKWMPFFVVCFSSIMAFIVPDSINFLPTLVSGMYVSWLYLRYFQRNPLTGLKGDPSDDFSFPSLFPAAMRPVTDPVANLFDRLLCARSRTLEVALPISDPTKASRRRERGERVLEERLAADNAGDTEASPRGHGTAED

SEQ ID NO: 59214 - protein, 312 aa, Zea mays
  Clone ID: 700265270_FLI.pep
LPPALCFHGRRFSQRTVPSSTRILCASSSWSSPLRLAPARSSPSSPSLLQSSSWPRVLAPSSPDFLAPCSPPWCPALRCQPRPPYLLCRSSSSARPGWRVARSLAQITRLPAALTLLPAPDPRSPMFPWPKLPSSPSSPALIHGRATGSSPAQHSSCVAASSPSTPSGFLALLFSGCRSCLPLSSTTAPGHCTTTCLLLLSSSARVGMRSPASLPASAELANAPSRRTPATSPCHAYFPVVGARQRPLFLHFVGHVFPPHTPPAPLAMAWMTDVSALVSCSSNHWLVGCALCRAHRVFGALSRMPSLSSPKS

SEQ ID NO: 59215 - protein, 236 aa, Zea mays
  Clone ID: 700265955_FLI.pep
QLQVMITQSDFGKPRAVAVTALFSIQTLTGTCQREYESRAAVNTVVLHPNQKELISGDQNGNIRVWDLAANSCSCELVPEVDTAVRSLTVMWDGSMVVAANNRGTCYVWRLLKGTQTITCFEPLHKLQAHDGYILKCLLSPEFCDPNRYLATASSDRTVKIWNVDGFKLERTLVGHQRWVWDCVFSVDGAYLITASSDTTARLWTMSTGEAIRVYQGHHKATVCCALHDGAESAPS

SEQ ID NO: 59216 - protein, 572 aa, Zea mays
  Clone ID: 700266091_FLI.pep
WWRPLHLPLHHSSLLQSRHHVVSVASSPRPPRSFQPRQTSKHVKNGQGKKLQCSHYMPVVIPEGKALPCVIYCHGNSGCRADASEAAIILLPSNITVFTLDFSGSGLSEGEHVTLGWNEREDLKAVVNYLRTDGNVSCIGLWGRSMGAVTSLMYGAEDPSIAGMVLDSPFSNLVDLMMELVDTYKYPLPKFTVKLAIQHMRKIVKRKASFDIMDLDTIQVAKQCFVPALFGHATEDDFILPHHSDKIYESYIGDKNIIKFDGDHNSPRPQFYFDSITIFFHNVLNPPEVAEDHYFMTPHGSLGQGHWDTEQDIEYRFSQSPTGTANATTTEDAIAQLRSRRLMSRMEVPSGATTEDRTDRTEGFDSDLGPSSSSVSTATPPNGRNGRLLTPTSDDGEYVEYSFDSLSDMPHTVEDEDRMLMQAILESLKDYEQSNTKNVQSTASDPASDPASKANGTVKDCNGVAAAALEQDASSFDAPDKHTNVPNSGEKVSEGQSTDCNAGKSSASVSASGSSEPLAPTQMVNGQPASVDSQKVTQNANGEDGTRATLVVQKSRTGGLIEKWGSFFKNND

SEQ ID NO: 59217 - protein, 777 aa, Zea mays
  Clone ID: 700266372_FLI.pep
RVLARSRSLRDDWVWATAALRQVPRLRRSLRRRRAPTRMQKLSGLRSLEGFRSLVGSTSTAMKVANPRPSPDTGGISYGSFANLKITAEKLVKEQASVKTDLEMAHVKLRRATEQINIIEGKLQQALNENAKLKVKQTEDSKLWQGLDSKLSSTKTLCDQLTETLQQLASQTEQAEEDKKFFEEMLGKNSKALDEFNCLLRDLSTKLEYAEQKIISGRQEMLQIKQEKEEMDRSYKGQLYSNDTTIKEKDSLIKQLEGSLDDNKSRLIYLDSRLQCMEQELKLKDDVCISLKGNLASSESEKNSLELMNKGHILEIKKLCQDNKDLNELFSSFMVKVTELDKEHASMSSHVSRLISSFERFYEMAQEEKMLMARSSKDKFEHLQSQYVDLTSENNALKTEIEELKSRLIELQRTQEIVMVQHVEECQVAEDKIRRLESEAEVSASNINQLEKLASELQGRIQKLLEDSTFAENHKQELLQKILKLESDNQELLGQMQSIMEEKSNNAESLHGEITKRDQQVDTLENQINQLRSVLDEKEQLYLCSVQKEKTLEEQKLQVEALLSATECKLSDAKKQYDLMLEGEKIELSKHLKELSLKNDQAINEIRKKYELEKIEITNAEKEKAEKLIREIENKCNEKISQNKHDSERYLICLKEEHGTTVARIQQDNEHKESTLRAYHKEELQRIQSQAENEMRERLSLLRKEHEVQIKSLRMHHEEECQRMQEELELQKSKEEKQRALLQLQWKVMGESQRVDQEVNSKKEYSVSSIRRSDPYG

SEQ ID NO: 59218 - protein, 152 aa, Zea mays
  Clone ID: 700267708_FLI.pep
TEPMADQLTDDQIAEFKEAFSLFDKDGDGCITTKELGTVMRSLGQNPTEAELQDMINEVDADGNGTIDFPEFLNLMARKMKDTDSEEELKEAFRVFDKDQNGFISAAELRHVMTNLGEKLTDEEVDEMIREADVDGDGQINYEEFVKVMMAK

SEQ ID NO: 59219 - protein, 460 aa, Zea mays
  Clone ID: 700267768_FLI.pep
IVEWKPYSSPSAAVAAQFPHPIPTLRSTDPYMMGEAKENDVYEEELLDYEEDDDKTVDGSAAKPTGEVAKKGYVGIHSSGFRDFLLKPELLRAIQDCGFEHPSEVQHECIPQAILGMDVICQAKSGMGKTAVFVLSSLQQIDPVAGQVAALVLCHTRELAYQICHEFERFSKYLTEVKGAVFYGGVHIRKHKDLLKNECPHIVVGTPGRILALARDKDLSLKNVRHFILDECDKMLESLDMRRDVQEIFKMTPHDKQVMMFSATLSKEIRPVCKKFMQDPMEIYVDDEAKLTLHGLVQHYIKLSEAEKNRKLNDLLDALDFNQVVIFVKSVSRAAELNKLLCECNFPSICIHSGMTQEERLTRYKNFKEGHKRILVATDLVGRGIDIERVNIVINYDMPDSADTYLHRVGRAGRFGTKGLAITFVSSASDSDVLNQVQERFEVDIKELPEQIDTSTYMPS

SEQ ID NO: 59220 - protein, 468 aa, Zea mays
  Clone ID: 700207738_FLI.pep
LLARALIRRYILIIDHQSPPPPKAQSPPPPKAQTISEIESHTSAMGLLPTDRMDSLFSPRCQWVNGPIIVGAGPSGLAVAACLREQGVPYVMLERADCIASLWQRRTYDRLKLHLPKQFCELPRMPFPDHYPEYPTRRQFIDYLEDYAARFEIRPEFSTTVVLARYDETSGLWRVTTSAPAGANGGDVEYIGRWLVVATGENAEAVVPDIPGLGGFHGKVTHVSDYKSGEAYAGKRVLVVGCGNSGMEVSLDLSDHGARPAMVVRDAVHILPREVLGKSTFELAVLLRRWLPLWLVDKIMVILAWLVLGNLARLGLRRPAAGPLELKETHGRTPVLDTGALARIRAGDIAVVPAVARFRKGGQVELADGRTLDFDAVILATGYRSNVPQWLESSNDSFNKEGYPKTAFPHGWKGQSGLYAVGFTRRGLLGASTDAVRIAKDLGNVWREETKPTKRAGACHRRCISVVF

SEQ ID NO: 59221 - protein, 239 aa, Zea mays
  Clone ID: 700208180_FLI.pep
SPEARGSAEMYHPTRGGVRGGRDQFKWDDVKVDKHRENYLGHSVKAPVGRWQKGKDLYWYTRDKKSDTEDALKEEIRRVKEEEEQAMREALGLAPKRSNRTQGNRLDKHEYAELIKRGSTAEDLGAGHAEAAQVQGLGLYKAPRDEGGSSSLSLDPQMEPEQAEPLLAPKQEDDLEDNRKGKRPRERDEKRGEKERKRDRHGDGKERRRDKHERRHDLEDRSKRHRKDKQKRRHDSDSD

SEQ ID NO: 59222 - protein, 233 aa, Zea mays; identical to SEQ ID NO: 47999
  Clone ID: 700208275_FLI.pep

SEQ ID NO: 59223 - protein, 165 aa, Zea mays
  Clone ID: 700208612_FLI.pep
QRRRRDLADDLVEGAGVLEPEHDADAEDVADGAAGQRVGEGEPGGVTRLQAGVARLQLQPRRRLAVRGRRQPEPPREQHQRRRRHHDQVGGGADVVAADALRRRPLPAHPHGRQRCHRGPGRGVAPEAVEPGHGGGELGCHVWRLRRRRRTSHLCAAVPSSASAE

SEQ ID NO: 59224 - protein, 233 aa, Zea mays
  Clone ID: 700208701_FLI.pep
HIPREDACSSPIDTMAVFSDLHTADGLKSLEAHLAGKTYVSGDSITKDDIKVFAAVPSKPGAEFPNAARWYETVSAAVASRFPGKAVGVNLPAGSAPAAAAPADEAEDDDDLDLFGDETEEDKKAADERAAAAKASSKKKESGKSSVLMDVKPWDDETDMKKLEEAVRSVQMEGLTWGASKLVPVGYGIKKMTIMLTIVDDLVSIDTLIEDHLTQEPINEYVQSCDIVAFNKI

SEQ ID NO: 59225 - protein, 171 aa, Zea mays
  Clone ID: CC-ZMLE18900083C05_FLI.pep
FLLWCSINLSQESMESTQSSKDCYPFILHISIILVNFRARSFLQNLTELLYLSLLEVFSGDDEPEVKRGLFGFEDVEDIGCVVRKLVQRHLHLLLCPLHRDVHARHLPGASHSPSPLGGRSPWQLGVRLFKPLAIGGNRRRLAVDRAGGDAEEHRRPSLARDRRSLTQWRI

SEQ ID NO: 59226 - protein, 363 aa, Zea mays subsp. mexicana
  Clone ID: UC-ZMROTEOSINTE048H12_FLI.pep
EGLPRSDGFNCILVVVDRLTKYAHFIPLRHPFTANQVASAVLTHVVKLHGVPASIVSDRDRIFTSAFWKGLFKLLDTKLLVSTAYHPQTDGQTERVNQCLEMYLRCTIYNSPAKWKAWLPLAELWYNSSYHSSLQCSPFKALYGYEPKLPSFPVLADVSTTDLSSLIKERDLHLELLKHNLLAAQTRIKLQADKKRIDRQFAEGEMVLLKLQPYTQSSVASRPFPKLAFKYFGPYKILQKIGVAAYKLELPAGSLVHPVFHVSQLKPYTADYSPVYADLPKIPDLTQRDLQPQCILQRRLVKKGGAAIVQVLVQWQGLPADSATWEDWTVMQARFPDSSAWGQASIPGGGDVTPAPTITGVTA

SEQ ID NO: 59227 - protein, 314 aa, Zea mays
  Clone ID: CC-ZMLE189062C02_FLI.pep
PPQQPTHRNHGLHHRSLRQDDCRLGRQPRHRTGHVRGLRQRRRQRGHSLPLAPQGARGGRERGQAVQRQVQGVPVRRRRRQARQGHGGADRGRPRHAHPRPLRQRRCLGRQACSGAHHRGLPQGLQRKRPRRLQHVPGPRAALGREGLQDGLHRHHQLHVVEPVQPEGPQRPSDADLLQRLQGRRDEHGQGSCHRVGQARHPRQRPRAGLLRDGADERHGPQDSRVAGRLGAHGPLQPAARAGRPGHPAAVRQGVVHHRHAAAARRRLQRLLSAAPRHVLRTLRPRYLSTPGRELRSRRDIHAHTHTHAQPFCS

SEQ ID NO: 59228 - protein, 218 aa, Zea mays subsp. mexicana
  Clone ID: UC-ZMROTEOSINTE023H05_FLI.pep
QRETRKTTPPRLENASQDFNLPFRPEIRFASPRQIRANGPMQFFGGSSLTSVAPEATPAPAAPPGTGTGASAQVLYVFNRNGVCLLYREWHRPLRTLDPTQDHKLMFGLLFSLRSFTAKIDPTTAEKGNLGVPLLPGQGCSFYSFKTNTYKLNFMESPSGIKLILITHPRTGDQRDSLKHIYNLYVEYVVKNPLYAPGTPIKCELFNKHLDQYVRTII

SEQ ID NO: 59229 - protein, 268 aa, Zea mays; identical to SEQ ID NO: 48084
  Clone ID: CC-ZMLE189105F11_FLI.pep

SEQ ID NO: 59230 - protein, 363 aa, Zea mays
  Clone ID: CC-ZMPO148065D09_FLI.pep
QNIFVLPSLLSLPAWSQYNLIYAGAALHCTALHCTRDCSLALDCAPSLSTQRKTQQEPELPPKSQPLYVQSIVGFRSVPSRPGRSAPQRDGGLVHQRPGGLRDAVRLPLRGLPARPGAVHAAHEGGEAPPVVRVEEVGAHAQVREGHHPVLGGALGGRGDHLVVRRAVVPRQRVLAREAHPGGARRGAHLPDQRLRHAPRLLRLLVVPHLHAGEVEHGAVARQEARDGEVPVVAPRVVVARGELGGVGPAAVVPVDAGHLHGDLHGRRAEHGRGARQDAVAVLQQHLRVPRQEEVAVLGAPPTVVAAEEDGVLRPVVVAASVGRPTVAPLRLAGRLRCRLQAATHVPVVALEGADAWELPGAV

SEQ ID NO: 59231 - protein, 116 aa, Zea mays
  Clone ID: CC-ZMLE189033G10_FLI.pep
SPNNPMRISLFALSTRYFKFQLKNYTSYSLQMSMNSWRMKKKVYSACVFHLIDCEPGIISLERTVTLATCLCSDNLRRCRYYKSIVGSVITLYAVWLTMVQQKENNSSRLLLILFL

SEQ ID NO: 59232 - protein, 414 aa, Zea mays subsp. mexicana
  Clone ID: UC-ZMROTEOSINTE011E02_FLI.pep
DYSVRQFRPERRRYVYAPQPLLLIRISCFPQKIHVLIFSAAAPNFPLISCCLFRRRRTSSFPSLSTGAGLDRLGPTHILGSVGGAKMSDNLMDKVSAFGERLKITGTEVSKKMTAGMSSMSFKMKELFQGQTPADKIVEGATSEELDGPDWNSNLEICDLINTEKVDSMELIRGIKKRIMLKDARVQYLSLVLLETIVKNCDKAFSEVAAERVLDEMVRLIDDPQTVVNNRNKALMLIEAWGESGDELRYLPVYEETYKSLKSRGVRFPGRDNESLAPIFTPARSVAEADVDASLPQQVFEDVHVHTYTAEETKEAFDVARNSVELLSTVLSSSPEQDALQDDLTTTLVQQCYQSQHTIQMIIETVGDNEAVLFEALSVNDEIQKLLSKYEEMKQPRASEHAEHVPVVIPIAGT

SEQ ID NO: 59233 - protein, 157 aa, Zea mays subsp. mexicana
  Clone ID: UC-ZMROTEOSINTE062C09_FLI.pep
FHTPGICIAGEMASKAGGDGKEAINEQVVANTYANMRTEMNQLYTKITELEMEVSEHSLVIGAIEPLDPSRRCYRMIGGVLVERTIKEVLPAVKRNKEGLEEVIARMHEALERKKKEITEFELKYKIRIRKADNDTEDEGGKKEGTAQGVLVGPAGQ

SEQ ID NO: 59234 - protein, 138 aa, Zea mays subsp. mexicana
  Clone ID: UC-ZMROTEOSINTE108E10_FLI.pep
TSSSGSSHSSGMKKELPMPRSPLDWGTRTAPAECADRGQTKFSVPGSELFCPRHWRRVIRLERHGMGRFLRLACNFVYPSVSVSCMFEVQILCLQNRGVEEAHQTPGQWNEMPTCSFPLQQFHCILVKDELGHIFSCF

SEQ ID NO: 59235 - protein, 113 aa, Zea mays
  Clone ID: CC-ZMLE189035G12_FLI.pep
AAPPWCVHAVGKCSRGTLSHTSVLALDTPVSSSPIVLGFGHRLTVSTHLQPMPPPSILPSTGRPSLSPPPCLRTTLLFVQHHWSSICQPRWSSSGEPPTILAMACIPCAQLNV

SEQ ID NO: 59236 - protein, 349 aa, Zea mays subsp. mexicana
  Clone ID: UC-ZMROTEOSINTE027E06_FLI.pep
IIFQFLPNVLIFVSMYIIIPSVLSYFSKFECHLTVSGEQRAALLKMVCFFLVNLILLRALVESSLESWILSMGRCYLDGPDCKQIERYLSPSFLSRSSLSSLAFLITCTFLGISFDLLAPIPWIKHIMKKFRKNDMVQLVPEENEDYLPMQNGEETNNLTAPLMPEREDGGLLDNIEGHDLSLYPLNRSFHMPKQKFDFAQYYAFDITIFALTLIYSLFAPLVVPVGATYFGYRYLVDKYNFLFVYRVRGFPAGNDGKLMDRVLCIMQFCVIFFLAAMLLFFAVQGDSMKLQAICTLGMLVFYKLLPSRSDRFQPSLLEGMQTVNSFVDGPTDYEVFSQPDLDWSLYQS

SEQ ID NO: 59237 - protein, 273 aa, Zea mays subsp. mexicana
  Clone ID: UC-ZMROTEOSINTE109A05_FLI.pep
RLLFQLRSQEAQKSDQKPPRGGADAEFLLHPASTARMFLTRTEYDRGVNTFSPEGRLFQVEYAIEAIKLGSTAIGLKTKDGVVLAVEKRVTSPLLEPSSVEKIMEIDEHIGCAMSGLIADARTLVEHARVETQNHRFSYGEPMTVESSTQAICDLALRFGEGDEESMSRPFGVSLLIAGHDENGPSLYYTDPSGTFWQCNAKAIGSGSEGADSSLQEQYNKELALEEAETIALSILKQVMEEKVTPNNVDIAKVAPKYHLYTPAEVEAVIARL

SEQ ID NO: 59238 - protein, 262 aa, Zea mays; identical to SEQ ID NO: 53280
  Clone ID: CC-ZMLE18900030B01_FLI.pep

SEQ ID NO: 59239 - protein, 233 aa, Zea mays; identical to SEQ ID NO: 46565
  Clone ID: CC-ZMLE189036D03_FLI.pep

SEQ ID NO: 59240 - protein, 319 aa, Zea mays subsp. mexicana
  Clone ID: UC-ZMROTEOSINTE030B03_FLI.pep
KRLTFWLETMYFEGYGFRGSTFEQTYRCYPASFIDKPQLEAGDKIIMPPSALDRLASLHIEYPMLFEVHNAAAERTSHCGVLEFIAEEGMIYMPYWMMQNLLLQEGDMVFIKNANLPKGTYVKLQPHTTDFLDISNPKAILEKTLRNFSCLTTGDSIMVAYNNKKYYIDIVETKPSNAISIIETDCEVDFAPPLDYKEPEPVKPAVPASTEPGTDVPAEEEPKFIPFTGSGRRLDGKPSKDKDVLASSPAKRQANATNGVQPSTATTSQGSSSRKATGKLVFGSGGSRAEKAPEKEAEEPKKEDPKFAAFTGKKYSLKG

SEQ ID NO: 59241 - protein, 87 aa, Zea mays subsp. mexicana; identical to SEQ ID NO: 46124
  Clone ID: UC-ZMROTEOSINTE066D04_FLI.pep

SEQ ID NO: 59242 - protein, 187 aa, Zea mays subsp. mexicana
  Clone ID: UC-ZMROTEOSINTE036B03_FLI.pep
PVPVAIDVAATPWLAATARLETTVVVRVPLLGQVLRTHHLYVPLLLRCGGAKQRTEKKNGDQILGPSSSTAQCMNHQHNEGWISYTHSSSSSTHTVIGFLVPFLELPLGRLELGVLRELQLRSHRVRVELSRRFLQTDRAELRQPDFAAIRFGSARTVFNDGGTRRSPRTQPAAAWLELLGCPGAAA

SEQ ID NO: 59243 - protein, 155 aa, Zea mays subsp. mexicana
  Clone ID: UC-ZMROTEOSINTE111F01_FLI.pep
VDTGFCTYVVIQMVGILHFDGASKGNPGKAGAGAVLMTEDGRVISRLREGLGVATNNVAEYRGLILGLKYAIRHGFKRIKVHGDSQLVCNQVNGVWQTKQPNMMELCTEARKLKENFHSFEIIHVRREWNAEADRQANIGITLASGAVFEERGDI

SEQ ID NO: 59244 - protein, 390 aa, Zea mays subsp. mexicana
  Clone ID: UC-ZMROTEOSINTE037F05_FLI.pep
ETQMGDGAPPPGALYSFGTPWPELNQGLTYTDTFRCADADAATTLIEFYSTNHKSSAPLPGWIKRIRNGQITVDGEVVTDPDTTLGDGSKLVYHRFPWQEPFAPYLLEVLYEDDDMVALNKPSGLQVLPKGLFQQRTVLAQLQLKDWKMASSCRFKRKDVQSHPVPVHRLGRGTSGLLLCAKTKVAKVRLASYFAEGAINAAKKRDKSEFSEERKISKFYRALVTGILDDDEVVVTQPIGLVHYPGVAEGLYAACSSGKPAMSKVCVLERLAHQNHTLVQVEIHSGRPHQIRIHLAYIGHPLVDDPLYGIGGHPNFVEPESTGTDSSFASDGGYERPLQPVPGDCGYHLHAHWLVLCHPTTNKMVKITAPLPQILQTREERRAAAEQTAG

SEQ ID NO: 59245 - protein, 125 aa, Zea mays subsp. mexicana
  Clone ID: UC-ZMROTEOSINTE111G06_FLI.pep
GAERFRCPEVLFQPSMIGMEAAGIHETTYNSIMKCDVDIRKDLYGNIVLSGGSTMFPGIADRMSKEITSLAPSSMKIKVVAPPERKYSVWIGGSILASLSTFQQMWISKEEYDESGPAIVHRKCF

SEQ ID NO: 59246 - protein, 203 aa, Zea mays subsp. mexicana
  Clone ID: UC-ZMROTEOSINTE002C10_FLI.pep
HTACYPRKYYYIIPIIACSNTTTKPKLQLERKPGPETVQYAAGSKITLLVMDLLLVLVFLLICSGILVLLVLRHQIVHVALSFGELHLIHALASVPMQESFPPEHSSELLAHTAEHLLDGGGIANEGGGHGEAARRDITNTGLHIVGDPLHEVGRVLVLDIDHLLVHLLGAHLSTEHGRCCEIAAVTRVSSTHHVLGIPHLLG

SEQ ID NO: 59247 - protein, 153 aa, Zea mays subsp. mexicana
  Clone ID: UC-ZMROTEOSINTE041D03_FLI.pep
TLWTRANNTAANRITWPRGPHRSVPPVPIGVAVAAATVATAVAAATTTVAAAATVAAAATAVAAAAITATATAVAAASTATTVPAAAASTAAAGLGLVDGDVAAVQLLAVHALDGVPHRLLRGEGDEAEAAGPLRLPIEDDLGLEDLAVGAEG

SEQ ID NO: 59248 - protein, 131 aa, Zea mays subsp. mexicana
  Clone ID: UC-ZMROTEOSINTE019E06_FLI.pep
ERVAAAKKFHSKEAEEEAKKVPAKTFTPGLPDAQDITMEPQGPKVVAPTPEQITAIKAAIANAHTLEEAARLEQVLSTGQVPAEFAVPRPDANMAEASDGAEKMDTDGENQEGGEADGQKQGEGSTPIQED

SEQ ID NO: 59249 - protein, 355 aa, Zea mays subsp. mexicana
  Clone ID: UC-ZMROTEOSINTE019E08_FLI.pep
ESGKYGTNNGRATKMVPTTEFRRTSGGLVRSGTVNGSPNSAVNGSTKVLINGSANAIDNSSSKAVINGTPKVAVNGTSLVKSSKTSLVKTQKQVRPKDDPFQEELKVLPSDEGFSWAKDNYNSVQRSIDIWSFVLSLRVRVLFDNAKWAYPGGFSEEKQKVRRRKTASWLREQVLQLGPTFIKLGQLSSTRSDLFPREFVDELAKLQDRVPAFSPEKAKAFIEKEMGCSIDVVYKEFEERPIAAASLGQVHRAMLHNGERVAVKVQRPGLKKLFDIDLRNLKLVAEYFQRSETFGGPSRDWIGIYEECSKILYEEIDYINEGKNADKFRRDFRNIKWVRVPVCFLDITMQFFGGV

SEQ ID NO: 59250 - protein, 481 aa, Zea mays
  Clone ID: UC-ZMFLMO17122A02_FLI.pep
NLGTTMIHSGSQGYYGMQNSHAAYTSQQSLTGSWNATSSQFGVAISPLTPTQPAMQSLSGQNIVAAENMGHLTTGMAPATANAEMVNSDLTSQNQMLSSLPQTDDRLADGIESKSGEDVSHGRVRSSAEAMGPQDAQLGPVQLNAQQLENTRNHMSSIDLSKSMMPSQMMSAPSAASVQPSLTTTARSDNQSSGWAVPAQMANTPGQSQITGNLTWGNTPQGDASLGWGMVGQSNMNMPWVASAQGASGYNMGVAMPTQPNAVPNMGWLPNPGNTSMNMIWAATQGQGTPNAAPMMGGQMQGVPMAPWGGVAAGSANSYPAWGNQQAGNMNQNVGWSAPVQGNPGQANNNMNWNAPNGNPNWNNQQRENGGRHSGHRGAFSGGDSGGRSWKSRSGGDGGSRGHSRFSHSTNTEGYPSRTDRHYDRQNSGNERRYENHNERNGRQFDRQPSDNERNHDRPDGRHGGRDDDRQADRSESRELR

SEQ ID NO: 59251 - protein, 386 aa, Zea mays
  Clone ID: UC-ZMFLMO17190C01_FLI.pep
LPDPPLASRFMAMWRAAARQLVDRALGSRAAHTSTGSKKIVGVFYKAGEYADKNPNFVGCVEGALGIRGWLESQGHQYIVTDDKEGPNCELEKHIEDMHVLITTPFHPAYVTAERIKKAKNLELLLTAGIGSDHIDLPAAAAAGLTVAEVTGSNTVSVAEDELLRILILLRNFLPGYQQVVQGEWNVAGIAHRAYDLEGKTVGTVGAGRIGRLLLQRLKPFNCNLLYHDRLQIDPELEKEIGAKFEEDLDAMLPKCDVIVINTPLTEKTRGMFNKERIAKMKKGVIVVNNARGAIMDAQAVADACSSGHIAGYGGDVWFPQPAPKDHPWRYMPNHAMTPHISGTTIDAQLRYADGVRDMLNRYFKGEDFPVQNYIVKEGQLASQYQ

SEQ ID NO: 59252 - protein, 362 aa, Zea mays
  Clone ID: UC-ZMFLMO17283H07_FLI.pep
SDTIDNVKAKIQDKEGIPPDQQRLIFAGKQLEDGRTLADYNIQKESTLHLVLRLRGGMQIFVKTLTGKTITLEVESSDTIDNVKAKIQDKEGIPPDQQRLIFAGKQLEDGRTLADYNIQKESTLHLVLRLRGGMQIFVKTLTGKTITLEVESSDTIDNVKAKIQDKEGIPPDQQRLIFAGKQLEDGRTLADYNIQKESTLHLVLRLRGGMQIFVKTLTGKTITLEVESSDTIDNVKAKIQDKEGIPPDQQRLIFAGKQLEDGRTLADYNIQKESTLHLVLRLRGGMQIFVKTLTGKTITLEVESSDTIDNVKAKIQDKEGIPPDQQRLIFAGKQLEDGRTLADYNIQKESTLHLVLRLRGGQ

SEQ ID NO: 59253 - protein, 344 aa, Zea mays subsp. mexicana
  Clone ID: UC-ZMROTEOSINTE120B02_FLI.pep
VFFGNVLSANLGQAPARQAALGAGIPNTVVCTTVNKVCASGMKATMFAAQSIQLGINDIVVAGGMESMSNAPKYIAEARKGSRFGHDTLVDAMLKDGLWDVYNDCAMGMCAELCADNHALTREDQDAFAIQSNQRGIAARDSGAFAWEIVPIEVPVGRGKPPVLIEKDESLDKFDPAKLKKLRPSFKENGGTVTAGNASSISDGAAALVLVSGQKAQELGLQVLARIRGYADAAQAPELFTTTPALAIPKAISNAGLESSHVDFFEINEAFSAVALANQKLLGIPSEKINVHGGAVSLGHPLGCSGARILVTLLGVLREKGGKIGVAGVCNGGGGASALVLELA

SEQ ID NO: 59254 - protein, 214 aa, Zea mays
  Clone ID: UC-ZMFLMO17216B11_FLI.pep
DYLEICRCYKAIYDIPAIKEDPTKWIPILRKICWYLVLAPHDPMQSSLLNATLEDKNLSEIPNFRLLLKQLVTMEVIQWTSLWEFFKEEYEKEKDLLGGALGAKASEDLRLRIIEHNILVVSKYYARVTLERLADLLCLTLQEAEKHLSDMVNSKSLVAKIDRPMGVVSFRTTQDSNGTLNSWATSLEKLLDLVEKSCHEIHKETMIHKTALKV

SEQ ID NO: 59255 - protein, 277 aa, Zea mays
  Clone ID: UC-ZMFLMO17320F04_FLI.pep
SCWQCSFKNPKPGDVVARVNILAAEGIQKNFEGKLVGADRAKDLAVLKVDAPTDLLKPINVGQSSALRVGQQCLAIGNPFGFDHTLTVGVISGLNRDILSQAGVTIGGGIQTDAAINPGNSGGPLLDSKGHMIGINAAIFTQTGTSAGVGFAIPSSTVLKIAPQLIQFGKVRRAGLNVDLAPDPIAYQLNVRNGALILKVPGGSAAAKAGLAPTSRGFAGNIVLGDIVVAVDGKPVKGKSDLLRVLDDYGVGDQVSLTIRRGSETLEATLPLEEADM

SEQ ID NO: 59256 - protein, 260 aa, Zea mays
  Clone ID: UC-ZMFLMO17169F05_FLI.pep
ATMWTRALATVLLFVAGAALLGVGGASAQQGVWSIITRPMFQSMLSHRGDSGCQGAFYTYDAFIEAASKFPGFGTTGDEQTRRRELAAFFGQTSHETTGGWATAPGGPFAWGYCRVKEQNPTDPPYYGRGPIQLTHEYNYRLAGQALNLNLVGNPDLVASDPVVAFKTAIWFWMTPQSPKPSCHAVMTGAWTPSATDRAAGRLPGYGLTSNIINGGLECGKGQSTDGAKDRVGYYKRYCDMLRVGYGDNVPCKDQKPYGG

SEQ ID NO: 59257 - protein, 267 aa, Zea mays
  Clone ID: UC-ZMFLB73008G03_FLI.pep
IARGSRRGEARRRGCLPPHRRRRRKRSPYPSAPLPAGPMDSEHWISRLAAAKRFYAAQLGHSDRAGMDELEMDEEVRPEFPCPYCYEDHDVGSLCAHLEEEHPFEPQAAACPVCSEMVTKDMVNHITTQHGYLFKNRRRLRRFIIPGSQALSLLSRDLREAHLQVLLGGGGQRSSDNSSSSSATNISADPLLSSFGLGFPTSDAEQASKSTVSIPDDATTVKEAPAQARKLSIDSSLTSEERELKRKQARVRATFVQDLLLSTLFGD

SEQ ID NO: 59258 - protein, 229 aa, Zea mays
  Clone ID: UC-ZMFLMO17036D06_FLI.pep
KKDIKRKRRKSSVVLVHGERFDLYTKWKRPAKQQATLLTTTERERQRERVLYWLLRYRRRLPPTTCCCWPRRPGPRRSALLSHDAAGVGVLVVEDAVRRVVHRRRVHPGRAVVVLLVVRLRRRGVRVRHVQVRRRPLLPLLRLWLLRGVVRLMRVRLLRGVRRLRLRREVRHARAALRRVVAQHRLRGRGVVGRPVLMLVRVLWRRRRRQRKGPLRRHSGRLRRAGVLG

SEQ ID NO: 59259 - protein, 563 aa, Zea mays
  Clone ID: UC-ZMFLMO17169F11_FLI.pep
LHHPRPAARPAAASYFASAASDPDRAPAMALAFDEFGRPFIILREQEKKTRLRGLDAQKANIGAGKAVARILRTSLGPKGADKMLQSPDGDVIITNDGATILEQMDVDNQIAKLMVELSRSQDYEIGDGTTGVVVMAGALLEQAEKLLERGIHPIRVAEGYEMASKVAFDHLERISEKFEFSADNIEPLVQTCMTTLSSKIVNRCKRALAEIAVKAVLAVADLERKDVNLDLIKVEGKVGGKLEDTELVYGIIVDKDMSHPQMPKRIEDAKIAILTCPFEPPKPKTKHKVDIDTVEKFQTLREQEQKYFDEMVQKCKDAGATLVICQWGFDDEANHLLMHRKLPAVRWVGGVELELIAIATGGRIVPRFQELSPEKLGKAGLVREKSFGTTKDRMLYIEQCANSRAVTIFIRGGNKMMIEETKRSLHDALCVARNLIRNNSIVYGGGSAEISCSIAVETAADRHPGVEQYAIRSFADALDAVPLALPENSGLSPIDTLTAVKAQQVKESNPHCGIDCNDVGTNDMKEQNVFETLIGKQQQILLATQVVKMILKIDDVISPSEY

SEQ ID NO: 59260 - protein, 231 aa, Zea mays; identical to SEQ ID NO: 43391
  Clone ID: UC-ZMFLB73062G05_FLI.pep

SEQ ID NO: 59261 - protein, 295 aa, Zea mays
  Clone ID: UC-ZMFLMO17169H06_FLI.pep
PRARDRGGAPLRRSAPRPRFATWYSRSPSYSRGHPKGRSRSQSPARSQSRSPVPDPRSQARSRSRSQEREEDAVNRGNTLYVTGLSSRVTERDVKDYFSKHGRVVGCHVVLEPHTRVSRGFAFVSMDTVEEAERCIKYLNGSVMEGRNITVEKSRRGRPRTPTPGSYLGHRYERRERGRFHRGYGGGRDEYYGNGGGGYGYRRSPPPMYSSYRESRDYYPSYKDSRDYPPYRDGRDYSPPHRDPRDYYESRGGRGYSPPPYGGGRSRRDRSVSPYRMPERGYGGGRRVGGGGYDR

SEQ ID NO: 59262 - protein, 660 aa, Zea mays
  Clone ID: UC-ZMFLMO17343A03_FLI.pep
GGQRRHQPCECECDDDDIEDVLRRHLLANKKYLLILVGISSKTMLNCVRASLPDDNNGSRVVLVLDIENEEVAWHANAMNKTTGISHGLIHHLNRLDQDKSVELFCMRALRTNLSDETTVNSMMSKYREVVYNITSGYPLAIVVLAGLLRFKEKPGQWNAVLQQLRTTSSGPAAADQEAHQQDDQGGHTEEKTMSAPTSTTQAANNQLSTRTSIERVFWASFEDLPNALKSCFLYLAAFPKGTFLSTGSIVRLWMAEGFIRPQKGKTIEELGHDYFKELALRCLVQVSGMNEVGGITNVIVHGRLHGFLHSEAREAGFIDVHDMNDVFVPPSVRRLSFMSFQDGYTTFTNRFCKLRSFICWANEKDSDNSIGSRGRVNNEEERWHDLNFLHGSDLLRVLYISGLRIKGLPNEIGNKIHLRYLRVNTEHLKELPASIARLPNLQTLDIRDTEVEEIHPSFWEIKTLRHVIAKKLTLLPSIKEEMGELQTLRGVKPSEEEWDQDNCPLLKMSKLRSLELHGLIGARHGAALITALGQMHLLGHLKLKGDKISCCVFTGERLRYLQTVELDGTVQWPPVAEFNDLRFVRPNLVQLSLTNTNDAPEDIQQELRNAGFVRSYQQLRPVYRLSYRQGGALATKPEQQGEAGSNKMEQQHQGEEAEE

SEQ ID NO: 59263 - protein, 339 aa, Zea mays
  Clone ID: UC-ZMFLMO17353F01_FLI.pep
HEGTNGRTRPSAAAQTSDPCCEQGMAAAWAVLAAVLVAAQVASAAPVTAPAFLWAPKNYGFRSDDAKEVVHYQTISPKNLAKSVLEEGGWSTFMCSREDTEKHVDVAIVFIGSKLQSSDISKDKQVDPALADTLKLSFTESEFSMAFPYVSTSDDEKLEESLLSGFTENCKSGFGRNRITYTDTCAVSGQDLKTYHNMDAINDLVVSGRTNPSGQTDVIVFCSGGFEKLGTTESEGELLSQLVDLLKLSGARHTILYASQPSGYLLENPSGSPVARHLAERTNGTKTGLLSKCDGECLVKSTLLEGTFVGIVLLIILISGLMCMMGIDTPSKFEAPQES

SEQ ID NO: 59264 - protein, 285 aa, Zea mays; identical to SEQ ID NO: 36650
  Clone ID: UC-ZMFLLIB3205467E03_FLI.pep

SEQ ID NO: 59265 - protein, 378 aa, Zea mays
  Clone ID: UC-ZMFLMO17279C10_FLI.pep
QMADGEDIQPLVCDNGTGMVKAGFAGDDAPRAVFPSIVGRPRHTGVMVGMGQKDAYVGDEAQSKRGILTLKYPIEHGIVSNWDDMEKIWHHTFYNELRVAPEEHPVLLTEAPLNPKANREKMTQIMFETFNVPAMYVAIQAVLSLYASGRTTGIVLDSGDGVSHTVPIYEGYALPHAILRLDLAGRDLTDSLMKILTERGYSFTTTAEREIVRDIKEKLAYVALDYDQELENAKSSSSVEKSYELPDGQVITIGAERFRCPEVLFQPSFIGMEAPGIHETTYNSIMKCDVDIRKDLYGNIVLSGGTTMFPGIADRMSKEITALAPSSMKIKVVAPPERKYSVWIGGSILASLSTFQQMWISKAEYDESGPAIVHRKCF

SEQ ID NO: 59266 - protein, 553 aa, Zea mays
  Clone ID: UC-ZMFLB73012F10_FLI.pep
GFTAVPRSIRAPRTAAMEFDEYEYLEKAVEPAPPQANGSGSGSGEKDRGSRRREGGEDRISKRSRSGEDRDRDRHRSGREHRDRDKDDVKEERSRESRGKDRDREGREREKERGDRHRLREREVERERRSRSRSERRRAEEEEMVRELERERERSERHHYRDRDVRRRKDDGAEPEVDPERDQRTVFAFQLSLKADERDVYEFFSRAGKVRDVRLIMDRNSRRSKGVGYIEFYDVMSVPMAIALSGQPLLGQAVMVKPSEAEKNLVQSNATSGGAASGGARKLYVGNLHSNITEDQLRQVFEPFGQVELVQLPVDPMTGLCKGYGFIQFARLEDAKAAQSLNGQLDIAGRVIKVSAVTDHVGMQASGATTGDLDDDEGGGLALNASSRAALMLKLDRSGTATSLTRGIGAAGVAVPATSVIGAPGAASLLPPTVAAVGSVPGAPVLPVTTQNVTMSTPTEFLLLKNMFDPALETDPDFDLDIRDDVQDECSKFGAVKHIFVDKNTAGFVYLQFDSVTAAAKAQNALHGRWFAGKMITATFMSALEYSTKFPNL

SEQ ID NO: 59267 - protein, 310 aa, Zea mays
  Clone ID: UC-ZMFLMO17399B02_FLI.pep
HFAVITSRQYPDKDAAITFLEGVITKLRETRESRINEPILYVKMQIAAINLEKGNKKECKNLLEDGKTTLDSMTDVDPTVHASFYWISSQYHKACQEFAEFYKNALLYLAYTTVESLSESFKLDLAFDLSLAALLGDNIYNFGELLAHPIINSLIGTKVEWVYHMLQAFNSGNLALYQELCRVHNAALTAQPALVQNERKLLEKINILCLMEIIFSRPSENRTIPLSVIAERTKLSISDVECLLMKSLSVHLIEGIIDEVDSTVHVSWVQPRVLGIPQVKALRDRLDAWVGKVHTTLLSVEAETPDLVAV

SEQ ID NO: 59268 - protein, 107 aa, Zea mays subsp. mexicana
  Clone ID: UC-ZMROTEOSINTE117A08_FLI.pep
TLVVLLRLIQSLRFISLFFPQGFEDRFQREANLSASAICPSLVKHGAVHCAQEVLLETNCLELARLCCAPFAAVHVTAVPMQVPMLESTVRQPQFIPDCCEVLVHLV

SEQ ID NO: 59269 - protein, 432 aa, Zea mays
  Clone ID: UC-ZMFLMO17092D04_FLI.pep
RAARWLRPEAGRGTGQRTPGDCLACLCAPPGASWSVVPCMDDKELISQSDLQSFYQQQQQHHRAFGGGGGQHSPSSLAGMHSVIRPMPNMNMSPSAILNSIGGGSFTGMQFQMDPPPPPLLHTAAMGASAPTSTPGAVPANPTEPVKRKRGRPRKYGPDGTMKQQQLVAAQPRIGPSGPSMISSAGIEDSSQKKRRGRPPGTAKKHQPSPSQGNAFAGSAGTSFTPHIITASPSEDVAAKIVAFATQSSRAVCVLSAMGSVSRAVLRHPADGSPMARVHASPQPYNNNPAIYEGFYEIMSLTGSYNLAEGSQQEQGQGQPSGGLSVTLCSPERNVIGGVLGGPLVAAGTVQVVLGSFHQGGSRSKSKKGGKQQQAPAPAAFSSDSLTGGQEASPSSGHNQNLTPPPPPPSVTGGWPTSGMFDTSIDINSSRG

SEQ ID NO: 59270 - protein, 501 aa, Zea mays
  Clone ID: UC-ZMFLMO17181G10_FLI.pep
ITHPVSIELHSETCNMIWYNSVHTPGDATTAWHHNPIPSSSDSSPCLVVVGSRSLPVEGLLEGVQVLWLEREEHVDGVVLVASLRDVRRAAAEHLRGGHEPGAAPAEVGVVDGHAEPADDPQVGLGHELAARRLVALVRLKLQVVDDGAHAGVVDAGHRALDPLRHEAQRLRQHVGHPHGDQVPHDGVAEVGRRERRAQALPDVGRDAQPRVAARREAPGDAHGAPQVRRDRAVRGRARRAARPDARQQLGRHGVDARHEGPRRPVEVGRGVDRVLAGGDVRRGPRAQERPVVRRRPRGGLPARQRRPRPDELDRAGAVHRHVVHARAHGHAAALEEGHLDHGEHAGRVAGRGEGHEQAARLGGGLEVGEHLVAGEVGPRDAEQRALAGAVDLEPAARAGRQPPRQRVEGHQRPGQRLPQARRVEERPFSLSLSLLPGAGAGGPRVVVDERRVGLGHRQVQVGQPQRVPRRRLARRHQRRLHHLHLHPPLRSVCVCVSQRA

SEQ ID NO: 59271 - protein, 351 aa, Zea mays
  Clone ID: UC-ZMFLMO17426A06_FLI.pep
RQHPELQPGGHGLQRGRHRHRSGPRHAPGQRRGPGRGGQHGGRLLHVVPREAALHAHPERLLPGRLRGGAAVQPAPRLPPRQVPAGARGAHAQGRGRPRLPLRVPGGGRAADQGPVHQPRPAGGGRPRAQDQHHHAGAPGAALLRAAALLRGRAVPPPVPVQGLHAGAADHPRGRLGRRALHPGLQARVRALLHARGQPRRAGAPAEQPGPAQRRPGGLPRRAAPFRQHLKQQHLVRAGVPGGQGPRPPRRPRLAARLRVGLQVQQRGVARRPPRAPPRAQPLAGLRRPVPGAHGRLARTCNAVAAIYLSLASLPLPVQCCTSPMDDGSDMIWYRTRSVDLHACTSVSIPF

SEQ ID NO: 59272 - protein, 286 aa, Zea mays subsp. mexicana
  Clone ID: UC-ZMROTEOSINTE117D03_FLI.pep
AVMLAASARRLSAAASFSSSSMRSSQLAAVLNQQRWMHDRNKKAMELVAKGWSALQEVDRVIDYADLNDKRLIPLLRGAKENFELALEIDNGNTHARYWLGKMHFKYHVPGACKAVGAALLVEAANMGDPDAQYELGCRLRIENDYVQSDQQAFHYIEQAVDQLHPGALYLLGAVYLTGDCVKRDMASALWCFHRASEKGHAGAAIAYGSLLLKGAEIPEVITRFNSGKSPSTGKMRKRTQQQDPVKLAKEQFQIAAEAGCDLGLRWLKRLEAYENQEEKLKQVQQ

SEQ ID NO: 59273 - protein, 481 aa, Zea mays; identical to SEQ ID NO: 53209
  Clone ID: UC-ZMFLB73304D06_FLI.pep

SEQ ID NO: 59274 - protein, 432 aa, Zea mays subsp. mexicana
  Clone ID: UC-ZMFLTEOSINTE007B08_FLI.pep
TIDREFPADVVLGDGRVFGGVSLYAGDPLDSTQLPLVFAGDCGSPLCLMGELDSKKVAGKMVLCLRGNNARVEKGAAVKLAGGVGMILANTEESGEELIADSHLVPATMVGQKFGDKIRYYVQTDPSPTATIVFRGTVIGKSPSAPRVAAFSSRGPNYRAPEILKPDVIAPGVNILAAWTGAASPTDLDIDSRRVEFNIISGTSMSCPHVSGLAALLRQAHPEWSPAAIKSALMTTAYNLDNAGETIKDLATGVESTPFVRGAGHVDPNAALDPGLVYDAGSDDYVAFLCTLGYSPSLISIFTQDASVADCSTKFARPGDLNYPAFAAVFSSYQDSVTYRRVVRNVGSNSSAVYHPTIASPYGVDVTVTPSKLAFDGKQQSLGYEITIAVSGNPVIVDSSYSFGSITWSDGAHDVTSPIAVTWPSNGGAAAM

SEQ ID NO: 59275 - protein, 730 aa, Zea mays
  Clone ID: UC-ZMROB73068G10_FLI.pep
GIGRRLCGGAMATAAWAAWLLILTCFGAWTPRQILVAAATDANDVTALNTLFTSMNSPGQLQGWKVSGGDPCGESWQGITCSGSSVTAIKLPNLGLSGNLAYNMNTMDSLVELDMSHNNLGGGQQIPYNLPNKKLERLNLAENQFSGSVPYSISTMPNIKYLNLNHNQLSGDITDIFSNLPSLTTVDLSSNSLTGNLPQSFTSLSSLKTLYLQNNQLTGSINVLANLPLDDLNVANNRFTGWIPEELKKINSLQTDGNSWSTGSAPPPPPFTAPPRSRNRRKSPGQHSNGSNNSSSGGSSSIGAGAIAGIIISVLVVGALVAFFLIKRNKRKSAMPEHYEQRQPFNSFPSNEVKNMKPIEEATTVEVESLPSPAAVNLKPPPKIERNQSFDDDDFANKPVAMKSNAAAAPVKATVYSVADLQMATDSFNMDNLIGEGTLGRVYKAQFSDGKVLAVKKLNSTTLPRQSSDDFYELVSNISKLHHPNLSELVGYCMEHGQHLLVYDFHRNGSLHDMLHLSDDYNKPLSWNSRVKIALGSARALEHLHEICSPSIIHKNFKSSNILLDTELNPHISDAGHSSFVPDAEFQASDQGSGYSAPEVEMSGQYTLKSDVYSFGVVMLELLTGRKPFDSSRPRSEQSLVRWATPQLHDIDALDQMVDPALKGLYPAKSLSRFADVIALCVQPEPEFRPPMSEVVQALVRLVQRANMTRRMLDGEEASRRPDDQEQEFV

SEQ ID NO: 59276 - protein, 302 aa, Zea mays
  Clone ID: UC-ZMROB73037A09_FLI.pep
QQQQQHGHHQHASPRHPPGAPGGGVTAAERSSKGRPEGSGGGEGGARAGGVVVVRRGRGGRGPSHRREQGAQGRPVQRVQAAAARHARGHADQRAADGQLQRADHHGAHQRRLRQDEGRRAQRAVAAGPDPARPLLRAAPLLQPLHARHPRRQGQHAGLRPRRALQVRHQAVGQQRQRVHGRQLDAAGQPRQQGLPARHLPRRQGAAPLRAVRAQAAHPGARAGPGTRQVQDQEEEEGRRHRRAAHGRRRHLRLRRPEGGRHARRRRQLGRRRALGARRCCPRRRPLLMGRGRIESVTIVQI

SEQ ID NO: 59277 - protein, 229 aa, Zea mays subsp. mexicana
  Clone ID: UC-ZMFLTEOSINTE014B02_FLI.pep
RTVLGPCSLGCKHKVKKLLRKIEGCSSMETSKEQASKDYADFEKKVKRTIYIDHLSPQVKESAIKAALAQCANVVHVEFIVNYTIPYKDIASAALVELDDDVQAKAAVELMNDFPFIIGGMPRPVKAIHAKAEMFRDRPPCPGLRKGFCWVKQGDKDYEAMQKLKNLAKRQESENMALIQKILKDEKELATRQQEVLDGNCKKYDMLETLVQKGDITNLAQQYGVNLND

SEQ ID NO: 59278 - protein, 524 aa, Zea mays
  Clone ID: UC-ZMROB73078C08_FLI.pep
RTGAPPPPPPPGAPPPPPPPGGGGRGPPPPPAPRGHLGGPPPPPPPSGRAPGVPPPPRAPGVPPPPGNNPSLGRGRGAVRPLGSAYGAAASRKSTLKPLHWVKVTRALQGSLWEELQRNDDSQSVSEFDISELESLFPAAVPKSDDSSKSERRKSLGSKPEKVHLIELRRANNTEIMLTKVKMPLSDLVSAALALDQSTLDVDQVENLIKFCPTKEEMELLKNYTGDKQNLGKCEQFFLELMKVPRMESKLRVFSFKIQFGSQVADLRRSLNIIDSSCNEIRTSLKLKEIMKKILLLGNTLNQGTARGAAVGFRLDSLLKLTDTRATNNKMTLMHYLCKVLAARSPQLLNFYVDLVSLDAASKIQLKMLAEEMQAVSKGLEKVHLEYDASERDGPVSEIFREKLKEFTDNAGADVQSLSSLFSEVGKKADALIKYFGEDPVRCPFEQVISTLLTFVTTFRKAHEENLKQAELEKKKAEKEAEAEKAKNAQLTGKNDSKPSNPRRQAKQTLERTRSASRRGRDVG

SEQ ID NO: 59279 - protein, 321 aa, Zea mays
  Clone ID: UC-ZMFLB73289A12_FLI.pep
INVVPCKKKLMWFGLKVHAPVAKLNIEERIIYVLVCPTPECGPKPQSWKVLRVQKCHNVMQTEGGGDELGQPNGPSSTSLPEEQNDKNKIPETNDDDFDLDALAEALEQAATLASNSKKKNKSKHANAPVKRPVLKEQACDLSIPVLPCFYIHYNKELYGGKGAVGSSSSELVLDKEIMDAANDEEEKWEGEKYEYDRAIGADRTFLKFKKRLDAYPQQCFRYSYGGKPLLATTKLQDPGTCRLCGSPRQYELQLMSPLSYFLHEAGDGSSNYAPSSWTWLTVIIYTCPKSCCPSSCGGKPQSCCWGAAEEEILIQEDEVL

SEQ ID NO: 59280 - protein, 277 aa, Zea mays
  Clone ID: UC-ZMROB73017F08_FLI.pep
GKADISVLFFGGLRSVPARICVKRVVILDFYNFCTGEARFHLADPMAQPEIPAFGDWETTGNTPYTQKFEDARKNKKTGILAQPNDPRRDLEPPRKSPLHPTVYKTNPQDQGPRNPPHRPRPELDNQRHSDRPTHRESAPRRHSNLQREQGSNAGTPRSPYRTAAGSASPMQPNNQSKPKHRSTGMQTPERRASSEGLGQHTPGRSRMKPGGYEPEEVAVPPFGEWDDANAASGEKYTGIFNRVRDDRLSPTSSARQPSTTRSEENKVQQKCSCCIL

SEQ ID NO: 59281 - protein, 238 aa, Zea mays
  Clone ID: UC-ZMROB73050F07_FLI.pep
ASTNPHLQELAASAVAASEPPPRARVVRILVHDADATDSSSSEDEAPPLLPRRRSRGGSSSLSVRRRVMEPAGASSAVRFRGVRRRPWGRWAAEIREPHNRRRLWLGTFDTAEEAANAYDAANIRFRGVSATTNFPAARYSPPPKPAKPIISLTPEPGKVITLPPVPVKPTFPVQVKEVGGSWGGLVKGARSEVKAFAPKPVWKMIPRVHQKFPGCADGSGLRAVHAASIYVEEVGGG

SEQ ID NO: 59282 - protein, 315 aa, Zea mays subsp. mexicana
  Clone ID: UC-ZMFLTEOSINTE059G06_FLI.pep
QCSNHSSQGRGNLLCLHLSCLPLAVPLLNLCPPLLAAFPHRAPAPAPRPPASTAAPVAVVAAVPLAAPAAATATTVVVVVVVVIVAVPGPGRATAAAVWARAAAAPAVAPEGAMQVAKQLPPQVPADLLDVHKVAVSAAVAAVLLELPAGGLPEVRHRRELGDDGAARVVAALQRLQGAGRLLLLAELHVHVPDHVVREVVADVEALDLAVLAQLHEDVLVEVLEVLLDPLRVDGVALRVHARGDHVRPLVHVAEQQRRGDGRLVVQAGAPVAVAACADLEVEGAVHAVLLRAKDGRKMLSHGCLITPLPARFVA

SEQ ID NO: 59283 - protein, 398 aa, Zea mays subsp. mexicana
  Clone ID: UC-ZMFLTEOSINTE071H02_FLI.pep
GGLKLLRRMPSIESSKTKSKDLQSGKPTLRVPNGTLDNNKVVSQRQRTRFASSQSPPKINKKYDNKEMKLETVTAAMSDGKLLSQKQQHGIESKVEECGIPMSEEEAAAFAAAEAARAAAIAAAQAYASVEAEISVPRELPKIPSFQSFVMRDHHLDESDARKRTLKDNFGRLECISENDSKNGEVKDLPENTKYADGDSLKMSHDNFTQQSHSNETACLANAQDHSTDTGVVDGRFTRAWVDTDTICIDGVKDPLAIERWQAQAMEADKEFYSRIRIPDEDDSSSQKHTCRSSASQGADSKPASERQSRGVEHIKQGLVNFIASLLMPLYRGKKIDREGYKTIMRKSVNKIIDTCSEGEKSMTTLEFLDDKRKIKIESFVGKMVDKHLHVVSKSAKP

SEQ ID NO: 59284 - protein, 266 aa, Zea mays subsp. mexicana
  Clone ID: UC-ZMFLTEOSINTE92C07_FLI.pep
DLLLGVACPVCALARTCLFPRLERREKVEMGACASVHKDPGHPKKQFLDSPTKAKAANGKGGGGGGVAPVGDGFGDLKSKVDAEAEQLRAEFNPKNPDSGSKDEVFFESRAWLDSDCEDDFYSVNGDFTPSRGSTPVYQPRAQTVMSSIFQPDTRSSKSPEPSPTGRRKLAELLQEAMQDGPEESADEEEQQQQQSLSAAADGKPPVSESTSSSACSTVPTPVAVAKSRKEKAWYTGRCCLPSFVHSLTLDESERGQKMSSRPCAV

SEQ ID NO: 59285 - protein, 476 aa, Zea mays subsp. mexicana
  Clone ID: UC-ZMFLTEOSINTE039A03_FLI.pep
RGRRRLASESLARSVSLVQRREKDRGGEDDDDGRRDRDRGGGEEGPARHRPRHRAGDRHRHARQLRVPGRLPGLLLPDHQERAPHRPQGEIQEDVRQVDDPEALHAPDGGVPGGEPEHVRVHGAVAGRAAGRGGGGGAEAGEGGGAEGDQGVGAAQVADHAPGVLHHVRGGHAGRRLPADQGAGPAPLREPPHDVPAGVLRGRHGAARGQGPRGEQPRRAGAGGVLRDHGRHVPRPLRVAPRLARGPGAVRRRRGGRGRGRRPGRPRRAPALPASLRRPDHPARLGGRHRRPPPRGGAHLPPAQGRARAHLQEHRPRAGRRVQAARHLRLELHLLGGAPRRARHPGPGGGQGRAGQGQDARHPPRPLRVRQHVQRLRPLHPRRDAQALRRGRTGHHGRGPRLGRPLRLRPGTHRRDRRAPQRPHHHRSGHRLIHRFINDQIPPLSDPPVVVSFVIILRRPSANNNVLSAIIVVCSK

SEQ ID NO: 59286 - protein, 308 aa, Zea mays subsp. mexicana
  Clone ID: UC-ZMFLTEOSINTE51B05_FLI.pep
RFSKENVIGEGGYGIVYRGRLVNGTDVAIKKLLNNMGQAEKEFRVEVEAIGHVRHKNLVRLLGYCVEGIHRMLVYEYVNNGNLEQWLHGAMRQHGVLTWEARMKVVLGIAKALAYLHEAIEPKVVHRDIKSSNILIDEEFNGKLSDFGLAKLLGAGKSHITTRVMGTFGYVAPEYANTGLLNEKSDVYSFGVLLLEAVTGRDPVDYGRPANEVHLVEWLKMMVGTRRAEEVVDPDMELKPAIRALKRALLVALRCVDPDAEKRPTMGQVVRMLEAEDVPSREDRRSRRGHSSHADNESKASSSAPSTG

SEQ ID NO: 59287 - protein, 671 aa, Zea mays subsp. mexicana
  Clone ID: UC-ZMFLTEOSINTE060D03_FLI.pep
PLSISLSATISMVEMAVVELRTLPLGFRFHPTDEELVTHYLKGKITGRINSESEVIPEIDVCKCEPWDLPDKSLIRSDDPEWFFFAPKDRKYPNGSRSNRATEAGYWKATGKDRIIKSKGDKRKQHTIGMKKTLVFHRGRAPKGERTGWIMHEYRTTEPEFESGEQGGYVLYRLFRKQEEKTERSSPEEVDRSGYSPTPSRSSPDNLEANEEANTPLNKESPESALHESPIELPKSVETNGGSMTRWLADRNGNLMANAPDVSHIPFHGHAADVAKVDPSVGASGHLVNPHNGNDDYNKFVSDFTPILPLENPFFTDIQQGAFGFDGIMNPLDPLDAFLNQTLVDPDEHSSTTSKVQYDSDIPTEFENHWNMKVEPQDDQCWWANIGFEPDEPNPLLPCDTTDQDILSVDSGADSFNELFNSMEETGITVRPQQLDSTVQPNHVFASQGNATRRLRLQVECREIITKDESEDEVSCVLTPDCLNDSVEESTAEKDVASDGDEAESTGIVIRSHHPAPRSSSERSFTQQGTAMQRLRLQSGLNKGQRPSTDDSSSCIIDEPGSQHKAEKAEIEEDASTNLTGSADDLPGNIHDDEQKNIPEYGAEMTSPEAKSVLRLRKTSEESNKDVKQESCLEPHVRAPMQKGGFQSYIIWLVLPVALLLLLCVGTYGWV

SEQ ID NO: 59288 - protein, 292 aa, Zea mays subsp. mexicana
  Clone ID: UC-ZMFLTEOSINTE072D10_FLI.pep
LRCAAHPWVGRLRLLVVGGGELLVGVGDEEQLVDDAGEAAADEGPDPVHPLVAPLPADERGAEGHGGVHGRAVEGAAHQDVGPHDEADGDGGDGAQAALLRVHRRRVHRVHQPEGHHDLQHQRLPHRHARQPEGARGLPARREAEQEARHGGPQQLRHPVQEPPEQGDVAAHEGAEGHGRVHVPAGDVRAHRHRHEQRERVRHRRRDQARRGRRAAAGQLAEGHAGALAGEDEDEGGDELSERRLEGARVVHLLVAPQGDPIDRHFHGPLASSRSGHDCDWSWSGAKLSSGG

SEQ ID NO: 59289 - protein, 344 aa, Zea mays subsp. mexicana
  Clone ID: UC-ZMFLTEOSINTE93E06_FLI.pep
RAFYMQACACHFSPVLAPPRSRISASHSPGMATLKVPATVPPVADDCDQLRKAFQGWGTNEALIISILGHRDAAQRRAIRRAYAEAYGEELLRSITDEISGDFERAVILWTLDPAERDAVLANEAARKWKPGNRVLVEIACTRTSAQIFATRQAYHERFKRSLEEDIAAHVTGDFRKLLVPLVSTYRYDGPEVNTRLAHSEAKLLHEKIHHKAYSDDEIIRILTTRSKPQLIATFNHYNDAFGHRINKDLKADPQDEYLRTLRAIIRCFSCPDRYFEKVARQAIAGLGTDEDSLTRVITTRAEVDLKLIKEAYQKRNSVPLERAVAGDTSGDYESMLLALLGQE

SEQ ID NO: 59290 - protein, 341 aa, Zea mays subsp. mexicana
  Clone ID: UC-ZMFLTEOSINTE120C09_FLI.pep
TTAKNSRHNYIYAETEHTWNGRAKLVQFVPSGRAQEYLQSFMVQITTETSSVQHNVLARRGPVASLRPWCELGGVDPGVVGDGVVEVVEQVLEGPLACDDGLDEEAEHGEHGEAAVLDLLDLELGEGDGVVGEAQRVEVLAAGVEVVALADAVEAVDAEALDEAHEDDLEAEHGEDALRVHQVGVAQVVQPALREDLRAGLEPHGLLEVHAHPLLQHLRGDAAQRTQHRPPPVDHFQRPVPRERLRVRGQPGGVPAVVAGELAGQVRGRLGGEGAQVLDAVRAVPQVVAHGDPAASSGGGDVAEGAGIGGGATLAKKRRLGRDDAGGGGHDRRRHLLLFVW

SEQ ID NO: 59291 - protein, 288 aa, Zea mays subsp. mexicana
  Clone ID: UC-ZMFLTEOSINTE086E11_FLI.pep
GLGVRPPGVVSSGSRLPTSSACSPRRRLGSERRKKMVASIRVPKTQRARRELLKHAPKLVETSKKTLILHGTKTSAVLNSVLSDIYHLKRDNAVKYTKKNDNIRPFESGGESSLEFFSLKADCSLIVYGSHSKKRPNNLILGRTYDHHIYDLVEVGVENYKSMESYVYDKKLAPLLGSKPFFAFIGEHFESAEELKHLKEVLLDLFRGEVVENLNLAGVDRIYVCTTAISPTTVYMMHCALRLKRSGTSIPRMELVEVGPSMDLVVRRHRLPAESLKKEAMKTSRLES

SEQ ID NO: 59292 - protein, 434 aa, Zea mays subsp. mexicana
  Clone ID: UC-ZMFLTEOSINTE094A04_FLI.pep
QAHEKKKITMSSWVTKSLPFLVAPAVASPTAALQLTSMDRALVSLPVSAMFVYENPIDRPAETIRRALSRALVPYYPMAGRLAVTGDQLKLACTGEGVAFVGASASCTLQDARLCDRRPVVSVEDLSISYAGQYSEDPPLLLVQVTEFSCGGFVVGVTWNHVLTDGAGMAQFLQAVGEFARGSPSPSVLPMRVDDTLSELPPPITTMTKALVSSKPRDMPSSYITVPLSFVDRIKGEFRRRSYGSGSGQVSTCTAFDVFTAAIWKCRARATIGSAASPDAPTALAFTVNVRKPAKAKDGYYGNVFAFGLAASTLREVADGDILDLVTLVRDAKARVPFTFADGAAHIADEMGGRLKGLDGYDTLYVTSWWNLGLDDVDFGSGGAERVIGCMERKVVPGCFLCGKKDKAEGVAAMALCVKQEHAEAFHAELRSLK

SEQ ID NO: 59293 - protein, 551 aa, Zea mays subsp. mexicana; identical to SEQ ID NO: 58625
  Clone ID: UC-ZMFLTEOSINTE126E04_FLI.pep

SEQ ID NO: 59294 - protein, 506 aa, Zea mays subsp. mexicana
  Clone ID: UC-ZMFLTEOSINTE087C04_FLI.pep
NTQECSCAAAVAQPAMAIKDEPKPLHILFFPFLAPGHLIPIADMAALFAARGVRCTILTTPVNAQLIRSAVDRANDASRGTEGALAIEIAVVPFPDVGLPPGVECAPALNTMDDREKFFHGAQLLREPFDRFLAENRPDAAVTDSFFDWSADAAAEHGVPRIAFLGSSLFSRACSESTLRNNPVEAAPDDPDALVLLPGLPRRVELRRSQMMEPKKRPERWAFFQRMNAADQRSYGEVFNSFHELEPDFMEHYTTTLGRRAWLVGPVALASKDVATRGANNGLSPDAGACQQWLDAKPEGSVVYVSFGTLTHFSPPEMRELARGLDLSGKNFVWVVGGADTEESEWMPDGFAELVARGDRGFIIRGWAPQMLILTHPAVGGFVTHCGWNSTLEAVSAGVPMVTWPRYADQFYNEKLVVELLKVGVAVGSTDYASMLETRRFVIGGEVIAKAIGRVMGDGEDAEAIREMAKELGEKARRAVANGGSSYDDVGRLVDELMARRSSVKV

SEQ ID NO: 59295 - protein, 201 aa, Zea mays subsp. mexicana
  Clone ID: UC-ZMFLTEOSINTE94A01_FLI.pep
QAHLYMTLVFSIVNMYTHEQPWPGLYRWHKQQRTARTYVLLRRHFFLGLDRRRACALRPVPPEPPRKTAQKAQQDTLGEGGSMSGATSLVRNTCWLLRRADSACFCLLSLPFVLRLSPPPPARRSMPTLLECRSSGCWASSAAPAFASASASVRKRSSQTRPDEPDRLNVVADLCNPAMGDGWVPPIHLPLSARRTSFVCA

SEQ ID NO: 59296 - protein, 633 aa, Zea mays subsp. mexicana
  Clone ID: UC-ZMFLTEOSINTE64E12_FLI.pep
TWGLFRGPILASADGMSAPLDRLARPCFEGFVHNDERKESRSDADNSEGDKKTKIGSFKKKAINAGNKFRHSLRRRSKKKTERGDSIKDIRDIKELQDVETFRQCLIDEDLLPPQHDDYHMMLRFLKARKFDVEKAKNMWSDMLKWRKEFGVDKIEEFEYAELDEVKKYYPQFYHGVDKEGRPVYIELIGKVDANKLVQVTTLDRYVKYHVKEFERCFQIRFPACSIAAKKHIDSSTTIFDVQGVGFKNFSKSARELITRLQKIDNDNYPETLCQMYIINAGQGFKMLWSTIKSFLDPKTASKIHVLGNKYQHKLLEIIDECELPEFLGGKCKCIEGCERSDKGPWKDPNIIKRVLNGEANYGRQIVTISSTDGRIVSYAWPVHPNRKGSDASAESGSEVEDVTSPTASRNLITHPILTPVHEESKLSAHGSSSVVHASIGENIPVVDKIVDDGWGSPRSSPQAASSGSLSLRNLHGTFQGLRAQTITWLTFLMMTLFAMLCSVPSKMARRISNQSGKHDDYHVKYPQEQECKEEFRPPSPAPSYTEKDVISSMLRRLGELEDKVQVLETKPSEMPFEKEELLNAAVRRVDALEAELISTKKALYDALMRQDELLAYIDRQELIKFRKKKFCF

SEQ ID NO: 59297 - protein, 167 aa, Zea mays subsp. mexicana
  Clone ID: UC-ZMFLTEOSINTE087D05_FLI.pep
IFSGKSCRLRWFNQLDPRINRSPFSEEEEELLLASHRVHGNRWAVIARLFPGRTDNAVKNHWHVIMARRCRERMRLSNRRAGGAASGAGAGAVVATGAAAEDGSNPRSANKKPRPDASGMASLLDKYRREFSAAVPFAINHDSNQQQGYCSNTNEGEYCYYYVLHVC

SEQ ID NO: 59298 - protein, 82 aa, Zea mays
  Clone ID: JC-ZMSHLIB3569P050F04_FLI.pep
LKKKSEYVAAKFKDTRLYSSTLVLVGHVHVKEEHDSAVGSSHLHASVRQPPPITAEVSQMEGFGMLLTKKAGIQWTQREDVS

SEQ ID NO: 59299 - protein, 112 aa, Zea mays subsp. mexicana; identical to SEQ ID NO: 42526
  Clone ID: UC-ZMFLTEOSINTE096H07_FLI.pep

SEQ ID NO: 59300 - protein, 616 aa, Zea mays subsp. mexicana
  Clone ID: UC-ZMFLTEOSINTE066C03_FLI.pep
FSQNGSNPPSMTSMSEDGVDDEGSCTESWTNALVSEPCQFKREKAAKSSTTESSNRLELMDDFLEMERLACLSSEVNGNGSTVDKMKVDNVGATFAGFTERDGVKDLQSASPMSETPSNKQCLSEKSPLLNFQSRISSLLDSESPENNAGKVLDSIRNILKDIEDEADSVNVNGTHPSDGTLSSESKFAMDQDLKNAILKILDFVKLLDQEISKFQGQSPDYDGLCEKTQQFSALVDKVLSNVDVLNDIVIALSVILSETSQIKFTLLRDNSNEAESNNLDCVDKVTLLENKVQLEPVKDNVPGICPLLPHSSSDPEFEGPADARFDVKTAVKVYSPEEYEQLKSEKANLEGELAKCNKIIEETMARLSDMEKKLEDLTSKLADSEKSNSLNETQLKCMAESYKSLESRKIELENEIEALRSRIDALTAELSDERQSHQEDLVKYRDLEEKMERYEMERSSILVDEDPDTKSKQEREIAAAAEKLAECQETILILGRQLQAMRPPAESLGSSPNRQRMEEFLKDAAGTTAGEYSQKPSGQPDTDQDMLGTGNVSPISGYKTHMIPSDADVSPFPSPNTSKRPKHRSRSSSSSSFTNHQLPDKQNRGFSRFFAKSKE

SEQ ID NO: 59301 - protein, 492 aa, Zea mays subsp. mexicana
  Clone ID: UC-ZMFLTEOSINTE080C04_FLI.pep
PPIKKKKKTERERATGGSAAMGHGVSCARTGDEHDYFRAAQVGDLEALEALLDADPSLARRATLYDRLSALHIAAANGRLEVLSMVLDHGVPPDVVNRHKQTPLMLAAMHGKTDCVLKLLQAGANILMFDSQHGRTCLHHASYFGHVGCLQAILTAARTTPVANSWGFARFVNVRDDHGATPLHLAARQGRPGCVQALLENGAIVSALTGSYGFPGSTSLHLAARSGSLDCTRKLLAWGADRLRRDSAGRIPYAVALKRNHEACAALLNPSAAEPMVWPSPFKFISELEPEAKALLEAALTEANREREEKILRGTKHSPHPPTWDHASDAADADAIDDASSDASASDAELCCICFDQACTMEVQDCGHQMCAPCTLALCCHSKPDPVTLALPSPACPFCRGSISRLLLVARASSDDADTEKSAAAAAAAAASSPQLVRRRSRRSHNLSDGGSSSFKGLSSAVAGSFSKIGRGSSRTMADSDGCGVDKPEHDP

SEQ ID NO: 59302 - protein, 449 aa, Zea mays subsp. mexicana
  Clone ID: UC-ZMFLTEOSINTE087F11_FLI.pep
IESPEDETELSQWKQLLGRDIEILKAKANFLKIQSFLTRHGMECTDLESVVCVKDRNLTSECVDKIVGYALSYQLKDHPIQTPGKDARVVLSGVSLKYGIDLLESIQSGPKKKSTKKSLKDVVTENEFEKRLLPDVIPPDEIGVTFEDIGALENVKETLQELVMLPLQRPELFSKGQLMKPCKGILLFGPPGTGKTMLAKAVATEAGANFINISMSSIASKWFGEGEKYVKAVFSLASKISPSVIFVDEVDGMLGRRENPGEHEAMRKMKNEFMVNWDGLRTKDKERVLVLAATNRPFDLDEAVVRRLPRRLMVNLPDAPNRKKILSVILAKEDLADDVDLEALANLTDGYSGSDLKNLCITAAHRPIREILEREKKERTLAEAENRPAPPQCCSGDVRSLKFSDFKHAHEQVCASISSDSKNMNELVQWNDLYGEGGSRHKTPLSYFM

SEQ ID NO: 59303 - protein, 432 aa, Zea mays
  Clone ID: JC-ZMSHLIB3569P058B09_FLI.pep
TLESHLPAHERDGFHHHHLPRHLAGRGSVRGAGTVLLTARHPRAAEREAGAGQPGVAVDVDAGVAQLLRVGPPPMQRRRAREQRLHRRRGRRARPDPVGGGRADGAHVADAVPAAGADGRHPGLPHGAVEPPVPHRLPHQRVRRHPGVAGAAARPRLRRPLQQPADGRHPGGVRRPAQPPVAGPPAQPADGAHPGGAGAGAVPVAGPVLQPAHGPHPARRRARRDQHRRPLPQQAHRRPLPPVRRRPAHRQGGPVVELPRLRPQQAGVPAGAHVPGPVPQPHPRHRAAVAGAPVHAAEAGPQLQPPVRPAPQGPRRHQARVQAVRAQPVQQRDPARGMPGPGVSEPVAMVFYTLLCSPSPAFFSCPNLEGRRYGAWFSYRQKKVRPRGGGANMLSHAHARLIFEQLSVYEMTAVYVYCLVECAVYLVSIRSA

SEQ ID NO: 59304 - protein, 309 aa, Zea mays subsp. mexicana
  Clone ID: UC-ZMFLTEOSINTE41G09_FLI.pep
MMKLQVNVFEYFDSRQLIVCGNHFRRIREVELKRDYAFIEFSDPRDADDAQYNLDGREVDGSRIIVEFAKGVPRGSGGSRDYNGRGPPPGTGRCFNCGVDGHWARDCQAGDWKNKCYRCGERGHIERNCQNSPRNLRRERSYSRSPSPRRGRGRSRSYSRSRSYSRSRSPSGSPRGERRDRDERRSRSLSYSRSASPRRSVSPAKEKERSRTPDGSRSPSPRDKVSPPPKDNGAHNGSDREDSPGGREMSKRSRSPSDGYRSPVGNGRSPSPRDDRSPSPKVNNGDDPSPKGNNGDDEHRGSPRGSQSP

SEQ ID NO: 59305 - protein, 555 aa, Zea mays subsp. mexicana
  Clone ID: UC-ZMFLTEOSINTE080C06_FLI.pep
SPFARNAHTARSPISDSLVDPKMQIFVKTLTGKTITLEVESSDTIDNVKAKIQDKEGIPPDQQRLIFAGKQLEDGRTLADYNIQKESTLHLVLRLRGGMQIFVKTLTGKTITLEVESSDTIDNVKAKIQDKEGIPPDQQRLIFAGKQLEDGRTLADYNIQKESTLHLVLRLRGGMQIFVKTLTGKTITLEVESSDTIDNVKAKIQDKEGIPPDQQRLIFAGKQLEDGRTLADYNIQKESTLHLVLRLRGGMQIFVKTLTGKTITLEVESSDTIDNVKAKIQDKEGIPPDQQRLIFAGKQLEDGRTLADYNIQKESTLHLVLRLRGGMQIFVKTLTGKTITLEVESSDTIDNVKAKIQDKEGIPPDQQRLIFAGKQLEDGRTLADYNIQKESTLHLVLRLRGGMQIFVKTLTGKTITLEVESSDTIDNVKAKIQDKEGIPPDQQRLIFAGKQLEDGRTLADYNIQKESTLHLVLRLRGGMQIFVKTLTGKTITLEVESSDTIDNVKAKIQDKEGIPPDQQRLIFAGKQLEDGRTLADYNIQKESTLHLVLRLRGGQ

SEQ ID NO: 59306 - protein, 229 aa, Zea mays subsp. mexicana
  Clone ID: UC-ZMFLTEOSINTE080G07_FLI.pep
QVAINHGNKKNPLTPTAIATWVHNTRTEELANYQKDSDKFASSFELLKVQEFSLVTALEIVDHIIRNRSDCLECSTLNHEARFGSHRLPLGADHLTAGLGIRLELVILGFPQAELLCATGGLHMLHADMDPLPDDATVNLLVDLDADGALGDVPDAPGAAVVELVRHALVHGAVNLDVDVVADLVGAQVRGERDVPLLAEGPREQVAGPRPQPVPRRHLPAPSSLLRLG

SEQ ID NO: 59307 - protein, 236 aa, Zea mays subsp. mexicana
  Clone ID: UC-ZMFLTEOSINTE111C06_FLI.pep
YNRTVTRSSVKQVAWPGGGSLFRSSFSPLAAADGGWLPPSLCCVLVLARPAASAVQRTDHHPVVHGGAPRRAGGVGAVGHPAFPAQLLPALSPGRRRCAEGRVGSAACGRRRRRRGAGLAARRRDDGQRRGPQHGDAPRHGGRRGALRGRRRRGRRGGEGRVLAELAEAGVRARPGHRVVPQLVQKPHARSATCVAVERPACCAFCLETDGRALFCLVVIWPSGVRCVARSLRLCS

SEQ ID NO: 59308 - protein, 603 aa, Zea mays subsp. mexicana
  Clone ID: UC-ZMFLTEOSINTE056G12_FLI.pep
ALLGSCIPHTLESSKDPAAQQPPFSPLRSQSYRRLPRSRRCLHSTMALHAPVHVMKDSLKRESGAKVHQANIQAAKAVADIIRTTLGPRSMLKMLLDAGGGIVVTNDGNSILREIDIAHPAAKSMIELSRTQDEEVGDGTTSVIVLAGEMLHVAQAFIDKNYHPTVICRAYTKALDDAIAVLDKIAMPVDVNDRGAMLGLVKSSIGTKFTGQFGDLIADLAIDATTTAGVDLGQGMREVDIKKYIKVEKVPGGQLEDSRVLKGVMINKDVVAPGKMRRKIVNPRIILLDCPVEYKKGENQTNAELMKEEDWQVLLEMEEEYIKNLCAQILKFKPDLVITEKGLSDLAIHYLSKAGVTAIRRLRKTDNNRIAKACGAVIVNRPEELQESDVGTGAGLFEVKKIGDEFFAFIVDCKDPKACTVLLRGASKDVLNEVERNLQDAMSVARNILKNPKLLPGGGATELTVSATLKQKSSSVEGVEKWPYEAAALAFEAIPRTLAQNCGLNVIRIMTQLQGKHANGENAWVGIDGRSGDIVDMKERKIWDSYSVKAQTFKTAIEAACMLLRIDDIVSGIKKKQAPGASAPKQPQIETEGDADNEQMIPE

SEQ ID NO: 59309 - protein, 554 aa, Zea mays subsp. mexicana
  Clone ID: UC-ZMFLTEOSINTE085A05_FLI.pep
RHFALIEESERLVDELQLQLQAAVYREDYRTAHKLRLAIAATSKNDAVGRAISDLNMAIDEERYKDAAYIRDHAGAGLLGWWSGISGNLSDPYGLIIRISAEHGRYVARSYDTRQLASDSPGLPIFEIYFAEANGGYNLQAVHLKPDGSDSDQVPNMLREKLGIDSINISSSPLGSKHEEFDGSVNMDDKDSDDSNIAAGPGSKNLSSDLTAVPRIKILKVVPMQNVDHDYIINIFDQISEEDDDNDNHEVENESSEDVDNDDNSGVAETVSAEENGDESGDESDIETLVSFDFVSENNVYASRPSAEAFERMPARLEKRDRFSFSFYTEEYSKKLDAGKARQTSKETVGLHADQQDYDGFVQLDRVKLSGSNKKLSILQLGIKQNNKVQQKLHGVTHFSRIQMPISSDPLTGLYVTTSGFDSEILSLQRKFGQWRDDGSSEEHSDLLFYEHVEAVKVTGDNLMPAGQVVFRAKVGERYQLPHKGIIPRELGVIARYKGQRKIADPGFQNPRWVDGELLIIDGKFIRDGPVIAFFYWTSNFHRFEFFRRLRLPE

SEQ ID NO: 59310 - protein, 318 aa, Zea mays subsp. mexicana
  Clone ID: UC-ZMFLTEOSINTE90E01_FLI.pep
HRLPLLTCEQGSSIVQFGNMSSKKIELDHKDMVHDSAIDYYGKRLATASSDSTVKIINIGAANAPSQVLATLSGHYGPVWRVAWAHPKYGAILASCSYDGRAIIWKEDARGNWSQVHVFSDNKSSVNSIAWAPYEVGLCLACASSGGRISILTMRADGGWDTATIERAHPVGATAISWAPATASIAGTGEFVYKLVSGGFDSVVKVWGFNSGSWKLESALISDMHTDCVRDVAWAPVLGLAKSTIASASQDGKVVIWTRGKDGDKWERKLMRDFGSPVWRVSWSLTGNILSIAAGGNNITLWKEGSDGQWEEVMKVET

SEQ ID NO: 59311 - protein, 488 aa, Zea mays subsp. mexicana; identical to SEQ ID NO: 46968
  Clone ID: UC-ZMFLTEOSINTE098H03_FLI.pep

SEQ ID NO: 59312 - protein, 432 aa, Zea mays subsp. mexicana
  Clone ID: UC-ZMFLTEOSINTE085C07_FLI.pep
HRSPNRISPTTGIPPYRLQIRDTSHLDGLFLASLRRSIRSAPTRPSSPRRRATALLVNLGCCSSRAGGEKMGVYLSTPKTDKLSADGENSRVRFGLSSMQGWRTTMEDAHAALPDLDECTSFFGVYDGHGKAVSKFCARHLHKQVLINDANSSGDLPTSLHKAFLRMDEMMKGQRGWRELTELGDKGNKISGMIDDIIWPPKGGDSDKIREDWDTEEGPNSNFPGPTSGSTACVAVIRNDKLIVANAGDSRCVISRKGQAYNLSTDHKPDLEEERERILGAGGFVVAGRVNASLNLSRAIGDMELKQNDLLPVERQIVTAEPELKTVQLSEDDEFIVLACDGIWDCMSSQEVVDFVHKQLKTEDKISSVCEKLLNRCVAPTSGGEGCDNMTVIVVQFKKPALAVATSSAEQSATTAEGMRPNEVDGPDYPPK

SEQ ID NO: 59313 - protein, 351 aa, Zea mays subsp. mexicana
  Clone ID: UC-ZMFLTEOSINTE91E08_FLI.pep
QLARHKRDNLNFKLAEMERQQHDLLAQFCQLLRNMVGKSCIVWVVKQVFTATTQVFNSIPPWISDISSGMYRVEAGCLFLGAVSSCLQSGFSPWIQITETMLEATLTWKHGALDHGVCENHPVLHITATGQWVRPGSEVSKIKRWNCHKLYLALFAQEIREIELSENSVMEHLSLFDHKVQSSLQLYEGKQSLALYLQASLVITLALSCYTSAGHKIVSVKELQVPWDPGGTSCTYKVTKRQLEDKLNFQGAVMSCPASVIVHFIGPIRRQPIGPRTNQTREQGQRRAGGWGQKIRNQRHSHRLPHGGMVQVILDLLTSRSSPPAATGRDMLFGTKVPQQLSKYSCPVPMS

SEQ ID NO: 59314 - protein, 386 aa, Zea mays
  Clone ID: LIB148-042-G3_FLI.pep
RLRGGMQIFVKTLTGKTITLEVESSDTIDNVKAKIQDKEGIPPDQQRLIFAGKQLEDGRTLADYNIQKESTLHLVLRLRGGMQIFVKTLTGKTITLEVESSDTIDNVKAKIQDKEGIPPDQQRLIFAGKQLEDGRTLADYNIQKESTLHLVLRLRGGMQIFVKTLTGKTITLEVESSDTIDNVKAKIQDKEGIPPDQQRLIFAGKQLEDGRTLADYNIQKESTLHLVLRLRGGMQIFVKTLTGKTITLEVESSDTIDNVKAKIQDKEGIPPDQQRLIFAGKQLEDGRTLADYNIQKESTLHLVLRLRGGMQIFVKTLTGKTITLEVESSDTIDNVKAKIQDKEGIPPDQQRLIFAGKQLEDGRTLADYNIQKESTLHLVLRLRGGQ

SEQ ID NO: 59315 - protein, 129 aa, Zea mays
  Clone ID: LIB148-044-A7_FLI.pep
WINCSNKQHRMQLRCADIYIFLPCIGVYRRRLLIRVRGHLVHGLHVVAALGEPEPAHAVLRVAPPLVVVVQHPGRPLLLGHPHLRVGGDVAHQLHHADPHRHPCRREQRVHLRPNPARRHVFFPRFCKS

SEQ ID NO: 59316 - protein, 262 aa, Zea mays
  Clone ID: LIB189-006-G11_FLI.pep
LSQDTGALLATKVLVPTGRASMASSRCFENPPVLEPASGGGEVVDDFGGQKAYVSGSAGSKAAVVLISDAFGFEAPNLRKIADKVASLGYFVVVPDFLHGDPYDPSNNAHSNPGTWIQSHNPQTAFEEAKPVIAAIKEKGVSSIGAAGYCWGAKVVVELAKVHEIQAAVLAHPSLLTVDDMKDVKCPISILGAEIDRSAPPELLKQFEQVLSANPEVDHFVKVFPGVAHGWAVRYSDDDAAAVTSAEEALRDMSHWFNKYLN

SEQ ID NO: 59317 - protein, 268 aa, Zea mays
  Clone ID: LIB189-009-F4_FLI.pep
SMAAQALLSGRQLLGRPVQSAVSRSSARKAPFVVRASSSPPAKQGSDRQLWFASKQSLSYLDGTLPGDYGFDPLGLSDPEGTGGFIEPKWLAYGEVINGRYAMLGAVGAIAPEIFGKMGIIPPETALPWFKTGVIPPAGTYNYWADSYTLFVFNMALMGFAEHRRLQDWYNPGSMGKQYFLGLEKFLAGSGDPSYPGGPLFNPLGFGKTEKEMNELKLKEIKNGRLAMLAILGYFIQGLVTGVGPFQNLLDHLADPVNNNVLTSLKFH

SEQ ID NO: 59318 - protein, 379 aa, Zea mays
  Clone ID: LIB189-016-E1_FLI.pep
ASSRPVGTKPLERARPRGARRAQPASPTGPAGPYIGRRHFLLATTRRQSTTASRAAPSLYVPPFPVLAAMARHFVLNTGAKIPSVGLGTWQSDPGVVGNAVYAAVKAGYRHIDCARVYGNEKEIGLALKKLFEEGVVKREDLFITSKLWNDHHAPEDVPEALNDSLNDLQLEYLDLYLIHWPFRVKKGTNTSPENFVTPDFPATWGAMEKLYDAGKARAIGVSNFSSKKLGDLLAVARVPPAVDQVECHPGWQQTKLHSFCQSTGVHLTAYSPLGSPGTTWMNGNVLKEPIIISIAEKLGKTSAQVALRWNIQMGHSVLPKSTNEERIKQNLDVYDWSIPDDLLAKFSEIKQARLLRGNFIVNPESVYKTHEELWDGEL

SEQ ID NO: 59319 - protein, 127 aa, Zea mays
  Clone ID: LIB189-027-D3_FLI.pep
PKLSKMFFIKLQNNFSLHGKRHVNELCSCFLQVRDEISTLLRLLQPREDHLGSRNVLFRVKQVLIQSVFFPDYSLVFVSRRVGVACSGTRLSPKKTVQVWTLLVAGALVDRVALRALGLKDLLAGFR

SEQ ID NO: 59320 - protein, 141 aa, Zea mays; identical to SEQ ID NO: 48129
  Clone ID: LIB3059-002-A5_FLI.pep

SEQ ID NO: 59321 - protein, 68 aa, Zea mays
  Clone ID: LIB3059-009-G12_FLI.pep
FSRLKHGQNQNARNCMSSFHDMHSKCQAISLALANSIALFRPADNRIFALEDISFLRTSGLPSRSGTQ

SEQ ID NO: 59322 - protein, 74 aa, Zea mays
  Clone ID: LIB3059-015-C5_FLI.pep
TISGLLSSARHLHPWLENCIGAIDGTHVPITIAEDKAPPYRNRKGSLSQNVMLACEVNVAMKRWAYSVLSGSNT

SEQ ID NO: 59323 - protein, 277 aa, Zea mays
  Clone ID: LIB3059-029-B4_FLI.pep
FCLLWGEGERERARERSSREASRWSSNEDVGGVQRAGGGGAGGAGGGGQPDAVAQDEGVAAGGALPGRVRAGRVRAARRPRPPRLLPHQPGAPPPQVVRGQGRGVLPVRRGAGQPGSSEPAARAVKQGRQRGAPRHRGLQDAARPRALPGQLHARPAHRLLRLRPLRQVHQLPASRIRPRGQGAALLGDHRRRLRRLLRRHRHAQRLMRQVARAVPARLLLLQRPRRAQVLREPQAQGHRCPRRRRRDLRCHFQGGGRVYCPDGAALIYHHQAEAMR

SEQ ID NO: 59324 - protein, 185 aa, Zea mays
  Clone ID: LIB3059-042-E12_FLI.pep
IAELLRDQCKVMANSKDTRLQPPSPPTTLSASAVSGNRGNILNASNFHPRTSKSPESRLSTRSRGLGLVASSGTKLNVQRCDTELLATLCNILGSKHSSIRRRLITISLNLHATSDPNQSFPPRQISDMNEGVIEGCKDVSNTKDKLSFTDSGSKGNVLLLGLPGLPPRHGCVDRRVTGAELAWG

SEQ ID NO: 59325 - protein, 46 aa, Zea mays
  Clone ID: LIB3059-045-H11_FLI.pep
GLPKTHLTLSYKLRQYSCNMLYSTGTALTKNDTFPIFQGSFYQQVK

SEQ ID NO: 59326 - protein, 288 aa, Zea mays
  Clone ID: LIB3059-060-C8_FLI.pep
RIPRQAGRRGGQEDRRPSRAGARDGNGTGPQNLRSFLPARPCPSTRRSCRPRPTSALSSSRGIGYATGCAMVLWVFGYGSLIWNPGFDFDDKILGFIKGYKRTFNLACIDHRGTPEHPARTCTLETDDEAICWGIAYCVKGGPEKELKAIQYLERRECEYDQKISIDFYKEGDPLKPAVTGVLVFVSTPDPIGNKYYLGPAPLQDMARQIATANGPTGYNRDYLFSMEKALASISHEDDSIIELANEVRKVLNRTKETKITGANASMKSHAPLVHLSALPEGTVVDSR

SEQ ID NO: 59327 - protein, 47 aa, Zea mays
  Clone ID: LIB3059-061-F3_FLI.pep
SSSSIDLLWIWPMSLEQTIASCSAPHVTIAVSAQLYDSVYIITIGCH

SEQ ID NO: 59328 - protein, 652 aa, Zea mays; identical to SEQ ID NO: 38995
  Clone ID: LIB3060-040-B9_FLI.pep

SEQ ID NO: 59329 - protein, 497 aa, Zea mays
  Clone ID: LIB3060-066-G10_FLI.pep
EVAKAVITMGSLPPVDGQRRPPHVVMIPYPAQGHITPMLQFAKLLHTRGFHVTFVNNEFNHRRHLRARGPNALDGTDGFRFTAIDDGLPLFEADATQDIPALCHSTLTTCLPRFKDLIARINAEAEAEGQPTVTCVVGDSTMTFALRAARELGLRCATLWTASACGFIGYFHYRHLVERGMVPLKNEEQLTDGYLDTIVDWIPGAPKDLRLRDFPSFVRTTDPNDVMLNFFIHETEGMSQASAVVINTFDELDATLLAAMAKLLPPIYTVGPLQLTVRNNVQANSPVAAIGSNLWKEQEAPLRWLNGRAPRSVVYVNFGSITVMSNEQLVEFAWGLANTGYYFLWNVRPDLVKSGDSAGLPPEFSAATEGRSMLSTWCPQAAVLEHDAVGVFLTHSGWNSTLESICGGVPMLCWPFFAEQQTNCRYKCTEWGIGKEIGDDVQRGEVESLIREAMEGEKGQEMLRRVTELRDSAVAAAGPDGRSMRNVDRLIEEVLLA

SEQ ID NO: 59330 - protein, 318 aa, Zea mays
  Clone ID: LIB3060-066-G12_FLI.pep
EASGTETRLLPRLPPMAPPLAAVSSSSPLFSPSSSRPIRRCHAPPPSISFQTRGRSPTAAAAAESSVSTLLEVRGLTASVKETGQQILAGVDLTIREGEIHAIMGKNGSGKSTLTKVLVGHPHYEVTGGTILFKGEDLVDMEPEDRSLAGLFMSFQAPIEIPGVSNFDFLLMAVNARRERSGLPALGPLEFYSVVSPKVDALKMDPKFLDRNVNEGFSGGERKRNEILQLSVIGADLALLDEIDSGLDVDALEDVANAVNGLLTPQNSVLMITHYQRLLDLIKPSYVHIMENGKIIKTGDSSIATQINEGGFKSIALV

SEQ ID NO: 59331 - protein, 158 aa, Zea mays
  Clone ID: LIB3060-067-G5_FLI.pep
GRHQSAAMGRMHSRGKGISSSALPYKRTPPTWLKTAASDVEEMITKAAKKGQMPSQIGVLLRDQHGIPLVKSVTGSKILRILKAHGLAPEIPEDLYFLIKKAVAIRKHLERNRKDKDSKFRLILVESRIHRLARYYKRTKKLPPTWKYESTTASTLVA

SEQ ID NO: 59332 - protein, 343 aa, Zea mays; identical to SEQ ID NO: 48353
  Clone ID: LIB3060-075-B7_FLI.pep

SEQ ID NO: 59333 - protein, 485 aa, Zea mays
  Clone ID: JC-ZMSHLIB3587P016C03_FLI.pep
NLDPLWPDSSWRYLKVRWDEPSTIPRPDRVSPWKIEPASSPPVNPLVHSSRAKRPRQNVPPPSLESSVLTKEGATKVEIDSAQTQHQNSVLQGQEQMTLRNNLTESADSDSTVQKPMMWSPSLNGKAHTHFQQRPAMDNWMPLGRRENDFKDTRSAFKDARTASQSFGDTQGFFVQAYDDNHHRLSFKNQGSTHRFADPYFYMPQQSSVTVESSTRTQTANNDLCFWGDQNAMYGNPSDQQQGFNFGQNPSSWLNQPFPQVEQPRVVRPHATVAPFDLEKTREGSGFKIFGFQVDTTSPSPVQLSSPLPAIQEHVLQTRPSAPVNELQPVQIECLPEGSVSTAGTATENIQQAPQSSKDIQSKSQGASTRSCTKVHKQGVALGRSVDLSKFTDYGELQAELDKMFDFEGELVSGSQNWQIVYTDDEGDMMLVGDDPWEEFCSIVRKIYIYTKEEVQKMNSKSAAPRKEESPAAGGGGGCAAATNE

SEQ ID NO: 59334 - protein, 239 aa, Zea mays; identical to SEQ ID NO: 41895
  Clone ID: JC-ZMSHLIB3587P035D12_FLI.pep

SEQ ID NO: 59335 - protein, 519 aa, Zea mays
  Clone ID: JC-ZMSHLIB3587P037C01_FLI.pep
TPCSPPRMVVVPFSLRIARNPIRLRLLPVSAARFTRLAMSTTPPAAATISVEYAKSGRSICKGCSGVIASGALRLGASARDPRGFGATKWYHVSCLPSSSYPLGPIGSIKGFDSIKDHDRAELRELEKNHKRDNTAVSPPEEQRPKKARIQMFSPAEGVPDNVTVSVEYAKSGRSTCKGCSENIAKGALRLGASFPDPRGYENTKWYHVVCFPTSSYPLFPMSNLKGFDSIEDHDRDKLHKLVENHKSDGKAADVLNESNLKREMAHSMDDSNEGAEKDLEGIKIHCMGEFEEGAEKNLEEAKLPAGNKMIGPSISFSLSDIKKEYKNATLPAHWKVFDTVIFREKEDGLHASSKIAAFDFDGCLANTSMKRVGADQWSLQHKSIPEKLQRLYDDGYKLVIFTNESNIERWKNKRQQAVDSKVGRLDNFIECVKAPIQVFIACGLGKGKGIPDDPYRKPNPGMWWLMAQHFNSGIKIDMDQSFYVGDAAGRENDHSDADIEFAKAIGLKFHVPEEYFGF

SEQ ID NO: 59336 - protein, 233 aa, Zea mays
  Clone ID: JC-ZMSHLIB3587P024H06_FLI.pep
RGFSPCLLLVVLCLAKEGIMTSVVHSVSGDHRAEDQNQQKKQAEPGDQQEAPVTSSDSQPTVGTPSTDYVAPYAPHDMSHAMGQYAYPNIDPYYGSLYAAAYGGQPLMHPPLVGMHPAGLPLPTDAIEEPVYVNAKQYNAILRRRQSRAKAESERKLIKGRKPYLHESRHQHALKRARGAGGRFLNSKSDDKEENSDSSHKENQNGVAPHRSGQPSTPPSPNGASSANQGRQS

SEQ ID NO: 59337 - protein, 440 aa, Zea mays
  Clone ID: JC-ZMSHLIB3587P048E07_FLI.pep
LDRPGWRLNRGGCLFVFSVRLRFSFDWIDQICRRRQRSPGKGVGIPAGMEVPWLLLVHGSVTALVVVSFLCGQWPIFEGTFIQSINHFLTFGAYHYLLRFVQSVCGTGARDLVLGVEGYCCDRPNPILQVFYVAIIGVTYFIIVQTSFQYIPGYYVSGLHRYLSVVAVSVGAILFVLTSFSDPGTVTAENVSQYVSSYPYDNIIFVEKECSTCKITRPARAKHCRICDKCVARFDHHCGWMNNCIGEKNIRYFVAFLVWHFLICLYGALILGFILAGEIKERKIIYILTVYYGIDNSFSGLFPHVAQWLLAVHNTQILLSVFLAILALLLGGFCAYHAHLCLTNTTTNETFKWQDYIIWMKKENEAKADAATLRSSIGSANSDAQKAPPSKWRTFFMRSRTPSMEPVVRNNIYDRGMITNLCEVVVPLSERKAFSRMKSD

SEQ ID NO: 59338 - protein, 206 aa, Zea mays
  Clone ID: JC-ZMSHLIB3587P050C06_FLI.pep
RAAASKLDLTASNATPRRKPGQAVFTAKDGDRTMSMSMAWACVGFAMDHVDLSLSSLNLAIMEWMSSRKGRSNVASRPMSSSPSAEQSWPVPSSMPVNTFLSGMSFHAILHAAEEIQPCHGFRVASYAASTSCARLCCCCCAESSSSLCNSAAVKSMDLASHRIALAQLSTFLAVPSFTSFSTIPVRVEYVAGSSRYSSCSLSGRW

SEQ ID NO: 59339 - protein, 482 aa, Zea mays; identical to SEQ ID NO: 56456
  Clone ID: UC-ZMFLB73143C03_FLI.pep

SEQ ID NO: 59340 - protein, 427 aa, Zea mays
  Clone ID: UC-ZMFLB73181H09_FLI.pep
RRIPSHYHPSRRPPIRSGSSNPGAVMATKRSVGTLGEADLKGKKVFVRADLNVPLDDAQKITDDTRIRASVPTIKFLLEKGAKVILASHLGRPKGVTPKYSLKPLVPRLSELLGVEVVMANDCIGEEVEKLAAALPEGGVLLLENVRFYKEEEKNEPEFAKKLASVADLYVNDAFGTAHRAHASTEGVTKYLKPAVAGFLMQKELDYLVGAVANPKKPFAAIVGGSKVSTKIGVIESLLAKVDILILGGGMIYTFYKAQGYSVGKSLVEEDKLELATSLIEKAKAKGVSLLLPTDIVVADKFAADAESKIVPATAIPDDWMGLDVGPDATKTFDEALDTTKTVIWNGPMGVFEFQKFAAGTEAIAKKLAELTTTKGVTTIIGGGDSVAAVEKAGLADKMSHISTGGGASLELLEGKTLPGVLALDDA

SEQ ID NO: 59341 - protein, 96 aa, Zea mays
  Clone ID: UC-ZMFLB73222F10_FLI.pep
FLNVHVLDHFFYHANHYTFKVGVSSCIVGLPMRVASVARFPPRAQQNIKKCACWDLNHGSLGRETSPLTPVTCVDLCYTKKPYMIYRNRSDAHATK

SEQ ID NO: 59342 - protein, 481 aa, Zea mays
  Clone ID: UC-ZMFLB73242F09_FLI.pep
SSYSPTSAAQTFPPSPNSFRRPPLHPYDDTMRECISIHIGQAGIQVGNACWELYCLEHGIQADGQMPGDKTIGGGDDAFNTFFSETGAGKHVPRAVFVDLEPTVIDEVRTGTYRQLFHPEQLISGKEDAANNFARGHYTIGKEIVDLCLDRIRKLADNCTGLQGFLVFNAVGGGTGSGLGSLLLERLSVDYGKKSKLGFTVYPSPQVSTSVVEPYNSVLSTHSLLEHTDVAILLDNEAIYDICRRSLDIERPTYTNLNRLVSQVISSLTASLRFDGALNVDVNEFQTNLVPYPRIHFMLSSYAPVISAEKAYHEQLSVAEITNSAFEPSSMMAKCDPRHGKYMACCLMYRGDVVPKDVNAAVATIKTKRTIQFVDWCPTGFKCGINYQPPSVVPGGDLAKVQRAVCMISNSTSVVEVFSRIDHKFDLMYAKRAFVHWYVGEGMEEGEFSEAREDLAALEKDYEEVGAEFDEGEDGDEGDEY

SEQ ID NO: 59343 - protein, 256 aa, Zea mays; identical to SEQ ID NO: 57488
  Clone ID: UC-ZMFLB73143C09_FLI.pep

SEQ ID NO: 59344 - protein, 929 aa, Zea mays
  Clone ID: UC-ZMFLB73156C01_FLI.pep
ASADMFGSTNPFGQSSTSPFGQTSFGTPQGFGQSSTAANNPFAPKPFGSPTTAFGAQTGSSLFGTTSTGAFGQQQSTPAFGTTSTGAFGQQQSAPTFGTTSSSQFGSSTPAFGASPTPAFGATSSGSLFGQKPSFGGFGSSSSQSSPFGSTFQQTQPTFGSSTFGSSTPPAFGATAPAFGTTTPAFGTTTAPAFGATTSPAFGSTSTSLFGASSTPMFGSSAFGTSATGFGTSGTTAFGVSSTTPGFGSSSTPSFGTSASAFSFGSSPSFGQTAVSSGSTPFGTTPSPFGAPAPAFGSQTAAPTFGQPQFANQAGGTRIKPYSQTPDVDSATSGTQPAAKLDSISAMPEYKEKSHEELRWEDYQRGDKGGPNTSGTPTLAPSFPSPIQHNTFASTSNPFSTNPFSTNNPFAPKPTTTTSSPFNTSFNNASVASSSLFTSSPGTTMFGQPGVSTLPAPASNSPSLFGNINPAPATSSIFATSVTNNPSPFGTGTSLANTQSAPLFSSAFAQPTSSTPAFSSGSLFGSTNPGSLFTSSGPSLFSTPTFQQSAPAQSSNMFSFQPPIQPASTAGLPFFPNTNQALPGQPTSSLSSMVMQPALVSNPFGMLPAMPQMSIGNGGSSPSVQYGISSLPVAEKPLPSRSLSMAVPRHLSQRRIKLLPRKYNPISDGKVPFFADDEESPATPKADAFFIPRENPRNLVIRPIEQWSSRRETGRQYTAKNVTDSNKYEDASIEGERGKSAMSPSSRPPVVENDKQHEARAMAQHANGNATSVERLLPKLPRADYFTEPSIEELAAKERAEPGYCGRVRDFVVGRHDYGSIKFFGETDVRCLDLESIVEFNDREVIVYKDDSKKPPVGEGLNKAAEVTLLNIKCVNKKTGEPCQGARVEKYREMLVKKAEEQGAEFVSFDAVKGEWKFRVKHFSAYGLW

SEQ ID NO: 59345 - protein, 203 aa, Zea mays; identical to SEQ ID NO: 56876
  Clone ID: UC-ZMFLB73208A06_FLI.pep

SEQ ID NO: 59346 - protein, 228 aa, Zea mays
  Clone ID: UC-ZMFLB73233F10_FLI.pep
LARESSRPAQQHGEVAVLREGAHEQGRLDQGGGPAARRLHQGPRRRLLEVAPQGRGPAALRQELPPPVDQLPAPRPQARQLHPGGGRRHHQAPPGPRKQVVADRRPAAGADGQRDQELLEHAHQAQAHRPGHRPTDAPAGECRRSCPRRRRRRRRAKQLSPPWRRLGGGAAQLLARQRLHRGAQQRRRRQHVRVPATPTCCRRHRPQPLAKPTDEPTVIAGRRQGSCS

SEQ ID NO: 59347 - protein, 416 aa, Zea mays
  Clone ID: UC-ZMFLB73222B09_FLI.pep
RNLAPAITSPPAASSSLPYLSPDPNPLNQRILHRGASTASGQASGGASSHEMVCIGSLLRALVLRAASSAGRRRGPRILCGRATDVRVTPRHGHGWRGFRAVTGRMMLDSSESASSAAAAAAEAGAGAVAGQAQPQRRAVGAVPQAHDGGYASGGWEREDGKLSCGYSSFRGKRATMEDFYDVKLTEIDGQAISLFGVFDGHGGSRAAEYLREHLFENLLKHPDFLTDTKLAISETYQKTDTDFLESEASAFRDDGSTASTAILVGDRLYVANVGDSRAVISKAGKAMALSEDHKPNRIDERKRIENAGGIVIWAGTWRVGGVLAMSRAFGNRLLKPYVVAEPEIQEEQFSDELECLVLASDGLWDVVENEEAVSLGKSEDTPESAARKLTEIAYSRGSADNITCIVVQFHHDKTG

SEQ ID NO: 59348 - protein, 353 aa, Zea mays
  Clone ID: UC-ZMFLB73222B12_FLI.pep
LVPLLPAAISDLCRLGSRTIRSPASFLATYSPTRCTLAMDPPSSDIVVDTPYFRIYSDRRIDRLVGTDTVPAGFDPTTGVTSKDVVVDSDAGVYVRLYLPDTATGSDDSKKLPVLVYFHGGGFVTHSAASPPYQSFLNTLAAKAGLLIVSVNYRLAPEHPLPAGYEDSFRALRWAASGSGDPWLSHHGDLARIFLAGDSAGGNFVHNIAVMAAASEVPVRIRGAVLLHAGFGGRERIDGETPESVALMEKLWGVVCLAATDGLNDPRINPLAAAAAPSLRNLPCERVLVCAAELDFLRPRNRAYYEALAASWRSGTVEWFESKGKEHVFFLYNPGCGEAVELMDRLVAFFAGN

SEQ ID NO: 59349 - protein, 560 aa, Oryza sativa nipponbare
  Clone ID: JC-OSLELIB3474019G01_FLI.pep
DHLWSCAAVPYASAFLSPHRATGERPAREEALPPPLLMLMMLGAASQWILAAAAAAAVAALLWLAVSTLEWAWWTPRRLERALRAQGIRGNRYRLFTGDVPENVRLNREARKKPLPLGCHDIIPRVLPMFSKAVEEHGKPSFTWFGPTPRVMISDPESIREVMSNKFGHYGKPKPTRLGKLLASGVVSYEGEKWAKHRRILNPAFHHEKIKRMLPVFSNCCTEMVTRWENSMSIEGMSEVDVWPEFQNLTGDVISKTAFGSSYEEGRRIFQLQAESAERIIQAFRTIFIPGYWFLPTKNNRRLREIEREVSKLLRGIIGKRERAIKNGETSNGDLLGLLVESNMRESNGKAELGMTTDEIIEECKLFYFAGMETTSVLLTWTLIVLSMHPEWQERAREEVLHHFGRTTPDYDSLSRLKIVTMILYEVLRLYPPVVFLTRRTYKEMELGGIKYPAEVTLMLPILFIHHDPDIWGKDAGEFNPGRFADGISNATKYQTSFFPFGWGPRICIGQNFALLEAKMAICTILQRFSFELSPSYIHAPFTVITLHPQHGAQIKLKKI

SEQ ID NO: 59350 - protein, 562 aa, Oryza sativa
  Clone ID: UC-OSFLCYP143F07_FLI.pep
FADHLWSCAAVPYASAFLSPHRATGERPAREEALPPPLLMLMMLGAASQWILAAAAAAAVAALLWLAVSTLEWAWWTPRRLERALRAQGIRGNRYRLFTGDVPENVRLNREARKKPLPLGCHDIIPRVLPMFSKAVEEHGKPSFTWFGPTPRVMISDPESIREVMSNKFGHYGKPKPTRLGKLLASGVVSYEGEKWAKHRRILNPAFHHEKIKRMLPVFSNCCTEMVTRWENSMSIEGMSEVDVWPEFQNLTGDVISKTAFGSSYEEGRRIFQLQAESAERIIQAFRTIFIPGYWFLPTKNNRRLREIEREVSKLLRGIIGKRERAIKNGETSNGDLLGLLVESNMRESNGKAELGMTTDEIIEECKLFYFAGMETTSVLLTWTLIVLSMHPEWQERAREEVLHHFGRTTPDYDSLSRLKIVTMILYEVLRLYPPVVFLTRRTYKEMELGGIKYPAEVTLMLPILFIHHDPDIWGKDAGEFNPGRFADGISNATKYQTSFFPFGWGPRICIGQNFALLEAKMAICTILQRFSFELSPSYIHAPFTVITLHPQHGAQIKLKKI

SEQ ID NO: 59351 - protein, 510 aa, Zea mays
  Clone ID: UC-ZMFLB73305A11_FLI.pep
PAGPAGQHSMDLALLEKALLGLFAAAVVAIAVAKLTGKRYRLPPGPPGAPVVGNWLQVGDDLNHRNLMAMAKRFGDIFLLRMGVRNLVVVSTPELAKEVLHTQGVEFGSRTRNVVFDIFTGKGQDMVFTVYGDHWRKMRRIMTVPFFTNKVVAQNRAGWEEEARLVVEDVRKDPEAAAGGVVLRRRLQLMMYNDMFRIMFDRRFDSEHDPLFNKLKALNAERSRLSQSFEYNYGDFIPVLRPFLRGYLNRCHDLKTRRMKVFEDNFVQERKKVMAQTGEIRCAMDHILEAERKGEINHDNVLYIVENINVAAIETTLWSIEWGIAELVNHPAIQHKLREELASVLGAGVPVTEPDLERLPYLQAIVKETLRLRMAIPLLVPHMNLNDGKLAGFDIPAESKILVNAWFLANDPKRWVRPDEFRPERFLEEEKSVEAHGNDFRFVPFGVGRRSCPGIILALPIIGITLGRLVQNFQLLPPPGLDKIDTTEKPGQFSNQIAKHATIVCKPLEA

SEQ ID NO: 59352 - protein, 379 aa, Zea mays subsp. mexicana
  Clone ID: UC-ZMFLTEOSINTE071E07_FLI.pep
PSCGQPLRGMEMESTPLLTPYKMGDFNLAHRVVLAPLTRCRAFGNVPQPEHMALYYRQRATPGGFLIAEACAVSESARGYPDVPGLWTHQQVVAWKPIVDAVHASGAVFFAQLWHTGRASPSEFQPNGHAPISSTDKQIPAQVNHSGDVNTFAVPRRLETEEIPHVVNDFRVAARNAIKAGFDGVEIHAANGYLFDQFMKDSTNDRDDSYGGSLENRCRFTAEVMAAVADEVGANRLGVRLSPFADYMDCHDSNPEALALHVIDETLNPLGVLYCHMVEPRMRVNPDDGIMTLEHMLLPFRRAFRGTFIANGGYDREEGNDAIARGYADLIAYGRIFLANPDLPMRFAKNAPLNKYDRSTFYTSDPVVGYTDYPFLDQL

SEQ ID NO: 59353 - protein, 189 aa, Zea mays subsp. mexicana
  Clone ID: UC-ZMROTEOSINTE059H01_FLI.pep
VVETQFSFFPCSPLGESKRGGEVYRLYDVGGQRNERRKWIHLFEGVNAVIFCAAISEYDQMLFEDETKNRMMETKELFDWVLKQRCFEKTSFMLFLNKFDIFERKIQKVPLSVCEWFKDYQPTAPGKQEVEHAYEFVKKKFEELYFQSSKPDRVDRVFKIYRTTALDQKLVKKTFKLIDESMRRSREGT

SEQ ID NO: 59354 - protein, 523 aa, Zea mays
  Clone ID: CC-ZMPO148064F10_FLI.pep
KGAGATTRMGGGGGGGNSRELDQTPTWAVASVCGVIVLISILLEKGLHHVGEFFSHRKKKAMVEALEKVKAELMVLGFISLLLVFGQNYIIKVCISNHAANTMLPCKLEAAAVEGKDGHGKEAAAVVAGKKKVAVAVPGKKKKKAAAAADHLGGVVDWPPPYYAHNARMLAEASMATKCPEGKVPLISINALHQLHIFIFFLAVFHVSYSAITMALGRAKIRAWKEWEKEAAGQDYEFSHDPTRFRFTHETSFVRQHMNVLNKFPASFYISNFFRQFFRSVRQADYCALRHSFVNVHLAPGSKFDFQKYIKRSLEDDFKVIVGISPPLWASALIFLFLNVNGWHTMLWISIMPVVIILSVGTKLQGIICRMAIDITERHAVIQGIPMVQVSDSYFWFARPTFVLFLIHFTLFQNGFQIIYFLWILYEYGMDSCFNDSEEFVFARLCLGVVVQVLCSYVTLPLYALVSQMGSTMKQSIFDEQTSKALKNWRAGAKKKAPTGGSKHGGGGSPTAGGSPTKADGDA

SEQ ID NO: 59355 - protein, 305 aa, Oryza sativa
  Clone ID: UC-OSFLM202009G07_FLI.pep
PDYQVLRSAFVQRHYPNRPDFDFHKYMVRALEHDFKEVVGISWYLWLFVIVFLLLNINGWHTYFWLSFLPLILLLIVGTKLELISTRLAQEAADCPDEATGNPWTKPCKEHFWFSKPRIVLHLIHFILFQNSFEMGFFFWVLATYGFDSCIMENKIYALPRLAIGIIVQVLCSYSTLPLYAIVTHMGGDIKLQAFGETVHVSVHSWATDVRKKKAAPPPHSHLRIPFLMKRRHSTRGADDAADDAGGDVDHHHHHHGHHHHGHHHHEGSSAAAAAPDLEEIVATTSGGEDGHPPAPPPPPQGPRP

SEQ ID NO: 59356 - protein, 175 aa, Oryza sativa
  Clone ID: UC-OSFLM202067D06_FLI.pep
TSAVVIGGATVIWILFEVLDYHLLTLLSHVMIGALAILFLWSKATTFIKKSPPDIPVVQIPEDVAVNVSRALRSDINRALHLFREIALGHDLKKFLGVIVALWVLSEVGSCCDFLTLIYVAVLMLHTVPILYDKYQDKVDHFAGRAHSEACKHYEVLDAKVLSKIPRGPVKPKKN

SEQ ID NO: 59357 - protein, 506 aa, Zea mays
  Clone ID: UC-ZMFLB73015C09_FLI.pep
YIRPGCLVLSMYLLMPGIAWDELEENLLQRVNSLVQSSDLDFWRKGRFLVRTNSQLVSYKAGMTRLSKSWRTWNTPELTLVSPIAVVGGQKTSLILKGRNLSIPGTQIHCTSIGKYISKEVLCSAYPGTIYDDSGVETFDLPGQPDLILGRCFVEVENRFRGNSFPVIVASSSVCQELRNLEVEFEDSQVLDVSSDGQIHDSRQPKTSVQVLHFLNELGWLFQRASACTSSTRSDVSDLDLIRFSTARFRYLLLFCSERDWCSLTKTLLDILAKRSLASEELSKETMEMLAEIHLLNRAVKRKSRNMVHLLVKFVVICPDNSKVYPFLPNLPGPGGLTPLHLAASIENAEDIVDALTDDPQQTGVTCWQTVLDDDGQSPETYAKLRNHNSYNELVAQKLVDMKNNQVTVRVNGDGIRADRLGNDVGDRKRSGVQALQIRSCSQCAILESGVLMQPVRSRGFLARPYIHSMLAIAAVCVCVCVFMRALLRINSGKSFKWERLDYGTI

SEQ ID NO: 59358 - protein, 217 aa, Zea mays
  Clone ID: UC-ZMFLB73220H06_FLI.pep
LAPAPPLRFPHSLLQLRVRRRREGKMYTARKKIQKEKGLEPSEFEDSVAQAFFDLENGNQELKSDLKDLYINNAIQMDVTGSRKAVVIHVPYRLRKAFRKIHVRLVRELEKKFSGKDVVIVATRRIVRPPKKGSAVLRPRTRTLTAVHDGILEDVVYPAEIVGKRVRYRLDGSKIIKIFLDPKERNNTEYKLETCTAVYRRLCGKDVVFEYPMTENA

SEQ ID NO: 59359 - protein, 750 aa, Zea mays
  Clone ID: UC-ZMFLB73297E11_FLI.pep
VGGLGFSNISQQAVVGTGQVRSKPKAQDGIGGPYYASGVGSSEEQFDRRSNFYASKDARPSGSVRLESALLPTPSINADRVGKPSSNKSWKHSEEEEYVWDDVHSKAAEYGGSHNVIKGEWMSDDGNAKFANLQRAKWADAGPVERIDPNTHKLDNVSRFGLGAGQERRISEYMDQEEYLLGKREVEARIDKEIRSDGQQFPAARGSPLWVSQEKTLLDIGLEPRISRFSTQPAERSTIYTGTMSAGITSSVPVGLSGNYAGRSSLDTANGMPIRSTEAFGQQKHRYWSSSPPQADTSSSTAPFARQGSPNPAESDFYPSRSLSRQNPQEYSKRALPVLAKDSHVVVHNDGFTQGQPSLQATRQTQKYPILQSKSHIKPSDQLQASFSRENSPSLFRPSIELGEVSLPSDSTPISSDLTSASNLLASLVKSGFKPNNHSDAQALGPSGPLPVASLSLQNAAGENTTLQAHTPNTSRPPLPPPPSTQSAEKAAPLSSLLSSLVAKGLISSPAYDSSSAVISQPNKASSMNVKDATASAVPLLALRPSVGKASSNSDSSAPTNASLTKAIEIKMSDLIGLEFKPEKLRKYHEHVISSLFDDDQSHQCKTCGNRFRLEELSLHTSSCGQRKSETIYTGIAPKRWYPSKNIYIDGSHEIEDSTEASDGDLGSAEEVCEFMVPSDERQIICALCGEPFDDIYSFEKGDWMYKDAVFLDYPKGESSCRNSVEGEEHVPIVHVRCMPRGSNDGMEVD

SEQ ID NO: 59360 - protein, 347 aa, Oryza sativa nipponbare; identical to SEQ ID NO: 58153
  Clone ID: JC-OSROLIB3475015G11_FLI.pep

SEQ ID NO: 59361 - protein, 444 aa, Oryza sativa
  Clone ID: UC-OSFLM2020118D05_FLI.pep
SFPCCSTSAGGLRLRSRPSRFPQKAATTRSGRAGAGARAVVRCMAAAAVAASDAAQLKSAREDIREILKTTYCHPIMVRLGWHDSGTYDKNIEEWPQRGGADGSLRFDAELSHGANAGLINALKLIQPIKDKYPGITYADLFQLASATAIEEAGGPKIPMKYGRVDVTAAEQCPPEGRLPDAGPCVPADHLREVFYRMGLDDKEIVALSGAHTLGRSRPDRSGWGKPETKYTKDGPGEPGGQSWTVEWLKFDNSYFKDIKEQRDQDLLVLPTDAALFEDPSFKVYAEKYAEDQEAFFKDYAEAHAKLSDLGAKFDPPEGFSLDDEPAVEEKDPEPAPAPAAAPPPPPVEEKKEAEPTPVPVTVGAAVASSPADDNNGAAPQPEPFVAAKYSYGKKELSDSMKQKIRAEYEGFGGSPDKPLQSNYFLNIMLLIGGLAFLTSLLGS

SEQ ID NO: 59362 - protein, 218 aa, Oryza sativa nipponbare
  Clone ID: JC-OSLELIB3474052F08_FLI.pep
AAEERGEEKMAAFASALRVLPSPPAAVPRRLRSREQRQGCRSRRYSKVVAYYALTTPPYKLDALEPYISKRTVELHWGKHQQDYVDSLNKQLATSMFYGYTLEELIKEAYNNGNPLPEYNNAAQVWNHHFFWESMQPEGGGSPGRGVLQQIEKDFGSFTNFREEFIRSALSLLGSGWVWLVCKFFIFIFFEVQPVQALLVQSDFLKCCFYNLNLVFKV

SEQ ID NO: 59363 - protein, 432 aa, Oryza sativa nipponbare
  Clone ID: JC-OSROLIB3475P047B04_FLI.pep
GCNGIDDDALTSLDQECSKSLQVLDMSNSYNVTHVGVLSIVKAMPNLLELNLSYCSPVTPSMSSSFEMIHKLQKLKLDGCQFMDDGLKSIGKSCVSLRELSLSKCSGVTDTDLSFVVPRLKNLLKLDVTCCRKITDVSLAAITTSCPSLISLRMESCSLVSSKGLQLIGRRCTHLEELDLTDTDLDDEGLKALSGCSKLSSLKIGICLRITDEGLRHVSKSCPDLRDIDLYRSGAISDEGVTHIAQGCPMLESINMSYCTKLTDCSLRSLSKCIKLNTLEIRGCPMVSSAGLSEIATGCRLLSKLDIKKCFEINDMGMIFLSQFSHNLRQINLSYCSVTDIGLISLSSICGLQNMTIVHLAGVTPNGLIAALMVCGLRKVKLHEAFKSMVPSHMLKVVEARGCLFQWINKPYQVAVEPCDVWKQQSQDLLVQ

SEQ ID NO: 59364 - protein, 426 aa, Zea mays subsp. mexicana
  Clone ID: UC-ZMFLTEOSINTE008A01_FLI.pep
QSKSSVLRQSGCSQLVPSTLPRGSLLRSLLDMALQAATSFLPSALSARKEGSVKDSASFLGVRLADGLKLDTTALGLRTVRVSRSADIRAQTAAVSSPSVTPASPSGKKTLRKGTAVITGASSGLGLATAKALAETGKWHVIMACRDFLKASRAAKAAGMDKDSFTVVHLDLASLDSVRQFVRNVRQLEMPIDVVVCNAAVYQPTAKEPSYTADGFEMSVGVNHLGHFLLARELLSDLQSSDYPSKRLIIVGSITGNTNTLAGNVPPKANLGDLRGLAGGLNGVGSSVMIDGGEFDGAKAYKDSKVCNMLTMQEFHRRYHEETGVTFASLYPGCIATTGLFREHIPLFRLLFPPFQKYITKGYVSEEEAGKRLAQVVSDPSLTKSGVYWSWNKNSASFENQLSEEASDADKAKKLWEISEKLVGLA

SEQ ID NO: 59365 - protein, 233 aa, Zea mays
  Clone ID: UC-ZMROB73050H10_FLI.pep
FNRQTNVHRRKRRSSLFDMVIDDPSDQLPLSRSSSQEMEQQHLDDPQPVAALPAPVVSPATVVPPVPVEVSASVPSPVQVPVPVSAPVMTSQPMEQDSDTTSSIAGEAGTVMPGAMPPYLYPMMIPPPYYHTAFVPMPCYGYVPFYCEPQGAAQAPHEVVKPVAVHSTPPLNAKDLYNMSELSLKGDSNANGGVPASPLPPKPIGRPERQSAFHGKGPTPTGGSSGGLIPAVK

SEQ ID NO: 59366 - protein, 407 aa, Oryza sativa
  Clone ID: UC-OSFLCYP178G12_FLI.pep
FVIVLFSILFLSFSVLVLFLTFLLKQTFSRHGAQSGGYGQQNYRPQGHGAASQWGPRSQPQPGYGYPPRGPPPQNMPYSQPYGGYPQQPPPRGGMGWDQRQGPPPHASHHGGGYDYYKQGSQPYEGQPPNYPPGPGNYNSYGPSQGPNYGQPQYPQSAPPQNYGPGYGDPRYNAPAPNQQYYGQPPAGPQQGYPPQQDPYARPYGGPGQWAPRGAPAGDGTYQAPPPTSYGPPSQQPPAYGQTYGPTTGPDGYSQQSYPQQGAQAPATYGQSAPAGPGYAQQGAQQGGYAQYPQSQPAYGDQAAQNNANYGYQGAPADPNYGNAYPQAGYGSTPASGQAGYAAAPAAGQPGYGQPGYTQPPTNPPAYDQSAQPPAQSGYAAPPANPQPAVAKGVSPQPAGYGGQWTA

SEQ ID NO: 59367 - protein, 187 aa, Zea mays
  Clone ID: 700051881_FLI.pep
PRSCGNMGLTFTKLFSRLFSKKEMRILMVGLDAAGKTTILYKLKLGEIVTTIPTIGFNVETVEYKNISFTVWDVGGQDKIRPLWRHYFQNTQGLIFVVDSNDRDRVVEAKDELHRMLNEDELRDAVLLVFANKQDLPNAMNAAEITDKLGLHSLRQRHWYIQSTCATTGEGLYEGLDWLSNNIANKA

SEQ ID NO: 59368 - protein, 466 aa, Zea mays
  Clone ID: 700051950_FLI.pep
NHRTERGNSRTGHSIFHSEGGVRRRGMSTTKVKRRVGKYELGRTIGEGTFAKVRFARDTVTGEAVAIKILDKEKVLRHKMVEQIKREISTMKLIKHPNVVRIYEVMGSKTKIYIVLEFATGGELFDTIVNHGRMREDEARRYFQQLINAVDYCHSRGVYHRDLKPENLLLDSYGNLKVSDFGLSALSQQIKDDGLLHTTCGTPNYVAPEVLEDQGYDGAMADLWSCGVILFVLLAGYLPFEDSNLMTLYKKISNAEFTFPPWTSFPAKRLLTRILDPNPMTRITIPEILEDEWFKKGYKRPEFDEQYDTTLDDVDAVFNDSEEHHVTEKKEEEPVALNAFELISMSAGLNLGNLFDSEQEFKRETRFTSKCPPKEIVRKIEEAAKPLGFDVQKKNYKLRLEKVKAGRKGNLNVATEILQVAPSLHMVEVRKAKGDTLEFHKFYKNLSKTLKDVVWKSDDLQTQHAS

SEQ ID NO: 59369 - protein, 363 aa, Zea mays
  Clone ID: 700052248_FLI.pep
RMPRAGPRQQGGLRDLHQDQHGDGVRRDHDQGDRGLREDRARHLPRDRVHLRRRGPRRRPLQGAGEHRAAVPRHRAGRARALHEAARGDRRGRPGPHVRVRHRRDPRADAAEPRAGHQAGRAPHEVRKNGTCAWLRPDGKTQVTVEYVNEGGAMVPVRVHTVLISTQHDETVTNDEIAADLKEHVIKPVIPEKYLDEKTIFHLNPSGRFVIGGPHGDAGLTGRKIIIDTYGGWGAHGGGAFSGKDPTKVDRSGAYVARQAAKSIVASGLARRCLVQVSYAIGVPEPLSVFVNSYGTGTIPDKEILKIVKENFDFRPGMISINLDLKKGGNRFIKTAAYGHFGRDDADFTWEVVKPLKFDKASA

SEQ ID NO: 59370 - protein, 522 aa, Zea mays
  Clone ID: 700052292_FLI.pep
FGHNEIDEPSFTQPKMYKVIRNHPSALEIYQRKLLESGKISKVDIDKLNKKVSTILNEEFQNSKDYVPNKRDWLSAYWTGFKSPEQISRIRNTGVKPEILKRVGEAMTTLPENFNPHRAVKKIFDQRRQMIKTGEGIDWAVGEALAFATLIIEGNHVRLSGQDVERGTFSHRHSVLHDQETGDQYCPLDHLVMNQDEELFTVSNSSLSEFAVLGFELGYSMENPNSLVIWEAQFGDFSNGAQVIFDQFLSSGESKWLRQTGLVVCLPHGYDGQGPEHSSARLERFLQMSDDNPYVIPEMDPTLRKQIQQCNWQVVNVTTPANYFHVLRRQIHRDFRKPLIVMSPKNLLRHKDCKSNLSEFDDLAGHPGFDKQGTRFKRLIKDQNNHKDLEEGINRLVLCSGKVYYELDEERRKTERTDVAICRVEQLCPFPYDLIQRELKRYPNAEIVWCQEEPMNMGAYSYINPRLLTAMKALGRGGIEDIKYVGRAPSAATATGFYSVHVQEQTELVQKALQRDPINYPF

SEQ ID NO: 59371 - protein, 464 aa, Zea mays
  Clone ID: 700201413_FLI.pep
GTSMDVLHNQTPRSPEERTIDRKLLIHDFQVIILAGGVGRNMRPITSDTMPKSLLPVANRILLSYQLEFVIKMRFPEVIVVTAEGYEEVIQLFLITYGEAFPELRIKLQVVNDYTNTAGVLLHLRPILTRDFIVIGGDLIVEGNFLHHMADKHRARDAAVTVLGFRRKIEEEGAGGASSSSAAGEDEEYFAVEPTTGRLLMLFDSTSVSSEFIRVKKKLFRKFPNFTLHSSSMRDAHFYMFSRWTLDLLENDPSLSIKSDFVPFLSRCQYDQHLVEKLEIPSFLSPVVAEMSSVKHDPEDKVKCYLFQFPDAEGTKYCDRVDSISSFFHINRTIAEGGKEYQPTEPRGPSNKAINFIATTAKIEKTTAIPSGSIVGADTIIGDRVGVKKTMIGKHCKVHSNAKAINSVIFDHVTVEEGAKIQNSIIGQHCYIEKNAELTDCILGAGNKVEAGAVWRGKKLTARI

SEQ ID NO: 59372 - protein, 146 aa, Zea mays
  Clone ID: 700201963_FLI.pep
FLLTVNLINMHITQTLFKYYPRWMPKPQGGNSFLRKQALYKLTFAQPGRARNCYRLATRCFIRHLQIDQEESKQRYSYFRDLNSQRIYAACEDLGYPYKYFIGKLPKMGIEIDRKCLANIAIWEPRTFESLVEIAKKYDETNFKLE

SEQ ID NO: 59373 - protein, 379 aa, Zea mays
  Clone ID: 700202346_FLI.pep
PREGRQLCMRRRRMGALHVVGEPRISFRQQPAAVVAKNGGHGAVVEEIHGLIRVYKDGHVERLPAIPAVPCTWGGTAAPDAPGGVVARDVVVDPATGVWARLYAPTSAGDGARRPVVVYFHGGGFCVGSAAWSCYHEFLAQLAARAGCAVMSVDYRLAPEHRLPAAFDDGLAAVRWLRHQAAASASASACSNDDLSWWRARCGFDRVFLMGDSAGASIALHVAARLGQGQLGALPPLTVRGAVLIQPFLGGEGRTASEKNVAQPPRSALTLPTSDCYWRLALPAGASREHPWCNPLSGRAAPRLETTPLPPLLVCVSETDILRDRNLELCRALREAGKRVEQAVYGGVGHAFQVLHNCHLSQPRTQEMLAHIKAFVSAR

SEQ ID NO: 59374 - protein, 209 aa, Zea mays
  Clone ID: 700202431_FLI.pep
FPHSLLQLRVRRRREGKMYTARKKIQKEKGLEPSEFEDSVAQAFFDLENGNQELKSDLKDLYINNAIQMDVTGSRKAVVIHVPYRLRKAFRKIHVRLVRELEKKFSGKDVVIVATRRIVRPPKKGSAVLRPRTRTLTAVHDGILEDVVYPAEIVGKRVRYRLDGSKIIKIFLDPKERNNTEYKLETCTAVYRRLCGKDVVFEYPMTENA

SEQ ID NO: 59375 - protein, 573 aa, Zea mays
  Clone ID: 700202830_FLI.pep
PVLAFSPPLNLQPLFLARWPPAAPSPSGQQRGRMEYERIHQKAQPGALSPTKLRMKILGAHNRVRVITSNSSSRTSPAKTIEASQAQNRLLVCDVLEEDSADSTKHPSATNKTEAVEKVQKDPAVDISQVQNASTSSAAKPATGSSSMIQIHPLRPAEEDSTTECDSGLDNASTSSFEFHGVEKAAATQNPAAGYLSRQTSISSKWNDAEKWIVSRQNVSQKNNVAKGALQNQTVNQMSSAAARGAVVPKISARPVQKMKRVNPALSAPRSILERLSFASYQPKLVRHADVCPVSNAGANSEHHKATDTGSSIEVKPCNDTNDIPTVQSSVSVRDVGTEMTPIPSQEPSRTGTPLGSRTPTRSPNCSVPSTPVGGRSIASPPGEDCTDDGPFFHRKCGVHANELSDTETRLKTRQEIAALGIQLGKMNIATWASKEELELVSAAPSIADLERIRKEYAARAASYEEAENTKHTARFKKEEVKIEAWEGRQRAKIEYEMRRIEEFAERMRSEAMQKMAEKLEMTRRIAEEKRASANAKMNQQAAIAVQKAEKIRQTGRVPGSSILRCGGCFCGP

SEQ ID NO: 59376 - protein, 630 aa, Zea mays
  Clone ID: 700205596_FLI.pep
GRKPSQSSCRPTTTRRSCWLLPRNPGQATSSTSPASYSFLLAAAGASRAAYRYRVQPHRQAAACAPASSSEGGRPSARACCPAPAPSTSTPPPTAGREGVRPPAPRDSPMPSHEACCGTMFWVYLMSCVGLVVFAGLMSGLTLGLMSLSLVDLEVLAKAGTPKDKLNAARILPVMKNQHLLLCTLLIGNSLAMEALPIFLDTLVPPYVAILISVTLILAFGEIMPQAICTRYGLSVGAKAAPVVRLLLILFFPVAYPISKLLDCLLGKGHFALMRRAELKTLVDMHGNEAGKGGELTRDETTIITGALELTQKIAKDAMTPISETFSLDINAKLDLHTMGMIMTRGHSRVPIYSGIPSNIIGLILVKNLITCRAEDEVPIRNVTIRKIPRVADDLPLYDILNEFQKGHSHMAVVVKRTKEAGVSTENQKSTTADYKINPKDAHADGSSPSYANNTAGSRRFNIEKHGDGRSCNKKSEKKRENILDFNTDPLPSYSMDEAAVGIITMEDVMEELLQEEIYDETDEYVDVHNKIRINMLPQGKSLSPTISPGGGPLSQGLRKTPMASPFSPYYHCNSVLRSPASNHCQSPGTLPTILSPGRSPTAQTPGQSSPNGSQVSINSNGQHKKDGEN

SEQ ID NO: 59377 - protein, 626 aa, Zea mays
  Clone ID: 700205787_FLI.pep
KSVKLRGSSFLFKMKFMKLGSNPDTFQDDGNEVSIAASELVSDITVRIGTTKFYLHKFPLLSKCARFQKLIPTTGDENIEIHIHDIPGGAKAFGVCAKFCYGMIVTLNAYNVIAARCAAEYLEMNETVDKGNLIYKIDVFLSSSIFRSWKDSIIVLGTTKAHLPWAEDLKLVSQCIDSVASKASIDVSKVEWSYTYNRKKLPTENGHDSPWNGVNQRQVVPKDWWVEDLTDLDIDAYKQVITAVKTKGMVAKDVIGEAIKAYTYKKLPSLSKVSMIHGDAKVRAMLVTITCLLPSEKGSVSCSFLLKLLKATNLLKCGDMCRKELMKRIARQLEEASVSDLLIPAVDEDTSVYDIDLILSIVEEFIRQDSKNAQRHNGGEVNDHVSAPSASMITVAKIVDGYLAEVAKDPNIPVYKFFSLAETVSANSRPVHDGLYRAIDMYLKEHPSLGKSDKKRLCALMDCRKLSPDACAHAVQNERLPLRVVVQVLYHEQTRASAAATVRADSIGIGSYESSRSGATTNTEDEWDGVMAVEDLSLSSKTTKLEKCDAASTVSEKNHGGNKGANGRAKGGVMPKKAVGRTTMSGNKGQAGERSSSDSSDSAILPCQLEHPKRAAARSTTKSAAV

SEQ ID NO: 59378 - protein, 572 aa, Zea mays
  Clone ID: 700205996_FLI.pep
SNDPRGPAPETKLGFASQPSSCSPASSCEPREPRTARRLSPLAAMGTERKRKVSLFDVVDETSVSAKLRAASNGAAATATGGNPSVNRWNGRPYTARYFDILEKRRTLPVWQQKEEFLRSLRDNQTLILVGETGSGKTTQIPQFVLETEGLGNRSMVACTQPRRVAAMSVSRRVAEEMDVTIGEEVGYSIRFEDCSSHKTVLKYLTDGMLLREAMADPLLEKYKVIVLDEAHERTLATDVLFGLLKEVLKNRPDLKLVVMSATLEAEKFQGYFNGAPLMKVPGRLHPVEIFYTQEPERDYLEAAIRTVMQIHMCEPAGDILVFLTGEEEIEDACRKINKETNNMGDQVGPVKVVPLYSTLPPAMQQKIFEPAPAPLKEGGPPGRKIVVSTNIAETSLTIDGIVYVIDPGFSKQKVYNPRIRVESLLVSPISKASAHQRAGRAGRTQPGKCFRLYTEKSFNEDLQPQTYPEILRSNLANTVLTLKKLGIDDLVHFDFMDPPAPETLMRALEVLNYLGALDDEGNLTQLGEMMSEFPLDPQMSKMLVISPKYNCSNEILSVSAMLSGMLVVTEG

SEQ ID NO: 59379 - protein, 427 aa, Zea mays
  Clone ID: 700206644_FLI.pep
SVQYSGADDMTKISRSLLVVIALVLLGPHLPPSEALTPKQGVRSKTFLSPPILLRPGDVADKFYYDIPFPRGHLALKSFNGEVVDERGAPVPLHETYLHHWVVQPYYALVVSAEGGSSRPRTIPARNAGVCSGHTLGQYYGLGSETRRTATWVPDPYGIEIGDPAAAPAEGYEQRWLLNVHAIDTRGAADRTMACTECRCDVYNVTADWRGHAIEPGYAGGLRCCYDGTRCGAAAEGAEGKARTVFLRYTVMWRDWSPAAVLPVRIYIFDVAGCGVEYDVEEQCSGGAGGECVHVKTATQALPRGGDVVFGVAHQHAGGAGASLHGADGRLLCESAATYGGGREAGDEAGYIVGMSTCYPRPGAVTVRDGEPLTVVSRYSSDRRHTGVMGLFYILVADHARQLPPQEGLCFSFPVPWCLPSWLSSNL

SEQ ID NO: 59380 - protein, 219 aa, Zea mays
  Clone ID: 700206770_FLI.pep
AAAMSKLQSESVKDAISQIVGDAKEKNRKFTETVELQIGLKNYDPQKDKRFSGSVKLPHIPRPKMKVCMLGDAQHVEEAEKMGLDYMDVEALKKMNKNKKLVKRLAKKYHAFLASEAIIKQIPRLLGPGLNKAGKFPTLVTHQESLESKVNETKATVKFQLKKVLCMGVAVGNLAMEEKQIQQNIQMSVNFLVSLLKKNWQNVRCLYVKSTMGKPYRVF

SEQ ID NO: 59381 - protein, 260 aa, Zea mays
  Clone ID: LIB84-005-C1_FLI.pep
NRKHPHQSLRLFVFGCAAAAAAEEVEEMLSGDIPPSQTIYLNNLNEKVKKEELKRSLYALCSQYGRILDVVALKTQKLRGQAWVAFSEITAATNAFRGLQDFDFYGKKMRVQYAKTKSDCIAKEDGTYAPKEKRKKQEEKAAEKKRRTEEAQQAGLNAAAAQSNGTGYQASRLGKASQEPPAPPNNILFIQNLPDQTTSMMLQILFQQYPGFREVRMIEAKPGIAFVEFEDDGQSMVAMQALQGFKITPENPMAISYAKK

SEQ ID NO: 59382 - protein, 252 aa, Zea mays
  Clone ID: LIB84-008-H2_FLI.pep
NIHRMSERSESATEKIMSSIMDTIADNLPKQKSGKFDPGSVSDKVKNKLFGRQKTLHGVLGGGKPADVLLWRNKKISSSVLALATAIWVFFEWLDYHLLTIVSFALVLGMVVQFVWSNFSNMLSSGSRSQVPRVELPDELFVNIAVAIGAQINKFLCFLQDVSCERNLKHFVVAIAGLWAAAVIGSWCNFLTVIYVGFVCVHTLPVLYEKYEDQVDDFLYSLLGLLRDQYQKLDQGVLSKIPKGNMKAKKNE

SEQ ID NO: 59383 - protein, 350 aa, Zea mays
  Clone ID: LIB3061-045-A8_FLI.pep
ASDRAHQQPPRSRVAAGRSRKRRGGGMGRPPCCDKVGVKKGPWTPEEDLMLVSYVQEHGPGNWRAVPTNTGLMRCSKSCRLRWTNYLRPGIKRGNFTDQEEKLIIHLQALLGNRWAAIASYLPERTDNDIKNYWNTHLKKKLKKMQAGEGGGGDGDGAAGASEGGAVATAGAGGKRPAVPKGQWERRLQTDIHTARQALRDALSLEPSPSAPPPAKVEPLPATAPGYKTYASSAENIARLLEGWLRPGSGGGKGPEASGSTSTTATTQQRPQCSGEGAASASASHSGGAPANAAAQTPECSTETSKVAGAGSAPPAFSMLESWLLDDGMGHGEDGLMTDVVPLGDPSEFF

SEQ ID NO: 59384 - protein, 369 aa, Zea mays
  Clone ID: LIB3062-015-H7_FLI.pep
YHGDLNALRDDIVELKPTLLVGVPRVYERIYEGILKAIAELRPLRRVIFNALYNRKLASMKAGYSHKTASPFADMLAFRKVKARLGGRLRLLISGGAPLSNEIEEFMRVTTCAYFIQGYGLTETLGPSTVCYIDDMALVGSAGVPATYTEIRLEEVPEMGYDPLGVPSRGEICIRGKSLFAGYYKSPELTNEAIVDGWFHTGDIGEMTPDGILKVIDRKKNIFKLSQGEYVAVEYLEKVYGFPPLVEDIWVYGDSFRSSLVAVVNPHQENTMKWAESNGYKGSFDEICKLEGLKEYILKELAAVAQKNKLRGFEYIKGVVLDPVPFDIERDLVTATMKKKRKNMLNYYQSEIDTIYKKLEAQKNAARTK

SEQ ID NO: 59385 - protein, 208 aa, Zea mays
  Clone ID: LIB3066-016-D12_FLI.pep
PIPLPPLRLRRRRRTEPEPGALTNPRRQAAAGMVYYALLVGAELDGLTNLQPRHGCDDPNFPYYLKLKCENCGEVTAKSTYVTLSEQVDLPKGHGAAHLVQKCKLCGRDGTIVMIPGQGTPLTIEQSQKEEKTCLMVFDCRGYEPVEFSFGTGWKAESVHGTPFEIDCSEGEFSEYDEKGECPVELGKLQSTFKVVKKHERGGKTRFV

SEQ ID NO: 59386 - protein, 162 aa, Zea mays
  Clone ID: LIB3066-021-G3_FLI.pep
LPLMLGSLCTCTRHHHHPVTDAGNKSPFHARQAFDLLGGMGESPALELNTDLGYWESIIISACDREMLLWNGDELCMPPPPPPPPLMMAPQYCMLSSPSARSRLSSGSTTAPRSGRSLRRSSQHRSAISARHCASSRGQSGTAGSSMSCSSPRSRARPTWCD

SEQ ID NO: 59387 - protein, 488 aa, Zea mays
  Clone ID: LIB3066-031-A3_FLI.pep
IDRRLRTRLSPRPKAFPLLPFFSHFSPPPPLPPFDNTMRECISIHIGQAGIQVGNACWELYCLEHGIQADGQMPGDKTIGGGDDAFNTFFSETGAGKHVPRAVFVDLEPTVIDEVRTGTYRQLFHPEQLISGKEDAANNFARGHYTIGKEIVDLCLDRIRKLADNCTGLQGFLVFNAVGGGTGSGLGSLLLERLSVDYGKKSKLGFTVYPSPQVSTSVVEPYNSVLSTHSLLEHTDVAVLLDNEAIYDICRRSLDIERPTYTNLNRLVSQVISSLTASLRFDGALNVDVNEFQTNLVPYPRIHFMLSSYAPVISAEKAYHEQLSVAEITNSAFEPSSMMAKCDPRHGKYMACCLMYRGDVVPKDVNAAVATIKTKRTIQFVDWCPTGFKCGINYQPPSVVPGGDLAKVQRAVCMISNSTSVVEVFSRIDHKFDLMYAKRAFVHWYVGEGMEEGEFSEVREDLAALEKDYEEVGAEFDEGEDGDEGDEY

SEQ ID NO: 59388 - protein, 486 aa, Zea mays
  Clone ID: LIB3060-087-A4_FLI.pep
SNFTRILAPPVAAPAAAFPSAMDPANSSAGAELDDASEWRTRALGGTEYSWLRAVPGGTGTTLLALRLSHGDAAEAALRSLRDAHPVLRARLRTSSPSGPTLAFPDPAPPFLLAPIPAPGSAPDFHALLEHELNRNPWADDPASSDDAPVLFATLYELPAATGGAALFVRIHTVACDRSAASALARELVALLAGAGGEEPDPEDAAAEAGLEARIPQRDIWKPFWARGLDMVGYSINGLRTSTLPFVETGTERSTQMLRLGLGLDETTRLLDACKENGVRLCSAVAAATMLAARQSKPMESGQQETYSVVTLINCRKFLEPVLEDRNVGFFYSAITNTHTIHGGEGLWELAKRCQDSYTSAKSNKKHLTDISDLNFLMCRAIENPQLTTAGALRTALVSVFEDPVVADVAEAQSKAGVEDCVCCATVHGIGPSIGVFDSIKDGKLDWACVYPSPLHSRKQVQEIFDKVKQILRHAAAAEENFEDCT

SEQ ID NO: 59389 - protein, 502 aa, Zea mays
  Clone ID: LIB3060-092-E8_FLI.pep
ITILSSPFPTSHLRLCSCAYAYTAPIRIVLLASLADPPLPSPRFKMQIFVKTLTGKTITLEVESSDTIDNVKAKIQDKEGIPPDQQRLIFAGKQLEDGRTLADYNIQKESTLHLVLRLRGGMQIFVKTLTGKTITLEVESSDTIDNVKAKIQDKEGIPPDQQRLIFAGKQLEDGRTLADYNIQKESTLHLVLRLRGGMQIFVKTLTGKTITLEVESSDTIDNVKAKIQDKEGIPPDQQRLIFAGKQLEDGRTLADYNIQKESTLHLVLRLRGGMQIFVKTLTGKTITLEVESSDTIDNVKAKIQDKEGIPPDQQRLIFAGKQLEDGRTLADYNIQKESTLHLVLRLRGGMQIFVKTLTGKTITLEVESSDTIDNVKAKIQDKEGIPPDQQRLIFAGKQLEDGRTLADYNIQKESTLHLVLRLRGGMQIFVKTLTGKTITLEVESSDTIDNVKAKIQDKEGIPPDQQRLIFAGKQLEDGRTLADYNIQKESTLHLVLRLRGGY

SEQ ID NO: 59390 - protein, 423 aa, Zea mays
  Clone ID: LIB3060-093-C4_FLI.pep
GTAHDTKLPRRTAARKRSAGPTDLRRHARRRRHGGAPPVDGRARHAAGELRAAGAGAPAPRGGRDRRAHPRGGPGQPRPRRGRGRRRRRLPLARLLPGRQPRDTRRPGRGGDGRGARLLPAAPRGEGQALLRRPRQEDPAVHQLQRAQGDGAQLARLPPPALPSPRRVPARLAVQPARFQGDHGHLLQGGPGARVQAVRRDLGEPGPRGELHEGGAGRAGAAHGGQLLPAVPGAGAHLRTPGAHRPQRAHHPAHGPGRRRPAGAPRRPVGRRQPAARRAHHQHRRPAAGAEQRAVPERVAPRGGELGPGAHVRGVVPVPVQPRRARPRAEARHRGHPGRVQELHVRRVLRQVLEQEPGPGALPRALQNLANRIRMDGYITYAPSVFLHDVRRTRSAMFVHSRWYQSRLWSLQFSRSIYMIKCF

SEQ ID NO: 59391 - protein, 311 aa, Zea mays
  Clone ID: LIB3060-096-A1_FLI.pep
LHSPLCTHQMAGMSLQHPWAFAFGLLGNVISFMTFLAPIPTFYRIYKSKSTEGFQSVPYVVALFSAMLWIFYALIKSNETFLITINAAGCVIETIYVVMYFVYAPKKAKLFTAKIMVLLNGGVFGVILLLTLLLFKGSKRVVLLGWICVGFSVSVFVAPLSIMRRVIQTKSVEYMPFSLSLSLTLSAVVWFLYGLLIKDKYVALPNILGFTFGVVQMVLYVLYMNKTPVAATAEGKDAGKLSSAADEHVLVNIAKLSPALPERSSGVHPVTQMAGVPVRSCAAEATAPAMLPNRDVVDVFVSRHSPAVHVA

SEQ ID NO: 59392 - protein, 378 aa, Zea mays
  Clone ID: LIB3060-101-D12_FLI.pep
LLRRRVLRLDGQAVVVPSIRRYQIELAHRAARFVLCWIGYGQLAPKSSGLRHPALVGGSDLLDVSVLGQNAARRDGAAAAQSPADLAQELAVAELLERAPQLLRQRHDALRVPHQLPRLVRRQLRELSRLGVQVAGEPRGGGVRGLPLPDHLGDVELLPGRERGLPDGAAAELLAVAERAVPLLGEDLEPAEPRLPAQRHGLHHPDPAGLLGGRVGAHDAVLHLEHERGAPGPRGDVGPRGGVREGGGGGGVALVGGVHGGGVGLAPHRGEQTDQAVVQRARRARVRQRGALRLPVHHLHAPLPVRFRDHFLRQLHGVAGRREVRAEAVPLAGHSRRELCPLAVIWRRAGGRRRSVGGSGAGCLGRDDSQPRFSLPPP

SEQ ID NO: 59393 - protein, 257 aa, Zea mays
  Clone ID: LIB3060-103-E8_FLI.pep
YTVNVCMYIVTGHVTRSSERDWSLHYMAMAPLPPPSFSSLAVLMVVVGFLVQFSSWLGLQRSSELITTQSYTVGLLGVPGASSPPPPPILAFPRSFFVQPSPLGVVAAPKGESGAPLAGDGDDGAELDSLRGDVTTDSAAGRRSMVKLRVTAPGGGAEPAAAAAATAADDDDEGEKEAYLRSLPRPESGRGPATVSSHSWFRSPIYAPVRARPTYVRSGRPATAWCAFCFESDALALFPLVLLFDVFVVLGARGREA

SEQ ID NO: 59394 - protein, 731 aa, Zea mays
  Clone ID: LIB3060-104-B12_FLI.pep
PLPDLRPDLAASPAPAREPPSTATAMGTANGQQPAEGAPSDKLRHVESMSELPSGAGKISGINAVVLGESLAAEENDLIVPSPEFSASALVSSPKQYREMYERSIKDPAGFWSEIAETFYWKEKWNPAEVCSENLDVTKGPVQINWFKGGKTNICYNAVDRNIESGNGDKVAMYWEGNEPGQDGKLTYSELLEKVCQLANYLKSLGVGKGDAVIIYLPMLLELPIAMLACARIGAVHSVVFAGFSADSLAQRIVDCKPKLVITCNAVKRGVKPIFLKDIVDAALVESEKNGVSVGLCLTYENQSAMKRENTKWQAERDVWWQDVVTKFPTKCDVEWVDAEDPLFLLYTSGSTGKPKGVLHTSGGYMVYTATTFKYAFDYKPTDIYWCTADCGWITGHSYVTYGPLLNGATVLVFEGTPNYPDSGRCWDIVDKYNVTIFYTAPTLVRSLMRDGTEYVTRYSRKSLRVLGSVGEPINPSAWRWFYNTVGDSRCPISDTWWQTETGGFMITPLPGAWPQKPGSATFPFFGVQPVIVDEKGQEIEGECSGYLCIKKSWPGAFRTLYGDHERYETTYFKPFAGYYFTGDGCSRDKDGYHWLTGRVDDVINVSGHRIGTAEVESALVSHPQCAEAAVVGVEHEVKGQGIYAFVTLVDGVPYSEELRKSLIMTVRNQIGAFAAPDKIHWAPGLPKTRSGKIMRRILRKIAARQLDELGDISTLAEPAVVDQLISLSNC

SEQ ID NO: 59395 - protein, 501 aa, Zea mays
  Clone ID: LIB3060-111-H8_FLI.pep
GKAACGREEEKRSCCALPSPISAPRLTHQTRERAQFGRRSRPTPAKPSAHPLTLLPSSRVQFGAWLTPHVFPPFPSLDRRPSVHHRIQERPSLVLVDDRPAADRPGRMSSLEEPLGLGDLPKLSINRLGRFVSLGARRPPADDDDHSTGKYSSSSCNNGSHQMAFHHGSNSSYPWHPQCRQAADPSRDAVELRDLPRKVMWELPRFVKIVEVGPRDGLQNEKGNVPASVKIQLIHKLVGAGLSVVEATSFVSPKWVPQLADAEEVLKGIKQEPGVRYPVLTPNLRGFEAAIAAGAKEIAVFASASESFSRSNINCTIEESLARYRGVTAAAKKHGLSIRGYVSCVIACPVGGATDPAKVAYVAKELYTMGCSEISLGDTTGVGTPGSVVAMLQAVMSFVPVDKIAVHFHDTYGQALANILVSLQMGINIVDSSVSGLGGCPYAKGATGNVATEDVVYMLHGLGIETNVDLNKLMEAGDYISKHLGRPLGSKTATALRKLTA

SEQ ID NO: 59396 - protein, 877 aa, Zea mays
  Clone ID: LIB3060-113-E2_FLI.pep
PRLQPPRPPPMASAAGSSNVMLAINEKKTITTDLYRPLRLYIASTYSEREAAAADDDLSVVCDLRAAVEKPSLPDPSSLEQRRDALLAYARALALVEPRFPISPDRAHVHSLTFTWHDAFKGNKKCALASIHLEKASVLFNLGAVYSQIALAADRSTDVGIRIACGAFQSAAGAFAWLRESGAAAKAVAAGTTTVDITPECAGMLEKLMLAQAQECFFEKVIGGGKPPALCSKVARQVGILYEEAYTALSASPLSQHFDKTWVSHVQLKAAQFYADACYRYSLDLHEKEEIAEEIARLKIGMSALADAKKTTKGVAAQLLDSVNKLESNMKTNLERAMKENDRVYLMRVPAAGSLGALPAASLVKPTSLAEVLDASKERLFSSLVPDGSMKALSKYTEMVDNSIRTQAEKLQQASEITRVRLKEMDLPDSILSLEGNITLPMDLKEDVEAVQISGGPAGLESELQQLRDLSRVNQELLVQTEELLQKEANEDAQFRTQFGSRWTRPQSSTLTKNIQDRLNLFASNLKRAADSDSLIERGVKENYSLMSILDKRPIESALPSISRPIMSLDGNEDAIVGALKQSLRQLESLGAQRAGLEDMLKEMKRKDDILPKLMVGVGSHDDLFKKEIAKYDPICADIADNIVAQEQLLLQIQAQNEQFAAVFNLEDYKAARERCYKQIAAAVVKYQEFKKNINEGLNFYVTLQEAIGKIKQQCSDFIMTRNIQCREMMEDVQRKLPGFRFSSSSRSSMQRNAASVPPDESSPSPPPPHAQAPYASPPGVDSRHGYSQPEARPAYSQPYPPSYGATPQQPTYGAQHPGQYQPPPGHDCGQPAYPGWRGPYPYYNAPQPQQSVPCPQAPYNATGAYPPHQSNYYRPQ

SEQ ID NO: 59397 - protein, 315 aa, Zea mays
  Clone ID: LIB3061-001-F3_FLI.pep
HPHSDSSARRKRRKKNSLSLSFPALSLPLHPAATMSGLYSQGFSPARTLSPQIRSNPDADSQYLAELLAEHQKLGPFMQVLPICSRLLNQEIMRVSSMVHDHGFSDLDRRRFRSPSPMSSPIVRPNLHGNGFGPWNGMHQERLGFPPPGTSMDWQGAPPSPGSYIVKKIVRLEVPVDSYPNFNFVGRILGPRGNSLKRVEASTGCRVFIRGKGSIKDTEKEEKLKGKPGYEHLNEPLHILIEAELPANIVDTRLRQAQEVMEELLKPVDESQDFYKRQQLRELAMLNSTLREDSPHPGSVSPFSNGSMKRAKPSQ

SEQ ID NO: 59398 - protein, 235 aa, Zea mays
  Clone ID: LIB3061-017-B10_FLI.pep
LKDGRHLPADMVVVGIGIRANTSLFEGQLMMSTENGGIKVNGQLQTSDSSVYAVGDVAAFPIKLFDDDIRRLEHVDSARRTGRHAVASILDPSKTRDIDYLPFFYSRVFTLSWQFYGDNVGEVVHFGDFTSSSPRFGAYWVNKGRIAGAFLEGGSREEYEAISIAVRREAVVTDMGELEKQGLALAIQESQKEVPDSGLAVVGKPTYAWHATAGVIAAVSIAAIGYWYGRKRRRW

SEQ ID NO: 59399 - protein, 266 aa, Zea mays
  Clone ID: LIB3061-042-A9_FLI.pep
NYKIPDGTIVGIEDDGERDAYVLVRVHALHNPLKVRFSTVERVTYGFAAGDWVRLREEDKKRSQVGILHSIDRDGAVAVGLIGVDTPWKGNYSDLQMAEAYCVGQFVRLKASISSPRFEWQRKRGGLASTGRISQIHPNGLLVVKFPGKFNLGEVCSCLADPSEVEVVSFDKCEGIVKKYEHLEDFHWAVRPLFVAIGFLTAIKLGVFVGKSISRPRSRKVASISDQSGDYQQQHQQQVVQQSANAAWLPPPVANMFFGDSVGTSG

SEQ ID NO: 59400 - protein, 250 aa, Zea mays
  Clone ID: LIB3061-042-F10_FLI.pep
MWSRTRAGFTLNIIDTPGLIEGGYINEQAVDIIKRFLLGKTIDVLLYVDRLDAYRMDTLDGQVIRAITNSFGKDIWRRSLVVLTHAQLSPPDGIEYNDFFTRRSEALLRYIHSGAGIKKREYGDFPLPIALVENSGRCKTNEHGEKILPDGTPWVPKLMKEITVVISNGSKPIHVDQKLIDGPNPNNRWKMFIPIILAVEYFLVVKGIRRAIHADIANGKVDDWEQRYRDLVGSRDPVEQKGSTTRNRKA

SEQ ID NO: 59401 - protein, 315 aa, Zea mays
  Clone ID: LIB3061-056-F8_FLI.pep
EARPIPCPRHLSVSPSHRRVTHSRRRRARVPERPRGSSAPSQRRLVRAKMLGFSTGQLLVILGACSVMMKPSDMVKIARTAGRMTGRAVGRLIVARRQLDEILGQSAATQVHKELKDAMTQLDSIRYEVQNLSRLSPGQFMLKQHNAGMAEAGKSDSSDGPTTNQEEFRQEIRSIIHDEFEKYCRTQPIQNSVSTTEDRKLHVADEPTALKSKDMKMANSGLTNLHSQAMTYARLSEAPGLKMGSSLSGNYQDQSKEMDGLLTVLPISAESAGLLPSRPDGPTGSDLVLEAVLEAEVAENAKLFVSQPHDQLPKE

SEQ ID NO: 59402 - protein, 65 aa, Zea mays
  Clone ID: LIB3061-117-E4_FLI.pep
VPISASNRDLITLLHCYLIPCMRTYVGVISERDMLSIFFFLERTGELRIIILREERSKVDRNIAP

SEQ ID NO: 59403 - protein, 168 aa, Zea mays
  Clone ID: LIB3062-025-A8_FLI.pep
VLDREYHPPTPTYVSPTPIYHPPAETEMKYDKKHFFDHFHKDHDYHHFFDHFHKKPVPPKPKPEPEPKPKPQPKPEYKPPMPTYGSPTPIYHPPAKKEVAFDKKHFLDHFHKDHDYHHFFDHFHKKPVPPKPKPEPKPEPKPQPEPEYHPPTPTYGSPTPIYHPPAKH

SEQ ID NO: 59404 - protein, 454 aa, Zea mays; identical to SEQ ID NO: 48078
  Clone ID: LIB3062-027-C11_FLI.pep

SEQ ID NO: 59405 - protein, 185 aa, Zea mays
  Clone ID: LIB3062-052-D9_FLI.pep
PPRAGDGHGASGVRAGDPCAAQPQRRVRGGADARGGALQPAAGARPGPAQRALWRRHLHRGQRVPRPLRLRQRSGRLRLRHGQGRVLRTGPPQRPGPLHPALQPVRRPQQVRLLGRLPPHGARQPGHRQPVHVRLARLRQPHEPQHRLANGRRISPDRVLTHRPERVETQPTSLLSSTSFRFISL

SEQ ID NO: 59406 - protein, 600 aa, Zea mays
  Clone ID: LIB3066-003-B1_FLI.pep
CLLLSPSTPSARARCLVATTGRPPPPSLPPLRQEARSSSVPSSRFSPATSTQQGTTRLILMDYDKSRRSNSKKRTHSNSDDGKRKRLSSRHDDTSMSSEPIETIYRILCPAKKIGSVLGRGGDIVKALREETKAKIRVADSIPGADERVIIIFNYQNQPELTDEAAEKQISDGLGNMKPHCFAQDALLKIHDKIVADEIYDEVAHDESSESADDVTARILVQGNQVGCLLGKGGSIIQQLRSDTGAGIRVLSSENLPQCALQSDELVQISGAPSLVRKALYEISTRLHQHPRKENRPLEQIIDASTQRKHESPTLQHENPMLPHLHSHHPPPIPLLDPYRSGPQYPVSETEEFSIRILCASELIGSVIGKSGANVRRVEQQTGARIKVQEIDKDASGERLIIVSSNEIPTEPISPTIEALILLHDKVSASSEKHHSSTRLVVPSNKVGCILGEGGQVITEMRRRTGAEIRVYSKADKPKYLSFGDELVQAAGQIHGLEDYRGLPSASGRFSSTIELRIPNSSLESIVGVGGVNLAEIRQISGARLRLHEAHAGSSESVVEIQGTLDQAKAAQSLLEGFISANSRQQQSHSSRMPLYPRWG

SEQ ID NO: 59407 - protein, 410 aa, Zea mays
  Clone ID: LIB3066-007-D6_FLI.pep
KWRVKICPLKCRNGRPRTQVQHLMQIDLKGWFLNYSTSFQYHSLLQILNCVAGLREYFSQTDDIHITPRIPAMESMADVNLAQKDEKLKEVDSKTKPEDQQQAENKNMGTIDEESDDDEDYHVPEADIEEITNKSDNEAKHTDEPPEKIDLSCFSGILHHDPDEKSRNCWTVPDSKLFKVRSKNFPNDKSKIPAASYLMELAAIDWFKDTKRMDNVGRQKNCVAQVAAEKGMHTFIVNLQIPGSTHYSMVMYFVTSSLKKGSLLQRFFDGDDDFRNSRLKLIPSVPKGSWIVRQSVGSTPCLLGKAVDCNYFRSPGYLEVDVDIGSSAVANGVLGLVFGVVTTLVVDMAFLIQANTYEELPEQVIGAARLSNVEPSTAVVPDLENNSDGNKDNSSNDATSSEDDSSKKTN

SEQ ID NO: 59408 - protein, 287 aa, Zea mays
  Clone ID: LIB3066-011-D8_FLI.pep
CPAPPALLSLLLPCPPGGRRRLRLVAERPRHVLRRRRRVWHDGRRVRLREHVQHGVRHQHGGAEHGALQRRRRVRVLLRAALRQRRAVVPAGHHHRHGHQLLPAQLRPPQRRRRLVQPAAPALRHGPAGLPPDRAVPRRHRARRVQEGAVREEGRDQVHHQRPLLLQPGAGDQRGRRRGRAVRVHQGLQHRVAAHVPQLGPELAEQLAPRRPEPLLPGHRQRRPHRHQQRRRSGGLAVRPDLRGRPVLATTTPSTSVTVSKREGETFFAVVKKRLPPFRGCLLLAPA

SEQ ID NO: 59409 - protein, 123 aa, Zea mays
  Clone ID: LIB3066-014-B11_FLI.pep
RLRASSGARPLLLPSSGASAALPWAKQRGKCREREVETVWSSSHMEGALVAGESFTCGVLHCRAAASWSASTTRADSIAGQPKLSVESLKAVCPCSFRSEVTSHPKTNLVRYLESQVPDKLCP

SEQ ID NO: 59410 - protein, 377 aa, Zea mays; identical to SEQ ID NO: 52727
  Clone ID: LIB3067-031-C2_FLI.pep

SEQ ID NO: 59411 - protein, 167 aa, Zea mays
  Clone ID: LIB3067-044-D1_FLI.pep
EENGLLHVPKEDAQKAQAAMFSDPNMAMDMMKKNLSMIVPQTLTFAWVNFFFSGFVAAKIPFPLTQRFRGMLQNGIDLSTVDVSYVSSRSWYFLNLFGLRGLFSLILGEENATDDAQKMMQMGGGFGFNPTMSLGAEKDSLDIMQHDWALPKMERHAEDVLKQLLKK

SEQ ID NO: 59412 - protein, 258 aa, Zea mays
  Clone ID: LIB3069-011-F9_FLI.pep
HHHHHHQSLRFSSAAAAAAAEEVDEMLSADIPPNQTIYLNNLNEKVKKEELKRSLYALCSQYGRILDVVALKTQKLRGQAWVVFSEITAATNAFRGLQDFDFYGKKMRVQYAKTKSDCIAKEDGTYAPKEKRKKQEEKAAEKKRRAEETQQAGPNAAAAQSNGTGYQASRLGKASQEPPAPPNNILFIQNLPDQTTSMMLQILFQQYPGFREVRMIEAKPGIAFVEFEDDGQSMVAMQALQGFKITPENPMAISYAKK

SEQ ID NO: 59413 - protein, 414 aa, Zea mays
  Clone ID: LIB3069-023-H11_FLI.pep
ASESSEPPARPPPSPPPVPKANSFQVAMADQANQPTVLHKLGGQFHLRSIISEGVRARNICPSVSSYERRFATRNYMTQSLWGPSMSVSGGINVPVMQTPLCANAPAEKGGKNFMIDFMMGGVSAAVSKTAAAPIERVKLLIQNQDEMIKSGRLSEPYKGIVDCFKRTIKDEGFSSLWRGNTANVIRYFPTQALNFAFKDYFKRLFNFKKDRDGYWKWFAGNLASGGAAGASSLFFVYSLDYARTRLANDAKAAKGGGERQFNGLVDVYRKTLKSDGIAGLYRGFNISCVGIIVYRGLYFGLYDSIKPVVLTGNLQDNFFASFALGWLITNGAGLASYPIDTVRRRMMMTSGEAVKYKSSLDAFQQILKKEGPKSLFKGAGANILRAIAGAGVLSGYDQLQILFFGKKYGSGGA

SEQ ID NO: 59414 - protein, 372 aa, Zea mays
  Clone ID: LIB3069-030-B1_FLI.pep
CCMHISLAVSGRRGHKYIPLSRLQIVLDDEGYTPRCSFPSVSSCKEIEVTPSSSVYHCKIGAVDAAAKIRYLDTRRVSNDEVKLFEYKLLGEVRMLGALRKHRSIVDIYGHQLSSKWVQVGGDKEYRILQSIILMEYVNGGSLKRYLTKLLKEGKKCVPIDLSVYIAREVACALLEMHKKLVIHRDIKSENVLIDLDPKRNAGAPPIVKLSDFDRSVPLYSLSHTCCISQLGTHPPDVCVGTPCWMAPEVVKAMHEKHHYGLEIDIWSFGCFLLEMLTLQMPYQGLSDTEIYDLILRKKQRPRLTQELEAFWTMDEPATRLKLGITSDAHADKLRHLIDLFYQCTRGHASRRPKAVQIYNSLCSLPTCYDMR

SEQ ID NO: 59415 - protein, 186 aa, Zea mays
  Clone ID: LIB3069-041-A6_FLI.pep
GAAMASDVPMTPELEQIDGEIHDIFRALQNGFQKMDKIKDSNRQAKQLEDLTVKMKECKRLIKEFDRILKDEESNNPPEINKQLNDRKQFMIKELNSYVTLRKTYQSSLGNNNKRVELFDMGAGSSEPAAEDNIQMASAMTNQQLIDTGRNQMDQTDQAIERSKMVTSLTIHPCPVCHGKIYKTFL

SEQ ID NO: 59416 - protein, 465 aa, Zea mays
  Clone ID: LIB3069-050-B1_FLI.pep
PALTAASLPLRYCSSSPHSPAGAAAAAARSYPTSASGGGTAGGKGKMFGRAPKKSDNTKYYEILGVPKSASQDDLKKAYRKAAIKNHPDKGGDPEKFKELAQAYEVLSDPEKREIYDQYGEDALKEGMGGGGSHVDPFDIFSSFFGPSFGGGGGSSRGRRQRRGEDVVHPLKVSLEDLYNGTSKKLSLSRNVICSKCKGKGSKSGASMRCPGCQGSGMKVTIRQLGPSMIQQMQQPCNECKGTGESINEKDRCPGCKGEKVIQEKKVLEVHVEKGMQHNQKITFPGEADEAPDTVTGDIVFVLQQKDHSKFKRKGEDLFYEHTLSLTEALCGFQFVLTHLDNRQLLIKSDPGEVVKPDQFKAINDEGMPIYQRPFMKGKLYIHFTVEFPDSLAPEQCKALETVLPPRPSSKLTDMEIDECEETTMHDVNNIEEEMRRKQAHAAQEAYEEDDEMPGGAQRVQCAQQ

SEQ ID NO: 59417 - protein, 119 aa, Zea mays
  Clone ID: LIB3070-014-F12_FLI.pep
PWTFGSPRCCPRSSSSSSRAPATAVATVAAATATPTGTGGTERWGPRGQVILFATVMFTLVQRVYLRSSRLLLPICVFDCKVALCQLLVLCSSSAPADPCINQHGLWIDGCCYSCQDLF

SEQ ID NO: 59418 - protein, 97 aa, Zea mays
  Clone ID: LIB3067-030-A7_FLI.pep
EYLCIINFFLQKDQQNTHSYPDIREDLSEKISGYSISDRYQTYCIRIRYPNKISVFVSVIKKRPDIRKFHPNQYSPSSSLDLDGYFLNHITSLAPNR

SEQ ID NO: 59419 - protein, 316 aa, Zea mays
  Clone ID: LIB3067-051-D6_FLI.pep
RAESRLESNLDLPDLSPTHASSAPSSAAAMASPDLLFNLRNLFYLGAYQAAINNSDVPGLDADAAAERDAIVFRSYIALGSYQLVISEIDSSAATSLQAVKLLALYLTGDKEGAISSLKEWLSDSAIGSNPVLRLIAGIIFMHEQDYNEALKHTHSGGTLDLHALNVQIFIKMHRSDYAEKQLKIMQQIDEDHTLTQLANAWLGIAVGGSKIREAYLIFQDFAEKYPMTGMVLNGKAVCCMHMGSFEEAETLLLEALNKDAKDPETLANLIVCNLHLGKPSSRYLSQLKLSHPDHVLVKNAAASEATFERALQAVA

SEQ ID NO: 59420 - protein, 408 aa, Zea mays
  Clone ID: LIB3067-057-G2_FLI.pep
QTPAESSVVRARPVLPPPPLPRLPHSSSSVPFQDPCSRPSIHPSIHPLRGEGKPAGRPAGGAEMRGQTETGRWRGGDGAAAWWVAVVALQLGHSLSRARAGLLESNPGLAYNFYQSSCPSAESIVRSVTWAQVAADPALPARLLRLHFHDCFVKGCDASILLDNAQSEKTAAPNLSVGGYEAIDSIKAQVEKACPGVVSCADIVALAARDAVSYQFGASLWQVETGRRDGAAPSLASDAAGPGALPSPFAGLGGLLAGFARRGLNLTDLVALSGAHTIGVASCSSVTPRLYQGNATSVDPLLDSAYARALMSSCPNPSPASATVGLDGGSPARFDSGFYARVRRGQGTLASDAALAQNAAAAQVMDDLATPASFYAAFSMSMKKMGRVDVLTGTNGQIRKQCRQVNTS

SEQ ID NO: 59421 - protein, 110 aa, Zea mays
  Clone ID: LIB3068-021-E4_FLI.pep
STASPSVPCPLEARGRTPSRPRRRSRAPSPAAPAPLPPRPRQIALGGARPPWRRRRAESHRSGPPWTTQSPSSAIRYHARTWRSPSRSCCGCRRSPKFAPPNVLCSTILI

SEQ ID NO: 59422 - protein, 361 aa, Zea mays
  Clone ID: LIB3069-003-F9_FLI.pep
PTPSRPSPARCPFRAPPPRFVDHLSGAAVLSRRTRHRGASGARSLRRLRPAAMGSRVLHLDVPADSEAYLMRNVPGSVSSPRTNGEKGLFRNQNAGFTALASPVRREIGNRSSTRSFCVEDNDLEDGKTSKEREGSAQSLRLPKIQNQALLSGLAYCISSCSMILVNKFVLSSYGFSAPVFLMLYQNIVSVTIVSTLSLSGAVPTEPLTWNLIKVWLPVNIIFVGMLITSMFSLKYINVAMLTILKNVANVLTASGETYFFKKQHGTQVWVALMLMIISAVAGGITDLSFHAVGYIWQTLNCVLTAAYSLTLRHVMDSAKQVTKSGNLNELSMVLLNNVLSLPLGIILVLGLNEVEYLLQT

SEQ ID NO: 59423 - protein, 124 aa, Zea mays; identical to SEQ ID NO: 41198
  Clone ID: LIB3069-010-G4_FLI.pep

SEQ ID NO: 59424 - protein, 423 aa, Zea mays
  Clone ID: LIB3069-016-B2_FLI.pep
LNFDAERTTPVKERPALSTPVKDRAGGATPARERGAAATPGRERTAAASPALSSASLRKSSSVLPRLTRSKSFVADRDQQHPRIPKSPFPTEKSSVSCTASRATRRVAKEEEPSSPPSDDELGSSATSTKKRSATAARVPVPGKLSLLGKDAMEQREQAQKVALEALRNASATDNVARIYKLFSEVSKTARPEAPATCFDSFLSFHQEAVQAVTDIEAIQAATSMAAAVASDEQQLEDAPPVLQEIAQNRTVVRRRGIGLGSVSKSVSFAPGTLDPKQDDGGGKAIRSSSASRKCLATDKIGEDGGDEKRSSSSGPSSATTTTAHSALGSSLKLAKKIQAEAGSWFMDFLEAALETGLKKSKASSMGDGRKQSSCCCPQSLMLRVINWVEMEQSGGDSSGRKTAHPRAAAVARKLRIKAKNPS

SEQ ID NO: 59425 - protein, 358 aa, Zea mays
  Clone ID: LIB3069-026-D6_FLI.pep
PETIDEHLPASAMAAATVSVPRIKLGSQGLEVSAQGLGCMGMSAFYGPPKPEPDMIKLIHHAVAAGVTLLDTSDMYGPHTNEILLGKALQGGVREKVELATKFAVSFADGKREIRGDPAYVRAACEASLKRLGIDCIDLYYQHRIDKKVPIEVTIGELKKLVEEGKVKYIGLSEASASTIRRAHAVHPITAVQLEWSLWSRDVEEDIIPTCRELGIGIVAYSPLGRGFFCSGAKLVDSLSEQDFRKHMPRLQPENIVKNAKIFEHVNAMAAKKGCTPSQLALAWVHHQGNDVCPIPGTTKIENFNQNVGALSVKLTPDEMAELESCAAAGEILGDRYPQMANTWKDSETPPLSSWKSE

SEQ ID NO: 59426 - protein, 75 aa, Zea mays
  Clone ID: LIB3069-027-D9_FLI.pep
NSSTPRRSPARRFLRQLRNRGPHDVGAAHKKLVCGLEPKIFCFFPPREVLEAYSPAPWLITHCSNSVWPCHACNK

SEQ ID NO: 59427 - protein, 87 aa, Zea mays
  Clone ID: LIB3069-042-H8_FLI.pep
FWKLQCCAAIHATEEVLSTIYIQVMLVIQTKHATVTSSSHQFDAACFYRSNRSAAKVGFDVILTSNLPLVCAMYISKPTSSGLFSFL

SEQ ID NO: 59428 - protein, 358 aa, Zea mays
  Clone ID: LIB3075-012-C12_FLI.pep
THRVGRGKGVGADPAVALSRIEYDLTHLRPSFLAPKMSGHGDTATSAKMAKLKELLQKSENHICADCGASDPKWASANIGVFICVKCSGVHRSLGTHISKVLSVTLDKWSDSEVDSMIEVGGNSQANAIYEAFIPEGYQKPHSDSTQEEREKFIRSKYELQEFLKPSLRIVSHQPSDSGKHAGNASHSDGSKSQVGMIEFIGILNVKVIGGTNLAIRDMSSSDPYVVLTLGQQKAQTSVINGNLNPVWNEELKLSVPQQYGPLKLQVFDHDMVSKDDLMGEAEIDLQTMINAAAAFGDPELLGDIQIGRWLKSEDNALVRDSAVVVSGGKVKQGMALKLQHTESGELELEMEWMPLNV

SEQ ID NO: 59429 - protein, 448 aa, Zea mays
  Clone ID: LIB3075-028-D3_FLI.pep
ATASLAHPLHLCRLRLAAPRSRSPSPRHGRRAMSVRSSLIDPDGGALVELVAPPDRLPALRAEAEALPRVRLAPVDLQWAHVLAEGWASPLRGFMREHEYLQSLHFNCVRLPDGGLVNMSLPIVLAIGDADKEQIGGKPDVALQGPDGGVVAILRRVEIYPHNKEERIARTWGTTAPGLPYVDEAIASAGNWLIGGDLEVLEPIKYNDGLDHYRLSPRQLRKEFDKRGADAVFAFQLRNPVHNGHALLMNDTRRRLLEMGYKNPILLLHPLGGYTKADDVPLPVRMEQHSKVLEDGVLDPETTIVSIFPSPMHYAGPTEVQWHAKARINAGANFYIVGRDPAGMGHPTEKRDLYNPDHGKKVLSMAPGLEKLNILPFKVAAYDTVAKEMAFFDPSRSQDFLFISGTKMRTYAKTGENPPDGFMCPGGWKVLVDYYNSLQAEEATPVPV

SEQ ID NO: 59430 - protein, 321 aa, Zea mays
  Clone ID: LIB3076-022-F9_FLI.pep
RERERDGPAAAEAEMGASDLDRQIEQLKRCEPLTEAEVKALCLKAMEILIEESNVQRVDAPVTICGDIHGQFYDMKELFKVGGDCPKTNYLFLGDFVDRGFYSVETFLLLLALKVRYPDRITLIRGNHESRQITQVYGFYDECLRKYGSVNVWRYCTDIFDYLSLSALIENKIFSVHGGLSPAITTLDQIRVIDRKQEVPHDGAMCDLLWSDPEDTVDGWGLSPRGAGFLFGGNVVSSFNHSNNIDYICRAHQLVMEGYKWMFNSKIVTVWSAPNYCYRCGNIAAILELDENLNKQFRVFEAAPHESRGVPAKRPAPDYFL

SEQ ID NO: 59431 - protein, 245 aa, Zea mays
  Clone ID: LIB3076-024-E6_FLI.pep
GADPSPRTAAPEPPRCSGWGWLRAIQKHSSENYSVGPKMVSLKVPKRLAASVLKCGKGKVWLDPNEVSEISMANSRHNIRKLVKDGFIIKKPQKIHSRSRARRAHEAKQKGRHSGYGKRRGTREARLPTKVLWMRRMRVLRRLLRKYREAKKIDKHMYHDMYMKVKGNSFKNKRVLMESIHKSKAEKAREKTLSDQFEARRAKSKASRERKNARREERLAQGPREIPPPVSATAPTTGAPKKAKK

SEQ ID NO: 59432 - protein, 328 aa, Zea mays
  Clone ID: LIB3076-053-G3_FLI.pep
RGAVILTGCKAEYFVLEKNHSSGSGSGRGKKCVGLVATCASNGVTKKLRIEAKVSIAACGALMTPPLLRRSGLKNRHIGSNLHLHPVSMAWGYFPENKQDPPLSGKCYEGGIITSMHRVTDRTIIETPALGPGAFAAMVPWESGRDMKERMRRYSRTAHAFALVRDRGVGFVDGEGRVRFTPSREDVDELRNGLRRVLRILVAAGAAEVGTHRSDGLRLRCKGLRDEDLEAFLDEVTIEKGPMHSRVDKWALHCSAHQMGSCRMGSSPKDGAVDGRGESWEAEGLYVCDGSLLPTAVGVNPMITIQSIAFCLSKGIAETMAQGQGKGQ

SEQ ID NO: 59433 - protein, 166 aa, Zea mays
  Clone ID: LIB3078-003-D6_FLI.pep
TPSQASLLLQKQLKDLAKNPVDGFSAGLVDDSNVFEWQVTIIGPPDTLYDGGYFNAIMTFPQNYPNSPPSVRFTSGMWHPNVYPDGRVCISILHPPGEDPSGYELASERWTPVHTVESIVLSIISMLSSPNDESPANIEAAKDWREKRDEFKKKVRQCVRRSQEML

SEQ ID NO: 59434 - protein, 99 aa, Zea mays
  Clone ID: LIB3078-009-F9_FLI.pep
RKFEVHGAMFAALSQENSLKNLDSRFVIPFLEQVVVTVRSSLNAKQKLNTLKSVVRYSVRLRRMIIRISQMKNCHAAGDDFFEEICKFTYMNSGTVCIE

SEQ ID NO: 59435 - protein, 250 aa, Zea mays
  Clone ID: LIB3076-023-B5_FLI.pep
YGFNRTRTWAAHSLSPSHNLPRRSRSPCAAGAPGQPSATAPPSCAQVAQGSRSARSSLFRPKLLDWSAAQINFTYWTVVQILIIELFIDTLSTKCMEALGDGGGLPEQVVAERARQAAREQLPLHHGHGAVPRRTASPAPLPPASPPLMLRFPVILVVAAHLRRRLLIRPRPLFHLVLGLRLNSRRRCGPGGLTGLHGVGPSHEASSPCRRWAKQRRLLLLRRRLPSGWKWERSKRTTTPRRSWRRESKQ

SEQ ID NO: 59436 - protein, 247 aa, Zea mays
  Clone ID: LIB3076-031-D11_FLI.pep
TALSVTGLTESGRLGFGKRAPAMSTTTEAAKSGSAAPVRCQRIGCDAVFTDDDNREGSCQYHPSAPMFHDGMKEWSCCKQRSHDFSLFLQIPGCTTGKHTTEKPITKAVSSNRTKATPIQSSKQGVGVDVCARCRQGFFCSDHGSQPKPQKPAATDDTNKEPVEKSAVPPPKKRIDVNELRTCKNKGCGKSYKEKDNHDSACDYHPGPAVFHDRMRGWKCCDVHVKEFDEFMEIPTCTKGWHNADAV

SEQ ID NO: 59437 - protein, 185 aa, Zea mays
  Clone ID: LIB3076-032-B1_FLI.pep
ARHRKHPPPSTSDITTTNSSSATAQALSPLMRRASWMSLGMMVTLLAWMAQRLVSSKSPTRYASAASCSAATAEDWNRRSVLKSCAISRTRRWEGSLRMSSSVLFWYLRISRSATVPGRKRCGFFTPPVAGADLRAALVASCFRGALPPVDLRAVCFVRAIRSGEEEGAVCTPGSGSGGGKGRFP

SEQ ID NO: 59438 - protein, 138 aa, Zea mays
  Clone ID: LIB3076-036-D6_FLI.pep
EGGGGRRRRRQRLVVVPELVRVVGRQSREQVADGDRRLHAVHDVLHGGQEGLPHLHQLQAALPRGPPPLLWRRRQRHRQGQVKGRSACRTVPRPSVQLMLIRMVSSGLSLWALCAHLEARWGSDRRWIIHWMDMAYLV

SEQ ID NO: 59439 - protein, 426 aa, Zea mays
  Clone ID: LIB3076-055-E4_FLI.pep
LGSSCRSTGHRDKPPISKAAIIGVAVGGLVILLMILVAVCRPHHPPAFKDATVSKPVSNGPPKLVILHMNMALHVFDDIMRMTENLSEKYIIGYGASSTVYKCVLKNCKPVAIKKLYAHYPQSLKEFETELETVGSIKHRNLVSLQGYSLSPVGNLLFYDYMESGSLWDVLHEGSSKKNKLDWVTRLRIALGAAQGLAYLHHDCSPRIIHRDVKSKNILLDKDYEAHLTDFGIAKSLCVSKTHTSTYVMGTIGYIDPEYARTSRLNEKSDVYSYGIVLLELLTGKKPVDNECNLHHLILSKTASNEVMETVDPDVGDTCKDLGEVKKLFQLALLCTKRQPSDRPTMHEVVRVLDCLVNPEPPPQPQQQQQKAHAHHQLPPQPSPPAYVDEYVSLRGTGALSCANSSSTSDAELFLKFGEAISQNMV

SEQ ID NO: 59440 - protein, 164 aa, Zea mays
  Clone ID: LIB3078-049-A7_FLI.pep
QRRRRDLADDLVEGAGVLEPEHDADAEDVADGAAGQRVGEGEPGGVTRLQAGVARLQLQPRRRLAVRGRRQPEPPREQHQRRRRHHDQVGGGADVVAADALRRRPLPAHPHGRQRCHRGPGRGVAPEAVEPGHGGGELGCHVWRLRRRRRTSHLCAAVPSSASA

SEQ ID NO: 59441 - protein, 264 aa, Zea mays
  Clone ID: LIB3079-008-F4_FLI.pep
LRSADAAHAGSNGGGDEEGPGAAGLLGEPVRAALPHRAGGEGHRLRVLGAGAAGRRQERHPPPLQPGAQEDPRAPPRRPPRLRVPRHPRVPRGGLPGGLPQAAPRRRLRARAGPLLGGLLRQGLRGRHAAVEAQGRRAGAGARRDRAGGPEPRRRARGQGLLRRRGVRVRGRGARALRAVAPQLRAVRGLQRGGDRAQAGGVGAPVRAAGERGQDPSPAGKGGRVHQPAQEDLRHRVVERTTTSRGDGTGRTYVAAMQFLFRFV

SEQ ID NO: 59442 - protein, 103 aa, Zea mays
  Clone ID: LIB3079-033-C1_FLI.pep
HPRPGQRPLPNCHPQGEGDQERPTDHVLHVRLLHLSLCHRRRPPCRTSPSRRFFLRVLRRTTSCKTTILQQKNDFSKFDPFIYYELASIDKIVCLYLQVRAWY

SEQ ID NO: 59443 - protein, 421 aa, Zea mays
  Clone ID: LIB3079-042-A9_FLI.pep
LAVFFNYHNPTNPLSLAHYLISLAGSSHRPVRLARGCQGAATRPRTRLLPSHPFSTGRVNGRDCMHAGSTSGRCCRVAAAAGPFLDSTNLLLIDIDSLCYYTLTNLRLHGNGHVGLDRQLLRRRHGSRDAAVGHAGRICPCSRSCLGGAGAGDRLHVHVDDHDHLRLVHLLHRRRRSFDVDVDGVHLSTAARPGLGRRRGHHHLLGVLRQLRLLHRHRRGLLVPVRHVQRYLRDAEDEAQHVGERHEHVPLQRAVREPDHGAQHQEEGERDGHELHALGPDHLPHDAERRGEYAERDADADPAEHAHAEAGAGDHHGGERGESKDADVEPQQHLGRQRPGGLGRVHQVRGQVRRLDHAPDAVDGHQQLGAGLEQRVEDPQHAAEQRHHVRGRLEPLRRLLAVHAVERRQRRKEHHQRDYVT

SEQ ID NO: 59444 - protein, 108 aa, Zea mays
  Clone ID: LIB3079-043-G7_FLI.pep
ESMTLSSLWEIVPKDLCALLMNPFLICLLIICLFALFSFCSFHKHDNQNMFYVHRWRGAILENKLVPLFKQRMLYDKGNSSFCILHHLVLGLLFVAVAGFFPIHQGHG

SEQ ID NO: 59445 - protein, 335 aa, Zea mays
  Clone ID: LIB3088-024-F4_FLI.pep
QMHKSYRSKRVRIHGYKQLSLTATTAGPRKSKRCERRRRSGGLRQSTMHARAREKLNDRRRAGRESWMLAAHPWVGRLRLLVVGGGELLVGVGDEEQLVDDAGEAAADEGPDPVHPLVAPLPADEGGAEGHGGVHGRAVEGAAHQDVGPHDEADGNGGDGAQAALLRVHRRGVHRVHQPEGHHDLQHQRLPHRHARQPEGARGLPARREAEQEARHGGPQQLRHPVQEPPEQGDVAAHEGAEGHGRVHVPAGDVRAHRHRHEQRERVRHRRRDQARRGRRAAAGQLACARGTPAGTSNSQILTTTVQIKTCSGFLFFFPAFLLYCCDFLLPLLSL

SEQ ID NO: 59446 - protein, 161 aa, Zea mays
  Clone ID: LIB3115-009-E10_FLI.pep
SSSTPSRYIHSQSAVSSEPREMADQETVAVVEAPTPVLGEPMDLMTALQLVMKKSGAHDGLVKGLREAAKAIEKHAAQLCVLAEDCDQPDYVKLVKALCAEHNVHLVTVPSAKTLGEWAGLCKIDSEGKARKVVGCSCVVVKDYGEESEGLNIVQEYVKSH

SEQ ID NO: 59447 - protein, 141 aa, Zea mays
  Clone ID: LIB3115-016-H3_FLI.pep
WLGEGVSSVEQAEAHVVIRLLLGLFLLLLDSRGSSSRSTTSRCGSSNWSSSATRSNGEDEVLDVALLQELGEEGRPVGLDLDVGRLHDRGDLLGGDGDAIVAEDESGVGAGKLAGGHGFVRLPLTGRRICGIRLREAVRRQ

SEQ ID NO: 59448 - protein, 85 aa, Zea mays
  Clone ID: LIB3115-039-D6_FLI.pep
HDVTIDDAEHDVTNGLAEHDVANDDATMSLRRRLADYAATAVTIHVQPNGHDDSTHVLTATLCWCCILDRNICVVPNNELTCHRV

SEQ ID NO: 59449 - protein, 47 aa, Zea mays
  Clone ID: LIB3118-030-G6_FLI.pep
GAPGSDSSATAERRLRSPVASHCSGPSPTKNKFNIEVNTWSTYQILN

SEQ ID NO: 59450 - protein, 165 aa, Zea mays
  Clone ID: LIB3150-006-C9_FLI.pep
HDTCKSEWMEYNVPEILNASTKHRSCHKNFHLPLFIIKVMLSPLRSIRPSVFLVFFLTLISSASSRTKFMYSSNPMMRPSIRRSFCSKSQIWMRALLWRKRKMRLMGWVMIRCTLVDAMAAAAAGASPPPRTSRSFRRRARRGQNPSYTRLVCEGAVREEGFVSP

SEQ ID NO: 59451 - protein, 233 aa, Zea mays
  Clone ID: LIB3150-009-D1_FLI.pep
IKLRAIHDKLRPPLRSPPSYSDPKERTQGESTMTEGGRPNRPDQRDLGELSAVSDLDHLGGGAVAGAHLLDGLDDVHALDDLAEDDVLAVEPRGRDGADEELGAVGVGPGVGHGEHTGGGVLAHELLVGELLAVDGLAAGAVAAGEVAALAHELGDDAVEGGALVVERLPGLAHALLARAQRAEVLRGLGHLVGVQLHHDPARRGAADGHVEEDARVRHRDRELGFGDIFPSL

SEQ ID NO: 59452 - protein, 230 aa, Zea mays
  Clone ID: LIB3150-012-D2_FLI.pep
IRSCASYHFDPMAPTSKLSTGIKRASRSHAYHRRGLWAIKAKNGGAFPKADKAAAAVEPKFYPADDVKPRVPSTRKPKPTKLRSSITPGTVLILLAGRFMGKRVVFLKQLKSGLLLVSGPFKINGVPIRRVNQTYVIATSTKVDISGVDVAKFDDKYFAREKKQKVKKTEGELFETEKEASKSLPDFKKDDQKAVDSALIKAIEAVPELKTYLGARFSLRDGDKPHEMVF

SEQ ID NO: 59453 - protein, 415 aa, Zea mays
  Clone ID: LIB3150-015-A3_FLI.pep
AQTLAAAAAAAAMVAVNRPLVSVKALEGDMVTDAPGIALPPVFGAPIRPDVVRFTHKLLSCNKRQPYAVSRRAGHQTSAESWGTGRAVSRIPRVPGGGTHRAGQGAFGNMCRGGRMFAPTKIWRKWHRRVNINLRRVAVASALAATAVPALVQARGHRIETVPEMPLVISDSAESIEKTSQALKILKQIGAHADAEKAKDSVGIRPGKGKMRNRRYINRKGPLIVYGTEGSKVVKAFRNLPGVDVANVERLNLLDLAPGGHLGRFVIWTQSAFNKLEEVYGSYDAPSQKKKGFVLPRPKMSNADLGRIINSDEVQSVVKPLNKEVKRREKRKNPLKNMAAVLKLNPYLGTARKMATLAEAARVKARKAKLDSKRTKLTPETAKVKAAGKAWYKTMVSDSDYTEFENFSKWLGVTQ

SEQ ID NO: 59454 - protein, 143 aa, Zea mays
  Clone ID: LIB3150-028-B8_FLI.pep
PSSWRAPIQEMAVPLLTKKIVKKRVKQFKRPHLDRYKCLKPSWRRPKGIDSRVRRKFKGCTLMPNIGYGSDKSTRHYLPNKFKKFVVHNVSELELLMMHNRTYCAEIAHNVSTKKRKEIVERAAQLDIVVTNKLARLRSQEDE

SEQ ID NO: 59455 - protein, 216 aa, Zea mays
  Clone ID: LIB3150-001-B6_FLI.pep
APAPPFRFPHSLLQLRVRRRREGKMYTARKKIQKEKGLEPSEFEDSVAQAFFDLENGNQELKSDLKDLYINNAIQMDVTGSRKAVVIHVPYRLRKAFRKIHVRLVRELEKKFSGKDVVIVATRRIVRPPKKGSAVLRPRTRTLTAVHDGILEDVVYPAEIVGKRVRYRLDGSKIIKIFLDPKERNNTEYKLETCTAVYRRLCGKDVVFEYPMTENA

SEQ ID NO: 59456 - protein, 181 aa, Zea mays; identical to SEQ ID NO: 38491
  Clone ID: LIB3150-006-G8_FLI.pep

SEQ ID NO: 59457 - protein, 36 aa, Zea mays
  Clone ID: LIB3150-013-G5_FLI.pep
GTILFSFHFNCSFRSLLTLTLPPMVMRDTLLLNHRR

SEQ ID NO: 59458 - protein, 242 aa, Zea mays
  Clone ID: LIB3150-016-B1_FLI.pep
SKANLQPAIIPPPHAKSARSSSSPEDQARATEMSYAYLFKYIIIGDTGVGKSCLLLQFTDKRFQPVHDLTIGVEFGARMITIDNKPIKLQIWDTAGQESFRSITRSYYRGAAGALLVYDITRRETFNHLASWLEDARQHANANMTIMLVGNKCDLSHRRAVSYEEGEQFAKEHGLIFMEASAKTAQNVEEAFVKTAGAIYKKIQDGVFDVSNESYGIKVGYAIPGQSGGAGSSSSQGGGCCS

SEQ ID NO: 59459 - protein, 653 aa, Zea mays
  Clone ID: LIB3150-020-B5_FLI.pep
GKEARRPQPEQPPFRIRPVSGAAALTLGVAAPSAEMQQRARDGEQHRLLDLAVESGFDRDLAASCLARLLEVYGEDGLDMVTVDNCGNDFLASLADATQPTDDWDDLKGIETEACGNLNDMMMKNVPDCNGGVAIDISYTSREPNLSSQRAPNHLEAFKFASDDSDFEMDNLPDKSSSMQRQTQSRNSGMQTRSSAKSTVTRETSRYEPTTPTSNREMPPAAFHQRRELLSYEQLCCLDDVNFANAVIFGNKGFRPLQYEACRAAMDNQDCFILMPTGGGKSLCYQLPATLHPGVTVVVSPLLSLIQDQIVALTYRFAVPAAFLNSQQTSAQASAVIQELRCGKPAFKLLYVTPERIVTNYSFMETLRGLDQRGLLARFVIDEAHCVSQWGHDFRPDYRGLGCLKQNFPTVPIMALTATATESVRKDVLGALRIPNAVVLKRSFDRLNLNYEVIGKTKTFQKQLGDLLKERFMNESGIVYCLSKNECADTAKFLREKYKIKCAHYHASLAARQRTSVQEKWHSGEVKVICATIAFGMGIDKPDVRFVIHNTLSKSIESYYQESGRAGRDELPAHCIVLYQKKDFSRIVCMLRNGDNFRSESFRVAMEQAKKMQAYCELKTECRRQALLQHFGEQYDRRRCRDGPSPCDNCLKT

SEQ ID NO: 59460 - protein, 362 aa, Zea mays
  Clone ID: LIB3150-027-A12_FLI.pep
ASSRLELQQAHTELWNLTFSYLKSMALECVVQLNIPNVIHNFGGNATLPSILSAIQVPEHRKPYLPRLMRFLVVSGILSFDSPTLGEEGTYHLTPLSRLLVDDTHINGYGSLGPFVLSQTTKYHVSSATYLSEWFKGEDGAGPMAAEMPFKMAHGTGPWGALGHDQQFNRVFNAGLGSNSRLVLDFVVAEYGDVFDGVSSLLDVGGGDGSTARTIRKAFPHIKCSVLDLPNVIIDIQPGDGMVDYIAGDMFSSIPPTDAIMLKYVLHDWNDDDCVKILQQCKKAICSCKPAGGKVLIIDVVVGSPLKEMFEAQVTSDLLMMVIAGGKERDKKEWHKIFVESGFKDYKISPVLGYLSIIELYS

SEQ ID NO: 59461 - protein, 246 aa, Zea mays
  Clone ID: LIB3150-031-B4_FLI.pep
AHEAPVLPTDGLPDDFDWRDHGAVGPVKNQGSCGSCWSFSASGALEGAHYLATGKLEVLSEQQFVDCDHECDSSEPDSCDSGCNGGLMTTAFSYLQKAGGLESEKDYPYTGSDGKCKFDKSKIVASVQNFSVVSVDEAQISANLIKHGPLAIGINAAYMQTYIGGVSCPYICGRHLDHGVLLVGYGASGFAPIRLKDKPYWIIKNSWGENWGENGYYKICRGSNVRNKCGVDSMVSTVSAVHASKE

SEQ ID NO: 59462 - protein, 435 aa, Zea mays
  Clone ID: LIB3150-047-D4_FLI.pep
TDSFLSYKYLLSTMFGRMPRKSSNNTKYYEVLGVSKTASQDELKKAYRKAAIKNHPDKGGDPEKFKELSQAYDVLSDPEKREIYDQYGEDALKEGMGGGSSSDFHSPFDIFEQLFPGSSTFGGGSSRGRRQKRGEDVVHTMKVSLDDLYNGTTKKLSLSRSALCSKCKGKGSKSGASGTCHGCRGAGMRTITRQIGLGMIQQMNTVCPECKGSGEIISDKDKCPSCKGNKVVQEKKVLEVHVEKGMQHNQKIVFQGQADEAPDTVTGDIVFVLQLKDHPKFKRMYDDLYVEHTISLTEALCGFQFVLTHLDGRQLLIKSDPGEVIKPGQHKAINDEGMPQHGRPFMKGRLFVEFNVEFPEPGALSPAQCRSLEKILPPKPGSQLSDMELDQCEETTLHDVNIEEEMRRRQQQKKQEAYDEDEEEDAQPRVQCAQQ

SEQ ID NO: 59463 - protein, 333 aa, Zea mays; identical to SEQ ID NO: 58237
  Clone ID: LIB3150-050-D11_FLI.pep

SEQ ID NO: 59464 - protein, 369 aa, Zea mays
  Clone ID: LIB3150-061-F3_FLI.pep
RGMYGDAVPPSLSLFDAAGSVAADPFQAVQQAPGAGGGGVDDVAGWQYAAAAGSELEAVQLQQEQQPRDADSGSEVSDMQGDPEDDGDGDAQGRGGGKGGGKRQQCKNLEAERKRRKKLNERLYKLRSLVPNISKMDRAAILGDAIDYIVGLQNQVKALQDELEDPADGAGAPDVLLDHPPPASLVGLENDESPPTSHQHPLAGTKRARAAAEEEEEEKGNDMEPQVEVRQVEANEFFLQMLCERRPGRFVQIMDSIADLGLEVTNVNVTSHESLVLNVFRAARRDNEVAVQADRLRDSLLEVMREPYGVWSSSAPPVGMSGSGIADVKHDSVDMKLDGIIDGQAAPSVAVGVSEDHYGGYNHLLQYLA

SEQ ID NO: 59465 - protein, 193 aa, Zea mays
  Clone ID: LIB3151-062-C9_FLI.pep
KRQCVERIVEQNSMKMVIVLVVCLALSAASASAMQMPCPCAGLQGLYGAGAGLTTMMGAGGLYPYAEYLRQPQCSPLAAAPYYAGCGQTSAMYQPLRQQCCQQQMRMMDVQSVAQQLQMMMQLERAAAASSSLYEPALMQQQQQLLAAQGLNPMAMMMAQNMPAMGGLYQYQYQLPSYRTNPCGVSAAIPPYY

SEQ ID NO: 59466 - protein, 423 aa, Zea mays
  Clone ID: LIB3180-001-F10_FLI.pep
GRGRLLPVCPPPDLVETECQRWKSKGVNIKYEVRGNRKGYKAGALKEGLKHDYVADCEYIAMFDADFQPDSDFLLRTIPFLVHNPEIALVQARWKFVNSDECLLTRFQEMSLDYHFKYEQEAGSSVYSFFGFNGTAGVWRISAIDDAGGWKDRTTVEDMDLAVRAMLQGWKFLYVGDIKVKSELPSTFKAYRFQQHRWSCGPANLFKKMMVEILENKRVSLWSKIHLWYDFFFVGKVAAHTVTFIYYCFAIPVSVLFPEIQIPLWGVVYVPTVITLLKALGTPSSFHLVILWVLFENVMSLHRIKAAVSGLLDAGGRVNEWVVTEKLGDTSKAKPGTNGSDTAVKVIDVKLTEPLVPKLVKRRARFWERYHCSELFVGTCIILCGFYDLLFANKGYYIFLFLQGTAFLVVGFGYVGTLPPCTA
